United States Patent Application Publication US 2005/0287570 A1 - sequence listing, part 10

SEQ ID NO: 207668 - DNA, 25 bp, Artificial
  Probe
ctgcaggagcccagcagtagcagct

SEQ ID NO: 207669 - DNA, 25 bp, Artificial
  Probe
tccagctgaaagaggccaagcacat

SEQ ID NO: 207670 - DNA, 25 bp, Artificial
  Probe
ccgtaactgcaggagcccagcagta

SEQ ID NO: 207671 - DNA, 25 bp, Artificial
  Probe
cagacgcatccagctggttgaggag

SEQ ID NO: 207672 - DNA, 25 bp, Artificial
  Probe
ttattgacatttttgtctcagcgct

SEQ ID NO: 207673 - DNA, 25 bp, Artificial
  Probe
agtatgaagaggtggcccgtaagct

SEQ ID NO: 207674 - DNA, 25 bp, Artificial
  Probe
accggacctggctccgtaactgcag

SEQ ID NO: 207675 - DNA, 25 bp, Artificial
  Probe
gtctcagcgctcaataaaactacag

SEQ ID NO: 207676 - DNA, 25 bp, Artificial
  Probe
ctgagaagtactctcagaaagaaga

SEQ ID NO: 207677 - DNA, 25 bp, Artificial
  Probe
tgagctctcggaaggcaaatgtgcc

SEQ ID NO: 207678 - DNA, 25 bp, Artificial
  Probe
gaagctgcgggaaaccgctgaagct

SEQ ID NO: 207679 - DNA, 25 bp, Artificial
  Probe
gatcgcgctcaggagcgtctggcca

SEQ ID NO: 207680 - DNA, 25 bp, Artificial
  Probe
gctctccagctgacccaggtttctt

SEQ ID NO: 207681 - DNA, 25 bp, Artificial
  Probe
ccggagcctgcaggaacaggcagat

SEQ ID NO: 207682 - DNA, 25 bp, Artificial
  Probe
ctgaagatgctgaccgaaagtatga

SEQ ID NO: 207683 - DNA, 25 bp, Artificial
  Probe
ggagatcaaggttctctctgacaag

SEQ ID NO: 207684 - DNA, 25 bp, Artificial
  Probe
tgctctccagctgacccaggtttct

SEQ ID NO: 207685 - DNA, 25 bp, Artificial
  Probe
cattgaaagccgagcccaaaaagat

SEQ ID NO: 207686 - DNA, 25 bp, Artificial
  Probe
ccagcagtagcagctgcagagcgcg

SEQ ID NO: 207687 - DNA, 25 bp, Artificial
  Probe
ggctcaggctgagaagtactctcag

SEQ ID NO: 207688 - DNA, 25 bp, Artificial
  Probe
gagcgtctggccacagctctacaga

SEQ ID NO: 207689 - DNA, 25 bp, Artificial
  Probe
taatttttggaccagttcatagact

SEQ ID NO: 207690 - DNA, 25 bp, Artificial
  Probe
gaaaacaaactctcaggagaccata

SEQ ID NO: 207691 - DNA, 25 bp, Artificial
  Probe
ttggaccagttcatagactcttttt

SEQ ID NO: 207692 - DNA, 25 bp, Artificial
  Probe
ttgtcttcatttatacaaaaaggga

SEQ ID NO: 207693 - DNA, 25 bp, Artificial
  Probe
gtaaagaaaacaaactctcaggaga

SEQ ID NO: 207694 - DNA, 25 bp, Artificial
  Probe
atatttgtcttcatttatacaaaaa

SEQ ID NO: 207695 - DNA, 25 bp, Artificial
  Probe
ctaatttttggaccagttcatagac

SEQ ID NO: 207696 - DNA, 25 bp, Artificial
  Probe
caaactctcaggagaccatatttgt

SEQ ID NO: 207697 - DNA, 25 bp, Artificial
  Probe
aacaaactctcaggagaccatattt

SEQ ID NO: 207698 - DNA, 25 bp, Artificial
  Probe
tttttggaccagttcatagactctt

SEQ ID NO: 207699 - DNA, 25 bp, Artificial
  Probe
ggagaccatatttgtcttcatttat

SEQ ID NO: 207700 - DNA, 25 bp, Artificial
  Probe
tctcaggagaccatatttgtcttca

SEQ ID NO: 207701 - DNA, 25 bp, Artificial
  Probe
catatttgtcttcatttatacaaaa

SEQ ID NO: 207702 - DNA, 25 bp, Artificial
  Probe
ctctcaggagaccatatttgtcttc

SEQ ID NO: 207703 - DNA, 25 bp, Artificial
  Probe
actctcaggagaccatatttgtctt

SEQ ID NO: 207704 - DNA, 25 bp, Artificial
  Probe
atttttggaccagttcatagactct

SEQ ID NO: 207705 - DNA, 25 bp, Artificial
  Probe
gagaccatatttgtcttcatttata

SEQ ID NO: 207706 - DNA, 25 bp, Artificial
  Probe
aaaacaaactctcaggagaccatat

SEQ ID NO: 207707 - DNA, 25 bp, Artificial
  Probe
tactaatttttggaccagttcatag

SEQ ID NO: 207708 - DNA, 25 bp, Artificial
  Probe
aaactctcaggagaccatatttgtc

SEQ ID NO: 207709 - DNA, 25 bp, Artificial
  Probe
aagaaaacaaactctcaggagacca

SEQ ID NO: 207710 - DNA, 25 bp, Artificial
  Probe
atttgtcttcatttatacaaaaagg

SEQ ID NO: 207711 - DNA, 25 bp, Artificial
  Probe
agaaaacaaactctcaggagaccat

SEQ ID NO: 207712 - DNA, 25 bp, Artificial
  Probe
actaatttttggaccagttcataga

SEQ ID NO: 207713 - DNA, 25 bp, Artificial
  Probe
cagttcatagactcttttttttaat

SEQ ID NO: 207714 - DNA, 25 bp, Artificial
  Probe
ctcaggagaccatatttgtcttcat

SEQ ID NO: 207715 - DNA, 25 bp, Artificial
  Probe
tcatagactcttttttttaatgggt

SEQ ID NO: 207716 - DNA, 25 bp, Artificial
  Probe
tttgtcttcatttatacaaaaaggg

SEQ ID NO: 207717 - DNA, 25 bp, Artificial
  Probe
aatactaatttttggaccagttcat

SEQ ID NO: 207718 - DNA, 25 bp, Artificial
  Probe
ttttggaccagttcatagactcttt

SEQ ID NO: 207719 - DNA, 25 bp, Artificial
  Probe
tggaccagttcatagactctttttt

SEQ ID NO: 207720 - DNA, 25 bp, Artificial
  Probe
accatatttgtcttcatttatacaa

SEQ ID NO: 207721 - DNA, 25 bp, Artificial
  Probe
gttcatagactcttttttttaatgg

SEQ ID NO: 207722 - DNA, 25 bp, Artificial
  Probe
tttggaccagttcatagactctttt

SEQ ID NO: 207723 - DNA, 25 bp, Artificial
  Probe
taaagaaaacaaactctcaggagac

SEQ ID NO: 207724 - DNA, 25 bp, Artificial
  Probe
tatttgtcttcatttatacaaaaag

SEQ ID NO: 207725 - DNA, 25 bp, Artificial
  Probe
tgtcttcatttatacaaaaagggac

SEQ ID NO: 207726 - DNA, 25 bp, Artificial
  Probe
ttcatagactcttttttttaatggg

SEQ ID NO: 207727 - DNA, 25 bp, Artificial
  Probe
aactctcaggagaccatatttgtct

SEQ ID NO: 207728 - DNA, 25 bp, Artificial
  Probe
acaaactctcaggagaccatatttg

SEQ ID NO: 207729 - DNA, 25 bp, Artificial
  Probe
gaccagttcatagactctttttttt

SEQ ID NO: 207730 - DNA, 25 bp, Artificial
  Probe
ggaccagttcatagactcttttttt

SEQ ID NO: 207731 - DNA, 25 bp, Artificial
  Probe
atactaatttttggaccagttcata

SEQ ID NO: 207732 - DNA, 25 bp, Artificial
  Probe
agaccatatttgtcttcatttatac

SEQ ID NO: 207733 - DNA, 25 bp, Artificial
  Probe
tcttcatttatacaaaaagggaccg

SEQ ID NO: 207734 - DNA, 25 bp, Artificial
  Probe
aatttttggaccagttcatagactc

SEQ ID NO: 207735 - DNA, 25 bp, Artificial
  Probe
catgaagtgcgacatcgacatcagg

SEQ ID NO: 207736 - DNA, 25 bp, Artificial
  Probe
acatcaggaaggacctgtacgccaa

SEQ ID NO: 207737 - DNA, 25 bp, Artificial
  Probe
tcctttatcggtatggagtctgcgg

SEQ ID NO: 207738 - DNA, 25 bp, Artificial
  Probe
tgcgacatcgacatcaggaaggacc

SEQ ID NO: 207739 - DNA, 25 bp, Artificial
  Probe
tcgctgaccgcatgcagaaggagat

SEQ ID NO: 207740 - DNA, 25 bp, Artificial
  Probe
agcatcatgaagtgcgacatcgaca

SEQ ID NO: 207741 - DNA, 25 bp, Artificial
  Probe
gccaacaacgtcatgtcagggggca

SEQ ID NO: 207742 - DNA, 25 bp, Artificial
  Probe
ccggtatcgctgaccgcatgcagaa

SEQ ID NO: 207743 - DNA, 25 bp, Artificial
  Probe
ctacaacagcatcatgaagtgcgac

SEQ ID NO: 207744 - DNA, 25 bp, Artificial
  Probe
cctttatcggtatggagtctgcggg

SEQ ID NO: 207745 - DNA, 25 bp, Artificial
  Probe
caaacaaagccctgtggaaggaaat

SEQ ID NO: 207746 - DNA, 25 bp, Artificial
  Probe
cccggtatcgctgaccgcatgcaga

SEQ ID NO: 207747 - DNA, 25 bp, Artificial
  Probe
caacagcatcatgaagtgcgacatc

SEQ ID NO: 207748 - DNA, 25 bp, Artificial
  Probe
tgtaccccggtatcgctgaccgcat

SEQ ID NO: 207749 - DNA, 25 bp, Artificial
  Probe
gacatcgacatcaggaaggacctgt

SEQ ID NO: 207750 - DNA, 25 bp, Artificial
  Probe
tacaacagcatcatgaagtgcgaca

SEQ ID NO: 207751 - DNA, 25 bp, Artificial
  Probe
atcgacatcaggaaggacctgtacg

SEQ ID NO: 207752 - DNA, 25 bp, Artificial
  Probe
gtacgccaacaacgtcatgtcaggg

SEQ ID NO: 207753 - DNA, 25 bp, Artificial
  Probe
tgtccaccttccagcagatgtggat

SEQ ID NO: 207754 - DNA, 25 bp, Artificial
  Probe
atcgctgaccgcatgcagaaggaga

SEQ ID NO: 207755 - DNA, 25 bp, Artificial
  Probe
acaacagcatcatgaagtgcgacat

SEQ ID NO: 207756 - DNA, 25 bp, Artificial
  Probe
caaagccctgtggaaggaaatggaa

SEQ ID NO: 207757 - DNA, 25 bp, Artificial
  Probe
gaagtgcgacatcgacatcaggaag

SEQ ID NO: 207758 - DNA, 25 bp, Artificial
  Probe
tcatgaagtgcgacatcgacatcag

SEQ ID NO: 207759 - DNA, 25 bp, Artificial
  Probe
tatttttcaaacaaagccctgtgga

SEQ ID NO: 207760 - DNA, 25 bp, Artificial
  Probe
acatcgacatcaggaaggacctgta

SEQ ID NO: 207761 - DNA, 25 bp, Artificial
  Probe
tttttcaaacaaagccctgtggaag

SEQ ID NO: 207762 - DNA, 25 bp, Artificial
  Probe
tcgacatcaggaaggacctgtacgc

SEQ ID NO: 207763 - DNA, 25 bp, Artificial
  Probe
cctgtacgccaacaacgtcatgtca

SEQ ID NO: 207764 - DNA, 25 bp, Artificial
  Probe
tgaagtgcgacatcgacatcaggaa

SEQ ID NO: 207765 - DNA, 25 bp, Artificial
  Probe
ggaaggacctgtacgccaacaacgt

SEQ ID NO: 207766 - DNA, 25 bp, Artificial
  Probe
atgtaccccggtatcgctgaccgca

SEQ ID NO: 207767 - DNA, 25 bp, Artificial
  Probe
acgccaacaacgtcatgtcaggggg

SEQ ID NO: 207768 - DNA, 25 bp, Artificial
  Probe
tgtacgccaacaacgtcatgtcagg

SEQ ID NO: 207769 - DNA, 25 bp, Artificial
  Probe
caggaaggacctgtacgccaacaac

SEQ ID NO: 207770 - DNA, 25 bp, Artificial
  Probe
aagtgcgacatcgacatcaggaagg

SEQ ID NO: 207771 - DNA, 25 bp, Artificial
  Probe
cagcatcatgaagtgcgacatcgac

SEQ ID NO: 207772 - DNA, 25 bp, Artificial
  Probe
acctgtacgccaacaacgtcatgtc

SEQ ID NO: 207773 - DNA, 25 bp, Artificial
  Probe
gcctgtttttgacgtgtacatagat

SEQ ID NO: 207774 - DNA, 25 bp, Artificial
  Probe
gacctgtacgccaacaacgtcatgt

SEQ ID NO: 207775 - DNA, 25 bp, Artificial
  Probe
gtgcgacatcgacatcaggaaggac

SEQ ID NO: 207776 - DNA, 25 bp, Artificial
  Probe
cgccaacaacgtcatgtcagggggc

SEQ ID NO: 207777 - DNA, 25 bp, Artificial
  Probe
atcaggaaggacctgtacgccaaca

SEQ ID NO: 207778 - DNA, 25 bp, Artificial
  Probe
gacatcaggaaggacctgtacgcca

SEQ ID NO: 207779 - DNA, 25 bp, Artificial
  Probe
tcaggaaggacctgtacgccaacaa

SEQ ID NO: 207780 - DNA, 25 bp, Artificial
  Probe
cctacaacagcatcatgaagtgcga

SEQ ID NO: 207781 - DNA, 25 bp, Artificial
  Probe
gtcctgggagctatcgagagagcca

SEQ ID NO: 207782 - DNA, 25 bp, Artificial
  Probe
ctcaaccgcggaaagaaagcattgg

SEQ ID NO: 207783 - DNA, 25 bp, Artificial
  Probe
agtaccacagcctgaagctggagtg

SEQ ID NO: 207784 - DNA, 25 bp, Artificial
  Probe
caagaacggacacgatggggacacc

SEQ ID NO: 207785 - DNA, 25 bp, Artificial
  Probe
agatttttctggtcgcctcgctttg

SEQ ID NO: 207786 - DNA, 25 bp, Artificial
  Probe
acctccagtcctggttccagctgtg

SEQ ID NO: 207787 - DNA, 25 bp, Artificial
  Probe
cctcaaccgcggaaagaaagcattg

SEQ ID NO: 207788 - DNA, 25 bp, Artificial
  Probe
gtggggtctagctgtgccttcaaaa

SEQ ID NO: 207789 - DNA, 25 bp, Artificial
  Probe
tgagggccacactgcacacagctcg

SEQ ID NO: 207790 - DNA, 25 bp, Artificial
  Probe
tccagtcctggttccagctgtgcac

SEQ ID NO: 207791 - DNA, 25 bp, Artificial
  Probe
tgctacaagcgcagtaccacagcct

SEQ ID NO: 207792 - DNA, 25 bp, Artificial
  Probe
gacaagaacggacacgatggggaca

SEQ ID NO: 207793 - DNA, 25 bp, Artificial
  Probe
gcgcagtaccacagcctgaagctgg

SEQ ID NO: 207794 - DNA, 25 bp, Artificial
  Probe
caaggatgagttccagctgctacaa

SEQ ID NO: 207795 - DNA, 25 bp, Artificial
  Probe
agagaagtccgattagctcctgggg

SEQ ID NO: 207796 - DNA, 25 bp, Artificial
  Probe
gctgaactccatcatccgacagcag

SEQ ID NO: 207797 - DNA, 25 bp, Artificial
  Probe
cgagcgagggtctgtctgtgcatat

SEQ ID NO: 207798 - DNA, 25 bp, Artificial
  Probe
cgagggtctgtctgtgcatatagtt

SEQ ID NO: 207799 - DNA, 25 bp, Artificial
  Probe
agcatcagcagcaggtcctgggagc

SEQ ID NO: 207800 - DNA, 25 bp, Artificial
  Probe
ctccagtcctggttccagctgtgca

SEQ ID NO: 207801 - DNA, 25 bp, Artificial
  Probe
tccagctgctacaagcgcagtacca

SEQ ID NO: 207802 - DNA, 25 bp, Artificial
  Probe
ggtcgcctcgctttgcaccgagagg

SEQ ID NO: 207803 - DNA, 25 bp, Artificial
  Probe
tgaactccatcatccgacagcagct

SEQ ID NO: 207804 - DNA, 25 bp, Artificial
  Probe
atatagttagatttttctggtcgcc

SEQ ID NO: 207805 - DNA, 25 bp, Artificial
  Probe
catcaaggatgagttccagctgcta

SEQ ID NO: 207806 - DNA, 25 bp, Artificial
  Probe
cgagctgaactccatcatccgacag

SEQ ID NO: 207807 - DNA, 25 bp, Artificial
  Probe
agctatcgagagagccaagcaggtc

SEQ ID NO: 207808 - DNA, 25 bp, Artificial
  Probe
tatagctaccatctaagagagaaaa

SEQ ID NO: 207809 - DNA, 25 bp, Artificial
  Probe
agcagcaggtcctgggagctatcga

SEQ ID NO: 207810 - DNA, 25 bp, Artificial
  Probe
gcctcgctttgcaccgagaggtgga

SEQ ID NO: 207811 - DNA, 25 bp, Artificial
  Probe
aggatgagttccagctgctacaagc

SEQ ID NO: 207812 - DNA, 25 bp, Artificial
  Probe
ctctccaaggaggacaagaacggac

SEQ ID NO: 207813 - DNA, 25 bp, Artificial
  Probe
gagctatcgagagagccaagcaggt

SEQ ID NO: 207814 - DNA, 25 bp, Artificial
  Probe
ataccaggggagacaggcacagaga

SEQ ID NO: 207815 - DNA, 25 bp, Artificial
  Probe
actctatagctaccatctaagagag

SEQ ID NO: 207816 - DNA, 25 bp, Artificial
  Probe
tttctggtcgcctcgctttgcaccg

SEQ ID NO: 207817 - DNA, 25 bp, Artificial
  Probe
tagctaccatctaagagagaaaaag

SEQ ID NO: 207818 - DNA, 25 bp, Artificial
  Probe
ccacctctccaaggaggacaagaac

SEQ ID NO: 207819 - DNA, 25 bp, Artificial
  Probe
cctgggagctatcgagagagccaag

SEQ ID NO: 207820 - DNA, 25 bp, Artificial
  Probe
agggccacactgcacacagctcggt

SEQ ID NO: 207821 - DNA, 25 bp, Artificial
  Probe
cccggagctgtcgatcggggacaaa

SEQ ID NO: 207822 - DNA, 25 bp, Artificial
  Probe
acagcctgaagctggagtgtgacaa

SEQ ID NO: 207823 - DNA, 25 bp, Artificial
  Probe
gtactctatagctaccatctaagag

SEQ ID NO: 207824 - DNA, 25 bp, Artificial
  Probe
tcaaggatgagttccagctgctaca

SEQ ID NO: 207825 - DNA, 25 bp, Artificial
  Probe
gaagtccgattagctcctggggaga

SEQ ID NO: 207826 - DNA, 25 bp, Artificial
  Probe
atcgagagagccaagcaggtcacgg

SEQ ID NO: 207827 - DNA, 25 bp, Artificial
  Probe
aaggcgccgccgtcatccagagggc

SEQ ID NO: 207828 - DNA, 25 bp, Artificial
  Probe
ttgcccatggtgatgggcgaccgcc

SEQ ID NO: 207829 - DNA, 25 bp, Artificial
  Probe
agacgctccaatctctgtcccaggt

SEQ ID NO: 207830 - DNA, 25 bp, Artificial
  Probe
aaccacttcggctggctgggatacc

SEQ ID NO: 207831 - DNA, 25 bp, Artificial
  Probe
aacgaggtgacaggttggcgtccat

SEQ ID NO: 207832 - DNA, 25 bp, Artificial
  Probe
acttcggctggctgggataccctcc

SEQ ID NO: 207833 - DNA, 25 bp, Artificial
  Probe
accggaaacacatggagaagatggt

SEQ ID NO: 207834 - DNA, 25 bp, Artificial
  Probe
acgggcagcatgctgtgcctcttcc

SEQ ID NO: 207835 - DNA, 25 bp, Artificial
  Probe
acgccctgccggagccgttgcgtgt

SEQ ID NO: 207836 - DNA, 25 bp, Artificial
  Probe
tcggtgttttgagtatgtgacctgc

SEQ ID NO: 207837 - DNA, 25 bp, Artificial
  Probe
gggctccgggatcgacgacatcttc

SEQ ID NO: 207838 - DNA, 25 bp, Artificial
  Probe
ggtgtatgactcaaacctaaaagca

SEQ ID NO: 207839 - DNA, 25 bp, Artificial
  Probe
gaaagatcccaggaaaacttcagat

SEQ ID NO: 207840 - DNA, 25 bp, Artificial
  Probe
aagggctccgggatcgacgacatct

SEQ ID NO: 207841 - DNA, 25 bp, Artificial
  Probe
cctctggcgagcaggcggcagactc

SEQ ID NO: 207842 - DNA, 25 bp, Artificial
  Probe
ggttcacaatgactgaaccctcatc

SEQ ID NO: 207843 - DNA, 25 bp, Artificial
  Probe
ctgtgatcctcgagaacttcaacac

SEQ ID NO: 207844 - DNA, 25 bp, Artificial
  Probe
tcactaccagggtcctcggggactc

SEQ ID NO: 207845 - DNA, 25 bp, Artificial
  Probe
tagcctccagcctctggcgagcagg

SEQ ID NO: 207846 - DNA, 25 bp, Artificial
  Probe
gaggccaacccttttaagaagctct

SEQ ID NO: 207847 - DNA, 25 bp, Artificial
  Probe
ccaatgtgtctgttcggtgttttga

SEQ ID NO: 207848 - DNA, 25 bp, Artificial
  Probe
agtttgaccccgaggcgtcgcagtt

SEQ ID NO: 207849 - DNA, 25 bp, Artificial
  Probe
ccaagccgaataagtttcagtttct

SEQ ID NO: 207850 - DNA, 25 bp, Artificial
  Probe
ttttccaaagtgaagaagggctccg

SEQ ID NO: 207851 - DNA, 25 bp, Artificial
  Probe
gggactgcaaaggacaccgaccata

SEQ ID NO: 207852 - DNA, 25 bp, Artificial
  Probe
ttgtcagtcagcaccccgactttca

SEQ ID NO: 207853 - DNA, 25 bp, Artificial
  Probe
tcagtttctagtgatggacttgccc

SEQ ID NO: 207854 - DNA, 25 bp, Artificial
  Probe
agaagctctacgagcccatagtcac

SEQ ID NO: 207855 - DNA, 25 bp, Artificial
  Probe
ttgcggacgccctgccggagccgtt

SEQ ID NO: 207856 - DNA, 25 bp, Artificial
  Probe
cgaggtgacaggttggcgtccattt

SEQ ID NO: 207857 - DNA, 25 bp, Artificial
  Probe
gatggtcaaactgaggctgaaggac

SEQ ID NO: 207858 - DNA, 25 bp, Artificial
  Probe
agccgttgcgtgtggccaagccgaa

SEQ ID NO: 207859 - DNA, 25 bp, Artificial
  Probe
tcttcaacttcgagacctttacggg

SEQ ID NO: 207860 - DNA, 25 bp, Artificial
  Probe
gtattcggccctctctgactttgcg

SEQ ID NO: 207861 - DNA, 25 bp, Artificial
  Probe
ctttgggatgagctggttttccaaa

SEQ ID NO: 207862 - DNA, 25 bp, Artificial
  Probe
cgcctccattgcatggatgttctct

SEQ ID NO: 207863 - DNA, 25 bp, Artificial
  Probe
gtccaacttacataaagatgagaaa

SEQ ID NO: 207864 - DNA, 25 bp, Artificial
  Probe
ccaagacagctgtcagcagccgcag

SEQ ID NO: 207865 - DNA, 25 bp, Artificial
  Probe
gtcgtctacttcgtcagttacatca

SEQ ID NO: 207866 - DNA, 25 bp, Artificial
  Probe
cgatctgtgtttttggctgaacgag

SEQ ID NO: 207867 - DNA, 25 bp, Artificial
  Probe
ccatgaaaaccatgatggaggagaa

SEQ ID NO: 207868 - DNA, 25 bp, Artificial
  Probe
gcatcacagaattgggtgtatgact

SEQ ID NO: 207869 - DNA, 25 bp, Artificial
  Probe
gccgtcatccagagggcctaccgga

SEQ ID NO: 207870 - DNA, 25 bp, Artificial
  Probe
tgacctgccacatgtagctcttttt

SEQ ID NO: 207871 - DNA, 25 bp, Artificial
  Probe
aggacaggtcaagttcatcgcacca

SEQ ID NO: 207872 - DNA, 25 bp, Artificial
  Probe
tttttgcatgtacgtcaaaaccctg

SEQ ID NO: 207873 - DNA, 25 bp, Artificial
  Probe
tgctctgtgtccagtacatggggga

SEQ ID NO: 207874 - DNA, 25 bp, Artificial
  Probe
caaacccaatccaacaagcagatgg

SEQ ID NO: 207875 - DNA, 25 bp, Artificial
  Probe
ccaacaagcagatggatccgttgcg

SEQ ID NO: 207876 - DNA, 25 bp, Artificial
  Probe
cactgtaaaaccaaatcctagggct

SEQ ID NO: 207877 - DNA, 25 bp, Artificial
  Probe
aatccaacaagcagatggatccgtt

SEQ ID NO: 207878 - DNA, 25 bp, Artificial
  Probe
gctgctctgtgtccagtacatgggg

SEQ ID NO: 207879 - DNA, 25 bp, Artificial
  Probe
ccgttgcgtgtatatgtttaacaga

SEQ ID NO: 207880 - DNA, 25 bp, Artificial
  Probe
ctatttaatgctgctctgtgtccag

SEQ ID NO: 207881 - DNA, 25 bp, Artificial
  Probe
tgaactatttaatgctgctctgtgt

SEQ ID NO: 207882 - DNA, 25 bp, Artificial
  Probe
tacagccattgttgcacattttgca

SEQ ID NO: 207883 - DNA, 25 bp, Artificial
  Probe
caagcagatggatccgttgcgtgta

SEQ ID NO: 207884 - DNA, 25 bp, Artificial
  Probe
tgctgctctgtgtccagtacatggg

SEQ ID NO: 207885 - DNA, 25 bp, Artificial
  Probe
gatccgttgcgtgtatatgtttaac

SEQ ID NO: 207886 - DNA, 25 bp, Artificial
  Probe
tttgatcccaaatggcttgtactat

SEQ ID NO: 207887 - DNA, 25 bp, Artificial
  Probe
atttaatgctgctctgtgtccagta

SEQ ID NO: 207888 - DNA, 25 bp, Artificial
  Probe
aaatggcttgtactatttatgtcac

SEQ ID NO: 207889 - DNA, 25 bp, Artificial
  Probe
cccaaatggcttgtactatttatgt

SEQ ID NO: 207890 - DNA, 25 bp, Artificial
  Probe
ttaatgctgctctgtgtccagtaca

SEQ ID NO: 207891 - DNA, 25 bp, Artificial
  Probe
cattgttgcacattttgcaagatga

SEQ ID NO: 207892 - DNA, 25 bp, Artificial
  Probe
ggcttgtactatttatgtcactgta

SEQ ID NO: 207893 - DNA, 25 bp, Artificial
  Probe
caaatggcttgtactatttatgtca

SEQ ID NO: 207894 - DNA, 25 bp, Artificial
  Probe
tccaacaagcagatggatccgttgc

SEQ ID NO: 207895 - DNA, 25 bp, Artificial
  Probe
agccattgttgcacattttgcaaga

SEQ ID NO: 207896 - DNA, 25 bp, Artificial
  Probe
caacaagcagatggatccgttgcgt

SEQ ID NO: 207897 - DNA, 25 bp, Artificial
  Probe
caatccaacaagcagatggatccgt

SEQ ID NO: 207898 - DNA, 25 bp, Artificial
  Probe
atccgttgcgtgtatatgtttaaca

SEQ ID NO: 207899 - DNA, 25 bp, Artificial
  Probe
tcccaaatggcttgtactatttatg

SEQ ID NO: 207900 - DNA, 25 bp, Artificial
  Probe
gccattgttgcacattttgcaagat

SEQ ID NO: 207901 - DNA, 25 bp, Artificial
  Probe
tgcacattttgcaagatgaactatt

SEQ ID NO: 207902 - DNA, 25 bp, Artificial
  Probe
gtcactgtaaaaccaaatcctaggg

SEQ ID NO: 207903 - DNA, 25 bp, Artificial
  Probe
acccaatccaacaagcagatggatc

SEQ ID NO: 207904 - DNA, 25 bp, Artificial
  Probe
tgttgcacattttgcaagatgaact

SEQ ID NO: 207905 - DNA, 25 bp, Artificial
  Probe
tgtcactgtaaaaccaaatcctagg

SEQ ID NO: 207906 - DNA, 25 bp, Artificial
  Probe
ttgttgcacattttgcaagatgaac

SEQ ID NO: 207907 - DNA, 25 bp, Artificial
  Probe
atggcttgtactatttatgtcactg

SEQ ID NO: 207908 - DNA, 25 bp, Artificial
  Probe
gggagactttgatcccaaatggctt

SEQ ID NO: 207909 - DNA, 25 bp, Artificial
  Probe
ctgctctgtgtccagtacatggggg

SEQ ID NO: 207910 - DNA, 25 bp, Artificial
  Probe
gactttgatcccaaatggcttgtac

SEQ ID NO: 207911 - DNA, 25 bp, Artificial
  Probe
actatttaatgctgctctgtgtcca

SEQ ID NO: 207912 - DNA, 25 bp, Artificial
  Probe
cagatggatccgttgcgtgtatatg

SEQ ID NO: 207913 - DNA, 25 bp, Artificial
  Probe
catacagccattgttgcacattttg

SEQ ID NO: 207914 - DNA, 25 bp, Artificial
  Probe
atacagccattgttgcacattttgc

SEQ ID NO: 207915 - DNA, 25 bp, Artificial
  Probe
gaactatttaatgctgctctgtgtc

SEQ ID NO: 207916 - DNA, 25 bp, Artificial
  Probe
actttgatcccaaatggcttgtact

SEQ ID NO: 207917 - DNA, 25 bp, Artificial
  Probe
atccaacaagcagatggatccgttg

SEQ ID NO: 207918 - DNA, 25 bp, Artificial
  Probe
ttgcacattttgcaagatgaactat

SEQ ID NO: 207919 - DNA, 25 bp, Artificial
  Probe
gttggctcttcctgtcttgtatagt

SEQ ID NO: 207920 - DNA, 25 bp, Artificial
  Probe
tgctctcgaaaatgctggtctatga

SEQ ID NO: 207921 - DNA, 25 bp, Artificial
  Probe
tggacttgctctcgaaaatgctggt

SEQ ID NO: 207922 - DNA, 25 bp, Artificial
  Probe
acgtcaagaacctggatgaaaacgg

SEQ ID NO: 207923 - DNA, 25 bp, Artificial
  Probe
tatttgcagagctggcgaccaagaa

SEQ ID NO: 207924 - DNA, 25 bp, Artificial
  Probe
ctttgacgacttggacaatcagatc

SEQ ID NO: 207925 - DNA, 25 bp, Artificial
  Probe
cgtggcgtttactgttggctcttcc

SEQ ID NO: 207926 - DNA, 25 bp, Artificial
  Probe
gtcccacgtcaagaacctggatgaa

SEQ ID NO: 207927 - DNA, 25 bp, Artificial
  Probe
tcgtggcgtttactgttggctcttc

SEQ ID NO: 207928 - DNA, 25 bp, Artificial
  Probe
aagatgtaaccctctggaagtcccg

SEQ ID NO: 207929 - DNA, 25 bp, Artificial
  Probe
aagatcgtggcgtttactgttggct

SEQ ID NO: 207930 - DNA, 25 bp, Artificial
  Probe
accccggttgacatctggagcatag

SEQ ID NO: 207931 - DNA, 25 bp, Artificial
  Probe
gctcttcaggatcttcagagctctg

SEQ ID NO: 207932 - DNA, 25 bp, Artificial
  Probe
ctctcgaaaatgctggtctatgatc

SEQ ID NO: 207933 - DNA, 25 bp, Artificial
  Probe
ccatatttgcagagctggcgaccaa

SEQ ID NO: 207934 - DNA, 25 bp, Artificial
  Probe
tcccacgtcaagaacctggatgaaa

SEQ ID NO: 207935 - DNA, 25 bp, Artificial
  Probe
tactgttggctcttcctgtcttgta

SEQ ID NO: 207936 - DNA, 25 bp, Artificial
  Probe
gatcgtggcgtttactgttggctct

SEQ ID NO: 207937 - DNA, 25 bp, Artificial
  Probe
ctggcgaccaagaagccgcttttcc

SEQ ID NO: 207938 - DNA, 25 bp, Artificial
  Probe
gctggcgaccaagaagccgcttttc

SEQ ID NO: 207939 - DNA, 25 bp, Artificial
  Probe
acttggacaatcagatcaagaagat

SEQ ID NO: 207940 - DNA, 25 bp, Artificial
  Probe
tcgcgtcccacgtcaagaacctgga

SEQ ID NO: 207941 - DNA, 25 bp, Artificial
  Probe
ccatactttgacgacttggacaatc

SEQ ID NO: 207942 - DNA, 25 bp, Artificial
  Probe
acccatactttgacgacttggacaa

SEQ ID NO: 207943 - DNA, 25 bp, Artificial
  Probe
tctcgaaaatgctggtctatgatcc

SEQ ID NO: 207944 - DNA, 25 bp, Artificial
  Probe
ccaagaagccgcttttccacggcga

SEQ ID NO: 207945 - DNA, 25 bp, Artificial
  Probe
aggatcttcagagctctgggcaccc

SEQ ID NO: 207946 - DNA, 25 bp, Artificial
  Probe
gaccagctcttcaggatcttcagag

SEQ ID NO: 207947 - DNA, 25 bp, Artificial
  Probe
tcgaaaatgctggtctatgatccag

SEQ ID NO: 207948 - DNA, 25 bp, Artificial
  Probe
caagaagatgtaaccctctggaagt

SEQ ID NO: 207949 - DNA, 25 bp, Artificial
  Probe
ggcgtttactgttggctcttcctgt

SEQ ID NO: 207950 - DNA, 25 bp, Artificial
  Probe
ccccggttgacatctggagcatagg

SEQ ID NO: 207951 - DNA, 25 bp, Artificial
  Probe
agagctggcgaccaagaagccgctt

SEQ ID NO: 207952 - DNA, 25 bp, Artificial
  Probe
gcagagctggcgaccaagaagccgc

SEQ ID NO: 207953 - DNA, 25 bp, Artificial
  Probe
caccccggttgacatctggagcata

SEQ ID NO: 207954 - DNA, 25 bp, Artificial
  Probe
tggcccttaagcacccatactttga

SEQ ID NO: 207955 - DNA, 25 bp, Artificial
  Probe
catactttgacgacttggacaatca

SEQ ID NO: 207956 - DNA, 25 bp, Artificial
  Probe
taagcacccatactttgacgacttg

SEQ ID NO: 207957 - DNA, 25 bp, Artificial
  Probe
atggcccttaagcacccatactttg

SEQ ID NO: 207958 - DNA, 25 bp, Artificial
  Probe
ttcaggatcttcagagctctgggca

SEQ ID NO: 207959 - DNA, 25 bp, Artificial
  Probe
cgtcaagaacctggatgaaaacggc

SEQ ID NO: 207960 - DNA, 25 bp, Artificial
  Probe
tggcgaccaagaagccgcttttcca

SEQ ID NO: 207961 - DNA, 25 bp, Artificial
  Probe
gtgttgctgggctcggctcgctact

SEQ ID NO: 207962 - DNA, 25 bp, Artificial
  Probe
gatgtaaccctctggaagtcccgcc

SEQ ID NO: 207963 - DNA, 25 bp, Artificial
  Probe
cccacgtcaagaacctggatgaaaa

SEQ ID NO: 207964 - DNA, 25 bp, Artificial
  Probe
cacgtcaagaacctggatgaaaacg

SEQ ID NO: 207965 - DNA, 25 bp, Artificial
  Probe
aggtcaagcatgaacggtagtgcgt

SEQ ID NO: 207966 - DNA, 25 bp, Artificial
  Probe
taagaacacatgtttctgtcagggg

SEQ ID NO: 207967 - DNA, 25 bp, Artificial
  Probe
agaacacatgtttctgtcaggggtg

SEQ ID NO: 207968 - DNA, 25 bp, Artificial
  Probe
catgaacggtagtgcgtgtgcacca

SEQ ID NO: 207969 - DNA, 25 bp, Artificial
  Probe
agctaggtgcactaccaccacggct

SEQ ID NO: 207970 - DNA, 25 bp, Artificial
  Probe
aagcatgaacggtagtgcgtgtgca

SEQ ID NO: 207971 - DNA, 25 bp, Artificial
  Probe
gacctcttgacaacattgtgaaaac

SEQ ID NO: 207972 - DNA, 25 bp, Artificial
  Probe
tcacctatacaatggtacgtgacag

SEQ ID NO: 207973 - DNA, 25 bp, Artificial
  Probe
ggtgcactaccaccacggcttgtcg

SEQ ID NO: 207974 - DNA, 25 bp, Artificial
  Probe
agaatggggacttgtcacctataca

SEQ ID NO: 207975 - DNA, 25 bp, Artificial
  Probe
ttgctgtttgaatccaatgcacaaa

SEQ ID NO: 207976 - DNA, 25 bp, Artificial
  Probe
agacacagacctcttgacaacattg

SEQ ID NO: 207977 - DNA, 25 bp, Artificial
  Probe
gcaaaagacacagacctcttgacaa

SEQ ID NO: 207978 - DNA, 25 bp, Artificial
  Probe
tgtcacctatacaatggtacgtgac

SEQ ID NO: 207979 - DNA, 25 bp, Artificial
  Probe
aacggtagtgcgtgtgcaccaccaa

SEQ ID NO: 207980 - DNA, 25 bp, Artificial
  Probe
ggtagtgcgtgtgcaccaccaacgt

SEQ ID NO: 207981 - DNA, 25 bp, Artificial
  Probe
cagaactttgaggtggactgcattt

SEQ ID NO: 207982 - DNA, 25 bp, Artificial
  Probe
aaagctaggtgcactaccaccacgg

SEQ ID NO: 207983 - DNA, 25 bp, Artificial
  Probe
ccctgagtccacaaggtggataaca

SEQ ID NO: 207984 - DNA, 25 bp, Artificial
  Probe
tacgtgacagaactttgaggtggac

SEQ ID NO: 207985 - DNA, 25 bp, Artificial
  Probe
acagaactttgaggtggactgcatt

SEQ ID NO: 207986 - DNA, 25 bp, Artificial
  Probe
acccctgagtccacaaggtggataa

SEQ ID NO: 207987 - DNA, 25 bp, Artificial
  Probe
atggcaaaagacacagacctcttga

SEQ ID NO: 207988 - DNA, 25 bp, Artificial
  Probe
tgcaccaccaacgtttggtgaaact

SEQ ID NO: 207989 - DNA, 25 bp, Artificial
  Probe
agtgcacacagtttgctgtttgaat

SEQ ID NO: 207990 - DNA, 25 bp, Artificial
  Probe
agttgagtgcacacagtttgctgtt

SEQ ID NO: 207991 - DNA, 25 bp, Artificial
  Probe
aacagttgagtgcacacagtttgct

SEQ ID NO: 207992 - DNA, 25 bp, Artificial
  Probe
cctcttgacaacattgtgaaaacag

SEQ ID NO: 207993 - DNA, 25 bp, Artificial
  Probe
ataagaacacatgtttctgtcaggg

SEQ ID NO: 207994 - DNA, 25 bp, Artificial
  Probe
gttgagtgcacacagtttgctgttt

SEQ ID NO: 207995 - DNA, 25 bp, Artificial
  Probe
tcttgacaacattgtgaaaacagtt

SEQ ID NO: 207996 - DNA, 25 bp, Artificial
  Probe
gagtgcacacagtttgctgtttgaa

SEQ ID NO: 207997 - DNA, 25 bp, Artificial
  Probe
gtttgctgtttgaatccaatgcaca

SEQ ID NO: 207998 - DNA, 25 bp, Artificial
  Probe
acacagacctcttgacaacattgtg

SEQ ID NO: 207999 - DNA, 25 bp, Artificial
  Probe
agtccacaaggtggataacatattg

SEQ ID NO: 208000 - DNA, 25 bp, Artificial
  Probe
cgtgtgcaccaccaacgtttggtga

SEQ ID NO: 208001 - DNA, 25 bp, Artificial
  Probe
acggtagtgcgtgtgcaccaccaac

SEQ ID NO: 208002 - DNA, 25 bp, Artificial
  Probe
acacccctgagtccacaaggtggat

SEQ ID NO: 208003 - DNA, 25 bp, Artificial
  Probe
ccattgatcaaagaatggggacttg

SEQ ID NO: 208004 - DNA, 25 bp, Artificial
  Probe
cacacagtttgctgtttgaatccaa

SEQ ID NO: 208005 - DNA, 25 bp, Artificial
  Probe
gaacacatgtttctgtcaggggtgt

SEQ ID NO: 208006 - DNA, 25 bp, Artificial
  Probe
acaatggtacgtgacagaactttga

SEQ ID NO: 208007 - DNA, 25 bp, Artificial
  Probe
tgacagaactttgaggtggactgca

SEQ ID NO: 208008 - DNA, 25 bp, Artificial
  Probe
caccaccaacgtttggtgaaactat

SEQ ID NO: 208009 - DNA, 25 bp, Artificial
  Probe
tgaggtcaagcatgaacggtagtgc

SEQ ID NO: 208010 - DNA, 25 bp, Artificial
  Probe
ttgtcacctatacaatggtacgtga

SEQ ID NO: 208011 - DNA, 25 bp, Artificial
  Probe
ccagcgtgggcaggatgaagcacat

SEQ ID NO: 208012 - DNA, 25 bp, Artificial
  Probe
ttgacagccgggtgtttgcgcacaa

SEQ ID NO: 208013 - DNA, 25 bp, Artificial
  Probe
cagtaccagggcaccagcgtgggca

SEQ ID NO: 208014 - DNA, 25 bp, Artificial
  Probe
ctctggaacatcaccagcttctcag

SEQ ID NO: 208015 - DNA, 25 bp, Artificial
  Probe
caggaaacttcaggaacaggaagtg

SEQ ID NO: 208016 - DNA, 25 bp, Artificial
  Probe
aggggaccagtgtgatcccgtacag

SEQ ID NO: 208017 - DNA, 25 bp, Artificial
  Probe
cgtgtgtctctgagaacttgtggtg

SEQ ID NO: 208018 - DNA, 25 bp, Artificial
  Probe
tgtttgcgcacaagcagccaaccca

SEQ ID NO: 208019 - DNA, 25 bp, Artificial
  Probe
tccacaggcgatgagccccggctgt

SEQ ID NO: 208020 - DNA, 25 bp, Artificial
  Probe
cgcccttctctttgacagccgggtg

SEQ ID NO: 208021 - DNA, 25 bp, Artificial
  Probe
cagccgggtgtttgcgcacaagcag

SEQ ID NO: 208022 - DNA, 25 bp, Artificial
  Probe
tctggaatgccatggtgttggcgat

SEQ ID NO: 208023 - DNA, 25 bp, Artificial
  Probe
ggtcagacatgtccagctttccgcc

SEQ ID NO: 208024 - DNA, 25 bp, Artificial
  Probe
ccctcagcgcagagccggggctgtt

SEQ ID NO: 208025 - DNA, 25 bp, Artificial
  Probe
ccacaggcgatgagccccggctgtg

SEQ ID NO: 208026 - DNA, 25 bp, Artificial
  Probe
gtcctgtggctccacaggcgatgag

SEQ ID NO: 208027 - DNA, 25 bp, Artificial
  Probe
tgcccagggcgctgattacgtagta

SEQ ID NO: 208028 - DNA, 25 bp, Artificial
  Probe
accagcgtgggcaggatgaagcaca

SEQ ID NO: 208029 - DNA, 25 bp, Artificial
  Probe
atgagccccggctgtgatgcccagg

SEQ ID NO: 208030 - DNA, 25 bp, Artificial
  Probe
agcctcaggggcagccgagccttgt

SEQ ID NO: 208031 - DNA, 25 bp, Artificial
  Probe
agggcgctgattacgtagtacaaat

SEQ ID NO: 208032 - DNA, 25 bp, Artificial
  Probe
ttctggaatgccatggtgttggcga

SEQ ID NO: 208033 - DNA, 25 bp, Artificial
  Probe
gagccggggctgtttacaaacgtct

SEQ ID NO: 208034 - DNA, 25 bp, Artificial
  Probe
ggaggccgggcttgtaatacctcct

SEQ ID NO: 208035 - DNA, 25 bp, Artificial
  Probe
gctgtgatgcccagggcgctgatta

SEQ ID NO: 208036 - DNA, 25 bp, Artificial
  Probe
atgcaaagaggcaggtgtagacctt

SEQ ID NO: 208037 - DNA, 25 bp, Artificial
  Probe
atgaccggggagtccgaatgcctca

SEQ ID NO: 208038 - DNA, 25 bp, Artificial
  Probe
ggggagtccgaatgcctcaacccct

SEQ ID NO: 208039 - DNA, 25 bp, Artificial
  Probe
gcttgtaatacctcctctggaacat

SEQ ID NO: 208040 - DNA, 25 bp, Artificial
  Probe
caggggcagccgagccttgtaagtc

SEQ ID NO: 208041 - DNA, 25 bp, Artificial
  Probe
cttctctttgacagccgggtgtttg

SEQ ID NO: 208042 - DNA, 25 bp, Artificial
  Probe
ggtcggcgtgtgtctctgagaactt

SEQ ID NO: 208043 - DNA, 25 bp, Artificial
  Probe
cagagccggggctgtttacaaacgt

SEQ ID NO: 208044 - DNA, 25 bp, Artificial
  Probe
ggaccagtgtgatcccgtacagggc

SEQ ID NO: 208045 - DNA, 25 bp, Artificial
  Probe
gcacaagcagccaacccacgtgaga

SEQ ID NO: 208046 - DNA, 25 bp, Artificial
  Probe
ttgtaagtcctgtggctccacaggc

SEQ ID NO: 208047 - DNA, 25 bp, Artificial
  Probe
ggaacatcaccagcttctcagcttt

SEQ ID NO: 208048 - DNA, 25 bp, Artificial
  Probe
acttcaggaacaggaagtgttcttt

SEQ ID NO: 208049 - DNA, 25 bp, Artificial
  Probe
agccaacccacgtgagagaagaaaa

SEQ ID NO: 208050 - DNA, 25 bp, Artificial
  Probe
catcaccagcttctcagctttcagg

SEQ ID NO: 208051 - DNA, 25 bp, Artificial
  Probe
agtgtgatcccgtacagggctccaa

SEQ ID NO: 208052 - DNA, 25 bp, Artificial
  Probe
ggtgtttgcgcacaagcagccaacc

SEQ ID NO: 208053 - DNA, 25 bp, Artificial
  Probe
ggcagccgagccttgtaagtcctgt

SEQ ID NO: 208054 - DNA, 25 bp, Artificial
  Probe
ccggggcccattcgtacacatcgtt

SEQ ID NO: 208055 - DNA, 25 bp, Artificial
  Probe
ctgtggctccacaggcgatgagccc

SEQ ID NO: 208056 - DNA, 25 bp, Artificial
  Probe
aaatgaccggggagtccgaatgcct

SEQ ID NO: 208057 - DNA, 25 bp, Artificial
  Probe
ggtcgcccagtcgaatgtttgacca

SEQ ID NO: 208058 - DNA, 25 bp, Artificial
  Probe
cggccacgctatgtgctagcggcgt

SEQ ID NO: 208059 - DNA, 25 bp, Artificial
  Probe
cagtcgaatgtttgaccacattatt

SEQ ID NO: 208060 - DNA, 25 bp, Artificial
  Probe
tcacaccagcgacaggaacgataca

SEQ ID NO: 208061 - DNA, 25 bp, Artificial
  Probe
gagcgcgacgacaaccacatagaca

SEQ ID NO: 208062 - DNA, 25 bp, Artificial
  Probe
acgctatgtgctagcggcgtacaga

SEQ ID NO: 208063 - DNA, 25 bp, Artificial
  Probe
gcccagtcgaatgtttgaccacatt

SEQ ID NO: 208064 - DNA, 25 bp, Artificial
  Probe
caggaacgatacaccgggaagccgg

SEQ ID NO: 208065 - DNA, 25 bp, Artificial
  Probe
gttcggtcgcccagtcgaatgtttg

SEQ ID NO: 208066 - DNA, 25 bp, Artificial
  Probe
cgacaggaacgatacaccgggaagc

SEQ ID NO: 208067 - DNA, 25 bp, Artificial
  Probe
gcgacgacaaccacatagacagcac

SEQ ID NO: 208068 - DNA, 25 bp, Artificial
  Probe
ttcggtcgcccagtcgaatgtttga

SEQ ID NO: 208069 - DNA, 25 bp, Artificial
  Probe
agccggcacgaggaacacgcacaga

SEQ ID NO: 208070 - DNA, 25 bp, Artificial
  Probe
atcacaccagcgacaggaacgatac

SEQ ID NO: 208071 - DNA, 25 bp, Artificial
  Probe
agcgcgacgacaaccacatagacag

SEQ ID NO: 208072 - DNA, 25 bp, Artificial
  Probe
accagcgacaggaacgatacaccgg

SEQ ID NO: 208073 - DNA, 25 bp, Artificial
  Probe
cacaccagcgacaggaacgatacac

SEQ ID NO: 208074 - DNA, 25 bp, Artificial
  Probe
tcgaatgtttgaccacattatttgg

SEQ ID NO: 208075 - DNA, 25 bp, Artificial
  Probe
tcggtcgcccagtcgaatgtttgac

SEQ ID NO: 208076 - DNA, 25 bp, Artificial
  Probe
ggccacgctatgtgctagcggcgta

SEQ ID NO: 208077 - DNA, 25 bp, Artificial
  Probe
cggtcgcccagtcgaatgtttgacc

SEQ ID NO: 208078 - DNA, 25 bp, Artificial
  Probe
cacgctatgtgctagcggcgtacag

SEQ ID NO: 208079 - DNA, 25 bp, Artificial
  Probe
acaggaacgatacaccgggaagccg

SEQ ID NO: 208080 - DNA, 25 bp, Artificial
  Probe
aagccggcacgaggaacacgcacag

SEQ ID NO: 208081 - DNA, 25 bp, Artificial
  Probe
ggagcgcgacgacaaccacatagac

SEQ ID NO: 208082 - DNA, 25 bp, Artificial
  Probe
gacaggaacgatacaccgggaagcc

SEQ ID NO: 208083 - DNA, 25 bp, Artificial
  Probe
cgacgacaaccacatagacagcacg

SEQ ID NO: 208084 - DNA, 25 bp, Artificial
  Probe
ccagtcgaatgtttgaccacattat

SEQ ID NO: 208085 - DNA, 25 bp, Artificial
  Probe
ggaagccggcacgaggaacacgcac

SEQ ID NO: 208086 - DNA, 25 bp, Artificial
  Probe
caccagcgacaggaacgatacaccg

SEQ ID NO: 208087 - DNA, 25 bp, Artificial
  Probe
gtcgaatgtttgaccacattatttg

SEQ ID NO: 208088 - DNA, 25 bp, Artificial
  Probe
cgcccagtcgaatgtttgaccacat

SEQ ID NO: 208089 - DNA, 25 bp, Artificial
  Probe
cccagtcgaatgtttgaccacatta

SEQ ID NO: 208090 - DNA, 25 bp, Artificial
  Probe
cgatacaccgggaagccggcacgag

SEQ ID NO: 208091 - DNA, 25 bp, Artificial
  Probe
gaagccggcacgaggaacacgcaca

SEQ ID NO: 208092 - DNA, 25 bp, Artificial
  Probe
aatgagcccctgttcggtcgcccag

SEQ ID NO: 208093 - DNA, 25 bp, Artificial
  Probe
acaccagcgacaggaacgatacacc

SEQ ID NO: 208094 - DNA, 25 bp, Artificial
  Probe
gtcgcccagtcgaatgtttgaccac

SEQ ID NO: 208095 - DNA, 25 bp, Artificial
  Probe
tcggagcgcgacgacaaccacatag

SEQ ID NO: 208096 - DNA, 25 bp, Artificial
  Probe
ccacgctatgtgctagcggcgtaca

SEQ ID NO: 208097 - DNA, 25 bp, Artificial
  Probe
gacgacaaccacatagacagcacgc

SEQ ID NO: 208098 - DNA, 25 bp, Artificial
  Probe
cggagcgcgacgacaaccacataga

SEQ ID NO: 208099 - DNA, 25 bp, Artificial
  Probe
gacgtgacaatgagcccctgttcgg

SEQ ID NO: 208100 - DNA, 25 bp, Artificial
  Probe
gacaaccacatagacagcacgccat

SEQ ID NO: 208101 - DNA, 25 bp, Artificial
  Probe
atgagcccctgttcggtcgcccagt

SEQ ID NO: 208102 - DNA, 25 bp, Artificial
  Probe
gcgcgacgacaaccacatagacagc

SEQ ID NO: 208103 - DNA, 25 bp, Artificial
  Probe
cacacaagagaattcacacaggaga

SEQ ID NO: 208104 - DNA, 25 bp, Artificial
  Probe
gagagaaaccctacaaatgtgaaga

SEQ ID NO: 208105 - DNA, 25 bp, Artificial
  Probe
ctcaacaccggagaatccatacagg

SEQ ID NO: 208106 - DNA, 25 bp, Artificial
  Probe
gaattcacacaggagagaaacctta

SEQ ID NO: 208107 - DNA, 25 bp, Artificial
  Probe
agtgttccaaccttagaaaacatga

SEQ ID NO: 208108 - DNA, 25 bp, Artificial
  Probe
gccttagaaaacaccagagaattca

SEQ ID NO: 208109 - DNA, 25 bp, Artificial
  Probe
ccttacaaatgtaaagactgtgaca

SEQ ID NO: 208110 - DNA, 25 bp, Artificial
  Probe
ccttacaaatgtgaacagtgtggaa

SEQ ID NO: 208111 - DNA, 25 bp, Artificial
  Probe
aaaccttacaaatgtaaagactgtg

SEQ ID NO: 208112 - DNA, 25 bp, Artificial
  Probe
gcacaaaccttactcaacaccggag

SEQ ID NO: 208113 - DNA, 25 bp, Artificial
  Probe
aaaccttacaaatgtgaacagtgtg

SEQ ID NO: 208114 - DNA, 25 bp, Artificial
  Probe
aaaccctacaaatgtgaagaatgtg

SEQ ID NO: 208115 - DNA, 25 bp, Artificial
  Probe
acaccggagaatccatacaggagag

SEQ ID NO: 208116 - DNA, 25 bp, Artificial
  Probe
tagtcagtgttccaaccttagaaaa

SEQ ID NO: 208117 - DNA, 25 bp, Artificial
  Probe
agagcctttaactgccgttcatctt

SEQ ID NO: 208118 - DNA, 25 bp, Artificial
  Probe
agaatgtggcagagcctttaactgc

SEQ ID NO: 208119 - DNA, 25 bp, Artificial
  Probe
agagaattcacacaggagagaaacc

SEQ ID NO: 208120 - DNA, 25 bp, Artificial
  Probe
agaattcatactggagaaaaacctt

SEQ ID NO: 208121 - DNA, 25 bp, Artificial
  Probe
gagaaaccttacaaatgtaaagact

SEQ ID NO: 208122 - DNA, 25 bp, Artificial
  Probe
gagaaaccctacaaatgtgaagaat

SEQ ID NO: 208123 - DNA, 25 bp, Artificial
  Probe
atgttcaagccttagaaaacaccag

SEQ ID NO: 208124 - DNA, 25 bp, Artificial
  Probe
aaccttacaaatgtgaacagtgtgg

SEQ ID NO: 208125 - DNA, 25 bp, Artificial
  Probe
cacactggagagaaaccctacaaat

SEQ ID NO: 208126 - DNA, 25 bp, Artificial
  Probe
gactgtgacaaagctttcatccact

SEQ ID NO: 208127 - DNA, 25 bp, Artificial
  Probe
ggagaatccatacaggagagaaacc

SEQ ID NO: 208128 - DNA, 25 bp, Artificial
  Probe
accagagaattcatactggagaaaa

SEQ ID NO: 208129 - DNA, 25 bp, Artificial
  Probe
ggagagaaaccctacaaatgtgaag

SEQ ID NO: 208130 - DNA, 25 bp, Artificial
  Probe
gtcagtgttccaaccttagaaaaca

SEQ ID NO: 208131 - DNA, 25 bp, Artificial
  Probe
ttcacacaggagagaaaccttacaa

SEQ ID NO: 208132 - DNA, 25 bp, Artificial
  Probe
aatccatacaggagagaaaccatac

SEQ ID NO: 208133 - DNA, 25 bp, Artificial
  Probe
ccctacaaatgtgaagaatgtggca

SEQ ID NO: 208134 - DNA, 25 bp, Artificial
  Probe
actcaacaccggagaatccatacag

SEQ ID NO: 208135 - DNA, 25 bp, Artificial
  Probe
agtcaacaccagagaattcatactg

SEQ ID NO: 208136 - DNA, 25 bp, Artificial
  Probe
gtgacaaagctttcatccactgcac

SEQ ID NO: 208137 - DNA, 25 bp, Artificial
  Probe
gaaaccttacaaatgtaaagactgt

SEQ ID NO: 208138 - DNA, 25 bp, Artificial
  Probe
gaaaccctacaaatgtgaagaatgt

SEQ ID NO: 208139 - DNA, 25 bp, Artificial
  Probe
aacaccagagaattcacactggaga

SEQ ID NO: 208140 - DNA, 25 bp, Artificial
  Probe
aattcacactggagagaaaccctac

SEQ ID NO: 208141 - DNA, 25 bp, Artificial
  Probe
cacaagagaattcacacaggagaga

SEQ ID NO: 208142 - DNA, 25 bp, Artificial
  Probe
caacaccagagaattcatactggag

SEQ ID NO: 208143 - DNA, 25 bp, Artificial
  Probe
gttcaagccttcagaaacaccaagt

SEQ ID NO: 208144 - DNA, 25 bp, Artificial
  Probe
acaccagagaattcacactggagag

SEQ ID NO: 208145 - DNA, 25 bp, Artificial
  Probe
gaatccatacaggagagaaaccata

SEQ ID NO: 208146 - DNA, 25 bp, Artificial
  Probe
gcagagcctttaactgccgttcatc

SEQ ID NO: 208147 - DNA, 25 bp, Artificial
  Probe
tgtggcagagcctttaactgccgtt

SEQ ID NO: 208148 - DNA, 25 bp, Artificial
  Probe
tcaacaccagagaattcatactgga

SEQ ID NO: 208149 - DNA, 25 bp, Artificial
  Probe
ccccaagtggatcagcatcatgact

SEQ ID NO: 208150 - DNA, 25 bp, Artificial
  Probe
gactaaccgcagcaatgcacagagg

SEQ ID NO: 208151 - DNA, 25 bp, Artificial
  Probe
tcctgtgcaagctcagcttggaggg

SEQ ID NO: 208152 - DNA, 25 bp, Artificial
  Probe
aagtcggccttgtctggtcacctgg

SEQ ID NO: 208153 - DNA, 25 bp, Artificial
  Probe
accaaaggcgtggacgaggtcacca

SEQ ID NO: 208154 - DNA, 25 bp, Artificial
  Probe
ttcgacgctgagagggatgctttga

SEQ ID NO: 208155 - DNA, 25 bp, Artificial
  Probe
gccatcggcgatgaagtcggccttg

SEQ ID NO: 208156 - DNA, 25 bp, Artificial
  Probe
acaccaacttcgacgctgagaggga

SEQ ID NO: 208157 - DNA, 25 bp, Artificial
  Probe
acgaaatcctgtgcaagctcagctt

SEQ ID NO: 208158 - DNA, 25 bp, Artificial
  Probe
tccccaagtggatcagcatcatgac

SEQ ID NO: 208159 - DNA, 25 bp, Artificial
  Probe
tgaagtcggccttgtctggtcacct

SEQ ID NO: 208160 - DNA, 25 bp, Artificial
  Probe
gcaatcaagaccaaaggcgtggacg

SEQ ID NO: 208161 - DNA, 25 bp, Artificial
  Probe
acgctgagagggatgctttgaacat

SEQ ID NO: 208162 - DNA, 25 bp, Artificial
  Probe
actaaccgcagcaatgcacagaggc

SEQ ID NO: 208163 - DNA, 25 bp, Artificial
  Probe
gccttgtctggtcacctggagaccg

SEQ ID NO: 208164 - DNA, 25 bp, Artificial
  Probe
caaaggcgtggacgaggtcaccatt

SEQ ID NO: 208165 - DNA, 25 bp, Artificial
  Probe
tcggcgatgaagtcggccttgtctg

SEQ ID NO: 208166 - DNA, 25 bp, Artificial
  Probe
agaccaaaggcgtggacgaggtcac

SEQ ID NO: 208167 - DNA, 25 bp, Artificial
  Probe
tgtccccaagtggatcagcatcatg

SEQ ID NO: 208168 - DNA, 25 bp, Artificial
  Probe
catcggcgatgaagtcggccttgtc

SEQ ID NO: 208169 - DNA, 25 bp, Artificial
  Probe
atgaagtcggccttgtctggtcacc

SEQ ID NO: 208170 - DNA, 25 bp, Artificial
  Probe
acattctgactaaccgcagcaatgc

SEQ ID NO: 208171 - DNA, 25 bp, Artificial
  Probe
ggatcagcatcatgactgagcgcag

SEQ ID NO: 208172 - DNA, 25 bp, Artificial
  Probe
cctacaccaacttcgacgctgagag

SEQ ID NO: 208173 - DNA, 25 bp, Artificial
  Probe
ccgatgtccccaagtggatcagcat

SEQ ID NO: 208174 - DNA, 25 bp, Artificial
  Probe
gaaatcctgtgcaagctcagcttgg

SEQ ID NO: 208175 - DNA, 25 bp, Artificial
  Probe
aacattctgactaaccgcagcaatg

SEQ ID NO: 208176 - DNA, 25 bp, Artificial
  Probe
ctgccatcggcgatgaagtcggcct

SEQ ID NO: 208177 - DNA, 25 bp, Artificial
  Probe
gatcagcatcatgactgagcgcagt

SEQ ID NO: 208178 - DNA, 25 bp, Artificial
  Probe
cctgtgcaagctcagcttggagggt

SEQ ID NO: 208179 - DNA, 25 bp, Artificial
  Probe
cgaaatcctgtgcaagctcagcttg

SEQ ID NO: 208180 - DNA, 25 bp, Artificial
  Probe
caagtggatcagcatcatgactgag

SEQ ID NO: 208181 - DNA, 25 bp, Artificial
  Probe
gtggatcagcatcatgactgagcgc

SEQ ID NO: 208182 - DNA, 25 bp, Artificial
  Probe
cggccttgtctggtcacctggagac

SEQ ID NO: 208183 - DNA, 25 bp, Artificial
  Probe
cgatgtccccaagtggatcagcatc

SEQ ID NO: 208184 - DNA, 25 bp, Artificial
  Probe
aatcaagaccaaaggcgtggacgag

SEQ ID NO: 208185 - DNA, 25 bp, Artificial
  Probe
agtggatcagcatcatgactgagcg

SEQ ID NO: 208186 - DNA, 25 bp, Artificial
  Probe
cttcgacgctgagagggatgctttg

SEQ ID NO: 208187 - DNA, 25 bp, Artificial
  Probe
aacttcgacgctgagagggatgctt

SEQ ID NO: 208188 - DNA, 25 bp, Artificial
  Probe
aacagcaatcaagaccaaaggcgtg

SEQ ID NO: 208189 - DNA, 25 bp, Artificial
  Probe
ctacaccaacttcgacgctgagagg

SEQ ID NO: 208190 - DNA, 25 bp, Artificial
  Probe
caacttcgacgctgagagggatgct

SEQ ID NO: 208191 - DNA, 25 bp, Artificial
  Probe
ctgactaaccgcagcaatgcacaga

SEQ ID NO: 208192 - DNA, 25 bp, Artificial
  Probe
aaaggcgtggacgaggtcaccattg

SEQ ID NO: 208193 - DNA, 25 bp, Artificial
  Probe
atgtccccaagtggatcagcatcat

SEQ ID NO: 208194 - DNA, 25 bp, Artificial
  Probe
gtcggccttgtctggtcacctggag

SEQ ID NO: 208195 - DNA, 25 bp, Artificial
  Probe
tgaagccgggaccatggaatgctac

SEQ ID NO: 208196 - DNA, 25 bp, Artificial
  Probe
aatcccactgttgaactcactgaag

SEQ ID NO: 208197 - DNA, 25 bp, Artificial
  Probe
tatcaaattgtggtggagcagctac

SEQ ID NO: 208198 - DNA, 25 bp, Artificial
  Probe
acaacatctatttccaagcgatgag

SEQ ID NO: 208199 - DNA, 25 bp, Artificial
  Probe
ctgggaatcttcctgagccagctcc

SEQ ID NO: 208200 - DNA, 25 bp, Artificial
  Probe
cactgtactgctgagacctgcacaa

SEQ ID NO: 208201 - DNA, 25 bp, Artificial
  Probe
aaacccagtgtgtgcgaattgctac

SEQ ID NO: 208202 - DNA, 25 bp, Artificial
  Probe
accaccatcactgtactgctgagac

SEQ ID NO: 208203 - DNA, 25 bp, Artificial
  Probe
accatggaatgctaccgggtaccgg

SEQ ID NO: 208204 - DNA, 25 bp, Artificial
  Probe
caaattgtggtggagcagctacacc

SEQ ID NO: 208205 - DNA, 25 bp, Artificial
  Probe
caccatcactgtactgctgagacct

SEQ ID NO: 208206 - DNA, 25 bp, Artificial
  Probe
cagtgtgtgcgaattgctacaaaag

SEQ ID NO: 208207 - DNA, 25 bp, Artificial
  Probe
atcactgtactgctgagacctgcac

SEQ ID NO: 208208 - DNA, 25 bp, Artificial
  Probe
tggtggagcagctacacccacatcg

SEQ ID NO: 208209 - DNA, 25 bp, Artificial
  Probe
aagccgggaccatggaatgctaccg

SEQ ID NO: 208210 - DNA, 25 bp, Artificial
  Probe
ccctgggaatcttcctgagccagct

SEQ ID NO: 208211 - DNA, 25 bp, Artificial
  Probe
attgctacaaaagatggtagttccc

SEQ ID NO: 208212 - DNA, 25 bp, Artificial
  Probe
caaccggacctataaaggcttctgg

SEQ ID NO: 208213 - DNA, 25 bp, Artificial
  Probe
acaaccggacctataaaggcttctg

SEQ ID NO: 208214 - DNA, 25 bp, Artificial
  Probe
tcccactgttgaactcactgaagat

SEQ ID NO: 208215 - DNA, 25 bp, Artificial
  Probe
aggatacaacatctatttccaagcg

SEQ ID NO: 208216 - DNA, 25 bp, Artificial
  Probe
tggagcagctacacccacatcggac

SEQ ID NO: 208217 - DNA, 25 bp, Artificial
  Probe
ccatggaatgctaccgggtaccggt

SEQ ID NO: 208218 - DNA, 25 bp, Artificial
  Probe
cgtgaagccgggaccatggaatgct

SEQ ID NO: 208219 - DNA, 25 bp, Artificial
  Probe
ctgttgaactcactgaagatcagaa

SEQ ID NO: 208220 - DNA, 25 bp, Artificial
  Probe
ggaatcttcctgagccagctccctt

SEQ ID NO: 208221 - DNA, 25 bp, Artificial
  Probe
aattgctacaaaagatggtagttcc

SEQ ID NO: 208222 - DNA, 25 bp, Artificial
  Probe
ggcgacaaccggacctataaaggct

SEQ ID NO: 208223 - DNA, 25 bp, Artificial
  Probe
gcgacaaccggacctataaaggctt

SEQ ID NO: 208224 - DNA, 25 bp, Artificial
  Probe
acatctatttccaagcgatgagcag

SEQ ID NO: 208225 - DNA, 25 bp, Artificial
  Probe
ccagtgtgtgcgaattgctacaaaa

SEQ ID NO: 208226 - DNA, 25 bp, Artificial
  Probe
caccgtgggcgacaaccggacctat

SEQ ID NO: 208227 - DNA, 25 bp, Artificial
  Probe
attgtggtggagcagctacacccac

SEQ ID NO: 208228 - DNA, 25 bp, Artificial
  Probe
ctaaaacccagtgtgtgcgaattgc

SEQ ID NO: 208229 - DNA, 25 bp, Artificial
  Probe
ggatacaacatctatttccaagcga

SEQ ID NO: 208230 - DNA, 25 bp, Artificial
  Probe
actaaaacccagtgtgtgcgaattg

SEQ ID NO: 208231 - DNA, 25 bp, Artificial
  Probe
gttgaactcactgaagatcagaaaa

SEQ ID NO: 208232 - DNA, 25 bp, Artificial
  Probe
cggttacgtaccagaactccctgag

SEQ ID NO: 208233 - DNA, 25 bp, Artificial
  Probe
tacgtaccagaactccctgagtggg

SEQ ID NO: 208234 - DNA, 25 bp, Artificial
  Probe
gacaaccggacctataaaggcttct

SEQ ID NO: 208235 - DNA, 25 bp, Artificial
  Probe
agccgggaccatggaatgctaccgg

SEQ ID NO: 208236 - DNA, 25 bp, Artificial
  Probe
gggaccatggaatgctaccgggtac

SEQ ID NO: 208237 - DNA, 25 bp, Artificial
  Probe
tcaaattgtggtggagcagctacac

SEQ ID NO: 208238 - DNA, 25 bp, Artificial
  Probe
actcactgaagatcagaaaagttgt

SEQ ID NO: 208239 - DNA, 25 bp, Artificial
  Probe
tcaccgtgggcgacaaccggaccta

SEQ ID NO: 208240 - DNA, 25 bp, Artificial
  Probe
aaactaaaacccagtgtgtgcgaat

SEQ ID NO: 208241 - DNA, 25 bp, Artificial
  Probe
agccatttaaggctgagcctgtaaa

SEQ ID NO: 208242 - DNA, 25 bp, Artificial
  Probe
gagcctgtaaagaccagaagctaga

SEQ ID NO: 208243 - DNA, 25 bp, Artificial
  Probe
ctgagcctgtaaagaccagaagcta

SEQ ID NO: 208244 - DNA, 25 bp, Artificial
  Probe
caaggagcatcaggcagaggggagt

SEQ ID NO: 208245 - DNA, 25 bp, Artificial
  Probe
ccatttaaggctgagcctgtaaaga

SEQ ID NO: 208246 - DNA, 25 bp, Artificial
  Probe
gctgagcctgtaaagaccagaagct

SEQ ID NO: 208247 - DNA, 25 bp, Artificial
  Probe
agcatcaggcagaggggagtgaggt

SEQ ID NO: 208248 - DNA, 25 bp, Artificial
  Probe
atacaaggagcatcaggcagagggg

SEQ ID NO: 208249 - DNA, 25 bp, Artificial
  Probe
tcaggcagaggggagtgaggtgagc

SEQ ID NO: 208250 - DNA, 25 bp, Artificial
  Probe
aaatacaaggagcatcaggcagagg

SEQ ID NO: 208251 - DNA, 25 bp, Artificial
  Probe
acaaggagcatcaggcagaggggag

SEQ ID NO: 208252 - DNA, 25 bp, Artificial
  Probe
tacaaggagcatcaggcagagggga

SEQ ID NO: 208253 - DNA, 25 bp, Artificial
  Probe
tgagcctgtaaagaccagaagctag

SEQ ID NO: 208254 - DNA, 25 bp, Artificial
  Probe
taaggctgagcctgtaaagaccaga

SEQ ID NO: 208255 - DNA, 25 bp, Artificial
  Probe
ctgtaaagaccagaagctagaaata

SEQ ID NO: 208256 - DNA, 25 bp, Artificial
  Probe
aaggagcatcaggcagaggggagtg

SEQ ID NO: 208257 - DNA, 25 bp, Artificial
  Probe
aatacaaggagcatcaggcagaggg

SEQ ID NO: 208258 - DNA, 25 bp, Artificial
  Probe
atcaggcagaggggagtgaggtgag

SEQ ID NO: 208259 - DNA, 25 bp, Artificial
  Probe
cctgtaaagaccagaagctagaaat

SEQ ID NO: 208260 - DNA, 25 bp, Artificial
  Probe
gagcatcaggcagaggggagtgagg

SEQ ID NO: 208261 - DNA, 25 bp, Artificial
  Probe
aggagcatcaggcagaggggagtga

SEQ ID NO: 208262 - DNA, 25 bp, Artificial
  Probe
gaaatacaaggagcatcaggcagag

SEQ ID NO: 208263 - DNA, 25 bp, Artificial
  Probe
ttaaggctgagcctgtaaagaccag

SEQ ID NO: 208264 - DNA, 25 bp, Artificial
  Probe
ggagcatcaggcagaggggagtgag

SEQ ID NO: 208265 - DNA, 25 bp, Artificial
  Probe
aggctgagcctgtaaagaccagaag

SEQ ID NO: 208266 - DNA, 25 bp, Artificial
  Probe
catcaggcagaggggagtgaggtga

SEQ ID NO: 208267 - DNA, 25 bp, Artificial
  Probe
agcctgtaaagaccagaagctagaa

SEQ ID NO: 208268 - DNA, 25 bp, Artificial
  Probe
ggctgagcctgtaaagaccagaagc

SEQ ID NO: 208269 - DNA, 25 bp, Artificial
  Probe
gcatcaggcagaggggagtgaggtg

SEQ ID NO: 208270 - DNA, 25 bp, Artificial
  Probe
catttaaggctgagcctgtaaagac

SEQ ID NO: 208271 - DNA, 25 bp, Artificial
  Probe
atttaaggctgagcctgtaaagacc

SEQ ID NO: 208272 - DNA, 25 bp, Artificial
  Probe
tttaaggctgagcctgtaaagacca

SEQ ID NO: 208273 - DNA, 25 bp, Artificial
  Probe
gccatttaaggctgagcctgtaaag

SEQ ID NO: 208274 - DNA, 25 bp, Artificial
  Probe
agcaaccagtctgccttccgagtgg

SEQ ID NO: 208275 - DNA, 25 bp, Artificial
  Probe
acatacaaaccgaaagattcggtgg

SEQ ID NO: 208276 - DNA, 25 bp, Artificial
  Probe
ttacagtgcctcacaaccagtccac

SEQ ID NO: 208277 - DNA, 25 bp, Artificial
  Probe
tcatgacacagaaaacagaaggttt

SEQ ID NO: 208278 - DNA, 25 bp, Artificial
  Probe
aaccagtctgccttccgagtggcat

SEQ ID NO: 208279 - DNA, 25 bp, Artificial
  Probe
aagagcaaccagtctgccttccgag

SEQ ID NO: 208280 - DNA, 25 bp, Artificial
  Probe
aaccaaacaatgtcgtcattaaagt

SEQ ID NO: 208281 - DNA, 25 bp, Artificial
  Probe
cactattttcatgacacagaaaaca

SEQ ID NO: 208282 - DNA, 25 bp, Artificial
  Probe
tctgccttccgagtggcatttgtaa

SEQ ID NO: 208283 - DNA, 25 bp, Artificial
  Probe
ctatctgaactgcctttacatttta

SEQ ID NO: 208284 - DNA, 25 bp, Artificial
  Probe
gtcctttaaccaaacaatgtcgtca

SEQ ID NO: 208285 - DNA, 25 bp, Artificial
  Probe
ccttccgagtggcatttgtaaagca

SEQ ID NO: 208286 - DNA, 25 bp, Artificial
  Probe
ctgaactgcctttacattttacagt

SEQ ID NO: 208287 - DNA, 25 bp, Artificial
  Probe
ttcatgacacagaaaacagaaggtt

SEQ ID NO: 208288 - DNA, 25 bp, Artificial
  Probe
acattttacagtgcctcacaaccag

SEQ ID NO: 208289 - DNA, 25 bp, Artificial
  Probe
gtaaagcactattttcatgacacag

SEQ ID NO: 208290 - DNA, 25 bp, Artificial
  Probe
catttgtaaagcactattttcatga

SEQ ID NO: 208291 - DNA, 25 bp, Artificial
  Probe
agagcaaccagtctgccttccgagt

SEQ ID NO: 208292 - DNA, 25 bp, Artificial
  Probe
gtttcagtcctttaaccaaacaatg

SEQ ID NO: 208293 - DNA, 25 bp, Artificial
  Probe
tgcctcacaaccagtccacaacata

SEQ ID NO: 208294 - DNA, 25 bp, Artificial
  Probe
gagcaaccagtctgccttccgagtg

SEQ ID NO: 208295 - DNA, 25 bp, Artificial
  Probe
actattttcatgacacagaaaacag

SEQ ID NO: 208296 - DNA, 25 bp, Artificial
  Probe
gtctgccttccgagtggcatttgta

SEQ ID NO: 208297 - DNA, 25 bp, Artificial
  Probe
cccgcccttccaaagagcaaccagt

SEQ ID NO: 208298 - DNA, 25 bp, Artificial
  Probe
tacaaaccgaaagattcggtggaca

SEQ ID NO: 208299 - DNA, 25 bp, Artificial
  Probe
cttccaaagagcaaccagtctgcct

SEQ ID NO: 208300 - DNA, 25 bp, Artificial
  Probe
catacaaaccgaaagattcggtgga

SEQ ID NO: 208301 - DNA, 25 bp, Artificial
  Probe
accagtctgccttccgagtggcatt

SEQ ID NO: 208302 - DNA, 25 bp, Artificial
  Probe
ctttacattttacagtgcctcacaa

SEQ ID NO: 208303 - DNA, 25 bp, Artificial
  Probe
tccaaagagcaaccagtctgccttc

SEQ ID NO: 208304 - DNA, 25 bp, Artificial
  Probe
gtccacaacatacaaaccgaaagat

SEQ ID NO: 208305 - DNA, 25 bp, Artificial
  Probe
atcctatctgaactgcctttacatt

SEQ ID NO: 208306 - DNA, 25 bp, Artificial
  Probe
tttcatgacacagaaaacagaaggt

SEQ ID NO: 208307 - DNA, 25 bp, Artificial
  Probe
cttccgagtggcatttgtaaagcac

SEQ ID NO: 208308 - DNA, 25 bp, Artificial
  Probe
aacatacaaaccgaaagattcggtg

SEQ ID NO: 208309 - DNA, 25 bp, Artificial
  Probe
gaactgcctttacattttacagtgc

SEQ ID NO: 208310 - DNA, 25 bp, Artificial
  Probe
ttccgagtggcatttgtaaagcact

SEQ ID NO: 208311 - DNA, 25 bp, Artificial
  Probe
aaccagtccacaacatacaaaccga

SEQ ID NO: 208312 - DNA, 25 bp, Artificial
  Probe
tccgagtggcatttgtaaagcacta

SEQ ID NO: 208313 - DNA, 25 bp, Artificial
  Probe
ttttcatgacacagaaaacagaagg

SEQ ID NO: 208314 - DNA, 25 bp, Artificial
  Probe
ctgccttccgagtggcatttgtaaa

SEQ ID NO: 208315 - DNA, 25 bp, Artificial
  Probe
actgcctttacattttacagtgcct

SEQ ID NO: 208316 - DNA, 25 bp, Artificial
  Probe
gcccttccaaagagcaaccagtctg

SEQ ID NO: 208317 - DNA, 25 bp, Artificial
  Probe
taaagcactattttcatgacacaga

SEQ ID NO: 208318 - DNA, 25 bp, Artificial
  Probe
tgaactgcctttacattttacagtg

SEQ ID NO: 208319 - DNA, 25 bp, Artificial
  Probe
ttccaaagagcaaccagtctgcctt

SEQ ID NO: 208320 - DNA, 25 bp, Artificial
  Probe
gtacagcctgctggtgggctctgtc

SEQ ID NO: 208321 - DNA, 25 bp, Artificial
  Probe
tacagcctgctggtgggctctgtct

SEQ ID NO: 208322 - DNA, 25 bp, Artificial
  Probe
attggtggctacagcaaacactaag

SEQ ID NO: 208323 - DNA, 25 bp, Artificial
  Probe
cgtacagcctgctggtgggctctgt

SEQ ID NO: 208324 - DNA, 25 bp, Artificial
  Probe
attcccagaggcaaatctgccatgc

SEQ ID NO: 208325 - DNA, 25 bp, Artificial
  Probe
catggagttctctttaccggcctcc

SEQ ID NO: 208326 - DNA, 25 bp, Artificial
  Probe
atggagttctctttaccggcctcct

SEQ ID NO: 208327 - DNA, 25 bp, Artificial
  Probe
aaggctcctggagattgggagaacc

SEQ ID NO: 208328 - DNA, 25 bp, Artificial
  Probe
aggctcctggagattgggagaacct

SEQ ID NO: 208329 - DNA, 25 bp, Artificial
  Probe
gtggattcccagaggcaaatctgcc

SEQ ID NO: 208330 - DNA, 25 bp, Artificial
  Probe
ccagaggcaaatctgccatgcttgc

SEQ ID NO: 208331 - DNA, 25 bp, Artificial
  Probe
acagcctgctggtgggctctgtctg

SEQ ID NO: 208332 - DNA, 25 bp, Artificial
  Probe
ggctacagcaaacactaaggaaccc

SEQ ID NO: 208333 - DNA, 25 bp, Artificial
  Probe
ttcccagaggcaaatctgccatgct

SEQ ID NO: 208334 - DNA, 25 bp, Artificial
  Probe
ggtggctacagcaaacactaaggaa

SEQ ID NO: 208335 - DNA, 25 bp, Artificial
  Probe
gcatggagttctctttaccggcctc

SEQ ID NO: 208336 - DNA, 25 bp, Artificial
  Probe
gagtggattcccagaggcaaatctg

SEQ ID NO: 208337 - DNA, 25 bp, Artificial
  Probe
gctacagcaaacactaaggaaccct

SEQ ID NO: 208338 - DNA, 25 bp, Artificial
  Probe
tcccagaggcaaatctgccatgctt

SEQ ID NO: 208339 - DNA, 25 bp, Artificial
  Probe
cctgctggggccagtgagaagacta

SEQ ID NO: 208340 - DNA, 25 bp, Artificial
  Probe
tggtggctacagcaaacactaagga

SEQ ID NO: 208341 - DNA, 25 bp, Artificial
  Probe
tggagttctctttaccggcctcctc

SEQ ID NO: 208342 - DNA, 25 bp, Artificial
  Probe
cccagaggcaaatctgccatgcttg

SEQ ID NO: 208343 - DNA, 25 bp, Artificial
  Probe
ggacgagtggattcccagaggcaaa

SEQ ID NO: 208344 - DNA, 25 bp, Artificial
  Probe
aaaggctcctggagattgggagaac

SEQ ID NO: 208345 - DNA, 25 bp, Artificial
  Probe
tgcgtacagcctgctggtgggctct

SEQ ID NO: 208346 - DNA, 25 bp, Artificial
  Probe
ccccgtgcgtacagcctgctggtgg

SEQ ID NO: 208347 - DNA, 25 bp, Artificial
  Probe
gctcctggagattgggagaacctgc

SEQ ID NO: 208348 - DNA, 25 bp, Artificial
  Probe
tgattggtggctacagcaaacacta

SEQ ID NO: 208349 - DNA, 25 bp, Artificial
  Probe
agtggattcccagaggcaaatctgc

SEQ ID NO: 208350 - DNA, 25 bp, Artificial
  Probe
gtggctacagcaaacactaaggaac

SEQ ID NO: 208351 - DNA, 25 bp, Artificial
  Probe
tggctacagcaaacactaaggaacc

SEQ ID NO: 208352 - DNA, 25 bp, Artificial
  Probe
ttggtggctacagcaaacactaagg

SEQ ID NO: 208353 - DNA, 25 bp, Artificial
  Probe
cataaacaagaacagaccctcccca

SEQ ID NO: 208354 - DNA, 25 bp, Artificial
  Probe
ctttctttctgcccttttgttctct

SEQ ID NO: 208355 - DNA, 25 bp, Artificial
  Probe
cgctcagcccatgactataggtgtc

SEQ ID NO: 208356 - DNA, 25 bp, Artificial
  Probe
ctccttagggtcagtcttctatacc

SEQ ID NO: 208357 - DNA, 25 bp, Artificial
  Probe
ttcataaacaagaacagaccctccc

SEQ ID NO: 208358 - DNA, 25 bp, Artificial
  Probe
tctccacagtcctcatagcttctcc

SEQ ID NO: 208359 - DNA, 25 bp, Artificial
  Probe
gggaatggccagagcgctcagccca

SEQ ID NO: 208360 - DNA, 25 bp, Artificial
  Probe
taaacttccttctaagggcaggtgg

SEQ ID NO: 208361 - DNA, 25 bp, Artificial
  Probe
gtctccttagggtcagtcttctata

SEQ ID NO: 208362 - DNA, 25 bp, Artificial
  Probe
agcgctcagcccatgactataggtg

SEQ ID NO: 208363 - DNA, 25 bp, Artificial
  Probe
gctcagcccatgactataggtgtca

SEQ ID NO: 208364 - DNA, 25 bp, Artificial
  Probe
tgaaggctctcagctgactcctatg

SEQ ID NO: 208365 - DNA, 25 bp, Artificial
  Probe
tgccctgtctccttagggtcagtct

SEQ ID NO: 208366 - DNA, 25 bp, Artificial
  Probe
tctccttagggtcagtcttctatac

SEQ ID NO: 208367 - DNA, 25 bp, Artificial
  Probe
gcgctcagcccatgactataggtgt

SEQ ID NO: 208368 - DNA, 25 bp, Artificial
  Probe
agggcaaagaactgccccatttcct

SEQ ID NO: 208369 - DNA, 25 bp, Artificial
  Probe
ggaatggccagagcgctcagcccat

SEQ ID NO: 208370 - DNA, 25 bp, Artificial
  Probe
ccttagggtcagtcttctataccct

SEQ ID NO: 208371 - DNA, 25 bp, Artificial
  Probe
gccctgtctccttagggtcagtctt

SEQ ID NO: 208372 - DNA, 25 bp, Artificial
  Probe
tccttagggtcagtcttctataccc

SEQ ID NO: 208373 - DNA, 25 bp, Artificial
  Probe
ctcagcccatgactataggtgtcac

SEQ ID NO: 208374 - DNA, 25 bp, Artificial
  Probe
cttagggtcagtcttctataccctg

SEQ ID NO: 208375 - DNA, 25 bp, Artificial
  Probe
tccttctaagggcaggtgggattat

SEQ ID NO: 208376 - DNA, 25 bp, Artificial
  Probe
atgaaggctctcagctgactcctat

SEQ ID NO: 208377 - DNA, 25 bp, Artificial
  Probe
cctatgccctgtctccttagggtca

SEQ ID NO: 208378 - DNA, 25 bp, Artificial
  Probe
atgccctgtctccttagggtcagtc

SEQ ID NO: 208379 - DNA, 25 bp, Artificial
  Probe
tagggtcagtcttctataccctggg

SEQ ID NO: 208380 - DNA, 25 bp, Artificial
  Probe
cagcccatgactataggtgtcactc

SEQ ID NO: 208381 - DNA, 25 bp, Artificial
  Probe
actcctatgccctgtctccttaggg

SEQ ID NO: 208382 - DNA, 25 bp, Artificial
  Probe
gaaggctctcagctgactcctatgc

SEQ ID NO: 208383 - DNA, 25 bp, Artificial
  Probe
gccagagcgctcagcccatgactat

SEQ ID NO: 208384 - DNA, 25 bp, Artificial
  Probe
tatgccctgtctccttagggtcagt

SEQ ID NO: 208385 - DNA, 25 bp, Artificial
  Probe
ccatgaaggctctcagctgactcct

SEQ ID NO: 208386 - DNA, 25 bp, Artificial
  Probe
ccctgtctccttagggtcagtcttc

SEQ ID NO: 208387 - DNA, 25 bp, Artificial
  Probe
ctatgccctgtctccttagggtcag

SEQ ID NO: 208388 - DNA, 25 bp, Artificial
  Probe
ggccagagcgctcagcccatgacta

SEQ ID NO: 208389 - DNA, 25 bp, Artificial
  Probe
tggccagagcgctcagcccatgact

SEQ ID NO: 208390 - DNA, 25 bp, Artificial
  Probe
gagcgctcagcccatgactataggt

SEQ ID NO: 208391 - DNA, 25 bp, Artificial
  Probe
aaggctctcagctgactcctatgcc

SEQ ID NO: 208392 - DNA, 25 bp, Artificial
  Probe
tcctatgccctgtctccttagggtc

SEQ ID NO: 208393 - DNA, 25 bp, Artificial
  Probe
gggcaaagaactgccccatttcctc

SEQ ID NO: 208394 - DNA, 25 bp, Artificial
  Probe
tcagcccatgactataggtgtcact

SEQ ID NO: 208395 - DNA, 25 bp, Artificial
  Probe
gtaaacttccttctaagggcaggtg

SEQ ID NO: 208396 - DNA, 25 bp, Artificial
  Probe
ccagtaaacttccttctaagggcag

SEQ ID NO: 208397 - DNA, 25 bp, Artificial
  Probe
cagtaaacttccttctaagggcagg

SEQ ID NO: 208398 - DNA, 25 bp, Artificial
  Probe
ctcctatgccctgtctccttagggt

SEQ ID NO: 208399 - DNA, 25 bp, Artificial
  Probe
gaaagacatctcaggtctctgggtt

SEQ ID NO: 208400 - DNA, 25 bp, Artificial
  Probe
aaacccagggagttgccagtcacct

SEQ ID NO: 208401 - DNA, 25 bp, Artificial
  Probe
cattccattcctgtcttagcttgag

SEQ ID NO: 208402 - DNA, 25 bp, Artificial
  Probe
attcctgtcttagcttgaggtaaat

SEQ ID NO: 208403 - DNA, 25 bp, Artificial
  Probe
cctgtcttagcttgaggtaaattgg

SEQ ID NO: 208404 - DNA, 25 bp, Artificial
  Probe
ggtctctgggtttggtcaagcacca

SEQ ID NO: 208405 - DNA, 25 bp, Artificial
  Probe
ggaaagacatctcaggtctctgggt

SEQ ID NO: 208406 - DNA, 25 bp, Artificial
  Probe
caggtctctgggtttggtcaagcac

SEQ ID NO: 208407 - DNA, 25 bp, Artificial
  Probe
tcctgtcttagcttgaggtaaattg

SEQ ID NO: 208408 - DNA, 25 bp, Artificial
  Probe
tctctgggtttggtcaagcaccaac

SEQ ID NO: 208409 - DNA, 25 bp, Artificial
  Probe
accaactggagtagcaatagtactt

SEQ ID NO: 208410 - DNA, 25 bp, Artificial
  Probe
agggagttgccagtcacctatcctc

SEQ ID NO: 208411 - DNA, 25 bp, Artificial
  Probe
aagacatctcaggtctctgggtttg

SEQ ID NO: 208412 - DNA, 25 bp, Artificial
  Probe
atctcaggtctctgggtttggtcaa

SEQ ID NO: 208413 - DNA, 25 bp, Artificial
  Probe
tttggtcaagcaccaactggagtag

SEQ ID NO: 208414 - DNA, 25 bp, Artificial
  Probe
ggtcaagcaccaactggagtagcaa

SEQ ID NO: 208415 - DNA, 25 bp, Artificial
  Probe
ggatcgaacatactttctttgctat

SEQ ID NO: 208416 - DNA, 25 bp, Artificial
  Probe
acttagaaacccagggagttgccag

SEQ ID NO: 208417 - DNA, 25 bp, Artificial
  Probe
tctgggtttggtcaagcaccaactg

SEQ ID NO: 208418 - DNA, 25 bp, Artificial
  Probe
catctcaggtctctgggtttggtca

SEQ ID NO: 208419 - DNA, 25 bp, Artificial
  Probe
gtttggtcaagcaccaactggagta

SEQ ID NO: 208420 - DNA, 25 bp, Artificial
  Probe
gacatctcaggtctctgggtttggt

SEQ ID NO: 208421 - DNA, 25 bp, Artificial
  Probe
agcaccaactggagtagcaatagta

SEQ ID NO: 208422 - DNA, 25 bp, Artificial
  Probe
gaaacccagggagttgccagtcacc

SEQ ID NO: 208423 - DNA, 25 bp, Artificial
  Probe
caccaactggagtagcaatagtact

SEQ ID NO: 208424 - DNA, 25 bp, Artificial
  Probe
caatagtacttagaaacccagggag

SEQ ID NO: 208425 - DNA, 25 bp, Artificial
  Probe
aggaaagacatctcaggtctctggg

SEQ ID NO: 208426 - DNA, 25 bp, Artificial
  Probe
gtctctgggtttggtcaagcaccaa

SEQ ID NO: 208427 - DNA, 25 bp, Artificial
  Probe
ttcctgtcttagcttgaggtaaatt

SEQ ID NO: 208428 - DNA, 25 bp, Artificial
  Probe
actttctttgctatttcaatgacgg

SEQ ID NO: 208429 - DNA, 25 bp, Artificial
  Probe
caagcaccaactggagtagcaatag

SEQ ID NO: 208430 - DNA, 25 bp, Artificial
  Probe
ggtttggtcaagcaccaactggagt

SEQ ID NO: 208431 - DNA, 25 bp, Artificial
  Probe
aggatcgaacatactttctttgcta

SEQ ID NO: 208432 - DNA, 25 bp, Artificial
  Probe
aacccagggagttgccagtcaccta

SEQ ID NO: 208433 - DNA, 25 bp, Artificial
  Probe
ctctgggtttggtcaagcaccaact

SEQ ID NO: 208434 - DNA, 25 bp, Artificial
  Probe
tagtacttagaaacccagggagttg

SEQ ID NO: 208435 - DNA, 25 bp, Artificial
  Probe
ggagttgccagtcacctatcctcat

SEQ ID NO: 208436 - DNA, 25 bp, Artificial
  Probe
ttggtcaagcaccaactggagtagc

SEQ ID NO: 208437 - DNA, 25 bp, Artificial
  Probe
ttccattcctgtcttagcttgaggt

SEQ ID NO: 208438 - DNA, 25 bp, Artificial
  Probe
cattcctgtcttagcttgaggtaaa

SEQ ID NO: 208439 - DNA, 25 bp, Artificial
  Probe
cagggagttgccagtcacctatcct

SEQ ID NO: 208440 - DNA, 25 bp, Artificial
  Probe
gggagttgccagtcacctatcctca

SEQ ID NO: 208441 - DNA, 25 bp, Artificial
  Probe
gagttgccagtcacctatcctcatc

SEQ ID NO: 208442 - DNA, 25 bp, Artificial
  Probe
attccattcctgtcttagcttgagg

SEQ ID NO: 208443 - DNA, 25 bp, Artificial
  Probe
tccattcctgtcttagcttgaggta

SEQ ID NO: 208444 - DNA, 25 bp, Artificial
  Probe
gtcaagcaccaactggagtagcaat

SEQ ID NO: 208445 - DNA, 25 bp, Artificial
  Probe
gatcttagcttattagctgttttac

SEQ ID NO: 208446 - DNA, 25 bp, Artificial
  Probe
cgaatttctggatctgaatgcccga

SEQ ID NO: 208447 - DNA, 25 bp, Artificial
  Probe
ctcctaaaagatatctaatggtgga

SEQ ID NO: 208448 - DNA, 25 bp, Artificial
  Probe
cttttttcataagcttaacaagcgg

SEQ ID NO: 208449 - DNA, 25 bp, Artificial
  Probe
tgttttaccatttatccagggtttg

SEQ ID NO: 208450 - DNA, 25 bp, Artificial
  Probe
atctaactagcatgtactgacatag

SEQ ID NO: 208451 - DNA, 25 bp, Artificial
  Probe
taccatttatccagggtttgacacg

SEQ ID NO: 208452 - DNA, 25 bp, Artificial
  Probe
cacactggttggaggatgaacattg

SEQ ID NO: 208453 - DNA, 25 bp, Artificial
  Probe
agatatctaatggtggactaccatc

SEQ ID NO: 208454 - DNA, 25 bp, Artificial
  Probe
tagtacactgacttgttttccgtgt

SEQ ID NO: 208455 - DNA, 25 bp, Artificial
  Probe
cttaacaagcggagtgttctgtata

SEQ ID NO: 208456 - DNA, 25 bp, Artificial
  Probe
gacacgttagaaaccttagacaaag

SEQ ID NO: 208457 - DNA, 25 bp, Artificial
  Probe
tctgaatgcccgatcttagcttatt

SEQ ID NO: 208458 - DNA, 25 bp, Artificial
  Probe
atctcctaaaagatatctaatggtg

SEQ ID NO: 208459 - DNA, 25 bp, Artificial
  Probe
acaagcggagtgttctgtataagca

SEQ ID NO: 208460 - DNA, 25 bp, Artificial
  Probe
gttagaaaccttagacaaagaagca

SEQ ID NO: 208461 - DNA, 25 bp, Artificial
  Probe
ttccgtgtgtaagtgaatgagtcac

SEQ ID NO: 208462 - DNA, 25 bp, Artificial
  Probe
ttagctgttttaccatttatccagg

SEQ ID NO: 208463 - DNA, 25 bp, Artificial
  Probe
agtgaatgagtcacctgcatttttc

SEQ ID NO: 208464 - DNA, 25 bp, Artificial
  Probe
tgctcccagatggaaacaaatgtta

SEQ ID NO: 208465 - DNA, 25 bp, Artificial
  Probe
atctgctcccagatggaaacaaatg

SEQ ID NO: 208466 - DNA, 25 bp, Artificial
  Probe
gcagtccattagcatctgctcccag

SEQ ID NO: 208467 - DNA, 25 bp, Artificial
  Probe
caagcggagtgttctgtataagcag

SEQ ID NO: 208468 - DNA, 25 bp, Artificial
  Probe
ataagcttaacaagcggagtgttct

SEQ ID NO: 208469 - DNA, 25 bp, Artificial
  Probe
cagcactgtttcaggctaatcttcg

SEQ ID NO: 208470 - DNA, 25 bp, Artificial
  Probe
tatccagggtttgacacgttagaaa

SEQ ID NO: 208471 - DNA, 25 bp, Artificial
  Probe
aatcagcatcgcagtccattagcat

SEQ ID NO: 208472 - DNA, 25 bp, Artificial
  Probe
attagcatctgctcccagatggaaa

SEQ ID NO: 208473 - DNA, 25 bp, Artificial
  Probe
agtgattttgccatctcctaaaaga

SEQ ID NO: 208474 - DNA, 25 bp, Artificial
  Probe
ggaaagaactgttccacactggttg

SEQ ID NO: 208475 - DNA, 25 bp, Artificial
  Probe
ctcccagatggaaacaaatgttaac

SEQ ID NO: 208476 - DNA, 25 bp, Artificial
  Probe
ggactaccatctaactagcatgtac

SEQ ID NO: 208477 - DNA, 25 bp, Artificial
  Probe
tagaaaccttagacaaagaagcatt

SEQ ID NO: 208478 - DNA, 25 bp, Artificial
  Probe
actgtttcaggctaatcttcgaatt

SEQ ID NO: 208479 - DNA, 25 bp, Artificial
  Probe
gtgattttgccatctcctaaaagat

SEQ ID NO: 208480 - DNA, 25 bp, Artificial
  Probe
gaatgagtcacctgcatttttcatt

SEQ ID NO: 208481 - DNA, 25 bp, Artificial
  Probe
atttatccagggtttgacacgttag

SEQ ID NO: 208482 - DNA, 25 bp, Artificial
  Probe
cattagcatctgctcccagatggaa

SEQ ID NO: 208483 - DNA, 25 bp, Artificial
  Probe
ggtttgatttaatctgcccaatcat

SEQ ID NO: 208484 - DNA, 25 bp, Artificial
  Probe
caaatgttaacagcactgtttcagg

SEQ ID NO: 208485 - DNA, 25 bp, Artificial
  Probe
ctaatggtggactaccatctaacta

SEQ ID NO: 208486 - DNA, 25 bp, Artificial
  Probe
gaaagaactgttccacactggttgg

SEQ ID NO: 208487 - DNA, 25 bp, Artificial
  Probe
aagtaatcagcatcgcagtccatta

SEQ ID NO: 208488 - DNA, 25 bp, Artificial
  Probe
atttgtagtacactgacttgttttc

SEQ ID NO: 208489 - DNA, 25 bp, Artificial
  Probe
tttgacacgttagaaaccttagaca

SEQ ID NO: 208490 - DNA, 25 bp, Artificial
  Probe
atatctaatggtggactaccatcta

SEQ ID NO: 208491 - DNA, 25 bp, Artificial
  Probe
aggacacactgaccaaaatatgcaa

SEQ ID NO: 208492 - DNA, 25 bp, Artificial
  Probe
agacttgtttcctagaagcatcctt

SEQ ID NO: 208493 - DNA, 25 bp, Artificial
  Probe
cagcattccaagcagacttgtttcc

SEQ ID NO: 208494 - DNA, 25 bp, Artificial
  Probe
gcttggtttacaccagagtcttgca

SEQ ID NO: 208495 - DNA, 25 bp, Artificial
  Probe
ttacaccagagtcttgcacagcatt

SEQ ID NO: 208496 - DNA, 25 bp, Artificial
  Probe
acccagcattccaagcagacttgtt

SEQ ID NO: 208497 - DNA, 25 bp, Artificial
  Probe
ttgcacagcattggtatcgcaaacc

SEQ ID NO: 208498 - DNA, 25 bp, Artificial
  Probe
cccagcattccaagcagacttgttt

SEQ ID NO: 208499 - DNA, 25 bp, Artificial
  Probe
ccagagtcttgcacagcattggtat

SEQ ID NO: 208500 - DNA, 25 bp, Artificial
  Probe
tacaccagagtcttgcacagcattg

SEQ ID NO: 208501 - DNA, 25 bp, Artificial
  Probe
cacccagcattccaagcagacttgt

SEQ ID NO: 208502 - DNA, 25 bp, Artificial
  Probe
tccaagcagacttgtttcctagaag

SEQ ID NO: 208503 - DNA, 25 bp, Artificial
  Probe
ttggtttacaccagagtcttgcaca

SEQ ID NO: 208504 - DNA, 25 bp, Artificial
  Probe
gtcttgcacagcattggtatcgcaa

SEQ ID NO: 208505 - DNA, 25 bp, Artificial
  Probe
tgaggcctcctcgtagggacctgga

SEQ ID NO: 208506 - DNA, 25 bp, Artificial
  Probe
cttgcacagcattggtatcgcaaac

SEQ ID NO: 208507 - DNA, 25 bp, Artificial
  Probe
tttggggcttggtttacaccagagt

SEQ ID NO: 208508 - DNA, 25 bp, Artificial
  Probe
cattccaagcagacttgtttcctag

SEQ ID NO: 208509 - DNA, 25 bp, Artificial
  Probe
aggcctcctcgtagggacctggata

SEQ ID NO: 208510 - DNA, 25 bp, Artificial
  Probe
gagtcttgcacagcattggtatcgc

SEQ ID NO: 208511 - DNA, 25 bp, Artificial
  Probe
ggcttggtttacaccagagtcttgc

SEQ ID NO: 208512 - DNA, 25 bp, Artificial
  Probe
agagtcttgcacagcattggtatcg

SEQ ID NO: 208513 - DNA, 25 bp, Artificial
  Probe
tggggcttggtttacaccagagtct

SEQ ID NO: 208514 - DNA, 25 bp, Artificial
  Probe
agcagacttgtttcctagaagcatc

SEQ ID NO: 208515 - DNA, 25 bp, Artificial
  Probe
ccaagcagacttgtttcctagaagc

SEQ ID NO: 208516 - DNA, 25 bp, Artificial
  Probe
ggacacactgaccaaaatatgcaac

SEQ ID NO: 208517 - DNA, 25 bp, Artificial
  Probe
cagacttgtttcctagaagcatcct

SEQ ID NO: 208518 - DNA, 25 bp, Artificial
  Probe
tcttgcacagcattggtatcgcaaa

SEQ ID NO: 208519 - DNA, 25 bp, Artificial
  Probe
gcagacttgtttcctagaagcatcc

SEQ ID NO: 208520 - DNA, 25 bp, Artificial
  Probe
gcattccaagcagacttgtttccta

SEQ ID NO: 208521 - DNA, 25 bp, Artificial
  Probe
cttggtttacaccagagtcttgcac

SEQ ID NO: 208522 - DNA, 25 bp, Artificial
  Probe
gacttgtttcctagaagcatccttc

SEQ ID NO: 208523 - DNA, 25 bp, Artificial
  Probe
ttggggcttggtttacaccagagtc

SEQ ID NO: 208524 - DNA, 25 bp, Artificial
  Probe
agtcttgcacagcattggtatcgca

SEQ ID NO: 208525 - DNA, 25 bp, Artificial
  Probe
taggacacactgaccaaaatatgca

SEQ ID NO: 208526 - DNA, 25 bp, Artificial
  Probe
acaccagagtcttgcacagcattgg

SEQ ID NO: 208527 - DNA, 25 bp, Artificial
  Probe
tggtttacaccagagtcttgcacag

SEQ ID NO: 208528 - DNA, 25 bp, Artificial
  Probe
tgcacagcattggtatcgcaaaccc

SEQ ID NO: 208529 - DNA, 25 bp, Artificial
  Probe
gggcttggtttacaccagagtcttg

SEQ ID NO: 208530 - DNA, 25 bp, Artificial
  Probe
caccagagtcttgcacagcattggt

SEQ ID NO: 208531 - DNA, 25 bp, Artificial
  Probe
gtttacaccagagtcttgcacagca

SEQ ID NO: 208532 - DNA, 25 bp, Artificial
  Probe
accagagtcttgcacagcattggta

SEQ ID NO: 208533 - DNA, 25 bp, Artificial
  Probe
ggggcttggtttacaccagagtctt

SEQ ID NO: 208534 - DNA, 25 bp, Artificial
  Probe
attccaagcagacttgtttcctaga

SEQ ID NO: 208535 - DNA, 25 bp, Artificial
  Probe
caagcagacttgtttcctagaagca

SEQ ID NO: 208536 - DNA, 25 bp, Artificial
  Probe
aagcagacttgtttcctagaagcat

SEQ ID NO: 208537 - DNA, 25 bp, Artificial
  Probe
aacctggggacagctctgtggctgt

SEQ ID NO: 208538 - DNA, 25 bp, Artificial
  Probe
aagcccctggatggataggccacca

SEQ ID NO: 208539 - DNA, 25 bp, Artificial
  Probe
gcccctggatggataggccaccagc

SEQ ID NO: 208540 - DNA, 25 bp, Artificial
  Probe
cttttcagatttccagtgggcctca

SEQ ID NO: 208541 - DNA, 25 bp, Artificial
  Probe
tcttgtaaacctggggacagctctg

SEQ ID NO: 208542 - DNA, 25 bp, Artificial
  Probe
tttcttgtaaacctggggacagctc

SEQ ID NO: 208543 - DNA, 25 bp, Artificial
  Probe
ggttatatcttgaagcccctggatg

SEQ ID NO: 208544 - DNA, 25 bp, Artificial
  Probe
cttgaagcccctggatggataggcc

SEQ ID NO: 208545 - DNA, 25 bp, Artificial
  Probe
ttcagatttccagtgggcctcagtt

SEQ ID NO: 208546 - DNA, 25 bp, Artificial
  Probe
gtgggcctcagtttgatccagaagg

SEQ ID NO: 208547 - DNA, 25 bp, Artificial
  Probe
tttcagatttccagtgggcctcagt

SEQ ID NO: 208548 - DNA, 25 bp, Artificial
  Probe
atttgaccgtataaatggataaggg

SEQ ID NO: 208549 - DNA, 25 bp, Artificial
  Probe
tcttgaagcccctggatggataggc

SEQ ID NO: 208550 - DNA, 25 bp, Artificial
  Probe
cagaaaacaacatttgaccgtataa

SEQ ID NO: 208551 - DNA, 25 bp, Artificial
  Probe
tggttatatcttgaagcccctggat

SEQ ID NO: 208552 - DNA, 25 bp, Artificial
  Probe
aacgtggttatatcttgaagcccct

SEQ ID NO: 208553 - DNA, 25 bp, Artificial
  Probe
tcagatttccagtgggcctcagttt

SEQ ID NO: 208554 - DNA, 25 bp, Artificial
  Probe
ctttcttgtaaacctggggacagct

SEQ ID NO: 208555 - DNA, 25 bp, Artificial
  Probe
gttatatcttgaagcccctggatgg

SEQ ID NO: 208556 - DNA, 25 bp, Artificial
  Probe
acctggggacagctctgtggctgtt

SEQ ID NO: 208557 - DNA, 25 bp, Artificial
  Probe
ttgaagcccctggatggataggcca

SEQ ID NO: 208558 - DNA, 25 bp, Artificial
  Probe
cagtgggcctcagtttgatccagaa

SEQ ID NO: 208559 - DNA, 25 bp, Artificial
  Probe
tccagtgggcctcagtttgatccag

SEQ ID NO: 208560 - DNA, 25 bp, Artificial
  Probe
ttcttttcagatttccagtgggcct

SEQ ID NO: 208561 - DNA, 25 bp, Artificial
  Probe
agcccctggatggataggccaccag

SEQ ID NO: 208562 - DNA, 25 bp, Artificial
  Probe
gcctcagtttgatccagaaggagga

SEQ ID NO: 208563 - DNA, 25 bp, Artificial
  Probe
ttatatcttgaagcccctggatgga

SEQ ID NO: 208564 - DNA, 25 bp, Artificial
  Probe
ccagtgggcctcagtttgatccaga

SEQ ID NO: 208565 - DNA, 25 bp, Artificial
  Probe
gggcctcagtttgatccagaaggag

SEQ ID NO: 208566 - DNA, 25 bp, Artificial
  Probe
tcttttcagatttccagtgggcctc

SEQ ID NO: 208567 - DNA, 25 bp, Artificial
  Probe
tgggcctcagtttgatccagaagga

SEQ ID NO: 208568 - DNA, 25 bp, Artificial
  Probe
gaagcccctggatggataggccacc

SEQ ID NO: 208569 - DNA, 25 bp, Artificial
  Probe
ggcctcagtttgatccagaaggagg

SEQ ID NO: 208570 - DNA, 25 bp, Artificial
  Probe
gtaaacctggggacagctctgtggc

SEQ ID NO: 208571 - DNA, 25 bp, Artificial
  Probe
ctcagtttgatccagaaggaggaga

SEQ ID NO: 208572 - DNA, 25 bp, Artificial
  Probe
aaacctggggacagctctgtggctg

SEQ ID NO: 208573 - DNA, 25 bp, Artificial
  Probe
ttcttgtaaacctggggacagctct

SEQ ID NO: 208574 - DNA, 25 bp, Artificial
  Probe
gtttttatacacagagttatcagac

SEQ ID NO: 208575 - DNA, 25 bp, Artificial
  Probe
tgaagcccctggatggataggccac

SEQ ID NO: 208576 - DNA, 25 bp, Artificial
  Probe
cagctctgtggctgttggagtttag

SEQ ID NO: 208577 - DNA, 25 bp, Artificial
  Probe
ttttcagatttccagtgggcctcag

SEQ ID NO: 208578 - DNA, 25 bp, Artificial
  Probe
ttccagtgggcctcagtttgatcca

SEQ ID NO: 208579 - DNA, 25 bp, Artificial
  Probe
taaacctggggacagctctgtggct

SEQ ID NO: 208580 - DNA, 25 bp, Artificial
  Probe
atcttgaagcccctggatggatagg

SEQ ID NO: 208581 - DNA, 25 bp, Artificial
  Probe
atccagaaggaggagatgggctctg

SEQ ID NO: 208582 - DNA, 25 bp, Artificial
  Probe
agtgggcctcagtttgatccagaag

SEQ ID NO: 208583 - DNA, 25 bp, Artificial
  Probe
actggttcacgcaccggctccaggg

SEQ ID NO: 208584 - DNA, 25 bp, Artificial
  Probe
gcttctccccagtgtatacctgaat

SEQ ID NO: 208585 - DNA, 25 bp, Artificial
  Probe
ctcagggccttcagcctctcttggg

SEQ ID NO: 208586 - DNA, 25 bp, Artificial
  Probe
cctcccaagcggtgcctaaaatcta

SEQ ID NO: 208587 - DNA, 25 bp, Artificial
  Probe
ggccctgagtctgcagtggcctgat

SEQ ID NO: 208588 - DNA, 25 bp, Artificial
  Probe
aaccccactggatgtctacctgctg

SEQ ID NO: 208589 - DNA, 25 bp, Artificial
  Probe
catttaaaggtgtcttcctcccaag

SEQ ID NO: 208590 - DNA, 25 bp, Artificial
  Probe
tgagccagctgcttctccccagtgt

SEQ ID NO: 208591 - DNA, 25 bp, Artificial
  Probe
agacctgagcctctgcttcagcctt

SEQ ID NO: 208592 - DNA, 25 bp, Artificial
  Probe
atatatatgcgatgtccagacagcc

SEQ ID NO: 208593 - DNA, 25 bp, Artificial
  Probe
ctggctcctgcagctgccattggag

SEQ ID NO: 208594 - DNA, 25 bp, Artificial
  Probe
tccccatgggaagataaggcctggt

SEQ ID NO: 208595 - DNA, 25 bp, Artificial
  Probe
ctgagtctgcagtggcctgatcccc

SEQ ID NO: 208596 - DNA, 25 bp, Artificial
  Probe
gctctggcttctccatgaccttttc

SEQ ID NO: 208597 - DNA, 25 bp, Artificial
  Probe
caagcggtgcctaaaatctaaccaa

SEQ ID NO: 208598 - DNA, 25 bp, Artificial
  Probe
tgtcttcctcccaagcggtgcctaa

SEQ ID NO: 208599 - DNA, 25 bp, Artificial
  Probe
tccccttgtaagtgccttctgtgtc

SEQ ID NO: 208600 - DNA, 25 bp, Artificial
  Probe
ccactggatgtctacctgctggtcc

SEQ ID NO: 208601 - DNA, 25 bp, Artificial
  Probe
cctgaatattcagtgggttttgctg

SEQ ID NO: 208602 - DNA, 25 bp, Artificial
  Probe
agaatccagagctgggcactcagcc

SEQ ID NO: 208603 - DNA, 25 bp, Artificial
  Probe
tcctgggaggattgccatctgggaa

SEQ ID NO: 208604 - DNA, 25 bp, Artificial
  Probe
tgtgagcagacagctgttgagtctc

SEQ ID NO: 208605 - DNA, 25 bp, Artificial
  Probe
atgtcgccaggctccccgtggaggc

SEQ ID NO: 208606 - DNA, 25 bp, Artificial
  Probe
aggattgccatctgggaaaggcccc

SEQ ID NO: 208607 - DNA, 25 bp, Artificial
  Probe
cggctcccgtcgtggcagctttgat

SEQ ID NO: 208608 - DNA, 25 bp, Artificial
  Probe
cagcctgtgtcttgggaaacagggc

SEQ ID NO: 208609 - DNA, 25 bp, Artificial
  Probe
gtcctgtgagcagacagctgttgag

SEQ ID NO: 208610 - DNA, 25 bp, Artificial
  Probe
atacttattcccttgagacctgagc

SEQ ID NO: 208611 - DNA, 25 bp, Artificial
  Probe
tacagcccgtacagtgtcagtggct

SEQ ID NO: 208612 - DNA, 25 bp, Artificial
  Probe
tatggccgccgctatgcctcagggc

SEQ ID NO: 208613 - DNA, 25 bp, Artificial
  Probe
ttcagcctctcttgggggccctgag

SEQ ID NO: 208614 - DNA, 25 bp, Artificial
  Probe
actactcctgtctctcctgggagga

SEQ ID NO: 208615 - DNA, 25 bp, Artificial
  Probe
tacctgaatattcagtgggttttgc

SEQ ID NO: 208616 - DNA, 25 bp, Artificial
  Probe
gataaggcctggtcctggccccagc

SEQ ID NO: 208617 - DNA, 25 bp, Artificial
  Probe
gcctggctcctgcagctgccattgg

SEQ ID NO: 208618 - DNA, 25 bp, Artificial
  Probe
ttcctcaggctatggccgccgctat

SEQ ID NO: 208619 - DNA, 25 bp, Artificial
  Probe
gggccttcagcctctcttgggggcc

SEQ ID NO: 208620 - DNA, 25 bp, Artificial
  Probe
ttccccatgggaagataaggcctgg

SEQ ID NO: 208621 - DNA, 25 bp, Artificial
  Probe
cactcaccacagctaggtgccttgg

SEQ ID NO: 208622 - DNA, 25 bp, Artificial
  Probe
ccccagtgtatacctgaatattcag

SEQ ID NO: 208623 - DNA, 25 bp, Artificial
  Probe
gaagataaggcctggtcctggcccc

SEQ ID NO: 208624 - DNA, 25 bp, Artificial
  Probe
tgtcttgggaaacagggctggccca

SEQ ID NO: 208625 - DNA, 25 bp, Artificial
  Probe
cgatgtccagacagcctgtgtcttg

SEQ ID NO: 208626 - DNA, 25 bp, Artificial
  Probe
gttcacgcactggttcacgcaccgg

SEQ ID NO: 208627 - DNA, 25 bp, Artificial
  Probe
gaggattgccatctgggaaaggccc

SEQ ID NO: 208628 - DNA, 25 bp, Artificial
  Probe
ccagtgtatacctgaatattcagtg

SEQ ID NO: 208629 - DNA, 25 bp, Artificial
  Probe
gatcaggcctgaacccgtccattca

SEQ ID NO: 208630 - DNA, 25 bp, Artificial
  Probe
ttacagttggatcaggcctgaaccc

SEQ ID NO: 208631 - DNA, 25 bp, Artificial
  Probe
ctgtgattccttcctaaagccaaag

SEQ ID NO: 208632 - DNA, 25 bp, Artificial
  Probe
tttacagttggatcaggcctgaacc

SEQ ID NO: 208633 - DNA, 25 bp, Artificial
  Probe
tatacgagtgatcgataatgctttc

SEQ ID NO: 208634 - DNA, 25 bp, Artificial
  Probe
gtctgtgattccttcctaaagccaa

SEQ ID NO: 208635 - DNA, 25 bp, Artificial
  Probe
ttggatcaggcctgaacccgtccat

SEQ ID NO: 208636 - DNA, 25 bp, Artificial
  Probe
caatgtctgtgattccttcctaaag

SEQ ID NO: 208637 - DNA, 25 bp, Artificial
  Probe
atgtctgtgattccttcctaaagcc

SEQ ID NO: 208638 - DNA, 25 bp, Artificial
  Probe
gtgtacaatgccatgtgctaagaat

SEQ ID NO: 208639 - DNA, 25 bp, Artificial
  Probe
gtacaatgccatgtgctaagaatga

SEQ ID NO: 208640 - DNA, 25 bp, Artificial
  Probe
ggatcaggcctgaacccgtccattc

SEQ ID NO: 208641 - DNA, 25 bp, Artificial
  Probe
aatgccatgtgctaagaatgatttc

SEQ ID NO: 208642 - DNA, 25 bp, Artificial
  Probe
atgccatgtgctaagaatgatttca

SEQ ID NO: 208643 - DNA, 25 bp, Artificial
  Probe
tgccgtgtacaatgccatgtgctaa

SEQ ID NO: 208644 - DNA, 25 bp, Artificial
  Probe
cctgaacccgtccattcagaaagct

SEQ ID NO: 208645 - DNA, 25 bp, Artificial
  Probe
caatgccatgtgctaagaatgattt

SEQ ID NO: 208646 - DNA, 25 bp, Artificial
  Probe
acaatgccatgtgctaagaatgatt

SEQ ID NO: 208647 - DNA, 25 bp, Artificial
  Probe
tgtgattccttcctaaagccaaagt

SEQ ID NO: 208648 - DNA, 25 bp, Artificial
  Probe
gcctgaacccgtccattcagaaagc

SEQ ID NO: 208649 - DNA, 25 bp, Artificial
  Probe
tgtacaatgccatgtgctaagaatg

SEQ ID NO: 208650 - DNA, 25 bp, Artificial
  Probe
tacaatgccatgtgctaagaatgat

SEQ ID NO: 208651 - DNA, 25 bp, Artificial
  Probe
tacagttggatcaggcctgaacccg

SEQ ID NO: 208652 - DNA, 25 bp, Artificial
  Probe
ggcctgaacccgtccattcagaaag

SEQ ID NO: 208653 - DNA, 25 bp, Artificial
  Probe
tgtctgtgattccttcctaaagcca

SEQ ID NO: 208654 - DNA, 25 bp, Artificial
  Probe
atgccgtgtacaatgccatgtgcta

SEQ ID NO: 208655 - DNA, 25 bp, Artificial
  Probe
aatgtctgtgattccttcctaaagc

SEQ ID NO: 208656 - DNA, 25 bp, Artificial
  Probe
gtgattccttcctaaagccaaagtt

SEQ ID NO: 208657 - DNA, 25 bp, Artificial
  Probe
tggatcaggcctgaacccgtccatt

SEQ ID NO: 208658 - DNA, 25 bp, Artificial
  Probe
gggccctaacagacagcagaacagc

SEQ ID NO: 208659 - DNA, 25 bp, Artificial
  Probe
gaagacaccaatagaaacccagggg

SEQ ID NO: 208660 - DNA, 25 bp, Artificial
  Probe
gaacagcgaggcaggcacacacaac

SEQ ID NO: 208661 - DNA, 25 bp, Artificial
  Probe
cgagggccctaacagacagcagaac

SEQ ID NO: 208662 - DNA, 25 bp, Artificial
  Probe
cacgcagagcaggagcggcacgaaa

SEQ ID NO: 208663 - DNA, 25 bp, Artificial
  Probe
acactggggcgcaccgcaagcgcga

SEQ ID NO: 208664 - DNA, 25 bp, Artificial
  Probe
ctttaccaggcgaagacaccaatag

SEQ ID NO: 208665 - DNA, 25 bp, Artificial
  Probe
aatcggcccaatagggagtcgaata

SEQ ID NO: 208666 - DNA, 25 bp, Artificial
  Probe
gcgtacaacagaaggccgaccgatc

SEQ ID NO: 208667 - DNA, 25 bp, Artificial
  Probe
ccagtgcgtacaacagaaggccgac

SEQ ID NO: 208668 - DNA, 25 bp, Artificial
  Probe
ccctatcgccagtgcgtacaacaga

SEQ ID NO: 208669 - DNA, 25 bp, Artificial
  Probe
atgggcagacgcactttaccaggcg

SEQ ID NO: 208670 - DNA, 25 bp, Artificial
  Probe
acggaagccacattgggacgcggtt

SEQ ID NO: 208671 - DNA, 25 bp, Artificial
  Probe
acgcagagcaggagcggcacgaaac

SEQ ID NO: 208672 - DNA, 25 bp, Artificial
  Probe
cagacgcactttaccaggcgaagac

SEQ ID NO: 208673 - DNA, 25 bp, Artificial
  Probe
aactaagcggcctggagacatcccc

SEQ ID NO: 208674 - DNA, 25 bp, Artificial
  Probe
gcaggcacacacaacgcacgcagag

SEQ ID NO: 208675 - DNA, 25 bp, Artificial
  Probe
accgcaagcgcgagggccctaacag

SEQ ID NO: 208676 - DNA, 25 bp, Artificial
  Probe
ggtctgtcaaccaaagggccaggga

SEQ ID NO: 208677 - DNA, 25 bp, Artificial
  Probe
atcgccagtgcgtacaacagaaggc

SEQ ID NO: 208678 - DNA, 25 bp, Artificial
  Probe
acgcactttaccaggcgaagacacc

SEQ ID NO: 208679 - DNA, 25 bp, Artificial
  Probe
gcgaggcaggcacacacaacgcacg

SEQ ID NO: 208680 - DNA, 25 bp, Artificial
  Probe
cctaacagacagcagaacagcgagg

SEQ ID NO: 208681 - DNA, 25 bp, Artificial
  Probe
gatgcccaactaagcggcctggaga

SEQ ID NO: 208682 - DNA, 25 bp, Artificial
  Probe
aacgcacgcagagcaggagcggcac

SEQ ID NO: 208683 - DNA, 25 bp, Artificial
  Probe
agcagaacagcgaggcaggcacaca

SEQ ID NO: 208684 - DNA, 25 bp, Artificial
  Probe
aacagacagcagaacagcgaggcag

SEQ ID NO: 208685 - DNA, 25 bp, Artificial
  Probe
ttaccaggcgaagacaccaatagaa

SEQ ID NO: 208686 - DNA, 25 bp, Artificial
  Probe
agccacattgggacgcggttaatgg

SEQ ID NO: 208687 - DNA, 25 bp, Artificial
  Probe
gttaatgggcagacgcactttacca

SEQ ID NO: 208688 - DNA, 25 bp, Artificial
  Probe
agcgaggcaggcacacacaacgcac

SEQ ID NO: 208689 - DNA, 25 bp, Artificial
  Probe
ggcccaatagggagtcgaataagaa

SEQ ID NO: 208690 - DNA, 25 bp, Artificial
  Probe
tgcgtacaacagaaggccgaccgat

SEQ ID NO: 208691 - DNA, 25 bp, Artificial
  Probe
caggcgaagacaccaatagaaaccc

SEQ ID NO: 208692 - DNA, 25 bp, Artificial
  Probe
ccacagttgccgacgtaggggatgc

SEQ ID NO: 208693 - DNA, 25 bp, Artificial
  Probe
cggagatgcccaactaagcggcctg

SEQ ID NO: 208694 - DNA, 25 bp, Artificial
  Probe
gaggcaggcacacacaacgcacgca

SEQ ID NO: 208695 - DNA, 25 bp, Artificial
  Probe
cacaacgcacgcagagcaggagcgg

SEQ ID NO: 208696 - DNA, 25 bp, Artificial
  Probe
cacacacaacgcacgcagagcagga

SEQ ID NO: 208697 - DNA, 25 bp, Artificial
  Probe
ccaggcgaagacaccaatagaaacc

SEQ ID NO: 208698 - DNA, 25 bp, Artificial
  Probe
cggaagccacattgggacgcggtta

SEQ ID NO: 208699 - DNA, 25 bp, Artificial
  Probe
aggcaggcacacacaacgcacgcag

SEQ ID NO: 208700 - DNA, 25 bp, Artificial
  Probe
agtgcgtacaacagaaggccgaccg

SEQ ID NO: 208701 - DNA, 25 bp, Artificial
  Probe
tctgtcaaccaaagggccagggacc

SEQ ID NO: 208702 - DNA, 25 bp, Artificial
  Probe
ccggagatgcccaactaagcggcct

SEQ ID NO: 208703 - DNA, 25 bp, Artificial
  Probe
gcgcgagggccctaacagacagcag

SEQ ID NO: 208704 - DNA, 25 bp, Artificial
  Probe
ccagctgggtgctgatgatggatta

SEQ ID NO: 208705 - DNA, 25 bp, Artificial
  Probe
tgatgatggattacctgggcaacgc

SEQ ID NO: 208706 - DNA, 25 bp, Artificial
  Probe
atgcagcatctggagcaaactctca

SEQ ID NO: 208707 - DNA, 25 bp, Artificial
  Probe
ggcaagatgcagcatctggagcaaa

SEQ ID NO: 208708 - DNA, 25 bp, Artificial
  Probe
aagatgcagcatctggagcaaactc

SEQ ID NO: 208709 - DNA, 25 bp, Artificial
  Probe
tctcaccaaggatctcatttcccgg

SEQ ID NO: 208710 - DNA, 25 bp, Artificial
  Probe
acgttaatcactgtcctcagaagtc

SEQ ID NO: 208711 - DNA, 25 bp, Artificial
  Probe
attacctgggcaacgccactgccat

SEQ ID NO: 208712 - DNA, 25 bp, Artificial
  Probe
cacgttaatcactgtcctcagaagt

SEQ ID NO: 208713 - DNA, 25 bp, Artificial
  Probe
acacgttaatcactgtcctcagaag

SEQ ID NO: 208714 - DNA, 25 bp, Artificial
  Probe
atggcaagatgcagcatctggagca

SEQ ID NO: 208715 - DNA, 25 bp, Artificial
  Probe
catctggagcaaactctcaccaagg

SEQ ID NO: 208716 - DNA, 25 bp, Artificial
  Probe
ctggagcaaactctcaccaaggatc

SEQ ID NO: 208717 - DNA, 25 bp, Artificial
  Probe
cgttaatcactgtcctcagaagtca

SEQ ID NO: 208718 - DNA, 25 bp, Artificial
  Probe
agcatctggagcaaactctcaccaa

SEQ ID NO: 208719 - DNA, 25 bp, Artificial
  Probe
gcaagatgcagcatctggagcaaac

SEQ ID NO: 208720 - DNA, 25 bp, Artificial
  Probe
cagctgggtgctgatgatggattac

SEQ ID NO: 208721 - DNA, 25 bp, Artificial
  Probe
tctggagcaaactctcaccaaggat

SEQ ID NO: 208722 - DNA, 25 bp, Artificial
  Probe
gcatctggagcaaactctcaccaag

SEQ ID NO: 208723 - DNA, 25 bp, Artificial
  Probe
tggcaagatgcagcatctggagcaa

SEQ ID NO: 208724 - DNA, 25 bp, Artificial
  Probe
ctcaccaaggatctcatttcccggt

SEQ ID NO: 208725 - DNA, 25 bp, Artificial
  Probe
gcagcatctggagcaaactctcacc

SEQ ID NO: 208726 - DNA, 25 bp, Artificial
  Probe
gatgcagcatctggagcaaactctc

SEQ ID NO: 208727 - DNA, 25 bp, Artificial
  Probe
gagcaaactctcaccaaggatctca

SEQ ID NO: 208728 - DNA, 25 bp, Artificial
  Probe
ggagcaaactctcaccaaggatctc

SEQ ID NO: 208729 - DNA, 25 bp, Artificial
  Probe
tgcagcatctggagcaaactctcac

SEQ ID NO: 208730 - DNA, 25 bp, Artificial
  Probe
atctggagcaaactctcaccaagga

SEQ ID NO: 208731 - DNA, 25 bp, Artificial
  Probe
ctgatgatggattacctgggcaacg

SEQ ID NO: 208732 - DNA, 25 bp, Artificial
  Probe
gattacctgggcaacgccactgcca

SEQ ID NO: 208733 - DNA, 25 bp, Artificial
  Probe
agctgggtgctgatgatggattacc

SEQ ID NO: 208734 - DNA, 25 bp, Artificial
  Probe
caccaaggatctcatttcccggttc

SEQ ID NO: 208735 - DNA, 25 bp, Artificial
  Probe
tcaccaaggatctcatttcccggtt

SEQ ID NO: 208736 - DNA, 25 bp, Artificial
  Probe
tggagcaaactctcaccaaggatct

SEQ ID NO: 208737 - DNA, 25 bp, Artificial
  Probe
tccagctgggtgctgatgatggatt

SEQ ID NO: 208738 - DNA, 25 bp, Artificial
  Probe
tgaagcttagccaggctgtgcataa

SEQ ID NO: 208739 - DNA, 25 bp, Artificial
  Probe
agatgcagcatctggagcaaactct

SEQ ID NO: 208740 - DNA, 25 bp, Artificial
  Probe
atgatggattacctgggcaacgcca

SEQ ID NO: 208741 - DNA, 25 bp, Artificial
  Probe
cagcatctggagcaaactctcacca

SEQ ID NO: 208742 - DNA, 25 bp, Artificial
  Probe
tgatggattacctgggcaacgccac

SEQ ID NO: 208743 - DNA, 25 bp, Artificial
  Probe
gtccatctctggaacctataacttg

SEQ ID NO: 208744 - DNA, 25 bp, Artificial
  Probe
caagatgcagcatctggagcaaact

SEQ ID NO: 208745 - DNA, 25 bp, Artificial
  Probe
gttaatcactgtcctcagaagtcac

SEQ ID NO: 208746 - DNA, 25 bp, Artificial
  Probe
cctggatcaaggttcgccggcgtga

SEQ ID NO: 208747 - DNA, 25 bp, Artificial
  Probe
cgagttcaagaacatctttggcacg

SEQ ID NO: 208748 - DNA, 25 bp, Artificial
  Probe
gagtacgcggccaagttcataaaga

SEQ ID NO: 208749 - DNA, 25 bp, Artificial
  Probe
aggtgagcatcctgcgcgagatccg

SEQ ID NO: 208750 - DNA, 25 bp, Artificial
  Probe
tgtccggcggcgaacttttcgactt

SEQ ID NO: 208751 - DNA, 25 bp, Artificial
  Probe
cgaggtgagcatcctgcgcgagatc

SEQ ID NO: 208752 - DNA, 25 bp, Artificial
  Probe
agtgccagcagaagggcaccggcat

SEQ ID NO: 208753 - DNA, 25 bp, Artificial
  Probe
cggagaacatcatgttgctggacaa

SEQ ID NO: 208754 - DNA, 25 bp, Artificial
  Probe
gagaccaagcaggaaacgctgacaa

SEQ ID NO: 208755 - DNA, 25 bp, Artificial
  Probe
actccaagcgcatcgcgcactttga

SEQ ID NO: 208756 - DNA, 25 bp, Artificial
  Probe
attgtaaactatgaaccacttggct

SEQ ID NO: 208757 - DNA, 25 bp, Artificial
  Probe
ctatgactttgatgaagagtacttc

SEQ ID NO: 208758 - DNA, 25 bp, Artificial
  Probe
tgatatgtggagcatcggcgtcatc

SEQ ID NO: 208759 - DNA, 25 bp, Artificial
  Probe
caagaacatctttggcacgccagag

SEQ ID NO: 208760 - DNA, 25 bp, Artificial
  Probe
gagtcactgacagaggatgaggcca

SEQ ID NO: 208761 - DNA, 25 bp, Artificial
  Probe
atcgcgcacaggatcgaggccggta

SEQ ID NO: 208762 - DNA, 25 bp, Artificial
  Probe
agctgatatgtggagcatcggcgtc

SEQ ID NO: 208763 - DNA, 25 bp, Artificial
  Probe
tggacggtgtccactacctgcactc

SEQ ID NO: 208764 - DNA, 25 bp, Artificial
  Probe
agatcgagcgcgaggtgagcatcct

SEQ ID NO: 208765 - DNA, 25 bp, Artificial
  Probe
ctttggcacgccagagttcgtcgcc

SEQ ID NO: 208766 - DNA, 25 bp, Artificial
  Probe
agcccacgcattaagctcatcgact

SEQ ID NO: 208767 - DNA, 25 bp, Artificial
  Probe
gaggatgaggccacgcagttcctca

SEQ ID NO: 208768 - DNA, 25 bp, Artificial
  Probe
acaagacagatgtggtgctgatctt

SEQ ID NO: 208769 - DNA, 25 bp, Artificial
  Probe
catcatcacgctgcacgatgtgttc

SEQ ID NO: 208770 - DNA, 25 bp, Artificial
  Probe
atcgagcgcgaggtgagcatcctgc

SEQ ID NO: 208771 - DNA, 25 bp, Artificial
  Probe
aagcatgcagccagcccacgcatta

SEQ ID NO: 208772 - DNA, 25 bp, Artificial
  Probe
gaagccagagcgacgccgactgcgc

SEQ ID NO: 208773 - DNA, 25 bp, Artificial
  Probe
tcactgacagaggatgaggccacgc

SEQ ID NO: 208774 - DNA, 25 bp, Artificial
  Probe
aggaggatgaccatcgcacagagcc

SEQ ID NO: 208775 - DNA, 25 bp, Artificial
  Probe
caggaaacgctgacaaacatctcgg

SEQ ID NO: 208776 - DNA, 25 bp, Artificial
  Probe
gcaccggcatggagtacgcggccaa

SEQ ID NO: 208777 - DNA, 25 bp, Artificial
  Probe
atcgaggccggtagcgagttcaaga

SEQ ID NO: 208778 - DNA, 25 bp, Artificial
  Probe
cagatgtggtgctgatcttggagct

SEQ ID NO: 208779 - DNA, 25 bp, Artificial
  Probe
gcccctgagattgtaaactatgaac

SEQ ID NO: 208780 - DNA, 25 bp, Artificial
  Probe
gcgcactttgacctgaagccggaga

SEQ ID NO: 208781 - DNA, 25 bp, Artificial
  Probe
ccacttggcttggaagctgatatgt

SEQ ID NO: 208782 - DNA, 25 bp, Artificial
  Probe
tgctggtcaaagatcccaagaggag

SEQ ID NO: 208783 - DNA, 25 bp, Artificial
  Probe
ttctggctgagaaggagtcactgac

SEQ ID NO: 208784 - DNA, 25 bp, Artificial
  Probe
acgatgtgttcgagaacaagacaga

SEQ ID NO: 208785 - DNA, 25 bp, Artificial
  Probe
atcccaagaggaggatgaccatcgc

SEQ ID NO: 208786 - DNA, 25 bp, Artificial
  Probe
ggccggtagcgagttcaagaacatc

SEQ ID NO: 208787 - DNA, 25 bp, Artificial
  Probe
gtctcaagtcgcactcaagcatgcc

SEQ ID NO: 208788 - DNA, 25 bp, Artificial
  Probe
ccggcatggagtacgcggccaagtt

SEQ ID NO: 208789 - DNA, 25 bp, Artificial
  Probe
cgcggccaagttcataaagaagcgg

SEQ ID NO: 208790 - DNA, 25 bp, Artificial
  Probe
acgctgacaaacatctcggctgtga

SEQ ID NO: 208791 - DNA, 25 bp, Artificial
  Probe
atgaagagtacttcagcagcaccag

SEQ ID NO: 208792 - DNA, 25 bp, Artificial
  Probe
attctacgtggagctagaggccaac

SEQ ID NO: 208793 - DNA, 25 bp, Artificial
  Probe
cacataccagctggagtgccggggt

SEQ ID NO: 208794 - DNA, 25 bp, Artificial
  Probe
tcgccatgaagctgatggaccaaat

SEQ ID NO: 208795 - DNA, 25 bp, Artificial
  Probe
ccatgggcagatagggcctgtgccc

SEQ ID NO: 208796 - DNA, 25 bp, Artificial
  Probe
gtgcctgaccgcatccaggttacta

SEQ ID NO: 208797 - DNA, 25 bp, Artificial
  Probe
ctcaacgactccacctatgacaagg

SEQ ID NO: 208798 - DNA, 25 bp, Artificial
  Probe
cactggggtgcctgaccgcatccag

SEQ ID NO: 208799 - DNA, 25 bp, Artificial
  Probe
acttctgcctttgctggtgggcatg

SEQ ID NO: 208800 - DNA, 25 bp, Artificial
  Probe
ctggtaaaatttctacttggactca

SEQ ID NO: 208801 - DNA, 25 bp, Artificial
  Probe
tccatgcacacagacaatgccctgt

SEQ ID NO: 208802 - DNA, 25 bp, Artificial
  Probe
tccaggttactacagatatgtacca

SEQ ID NO: 208803 - DNA, 25 bp, Artificial
  Probe
accgagctgaccaaagatgttgccc

SEQ ID NO: 208804 - DNA, 25 bp, Artificial
  Probe
agacttcgccatgaagctgatggac

SEQ ID NO: 208805 - DNA, 25 bp, Artificial
  Probe
ggcgcttgctgcacaacattctgcc

SEQ ID NO: 208806 - DNA, 25 bp, Artificial
  Probe
ctcttgcagacttcgccatgaagct

SEQ ID NO: 208807 - DNA, 25 bp, Artificial
  Probe
agcgtcctgcgagcaccgagctgac

SEQ ID NO: 208808 - DNA, 25 bp, Artificial
  Probe
ctatgacaaggcaggcaagacccac

SEQ ID NO: 208809 - DNA, 25 bp, Artificial
  Probe
ggccgccaacacataccagctggag

SEQ ID NO: 208810 - DNA, 25 bp, Artificial
  Probe
gggcctgtgcccaggctcacagctg

SEQ ID NO: 208811 - DNA, 25 bp, Artificial
  Probe
aggattgaacagcttctctgtgcac

SEQ ID NO: 208812 - DNA, 25 bp, Artificial
  Probe
actggggtgcctgaccgcatccagg

SEQ ID NO: 208813 - DNA, 25 bp, Artificial
  Probe
tcccctcagttagcagataccagca

SEQ ID NO: 208814 - DNA, 25 bp, Artificial
  Probe
acttggactcagaagcaacttctgc

SEQ ID NO: 208815 - DNA, 25 bp, Artificial
  Probe
aaggcaggcaagacccacatcaagg

SEQ ID NO: 208816 - DNA, 25 bp, Artificial
  Probe
tccactgtggagaggctatgccccc

SEQ ID NO: 208817 - DNA, 25 bp, Artificial
  Probe
ccctgtacgggaaacaggactgttg

SEQ ID NO: 208818 - DNA, 25 bp, Artificial
  Probe
taacattggacctgtagtggctggg

SEQ ID NO: 208819 - DNA, 25 bp, Artificial
  Probe
tgcaccatgggcagatagggcctgt

SEQ ID NO: 208820 - DNA, 25 bp, Artificial
  Probe
ctgcgagcaccgagctgaccaaaga

SEQ ID NO: 208821 - DNA, 25 bp, Artificial
  Probe
ctccgaattctacgtggagctagag

SEQ ID NO: 208822 - DNA, 25 bp, Artificial
  Probe
cagaagactgtagactcgagctgac

SEQ ID NO: 208823 - DNA, 25 bp, Artificial
  Probe
tacatggctgcctctggcctcaacg

SEQ ID NO: 208824 - DNA, 25 bp, Artificial
  Probe
cctaggccagggtgccagcgtcctg

SEQ ID NO: 208825 - DNA, 25 bp, Artificial
  Probe
agatgcggcctgtgccattctctcc

SEQ ID NO: 208826 - DNA, 25 bp, Artificial
  Probe
gaagatcgggcttaacattggacct

SEQ ID NO: 208827 - DNA, 25 bp, Artificial
  Probe
gcagataccagcagcatcctggcct

SEQ ID NO: 208828 - DNA, 25 bp, Artificial
  Probe
acagctgtgctggtaaaatttctac

SEQ ID NO: 208829 - DNA, 25 bp, Artificial
  Probe
tgaacagcttctctgtgcaccatgg

SEQ ID NO: 208830 - DNA, 25 bp, Artificial
  Probe
acatggctgcctctggcctcaacga

SEQ ID NO: 208831 - DNA, 25 bp, Artificial
  Probe
cctccagaggattgaacagcttctc

SEQ ID NO: 208832 - DNA, 25 bp, Artificial
  Probe
ggtgccagcgtcctgcgagcaccga

SEQ ID NO: 208833 - DNA, 25 bp, Artificial
  Probe
gcagatagggcctgtgcccaggctc

SEQ ID NO: 208834 - DNA, 25 bp, Artificial
  Probe
gcaagaggacaccaggcaaggagca

SEQ ID NO: 208835 - DNA, 25 bp, Artificial
  Probe
gggatgtccatggacctcatgggtc

SEQ ID NO: 208836 - DNA, 25 bp, Artificial
  Probe
agcatcctggcctccagaggattga

SEQ ID NO: 208837 - DNA, 25 bp, Artificial
  Probe
agaagcaacttctgcctttgctggt

SEQ ID NO: 208838 - DNA, 25 bp, Artificial
  Probe
atatctgcgtgcaagcgcaggaccg

SEQ ID NO: 208839 - DNA, 25 bp, Artificial
  Probe
agagaagacctctgccgaagtccaa

SEQ ID NO: 208840 - DNA, 25 bp, Artificial
  Probe
gaagtccaatgcaaaggggcgaata

SEQ ID NO: 208841 - DNA, 25 bp, Artificial
  Probe
tgcaagcgcaggaccgctactacaa

SEQ ID NO: 208842 - DNA, 25 bp, Artificial
  Probe
ctgccgaagtccaatgcaaaggggc

SEQ ID NO: 208843 - DNA, 25 bp, Artificial
  Probe
gtgcgttcctcgtagagaagacctc

SEQ ID NO: 208844 - DNA, 25 bp, Artificial
  Probe
caattcatcatgcagcaaatggaca

SEQ ID NO: 208845 - DNA, 25 bp, Artificial
  Probe
gcgcaggaccgctactacaattcat

SEQ ID NO: 208846 - DNA, 25 bp, Artificial
  Probe
cgtagagaagacctctgccgaagtc

SEQ ID NO: 208847 - DNA, 25 bp, Artificial
  Probe
ccgaagtccaatgcaaaggggcgaa

SEQ ID NO: 208848 - DNA, 25 bp, Artificial
  Probe
gttcctcgtagagaagacctctgcc

SEQ ID NO: 208849 - DNA, 25 bp, Artificial
  Probe
acaattcatcatgcagcaaatggac

SEQ ID NO: 208850 - DNA, 25 bp, Artificial
  Probe
ctacaattcatcatgcagcaaatgg

SEQ ID NO: 208851 - DNA, 25 bp, Artificial
  Probe
aaggggcgaatatctgcgtgcaagc

SEQ ID NO: 208852 - DNA, 25 bp, Artificial
  Probe
gaaaggtgcgttcctcgtagagaag

SEQ ID NO: 208853 - DNA, 25 bp, Artificial
  Probe
tcaagttcttcgtccgcatccagcg

SEQ ID NO: 208854 - DNA, 25 bp, Artificial
  Probe
cgaatatctgcgtgcaagcgcagga

SEQ ID NO: 208855 - DNA, 25 bp, Artificial
  Probe
cctcgtagagaagacctctgccgaa

SEQ ID NO: 208856 - DNA, 25 bp, Artificial
  Probe
atggacatgtgtaccctgcaggggc

SEQ ID NO: 208857 - DNA, 25 bp, Artificial
  Probe
aggaccgctactacaattcatcatg

SEQ ID NO: 208858 - DNA, 25 bp, Artificial
  Probe
agtgtaaccagaaaggtgcgttcct

SEQ ID NO: 208859 - DNA, 25 bp, Artificial
  Probe
agtccaatgcaaaggggcgaatatc

SEQ ID NO: 208860 - DNA, 25 bp, Artificial
  Probe
aaatggacatgtgtaccctgcaggg

SEQ ID NO: 208861 - DNA, 25 bp, Artificial
  Probe
cctctgccgaagtccaatgcaaagg

SEQ ID NO: 208862 - DNA, 25 bp, Artificial
  Probe
cagaaaggtgcgttcctcgtagaga

SEQ ID NO: 208863 - DNA, 25 bp, Artificial
  Probe
attcatcatgcagcaaatggacatg

SEQ ID NO: 208864 - DNA, 25 bp, Artificial
  Probe
aatatctgcgtgcaagcgcaggacc

SEQ ID NO: 208865 - DNA, 25 bp, Artificial
  Probe
gcaggaccgctactacaattcatca

SEQ ID NO: 208866 - DNA, 25 bp, Artificial
  Probe
ggaccgctactacaattcatcatgc

SEQ ID NO: 208867 - DNA, 25 bp, Artificial
  Probe
caaatggacatgtgtaccctgcagg

SEQ ID NO: 208868 - DNA, 25 bp, Artificial
  Probe
gaatatctgcgtgcaagcgcaggac

SEQ ID NO: 208869 - DNA, 25 bp, Artificial
  Probe
cttcgtccgcatccagcgcaagaaa

SEQ ID NO: 208870 - DNA, 25 bp, Artificial
  Probe
taaccagaaaggtgcgttcctcgta

SEQ ID NO: 208871 - DNA, 25 bp, Artificial
  Probe
tgtaaccagaaaggtgcgttcctcg

SEQ ID NO: 208872 - DNA, 25 bp, Artificial
  Probe
tcatcatgcagcaaatggacatgtg

SEQ ID NO: 208873 - DNA, 25 bp, Artificial
  Probe
tatctgcgtgcaagcgcaggaccgc

SEQ ID NO: 208874 - DNA, 25 bp, Artificial
  Probe
cgttcctcgtagagaagacctctgc

SEQ ID NO: 208875 - DNA, 25 bp, Artificial
  Probe
acatgtgtaccctgcaggggccgat

SEQ ID NO: 208876 - DNA, 25 bp, Artificial
  Probe
aaggtgcgttcctcgtagagaagac

SEQ ID NO: 208877 - DNA, 25 bp, Artificial
  Probe
gcgtgcaagcgcaggaccgctacta

SEQ ID NO: 208878 - DNA, 25 bp, Artificial
  Probe
atgcagcaaatggacatgtgtaccc

SEQ ID NO: 208879 - DNA, 25 bp, Artificial
  Probe
ctctgccgaagtccaatgcaaaggg

SEQ ID NO: 208880 - DNA, 25 bp, Artificial
  Probe
ctcgtagagaagacctctgccgaag

SEQ ID NO: 208881 - DNA, 25 bp, Artificial
  Probe
tcgtccgcatccagcgcaagaaaga

SEQ ID NO: 208882 - DNA, 25 bp, Artificial
  Probe
aaaggtgcgttcctcgtagagaaga

SEQ ID NO: 208883 - DNA, 25 bp, Artificial
  Probe
ttcttcgtccgcatccagcgcaaga

SEQ ID NO: 208884 - DNA, 25 bp, Artificial
  Probe
gaggccgtggtggaggccggggcgg

SEQ ID NO: 208885 - DNA, 25 bp, Artificial
  Probe
gccgtggtggaggccggggcggctt

SEQ ID NO: 208886 - DNA, 25 bp, Artificial
  Probe
ggaggccgaggtggatttggtggca

SEQ ID NO: 208887 - DNA, 25 bp, Artificial
  Probe
gaccgggagactgggtcctccaaag

SEQ ID NO: 208888 - DNA, 25 bp, Artificial
  Probe
ctgaccgggagactgggtcctccaa

SEQ ID NO: 208889 - DNA, 25 bp, Artificial
  Probe
attaagggagtcattcgacggctct

SEQ ID NO: 208890 - DNA, 25 bp, Artificial
  Probe
aggaggccgaggtggatttggtggc

SEQ ID NO: 208891 - DNA, 25 bp, Artificial
  Probe
cagaggaggccgaggtggatttggt

SEQ ID NO: 208892 - DNA, 25 bp, Artificial
  Probe
cgtggtggaggccggggcggctttg

SEQ ID NO: 208893 - DNA, 25 bp, Artificial
  Probe
ctttggaggccgtggtggaggccgg

SEQ ID NO: 208894 - DNA, 25 bp, Artificial
  Probe
tcactgaccgggagactgggtcctc

SEQ ID NO: 208895 - DNA, 25 bp, Artificial
  Probe
agaggaggccgaggtggatttggtg

SEQ ID NO: 208896 - DNA, 25 bp, Artificial
  Probe
aagggagtcattcgacggctctgtt

SEQ ID NO: 208897 - DNA, 25 bp, Artificial
  Probe
agggagtcattcgacggctctgttc

SEQ ID NO: 208898 - DNA, 25 bp, Artificial
  Probe
ttggaggccgtggtggaggccgggg

SEQ ID NO: 208899 - DNA, 25 bp, Artificial
  Probe
taagggagtcattcgacggctctgt

SEQ ID NO: 208900 - DNA, 25 bp, Artificial
  Probe
ttaagggagtcattcgacggctctg

SEQ ID NO: 208901 - DNA, 25 bp, Artificial
  Probe
agtcactgaccgggagactgggtcc

SEQ ID NO: 208902 - DNA, 25 bp, Artificial
  Probe
gtcactgaccgggagactgggtcct

SEQ ID NO: 208903 - DNA, 25 bp, Artificial
  Probe
gaggaggccgaggtggatttggtgg

SEQ ID NO: 208904 - DNA, 25 bp, Artificial
  Probe
tgaccgggagactgggtcctccaaa

SEQ ID NO: 208905 - DNA, 25 bp, Artificial
  Probe
gatagtcactgaccgggagactggg

SEQ ID NO: 208906 - DNA, 25 bp, Artificial
  Probe
tggaggccgtggtggaggccggggc

SEQ ID NO: 208907 - DNA, 25 bp, Artificial
  Probe
ggaggccgtggtggaggccggggcg

SEQ ID NO: 208908 - DNA, 25 bp, Artificial
  Probe
ggagtcattcgacggctctgttcgg

SEQ ID NO: 208909 - DNA, 25 bp, Artificial
  Probe
gggagtcattcgacggctctgttcg

SEQ ID NO: 208910 - DNA, 25 bp, Artificial
  Probe
tttggaggccgtggtggaggccggg

SEQ ID NO: 208911 - DNA, 25 bp, Artificial
  Probe
ggccgtggtggaggccggggcggct

SEQ ID NO: 208912 - DNA, 25 bp, Artificial
  Probe
gttctcttatccagatgctgaaaca

SEQ ID NO: 208913 - DNA, 25 bp, Artificial
  Probe
ctctgagatttgctttataactctg

SEQ ID NO: 208914 - DNA, 25 bp, Artificial
  Probe
cttgttcctatgaaaggaaatctca

SEQ ID NO: 208915 - DNA, 25 bp, Artificial
  Probe
gaatattaccgactcttgtccccag

SEQ ID NO: 208916 - DNA, 25 bp, Artificial
  Probe
ctcttgtccccagtccttgaagaga

SEQ ID NO: 208917 - DNA, 25 bp, Artificial
  Probe
gttctaagggccacctctgggaata

SEQ ID NO: 208918 - DNA, 25 bp, Artificial
  Probe
agatttgctttataactctgggctt

SEQ ID NO: 208919 - DNA, 25 bp, Artificial
  Probe
gctttataactctgggcttccgctt

SEQ ID NO: 208920 - DNA, 25 bp, Artificial
  Probe
agtttgtggctgtcccagactcccc

SEQ ID NO: 208921 - DNA, 25 bp, Artificial
  Probe
ggtaccgaacggtatccagaaagct

SEQ ID NO: 208922 - DNA, 25 bp, Artificial
  Probe
gaccaagtaactcacattttcaggc

SEQ ID NO: 208923 - DNA, 25 bp, Artificial
  Probe
cattctctacccaagggtctcaacg

SEQ ID NO: 208924 - DNA, 25 bp, Artificial
  Probe
ccaacttggttgttctcttatccag

SEQ ID NO: 208925 - DNA, 25 bp, Artificial
  Probe
ctctgggaatatactctgagatttg

SEQ ID NO: 208926 - DNA, 25 bp, Artificial
  Probe
catcacccttcacagggaccaagta

SEQ ID NO: 208927 - DNA, 25 bp, Artificial
  Probe
ggtgtcctgatggtcaggtccccca

SEQ ID NO: 208928 - DNA, 25 bp, Artificial
  Probe
atccagatgctgaaacattatcccg

SEQ ID NO: 208929 - DNA, 25 bp, Artificial
  Probe
gttcatcattctctacccaagggtc

SEQ ID NO: 208930 - DNA, 25 bp, Artificial
  Probe
ttccgcttctcaactgcagtgggag

SEQ ID NO: 208931 - DNA, 25 bp, Artificial
  Probe
agtaactcacattttcaggccttag

SEQ ID NO: 208932 - DNA, 25 bp, Artificial
  Probe
aggctgcatatagaaaccggacaaa

SEQ ID NO: 208933 - DNA, 25 bp, Artificial
  Probe
agcagcgcagagcagccttgggccc

SEQ ID NO: 208934 - DNA, 25 bp, Artificial
  Probe
cctgtcagtcctgagttcatcattc

SEQ ID NO: 208935 - DNA, 25 bp, Artificial
  Probe
tctcaagcaagcagcgcagagcagc

SEQ ID NO: 208936 - DNA, 25 bp, Artificial
  Probe
ctttgcaccccaacttggttgttct

SEQ ID NO: 208937 - DNA, 25 bp, Artificial
  Probe
actcacattttcaggccttagcttg

SEQ ID NO: 208938 - DNA, 25 bp, Artificial
  Probe
agcaagcagcgcagagcagccttgg

SEQ ID NO: 208939 - DNA, 25 bp, Artificial
  Probe
agccttggtggtgtcctgatggtca

SEQ ID NO: 208940 - DNA, 25 bp, Artificial
  Probe
tcctgtgccctgtcagtcctgagtt

SEQ ID NO: 208941 - DNA, 25 bp, Artificial
  Probe
aggaaatctcaaaagtccaggagac

SEQ ID NO: 208942 - DNA, 25 bp, Artificial
  Probe
ataactctgggcttccgcttctcaa

SEQ ID NO: 208943 - DNA, 25 bp, Artificial
  Probe
tggtgtcctgatggtcaggtccccc

SEQ ID NO: 208944 - DNA, 25 bp, Artificial
  Probe
gggtctcaacgctggcctttgcacc

SEQ ID NO: 208945 - DNA, 25 bp, Artificial
  Probe
gctggcctttgcaccccaacttggt

SEQ ID NO: 208946 - DNA, 25 bp, Artificial
  Probe
taactctgggcttccgcttctcaac

SEQ ID NO: 208947 - DNA, 25 bp, Artificial
  Probe
ccctggtccatctcaggctgcatat

SEQ ID NO: 208948 - DNA, 25 bp, Artificial
  Probe
ctgggcttccgcttctcaactgcag

SEQ ID NO: 208949 - DNA, 25 bp, Artificial
  Probe
cattttcaggccttagcttgttcct

SEQ ID NO: 208950 - DNA, 25 bp, Artificial
  Probe
gcaccccaacttggttgttctctta

SEQ ID NO: 208951 - DNA, 25 bp, Artificial
  Probe
tctacccaagggtctcaacgctggc

SEQ ID NO: 208952 - DNA, 25 bp, Artificial
  Probe
attcctgtgccctgtcagtcctgag

SEQ ID NO: 208953 - DNA, 25 bp, Artificial
  Probe
gtcagtcctgagttcatcattctct

SEQ ID NO: 208954 - DNA, 25 bp, Artificial
  Probe
tgagttcatcattctctacccaagg

SEQ ID NO: 208955 - DNA, 25 bp, Artificial
  Probe
tccatctcaggctgcatatagaaac

SEQ ID NO: 208956 - DNA, 25 bp, Artificial
  Probe
catagattcctgtgccctgtcagtc

SEQ ID NO: 208957 - DNA, 25 bp, Artificial
  Probe
cccatagattcctgtgccctgtcag

SEQ ID NO: 208958 - DNA, 25 bp, Artificial
  Probe
actcagctaggaaatgcaaggagct

SEQ ID NO: 208959 - DNA, 25 bp, Artificial
  Probe
ctaggtctacattcccctgggagag

SEQ ID NO: 208960 - DNA, 25 bp, Artificial
  Probe
tctcttcaggcttggatccatccct

SEQ ID NO: 208961 - DNA, 25 bp, Artificial
  Probe
aggtccacactcagaacccttcatg

SEQ ID NO: 208962 - DNA, 25 bp, Artificial
  Probe
gacgaaggttgctgtgctggtttcc

SEQ ID NO: 208963 - DNA, 25 bp, Artificial
  Probe
gctgcacctaaatttctgaaagccc

SEQ ID NO: 208964 - DNA, 25 bp, Artificial
  Probe
catcactcctcagtctagtctgatg

SEQ ID NO: 208965 - DNA, 25 bp, Artificial
  Probe
acccagcaataatttgtgaaggagt

SEQ ID NO: 208966 - DNA, 25 bp, Artificial
  Probe
ccatgcaacacaggtacccagcaat

SEQ ID NO: 208967 - DNA, 25 bp, Artificial
  Probe
cgggacagtcccaactctccttttg

SEQ ID NO: 208968 - DNA, 25 bp, Artificial
  Probe
agtctagtctgatggcaggacgaag

SEQ ID NO: 208969 - DNA, 25 bp, Artificial
  Probe
cagaacccttcatgggcacagcaca

SEQ ID NO: 208970 - DNA, 25 bp, Artificial
  Probe
gctggtttcccctagccagcctttg

SEQ ID NO: 208971 - DNA, 25 bp, Artificial
  Probe
gaccaccacagctctgaggctcgga

SEQ ID NO: 208972 - DNA, 25 bp, Artificial
  Probe
gggacagtcccaactctccttttgc

SEQ ID NO: 208973 - DNA, 25 bp, Artificial
  Probe
cactcagaacccttcatgggcacag

SEQ ID NO: 208974 - DNA, 25 bp, Artificial
  Probe
gagtaaacatgcatctacccattga

SEQ ID NO: 208975 - DNA, 25 bp, Artificial
  Probe
cttccacgtctttcactcagctagg

SEQ ID NO: 208976 - DNA, 25 bp, Artificial
  Probe
gtcatctcaggctgcacctaaattt

SEQ ID NO: 208977 - DNA, 25 bp, Artificial
  Probe
ttcatgggcacagcacaccaatcca

SEQ ID NO: 208978 - DNA, 25 bp, Artificial
  Probe
gaagaggctagcttctcatcactcc

SEQ ID NO: 208979 - DNA, 25 bp, Artificial
  Probe
gtcactgggccaggtccacactcag

SEQ ID NO: 208980 - DNA, 25 bp, Artificial
  Probe
ggatccatccctgcaggctctggac

SEQ ID NO: 208981 - DNA, 25 bp, Artificial
  Probe
cccaggactaagacataaggaagag

SEQ ID NO: 208982 - DNA, 25 bp, Artificial
  Probe
accaatccatagagcggacatgtct

SEQ ID NO: 208983 - DNA, 25 bp, Artificial
  Probe
ggcttggatccatccctgcaggctc

SEQ ID NO: 208984 - DNA, 25 bp, Artificial
  Probe
gatcctctcttcaggcttggatcca

SEQ ID NO: 208985 - DNA, 25 bp, Artificial
  Probe
acttcctaggtctacattcccctgg

SEQ ID NO: 208986 - DNA, 25 bp, Artificial
  Probe
atccctgcaggctctggacccagga

SEQ ID NO: 208987 - DNA, 25 bp, Artificial
  Probe
tagccagcctttgacacagtccttc

SEQ ID NO: 208988 - DNA, 25 bp, Artificial
  Probe
tccatagagcggacatgtctggagt

SEQ ID NO: 208989 - DNA, 25 bp, Artificial
  Probe
cattcccctgggagagacagaccaa

SEQ ID NO: 208990 - DNA, 25 bp, Artificial
  Probe
actcccaggtctcaggtcatctcag

SEQ ID NO: 208991 - DNA, 25 bp, Artificial
  Probe
agacagcatgaccaccacagctctg

SEQ ID NO: 208992 - DNA, 25 bp, Artificial
  Probe
ctgaggctcggactccacgggacag

SEQ ID NO: 208993 - DNA, 25 bp, Artificial
  Probe
tcagatcccacagagctagctcctt

SEQ ID NO: 208994 - DNA, 25 bp, Artificial
  Probe
acagagctagctccttcccagacag

SEQ ID NO: 208995 - DNA, 25 bp, Artificial
  Probe
ggctagcttctcatcactcctcagt

SEQ ID NO: 208996 - DNA, 25 bp, Artificial
  Probe
actgggccaggtccacactcagaac

SEQ ID NO: 208997 - DNA, 25 bp, Artificial
  Probe
ctagccagcctttgacacagtcctt

SEQ ID NO: 208998 - DNA, 25 bp, Artificial
  Probe
tgctgtgctggtttcccctagccag

SEQ ID NO: 208999 - DNA, 25 bp, Artificial
  Probe
tgtctggagtccttcagcccttcca

SEQ ID NO: 209000 - DNA, 25 bp, Artificial
  Probe
cagctctgaggctcggactccacgg

SEQ ID NO: 209001 - DNA, 25 bp, Artificial
  Probe
agagctagctccttcccagacagca

SEQ ID NO: 209002 - DNA, 25 bp, Artificial
  Probe
cccattgatcctctcttcaggcttg

SEQ ID NO: 209003 - DNA, 25 bp, Artificial
  Probe
gtccacactcagaacccttcatggg

SEQ ID NO: 209004 - DNA, 25 bp, Artificial
  Probe
cccaggcagctgaaaacattaaaaa

SEQ ID NO: 209005 - DNA, 25 bp, Artificial
  Probe
tgtttcccagcatagtcaaggctgc

SEQ ID NO: 209006 - DNA, 25 bp, Artificial
  Probe
gatttgtttcccagcatagtcaagg

SEQ ID NO: 209007 - DNA, 25 bp, Artificial
  Probe
gttacaagtcacagtctgtaggatg

SEQ ID NO: 209008 - DNA, 25 bp, Artificial
  Probe
gtattttgccccaggcagctgaaaa

SEQ ID NO: 209009 - DNA, 25 bp, Artificial
  Probe
tggccaggtttgatttgtttcccag

SEQ ID NO: 209010 - DNA, 25 bp, Artificial
  Probe
gtcacagtctgtaggatgatgtcat

SEQ ID NO: 209011 - DNA, 25 bp, Artificial
  Probe
acatgcacaaagttggccaggtttg

SEQ ID NO: 209012 - DNA, 25 bp, Artificial
  Probe
gggttacaagtcacagtctgtagga

SEQ ID NO: 209013 - DNA, 25 bp, Artificial
  Probe
ggagaaaccagctgagagaacatgg

SEQ ID NO: 209014 - DNA, 25 bp, Artificial
  Probe
tcccagcatagtcaaggctgccctt

SEQ ID NO: 209015 - DNA, 25 bp, Artificial
  Probe
ccagcatagtcaaggctgcccttca

SEQ ID NO: 209016 - DNA, 25 bp, Artificial
  Probe
tcctctctgcacatttataggttgt

SEQ ID NO: 209017 - DNA, 25 bp, Artificial
  Probe
agattcctctctgcacatttatagg

SEQ ID NO: 209018 - DNA, 25 bp, Artificial
  Probe
cacagtctgtaggatgatgtcatta

SEQ ID NO: 209019 - DNA, 25 bp, Artificial
  Probe
aacatggaggcagatgtaagattcc

SEQ ID NO: 209020 - DNA, 25 bp, Artificial
  Probe
atttgtttcccagcatagtcaaggc

SEQ ID NO: 209021 - DNA, 25 bp, Artificial
  Probe
aggtttgatttgtttcccagcatag

SEQ ID NO: 209022 - DNA, 25 bp, Artificial
  Probe
gatgtaagattcctctctgcacatt

SEQ ID NO: 209023 - DNA, 25 bp, Artificial
  Probe
ttcctctctgcacatttataggttg

SEQ ID NO: 209024 - DNA, 25 bp, Artificial
  Probe
gccccaggcagctgaaaacattaaa

SEQ ID NO: 209025 - DNA, 25 bp, Artificial
  Probe
ttgtttcccagcatagtcaaggctg

SEQ ID NO: 209026 - DNA, 25 bp, Artificial
  Probe
ttggccaggtttgatttgtttccca

SEQ ID NO: 209027 - DNA, 25 bp, Artificial
  Probe
tacaagtcacagtctgtaggatgat

SEQ ID NO: 209028 - DNA, 25 bp, Artificial
  Probe
ggattcgtattttgccccaggcagc

SEQ ID NO: 209029 - DNA, 25 bp, Artificial
  Probe
cagccttttcggtcagttatggggt

SEQ ID NO: 209030 - DNA, 25 bp, Artificial
  Probe
ttcccagcatagtcaaggctgccct

SEQ ID NO: 209031 - DNA, 25 bp, Artificial
  Probe
gtttgatttgtttcccagcatagtc

SEQ ID NO: 209032 - DNA, 25 bp, Artificial
  Probe
tttgccccaggcagctgaaaacatt

SEQ ID NO: 209033 - DNA, 25 bp, Artificial
  Probe
cagatgtaagattcctctctgcaca

SEQ ID NO: 209034 - DNA, 25 bp, Artificial
  Probe
caggtttgatttgtttcccagcata

SEQ ID NO: 209035 - DNA, 25 bp, Artificial
  Probe
cttggattcgtattttgccccaggc

SEQ ID NO: 209036 - DNA, 25 bp, Artificial
  Probe
agtcacagtctgtaggatgatgtca

SEQ ID NO: 209037 - DNA, 25 bp, Artificial
  Probe
catgcacaaagttggccaggtttga

SEQ ID NO: 209038 - DNA, 25 bp, Artificial
  Probe
ttgccccaggcagctgaaaacatta

SEQ ID NO: 209039 - DNA, 25 bp, Artificial
  Probe
accttggattcgtattttgccccag

SEQ ID NO: 209040 - DNA, 25 bp, Artificial
  Probe
gattcctctctgcacatttataggt

SEQ ID NO: 209041 - DNA, 25 bp, Artificial
  Probe
ggtttgatttgtttcccagcatagt

SEQ ID NO: 209042 - DNA, 25 bp, Artificial
  Probe
ccccaggcagctgaaaacattaaaa

SEQ ID NO: 209043 - DNA, 25 bp, Artificial
  Probe
gaaaccagctgagagaacatggagg

SEQ ID NO: 209044 - DNA, 25 bp, Artificial
  Probe
tcagttatggggttacaagtcacag

SEQ ID NO: 209045 - DNA, 25 bp, Artificial
  Probe
caagtcacagtctgtaggatgatgt

SEQ ID NO: 209046 - DNA, 25 bp, Artificial
  Probe
catagtcaaggctgcccttcaactc

SEQ ID NO: 209047 - DNA, 25 bp, Artificial
  Probe
agatgtaagattcctctctgcacat

SEQ ID NO: 209048 - DNA, 25 bp, Artificial
  Probe
aggagaaaccagctgagagaacatg

SEQ ID NO: 209049 - DNA, 25 bp, Artificial
  Probe
aaccagctgagagaacatggaggca

SEQ ID NO: 209050 - DNA, 25 bp, Artificial
  Probe
ggcatgttgttcactcccatcttcc

SEQ ID NO: 209051 - DNA, 25 bp, Artificial
  Probe
agcagtgtttgttcaagctctgtaa

SEQ ID NO: 209052 - DNA, 25 bp, Artificial
  Probe
gggaggcaggcactgtcctttcaga

SEQ ID NO: 209053 - DNA, 25 bp, Artificial
  Probe
aagcaagctacagtaagcattgtgc

SEQ ID NO: 209054 - DNA, 25 bp, Artificial
  Probe
cctttgtggatagtatcctttaaat

SEQ ID NO: 209055 - DNA, 25 bp, Artificial
  Probe
atggaaagccacagttcagaagagt

SEQ ID NO: 209056 - DNA, 25 bp, Artificial
  Probe
actcccatcttccacaagggtgcaa

SEQ ID NO: 209057 - DNA, 25 bp, Artificial
  Probe
gtcctttcagaatgtgtacaaattc

SEQ ID NO: 209058 - DNA, 25 bp, Artificial
  Probe
gcaaggagcccacagggctggtcca

SEQ ID NO: 209059 - DNA, 25 bp, Artificial
  Probe
ggaagcagtttctggtgctttccac

SEQ ID NO: 209060 - DNA, 25 bp, Artificial
  Probe
agttgcggttgtttctggagacagc

SEQ ID NO: 209061 - DNA, 25 bp, Artificial
  Probe
tgtgacaatagcaaatccatgaata

SEQ ID NO: 209062 - DNA, 25 bp, Artificial
  Probe
caaatgtgtgcctgatgaattctgt

SEQ ID NO: 209063 - DNA, 25 bp, Artificial
  Probe
ctcctgagagaggacggtaactgga

SEQ ID NO: 209064 - DNA, 25 bp, Artificial
  Probe
tgagtgagtgccacctcaccgcatt

SEQ ID NO: 209065 - DNA, 25 bp, Artificial
  Probe
gtgtgtccactgtcaaatcctttat

SEQ ID NO: 209066 - DNA, 25 bp, Artificial
  Probe
tgagtgccacctcaccgcattgtat

SEQ ID NO: 209067 - DNA, 25 bp, Artificial
  Probe
tatcttaaatcaaatgtgtgcctga

SEQ ID NO: 209068 - DNA, 25 bp, Artificial
  Probe
tccatgaatagttgcggttgtttct

SEQ ID NO: 209069 - DNA, 25 bp, Artificial
  Probe
ctctgtatcttaaatcaaatgtgtg

SEQ ID NO: 209070 - DNA, 25 bp, Artificial
  Probe
tgtcaaatcctttatcattatggtg

SEQ ID NO: 209071 - DNA, 25 bp, Artificial
  Probe
ttgaatcgtgtgagctagcggccac

SEQ ID NO: 209072 - DNA, 25 bp, Artificial
  Probe
atgtgtacaaattcctgagctgcag

SEQ ID NO: 209073 - DNA, 25 bp, Artificial
  Probe
cactgatgtctattatgaaagcagg

SEQ ID NO: 209074 - DNA, 25 bp, Artificial
  Probe
gtttctggagacagcgtaaacatgg

SEQ ID NO: 209075 - DNA, 25 bp, Artificial
  Probe
ctggtccatgactgtgtgttatgag

SEQ ID NO: 209076 - DNA, 25 bp, Artificial
  Probe
tccacaagggtgcaaggagcccaca

SEQ ID NO: 209077 - DNA, 25 bp, Artificial
  Probe
gttaatactctagaacaccgttctg

SEQ ID NO: 209078 - DNA, 25 bp, Artificial
  Probe
acaattcccatgcttccagtctagg

SEQ ID NO: 209079 - DNA, 25 bp, Artificial
  Probe
tattttcctacaattaagaaggctg

SEQ ID NO: 209080 - DNA, 25 bp, Artificial
  Probe
caccagtgtgtgtccactgtcaaat

SEQ ID NO: 209081 - DNA, 25 bp, Artificial
  Probe
atatgtgcttcctgcagggtccttg

SEQ ID NO: 209082 - DNA, 25 bp, Artificial
  Probe
catgtccgtgttagaaaacagaaac

SEQ ID NO: 209083 - DNA, 25 bp, Artificial
  Probe
cattcatgagacagagtacattttg

SEQ ID NO: 209084 - DNA, 25 bp, Artificial
  Probe
cccgtgtctataagggggacatgaa

SEQ ID NO: 209085 - DNA, 25 bp, Artificial
  Probe
gaagagtacccgtgtctataagggg

SEQ ID NO: 209086 - DNA, 25 bp, Artificial
  Probe
aggctgtcctctcacagaataaaat

SEQ ID NO: 209087 - DNA, 25 bp, Artificial
  Probe
ctcaggttggagagaggcagaaaac

SEQ ID NO: 209088 - DNA, 25 bp, Artificial
  Probe
acactacagagctgggtttcgggag

SEQ ID NO: 209089 - DNA, 25 bp, Artificial
  Probe
gcctgatgaattctgtcctctaacc

SEQ ID NO: 209090 - DNA, 25 bp, Artificial
  Probe
tagaaaacagaaacccagtcatcag

SEQ ID NO: 209091 - DNA, 25 bp, Artificial
  Probe
agcgtaaacatggtcacccaactgg

SEQ ID NO: 209092 - DNA, 25 bp, Artificial
  Probe
tgtattatgaacttcttccagatgt

SEQ ID NO: 209093 - DNA, 25 bp, Artificial
  Probe
agggttcctttgtggatagtatcct

SEQ ID NO: 209094 - DNA, 25 bp, Artificial
  Probe
ttccttgcactcacacttctgaagg

SEQ ID NO: 209095 - DNA, 25 bp, Artificial
  Probe
taactggagatgagtgagtgccacc

SEQ ID NO: 209096 - DNA, 25 bp, Artificial
  Probe
cccagaggtccttgggtttgcccag

SEQ ID NO: 209097 - DNA, 25 bp, Artificial
  Probe
gagaattgtctggttcaggcaaatc

SEQ ID NO: 209098 - DNA, 25 bp, Artificial
  Probe
caggggcatcacttctttctgctgt

SEQ ID NO: 209099 - DNA, 25 bp, Artificial
  Probe
gtctttattggctctgggtacctct

SEQ ID NO: 209100 - DNA, 25 bp, Artificial
  Probe
ctgggtacctctatgacctgggagc

SEQ ID NO: 209101 - DNA, 25 bp, Artificial
  Probe
agcccactgctgacacttctgcaat

SEQ ID NO: 209102 - DNA, 25 bp, Artificial
  Probe
caggcaaatcacagagatggagaca

SEQ ID NO: 209103 - DNA, 25 bp, Artificial
  Probe
ctctgggtttctcagcccactgctg

SEQ ID NO: 209104 - DNA, 25 bp, Artificial
  Probe
acctctatgacctgggagcatgggg

SEQ ID NO: 209105 - DNA, 25 bp, Artificial
  Probe
ggctctgggtacctctatgacctgg

SEQ ID NO: 209106 - DNA, 25 bp, Artificial
  Probe
ggtccttgggtttgcccagctctct

SEQ ID NO: 209107 - DNA, 25 bp, Artificial
  Probe
tctggttcaggcaaatcacagagat

SEQ ID NO: 209108 - DNA, 25 bp, Artificial
  Probe
agaattgtctggttcaggcaaatca

SEQ ID NO: 209109 - DNA, 25 bp, Artificial
  Probe
tctctgtgccctctgggtttctcag

SEQ ID NO: 209110 - DNA, 25 bp, Artificial
  Probe
cttcagagaattgtctggttcaggc

SEQ ID NO: 209111 - DNA, 25 bp, Artificial
  Probe
gtacctctatgacctgggagcatgg

SEQ ID NO: 209112 - DNA, 25 bp, Artificial
  Probe
ttgggtttgcccagctctctctgtg

SEQ ID NO: 209113 - DNA, 25 bp, Artificial
  Probe
ctttattggctctgggtacctctat

SEQ ID NO: 209114 - DNA, 25 bp, Artificial
  Probe
ctctgggtacctctatgacctggga

SEQ ID NO: 209115 - DNA, 25 bp, Artificial
  Probe
aggcaaatcacagagatggagacag

SEQ ID NO: 209116 - DNA, 25 bp, Artificial
  Probe
tctgggtacctctatgacctgggag

SEQ ID NO: 209117 - DNA, 25 bp, Artificial
  Probe
tctgggtttctcagcccactgctga

SEQ ID NO: 209118 - DNA, 25 bp, Artificial
  Probe
attggctctgggtacctctatgacc

SEQ ID NO: 209119 - DNA, 25 bp, Artificial
  Probe
ccttggaggaactgcaggggcatca

SEQ ID NO: 209120 - DNA, 25 bp, Artificial
  Probe
tacctctatgacctgggagcatggg

SEQ ID NO: 209121 - DNA, 25 bp, Artificial
  Probe
agtacggtctttattggctctgggt

SEQ ID NO: 209122 - DNA, 25 bp, Artificial
  Probe
tacggtctttattggctctgggtac

SEQ ID NO: 209123 - DNA, 25 bp, Artificial
  Probe
gaggtccttgggtttgcccagctct

SEQ ID NO: 209124 - DNA, 25 bp, Artificial
  Probe
tctttattggctctgggtacctcta

SEQ ID NO: 209125 - DNA, 25 bp, Artificial
  Probe
gcaaatcacagagatggagacaggc

SEQ ID NO: 209126 - DNA, 25 bp, Artificial
  Probe
aggtccttgggtttgcccagctctc

SEQ ID NO: 209127 - DNA, 25 bp, Artificial
  Probe
ctctctgtgccctctgggtttctca

SEQ ID NO: 209128 - DNA, 25 bp, Artificial
  Probe
aattgtctggttcaggcaaatcaca

SEQ ID NO: 209129 - DNA, 25 bp, Artificial
  Probe
aatcacagagatggagacaggcaca

SEQ ID NO: 209130 - DNA, 25 bp, Artificial
  Probe
aactgcaggggcatcacttctttct

SEQ ID NO: 209131 - DNA, 25 bp, Artificial
  Probe
attgtctggttcaggcaaatcacag

SEQ ID NO: 209132 - DNA, 25 bp, Artificial
  Probe
ttcaggcaaatcacagagatggaga

SEQ ID NO: 209133 - DNA, 25 bp, Artificial
  Probe
tatagtacggtctttattggctctg

SEQ ID NO: 209134 - DNA, 25 bp, Artificial
  Probe
gacttcagagaattgtctggttcag

SEQ ID NO: 209135 - DNA, 25 bp, Artificial
  Probe
cagctctctctgtgccctctgggtt

SEQ ID NO: 209136 - DNA, 25 bp, Artificial
  Probe
gggtttgcccagctctctctgtgcc

SEQ ID NO: 209137 - DNA, 25 bp, Artificial
  Probe
tggaggaactgcaggggcatcactt

SEQ ID NO: 209138 - DNA, 25 bp, Artificial
  Probe
gggcatcacttctttctgctgtttc

SEQ ID NO: 209139 - DNA, 25 bp, Artificial
  Probe
ctctgtgccctctgggtttctcagc

SEQ ID NO: 209140 - DNA, 25 bp, Artificial
  Probe
ggcatcacttctttctgctgtttct

SEQ ID NO: 209141 - DNA, 25 bp, Artificial
  Probe
gtttctcagcccactgctgacactt

SEQ ID NO: 209142 - DNA, 25 bp, Artificial
  Probe
cttttcaagctgttgaaggagggtc

SEQ ID NO: 209143 - DNA, 25 bp, Artificial
  Probe
cggattgtggccttgacctccaacc

SEQ ID NO: 209144 - DNA, 25 bp, Artificial
  Probe
ccagcttgcaaatggcggactcaac

SEQ ID NO: 209145 - DNA, 25 bp, Artificial
  Probe
atcgaatggacaagcccagtaactg

SEQ ID NO: 209146 - DNA, 25 bp, Artificial
  Probe
ggactcgccaagctttccggacaca

SEQ ID NO: 209147 - DNA, 25 bp, Artificial
  Probe
gccctctcagagaccaactttcaag

SEQ ID NO: 209148 - DNA, 25 bp, Artificial
  Probe
tggacctgtccatgccactggacca

SEQ ID NO: 209149 - DNA, 25 bp, Artificial
  Probe
caaaccccggcgtgcctgtggaaga

SEQ ID NO: 209150 - DNA, 25 bp, Artificial
  Probe
gtcttctctcatgagccatttcctg

SEQ ID NO: 209151 - DNA, 25 bp, Artificial
  Probe
gctggaacgcagtgccctctcagag

SEQ ID NO: 209152 - DNA, 25 bp, Artificial
  Probe
cgtgcctgtggaagaacttttcaag

SEQ ID NO: 209153 - DNA, 25 bp, Artificial
  Probe
tggaccggattgtggccttgacctc

SEQ ID NO: 209154 - DNA, 25 bp, Artificial
  Probe
attcactctgggtggctcaccaaac

SEQ ID NO: 209155 - DNA, 25 bp, Artificial
  Probe
aacgcagtgccctctcagagaccaa

SEQ ID NO: 209156 - DNA, 25 bp, Artificial
  Probe
caagctgttgaaggagggtcatcga

SEQ ID NO: 209157 - DNA, 25 bp, Artificial
  Probe
ggagatattcactctgggtggctca

SEQ ID NO: 209158 - DNA, 25 bp, Artificial
  Probe
ggacacacggagctctacctgctct

SEQ ID NO: 209159 - DNA, 25 bp, Artificial
  Probe
agatattcactctgggtggctcacc

SEQ ID NO: 209160 - DNA, 25 bp, Artificial
  Probe
gctcgagacattcaccatatcgact

SEQ ID NO: 209161 - DNA, 25 bp, Artificial
  Probe
tgctcttatgggagatattcactct

SEQ ID NO: 209162 - DNA, 25 bp, Artificial
  Probe
acctgaggcattgtttgaccggatc

SEQ ID NO: 209163 - DNA, 25 bp, Artificial
  Probe
gactctgtcttctctcatgagccat

SEQ ID NO: 209164 - DNA, 25 bp, Artificial
  Probe
ctctcatgagccatttcctgaggag

SEQ ID NO: 209165 - DNA, 25 bp, Artificial
  Probe
cactggaccaggactcgccaagctt

SEQ ID NO: 209166 - DNA, 25 bp, Artificial
  Probe
gctttccggacacacggagctctac

SEQ ID NO: 209167 - DNA, 25 bp, Artificial
  Probe
ctggaccaggactcgccaagctttc

SEQ ID NO: 209168 - DNA, 25 bp, Artificial
  Probe
ctgctggaacgcagtgccctctcag

SEQ ID NO: 209169 - DNA, 25 bp, Artificial
  Probe
gggtggctcaccaaaccccggcgtg

SEQ ID NO: 209170 - DNA, 25 bp, Artificial
  Probe
ccccggcgtgcctgtggaagaactt

SEQ ID NO: 209171 - DNA, 25 bp, Artificial
  Probe
atgccactggaccaggactcgccaa

SEQ ID NO: 209172 - DNA, 25 bp, Artificial
  Probe
gtcatcgaatggacaagcccagtaa

SEQ ID NO: 209173 - DNA, 25 bp, Artificial
  Probe
caagctttccggacacacggagctc

SEQ ID NO: 209174 - DNA, 25 bp, Artificial
  Probe
caggactcgccaagctttccggaca

SEQ ID NO: 209175 - DNA, 25 bp, Artificial
  Probe
ctgtccatgccactggaccaggact

SEQ ID NO: 209176 - DNA, 25 bp, Artificial
  Probe
cagactttggcctagctcgagacat

SEQ ID NO: 209177 - DNA, 25 bp, Artificial
  Probe
catttcctgaggagccctgtctgcc

SEQ ID NO: 209178 - DNA, 25 bp, Artificial
  Probe
ccacccagcttgcaaatggcggact

SEQ ID NO: 209179 - DNA, 25 bp, Artificial
  Probe
agggtcatcgaatggacaagcccag

SEQ ID NO: 209180 - DNA, 25 bp, Artificial
  Probe
gtccatgccactggaccaggactcg

SEQ ID NO: 209181 - DNA, 25 bp, Artificial
  Probe
ttcaagctgttgaaggagggtcatc

SEQ ID NO: 209182 - DNA, 25 bp, Artificial
  Probe
gtcctggtgacagaggataatgtca

SEQ ID NO: 209183 - DNA, 25 bp, Artificial
  Probe
tgcaaatggcggactcaaccggcgc

SEQ ID NO: 209184 - DNA, 25 bp, Artificial
  Probe
ctaggaatgtcctggtgacagagga

SEQ ID NO: 209185 - DNA, 25 bp, Artificial
  Probe
gacacacggagctctacctgctctt

SEQ ID NO: 209186 - DNA, 25 bp, Artificial
  Probe
gacctggaccggattgtggccttga

SEQ ID NO: 209187 - DNA, 25 bp, Artificial
  Probe
gggaggactctgtcttctctcatga

SEQ ID NO: 209188 - DNA, 25 bp, Artificial
  Probe
agtacctatggattttcttcatttg

SEQ ID NO: 209189 - DNA, 25 bp, Artificial
  Probe
accaggtttccctgagctggtaata

SEQ ID NO: 209190 - DNA, 25 bp, Artificial
  Probe
accaccgcacctgcatggtgttttt

SEQ ID NO: 209191 - DNA, 25 bp, Artificial
  Probe
tctgtgttcttataatacagtgccc

SEQ ID NO: 209192 - DNA, 25 bp, Artificial
  Probe
ttgttatttgagtgaaccagcctta

SEQ ID NO: 209193 - DNA, 25 bp, Artificial
  Probe
tcatttgttatttgagtgaaccagc

SEQ ID NO: 209194 - DNA, 25 bp, Artificial
  Probe
tgcaccaaaggtatcactggggtga

SEQ ID NO: 209195 - DNA, 25 bp, Artificial
  Probe
tgcctctctaagacccaccgtggat

SEQ ID NO: 209196 - DNA, 25 bp, Artificial
  Probe
tctctaagacccaccgtggatgctg

SEQ ID NO: 209197 - DNA, 25 bp, Artificial
  Probe
ctttggaatgcctctctaagaccca

SEQ ID NO: 209198 - DNA, 25 bp, Artificial
  Probe
ttatttgagtgaaccagccttagtt

SEQ ID NO: 209199 - DNA, 25 bp, Artificial
  Probe
tctaggatctgcagataagagagac

SEQ ID NO: 209200 - DNA, 25 bp, Artificial
  Probe
gcatacatgtgacaacttcaaaatg

SEQ ID NO: 209201 - DNA, 25 bp, Artificial
  Probe
caccgcacctgcatggtgtttttat

SEQ ID NO: 209202 - DNA, 25 bp, Artificial
  Probe
cggtgttctaggatctgcagataag

SEQ ID NO: 209203 - DNA, 25 bp, Artificial
  Probe
ctgattttgtagtgcaccaaaggta

SEQ ID NO: 209204 - DNA, 25 bp, Artificial
  Probe
tggatgctgattttgtagtgcacca

SEQ ID NO: 209205 - DNA, 25 bp, Artificial
  Probe
tttgagtgaaccagccttagttgtg

SEQ ID NO: 209206 - DNA, 25 bp, Artificial
  Probe
ctaaaacggtgttctaggatctgca

SEQ ID NO: 209207 - DNA, 25 bp, Artificial
  Probe
atacagtgccctaaaacggtgttct

SEQ ID NO: 209208 - DNA, 25 bp, Artificial
  Probe
tgctgattttgtagtgcaccaaagg

SEQ ID NO: 209209 - DNA, 25 bp, Artificial
  Probe
atagactctagctgggccaatacca

SEQ ID NO: 209210 - DNA, 25 bp, Artificial
  Probe
tcttcatttgttatttgagtgaacc

SEQ ID NO: 209211 - DNA, 25 bp, Artificial
  Probe
cttataatacagtgccctaaaacgg

SEQ ID NO: 209212 - DNA, 25 bp, Artificial
  Probe
cagtgccctaaaacggtgttctagg

SEQ ID NO: 209213 - DNA, 25 bp, Artificial
  Probe
tgttaccaggtttccctgagctggt

SEQ ID NO: 209214 - DNA, 25 bp, Artificial
  Probe
tctatttggacagatggaatctcat

SEQ ID NO: 209215 - DNA, 25 bp, Artificial
  Probe
gtactctatttggacagatggaatc

SEQ ID NO: 209216 - DNA, 25 bp, Artificial
  Probe
gccctaaaacggtgttctaggatct

SEQ ID NO: 209217 - DNA, 25 bp, Artificial
  Probe
gacaacttcaaaatgcattctgtgt

SEQ ID NO: 209218 - DNA, 25 bp, Artificial
  Probe
ccaggtttccctgagctggtaatag

SEQ ID NO: 209219 - DNA, 25 bp, Artificial
  Probe
acggtgttctaggatctgcagataa

SEQ ID NO: 209220 - DNA, 25 bp, Artificial
  Probe
ctggtaatagactctagctgggcca

SEQ ID NO: 209221 - DNA, 25 bp, Artificial
  Probe
ctgcatggtgtttttatcttaacaa

SEQ ID NO: 209222 - DNA, 25 bp, Artificial
  Probe
acattcttgttaccaggtttccctg

SEQ ID NO: 209223 - DNA, 25 bp, Artificial
  Probe
tgtgacaacttcaaaatgcattctg

SEQ ID NO: 209224 - DNA, 25 bp, Artificial
  Probe
ccctgagctggtaatagactctagc

SEQ ID NO: 209225 - DNA, 25 bp, Artificial
  Probe
gacccaccgtggatgctgattttgt

SEQ ID NO: 209226 - DNA, 25 bp, Artificial
  Probe
tttccctgagctggtaatagactct

SEQ ID NO: 209227 - DNA, 25 bp, Artificial
  Probe
attttgtagtgcaccaaaggtatca

SEQ ID NO: 209228 - DNA, 25 bp, Artificial
  Probe
taagacccaccgtggatgctgattt

SEQ ID NO: 209229 - DNA, 25 bp, Artificial
  Probe
gatgctgattttgtagtgcaccaaa

SEQ ID NO: 209230 - DNA, 25 bp, Artificial
  Probe
tgcattctgtgttcttataatacag

SEQ ID NO: 209231 - DNA, 25 bp, Artificial
  Probe
cttcatttgttatttgagtgaacca

SEQ ID NO: 209232 - DNA, 25 bp, Artificial
  Probe
aaacggtgttctaggatctgcagat

SEQ ID NO: 209233 - DNA, 25 bp, Artificial
  Probe
ccgtggatgctgattttgtagtgca

SEQ ID NO: 209234 - DNA, 25 bp, Artificial
  Probe
tcaccaagtgctgtagtgggtccct

SEQ ID NO: 209235 - DNA, 25 bp, Artificial
  Probe
gaagaccccagtgagcgagaaggct

SEQ ID NO: 209236 - DNA, 25 bp, Artificial
  Probe
tgtctgccatcctgaaccgtctgtg

SEQ ID NO: 209237 - DNA, 25 bp, Artificial
  Probe
agaagaccccagtgagcgagaaggc

SEQ ID NO: 209238 - DNA, 25 bp, Artificial
  Probe
atctgtctgccatcctgaaccgtct

SEQ ID NO: 209239 - DNA, 25 bp, Artificial
  Probe
aagactatctgtctgccatcctgaa

SEQ ID NO: 209240 - DNA, 25 bp, Artificial
  Probe
tgaaccgtctgtgtgtgctgcatga

SEQ ID NO: 209241 - DNA, 25 bp, Artificial
  Probe
gaaagacggccatgtttctctgctc

SEQ ID NO: 209242 - DNA, 25 bp, Artificial
  Probe
tgtgtgtgctgcatgagaagacccc

SEQ ID NO: 209243 - DNA, 25 bp, Artificial
  Probe
aagacggccatgtttctctgctctg

SEQ ID NO: 209244 - DNA, 25 bp, Artificial
  Probe
ctgcatgagaagaccccagtgagcg

SEQ ID NO: 209245 - DNA, 25 bp, Artificial
  Probe
catcctgaaccgtctgtgtgtgctg

SEQ ID NO: 209246 - DNA, 25 bp, Artificial
  Probe
tgagaagaccccagtgagcgagaag

SEQ ID NO: 209247 - DNA, 25 bp, Artificial
  Probe
tcctgaaccgtctgtgtgtgctgca

SEQ ID NO: 209248 - DNA, 25 bp, Artificial
  Probe
ccgtctgtgtgtgctgcatgagaag

SEQ ID NO: 209249 - DNA, 25 bp, Artificial
  Probe
tggaagactatctgtctgccatcct

SEQ ID NO: 209250 - DNA, 25 bp, Artificial
  Probe
gaagactatctgtctgccatcctga

SEQ ID NO: 209251 - DNA, 25 bp, Artificial
  Probe
tgccctgtgtggaagactatctgtc

SEQ ID NO: 209252 - DNA, 25 bp, Artificial
  Probe
aaggctcaccaagtgctgtagtggg

SEQ ID NO: 209253 - DNA, 25 bp, Artificial
  Probe
agagactgccctgtgtggaagacta

SEQ ID NO: 209254 - DNA, 25 bp, Artificial
  Probe
ctgaaccgtctgtgtgtgctgcatg

SEQ ID NO: 209255 - DNA, 25 bp, Artificial
  Probe
cgagaaggctcaccaagtgctgtag

SEQ ID NO: 209256 - DNA, 25 bp, Artificial
  Probe
gctcaccaagtgctgtagtgggtcc

SEQ ID NO: 209257 - DNA, 25 bp, Artificial
  Probe
accaagtgctgtagtgggtccctgg

SEQ ID NO: 209258 - DNA, 25 bp, Artificial
  Probe
agactatctgtctgccatcctgaac

SEQ ID NO: 209259 - DNA, 25 bp, Artificial
  Probe
accgtctgtgtgtgctgcatgagaa

SEQ ID NO: 209260 - DNA, 25 bp, Artificial
  Probe
aagaccccagtgagcgagaaggctc

SEQ ID NO: 209261 - DNA, 25 bp, Artificial
  Probe
gtccctggtggaaagacggccatgt

SEQ ID NO: 209262 - DNA, 25 bp, Artificial
  Probe
ccccagtgagcgagaaggctcacca

SEQ ID NO: 209263 - DNA, 25 bp, Artificial
  Probe
gtctgtgtgtgctgcatgagaagac

SEQ ID NO: 209264 - DNA, 25 bp, Artificial
  Probe
gagcgagaaggctcaccaagtgctg

SEQ ID NO: 209265 - DNA, 25 bp, Artificial
  Probe
tctgtgtgtgctgcatgagaagacc

SEQ ID NO: 209266 - DNA, 25 bp, Artificial
  Probe
gagaaggctcaccaagtgctgtagt

SEQ ID NO: 209267 - DNA, 25 bp, Artificial
  Probe
tgtgtgctgcatgagaagaccccag

SEQ ID NO: 209268 - DNA, 25 bp, Artificial
  Probe
ctcaccaagtgctgtagtgggtccc

SEQ ID NO: 209269 - DNA, 25 bp, Artificial
  Probe
tgctgcatgagaagaccccagtgag

SEQ ID NO: 209270 - DNA, 25 bp, Artificial
  Probe
ccaagtgctgtagtgggtccctggt

SEQ ID NO: 209271 - DNA, 25 bp, Artificial
  Probe
ctgccatcctgaaccgtctgtgtgt

SEQ ID NO: 209272 - DNA, 25 bp, Artificial
  Probe
gtctgccatcctgaaccgtctgtgt

SEQ ID NO: 209273 - DNA, 25 bp, Artificial
  Probe
ctgtctgccatcctgaaccgtctgt

SEQ ID NO: 209274 - DNA, 25 bp, Artificial
  Probe
ggaaagacggccatgtttctctgct

SEQ ID NO: 209275 - DNA, 25 bp, Artificial
  Probe
tccctggtggaaagacggccatgtt

SEQ ID NO: 209276 - DNA, 25 bp, Artificial
  Probe
tatctgtctgccatcctgaaccgtc

SEQ ID NO: 209277 - DNA, 25 bp, Artificial
  Probe
aaccgtctgtgtgtgctgcatgaga

SEQ ID NO: 209278 - DNA, 25 bp, Artificial
  Probe
gagactgccctgtgtggaagactat

SEQ ID NO: 209279 - DNA, 25 bp, Artificial
  Probe
actgccctgtgtggaagactatctg

SEQ ID NO: 209280 - DNA, 25 bp, Artificial
  Probe
gcctcgttctatagggcatccacat

SEQ ID NO: 209281 - DNA, 25 bp, Artificial
  Probe
tcctaaatcattggaatagagatct

SEQ ID NO: 209282 - DNA, 25 bp, Artificial
  Probe
aaatgacagaatgcacttgggccat

SEQ ID NO: 209283 - DNA, 25 bp, Artificial
  Probe
agatgggcaagcttttgacattgca

SEQ ID NO: 209284 - DNA, 25 bp, Artificial
  Probe
tgggcaagcttttgacattgcagct

SEQ ID NO: 209285 - DNA, 25 bp, Artificial
  Probe
tttgacattgcagcttcattggcct

SEQ ID NO: 209286 - DNA, 25 bp, Artificial
  Probe
cctgttgacttgtaacaagctaaat

SEQ ID NO: 209287 - DNA, 25 bp, Artificial
  Probe
cactctcctgttgacttgtaacaag

SEQ ID NO: 209288 - DNA, 25 bp, Artificial
  Probe
atagggcatccacatggagggtaag

SEQ ID NO: 209289 - DNA, 25 bp, Artificial
  Probe
tcctgttgacttgtaacaagctaaa

SEQ ID NO: 209290 - DNA, 25 bp, Artificial
  Probe
gacatcattggtaagatgggcaagc

SEQ ID NO: 209291 - DNA, 25 bp, Artificial
  Probe
ttctttatgagctatgacatcattg

SEQ ID NO: 209292 - DNA, 25 bp, Artificial
  Probe
tcattggcctcgttctatagggcat

SEQ ID NO: 209293 - DNA, 25 bp, Artificial
  Probe
cattggcctcgttctatagggcatc

SEQ ID NO: 209294 - DNA, 25 bp, Artificial
  Probe
gcttcattggcctcgttctataggg

SEQ ID NO: 209295 - DNA, 25 bp, Artificial
  Probe
ttttgacattgcagcttcattggcc

SEQ ID NO: 209296 - DNA, 25 bp, Artificial
  Probe
ggcatccacatggagggtaaggaat

SEQ ID NO: 209297 - DNA, 25 bp, Artificial
  Probe
acagaatgcacttgggccatctccc

SEQ ID NO: 209298 - DNA, 25 bp, Artificial
  Probe
attggcctcgttctatagggcatcc

SEQ ID NO: 209299 - DNA, 25 bp, Artificial
  Probe
gctaatcactctcctgttgacttgt

SEQ ID NO: 209300 - DNA, 25 bp, Artificial
  Probe
acatcattggtaagatgggcaagct

SEQ ID NO: 209301 - DNA, 25 bp, Artificial
  Probe
ctatgacatcattggtaagatgggc

SEQ ID NO: 209302 - DNA, 25 bp, Artificial
  Probe
gatgggcaagcttttgacattgcag

SEQ ID NO: 209303 - DNA, 25 bp, Artificial
  Probe
gttctatagggcatccacatggagg

SEQ ID NO: 209304 - DNA, 25 bp, Artificial
  Probe
gcatccacatggagggtaaggaatc

SEQ ID NO: 209305 - DNA, 25 bp, Artificial
  Probe
ttgcagcttcattggcctcgttcta

SEQ ID NO: 209306 - DNA, 25 bp, Artificial
  Probe
aatgacagaatgcacttgggccatc

SEQ ID NO: 209307 - DNA, 25 bp, Artificial
  Probe
ctatagggcatccacatggagggta

SEQ ID NO: 209308 - DNA, 25 bp, Artificial
  Probe
ttgtagctaatcactctcctgttga

SEQ ID NO: 209309 - DNA, 25 bp, Artificial
  Probe
cttttgacattgcagcttcattggc

SEQ ID NO: 209310 - DNA, 25 bp, Artificial
  Probe
cttcattggcctcgttctatagggc

SEQ ID NO: 209311 - DNA, 25 bp, Artificial
  Probe
ctcctgttgacttgtaacaagctaa

SEQ ID NO: 209312 - DNA, 25 bp, Artificial
  Probe
ttctatagggcatccacatggaggg

SEQ ID NO: 209313 - DNA, 25 bp, Artificial
  Probe
attgcagcttcattggcctcgttct

SEQ ID NO: 209314 - DNA, 25 bp, Artificial
  Probe
gacagaatgcacttgggccatctcc

SEQ ID NO: 209315 - DNA, 25 bp, Artificial
  Probe
ctctcctgttgacttgtaacaagct

SEQ ID NO: 209316 - DNA, 25 bp, Artificial
  Probe
tgacattgcagcttcattggcctcg

SEQ ID NO: 209317 - DNA, 25 bp, Artificial
  Probe
agcttttgacattgcagcttcattg

SEQ ID NO: 209318 - DNA, 25 bp, Artificial
  Probe
ggcaagcttttgacattgcagcttc

SEQ ID NO: 209319 - DNA, 25 bp, Artificial
  Probe
caagcttttgacattgcagcttcat

SEQ ID NO: 209320 - DNA, 25 bp, Artificial
  Probe
atcctaaatcattggaatagagatc

SEQ ID NO: 209321 - DNA, 25 bp, Artificial
  Probe
agctaatcactctcctgttgacttg

SEQ ID NO: 209322 - DNA, 25 bp, Artificial
  Probe
gtagctaatcactctcctgttgact

SEQ ID NO: 209323 - DNA, 25 bp, Artificial
  Probe
cttgtagctaatcactctcctgttg

SEQ ID NO: 209324 - DNA, 25 bp, Artificial
  Probe
ctttatgagctatgacatcattggt

SEQ ID NO: 209325 - DNA, 25 bp, Artificial
  Probe
acattgcagcttcattggcctcgtt

SEQ ID NO: 209326 - DNA, 25 bp, Artificial
  Probe
agcaaaggagccatctgcaggaact

SEQ ID NO: 209327 - DNA, 25 bp, Artificial
  Probe
tcgccatgtggcaccaattgcacct

SEQ ID NO: 209328 - DNA, 25 bp, Artificial
  Probe
ccaggctcagaagctgaagaagaaa

SEQ ID NO: 209329 - DNA, 25 bp, Artificial
  Probe
ggcctgaatggagcatctgtacccc

SEQ ID NO: 209330 - DNA, 25 bp, Artificial
  Probe
accacagcaaaggagccatctgcag

SEQ ID NO: 209331 - DNA, 25 bp, Artificial
  Probe
gtgaactgaagaccacagcaaagga

SEQ ID NO: 209332 - DNA, 25 bp, Artificial
  Probe
aaaggagccatctgcaggaactggg

SEQ ID NO: 209333 - DNA, 25 bp, Artificial
  Probe
agacatagtgtgattggggaactcc

SEQ ID NO: 209334 - DNA, 25 bp, Artificial
  Probe
cacgccggcagatcgccatgtggca

SEQ ID NO: 209335 - DNA, 25 bp, Artificial
  Probe
ggccactgaccgtctttcttggaca

SEQ ID NO: 209336 - DNA, 25 bp, Artificial
  Probe
ccttgaaacaccaggctcagaagct

SEQ ID NO: 209337 - DNA, 25 bp, Artificial
  Probe
acgcctctggctctgagcgaagcca

SEQ ID NO: 209338 - DNA, 25 bp, Artificial
  Probe
gaaacaccaggctcagaagctgaag

SEQ ID NO: 209339 - DNA, 25 bp, Artificial
  Probe
tgcacctgtagttggccaccggcca

SEQ ID NO: 209340 - DNA, 25 bp, Artificial
  Probe
tgctgcaggcatccagtgtggagct

SEQ ID NO: 209341 - DNA, 25 bp, Artificial
  Probe
atgacctgctgcaggcatccagtgt

SEQ ID NO: 209342 - DNA, 25 bp, Artificial
  Probe
catctgtacccctggggacagcaca

SEQ ID NO: 209343 - DNA, 25 bp, Artificial
  Probe
ctgtcaatcagctaccttccagctg

SEQ ID NO: 209344 - DNA, 25 bp, Artificial
  Probe
ccccgtgtggaatgagatgatcatg

SEQ ID NO: 209345 - DNA, 25 bp, Artificial
  Probe
gaaacagacaaaacgggccaagcac

SEQ ID NO: 209346 - DNA, 25 bp, Artificial
  Probe
cctgctgcaggcatccagtgtggag

SEQ ID NO: 209347 - DNA, 25 bp, Artificial
  Probe
tgattggggaactccgcctgggcct

SEQ ID NO: 209348 - DNA, 25 bp, Artificial
  Probe
acacagtcatcttccaggctcagct

SEQ ID NO: 209349 - DNA, 25 bp, Artificial
  Probe
cggcagatcgccatgtggcaccaat

SEQ ID NO: 209350 - DNA, 25 bp, Artificial
  Probe
accagatgacctgctgcaggcatcc

SEQ ID NO: 209351 - DNA, 25 bp, Artificial
  Probe
agcacaagatcaaccccgtgtggaa

SEQ ID NO: 209352 - DNA, 25 bp, Artificial
  Probe
gatgacctgctgcaggcatccagtg

SEQ ID NO: 209353 - DNA, 25 bp, Artificial
  Probe
cagatcgccatgtggcaccaattgc

SEQ ID NO: 209354 - DNA, 25 bp, Artificial
  Probe
atggagcatctgtacccctggggac

SEQ ID NO: 209355 - DNA, 25 bp, Artificial
  Probe
cttctaggcaaagatgtctctgtca

SEQ ID NO: 209356 - DNA, 25 bp, Artificial
  Probe
tccaaccaatccaaggagcttctag

SEQ ID NO: 209357 - DNA, 25 bp, Artificial
  Probe
gaatggagcatctgtacccctgggg

SEQ ID NO: 209358 - DNA, 25 bp, Artificial
  Probe
cctggtggtgctgattaaagctaag

SEQ ID NO: 209359 - DNA, 25 bp, Artificial
  Probe
tgtcaatcagctaccttccagctgc

SEQ ID NO: 209360 - DNA, 25 bp, Artificial
  Probe
ggtccttctgtcaatcagctacctt

SEQ ID NO: 209361 - DNA, 25 bp, Artificial
  Probe
gggaggtccttctgtcaatcagcta

SEQ ID NO: 209362 - DNA, 25 bp, Artificial
  Probe
aaacgggccaagcacaagatcaacc

SEQ ID NO: 209363 - DNA, 25 bp, Artificial
  Probe
atgatcatgtttgagctaccagatg

SEQ ID NO: 209364 - DNA, 25 bp, Artificial
  Probe
cctctggctctgagcgaagccactg

SEQ ID NO: 209365 - DNA, 25 bp, Artificial
  Probe
ctgccaatcgcctcctggtggtgct

SEQ ID NO: 209366 - DNA, 25 bp, Artificial
  Probe
tccgcctgggcctgaatggagcatc

SEQ ID NO: 209367 - DNA, 25 bp, Artificial
  Probe
caaagatgtctctgtcaaggtgacc

SEQ ID NO: 209368 - DNA, 25 bp, Artificial
  Probe
atcttccaggctcagctgtcagtca

SEQ ID NO: 209369 - DNA, 25 bp, Artificial
  Probe
caaggagcttctaggcaaagatgtc

SEQ ID NO: 209370 - DNA, 25 bp, Artificial
  Probe
agatcaaccccgtgtggaatgagat

SEQ ID NO: 209371 - DNA, 25 bp, Artificial
  Probe
gagcttctaggcaaagatgtctctg

SEQ ID NO: 209372 - DNA, 25 bp, Artificial
  Probe
ctgctgcctctttccctgctgatga

SEQ ID NO: 209373 - DNA, 25 bp, Artificial
  Probe
gttctgctgcctctttccctgctga

SEQ ID NO: 209374 - DNA, 25 bp, Artificial
  Probe
ttttaaatcttgtctcctgtgagct

SEQ ID NO: 209375 - DNA, 25 bp, Artificial
  Probe
tggagttacacctgggccatttgat

SEQ ID NO: 209376 - DNA, 25 bp, Artificial
  Probe
gactcagctcggagcacccctgagg

SEQ ID NO: 209377 - DNA, 25 bp, Artificial
  Probe
tatcatgaagccttgctgaactaag

SEQ ID NO: 209378 - DNA, 25 bp, Artificial
  Probe
tctgctgcctctttccctgctgatg

SEQ ID NO: 209379 - DNA, 25 bp, Artificial
  Probe
tttatctctggagttacacctgggc

SEQ ID NO: 209380 - DNA, 25 bp, Artificial
  Probe
atgaagccttgctgaactaagtttt

SEQ ID NO: 209381 - DNA, 25 bp, Artificial
  Probe
gccttgctgaactaagttttgtgtg

SEQ ID NO: 209382 - DNA, 25 bp, Artificial
  Probe
agatggactcagctcggagcacccc

SEQ ID NO: 209383 - DNA, 25 bp, Artificial
  Probe
gaagccttgctgaactaagttttgt

SEQ ID NO: 209384 - DNA, 25 bp, Artificial
  Probe
ccttgctgaactaagttttgtgtgt

SEQ ID NO: 209385 - DNA, 25 bp, Artificial
  Probe
ggttctgctgcctctttccctgctg

SEQ ID NO: 209386 - DNA, 25 bp, Artificial
  Probe
tctggagttacacctgggccatttg

SEQ ID NO: 209387 - DNA, 25 bp, Artificial
  Probe
tacacctgggccatttgattgtttt

SEQ ID NO: 209388 - DNA, 25 bp, Artificial
  Probe
tttaaatcttgtctcctgtgagctc

SEQ ID NO: 209389 - DNA, 25 bp, Artificial
  Probe
caagagcaacgcaaagctttttaaa

SEQ ID NO: 209390 - DNA, 25 bp, Artificial
  Probe
ttctgctgcctctttccctgctgat

SEQ ID NO: 209391 - DNA, 25 bp, Artificial
  Probe
ctctggagttacacctgggccattt

SEQ ID NO: 209392 - DNA, 25 bp, Artificial
  Probe
aaatttatctctggagttacacctg

SEQ ID NO: 209393 - DNA, 25 bp, Artificial
  Probe
atcatgaagccttgctgaactaagt

SEQ ID NO: 209394 - DNA, 25 bp, Artificial
  Probe
aatttatctctggagttacacctgg

SEQ ID NO: 209395 - DNA, 25 bp, Artificial
  Probe
ttatctctggagttacacctgggcc

SEQ ID NO: 209396 - DNA, 25 bp, Artificial
  Probe
aagccttgctgaactaagttttgtg

SEQ ID NO: 209397 - DNA, 25 bp, Artificial
  Probe
tatctctggagttacacctgggcca

SEQ ID NO: 209398 - DNA, 25 bp, Artificial
  Probe
tctctggagttacacctgggccatt

SEQ ID NO: 209399 - DNA, 25 bp, Artificial
  Probe
agaccaagagcaacgcaaagctttt

SEQ ID NO: 209400 - DNA, 25 bp, Artificial
  Probe
catgaagccttgctgaactaagttt

SEQ ID NO: 209401 - DNA, 25 bp, Artificial
  Probe
tgaagccttgctgaactaagttttg

SEQ ID NO: 209402 - DNA, 25 bp, Artificial
  Probe
tcatgaagccttgctgaactaagtt

SEQ ID NO: 209403 - DNA, 25 bp, Artificial
  Probe
tgcctctttccctgctgatgataaa

SEQ ID NO: 209404 - DNA, 25 bp, Artificial
  Probe
gcctctttccctgctgatgataaaa

SEQ ID NO: 209405 - DNA, 25 bp, Artificial
  Probe
aagaccaagagcaacgcaaagcttt

SEQ ID NO: 209406 - DNA, 25 bp, Artificial
  Probe
gatggactcagctcggagcacccct

SEQ ID NO: 209407 - DNA, 25 bp, Artificial
  Probe
gtgtatatcatgaagccttgctgaa

SEQ ID NO: 209408 - DNA, 25 bp, Artificial
  Probe
ttaaatcttgtctcctgtgagctct

SEQ ID NO: 209409 - DNA, 25 bp, Artificial
  Probe
tgtatatcatgaagccttgctgaac

SEQ ID NO: 209410 - DNA, 25 bp, Artificial
  Probe
ctggagttacacctgggccatttga

SEQ ID NO: 209411 - DNA, 25 bp, Artificial
  Probe
atttatctctggagttacacctggg

SEQ ID NO: 209412 - DNA, 25 bp, Artificial
  Probe
acacctgggccatttgattgtttta

SEQ ID NO: 209413 - DNA, 25 bp, Artificial
  Probe
agccttgctgaactaagttttgtgt

SEQ ID NO: 209414 - DNA, 25 bp, Artificial
  Probe
atctctggagttacacctgggccat

SEQ ID NO: 209415 - DNA, 25 bp, Artificial
  Probe
gtgatctctaagctgcaaaaactgt

SEQ ID NO: 209416 - DNA, 25 bp, Artificial
  Probe
cgcctgcagtgatgagggcactgcc

SEQ ID NO: 209417 - DNA, 25 bp, Artificial
  Probe
atctggaccttgtgccctggctgcc

SEQ ID NO: 209418 - DNA, 25 bp, Artificial
  Probe
tgggtgatctctaagctgcaaaaac

SEQ ID NO: 209419 - DNA, 25 bp, Artificial
  Probe
aagctgcaaaaactgtgctgtcctt

SEQ ID NO: 209420 - DNA, 25 bp, Artificial
  Probe
gggcagaggccagtgctgtctccaa

SEQ ID NO: 209421 - DNA, 25 bp, Artificial
  Probe
tggccccgcatctgccagtgctgag

SEQ ID NO: 209422 - DNA, 25 bp, Artificial
  Probe
gggtgattcttcagcctcctcacca

SEQ ID NO: 209423 - DNA, 25 bp, Artificial
  Probe
tcctgtggattctcccatcagccat

SEQ ID NO: 209424 - DNA, 25 bp, Artificial
  Probe
cctgcagtgatgagggcactgccca

SEQ ID NO: 209425 - DNA, 25 bp, Artificial
  Probe
tccttcaagagaaatcggaaggagg

SEQ ID NO: 209426 - DNA, 25 bp, Artificial
  Probe
cccgcatctgccagtgctgagaatg

SEQ ID NO: 209427 - DNA, 25 bp, Artificial
  Probe
tgccagtgctgagaatgagtagctg

SEQ ID NO: 209428 - DNA, 25 bp, Artificial
  Probe
ggattctcccatcagccatttggtc

SEQ ID NO: 209429 - DNA, 25 bp, Artificial
  Probe
ccgcatctgccagtgctgagaatga

SEQ ID NO: 209430 - DNA, 25 bp, Artificial
  Probe
tcaccatctggaccttgtgccctgg

SEQ ID NO: 209431 - DNA, 25 bp, Artificial
  Probe
gcctcctcaccaacagaggaagagc

SEQ ID NO: 209432 - DNA, 25 bp, Artificial
  Probe
cactgcccaagaagggaaggctgct

SEQ ID NO: 209433 - DNA, 25 bp, Artificial
  Probe
agaggccagtgctgtctccaaggga

SEQ ID NO: 209434 - DNA, 25 bp, Artificial
  Probe
gctgccttcctgtgcccagaaagga

SEQ ID NO: 209435 - DNA, 25 bp, Artificial
  Probe
tgtgaggtcaccatctggaccttgt

SEQ ID NO: 209436 - DNA, 25 bp, Artificial
  Probe
gtggattctcccatcagccatttgg

SEQ ID NO: 209437 - DNA, 25 bp, Artificial
  Probe
aattgagtggcctgtccttcaagag

SEQ ID NO: 209438 - DNA, 25 bp, Artificial
  Probe
tcaccaacagaggaagagcaagagc

SEQ ID NO: 209439 - DNA, 25 bp, Artificial
  Probe
gcactgcccaagaagggaaggctgc

SEQ ID NO: 209440 - DNA, 25 bp, Artificial
  Probe
agaagcctttcaaattgagtggcct

SEQ ID NO: 209441 - DNA, 25 bp, Artificial
  Probe
aaactgtgctgtccttgtgaggtca

SEQ ID NO: 209442 - DNA, 25 bp, Artificial
  Probe
accatctggaccttgtgccctggct

SEQ ID NO: 209443 - DNA, 25 bp, Artificial
  Probe
cagcgcctgcagtgatgagggcact

SEQ ID NO: 209444 - DNA, 25 bp, Artificial
  Probe
ctggctgccttcctgtgcccagaaa

SEQ ID NO: 209445 - DNA, 25 bp, Artificial
  Probe
ctgagagccaagagccccaggccaa

SEQ ID NO: 209446 - DNA, 25 bp, Artificial
  Probe
agaagaaattctctttcaagaagcc

SEQ ID NO: 209447 - DNA, 25 bp, Artificial
  Probe
gaaatcagcgcctgcagtgatgagg

SEQ ID NO: 209448 - DNA, 25 bp, Artificial
  Probe
tcgggcccagagagtggccccgcat

SEQ ID NO: 209449 - DNA, 25 bp, Artificial
  Probe
caagaagcctttcaaattgagtggc

SEQ ID NO: 209450 - DNA, 25 bp, Artificial
  Probe
gaagaaattctctttcaagaagcct

SEQ ID NO: 209451 - DNA, 25 bp, Artificial
  Probe
tttcaagaagcctttcaaattgagt

SEQ ID NO: 209452 - DNA, 25 bp, Artificial
  Probe
ttgtgccctggctgccttcctgtgc

SEQ ID NO: 209453 - DNA, 25 bp, Artificial
  Probe
agtgatgagggcactgcccaagaag

SEQ ID NO: 209454 - DNA, 25 bp, Artificial
  Probe
cctagccaggaagctgaggccaagg

SEQ ID NO: 209455 - DNA, 25 bp, Artificial
  Probe
atcagccatttggtcttactattag

SEQ ID NO: 209456 - DNA, 25 bp, Artificial
  Probe
gggtgatctctaagctgcaaaaact

SEQ ID NO: 209457 - DNA, 25 bp, Artificial
  Probe
gcatctgccagtgctgagaatgagt

SEQ ID NO: 209458 - DNA, 25 bp, Artificial
  Probe
gggcccagagagtggccccgcatct

SEQ ID NO: 209459 - DNA, 25 bp, Artificial
  Probe
tttcaaattgagtggcctgtccttc

SEQ ID NO: 209460 - DNA, 25 bp, Artificial
  Probe
agtggccccgcatctgccagtgctg

SEQ ID NO: 209461 - DNA, 25 bp, Artificial
  Probe
tgtttttcagcatcatgtacatatg

SEQ ID NO: 209462 - DNA, 25 bp, Artificial
  Probe
agtgtctgtgcgaacagatgaccgg

SEQ ID NO: 209463 - DNA, 25 bp, Artificial
  Probe
catgacggggtagtggtagatctct

SEQ ID NO: 209464 - DNA, 25 bp, Artificial
  Probe
atataaacgtgagcttcggaatttc

SEQ ID NO: 209465 - DNA, 25 bp, Artificial
  Probe
tcctcaaaaacagagaggatgacac

SEQ ID NO: 209466 - DNA, 25 bp, Artificial
  Probe
gaagcagaccataggcacctctttt

SEQ ID NO: 209467 - DNA, 25 bp, Artificial
  Probe
gggacaaagtacactcacaacctca

SEQ ID NO: 209468 - DNA, 25 bp, Artificial
  Probe
attatcttcaggttgatatcacgat

SEQ ID NO: 209469 - DNA, 25 bp, Artificial
  Probe
ggttgatatcacgatcacttttctt

SEQ ID NO: 209470 - DNA, 25 bp, Artificial
  Probe
catccaaattatgatttgcaattgg

SEQ ID NO: 209471 - DNA, 25 bp, Artificial
  Probe
aggatgacacttacatagtcaatta

SEQ ID NO: 209472 - DNA, 25 bp, Artificial
  Probe
tctgtggtgcacgtttgagcaaaca

SEQ ID NO: 209473 - DNA, 25 bp, Artificial
  Probe
accatgacggggtagtggtagatct

SEQ ID NO: 209474 - DNA, 25 bp, Artificial
  Probe
tccgctggtaatatactgtattctg

SEQ ID NO: 209475 - DNA, 25 bp, Artificial
  Probe
ccgcttaaccctgcactttgtttag

SEQ ID NO: 209476 - DNA, 25 bp, Artificial
  Probe
ctgtattctgtaccattatagatag

SEQ ID NO: 209477 - DNA, 25 bp, Artificial
  Probe
cagcattttaacaatgtctgggttg

SEQ ID NO: 209478 - DNA, 25 bp, Artificial
  Probe
gcttaaccctgcactttgtttagcc

SEQ ID NO: 209479 - DNA, 25 bp, Artificial
  Probe
gttcagcagatttcatttctttaag

SEQ ID NO: 209480 - DNA, 25 bp, Artificial
  Probe
tctcatactcatgagacaccatagg

SEQ ID NO: 209481 - DNA, 25 bp, Artificial
  Probe
ccgtattcatgaactgcatgttgga

SEQ ID NO: 209482 - DNA, 25 bp, Artificial
  Probe
aatatttaggcaaaccgtattcatg

SEQ ID NO: 209483 - DNA, 25 bp, Artificial
  Probe
cacagcagtttttcatggaagatat

SEQ ID NO: 209484 - DNA, 25 bp, Artificial
  Probe
cagcatcatgtacatatgaagagga

SEQ ID NO: 209485 - DNA, 25 bp, Artificial
  Probe
atttgtgtttcttacagaagcagac

SEQ ID NO: 209486 - DNA, 25 bp, Artificial
  Probe
caattctaagtggatgacgttcaat

SEQ ID NO: 209487 - DNA, 25 bp, Artificial
  Probe
tgctgcggtatctagtttctcccac

SEQ ID NO: 209488 - DNA, 25 bp, Artificial
  Probe
tagtttgcagcattttaacaatgtc

SEQ ID NO: 209489 - DNA, 25 bp, Artificial
  Probe
taaacgtgagcttcggaatttcttt

SEQ ID NO: 209490 - DNA, 25 bp, Artificial
  Probe
gtttctgttcactgtctcttcaaag

SEQ ID NO: 209491 - DNA, 25 bp, Artificial
  Probe
ttgcatcaaatacgtaccacgagaa

SEQ ID NO: 209492 - DNA, 25 bp, Artificial
  Probe
ggatgacacttacatagtcaattat

SEQ ID NO: 209493 - DNA, 25 bp, Artificial
  Probe
tgtgcgaacagatgaccggaatgct

SEQ ID NO: 209494 - DNA, 25 bp, Artificial
  Probe
ttcttttcctcaaaaacagagagga

SEQ ID NO: 209495 - DNA, 25 bp, Artificial
  Probe
tttctttgctttggaatcacgcatc

SEQ ID NO: 209496 - DNA, 25 bp, Artificial
  Probe
tcagcgaggttgacactgtaatgtg

SEQ ID NO: 209497 - DNA, 25 bp, Artificial
  Probe
agtcattaagcaatagtttgcagca

SEQ ID NO: 209498 - DNA, 25 bp, Artificial
  Probe
ccagccctagcagagcgaattgacc

SEQ ID NO: 209499 - DNA, 25 bp, Artificial
  Probe
tttcaattctaagtggatgacgttc

SEQ ID NO: 209500 - DNA, 25 bp, Artificial
  Probe
agtgtggatgctgtcagtgcatgtc

SEQ ID NO: 209501 - DNA, 25 bp, Artificial
  Probe
ggaaaatgctactattgcccaaaat

SEQ ID NO: 209502 - DNA, 25 bp, Artificial
  Probe
tggaatcacgcatctctagattgtt

SEQ ID NO: 209503 - DNA, 25 bp, Artificial
  Probe
gaagacaacactactgcttaacctg

SEQ ID NO: 209504 - DNA, 25 bp, Artificial
  Probe
tttagccatcttcagctctcagcga

SEQ ID NO: 209505 - DNA, 25 bp, Artificial
  Probe
atgacgttcaatgtatagccagact

SEQ ID NO: 209506 - DNA, 25 bp, Artificial
  Probe
tttccgtccacagcagtttttcatg

SEQ ID NO: 209507 - DNA, 25 bp, Artificial
  Probe
aagtttgtagtcatgtgacactagc

SEQ ID NO: 209508 - DNA, 25 bp, Artificial
  Probe
tcttagaatcgcatgctgtagaaat

SEQ ID NO: 209509 - DNA, 25 bp, Artificial
  Probe
catgtcacagatgactgtttcgcac

SEQ ID NO: 209510 - DNA, 25 bp, Artificial
  Probe
ggccacgaatgcttggtcagaatcc

SEQ ID NO: 209511 - DNA, 25 bp, Artificial
  Probe
cacatgttatgatggccacgaatgc

SEQ ID NO: 209512 - DNA, 25 bp, Artificial
  Probe
tgatgcatttttgtccctggcttgc

SEQ ID NO: 209513 - DNA, 25 bp, Artificial
  Probe
tttgtagtcatgtgacactagccgt

SEQ ID NO: 209514 - DNA, 25 bp, Artificial
  Probe
ttactcttagaatcgcatgctgtag

SEQ ID NO: 209515 - DNA, 25 bp, Artificial
  Probe
gctttgtccattactgttgctattc

SEQ ID NO: 209516 - DNA, 25 bp, Artificial
  Probe
agtttgtagtcatgtgacactagcc

SEQ ID NO: 209517 - DNA, 25 bp, Artificial
  Probe
agtcatgtgacactagccgtcctgc

SEQ ID NO: 209518 - DNA, 25 bp, Artificial
  Probe
ttccctttgctcagcagtgaactta

SEQ ID NO: 209519 - DNA, 25 bp, Artificial
  Probe
ttgtccattactgttgctattctgc

SEQ ID NO: 209520 - DNA, 25 bp, Artificial
  Probe
cggctttgtccattactgttgctat

SEQ ID NO: 209521 - DNA, 25 bp, Artificial
  Probe
ccttgggtttcctgtgaagttggag

SEQ ID NO: 209522 - DNA, 25 bp, Artificial
  Probe
tagaatcgcatgctgtagaaatgct

SEQ ID NO: 209523 - DNA, 25 bp, Artificial
  Probe
tgctcagcagtgaacttattcccag

SEQ ID NO: 209524 - DNA, 25 bp, Artificial
  Probe
agcagtgaacttattcccagcaccc

SEQ ID NO: 209525 - DNA, 25 bp, Artificial
  Probe
atcgcatgctgtagaaatgctctaa

SEQ ID NO: 209526 - DNA, 25 bp, Artificial
  Probe
tcacagatgactgtttcgcacaaac

SEQ ID NO: 209527 - DNA, 25 bp, Artificial
  Probe
cagatgactgtttcgcacaaacaca

SEQ ID NO: 209528 - DNA, 25 bp, Artificial
  Probe
ctgttgctattctgcacacatatcg

SEQ ID NO: 209529 - DNA, 25 bp, Artificial
  Probe
tgtttcgcacaaacacagcatagtg

SEQ ID NO: 209530 - DNA, 25 bp, Artificial
  Probe
tctttccttgggtttcctgtgaagt

SEQ ID NO: 209531 - DNA, 25 bp, Artificial
  Probe
ctcagcagtgaacttattcccagca

SEQ ID NO: 209532 - DNA, 25 bp, Artificial
  Probe
ggcggctttgtccattactgttgct

SEQ ID NO: 209533 - DNA, 25 bp, Artificial
  Probe
gtagccaagcacatgttatgatggc

SEQ ID NO: 209534 - DNA, 25 bp, Artificial
  Probe
cgcacaaacacagcatagtggaaga

SEQ ID NO: 209535 - DNA, 25 bp, Artificial
  Probe
ctcatgtcacagatgactgtttcgc

SEQ ID NO: 209536 - DNA, 25 bp, Artificial
  Probe
gcacaaacacagcatagtggaagaa

SEQ ID NO: 209537 - DNA, 25 bp, Artificial
  Probe
gtcatgtgacactagccgtcctgcc

SEQ ID NO: 209538 - DNA, 25 bp, Artificial
  Probe
gtccagtttctgttctttccttggg

SEQ ID NO: 209539 - DNA, 25 bp, Artificial
  Probe
gttatgatggccacgaatgcttggt

SEQ ID NO: 209540 - DNA, 25 bp, Artificial
  Probe
caagcacatgttatgatggccacga

SEQ ID NO: 209541 - DNA, 25 bp, Artificial
  Probe
tttccttgggtttcctgtgaagttg

SEQ ID NO: 209542 - DNA, 25 bp, Artificial
  Probe
atccttccctttgctcagcagtgaa

SEQ ID NO: 209543 - DNA, 25 bp, Artificial
  Probe
gaatgcttggtcagaatccttccct

SEQ ID NO: 209544 - DNA, 25 bp, Artificial
  Probe
tgggtttactcttagaatcgcatgc

SEQ ID NO: 209545 - DNA, 25 bp, Artificial
  Probe
ctttgctcagcagtgaacttattcc

SEQ ID NO: 209546 - DNA, 25 bp, Artificial
  Probe
gcagtgaacttattcccagcaccct

SEQ ID NO: 209547 - DNA, 25 bp, Artificial
  Probe
gtccattactgttgctattctgcac

SEQ ID NO: 209548 - DNA, 25 bp, Artificial
  Probe
agcacatgttatgatggccacgaat

SEQ ID NO: 209549 - DNA, 25 bp, Artificial
  Probe
gactgtttcgcacaaacacagcata

SEQ ID NO: 209550 - DNA, 25 bp, Artificial
  Probe
tcactgatgcatttttgtccctggc

SEQ ID NO: 209551 - DNA, 25 bp, Artificial
  Probe
gatggccacgaatgcttggtcagaa

SEQ ID NO: 209552 - DNA, 25 bp, Artificial
  Probe
cgaatgcttggtcagaatccttccc

SEQ ID NO: 209553 - DNA, 25 bp, Artificial
  Probe
cttggatgacccagccgacgtgatg

SEQ ID NO: 209554 - DNA, 25 bp, Artificial
  Probe
atgacccagccgacgtgatgtcgtt

SEQ ID NO: 209555 - DNA, 25 bp, Artificial
  Probe
acaacgtggcccatgccgggaagac

SEQ ID NO: 209556 - DNA, 25 bp, Artificial
  Probe
catgccgggaagaccctactgaccg

SEQ ID NO: 209557 - DNA, 25 bp, Artificial
  Probe
gggcttcttccacaaggaggagttt

SEQ ID NO: 209558 - DNA, 25 bp, Artificial
  Probe
ctggggcttggatgacccagccgac

SEQ ID NO: 209559 - DNA, 25 bp, Artificial
  Probe
ctgtcccagcggtgtcaacttgatt

SEQ ID NO: 209560 - DNA, 25 bp, Artificial
  Probe
cttgctgctggctgaggtcatcaac

SEQ ID NO: 209561 - DNA, 25 bp, Artificial
  Probe
accggatcttcaacacctggctggg

SEQ ID NO: 209562 - DNA, 25 bp, Artificial
  Probe
tgaccgggctgctggacctccaggc

SEQ ID NO: 209563 - DNA, 25 bp, Artificial
  Probe
tgtcaacttgattagtttgcctaat

SEQ ID NO: 209564 - DNA, 25 bp, Artificial
  Probe
agccgacgtgatgtcgttcagcaag

SEQ ID NO: 209565 - DNA, 25 bp, Artificial
  Probe
tgggggacccatccaagaacttgct

SEQ ID NO: 209566 - DNA, 25 bp, Artificial
  Probe
atgactgggggcttcttccacaagg

SEQ ID NO: 209567 - DNA, 25 bp, Artificial
  Probe
caagaacttgctgctggctgaggtc

SEQ ID NO: 209568 - DNA, 25 bp, Artificial
  Probe
cttcttccacaaggaggagtttcga

SEQ ID NO: 209569 - DNA, 25 bp, Artificial
  Probe
agaacttgctgctggctgaggtcat

SEQ ID NO: 209570 - DNA, 25 bp, Artificial
  Probe
aagctctgtcccagcggtgtcaact

SEQ ID NO: 209571 - DNA, 25 bp, Artificial
  Probe
cgacattcagagaaagctctgtccc

SEQ ID NO: 209572 - DNA, 25 bp, Artificial
  Probe
gtacccccagttcgtcagccgggtg

SEQ ID NO: 209573 - DNA, 25 bp, Artificial
  Probe
ttatcagaggcgaatgcataaacta

SEQ ID NO: 209574 - DNA, 25 bp, Artificial
  Probe
gcccatgccgggaagaccctactga

SEQ ID NO: 209575 - DNA, 25 bp, Artificial
  Probe
cgggaagaccctactgaccgggctg

SEQ ID NO: 209576 - DNA, 25 bp, Artificial
  Probe
tgtcgttcagcaagaagatgatgac

SEQ ID NO: 209577 - DNA, 25 bp, Artificial
  Probe
aagaccctactgaccgggctgctgg

SEQ ID NO: 209578 - DNA, 25 bp, Artificial
  Probe
caacgtggcccatgccgggaagacc

SEQ ID NO: 209579 - DNA, 25 bp, Artificial
  Probe
acgtgatgtcgttcagcaagaagat

SEQ ID NO: 209580 - DNA, 25 bp, Artificial
  Probe
ggggcttcttccacaaggaggagtt

SEQ ID NO: 209581 - DNA, 25 bp, Artificial
  Probe
cacgacattcagagaaagctctgtc

SEQ ID NO: 209582 - DNA, 25 bp, Artificial
  Probe
tcatcaagcgggaagacctgctcaa

SEQ ID NO: 209583 - DNA, 25 bp, Artificial
  Probe
attcagagaaagctctgtcccagcg

SEQ ID NO: 209584 - DNA, 25 bp, Artificial
  Probe
tccttaccggatcttcaacacctgg

SEQ ID NO: 209585 - DNA, 25 bp, Artificial
  Probe
acccccagttcgtcagccgggtgag

SEQ ID NO: 209586 - DNA, 25 bp, Artificial
  Probe
tcaaagtttatcagaggcgaatgca

SEQ ID NO: 209587 - DNA, 25 bp, Artificial
  Probe
gagaaagctctgtcccagcggtgtc

SEQ ID NO: 209588 - DNA, 25 bp, Artificial
  Probe
tgctcaacaacgtggcccatgccgg

SEQ ID NO: 209589 - DNA, 25 bp, Artificial
  Probe
tcaacatcatcaagcgggaagacct

SEQ ID NO: 209590 - DNA, 25 bp, Artificial
  Probe
caagtgctccttaccggatcttcaa

SEQ ID NO: 209591 - DNA, 25 bp, Artificial
  Probe
ttttcacttcaaagtttatcagagg

SEQ ID NO: 209592 - DNA, 25 bp, Artificial
  Probe
aggagtttcgaccaagtgctcctta

SEQ ID NO: 209593 - DNA, 25 bp, Artificial
  Probe
gacctgctcaacaacgtggcccatg

SEQ ID NO: 209594 - DNA, 25 bp, Artificial
  Probe
gtcgttcagcaagaagatgatgact

SEQ ID NO: 209595 - DNA, 25 bp, Artificial
  Probe
tccacaaggaggagtttcgaccaag

SEQ ID NO: 209596 - DNA, 25 bp, Artificial
  Probe
ctgggggcttcttccacaaggagga

SEQ ID NO: 209597 - DNA, 25 bp, Artificial
  Probe
cgtgatgtcgttcagcaagaagatg

SEQ ID NO: 209598 - DNA, 25 bp, Artificial
  Probe
tactgaccgggctgctggacctcca

SEQ ID NO: 209599 - DNA, 25 bp, Artificial
  Probe
tcgtggctctcaaacatcccttttg

SEQ ID NO: 209600 - DNA, 25 bp, Artificial
  Probe
gtggatgcagagtccccgcttctcc

SEQ ID NO: 209601 - DNA, 25 bp, Artificial
  Probe
agatggccgcgaagccaatgttgcc

SEQ ID NO: 209602 - DNA, 25 bp, Artificial
  Probe
ttgggggactcctcaagctgccaga

SEQ ID NO: 209603 - DNA, 25 bp, Artificial
  Probe
aaagcaaggagcacagctccttcca

SEQ ID NO: 209604 - DNA, 25 bp, Artificial
  Probe
ggctctcaaacatcccttttgaagg

SEQ ID NO: 209605 - DNA, 25 bp, Artificial
  Probe
cagaagatgctctggtgaaggccga

SEQ ID NO: 209606 - DNA, 25 bp, Artificial
  Probe
gcccacgtaggctacagcatgtacc

SEQ ID NO: 209607 - DNA, 25 bp, Artificial
  Probe
gtacctgtctattgccgagcgcgcc

SEQ ID NO: 209608 - DNA, 25 bp, Artificial
  Probe
ccagaagcagtacctgtctattgcc

SEQ ID NO: 209609 - DNA, 25 bp, Artificial
  Probe
cccggagaagctagatcggaccccg

SEQ ID NO: 209610 - DNA, 25 bp, Artificial
  Probe
ccgagagcccggagaagctagatcg

SEQ ID NO: 209611 - DNA, 25 bp, Artificial
  Probe
cacgtaggctacagcatgtaccacc

SEQ ID NO: 209612 - DNA, 25 bp, Artificial
  Probe
tggccggaagtgtctaggtttttcg

SEQ ID NO: 209613 - DNA, 25 bp, Artificial
  Probe
agcgggagtccttcctaggaagctc

SEQ ID NO: 209614 - DNA, 25 bp, Artificial
  Probe
acctgacataggtgggcccagagtc

SEQ ID NO: 209615 - DNA, 25 bp, Artificial
  Probe
agtacattttcgtggctctcaaaca

SEQ ID NO: 209616 - DNA, 25 bp, Artificial
  Probe
agctgcttccggtcctgaaaccagg

SEQ ID NO: 209617 - DNA, 25 bp, Artificial
  Probe
tccggtcctgaaaccaggcaggact

SEQ ID NO: 209618 - DNA, 25 bp, Artificial
  Probe
gactcctcaagctgccagaagatgc

SEQ ID NO: 209619 - DNA, 25 bp, Artificial
  Probe
accagaggccaaaaggactagaggc

SEQ ID NO: 209620 - DNA, 25 bp, Artificial
  Probe
cctcttctaggcagcgggagtcctt

SEQ ID NO: 209621 - DNA, 25 bp, Artificial
  Probe
agagcccggagaagctagatcggac

SEQ ID NO: 209622 - DNA, 25 bp, Artificial
  Probe
agaccagaggccaaaaggactagag

SEQ ID NO: 209623 - DNA, 25 bp, Artificial
  Probe
atgctctggtgaaggccgagagccc

SEQ ID NO: 209624 - DNA, 25 bp, Artificial
  Probe
ctcaaacatcccttttgaagggatc

SEQ ID NO: 209625 - DNA, 25 bp, Artificial
  Probe
tctatttaacagtacattttcgtgg

SEQ ID NO: 209626 - DNA, 25 bp, Artificial
  Probe
tcaaacatcccttttgaagggatcg

SEQ ID NO: 209627 - DNA, 25 bp, Artificial
  Probe
ggaccccgtggatgcagagtccccg

SEQ ID NO: 209628 - DNA, 25 bp, Artificial
  Probe
cctcaagctgccagaagatgctctg

SEQ ID NO: 209629 - DNA, 25 bp, Artificial
  Probe
aagctagatcggaccccgtggatgc

SEQ ID NO: 209630 - DNA, 25 bp, Artificial
  Probe
cctctcggccatttctctgttgggg

SEQ ID NO: 209631 - DNA, 25 bp, Artificial
  Probe
ggccgcgaagccaatgttgccgcct

SEQ ID NO: 209632 - DNA, 25 bp, Artificial
  Probe
gatcggaccccgtggatgcagagtc

SEQ ID NO: 209633 - DNA, 25 bp, Artificial
  Probe
ccgtggatgcagagtccccgcttct

SEQ ID NO: 209634 - DNA, 25 bp, Artificial
  Probe
ctaggcagcgggagtccttcctagg

SEQ ID NO: 209635 - DNA, 25 bp, Artificial
  Probe
ccaagagactgcaggaggccgagtt

SEQ ID NO: 209636 - DNA, 25 bp, Artificial
  Probe
tacgcaagcacaagaccaaccgcaa

SEQ ID NO: 209637 - DNA, 25 bp, Artificial
  Probe
ccatcagctgcttccggtcctgaaa

SEQ ID NO: 209638 - DNA, 25 bp, Artificial
  Probe
acgcaagcacaagaccaaccgcaag

SEQ ID NO: 209639 - DNA, 25 bp, Artificial
  Probe
aagatggccgcgaagccaatgttgc

SEQ ID NO: 209640 - DNA, 25 bp, Artificial
  Probe
gccgcgaagccaatgttgccgcctg

SEQ ID NO: 209641 - DNA, 25 bp, Artificial
  Probe
ccttttgaagggatcgtgtgtacta

SEQ ID NO: 209642 - DNA, 25 bp, Artificial
  Probe
cagccacctcttctaggcagcggga

SEQ ID NO: 209643 - DNA, 25 bp, Artificial
  Probe
tgtctattgccgagcgcgccgagtt

SEQ ID NO: 209644 - DNA, 25 bp, Artificial
  Probe
gccacctcttctaggcagcgggagt

SEQ ID NO: 209645 - DNA, 25 bp, Artificial
  Probe
gaccaggacctcaagtcctagacga

SEQ ID NO: 209646 - DNA, 25 bp, Artificial
  Probe
tgcctagcctataccttggcccggg

SEQ ID NO: 209647 - DNA, 25 bp, Artificial
  Probe
ttgtggcggcagtaaggcacagctt

SEQ ID NO: 209648 - DNA, 25 bp, Artificial
  Probe
aaggtggcgtacacatttgatgcgg

SEQ ID NO: 209649 - DNA, 25 bp, Artificial
  Probe
aacttcgctggctacggagcccagc

SEQ ID NO: 209650 - DNA, 25 bp, Artificial
  Probe
gatagccccagagtggcactggccc

SEQ ID NO: 209651 - DNA, 25 bp, Artificial
  Probe
gtacacatttgatgcgggccccaat

SEQ ID NO: 209652 - DNA, 25 bp, Artificial
  Probe
cctgtgatgagcagctgtctgggca

SEQ ID NO: 209653 - DNA, 25 bp, Artificial
  Probe
actggccccagctccgagttcttat

SEQ ID NO: 209654 - DNA, 25 bp, Artificial
  Probe
aggacagcaaccagtttcacgccac

SEQ ID NO: 209655 - DNA, 25 bp, Artificial
  Probe
agcacagtgggcatgcagaccagcg

SEQ ID NO: 209656 - DNA, 25 bp, Artificial
  Probe
agcgcatgccgcagcctctacgggg

SEQ ID NO: 209657 - DNA, 25 bp, Artificial
  Probe
cttcctgctggctagccgaccttag

SEQ ID NO: 209658 - DNA, 25 bp, Artificial
  Probe
gaacccacaggtagggtccattgtg

SEQ ID NO: 209659 - DNA, 25 bp, Artificial
  Probe
gccttcgcccagctgaccatgaagg

SEQ ID NO: 209660 - DNA, 25 bp, Artificial
  Probe
tgctcccgggagctcgggagctcct

SEQ ID NO: 209661 - DNA, 25 bp, Artificial
  Probe
tcaatgacacctccaggcgcatcat

SEQ ID NO: 209662 - DNA, 25 bp, Artificial
  Probe
gcatccaagagcaggacttccaggc

SEQ ID NO: 209663 - DNA, 25 bp, Artificial
  Probe
tcaccatcatctgctaggcccggat

SEQ ID NO: 209664 - DNA, 25 bp, Artificial
  Probe
gagactcaggccacagtttctttga

SEQ ID NO: 209665 - DNA, 25 bp, Artificial
  Probe
cgtggcgtcagtgaacaacttcccc

SEQ ID NO: 209666 - DNA, 25 bp, Artificial
  Probe
tagcctataccttggcccgggtcta

SEQ ID NO: 209667 - DNA, 25 bp, Artificial
  Probe
taaagtgtgccactgctgcctgcca

SEQ ID NO: 209668 - DNA, 25 bp, Artificial
  Probe
ttgctcccgggagctcgggagctcc

SEQ ID NO: 209669 - DNA, 25 bp, Artificial
  Probe
tgcgggccccaatgctgtgatcttc

SEQ ID NO: 209670 - DNA, 25 bp, Artificial
  Probe
tctacggggttgagggagacctctc

SEQ ID NO: 209671 - DNA, 25 bp, Artificial
  Probe
gctgtggaacccacaggtagggtcc

SEQ ID NO: 209672 - DNA, 25 bp, Artificial
  Probe
ggagatgacccgttgcatccaagag

SEQ ID NO: 209673 - DNA, 25 bp, Artificial
  Probe
cccaccatgggcagacgaaggtggc

SEQ ID NO: 209674 - DNA, 25 bp, Artificial
  Probe
gctgcaggtggcacccgttcttctc

SEQ ID NO: 209675 - DNA, 25 bp, Artificial
  Probe
cccctgctgcgaatggagacaagtt

SEQ ID NO: 209676 - DNA, 25 bp, Artificial
  Probe
gagctcctgtgctgatgggccacgt

SEQ ID NO: 209677 - DNA, 25 bp, Artificial
  Probe
agacctctcagaagtggcccggcgg

SEQ ID NO: 209678 - DNA, 25 bp, Artificial
  Probe
gcatctggagaaaggggttgctccc

SEQ ID NO: 209679 - DNA, 25 bp, Artificial
  Probe
gtaccctgctcaagttccgggctga

SEQ ID NO: 209680 - DNA, 25 bp, Artificial
  Probe
gatgagggctcagacagcagtgcct

SEQ ID NO: 209681 - DNA, 25 bp, Artificial
  Probe
tgcctgagcgcatgaaggagatgac

SEQ ID NO: 209682 - DNA, 25 bp, Artificial
  Probe
ggaaggacagcatcgcccggcagat

SEQ ID NO: 209683 - DNA, 25 bp, Artificial
  Probe
tttgtggcggcagtaaggcacagct

SEQ ID NO: 209684 - DNA, 25 bp, Artificial
  Probe
ctagccgaccttagggaagaggagt

SEQ ID NO: 209685 - DNA, 25 bp, Artificial
  Probe
actcaggccacagtttctttgagaa

SEQ ID NO: 209686 - DNA, 25 bp, Artificial
  Probe
gccgcagcctctacgggggcttcgt

SEQ ID NO: 209687 - DNA, 25 bp, Artificial
  Probe
gggttcagtacatcattgccactca

SEQ ID NO: 209688 - DNA, 25 bp, Artificial
  Probe
cctgagcgcatgaaggagatgaccc

SEQ ID NO: 209689 - DNA, 25 bp, Artificial
  Probe
cactctggaggacaccgtggccgag

SEQ ID NO: 209690 - DNA, 25 bp, Artificial
  Probe
cttatccttgtggtgagtgcagaga

SEQ ID NO: 209691 - DNA, 25 bp, Artificial
  Probe
gagacaactacttccgaagtgggga

SEQ ID NO: 209692 - DNA, 25 bp, Artificial
  Probe
acagcggacttcagggaacagattt

SEQ ID NO: 209693 - DNA, 25 bp, Artificial
  Probe
gctgaccagtggaacgttaactatg

SEQ ID NO: 209694 - DNA, 25 bp, Artificial
  Probe
acgtctgctaaaacgcgcgccaacg

SEQ ID NO: 209695 - DNA, 25 bp, Artificial
  Probe
gaatgtcccatttctcctggttggt

SEQ ID NO: 209696 - DNA, 25 bp, Artificial
  Probe
aaacgcgcgccaacgttgacaaggt

SEQ ID NO: 209697 - DNA, 25 bp, Artificial
  Probe
caattagagacaactacttccgaag

SEQ ID NO: 209698 - DNA, 25 bp, Artificial
  Probe
aattagagacaactacttccgaagt

SEQ ID NO: 209699 - DNA, 25 bp, Artificial
  Probe
ggaagactacgctgcaattagagac

SEQ ID NO: 209700 - DNA, 25 bp, Artificial
  Probe
acagagctgaccagtggaacgttaa

SEQ ID NO: 209701 - DNA, 25 bp, Artificial
  Probe
tcctttgcagctacagcggacttca

SEQ ID NO: 209702 - DNA, 25 bp, Artificial
  Probe
aatacgagccagaaagatggaagac

SEQ ID NO: 209703 - DNA, 25 bp, Artificial
  Probe
gagtcctttgcagctacagcggact

SEQ ID NO: 209704 - DNA, 25 bp, Artificial
  Probe
ttctcctggttggtaacaaatcaga

SEQ ID NO: 209705 - DNA, 25 bp, Artificial
  Probe
tctcctggttggtaacaaatcagat

SEQ ID NO: 209706 - DNA, 25 bp, Artificial
  Probe
cagctacagcggacttcagggaaca

SEQ ID NO: 209707 - DNA, 25 bp, Artificial
  Probe
agagacaactacttccgaagtgggg

SEQ ID NO: 209708 - DNA, 25 bp, Artificial
  Probe
aacgcgcgccaacgttgacaaggta

SEQ ID NO: 209709 - DNA, 25 bp, Artificial
  Probe
aacgttaactatgtggagacgtctg

SEQ ID NO: 209710 - DNA, 25 bp, Artificial
  Probe
tgtggagacgtctgctaaaacgcgc

SEQ ID NO: 209711 - DNA, 25 bp, Artificial
  Probe
aacagagctgaccagtggaacgtta

SEQ ID NO: 209712 - DNA, 25 bp, Artificial
  Probe
agtcctttgcagctacagcggactt

SEQ ID NO: 209713 - DNA, 25 bp, Artificial
  Probe
agctgaccagtggaacgttaactat

SEQ ID NO: 209714 - DNA, 25 bp, Artificial
  Probe
ctgaccagtggaacgttaactatgt

SEQ ID NO: 209715 - DNA, 25 bp, Artificial
  Probe
aagtgcagatcgacatcttagatac

SEQ ID NO: 209716 - DNA, 25 bp, Artificial
  Probe
ctttgcagctacagcggacttcagg

SEQ ID NO: 209717 - DNA, 25 bp, Artificial
  Probe
aagactacgctgcaattagagacaa

SEQ ID NO: 209718 - DNA, 25 bp, Artificial
  Probe
tttctcctggttggtaacaaatcag

SEQ ID NO: 209719 - DNA, 25 bp, Artificial
  Probe
gagctgaccagtggaacgttaacta

SEQ ID NO: 209720 - DNA, 25 bp, Artificial
  Probe
ctcctggttggtaacaaatcagatt

SEQ ID NO: 209721 - DNA, 25 bp, Artificial
  Probe
tacagcggacttcagggaacagatt

SEQ ID NO: 209722 - DNA, 25 bp, Artificial
  Probe
gcgcgccaacgttgacaaggtattt

SEQ ID NO: 209723 - DNA, 25 bp, Artificial
  Probe
gacgtctgctaaaacgcgcgccaac

SEQ ID NO: 209724 - DNA, 25 bp, Artificial
  Probe
aatgtcccatttctcctggttggta

SEQ ID NO: 209725 - DNA, 25 bp, Artificial
  Probe
ggaacgttaactatgtggagacgtc

SEQ ID NO: 209726 - DNA, 25 bp, Artificial
  Probe
cggacttcagggaacagattttaag

SEQ ID NO: 209727 - DNA, 25 bp, Artificial
  Probe
gcgccaacgttgacaaggtattttt

SEQ ID NO: 209728 - DNA, 25 bp, Artificial
  Probe
agagatggagtcctttgcagctaca

SEQ ID NO: 209729 - DNA, 25 bp, Artificial
  Probe
gcagatcgacatcttagatacagca

SEQ ID NO: 209730 - DNA, 25 bp, Artificial
  Probe
taactatgtggagacgtctgctaaa

SEQ ID NO: 209731 - DNA, 25 bp, Artificial
  Probe
catttctcctggttggtaacaaatc

SEQ ID NO: 209732 - DNA, 25 bp, Artificial
  Probe
cgcgcgccaacgttgacaaggtatt

SEQ ID NO: 209733 - DNA, 25 bp, Artificial
  Probe
tacagcagggcaggaagactacgct

SEQ ID NO: 209734 - DNA, 25 bp, Artificial
  Probe
tacgctgcaattagagacaactact

SEQ ID NO: 209735 - DNA, 25 bp, Artificial
  Probe
atacagcagggcaggaagactacgc

SEQ ID NO: 209736 - DNA, 25 bp, Artificial
  Probe
tggagacgtctgctaaaacgcgcgc

SEQ ID NO: 209737 - DNA, 25 bp, Artificial
  Probe
cctagcaccatgaagatcaagatca

SEQ ID NO: 209738 - DNA, 25 bp, Artificial
  Probe
gacctctatgccaacacagtgctgt

SEQ ID NO: 209739 - DNA, 25 bp, Artificial
  Probe
ctatgccaacacagtgctgtctggt

SEQ ID NO: 209740 - DNA, 25 bp, Artificial
  Probe
tggatcagcaagcaggagtacgatg

SEQ ID NO: 209741 - DNA, 25 bp, Artificial
  Probe
attggtggctctatcctggcctcac

SEQ ID NO: 209742 - DNA, 25 bp, Artificial
  Probe
ccccaaagttctacaatgtggctga

SEQ ID NO: 209743 - DNA, 25 bp, Artificial
  Probe
ctcctagcaccatgaagatcaagat

SEQ ID NO: 209744 - DNA, 25 bp, Artificial
  Probe
gacatccgtaaagacctctatgcca

SEQ ID NO: 209745 - DNA, 25 bp, Artificial
  Probe
tactgagctgcgttttacacccttt

SEQ ID NO: 209746 - DNA, 25 bp, Artificial
  Probe
tctatgccaacacagtgctgtctgg

SEQ ID NO: 209747 - DNA, 25 bp, Artificial
  Probe
caccttccagcagatgtggatcagc

SEQ ID NO: 209748 - DNA, 25 bp, Artificial
  Probe
cggactgttactgagctgcgtttta

SEQ ID NO: 209749 - DNA, 25 bp, Artificial
  Probe
gatgtggatcagcaagcaggagtac

SEQ ID NO: 209750 - DNA, 25 bp, Artificial
  Probe
taaagacctctatgccaacacagtg

SEQ ID NO: 209751 - DNA, 25 bp, Artificial
  Probe
agttctacaatgtggctgaggactt

SEQ ID NO: 209752 - DNA, 25 bp, Artificial
  Probe
ctgttactgagctgcgttttacacc

SEQ ID NO: 209753 - DNA, 25 bp, Artificial
  Probe
tttggcgcttttgactcaggattta

SEQ ID NO: 209754 - DNA, 25 bp, Artificial
  Probe
ggactgttactgagctgcgttttac

SEQ ID NO: 209755 - DNA, 25 bp, Artificial
  Probe
ccagcagatgtggatcagcaagcag

SEQ ID NO: 209756 - DNA, 25 bp, Artificial
  Probe
agctgcgttttacaccctttctttg

SEQ ID NO: 209757 - DNA, 25 bp, Artificial
  Probe
tgccaacacagtgctgtctggtggc

SEQ ID NO: 209758 - DNA, 25 bp, Artificial
  Probe
actcccagtatatacggcatagatg

SEQ ID NO: 209759 - DNA, 25 bp, Artificial
  Probe
tgtccaccttccagcagatgtggat

SEQ ID NO: 209760 - DNA, 25 bp, Artificial
  Probe
gtggctctatcctggcctcactgtc

SEQ ID NO: 209761 - DNA, 25 bp, Artificial
  Probe
tccaccttccagcagatgtggatca

SEQ ID NO: 209762 - DNA, 25 bp, Artificial
  Probe
cttccagcagatgtggatcagcaag

SEQ ID NO: 209763 - DNA, 25 bp, Artificial
  Probe
caaagttctacaatgtggctgagga

SEQ ID NO: 209764 - DNA, 25 bp, Artificial
  Probe
aagatcaagatcattgctcctcctg

SEQ ID NO: 209765 - DNA, 25 bp, Artificial
  Probe
gcggactgttactgagctgcgtttt

SEQ ID NO: 209766 - DNA, 25 bp, Artificial
  Probe
tgccctggctcctagcaccatgaag

SEQ ID NO: 209767 - DNA, 25 bp, Artificial
  Probe
actgttactgagctgcgttttacac

SEQ ID NO: 209768 - DNA, 25 bp, Artificial
  Probe
gagctgcgttttacaccctttcttt

SEQ ID NO: 209769 - DNA, 25 bp, Artificial
  Probe
atagtactcccagtatatacggcat

SEQ ID NO: 209770 - DNA, 25 bp, Artificial
  Probe
ggtggctctatcctggcctcactgt

SEQ ID NO: 209771 - DNA, 25 bp, Artificial
  Probe
accttccagcagatgtggatcagca

SEQ ID NO: 209772 - DNA, 25 bp, Artificial
  Probe
cctctatgccaacacagtgctgtct

SEQ ID NO: 209773 - DNA, 25 bp, Artificial
  Probe
agcaccatgaagatcaagatcattg

SEQ ID NO: 209774 - DNA, 25 bp, Artificial
  Probe
ccaaagttctacaatgtggctgagg

SEQ ID NO: 209775 - DNA, 25 bp, Artificial
  Probe
ttgatttggcgcttttgactcagga

SEQ ID NO: 209776 - DNA, 25 bp, Artificial
  Probe
gccctggctcctagcaccatgaaga

SEQ ID NO: 209777 - DNA, 25 bp, Artificial
  Probe
cccccaaagttctacaatgtggctg

SEQ ID NO: 209778 - DNA, 25 bp, Artificial
  Probe
cgtaaagacctctatgccaacacag

SEQ ID NO: 209779 - DNA, 25 bp, Artificial
  Probe
atgccaacacagtgctgtctggtgg

SEQ ID NO: 209780 - DNA, 25 bp, Artificial
  Probe
gctgcgttttacaccctttctttga

SEQ ID NO: 209781 - DNA, 25 bp, Artificial
  Probe
ctacaatgtggctgaggactttgat

SEQ ID NO: 209782 - DNA, 25 bp, Artificial
  Probe
atcccccaaagttctacaatgtggc

SEQ ID NO: 209783 - DNA, 25 bp, Artificial
  Probe
catccctgaatctgccggtcctgga

SEQ ID NO: 209784 - DNA, 25 bp, Artificial
  Probe
ggaaaacagcagcttctcttcagcc

SEQ ID NO: 209785 - DNA, 25 bp, Artificial
  Probe
tcctgattcagaagataacggatga

SEQ ID NO: 209786 - DNA, 25 bp, Artificial
  Probe
acgggatgcgcgtcttaaatcacag

SEQ ID NO: 209787 - DNA, 25 bp, Artificial
  Probe
atctgccggtcctggaagttggcag

SEQ ID NO: 209788 - DNA, 25 bp, Artificial
  Probe
ctgcgagttgttctaatagtggtgc

SEQ ID NO: 209789 - DNA, 25 bp, Artificial
  Probe
tgaatctgccggtcctggaagttgg

SEQ ID NO: 209790 - DNA, 25 bp, Artificial
  Probe
acggtcacgggctctttcacggcag

SEQ ID NO: 209791 - DNA, 25 bp, Artificial
  Probe
tcacaggtgcacataacattctctg

SEQ ID NO: 209792 - DNA, 25 bp, Artificial
  Probe
atccacggtcatctaccatccagag

SEQ ID NO: 209793 - DNA, 25 bp, Artificial
  Probe
agttggcaggctggaaaacagcagc

SEQ ID NO: 209794 - DNA, 25 bp, Artificial
  Probe
tgcccccagacctgcggttagaaga

SEQ ID NO: 209795 - DNA, 25 bp, Artificial
  Probe
gagagtcgagcactgctcccttctt

SEQ ID NO: 209796 - DNA, 25 bp, Artificial
  Probe
gagccaccaacaacctttctaggtc

SEQ ID NO: 209797 - DNA, 25 bp, Artificial
  Probe
gcagctggagccaccaacaaccttt

SEQ ID NO: 209798 - DNA, 25 bp, Artificial
  Probe
ggagcacctcaaaggcctgaagtgc

SEQ ID NO: 209799 - DNA, 25 bp, Artificial
  Probe
gtgagatgtttctccccttacggtc

SEQ ID NO: 209800 - DNA, 25 bp, Artificial
  Probe
aaatcatggtggtcgtgtacttttc

SEQ ID NO: 209801 - DNA, 25 bp, Artificial
  Probe
tttcacggcagtgacaggtcactgc

SEQ ID NO: 209802 - DNA, 25 bp, Artificial
  Probe
ctaggggcagcttggtgtaaatcat

SEQ ID NO: 209803 - DNA, 25 bp, Artificial
  Probe
acctcaaaggcctgaagtgcagtag

SEQ ID NO: 209804 - DNA, 25 bp, Artificial
  Probe
taaatcacgggatgcgcgtcttaaa

SEQ ID NO: 209805 - DNA, 25 bp, Artificial
  Probe
gctgtgagcccttcgcagctggagc

SEQ ID NO: 209806 - DNA, 25 bp, Artificial
  Probe
gcagtagctgtgagcccttcgcagc

SEQ ID NO: 209807 - DNA, 25 bp, Artificial
  Probe
atataaaactggagcacctcaaagg

SEQ ID NO: 209808 - DNA, 25 bp, Artificial
  Probe
gcacataacattctctgtaaatagg

SEQ ID NO: 209809 - DNA, 25 bp, Artificial
  Probe
aagtgagatgtttctccccttacgg

SEQ ID NO: 209810 - DNA, 25 bp, Artificial
  Probe
cacagaacttcctgattcagaagat

SEQ ID NO: 209811 - DNA, 25 bp, Artificial
  Probe
aacctttctaggtccaattctgatg

SEQ ID NO: 209812 - DNA, 25 bp, Artificial
  Probe
gtcttaaatcacaggtgcacataac

SEQ ID NO: 209813 - DNA, 25 bp, Artificial
  Probe
gaatccattcgcagggagaaaacac

SEQ ID NO: 209814 - DNA, 25 bp, Artificial
  Probe
ctggaagttggcaggctggaaaaca

SEQ ID NO: 209815 - DNA, 25 bp, Artificial
  Probe
gagaaaacacagaacttcctgattc

SEQ ID NO: 209816 - DNA, 25 bp, Artificial
  Probe
ctctaccgagtcatccctgaatctg

SEQ ID NO: 209817 - DNA, 25 bp, Artificial
  Probe
tgccgaacttcaagtagaaaaaggg

SEQ ID NO: 209818 - DNA, 25 bp, Artificial
  Probe
tgtaatggagcacactctaggggca

SEQ ID NO: 209819 - DNA, 25 bp, Artificial
  Probe
tggagcacactctaggggcagcttg

SEQ ID NO: 209820 - DNA, 25 bp, Artificial
  Probe
ccattcgcagggagaaaacacagaa

SEQ ID NO: 209821 - DNA, 25 bp, Artificial
  Probe
tttgcccccagacctgcggttagaa

SEQ ID NO: 209822 - DNA, 25 bp, Artificial
  Probe
caagggactggacacccttgtggaa

SEQ ID NO: 209823 - DNA, 25 bp, Artificial
  Probe
gcagtgacaggtcactgcgagttgt

SEQ ID NO: 209824 - DNA, 25 bp, Artificial
  Probe
cactctaggggcagcttggtgtaaa

SEQ ID NO: 209825 - DNA, 25 bp, Artificial
  Probe
gagtcgagcactgctcccttcttct

SEQ ID NO: 209826 - DNA, 25 bp, Artificial
  Probe
acagagaccatccacggtcatctac

SEQ ID NO: 209827 - DNA, 25 bp, Artificial
  Probe
atccagagggagagtcgagcactgc

SEQ ID NO: 209828 - DNA, 25 bp, Artificial
  Probe
cagcttggtgtaaatcatggtggtc

SEQ ID NO: 209829 - DNA, 25 bp, Artificial
  Probe
agcgtgtgttcaacattgatctttt

SEQ ID NO: 209830 - DNA, 25 bp, Artificial
  Probe
tacaggcaggtgagcctaaggaagc

SEQ ID NO: 209831 - DNA, 25 bp, Artificial
  Probe
tggcagagagcgtgtgttcaacatt

SEQ ID NO: 209832 - DNA, 25 bp, Artificial
  Probe
taagtttctggctctgaccagatac

SEQ ID NO: 209833 - DNA, 25 bp, Artificial
  Probe
cagccagggctagtcaggtctagag

SEQ ID NO: 209834 - DNA, 25 bp, Artificial
  Probe
agatagtgggccagcagtcctttgg

SEQ ID NO: 209835 - DNA, 25 bp, Artificial
  Probe
agaatctgtcaggtgatagccgggc

SEQ ID NO: 209836 - DNA, 25 bp, Artificial
  Probe
ctgtcaggtgatagccgggcaccaa

SEQ ID NO: 209837 - DNA, 25 bp, Artificial
  Probe
agtatacgctgagtaaacaggacaa

SEQ ID NO: 209838 - DNA, 25 bp, Artificial
  Probe
tgaagaatctgtcaggtgatagccg

SEQ ID NO: 209839 - DNA, 25 bp, Artificial
  Probe
ctggctctgaccagatactgtagag

SEQ ID NO: 209840 - DNA, 25 bp, Artificial
  Probe
catgattggcagagagcgtgtgttc

SEQ ID NO: 209841 - DNA, 25 bp, Artificial
  Probe
tatacgctgagtaaacaggacaaac

SEQ ID NO: 209842 - DNA, 25 bp, Artificial
  Probe
accacagaagggtctgatgggagtt

SEQ ID NO: 209843 - DNA, 25 bp, Artificial
  Probe
tgatagccgggcaccaaagtatacg

SEQ ID NO: 209844 - DNA, 25 bp, Artificial
  Probe
gattctaagccaaggcccaagtgtt

SEQ ID NO: 209845 - DNA, 25 bp, Artificial
  Probe
gcaccaaagtatacgctgagtaaac

SEQ ID NO: 209846 - DNA, 25 bp, Artificial
  Probe
agcttaagtttctggctctgaccag

SEQ ID NO: 209847 - DNA, 25 bp, Artificial
  Probe
cagtcctttggtacaaagccaccgg

SEQ ID NO: 209848 - DNA, 25 bp, Artificial
  Probe
ttttttacaggcaggtgagcctaag

SEQ ID NO: 209849 - DNA, 25 bp, Artificial
  Probe
ggattctaagccaaggcccaagtgt

SEQ ID NO: 209850 - DNA, 25 bp, Artificial
  Probe
ctcacagtaagaggtgaagaatctg

SEQ ID NO: 209851 - DNA, 25 bp, Artificial
  Probe
acagtggctggacatgggcccagcc

SEQ ID NO: 209852 - DNA, 25 bp, Artificial
  Probe
ctctgaccagatactgtagagcctc

SEQ ID NO: 209853 - DNA, 25 bp, Artificial
  Probe
aacatgggtgcctaggtatctctga

SEQ ID NO: 209854 - DNA, 25 bp, Artificial
  Probe
tgagcctaaggaagcttaagtttct

SEQ ID NO: 209855 - DNA, 25 bp, Artificial
  Probe
agagcgtgtgttcaacattgatctt

SEQ ID NO: 209856 - DNA, 25 bp, Artificial
  Probe
ctaggtatctctgaagcagacagcc

SEQ ID NO: 209857 - DNA, 25 bp, Artificial
  Probe
catcccagatagtgggccagcagtc

SEQ ID NO: 209858 - DNA, 25 bp, Artificial
  Probe
ccaagtgttaggaccacagaagggt

SEQ ID NO: 209859 - DNA, 25 bp, Artificial
  Probe
caaagtatacgctgagtaaacagga

SEQ ID NO: 209860 - DNA, 25 bp, Artificial
  Probe
attgggattctaagccaaggcccaa

SEQ ID NO: 209861 - DNA, 25 bp, Artificial
  Probe
tctgaagcagacagccatgtggggc

SEQ ID NO: 209862 - DNA, 25 bp, Artificial
  Probe
ctagtcaggtctagaggcaattggg

SEQ ID NO: 209863 - DNA, 25 bp, Artificial
  Probe
ggcaggtgagcctaaggaagcttaa

SEQ ID NO: 209864 - DNA, 25 bp, Artificial
  Probe
cagatactgtagagcctcacagtaa

SEQ ID NO: 209865 - DNA, 25 bp, Artificial
  Probe
tactgtagagcctcacagtaagagg

SEQ ID NO: 209866 - DNA, 25 bp, Artificial
  Probe
cacagaagggtctgatgggagttca

SEQ ID NO: 209867 - DNA, 25 bp, Artificial
  Probe
cagacagtggctggacatgggccca

SEQ ID NO: 209868 - DNA, 25 bp, Artificial
  Probe
cagtggctggacatgggcccagcca

SEQ ID NO: 209869 - DNA, 25 bp, Artificial
  Probe
aagcagacagccatgtggggcctac

SEQ ID NO: 209870 - DNA, 25 bp, Artificial
  Probe
tttttacaggcaggtgagcctaagg

SEQ ID NO: 209871 - DNA, 25 bp, Artificial
  Probe
gaagcttaagtttctggctctgacc

SEQ ID NO: 209872 - DNA, 25 bp, Artificial
  Probe
gacaaacatgggtgcctaggtatct

SEQ ID NO: 209873 - DNA, 25 bp, Artificial
  Probe
cccagccagggctagtcaggtctag

SEQ ID NO: 209874 - DNA, 25 bp, Artificial
  Probe
ttaggaccacagaagggtctgatgg

SEQ ID NO: 209875 - DNA, 25 bp, Artificial
  Probe
tggtcaggcaggagccccactggct

SEQ ID NO: 209876 - DNA, 25 bp, Artificial
  Probe
ccctgtcacttaactggccatgtga

SEQ ID NO: 209877 - DNA, 25 bp, Artificial
  Probe
ctgtgaggctccataggaaattaag

SEQ ID NO: 209878 - DNA, 25 bp, Artificial
  Probe
gtgctgtgcccctaagttcattttc

SEQ ID NO: 209879 - DNA, 25 bp, Artificial
  Probe
gccctggggcctctttactaaagca

SEQ ID NO: 209880 - DNA, 25 bp, Artificial
  Probe
cccttgtgctcaccagggtgagata

SEQ ID NO: 209881 - DNA, 25 bp, Artificial
  Probe
tttcaccatggttggcttgtttggg

SEQ ID NO: 209882 - DNA, 25 bp, Artificial
  Probe
gaccatttggtcaggcaggagcccc

SEQ ID NO: 209883 - DNA, 25 bp, Artificial
  Probe
ttgctgtgccccaggactttgtacc

SEQ ID NO: 209884 - DNA, 25 bp, Artificial
  Probe
gtgagaatgcccttactggtgacca

SEQ ID NO: 209885 - DNA, 25 bp, Artificial
  Probe
gcactgtttgctgctggcagacacg

SEQ ID NO: 209886 - DNA, 25 bp, Artificial
  Probe
ctaaagcactgtttgctgctggcag

SEQ ID NO: 209887 - DNA, 25 bp, Artificial
  Probe
tgacttaccttctgggcctcagctt

SEQ ID NO: 209888 - DNA, 25 bp, Artificial
  Probe
caggactttgtacctcactgccctg

SEQ ID NO: 209889 - DNA, 25 bp, Artificial
  Probe
tgtggtaggcatttaccgttcggag

SEQ ID NO: 209890 - DNA, 25 bp, Artificial
  Probe
tttggggagcccttgctgtgcccca

SEQ ID NO: 209891 - DNA, 25 bp, Artificial
  Probe
tcccagctgctctggcccagtgttt

SEQ ID NO: 209892 - DNA, 25 bp, Artificial
  Probe
tggtctgagccaattgtgtttgtgc

SEQ ID NO: 209893 - DNA, 25 bp, Artificial
  Probe
actgtggtaggcatttaccgttcgg

SEQ ID NO: 209894 - DNA, 25 bp, Artificial
  Probe
acgtgggtgtgagtcctgaccctgt

SEQ ID NO: 209895 - DNA, 25 bp, Artificial
  Probe
ctcactgccctggatcagttgggga

SEQ ID NO: 209896 - DNA, 25 bp, Artificial
  Probe
cgagcagaagctgacaccagtgagt

SEQ ID NO: 209897 - DNA, 25 bp, Artificial
  Probe
ctgttgtgactcttaaagataaagc

SEQ ID NO: 209898 - DNA, 25 bp, Artificial
  Probe
gcccctaagttcattttcaccatgg

SEQ ID NO: 209899 - DNA, 25 bp, Artificial
  Probe
cagactgttgtgactcttaaagata

SEQ ID NO: 209900 - DNA, 25 bp, Artificial
  Probe
gtttttctgctcagggccctggggc

SEQ ID NO: 209901 - DNA, 25 bp, Artificial
  Probe
cagttggggatctcccagctgctct

SEQ ID NO: 209902 - DNA, 25 bp, Artificial
  Probe
gccttttcttctgctcacccttgtg

SEQ ID NO: 209903 - DNA, 25 bp, Artificial
  Probe
gtgtttgtgctgtgcccctaagttc

SEQ ID NO: 209904 - DNA, 25 bp, Artificial
  Probe
cttctgggcctcagcttctcacaga

SEQ ID NO: 209905 - DNA, 25 bp, Artificial
  Probe
aactggccatgtgaccttggtcagg

SEQ ID NO: 209906 - DNA, 25 bp, Artificial
  Probe
tttgtacctcactgccctggatcag

SEQ ID NO: 209907 - DNA, 25 bp, Artificial
  Probe
ccgttcggagggaactccattctgg

SEQ ID NO: 209908 - DNA, 25 bp, Artificial
  Probe
cttgactggctgaatattgtctgat

SEQ ID NO: 209909 - DNA, 25 bp, Artificial
  Probe
gtgtgagtcctgaccctgtcactta

SEQ ID NO: 209910 - DNA, 25 bp, Artificial
  Probe
ccctggatcagttggggatctccca

SEQ ID NO: 209911 - DNA, 25 bp, Artificial
  Probe
tgctcacccttgtgctcaccagggt

SEQ ID NO: 209912 - DNA, 25 bp, Artificial
  Probe
tgctcagggccctggggcctcttta

SEQ ID NO: 209913 - DNA, 25 bp, Artificial
  Probe
tgccccaggactttgtacctcactg

SEQ ID NO: 209914 - DNA, 25 bp, Artificial
  Probe
gagcccttgctgtgccccaggactt

SEQ ID NO: 209915 - DNA, 25 bp, Artificial
  Probe
ctgctctggcccagtgtttttctgc

SEQ ID NO: 209916 - DNA, 25 bp, Artificial
  Probe
gctgtgcccctaagttcattttcac

SEQ ID NO: 209917 - DNA, 25 bp, Artificial
  Probe
ggcaggagccccactggcttgactg

SEQ ID NO: 209918 - DNA, 25 bp, Artificial
  Probe
tcagttggggatctcccagctgctc

SEQ ID NO: 209919 - DNA, 25 bp, Artificial
  Probe
tggggatctcccagctgctctggcc

SEQ ID NO: 209920 - DNA, 25 bp, Artificial
  Probe
gaccactgtggtaggcatttaccgt

SEQ ID NO: 209921 - DNA, 25 bp, Artificial
  Probe
cagtaaatacgcagcagaccgtaac

SEQ ID NO: 209922 - DNA, 25 bp, Artificial
  Probe
acaggccctggtggagttccagttc

SEQ ID NO: 209923 - DNA, 25 bp, Artificial
  Probe
gtatcgccgcaacttcaattaccga

SEQ ID NO: 209924 - DNA, 25 bp, Artificial
  Probe
accccaggaagtaccttcgcagtgt

SEQ ID NO: 209925 - DNA, 25 bp, Artificial
  Probe
ccctggtggagttccagttcaaggc

SEQ ID NO: 209926 - DNA, 25 bp, Artificial
  Probe
cggtatcgccgcaacttcaattacc

SEQ ID NO: 209927 - DNA, 25 bp, Artificial
  Probe
tgacaaccagggtgcaggagagcaa

SEQ ID NO: 209928 - DNA, 25 bp, Artificial
  Probe
gtggagttccagttcaaggcagtaa

SEQ ID NO: 209929 - DNA, 25 bp, Artificial
  Probe
tgttacaggccctggtggagttcca

SEQ ID NO: 209930 - DNA, 25 bp, Artificial
  Probe
ccagttcaaggcagtaaatacgcag

SEQ ID NO: 209931 - DNA, 25 bp, Artificial
  Probe
cgtcgtaggggtcctccacgcaatt

SEQ ID NO: 209932 - DNA, 25 bp, Artificial
  Probe
taggggtcctccacgcaattaccag

SEQ ID NO: 209933 - DNA, 25 bp, Artificial
  Probe
cgctatccacgtcgtaggggtcctc

SEQ ID NO: 209934 - DNA, 25 bp, Artificial
  Probe
gccgcaacttcaattaccgacgcag

SEQ ID NO: 209935 - DNA, 25 bp, Artificial
  Probe
acgtcgtaggggtcctccacgcaat

SEQ ID NO: 209936 - DNA, 25 bp, Artificial
  Probe
caccagacggccataaagaagaata

SEQ ID NO: 209937 - DNA, 25 bp, Artificial
  Probe
taccagcaaaattaccagaatagtg

SEQ ID NO: 209938 - DNA, 25 bp, Artificial
  Probe
cctggtggagttccagttcaaggca

SEQ ID NO: 209939 - DNA, 25 bp, Artificial
  Probe
tcgtaggggtcctccacgcaattac

SEQ ID NO: 209940 - DNA, 25 bp, Artificial
  Probe
ggtcctccacgcaattaccagcaaa

SEQ ID NO: 209941 - DNA, 25 bp, Artificial
  Probe
atcgccgcaacttcaattaccgacg

SEQ ID NO: 209942 - DNA, 25 bp, Artificial
  Probe
aagtaccttcgcagtgtaggagatg

SEQ ID NO: 209943 - DNA, 25 bp, Artificial
  Probe
aaagcgctcctgaaggccaggccca

SEQ ID NO: 209944 - DNA, 25 bp, Artificial
  Probe
accttcgcagtgtaggagatggaga

SEQ ID NO: 209945 - DNA, 25 bp, Artificial
  Probe
ccatcatccggtttggtcatccaac

SEQ ID NO: 209946 - DNA, 25 bp, Artificial
  Probe
taaatacgcagcagaccgtaaccat

SEQ ID NO: 209947 - DNA, 25 bp, Artificial
  Probe
cagctaatgttacaggccctggtgg

SEQ ID NO: 209948 - DNA, 25 bp, Artificial
  Probe
gaggcagctaatgttacaggccctg

SEQ ID NO: 209949 - DNA, 25 bp, Artificial
  Probe
gtaggggtcctccacgcaattacca

SEQ ID NO: 209950 - DNA, 25 bp, Artificial
  Probe
ggtatcgccgcaacttcaattaccg

SEQ ID NO: 209951 - DNA, 25 bp, Artificial
  Probe
atcggaaagcgctcctgaaggccag

SEQ ID NO: 209952 - DNA, 25 bp, Artificial
  Probe
ataaccccaggaagtaccttcgcag

SEQ ID NO: 209953 - DNA, 25 bp, Artificial
  Probe
tcggaaagcgctcctgaaggccagg

SEQ ID NO: 209954 - DNA, 25 bp, Artificial
  Probe
tcaacgtcggtatcgccgcaacttc

SEQ ID NO: 209955 - DNA, 25 bp, Artificial
  Probe
ccccctgtgcaaggagaagtgatgg

SEQ ID NO: 209956 - DNA, 25 bp, Artificial
  Probe
agctaatgttacaggccctggtgga

SEQ ID NO: 209957 - DNA, 25 bp, Artificial
  Probe
tggtggagttccagttcaaggcagt

SEQ ID NO: 209958 - DNA, 25 bp, Artificial
  Probe
tttgtacaccagacggccataaaga

SEQ ID NO: 209959 - DNA, 25 bp, Artificial
  Probe
atttgtacaccagacggccataaag

SEQ ID NO: 209960 - DNA, 25 bp, Artificial
  Probe
agttccagttcaaggcagtaaatac

SEQ ID NO: 209961 - DNA, 25 bp, Artificial
  Probe
aggccctggtggagttccagttcaa

SEQ ID NO: 209962 - DNA, 25 bp, Artificial
  Probe
caggaagtaccttcgcagtgtagga

SEQ ID NO: 209963 - DNA, 25 bp, Artificial
  Probe
ccagcaaaattaccagaatagtgag

SEQ ID NO: 209964 - DNA, 25 bp, Artificial
  Probe
aatacgcagcagaccgtaaccatta

SEQ ID NO: 209965 - DNA, 25 bp, Artificial
  Probe
ccagacggccataaagaagaataac

SEQ ID NO: 209966 - DNA, 25 bp, Artificial
  Probe
tatccacgtcgtaggggtcctccac

SEQ ID NO: 209967 - DNA, 25 bp, Artificial
  Probe
acacagaccaagtgatcaaatcaag

SEQ ID NO: 209968 - DNA, 25 bp, Artificial
  Probe
gcttctatcacctgggacgacctgg

SEQ ID NO: 209969 - DNA, 25 bp, Artificial
  Probe
cagaccaagtgatcaaatcaaggaa

SEQ ID NO: 209970 - DNA, 25 bp, Artificial
  Probe
agtggataccttcatgttcgagggc

SEQ ID NO: 209971 - DNA, 25 bp, Artificial
  Probe
tcacaacccaactgtgtggccaaat

SEQ ID NO: 209972 - DNA, 25 bp, Artificial
  Probe
tgagcagaatgctcagcacacctgt

SEQ ID NO: 209973 - DNA, 25 bp, Artificial
  Probe
aaggagatccagagtctcctaggag

SEQ ID NO: 209974 - DNA, 25 bp, Artificial
  Probe
aaggaaggctcaacttcaggacgag

SEQ ID NO: 209975 - DNA, 25 bp, Artificial
  Probe
ctgaacaccagcagggatgcaggaa

SEQ ID NO: 209976 - DNA, 25 bp, Artificial
  Probe
gattacacagaccaagtgatcaaat

SEQ ID NO: 209977 - DNA, 25 bp, Artificial
  Probe
agatccagagtctcctaggagatgg

SEQ ID NO: 209978 - DNA, 25 bp, Artificial
  Probe
catccttctgtttgccagaatagaa

SEQ ID NO: 209979 - DNA, 25 bp, Artificial
  Probe
gctgtgcttctggtctccttgtctg

SEQ ID NO: 209980 - DNA, 25 bp, Artificial
  Probe
gtttgaccttgaccttaatgatctc

SEQ ID NO: 209981 - DNA, 25 bp, Artificial
  Probe
gaagtattgccctatgattcgatat

SEQ ID NO: 209982 - DNA, 25 bp, Artificial
  Probe
tagcggtatctcttggatcttctat

SEQ ID NO: 209983 - DNA, 25 bp, Artificial
  Probe
tgacccttatcgatttgcaccagag

SEQ ID NO: 209984 - DNA, 25 bp, Artificial
  Probe
gtctttctgtcagtcactcttgtcc

SEQ ID NO: 209985 - DNA, 25 bp, Artificial
  Probe
acagctgtgagcagaatgctcagca

SEQ ID NO: 209986 - DNA, 25 bp, Artificial
  Probe
gtctccttgtctgtcagtctttcta

SEQ ID NO: 209987 - DNA, 25 bp, Artificial
  Probe
tttggccacaaatcctgaacaccag

SEQ ID NO: 209988 - DNA, 25 bp, Artificial
  Probe
tgctgtgcttctggtctccttgtct

SEQ ID NO: 209989 - DNA, 25 bp, Artificial
  Probe
ccagagtctcctaggagatggagct

SEQ ID NO: 209990 - DNA, 25 bp, Artificial
  Probe
cagcatgctgtctgccatttgtctt

SEQ ID NO: 209991 - DNA, 25 bp, Artificial
  Probe
agatggagcttctatcacctgggac

SEQ ID NO: 209992 - DNA, 25 bp, Artificial
  Probe
atcaaatcaaggaaggctcaacttc

SEQ ID NO: 209993 - DNA, 25 bp, Artificial
  Probe
gccatttgtctttctgtcagtcact

SEQ ID NO: 209994 - DNA, 25 bp, Artificial
  Probe
ggtatcacagtcatgctctccttct

SEQ ID NO: 209995 - DNA, 25 bp, Artificial
  Probe
tcgatttgcaccagagtcttcccga

SEQ ID NO: 209996 - DNA, 25 bp, Artificial
  Probe
gagctttataccaatgtcataattg

SEQ ID NO: 209997 - DNA, 25 bp, Artificial
  Probe
gaggatctacccacctgtaacagct

SEQ ID NO: 209998 - DNA, 25 bp, Artificial
  Probe
tttacccaaaggtatcacagtcatg

SEQ ID NO: 209999 - DNA, 25 bp, Artificial
  Probe
gcagaatgctcagcacacctgtcac

SEQ ID NO: 210000 - DNA, 25 bp, Artificial
  Probe
gctcaacttcaggacgaggaagagt

SEQ ID NO: 210001 - DNA, 25 bp, Artificial
  Probe
aatccccataccaagactcgtgttg

SEQ ID NO: 210002 - DNA, 25 bp, Artificial
  Probe
ctcctaggagatggagcttctatca

SEQ ID NO: 210003 - DNA, 25 bp, Artificial
  Probe
tcacagtcatgctctccttctatgg

SEQ ID NO: 210004 - DNA, 25 bp, Artificial
  Probe
atcaaggaaggctcaacttcaggac

SEQ ID NO: 210005 - DNA, 25 bp, Artificial
  Probe
gctccaataatcttgacagcacaag

SEQ ID NO: 210006 - DNA, 25 bp, Artificial
  Probe
atgctgtctgccatttgtctttctg

SEQ ID NO: 210007 - DNA, 25 bp, Artificial
  Probe
cttctgtttgccagaatagaaaatg

SEQ ID NO: 210008 - DNA, 25 bp, Artificial
  Probe
ctacctgacttcatgtttgaccttg

SEQ ID NO: 210009 - DNA, 25 bp, Artificial
  Probe
cttcaggacgaggaagagttgcaaa

SEQ ID NO: 210010 - DNA, 25 bp, Artificial
  Probe
gtcatgctctccttctatggccttc

SEQ ID NO: 210011 - DNA, 25 bp, Artificial
  Probe
caataatcttgacagcacaagacag

SEQ ID NO: 210012 - DNA, 25 bp, Artificial
  Probe
cacagctagcggtatctcttggatc

SEQ ID NO: 210013 - DNA, 25 bp, Artificial
  Probe
cctcttaatgcaagaggattataga

SEQ ID NO: 210014 - DNA, 25 bp, Artificial
  Probe
tgacaactgggaacaagctgagggt

SEQ ID NO: 210015 - DNA, 25 bp, Artificial
  Probe
agacacataggcaaagctagtaagc

SEQ ID NO: 210016 - DNA, 25 bp, Artificial
  Probe
aaagctgacaactgggaacaagctg

SEQ ID NO: 210017 - DNA, 25 bp, Artificial
  Probe
ctagttaccaaatgttgtacttgat

SEQ ID NO: 210018 - DNA, 25 bp, Artificial
  Probe
tttcttaccagaggtaaagtacatt

SEQ ID NO: 210019 - DNA, 25 bp, Artificial
  Probe
gtgccttagaatcattgtctcttac

SEQ ID NO: 210020 - DNA, 25 bp, Artificial
  Probe
gttggagtaaccagttcctgttcat

SEQ ID NO: 210021 - DNA, 25 bp, Artificial
  Probe
tcttaccagaggtaaagtacattgc

SEQ ID NO: 210022 - DNA, 25 bp, Artificial
  Probe
gtcaacctggttatgttctttacct

SEQ ID NO: 210023 - DNA, 25 bp, Artificial
  Probe
ggttgcctgggcttgcctggacttc

SEQ ID NO: 210024 - DNA, 25 bp, Artificial
  Probe
aatagtagtcaacctggttatgttc

SEQ ID NO: 210025 - DNA, 25 bp, Artificial
  Probe
agctttacacctcttaatgcaagag

SEQ ID NO: 210026 - DNA, 25 bp, Artificial
  Probe
acaagctgagggtgccttagaatca

SEQ ID NO: 210027 - DNA, 25 bp, Artificial
  Probe
ccaattgatgagagcttttgaaact

SEQ ID NO: 210028 - DNA, 25 bp, Artificial
  Probe
taaagtacattgcaaagctgacaac

SEQ ID NO: 210029 - DNA, 25 bp, Artificial
  Probe
agctagtaagctagttggagtaacc

SEQ ID NO: 210030 - DNA, 25 bp, Artificial
  Probe
ctgagggtgccttagaatcattgtc

SEQ ID NO: 210031 - DNA, 25 bp, Artificial
  Probe
ctgggaacaagctgagggtgcctta

SEQ ID NO: 210032 - DNA, 25 bp, Artificial
  Probe
ctatgccagtaatttcttaccagag

SEQ ID NO: 210033 - DNA, 25 bp, Artificial
  Probe
agcttttgaaacttgtttctcagtg

SEQ ID NO: 210034 - DNA, 25 bp, Artificial
  Probe
tgccttgtgatgtctgatttttaac

SEQ ID NO: 210035 - DNA, 25 bp, Artificial
  Probe
tcagtgacaggctaacaaagacatg

SEQ ID NO: 210036 - DNA, 25 bp, Artificial
  Probe
cctgggcttgcctggacttcagaca

SEQ ID NO: 210037 - DNA, 25 bp, Artificial
  Probe
catttctaaatgttctattggcaga

SEQ ID NO: 210038 - DNA, 25 bp, Artificial
  Probe
aacctggttatgttctttacctatg

SEQ ID NO: 210039 - DNA, 25 bp, Artificial
  Probe
cttcagacacataggcaaagctagt

SEQ ID NO: 210040 - DNA, 25 bp, Artificial
  Probe
ctaaatgttctattggcagagacgg

SEQ ID NO: 210041 - DNA, 25 bp, Artificial
  Probe
agggtgccttagaatcattgtctct

SEQ ID NO: 210042 - DNA, 25 bp, Artificial
  Probe
gttatgttctttacctatgccagta

SEQ ID NO: 210043 - DNA, 25 bp, Artificial
  Probe
tctattggcagagacggttgcctgg

SEQ ID NO: 210044 - DNA, 25 bp, Artificial
  Probe
aagctagttggagtaaccagttcct

SEQ ID NO: 210045 - DNA, 25 bp, Artificial
  Probe
tttctcagtgacaggctaacaaaga

SEQ ID NO: 210046 - DNA, 25 bp, Artificial
  Probe
cagttcctgttcatgtgggaatagt

SEQ ID NO: 210047 - DNA, 25 bp, Artificial
  Probe
acatttgccttgtgatgtctgattt

SEQ ID NO: 210048 - DNA, 25 bp, Artificial
  Probe
tgttctattggcagagacggttgcc

SEQ ID NO: 210049 - DNA, 25 bp, Artificial
  Probe
gccagtaatttcttaccagaggtaa

SEQ ID NO: 210050 - DNA, 25 bp, Artificial
  Probe
acacataggcaaagctagtaagcta

SEQ ID NO: 210051 - DNA, 25 bp, Artificial
  Probe
tgaacatttgccttgtgatgtctga

SEQ ID NO: 210052 - DNA, 25 bp, Artificial
  Probe
ttctaaatgttctattggcagagac

SEQ ID NO: 210053 - DNA, 25 bp, Artificial
  Probe
cagtaatttcttaccagaggtaaag

SEQ ID NO: 210054 - DNA, 25 bp, Artificial
  Probe
ctgacaactgggaacaagctgaggg

SEQ ID NO: 210055 - DNA, 25 bp, Artificial
  Probe
acacctcttaatgcaagaggattat

SEQ ID NO: 210056 - DNA, 25 bp, Artificial
  Probe
ccttgtgatgtctgatttttaacat

SEQ ID NO: 210057 - DNA, 25 bp, Artificial
  Probe
gttgcctgggcttgcctggacttca

SEQ ID NO: 210058 - DNA, 25 bp, Artificial
  Probe
tagtcaacctggttatgttctttac

SEQ ID NO: 210059 - DNA, 25 bp, Artificial
  Probe
tccgcttgaagaaactgaagcgtca

SEQ ID NO: 210060 - DNA, 25 bp, Artificial
  Probe
tcagagccgggaagcccgccaacag

SEQ ID NO: 210061 - DNA, 25 bp, Artificial
  Probe
gtgtcttatcagaagaacagatccg

SEQ ID NO: 210062 - DNA, 25 bp, Artificial
  Probe
tacaaccctgggagtgagagcatca

SEQ ID NO: 210063 - DNA, 25 bp, Artificial
  Probe
aaacgactaacgttgtatgccatct

SEQ ID NO: 210064 - DNA, 25 bp, Artificial
  Probe
aacgtgcaggaccagctccaagtag

SEQ ID NO: 210065 - DNA, 25 bp, Artificial
  Probe
gatttcagttacaaccgggaagact

SEQ ID NO: 210066 - DNA, 25 bp, Artificial
  Probe
agcggtggccactgccccatggaca

SEQ ID NO: 210067 - DNA, 25 bp, Artificial
  Probe
cccatggacacctacatgcggcgga

SEQ ID NO: 210068 - DNA, 25 bp, Artificial
  Probe
attgagaagttggtggctgcccagc

SEQ ID NO: 210069 - DNA, 25 bp, Artificial
  Probe
tgagagcatcaccttcctcaaggat

SEQ ID NO: 210070 - DNA, 25 bp, Artificial
  Probe
gattgttgactttgccaaacagctc

SEQ ID NO: 210071 - DNA, 25 bp, Artificial
  Probe
ccagatcgccttgctgaagacctct

SEQ ID NO: 210072 - DNA, 25 bp, Artificial
  Probe
agaccggcccaacgtgcaggaccag

SEQ ID NO: 210073 - DNA, 25 bp, Artificial
  Probe
gctccttctctgaccgacttcgagt

SEQ ID NO: 210074 - DNA, 25 bp, Artificial
  Probe
tggacacctacatgcggcggaaatg

SEQ ID NO: 210075 - DNA, 25 bp, Artificial
  Probe
ttgcacttcgcctgcaggacaaaaa

SEQ ID NO: 210076 - DNA, 25 bp, Artificial
  Probe
gacccaaccaaataaactagccagg

SEQ ID NO: 210077 - DNA, 25 bp, Artificial
  Probe
catctttgagttctccagatccatg

SEQ ID NO: 210078 - DNA, 25 bp, Artificial
  Probe
gtgagcctccggactttgagcagcg

SEQ ID NO: 210079 - DNA, 25 bp, Artificial
  Probe
agccacatcggtgtccccaagggtt

SEQ ID NO: 210080 - DNA, 25 bp, Artificial
  Probe
acaaccctgggagtgagagcatcac

SEQ ID NO: 210081 - DNA, 25 bp, Artificial
  Probe
ttgctctgctcatagccatcagcat

SEQ ID NO: 210082 - DNA, 25 bp, Artificial
  Probe
actgagctggccatcgtgtccgtgc

SEQ ID NO: 210083 - DNA, 25 bp, Artificial
  Probe
tggccacgcagctgaagcttactga

SEQ ID NO: 210084 - DNA, 25 bp, Artificial
  Probe
ttacaatgtgctgagctgcgagggc

SEQ ID NO: 210085 - DNA, 25 bp, Artificial
  Probe
actgaagcgtcaagaagaggagcag

SEQ ID NO: 210086 - DNA, 25 bp, Artificial
  Probe
tcgagtcacgccttggcccattgca

SEQ ID NO: 210087 - DNA, 25 bp, Artificial
  Probe
aggagcaggctcaagccacatcggt

SEQ ID NO: 210088 - DNA, 25 bp, Artificial
  Probe
acagctcagcccagaacaactgggc

SEQ ID NO: 210089 - DNA, 25 bp, Artificial
  Probe
ggcagttggggacctactaacgttg

SEQ ID NO: 210090 - DNA, 25 bp, Artificial
  Probe
tggcttcctacagctgagcagggag

SEQ ID NO: 210091 - DNA, 25 bp, Artificial
  Probe
cggaaatgccaggagtgtcgccttc

SEQ ID NO: 210092 - DNA, 25 bp, Artificial
  Probe
gaaggccttgttgacccaaccaaat

SEQ ID NO: 210093 - DNA, 25 bp, Artificial
  Probe
aaactgaagcgtcaagaagaggagc

SEQ ID NO: 210094 - DNA, 25 bp, Artificial
  Probe
gcaaatgccgccacgcaggcatgag

SEQ ID NO: 210095 - DNA, 25 bp, Artificial
  Probe
gccacatcggtgtccccaagggttt

SEQ ID NO: 210096 - DNA, 25 bp, Artificial
  Probe
gcccagaacaactgggcatgattga

SEQ ID NO: 210097 - DNA, 25 bp, Artificial
  Probe
agtgagagcatcaccttcctcaagg

SEQ ID NO: 210098 - DNA, 25 bp, Artificial
  Probe
ggagcaggctcaagccacatcggtg

SEQ ID NO: 210099 - DNA, 25 bp, Artificial
  Probe
ccgtgtcctctgtgttggccacgca

SEQ ID NO: 210100 - DNA, 25 bp, Artificial
  Probe
ctttgccaaagcagggctgcaggtg

SEQ ID NO: 210101 - DNA, 25 bp, Artificial
  Probe
ttcttccgccgcagtgtcatcaagg

SEQ ID NO: 210102 - DNA, 25 bp, Artificial
  Probe
gggaagcccgccaacagcgctttgc

SEQ ID NO: 210103 - DNA, 25 bp, Artificial
  Probe
tcctcaaggatttcagttacaaccg

SEQ ID NO: 210104 - DNA, 25 bp, Artificial
  Probe
ggagtgtcgccttcgcaaatgccgc

SEQ ID NO: 210105 - DNA, 25 bp, Artificial
  Probe
tctctgaaagcctcccataagagat

SEQ ID NO: 210106 - DNA, 25 bp, Artificial
  Probe
tgcctaggagcagaaggtagcccat

SEQ ID NO: 210107 - DNA, 25 bp, Artificial
  Probe
caccaggagtgacaaggagggccac

SEQ ID NO: 210108 - DNA, 25 bp, Artificial
  Probe
tcaggtagccctctctgaaagcctc

SEQ ID NO: 210109 - DNA, 25 bp, Artificial
  Probe
gctgtatacagcacacttgcatgtc

SEQ ID NO: 210110 - DNA, 25 bp, Artificial
  Probe
tccccaaagggagatgagcaggact

SEQ ID NO: 210111 - DNA, 25 bp, Artificial
  Probe
gaaggttacagaacaccaggagtga

SEQ ID NO: 210112 - DNA, 25 bp, Artificial
  Probe
actcactacatgctctgatggagga

SEQ ID NO: 210113 - DNA, 25 bp, Artificial
  Probe
agaagactgatcttggagaatccag

SEQ ID NO: 210114 - DNA, 25 bp, Artificial
  Probe
tgggtggctggctcattgtccccag

SEQ ID NO: 210115 - DNA, 25 bp, Artificial
  Probe
tctggctattctaatgtttactgat

SEQ ID NO: 210116 - DNA, 25 bp, Artificial
  Probe
gctgagccgacactggcttactcac

SEQ ID NO: 210117 - DNA, 25 bp, Artificial
  Probe
aggctcagccagatgagggaccgta

SEQ ID NO: 210118 - DNA, 25 bp, Artificial
  Probe
gagcggctgttatggagagcatctt

SEQ ID NO: 210119 - DNA, 25 bp, Artificial
  Probe
ctcagccagatgagggaccgtacaa

SEQ ID NO: 210120 - DNA, 25 bp, Artificial
  Probe
tgtggccctgcagatgtggaagtaa

SEQ ID NO: 210121 - DNA, 25 bp, Artificial
  Probe
agcagtgtacttctcctgccaacct

SEQ ID NO: 210122 - DNA, 25 bp, Artificial
  Probe
gaccaaagtgaatccagcttagagc

SEQ ID NO: 210123 - DNA, 25 bp, Artificial
  Probe
ctctagtgtggatgctacaagtaat

SEQ ID NO: 210124 - DNA, 25 bp, Artificial
  Probe
ttcaagaatgcaggagggctaggct

SEQ ID NO: 210125 - DNA, 25 bp, Artificial
  Probe
ttgctccttcatgtgcacatgcgtg

SEQ ID NO: 210126 - DNA, 25 bp, Artificial
  Probe
gcacatgcatctgtaatatagtttc

SEQ ID NO: 210127 - DNA, 25 bp, Artificial
  Probe
tgtcttttacctgagggcttgggtg

SEQ ID NO: 210128 - DNA, 25 bp, Artificial
  Probe
acacaggaaaagctcggagttgggt

SEQ ID NO: 210129 - DNA, 25 bp, Artificial
  Probe
cctctctcacggatctccagaatga

SEQ ID NO: 210130 - DNA, 25 bp, Artificial
  Probe
ctgataatgctcatagggattggtc

SEQ ID NO: 210131 - DNA, 25 bp, Artificial
  Probe
cgtgcctgggagaagactgatcttg

SEQ ID NO: 210132 - DNA, 25 bp, Artificial
  Probe
tcctctcattgtcttttacctgagg

SEQ ID NO: 210133 - DNA, 25 bp, Artificial
  Probe
ccacatgggtttcaagaatgcagga

SEQ ID NO: 210134 - DNA, 25 bp, Artificial
  Probe
ggccctgcagatgtggaagtaactg

SEQ ID NO: 210135 - DNA, 25 bp, Artificial
  Probe
cctgttgttgagagctttggttggc

SEQ ID NO: 210136 - DNA, 25 bp, Artificial
  Probe
gagaatccagattcctctcattgtc

SEQ ID NO: 210137 - DNA, 25 bp, Artificial
  Probe
ttatgcctaggagcagaaggtagcc

SEQ ID NO: 210138 - DNA, 25 bp, Artificial
  Probe
tagactgtgttttacacttggcact

SEQ ID NO: 210139 - DNA, 25 bp, Artificial
  Probe
atgagggaccgtacaagacgcactc

SEQ ID NO: 210140 - DNA, 25 bp, Artificial
  Probe
gcgtgcctgggagaagactgatctt

SEQ ID NO: 210141 - DNA, 25 bp, Artificial
  Probe
cacaagtgaacaaactccataagag

SEQ ID NO: 210142 - DNA, 25 bp, Artificial
  Probe
acggactctcagcactgtggccctg

SEQ ID NO: 210143 - DNA, 25 bp, Artificial
  Probe
tgcgggagcgctggttcccactctt

SEQ ID NO: 210144 - DNA, 25 bp, Artificial
  Probe
cattgctccttcatgtgcacatgcg

SEQ ID NO: 210145 - DNA, 25 bp, Artificial
  Probe
atctccagaatgaaggttacagaac

SEQ ID NO: 210146 - DNA, 25 bp, Artificial
  Probe
tgggacccacacaggaaaagctcgg

SEQ ID NO: 210147 - DNA, 25 bp, Artificial
  Probe
gagatgagcaggactcaggtagccc

SEQ ID NO: 210148 - DNA, 25 bp, Artificial
  Probe
tttcaagaatgcaggagggctaggc

SEQ ID NO: 210149 - DNA, 25 bp, Artificial
  Probe
acaaggagggccacggactctcagc

SEQ ID NO: 210150 - DNA, 25 bp, Artificial
  Probe
atgctacaagtaatgaggcgtgcct

SEQ ID NO: 210151 - DNA, 25 bp, Artificial
  Probe
ccgccccgatttgccttccaacaat

SEQ ID NO: 210152 - DNA, 25 bp, Artificial
  Probe
cagacaacatagccctcgagggggg

SEQ ID NO: 210153 - DNA, 25 bp, Artificial
  Probe
cacattaaaacgctggagaaaacac

SEQ ID NO: 210154 - DNA, 25 bp, Artificial
  Probe
acaacatagccctcgagggggggcg

SEQ ID NO: 210155 - DNA, 25 bp, Artificial
  Probe
ccgatttgccttccaacaatgtgcc

SEQ ID NO: 210156 - DNA, 25 bp, Artificial
  Probe
tccaacaatgtgccaccttatgggg

SEQ ID NO: 210157 - DNA, 25 bp, Artificial
  Probe
gccttccaacaatgtgccaccttat

SEQ ID NO: 210158 - DNA, 25 bp, Artificial
  Probe
atgtgccaccttatggggaggggaa

SEQ ID NO: 210159 - DNA, 25 bp, Artificial
  Probe
tgggggacccacattaaaacgctgg

SEQ ID NO: 210160 - DNA, 25 bp, Artificial
  Probe
tttgccttccaacaatgtgccacct

SEQ ID NO: 210161 - DNA, 25 bp, Artificial
  Probe
atttgccttccaacaatgtgccacc

SEQ ID NO: 210162 - DNA, 25 bp, Artificial
  Probe
ccaacaatgtgccaccttatgggga

SEQ ID NO: 210163 - DNA, 25 bp, Artificial
  Probe
acatagccctcgagggggggcgcgg

SEQ ID NO: 210164 - DNA, 25 bp, Artificial
  Probe
ccccgatttgccttccaacaatgtg

SEQ ID NO: 210165 - DNA, 25 bp, Artificial
  Probe
cgccccgatttgccttccaacaatg

SEQ ID NO: 210166 - DNA, 25 bp, Artificial
  Probe
aacaatgtgccaccttatggggagg

SEQ ID NO: 210167 - DNA, 25 bp, Artificial
  Probe
gacccacattaaaacgctggagaaa

SEQ ID NO: 210168 - DNA, 25 bp, Artificial
  Probe
gctggagaaaacaccctttttccat

SEQ ID NO: 210169 - DNA, 25 bp, Artificial
  Probe
agacaacatagccctcgaggggggg

SEQ ID NO: 210170 - DNA, 25 bp, Artificial
  Probe
ccttccaacaatgtgccaccttatg

SEQ ID NO: 210171 - DNA, 25 bp, Artificial
  Probe
ttccaacaatgtgccaccttatggg

SEQ ID NO: 210172 - DNA, 25 bp, Artificial
  Probe
aacatagccctcgagggggggcgcg

SEQ ID NO: 210173 - DNA, 25 bp, Artificial
  Probe
ggccgccccgatttgccttccaaca

SEQ ID NO: 210174 - DNA, 25 bp, Artificial
  Probe
gacaacatagccctcgagggggggc

SEQ ID NO: 210175 - DNA, 25 bp, Artificial
  Probe
ccacattaaaacgctggagaaaaca

SEQ ID NO: 210176 - DNA, 25 bp, Artificial
  Probe
ggggacccacattaaaacgctggag

SEQ ID NO: 210177 - DNA, 25 bp, Artificial
  Probe
caacaatgtgccaccttatggggag

SEQ ID NO: 210178 - DNA, 25 bp, Artificial
  Probe
caacatagccctcgagggggggcgc

SEQ ID NO: 210179 - DNA, 25 bp, Artificial
  Probe
ggacccacattaaaacgctggagaa

SEQ ID NO: 210180 - DNA, 25 bp, Artificial
  Probe
aatgtgccaccttatggggagggga

SEQ ID NO: 210181 - DNA, 25 bp, Artificial
  Probe
gggacccacattaaaacgctggaga

SEQ ID NO: 210182 - DNA, 25 bp, Artificial
  Probe
gcgcggtttacaccggcggggactg

SEQ ID NO: 210183 - DNA, 25 bp, Artificial
  Probe
tggagaaaacaccctttttccattg

SEQ ID NO: 210184 - DNA, 25 bp, Artificial
  Probe
gatttgccttccaacaatgtgccac

SEQ ID NO: 210185 - DNA, 25 bp, Artificial
  Probe
tgccttccaacaatgtgccacctta

SEQ ID NO: 210186 - DNA, 25 bp, Artificial
  Probe
gccccgatttgccttccaacaatgt

SEQ ID NO: 210187 - DNA, 25 bp, Artificial
  Probe
ttgccttccaacaatgtgccacctt

SEQ ID NO: 210188 - DNA, 25 bp, Artificial
  Probe
acaatgtgccaccttatggggaggg

SEQ ID NO: 210189 - DNA, 25 bp, Artificial
  Probe
cgatttgccttccaacaatgtgcca

SEQ ID NO: 210190 - DNA, 25 bp, Artificial
  Probe
cccgatttgccttccaacaatgtgc

SEQ ID NO: 210191 - DNA, 25 bp, Artificial
  Probe
caatgtgccaccttatggggagggg

SEQ ID NO: 210192 - DNA, 25 bp, Artificial
  Probe
ctgggggacccacattaaaacgctg

SEQ ID NO: 210193 - DNA, 25 bp, Artificial
  Probe
cttccaacaatgtgccaccttatgg

SEQ ID NO: 210194 - DNA, 25 bp, Artificial
  Probe
atagccctcgagggggggcgcggtg

SEQ ID NO: 210195 - DNA, 25 bp, Artificial
  Probe
gccgccccgatttgccttccaacaa

SEQ ID NO: 210196 - DNA, 25 bp, Artificial
  Probe
tcaggagcaccataagatatgatgg

SEQ ID NO: 210197 - DNA, 25 bp, Artificial
  Probe
acggcaacaccacatgtgaatgata

SEQ ID NO: 210198 - DNA, 25 bp, Artificial
  Probe
ttcttgtgaggatctgaaacccaaa

SEQ ID NO: 210199 - DNA, 25 bp, Artificial
  Probe
agagtcaggagcaccataagatatg

SEQ ID NO: 210200 - DNA, 25 bp, Artificial
  Probe
atgatggtctctatgtgccaacggg

SEQ ID NO: 210201 - DNA, 25 bp, Artificial
  Probe
aagatatgatggtctctatgtgcca

SEQ ID NO: 210202 - DNA, 25 bp, Artificial
  Probe
agtcaggagcaccataagatatgat

SEQ ID NO: 210203 - DNA, 25 bp, Artificial
  Probe
cggcaacaccacatgtgaatgatac

SEQ ID NO: 210204 - DNA, 25 bp, Artificial
  Probe
tacggcaacaccacatgtgaatgat

SEQ ID NO: 210205 - DNA, 25 bp, Artificial
  Probe
cacatacggcaacaccacatgtgaa

SEQ ID NO: 210206 - DNA, 25 bp, Artificial
  Probe
gggacatggatcttgcccaatcaga

SEQ ID NO: 210207 - DNA, 25 bp, Artificial
  Probe
gatatgatggtctctatgtgccaac

SEQ ID NO: 210208 - DNA, 25 bp, Artificial
  Probe
atagtcgcagatcacgatgtaaatc

SEQ ID NO: 210209 - DNA, 25 bp, Artificial
  Probe
atatgatggtctctatgtgccaacg

SEQ ID NO: 210210 - DNA, 25 bp, Artificial
  Probe
gcatccccatagtcgcagatcacga

SEQ ID NO: 210211 - DNA, 25 bp, Artificial
  Probe
tgtgccaacgggttccccgaagcgg

SEQ ID NO: 210212 - DNA, 25 bp, Artificial
  Probe
aagacatacacagagtttgtataac

SEQ ID NO: 210213 - DNA, 25 bp, Artificial
  Probe
catacggcaacaccacatgtgaatg

SEQ ID NO: 210214 - DNA, 25 bp, Artificial
  Probe
tttcttgtgaggatctgaaacccaa

SEQ ID NO: 210215 - DNA, 25 bp, Artificial
  Probe
gcaacaccacatgtgaatgatactt

SEQ ID NO: 210216 - DNA, 25 bp, Artificial
  Probe
gatcacgatgtaaatcactgtaatt

SEQ ID NO: 210217 - DNA, 25 bp, Artificial
  Probe
agatcacgatgtaaatcactgtaat

SEQ ID NO: 210218 - DNA, 25 bp, Artificial
  Probe
tcgcagatcacgatgtaaatcactg

SEQ ID NO: 210219 - DNA, 25 bp, Artificial
  Probe
tttgggttatccactgccttaaaat

SEQ ID NO: 210220 - DNA, 25 bp, Artificial
  Probe
aaatcctttgggttatccactgcct

SEQ ID NO: 210221 - DNA, 25 bp, Artificial
  Probe
ccccatagtcgcagatcacgatgta

SEQ ID NO: 210222 - DNA, 25 bp, Artificial
  Probe
atggtctctatgtgccaacgggttc

SEQ ID NO: 210223 - DNA, 25 bp, Artificial
  Probe
gatggtctctatgtgccaacgggtt

SEQ ID NO: 210224 - DNA, 25 bp, Artificial
  Probe
aactttcttgtgaggatctgaaacc

SEQ ID NO: 210225 - DNA, 25 bp, Artificial
  Probe
acacatacggcaacaccacatgtga

SEQ ID NO: 210226 - DNA, 25 bp, Artificial
  Probe
tctctatgtgccaacgggttccccg

SEQ ID NO: 210227 - DNA, 25 bp, Artificial
  Probe
gacatacacagagtttgtataacac

SEQ ID NO: 210228 - DNA, 25 bp, Artificial
  Probe
tgttaaatcctttgggttatccact

SEQ ID NO: 210229 - DNA, 25 bp, Artificial
  Probe
agacatacacagagtttgtataaca

SEQ ID NO: 210230 - DNA, 25 bp, Artificial
  Probe
actttcttgtgaggatctgaaaccc

SEQ ID NO: 210231 - DNA, 25 bp, Artificial
  Probe
ggacatggatcttgcccaatcagaa

SEQ ID NO: 210232 - DNA, 25 bp, Artificial
  Probe
atcctttgggttatccactgcctta

SEQ ID NO: 210233 - DNA, 25 bp, Artificial
  Probe
ctctatgtgccaacgggttccccga

SEQ ID NO: 210234 - DNA, 25 bp, Artificial
  Probe
agcaccataagatatgatggtctct

SEQ ID NO: 210235 - DNA, 25 bp, Artificial
  Probe
tcctttgggttatccactgccttaa

SEQ ID NO: 210236 - DNA, 25 bp, Artificial
  Probe
cccatagtcgcagatcacgatgtaa

SEQ ID NO: 210237 - DNA, 25 bp, Artificial
  Probe
tgggttatccactgccttaaaatga

SEQ ID NO: 210238 - DNA, 25 bp, Artificial
  Probe
agtcgcagatcacgatgtaaatcac

SEQ ID NO: 210239 - DNA, 25 bp, Artificial
  Probe
aggagcaccataagatatgatggtc

SEQ ID NO: 210240 - DNA, 25 bp, Artificial
  Probe
gtcgcagatcacgatgtaaatcact

SEQ ID NO: 210241 - DNA, 25 bp, Artificial
  Probe
gtcaggagcaccataagatatgatg

SEQ ID NO: 210242 - DNA, 25 bp, Artificial
  Probe
tcttaaagtggttgttactgcccaa

SEQ ID NO: 210243 - DNA, 25 bp, Artificial
  Probe
aattcaggcctaacttctgagaaac

SEQ ID NO: 210244 - DNA, 25 bp, Artificial
  Probe
tggaggataaccactggcaggtact

SEQ ID NO: 210245 - DNA, 25 bp, Artificial
  Probe
ccacctcagaggtcctggcaagtca

SEQ ID NO: 210246 - DNA, 25 bp, Artificial
  Probe
ttgcacaggcgcttatgtgtaacac

SEQ ID NO: 210247 - DNA, 25 bp, Artificial
  Probe
agtggttgttactgcccaaggaggc

SEQ ID NO: 210248 - DNA, 25 bp, Artificial
  Probe
ccaagagacacacacttccctgaag

SEQ ID NO: 210249 - DNA, 25 bp, Artificial
  Probe
gctctcagaggcagcacaggagatg

SEQ ID NO: 210250 - DNA, 25 bp, Artificial
  Probe
ctcctcacctcactgatggaaagat

SEQ ID NO: 210251 - DNA, 25 bp, Artificial
  Probe
gacagcactgaatatccttaaagcc

SEQ ID NO: 210252 - DNA, 25 bp, Artificial
  Probe
agatgactgagcagtgcctaaaact

SEQ ID NO: 210253 - DNA, 25 bp, Artificial
  Probe
agaggtcctggcaagtcacagggcc

SEQ ID NO: 210254 - DNA, 25 bp, Artificial
  Probe
cctcagaggtcctggcaagtcacag

SEQ ID NO: 210255 - DNA, 25 bp, Artificial
  Probe
ttatttctgcccagaatttctgagc

SEQ ID NO: 210256 - DNA, 25 bp, Artificial
  Probe
cctgctgtgtagttggagccccgca

SEQ ID NO: 210257 - DNA, 25 bp, Artificial
  Probe
acgtacttgcacaggcgcttatgtg

SEQ ID NO: 210258 - DNA, 25 bp, Artificial
  Probe
tgacaggtgacagcactgaatatcc

SEQ ID NO: 210259 - DNA, 25 bp, Artificial
  Probe
aggagctctcagaggcagcacagga

SEQ ID NO: 210260 - DNA, 25 bp, Artificial
  Probe
ctaatatacctaggatcatggtgga

SEQ ID NO: 210261 - DNA, 25 bp, Artificial
  Probe
gtgcctaaaactcacttgctgatct

SEQ ID NO: 210262 - DNA, 25 bp, Artificial
  Probe
agagacacacacttccctgaaggag

SEQ ID NO: 210263 - DNA, 25 bp, Artificial
  Probe
tttccaaggttaccaattggaggat

SEQ ID NO: 210264 - DNA, 25 bp, Artificial
  Probe
ctaattcaggcctaacttctgagaa

SEQ ID NO: 210265 - DNA, 25 bp, Artificial
  Probe
aggcagcacaggagatgactgagca

SEQ ID NO: 210266 - DNA, 25 bp, Artificial
  Probe
atgtttgctgcctgctgtgtagttg

SEQ ID NO: 210267 - DNA, 25 bp, Artificial
  Probe
gaggataaccactggcaggtactgt

SEQ ID NO: 210268 - DNA, 25 bp, Artificial
  Probe
gtgacagcactgaatatccttaaag

SEQ ID NO: 210269 - DNA, 25 bp, Artificial
  Probe
gcccagaatttctgagccactttta

SEQ ID NO: 210270 - DNA, 25 bp, Artificial
  Probe
ttgttactgcccaaggaggcatcat

SEQ ID NO: 210271 - DNA, 25 bp, Artificial
  Probe
ataaccactggcaggtactgtccta

SEQ ID NO: 210272 - DNA, 25 bp, Artificial
  Probe
ctggcaagtcacagggcctccaagg

SEQ ID NO: 210273 - DNA, 25 bp, Artificial
  Probe
acacacttccctgaaggagctctca

SEQ ID NO: 210274 - DNA, 25 bp, Artificial
  Probe
cctcactgatggaaagatggttggt

SEQ ID NO: 210275 - DNA, 25 bp, Artificial
  Probe
tccaaggttaccaattggaggataa

SEQ ID NO: 210276 - DNA, 25 bp, Artificial
  Probe
ttgcaatgtgtgtgctaattcaggc

SEQ ID NO: 210277 - DNA, 25 bp, Artificial
  Probe
gtgacaggtgacagcactgaatatc

SEQ ID NO: 210278 - DNA, 25 bp, Artificial
  Probe
ctgagcagtgcctaaaactcacttg

SEQ ID NO: 210279 - DNA, 25 bp, Artificial
  Probe
gtgtgctaattcaggcctaacttct

SEQ ID NO: 210280 - DNA, 25 bp, Artificial
  Probe
ggtcctggcaagtcacagggcctcc

SEQ ID NO: 210281 - DNA, 25 bp, Artificial
  Probe
caatgtgtgtgctaattcaggccta

SEQ ID NO: 210282 - DNA, 25 bp, Artificial
  Probe
ttaaggatgtttgctgcctgctgtg

SEQ ID NO: 210283 - DNA, 25 bp, Artificial
  Probe
taacttctgagaaacaaggacaagg

SEQ ID NO: 210284 - DNA, 25 bp, Artificial
  Probe
caggcctaacttctgagaaacaagg

SEQ ID NO: 210285 - DNA, 25 bp, Artificial
  Probe
tactgcccaaggaggcatcatccct

SEQ ID NO: 210286 - DNA, 25 bp, Artificial
  Probe
atgactgagcagtgcctaaaactca

SEQ ID NO: 210287 - DNA, 25 bp, Artificial
  Probe
cttaaagcccacatctttaaggatg

SEQ ID NO: 210288 - DNA, 25 bp, Artificial
  Probe
cagcgccatgcaggacacaatcaac

SEQ ID NO: 210289 - DNA, 25 bp, Artificial
  Probe
ataaccagcggctactctcagagct

SEQ ID NO: 210290 - DNA, 25 bp, Artificial
  Probe
cctacttgatgtctgctcgagcatt

SEQ ID NO: 210291 - DNA, 25 bp, Artificial
  Probe
aaccagcggctactctcagagctcg

SEQ ID NO: 210292 - DNA, 25 bp, Artificial
  Probe
cagaatgcagacatcagcgccatgc

SEQ ID NO: 210293 - DNA, 25 bp, Artificial
  Probe
caggacacaatcaacaaactggaga

SEQ ID NO: 210294 - DNA, 25 bp, Artificial
  Probe
atgcaggacacaatcaacaaactgg

SEQ ID NO: 210295 - DNA, 25 bp, Artificial
  Probe
aggagaccattgaggctacgaaagc

SEQ ID NO: 210296 - DNA, 25 bp, Artificial
  Probe
accagcgtgggtagcataaccagcg

SEQ ID NO: 210297 - DNA, 25 bp, Artificial
  Probe
gctcctacttgatgtctgctcgagc

SEQ ID NO: 210298 - DNA, 25 bp, Artificial
  Probe
tgcagagcagctcctacttgatgtc

SEQ ID NO: 210299 - DNA, 25 bp, Artificial
  Probe
cgccatgcaggacacaatcaacaaa

SEQ ID NO: 210300 - DNA, 25 bp, Artificial
  Probe
tactctcagagctcgcaggtctttg

SEQ ID NO: 210301 - DNA, 25 bp, Artificial
  Probe
agctgcgaagcacgaagagcgagat

SEQ ID NO: 210302 - DNA, 25 bp, Artificial
  Probe
aatgcagacatcagcgccatgcagg

SEQ ID NO: 210303 - DNA, 25 bp, Artificial
  Probe
catcagcgccatgcaggacacaatc

SEQ ID NO: 210304 - DNA, 25 bp, Artificial
  Probe
cattgaggctacgaaagctgaggag

SEQ ID NO: 210305 - DNA, 25 bp, Artificial
  Probe
tgggtagcataaccagcggctactc

SEQ ID NO: 210306 - DNA, 25 bp, Artificial
  Probe
caccagcgtgggtagcataaccagc

SEQ ID NO: 210307 - DNA, 25 bp, Artificial
  Probe
aggctacgaaagctgaggaggccaa

SEQ ID NO: 210308 - DNA, 25 bp, Artificial
  Probe
gcggctactctcagagctcgcaggt

SEQ ID NO: 210309 - DNA, 25 bp, Artificial
  Probe
ctcagagctcgcaggtctttggccg

SEQ ID NO: 210310 - DNA, 25 bp, Artificial
  Probe
cggctactctcagagctcgcaggtc

SEQ ID NO: 210311 - DNA, 25 bp, Artificial
  Probe
gccatgcaggacacaatcaacaaac

SEQ ID NO: 210312 - DNA, 25 bp, Artificial
  Probe
catgcaggacacaatcaacaaactg

SEQ ID NO: 210313 - DNA, 25 bp, Artificial
  Probe
agaatgcagacatcagcgccatgca

SEQ ID NO: 210314 - DNA, 25 bp, Artificial
  Probe
agagcagctcctacttgatgtctgc

SEQ ID NO: 210315 - DNA, 25 bp, Artificial
  Probe
gctcagtttcaccagcgtgggtagc

SEQ ID NO: 210316 - DNA, 25 bp, Artificial
  Probe
agcgccatgcaggacacaatcaaca

SEQ ID NO: 210317 - DNA, 25 bp, Artificial
  Probe
accattgaggctacgaaagctgagg

SEQ ID NO: 210318 - DNA, 25 bp, Artificial
  Probe
ccattgaggctacgaaagctgagga

SEQ ID NO: 210319 - DNA, 25 bp, Artificial
  Probe
ctactctcagagctcgcaggtcttt

SEQ ID NO: 210320 - DNA, 25 bp, Artificial
  Probe
gcaggacacaatcaacaaactggag

SEQ ID NO: 210321 - DNA, 25 bp, Artificial
  Probe
ctcagtttcaccagcgtgggtagca

SEQ ID NO: 210322 - DNA, 25 bp, Artificial
  Probe
gagagcgccgccaagaacaccgacg

SEQ ID NO: 210323 - DNA, 25 bp, Artificial
  Probe
ctacgaaagctgaggaggccaagga

SEQ ID NO: 210324 - DNA, 25 bp, Artificial
  Probe
ggtagcataaccagcggctactctc

SEQ ID NO: 210325 - DNA, 25 bp, Artificial
  Probe
gaccattgaggctacgaaagctgag

SEQ ID NO: 210326 - DNA, 25 bp, Artificial
  Probe
ggctactctcagagctcgcaggtct

SEQ ID NO: 210327 - DNA, 25 bp, Artificial
  Probe
ttgcagagcagctcctacttgatgt

SEQ ID NO: 210328 - DNA, 25 bp, Artificial
  Probe
gcagctcctacttgatgtctgctcg

SEQ ID NO: 210329 - DNA, 25 bp, Artificial
  Probe
cagagcagctcctacttgatgtctg

SEQ ID NO: 210330 - DNA, 25 bp, Artificial
  Probe
tcctacttgatgtctgctcgagcat

SEQ ID NO: 210331 - DNA, 25 bp, Artificial
  Probe
agcggctactctcagagctcgcagg

SEQ ID NO: 210332 - DNA, 25 bp, Artificial
  Probe
ctcctacttgatgtctgctcgagca

SEQ ID NO: 210333 - DNA, 25 bp, Artificial
  Probe
gcagagcagctcctacttgatgtct

SEQ ID NO: 210334 - DNA, 25 bp, Artificial
  Probe
cctcagacattaacggatgggcaca

SEQ ID NO: 210335 - DNA, 25 bp, Artificial
  Probe
gacctctgtgcctacatcagggctg

SEQ ID NO: 210336 - DNA, 25 bp, Artificial
  Probe
aagcatggtggctcccactggttta

SEQ ID NO: 210337 - DNA, 25 bp, Artificial
  Probe
aaccaacacggctggcttgagcaac

SEQ ID NO: 210338 - DNA, 25 bp, Artificial
  Probe
gccaatgcccagcagtttccatttc

SEQ ID NO: 210339 - DNA, 25 bp, Artificial
  Probe
gaaccagatgacaggccagatgagc

SEQ ID NO: 210340 - DNA, 25 bp, Artificial
  Probe
ccgcctcagacattaacggatgggc

SEQ ID NO: 210341 - DNA, 25 bp, Artificial
  Probe
gaaacagcatgttctcacaacagtc

SEQ ID NO: 210342 - DNA, 25 bp, Artificial
  Probe
ggaagcagccttttcaccacaaacc

SEQ ID NO: 210343 - DNA, 25 bp, Artificial
  Probe
tccgaactacggaataagtcagcaa

SEQ ID NO: 210344 - DNA, 25 bp, Artificial
  Probe
gcgaacaccagcatgtacaataaca

SEQ ID NO: 210345 - DNA, 25 bp, Artificial
  Probe
acatacgcagagtcccatgatgcag

SEQ ID NO: 210346 - DNA, 25 bp, Artificial
  Probe
gggttgaatatgaccccaagcatgg

SEQ ID NO: 210347 - DNA, 25 bp, Artificial
  Probe
caccacaaaccaactgcctggaatg

SEQ ID NO: 210348 - DNA, 25 bp, Artificial
  Probe
ccacaaaccaactgcctggaatgga

SEQ ID NO: 210349 - DNA, 25 bp, Artificial
  Probe
cacactttgggcaacaagcgaacac

SEQ ID NO: 210350 - DNA, 25 bp, Artificial
  Probe
ctctgaggggaagcagccttttcac

SEQ ID NO: 210351 - DNA, 25 bp, Artificial
  Probe
agatgacaggccagatgagcatgac

SEQ ID NO: 210352 - DNA, 25 bp, Artificial
  Probe
caacatgaacatcaacgtgtccatg

SEQ ID NO: 210353 - DNA, 25 bp, Artificial
  Probe
atggcaaccaacacggctggcttga

SEQ ID NO: 210354 - DNA, 25 bp, Artificial
  Probe
tgctctgaggggaagcagccttttc

SEQ ID NO: 210355 - DNA, 25 bp, Artificial
  Probe
catttcctccgaactacggaataag

SEQ ID NO: 210356 - DNA, 25 bp, Artificial
  Probe
gaatatgaccccaagcatggtggct

SEQ ID NO: 210357 - DNA, 25 bp, Artificial
  Probe
ccgaactacggaataagtcagcaac

SEQ ID NO: 210358 - DNA, 25 bp, Artificial
  Probe
gggaagcagccttttcaccacaaac

SEQ ID NO: 210359 - DNA, 25 bp, Artificial
  Probe
cagagtcctctaatgtctccccgga

SEQ ID NO: 210360 - DNA, 25 bp, Artificial
  Probe
aagccaatgcccagcagtttccatt

SEQ ID NO: 210361 - DNA, 25 bp, Artificial
  Probe
gaccctgctctgaggggaagcagcc

SEQ ID NO: 210362 - DNA, 25 bp, Artificial
  Probe
cctgatcctggctttactggagcta

SEQ ID NO: 210363 - DNA, 25 bp, Artificial
  Probe
tcctctaatgtctccccggatggca

SEQ ID NO: 210364 - DNA, 25 bp, Artificial
  Probe
acaggccagatgagcatgacctcag

SEQ ID NO: 210365 - DNA, 25 bp, Artificial
  Probe
ttcctccgaactacggaataagtca

SEQ ID NO: 210366 - DNA, 25 bp, Artificial
  Probe
atgcagcagtctcaggccaacccag

SEQ ID NO: 210367 - DNA, 25 bp, Artificial
  Probe
tggagctacaactccccagagtcct

SEQ ID NO: 210368 - DNA, 25 bp, Artificial
  Probe
tggtttaccagcagccatgagcaac

SEQ ID NO: 210369 - DNA, 25 bp, Artificial
  Probe
cggaataagtcagcaacctgatcct

SEQ ID NO: 210370 - DNA, 25 bp, Artificial
  Probe
cgtgtccatggcaaccaacacggct

SEQ ID NO: 210371 - DNA, 25 bp, Artificial
  Probe
atgaccccaagcatggtggctccca

SEQ ID NO: 210372 - DNA, 25 bp, Artificial
  Probe
cggaaacagcatgttctcacaacag

SEQ ID NO: 210373 - DNA, 25 bp, Artificial
  Probe
gacattaacggatgggcacagggaa

SEQ ID NO: 210374 - DNA, 25 bp, Artificial
  Probe
ctacatcagggctgtcctccatggg

SEQ ID NO: 210375 - DNA, 25 bp, Artificial
  Probe
ggctgtcctccatgggtcctgaaca

SEQ ID NO: 210376 - DNA, 25 bp, Artificial
  Probe
tgtctccccggatggcacatacgca

SEQ ID NO: 210377 - DNA, 25 bp, Artificial
  Probe
gtcctgaacaggtcaatgaccctgc

SEQ ID NO: 210378 - DNA, 25 bp, Artificial
  Probe
atgtctccccggatggcacatacgc

SEQ ID NO: 210379 - DNA, 25 bp, Artificial
  Probe
tgtgcctacatcagggctgtcctcc

SEQ ID NO: 210380 - DNA, 25 bp, Artificial
  Probe
tcaccacagagatcctcaagtcggt

SEQ ID NO: 210381 - DNA, 25 bp, Artificial
  Probe
cctcacagagcgagcagcaacattc

SEQ ID NO: 210382 - DNA, 25 bp, Artificial
  Probe
gctggaagctgctgaggacattgct

SEQ ID NO: 210383 - DNA, 25 bp, Artificial
  Probe
gtgagtgatgacctcacagagcgag

SEQ ID NO: 210384 - DNA, 25 bp, Artificial
  Probe
ctgagggtgactccaaagcggctga

SEQ ID NO: 210385 - DNA, 25 bp, Artificial
  Probe
gagcagcaacattcgggctcatcct

SEQ ID NO: 210386 - DNA, 25 bp, Artificial
  Probe
aaagctggaagctgctgaggacatt

SEQ ID NO: 210387 - DNA, 25 bp, Artificial
  Probe
tgcagactggccttccaccctgggt

SEQ ID NO: 210388 - DNA, 25 bp, Artificial
  Probe
gacattgcttatcagctctcccgct

SEQ ID NO: 210389 - DNA, 25 bp, Artificial
  Probe
tggcctgatcgagctgcgaaagctg

SEQ ID NO: 210390 - DNA, 25 bp, Artificial
  Probe
ccttcgggaaggagttcacagaggc

SEQ ID NO: 210391 - DNA, 25 bp, Artificial
  Probe
gtctccaggcaggtgagtgatgacc

SEQ ID NO: 210392 - DNA, 25 bp, Artificial
  Probe
gcagactggccttccaccctgggtg

SEQ ID NO: 210393 - DNA, 25 bp, Artificial
  Probe
atgacctcacagagcgagcagcaac

SEQ ID NO: 210394 - DNA, 25 bp, Artificial
  Probe
cacatctgaccttcgggaaggagtt

SEQ ID NO: 210395 - DNA, 25 bp, Artificial
  Probe
tgctgagggtgactccaaagcggct

SEQ ID NO: 210396 - DNA, 25 bp, Artificial
  Probe
ctccaaagcggctgagctgatcgcc

SEQ ID NO: 210397 - DNA, 25 bp, Artificial
  Probe
agggtgactccaaagcggctgagct

SEQ ID NO: 210398 - DNA, 25 bp, Artificial
  Probe
gcctgatcgagctgcgaaagctgga

SEQ ID NO: 210399 - DNA, 25 bp, Artificial
  Probe
ttccaccctgggtgctggcagtcgg

SEQ ID NO: 210400 - DNA, 25 bp, Artificial
  Probe
tgaccttcgggaaggagttcacaga

SEQ ID NO: 210401 - DNA, 25 bp, Artificial
  Probe
ctggatgacgtgtccctgacacatc

SEQ ID NO: 210402 - DNA, 25 bp, Artificial
  Probe
gtgtccctgacacatctgaccttcg

SEQ ID NO: 210403 - DNA, 25 bp, Artificial
  Probe
gatggcctgatcgagctgcgaaagc

SEQ ID NO: 210404 - DNA, 25 bp, Artificial
  Probe
gatcgagctgcgaaagctggaagct

SEQ ID NO: 210405 - DNA, 25 bp, Artificial
  Probe
ttgccaagtgcctatgcagactggc

SEQ ID NO: 210406 - DNA, 25 bp, Artificial
  Probe
gagctgatcgccaactcactggcca

SEQ ID NO: 210407 - DNA, 25 bp, Artificial
  Probe
agctgcgaaagctggaagctgctga

SEQ ID NO: 210408 - DNA, 25 bp, Artificial
  Probe
accacagagatcctcaagtcggtgg

SEQ ID NO: 210409 - DNA, 25 bp, Artificial
  Probe
atgacgtgtccctgacacatctgac

SEQ ID NO: 210410 - DNA, 25 bp, Artificial
  Probe
tctgctgagggtgactccaaagcgg

SEQ ID NO: 210411 - DNA, 25 bp, Artificial
  Probe
gtgcctatgcagactggccttccac

SEQ ID NO: 210412 - DNA, 25 bp, Artificial
  Probe
tccaggcaggtgagtgatgacctca

SEQ ID NO: 210413 - DNA, 25 bp, Artificial
  Probe
cacagagatcctcaagtcggtggtg

SEQ ID NO: 210414 - DNA, 25 bp, Artificial
  Probe
ttcgatgctggagaattgattaccc

SEQ ID NO: 210415 - DNA, 25 bp, Artificial
  Probe
cggctgagctgatcgccaactcact

SEQ ID NO: 210416 - DNA, 25 bp, Artificial
  Probe
attcgatgctggagaattgattacc

SEQ ID NO: 210417 - DNA, 25 bp, Artificial
  Probe
ctgaggacattgcttatcagctctc

SEQ ID NO: 210418 - DNA, 25 bp, Artificial
  Probe
ctcgattcgatgctggagaattgat

SEQ ID NO: 210419 - DNA, 25 bp, Artificial
  Probe
tgccagcagggcagtccgtgctcct

SEQ ID NO: 210420 - DNA, 25 bp, Artificial
  Probe
ctacctgccagcagggcagtccgtg

SEQ ID NO: 210421 - DNA, 25 bp, Artificial
  Probe
ggctcatcctggatgacgtgtccct

SEQ ID NO: 210422 - DNA, 25 bp, Artificial
  Probe
caacattcgggctcatcctggatga

SEQ ID NO: 210423 - DNA, 25 bp, Artificial
  Probe
gtggctcgattcgatgctggagaat

SEQ ID NO: 210424 - DNA, 25 bp, Artificial
  Probe
acagagcgagcagcaacattcgggc

SEQ ID NO: 210425 - DNA, 25 bp, Artificial
  Probe
ctgctgaggacattgcttatcagct

SEQ ID NO: 210426 - DNA, 25 bp, Artificial
  Probe
tagagaacgacgaggccttcgccat

SEQ ID NO: 210427 - DNA, 25 bp, Artificial
  Probe
ttggtttcggcttcggtgtcgctgc

SEQ ID NO: 210428 - DNA, 25 bp, Artificial
  Probe
tttcagaagtggatcggttgcagtc

SEQ ID NO: 210429 - DNA, 25 bp, Artificial
  Probe
ggtccaacagacagttacgcagcca

SEQ ID NO: 210430 - DNA, 25 bp, Artificial
  Probe
ggccgtcatggctgagttggatcca

SEQ ID NO: 210431 - DNA, 25 bp, Artificial
  Probe
ctaccaggagagcaatggtccaaca

SEQ ID NO: 210432 - DNA, 25 bp, Artificial
  Probe
agattgcgggcatagagaacgacga

SEQ ID NO: 210433 - DNA, 25 bp, Artificial
  Probe
tggatcggttgcagtcagagcctga

SEQ ID NO: 210434 - DNA, 25 bp, Artificial
  Probe
acgacgaggccttcgccatcctaga

SEQ ID NO: 210435 - DNA, 25 bp, Artificial
  Probe
aacgacgaggccttcgccatcctag

SEQ ID NO: 210436 - DNA, 25 bp, Artificial
  Probe
gccatttcagaagtggatcggttgc

SEQ ID NO: 210437 - DNA, 25 bp, Artificial
  Probe
cttcggtgtcgctgcgtttgagttg

SEQ ID NO: 210438 - DNA, 25 bp, Artificial
  Probe
tcggcttcggtgtcgctgcgtttga

SEQ ID NO: 210439 - DNA, 25 bp, Artificial
  Probe
gctgagttggatccatttggcgctc

SEQ ID NO: 210440 - DNA, 25 bp, Artificial
  Probe
caacagacagttacgcagccatttc

SEQ ID NO: 210441 - DNA, 25 bp, Artificial
  Probe
aagtggatcggttgcagtcagagcc

SEQ ID NO: 210442 - DNA, 25 bp, Artificial
  Probe
cgctgcgtttgagttgggccgtcat

SEQ ID NO: 210443 - DNA, 25 bp, Artificial
  Probe
agacagttacgcagccatttcagaa

SEQ ID NO: 210444 - DNA, 25 bp, Artificial
  Probe
cgcagccatttcagaagtggatcgg

SEQ ID NO: 210445 - DNA, 25 bp, Artificial
  Probe
gtccaacagacagttacgcagccat

SEQ ID NO: 210446 - DNA, 25 bp, Artificial
  Probe
ccgtcatggctgagttggatccatt

SEQ ID NO: 210447 - DNA, 25 bp, Artificial
  Probe
agagcaatggtccaacagacagtta

SEQ ID NO: 210448 - DNA, 25 bp, Artificial
  Probe
cgtcatggctgagttggatccattt

SEQ ID NO: 210449 - DNA, 25 bp, Artificial
  Probe
catttcagaagtggatcggttgcag

SEQ ID NO: 210450 - DNA, 25 bp, Artificial
  Probe
atggcgaatactaccaggagagcaa

SEQ ID NO: 210451 - DNA, 25 bp, Artificial
  Probe
agttacgcagccatttcagaagtgg

SEQ ID NO: 210452 - DNA, 25 bp, Artificial
  Probe
agtggatcggttgcagtcagagcct

SEQ ID NO: 210453 - DNA, 25 bp, Artificial
  Probe
aatggtccaacagacagttacgcag

SEQ ID NO: 210454 - DNA, 25 bp, Artificial
  Probe
gaggccttcgccatcctagacggcg

SEQ ID NO: 210455 - DNA, 25 bp, Artificial
  Probe
tcgctgcgtttgagttgggccgtca

SEQ ID NO: 210456 - DNA, 25 bp, Artificial
  Probe
tgaatggcgaatactaccaggagag

SEQ ID NO: 210457 - DNA, 25 bp, Artificial
  Probe
ttcagaagtggatcggttgcagtca

SEQ ID NO: 210458 - DNA, 25 bp, Artificial
  Probe
gcagtcagagcctgaaagtatccgt

SEQ ID NO: 210459 - DNA, 25 bp, Artificial
  Probe
ccaacagacagttacgcagccattt

SEQ ID NO: 210460 - DNA, 25 bp, Artificial
  Probe
agtcagagcctgaaagtatccgtaa

SEQ ID NO: 210461 - DNA, 25 bp, Artificial
  Probe
ttacgcagccatttcagaagtggat

SEQ ID NO: 210462 - DNA, 25 bp, Artificial
  Probe
agttggatccatttggcgctcccgc

SEQ ID NO: 210463 - DNA, 25 bp, Artificial
  Probe
ggctgagttggatccatttggcgct

SEQ ID NO: 210464 - DNA, 25 bp, Artificial
  Probe
tttcggcttcggtgtcgctgcgttt

SEQ ID NO: 210465 - DNA, 25 bp, Artificial
  Probe
ccatttcagaagtggatcggttgca

SEQ ID NO: 210466 - DNA, 25 bp, Artificial
  Probe
gagagcaatggtccaacagacagtt

SEQ ID NO: 210467 - DNA, 25 bp, Artificial
  Probe
ggttgcagtcagagcctgaaagtat

SEQ ID NO: 210468 - DNA, 25 bp, Artificial
  Probe
atactaccaggagagcaatggtcca

SEQ ID NO: 210469 - DNA, 25 bp, Artificial
  Probe
gtagcagccgccagcacagtgtccg

SEQ ID NO: 210470 - DNA, 25 bp, Artificial
  Probe
gtcatggctgagttggatccatttg

SEQ ID NO: 210471 - DNA, 25 bp, Artificial
  Probe
atagagaacgacgaggccttcgcca

SEQ ID NO: 210472 - DNA, 25 bp, Artificial
  Probe
cacgtcatgctgaaccacctctatg

SEQ ID NO: 210473 - DNA, 25 bp, Artificial
  Probe
tgtatctgagctgtccagttccccc

SEQ ID NO: 210474 - DNA, 25 bp, Artificial
  Probe
ctctatgcactctctatcaaggatg

SEQ ID NO: 210475 - DNA, 25 bp, Artificial
  Probe
tcatccctctgctggcccgagatgt

SEQ ID NO: 210476 - DNA, 25 bp, Artificial
  Probe
cagtgcgacccatcggtacaagaaa

SEQ ID NO: 210477 - DNA, 25 bp, Artificial
  Probe
ctctctatcaaggatggagtgatgg

SEQ ID NO: 210478 - DNA, 25 bp, Artificial
  Probe
gtgtgctcagtgtgatttccacagt

SEQ ID NO: 210479 - DNA, 25 bp, Artificial
  Probe
agtgtgatttccacagtgatgtcac

SEQ ID NO: 210480 - DNA, 25 bp, Artificial
  Probe
gtccaccttatttcagttgcagtgt

SEQ ID NO: 210481 - DNA, 25 bp, Artificial
  Probe
tcacctgctgcaggtcatcttgaac

SEQ ID NO: 210482 - DNA, 25 bp, Artificial
  Probe
attggtacaggctcctgtcacctgt

SEQ ID NO: 210483 - DNA, 25 bp, Artificial
  Probe
ctgtccaggcacagccagaaatcgg

SEQ ID NO: 210484 - DNA, 25 bp, Artificial
  Probe
ctcacttaaggcaataagtcaccag

SEQ ID NO: 210485 - DNA, 25 bp, Artificial
  Probe
cggagcccaaccacgtcatgctgaa

SEQ ID NO: 210486 - DNA, 25 bp, Artificial
  Probe
tcgcaatcgattcctgacactgtgc

SEQ ID NO: 210487 - DNA, 25 bp, Artificial
  Probe
gtgcatgcgcatcctcactccggga

SEQ ID NO: 210488 - DNA, 25 bp, Artificial
  Probe
tgcgccaggctctagtgctctaagc

SEQ ID NO: 210489 - DNA, 25 bp, Artificial
  Probe
tgggctctccgtgtgcatgcgcatc

SEQ ID NO: 210490 - DNA, 25 bp, Artificial
  Probe
ctgtgcactgagaccttcttaacca

SEQ ID NO: 210491 - DNA, 25 bp, Artificial
  Probe
ccagaggagcggttcaaggccccgc

SEQ ID NO: 210492 - DNA, 25 bp, Artificial
  Probe
ctcggtcttgcctgtccttccgaat

SEQ ID NO: 210493 - DNA, 25 bp, Artificial
  Probe
tccgctatttggttaaacctgagtt

SEQ ID NO: 210494 - DNA, 25 bp, Artificial
  Probe
gcggcagactgctaggttccagcag

SEQ ID NO: 210495 - DNA, 25 bp, Artificial
  Probe
ggctggctgtccactctcacttaag

SEQ ID NO: 210496 - DNA, 25 bp, Artificial
  Probe
agtcctccttgaaggtctgtccagg

SEQ ID NO: 210497 - DNA, 25 bp, Artificial
  Probe
aggactgaccaccatgggaggttgt

SEQ ID NO: 210498 - DNA, 25 bp, Artificial
  Probe
tctagcacgtgctactcagctgggg

SEQ ID NO: 210499 - DNA, 25 bp, Artificial
  Probe
gtcatcttgaacaaggacacgggca

SEQ ID NO: 210500 - DNA, 25 bp, Artificial
  Probe
caggagccttacatctctaaaccag

SEQ ID NO: 210501 - DNA, 25 bp, Artificial
  Probe
cgccctctttttagttctagcacgt

SEQ ID NO: 210502 - DNA, 25 bp, Artificial
  Probe
agcccatatgagaggatgagccagc

SEQ ID NO: 210503 - DNA, 25 bp, Artificial
  Probe
gcctcacctgctgcaggtcatcttg

SEQ ID NO: 210504 - DNA, 25 bp, Artificial
  Probe
ctctacaagcccatatgagaggatg

SEQ ID NO: 210505 - DNA, 25 bp, Artificial
  Probe
tctacagccagacctgaatgctggt

SEQ ID NO: 210506 - DNA, 25 bp, Artificial
  Probe
tgttactgttttcaaaacacggact

SEQ ID NO: 210507 - DNA, 25 bp, Artificial
  Probe
cacagccagaaatcggatggacggc

SEQ ID NO: 210508 - DNA, 25 bp, Artificial
  Probe
atgtgactactgagcaataatcgtt

SEQ ID NO: 210509 - DNA, 25 bp, Artificial
  Probe
gtcatgctgaaccacctctatgcac

SEQ ID NO: 210510 - DNA, 25 bp, Artificial
  Probe
gagtgatggtgctcagtgcgaccca

SEQ ID NO: 210511 - DNA, 25 bp, Artificial
  Probe
tagattgtagactccatggaatttc

SEQ ID NO: 210512 - DNA, 25 bp, Artificial
  Probe
atttcagtgtccaatttccagatgc

SEQ ID NO: 210513 - DNA, 25 bp, Artificial
  Probe
gcagggttggcacgagtgaacctat

SEQ ID NO: 210514 - DNA, 25 bp, Artificial
  Probe
gtgatccagcgctgcttccggagcc

SEQ ID NO: 210515 - DNA, 25 bp, Artificial
  Probe
cccacatagtcctccttgaaggtct

SEQ ID NO: 210516 - DNA, 25 bp, Artificial
  Probe
ggtcatgtgactactgagcaataat

SEQ ID NO: 210517 - DNA, 25 bp, Artificial
  Probe
tcttgcctgtccttccgaatcacag

SEQ ID NO: 210518 - DNA, 25 bp, Artificial
  Probe
aaccagatgaggtgcccgctattta

SEQ ID NO: 210519 - DNA, 25 bp, Artificial
  Probe
aaatgactgatcctgaactgtcctg

SEQ ID NO: 210520 - DNA, 25 bp, Artificial
  Probe
gtggtcattgtacaaggggcctccc

SEQ ID NO: 210521 - DNA, 25 bp, Artificial
  Probe
tgctgtggttggtttgcaaactcag

SEQ ID NO: 210522 - DNA, 25 bp, Artificial
  Probe
tctgaccctctgtgcactgctgctt

SEQ ID NO: 210523 - DNA, 25 bp, Artificial
  Probe
ctattgttagacaaacacagtgggt

SEQ ID NO: 210524 - DNA, 25 bp, Artificial
  Probe
tgtacagatctcagaaatggttcca

SEQ ID NO: 210525 - DNA, 25 bp, Artificial
  Probe
ttcctctgccctgagaggaagatga

SEQ ID NO: 210526 - DNA, 25 bp, Artificial
  Probe
cgcggggctctctttaagatttaat

SEQ ID NO: 210527 - DNA, 25 bp, Artificial
  Probe
tgactacggcccttggtggtaacag

SEQ ID NO: 210528 - DNA, 25 bp, Artificial
  Probe
cagtgttaccgctgcgtgtgtcccg

SEQ ID NO: 210529 - DNA, 25 bp, Artificial
  Probe
tgcagacattgtgtctgcagtgtct

SEQ ID NO: 210530 - DNA, 25 bp, Artificial
  Probe
ctggttgttccagagaaaaatgact

SEQ ID NO: 210531 - DNA, 25 bp, Artificial
  Probe
cactcaagcacttgtggtcattgta

SEQ ID NO: 210532 - DNA, 25 bp, Artificial
  Probe
ctgccctgagaggaagatgaaagat

SEQ ID NO: 210533 - DNA, 25 bp, Artificial
  Probe
ttgtagcagccattactgctgcaga

SEQ ID NO: 210534 - DNA, 25 bp, Artificial
  Probe
gaaatggttccattgtctgctggtt

SEQ ID NO: 210535 - DNA, 25 bp, Artificial
  Probe
agcggcttgactacggcccttggtg

SEQ ID NO: 210536 - DNA, 25 bp, Artificial
  Probe
atcctttgtcatcacagagattttg

SEQ ID NO: 210537 - DNA, 25 bp, Artificial
  Probe
aaagctgctgtggactggggaattc

SEQ ID NO: 210538 - DNA, 25 bp, Artificial
  Probe
aagctgctgtggactggggaattct

SEQ ID NO: 210539 - DNA, 25 bp, Artificial
  Probe
ttctattataggagcggcttgacta

SEQ ID NO: 210540 - DNA, 25 bp, Artificial
  Probe
ctttctggagtagttactaacaatt

SEQ ID NO: 210541 - DNA, 25 bp, Artificial
  Probe
ttagttggtatctgagttctctgct

SEQ ID NO: 210542 - DNA, 25 bp, Artificial
  Probe
aggtgcccgctatttatcgggagtg

SEQ ID NO: 210543 - DNA, 25 bp, Artificial
  Probe
ttcatgctgtggttggtttgcaaac

SEQ ID NO: 210544 - DNA, 25 bp, Artificial
  Probe
agttggtatctgagttctctgctct

SEQ ID NO: 210545 - DNA, 25 bp, Artificial
  Probe
ctatgctgtggattagtgttcatgc

SEQ ID NO: 210546 - DNA, 25 bp, Artificial
  Probe
tagacaaacacagtgggtaaacttt

SEQ ID NO: 210547 - DNA, 25 bp, Artificial
  Probe
ctgagacttgctgatcctggttgca

SEQ ID NO: 210548 - DNA, 25 bp, Artificial
  Probe
agactggactccagccgttgctgcc

SEQ ID NO: 210549 - DNA, 25 bp, Artificial
  Probe
gagaagactggactccagccgttgc

SEQ ID NO: 210550 - DNA, 25 bp, Artificial
  Probe
gcttgctggagaagactggactcca

SEQ ID NO: 210551 - DNA, 25 bp, Artificial
  Probe
ctatgctcaggaattagttggtatc

SEQ ID NO: 210552 - DNA, 25 bp, Artificial
  Probe
cacctgcgtaaagctgctgtggact

SEQ ID NO: 210553 - DNA, 25 bp, Artificial
  Probe
tgaggtgcccgctatttatcgggag

SEQ ID NO: 210554 - DNA, 25 bp, Artificial
  Probe
ctgcagtgtctggagttatcctccc

SEQ ID NO: 210555 - DNA, 25 bp, Artificial
  Probe
ttctaaattctattataggagcggc

SEQ ID NO: 210556 - DNA, 25 bp, Artificial
  Probe
gactggggaattctgccctggttgt

SEQ ID NO: 210557 - DNA, 25 bp, Artificial
  Probe
gagtggctctgtttggtgcagccct

SEQ ID NO: 210558 - DNA, 25 bp, Artificial
  Probe
ccttcattccctggtgactcttgct

SEQ ID NO: 210559 - DNA, 25 bp, Artificial
  Probe
ttactgctgcagacattgtgtctgc

SEQ ID NO: 210560 - DNA, 25 bp, Artificial
  Probe
ctgaggtgaaccagatgaggtgccc

SEQ ID NO: 210561 - DNA, 25 bp, Artificial
  Probe
tgaaccagatgaggtgcccgctatt

SEQ ID NO: 210562 - DNA, 25 bp, Artificial
  Probe
tataggagcggcttgactacggccc

SEQ ID NO: 210563 - DNA, 25 bp, Artificial
  Probe
cagccattactgctgcagacattgt

SEQ ID NO: 210564 - DNA, 25 bp, Artificial
  Probe
cttggccgccgatttacaccgtcat

SEQ ID NO: 210565 - DNA, 25 bp, Artificial
  Probe
tgtcaaagaatccccctttcggcca

SEQ ID NO: 210566 - DNA, 25 bp, Artificial
  Probe
caataccccctataggcagtcgatt

SEQ ID NO: 210567 - DNA, 25 bp, Artificial
  Probe
aagagcccatactgatatcgcattc

SEQ ID NO: 210568 - DNA, 25 bp, Artificial
  Probe
ctttcggccaacttggcttataacg

SEQ ID NO: 210569 - DNA, 25 bp, Artificial
  Probe
ttggccgccgatttacaccgtcatg

SEQ ID NO: 210570 - DNA, 25 bp, Artificial
  Probe
acctcaagagcataagaaaactcca

SEQ ID NO: 210571 - DNA, 25 bp, Artificial
  Probe
aacagctttaaatgcctgtcaaaga

SEQ ID NO: 210572 - DNA, 25 bp, Artificial
  Probe
ataggcagtcgatttacaattactt

SEQ ID NO: 210573 - DNA, 25 bp, Artificial
  Probe
gctttaaatgcctgtcaaagaatcc

SEQ ID NO: 210574 - DNA, 25 bp, Artificial
  Probe
ctaaaagagcccatactgatatcgc

SEQ ID NO: 210575 - DNA, 25 bp, Artificial
  Probe
tacttggccgccgatttacaccgtc

SEQ ID NO: 210576 - DNA, 25 bp, Artificial
  Probe
accccctataggcagtcgatttaca

SEQ ID NO: 210577 - DNA, 25 bp, Artificial
  Probe
ccgatttacaccgtcatgattggaa

SEQ ID NO: 210578 - DNA, 25 bp, Artificial
  Probe
cggccaacttggcttataacgctaa

SEQ ID NO: 210579 - DNA, 25 bp, Artificial
  Probe
ccaacttggcttataacgctaaaag

SEQ ID NO: 210580 - DNA, 25 bp, Artificial
  Probe
tacaattacttggccgccgatttac

SEQ ID NO: 210581 - DNA, 25 bp, Artificial
  Probe
tggcttataacgctaaaagagccca

SEQ ID NO: 210582 - DNA, 25 bp, Artificial
  Probe
ggccgccgatttacaccgtcatgat

SEQ ID NO: 210583 - DNA, 25 bp, Artificial
  Probe
gccgatttacaccgtcatgattgga

SEQ ID NO: 210584 - DNA, 25 bp, Artificial
  Probe
acttggcttataacgctaaaagagc

SEQ ID NO: 210585 - DNA, 25 bp, Artificial
  Probe
ataacgctaaaagagcccatactga

SEQ ID NO: 210586 - DNA, 25 bp, Artificial
  Probe
agagcccatactgatatcgcattcc

SEQ ID NO: 210587 - DNA, 25 bp, Artificial
  Probe
aaacacctggcgtttcacaccacca

SEQ ID NO: 210588 - DNA, 25 bp, Artificial
  Probe
cttggcttataacgctaaaagagcc

SEQ ID NO: 210589 - DNA, 25 bp, Artificial
  Probe
aacgctaaaagagcccatactgata

SEQ ID NO: 210590 - DNA, 25 bp, Artificial
  Probe
gccaacttggcttataacgctaaaa

SEQ ID NO: 210591 - DNA, 25 bp, Artificial
  Probe
acttggccgccgatttacaccgtca

SEQ ID NO: 210592 - DNA, 25 bp, Artificial
  Probe
acaccaccactctaaatataacaaa

SEQ ID NO: 210593 - DNA, 25 bp, Artificial
  Probe
caacttggcttataacgctaaaaga

SEQ ID NO: 210594 - DNA, 25 bp, Artificial
  Probe
ataccccctataggcagtcgattta

SEQ ID NO: 210595 - DNA, 25 bp, Artificial
  Probe
taacgctaaaagagcccatactgat

SEQ ID NO: 210596 - DNA, 25 bp, Artificial
  Probe
ggcttataacgctaaaagagcccat

SEQ ID NO: 210597 - DNA, 25 bp, Artificial
  Probe
gccgccgatttacaccgtcatgatt

SEQ ID NO: 210598 - DNA, 25 bp, Artificial
  Probe
tataacgctaaaagagcccatactg

SEQ ID NO: 210599 - DNA, 25 bp, Artificial
  Probe
gcctgtcaaagaatccccctttcgg

SEQ ID NO: 210600 - DNA, 25 bp, Artificial
  Probe
aataccccctataggcagtcgattt

SEQ ID NO: 210601 - DNA, 25 bp, Artificial
  Probe
ggcgtttcacaccaccactctaaat

SEQ ID NO: 210602 - DNA, 25 bp, Artificial
  Probe
ggccaacttggcttataacgctaaa

SEQ ID NO: 210603 - DNA, 25 bp, Artificial
  Probe
tgcctgtcaaagaatccccctttcg

SEQ ID NO: 210604 - DNA, 25 bp, Artificial
  Probe
gagcccatactgatatcgcattcct

SEQ ID NO: 210605 - DNA, 25 bp, Artificial
  Probe
tttcggccaacttggcttataacgc

SEQ ID NO: 210606 - DNA, 25 bp, Artificial
  Probe
aacttggcttataacgctaaaagag

SEQ ID NO: 210607 - DNA, 25 bp, Artificial
  Probe
atttacaattacttggccgccgatt

SEQ ID NO: 210608 - DNA, 25 bp, Artificial
  Probe
tggccgccgatttacaccgtcatga

SEQ ID NO: 210609 - DNA, 25 bp, Artificial
  Probe
ttcggccaacttggcttataacgct

SEQ ID NO: 210610 - DNA, 25 bp, Artificial
  Probe
gctagagaactcttttgatatccct

SEQ ID NO: 210611 - DNA, 25 bp, Artificial
  Probe
accagcctgagtctgcacgagtcag

SEQ ID NO: 210612 - DNA, 25 bp, Artificial
  Probe
ctgcgtgggcagtccaagaaagata

SEQ ID NO: 210613 - DNA, 25 bp, Artificial
  Probe
gaactcttttgatatcccttgggat

SEQ ID NO: 210614 - DNA, 25 bp, Artificial
  Probe
tccaagctagagaactcttttgata

SEQ ID NO: 210615 - DNA, 25 bp, Artificial
  Probe
ctgtccctaggatgatctcaacaat

SEQ ID NO: 210616 - DNA, 25 bp, Artificial
  Probe
agagaactcttttgatatcccttgg

SEQ ID NO: 210617 - DNA, 25 bp, Artificial
  Probe
aagcctgtccctaggatgatctcaa

SEQ ID NO: 210618 - DNA, 25 bp, Artificial
  Probe
cgtgggcagtccaagaaagataaga

SEQ ID NO: 210619 - DNA, 25 bp, Artificial
  Probe
gagaactcttttgatatcccttggg

SEQ ID NO: 210620 - DNA, 25 bp, Artificial
  Probe
ctgtcccaagcctgtccctaggatg

SEQ ID NO: 210621 - DNA, 25 bp, Artificial
  Probe
aactcttttgatatcccttgggatc

SEQ ID NO: 210622 - DNA, 25 bp, Artificial
  Probe
gtccctaggatgatctcaacaatac

SEQ ID NO: 210623 - DNA, 25 bp, Artificial
  Probe
ctgttacccttggagttcatgatgt

SEQ ID NO: 210624 - DNA, 25 bp, Artificial
  Probe
tgttacccttggagttcatgatgtg

SEQ ID NO: 210625 - DNA, 25 bp, Artificial
  Probe
ccagcctgagtctgcacgagtcaga

SEQ ID NO: 210626 - DNA, 25 bp, Artificial
  Probe
gtctgcgtgggcagtccaagaaaga

SEQ ID NO: 210627 - DNA, 25 bp, Artificial
  Probe
tgtcccaagcctgtccctaggatga

SEQ ID NO: 210628 - DNA, 25 bp, Artificial
  Probe
ggcaaggatctgaccagcctgagtc

SEQ ID NO: 210629 - DNA, 25 bp, Artificial
  Probe
gagtctccaagctagagaactcttt

SEQ ID NO: 210630 - DNA, 25 bp, Artificial
  Probe
actgttacccttggagttcatgatg

SEQ ID NO: 210631 - DNA, 25 bp, Artificial
  Probe
tctgaccagcctgagtctgcacgag

SEQ ID NO: 210632 - DNA, 25 bp, Artificial
  Probe
tctgcgtgggcagtccaagaaagat

SEQ ID NO: 210633 - DNA, 25 bp, Artificial
  Probe
gcctgtccctaggatgatctcaaca

SEQ ID NO: 210634 - DNA, 25 bp, Artificial
  Probe
cctgtccctaggatgatctcaacaa

SEQ ID NO: 210635 - DNA, 25 bp, Artificial
  Probe
aagctagagaactcttttgatatcc

SEQ ID NO: 210636 - DNA, 25 bp, Artificial
  Probe
atctgaccagcctgagtctgcacga

SEQ ID NO: 210637 - DNA, 25 bp, Artificial
  Probe
gaaagccaaggtgactcctgctgtg

SEQ ID NO: 210638 - DNA, 25 bp, Artificial
  Probe
ccaagctagagaactcttttgatat

SEQ ID NO: 210639 - DNA, 25 bp, Artificial
  Probe
tgaccagcctgagtctgcacgagtc

SEQ ID NO: 210640 - DNA, 25 bp, Artificial
  Probe
caagctagagaactcttttgatatc

SEQ ID NO: 210641 - DNA, 25 bp, Artificial
  Probe
tgtccctaggatgatctcaacaata

SEQ ID NO: 210642 - DNA, 25 bp, Artificial
  Probe
agcctgtccctaggatgatctcaac

SEQ ID NO: 210643 - DNA, 25 bp, Artificial
  Probe
actcttttgatatcccttgggatca

SEQ ID NO: 210644 - DNA, 25 bp, Artificial
  Probe
caaggatctgaccagcctgagtctg

SEQ ID NO: 210645 - DNA, 25 bp, Artificial
  Probe
gtcccaagcctgtccctaggatgat

SEQ ID NO: 210646 - DNA, 25 bp, Artificial
  Probe
gtctccaagctagagaactcttttg

SEQ ID NO: 210647 - DNA, 25 bp, Artificial
  Probe
gcgtgggcagtccaagaaagataag

SEQ ID NO: 210648 - DNA, 25 bp, Artificial
  Probe
gcaaggatctgaccagcctgagtct

SEQ ID NO: 210649 - DNA, 25 bp, Artificial
  Probe
agtctccaagctagagaactctttt

SEQ ID NO: 210650 - DNA, 25 bp, Artificial
  Probe
ctgaccagcctgagtctgcacgagt

SEQ ID NO: 210651 - DNA, 25 bp, Artificial
  Probe
gaccagcctgagtctgcacgagtca

SEQ ID NO: 210652 - DNA, 25 bp, Artificial
  Probe
caagcctgtccctaggatgatctca

SEQ ID NO: 210653 - DNA, 25 bp, Artificial
  Probe
ccactgagagaggttacaaggccac

SEQ ID NO: 210654 - DNA, 25 bp, Artificial
  Probe
cagcctgagtctgcacgagtcagag

SEQ ID NO: 210655 - DNA, 25 bp, Artificial
  Probe
aaagccaaggtgactcctgctgtgg

SEQ ID NO: 210656 - DNA, 25 bp, Artificial
  Probe
agagatcagccgtagcgtccacctc

SEQ ID NO: 210657 - DNA, 25 bp, Artificial
  Probe
agagcggcgcctagagatcagccgt

SEQ ID NO: 210658 - DNA, 25 bp, Artificial
  Probe
accttactcgagagcggcgcctaga

SEQ ID NO: 210659 - DNA, 25 bp, Artificial
  Probe
taccttactcgagagcggcgcctag

SEQ ID NO: 210660 - DNA, 25 bp, Artificial
  Probe
tattcaacatgtaccttactcgaga

SEQ ID NO: 210661 - DNA, 25 bp, Artificial
  Probe
cgagagcggcgcctagagatcagcc

SEQ ID NO: 210662 - DNA, 25 bp, Artificial
  Probe
cgcctagagatcagccgtagcgtcc

SEQ ID NO: 210663 - DNA, 25 bp, Artificial
  Probe
agatcagccgtagcgtccacctcac

SEQ ID NO: 210664 - DNA, 25 bp, Artificial
  Probe
gcggcgcctagagatcagccgtagc

SEQ ID NO: 210665 - DNA, 25 bp, Artificial
  Probe
gagcggcgcctagagatcagccgta

SEQ ID NO: 210666 - DNA, 25 bp, Artificial
  Probe
cggcgcctagagatcagccgtagcg

SEQ ID NO: 210667 - DNA, 25 bp, Artificial
  Probe
tagagatcagccgtagcgtccacct

SEQ ID NO: 210668 - DNA, 25 bp, Artificial
  Probe
cttactcgagagcggcgcctagaga

SEQ ID NO: 210669 - DNA, 25 bp, Artificial
  Probe
ctattcaacatgtaccttactcgag

SEQ ID NO: 210670 - DNA, 25 bp, Artificial
  Probe
cctagagatcagccgtagcgtccac

SEQ ID NO: 210671 - DNA, 25 bp, Artificial
  Probe
tgtaccttactcgagagcggcgcct

SEQ ID NO: 210672 - DNA, 25 bp, Artificial
  Probe
agcggcgcctagagatcagccgtag

SEQ ID NO: 210673 - DNA, 25 bp, Artificial
  Probe
gccgtagcgtccacctcacggacag

SEQ ID NO: 210674 - DNA, 25 bp, Artificial
  Probe
tcaacatgtaccttactcgagagcg

SEQ ID NO: 210675 - DNA, 25 bp, Artificial
  Probe
cgtccacctcacggacagacaagtg

SEQ ID NO: 210676 - DNA, 25 bp, Artificial
  Probe
attcaacatgtaccttactcgagag

SEQ ID NO: 210677 - DNA, 25 bp, Artificial
  Probe
gtaccttactcgagagcggcgccta

SEQ ID NO: 210678 - DNA, 25 bp, Artificial
  Probe
atgtaccttactcgagagcggcgcc

SEQ ID NO: 210679 - DNA, 25 bp, Artificial
  Probe
gcgtccacctcacggacagacaagt

SEQ ID NO: 210680 - DNA, 25 bp, Artificial
  Probe
gagatcagccgtagcgtccacctca

SEQ ID NO: 210681 - DNA, 25 bp, Artificial
  Probe
cagccgtagcgtccacctcacggac

SEQ ID NO: 210682 - DNA, 25 bp, Artificial
  Probe
aacatgtaccttactcgagagcggc

SEQ ID NO: 210683 - DNA, 25 bp, Artificial
  Probe
ttcaacatgtaccttactcgagagc

SEQ ID NO: 210684 - DNA, 25 bp, Artificial
  Probe
catgtaccttactcgagagcggcgc

SEQ ID NO: 210685 - DNA, 25 bp, Artificial
  Probe
ccttactcgagagcggcgcctagag

SEQ ID NO: 210686 - DNA, 25 bp, Artificial
  Probe
gcctagagatcagccgtagcgtcca

SEQ ID NO: 210687 - DNA, 25 bp, Artificial
  Probe
ctagagatcagccgtagcgtccacc

SEQ ID NO: 210688 - DNA, 25 bp, Artificial
  Probe
atcagccgtagcgtccacctcacgg

SEQ ID NO: 210689 - DNA, 25 bp, Artificial
  Probe
gagagcggcgcctagagatcagccg

SEQ ID NO: 210690 - DNA, 25 bp, Artificial
  Probe
gcgcctagagatcagccgtagcgtc

SEQ ID NO: 210691 - DNA, 25 bp, Artificial
  Probe
ggcgcctagagatcagccgtagcgt

SEQ ID NO: 210692 - DNA, 25 bp, Artificial
  Probe
acatgtaccttactcgagagcggcg

SEQ ID NO: 210693 - DNA, 25 bp, Artificial
  Probe
tactcgagagcggcgcctagagatc

SEQ ID NO: 210694 - DNA, 25 bp, Artificial
  Probe
ttactcgagagcggcgcctagagat

SEQ ID NO: 210695 - DNA, 25 bp, Artificial
  Probe
tcagccgtagcgtccacctcacgga

SEQ ID NO: 210696 - DNA, 25 bp, Artificial
  Probe
cgtagcgtccacctcacggacagac

SEQ ID NO: 210697 - DNA, 25 bp, Artificial
  Probe
agccgtagcgtccacctcacggaca

SEQ ID NO: 210698 - DNA, 25 bp, Artificial
  Probe
caacatgtaccttactcgagagcgg

SEQ ID NO: 210699 - DNA, 25 bp, Artificial
  Probe
gatcagccgtagcgtccacctcacg

SEQ ID NO: 210700 - DNA, 25 bp, Artificial
  Probe
ccgtagcgtccacctcacggacaga

SEQ ID NO: 210701 - DNA, 25 bp, Artificial
  Probe
ctgctctcagacagaaactattctc

SEQ ID NO: 210702 - DNA, 25 bp, Artificial
  Probe
cagaaactattctctgttcctctgg

SEQ ID NO: 210703 - DNA, 25 bp, Artificial
  Probe
cagggcttcctcagctcttctgctc

SEQ ID NO: 210704 - DNA, 25 bp, Artificial
  Probe
tctggttcgcagaatgtctagattt

SEQ ID NO: 210705 - DNA, 25 bp, Artificial
  Probe
gacagaaactattctctgttcctct

SEQ ID NO: 210706 - DNA, 25 bp, Artificial
  Probe
gggcttcctcagctcttctgctctc

SEQ ID NO: 210707 - DNA, 25 bp, Artificial
  Probe
ttcgcagaatgtctagatttgaccc

SEQ ID NO: 210708 - DNA, 25 bp, Artificial
  Probe
gctttcccatcagggcttcctcagc

SEQ ID NO: 210709 - DNA, 25 bp, Artificial
  Probe
tgtctagatttgacccagaaaactt

SEQ ID NO: 210710 - DNA, 25 bp, Artificial
  Probe
tggttcgcagaatgtctagatttga

SEQ ID NO: 210711 - DNA, 25 bp, Artificial
  Probe
agaaactattctctgttcctctggt

SEQ ID NO: 210712 - DNA, 25 bp, Artificial
  Probe
tctagatttgacccagaaaacttca

SEQ ID NO: 210713 - DNA, 25 bp, Artificial
  Probe
tcagggcttcctcagctcttctgct

SEQ ID NO: 210714 - DNA, 25 bp, Artificial
  Probe
tctgctctcagacagaaactattct

SEQ ID NO: 210715 - DNA, 25 bp, Artificial
  Probe
tcagctcttctgctctcagacagaa

SEQ ID NO: 210716 - DNA, 25 bp, Artificial
  Probe
tcccatcagggcttcctcagctctt

SEQ ID NO: 210717 - DNA, 25 bp, Artificial
  Probe
gttcctctggttcgcagaatgtcta

SEQ ID NO: 210718 - DNA, 25 bp, Artificial
  Probe
ggcttcctcagctcttctgctctca

SEQ ID NO: 210719 - DNA, 25 bp, Artificial
  Probe
gaaactattctctgttcctctggtt

SEQ ID NO: 210720 - DNA, 25 bp, Artificial
  Probe
agggcttcctcagctcttctgctct

SEQ ID NO: 210721 - DNA, 25 bp, Artificial
  Probe
agctcttctgctctcagacagaaac

SEQ ID NO: 210722 - DNA, 25 bp, Artificial
  Probe
cagctcttctgctctcagacagaaa

SEQ ID NO: 210723 - DNA, 25 bp, Artificial
  Probe
cctctggttcgcagaatgtctagat

SEQ ID NO: 210724 - DNA, 25 bp, Artificial
  Probe
aactattctctgttcctctggttcg

SEQ ID NO: 210725 - DNA, 25 bp, Artificial
  Probe
atcagggcttcctcagctcttctgc

SEQ ID NO: 210726 - DNA, 25 bp, Artificial
  Probe
ttcctcagctcttctgctctcagac

SEQ ID NO: 210727 - DNA, 25 bp, Artificial
  Probe
ctctggttcgcagaatgtctagatt

SEQ ID NO: 210728 - DNA, 25 bp, Artificial
  Probe
ctcagctcttctgctctcagacaga

SEQ ID NO: 210729 - DNA, 25 bp, Artificial
  Probe
acagaaactattctctgttcctctg

SEQ ID NO: 210730 - DNA, 25 bp, Artificial
  Probe
cttctgctctcagacagaaactatt

SEQ ID NO: 210731 - DNA, 25 bp, Artificial
  Probe
atgtctagatttgacccagaaaact

SEQ ID NO: 210732 - DNA, 25 bp, Artificial
  Probe
gtctagatttgacccagaaaacttc

SEQ ID NO: 210733 - DNA, 25 bp, Artificial
  Probe
ggttcgcagaatgtctagatttgac

SEQ ID NO: 210734 - DNA, 25 bp, Artificial
  Probe
cctcagctcttctgctctcagacag

SEQ ID NO: 210735 - DNA, 25 bp, Artificial
  Probe
aaactattctctgttcctctggttc

SEQ ID NO: 210736 - DNA, 25 bp, Artificial
  Probe
actattctctgttcctctggttcgc

SEQ ID NO: 210737 - DNA, 25 bp, Artificial
  Probe
agacagaaactattctctgttcctc

SEQ ID NO: 210738 - DNA, 25 bp, Artificial
  Probe
tgctctcagacagaaactattctct

SEQ ID NO: 210739 - DNA, 25 bp, Artificial
  Probe
ctggttcgcagaatgtctagatttg

SEQ ID NO: 210740 - DNA, 25 bp, Artificial
  Probe
ctctcagacagaaactattctctgt

SEQ ID NO: 210741 - DNA, 25 bp, Artificial
  Probe
ccatcagggcttcctcagctcttct

SEQ ID NO: 210742 - DNA, 25 bp, Artificial
  Probe
gctctcagacagaaactattctctg

SEQ ID NO: 210743 - DNA, 25 bp, Artificial
  Probe
gttcgcagaatgtctagatttgacc

SEQ ID NO: 210744 - DNA, 25 bp, Artificial
  Probe
catcagggcttcctcagctcttctg

SEQ ID NO: 210745 - DNA, 25 bp, Artificial
  Probe
aatgtctagatttgacccagaaaac

SEQ ID NO: 210746 - DNA, 25 bp, Artificial
  Probe
tcctctggttcgcagaatgtctaga

SEQ ID NO: 210747 - DNA, 25 bp, Artificial
  Probe
ttaagggcaagcagcagtaaaacac

SEQ ID NO: 210748 - DNA, 25 bp, Artificial
  Probe
agccttgtttctgaaaattaagcat

SEQ ID NO: 210749 - DNA, 25 bp, Artificial
  Probe
aagtcggaactgtgaagggctccca

SEQ ID NO: 210750 - DNA, 25 bp, Artificial
  Probe
gagaagactttctcaaagtcggaac

SEQ ID NO: 210751 - DNA, 25 bp, Artificial
  Probe
agctctggccctctcttgaattcca

SEQ ID NO: 210752 - DNA, 25 bp, Artificial
  Probe
tagtgactgcttaagggcaagcagc

SEQ ID NO: 210753 - DNA, 25 bp, Artificial
  Probe
ctgaggattctcatttaacatctgg

SEQ ID NO: 210754 - DNA, 25 bp, Artificial
  Probe
actgtgaagggctcccatcagggct

SEQ ID NO: 210755 - DNA, 25 bp, Artificial
  Probe
ttataacattagtcttcaccagagg

SEQ ID NO: 210756 - DNA, 25 bp, Artificial
  Probe
ccagaggagctctggccctctcttg

SEQ ID NO: 210757 - DNA, 25 bp, Artificial
  Probe
aaggcacagagaaacctgaggattc

SEQ ID NO: 210758 - DNA, 25 bp, Artificial
  Probe
gcatactcctaggaccagttaggtc

SEQ ID NO: 210759 - DNA, 25 bp, Artificial
  Probe
tctcaaagtcggaactgtgaagggc

SEQ ID NO: 210760 - DNA, 25 bp, Artificial
  Probe
tcttcaccagaggagctctggccct

SEQ ID NO: 210761 - DNA, 25 bp, Artificial
  Probe
ttcaccagaggagctctggccctct

SEQ ID NO: 210762 - DNA, 25 bp, Artificial
  Probe
ccgactgacagagagctagaaggca

SEQ ID NO: 210763 - DNA, 25 bp, Artificial
  Probe
tgaagggctcccatcagggctcccg

SEQ ID NO: 210764 - DNA, 25 bp, Artificial
  Probe
gagctctggccctctcttgaattcc

SEQ ID NO: 210765 - DNA, 25 bp, Artificial
  Probe
ttctgacttcaaagccttgtttctg

SEQ ID NO: 210766 - DNA, 25 bp, Artificial
  Probe
gaagggctcccatcagggctcccga

SEQ ID NO: 210767 - DNA, 25 bp, Artificial
  Probe
acattagtcttcaccagaggagctc

SEQ ID NO: 210768 - DNA, 25 bp, Artificial
  Probe
agtcttcaccagaggagctctggcc

SEQ ID NO: 210769 - DNA, 25 bp, Artificial
  Probe
gactttctcaaagtcggaactgtga

SEQ ID NO: 210770 - DNA, 25 bp, Artificial
  Probe
aagtagtgactgcttaagggcaagc

SEQ ID NO: 210771 - DNA, 25 bp, Artificial
  Probe
actgacagagagctagaaggcacag

SEQ ID NO: 210772 - DNA, 25 bp, Artificial
  Probe
ctgcttaagggcaagcagcagtaaa

SEQ ID NO: 210773 - DNA, 25 bp, Artificial
  Probe
caaagccttgtttctgaaaattaag

SEQ ID NO: 210774 - DNA, 25 bp, Artificial
  Probe
tcagggctcccgactgacagagagc

SEQ ID NO: 210775 - DNA, 25 bp, Artificial
  Probe
atactcctaggaccagttaggtcac

SEQ ID NO: 210776 - DNA, 25 bp, Artificial
  Probe
gagaaacctgaggattctcatttaa

SEQ ID NO: 210777 - DNA, 25 bp, Artificial
  Probe
agtcggaactgtgaagggctcccat

SEQ ID NO: 210778 - DNA, 25 bp, Artificial
  Probe
gacttcaaagccttgtttctgaaaa

SEQ ID NO: 210779 - DNA, 25 bp, Artificial
  Probe
accagaggagctctggccctctctt

SEQ ID NO: 210780 - DNA, 25 bp, Artificial
  Probe
gtgattcaacattgttcaactgttt

SEQ ID NO: 210781 - DNA, 25 bp, Artificial
  Probe
caaagtcggaactgtgaagggctcc

SEQ ID NO: 210782 - DNA, 25 bp, Artificial
  Probe
cagttaggtcacatgtttttaaagc

SEQ ID NO: 210783 - DNA, 25 bp, Artificial
  Probe
ccttgtttctgaaaattaagcatgt

SEQ ID NO: 210784 - DNA, 25 bp, Artificial
  Probe
agggctcccgactgacagagagcta

SEQ ID NO: 210785 - DNA, 25 bp, Artificial
  Probe
actttctcaaagtcggaactgtgaa

SEQ ID NO: 210786 - DNA, 25 bp, Artificial
  Probe
gaaacctgaggattctcatttaaca

SEQ ID NO: 210787 - DNA, 25 bp, Artificial
  Probe
gaccagttaggtcacatgtttttaa

SEQ ID NO: 210788 - DNA, 25 bp, Artificial
  Probe
taccagcgggagaagactttctcaa

SEQ ID NO: 210789 - DNA, 25 bp, Artificial
  Probe
aggcacagagaaacctgaggattct

SEQ ID NO: 210790 - DNA, 25 bp, Artificial
  Probe
aagccttgtttctgaaaattaagca

SEQ ID NO: 210791 - DNA, 25 bp, Artificial
  Probe
cctaccagcgggagaagactttctc

SEQ ID NO: 210792 - DNA, 25 bp, Artificial
  Probe
ccagttaggtcacatgtttttaaag

SEQ ID NO: 210793 - DNA, 25 bp, Artificial
  Probe
acctttctcagactcaactgcagac

SEQ ID NO: 210794 - DNA, 25 bp, Artificial
  Probe
ctggtcctgtccacaaggagccccc

SEQ ID NO: 210795 - DNA, 25 bp, Artificial
  Probe
tcagactcaactgcagacacaaccc

SEQ ID NO: 210796 - DNA, 25 bp, Artificial
  Probe
tggtcctgtccacaaggagccccca

SEQ ID NO: 210797 - DNA, 25 bp, Artificial
  Probe
tgctggtcctgtccacaaggagccc

SEQ ID NO: 210798 - DNA, 25 bp, Artificial
  Probe
cagactcaactgcagacacaaccca

SEQ ID NO: 210799 - DNA, 25 bp, Artificial
  Probe
cgaggcctgctgctggtcctgtcca

SEQ ID NO: 210800 - DNA, 25 bp, Artificial
  Probe
aacctttctcagactcaactgcaga

SEQ ID NO: 210801 - DNA, 25 bp, Artificial
  Probe
acgaggcctgctgctggtcctgtcc

SEQ ID NO: 210802 - DNA, 25 bp, Artificial
  Probe
agactcaactgcagacacaacccac

SEQ ID NO: 210803 - DNA, 25 bp, Artificial
  Probe
ctcagactcaactgcagacacaacc

SEQ ID NO: 210804 - DNA, 25 bp, Artificial
  Probe
tctcagactcaactgcagacacaac

SEQ ID NO: 210805 - DNA, 25 bp, Artificial
  Probe
tgctgctggtcctgtccacaaggag

SEQ ID NO: 210806 - DNA, 25 bp, Artificial
  Probe
gcacgaggcctgctgctggtcctgt

SEQ ID NO: 210807 - DNA, 25 bp, Artificial
  Probe
gtcctgtccacaaggagcccccaac

SEQ ID NO: 210808 - DNA, 25 bp, Artificial
  Probe
ctgtccacaaggagcccccaacctt

SEQ ID NO: 210809 - DNA, 25 bp, Artificial
  Probe
cctgctgctggtcctgtccacaagg

SEQ ID NO: 210810 - DNA, 25 bp, Artificial
  Probe
gctgctggtcctgtccacaaggagc

SEQ ID NO: 210811 - DNA, 25 bp, Artificial
  Probe
cctgtccacaaggagcccccaacct

SEQ ID NO: 210812 - DNA, 25 bp, Artificial
  Probe
tttctcagactcaactgcagacaca

SEQ ID NO: 210813 - DNA, 25 bp, Artificial
  Probe
cacgaggcctgctgctggtcctgtc

SEQ ID NO: 210814 - DNA, 25 bp, Artificial
  Probe
ccactatgtctgacgaggaaactga

SEQ ID NO: 210815 - DNA, 25 bp, Artificial
  Probe
ctttctcagactcaactgcagacac

SEQ ID NO: 210816 - DNA, 25 bp, Artificial
  Probe
tccacaaggagcccccaacctttct

SEQ ID NO: 210817 - DNA, 25 bp, Artificial
  Probe
gctggtcctgtccacaaggagcccc

SEQ ID NO: 210818 - DNA, 25 bp, Artificial
  Probe
ggcacgaggcctgctgctggtcctg

SEQ ID NO: 210819 - DNA, 25 bp, Artificial
  Probe
cccaacctttctcagactcaactgc

SEQ ID NO: 210820 - DNA, 25 bp, Artificial
  Probe
ggtcctgtccacaaggagcccccaa

SEQ ID NO: 210821 - DNA, 25 bp, Artificial
  Probe
actatgtctgacgaggaaactgaac

SEQ ID NO: 210822 - DNA, 25 bp, Artificial
  Probe
cctttctcagactcaactgcagaca

SEQ ID NO: 210823 - DNA, 25 bp, Artificial
  Probe
ctgctgctggtcctgtccacaagga

SEQ ID NO: 210824 - DNA, 25 bp, Artificial
  Probe
ctgctggtcctgtccacaaggagcc

SEQ ID NO: 210825 - DNA, 25 bp, Artificial
  Probe
gccactatgtctgacgaggaaactg

SEQ ID NO: 210826 - DNA, 25 bp, Artificial
  Probe
tcctgtccacaaggagcccccaacc

SEQ ID NO: 210827 - DNA, 25 bp, Artificial
  Probe
ttctcagactcaactgcagacacaa

SEQ ID NO: 210828 - DNA, 25 bp, Artificial
  Probe
ccaacctttctcagactcaactgca

SEQ ID NO: 210829 - DNA, 25 bp, Artificial
  Probe
tgtccacaaggagcccccaaccttt

SEQ ID NO: 210830 - DNA, 25 bp, Artificial
  Probe
tatgtctgacgaggaaactgaacaa

SEQ ID NO: 210831 - DNA, 25 bp, Artificial
  Probe
ctatgtctgacgaggaaactgaaca

SEQ ID NO: 210832 - DNA, 25 bp, Artificial
  Probe
aggcctgctgctggtcctgtccaca

SEQ ID NO: 210833 - DNA, 25 bp, Artificial
  Probe
caacctttctcagactcaactgcag

SEQ ID NO: 210834 - DNA, 25 bp, Artificial
  Probe
ccccaacctttctcagactcaactg

SEQ ID NO: 210835 - DNA, 25 bp, Artificial
  Probe
gcctgctgctggtcctgtccacaag

SEQ ID NO: 210836 - DNA, 25 bp, Artificial
  Probe
cactatgtctgacgaggaaactgaa

SEQ ID NO: 210837 - DNA, 25 bp, Artificial
  Probe
ggcctgctgctggtcctgtccacaa

SEQ ID NO: 210838 - DNA, 25 bp, Artificial
  Probe
tatgaggagggtcgggaagaatttg

SEQ ID NO: 210839 - DNA, 25 bp, Artificial
  Probe
tcagccactatgaggagggtcggga

SEQ ID NO: 210840 - DNA, 25 bp, Artificial
  Probe
agaatttgcgttttcagtggaaaca

SEQ ID NO: 210841 - DNA, 25 bp, Artificial
  Probe
agtgcgtactctatcgatgactgtg

SEQ ID NO: 210842 - DNA, 25 bp, Artificial
  Probe
gcgttttcagtggaaacaagtgcgt

SEQ ID NO: 210843 - DNA, 25 bp, Artificial
  Probe
cagccactatgaggagggtcgggaa

SEQ ID NO: 210844 - DNA, 25 bp, Artificial
  Probe
ctatcgatgactgtgattgactcga

SEQ ID NO: 210845 - DNA, 25 bp, Artificial
  Probe
tactctatcgatgactgtgattgac

SEQ ID NO: 210846 - DNA, 25 bp, Artificial
  Probe
agtcagccactatgaggagggtcgg

SEQ ID NO: 210847 - DNA, 25 bp, Artificial
  Probe
tttgcgttttcagtggaaacaagtg

SEQ ID NO: 210848 - DNA, 25 bp, Artificial
  Probe
ctatgaggagggtcgggaagaattt

SEQ ID NO: 210849 - DNA, 25 bp, Artificial
  Probe
gtcagccactatgaggagggtcggg

SEQ ID NO: 210850 - DNA, 25 bp, Artificial
  Probe
atttgcgttttcagtggaaacaagt

SEQ ID NO: 210851 - DNA, 25 bp, Artificial
  Probe
caagtgcgtactctatcgatgactg

SEQ ID NO: 210852 - DNA, 25 bp, Artificial
  Probe
agccactatgaggagggtcgggaag

SEQ ID NO: 210853 - DNA, 25 bp, Artificial
  Probe
actatgaggagggtcgggaagaatt

SEQ ID NO: 210854 - DNA, 25 bp, Artificial
  Probe
gaaacaagtgcgtactctatcgatg

SEQ ID NO: 210855 - DNA, 25 bp, Artificial
  Probe
ttgcgttttcagtggaaacaagtgc

SEQ ID NO: 210856 - DNA, 25 bp, Artificial
  Probe
tgcgtactctatcgatgactgtgat

SEQ ID NO: 210857 - DNA, 25 bp, Artificial
  Probe
ggaaacaagtgcgtactctatcgat

SEQ ID NO: 210858 - DNA, 25 bp, Artificial
  Probe
ctctatcgatgactgtgattgactc

SEQ ID NO: 210859 - DNA, 25 bp, Artificial
  Probe
tctatcgatgactgtgattgactcg

SEQ ID NO: 210860 - DNA, 25 bp, Artificial
  Probe
gaatttgcgttttcagtggaaacaa

SEQ ID NO: 210861 - DNA, 25 bp, Artificial
  Probe
gccactatgaggagggtcgggaaga

SEQ ID NO: 210862 - DNA, 25 bp, Artificial
  Probe
ccactatgaggagggtcgggaagaa

SEQ ID NO: 210863 - DNA, 25 bp, Artificial
  Probe
acaagtgcgtactctatcgatgact

SEQ ID NO: 210864 - DNA, 25 bp, Artificial
  Probe
gaagaatttgcgttttcagtggaaa

SEQ ID NO: 210865 - DNA, 25 bp, Artificial
  Probe
gtgcgtactctatcgatgactgtga

SEQ ID NO: 210866 - DNA, 25 bp, Artificial
  Probe
aatttgcgttttcagtggaaacaag

SEQ ID NO: 210867 - DNA, 25 bp, Artificial
  Probe
atcgatgactgtgattgactcgatc

SEQ ID NO: 210868 - DNA, 25 bp, Artificial
  Probe
cgttttcagtggaaacaagtgcgta

SEQ ID NO: 210869 - DNA, 25 bp, Artificial
  Probe
tatcgatgactgtgattgactcgat

SEQ ID NO: 210870 - DNA, 25 bp, Artificial
  Probe
cactatgaggagggtcgggaagaat

SEQ ID NO: 210871 - DNA, 25 bp, Artificial
  Probe
gcgtactctatcgatgactgtgatt

SEQ ID NO: 210872 - DNA, 25 bp, Artificial
  Probe
gttttcagtggaaacaagtgcgtac

SEQ ID NO: 210873 - DNA, 25 bp, Artificial
  Probe
aagtgcgtactctatcgatgactgt

SEQ ID NO: 210874 - DNA, 25 bp, Artificial
  Probe
actctatcgatgactgtgattgact

SEQ ID NO: 210875 - DNA, 25 bp, Artificial
  Probe
gtactctatcgatgactgtgattga

SEQ ID NO: 210876 - DNA, 25 bp, Artificial
  Probe
aacaagtgcgtactctatcgatgac

SEQ ID NO: 210877 - DNA, 25 bp, Artificial
  Probe
aaacaagtgcgtactctatcgatga

SEQ ID NO: 210878 - DNA, 25 bp, Artificial
  Probe
tgcgttttcagtggaaacaagtgcg

SEQ ID NO: 210879 - DNA, 25 bp, Artificial
  Probe
cgtactctatcgatgactgtgattg

SEQ ID NO: 210880 - DNA, 25 bp, Artificial
  Probe
acaaggacacagactcagccatcac

SEQ ID NO: 210881 - DNA, 25 bp, Artificial
  Probe
gtcatcgtgtcaaccctgatgggca

SEQ ID NO: 210882 - DNA, 25 bp, Artificial
  Probe
tccgggtggacctacaagaccatgg

SEQ ID NO: 210883 - DNA, 25 bp, Artificial
  Probe
cctgagcaaaatcacagcccaaggg

SEQ ID NO: 210884 - DNA, 25 bp, Artificial
  Probe
cgctacaagctgaaggtagaaggat

SEQ ID NO: 210885 - DNA, 25 bp, Artificial
  Probe
cagtggaacggcaggtgactccatg

SEQ ID NO: 210886 - DNA, 25 bp, Artificial
  Probe
tatgacaaggacacagactcagcca

SEQ ID NO: 210887 - DNA, 25 bp, Artificial
  Probe
atgagctccgggtggacctacaaga

SEQ ID NO: 210888 - DNA, 25 bp, Artificial
  Probe
caggttcagtgttggagatgccaag

SEQ ID NO: 210889 - DNA, 25 bp, Artificial
  Probe
tgaactatcacaatggtagatcctt

SEQ ID NO: 210890 - DNA, 25 bp, Artificial
  Probe
ttcagtgttggagatgccaagagtc

SEQ ID NO: 210891 - DNA, 25 bp, Artificial
  Probe
aggacacagactcagccatcaccaa

SEQ ID NO: 210892 - DNA, 25 bp, Artificial
  Probe
tcgtgtcaaccctgatgggcagata

SEQ ID NO: 210893 - DNA, 25 bp, Artificial
  Probe
gatccttctctacctatgacaagga

SEQ ID NO: 210894 - DNA, 25 bp, Artificial
  Probe
tgacaaggacacagactcagccatc

SEQ ID NO: 210895 - DNA, 25 bp, Artificial
  Probe
aaggacacagactcagccatcacca

SEQ ID NO: 210896 - DNA, 25 bp, Artificial
  Probe
tcagtgttggagatgccaagagtcg

SEQ ID NO: 210897 - DNA, 25 bp, Artificial
  Probe
ctttctggtataagaactgtcatcg

SEQ ID NO: 210898 - DNA, 25 bp, Artificial
  Probe
gaactatcacaatggtagatccttc

SEQ ID NO: 210899 - DNA, 25 bp, Artificial
  Probe
gggagtcagcctatgctgtgtatga

SEQ ID NO: 210900 - DNA, 25 bp, Artificial
  Probe
ctacaaaggagctttctggtataag

SEQ ID NO: 210901 - DNA, 25 bp, Artificial
  Probe
agatccttctctacctatgacaagg

SEQ ID NO: 210902 - DNA, 25 bp, Artificial
  Probe
gccaagagtcgctacaagctgaagg

SEQ ID NO: 210903 - DNA, 25 bp, Artificial
  Probe
caaaggagctttctggtataagaac

SEQ ID NO: 210904 - DNA, 25 bp, Artificial
  Probe
gtataagaactgtcatcgtgtcaac

SEQ ID NO: 210905 - DNA, 25 bp, Artificial
  Probe
cctacaagaccatggggagtcagcc

SEQ ID NO: 210906 - DNA, 25 bp, Artificial
  Probe
ccaactgtgccctgtcctacaaagg

SEQ ID NO: 210907 - DNA, 25 bp, Artificial
  Probe
ctatgctgtgtatgacaggttcagt

SEQ ID NO: 210908 - DNA, 25 bp, Artificial
  Probe
agtggaacggcaggtgactccatga

SEQ ID NO: 210909 - DNA, 25 bp, Artificial
  Probe
ggtagatccttctctacctatgaca

SEQ ID NO: 210910 - DNA, 25 bp, Artificial
  Probe
agatgccaagagtcgctacaagctg

SEQ ID NO: 210911 - DNA, 25 bp, Artificial
  Probe
ccatggggagtcagcctatgctgtg

SEQ ID NO: 210912 - DNA, 25 bp, Artificial
  Probe
ggagatgccaagagtcgctacaagc

SEQ ID NO: 210913 - DNA, 25 bp, Artificial
  Probe
ttctctacctatgacaaggacacag

SEQ ID NO: 210914 - DNA, 25 bp, Artificial
  Probe
agaactgtcatcgtgtcaaccctga

SEQ ID NO: 210915 - DNA, 25 bp, Artificial
  Probe
taagaactgtcatcgtgtcaaccct

SEQ ID NO: 210916 - DNA, 25 bp, Artificial
  Probe
cctatgacaaggacacagactcagc

SEQ ID NO: 210917 - DNA, 25 bp, Artificial
  Probe
gtggacctacaagaccatggggagt

SEQ ID NO: 210918 - DNA, 25 bp, Artificial
  Probe
aagaccatggggagtcagcctatgc

SEQ ID NO: 210919 - DNA, 25 bp, Artificial
  Probe
tggaacggcaggtgactccatgaac

SEQ ID NO: 210920 - DNA, 25 bp, Artificial
  Probe
tgacaggttcagtgttggagatgcc

SEQ ID NO: 210921 - DNA, 25 bp, Artificial
  Probe
ggagctttctggtataagaactgtc

SEQ ID NO: 210922 - DNA, 25 bp, Artificial
  Probe
actccatgaactatcacaatggtag

SEQ ID NO: 210923 - DNA, 25 bp, Artificial
  Probe
tccatgaactatcacaatggtagat

SEQ ID NO: 210924 - DNA, 25 bp, Artificial
  Probe
aatggtagatccttctctacctatg

SEQ ID NO: 210925 - DNA, 25 bp, Artificial
  Probe
ctacaagctgaaggtagaaggatac

SEQ ID NO: 210926 - DNA, 25 bp, Artificial
  Probe
cattcctgcaagtctatcctgtccg

SEQ ID NO: 210927 - DNA, 25 bp, Artificial
  Probe
tatgacggctctcctagctctgttc

SEQ ID NO: 210928 - DNA, 25 bp, Artificial
  Probe
actcagaatactcacaggaacctag

SEQ ID NO: 210929 - DNA, 25 bp, Artificial
  Probe
ctccgtaactagagagaagccactc

SEQ ID NO: 210930 - DNA, 25 bp, Artificial
  Probe
caaagtggaactcctagatgtattt

SEQ ID NO: 210931 - DNA, 25 bp, Artificial
  Probe
ccatcaagagcttattgaaagcggt

SEQ ID NO: 210932 - DNA, 25 bp, Artificial
  Probe
aatctcttcagcatgtgccatgccc

SEQ ID NO: 210933 - DNA, 25 bp, Artificial
  Probe
tttctcctgaccatggtcccatcag

SEQ ID NO: 210934 - DNA, 25 bp, Artificial
  Probe
cacctgcatcgacttccatgaacag

SEQ ID NO: 210935 - DNA, 25 bp, Artificial
  Probe
tgcctcgtgctgctgagtctgagtg

SEQ ID NO: 210936 - DNA, 25 bp, Artificial
  Probe
caccatgaacccaagtgctgctgtc

SEQ ID NO: 210937 - DNA, 25 bp, Artificial
  Probe
gaagaggtgtctgaatccggaatct

SEQ ID NO: 210938 - DNA, 25 bp, Artificial
  Probe
ataggcaaatgctttgaatgctaca

SEQ ID NO: 210939 - DNA, 25 bp, Artificial
  Probe
catcagttctgagttcacctgagct

SEQ ID NO: 210940 - DNA, 25 bp, Artificial
  Probe
atgttgagatcattgccacaatgaa

SEQ ID NO: 210941 - DNA, 25 bp, Artificial
  Probe
cggctgagctgcattccaatcccag

SEQ ID NO: 210942 - DNA, 25 bp, Artificial
  Probe
cctagctctaagctcatcagttctg

SEQ ID NO: 210943 - DNA, 25 bp, Artificial
  Probe
agtccaggtgagatggcaaatcaag

SEQ ID NO: 210944 - DNA, 25 bp, Artificial
  Probe
tagagagaagccactcgccacagtg

SEQ ID NO: 210945 - DNA, 25 bp, Artificial
  Probe
agccaaccttccagaagcaccatga

SEQ ID NO: 210946 - DNA, 25 bp, Artificial
  Probe
agctacatccggagcccagctacat

SEQ ID NO: 210947 - DNA, 25 bp, Artificial
  Probe
aagagctccgtaactagagagaagc

SEQ ID NO: 210948 - DNA, 25 bp, Artificial
  Probe
atggacaaggcctggtcctgagaca

SEQ ID NO: 210949 - DNA, 25 bp, Artificial
  Probe
tgctgctgagtctgagtgggactca

SEQ ID NO: 210950 - DNA, 25 bp, Artificial
  Probe
ttacataggcaaatgctttgaatgc

SEQ ID NO: 210951 - DNA, 25 bp, Artificial
  Probe
ctggtcctgagacaaaagtaactcc

SEQ ID NO: 210952 - DNA, 25 bp, Artificial
  Probe
gctttgaatgctacatattacaaga

SEQ ID NO: 210953 - DNA, 25 bp, Artificial
  Probe
accgatggacagcagagagacggtc

SEQ ID NO: 210954 - DNA, 25 bp, Artificial
  Probe
agacaaaagtaactccagcagcaag

SEQ ID NO: 210955 - DNA, 25 bp, Artificial
  Probe
ttcccaagggaatttcataactcag

SEQ ID NO: 210956 - DNA, 25 bp, Artificial
  Probe
gctagtcctaactgtccctgtttct

SEQ ID NO: 210957 - DNA, 25 bp, Artificial
  Probe
ctccctttacccagtgtgcggctag

SEQ ID NO: 210958 - DNA, 25 bp, Artificial
  Probe
gaacctagacatgcatgtttaaata

SEQ ID NO: 210959 - DNA, 25 bp, Artificial
  Probe
ggagcccagctacattcgagcccag

SEQ ID NO: 210960 - DNA, 25 bp, Artificial
  Probe
actgtccctgtttctcctgaccatg

SEQ ID NO: 210961 - DNA, 25 bp, Artificial
  Probe
gagttcacctgagctcctttatttc

SEQ ID NO: 210962 - DNA, 25 bp, Artificial
  Probe
tcgcaagaacggtgcgctgcacctg

SEQ ID NO: 210963 - DNA, 25 bp, Artificial
  Probe
atggacagcagagagacggtctctc

SEQ ID NO: 210964 - DNA, 25 bp, Artificial
  Probe
gctctaagctcatcagttctgagtt

SEQ ID NO: 210965 - DNA, 25 bp, Artificial
  Probe
cactcgccacagtgctgagaccgat

SEQ ID NO: 210966 - DNA, 25 bp, Artificial
  Probe
atttaatgaccgactgtacaaagtg

SEQ ID NO: 210967 - DNA, 25 bp, Artificial
  Probe
gccaaccttccagaagcaccatgaa

SEQ ID NO: 210968 - DNA, 25 bp, Artificial
  Probe
gtaagctatgtgcaggtactaatct

SEQ ID NO: 210969 - DNA, 25 bp, Artificial
  Probe
attccaatcccagctacatccggag

SEQ ID NO: 210970 - DNA, 25 bp, Artificial
  Probe
ctgagctcctttatttcaaatgcag

SEQ ID NO: 210971 - DNA, 25 bp, Artificial
  Probe
gagagaagccactcgccacagtgct

SEQ ID NO: 210972 - DNA, 25 bp, Artificial
  Probe
cctactcggcagttccctacaagtt

SEQ ID NO: 210973 - DNA, 25 bp, Artificial
  Probe
aggcgtccgcctacggtgacttcgg

SEQ ID NO: 210974 - DNA, 25 bp, Artificial
  Probe
ggaccaggtcccttctctggagttc

SEQ ID NO: 210975 - DNA, 25 bp, Artificial
  Probe
tggagtactaatcaccaggaccccc

SEQ ID NO: 210976 - DNA, 25 bp, Artificial
  Probe
tcaaggagttggagcgcgtcttcgc

SEQ ID NO: 210977 - DNA, 25 bp, Artificial
  Probe
caagatcgacctcactgaggctcgc

SEQ ID NO: 210978 - DNA, 25 bp, Artificial
  Probe
agccgtccggcctgcatgagaagcg

SEQ ID NO: 210979 - DNA, 25 bp, Artificial
  Probe
ccttccctagccagtatgtcgcaga

SEQ ID NO: 210980 - DNA, 25 bp, Artificial
  Probe
ggctcctccaactgtgcgcttggcg

SEQ ID NO: 210981 - DNA, 25 bp, Artificial
  Probe
gcagttccctacaagttcttcccgg

SEQ ID NO: 210982 - DNA, 25 bp, Artificial
  Probe
accacgttcacgagtgctcagctca

SEQ ID NO: 210983 - DNA, 25 bp, Artificial
  Probe
cccggacatttacactcgtgaggaa

SEQ ID NO: 210984 - DNA, 25 bp, Artificial
  Probe
ggatcaaattgcacctgtccctaac

SEQ ID NO: 210985 - DNA, 25 bp, Artificial
  Probe
ccgccgggctaagttccgcaaacag

SEQ ID NO: 210986 - DNA, 25 bp, Artificial
  Probe
ttccttaggagcagggatcaaattg

SEQ ID NO: 210987 - DNA, 25 bp, Artificial
  Probe
tccaaggagtccacgtgcagccaca

SEQ ID NO: 210988 - DNA, 25 bp, Artificial
  Probe
tagccgcgggcgtctgtaggcaacc

SEQ ID NO: 210989 - DNA, 25 bp, Artificial
  Probe
tcaagcaacctgaagagtcccaccg

SEQ ID NO: 210990 - DNA, 25 bp, Artificial
  Probe
ggccactcactccttgaaatcaagc

SEQ ID NO: 210991 - DNA, 25 bp, Artificial
  Probe
cactacccagtgtctgatccctaga

SEQ ID NO: 210992 - DNA, 25 bp, Artificial
  Probe
gcagagctgcttaaggcctggcagc

SEQ ID NO: 210993 - DNA, 25 bp, Artificial
  Probe
ttcgttgtaaaacaagccagggcca

SEQ ID NO: 210994 - DNA, 25 bp, Artificial
  Probe
cagagctgcttaaggcctggcagcc

SEQ ID NO: 210995 - DNA, 25 bp, Artificial
  Probe
tgtccctaactcagagcccagtcat

SEQ ID NO: 210996 - DNA, 25 bp, Artificial
  Probe
gtaaaacaagccagggccactctcg

SEQ ID NO: 210997 - DNA, 25 bp, Artificial
  Probe
aggtgattttgctcaatccaaataa

SEQ ID NO: 210998 - DNA, 25 bp, Artificial
  Probe
ttaaggcctggcagccggcggaacc

SEQ ID NO: 210999 - DNA, 25 bp, Artificial
  Probe
ttccgcaaacaggagcgcgcggcca

SEQ ID NO: 211000 - DNA, 25 bp, Artificial
  Probe
gtgtctgatccctagaccaggtccc

SEQ ID NO: 211001 - DNA, 25 bp, Artificial
  Probe
gttgctcgtcggaggacgacgactc

SEQ ID NO: 211002 - DNA, 25 bp, Artificial
  Probe
tggagcgcgtcttcgccgagaccca

SEQ ID NO: 211003 - DNA, 25 bp, Artificial
  Probe
ttcggcgcctgcagccagcctggag

SEQ ID NO: 211004 - DNA, 25 bp, Artificial
  Probe
agttctgtcctcctttcaccggaag

SEQ ID NO: 211005 - DNA, 25 bp, Artificial
  Probe
gacaaacctcttctagccgcgggcg

SEQ ID NO: 211006 - DNA, 25 bp, Artificial
  Probe
gcctgcatgagaagcgcaagcagcg

SEQ ID NO: 211007 - DNA, 25 bp, Artificial
  Probe
tatgtcgcagagattagacactaga

SEQ ID NO: 211008 - DNA, 25 bp, Artificial
  Probe
ctccttgaaatcaagcaacctgaag

SEQ ID NO: 211009 - DNA, 25 bp, Artificial
  Probe
tcggctcctccaactgtgcgcttgg

SEQ ID NO: 211010 - DNA, 25 bp, Artificial
  Probe
cagggcagcggaagccctttcttgc

SEQ ID NO: 211011 - DNA, 25 bp, Artificial
  Probe
gaggcttccaatacagtcccctgcg

SEQ ID NO: 211012 - DNA, 25 bp, Artificial
  Probe
cctacggtgacttcggcgcctgcag

SEQ ID NO: 211013 - DNA, 25 bp, Artificial
  Probe
cccagccactcaaaggcgcgttgtg

SEQ ID NO: 211014 - DNA, 25 bp, Artificial
  Probe
agccgcgggcgtctgtaggcaacca

SEQ ID NO: 211015 - DNA, 25 bp, Artificial
  Probe
cagggatcaaattgcacctgtccct

SEQ ID NO: 211016 - DNA, 25 bp, Artificial
  Probe
cactacccggacatttacactcgtg

SEQ ID NO: 211017 - DNA, 25 bp, Artificial
  Probe
cgccctgaagacaaacctcttctag

SEQ ID NO: 211018 - DNA, 25 bp, Artificial
  Probe
gttcagtcaggtctcacacctccag

SEQ ID NO: 211019 - DNA, 25 bp, Artificial
  Probe
ggagctcagggcttagtgctcaccg

SEQ ID NO: 211020 - DNA, 25 bp, Artificial
  Probe
gtcagatagcatcctggtaggaaat

SEQ ID NO: 211021 - DNA, 25 bp, Artificial
  Probe
aaagtctggtctccaagtccatcgg

SEQ ID NO: 211022 - DNA, 25 bp, Artificial
  Probe
aacacagcaggatcattatatcaag

SEQ ID NO: 211023 - DNA, 25 bp, Artificial
  Probe
agcatcctggtaggaaatgacacat

SEQ ID NO: 211024 - DNA, 25 bp, Artificial
  Probe
gccttcagtcaaaagtctggtctcc

SEQ ID NO: 211025 - DNA, 25 bp, Artificial
  Probe
ggatcattatatcaaggctgttaca

SEQ ID NO: 211026 - DNA, 25 bp, Artificial
  Probe
caatgtaaacacagcaggatcatta

SEQ ID NO: 211027 - DNA, 25 bp, Artificial
  Probe
agtgctcaccggagggtccacacag

SEQ ID NO: 211028 - DNA, 25 bp, Artificial
  Probe
ggcttagtgctcaccggagggtcca

SEQ ID NO: 211029 - DNA, 25 bp, Artificial
  Probe
ccctgtatcccctggatatagaatt

SEQ ID NO: 211030 - DNA, 25 bp, Artificial
  Probe
agatagcatcctggtaggaaatgac

SEQ ID NO: 211031 - DNA, 25 bp, Artificial
  Probe
gctcagggcttagtgctcaccggag

SEQ ID NO: 211032 - DNA, 25 bp, Artificial
  Probe
gaagccttacaaatgtgacacctgt

SEQ ID NO: 211033 - DNA, 25 bp, Artificial
  Probe
ggaaggccttcagtcaaaagtctgg

SEQ ID NO: 211034 - DNA, 25 bp, Artificial
  Probe
gaaggccttcagtcaaaagtctggt

SEQ ID NO: 211035 - DNA, 25 bp, Artificial
  Probe
tcaccggagggtccacacaggagaa

SEQ ID NO: 211036 - DNA, 25 bp, Artificial
  Probe
tagtcagatagcatcctggtaggaa

SEQ ID NO: 211037 - DNA, 25 bp, Artificial
  Probe
cctgtatcccctggatatagaatta

SEQ ID NO: 211038 - DNA, 25 bp, Artificial
  Probe
tcagtcaaaagtctggtctccaagt

SEQ ID NO: 211039 - DNA, 25 bp, Artificial
  Probe
gccttacaaatgtgacacctgtggg

SEQ ID NO: 211040 - DNA, 25 bp, Artificial
  Probe
ttccaatgcaatgagtgccagaaga

SEQ ID NO: 211041 - DNA, 25 bp, Artificial
  Probe
tcaaaagtctggtctccaagtccat

SEQ ID NO: 211042 - DNA, 25 bp, Artificial
  Probe
gatccaatgtaaacacagcaggatc

SEQ ID NO: 211043 - DNA, 25 bp, Artificial
  Probe
gtctgatccaatgtaaacacagcag

SEQ ID NO: 211044 - DNA, 25 bp, Artificial
  Probe
catctggagctcagggcttagtgct

SEQ ID NO: 211045 - DNA, 25 bp, Artificial
  Probe
ggaattcatctggagctcagggctt

SEQ ID NO: 211046 - DNA, 25 bp, Artificial
  Probe
gcatcccctgtatcccctggatata

SEQ ID NO: 211047 - DNA, 25 bp, Artificial
  Probe
aagggcttcagtcagacctcacact

SEQ ID NO: 211048 - DNA, 25 bp, Artificial
  Probe
ccctgcacggttagcagtgtgggaa

SEQ ID NO: 211049 - DNA, 25 bp, Artificial
  Probe
aattagtcagatagcatcctggtag

SEQ ID NO: 211050 - DNA, 25 bp, Artificial
  Probe
ttcatctggagctcagggcttagtg

SEQ ID NO: 211051 - DNA, 25 bp, Artificial
  Probe
acagtctgatccaatgtaaacacag

SEQ ID NO: 211052 - DNA, 25 bp, Artificial
  Probe
gtaaacacagcaggatcattatatc

SEQ ID NO: 211053 - DNA, 25 bp, Artificial
  Probe
gatcattatatcaaggctgttacaa

SEQ ID NO: 211054 - DNA, 25 bp, Artificial
  Probe
gagaagccttacaaatgtgacacct

SEQ ID NO: 211055 - DNA, 25 bp, Artificial
  Probe
ttccgattaacagtctgatccaatg

SEQ ID NO: 211056 - DNA, 25 bp, Artificial
  Probe
gggcttcagtcagacctcacacttc

SEQ ID NO: 211057 - DNA, 25 bp, Artificial
  Probe
aaccctgcacggttagcagtgtggg

SEQ ID NO: 211058 - DNA, 25 bp, Artificial
  Probe
aaggaattcatctggagctcagggc

SEQ ID NO: 211059 - DNA, 25 bp, Artificial
  Probe
gattaacagtctgatccaatgtaaa

SEQ ID NO: 211060 - DNA, 25 bp, Artificial
  Probe
ttttgcatcccctgtatcccctgga

SEQ ID NO: 211061 - DNA, 25 bp, Artificial
  Probe
ctcagggcttagtgctcaccggagg

SEQ ID NO: 211062 - DNA, 25 bp, Artificial
  Probe
tgatccaatgtaaacacagcaggat

SEQ ID NO: 211063 - DNA, 25 bp, Artificial
  Probe
ccgattaacagtctgatccaatgta

SEQ ID NO: 211064 - DNA, 25 bp, Artificial
  Probe
aggacccaatactcgggtgttcaag

SEQ ID NO: 211065 - DNA, 25 bp, Artificial
  Probe
cgcccctggaatagaaaagtacagt

SEQ ID NO: 211066 - DNA, 25 bp, Artificial
  Probe
agcagctgtttctatagattttcat

SEQ ID NO: 211067 - DNA, 25 bp, Artificial
  Probe
tgagtcaatccattatgggatcccc

SEQ ID NO: 211068 - DNA, 25 bp, Artificial
  Probe
ccatccttgccaaacattgagtttg

SEQ ID NO: 211069 - DNA, 25 bp, Artificial
  Probe
ttcctgcttgcctgtgtgctggcca

SEQ ID NO: 211070 - DNA, 25 bp, Artificial
  Probe
ctcgggtgttcaagtggatacccca

SEQ ID NO: 211071 - DNA, 25 bp, Artificial
  Probe
aattttaggaagacccactacaatg

SEQ ID NO: 211072 - DNA, 25 bp, Artificial
  Probe
cgttttcatattgattctcgatgtg

SEQ ID NO: 211073 - DNA, 25 bp, Artificial
  Probe
cattgttttacttgctgtaaaatgc

SEQ ID NO: 211074 - DNA, 25 bp, Artificial
  Probe
gattttcatacaatgtccagttcag

SEQ ID NO: 211075 - DNA, 25 bp, Artificial
  Probe
tcaacgcactgaaggcagtcatcaa

SEQ ID NO: 211076 - DNA, 25 bp, Artificial
  Probe
tcatacaatgtccagttcagatttg

SEQ ID NO: 211077 - DNA, 25 bp, Artificial
  Probe
aagggctaacacaattgcatcagcc

SEQ ID NO: 211078 - DNA, 25 bp, Artificial
  Probe
ctttattgctggaactatatatcag

SEQ ID NO: 211079 - DNA, 25 bp, Artificial
  Probe
gccattgttttacttgctgtaaaat

SEQ ID NO: 211080 - DNA, 25 bp, Artificial
  Probe
gggcaagaaaccagacaccttagga

SEQ ID NO: 211081 - DNA, 25 bp, Artificial
  Probe
cgcactgaaggcagtcatcaataac

SEQ ID NO: 211082 - DNA, 25 bp, Artificial
  Probe
atgactactccctttattgctggaa

SEQ ID NO: 211083 - DNA, 25 bp, Artificial
  Probe
ccctgaaacaccaacttgcttatgg

SEQ ID NO: 211084 - DNA, 25 bp, Artificial
  Probe
cacaattgcatcagccctggcacaa

SEQ ID NO: 211085 - DNA, 25 bp, Artificial
  Probe
catacaatgtccagttcagatttgc

SEQ ID NO: 211086 - DNA, 25 bp, Artificial
  Probe
ccttgttttagaagacattgagcta

SEQ ID NO: 211087 - DNA, 25 bp, Artificial
  Probe
taggaagcctaaactttttactgtg

SEQ ID NO: 211088 - DNA, 25 bp, Artificial
  Probe
gcatccctttatttgcagaacaacg

SEQ ID NO: 211089 - DNA, 25 bp, Artificial
  Probe
gctcaacgcactgaaggcagtcatc

SEQ ID NO: 211090 - DNA, 25 bp, Artificial
  Probe
tcctgcttgcctgtgtgctggccat

SEQ ID NO: 211091 - DNA, 25 bp, Artificial
  Probe
ccatggttggcatccctttatttgc

SEQ ID NO: 211092 - DNA, 25 bp, Artificial
  Probe
atccctttatttgcagaacaacgtg

SEQ ID NO: 211093 - DNA, 25 bp, Artificial
  Probe
gaagcctaaactttttactgtgaat

SEQ ID NO: 211094 - DNA, 25 bp, Artificial
  Probe
gactactccctttattgctggaact

SEQ ID NO: 211095 - DNA, 25 bp, Artificial
  Probe
gcagctgtttctatagattttcata

SEQ ID NO: 211096 - DNA, 25 bp, Artificial
  Probe
ctacaatggttgacacaatgaagaa

SEQ ID NO: 211097 - DNA, 25 bp, Artificial
  Probe
actgaaggcagtcatcaataacccc

SEQ ID NO: 211098 - DNA, 25 bp, Artificial
  Probe
ccaacttgcttatgggcaaagatat

SEQ ID NO: 211099 - DNA, 25 bp, Artificial
  Probe
atttcctgctaaggattgggatcca

SEQ ID NO: 211100 - DNA, 25 bp, Artificial
  Probe
tgtgtgctggccattgttttacttg

SEQ ID NO: 211101 - DNA, 25 bp, Artificial
  Probe
cttgccaaacattgagtttgttgga

SEQ ID NO: 211102 - DNA, 25 bp, Artificial
  Probe
gttttacttgctgtaaaatgctgtc

SEQ ID NO: 211103 - DNA, 25 bp, Artificial
  Probe
ttaggacccaatactcgggtgttca

SEQ ID NO: 211104 - DNA, 25 bp, Artificial
  Probe
aagtacagtgcaggacaacccttcc

SEQ ID NO: 211105 - DNA, 25 bp, Artificial
  Probe
ccaatactcgggtgttcaagtggat

SEQ ID NO: 211106 - DNA, 25 bp, Artificial
  Probe
tattttgattcctggttcgagtcat

SEQ ID NO: 211107 - DNA, 25 bp, Artificial
  Probe
atatatcagatgctccttgttttag

SEQ ID NO: 211108 - DNA, 25 bp, Artificial
  Probe
gagtcaatccattatgggatccccc

SEQ ID NO: 211109 - DNA, 25 bp, Artificial
  Probe
taggaagacccactacaatggttga

SEQ ID NO: 211110 - DNA, 25 bp, Artificial
  Probe
taacctctatacctgtgaggttgtt

SEQ ID NO: 211111 - DNA, 25 bp, Artificial
  Probe
aagcggccgcaagcttattcccttt

SEQ ID NO: 211112 - DNA, 25 bp, Artificial
  Probe
ggaagcggccgcaagcttattccct

SEQ ID NO: 211113 - DNA, 25 bp, Artificial
  Probe
acttctatcccagagacatcagtgt

SEQ ID NO: 211114 - DNA, 25 bp, Artificial
  Probe
gtgttactgatcaggacagcaaaga

SEQ ID NO: 211115 - DNA, 25 bp, Artificial
  Probe
cagtcccagacaggacacaggccag

SEQ ID NO: 211116 - DNA, 25 bp, Artificial
  Probe
cagagacatcagtgtcaagtggaag

SEQ ID NO: 211117 - DNA, 25 bp, Artificial
  Probe
agtgttactgatcaggacagcaaag

SEQ ID NO: 211118 - DNA, 25 bp, Artificial
  Probe
tcccagagacatcagtgtcaagtgg

SEQ ID NO: 211119 - DNA, 25 bp, Artificial
  Probe
aacttctatcccagagacatcagtg

SEQ ID NO: 211120 - DNA, 25 bp, Artificial
  Probe
gtgtcctggacagtgttactgatca

SEQ ID NO: 211121 - DNA, 25 bp, Artificial
  Probe
gttactgatcaggacagcaaagaca

SEQ ID NO: 211122 - DNA, 25 bp, Artificial
  Probe
ccagagacatcagtgtcaagtggaa

SEQ ID NO: 211123 - DNA, 25 bp, Artificial
  Probe
gtctccagtcccagacaggacacag

SEQ ID NO: 211124 - DNA, 25 bp, Artificial
  Probe
atacctgtgaggttgttcataagac

SEQ ID NO: 211125 - DNA, 25 bp, Artificial
  Probe
gggctgatgctgcaccaactgtatc

SEQ ID NO: 211126 - DNA, 25 bp, Artificial
  Probe
tactgatcaggacagcaaagacagc

SEQ ID NO: 211127 - DNA, 25 bp, Artificial
  Probe
tttggtctccagtcccagacaggac

SEQ ID NO: 211128 - DNA, 25 bp, Artificial
  Probe
cgggctgatgctgcaccaactgtat

SEQ ID NO: 211129 - DNA, 25 bp, Artificial
  Probe
aggacagcaaagacagcacgtacag

SEQ ID NO: 211130 - DNA, 25 bp, Artificial
  Probe
gatcaggacagcaaagacagcacgt

SEQ ID NO: 211131 - DNA, 25 bp, Artificial
  Probe
actgatcaggacagcaaagacagca

SEQ ID NO: 211132 - DNA, 25 bp, Artificial
  Probe
cggccgcaagcttattccctttagt

SEQ ID NO: 211133 - DNA, 25 bp, Artificial
  Probe
tctatcccagagacatcagtgtcaa

SEQ ID NO: 211134 - DNA, 25 bp, Artificial
  Probe
gacagtgttactgatcaggacagca

SEQ ID NO: 211135 - DNA, 25 bp, Artificial
  Probe
acctctatacctgtgaggttgttca

SEQ ID NO: 211136 - DNA, 25 bp, Artificial
  Probe
tacctgtgaggttgttcataagaca

SEQ ID NO: 211137 - DNA, 25 bp, Artificial
  Probe
tctccagtcccagacaggacacagg

SEQ ID NO: 211138 - DNA, 25 bp, Artificial
  Probe
acctgtgaggttgttcataagacat

SEQ ID NO: 211139 - DNA, 25 bp, Artificial
  Probe
ctctatacctgtgaggttgttcata

SEQ ID NO: 211140 - DNA, 25 bp, Artificial
  Probe
tgtcctggacagtgttactgatcag

SEQ ID NO: 211141 - DNA, 25 bp, Artificial
  Probe
agatggtgtcctggacagtgttact

SEQ ID NO: 211142 - DNA, 25 bp, Artificial
  Probe
cccaaaggtcctgaggtgccacctg

SEQ ID NO: 211143 - DNA, 25 bp, Artificial
  Probe
ggacagtgttactgatcaggacagc

SEQ ID NO: 211144 - DNA, 25 bp, Artificial
  Probe
aggacacaggccagacatgatggct

SEQ ID NO: 211145 - DNA, 25 bp, Artificial
  Probe
tatcccagagacatcagtgtcaagt

SEQ ID NO: 211146 - DNA, 25 bp, Artificial
  Probe
gcggccgcaagcttattccctttag

SEQ ID NO: 211147 - DNA, 25 bp, Artificial
  Probe
ctatacctgtgaggttgttcataag

SEQ ID NO: 211148 - DNA, 25 bp, Artificial
  Probe
cttctatcccagagacatcagtgtc

SEQ ID NO: 211149 - DNA, 25 bp, Artificial
  Probe
gacccaaaggtcctgaggtgccacc

SEQ ID NO: 211150 - DNA, 25 bp, Artificial
  Probe
acgagatggtgtcctggacagtgtt

SEQ ID NO: 211151 - DNA, 25 bp, Artificial
  Probe
tcccagacaggacacaggccagaca

SEQ ID NO: 211152 - DNA, 25 bp, Artificial
  Probe
cagacaggacacaggccagacatga

SEQ ID NO: 211153 - DNA, 25 bp, Artificial
  Probe
gacagcaaagacagcacgtacagca

SEQ ID NO: 211154 - DNA, 25 bp, Artificial
  Probe
gtcccagacaggacacaggccagac

SEQ ID NO: 211155 - DNA, 25 bp, Artificial
  Probe
tggtgtcctggacagtgttactgat

SEQ ID NO: 211156 - DNA, 25 bp, Artificial
  Probe
agactggcatttcctcaggaaccca

SEQ ID NO: 211157 - DNA, 25 bp, Artificial
  Probe
caatgacccagttctgtgaggctga

SEQ ID NO: 211158 - DNA, 25 bp, Artificial
  Probe
tgacccagttctgtgaggctgaatt

SEQ ID NO: 211159 - DNA, 25 bp, Artificial
  Probe
gagcgattctcttgcttccagaagg

SEQ ID NO: 211160 - DNA, 25 bp, Artificial
  Probe
ttctcttgcttccagaaggaagctc

SEQ ID NO: 211161 - DNA, 25 bp, Artificial
  Probe
gcaatgacccagttctgtgaggctg

SEQ ID NO: 211162 - DNA, 25 bp, Artificial
  Probe
ggagcgattctcttgcttccagaag

SEQ ID NO: 211163 - DNA, 25 bp, Artificial
  Probe
ccagactggcatttcctcaggaacc

SEQ ID NO: 211164 - DNA, 25 bp, Artificial
  Probe
ttgcttccagaaggaagctcctcgg

SEQ ID NO: 211165 - DNA, 25 bp, Artificial
  Probe
gaaggaagctcctcggcccgactac

SEQ ID NO: 211166 - DNA, 25 bp, Artificial
  Probe
cccagttctgtgaggctgaattctc

SEQ ID NO: 211167 - DNA, 25 bp, Artificial
  Probe
ggcatttcctcaggaacccaactgc

SEQ ID NO: 211168 - DNA, 25 bp, Artificial
  Probe
tgaggctgaattctctgtcaagacc

SEQ ID NO: 211169 - DNA, 25 bp, Artificial
  Probe
aggctgaattctctgtcaagacccg

SEQ ID NO: 211170 - DNA, 25 bp, Artificial
  Probe
agcgattctcttgcttccagaagga

SEQ ID NO: 211171 - DNA, 25 bp, Artificial
  Probe
tctcttgcttccagaaggaagctcc

SEQ ID NO: 211172 - DNA, 25 bp, Artificial
  Probe
agaaggaagctcctcggcccgacta

SEQ ID NO: 211173 - DNA, 25 bp, Artificial
  Probe
tcttgcttccagaaggaagctcctc

SEQ ID NO: 211174 - DNA, 25 bp, Artificial
  Probe
acgcaatgacccagttctgtgaggc

SEQ ID NO: 211175 - DNA, 25 bp, Artificial
  Probe
gacccagttctgtgaggctgaattc

SEQ ID NO: 211176 - DNA, 25 bp, Artificial
  Probe
acccagttctgtgaggctgaattct

SEQ ID NO: 211177 - DNA, 25 bp, Artificial
  Probe
tccagaaggaagctcctcggcccga

SEQ ID NO: 211178 - DNA, 25 bp, Artificial
  Probe
gaggctgaattctctgtcaagaccc

SEQ ID NO: 211179 - DNA, 25 bp, Artificial
  Probe
caccagactggcatttcctcaggaa

SEQ ID NO: 211180 - DNA, 25 bp, Artificial
  Probe
ctgtgaggctgaattctctgtcaag

SEQ ID NO: 211181 - DNA, 25 bp, Artificial
  Probe
ctggcatttcctcaggaacccaact

SEQ ID NO: 211182 - DNA, 25 bp, Artificial
  Probe
gttctgtgaggctgaattctctgtc

SEQ ID NO: 211183 - DNA, 25 bp, Artificial
  Probe
tgtgaggctgaattctctgtcaaga

SEQ ID NO: 211184 - DNA, 25 bp, Artificial
  Probe
gcgattctcttgcttccagaaggaa

SEQ ID NO: 211185 - DNA, 25 bp, Artificial
  Probe
accagactggcatttcctcaggaac

SEQ ID NO: 211186 - DNA, 25 bp, Artificial
  Probe
ttccagaaggaagctcctcggcccg

SEQ ID NO: 211187 - DNA, 25 bp, Artificial
  Probe
gcttccagaaggaagctcctcggcc

SEQ ID NO: 211188 - DNA, 25 bp, Artificial
  Probe
cttgcttccagaaggaagctcctcg

SEQ ID NO: 211189 - DNA, 25 bp, Artificial
  Probe
aatgacccagttctgtgaggctgaa

SEQ ID NO: 211190 - DNA, 25 bp, Artificial
  Probe
aggagcgattctcttgcttccagaa

SEQ ID NO: 211191 - DNA, 25 bp, Artificial
  Probe
tgcttccagaaggaagctcctcggc

SEQ ID NO: 211192 - DNA, 25 bp, Artificial
  Probe
ttctgtgaggctgaattctctgtca

SEQ ID NO: 211193 - DNA, 25 bp, Artificial
  Probe
cagaaggaagctcctcggcccgact

SEQ ID NO: 211194 - DNA, 25 bp, Artificial
  Probe
cgcaatgacccagttctgtgaggct

SEQ ID NO: 211195 - DNA, 25 bp, Artificial
  Probe
tctgtgaggctgaattctctgtcaa

SEQ ID NO: 211196 - DNA, 25 bp, Artificial
  Probe
atgacccagttctgtgaggctgaat

SEQ ID NO: 211197 - DNA, 25 bp, Artificial
  Probe
gactggcatttcctcaggaacccaa

SEQ ID NO: 211198 - DNA, 25 bp, Artificial
  Probe
tggcatttcctcaggaacccaactg

SEQ ID NO: 211199 - DNA, 25 bp, Artificial
  Probe
ctgaattctctgtcaagacccgacc

SEQ ID NO: 211200 - DNA, 25 bp, Artificial
  Probe
ggctgaattctctgtcaagacccga

SEQ ID NO: 211201 - DNA, 25 bp, Artificial
  Probe
gaggagcgattctcttgcttccaga

SEQ ID NO: 211202 - DNA, 25 bp, Artificial
  Probe
tccagcagcagctccctggagagct

SEQ ID NO: 211203 - DNA, 25 bp, Artificial
  Probe
tcaggaagcctgtgccggctccagg

SEQ ID NO: 211204 - DNA, 25 bp, Artificial
  Probe
gaacagcagcacctattgaccacag

SEQ ID NO: 211205 - DNA, 25 bp, Artificial
  Probe
agttccagcagcagctccctggaga

SEQ ID NO: 211206 - DNA, 25 bp, Artificial
  Probe
ggggtcattcccaagcaagagtcac

SEQ ID NO: 211207 - DNA, 25 bp, Artificial
  Probe
cgtcacctgcatcgtgaacgtctgt

SEQ ID NO: 211208 - DNA, 25 bp, Artificial
  Probe
agttcagattcttcccatggcagcc

SEQ ID NO: 211209 - DNA, 25 bp, Artificial
  Probe
ttcccaagcaagagtcacagcggag

SEQ ID NO: 211210 - DNA, 25 bp, Artificial
  Probe
tcaacgtcacctgcatcgtgaacgt

SEQ ID NO: 211211 - DNA, 25 bp, Artificial
  Probe
acgggacccatgtcaacgtcacctg

SEQ ID NO: 211212 - DNA, 25 bp, Artificial
  Probe
cggctccaggagttcagattcttcc

SEQ ID NO: 211213 - DNA, 25 bp, Artificial
  Probe
agcagctccctggagagctcagcca

SEQ ID NO: 211214 - DNA, 25 bp, Artificial
  Probe
caacgtcacctgcatcgtgaacgtc

SEQ ID NO: 211215 - DNA, 25 bp, Artificial
  Probe
ggcagccacgggacccatgtcaacg

SEQ ID NO: 211216 - DNA, 25 bp, Artificial
  Probe
gccggctccaggagttcagattctt

SEQ ID NO: 211217 - DNA, 25 bp, Artificial
  Probe
cagttccagcagcagctccctggag

SEQ ID NO: 211218 - DNA, 25 bp, Artificial
  Probe
tctcaggaagcctgtgccggctcca

SEQ ID NO: 211219 - DNA, 25 bp, Artificial
  Probe
gcagctccctggagagctcagccag

SEQ ID NO: 211220 - DNA, 25 bp, Artificial
  Probe
gccaagggtctcaggaagcctgtgc

SEQ ID NO: 211221 - DNA, 25 bp, Artificial
  Probe
catgtcaacgtcacctgcatcgtga

SEQ ID NO: 211222 - DNA, 25 bp, Artificial
  Probe
agcaagagtcacagcggaggccaag

SEQ ID NO: 211223 - DNA, 25 bp, Artificial
  Probe
ctccaggagttcagattcttcccat

SEQ ID NO: 211224 - DNA, 25 bp, Artificial
  Probe
cccctggggtcattcccaagcaaga

SEQ ID NO: 211225 - DNA, 25 bp, Artificial
  Probe
attcccaagcaagagtcacagcgga

SEQ ID NO: 211226 - DNA, 25 bp, Artificial
  Probe
aacagcagcacctattgaccacagc

SEQ ID NO: 211227 - DNA, 25 bp, Artificial
  Probe
ggacccatgtcaacgtcacctgcat

SEQ ID NO: 211228 - DNA, 25 bp, Artificial
  Probe
tccaggagttcagattcttcccatg

SEQ ID NO: 211229 - DNA, 25 bp, Artificial
  Probe
aggccaagggtctcaggaagcctgt

SEQ ID NO: 211230 - DNA, 25 bp, Artificial
  Probe
agattcttcccatggcagccacggg

SEQ ID NO: 211231 - DNA, 25 bp, Artificial
  Probe
caagggtctcaggaagcctgtgccg

SEQ ID NO: 211232 - DNA, 25 bp, Artificial
  Probe
acgtcacctgcatcgtgaacgtctg

SEQ ID NO: 211233 - DNA, 25 bp, Artificial
  Probe
aggagttcagattcttcccatggca

SEQ ID NO: 211234 - DNA, 25 bp, Artificial
  Probe
gcctgtgccggctccaggagttcag

SEQ ID NO: 211235 - DNA, 25 bp, Artificial
  Probe
tccctggagagctcagccagcgctg

SEQ ID NO: 211236 - DNA, 25 bp, Artificial
  Probe
cagattcttcccatggcagccacgg

SEQ ID NO: 211237 - DNA, 25 bp, Artificial
  Probe
cattcccaagcaagagtcacagcgg

SEQ ID NO: 211238 - DNA, 25 bp, Artificial
  Probe
ccaagggtctcaggaagcctgtgcc

SEQ ID NO: 211239 - DNA, 25 bp, Artificial
  Probe
aagcaagagtcacagcggaggccaa

SEQ ID NO: 211240 - DNA, 25 bp, Artificial
  Probe
ccaagcaagagtcacagcggaggcc

SEQ ID NO: 211241 - DNA, 25 bp, Artificial
  Probe
ccctggagagctcagccagcgctgg

SEQ ID NO: 211242 - DNA, 25 bp, Artificial
  Probe
agctccctggagagctcagccagcg

SEQ ID NO: 211243 - DNA, 25 bp, Artificial
  Probe
ccctggggtcattcccaagcaagag

SEQ ID NO: 211244 - DNA, 25 bp, Artificial
  Probe
gggacccatgtcaacgtcacctgca

SEQ ID NO: 211245 - DNA, 25 bp, Artificial
  Probe
ccatgtcaacgtcacctgcatcgtg

SEQ ID NO: 211246 - DNA, 25 bp, Artificial
  Probe
gtgccggctccaggagttcagattc

SEQ ID NO: 211247 - DNA, 25 bp, Artificial
  Probe
gagttcagattcttcccatggcagc

SEQ ID NO: 211248 - DNA, 25 bp, Artificial
  Probe
ggagccatatacagttcacaatcct

SEQ ID NO: 211249 - DNA, 25 bp, Artificial
  Probe
agttcaacaacctgggccagaggag

SEQ ID NO: 211250 - DNA, 25 bp, Artificial
  Probe
cagtaccagttcaacaacctgggcc

SEQ ID NO: 211251 - DNA, 25 bp, Artificial
  Probe
tccaggatgagcttgaaaggacccc

SEQ ID NO: 211252 - DNA, 25 bp, Artificial
  Probe
gtacatcgagacttctcatgaccac

SEQ ID NO: 211253 - DNA, 25 bp, Artificial
  Probe
agagaatccagtgtgacatcccttc

SEQ ID NO: 211254 - DNA, 25 bp, Artificial
  Probe
cagctccgtcggaggcctggtgctc

SEQ ID NO: 211255 - DNA, 25 bp, Artificial
  Probe
tgagcttgaaaggaccccagtgctg

SEQ ID NO: 211256 - DNA, 25 bp, Artificial
  Probe
agcttccctgtcagcgtggtcttct

SEQ ID NO: 211257 - DNA, 25 bp, Artificial
  Probe
tgagcactgccgagatcctctttaa

SEQ ID NO: 211258 - DNA, 25 bp, Artificial
  Probe
agaccaaagtggagccatatacagt

SEQ ID NO: 211259 - DNA, 25 bp, Artificial
  Probe
tctcccagaacctctcaagtgtctg

SEQ ID NO: 211260 - DNA, 25 bp, Artificial
  Probe
tcactgctggcctatacaagcttgg

SEQ ID NO: 211261 - DNA, 25 bp, Artificial
  Probe
gagccatatacagttcacaatcctg

SEQ ID NO: 211262 - DNA, 25 bp, Artificial
  Probe
accctccagggcaatctgctatttg

SEQ ID NO: 211263 - DNA, 25 bp, Artificial
  Probe
acgacagtacaaggacatgatgaat

SEQ ID NO: 211264 - DNA, 25 bp, Artificial
  Probe
cacaatcctgtaccactcattgtgg

SEQ ID NO: 211265 - DNA, 25 bp, Artificial
  Probe
taccactcattgtgggcagctccgt

SEQ ID NO: 211266 - DNA, 25 bp, Artificial
  Probe
aacgacagtacaaggacatgatgaa

SEQ ID NO: 211267 - DNA, 25 bp, Artificial
  Probe
cctctcactccaagttccaggatga

SEQ ID NO: 211268 - DNA, 25 bp, Artificial
  Probe
gagcttgaaaggaccccagtgctga

SEQ ID NO: 211269 - DNA, 25 bp, Artificial
  Probe
tgtcgcactgagcagaaatccccct

SEQ ID NO: 211270 - DNA, 25 bp, Artificial
  Probe
gagatcctctttaacgactccgcat

SEQ ID NO: 211271 - DNA, 25 bp, Artificial
  Probe
tgtctgtcgcactgagcagaaatcc

SEQ ID NO: 211272 - DNA, 25 bp, Artificial
  Probe
gaatccagtgtgacatcccttcctt

SEQ ID NO: 211273 - DNA, 25 bp, Artificial
  Probe
tgaaaggaccccagtgctgaactgc

SEQ ID NO: 211274 - DNA, 25 bp, Artificial
  Probe
ctgcaagagaatccagtgtgacatc

SEQ ID NO: 211275 - DNA, 25 bp, Artificial
  Probe
acctcctgcttgtgagcactgccga

SEQ ID NO: 211276 - DNA, 25 bp, Artificial
  Probe
actgctctgttgcagtctgcaagag

SEQ ID NO: 211277 - DNA, 25 bp, Artificial
  Probe
tctcatcactgctggcctatacaag

SEQ ID NO: 211278 - DNA, 25 bp, Artificial
  Probe
tccctgtcagcgtggtcttctggat

SEQ ID NO: 211279 - DNA, 25 bp, Artificial
  Probe
ctggcctatacaagcttggcttttt

SEQ ID NO: 211280 - DNA, 25 bp, Artificial
  Probe
agacgtttgtgaaggctcagacaga

SEQ ID NO: 211281 - DNA, 25 bp, Artificial
  Probe
acaacctgggccagaggagcttccc

SEQ ID NO: 211282 - DNA, 25 bp, Artificial
  Probe
cttctggatccctgtccagatcaac

SEQ ID NO: 211283 - DNA, 25 bp, Artificial
  Probe
gcttgtgagcactgccgagatcctc

SEQ ID NO: 211284 - DNA, 25 bp, Artificial
  Probe
aaagtggagccatatacagttcaca

SEQ ID NO: 211285 - DNA, 25 bp, Artificial
  Probe
agacagagaccaaagtggagccata

SEQ ID NO: 211286 - DNA, 25 bp, Artificial
  Probe
cgcatttgccctacttccggggcag

SEQ ID NO: 211287 - DNA, 25 bp, Artificial
  Probe
acaaggtgaccatatgggatcctcc

SEQ ID NO: 211288 - DNA, 25 bp, Artificial
  Probe
ctcaagtgtctgtcgcactgagcag

SEQ ID NO: 211289 - DNA, 25 bp, Artificial
  Probe
gtgtgacatcccttccttcaacagt

SEQ ID NO: 211290 - DNA, 25 bp, Artificial
  Probe
ctcattgtgggcagctccgtcggag

SEQ ID NO: 211291 - DNA, 25 bp, Artificial
  Probe
agagaccaaagtggagccatataca

SEQ ID NO: 211292 - DNA, 25 bp, Artificial
  Probe
tcggaggcctggtgctcttggctct

SEQ ID NO: 211293 - DNA, 25 bp, Artificial
  Probe
aagccggtggccaagatggcccacc

SEQ ID NO: 211294 - DNA, 25 bp, Artificial
  Probe
ctttaccatcagctcctgccaggaa

SEQ ID NO: 211295 - DNA, 25 bp, Artificial
  Probe
accatcagctcctgccaggaattca

SEQ ID NO: 211296 - DNA, 25 bp, Artificial
  Probe
ctgccaggaattcaggtgtgtgtgt

SEQ ID NO: 211297 - DNA, 25 bp, Artificial
  Probe
agccagtgagtgtggcttgctaagt

SEQ ID NO: 211298 - DNA, 25 bp, Artificial
  Probe
gtactttaccatcagctcctgccag

SEQ ID NO: 211299 - DNA, 25 bp, Artificial
  Probe
catcttaaagcactgggagaagagg

SEQ ID NO: 211300 - DNA, 25 bp, Artificial
  Probe
agacgataaacatgcctgcccacgc

SEQ ID NO: 211301 - DNA, 25 bp, Artificial
  Probe
gtgccctatattgttgcctacccta

SEQ ID NO: 211302 - DNA, 25 bp, Artificial
  Probe
gtaacagccagtgagtgtggcttgc

SEQ ID NO: 211303 - DNA, 25 bp, Artificial
  Probe
gcttgctaagtgttgagtgactact

SEQ ID NO: 211304 - DNA, 25 bp, Artificial
  Probe
tcagctcctgccaggaattcaggtg

SEQ ID NO: 211305 - DNA, 25 bp, Artificial
  Probe
gatgtaacagccagtgagtgtggct

SEQ ID NO: 211306 - DNA, 25 bp, Artificial
  Probe
cagaagcacccatcttaaagcactg

SEQ ID NO: 211307 - DNA, 25 bp, Artificial
  Probe
tgccatgcaatattgtagcaactcc

SEQ ID NO: 211308 - DNA, 25 bp, Artificial
  Probe
ctatttgggccctcaagagcttcct

SEQ ID NO: 211309 - DNA, 25 bp, Artificial
  Probe
ccaacccttcctaagaggcttagca

SEQ ID NO: 211310 - DNA, 25 bp, Artificial
  Probe
gcccacgcacacacagctatagagg

SEQ ID NO: 211311 - DNA, 25 bp, Artificial
  Probe
gtgactactatttgggccctcaaga

SEQ ID NO: 211312 - DNA, 25 bp, Artificial
  Probe
gcaactccgaaatggtcatttttta

SEQ ID NO: 211313 - DNA, 25 bp, Artificial
  Probe
ctgcgcctggttttgccatgcaata

SEQ ID NO: 211314 - DNA, 25 bp, Artificial
  Probe
gagcttcctgacctgcgtcgctttc

SEQ ID NO: 211315 - DNA, 25 bp, Artificial
  Probe
cctgccaggaattcaggtgtgtgtg

SEQ ID NO: 211316 - DNA, 25 bp, Artificial
  Probe
cacagctatagaggtgcactctccc

SEQ ID NO: 211317 - DNA, 25 bp, Artificial
  Probe
gacctgcgtcgctttccagtcatta

SEQ ID NO: 211318 - DNA, 25 bp, Artificial
  Probe
tttccagtcattatgcacgctctgt

SEQ ID NO: 211319 - DNA, 25 bp, Artificial
  Probe
gacaggtactttaccatcagctcct

SEQ ID NO: 211320 - DNA, 25 bp, Artificial
  Probe
tgttgagtgactactatttgggccc

SEQ ID NO: 211321 - DNA, 25 bp, Artificial
  Probe
gcaatattgtagcaactccgaaatg

SEQ ID NO: 211322 - DNA, 25 bp, Artificial
  Probe
ctaagaggcttagcaatggaagagc

SEQ ID NO: 211323 - DNA, 25 bp, Artificial
  Probe
gaggtggtgccctatattgttgcct

SEQ ID NO: 211324 - DNA, 25 bp, Artificial
  Probe
gggccctcaagagcttcctgacctg

SEQ ID NO: 211325 - DNA, 25 bp, Artificial
  Probe
ggcttgctaagtgttgagtgactac

SEQ ID NO: 211326 - DNA, 25 bp, Artificial
  Probe
acccttcctaagaggcttagcaatg

SEQ ID NO: 211327 - DNA, 25 bp, Artificial
  Probe
ctcctgccaggaattcaggtgtgtg

SEQ ID NO: 211328 - DNA, 25 bp, Artificial
  Probe
agaggtgcactctccctcagaagca

SEQ ID NO: 211329 - DNA, 25 bp, Artificial
  Probe
tggtcattttttactccccttgtag

SEQ ID NO: 211330 - DNA, 25 bp, Artificial
  Probe
acagccagtgagtgtggcttgctaa

SEQ ID NO: 211331 - DNA, 25 bp, Artificial
  Probe
ttaccatcagctcctgccaggaatt

SEQ ID NO: 211332 - DNA, 25 bp, Artificial
  Probe
cctggttttgccatgcaatattgta

SEQ ID NO: 211333 - DNA, 25 bp, Artificial
  Probe
tattgtagcaactccgaaatggtca

SEQ ID NO: 211334 - DNA, 25 bp, Artificial
  Probe
cagctatagaggtgcactctccctc

SEQ ID NO: 211335 - DNA, 25 bp, Artificial
  Probe
gtagcaactccgaaatggtcatttt

SEQ ID NO: 211336 - DNA, 25 bp, Artificial
  Probe
tgcgcctggttttgccatgcaatat

SEQ ID NO: 211337 - DNA, 25 bp, Artificial
  Probe
ctcaagagcttcctgacctgcgtcg

SEQ ID NO: 211338 - DNA, 25 bp, Artificial
  Probe
ccacgcacacacagctatagaggtg

SEQ ID NO: 211339 - DNA, 25 bp, Artificial
  Probe
ttcctaagaggcttagcaatggaag

SEQ ID NO: 211340 - DNA, 25 bp, Artificial
  Probe
cctctggcaagaatgcatcaatgtt

SEQ ID NO: 211341 - DNA, 25 bp, Artificial
  Probe
ccctttggtggatcttttgatgtga

SEQ ID NO: 211342 - DNA, 25 bp, Artificial
  Probe
ccactactctgagaaaacagaaatg

SEQ ID NO: 211343 - DNA, 25 bp, Artificial
  Probe
actactctgagaaaacagaaatgtg

SEQ ID NO: 211344 - DNA, 25 bp, Artificial
  Probe
gcctctgctgcctctggcaagaatg

SEQ ID NO: 211345 - DNA, 25 bp, Artificial
  Probe
cttctcattttgatttgaaaagtgc

SEQ ID NO: 211346 - DNA, 25 bp, Artificial
  Probe
cttccgctgcagtgcgtgagaggta

SEQ ID NO: 211347 - DNA, 25 bp, Artificial
  Probe
tgttttcagtggtcttatgcatagc

SEQ ID NO: 211348 - DNA, 25 bp, Artificial
  Probe
ctcgagacttattgtgaaggaacca

SEQ ID NO: 211349 - DNA, 25 bp, Artificial
  Probe
ccacttttgtaatgtgttttcagtg

SEQ ID NO: 211350 - DNA, 25 bp, Artificial
  Probe
tgcacaaagctaagtgaccaaactt

SEQ ID NO: 211351 - DNA, 25 bp, Artificial
  Probe
ctactgtacacttgacctgcacatg

SEQ ID NO: 211352 - DNA, 25 bp, Artificial
  Probe
tctttcaaatcaagggtactaaagg

SEQ ID NO: 211353 - DNA, 25 bp, Artificial
  Probe
tgttccatccgtgtgggaaaggatt

SEQ ID NO: 211354 - DNA, 25 bp, Artificial
  Probe
tttaggtgtgccatgtgctttcaaa

SEQ ID NO: 211355 - DNA, 25 bp, Artificial
  Probe
ttaaactatgcacaaagctaagtga

SEQ ID NO: 211356 - DNA, 25 bp, Artificial
  Probe
gcagattccttttgtaactattagt

SEQ ID NO: 211357 - DNA, 25 bp, Artificial
  Probe
ggatgtcaatgtcatcaacgcctcc

SEQ ID NO: 211358 - DNA, 25 bp, Artificial
  Probe
agtgtgtctttcaaatcaagggtac

SEQ ID NO: 211359 - DNA, 25 bp, Artificial
  Probe
acaccaatgtcctagctgtgttctg

SEQ ID NO: 211360 - DNA, 25 bp, Artificial
  Probe
actgtacacttgacctgcacatgac

SEQ ID NO: 211361 - DNA, 25 bp, Artificial
  Probe
gtgtttgcgcgcatgtttgtgcatg

SEQ ID NO: 211362 - DNA, 25 bp, Artificial
  Probe
cacaactgtaactagtttaagagaa

SEQ ID NO: 211363 - DNA, 25 bp, Artificial
  Probe
aatctgaaatcttggttctaattgc

SEQ ID NO: 211364 - DNA, 25 bp, Artificial
  Probe
gaatgtttaacatgccgtatcagct

SEQ ID NO: 211365 - DNA, 25 bp, Artificial
  Probe
cagcgtttgccttttcttctttgga

SEQ ID NO: 211366 - DNA, 25 bp, Artificial
  Probe
ttgtattgcccttgttactgttaaa

SEQ ID NO: 211367 - DNA, 25 bp, Artificial
  Probe
gttccatccgtgtgggaaaggatta

SEQ ID NO: 211368 - DNA, 25 bp, Artificial
  Probe
gagcatttaccacagataccacatg

SEQ ID NO: 211369 - DNA, 25 bp, Artificial
  Probe
gccgtatcagctcagggtacttgcc

SEQ ID NO: 211370 - DNA, 25 bp, Artificial
  Probe
gtgtattcttcaagccctgaaactt

SEQ ID NO: 211371 - DNA, 25 bp, Artificial
  Probe
catgtttgtgcatgtatggctgtgc

SEQ ID NO: 211372 - DNA, 25 bp, Artificial
  Probe
tgaaacttgaactcaacctcagcag

SEQ ID NO: 211373 - DNA, 25 bp, Artificial
  Probe
gttgttttcactactgtacacttga

SEQ ID NO: 211374 - DNA, 25 bp, Artificial
  Probe
taccacatgaagctttcactccagg

SEQ ID NO: 211375 - DNA, 25 bp, Artificial
  Probe
tggaacagcgcatctgtcccttcca

SEQ ID NO: 211376 - DNA, 25 bp, Artificial
  Probe
tactaaaggcccttccgctgcagtg

SEQ ID NO: 211377 - DNA, 25 bp, Artificial
  Probe
tgtgaagtgcccagcctctgctgcc

SEQ ID NO: 211378 - DNA, 25 bp, Artificial
  Probe
actaaaggcccttccgctgcagtgc

SEQ ID NO: 211379 - DNA, 25 bp, Artificial
  Probe
gaaatgttaccctttggtggatctt

SEQ ID NO: 211380 - DNA, 25 bp, Artificial
  Probe
ttattgtgaaggaaccactgaccgt

SEQ ID NO: 211381 - DNA, 25 bp, Artificial
  Probe
ctcccacttgttttgttctgtgcac

SEQ ID NO: 211382 - DNA, 25 bp, Artificial
  Probe
ctccacttttgtaatgtgttttcag

SEQ ID NO: 211383 - DNA, 25 bp, Artificial
  Probe
gctcagcaggagaaccagaaaggat

SEQ ID NO: 211384 - DNA, 25 bp, Artificial
  Probe
gccttttcttctttggatgtcaatg

SEQ ID NO: 211385 - DNA, 25 bp, Artificial
  Probe
gcagctcttcgcagcgtttgccttt

SEQ ID NO: 211386 - DNA, 25 bp, Artificial
  Probe
gtcagagctgtcaccttgttgctca

SEQ ID NO: 211387 - DNA, 25 bp, Artificial
  Probe
cagagctgtcaccttgttgctcatc

SEQ ID NO: 211388 - DNA, 25 bp, Artificial
  Probe
tcacactggggaaaagccctatgaa

SEQ ID NO: 211389 - DNA, 25 bp, Artificial
  Probe
tgtggaaaatccttcagtcagagct

SEQ ID NO: 211390 - DNA, 25 bp, Artificial
  Probe
gttgctcatcggagaattcacaccg

SEQ ID NO: 211391 - DNA, 25 bp, Artificial
  Probe
aatccttcagtcagagctgtcacct

SEQ ID NO: 211392 - DNA, 25 bp, Artificial
  Probe
tccttcagtcagagctgtcaccttg

SEQ ID NO: 211393 - DNA, 25 bp, Artificial
  Probe
ggaaaatccttcagtcagagctgtc

SEQ ID NO: 211394 - DNA, 25 bp, Artificial
  Probe
tgctcatcggagaattcacaccggc

SEQ ID NO: 211395 - DNA, 25 bp, Artificial
  Probe
ttcacactggggaaaagccctatga

SEQ ID NO: 211396 - DNA, 25 bp, Artificial
  Probe
agtcagagctgtcaccttgttgctc

SEQ ID NO: 211397 - DNA, 25 bp, Artificial
  Probe
tcatcggagaattcacaccggcgaa

SEQ ID NO: 211398 - DNA, 25 bp, Artificial
  Probe
ttcagtcagagctgtcaccttgttg

SEQ ID NO: 211399 - DNA, 25 bp, Artificial
  Probe
aaagccctatgaatgcaataaatgt

SEQ ID NO: 211400 - DNA, 25 bp, Artificial
  Probe
tcggagaattcacaccggcgaaaaa

SEQ ID NO: 211401 - DNA, 25 bp, Artificial
  Probe
cacactggggaaaagccctatgaat

SEQ ID NO: 211402 - DNA, 25 bp, Artificial
  Probe
agagctgtcaccttgttgctcatcg

SEQ ID NO: 211403 - DNA, 25 bp, Artificial
  Probe
cttcagtcagagctgtcaccttgtt

SEQ ID NO: 211404 - DNA, 25 bp, Artificial
  Probe
catcggagaattcacaccggcgaaa

SEQ ID NO: 211405 - DNA, 25 bp, Artificial
  Probe
ttgctcatcggagaattcacaccgg

SEQ ID NO: 211406 - DNA, 25 bp, Artificial
  Probe
ccttcagtcagagctgtcaccttgt

SEQ ID NO: 211407 - DNA, 25 bp, Artificial
  Probe
ctcatcggagaattcacaccggcga

SEQ ID NO: 211408 - DNA, 25 bp, Artificial
  Probe
agccctatgaatgcaataaatgtgg

SEQ ID NO: 211409 - DNA, 25 bp, Artificial
  Probe
tcagagctgtcaccttgttgctcat

SEQ ID NO: 211410 - DNA, 25 bp, Artificial
  Probe
gtggaaaatccttcagtcagagctg

SEQ ID NO: 211411 - DNA, 25 bp, Artificial
  Probe
tggaaaatccttcagtcagagctgt

SEQ ID NO: 211412 - DNA, 25 bp, Artificial
  Probe
aaatccttcagtcagagctgtcacc

SEQ ID NO: 211413 - DNA, 25 bp, Artificial
  Probe
atcggagaattcacaccggcgaaaa

SEQ ID NO: 211414 - DNA, 25 bp, Artificial
  Probe
gctcatcggagaattcacaccggcg

SEQ ID NO: 211415 - DNA, 25 bp, Artificial
  Probe
aagccctatgaatgcaataaatgtg

SEQ ID NO: 211416 - DNA, 25 bp, Artificial
  Probe
cactaaacaccgaacacacactggg

SEQ ID NO: 211417 - DNA, 25 bp, Artificial
  Probe
caaacctcactaaacaccgaacaca

SEQ ID NO: 211418 - DNA, 25 bp, Artificial
  Probe
tcaaacctcactaaacaccgaacac

SEQ ID NO: 211419 - DNA, 25 bp, Artificial
  Probe
actaaacaccgaacacacactgggg

SEQ ID NO: 211420 - DNA, 25 bp, Artificial
  Probe
tcgtttacgaatagctcaaacctca

SEQ ID NO: 211421 - DNA, 25 bp, Artificial
  Probe
agtcgtttacgaatagctcaaacct

SEQ ID NO: 211422 - DNA, 25 bp, Artificial
  Probe
gaagccttacgtgtgcaccaagtgt

SEQ ID NO: 211423 - DNA, 25 bp, Artificial
  Probe
aatagctcaaacctcactaaacacc

SEQ ID NO: 211424 - DNA, 25 bp, Artificial
  Probe
gtttacgaatagctcaaacctcact

SEQ ID NO: 211425 - DNA, 25 bp, Artificial
  Probe
tacgaatagctcaaacctcactaaa

SEQ ID NO: 211426 - DNA, 25 bp, Artificial
  Probe
ttacgaatagctcaaacctcactaa

SEQ ID NO: 211427 - DNA, 25 bp, Artificial
  Probe
tttacgaatagctcaaacctcacta

SEQ ID NO: 211428 - DNA, 25 bp, Artificial
  Probe
ctcaaacctcactaaacaccgaaca

SEQ ID NO: 211429 - DNA, 25 bp, Artificial
  Probe
gccttacgtgtgcaccaagtgtggg

SEQ ID NO: 211430 - DNA, 25 bp, Artificial
  Probe
acctcactaaacaccgaacacacac

SEQ ID NO: 211431 - DNA, 25 bp, Artificial
  Probe
tcactaaacaccgaacacacactgg

SEQ ID NO: 211432 - DNA, 25 bp, Artificial
  Probe
ctcactaaacaccgaacacacactg

SEQ ID NO: 211433 - DNA, 25 bp, Artificial
  Probe
gaatagctcaaacctcactaaacac

SEQ ID NO: 211434 - DNA, 25 bp, Artificial
  Probe
agccttacgtgtgcaccaagtgtgg

SEQ ID NO: 211435 - DNA, 25 bp, Artificial
  Probe
agctcaaacctcactaaacaccgaa

SEQ ID NO: 211436 - DNA, 25 bp, Artificial
  Probe
gtcgtttacgaatagctcaaacctc

SEQ ID NO: 211437 - DNA, 25 bp, Artificial
  Probe
ctaaacaccgaacacacactgggga

SEQ ID NO: 211438 - DNA, 25 bp, Artificial
  Probe
cctcactaaacaccgaacacacact

SEQ ID NO: 211439 - DNA, 25 bp, Artificial
  Probe
tagctcaaacctcactaaacaccga

SEQ ID NO: 211440 - DNA, 25 bp, Artificial
  Probe
aagccttacgtgtgcaccaagtgtg

SEQ ID NO: 211441 - DNA, 25 bp, Artificial
  Probe
atagctcaaacctcactaaacaccg

SEQ ID NO: 211442 - DNA, 25 bp, Artificial
  Probe
taaacaccgaacacacactggggag

SEQ ID NO: 211443 - DNA, 25 bp, Artificial
  Probe
acgaatagctcaaacctcactaaac

SEQ ID NO: 211444 - DNA, 25 bp, Artificial
  Probe
aacctcactaaacaccgaacacaca

SEQ ID NO: 211445 - DNA, 25 bp, Artificial
  Probe
gctcaaacctcactaaacaccgaac

SEQ ID NO: 211446 - DNA, 25 bp, Artificial
  Probe
cgaatagctcaaacctcactaaaca

SEQ ID NO: 211447 - DNA, 25 bp, Artificial
  Probe
gacaggggcctagacaagtgttgct

SEQ ID NO: 211448 - DNA, 25 bp, Artificial
  Probe
gggagactcgggtcaggtcaaacac

SEQ ID NO: 211449 - DNA, 25 bp, Artificial
  Probe
acccaaggcaacaccgtgaagcagg

SEQ ID NO: 211450 - DNA, 25 bp, Artificial
  Probe
ggagcattttttccagccttaacag

SEQ ID NO: 211451 - DNA, 25 bp, Artificial
  Probe
aagggcttgccctggagaggtattt

SEQ ID NO: 211452 - DNA, 25 bp, Artificial
  Probe
tttctggtgccaactaacttgctgg

SEQ ID NO: 211453 - DNA, 25 bp, Artificial
  Probe
gccaactaacttgctggacagaagg

SEQ ID NO: 211454 - DNA, 25 bp, Artificial
  Probe
ttgattagaaccaggctaggcagtt

SEQ ID NO: 211455 - DNA, 25 bp, Artificial
  Probe
atgacaaagggcttgccctggagag

SEQ ID NO: 211456 - DNA, 25 bp, Artificial
  Probe
taaccaaggagcattttttccagcc

SEQ ID NO: 211457 - DNA, 25 bp, Artificial
  Probe
cagttgcccggctggtactgggaca

SEQ ID NO: 211458 - DNA, 25 bp, Artificial
  Probe
aacttgctggacagaaggaagctgg

SEQ ID NO: 211459 - DNA, 25 bp, Artificial
  Probe
caggtttattgttgagccctataat

SEQ ID NO: 211460 - DNA, 25 bp, Artificial
  Probe
aaggcaacaccgtgaagcaggttta

SEQ ID NO: 211461 - DNA, 25 bp, Artificial
  Probe
ttaaccaaggagcattttttccagc

SEQ ID NO: 211462 - DNA, 25 bp, Artificial
  Probe
caaggagcattttttccagccttaa

SEQ ID NO: 211463 - DNA, 25 bp, Artificial
  Probe
gtcaggtcaaacacccaaggcaaca

SEQ ID NO: 211464 - DNA, 25 bp, Artificial
  Probe
tatctcaggggaagataaggctcaa

SEQ ID NO: 211465 - DNA, 25 bp, Artificial
  Probe
ccaaggagcattttttccagcctta

SEQ ID NO: 211466 - DNA, 25 bp, Artificial
  Probe
gtgccaactaacttgctggacagaa

SEQ ID NO: 211467 - DNA, 25 bp, Artificial
  Probe
cagtgtttttaaccaaggagcattt

SEQ ID NO: 211468 - DNA, 25 bp, Artificial
  Probe
aacacccaaggcaacaccgtgaagc

SEQ ID NO: 211469 - DNA, 25 bp, Artificial
  Probe
cgggtcaggtcaaacacccaaggca

SEQ ID NO: 211470 - DNA, 25 bp, Artificial
  Probe
tcccaggatgcatttgggagactcg

SEQ ID NO: 211471 - DNA, 25 bp, Artificial
  Probe
ggtcaaacacccaaggcaacaccgt

SEQ ID NO: 211472 - DNA, 25 bp, Artificial
  Probe
gcttatttctggtgccaactaactt

SEQ ID NO: 211473 - DNA, 25 bp, Artificial
  Probe
cagcttatttctggtgccaactaac

SEQ ID NO: 211474 - DNA, 25 bp, Artificial
  Probe
catttgggagactcgggtcaggtca

SEQ ID NO: 211475 - DNA, 25 bp, Artificial
  Probe
accaggctaggcagttgcccggctg

SEQ ID NO: 211476 - DNA, 25 bp, Artificial
  Probe
ggttctgtcactcattaagcattta

SEQ ID NO: 211477 - DNA, 25 bp, Artificial
  Probe
gcctagacaagtgttgctggtccag

SEQ ID NO: 211478 - DNA, 25 bp, Artificial
  Probe
acaggggcctagacaagtgttgctg

SEQ ID NO: 211479 - DNA, 25 bp, Artificial
  Probe
aattgattagaaccaggctaggcag

SEQ ID NO: 211480 - DNA, 25 bp, Artificial
  Probe
tgccctggagaggtatttatctcag

SEQ ID NO: 211481 - DNA, 25 bp, Artificial
  Probe
tagaaccaggctaggcagttgcccg

SEQ ID NO: 211482 - DNA, 25 bp, Artificial
  Probe
ttagaaccaggctaggcagttgccc

SEQ ID NO: 211483 - DNA, 25 bp, Artificial
  Probe
tattcccaggatgcatttgggagac

SEQ ID NO: 211484 - DNA, 25 bp, Artificial
  Probe
gtcaaacacccaaggcaacaccgtg

SEQ ID NO: 211485 - DNA, 25 bp, Artificial
  Probe
ttatctcaggggaagataaggctca

SEQ ID NO: 211486 - DNA, 25 bp, Artificial
  Probe
ttcccaggatgcatttgggagactc

SEQ ID NO: 211487 - DNA, 25 bp, Artificial
  Probe
ggagatattcccaggatgcatttgg

SEQ ID NO: 211488 - DNA, 25 bp, Artificial
  Probe
ttccttggttctgtcactcattaag

SEQ ID NO: 211489 - DNA, 25 bp, Artificial
  Probe
ctcgggtcaggtcaaacacccaagg

SEQ ID NO: 211490 - DNA, 25 bp, Artificial
  Probe
aggagcattttttccagccttaaca

SEQ ID NO: 211491 - DNA, 25 bp, Artificial
  Probe
ttaagcatttacagcttatttctgg

SEQ ID NO: 211492 - DNA, 25 bp, Artificial
  Probe
caccgtgaagcaggtttattgttga

SEQ ID NO: 211493 - DNA, 25 bp, Artificial
  Probe
gacagtcaaggatcctgttcttctc

SEQ ID NO: 211494 - DNA, 25 bp, Artificial
  Probe
acctggccgagcaaccagttttgac

SEQ ID NO: 211495 - DNA, 25 bp, Artificial
  Probe
gtcaaggatcctgttcttctcccag

SEQ ID NO: 211496 - DNA, 25 bp, Artificial
  Probe
caaggatcctgttcttctcccaggc

SEQ ID NO: 211497 - DNA, 25 bp, Artificial
  Probe
cttgctggagttacctggccgagca

SEQ ID NO: 211498 - DNA, 25 bp, Artificial
  Probe
ttacctggccgagcaaccagttttg

SEQ ID NO: 211499 - DNA, 25 bp, Artificial
  Probe
aaccagttttgacagtcaaggatcc

SEQ ID NO: 211500 - DNA, 25 bp, Artificial
  Probe
accccttgctggagttacctggccg

SEQ ID NO: 211501 - DNA, 25 bp, Artificial
  Probe
gcaccccttgctggagttacctggc

SEQ ID NO: 211502 - DNA, 25 bp, Artificial
  Probe
tttgacagtcaaggatcctgttctt

SEQ ID NO: 211503 - DNA, 25 bp, Artificial
  Probe
cagttttgacagtcaaggatcctgt

SEQ ID NO: 211504 - DNA, 25 bp, Artificial
  Probe
gcaaccagttttgacagtcaaggat

SEQ ID NO: 211505 - DNA, 25 bp, Artificial
  Probe
tgacagtcaaggatcctgttcttct

SEQ ID NO: 211506 - DNA, 25 bp, Artificial
  Probe
ctggcaccccttgctggagttacct

SEQ ID NO: 211507 - DNA, 25 bp, Artificial
  Probe
gccgagcaaccagttttgacagtca

SEQ ID NO: 211508 - DNA, 25 bp, Artificial
  Probe
cccttgctggagttacctggccgag

SEQ ID NO: 211509 - DNA, 25 bp, Artificial
  Probe
caaccagttttgacagtcaaggatc

SEQ ID NO: 211510 - DNA, 25 bp, Artificial
  Probe
tggcaccccttgctggagttacctg

SEQ ID NO: 211511 - DNA, 25 bp, Artificial
  Probe
actggcaccccttgctggagttacc

SEQ ID NO: 211512 - DNA, 25 bp, Artificial
  Probe
tggccgagcaaccagttttgacagt

SEQ ID NO: 211513 - DNA, 25 bp, Artificial
  Probe
agcaaccagttttgacagtcaagga

SEQ ID NO: 211514 - DNA, 25 bp, Artificial
  Probe
gctggagttacctggccgagcaacc

SEQ ID NO: 211515 - DNA, 25 bp, Artificial
  Probe
tacctggccgagcaaccagttttga

SEQ ID NO: 211516 - DNA, 25 bp, Artificial
  Probe
cgagcaaccagttttgacagtcaag

SEQ ID NO: 211517 - DNA, 25 bp, Artificial
  Probe
ccagttttgacagtcaaggatcctg

SEQ ID NO: 211518 - DNA, 25 bp, Artificial
  Probe
ggcaccccttgctggagttacctgg

SEQ ID NO: 211519 - DNA, 25 bp, Artificial
  Probe
agttttgacagtcaaggatcctgtt

SEQ ID NO: 211520 - DNA, 25 bp, Artificial
  Probe
acagtcaaggatcctgttcttctcc

SEQ ID NO: 211521 - DNA, 25 bp, Artificial
  Probe
ccgagcaaccagttttgacagtcaa

SEQ ID NO: 211522 - DNA, 25 bp, Artificial
  Probe
tcaaggatcctgttcttctcccagg

SEQ ID NO: 211523 - DNA, 25 bp, Artificial
  Probe
agtcaaggatcctgttcttctccca

SEQ ID NO: 211524 - DNA, 25 bp, Artificial
  Probe
ccccttgctggagttacctggccga

SEQ ID NO: 211525 - DNA, 25 bp, Artificial
  Probe
cagtcaaggatcctgttcttctccc

SEQ ID NO: 211526 - DNA, 25 bp, Artificial
  Probe
accagttttgacagtcaaggatcct

SEQ ID NO: 211527 - DNA, 25 bp, Artificial
  Probe
gttttgacagtcaaggatcctgttc

SEQ ID NO: 211528 - DNA, 25 bp, Artificial
  Probe
aggatcctgttcttctcccaggcca

SEQ ID NO: 211529 - DNA, 25 bp, Artificial
  Probe
ccttgctggagttacctggccgagc

SEQ ID NO: 211530 - DNA, 25 bp, Artificial
  Probe
ggccgagcaaccagttttgacagtc

SEQ ID NO: 211531 - DNA, 25 bp, Artificial
  Probe
tgctggagttacctggccgagcaac

SEQ ID NO: 211532 - DNA, 25 bp, Artificial
  Probe
gttacctggccgagcaaccagtttt

SEQ ID NO: 211533 - DNA, 25 bp, Artificial
  Probe
ctggccgagcaaccagttttgacag

SEQ ID NO: 211534 - DNA, 25 bp, Artificial
  Probe
gagcaaccagttttgacagtcaagg

SEQ ID NO: 211535 - DNA, 25 bp, Artificial
  Probe
cctggccgagcaaccagttttgaca

SEQ ID NO: 211536 - DNA, 25 bp, Artificial
  Probe
ttgacagtcaaggatcctgttcttc

SEQ ID NO: 211537 - DNA, 25 bp, Artificial
  Probe
aaggatcctgttcttctcccaggcc

SEQ ID NO: 211538 - DNA, 25 bp, Artificial
  Probe
ttttgacagtcaaggatcctgttct

SEQ ID NO: 211539 - DNA, 25 bp, Artificial
  Probe
atcactttaatcgctatatattgac

SEQ ID NO: 211540 - DNA, 25 bp, Artificial
  Probe
gctatatattgacttacactctatg

SEQ ID NO: 211541 - DNA, 25 bp, Artificial
  Probe
aaagctactatcttgacgaaagcct

SEQ ID NO: 211542 - DNA, 25 bp, Artificial
  Probe
tgtttaaaagctactatcttgacga

SEQ ID NO: 211543 - DNA, 25 bp, Artificial
  Probe
ttaaaagctactatcttgacgaaag

SEQ ID NO: 211544 - DNA, 25 bp, Artificial
  Probe
tatgtgcaattgtatcctcatcatc

SEQ ID NO: 211545 - DNA, 25 bp, Artificial
  Probe
tctatgtgcaattgtatcctcatca

SEQ ID NO: 211546 - DNA, 25 bp, Artificial
  Probe
tgacgaaagccttaaatctctcacc

SEQ ID NO: 211547 - DNA, 25 bp, Artificial
  Probe
tcctccgtccatgttgtttaaaagc

SEQ ID NO: 211548 - DNA, 25 bp, Artificial
  Probe
atattgacttacactctatgtgcaa

SEQ ID NO: 211549 - DNA, 25 bp, Artificial
  Probe
attgtatcctcatcatcctccgtcc

SEQ ID NO: 211550 - DNA, 25 bp, Artificial
  Probe
tgtgcaattgtatcctcatcatcct

SEQ ID NO: 211551 - DNA, 25 bp, Artificial
  Probe
caatgcgctatcactttaatcgcta

SEQ ID NO: 211552 - DNA, 25 bp, Artificial
  Probe
catcctccgtccatgttgtttaaaa

SEQ ID NO: 211553 - DNA, 25 bp, Artificial
  Probe
ctactatcttgacgaaagccttaaa

SEQ ID NO: 211554 - DNA, 25 bp, Artificial
  Probe
ttgacttacactctatgtgcaattg

SEQ ID NO: 211555 - DNA, 25 bp, Artificial
  Probe
ctatcactttaatcgctatatattg

SEQ ID NO: 211556 - DNA, 25 bp, Artificial
  Probe
ctccgtccatgttgtttaaaagcta

SEQ ID NO: 211557 - DNA, 25 bp, Artificial
  Probe
atcctccgtccatgttgtttaaaag

SEQ ID NO: 211558 - DNA, 25 bp, Artificial
  Probe
atcatcctccgtccatgttgtttaa

SEQ ID NO: 211559 - DNA, 25 bp, Artificial
  Probe
gcaattgtatcctcatcatcctccg

SEQ ID NO: 211560 - DNA, 25 bp, Artificial
  Probe
taaatctctcaccctttattccaac

SEQ ID NO: 211561 - DNA, 25 bp, Artificial
  Probe
gacttacactctatgtgcaattgta

SEQ ID NO: 211562 - DNA, 25 bp, Artificial
  Probe
agctactatcttgacgaaagcctta

SEQ ID NO: 211563 - DNA, 25 bp, Artificial
  Probe
ccgtccatgttgtttaaaagctact

SEQ ID NO: 211564 - DNA, 25 bp, Artificial
  Probe
attgacttacactctatgtgcaatt

SEQ ID NO: 211565 - DNA, 25 bp, Artificial
  Probe
gaaagccttaaatctctcacccttt

SEQ ID NO: 211566 - DNA, 25 bp, Artificial
  Probe
tacactctatgtgcaattgtatcct

SEQ ID NO: 211567 - DNA, 25 bp, Artificial
  Probe
actctatgtgcaattgtatcctcat

SEQ ID NO: 211568 - DNA, 25 bp, Artificial
  Probe
ctatcttgacgaaagccttaaatct

SEQ ID NO: 211569 - DNA, 25 bp, Artificial
  Probe
gctactatcttgacgaaagccttaa

SEQ ID NO: 211570 - DNA, 25 bp, Artificial
  Probe
tccgtccatgttgtttaaaagctac

SEQ ID NO: 211571 - DNA, 25 bp, Artificial
  Probe
tatatattgacttacactctatgtg

SEQ ID NO: 211572 - DNA, 25 bp, Artificial
  Probe
atcgctatatattgacttacactct

SEQ ID NO: 211573 - DNA, 25 bp, Artificial
  Probe
atcttgacgaaagccttaaatctct

SEQ ID NO: 211574 - DNA, 25 bp, Artificial
  Probe
acttacactctatgtgcaattgtat

SEQ ID NO: 211575 - DNA, 25 bp, Artificial
  Probe
cgtccatgttgtttaaaagctacta

SEQ ID NO: 211576 - DNA, 25 bp, Artificial
  Probe
cgctatcactttaatcgctatatat

SEQ ID NO: 211577 - DNA, 25 bp, Artificial
  Probe
acgaaagccttaaatctctcaccct

SEQ ID NO: 211578 - DNA, 25 bp, Artificial
  Probe
ttgtttaaaagctactatcttgacg

SEQ ID NO: 211579 - DNA, 25 bp, Artificial
  Probe
tgcgctatcactttaatcgctatat

SEQ ID NO: 211580 - DNA, 25 bp, Artificial
  Probe
tgacttacactctatgtgcaattgt

SEQ ID NO: 211581 - DNA, 25 bp, Artificial
  Probe
aagctactatcttgacgaaagcctt

SEQ ID NO: 211582 - DNA, 25 bp, Artificial
  Probe
cctccgtccatgttgtttaaaagct

SEQ ID NO: 211583 - DNA, 25 bp, Artificial
  Probe
gtatcctcatcatcctccgtccatg

SEQ ID NO: 211584 - DNA, 25 bp, Artificial
  Probe
tttaaaagctactatcttgacgaaa

SEQ ID NO: 211585 - DNA, 25 bp, Artificial
  Probe
acacacacacacaagttgccatgaa

SEQ ID NO: 211586 - DNA, 25 bp, Artificial
  Probe
cacacacaagttgccatgaaggtta

SEQ ID NO: 211587 - DNA, 25 bp, Artificial
  Probe
cacacacacaagttgccatgaaggt

SEQ ID NO: 211588 - DNA, 25 bp, Artificial
  Probe
aagttgccatgaaggttaagtggat

SEQ ID NO: 211589 - DNA, 25 bp, Artificial
  Probe
gtgtcttagttcaggttttattgct

SEQ ID NO: 211590 - DNA, 25 bp, Artificial
  Probe
atttggggtgtgtcttagttcaggt

SEQ ID NO: 211591 - DNA, 25 bp, Artificial
  Probe
acacacacacacacacaagttgcca

SEQ ID NO: 211592 - DNA, 25 bp, Artificial
  Probe
taaaccatttggggtgtgtcttagt

SEQ ID NO: 211593 - DNA, 25 bp, Artificial
  Probe
tgctaaaacatcttgaaatggaaat

SEQ ID NO: 211594 - DNA, 25 bp, Artificial
  Probe
acacacacacaagttgccatgaagg

SEQ ID NO: 211595 - DNA, 25 bp, Artificial
  Probe
ttggggtgtgtcttagttcaggttt

SEQ ID NO: 211596 - DNA, 25 bp, Artificial
  Probe
ttagttcaggttttattgctgtgaa

SEQ ID NO: 211597 - DNA, 25 bp, Artificial
  Probe
cacaagttgccatgaaggttaagtg

SEQ ID NO: 211598 - DNA, 25 bp, Artificial
  Probe
tagtgctaaaacatcttgaaatgga

SEQ ID NO: 211599 - DNA, 25 bp, Artificial
  Probe
tgtaaaccatttggggtgtgtctta

SEQ ID NO: 211600 - DNA, 25 bp, Artificial
  Probe
acacacacaagttgccatgaaggtt

SEQ ID NO: 211601 - DNA, 25 bp, Artificial
  Probe
atgcctagtgctaaaacatcttgaa

SEQ ID NO: 211602 - DNA, 25 bp, Artificial
  Probe
ctagtgctaaaacatcttgaaatgg

SEQ ID NO: 211603 - DNA, 25 bp, Artificial
  Probe
cacacacacacaagttgccatgaag

SEQ ID NO: 211604 - DNA, 25 bp, Artificial
  Probe
ataactgtatctacacacacacaca

SEQ ID NO: 211605 - DNA, 25 bp, Artificial
  Probe
agttcaggttttattgctgtgaaca

SEQ ID NO: 211606 - DNA, 25 bp, Artificial
  Probe
cacacaagttgccatgaaggttaag

SEQ ID NO: 211607 - DNA, 25 bp, Artificial
  Probe
tgcctagtgctaaaacatcttgaaa

SEQ ID NO: 211608 - DNA, 25 bp, Artificial
  Probe
cctagtgctaaaacatcttgaaatg

SEQ ID NO: 211609 - DNA, 25 bp, Artificial
  Probe
gaaataactgtatctacacacacac

SEQ ID NO: 211610 - DNA, 25 bp, Artificial
  Probe
ttgccatgaaggttaagtggatgta

SEQ ID NO: 211611 - DNA, 25 bp, Artificial
  Probe
tggatgtaaaccatttggggtgtgt

SEQ ID NO: 211612 - DNA, 25 bp, Artificial
  Probe
ggatgtaaaccatttggggtgtgtc

SEQ ID NO: 211613 - DNA, 25 bp, Artificial
  Probe
tttatgcctagtgctaaaacatctt

SEQ ID NO: 211614 - DNA, 25 bp, Artificial
  Probe
gtaaaccatttggggtgtgtcttag

SEQ ID NO: 211615 - DNA, 25 bp, Artificial
  Probe
accatttggggtgtgtcttagttca

SEQ ID NO: 211616 - DNA, 25 bp, Artificial
  Probe
acaagttgccatgaaggttaagtgg

SEQ ID NO: 211617 - DNA, 25 bp, Artificial
  Probe
atgtaaaccatttggggtgtgtctt

SEQ ID NO: 211618 - DNA, 25 bp, Artificial
  Probe
ttatgcctagtgctaaaacatcttg

SEQ ID NO: 211619 - DNA, 25 bp, Artificial
  Probe
tatgcctagtgctaaaacatcttga

SEQ ID NO: 211620 - DNA, 25 bp, Artificial
  Probe
aaataactgtatctacacacacaca

SEQ ID NO: 211621 - DNA, 25 bp, Artificial
  Probe
gcctagtgctaaaacatcttgaaat

SEQ ID NO: 211622 - DNA, 25 bp, Artificial
  Probe
gggtgtgtcttagttcaggttttat

SEQ ID NO: 211623 - DNA, 25 bp, Artificial
  Probe
acacacaagttgccatgaaggttaa

SEQ ID NO: 211624 - DNA, 25 bp, Artificial
  Probe
ggtgtgtcttagttcaggttttatt

SEQ ID NO: 211625 - DNA, 25 bp, Artificial
  Probe
acacaagttgccatgaaggttaagt

SEQ ID NO: 211626 - DNA, 25 bp, Artificial
  Probe
aactgtatctacacacacacacaca

SEQ ID NO: 211627 - DNA, 25 bp, Artificial
  Probe
taaaacatcttgaaatggaaataac

SEQ ID NO: 211628 - DNA, 25 bp, Artificial
  Probe
agtgctaaaacatcttgaaatggaa

SEQ ID NO: 211629 - DNA, 25 bp, Artificial
  Probe
gctaaaacatcttgaaatggaaata

SEQ ID NO: 211630 - DNA, 25 bp, Artificial
  Probe
acacacacacacacaagttgccatg

SEQ ID NO: 211631 - DNA, 25 bp, Artificial
  Probe
agaaaccgtccctgctacagagcag

SEQ ID NO: 211632 - DNA, 25 bp, Artificial
  Probe
cacaaaatgcccggtgaagccacag

SEQ ID NO: 211633 - DNA, 25 bp, Artificial
  Probe
atgcccggtgaagccacagaaaccg

SEQ ID NO: 211634 - DNA, 25 bp, Artificial
  Probe
aaaccgtccctgctacagagcagga

SEQ ID NO: 211635 - DNA, 25 bp, Artificial
  Probe
aaatgcccggtgaagccacagaaac

SEQ ID NO: 211636 - DNA, 25 bp, Artificial
  Probe
tacagagcaggagttgccacagcct

SEQ ID NO: 211637 - DNA, 25 bp, Artificial
  Probe
ggtgaagccacagaaaccgtccctg

SEQ ID NO: 211638 - DNA, 25 bp, Artificial
  Probe
cctgctacagagcaggagttgccac

SEQ ID NO: 211639 - DNA, 25 bp, Artificial
  Probe
cggtgaagccacagaaaccgtccct

SEQ ID NO: 211640 - DNA, 25 bp, Artificial
  Probe
ttccttctgcaacaggcgtgggtca

SEQ ID NO: 211641 - DNA, 25 bp, Artificial
  Probe
gggctcgctcgctctctttccaccg

SEQ ID NO: 211642 - DNA, 25 bp, Artificial
  Probe
aaaatgcccggtgaagccacagaaa

SEQ ID NO: 211643 - DNA, 25 bp, Artificial
  Probe
tccctgctacagagcaggagttgcc

SEQ ID NO: 211644 - DNA, 25 bp, Artificial
  Probe
tgctacagagcaggagttgccacag

SEQ ID NO: 211645 - DNA, 25 bp, Artificial
  Probe
cccgcttccttctgcaacaggcgtg

SEQ ID NO: 211646 - DNA, 25 bp, Artificial
  Probe
cgcttccttctgcaacaggcgtggg

SEQ ID NO: 211647 - DNA, 25 bp, Artificial
  Probe
tgaagccacagaaaccgtccctgct

SEQ ID NO: 211648 - DNA, 25 bp, Artificial
  Probe
cgggctcgctcgctctctttccacc

SEQ ID NO: 211649 - DNA, 25 bp, Artificial
  Probe
tgcaacaggcgtgggtcacgggctc

SEQ ID NO: 211650 - DNA, 25 bp, Artificial
  Probe
tctgcaacaggcgtgggtcacgggc

SEQ ID NO: 211651 - DNA, 25 bp, Artificial
  Probe
ccctgctacagagcaggagttgcca

SEQ ID NO: 211652 - DNA, 25 bp, Artificial
  Probe
cacgggctcgctcgctctctttcca

SEQ ID NO: 211653 - DNA, 25 bp, Artificial
  Probe
gtcacgggctcgctcgctctctttc

SEQ ID NO: 211654 - DNA, 25 bp, Artificial
  Probe
ccgtccctgctacagagcaggagtt

SEQ ID NO: 211655 - DNA, 25 bp, Artificial
  Probe
aatgcccggtgaagccacagaaacc

SEQ ID NO: 211656 - DNA, 25 bp, Artificial
  Probe
ccgcttccttctgcaacaggcgtgg

SEQ ID NO: 211657 - DNA, 25 bp, Artificial
  Probe
aacagagtctgacagtgatgaatca

SEQ ID NO: 211658 - DNA, 25 bp, Artificial
  Probe
gcccggtgaagccacagaaaccgtc

SEQ ID NO: 211659 - DNA, 25 bp, Artificial
  Probe
aagccacagaaaccgtccctgctac

SEQ ID NO: 211660 - DNA, 25 bp, Artificial
  Probe
acagagcaggagttgccacagcctc

SEQ ID NO: 211661 - DNA, 25 bp, Artificial
  Probe
ctgctacagagcaggagttgccaca

SEQ ID NO: 211662 - DNA, 25 bp, Artificial
  Probe
gaagccacagaaaccgtccctgcta

SEQ ID NO: 211663 - DNA, 25 bp, Artificial
  Probe
aggcgtgggtcacgggctcgctcgc

SEQ ID NO: 211664 - DNA, 25 bp, Artificial
  Probe
gctgagacagggtcgggaacagagt

SEQ ID NO: 211665 - DNA, 25 bp, Artificial
  Probe
cgtccctgctacagagcaggagttg

SEQ ID NO: 211666 - DNA, 25 bp, Artificial
  Probe
gtgaagccacagaaaccgtccctgc

SEQ ID NO: 211667 - DNA, 25 bp, Artificial
  Probe
gaaaccgtccctgctacagagcagg

SEQ ID NO: 211668 - DNA, 25 bp, Artificial
  Probe
tgagacagggtcgggaacagagtct

SEQ ID NO: 211669 - DNA, 25 bp, Artificial
  Probe
gaacagagtctgacagtgatgaatc

SEQ ID NO: 211670 - DNA, 25 bp, Artificial
  Probe
gcgtgggtcacgggctcgctcgctc

SEQ ID NO: 211671 - DNA, 25 bp, Artificial
  Probe
cgcacaaaatgcccggtgaagccac

SEQ ID NO: 211672 - DNA, 25 bp, Artificial
  Probe
gtccctgctacagagcaggagttgc

SEQ ID NO: 211673 - DNA, 25 bp, Artificial
  Probe
aaccgtccctgctacagagcaggag

SEQ ID NO: 211674 - DNA, 25 bp, Artificial
  Probe
accgtccctgctacagagcaggagt

SEQ ID NO: 211675 - DNA, 25 bp, Artificial
  Probe
gggtcacgggctcgctcgctctctt

SEQ ID NO: 211676 - DNA, 25 bp, Artificial
  Probe
ctacagagcaggagttgccacagcc

SEQ ID NO: 211677 - DNA, 25 bp, Artificial
  Probe
gtcactctctgaccagatgtcagta

SEQ ID NO: 211678 - DNA, 25 bp, Artificial
  Probe
tgggggacagcactgcctctacgcc

SEQ ID NO: 211679 - DNA, 25 bp, Artificial
  Probe
cctttgctgaggacctggtcctgga

SEQ ID NO: 211680 - DNA, 25 bp, Artificial
  Probe
cactctctgaccagatgtcagtact

SEQ ID NO: 211681 - DNA, 25 bp, Artificial
  Probe
tcggcggctgcaagccctacggctg

SEQ ID NO: 211682 - DNA, 25 bp, Artificial
  Probe
gccctgcagagcaataacactatat

SEQ ID NO: 211683 - DNA, 25 bp, Artificial
  Probe
ctgggccaagagcatcccaggcttc

SEQ ID NO: 211684 - DNA, 25 bp, Artificial
  Probe
ctacgccctgcagagcaataacact

SEQ ID NO: 211685 - DNA, 25 bp, Artificial
  Probe
ctcactgtcactctctgaccagatg

SEQ ID NO: 211686 - DNA, 25 bp, Artificial
  Probe
ttgctgaggacctggtcctggatga

SEQ ID NO: 211687 - DNA, 25 bp, Artificial
  Probe
cttggctgtacagagactctatttt

SEQ ID NO: 211688 - DNA, 25 bp, Artificial
  Probe
tcactgtcactctctgaccagatgt

SEQ ID NO: 211689 - DNA, 25 bp, Artificial
  Probe
cccttggctgtacagagactctatt

SEQ ID NO: 211690 - DNA, 25 bp, Artificial
  Probe
ctgaccagatgtcagtactgcagag

SEQ ID NO: 211691 - DNA, 25 bp, Artificial
  Probe
gggccaagagcatcccaggcttctc

SEQ ID NO: 211692 - DNA, 25 bp, Artificial
  Probe
ctctctgaccagatgtcagtactgc

SEQ ID NO: 211693 - DNA, 25 bp, Artificial
  Probe
tacgccctgcagagcaataacacta

SEQ ID NO: 211694 - DNA, 25 bp, Artificial
  Probe
ctgaggacctggtcctggatgaaga

SEQ ID NO: 211695 - DNA, 25 bp, Artificial
  Probe
gttcggcggctgcaagccctacggc

SEQ ID NO: 211696 - DNA, 25 bp, Artificial
  Probe
cactgtcactctctgaccagatgtc

SEQ ID NO: 211697 - DNA, 25 bp, Artificial
  Probe
actctctgaccagatgtcagtactg

SEQ ID NO: 211698 - DNA, 25 bp, Artificial
  Probe
tctacgccctgcagagcaataacac

SEQ ID NO: 211699 - DNA, 25 bp, Artificial
  Probe
ggcccagagcccttggctgtacaga

SEQ ID NO: 211700 - DNA, 25 bp, Artificial
  Probe
agcccttggctgtacagagactcta

SEQ ID NO: 211701 - DNA, 25 bp, Artificial
  Probe
agagcccttggctgtacagagactc

SEQ ID NO: 211702 - DNA, 25 bp, Artificial
  Probe
ccttggctgtacagagactctattt

SEQ ID NO: 211703 - DNA, 25 bp, Artificial
  Probe
ttcggcggctgcaagccctacggct

SEQ ID NO: 211704 - DNA, 25 bp, Artificial
  Probe
tgtcactctctgaccagatgtcagt

SEQ ID NO: 211705 - DNA, 25 bp, Artificial
  Probe
atatttgctgcaaagagaaaccgct

SEQ ID NO: 211706 - DNA, 25 bp, Artificial
  Probe
ctttgctgaggacctggtcctggat

SEQ ID NO: 211707 - DNA, 25 bp, Artificial
  Probe
ctctacgccctgcagagcaataaca

SEQ ID NO: 211708 - DNA, 25 bp, Artificial
  Probe
tggctgtacagagactctattttaa

SEQ ID NO: 211709 - DNA, 25 bp, Artificial
  Probe
gctgggccaagagcatcccaggctt

SEQ ID NO: 211710 - DNA, 25 bp, Artificial
  Probe
tgtatatttgctgcaaagagaaacc

SEQ ID NO: 211711 - DNA, 25 bp, Artificial
  Probe
tgctgaggacctggtcctggatgaa

SEQ ID NO: 211712 - DNA, 25 bp, Artificial
  Probe
tggcctttgctgaggacctggtcct

SEQ ID NO: 211713 - DNA, 25 bp, Artificial
  Probe
ctctgaccagatgtcagtactgcag

SEQ ID NO: 211714 - DNA, 25 bp, Artificial
  Probe
ggcctttgctgaggacctggtcctg

SEQ ID NO: 211715 - DNA, 25 bp, Artificial
  Probe
gagcccttggctgtacagagactct

SEQ ID NO: 211716 - DNA, 25 bp, Artificial
  Probe
tggttcggcggctgcaagccctacg

SEQ ID NO: 211717 - DNA, 25 bp, Artificial
  Probe
actgtcactctctgaccagatgtca

SEQ ID NO: 211718 - DNA, 25 bp, Artificial
  Probe
cgccctgcagagcaataacactata

SEQ ID NO: 211719 - DNA, 25 bp, Artificial
  Probe
tgaccagatgtcagtactgcagagt

SEQ ID NO: 211720 - DNA, 25 bp, Artificial
  Probe
gcccttggctgtacagagactctat

SEQ ID NO: 211721 - DNA, 25 bp, Artificial
  Probe
gcccagagcccttggctgtacagag

SEQ ID NO: 211722 - DNA, 25 bp, Artificial
  Probe
tttgctgcaaagagaaaccgctttt

SEQ ID NO: 211723 - DNA, 25 bp, Artificial
  Probe
agagtcctgccaagatgtctatcgg

SEQ ID NO: 211724 - DNA, 25 bp, Artificial
  Probe
ccggtttctgattttgcctgacatg

SEQ ID NO: 211725 - DNA, 25 bp, Artificial
  Probe
tccggtttctgattttgcctgacat

SEQ ID NO: 211726 - DNA, 25 bp, Artificial
  Probe
gtgctctccattgaagagaactttg

SEQ ID NO: 211727 - DNA, 25 bp, Artificial
  Probe
agatagtgctctccattgaagagaa

SEQ ID NO: 211728 - DNA, 25 bp, Artificial
  Probe
gattttgcctgacatgctgaaaaat

SEQ ID NO: 211729 - DNA, 25 bp, Artificial
  Probe
atagtgctctccattgaagagaact

SEQ ID NO: 211730 - DNA, 25 bp, Artificial
  Probe
ttttgcctgacatgctgaaaaatgc

SEQ ID NO: 211731 - DNA, 25 bp, Artificial
  Probe
cggtttctgattttgcctgacatgc

SEQ ID NO: 211732 - DNA, 25 bp, Artificial
  Probe
tagtgctctccattgaagagaactt

SEQ ID NO: 211733 - DNA, 25 bp, Artificial
  Probe
gctcattgaggcagaggacaacatg

SEQ ID NO: 211734 - DNA, 25 bp, Artificial
  Probe
gtcctgccaagatgtctatcggtgt

SEQ ID NO: 211735 - DNA, 25 bp, Artificial
  Probe
tgattttgcctgacatgctgaaaaa

SEQ ID NO: 211736 - DNA, 25 bp, Artificial
  Probe
gccagatgtccaacatcacagtcac

SEQ ID NO: 211737 - DNA, 25 bp, Artificial
  Probe
agtcctgccaagatgtctatcggtg

SEQ ID NO: 211738 - DNA, 25 bp, Artificial
  Probe
gaggacaacatgaactgccagatgt

SEQ ID NO: 211739 - DNA, 25 bp, Artificial
  Probe
aggacaacatgaactgccagatgtc

SEQ ID NO: 211740 - DNA, 25 bp, Artificial
  Probe
gagtcctgccaagatgtctatcggt

SEQ ID NO: 211741 - DNA, 25 bp, Artificial
  Probe
aacatcacagtcacatacagagacg

SEQ ID NO: 211742 - DNA, 25 bp, Artificial
  Probe
aagatagtgctctccattgaagaga

SEQ ID NO: 211743 - DNA, 25 bp, Artificial
  Probe
tttccagaagcgaagatagtgctct

SEQ ID NO: 211744 - DNA, 25 bp, Artificial
  Probe
cgaagatagtgctctccattgaaga

SEQ ID NO: 211745 - DNA, 25 bp, Artificial
  Probe
tgccagatgtccaacatcacagtca

SEQ ID NO: 211746 - DNA, 25 bp, Artificial
  Probe
catgaactgccagatgtccaacatc

SEQ ID NO: 211747 - DNA, 25 bp, Artificial
  Probe
tctgattttgcctgacatgctgaaa

SEQ ID NO: 211748 - DNA, 25 bp, Artificial
  Probe
ctgattttgcctgacatgctgaaaa

SEQ ID NO: 211749 - DNA, 25 bp, Artificial
  Probe
ggtttctgattttgcctgacatgct

SEQ ID NO: 211750 - DNA, 25 bp, Artificial
  Probe
aacattttccagaagcgaagatagt

SEQ ID NO: 211751 - DNA, 25 bp, Artificial
  Probe
ctcattgaggcagaggacaacatga

SEQ ID NO: 211752 - DNA, 25 bp, Artificial
  Probe
attttgcctgacatgctgaaaaatg

SEQ ID NO: 211753 - DNA, 25 bp, Artificial
  Probe
gaactgccagatgtccaacatcaca

SEQ ID NO: 211754 - DNA, 25 bp, Artificial
  Probe
aactgccagatgtccaacatcacag

SEQ ID NO: 211755 - DNA, 25 bp, Artificial
  Probe
aagagtcctgccaagatgtctatcg

SEQ ID NO: 211756 - DNA, 25 bp, Artificial
  Probe
acattttccagaagcgaagatagtg

SEQ ID NO: 211757 - DNA, 25 bp, Artificial
  Probe
ctgccagatgtccaacatcacagtc

SEQ ID NO: 211758 - DNA, 25 bp, Artificial
  Probe
acatgaactgccagatgtccaacat

SEQ ID NO: 211759 - DNA, 25 bp, Artificial
  Probe
gaagatagtgctctccattgaagag

SEQ ID NO: 211760 - DNA, 25 bp, Artificial
  Probe
tgaactgccagatgtccaacatcac

SEQ ID NO: 211761 - DNA, 25 bp, Artificial
  Probe
atgaactgccagatgtccaacatca

SEQ ID NO: 211762 - DNA, 25 bp, Artificial
  Probe
gacaacatgaactgccagatgtcca

SEQ ID NO: 211763 - DNA, 25 bp, Artificial
  Probe
gatagtgctctccattgaagagaac

SEQ ID NO: 211764 - DNA, 25 bp, Artificial
  Probe
ttccagaagcgaagatagtgctctc

SEQ ID NO: 211765 - DNA, 25 bp, Artificial
  Probe
agtgctctccattgaagagaacttt

SEQ ID NO: 211766 - DNA, 25 bp, Artificial
  Probe
agtgtggccaaggaaacagcccgca

SEQ ID NO: 211767 - DNA, 25 bp, Artificial
  Probe
ttaagaagctgcttaatgccaggcg

SEQ ID NO: 211768 - DNA, 25 bp, Artificial
  Probe
agcaggactattcctaaagaacctc

SEQ ID NO: 211769 - DNA, 25 bp, Artificial
  Probe
ctttgtcttggtagacagaagattc

SEQ ID NO: 211770 - DNA, 25 bp, Artificial
  Probe
acagctttgtcttggtagacagaag

SEQ ID NO: 211771 - DNA, 25 bp, Artificial
  Probe
ggcggttaaaccacagtgtggccaa

SEQ ID NO: 211772 - DNA, 25 bp, Artificial
  Probe
tgttaagaagctgcttaatgccagg

SEQ ID NO: 211773 - DNA, 25 bp, Artificial
  Probe
ctccaacagctttgtcttggtagac

SEQ ID NO: 211774 - DNA, 25 bp, Artificial
  Probe
ataagcctggacctatgaccagagt

SEQ ID NO: 211775 - DNA, 25 bp, Artificial
  Probe
caaataagcctggacctatgaccag

SEQ ID NO: 211776 - DNA, 25 bp, Artificial
  Probe
gaaacagcccgcaggagagccatgc

SEQ ID NO: 211777 - DNA, 25 bp, Artificial
  Probe
tccaagcaaataagcctggacctat

SEQ ID NO: 211778 - DNA, 25 bp, Artificial
  Probe
ggccaaggaaacagcccgcaggaga

SEQ ID NO: 211779 - DNA, 25 bp, Artificial
  Probe
cctcctggttctccaagcaaataag

SEQ ID NO: 211780 - DNA, 25 bp, Artificial
  Probe
cagctttgtcttggtagacagaaga

SEQ ID NO: 211781 - DNA, 25 bp, Artificial
  Probe
cgagttgtcttggtcaacaatattt

SEQ ID NO: 211782 - DNA, 25 bp, Artificial
  Probe
caaagtctccgtagacctttgattt

SEQ ID NO: 211783 - DNA, 25 bp, Artificial
  Probe
ctattctccaacagctttgtcttgg

SEQ ID NO: 211784 - DNA, 25 bp, Artificial
  Probe
gaaggtggccctggatctggacccc

SEQ ID NO: 211785 - DNA, 25 bp, Artificial
  Probe
cgcaggagagccatgctggattcag

SEQ ID NO: 211786 - DNA, 25 bp, Artificial
  Probe
cacagtgtggccaaggaaacagccc

SEQ ID NO: 211787 - DNA, 25 bp, Artificial
  Probe
cctttgatttgtttgcactatgtac

SEQ ID NO: 211788 - DNA, 25 bp, Artificial
  Probe
cccctatgttaagaagctgcttaat

SEQ ID NO: 211789 - DNA, 25 bp, Artificial
  Probe
agcccgcaggagagccatgctggat

SEQ ID NO: 211790 - DNA, 25 bp, Artificial
  Probe
ccctggatctggacccctatgttaa

SEQ ID NO: 211791 - DNA, 25 bp, Artificial
  Probe
gatctggacccctatgttaagaagc

SEQ ID NO: 211792 - DNA, 25 bp, Artificial
  Probe
agcaaataagcctggacctatgacc

SEQ ID NO: 211793 - DNA, 25 bp, Artificial
  Probe
gatttgtttgcactatgtactcatt

SEQ ID NO: 211794 - DNA, 25 bp, Artificial
  Probe
tgtttgcactatgtactcattcatg

SEQ ID NO: 211795 - DNA, 25 bp, Artificial
  Probe
ttgcactatgtactcattcatgtag

SEQ ID NO: 211796 - DNA, 25 bp, Artificial
  Probe
ttgtcttggtagacagaagattcca

SEQ ID NO: 211797 - DNA, 25 bp, Artificial
  Probe
cattcatgtagcagcctcaagaaat

SEQ ID NO: 211798 - DNA, 25 bp, Artificial
  Probe
gtttaccctcctggttctccaagca

SEQ ID NO: 211799 - DNA, 25 bp, Artificial
  Probe
ttctccaacagctttgtcttggtag

SEQ ID NO: 211800 - DNA, 25 bp, Artificial
  Probe
catgtagcagcctcaagaaatatgc

SEQ ID NO: 211801 - DNA, 25 bp, Artificial
  Probe
aacagcccgcaggagagccatgctg

SEQ ID NO: 211802 - DNA, 25 bp, Artificial
  Probe
gtagcagcctcaagaaatatgcata

SEQ ID NO: 211803 - DNA, 25 bp, Artificial
  Probe
ctatgttaagaagctgcttaatgcc

SEQ ID NO: 211804 - DNA, 25 bp, Artificial
  Probe
caacagctttgtcttggtagacaga

SEQ ID NO: 211805 - DNA, 25 bp, Artificial
  Probe
gtttgcactatgtactcattcatgt

SEQ ID NO: 211806 - DNA, 25 bp, Artificial
  Probe
aggtggccctggatctggaccccta

SEQ ID NO: 211807 - DNA, 25 bp, Artificial
  Probe
ttgatttgtttgcactatgtactca

SEQ ID NO: 211808 - DNA, 25 bp, Artificial
  Probe
gtggccaaggaaacagcccgcagga

SEQ ID NO: 211809 - DNA, 25 bp, Artificial
  Probe
taaaccacagtgtggccaaggaaac

SEQ ID NO: 211810 - DNA, 25 bp, Artificial
  Probe
attctccaacagctttgtcttggta

SEQ ID NO: 211811 - DNA, 25 bp, Artificial
  Probe
tatgaccagagtatacagtactatt

SEQ ID NO: 211812 - DNA, 25 bp, Artificial
  Probe
actctggaagctgagaggtaggtgg

SEQ ID NO: 211813 - DNA, 25 bp, Artificial
  Probe
tatacagtcctcctgcttgaggctc

SEQ ID NO: 211814 - DNA, 25 bp, Artificial
  Probe
ctctggaagctgagaggtaggtggg

SEQ ID NO: 211815 - DNA, 25 bp, Artificial
  Probe
cactctggaagctgagaggtaggtg

SEQ ID NO: 211816 - DNA, 25 bp, Artificial
  Probe
agctgagaggtaggtgggtgggtct

SEQ ID NO: 211817 - DNA, 25 bp, Artificial
  Probe
aagctgagaggtaggtgggtgggtc

SEQ ID NO: 211818 - DNA, 25 bp, Artificial
  Probe
tcctgcttgaggctcagggttagag

SEQ ID NO: 211819 - DNA, 25 bp, Artificial
  Probe
tacagtcctcctgcttgaggctcag

SEQ ID NO: 211820 - DNA, 25 bp, Artificial
  Probe
tgaggctcagggttagagctaacaa

SEQ ID NO: 211821 - DNA, 25 bp, Artificial
  Probe
tctggaagctgagaggtaggtgggt

SEQ ID NO: 211822 - DNA, 25 bp, Artificial
  Probe
cttgaggctcagggttagagctaac

SEQ ID NO: 211823 - DNA, 25 bp, Artificial
  Probe
cctcctgcttgaggctcagggttag

SEQ ID NO: 211824 - DNA, 25 bp, Artificial
  Probe
tgcttgaggctcagggttagagcta

SEQ ID NO: 211825 - DNA, 25 bp, Artificial
  Probe
taacaatgttaggttggaggattgc

SEQ ID NO: 211826 - DNA, 25 bp, Artificial
  Probe
tcctcctgcttgaggctcagggtta

SEQ ID NO: 211827 - DNA, 25 bp, Artificial
  Probe
ttgaggctcagggttagagctaaca

SEQ ID NO: 211828 - DNA, 25 bp, Artificial
  Probe
gcttgaggctcagggttagagctaa

SEQ ID NO: 211829 - DNA, 25 bp, Artificial
  Probe
ctcctgcttgaggctcagggttaga

SEQ ID NO: 211830 - DNA, 25 bp, Artificial
  Probe
gtcctcctgcttgaggctcagggtt

SEQ ID NO: 211831 - DNA, 25 bp, Artificial
  Probe
aacaatgttaggttggaggattgct

SEQ ID NO: 211832 - DNA, 25 bp, Artificial
  Probe
ctgcttgaggctcagggttagagct

SEQ ID NO: 211833 - DNA, 25 bp, Artificial
  Probe
ctgagaggtaggtgggtgggtctca

SEQ ID NO: 211834 - DNA, 25 bp, Artificial
  Probe
acagtcctcctgcttgaggctcagg

SEQ ID NO: 211835 - DNA, 25 bp, Artificial
  Probe
aggctcagggttagagctaacaatg

SEQ ID NO: 211836 - DNA, 25 bp, Artificial
  Probe
atacagtcctcctgcttgaggctca

SEQ ID NO: 211837 - DNA, 25 bp, Artificial
  Probe
cctgcttgaggctcagggttagagc

SEQ ID NO: 211838 - DNA, 25 bp, Artificial
  Probe
gctgagaggtaggtgggtgggtctc

SEQ ID NO: 211839 - DNA, 25 bp, Artificial
  Probe
ttagagctaacaatgttaggttgga

SEQ ID NO: 211840 - DNA, 25 bp, Artificial
  Probe
atatacagtcctcctgcttgaggct

SEQ ID NO: 211841 - DNA, 25 bp, Artificial
  Probe
agtcctcctgcttgaggctcagggt

SEQ ID NO: 211842 - DNA, 25 bp, Artificial
  Probe
cagtcctcctgcttgaggctcaggg

SEQ ID NO: 211843 - DNA, 25 bp, Artificial
  Probe
acaatgttaggttggaggattgctt

SEQ ID NO: 211844 - DNA, 25 bp, Artificial
  Probe
ctaacaatgttaggttggaggattg

SEQ ID NO: 211845 - DNA, 25 bp, Artificial
  Probe
agctaacaatgttaggttggaggat

SEQ ID NO: 211846 - DNA, 25 bp, Artificial
  Probe
ggaagctgagaggtaggtgggtggg

SEQ ID NO: 211847 - DNA, 25 bp, Artificial
  Probe
aatatacagtcctcctgcttgaggc

SEQ ID NO: 211848 - DNA, 25 bp, Artificial
  Probe
gaagctgagaggtaggtgggtgggt

SEQ ID NO: 211849 - DNA, 25 bp, Artificial
  Probe
gagcctgactgcagccctggccgta

SEQ ID NO: 211850 - DNA, 25 bp, Artificial
  Probe
agtccacactgtcagcagggcccag

SEQ ID NO: 211851 - DNA, 25 bp, Artificial
  Probe
cagttgcaggaagtcccagtgttgg

SEQ ID NO: 211852 - DNA, 25 bp, Artificial
  Probe
agatgcttgcccactaggacaggat

SEQ ID NO: 211853 - DNA, 25 bp, Artificial
  Probe
gaccttaccttccaggaggaataca

SEQ ID NO: 211854 - DNA, 25 bp, Artificial
  Probe
atgctgtactgcttcctttgtttac

SEQ ID NO: 211855 - DNA, 25 bp, Artificial
  Probe
cccagtgttggagatgcttgcccac

SEQ ID NO: 211856 - DNA, 25 bp, Artificial
  Probe
aaccatagtccctgaaggacaggga

SEQ ID NO: 211857 - DNA, 25 bp, Artificial
  Probe
tcacgtggagcctgactgcagccct

SEQ ID NO: 211858 - DNA, 25 bp, Artificial
  Probe
cagccctggccgtacgcagattcaa

SEQ ID NO: 211859 - DNA, 25 bp, Artificial
  Probe
ctcatgctgtactgcttcctttgtt

SEQ ID NO: 211860 - DNA, 25 bp, Artificial
  Probe
tggagcctgactgcagccctggccg

SEQ ID NO: 211861 - DNA, 25 bp, Artificial
  Probe
cgtggagcctgactgcagccctggc

SEQ ID NO: 211862 - DNA, 25 bp, Artificial
  Probe
ctggccgtacgcagattcaaggacc

SEQ ID NO: 211863 - DNA, 25 bp, Artificial
  Probe
tccctgaaggacagggagtccacac

SEQ ID NO: 211864 - DNA, 25 bp, Artificial
  Probe
atggctcaccactggctcactcatg

SEQ ID NO: 211865 - DNA, 25 bp, Artificial
  Probe
accttccaggaggaatacaacacac

SEQ ID NO: 211866 - DNA, 25 bp, Artificial
  Probe
ggaggagctcgcatggctcaccact

SEQ ID NO: 211867 - DNA, 25 bp, Artificial
  Probe
agcagggcccagttgcaggaagtcc

SEQ ID NO: 211868 - DNA, 25 bp, Artificial
  Probe
caggaagtcccagtgttggagatgc

SEQ ID NO: 211869 - DNA, 25 bp, Artificial
  Probe
gaggagctcgcatggctcaccactg

SEQ ID NO: 211870 - DNA, 25 bp, Artificial
  Probe
cttaccttccaggaggaatacaaca

SEQ ID NO: 211871 - DNA, 25 bp, Artificial
  Probe
actgcttcctttgtttactctgtgc

SEQ ID NO: 211872 - DNA, 25 bp, Artificial
  Probe
tcaaggaccttaccttccaggagga

SEQ ID NO: 211873 - DNA, 25 bp, Artificial
  Probe
agttgcaggaagtcccagtgttgga

SEQ ID NO: 211874 - DNA, 25 bp, Artificial
  Probe
agccctggccgtacgcagattcaag

SEQ ID NO: 211875 - DNA, 25 bp, Artificial
  Probe
tcagcagggcccagttgcaggaagt

SEQ ID NO: 211876 - DNA, 25 bp, Artificial
  Probe
attttcacgtggagcctgactgcag

SEQ ID NO: 211877 - DNA, 25 bp, Artificial
  Probe
gtctggaggagctcgcatggctcac

SEQ ID NO: 211878 - DNA, 25 bp, Artificial
  Probe
gctcactcatgctgtactgcttcct

SEQ ID NO: 211879 - DNA, 25 bp, Artificial
  Probe
cactcatgctgtactgcttcctttg

SEQ ID NO: 211880 - DNA, 25 bp, Artificial
  Probe
cacgtggagcctgactgcagccctg

SEQ ID NO: 211881 - DNA, 25 bp, Artificial
  Probe
cacactgtcagcagggcccagttgc

SEQ ID NO: 211882 - DNA, 25 bp, Artificial
  Probe
cactggctcactcatgctgtactgc

SEQ ID NO: 211883 - DNA, 25 bp, Artificial
  Probe
gaggaatacaacacactgttccctg

SEQ ID NO: 211884 - DNA, 25 bp, Artificial
  Probe
catgctgtactgcttcctttgttta

SEQ ID NO: 211885 - DNA, 25 bp, Artificial
  Probe
ggaatacaacacactgttccctgcc

SEQ ID NO: 211886 - DNA, 25 bp, Artificial
  Probe
gttggagatgcttgcccactaggac

SEQ ID NO: 211887 - DNA, 25 bp, Artificial
  Probe
ctgtctggaggagctcgcatggctc

SEQ ID NO: 211888 - DNA, 25 bp, Artificial
  Probe
gcacaaccatagtccctgaaggaca

SEQ ID NO: 211889 - DNA, 25 bp, Artificial
  Probe
gctgtactgcttcctttgtttactc

SEQ ID NO: 211890 - DNA, 25 bp, Artificial
  Probe
tgactgcagccctggccgtacgcag

SEQ ID NO: 211891 - DNA, 25 bp, Artificial
  Probe
aggacagggagtccacactgtcagc

SEQ ID NO: 211892 - DNA, 25 bp, Artificial
  Probe
ctcagcacaaccatagtccctgaag

SEQ ID NO: 211893 - DNA, 25 bp, Artificial
  Probe
cactaggacaggatgaggctgtctg

SEQ ID NO: 211894 - DNA, 25 bp, Artificial
  Probe
gtgttggagatgcttgcccactagg

SEQ ID NO: 211895 - DNA, 25 bp, Artificial
  Probe
tgcgcagggacagcaaagaggataa

SEQ ID NO: 211896 - DNA, 25 bp, Artificial
  Probe
tgcgctctcgtgaggtctctgtgga

SEQ ID NO: 211897 - DNA, 25 bp, Artificial
  Probe
tttctgggccgcatagtagctcgca

SEQ ID NO: 211898 - DNA, 25 bp, Artificial
  Probe
ttcgagggtgttgtgcgtcagatac

SEQ ID NO: 211899 - DNA, 25 bp, Artificial
  Probe
catgccggtggacgagcgagacctt

SEQ ID NO: 211900 - DNA, 25 bp, Artificial
  Probe
tgccatgacctctctgttctctaag

SEQ ID NO: 211901 - DNA, 25 bp, Artificial
  Probe
gttcatcgagacctccgcagcactg

SEQ ID NO: 211902 - DNA, 25 bp, Artificial
  Probe
ggctgcctggccactgcatggccat

SEQ ID NO: 211903 - DNA, 25 bp, Artificial
  Probe
ccctggcagcgactgcagctggaac

SEQ ID NO: 211904 - DNA, 25 bp, Artificial
  Probe
gaggataatgctcgtcgacaagctg

SEQ ID NO: 211905 - DNA, 25 bp, Artificial
  Probe
agtagaagacggacctgaagcagaa

SEQ ID NO: 211906 - DNA, 25 bp, Artificial
  Probe
ctgctcttggacaggactctgcctt

SEQ ID NO: 211907 - DNA, 25 bp, Artificial
  Probe
ggtcttcgactgcaagttcatcgag

SEQ ID NO: 211908 - DNA, 25 bp, Artificial
  Probe
gcgcacgcagacagacagatgtgcc

SEQ ID NO: 211909 - DNA, 25 bp, Artificial
  Probe
agcgcgaccgtcgtcgaggcagcac

SEQ ID NO: 211910 - DNA, 25 bp, Artificial
  Probe
tcgtcgaggcagcaccccatggggc

SEQ ID NO: 211911 - DNA, 25 bp, Artificial
  Probe
ctgcagctggaactcggacacaggg

SEQ ID NO: 211912 - DNA, 25 bp, Artificial
  Probe
gtgtactcaataacggacaagggca

SEQ ID NO: 211913 - DNA, 25 bp, Artificial
  Probe
ctctcgtgaggtctctgtggatgag

SEQ ID NO: 211914 - DNA, 25 bp, Artificial
  Probe
tatggagatgcatgtgcaggcccac

SEQ ID NO: 211915 - DNA, 25 bp, Artificial
  Probe
atggagatgcatgtgcaggcccacg

SEQ ID NO: 211916 - DNA, 25 bp, Artificial
  Probe
ggatgcatatgtcattgtgtactca

SEQ ID NO: 211917 - DNA, 25 bp, Artificial
  Probe
cactgcaccgcaggagcatgccggt

SEQ ID NO: 211918 - DNA, 25 bp, Artificial
  Probe
tggatggaaggctgcccagccaact

SEQ ID NO: 211919 - DNA, 25 bp, Artificial
  Probe
acgatgaccctgaatggaggcagcg

SEQ ID NO: 211920 - DNA, 25 bp, Artificial
  Probe
tttacaaggtgcatgctgctggggc

SEQ ID NO: 211921 - DNA, 25 bp, Artificial
  Probe
accctccggtatttctcagaactgt

SEQ ID NO: 211922 - DNA, 25 bp, Artificial
  Probe
cgcaacagccgcaagatggcctttc

SEQ ID NO: 211923 - DNA, 25 bp, Artificial
  Probe
actgcaccgcaggagcatgccggtg

SEQ ID NO: 211924 - DNA, 25 bp, Artificial
  Probe
agaactccgggtccagctgcgcgca

SEQ ID NO: 211925 - DNA, 25 bp, Artificial
  Probe
gagagccttggcaagaaggccaaac

SEQ ID NO: 211926 - DNA, 25 bp, Artificial
  Probe
ggcaagagtgctctggcgcgcatct

SEQ ID NO: 211927 - DNA, 25 bp, Artificial
  Probe
gaggcaactccaaacgccatcgagc

SEQ ID NO: 211928 - DNA, 25 bp, Artificial
  Probe
ctaatggtctatgacatttgggaac

SEQ ID NO: 211929 - DNA, 25 bp, Artificial
  Probe
ggaggctgttctatatgcttgctgt

SEQ ID NO: 211930 - DNA, 25 bp, Artificial
  Probe
cgcatctttggtggagtagaagacg

SEQ ID NO: 211931 - DNA, 25 bp, Artificial
  Probe
ctcgacgacgggagagccttggcaa

SEQ ID NO: 211932 - DNA, 25 bp, Artificial
  Probe
gagaaagcctcagaactccgggtcc

SEQ ID NO: 211933 - DNA, 25 bp, Artificial
  Probe
gctgcctggccactgcatggccatg

SEQ ID NO: 211934 - DNA, 25 bp, Artificial
  Probe
ctatcactgtggatggagaagaagc

SEQ ID NO: 211935 - DNA, 25 bp, Artificial
  Probe
gacagacagatgtgcccatcatcct

SEQ ID NO: 211936 - DNA, 25 bp, Artificial
  Probe
agcgagaccttcaggcggcgctaac

SEQ ID NO: 211937 - DNA, 25 bp, Artificial
  Probe
gccatgacctctctgttctctaagc

SEQ ID NO: 211938 - DNA, 25 bp, Artificial
  Probe
gcagcactgcatcacaacgtccagg

SEQ ID NO: 211939 - DNA, 25 bp, Artificial
  Probe
agaagaagcatcactaatggtctat

SEQ ID NO: 211940 - DNA, 25 bp, Artificial
  Probe
gctggactggcctgaaggctcctcc

SEQ ID NO: 211941 - DNA, 25 bp, Artificial
  Probe
cacgacctggcgaagaagatggcaa

SEQ ID NO: 211942 - DNA, 25 bp, Artificial
  Probe
gcgtgatattgcagcaggggacttc

SEQ ID NO: 211943 - DNA, 25 bp, Artificial
  Probe
gatgatgcagcgtgatattgcagca

SEQ ID NO: 211944 - DNA, 25 bp, Artificial
  Probe
agcatgctgagttctcagggaacct

SEQ ID NO: 211945 - DNA, 25 bp, Artificial
  Probe
cgacctggcgaagaagatggcaaag

SEQ ID NO: 211946 - DNA, 25 bp, Artificial
  Probe
gctgtgcaggccatgaaccgcatct

SEQ ID NO: 211947 - DNA, 25 bp, Artificial
  Probe
acaaggaacccacgacctggcgaag

SEQ ID NO: 211948 - DNA, 25 bp, Artificial
  Probe
aagattactactttgtgaccaggga

SEQ ID NO: 211949 - DNA, 25 bp, Artificial
  Probe
cgtccgggctgtgcaggccatgaac

SEQ ID NO: 211950 - DNA, 25 bp, Artificial
  Probe
atctgcgtgctagatgtcgacctac

SEQ ID NO: 211951 - DNA, 25 bp, Artificial
  Probe
gtgcaggccatgaaccgcatctgcg

SEQ ID NO: 211952 - DNA, 25 bp, Artificial
  Probe
attactactttgtgaccagggagat

SEQ ID NO: 211953 - DNA, 25 bp, Artificial
  Probe
cagcaggggacttcattgagcatgc

SEQ ID NO: 211954 - DNA, 25 bp, Artificial
  Probe
acttcattgagcatgctgagttctc

SEQ ID NO: 211955 - DNA, 25 bp, Artificial
  Probe
ctactttgtgaccagggagatgatg

SEQ ID NO: 211956 - DNA, 25 bp, Artificial
  Probe
tgatattgcagcaggggacttcatt

SEQ ID NO: 211957 - DNA, 25 bp, Artificial
  Probe
aggaacccacgacctggcgaagaag

SEQ ID NO: 211958 - DNA, 25 bp, Artificial
  Probe
caaggaacccacgacctggcgaaga

SEQ ID NO: 211959 - DNA, 25 bp, Artificial
  Probe
gcaaagattactactttgtgaccag

SEQ ID NO: 211960 - DNA, 25 bp, Artificial
  Probe
acactacaaggaacccacgacctgg

SEQ ID NO: 211961 - DNA, 25 bp, Artificial
  Probe
acgacctggcgaagaagatggcaaa

SEQ ID NO: 211962 - DNA, 25 bp, Artificial
  Probe
cattgagcatgctgagttctcaggg

SEQ ID NO: 211963 - DNA, 25 bp, Artificial
  Probe
ttgcagcaggggacttcattgagca

SEQ ID NO: 211964 - DNA, 25 bp, Artificial
  Probe
tcagggaacctgtaatgggacaagc

SEQ ID NO: 211965 - DNA, 25 bp, Artificial
  Probe
agcgtgatattgcagcaggggactt

SEQ ID NO: 211966 - DNA, 25 bp, Artificial
  Probe
gggacttcattgagcatgctgagtt

SEQ ID NO: 211967 - DNA, 25 bp, Artificial
  Probe
tacaaggaacccacgacctggcgaa

SEQ ID NO: 211968 - DNA, 25 bp, Artificial
  Probe
agcaggggacttcattgagcatgct

SEQ ID NO: 211969 - DNA, 25 bp, Artificial
  Probe
tccgggctgtgcaggccatgaaccg

SEQ ID NO: 211970 - DNA, 25 bp, Artificial
  Probe
gcatctgcgtgctagatgtcgacct

SEQ ID NO: 211971 - DNA, 25 bp, Artificial
  Probe
gagttctcagggaacctgtaatggg

SEQ ID NO: 211972 - DNA, 25 bp, Artificial
  Probe
tactactttgtgaccagggagatga

SEQ ID NO: 211973 - DNA, 25 bp, Artificial
  Probe
attgagcatgctgagttctcaggga

SEQ ID NO: 211974 - DNA, 25 bp, Artificial
  Probe
atgaaccgcatctgcgtgctagatg

SEQ ID NO: 211975 - DNA, 25 bp, Artificial
  Probe
gaacccacgacctggcgaagaagat

SEQ ID NO: 211976 - DNA, 25 bp, Artificial
  Probe
tactttgtgaccagggagatgatgc

SEQ ID NO: 211977 - DNA, 25 bp, Artificial
  Probe
tgatgcagcgtgatattgcagcagg

SEQ ID NO: 211978 - DNA, 25 bp, Artificial
  Probe
caaagattactactttgtgaccagg

SEQ ID NO: 211979 - DNA, 25 bp, Artificial
  Probe
atgctgagttctcagggaacctgta

SEQ ID NO: 211980 - DNA, 25 bp, Artificial
  Probe
tctcagggaacctgtaatgggacaa

SEQ ID NO: 211981 - DNA, 25 bp, Artificial
  Probe
ctgtgcaggccatgaaccgcatctg

SEQ ID NO: 211982 - DNA, 25 bp, Artificial
  Probe
gagcatgctgagttctcagggaacc

SEQ ID NO: 211983 - DNA, 25 bp, Artificial
  Probe
aggggacttcattgagcatgctgag

SEQ ID NO: 211984 - DNA, 25 bp, Artificial
  Probe
cagcgtgatattgcagcaggggact

SEQ ID NO: 211985 - DNA, 25 bp, Artificial
  Probe
ccatgaaccgcatctgcgtgctaga

SEQ ID NO: 211986 - DNA, 25 bp, Artificial
  Probe
gtgatattgcagcaggggacttcat

SEQ ID NO: 211987 - DNA, 25 bp, Artificial
  Probe
ttgtcctgggacaggagcaggatac

SEQ ID NO: 211988 - DNA, 25 bp, Artificial
  Probe
ctgggagtcctcctctggtattgct

SEQ ID NO: 211989 - DNA, 25 bp, Artificial
  Probe
tcacagtccgtggtttagaagaatt

SEQ ID NO: 211990 - DNA, 25 bp, Artificial
  Probe
atttctgtaccagctgggagtcctc

SEQ ID NO: 211991 - DNA, 25 bp, Artificial
  Probe
taccagctgggagtcctcctctggt

SEQ ID NO: 211992 - DNA, 25 bp, Artificial
  Probe
acacagtcctttgtgggagagattg

SEQ ID NO: 211993 - DNA, 25 bp, Artificial
  Probe
acccagtattgtcctgggacaggag

SEQ ID NO: 211994 - DNA, 25 bp, Artificial
  Probe
aaattcaaaagtcacagtccgtggt

SEQ ID NO: 211995 - DNA, 25 bp, Artificial
  Probe
cacagtcctttgtgggagagattgc

SEQ ID NO: 211996 - DNA, 25 bp, Artificial
  Probe
cacagtccgtggtttagaagaattc

SEQ ID NO: 211997 - DNA, 25 bp, Artificial
  Probe
ttcaaaagtcacagtccgtggttta

SEQ ID NO: 211998 - DNA, 25 bp, Artificial
  Probe
ttggcgggccctgaattatgaaata

SEQ ID NO: 211999 - DNA, 25 bp, Artificial
  Probe
tcctgggacaggagcaggatacgta

SEQ ID NO: 212000 - DNA, 25 bp, Artificial
  Probe
tcaaaagtcacagtccgtggtttag

SEQ ID NO: 212001 - DNA, 25 bp, Artificial
  Probe
agtcacagtccgtggtttagaagaa

SEQ ID NO: 212002 - DNA, 25 bp, Artificial
  Probe
cccagtattgtcctgggacaggagc

SEQ ID NO: 212003 - DNA, 25 bp, Artificial
  Probe
agctgggagtcctcctctggtattg

SEQ ID NO: 212004 - DNA, 25 bp, Artificial
  Probe
tacatttctgtaccagctgggagtc

SEQ ID NO: 212005 - DNA, 25 bp, Artificial
  Probe
tggcgggccctgaattatgaaataa

SEQ ID NO: 212006 - DNA, 25 bp, Artificial
  Probe
aagacacagtcctttgtgggagaga

SEQ ID NO: 212007 - DNA, 25 bp, Artificial
  Probe
catttctgtaccagctgggagtcct

SEQ ID NO: 212008 - DNA, 25 bp, Artificial
  Probe
agacacagtcctttgtgggagagat

SEQ ID NO: 212009 - DNA, 25 bp, Artificial
  Probe
ccagtattgtcctgggacaggagca

SEQ ID NO: 212010 - DNA, 25 bp, Artificial
  Probe
ctcacccagtattgtcctgggacag

SEQ ID NO: 212011 - DNA, 25 bp, Artificial
  Probe
ggcgggccctgaattatgaaataaa

SEQ ID NO: 212012 - DNA, 25 bp, Artificial
  Probe
tgggagtcctcctctggtattgctg

SEQ ID NO: 212013 - DNA, 25 bp, Artificial
  Probe
gaaattcaaaagtcacagtccgtgg

SEQ ID NO: 212014 - DNA, 25 bp, Artificial
  Probe
gagtcctcctctggtattgctgaat

SEQ ID NO: 212015 - DNA, 25 bp, Artificial
  Probe
ccaatacatttctgtaccagctggg

SEQ ID NO: 212016 - DNA, 25 bp, Artificial
  Probe
gtcacagtccgtggtttagaagaat

SEQ ID NO: 212017 - DNA, 25 bp, Artificial
  Probe
cacccagtattgtcctgggacagga

SEQ ID NO: 212018 - DNA, 25 bp, Artificial
  Probe
tttctgtaccagctgggagtcctcc

SEQ ID NO: 212019 - DNA, 25 bp, Artificial
  Probe
cctgggacaggagcaggatacgtat

SEQ ID NO: 212020 - DNA, 25 bp, Artificial
  Probe
agcctatacattggaaattcaaaag

SEQ ID NO: 212021 - DNA, 25 bp, Artificial
  Probe
gtaccagctgggagtcctcctctgg

SEQ ID NO: 212022 - DNA, 25 bp, Artificial
  Probe
ggagtcctcctctggtattgctgaa

SEQ ID NO: 212023 - DNA, 25 bp, Artificial
  Probe
cagctgggagtcctcctctggtatt

SEQ ID NO: 212024 - DNA, 25 bp, Artificial
  Probe
atacatttctgtaccagctgggagt

SEQ ID NO: 212025 - DNA, 25 bp, Artificial
  Probe
ttctgtaccagctgggagtcctcct

SEQ ID NO: 212026 - DNA, 25 bp, Artificial
  Probe
aatattttggattggcgggccctga

SEQ ID NO: 212027 - DNA, 25 bp, Artificial
  Probe
tccaatacatttctgtaccagctgg

SEQ ID NO: 212028 - DNA, 25 bp, Artificial
  Probe
attggcgggccctgaattatgaaat

SEQ ID NO: 212029 - DNA, 25 bp, Artificial
  Probe
aatacatttctgtaccagctgggag

SEQ ID NO: 212030 - DNA, 25 bp, Artificial
  Probe
gggagtcctcctctggtattgctga

SEQ ID NO: 212031 - DNA, 25 bp, Artificial
  Probe
ccagctgggagtcctcctctggtat

SEQ ID NO: 212032 - DNA, 25 bp, Artificial
  Probe
aattcaaaagtcacagtccgtggtt

SEQ ID NO: 212033 - DNA, 25 bp, Artificial
  Probe
ttaacacagctggtaattatcaaga

SEQ ID NO: 212034 - DNA, 25 bp, Artificial
  Probe
tttaacacagctggtaattatcaag

SEQ ID NO: 212035 - DNA, 25 bp, Artificial
  Probe
gaagcattactttctcaaaggaaaa

SEQ ID NO: 212036 - DNA, 25 bp, Artificial
  Probe
tataggattcttattaccttgacct

SEQ ID NO: 212037 - DNA, 25 bp, Artificial
  Probe
agatacagtctattaatcacttttt

SEQ ID NO: 212038 - DNA, 25 bp, Artificial
  Probe
aagcattactttctcaaaggaaaat

SEQ ID NO: 212039 - DNA, 25 bp, Artificial
  Probe
accagtagcatctcctggatagaat

SEQ ID NO: 212040 - DNA, 25 bp, Artificial
  Probe
taccagtagcatctcctggatagaa

SEQ ID NO: 212041 - DNA, 25 bp, Artificial
  Probe
gtttttaacacagctggtaattatc

SEQ ID NO: 212042 - DNA, 25 bp, Artificial
  Probe
gcatctcctggatagaatttttgta

SEQ ID NO: 212043 - DNA, 25 bp, Artificial
  Probe
tagtttaaatggggttcagttctgg

SEQ ID NO: 212044 - DNA, 25 bp, Artificial
  Probe
ttcagaatcattagtgcttattttt

SEQ ID NO: 212045 - DNA, 25 bp, Artificial
  Probe
ttaaatggggttcagttctggacag

SEQ ID NO: 212046 - DNA, 25 bp, Artificial
  Probe
tttactttggcttaaaagagataca

SEQ ID NO: 212047 - DNA, 25 bp, Artificial
  Probe
agcttgaagtactcagtgaaaaatg

SEQ ID NO: 212048 - DNA, 25 bp, Artificial
  Probe
gactttagtttttaacacagctggt

SEQ ID NO: 212049 - DNA, 25 bp, Artificial
  Probe
accttaccagtagcatctcctggat

SEQ ID NO: 212050 - DNA, 25 bp, Artificial
  Probe
gtagcatctcctggatagaattttt

SEQ ID NO: 212051 - DNA, 25 bp, Artificial
  Probe
tgaccttaccagtagcatctcctgg

SEQ ID NO: 212052 - DNA, 25 bp, Artificial
  Probe
gttctggacagaggatattagggat

SEQ ID NO: 212053 - DNA, 25 bp, Artificial
  Probe
cagtagcatctcctggatagaattt

SEQ ID NO: 212054 - DNA, 25 bp, Artificial
  Probe
ttagattatggatcctatttaaaca

SEQ ID NO: 212055 - DNA, 25 bp, Artificial
  Probe
agtagcatctcctggatagaatttt

SEQ ID NO: 212056 - DNA, 25 bp, Artificial
  Probe
agtgtggctattttccttcttctga

SEQ ID NO: 212057 - DNA, 25 bp, Artificial
  Probe
gaccttaccagtagcatctcctgga

SEQ ID NO: 212058 - DNA, 25 bp, Artificial
  Probe
gaattaaccttctgaggtgaaaagt

SEQ ID NO: 212059 - DNA, 25 bp, Artificial
  Probe
tagcatctcctggatagaatttttg

SEQ ID NO: 212060 - DNA, 25 bp, Artificial
  Probe
aattttattaatgagtgtggctatt

SEQ ID NO: 212061 - DNA, 25 bp, Artificial
  Probe
agcatctcctggatagaatttttgt

SEQ ID NO: 212062 - DNA, 25 bp, Artificial
  Probe
ccttaccagtagcatctcctggata

SEQ ID NO: 212063 - DNA, 25 bp, Artificial
  Probe
tcaaaacctaattttatataggatt

SEQ ID NO: 212064 - DNA, 25 bp, Artificial
  Probe
gcattactttctcaaaggaaaattt

SEQ ID NO: 212065 - DNA, 25 bp, Artificial
  Probe
atggaagcattactttctcaaagga

SEQ ID NO: 212066 - DNA, 25 bp, Artificial
  Probe
ccagtagcatctcctggatagaatt

SEQ ID NO: 212067 - DNA, 25 bp, Artificial
  Probe
gtaattatcaagacactgcatttca

SEQ ID NO: 212068 - DNA, 25 bp, Artificial
  Probe
gtaaaagaattaaccttctgaggtg

SEQ ID NO: 212069 - DNA, 25 bp, Artificial
  Probe
atgagtgtggctattttccttcttc

SEQ ID NO: 212070 - DNA, 25 bp, Artificial
  Probe
taacacagctggtaattatcaagac

SEQ ID NO: 212071 - DNA, 25 bp, Artificial
  Probe
ttactttggcttaaaagagatacag

SEQ ID NO: 212072 - DNA, 25 bp, Artificial
  Probe
aacacagctggtaattatcaagaca

SEQ ID NO: 212073 - DNA, 25 bp, Artificial
  Probe
tcctatttaaacagtagtttaaatg

SEQ ID NO: 212074 - DNA, 25 bp, Artificial
  Probe
ttattttttggaatggaagcattac

SEQ ID NO: 212075 - DNA, 25 bp, Artificial
  Probe
catctcctggatagaatttttgtac

SEQ ID NO: 212076 - DNA, 25 bp, Artificial
  Probe
gtgtggctattttccttcttctgac

SEQ ID NO: 212077 - DNA, 25 bp, Artificial
  Probe
gagtgtggctattttccttcttctg

SEQ ID NO: 212078 - DNA, 25 bp, Artificial
  Probe
tcaagacactgcatttcaaaaccta

SEQ ID NO: 212079 - DNA, 25 bp, Artificial
  Probe
tgagccccaaaatgggccccaaaag

SEQ ID NO: 212080 - DNA, 25 bp, Artificial
  Probe
cagtgaaatcagtgtacgggaactg

SEQ ID NO: 212081 - DNA, 25 bp, Artificial
  Probe
tgtgaaacctctttgtaatactgta

SEQ ID NO: 212082 - DNA, 25 bp, Artificial
  Probe
cctttcagtagagctgactgggcaa

SEQ ID NO: 212083 - DNA, 25 bp, Artificial
  Probe
cctgcagttgctcttcagtaccatg

SEQ ID NO: 212084 - DNA, 25 bp, Artificial
  Probe
ggttctgaaggacacagtgaaatca

SEQ ID NO: 212085 - DNA, 25 bp, Artificial
  Probe
gtcatcaaacagtgtttataactgt

SEQ ID NO: 212086 - DNA, 25 bp, Artificial
  Probe
gaacggttctgaaggacacagtgaa

SEQ ID NO: 212087 - DNA, 25 bp, Artificial
  Probe
aagttaggctagacacgtcaaacct

SEQ ID NO: 212088 - DNA, 25 bp, Artificial
  Probe
ttctattagcacctcctgcagttgc

SEQ ID NO: 212089 - DNA, 25 bp, Artificial
  Probe
gacacgtcaaacctcagtgattggg

SEQ ID NO: 212090 - DNA, 25 bp, Artificial
  Probe
cacctcctgcagttgctcttcagta

SEQ ID NO: 212091 - DNA, 25 bp, Artificial
  Probe
ctcttcagtaccatgaagttaggct

SEQ ID NO: 212092 - DNA, 25 bp, Artificial
  Probe
tcctgcagttgctcttcagtaccat

SEQ ID NO: 212093 - DNA, 25 bp, Artificial
  Probe
ttaggctagacacgtcaaacctcag

SEQ ID NO: 212094 - DNA, 25 bp, Artificial
  Probe
gtcttctattagcacctcctgcagt

SEQ ID NO: 212095 - DNA, 25 bp, Artificial
  Probe
gttaccaaggaatctttgggagtgc

SEQ ID NO: 212096 - DNA, 25 bp, Artificial
  Probe
gttgctcttcagtaccatgaagtta

SEQ ID NO: 212097 - DNA, 25 bp, Artificial
  Probe
cttctattagcacctcctgcagttg

SEQ ID NO: 212098 - DNA, 25 bp, Artificial
  Probe
agctgactgggcaaagcatatggga

SEQ ID NO: 212099 - DNA, 25 bp, Artificial
  Probe
ggccccaaaagataattactgattt

SEQ ID NO: 212100 - DNA, 25 bp, Artificial
  Probe
caattaaggtgttaccaaggaatct

SEQ ID NO: 212101 - DNA, 25 bp, Artificial
  Probe
ccaaggaatctttgggagtgccttc

SEQ ID NO: 212102 - DNA, 25 bp, Artificial
  Probe
tgactgggcaaagcatatgggaacg

SEQ ID NO: 212103 - DNA, 25 bp, Artificial
  Probe
gaagcccagatactctcaaagtcat

SEQ ID NO: 212104 - DNA, 25 bp, Artificial
  Probe
acagtgaaatcagtgtacgggaact

SEQ ID NO: 212105 - DNA, 25 bp, Artificial
  Probe
tgctcttcagtaccatgaagttagg

SEQ ID NO: 212106 - DNA, 25 bp, Artificial
  Probe
agaagtcttctattagcacctcctg

SEQ ID NO: 212107 - DNA, 25 bp, Artificial
  Probe
agtaccatgaagttaggctagacac

SEQ ID NO: 212108 - DNA, 25 bp, Artificial
  Probe
ttcagtagagctgactgggcaaagc

SEQ ID NO: 212109 - DNA, 25 bp, Artificial
  Probe
tcaaacctcagtgattgggcaatgt

SEQ ID NO: 212110 - DNA, 25 bp, Artificial
  Probe
atgggaacggttctgaaggacacag

SEQ ID NO: 212111 - DNA, 25 bp, Artificial
  Probe
atatgggaacggttctgaaggacac

SEQ ID NO: 212112 - DNA, 25 bp, Artificial
  Probe
ctagacacgtcaaacctcagtgatt

SEQ ID NO: 212113 - DNA, 25 bp, Artificial
  Probe
ctaacctttcagtagagctgactgg

SEQ ID NO: 212114 - DNA, 25 bp, Artificial
  Probe
gaagtcttctattagcacctcctgc

SEQ ID NO: 212115 - DNA, 25 bp, Artificial
  Probe
gtgaaacctctttgtaatactgtat

SEQ ID NO: 212116 - DNA, 25 bp, Artificial
  Probe
agtcttctattagcacctcctgcag

SEQ ID NO: 212117 - DNA, 25 bp, Artificial
  Probe
agtagagctgactgggcaaagcata

SEQ ID NO: 212118 - DNA, 25 bp, Artificial
  Probe
ctgtggaagcccagatactctcaaa

SEQ ID NO: 212119 - DNA, 25 bp, Artificial
  Probe
aatgggccccaaaagataattactg

SEQ ID NO: 212120 - DNA, 25 bp, Artificial
  Probe
tgggccccaaaagataattactgat

SEQ ID NO: 212121 - DNA, 25 bp, Artificial
  Probe
actgggcaaagcatatgggaacggt

SEQ ID NO: 212122 - DNA, 25 bp, Artificial
  Probe
taccatgaagttaggctagacacgt

SEQ ID NO: 212123 - DNA, 25 bp, Artificial
  Probe
ctgactgggcaaagcatatgggaac

SEQ ID NO: 212124 - DNA, 25 bp, Artificial
  Probe
gttctgaaggacacagtgaaatcag

SEQ ID NO: 212125 - DNA, 25 bp, Artificial
  Probe
ccatgaaacagacatttgagattaa

SEQ ID NO: 212126 - DNA, 25 bp, Artificial
  Probe
actaaatgccaggttactggctggg

SEQ ID NO: 212127 - DNA, 25 bp, Artificial
  Probe
gtgttaaccacctctgatacactgc

SEQ ID NO: 212128 - DNA, 25 bp, Artificial
  Probe
gagcttttcttcatctgctctggtt

SEQ ID NO: 212129 - DNA, 25 bp, Artificial
  Probe
gtccaactgcttcacctgagatcca

SEQ ID NO: 212130 - DNA, 25 bp, Artificial
  Probe
agtagaaaacgctgcaacagccaga

SEQ ID NO: 212131 - DNA, 25 bp, Artificial
  Probe
ctaagaaatatcagacctggatcaa

SEQ ID NO: 212132 - DNA, 25 bp, Artificial
  Probe
tctttttccaggacaagcttgcaga

SEQ ID NO: 212133 - DNA, 25 bp, Artificial
  Probe
tttaagtctggaacgaatgacatca

SEQ ID NO: 212134 - DNA, 25 bp, Artificial
  Probe
aaacgctgcaacagccagagctact

SEQ ID NO: 212135 - DNA, 25 bp, Artificial
  Probe
cagagagtttccatactgaaattat

SEQ ID NO: 212136 - DNA, 25 bp, Artificial
  Probe
gctggggatccaccaagccagatgt

SEQ ID NO: 212137 - DNA, 25 bp, Artificial
  Probe
agcatggcacagctggggtatattt

SEQ ID NO: 212138 - DNA, 25 bp, Artificial
  Probe
gaactgaacaagcatgtccaactgc

SEQ ID NO: 212139 - DNA, 25 bp, Artificial
  Probe
gcaacagccagagctactacaacca

SEQ ID NO: 212140 - DNA, 25 bp, Artificial
  Probe
gattaaggaattcatcccgttctca

SEQ ID NO: 212141 - DNA, 25 bp, Artificial
  Probe
accctgttgactaagaaatatcaga

SEQ ID NO: 212142 - DNA, 25 bp, Artificial
  Probe
tcatctgctctggttttccttgtgg

SEQ ID NO: 212143 - DNA, 25 bp, Artificial
  Probe
aagcttgcagactggctttctcttc

SEQ ID NO: 212144 - DNA, 25 bp, Artificial
  Probe
ctctcccacggttgttttaggagca

SEQ ID NO: 212145 - DNA, 25 bp, Artificial
  Probe
aactaaatgccaggttactggctgg

SEQ ID NO: 212146 - DNA, 25 bp, Artificial
  Probe
ggcttccatccagtaccgcggcaag

SEQ ID NO: 212147 - DNA, 25 bp, Artificial
  Probe
atttatatgtcttcagagagtttcc

SEQ ID NO: 212148 - DNA, 25 bp, Artificial
  Probe
gatctgcaaaggtgtcttccatgcc

SEQ ID NO: 212149 - DNA, 25 bp, Artificial
  Probe
acatcatgctgataaagcttcgcac

SEQ ID NO: 212150 - DNA, 25 bp, Artificial
  Probe
atccgcagtgggtgctaacagccgc

SEQ ID NO: 212151 - DNA, 25 bp, Artificial
  Probe
tgtggccgggatttatatgtcttca

SEQ ID NO: 212152 - DNA, 25 bp, Artificial
  Probe
cacattgagatgacaagtggttttc

SEQ ID NO: 212153 - DNA, 25 bp, Artificial
  Probe
cagtaccgcggcaagcatatttgtg

SEQ ID NO: 212154 - DNA, 25 bp, Artificial
  Probe
actgcaggaagtcactgttaccatc

SEQ ID NO: 212155 - DNA, 25 bp, Artificial
  Probe
acaagtggttttcttggatctgcca

SEQ ID NO: 212156 - DNA, 25 bp, Artificial
  Probe
tgctgataaagcttcgcacggctgc

SEQ ID NO: 212157 - DNA, 25 bp, Artificial
  Probe
ctggatcaaaagcaagcttgccccg

SEQ ID NO: 212158 - DNA, 25 bp, Artificial
  Probe
agaagtacagccacattccaggcct

SEQ ID NO: 212159 - DNA, 25 bp, Artificial
  Probe
tggtggtcctttgatctgcaaaggt

SEQ ID NO: 212160 - DNA, 25 bp, Artificial
  Probe
tcgaggccactctcccacggttgtt

SEQ ID NO: 212161 - DNA, 25 bp, Artificial
  Probe
cctggagtctacaccctgttgacta

SEQ ID NO: 212162 - DNA, 25 bp, Artificial
  Probe
ttaccatcataagtagaaaacgctg

SEQ ID NO: 212163 - DNA, 25 bp, Artificial
  Probe
gtaattatgagcttttcttcatctg

SEQ ID NO: 212164 - DNA, 25 bp, Artificial
  Probe
tgacaagtggttttcttggatctgc

SEQ ID NO: 212165 - DNA, 25 bp, Artificial
  Probe
aagcttgccccgtcgagtgcacatt

SEQ ID NO: 212166 - DNA, 25 bp, Artificial
  Probe
cttgtggccgggatttatatgtctt

SEQ ID NO: 212167 - DNA, 25 bp, Artificial
  Probe
gcatggcacagctggggtatatttc

SEQ ID NO: 212168 - DNA, 25 bp, Artificial
  Probe
tctggttttccttgtggccgggatt

SEQ ID NO: 212169 - DNA, 25 bp, Artificial
  Probe
tgttagggagccatattcttttctc

SEQ ID NO: 212170 - DNA, 25 bp, Artificial
  Probe
ctgagatccaaaaactatattagag

SEQ ID NO: 212171 - DNA, 25 bp, Artificial
  Probe
gcatctgtaaacactcgtgacgtct

SEQ ID NO: 212172 - DNA, 25 bp, Artificial
  Probe
taagcatctgtaaacactcgtgacg

SEQ ID NO: 212173 - DNA, 25 bp, Artificial
  Probe
atgttaactttagacatatgcttct

SEQ ID NO: 212174 - DNA, 25 bp, Artificial
  Probe
aacgtggctgatctgaggtcacttg

SEQ ID NO: 212175 - DNA, 25 bp, Artificial
  Probe
taaacactcgtgacgtctgtaccgt

SEQ ID NO: 212176 - DNA, 25 bp, Artificial
  Probe
catctgtaaacactcgtgacgtctg

SEQ ID NO: 212177 - DNA, 25 bp, Artificial
  Probe
aacactcgtgacgtctgtaccgtgt

SEQ ID NO: 212178 - DNA, 25 bp, Artificial
  Probe
tttaagcatctgtaaacactcgtga

SEQ ID NO: 212179 - DNA, 25 bp, Artificial
  Probe
actcgtgacgtctgtaccgtgtgac

SEQ ID NO: 212180 - DNA, 25 bp, Artificial
  Probe
acactcgtgacgtctgtaccgtgtg

SEQ ID NO: 212181 - DNA, 25 bp, Artificial
  Probe
tcgtgacgtctgtaccgtgtgacta

SEQ ID NO: 212182 - DNA, 25 bp, Artificial
  Probe
aagcatctgtaaacactcgtgacgt

SEQ ID NO: 212183 - DNA, 25 bp, Artificial
  Probe
tgcaacaaacctttactacctaaag

SEQ ID NO: 212184 - DNA, 25 bp, Artificial
  Probe
tctgtattcccaattgtttaaaaga

SEQ ID NO: 212185 - DNA, 25 bp, Artificial
  Probe
cgtgacgtctgtaccgtgtgactaa

SEQ ID NO: 212186 - DNA, 25 bp, Artificial
  Probe
aggaaattgactttctccatttatg

SEQ ID NO: 212187 - DNA, 25 bp, Artificial
  Probe
atctgtaaacactcgtgacgtctgt

SEQ ID NO: 212188 - DNA, 25 bp, Artificial
  Probe
tttgtaaacagggtagcaaacaaga

SEQ ID NO: 212189 - DNA, 25 bp, Artificial
  Probe
gaacaaatcttctctcaggaaattg

SEQ ID NO: 212190 - DNA, 25 bp, Artificial
  Probe
ctgaggtcacttggaatttgtaaac

SEQ ID NO: 212191 - DNA, 25 bp, Artificial
  Probe
ggaaattgactttctccatttatga

SEQ ID NO: 212192 - DNA, 25 bp, Artificial
  Probe
gtggctgatctgaggtcacttggaa

SEQ ID NO: 212193 - DNA, 25 bp, Artificial
  Probe
gtttaagcatctgtaaacactcgtg

SEQ ID NO: 212194 - DNA, 25 bp, Artificial
  Probe
acgtggctgatctgaggtcacttgg

SEQ ID NO: 212195 - DNA, 25 bp, Artificial
  Probe
tctgtaaacactcgtgacgtctgta

SEQ ID NO: 212196 - DNA, 25 bp, Artificial
  Probe
ctcgtgacgtctgtaccgtgtgact

SEQ ID NO: 212197 - DNA, 25 bp, Artificial
  Probe
tgtaaacactcgtgacgtctgtacc

SEQ ID NO: 212198 - DNA, 25 bp, Artificial
  Probe
ctgtaaacactcgtgacgtctgtac

SEQ ID NO: 212199 - DNA, 25 bp, Artificial
  Probe
tgtaacgtggctgatctgaggtcac

SEQ ID NO: 212200 - DNA, 25 bp, Artificial
  Probe
ttttaagtgcaatttgcgttgcagc

SEQ ID NO: 212201 - DNA, 25 bp, Artificial
  Probe
gtaacgtggctgatctgaggtcact

SEQ ID NO: 212202 - DNA, 25 bp, Artificial
  Probe
tttttaagtgcaatttgcgttgcag

SEQ ID NO: 212203 - DNA, 25 bp, Artificial
  Probe
tgactttctccatttatgaattttt

SEQ ID NO: 212204 - DNA, 25 bp, Artificial
  Probe
gtaaacactcgtgacgtctgtaccg

SEQ ID NO: 212205 - DNA, 25 bp, Artificial
  Probe
cactcgtgacgtctgtaccgtgtga

SEQ ID NO: 212206 - DNA, 25 bp, Artificial
  Probe
ctgatctgaggtcacttggaatttg

SEQ ID NO: 212207 - DNA, 25 bp, Artificial
  Probe
tttaagtgcaatttgcgttgcagca

SEQ ID NO: 212208 - DNA, 25 bp, Artificial
  Probe
ttaagcatctgtaaacactcgtgac

SEQ ID NO: 212209 - DNA, 25 bp, Artificial
  Probe
tggctgatctgaggtcacttggaat

SEQ ID NO: 212210 - DNA, 25 bp, Artificial
  Probe
ggctgatctgaggtcacttggaatt

SEQ ID NO: 212211 - DNA, 25 bp, Artificial
  Probe
agtttaagcatctgtaaacactcgt

SEQ ID NO: 212212 - DNA, 25 bp, Artificial
  Probe
cgatttcaagaacaaatcttctctc

SEQ ID NO: 212213 - DNA, 25 bp, Artificial
  Probe
agcatctgtaaacactcgtgacgtc

SEQ ID NO: 212214 - DNA, 25 bp, Artificial
  Probe
gctgatctgaggtcacttggaattt

SEQ ID NO: 212215 - DNA, 25 bp, Artificial
  Probe
cgtggctgatctgaggtcacttgga

SEQ ID NO: 212216 - DNA, 25 bp, Artificial
  Probe
taacgtggctgatctgaggtcactt

SEQ ID NO: 212217 - DNA, 25 bp, Artificial
  Probe
atctcatgaagtatgacagctacag

SEQ ID NO: 212218 - DNA, 25 bp, Artificial
  Probe
tacatgaccttcctgtccaataagg

SEQ ID NO: 212219 - DNA, 25 bp, Artificial
  Probe
tcggctcactgaaaagattctggaa

SEQ ID NO: 212220 - DNA, 25 bp, Artificial
  Probe
tctcagactgtgtgcaggatgtcat

SEQ ID NO: 212221 - DNA, 25 bp, Artificial
  Probe
agtgtgcaagaccttccctcagaat

SEQ ID NO: 212222 - DNA, 25 bp, Artificial
  Probe
aagtctgacttgtttctgaagcacc

SEQ ID NO: 212223 - DNA, 25 bp, Artificial
  Probe
cgcttcttgaagtctgacttgtttc

SEQ ID NO: 212224 - DNA, 25 bp, Artificial
  Probe
cttgtttctgaagcaccggcggact

SEQ ID NO: 212225 - DNA, 25 bp, Artificial
  Probe
agctacagccgcttcttgaagtctg

SEQ ID NO: 212226 - DNA, 25 bp, Artificial
  Probe
gttcacaaaacacatgagagtcctc

SEQ ID NO: 212227 - DNA, 25 bp, Artificial
  Probe
ttcaatctcatgaagtatgacagct

SEQ ID NO: 212228 - DNA, 25 bp, Artificial
  Probe
ttcttgaagtctgacttgtttctga

SEQ ID NO: 212229 - DNA, 25 bp, Artificial
  Probe
actctcagactgtgtgcaggatgtc

SEQ ID NO: 212230 - DNA, 25 bp, Artificial
  Probe
cagtctcggctcactgaaaagattc

SEQ ID NO: 212231 - DNA, 25 bp, Artificial
  Probe
agggatggactctcagactgtgtgc

SEQ ID NO: 212232 - DNA, 25 bp, Artificial
  Probe
tcttcaatctcatgaagtatgacag

SEQ ID NO: 212233 - DNA, 25 bp, Artificial
  Probe
gacttgtttctgaagcaccggcgga

SEQ ID NO: 212234 - DNA, 25 bp, Artificial
  Probe
gaccttcctgtccaataaggcctct

SEQ ID NO: 212235 - DNA, 25 bp, Artificial
  Probe
aggaagaggatcctccggacgctca

SEQ ID NO: 212236 - DNA, 25 bp, Artificial
  Probe
ctcactgaaaagattctggaagaac

SEQ ID NO: 212237 - DNA, 25 bp, Artificial
  Probe
agaagatctacatgaccttcctgtc

SEQ ID NO: 212238 - DNA, 25 bp, Artificial
  Probe
ataaggcctcttcacaagtcaatgt

SEQ ID NO: 212239 - DNA, 25 bp, Artificial
  Probe
ggcctcttcacaagtcaatgtggag

SEQ ID NO: 212240 - DNA, 25 bp, Artificial
  Probe
ggactctcagactgtgtgcaggatg

SEQ ID NO: 212241 - DNA, 25 bp, Artificial
  Probe
gtgtgcaagaccttccctcagaata

SEQ ID NO: 212242 - DNA, 25 bp, Artificial
  Probe
gcttcttgaagtctgacttgtttct

SEQ ID NO: 212243 - DNA, 25 bp, Artificial
  Probe
cccccatggagcagagggatggact

SEQ ID NO: 212244 - DNA, 25 bp, Artificial
  Probe
aatctcatgaagtatgacagctaca

SEQ ID NO: 212245 - DNA, 25 bp, Artificial
  Probe
acccccatggagcagagggatggac

SEQ ID NO: 212246 - DNA, 25 bp, Artificial
  Probe
tgaagtctgacttgtttctgaagca

SEQ ID NO: 212247 - DNA, 25 bp, Artificial
  Probe
tatgacagctacagccgcttcttga

SEQ ID NO: 212248 - DNA, 25 bp, Artificial
  Probe
ctacagccgcttcttgaagtctgac

SEQ ID NO: 212249 - DNA, 25 bp, Artificial
  Probe
aagtatgacagctacagccgcttct

SEQ ID NO: 212250 - DNA, 25 bp, Artificial
  Probe
ggctcactgaaaagattctggaaga

SEQ ID NO: 212251 - DNA, 25 bp, Artificial
  Probe
caatctcatgaagtatgacagctac

SEQ ID NO: 212252 - DNA, 25 bp, Artificial
  Probe
tctcggctcactgaaaagattctgg

SEQ ID NO: 212253 - DNA, 25 bp, Artificial
  Probe
agtttcagttcacaaaacacatgag

SEQ ID NO: 212254 - DNA, 25 bp, Artificial
  Probe
ctgacttgtttctgaagcaccggcg

SEQ ID NO: 212255 - DNA, 25 bp, Artificial
  Probe
aggatcctccggacgctcaaactgc

SEQ ID NO: 212256 - DNA, 25 bp, Artificial
  Probe
gagtgtgcaagaccttccctcagaa

SEQ ID NO: 212257 - DNA, 25 bp, Artificial
  Probe
ggcagtctcggctcactgaaaagat

SEQ ID NO: 212258 - DNA, 25 bp, Artificial
  Probe
cccatggagcagagggatggactct

SEQ ID NO: 212259 - DNA, 25 bp, Artificial
  Probe
ctgtgtgcaggatgtcattgctttg

SEQ ID NO: 212260 - DNA, 25 bp, Artificial
  Probe
atggactctcagactgtgtgcagga

SEQ ID NO: 212261 - DNA, 25 bp, Artificial
  Probe
gaagatctacatgaccttcctgtcc

SEQ ID NO: 212262 - DNA, 25 bp, Artificial
  Probe
tgtttctgaagcaccggcggactga

SEQ ID NO: 212263 - DNA, 25 bp, Artificial
  Probe
tcgaggcgctctgacaccgtagaca

SEQ ID NO: 212264 - DNA, 25 bp, Artificial
  Probe
attctgacgtcttccctgggtgttt

SEQ ID NO: 212265 - DNA, 25 bp, Artificial
  Probe
cctcctttctgcactgtatcaaagg

SEQ ID NO: 212266 - DNA, 25 bp, Artificial
  Probe
ctgacaccgtagacaggcttagcct

SEQ ID NO: 212267 - DNA, 25 bp, Artificial
  Probe
ctgggtgtttttctgtctctgccgt

SEQ ID NO: 212268 - DNA, 25 bp, Artificial
  Probe
aggcgctctgacaccgtagacaggc

SEQ ID NO: 212269 - DNA, 25 bp, Artificial
  Probe
agagtcacattctgacgtcttccct

SEQ ID NO: 212270 - DNA, 25 bp, Artificial
  Probe
tactcagagtcacattctgacgtct

SEQ ID NO: 212271 - DNA, 25 bp, Artificial
  Probe
tgaaacgaagaccaatccatgtaaa

SEQ ID NO: 212272 - DNA, 25 bp, Artificial
  Probe
ttgaaacgaagaccaatccatgtaa

SEQ ID NO: 212273 - DNA, 25 bp, Artificial
  Probe
atccattgtacatttgaaacgaaga

SEQ ID NO: 212274 - DNA, 25 bp, Artificial
  Probe
agcgtctttcaccttactcagagtc

SEQ ID NO: 212275 - DNA, 25 bp, Artificial
  Probe
gtgtttttctgtctctgccgtggct

SEQ ID NO: 212276 - DNA, 25 bp, Artificial
  Probe
tcaaagggacagtctgagggtatgc

SEQ ID NO: 212277 - DNA, 25 bp, Artificial
  Probe
actcagagtcacattctgacgtctt

SEQ ID NO: 212278 - DNA, 25 bp, Artificial
  Probe
gatatccattgtacatttgaaacga

SEQ ID NO: 212279 - DNA, 25 bp, Artificial
  Probe
tttctgcactgtatcaaagggacag

SEQ ID NO: 212280 - DNA, 25 bp, Artificial
  Probe
cgaggcgctctgacaccgtagacag

SEQ ID NO: 212281 - DNA, 25 bp, Artificial
  Probe
ttctgcactgtatcaaagggacagt

SEQ ID NO: 212282 - DNA, 25 bp, Artificial
  Probe
gcgtctttcaccttactcagagtca

SEQ ID NO: 212283 - DNA, 25 bp, Artificial
  Probe
cagagtcacattctgacgtcttccc

SEQ ID NO: 212284 - DNA, 25 bp, Artificial
  Probe
gctctgacaccgtagacaggcttag

SEQ ID NO: 212285 - DNA, 25 bp, Artificial
  Probe
ccggtgtagtcgaggcgctctgaca

SEQ ID NO: 212286 - DNA, 25 bp, Artificial
  Probe
aaaggtgcggcatctgtgacacata

SEQ ID NO: 212287 - DNA, 25 bp, Artificial
  Probe
tctgacaccgtagacaggcttagcc

SEQ ID NO: 212288 - DNA, 25 bp, Artificial
  Probe
gacaccgtagacaggcttagcctgt

SEQ ID NO: 212289 - DNA, 25 bp, Artificial
  Probe
tagtcgaggcgctctgacaccgtag

SEQ ID NO: 212290 - DNA, 25 bp, Artificial
  Probe
gcactgtatcaaagggacagtctga

SEQ ID NO: 212291 - DNA, 25 bp, Artificial
  Probe
ccgtagacaggcttagcctgttatt

SEQ ID NO: 212292 - DNA, 25 bp, Artificial
  Probe
ccttactcagagtcacattctgacg

SEQ ID NO: 212293 - DNA, 25 bp, Artificial
  Probe
ctgcactgtatcaaagggacagtct

SEQ ID NO: 212294 - DNA, 25 bp, Artificial
  Probe
tccctgggtgtttttctgtctctgc

SEQ ID NO: 212295 - DNA, 25 bp, Artificial
  Probe
tgacgtcttccctgggtgtttttct

SEQ ID NO: 212296 - DNA, 25 bp, Artificial
  Probe
agtcgaggcgctctgacaccgtaga

SEQ ID NO: 212297 - DNA, 25 bp, Artificial
  Probe
ctctgccgtggctttcggaaaagaa

SEQ ID NO: 212298 - DNA, 25 bp, Artificial
  Probe
ggtgcggcatctgtgacacatattt

SEQ ID NO: 212299 - DNA, 25 bp, Artificial
  Probe
ctgtctctgccgtggctttcggaaa

SEQ ID NO: 212300 - DNA, 25 bp, Artificial
  Probe
tatccattgtacatttgaaacgaag

SEQ ID NO: 212301 - DNA, 25 bp, Artificial
  Probe
agatatccattgtacatttgaaacg

SEQ ID NO: 212302 - DNA, 25 bp, Artificial
  Probe
tcacattctgacgtcttccctgggt

SEQ ID NO: 212303 - DNA, 25 bp, Artificial
  Probe
tgcggcatctgtgacacatatttta

SEQ ID NO: 212304 - DNA, 25 bp, Artificial
  Probe
aggtgcggcatctgtgacacatatt

SEQ ID NO: 212305 - DNA, 25 bp, Artificial
  Probe
gtagacaggcttagcctgttattta

SEQ ID NO: 212306 - DNA, 25 bp, Artificial
  Probe
caaagggacagtctgagggtatgct

SEQ ID NO: 212307 - DNA, 25 bp, Artificial
  Probe
gggtgtttttctgtctctgccgtgg

SEQ ID NO: 212308 - DNA, 25 bp, Artificial
  Probe
ccattgtacatttgaaacgaagacc

SEQ ID NO: 212309 - DNA, 25 bp, Artificial
  Probe
agctgctcctggacttctagagttc

SEQ ID NO: 212310 - DNA, 25 bp, Artificial
  Probe
gctgctcctggacttctagagttcc

SEQ ID NO: 212311 - DNA, 25 bp, Artificial
  Probe
tgcctccctgagctgtaaatttgtt

SEQ ID NO: 212312 - DNA, 25 bp, Artificial
  Probe
ggaagatcccagcagctgttcccct

SEQ ID NO: 212313 - DNA, 25 bp, Artificial
  Probe
ccatgccagcatctacgtctagttc

SEQ ID NO: 212314 - DNA, 25 bp, Artificial
  Probe
ccagcatctacgtctagttcctgag

SEQ ID NO: 212315 - DNA, 25 bp, Artificial
  Probe
gctcctggacttctagagttcccct

SEQ ID NO: 212316 - DNA, 25 bp, Artificial
  Probe
atctttgtaatagaggctgctgtcc

SEQ ID NO: 212317 - DNA, 25 bp, Artificial
  Probe
aggatgcctccctgagctgtaaatt

SEQ ID NO: 212318 - DNA, 25 bp, Artificial
  Probe
cctccctgagctgtaaatttgttct

SEQ ID NO: 212319 - DNA, 25 bp, Artificial
  Probe
acatcaaagctgctgtgcagccttt

SEQ ID NO: 212320 - DNA, 25 bp, Artificial
  Probe
tgctgtgcagccttttaaccacctg

SEQ ID NO: 212321 - DNA, 25 bp, Artificial
  Probe
agcatctacgtctagttcctgagct

SEQ ID NO: 212322 - DNA, 25 bp, Artificial
  Probe
caaagctgctgtgcagccttttaac

SEQ ID NO: 212323 - DNA, 25 bp, Artificial
  Probe
aagctgctgtgcagccttttaacca

SEQ ID NO: 212324 - DNA, 25 bp, Artificial
  Probe
tgctcctggacttctagagttcccc

SEQ ID NO: 212325 - DNA, 25 bp, Artificial
  Probe
gccagcatctacgtctagttcctga

SEQ ID NO: 212326 - DNA, 25 bp, Artificial
  Probe
aaagctgctgtgcagccttttaacc

SEQ ID NO: 212327 - DNA, 25 bp, Artificial
  Probe
tcagctgctcctggacttctagagt

SEQ ID NO: 212328 - DNA, 25 bp, Artificial
  Probe
tgtgcagccttttaaccacctgacc

SEQ ID NO: 212329 - DNA, 25 bp, Artificial
  Probe
cagctgctcctggacttctagagtt

SEQ ID NO: 212330 - DNA, 25 bp, Artificial
  Probe
atgcctccctgagctgtaaatttgt

SEQ ID NO: 212331 - DNA, 25 bp, Artificial
  Probe
tccctgagctgtaaatttgttctta

SEQ ID NO: 212332 - DNA, 25 bp, Artificial
  Probe
catgccagcatctacgtctagttcc

SEQ ID NO: 212333 - DNA, 25 bp, Artificial
  Probe
ctcagctgctcctggacttctagag

SEQ ID NO: 212334 - DNA, 25 bp, Artificial
  Probe
tgccagcatctacgtctagttcctg

SEQ ID NO: 212335 - DNA, 25 bp, Artificial
  Probe
tacatcaaagctgctgtgcagcctt

SEQ ID NO: 212336 - DNA, 25 bp, Artificial
  Probe
atgccagcatctacgtctagttcct

SEQ ID NO: 212337 - DNA, 25 bp, Artificial
  Probe
tccatgccagcatctacgtctagtt

SEQ ID NO: 212338 - DNA, 25 bp, Artificial
  Probe
cagcatctacgtctagttcctgagc

SEQ ID NO: 212339 - DNA, 25 bp, Artificial
  Probe
tgaatccatgccagcatctacgtct

SEQ ID NO: 212340 - DNA, 25 bp, Artificial
  Probe
cctcagctgctcctggacttctaga

SEQ ID NO: 212341 - DNA, 25 bp, Artificial
  Probe
gaagatcccagcagctgttcccctt

SEQ ID NO: 212342 - DNA, 25 bp, Artificial
  Probe
aggtgctccctcagctgctcctgga

SEQ ID NO: 212343 - DNA, 25 bp, Artificial
  Probe
ctgtgcagccttttaaccacctgac

SEQ ID NO: 212344 - DNA, 25 bp, Artificial
  Probe
aaggtgctccctcagctgctcctgg

SEQ ID NO: 212345 - DNA, 25 bp, Artificial
  Probe
aatccatgccagcatctacgtctag

SEQ ID NO: 212346 - DNA, 25 bp, Artificial
  Probe
tgggaagatcccagcagctgttccc

SEQ ID NO: 212347 - DNA, 25 bp, Artificial
  Probe
gatgcctccctgagctgtaaatttg

SEQ ID NO: 212348 - DNA, 25 bp, Artificial
  Probe
ctccctgagctgtaaatttgttctt

SEQ ID NO: 212349 - DNA, 25 bp, Artificial
  Probe
atccatgccagcatctacgtctagt

SEQ ID NO: 212350 - DNA, 25 bp, Artificial
  Probe
ggatgcctccctgagctgtaaattt

SEQ ID NO: 212351 - DNA, 25 bp, Artificial
  Probe
ctgctcctggacttctagagttccc

SEQ ID NO: 212352 - DNA, 25 bp, Artificial
  Probe
gaatccatgccagcatctacgtcta

SEQ ID NO: 212353 - DNA, 25 bp, Artificial
  Probe
gctgtgcagccttttaaccacctga

SEQ ID NO: 212354 - DNA, 25 bp, Artificial
  Probe
gcctccctgagctgtaaatttgttc

SEQ ID NO: 212355 - DNA, 25 bp, Artificial
  Probe
tttggggctcctcttcctgcctttc

SEQ ID NO: 212356 - DNA, 25 bp, Artificial
  Probe
gggaacattccagtcttgggaaaag

SEQ ID NO: 212357 - DNA, 25 bp, Artificial
  Probe
ctttatctttatctgcgggatgatt

SEQ ID NO: 212358 - DNA, 25 bp, Artificial
  Probe
catctgttattgacaaggggaacat

SEQ ID NO: 212359 - DNA, 25 bp, Artificial
  Probe
gaaagcctttatctttatctgcggg

SEQ ID NO: 212360 - DNA, 25 bp, Artificial
  Probe
cagttgggtgtttggggctcctctt

SEQ ID NO: 212361 - DNA, 25 bp, Artificial
  Probe
ccagtagcttcattacagctaattg

SEQ ID NO: 212362 - DNA, 25 bp, Artificial
  Probe
ccaacacttctgaaactgtgacctg

SEQ ID NO: 212363 - DNA, 25 bp, Artificial
  Probe
ttcattacagctaattgcagttggg

SEQ ID NO: 212364 - DNA, 25 bp, Artificial
  Probe
gcatgctagaccaacacttctgaaa

SEQ ID NO: 212365 - DNA, 25 bp, Artificial
  Probe
tgcctgacttgatgtaaggaatcca

SEQ ID NO: 212366 - DNA, 25 bp, Artificial
  Probe
gcaccagtagcttcattacagctaa

SEQ ID NO: 212367 - DNA, 25 bp, Artificial
  Probe
tcaggcatgctagaccaacacttct

SEQ ID NO: 212368 - DNA, 25 bp, Artificial
  Probe
gtcccatctgttattgacaagggga

SEQ ID NO: 212369 - DNA, 25 bp, Artificial
  Probe
tagaccaacacttctgaaactgtga

SEQ ID NO: 212370 - DNA, 25 bp, Artificial
  Probe
ccaacagtatcgtgcttactatgga

SEQ ID NO: 212371 - DNA, 25 bp, Artificial
  Probe
ctgaaagcctttatctttatctgcg

SEQ ID NO: 212372 - DNA, 25 bp, Artificial
  Probe
ggaatccacaggtcccatctgttat

SEQ ID NO: 212373 - DNA, 25 bp, Artificial
  Probe
tccacaggtcccatctgttattgac

SEQ ID NO: 212374 - DNA, 25 bp, Artificial
  Probe
ctgcctttcacaattgcctgacttg

SEQ ID NO: 212375 - DNA, 25 bp, Artificial
  Probe
ctccaacagtatcgtgcttactatg

SEQ ID NO: 212376 - DNA, 25 bp, Artificial
  Probe
gcctgacttgatgtaaggaatccac

SEQ ID NO: 212377 - DNA, 25 bp, Artificial
  Probe
agtagcttcattacagctaattgca

SEQ ID NO: 212378 - DNA, 25 bp, Artificial
  Probe
tggcaagcagtcaggcatgctagac

SEQ ID NO: 212379 - DNA, 25 bp, Artificial
  Probe
cattacagctaattgcagttgggtg

SEQ ID NO: 212380 - DNA, 25 bp, Artificial
  Probe
tcacaattgcctgacttgatgtaag

SEQ ID NO: 212381 - DNA, 25 bp, Artificial
  Probe
tctgttattgacaaggggaacattc

SEQ ID NO: 212382 - DNA, 25 bp, Artificial
  Probe
gcatgttctggcaagcagtcaggca

SEQ ID NO: 212383 - DNA, 25 bp, Artificial
  Probe
aagcctttatctttatctgcgggat

SEQ ID NO: 212384 - DNA, 25 bp, Artificial
  Probe
tgctagaccaacacttctgaaactg

SEQ ID NO: 212385 - DNA, 25 bp, Artificial
  Probe
tctggcaagcagtcaggcatgctag

SEQ ID NO: 212386 - DNA, 25 bp, Artificial
  Probe
cacaattgcctgacttgatgtaagg

SEQ ID NO: 212387 - DNA, 25 bp, Artificial
  Probe
ctgaaactgtgacctggacaagcac

SEQ ID NO: 212388 - DNA, 25 bp, Artificial
  Probe
ttctgaaactgtgacctggacaagc

SEQ ID NO: 212389 - DNA, 25 bp, Artificial
  Probe
acttctgaaactgtgacctggacaa

SEQ ID NO: 212390 - DNA, 25 bp, Artificial
  Probe
gtgacctggacaagcaccagtagct

SEQ ID NO: 212391 - DNA, 25 bp, Artificial
  Probe
ggtgtttggggctcctcttcctgcc

SEQ ID NO: 212392 - DNA, 25 bp, Artificial
  Probe
ttgcctgacttgatgtaaggaatcc

SEQ ID NO: 212393 - DNA, 25 bp, Artificial
  Probe
cctggacaagcaccagtagcttcat

SEQ ID NO: 212394 - DNA, 25 bp, Artificial
  Probe
aagcagtcaggcatgctagaccaac

SEQ ID NO: 212395 - DNA, 25 bp, Artificial
  Probe
aggtcccatctgttattgacaaggg

SEQ ID NO: 212396 - DNA, 25 bp, Artificial
  Probe
gaccaacacttctgaaactgtgacc

SEQ ID NO: 212397 - DNA, 25 bp, Artificial
  Probe
caattgcctgacttgatgtaaggaa

SEQ ID NO: 212398 - DNA, 25 bp, Artificial
  Probe
acaagcaccagtagcttcattacag

SEQ ID NO: 212399 - DNA, 25 bp, Artificial
  Probe
tgtaaggaatccacaggtcccatct

SEQ ID NO: 212400 - DNA, 25 bp, Artificial
  Probe
gcctttcacaattgcctgacttgat

SEQ ID NO: 212401 - DNA, 25 bp, Artificial
  Probe
cagctactgtgctatattgacttta

SEQ ID NO: 212402 - DNA, 25 bp, Artificial
  Probe
caattgaacagctactgtgctatat

SEQ ID NO: 212403 - DNA, 25 bp, Artificial
  Probe
ctacaattgaacagctactgtgcta

SEQ ID NO: 212404 - DNA, 25 bp, Artificial
  Probe
agaccttgtttctgcatgaaactag

SEQ ID NO: 212405 - DNA, 25 bp, Artificial
  Probe
attgaacagctactgtgctatattg

SEQ ID NO: 212406 - DNA, 25 bp, Artificial
  Probe
gtttctgcatgaaactagttgcaaa

SEQ ID NO: 212407 - DNA, 25 bp, Artificial
  Probe
gataatttgcacagcaatgtacatg

SEQ ID NO: 212408 - DNA, 25 bp, Artificial
  Probe
acagcaatgtacatgcttatctgta

SEQ ID NO: 212409 - DNA, 25 bp, Artificial
  Probe
gcacagcaatgtacatgcttatctg

SEQ ID NO: 212410 - DNA, 25 bp, Artificial
  Probe
tatctacaattgaacagctactgtg

SEQ ID NO: 212411 - DNA, 25 bp, Artificial
  Probe
ataatttgcacagcaatgtacatgc

SEQ ID NO: 212412 - DNA, 25 bp, Artificial
  Probe
aatttgcacagcaatgtacatgctt

SEQ ID NO: 212413 - DNA, 25 bp, Artificial
  Probe
tgcacagcaatgtacatgcttatct

SEQ ID NO: 212414 - DNA, 25 bp, Artificial
  Probe
acaattgaacagctactgtgctata

SEQ ID NO: 212415 - DNA, 25 bp, Artificial
  Probe
ctttacttggataccagtttgaata

SEQ ID NO: 212416 - DNA, 25 bp, Artificial
  Probe
atttgcacagcaatgtacatgctta

SEQ ID NO: 212417 - DNA, 25 bp, Artificial
  Probe
aatgtacatgcttatctgtaaatgc

SEQ ID NO: 212418 - DNA, 25 bp, Artificial
  Probe
tgagcagaccttgtttctgcatgaa

SEQ ID NO: 212419 - DNA, 25 bp, Artificial
  Probe
caatgtacatgcttatctgtaaatg

SEQ ID NO: 212420 - DNA, 25 bp, Artificial
  Probe
aacagctactgtgctatattgactt

SEQ ID NO: 212421 - DNA, 25 bp, Artificial
  Probe
tgtatctacaattgaacagctactg

SEQ ID NO: 212422 - DNA, 25 bp, Artificial
  Probe
tctacaattgaacagctactgtgct

SEQ ID NO: 212423 - DNA, 25 bp, Artificial
  Probe
gtagtactgagcagaccttgtttct

SEQ ID NO: 212424 - DNA, 25 bp, Artificial
  Probe
ttgcacagcaatgtacatgcttatc

SEQ ID NO: 212425 - DNA, 25 bp, Artificial
  Probe
cagaccttgtttctgcatgaaacta

SEQ ID NO: 212426 - DNA, 25 bp, Artificial
  Probe
ttctgcatgaaactagttgcaaaac

SEQ ID NO: 212427 - DNA, 25 bp, Artificial
  Probe
ttgtttctgcatgaaactagttgca

SEQ ID NO: 212428 - DNA, 25 bp, Artificial
  Probe
tattggtagtactgagcagaccttg

SEQ ID NO: 212429 - DNA, 25 bp, Artificial
  Probe
gaacagctactgtgctatattgact

SEQ ID NO: 212430 - DNA, 25 bp, Artificial
  Probe
agcagaccttgtttctgcatgaaac

SEQ ID NO: 212431 - DNA, 25 bp, Artificial
  Probe
agtactgagcagaccttgtttctgc

SEQ ID NO: 212432 - DNA, 25 bp, Artificial
  Probe
cagcaatgtacatgcttatctgtaa

SEQ ID NO: 212433 - DNA, 25 bp, Artificial
  Probe
atgcttatctgtaaatgcgaaccta

SEQ ID NO: 212434 - DNA, 25 bp, Artificial
  Probe
tacatgcttatctgtaaatgcgaac

SEQ ID NO: 212435 - DNA, 25 bp, Artificial
  Probe
ttgaacagctactgtgctatattga

SEQ ID NO: 212436 - DNA, 25 bp, Artificial
  Probe
ctactgtgctatattgactttattg

SEQ ID NO: 212437 - DNA, 25 bp, Artificial
  Probe
gtatctacaattgaacagctactgt

SEQ ID NO: 212438 - DNA, 25 bp, Artificial
  Probe
actttattggtagtactgagcagac

SEQ ID NO: 212439 - DNA, 25 bp, Artificial
  Probe
ctgagcagaccttgtttctgcatga

SEQ ID NO: 212440 - DNA, 25 bp, Artificial
  Probe
tactgagcagaccttgtttctgcat

SEQ ID NO: 212441 - DNA, 25 bp, Artificial
  Probe
tttattggtagtactgagcagacct

SEQ ID NO: 212442 - DNA, 25 bp, Artificial
  Probe
gcaatgtacatgcttatctgtaaat

SEQ ID NO: 212443 - DNA, 25 bp, Artificial
  Probe
cttgtttctgcatgaaactagttgc

SEQ ID NO: 212444 - DNA, 25 bp, Artificial
  Probe
tgcttatctgtaaatgcgaacctaa

SEQ ID NO: 212445 - DNA, 25 bp, Artificial
  Probe
gctactgtgctatattgactttatt

SEQ ID NO: 212446 - DNA, 25 bp, Artificial
  Probe
tgtacatgcttatctgtaaatgcga

SEQ ID NO: 212447 - DNA, 25 bp, Artificial
  Probe
agggatctgcatctgcggagacaat

SEQ ID NO: 212448 - DNA, 25 bp, Artificial
  Probe
aacctgcagctgtaaaacctgtcgt

SEQ ID NO: 212449 - DNA, 25 bp, Artificial
  Probe
aaacctgtcgtaaaagctgctgccc

SEQ ID NO: 212450 - DNA, 25 bp, Artificial
  Probe
gagggatctgcatctgcggagacaa

SEQ ID NO: 212451 - DNA, 25 bp, Artificial
  Probe
tgcacaacctgcagctgtaaaacct

SEQ ID NO: 212452 - DNA, 25 bp, Artificial
  Probe
caacctgcagctgtaaaacctgtcg

SEQ ID NO: 212453 - DNA, 25 bp, Artificial
  Probe
cagctgtaaaacctgtcgtaaaagc

SEQ ID NO: 212454 - DNA, 25 bp, Artificial
  Probe
tctgcggagacaattgcaaatgcac

SEQ ID NO: 212455 - DNA, 25 bp, Artificial
  Probe
ctgtacctgagacaagggattggat

SEQ ID NO: 212456 - DNA, 25 bp, Artificial
  Probe
cctgcagctgtaaaacctgtcgtaa

SEQ ID NO: 212457 - DNA, 25 bp, Artificial
  Probe
accctggggaatgcacgtgtatgtc

SEQ ID NO: 212458 - DNA, 25 bp, Artificial
  Probe
gaccatggaccctggggaatgcacg

SEQ ID NO: 212459 - DNA, 25 bp, Artificial
  Probe
accacgctgtacctgagacaaggga

SEQ ID NO: 212460 - DNA, 25 bp, Artificial
  Probe
gtaaaacctgtcgtaaaagctgctg

SEQ ID NO: 212461 - DNA, 25 bp, Artificial
  Probe
tggaccctggggaatgcacgtgtat

SEQ ID NO: 212462 - DNA, 25 bp, Artificial
  Probe
cgctgtacctgagacaagggattgg

SEQ ID NO: 212463 - DNA, 25 bp, Artificial
  Probe
gggaccacgctgtacctgagacaag

SEQ ID NO: 212464 - DNA, 25 bp, Artificial
  Probe
ctgcatctgcggagacaattgcaaa

SEQ ID NO: 212465 - DNA, 25 bp, Artificial
  Probe
caaatgcacaacctgcagctgtaaa

SEQ ID NO: 212466 - DNA, 25 bp, Artificial
  Probe
tgcacgtgtatgtctggagggatct

SEQ ID NO: 212467 - DNA, 25 bp, Artificial
  Probe
acgtgtatgtctggagggatctgca

SEQ ID NO: 212468 - DNA, 25 bp, Artificial
  Probe
atgtctggagggatctgcatctgcg

SEQ ID NO: 212469 - DNA, 25 bp, Artificial
  Probe
aagggaccacgctgtacctgagaca

SEQ ID NO: 212470 - DNA, 25 bp, Artificial
  Probe
tgcagctgtaaaacctgtcgtaaaa

SEQ ID NO: 212471 - DNA, 25 bp, Artificial
  Probe
atgcacgtgtatgtctggagggatc

SEQ ID NO: 212472 - DNA, 25 bp, Artificial
  Probe
ccacccatggcactgggagagatcc

SEQ ID NO: 212473 - DNA, 25 bp, Artificial
  Probe
aggctgcatctgcaaagggggctca

SEQ ID NO: 212474 - DNA, 25 bp, Artificial
  Probe
cacgtgtatgtctggagggatctgc

SEQ ID NO: 212475 - DNA, 25 bp, Artificial
  Probe
cacccatggcactgggagagatcct

SEQ ID NO: 212476 - DNA, 25 bp, Artificial
  Probe
agctgtaaaacctgtcgtaaaagct

SEQ ID NO: 212477 - DNA, 25 bp, Artificial
  Probe
ccctggggaatgcacgtgtatgtct

SEQ ID NO: 212478 - DNA, 25 bp, Artificial
  Probe
acaacctgcagctgtaaaacctgtc

SEQ ID NO: 212479 - DNA, 25 bp, Artificial
  Probe
catctgcggagacaattgcaaatgc

SEQ ID NO: 212480 - DNA, 25 bp, Artificial
  Probe
ccacgctgtacctgagacaagggat

SEQ ID NO: 212481 - DNA, 25 bp, Artificial
  Probe
aatgcacaacctgcagctgtaaaac

SEQ ID NO: 212482 - DNA, 25 bp, Artificial
  Probe
gtgtatgtctggagggatctgcatc

SEQ ID NO: 212483 - DNA, 25 bp, Artificial
  Probe
tgtaaaacctgtcgtaaaagctgct

SEQ ID NO: 212484 - DNA, 25 bp, Artificial
  Probe
gaccacgctgtacctgagacaaggg

SEQ ID NO: 212485 - DNA, 25 bp, Artificial
  Probe
ttgcaaatgcacaacctgcagctgt

SEQ ID NO: 212486 - DNA, 25 bp, Artificial
  Probe
aattgcaaatgcacaacctgcagct

SEQ ID NO: 212487 - DNA, 25 bp, Artificial
  Probe
aaatgcacaacctgcagctgtaaaa

SEQ ID NO: 212488 - DNA, 25 bp, Artificial
  Probe
gaccctggggaatgcacgtgtatgt

SEQ ID NO: 212489 - DNA, 25 bp, Artificial
  Probe
gggatctgcatctgcggagacaatt

SEQ ID NO: 212490 - DNA, 25 bp, Artificial
  Probe
caattgcaaatgcacaacctgcagc

SEQ ID NO: 212491 - DNA, 25 bp, Artificial
  Probe
gctgtaaaacctgtcgtaaaagctg

SEQ ID NO: 212492 - DNA, 25 bp, Artificial
  Probe
cgtgtatgtctggagggatctgcat

SEQ ID NO: 212493 - DNA, 25 bp, Artificial
  Probe
ctaacctcggactggcctgtgtgtg

SEQ ID NO: 212494 - DNA, 25 bp, Artificial
  Probe
ccagtccaaggctgctggaacaagt

SEQ ID NO: 212495 - DNA, 25 bp, Artificial
  Probe
ttcccaaaaaatgtggaggtccacg

SEQ ID NO: 212496 - DNA, 25 bp, Artificial
  Probe
gaggtccacggtgtttgccagacga

SEQ ID NO: 212497 - DNA, 25 bp, Artificial
  Probe
tgatggtgccaaaggggccttgtct

SEQ ID NO: 212498 - DNA, 25 bp, Artificial
  Probe
ttctaatacactttctgtctgtgtg

SEQ ID NO: 212499 - DNA, 25 bp, Artificial
  Probe
ggaaaatgcccaaactatgatacat

SEQ ID NO: 212500 - DNA, 25 bp, Artificial
  Probe
gtccacggtgtttgccagacgacat

SEQ ID NO: 212501 - DNA, 25 bp, Artificial
  Probe
cgaggggcttaccagtccaaggctg

SEQ ID NO: 212502 - DNA, 25 bp, Artificial
  Probe
atgttgcatgatatttgtgcacact

SEQ ID NO: 212503 - DNA, 25 bp, Artificial
  Probe
tcctaatgttgcatgatatttgtgc

SEQ ID NO: 212504 - DNA, 25 bp, Artificial
  Probe
acaagtgatgcctctaacctcggac

SEQ ID NO: 212505 - DNA, 25 bp, Artificial
  Probe
aggggcttaccagtccaaggctgct

SEQ ID NO: 212506 - DNA, 25 bp, Artificial
  Probe
acggtgtttgccagacgacatgtgt

SEQ ID NO: 212507 - DNA, 25 bp, Artificial
  Probe
ttacgtgtgaattcccaaaaaatgt

SEQ ID NO: 212508 - DNA, 25 bp, Artificial
  Probe
ctaatgttgcatgatatttgtgcac

SEQ ID NO: 212509 - DNA, 25 bp, Artificial
  Probe
aaatgtggaggtccacggtgtttgc

SEQ ID NO: 212510 - DNA, 25 bp, Artificial
  Probe
gtttctaatacactttctgtctgtg

SEQ ID NO: 212511 - DNA, 25 bp, Artificial
  Probe
ctaatacactttctgtctgtgtgtc

SEQ ID NO: 212512 - DNA, 25 bp, Artificial
  Probe
tctgcataggggtgctgcgagctta

SEQ ID NO: 212513 - DNA, 25 bp, Artificial
  Probe
tgaattcccaaaaaatgtggaggtc

SEQ ID NO: 212514 - DNA, 25 bp, Artificial
  Probe
cagtttcacctttggaaaatgccca

SEQ ID NO: 212515 - DNA, 25 bp, Artificial
  Probe
gccagacgacatgtgtctgacaata

SEQ ID NO: 212516 - DNA, 25 bp, Artificial
  Probe
cggactggcctgtgtgtgtttgtat

SEQ ID NO: 212517 - DNA, 25 bp, Artificial
  Probe
ccttgtctgcataggggtgctgcga

SEQ ID NO: 212518 - DNA, 25 bp, Artificial
  Probe
aatacactttctgtctgtgtgtctg

SEQ ID NO: 212519 - DNA, 25 bp, Artificial
  Probe
atgcctctaacctcggactggcctg

SEQ ID NO: 212520 - DNA, 25 bp, Artificial
  Probe
ctctaacctcggactggcctgtgtg

SEQ ID NO: 212521 - DNA, 25 bp, Artificial
  Probe
gggcttaccagtccaaggctgctgg

SEQ ID NO: 212522 - DNA, 25 bp, Artificial
  Probe
ctgcatattttgtacaggaaataac

SEQ ID NO: 212523 - DNA, 25 bp, Artificial
  Probe
tgtttgccagacgacatgtgtctga

SEQ ID NO: 212524 - DNA, 25 bp, Artificial
  Probe
ccaaaggggccttgtctgcataggg

SEQ ID NO: 212525 - DNA, 25 bp, Artificial
  Probe
gccaaaggggccttgtctgcatagg

SEQ ID NO: 212526 - DNA, 25 bp, Artificial
  Probe
ctgcataggggtgctgcgagcttac

SEQ ID NO: 212527 - DNA, 25 bp, Artificial
  Probe
ttctgtctgtgtgtctgctcctaat

SEQ ID NO: 212528 - DNA, 25 bp, Artificial
  Probe
gcgagcttacgtgtgaattcccaaa

SEQ ID NO: 212529 - DNA, 25 bp, Artificial
  Probe
aggctgctggaacaagtgatgcctc

SEQ ID NO: 212530 - DNA, 25 bp, Artificial
  Probe
aaagcctgcatattttgtacaggaa

SEQ ID NO: 212531 - DNA, 25 bp, Artificial
  Probe
ttgcatgatatttgtgcacacttat

SEQ ID NO: 212532 - DNA, 25 bp, Artificial
  Probe
gcacgaggggcttaccagtccaagg

SEQ ID NO: 212533 - DNA, 25 bp, Artificial
  Probe
atgtggaggtccacggtgtttgcca

SEQ ID NO: 212534 - DNA, 25 bp, Artificial
  Probe
ggtgctgcgagcttacgtgtgaatt

SEQ ID NO: 212535 - DNA, 25 bp, Artificial
  Probe
acctttggaaaatgcccaaactatg

SEQ ID NO: 212536 - DNA, 25 bp, Artificial
  Probe
tggaaaatgcccaaactatgataca

SEQ ID NO: 212537 - DNA, 25 bp, Artificial
  Probe
tatacagtttcacctttggaaaatg

SEQ ID NO: 212538 - DNA, 25 bp, Artificial
  Probe
ctcggactggcctgtgtgtgtttgt

SEQ ID NO: 212539 - DNA, 25 bp, Artificial
  Probe
gtagaacactgcagctgtcgccagg

SEQ ID NO: 212540 - DNA, 25 bp, Artificial
  Probe
ctacagatcacaggaagttagtttg

SEQ ID NO: 212541 - DNA, 25 bp, Artificial
  Probe
ggactccacactagacatttcagtc

SEQ ID NO: 212542 - DNA, 25 bp, Artificial
  Probe
cggtaccgtggtagaacactgcagc

SEQ ID NO: 212543 - DNA, 25 bp, Artificial
  Probe
gtcacactgaagagccgtcacattc

SEQ ID NO: 212544 - DNA, 25 bp, Artificial
  Probe
gtggtagaacactgcagctgtcgcc

SEQ ID NO: 212545 - DNA, 25 bp, Artificial
  Probe
gaagcgcacgcctctgactctggta

SEQ ID NO: 212546 - DNA, 25 bp, Artificial
  Probe
aagcgcacgcctctgactctggtat

SEQ ID NO: 212547 - DNA, 25 bp, Artificial
  Probe
acagaatggcggtaccgtggtagaa

SEQ ID NO: 212548 - DNA, 25 bp, Artificial
  Probe
tagacatttcagtcacactgaagag

SEQ ID NO: 212549 - DNA, 25 bp, Artificial
  Probe
cacgcctctgactctggtatacgtt

SEQ ID NO: 212550 - DNA, 25 bp, Artificial
  Probe
ataatggttactacagatcacagga

SEQ ID NO: 212551 - DNA, 25 bp, Artificial
  Probe
agacatcataatggttactacagat

SEQ ID NO: 212552 - DNA, 25 bp, Artificial
  Probe
aatacgttcctgattgtacatactg

SEQ ID NO: 212553 - DNA, 25 bp, Artificial
  Probe
acactgcagctgtcgccagggcgac

SEQ ID NO: 212554 - DNA, 25 bp, Artificial
  Probe
agagactggcactgctgaggactcc

SEQ ID NO: 212555 - DNA, 25 bp, Artificial
  Probe
ggagtgtatctgtcttaccaagatc

SEQ ID NO: 212556 - DNA, 25 bp, Artificial
  Probe
taccaagatcgatggcaaggtgtag

SEQ ID NO: 212557 - DNA, 25 bp, Artificial
  Probe
ttcatggacttttacttctgttggc

SEQ ID NO: 212558 - DNA, 25 bp, Artificial
  Probe
tgtatctgtcttaccaagatcgatg

SEQ ID NO: 212559 - DNA, 25 bp, Artificial
  Probe
ggcggtaccgtggtagaacactgca

SEQ ID NO: 212560 - DNA, 25 bp, Artificial
  Probe
atggcggtaccgtggtagaacactg

SEQ ID NO: 212561 - DNA, 25 bp, Artificial
  Probe
gtcgcgtttttcatggacttttact

SEQ ID NO: 212562 - DNA, 25 bp, Artificial
  Probe
ctctggtatacgttcatgtgttctt

SEQ ID NO: 212563 - DNA, 25 bp, Artificial
  Probe
taaatcacagaatggcggtaccgtg

SEQ ID NO: 212564 - DNA, 25 bp, Artificial
  Probe
actgaagagccgtcacattccacag

SEQ ID NO: 212565 - DNA, 25 bp, Artificial
  Probe
aatggttactacagatcacaggaag

SEQ ID NO: 212566 - DNA, 25 bp, Artificial
  Probe
gtttttccaatggagtgtatctgtc

SEQ ID NO: 212567 - DNA, 25 bp, Artificial
  Probe
acatttcagtcacactgaagagccg

SEQ ID NO: 212568 - DNA, 25 bp, Artificial
  Probe
acattccacagtgacatggtcgcgt

SEQ ID NO: 212569 - DNA, 25 bp, Artificial
  Probe
gacatggtcgcgtttttcatggact

SEQ ID NO: 212570 - DNA, 25 bp, Artificial
  Probe
acagtgacatggtcgcgtttttcat

SEQ ID NO: 212571 - DNA, 25 bp, Artificial
  Probe
cagaatggcggtaccgtggtagaac

SEQ ID NO: 212572 - DNA, 25 bp, Artificial
  Probe
cgtcacattccacagtgacatggtc

SEQ ID NO: 212573 - DNA, 25 bp, Artificial
  Probe
gcaaaacgtaaatcacagaatggcg

SEQ ID NO: 212574 - DNA, 25 bp, Artificial
  Probe
agccgtcacattccacagtgacatg

SEQ ID NO: 212575 - DNA, 25 bp, Artificial
  Probe
tggtcgcgtttttcatggactttta

SEQ ID NO: 212576 - DNA, 25 bp, Artificial
  Probe
accgtggtagaacactgcagctgtc

SEQ ID NO: 212577 - DNA, 25 bp, Artificial
  Probe
ggacttttacttctgttggccttat

SEQ ID NO: 212578 - DNA, 25 bp, Artificial
  Probe
ctggtatacgttcatgtgttcttta

SEQ ID NO: 212579 - DNA, 25 bp, Artificial
  Probe
gtagcgaagcgcacgcctctgactc

SEQ ID NO: 212580 - DNA, 25 bp, Artificial
  Probe
tcagtcacactgaagagccgtcaca

SEQ ID NO: 212581 - DNA, 25 bp, Artificial
  Probe
actagacatttcagtcacactgaag

SEQ ID NO: 212582 - DNA, 25 bp, Artificial
  Probe
ttccaatggagtgtatctgtcttac

SEQ ID NO: 212583 - DNA, 25 bp, Artificial
  Probe
aaacgtaaatcacagaatggcggta

SEQ ID NO: 212584 - DNA, 25 bp, Artificial
  Probe
ggttactacagatcacaggaagtta

SEQ ID NO: 212585 - DNA, 25 bp, Artificial
  Probe
tcttttactctgtgtagactttaga

SEQ ID NO: 212586 - DNA, 25 bp, Artificial
  Probe
aggctctccacatcactatagtgta

SEQ ID NO: 212587 - DNA, 25 bp, Artificial
  Probe
ttcacagtgcagcttgcagtccgtt

SEQ ID NO: 212588 - DNA, 25 bp, Artificial
  Probe
gaggaggctctccacatcactatag

SEQ ID NO: 212589 - DNA, 25 bp, Artificial
  Probe
tgggtgctagaggaggctctccaca

SEQ ID NO: 212590 - DNA, 25 bp, Artificial
  Probe
tctaatccagagatgggccaattca

SEQ ID NO: 212591 - DNA, 25 bp, Artificial
  Probe
aagtctaatccagagatgggccaat

SEQ ID NO: 212592 - DNA, 25 bp, Artificial
  Probe
gatgggccaattcagaattgactat

SEQ ID NO: 212593 - DNA, 25 bp, Artificial
  Probe
tgacacatagcatgagttatttgac

SEQ ID NO: 212594 - DNA, 25 bp, Artificial
  Probe
ggccaattcagaattgactataatt

SEQ ID NO: 212595 - DNA, 25 bp, Artificial
  Probe
aaagtctaatccagagatgggccaa

SEQ ID NO: 212596 - DNA, 25 bp, Artificial
  Probe
tcacagtgcagcttgcagtccgttg

SEQ ID NO: 212597 - DNA, 25 bp, Artificial
  Probe
cacactgaaatgtattcagaaacag

SEQ ID NO: 212598 - DNA, 25 bp, Artificial
  Probe
ggctctccacatcactatagtgtaa

SEQ ID NO: 212599 - DNA, 25 bp, Artificial
  Probe
gtgcagcttgcagtccgttgctgaa

SEQ ID NO: 212600 - DNA, 25 bp, Artificial
  Probe
ttcttcacagtgcagcttgcagtcc

SEQ ID NO: 212601 - DNA, 25 bp, Artificial
  Probe
cttcacagtgcagcttgcagtccgt

SEQ ID NO: 212602 - DNA, 25 bp, Artificial
  Probe
acagtgcagcttgcagtccgttgct

SEQ ID NO: 212603 - DNA, 25 bp, Artificial
  Probe
acacatagcatgagttatttgactt

SEQ ID NO: 212604 - DNA, 25 bp, Artificial
  Probe
gattacagactttccattagtgtct

SEQ ID NO: 212605 - DNA, 25 bp, Artificial
  Probe
tgcagcttgcagtccgttgctgaaa

SEQ ID NO: 212606 - DNA, 25 bp, Artificial
  Probe
agtctaatccagagatgggccaatt

SEQ ID NO: 212607 - DNA, 25 bp, Artificial
  Probe
agaggaggctctccacatcactata

SEQ ID NO: 212608 - DNA, 25 bp, Artificial
  Probe
actctgtgtagactttagaaagtct

SEQ ID NO: 212609 - DNA, 25 bp, Artificial
  Probe
ctagaggaggctctccacatcacta

SEQ ID NO: 212610 - DNA, 25 bp, Artificial
  Probe
ctttagaaagtctaatccagagatg

SEQ ID NO: 212611 - DNA, 25 bp, Artificial
  Probe
aggaggctctccacatcactatagt

SEQ ID NO: 212612 - DNA, 25 bp, Artificial
  Probe
tactctgtgtagactttagaaagtc

SEQ ID NO: 212613 - DNA, 25 bp, Artificial
  Probe
gaggctctccacatcactatagtgt

SEQ ID NO: 212614 - DNA, 25 bp, Artificial
  Probe
cacagtgcagcttgcagtccgttgc

SEQ ID NO: 212615 - DNA, 25 bp, Artificial
  Probe
gcattttcttcacagtgcagcttgc

SEQ ID NO: 212616 - DNA, 25 bp, Artificial
  Probe
cattttcttcacagtgcagcttgca

SEQ ID NO: 212617 - DNA, 25 bp, Artificial
  Probe
agatgggccaattcagaattgacta

SEQ ID NO: 212618 - DNA, 25 bp, Artificial
  Probe
tttcttcacagtgcagcttgcagtc

SEQ ID NO: 212619 - DNA, 25 bp, Artificial
  Probe
cttttactctgtgtagactttagaa

SEQ ID NO: 212620 - DNA, 25 bp, Artificial
  Probe
gaaagtctaatccagagatgggcca

SEQ ID NO: 212621 - DNA, 25 bp, Artificial
  Probe
ctaatccagagatgggccaattcag

SEQ ID NO: 212622 - DNA, 25 bp, Artificial
  Probe
tgcattttcttcacagtgcagcttg

SEQ ID NO: 212623 - DNA, 25 bp, Artificial
  Probe
cttgcagtccgttgctgaaaattat

SEQ ID NO: 212624 - DNA, 25 bp, Artificial
  Probe
atgcattttcttcacagtgcagctt

SEQ ID NO: 212625 - DNA, 25 bp, Artificial
  Probe
attttcttcacagtgcagcttgcag

SEQ ID NO: 212626 - DNA, 25 bp, Artificial
  Probe
ctctgtgtagactttagaaagtcta

SEQ ID NO: 212627 - DNA, 25 bp, Artificial
  Probe
ttttcttcacagtgcagcttgcagt

SEQ ID NO: 212628 - DNA, 25 bp, Artificial
  Probe
cacatagcatgagttatttgacttt

SEQ ID NO: 212629 - DNA, 25 bp, Artificial
  Probe
atgggccaattcagaattgactata

SEQ ID NO: 212630 - DNA, 25 bp, Artificial
  Probe
gcttgcagtccgttgctgaaaatta

SEQ ID NO: 212631 - DNA, 25 bp, Artificial
  Probe
aagagtcatgtctttcacttttaag

SEQ ID NO: 212632 - DNA, 25 bp, Artificial
  Probe
atgaaaatggcttccttttgacttt

SEQ ID NO: 212633 - DNA, 25 bp, Artificial
  Probe
tgtgtcacacacttgtgtaccaact

SEQ ID NO: 212634 - DNA, 25 bp, Artificial
  Probe
agagtcatgtctttcacttttaagt

SEQ ID NO: 212635 - DNA, 25 bp, Artificial
  Probe
tggcttccttttgactttgggatgt

SEQ ID NO: 212636 - DNA, 25 bp, Artificial
  Probe
atggcttccttttgactttgggatg

SEQ ID NO: 212637 - DNA, 25 bp, Artificial
  Probe
gacaaactggtatctcattatgtaa

SEQ ID NO: 212638 - DNA, 25 bp, Artificial
  Probe
ggtgtgtcacacacttgtgtaccaa

SEQ ID NO: 212639 - DNA, 25 bp, Artificial
  Probe
tgcaaacaattactaggttaactag

SEQ ID NO: 212640 - DNA, 25 bp, Artificial
  Probe
aatggcttccttttgactttgggat

SEQ ID NO: 212641 - DNA, 25 bp, Artificial
  Probe
tgtctttcacttttaagttcaggga

SEQ ID NO: 212642 - DNA, 25 bp, Artificial
  Probe
gagtcatgtctttcacttttaagtt

SEQ ID NO: 212643 - DNA, 25 bp, Artificial
  Probe
ctttcacttttaagttcagggagca

SEQ ID NO: 212644 - DNA, 25 bp, Artificial
  Probe
tctttcacttttaagttcagggagc

SEQ ID NO: 212645 - DNA, 25 bp, Artificial
  Probe
caaactggtatctcattatgtaatg

SEQ ID NO: 212646 - DNA, 25 bp, Artificial
  Probe
gagacaaactggtatctcattatgt

SEQ ID NO: 212647 - DNA, 25 bp, Artificial
  Probe
atgtctttcacttttaagttcaggg

SEQ ID NO: 212648 - DNA, 25 bp, Artificial
  Probe
ggcttccttttgactttgggatgtt

SEQ ID NO: 212649 - DNA, 25 bp, Artificial
  Probe
gtctttcacttttaagttcagggag

SEQ ID NO: 212650 - DNA, 25 bp, Artificial
  Probe
gtgtgtcacacacttgtgtaccaac

SEQ ID NO: 212651 - DNA, 25 bp, Artificial
  Probe
tgaaaatggcttccttttgactttg

SEQ ID NO: 212652 - DNA, 25 bp, Artificial
  Probe
tatgaaaatggcttccttttgactt

SEQ ID NO: 212653 - DNA, 25 bp, Artificial
  Probe
catgtctttcacttttaagttcagg

SEQ ID NO: 212654 - DNA, 25 bp, Artificial
  Probe
agacaaactggtatctcattatgta

SEQ ID NO: 212655 - DNA, 25 bp, Artificial
  Probe
gggtgtgtcacacacttgtgtacca

SEQ ID NO: 212656 - DNA, 25 bp, Artificial
  Probe
ctttatgccaaggacaaggacagag

SEQ ID NO: 212657 - DNA, 25 bp, Artificial
  Probe
cttgcttcaatataatccagggtgg

SEQ ID NO: 212658 - DNA, 25 bp, Artificial
  Probe
tgccaaggacaaggacagagacaca

SEQ ID NO: 212659 - DNA, 25 bp, Artificial
  Probe
gacatgtattgtgtccccacatctt

SEQ ID NO: 212660 - DNA, 25 bp, Artificial
  Probe
atgagggagctcagctcaactcttt

SEQ ID NO: 212661 - DNA, 25 bp, Artificial
  Probe
accagtgacatgtattgtgtcccca

SEQ ID NO: 212662 - DNA, 25 bp, Artificial
  Probe
aagaggctccaatacagctggttgt

SEQ ID NO: 212663 - DNA, 25 bp, Artificial
  Probe
cttcaatataatccagggtggtata

SEQ ID NO: 212664 - DNA, 25 bp, Artificial
  Probe
agaataactttatgccaaggacaag

SEQ ID NO: 212665 - DNA, 25 bp, Artificial
  Probe
tatgccaaggacaaggacagagaca

SEQ ID NO: 212666 - DNA, 25 bp, Artificial
  Probe
tcatcataagggttccaaagaggct

SEQ ID NO: 212667 - DNA, 25 bp, Artificial
  Probe
acagctggttgttgtgtttcgcttt

SEQ ID NO: 212668 - DNA, 25 bp, Artificial
  Probe
ataagggttccaaagaggctccaat

SEQ ID NO: 212669 - DNA, 25 bp, Artificial
  Probe
tgagggagctcagctcaactctttc

SEQ ID NO: 212670 - DNA, 25 bp, Artificial
  Probe
tggtaccagtgacatgtattgtgtc

SEQ ID NO: 212671 - DNA, 25 bp, Artificial
  Probe
tcataagggttccaaagaggctcca

SEQ ID NO: 212672 - DNA, 25 bp, Artificial
  Probe
ttcctcatggtaccagtgacatgta

SEQ ID NO: 212673 - DNA, 25 bp, Artificial
  Probe
agggagctcagctcaactctttcct

SEQ ID NO: 212674 - DNA, 25 bp, Artificial
  Probe
gctccaatacagctggttgttgtgt

SEQ ID NO: 212675 - DNA, 25 bp, Artificial
  Probe
tcatggtaccagtgacatgtattgt

SEQ ID NO: 212676 - DNA, 25 bp, Artificial
  Probe
acccttcctcatggtaccagtgaca

SEQ ID NO: 212677 - DNA, 25 bp, Artificial
  Probe
taactttatgccaaggacaaggaca

SEQ ID NO: 212678 - DNA, 25 bp, Artificial
  Probe
aatacagctggttgttgtgtttcgc

SEQ ID NO: 212679 - DNA, 25 bp, Artificial
  Probe
gtaccagtgacatgtattgtgtccc

SEQ ID NO: 212680 - DNA, 25 bp, Artificial
  Probe
acttttactcagctcatcataaggg

SEQ ID NO: 212681 - DNA, 25 bp, Artificial
  Probe
gtgatgtcaacacttttactcagct

SEQ ID NO: 212682 - DNA, 25 bp, Artificial
  Probe
gtgttaacacccttcctcatggtac

SEQ ID NO: 212683 - DNA, 25 bp, Artificial
  Probe
tgtgatgtcaacacttttactcagc

SEQ ID NO: 212684 - DNA, 25 bp, Artificial
  Probe
aatttacagagatgctactgttcct

SEQ ID NO: 212685 - DNA, 25 bp, Artificial
  Probe
cagctcatcataagggttccaaaga

SEQ ID NO: 212686 - DNA, 25 bp, Artificial
  Probe
gttccttgcttcaatataatccagg

SEQ ID NO: 212687 - DNA, 25 bp, Artificial
  Probe
gagatgctactgttccttgcttcaa

SEQ ID NO: 212688 - DNA, 25 bp, Artificial
  Probe
actcagctcatcataagggttccaa

SEQ ID NO: 212689 - DNA, 25 bp, Artificial
  Probe
gtgtgatgtcaacacttttactcag

SEQ ID NO: 212690 - DNA, 25 bp, Artificial
  Probe
ttccaaagaggctccaatacagctg

SEQ ID NO: 212691 - DNA, 25 bp, Artificial
  Probe
actctgacttgataattgttgaagc

SEQ ID NO: 212692 - DNA, 25 bp, Artificial
  Probe
ccaaagaggctccaatacagctggt

SEQ ID NO: 212693 - DNA, 25 bp, Artificial
  Probe
tgacatgtattgtgtccccacatct

SEQ ID NO: 212694 - DNA, 25 bp, Artificial
  Probe
tttacagagatgctactgttccttg

SEQ ID NO: 212695 - DNA, 25 bp, Artificial
  Probe
gctcagctcaactctttcctgaaga

SEQ ID NO: 212696 - DNA, 25 bp, Artificial
  Probe
ttatgccaaggacaaggacagagac

SEQ ID NO: 212697 - DNA, 25 bp, Artificial
  Probe
agggttccaaagaggctccaataca

SEQ ID NO: 212698 - DNA, 25 bp, Artificial
  Probe
gatgctactgttccttgcttcaata

SEQ ID NO: 212699 - DNA, 25 bp, Artificial
  Probe
caaagaggctccaatacagctggtt

SEQ ID NO: 212700 - DNA, 25 bp, Artificial
  Probe
cctcatggtaccagtgacatgtatt

SEQ ID NO: 212701 - DNA, 25 bp, Artificial
  Probe
catggtaccagtgacatgtattgtg

SEQ ID NO: 212702 - DNA, 25 bp, Artificial
  Probe
ttggacctctgtggaaaccctagaa

SEQ ID NO: 212703 - DNA, 25 bp, Artificial
  Probe
gtagaactcttaagatctttgggaa

SEQ ID NO: 212704 - DNA, 25 bp, Artificial
  Probe
gaactcttaagatctttgggaaggc

SEQ ID NO: 212705 - DNA, 25 bp, Artificial
  Probe
atctttggacctctgtggaaaccct

SEQ ID NO: 212706 - DNA, 25 bp, Artificial
  Probe
gtggccagtagaactcttaagatct

SEQ ID NO: 212707 - DNA, 25 bp, Artificial
  Probe
gtaaatagcatttagggtggccagt

SEQ ID NO: 212708 - DNA, 25 bp, Artificial
  Probe
ggcttaacatctttggacctctgtg

SEQ ID NO: 212709 - DNA, 25 bp, Artificial
  Probe
ttagggtggccagtagaactcttaa

SEQ ID NO: 212710 - DNA, 25 bp, Artificial
  Probe
taagatctttgggaaggcttaacat

SEQ ID NO: 212711 - DNA, 25 bp, Artificial
  Probe
tggccagtagaactcttaagatctt

SEQ ID NO: 212712 - DNA, 25 bp, Artificial
  Probe
agaactcttaagatctttgggaagg

SEQ ID NO: 212713 - DNA, 25 bp, Artificial
  Probe
gaaggcttaacatctttggacctct

SEQ ID NO: 212714 - DNA, 25 bp, Artificial
  Probe
aggcttaacatctttggacctctgt

SEQ ID NO: 212715 - DNA, 25 bp, Artificial
  Probe
atagcatttagggtggccagtagaa

SEQ ID NO: 212716 - DNA, 25 bp, Artificial
  Probe
ttaagatctttgggaaggcttaaca

SEQ ID NO: 212717 - DNA, 25 bp, Artificial
  Probe
aaggcttaacatctttggacctctg

SEQ ID NO: 212718 - DNA, 25 bp, Artificial
  Probe
aaacagtaacacagcggccagtaaa

SEQ ID NO: 212719 - DNA, 25 bp, Artificial
  Probe
cttaacatctttggacctctgtgga

SEQ ID NO: 212720 - DNA, 25 bp, Artificial
  Probe
atttagggtggccagtagaactctt

SEQ ID NO: 212721 - DNA, 25 bp, Artificial
  Probe
ctttggacctctgtggaaaccctag

SEQ ID NO: 212722 - DNA, 25 bp, Artificial
  Probe
taacatctttggacctctgtggaaa

SEQ ID NO: 212723 - DNA, 25 bp, Artificial
  Probe
acatctttggacctctgtggaaacc

SEQ ID NO: 212724 - DNA, 25 bp, Artificial
  Probe
tttggacctctgtggaaaccctaga

SEQ ID NO: 212725 - DNA, 25 bp, Artificial
  Probe
aagatctttgggaaggcttaacatc

SEQ ID NO: 212726 - DNA, 25 bp, Artificial
  Probe
agcatttagggtggccagtagaact

SEQ ID NO: 212727 - DNA, 25 bp, Artificial
  Probe
agatctttgggaaggcttaacatct

SEQ ID NO: 212728 - DNA, 25 bp, Artificial
  Probe
tagcatttagggtggccagtagaac

SEQ ID NO: 212729 - DNA, 25 bp, Artificial
  Probe
acagcggccagtaaatagcatttag

SEQ ID NO: 212730 - DNA, 25 bp, Artificial
  Probe
actcttaagatctttgggaaggctt

SEQ ID NO: 212731 - DNA, 25 bp, Artificial
  Probe
tagaactcttaagatctttgggaag

SEQ ID NO: 212732 - DNA, 25 bp, Artificial
  Probe
tttagggtggccagtagaactctta

SEQ ID NO: 212733 - DNA, 25 bp, Artificial
  Probe
tctttggacctctgtggaaacccta

SEQ ID NO: 212734 - DNA, 25 bp, Artificial
  Probe
tcttaagatctttgggaaggcttaa

SEQ ID NO: 212735 - DNA, 25 bp, Artificial
  Probe
atctttgggaaggcttaacatcttt

SEQ ID NO: 212736 - DNA, 25 bp, Artificial
  Probe
aatagcatttagggtggccagtaga

SEQ ID NO: 212737 - DNA, 25 bp, Artificial
  Probe
ttaacatctttggacctctgtggaa

SEQ ID NO: 212738 - DNA, 25 bp, Artificial
  Probe
ggaaggcttaacatctttggacctc

SEQ ID NO: 212739 - DNA, 25 bp, Artificial
  Probe
ctcttaagatctttgggaaggctta

SEQ ID NO: 212740 - DNA, 25 bp, Artificial
  Probe
aactcttaagatctttgggaaggct

SEQ ID NO: 212741 - DNA, 25 bp, Artificial
  Probe
taacacagcggccagtaaatagcat

SEQ ID NO: 212742 - DNA, 25 bp, Artificial
  Probe
acacagcggccagtaaatagcattt

SEQ ID NO: 212743 - DNA, 25 bp, Artificial
  Probe
gcttaacatctttggacctctgtgg

SEQ ID NO: 212744 - DNA, 25 bp, Artificial
  Probe
aacacagcggccagtaaatagcatt

SEQ ID NO: 212745 - DNA, 25 bp, Artificial
  Probe
cacagcggccagtaaatagcattta

SEQ ID NO: 212746 - DNA, 25 bp, Artificial
  Probe
catctttggacctctgtggaaaccc

SEQ ID NO: 212747 - DNA, 25 bp, Artificial
  Probe
aacatctttggacctctgtggaaac

SEQ ID NO: 212748 - DNA, 25 bp, Artificial
  Probe
tcagcaatactatcgcaactggttg

SEQ ID NO: 212749 - DNA, 25 bp, Artificial
  Probe
ctgtccttccgttgtacaacaatgc

SEQ ID NO: 212750 - DNA, 25 bp, Artificial
  Probe
ggcctcggacactgaatcttcggta

SEQ ID NO: 212751 - DNA, 25 bp, Artificial
  Probe
cgcaactggttgaatcaggattcgg

SEQ ID NO: 212752 - DNA, 25 bp, Artificial
  Probe
tacactagagggttgctgtccttcc

SEQ ID NO: 212753 - DNA, 25 bp, Artificial
  Probe
ctttttatagctgtaagtacacaga

SEQ ID NO: 212754 - DNA, 25 bp, Artificial
  Probe
tcggcctcggacactgaatcttcgg

SEQ ID NO: 212755 - DNA, 25 bp, Artificial
  Probe
actagagggttgctgtccttccgtt

SEQ ID NO: 212756 - DNA, 25 bp, Artificial
  Probe
cggcctcggacactgaatcttcggt

SEQ ID NO: 212757 - DNA, 25 bp, Artificial
  Probe
ggctctcagccctgtcagagacaag

SEQ ID NO: 212758 - DNA, 25 bp, Artificial
  Probe
caatactatcgcaactggttgaatc

SEQ ID NO: 212759 - DNA, 25 bp, Artificial
  Probe
cactagagggttgctgtccttccgt

SEQ ID NO: 212760 - DNA, 25 bp, Artificial
  Probe
tatcgcaactggttgaatcaggatt

SEQ ID NO: 212761 - DNA, 25 bp, Artificial
  Probe
tcgcaactggttgaatcaggattcg

SEQ ID NO: 212762 - DNA, 25 bp, Artificial
  Probe
attcggcctcggacactgaatcttc

SEQ ID NO: 212763 - DNA, 25 bp, Artificial
  Probe
gtccttccgttgtacaacaatgcct

SEQ ID NO: 212764 - DNA, 25 bp, Artificial
  Probe
tggttgaatcaggattcggcctcgg

SEQ ID NO: 212765 - DNA, 25 bp, Artificial
  Probe
ttgatcttaacttcagattgtgttc

SEQ ID NO: 212766 - DNA, 25 bp, Artificial
  Probe
tcggacactgaatcttcggtatctc

SEQ ID NO: 212767 - DNA, 25 bp, Artificial
  Probe
gttgaatcaggattcggcctcggac

SEQ ID NO: 212768 - DNA, 25 bp, Artificial
  Probe
gccttctatcataaccagcatgtgc

SEQ ID NO: 212769 - DNA, 25 bp, Artificial
  Probe
tatcataaccagcatgtgcataagg

SEQ ID NO: 212770 - DNA, 25 bp, Artificial
  Probe
caggattcggcctcggacactgaat

SEQ ID NO: 212771 - DNA, 25 bp, Artificial
  Probe
gtgaattggggctctcagccctgtc

SEQ ID NO: 212772 - DNA, 25 bp, Artificial
  Probe
ttgaatcaggattcggcctcggaca

SEQ ID NO: 212773 - DNA, 25 bp, Artificial
  Probe
atcgcaactggttgaatcaggattc

SEQ ID NO: 212774 - DNA, 25 bp, Artificial
  Probe
ggttgctgtccttccgttgtacaac

SEQ ID NO: 212775 - DNA, 25 bp, Artificial
  Probe
tgtccttccgttgtacaacaatgcc

SEQ ID NO: 212776 - DNA, 25 bp, Artificial
  Probe
gacactgaatcttcggtatctcaat

SEQ ID NO: 212777 - DNA, 25 bp, Artificial
  Probe
gaattggggctctcagccctgtcag

SEQ ID NO: 212778 - DNA, 25 bp, Artificial
  Probe
cggacactgaatcttcggtatctca

SEQ ID NO: 212779 - DNA, 25 bp, Artificial
  Probe
tctttttatagctgtaagtacacag

SEQ ID NO: 212780 - DNA, 25 bp, Artificial
  Probe
ctggttgaatcaggattcggcctcg

SEQ ID NO: 212781 - DNA, 25 bp, Artificial
  Probe
agccttctatcataaccagcatgtg

SEQ ID NO: 212782 - DNA, 25 bp, Artificial
  Probe
ctcagccctgtcagagacaagtaac

SEQ ID NO: 212783 - DNA, 25 bp, Artificial
  Probe
atactatcgcaactggttgaatcag

SEQ ID NO: 212784 - DNA, 25 bp, Artificial
  Probe
tcataaccagcatgtgcataaggaa

SEQ ID NO: 212785 - DNA, 25 bp, Artificial
  Probe
ccctcagcaatactatcgcaactgg

SEQ ID NO: 212786 - DNA, 25 bp, Artificial
  Probe
aattggggctctcagccctgtcaga

SEQ ID NO: 212787 - DNA, 25 bp, Artificial
  Probe
ctatcataaccagcatgtgcataag

SEQ ID NO: 212788 - DNA, 25 bp, Artificial
  Probe
gctgtccttccgttgtacaacaatg

SEQ ID NO: 212789 - DNA, 25 bp, Artificial
  Probe
ctctcagccctgtcagagacaagta

SEQ ID NO: 212790 - DNA, 25 bp, Artificial
  Probe
ggacactgaatcttcggtatctcaa

SEQ ID NO: 212791 - DNA, 25 bp, Artificial
  Probe
attggggctctcagccctgtcagag

SEQ ID NO: 212792 - DNA, 25 bp, Artificial
  Probe
ctagagggttgctgtccttccgttg

SEQ ID NO: 212793 - DNA, 25 bp, Artificial
  Probe
gttgtacaacaatgcctttaatatg

SEQ ID NO: 212794 - DNA, 25 bp, Artificial
  Probe
atattagtcacacttaagtgcctgc

SEQ ID NO: 212795 - DNA, 25 bp, Artificial
  Probe
ctgtgagttctcactgggccagcgg

SEQ ID NO: 212796 - DNA, 25 bp, Artificial
  Probe
ttatctatggtttaggaagtgccac

SEQ ID NO: 212797 - DNA, 25 bp, Artificial
  Probe
ccactcactgtctgtgcatcgagct

SEQ ID NO: 212798 - DNA, 25 bp, Artificial
  Probe
tattagtcacacttaagtgcctgct

SEQ ID NO: 212799 - DNA, 25 bp, Artificial
  Probe
agtcacacttaagtgcctgcttagg

SEQ ID NO: 212800 - DNA, 25 bp, Artificial
  Probe
ctccttcaatcagtttgttcaaagg

SEQ ID NO: 212801 - DNA, 25 bp, Artificial
  Probe
agggcccttatattagtcacactta

SEQ ID NO: 212802 - DNA, 25 bp, Artificial
  Probe
ttaggaagtgccacactgatatagt

SEQ ID NO: 212803 - DNA, 25 bp, Artificial
  Probe
gggcccttatattagtcacacttaa

SEQ ID NO: 212804 - DNA, 25 bp, Artificial
  Probe
gtgcatcgagctgagcccctgtgag

SEQ ID NO: 212805 - DNA, 25 bp, Artificial
  Probe
tcactgtctgtgcatcgagctgagc

SEQ ID NO: 212806 - DNA, 25 bp, Artificial
  Probe
aagtgccacactgatatagtaagcc

SEQ ID NO: 212807 - DNA, 25 bp, Artificial
  Probe
ccttcaatcagtttgttcaaaggta

SEQ ID NO: 212808 - DNA, 25 bp, Artificial
  Probe
gaagtgccacactgatatagtaagc

SEQ ID NO: 212809 - DNA, 25 bp, Artificial
  Probe
tatctatggtttaggaagtgccaca

SEQ ID NO: 212810 - DNA, 25 bp, Artificial
  Probe
cacttaagtgcctgcttagggaagg

SEQ ID NO: 212811 - DNA, 25 bp, Artificial
  Probe
acttaagtgcctgcttagggaaggt

SEQ ID NO: 212812 - DNA, 25 bp, Artificial
  Probe
tcaatcagtttgttcaaaggtagac

SEQ ID NO: 212813 - DNA, 25 bp, Artificial
  Probe
ctgtgcatcgagctgagcccctgtg

SEQ ID NO: 212814 - DNA, 25 bp, Artificial
  Probe
cttcaatcagtttgttcaaaggtag

SEQ ID NO: 212815 - DNA, 25 bp, Artificial
  Probe
gagctgagcccctgtgagttctcac

SEQ ID NO: 212816 - DNA, 25 bp, Artificial
  Probe
tgcatcgagctgagcccctgtgagt

SEQ ID NO: 212817 - DNA, 25 bp, Artificial
  Probe
actcactgtctgtgcatcgagctga

SEQ ID NO: 212818 - DNA, 25 bp, Artificial
  Probe
tgagcccctgtgagttctcactggg

SEQ ID NO: 212819 - DNA, 25 bp, Artificial
  Probe
tccttcaatcagtttgttcaaaggt

SEQ ID NO: 212820 - DNA, 25 bp, Artificial
  Probe
tctgtgcatcgagctgagcccctgt

SEQ ID NO: 212821 - DNA, 25 bp, Artificial
  Probe
cactgtctgtgcatcgagctgagcc

SEQ ID NO: 212822 - DNA, 25 bp, Artificial
  Probe
ctgtctgtgcatcgagctgagcccc

SEQ ID NO: 212823 - DNA, 25 bp, Artificial
  Probe
gctgagcccctgtgagttctcactg

SEQ ID NO: 212824 - DNA, 25 bp, Artificial
  Probe
cctgtgagttctcactgggccagcg

SEQ ID NO: 212825 - DNA, 25 bp, Artificial
  Probe
caatcagtttgttcaaaggtagact

SEQ ID NO: 212826 - DNA, 25 bp, Artificial
  Probe
tgtgcatcgagctgagcccctgtga

SEQ ID NO: 212827 - DNA, 25 bp, Artificial
  Probe
aagggcccttatattagtcacactt

SEQ ID NO: 212828 - DNA, 25 bp, Artificial
  Probe
tatattagtcacacttaagtgcctg

SEQ ID NO: 212829 - DNA, 25 bp, Artificial
  Probe
gtcacacttaagtgcctgcttaggg

SEQ ID NO: 212830 - DNA, 25 bp, Artificial
  Probe
aggaagtgccacactgatatagtaa

SEQ ID NO: 212831 - DNA, 25 bp, Artificial
  Probe
ctgagcccctgtgagttctcactgg

SEQ ID NO: 212832 - DNA, 25 bp, Artificial
  Probe
aaagggcccttatattagtcacact

SEQ ID NO: 212833 - DNA, 25 bp, Artificial
  Probe
tgccacactgatatagtaagccacc

SEQ ID NO: 212834 - DNA, 25 bp, Artificial
  Probe
cttaagtgcctgcttagggaaggta

SEQ ID NO: 212835 - DNA, 25 bp, Artificial
  Probe
gtgccacactgatatagtaagccac

SEQ ID NO: 212836 - DNA, 25 bp, Artificial
  Probe
taggaagtgccacactgatatagta

SEQ ID NO: 212837 - DNA, 25 bp, Artificial
  Probe
gtctgtgcatcgagctgagcccctg

SEQ ID NO: 212838 - DNA, 25 bp, Artificial
  Probe
ggcccttatattagtcacacttaag

SEQ ID NO: 212839 - DNA, 25 bp, Artificial
  Probe
agtgccacactgatatagtaagcca

SEQ ID NO: 212840 - DNA, 25 bp, Artificial
  Probe
cacagcacaggtttagaaacaacct

SEQ ID NO: 212841 - DNA, 25 bp, Artificial
  Probe
aatatccagagctgttagcactgag

SEQ ID NO: 212842 - DNA, 25 bp, Artificial
  Probe
ctttgtatcatcaagaatgacagtt

SEQ ID NO: 212843 - DNA, 25 bp, Artificial
  Probe
actataggggcaccttggctcccaa

SEQ ID NO: 212844 - DNA, 25 bp, Artificial
  Probe
gggcaccttggctcccaatatcaga

SEQ ID NO: 212845 - DNA, 25 bp, Artificial
  Probe
gttagcactgagcaaataccctctt

SEQ ID NO: 212846 - DNA, 25 bp, Artificial
  Probe
tccacagcacaggtttagaaacaac

SEQ ID NO: 212847 - DNA, 25 bp, Artificial
  Probe
atctttgtatcatcaagaatgacag

SEQ ID NO: 212848 - DNA, 25 bp, Artificial
  Probe
cactataggggcaccttggctccca

SEQ ID NO: 212849 - DNA, 25 bp, Artificial
  Probe
agaatcttcaaggtcaccccaggag

SEQ ID NO: 212850 - DNA, 25 bp, Artificial
  Probe
gtatcatcaagaatgacagtttcat

SEQ ID NO: 212851 - DNA, 25 bp, Artificial
  Probe
cagagctgttagcactgagcaaata

SEQ ID NO: 212852 - DNA, 25 bp, Artificial
  Probe
gtccacagcacaggtttagaaacaa

SEQ ID NO: 212853 - DNA, 25 bp, Artificial
  Probe
gctgttagcactgagcaaataccct

SEQ ID NO: 212854 - DNA, 25 bp, Artificial
  Probe
caaggtcaccccaggagttttctat

SEQ ID NO: 212855 - DNA, 25 bp, Artificial
  Probe
gtccatctttgtatcatcaagaatg

SEQ ID NO: 212856 - DNA, 25 bp, Artificial
  Probe
tatcatcaagaatgacagtttcatc

SEQ ID NO: 212857 - DNA, 25 bp, Artificial
  Probe
tgttagcactgagcaaataccctct

SEQ ID NO: 212858 - DNA, 25 bp, Artificial
  Probe
tatccagagctgttagcactgagca

SEQ ID NO: 212859 - DNA, 25 bp, Artificial
  Probe
gtgtccatctttgtatcatcaagaa

SEQ ID NO: 212860 - DNA, 25 bp, Artificial
  Probe
gaatcttcaaggtcaccccaggagt

SEQ ID NO: 212861 - DNA, 25 bp, Artificial
  Probe
tccagagctgttagcactgagcaaa

SEQ ID NO: 212862 - DNA, 25 bp, Artificial
  Probe
agtccacagcacaggtttagaaaca

SEQ ID NO: 212863 - DNA, 25 bp, Artificial
  Probe
agcactataggggcaccttggctcc

SEQ ID NO: 212864 - DNA, 25 bp, Artificial
  Probe
ccacagcacaggtttagaaacaacc

SEQ ID NO: 212865 - DNA, 25 bp, Artificial
  Probe
agctgttagcactgagcaaataccc

SEQ ID NO: 212866 - DNA, 25 bp, Artificial
  Probe
ctgttagcactgagcaaataccctc

SEQ ID NO: 212867 - DNA, 25 bp, Artificial
  Probe
atcttcaaggtcaccccaggagttt

SEQ ID NO: 212868 - DNA, 25 bp, Artificial
  Probe
tcagaatcttcaaggtcaccccagg

SEQ ID NO: 212869 - DNA, 25 bp, Artificial
  Probe
ccagagctgttagcactgagcaaat

SEQ ID NO: 212870 - DNA, 25 bp, Artificial
  Probe
gagtccacagcacaggtttagaaac

SEQ ID NO: 212871 - DNA, 25 bp, Artificial
  Probe
aatcttcaaggtcaccccaggagtt

SEQ ID NO: 212872 - DNA, 25 bp, Artificial
  Probe
gagctgttagcactgagcaaatacc

SEQ ID NO: 212873 - DNA, 25 bp, Artificial
  Probe
ggtttagaaacaacctctggaggag

SEQ ID NO: 212874 - DNA, 25 bp, Artificial
  Probe
atatccagagctgttagcactgagc

SEQ ID NO: 212875 - DNA, 25 bp, Artificial
  Probe
ctataggggcaccttggctcccaat

SEQ ID NO: 212876 - DNA, 25 bp, Artificial
  Probe
agagctgttagcactgagcaaatac

SEQ ID NO: 212877 - DNA, 25 bp, Artificial
  Probe
ctcctcttccttctcagaatcttca

SEQ ID NO: 212878 - DNA, 25 bp, Artificial
  Probe
gcagttctcttctttttcctccttt

SEQ ID NO: 212879 - DNA, 25 bp, Artificial
  Probe
tgtatcatcaagaatgacagtttca

SEQ ID NO: 212880 - DNA, 25 bp, Artificial
  Probe
cgtgtccatctttgtatcatcaaga

SEQ ID NO: 212881 - DNA, 25 bp, Artificial
  Probe
cagaatcttcaaggtcaccccagga

SEQ ID NO: 212882 - DNA, 25 bp, Artificial
  Probe
tctttgtatcatcaagaatgacagt

SEQ ID NO: 212883 - DNA, 25 bp, Artificial
  Probe
ccgtgtccatctttgtatcatcaag

SEQ ID NO: 212884 - DNA, 25 bp, Artificial
  Probe
ctcagaatcttcaaggtcaccccag

SEQ ID NO: 212885 - DNA, 25 bp, Artificial
  Probe
atccagagctgttagcactgagcaa

SEQ ID NO: 212886 - DNA, 25 bp, Artificial
  Probe
ccagcgattgtcaaacatagaaagg

SEQ ID NO: 212887 - DNA, 25 bp, Artificial
  Probe
ttgggtttggcttgcccttggcttt

SEQ ID NO: 212888 - DNA, 25 bp, Artificial
  Probe
ggctgcctcttttctatcctgtttc

SEQ ID NO: 212889 - DNA, 25 bp, Artificial
  Probe
ggctttcctcacagcaatgcaatcc

SEQ ID NO: 212890 - DNA, 25 bp, Artificial
  Probe
tgcaatcctcctacattatcagtgg

SEQ ID NO: 212891 - DNA, 25 bp, Artificial
  Probe
cagcgccaatgaagcaaagactcct

SEQ ID NO: 212892 - DNA, 25 bp, Artificial
  Probe
ttgcccttggctttcctcacagcaa

SEQ ID NO: 212893 - DNA, 25 bp, Artificial
  Probe
tttggcttgcccttggctttcctca

SEQ ID NO: 212894 - DNA, 25 bp, Artificial
  Probe
gtctacctacagtcggccctgagca

SEQ ID NO: 212895 - DNA, 25 bp, Artificial
  Probe
cttgtgggtcagctggttagtttgc

SEQ ID NO: 212896 - DNA, 25 bp, Artificial
  Probe
tttgagtaccgttggttcaacaaag

SEQ ID NO: 212897 - DNA, 25 bp, Artificial
  Probe
atgctcttcaaccttttgctacagg

SEQ ID NO: 212898 - DNA, 25 bp, Artificial
  Probe
attatcagtggctgcctcttttcta

SEQ ID NO: 212899 - DNA, 25 bp, Artificial
  Probe
gccttactactttgggtttggcttg

SEQ ID NO: 212900 - DNA, 25 bp, Artificial
  Probe
actgctttgagtaccgttggttcaa

SEQ ID NO: 212901 - DNA, 25 bp, Artificial
  Probe
tccacaagacggtctacctacagtc

SEQ ID NO: 212902 - DNA, 25 bp, Artificial
  Probe
gactcctggaaaagcatatcttttc

SEQ ID NO: 212903 - DNA, 25 bp, Artificial
  Probe
taccgttggttcaacaaaggaattg

SEQ ID NO: 212904 - DNA, 25 bp, Artificial
  Probe
aatgcaccagcgattgtcaaacata

SEQ ID NO: 212905 - DNA, 25 bp, Artificial
  Probe
ccatcttgtgggtcagctggttagt

SEQ ID NO: 212906 - DNA, 25 bp, Artificial
  Probe
tggccttactactttgggtttggct

SEQ ID NO: 212907 - DNA, 25 bp, Artificial
  Probe
cccatccatcttgtgggtcagctgg

SEQ ID NO: 212908 - DNA, 25 bp, Artificial
  Probe
tcagtggctgcctcttttctatcct

SEQ ID NO: 212909 - DNA, 25 bp, Artificial
  Probe
gctgacatgctcttcaaccttttgc

SEQ ID NO: 212910 - DNA, 25 bp, Artificial
  Probe
cttttccttattcaggggatgtttg

SEQ ID NO: 212911 - DNA, 25 bp, Artificial
  Probe
gacttttccacaagacggtctacct

SEQ ID NO: 212912 - DNA, 25 bp, Artificial
  Probe
tactactttgggtttggcttgccct

SEQ ID NO: 212913 - DNA, 25 bp, Artificial
  Probe
gctcttcaaccttttgctacaggca

SEQ ID NO: 212914 - DNA, 25 bp, Artificial
  Probe
atcatcagcgccaatgaagcaaaga

SEQ ID NO: 212915 - DNA, 25 bp, Artificial
  Probe
aattgaaatgcaccagcgattgtca

SEQ ID NO: 212916 - DNA, 25 bp, Artificial
  Probe
caatgaagcaaagactcctggaaaa

SEQ ID NO: 212917 - DNA, 25 bp, Artificial
  Probe
tggtctttttaagcaacagactttt

SEQ ID NO: 212918 - DNA, 25 bp, Artificial
  Probe
aagcaacagacttttccacaagacg

SEQ ID NO: 212919 - DNA, 25 bp, Artificial
  Probe
actcactctactgctttgagtaccg

SEQ ID NO: 212920 - DNA, 25 bp, Artificial
  Probe
ctactttgggtttggcttgcccttg

SEQ ID NO: 212921 - DNA, 25 bp, Artificial
  Probe
tacagtcggccctgagcagctcatc

SEQ ID NO: 212922 - DNA, 25 bp, Artificial
  Probe
ttattcatcatcagcgccaatgaag

SEQ ID NO: 212923 - DNA, 25 bp, Artificial
  Probe
gctacaggcacttttccttattcag

SEQ ID NO: 212924 - DNA, 25 bp, Artificial
  Probe
ttggcttgcccttggctttcctcac

SEQ ID NO: 212925 - DNA, 25 bp, Artificial
  Probe
gtttgctgcatatgtctcttctcta

SEQ ID NO: 212926 - DNA, 25 bp, Artificial
  Probe
gaattgaaatgcaccagcgattgtc

SEQ ID NO: 212927 - DNA, 25 bp, Artificial
  Probe
tgggtcagctggttagtttgctgca

SEQ ID NO: 212928 - DNA, 25 bp, Artificial
  Probe
ttctccttggtggtctttttaagca

SEQ ID NO: 212929 - DNA, 25 bp, Artificial
  Probe
gatgtttgtgagtctcttccccatc

SEQ ID NO: 212930 - DNA, 25 bp, Artificial
  Probe
ctgagcagctcatcctccgcagaga

SEQ ID NO: 212931 - DNA, 25 bp, Artificial
  Probe
cgcctcttctccttggtggtctttt

SEQ ID NO: 212932 - DNA, 25 bp, Artificial
  Probe
aatccccctgacctgggctagtgga

SEQ ID NO: 212933 - DNA, 25 bp, Artificial
  Probe
cttctaccacctcagagcgcaggtt

SEQ ID NO: 212934 - DNA, 25 bp, Artificial
  Probe
catgatcttctaccacctcagagcg

SEQ ID NO: 212935 - DNA, 25 bp, Artificial
  Probe
ttgtcttcctcttggcatgcagaag

SEQ ID NO: 212936 - DNA, 25 bp, Artificial
  Probe
cacgctgctcccaagaacggaagaa

SEQ ID NO: 212937 - DNA, 25 bp, Artificial
  Probe
ttgtagcttcccttcctgcagatga

SEQ ID NO: 212938 - DNA, 25 bp, Artificial
  Probe
agtggttccactttgcctgtgtggg

SEQ ID NO: 212939 - DNA, 25 bp, Artificial
  Probe
ttccttggattccatcagagacttc

SEQ ID NO: 212940 - DNA, 25 bp, Artificial
  Probe
ctgagtatgggatgccctcagtgac

SEQ ID NO: 212941 - DNA, 25 bp, Artificial
  Probe
ccagactgttccattgagtggttcc

SEQ ID NO: 212942 - DNA, 25 bp, Artificial
  Probe
atggttttgcccacgctgctcccaa

SEQ ID NO: 212943 - DNA, 25 bp, Artificial
  Probe
cctgcagatgacatttgtcttcctc

SEQ ID NO: 212944 - DNA, 25 bp, Artificial
  Probe
tgatcttctaccacctcagagcgca

SEQ ID NO: 212945 - DNA, 25 bp, Artificial
  Probe
gtggatcccaacgaacccacatatt

SEQ ID NO: 212946 - DNA, 25 bp, Artificial
  Probe
cctgagtatgggatgccctcagtga

SEQ ID NO: 212947 - DNA, 25 bp, Artificial
  Probe
gaaataggtttccttggattccatc

SEQ ID NO: 212948 - DNA, 25 bp, Artificial
  Probe
atgtgttggatatgcctgtggatcc

SEQ ID NO: 212949 - DNA, 25 bp, Artificial
  Probe
gtgctcttccttttctccatgggga

SEQ ID NO: 212950 - DNA, 25 bp, Artificial
  Probe
acctcagagcgcaggttgtagcttc

SEQ ID NO: 212951 - DNA, 25 bp, Artificial
  Probe
caggttgtagcttcccttcctgcag

SEQ ID NO: 212952 - DNA, 25 bp, Artificial
  Probe
gaagccacaccatgcttcaccatga

SEQ ID NO: 212953 - DNA, 25 bp, Artificial
  Probe
tatgggatgccctcagtgacctttg

SEQ ID NO: 212954 - DNA, 25 bp, Artificial
  Probe
gagacttcttctgaatccccctgac

SEQ ID NO: 212955 - DNA, 25 bp, Artificial
  Probe
ttggattccatcagagacttcttct

SEQ ID NO: 212956 - DNA, 25 bp, Artificial
  Probe
gagtggttccactttgcctgtgtgg

SEQ ID NO: 212957 - DNA, 25 bp, Artificial
  Probe
ctgctcccaagaacggaagaagaaa

SEQ ID NO: 212958 - DNA, 25 bp, Artificial
  Probe
acccctctgatgtgttggatatgcc

SEQ ID NO: 212959 - DNA, 25 bp, Artificial
  Probe
ccacatattgcctttgtcaccaggt

SEQ ID NO: 212960 - DNA, 25 bp, Artificial
  Probe
tctaccacctcagagcgcaggttgt

SEQ ID NO: 212961 - DNA, 25 bp, Artificial
  Probe
caaccaagcctcgagggaaatggtt

SEQ ID NO: 212962 - DNA, 25 bp, Artificial
  Probe
ctgtgacaacccagactgttccatt

SEQ ID NO: 212963 - DNA, 25 bp, Artificial
  Probe
cagagacttcttctgaatccccctg

SEQ ID NO: 212964 - DNA, 25 bp, Artificial
  Probe
gattccatcagagacttcttctgaa

SEQ ID NO: 212965 - DNA, 25 bp, Artificial
  Probe
ctcagtgacctttggcagtgtccac

SEQ ID NO: 212966 - DNA, 25 bp, Artificial
  Probe
tggggctgacaaccaagcctcgagg

SEQ ID NO: 212967 - DNA, 25 bp, Artificial
  Probe
tatgcctgtggatcccaacgaaccc

SEQ ID NO: 212968 - DNA, 25 bp, Artificial
  Probe
ggacagtgcagtaccgtcatccctt

SEQ ID NO: 212969 - DNA, 25 bp, Artificial
  Probe
atccccctgacctgggctagtggac

SEQ ID NO: 212970 - DNA, 25 bp, Artificial
  Probe
gacaaccaagcctcgagggaaatgg

SEQ ID NO: 212971 - DNA, 25 bp, Artificial
  Probe
cagatgacatttgtcttcctcttgg

SEQ ID NO: 212972 - DNA, 25 bp, Artificial
  Probe
ctcctatggagagatgattggctgt

SEQ ID NO: 212973 - DNA, 25 bp, Artificial
  Probe
tggggacagtgcagtaccgtcatcc

SEQ ID NO: 212974 - DNA, 25 bp, Artificial
  Probe
ctctgatgtgttggatatgcctgtg

SEQ ID NO: 212975 - DNA, 25 bp, Artificial
  Probe
cctgacctgggctagtggacagaga

SEQ ID NO: 212976 - DNA, 25 bp, Artificial
  Probe
ttggatatgcctgtggatcccaacg

SEQ ID NO: 212977 - DNA, 25 bp, Artificial
  Probe
ctgtggatcccaacgaacccacata

SEQ ID NO: 212978 - DNA, 25 bp, Artificial
  Probe
cagcttgactaaggagtgctggcaa

SEQ ID NO: 212979 - DNA, 25 bp, Artificial
  Probe
ggcctaaagccatttcaagaacaaa

SEQ ID NO: 212980 - DNA, 25 bp, Artificial
  Probe
tggcctaaagccatttcaagaacaa

SEQ ID NO: 212981 - DNA, 25 bp, Artificial
  Probe
aggttttgattcctacacaggtgtc

SEQ ID NO: 212982 - DNA, 25 bp, Artificial
  Probe
actactctgaccatctagttatgga

SEQ ID NO: 212983 - DNA, 25 bp, Artificial
  Probe
ctcctttgtgagaaccactgcacgt

SEQ ID NO: 212984 - DNA, 25 bp, Artificial
  Probe
tctcctttgtgagaaccactgcacg

SEQ ID NO: 212985 - DNA, 25 bp, Artificial
  Probe
caggttttgattcctacacaggtgt

SEQ ID NO: 212986 - DNA, 25 bp, Artificial
  Probe
cattaccatcacttgtacactggga

SEQ ID NO: 212987 - DNA, 25 bp, Artificial
  Probe
gataaatcagccatggcctaaagcc

SEQ ID NO: 212988 - DNA, 25 bp, Artificial
  Probe
agcttgactaaggagtgctggcaat

SEQ ID NO: 212989 - DNA, 25 bp, Artificial
  Probe
tcagccatggcctaaagccatttca

SEQ ID NO: 212990 - DNA, 25 bp, Artificial
  Probe
accatcacttgtacactgggaaaaa

SEQ ID NO: 212991 - DNA, 25 bp, Artificial
  Probe
gccatggcctaaagccatttcaaga

SEQ ID NO: 212992 - DNA, 25 bp, Artificial
  Probe
ctttgtgagaaccactgcacgtatt

SEQ ID NO: 212993 - DNA, 25 bp, Artificial
  Probe
ggtgtcttcattaccatcacttgta

SEQ ID NO: 212994 - DNA, 25 bp, Artificial
  Probe
taccatcacttgtacactgggaaaa

SEQ ID NO: 212995 - DNA, 25 bp, Artificial
  Probe
ttcaggttttgattcctacacaggt

SEQ ID NO: 212996 - DNA, 25 bp, Artificial
  Probe
tgagcattccacaggactgagctga

SEQ ID NO: 212997 - DNA, 25 bp, Artificial
  Probe
tcattaccatcacttgtacactggg

SEQ ID NO: 212998 - DNA, 25 bp, Artificial
  Probe
tttgattcctacacaggtgtcttca

SEQ ID NO: 212999 - DNA, 25 bp, Artificial
  Probe
gattcctacacaggtgtcttcatta

SEQ ID NO: 213000 - DNA, 25 bp, Artificial
  Probe
tggtcagcttgactaaggagtgctg

SEQ ID NO: 213001 - DNA, 25 bp, Artificial
  Probe
gcttgactaaggagtgctggcaata

SEQ ID NO: 213002 - DNA, 25 bp, Artificial
  Probe
tgactactctgaccatctagttatg

SEQ ID NO: 213003 - DNA, 25 bp, Artificial
  Probe
agccatggcctaaagccatttcaag

SEQ ID NO: 213004 - DNA, 25 bp, Artificial
  Probe
ccatcacttgtacactgggaaaaaa

SEQ ID NO: 213005 - DNA, 25 bp, Artificial
  Probe
agcattccacaggactgagctgaac

SEQ ID NO: 213006 - DNA, 25 bp, Artificial
  Probe
gactactctgaccatctagttatgg

SEQ ID NO: 213007 - DNA, 25 bp, Artificial
  Probe
tcagcttgactaaggagtgctggca

SEQ ID NO: 213008 - DNA, 25 bp, Artificial
  Probe
tctgaccatctagttatggacttca

SEQ ID NO: 213009 - DNA, 25 bp, Artificial
  Probe
ttttcaggttttgattcctacacag

SEQ ID NO: 213010 - DNA, 25 bp, Artificial
  Probe
gttttgattcctacacaggtgtctt

SEQ ID NO: 213011 - DNA, 25 bp, Artificial
  Probe
caggtgtcttcattaccatcacttg

SEQ ID NO: 213012 - DNA, 25 bp, Artificial
  Probe
tgactaaggagtgctggcaataaac

SEQ ID NO: 213013 - DNA, 25 bp, Artificial
  Probe
actctgaccatctagttatggactt

SEQ ID NO: 213014 - DNA, 25 bp, Artificial
  Probe
tactctgaccatctagttatggact

SEQ ID NO: 213015 - DNA, 25 bp, Artificial
  Probe
ttttgattcctacacaggtgtcttc

SEQ ID NO: 213016 - DNA, 25 bp, Artificial
  Probe
cttgactaaggagtgctggcaataa

SEQ ID NO: 213017 - DNA, 25 bp, Artificial
  Probe
ctactctgaccatctagttatggac

SEQ ID NO: 213018 - DNA, 25 bp, Artificial
  Probe
ttgattcctacacaggtgtcttcat

SEQ ID NO: 213019 - DNA, 25 bp, Artificial
  Probe
attaccatcacttgtacactgggaa

SEQ ID NO: 213020 - DNA, 25 bp, Artificial
  Probe
gtcagcttgactaaggagtgctggc

SEQ ID NO: 213021 - DNA, 25 bp, Artificial
  Probe
ttggtcagcttgactaaggagtgct

SEQ ID NO: 213022 - DNA, 25 bp, Artificial
  Probe
acaaggacacctgtttaccaccttg

SEQ ID NO: 213023 - DNA, 25 bp, Artificial
  Probe
ttaccatcacttgtacactgggaaa

SEQ ID NO: 213024 - DNA, 25 bp, Artificial
  Probe
agccttttggcttcaagtgggaagg

SEQ ID NO: 213025 - DNA, 25 bp, Artificial
  Probe
gagccttttggcttcaagtgggaag

SEQ ID NO: 213026 - DNA, 25 bp, Artificial
  Probe
cgtgcctctgtcgaactgccccgga

SEQ ID NO: 213027 - DNA, 25 bp, Artificial
  Probe
ttcaagtgggaagggaggtgggaca

SEQ ID NO: 213028 - DNA, 25 bp, Artificial
  Probe
gtagatagagccttttggcttcaag

SEQ ID NO: 213029 - DNA, 25 bp, Artificial
  Probe
gcctctgtcgaactgccccggaaga

SEQ ID NO: 213030 - DNA, 25 bp, Artificial
  Probe
agtagatagagccttttggcttcaa

SEQ ID NO: 213031 - DNA, 25 bp, Artificial
  Probe
aactgccccggaagatcctcagctg

SEQ ID NO: 213032 - DNA, 25 bp, Artificial
  Probe
gcttcaagtgggaagggaggtggga

SEQ ID NO: 213033 - DNA, 25 bp, Artificial
  Probe
gccccggaagatcctcagctgagag

SEQ ID NO: 213034 - DNA, 25 bp, Artificial
  Probe
cggaagatcctcagctgagagtaga

SEQ ID NO: 213035 - DNA, 25 bp, Artificial
  Probe
tgcctctgtcgaactgccccggaag

SEQ ID NO: 213036 - DNA, 25 bp, Artificial
  Probe
cagttttcatccgtgcctctgtcga

SEQ ID NO: 213037 - DNA, 25 bp, Artificial
  Probe
gccttttggcttcaagtgggaaggg

SEQ ID NO: 213038 - DNA, 25 bp, Artificial
  Probe
cgagggcagttttcatccgtgcctc

SEQ ID NO: 213039 - DNA, 25 bp, Artificial
  Probe
agatagagccttttggcttcaagtg

SEQ ID NO: 213040 - DNA, 25 bp, Artificial
  Probe
atagagccttttggcttcaagtggg

SEQ ID NO: 213041 - DNA, 25 bp, Artificial
  Probe
gaagatcctcagctgagagtagata

SEQ ID NO: 213042 - DNA, 25 bp, Artificial
  Probe
ccccggaagatcctcagctgagagt

SEQ ID NO: 213043 - DNA, 25 bp, Artificial
  Probe
aggtgggacaggatctcaggcactg

SEQ ID NO: 213044 - DNA, 25 bp, Artificial
  Probe
agagccttttggcttcaagtgggaa

SEQ ID NO: 213045 - DNA, 25 bp, Artificial
  Probe
ctctgtcgaactgccccggaagatc

SEQ ID NO: 213046 - DNA, 25 bp, Artificial
  Probe
gagggcagttttcatccgtgcctct

SEQ ID NO: 213047 - DNA, 25 bp, Artificial
  Probe
cctctgtcgaactgccccggaagat

SEQ ID NO: 213048 - DNA, 25 bp, Artificial
  Probe
ttcatccgtgcctctgtcgaactgc

SEQ ID NO: 213049 - DNA, 25 bp, Artificial
  Probe
tcatccgtgcctctgtcgaactgcc

SEQ ID NO: 213050 - DNA, 25 bp, Artificial
  Probe
gggacaggatctcaggcactggctg

SEQ ID NO: 213051 - DNA, 25 bp, Artificial
  Probe
gatagagccttttggcttcaagtgg

SEQ ID NO: 213052 - DNA, 25 bp, Artificial
  Probe
cctcagctgagagtagatagagcct

SEQ ID NO: 213053 - DNA, 25 bp, Artificial
  Probe
caagtgggaagggaggtgggacagg

SEQ ID NO: 213054 - DNA, 25 bp, Artificial
  Probe
cccggaagatcctcagctgagagta

SEQ ID NO: 213055 - DNA, 25 bp, Artificial
  Probe
tagatagagccttttggcttcaagt

SEQ ID NO: 213056 - DNA, 25 bp, Artificial
  Probe
agttttcatccgtgcctctgtcgaa

SEQ ID NO: 213057 - DNA, 25 bp, Artificial
  Probe
ggaagatcctcagctgagagtagat

SEQ ID NO: 213058 - DNA, 25 bp, Artificial
  Probe
ccggaagatcctcagctgagagtag

SEQ ID NO: 213059 - DNA, 25 bp, Artificial
  Probe
actgccccggaagatcctcagctga

SEQ ID NO: 213060 - DNA, 25 bp, Artificial
  Probe
gggcagttttcatccgtgcctctgt

SEQ ID NO: 213061 - DNA, 25 bp, Artificial
  Probe
agggcagttttcatccgtgcctctg

SEQ ID NO: 213062 - DNA, 25 bp, Artificial
  Probe
ctgccccggaagatcctcagctgag

SEQ ID NO: 213063 - DNA, 25 bp, Artificial
  Probe
acgagggcagttttcatccgtgcct

SEQ ID NO: 213064 - DNA, 25 bp, Artificial
  Probe
tgccccggaagatcctcagctgaga

SEQ ID NO: 213065 - DNA, 25 bp, Artificial
  Probe
cttttggcttcaagtgggaagggag

SEQ ID NO: 213066 - DNA, 25 bp, Artificial
  Probe
cgaactgccccggaagatcctcagc

SEQ ID NO: 213067 - DNA, 25 bp, Artificial
  Probe
aagatcctcagctgagagtagatag

SEQ ID NO: 213068 - DNA, 25 bp, Artificial
  Probe
gtgcctctgtcgaactgccccggaa

SEQ ID NO: 213069 - DNA, 25 bp, Artificial
  Probe
gaactgccccggaagatcctcagct

SEQ ID NO: 213070 - DNA, 25 bp, Artificial
  Probe
catcggccagcactcagcactgtgt

SEQ ID NO: 213071 - DNA, 25 bp, Artificial
  Probe
gcgctggcacgctcaacatggaccg

SEQ ID NO: 213072 - DNA, 25 bp, Artificial
  Probe
agagagtgctcaacctcacaggcct

SEQ ID NO: 213073 - DNA, 25 bp, Artificial
  Probe
ggcatcaagccagagagtgctcaac

SEQ ID NO: 213074 - DNA, 25 bp, Artificial
  Probe
cgctcaacatggaccgtggtgagag

SEQ ID NO: 213075 - DNA, 25 bp, Artificial
  Probe
aaatttagacagcacaacagtggca

SEQ ID NO: 213076 - DNA, 25 bp, Artificial
  Probe
aagccagagagtgctcaacctcaca

SEQ ID NO: 213077 - DNA, 25 bp, Artificial
  Probe
taccacgctgaagaggtgcagtgtg

SEQ ID NO: 213078 - DNA, 25 bp, Artificial
  Probe
gaaccgtgtaccacgctgaagaggt

SEQ ID NO: 213079 - DNA, 25 bp, Artificial
  Probe
cgtgtaccacgctgaagaggtgcag

SEQ ID NO: 213080 - DNA, 25 bp, Artificial
  Probe
gtgcatcggccagcactcagcactg

SEQ ID NO: 213081 - DNA, 25 bp, Artificial
  Probe
tcaagccagagagtgctcaacctca

SEQ ID NO: 213082 - DNA, 25 bp, Artificial
  Probe
tccaccgctgctgctttctgtgcat

SEQ ID NO: 213083 - DNA, 25 bp, Artificial
  Probe
acaacagtggcaattcatgatgaag

SEQ ID NO: 213084 - DNA, 25 bp, Artificial
  Probe
gccagagagtgctcaacctcacagg

SEQ ID NO: 213085 - DNA, 25 bp, Artificial
  Probe
gcctgcgggagaaccgtgtaccacg

SEQ ID NO: 213086 - DNA, 25 bp, Artificial
  Probe
tatggaggtgctgagaagtgctcca

SEQ ID NO: 213087 - DNA, 25 bp, Artificial
  Probe
gagaaccgtgtaccacgctgaagag

SEQ ID NO: 213088 - DNA, 25 bp, Artificial
  Probe
gggcccttgttcatgctcagtagtg

SEQ ID NO: 213089 - DNA, 25 bp, Artificial
  Probe
gcaggggcccttgttcatgctcagt

SEQ ID NO: 213090 - DNA, 25 bp, Artificial
  Probe
ggcctgcgggagaaccgtgtaccac

SEQ ID NO: 213091 - DNA, 25 bp, Artificial
  Probe
gagcaggggcccttgttcatgctca

SEQ ID NO: 213092 - DNA, 25 bp, Artificial
  Probe
ttagacagcacaacagtggcaattc

SEQ ID NO: 213093 - DNA, 25 bp, Artificial
  Probe
tcccactcggaatgcctgtctgggg

SEQ ID NO: 213094 - DNA, 25 bp, Artificial
  Probe
tgcccagaaatatggaggtgctgag

SEQ ID NO: 213095 - DNA, 25 bp, Artificial
  Probe
agcactcagcactgtgtagcacaca

SEQ ID NO: 213096 - DNA, 25 bp, Artificial
  Probe
cgctgctgctttctgtgcatggttt

SEQ ID NO: 213097 - DNA, 25 bp, Artificial
  Probe
cacaacagtggcaattcatgatgaa

SEQ ID NO: 213098 - DNA, 25 bp, Artificial
  Probe
aatttagacagcacaacagtggcaa

SEQ ID NO: 213099 - DNA, 25 bp, Artificial
  Probe
ctgcaaatcatgctacggaaagaag

SEQ ID NO: 213100 - DNA, 25 bp, Artificial
  Probe
gccagcactcagcactgtgtagcac

SEQ ID NO: 213101 - DNA, 25 bp, Artificial
  Probe
ggggcccttgttcatgctcagtagt

SEQ ID NO: 213102 - DNA, 25 bp, Artificial
  Probe
agtgctcaacctcacaggcctacaa

SEQ ID NO: 213103 - DNA, 25 bp, Artificial
  Probe
atttagacagcacaacagtggcaat

SEQ ID NO: 213104 - DNA, 25 bp, Artificial
  Probe
ctaaatttgcccagaaatatggagg

SEQ ID NO: 213105 - DNA, 25 bp, Artificial
  Probe
ccagcactcagcactgtgtagcaca

SEQ ID NO: 213106 - DNA, 25 bp, Artificial
  Probe
gggcatcaagccagagagtgctcaa

SEQ ID NO: 213107 - DNA, 25 bp, Artificial
  Probe
aatttgcccagaaatatggaggtgc

SEQ ID NO: 213108 - DNA, 25 bp, Artificial
  Probe
ccacgctgaagaggtgcagtgtgat

SEQ ID NO: 213109 - DNA, 25 bp, Artificial
  Probe
cgggagaaccgtgtaccacgctgaa

SEQ ID NO: 213110 - DNA, 25 bp, Artificial
  Probe
gatctactgcaaatcatgctacgga

SEQ ID NO: 213111 - DNA, 25 bp, Artificial
  Probe
tctactgcaaatcatgctacggaaa

SEQ ID NO: 213112 - DNA, 25 bp, Artificial
  Probe
cgctggcacgctcaacatggaccgt

SEQ ID NO: 213113 - DNA, 25 bp, Artificial
  Probe
ttccaccgctgctgctttctgtgca

SEQ ID NO: 213114 - DNA, 25 bp, Artificial
  Probe
atatggaggtgctgagaagtgctcc

SEQ ID NO: 213115 - DNA, 25 bp, Artificial
  Probe
aggggcccttgttcatgctcagtag

SEQ ID NO: 213116 - DNA, 25 bp, Artificial
  Probe
tgctatttagcctcatcatgaatga

SEQ ID NO: 213117 - DNA, 25 bp, Artificial
  Probe
ctcatttgctttttctgaggattgg

SEQ ID NO: 213118 - DNA, 25 bp, Artificial
  Probe
atgtaggttctgtgtcgactgggtc

SEQ ID NO: 213119 - DNA, 25 bp, Artificial
  Probe
actagttagcgctaaaaagactgtt

SEQ ID NO: 213120 - DNA, 25 bp, Artificial
  Probe
ggaagtcttttacctgtacaagaag

SEQ ID NO: 213121 - DNA, 25 bp, Artificial
  Probe
cgtgttggtctataccagtgagtgt

SEQ ID NO: 213122 - DNA, 25 bp, Artificial
  Probe
gtgtcgactgggtctaccagtggta

SEQ ID NO: 213123 - DNA, 25 bp, Artificial
  Probe
cgccttcagtaatggcgtacctctg

SEQ ID NO: 213124 - DNA, 25 bp, Artificial
  Probe
tctataccagtgagtgtgtgttagc

SEQ ID NO: 213125 - DNA, 25 bp, Artificial
  Probe
caaatactaggaggtgttcttattc

SEQ ID NO: 213126 - DNA, 25 bp, Artificial
  Probe
gtacctctgctcagccagtatttaa

SEQ ID NO: 213127 - DNA, 25 bp, Artificial
  Probe
caagaaaccaaactagttagcgcta

SEQ ID NO: 213128 - DNA, 25 bp, Artificial
  Probe
acacccagcgccttcagtaatggcg

SEQ ID NO: 213129 - DNA, 25 bp, Artificial
  Probe
gaagtcttttacctgtacaagaagg

SEQ ID NO: 213130 - DNA, 25 bp, Artificial
  Probe
gctcatttgctttttctgaggattg

SEQ ID NO: 213131 - DNA, 25 bp, Artificial
  Probe
tattcgagggttttcccaatcagaa

SEQ ID NO: 213132 - DNA, 25 bp, Artificial
  Probe
gactgggtctaccagtggtattaaa

SEQ ID NO: 213133 - DNA, 25 bp, Artificial
  Probe
acctgtacaagaaggttgcacatgt

SEQ ID NO: 213134 - DNA, 25 bp, Artificial
  Probe
tagcctcatcatgaatgagcaatgg

SEQ ID NO: 213135 - DNA, 25 bp, Artificial
  Probe
catcatgaatgagcaatgggatcaa

SEQ ID NO: 213136 - DNA, 25 bp, Artificial
  Probe
ggttttcccaatcagaacgtgttgg

SEQ ID NO: 213137 - DNA, 25 bp, Artificial
  Probe
aagactgtttccacaccataggcaa

SEQ ID NO: 213138 - DNA, 25 bp, Artificial
  Probe
tttacctgtacaagaaggttgcaca

SEQ ID NO: 213139 - DNA, 25 bp, Artificial
  Probe
tttcaggaagtcttttacctgtaca

SEQ ID NO: 213140 - DNA, 25 bp, Artificial
  Probe
tatttagcctcatcatgaatgagca

SEQ ID NO: 213141 - DNA, 25 bp, Artificial
  Probe
acaagttgtctgtcacacccagcgc

SEQ ID NO: 213142 - DNA, 25 bp, Artificial
  Probe
caacaagttgtctgtcacacccagc

SEQ ID NO: 213143 - DNA, 25 bp, Artificial
  Probe
ctcacggtgtgtagtaaccatacag

SEQ ID NO: 213144 - DNA, 25 bp, Artificial
  Probe
gtcttttacctgtacaagaaggttg

SEQ ID NO: 213145 - DNA, 25 bp, Artificial
  Probe
tgtagtaaccatacagaacgcacag

SEQ ID NO: 213146 - DNA, 25 bp, Artificial
  Probe
tcagtaatggcgtacctctgctcag

SEQ ID NO: 213147 - DNA, 25 bp, Artificial
  Probe
agttgtctgtcacacccagcgcctt

SEQ ID NO: 213148 - DNA, 25 bp, Artificial
  Probe
aagttgtctgtcacacccagcgcct

SEQ ID NO: 213149 - DNA, 25 bp, Artificial
  Probe
catacagaacgcacagcaacaagtt

SEQ ID NO: 213150 - DNA, 25 bp, Artificial
  Probe
gtaaccatacagaacgcacagcaac

SEQ ID NO: 213151 - DNA, 25 bp, Artificial
  Probe
tgcctactgtattcgagggttttcc

SEQ ID NO: 213152 - DNA, 25 bp, Artificial
  Probe
aggttgcacatgtttaataacaatc

SEQ ID NO: 213153 - DNA, 25 bp, Artificial
  Probe
gggatcaattcaactaattcaagaa

SEQ ID NO: 213154 - DNA, 25 bp, Artificial
  Probe
caggaagtcttttacctgtacaaga

SEQ ID NO: 213155 - DNA, 25 bp, Artificial
  Probe
ttctgtgtcgactgggtctaccagt

SEQ ID NO: 213156 - DNA, 25 bp, Artificial
  Probe
taagcatatgcctactgtattcgag

SEQ ID NO: 213157 - DNA, 25 bp, Artificial
  Probe
ctataccagtgagtgtgtgttagcg

SEQ ID NO: 213158 - DNA, 25 bp, Artificial
  Probe
gactgtttccacaccataggcaatc

SEQ ID NO: 213159 - DNA, 25 bp, Artificial
  Probe
ctctgataattcaaatactaggagg

SEQ ID NO: 213160 - DNA, 25 bp, Artificial
  Probe
tgtattcgagggttttcccaatcag

SEQ ID NO: 213161 - DNA, 25 bp, Artificial
  Probe
attcaagaaaccaaactagttagcg

SEQ ID NO: 213162 - DNA, 25 bp, Artificial
  Probe
gtttggagctgacttcatgttttgc

SEQ ID NO: 213163 - DNA, 25 bp, Artificial
  Probe
ttaactaaccttcgtctgtgccatg

SEQ ID NO: 213164 - DNA, 25 bp, Artificial
  Probe
gagctgacttcatgttttgcagttg

SEQ ID NO: 213165 - DNA, 25 bp, Artificial
  Probe
gtccagactgagtgcacaagaacga

SEQ ID NO: 213166 - DNA, 25 bp, Artificial
  Probe
gacttcatgttttgcagttgacctt

SEQ ID NO: 213167 - DNA, 25 bp, Artificial
  Probe
ctaaccttcgtctgtgccatgctct

SEQ ID NO: 213168 - DNA, 25 bp, Artificial
  Probe
tccagactgagtgcacaagaacgac

SEQ ID NO: 213169 - DNA, 25 bp, Artificial
  Probe
caaatactgtccagactgagtgcac

SEQ ID NO: 213170 - DNA, 25 bp, Artificial
  Probe
ccaaatactgtccagactgagtgca

SEQ ID NO: 213171 - DNA, 25 bp, Artificial
  Probe
ggagcctcggctttagattagaact

SEQ ID NO: 213172 - DNA, 25 bp, Artificial
  Probe
tgtgccatgctctactagaacattc

SEQ ID NO: 213173 - DNA, 25 bp, Artificial
  Probe
tccaaatactgtccagactgagtgc

SEQ ID NO: 213174 - DNA, 25 bp, Artificial
  Probe
taaccttcgtctgtgccatgctcta

SEQ ID NO: 213175 - DNA, 25 bp, Artificial
  Probe
ccttccaaatactgtccagactgag

SEQ ID NO: 213176 - DNA, 25 bp, Artificial
  Probe
ttggagctgacttcatgttttgcag

SEQ ID NO: 213177 - DNA, 25 bp, Artificial
  Probe
gtctgtgccatgctctactagaaca

SEQ ID NO: 213178 - DNA, 25 bp, Artificial
  Probe
aactgtttggagctgacttcatgtt

SEQ ID NO: 213179 - DNA, 25 bp, Artificial
  Probe
gtgccatgctctactagaacattct

SEQ ID NO: 213180 - DNA, 25 bp, Artificial
  Probe
cttccaaatactgtccagactgagt

SEQ ID NO: 213181 - DNA, 25 bp, Artificial
  Probe
agactgagtgcacaagaacgacctt

SEQ ID NO: 213182 - DNA, 25 bp, Artificial
  Probe
gcttaaaagcttccagaatccactg

SEQ ID NO: 213183 - DNA, 25 bp, Artificial
  Probe
actgtccagactgagtgcacaagaa

SEQ ID NO: 213184 - DNA, 25 bp, Artificial
  Probe
ctgtgccatgctctactagaacatt

SEQ ID NO: 213185 - DNA, 25 bp, Artificial
  Probe
tcatgttttgcagttgaccttaggt

SEQ ID NO: 213186 - DNA, 25 bp, Artificial
  Probe
tggagctgacttcatgttttgcagt

SEQ ID NO: 213187 - DNA, 25 bp, Artificial
  Probe
tggagcctcggctttagattagaac

SEQ ID NO: 213188 - DNA, 25 bp, Artificial
  Probe
gagcctcggctttagattagaactg

SEQ ID NO: 213189 - DNA, 25 bp, Artificial
  Probe
gctgacttcatgttttgcagttgac

SEQ ID NO: 213190 - DNA, 25 bp, Artificial
  Probe
aaggagcttatatccctgcttagca

SEQ ID NO: 213191 - DNA, 25 bp, Artificial
  Probe
cgtctgtgccatgctctactagaac

SEQ ID NO: 213192 - DNA, 25 bp, Artificial
  Probe
ccagactgagtgcacaagaacgacc

SEQ ID NO: 213193 - DNA, 25 bp, Artificial
  Probe
aaccttcgtctgtgccatgctctac

SEQ ID NO: 213194 - DNA, 25 bp, Artificial
  Probe
ttcgtctgtgccatgctctactaga

SEQ ID NO: 213195 - DNA, 25 bp, Artificial
  Probe
actgtttggagctgacttcatgttt

SEQ ID NO: 213196 - DNA, 25 bp, Artificial
  Probe
tgacttcatgttttgcagttgacct

SEQ ID NO: 213197 - DNA, 25 bp, Artificial
  Probe
ctgtttggagctgacttcatgtttt

SEQ ID NO: 213198 - DNA, 25 bp, Artificial
  Probe
ttccaaatactgtccagactgagtg

SEQ ID NO: 213199 - DNA, 25 bp, Artificial
  Probe
acttcatgttttgcagttgacctta

SEQ ID NO: 213200 - DNA, 25 bp, Artificial
  Probe
actaaccttcgtctgtgccatgctc

SEQ ID NO: 213201 - DNA, 25 bp, Artificial
  Probe
aatactgtccagactgagtgcacaa

SEQ ID NO: 213202 - DNA, 25 bp, Artificial
  Probe
caactgtttggagctgacttcatgt

SEQ ID NO: 213203 - DNA, 25 bp, Artificial
  Probe
ggagctgacttcatgttttgcagtt

SEQ ID NO: 213204 - DNA, 25 bp, Artificial
  Probe
tgctctactagaacattctccgggt

SEQ ID NO: 213205 - DNA, 25 bp, Artificial
  Probe
ttcatgttttgcagttgaccttagg

SEQ ID NO: 213206 - DNA, 25 bp, Artificial
  Probe
ctgtccagactgagtgcacaagaac

SEQ ID NO: 213207 - DNA, 25 bp, Artificial
  Probe
catgctctactagaacattctccgg

SEQ ID NO: 213208 - DNA, 25 bp, Artificial
  Probe
ttagtctgtggctactgttctcttg

SEQ ID NO: 213209 - DNA, 25 bp, Artificial
  Probe
gccataggtctttgttctgtgtaat

SEQ ID NO: 213210 - DNA, 25 bp, Artificial
  Probe
aggctgaccttcagctcagaaatta

SEQ ID NO: 213211 - DNA, 25 bp, Artificial
  Probe
tgagaccataccttctctgtgttaa

SEQ ID NO: 213212 - DNA, 25 bp, Artificial
  Probe
tgtacttattatgcaccagccatag

SEQ ID NO: 213213 - DNA, 25 bp, Artificial
  Probe
gtctgtctgtatagctctcgatgtc

SEQ ID NO: 213214 - DNA, 25 bp, Artificial
  Probe
gaccataccttctctgtgttaagta

SEQ ID NO: 213215 - DNA, 25 bp, Artificial
  Probe
gttcacatgaacacagagtgtattt

SEQ ID NO: 213216 - DNA, 25 bp, Artificial
  Probe
tttcctcatgccaaagtgttcttag

SEQ ID NO: 213217 - DNA, 25 bp, Artificial
  Probe
gctcctgcctgtgtgtgcccgtaca

SEQ ID NO: 213218 - DNA, 25 bp, Artificial
  Probe
accagccataggtctttgttctgtg

SEQ ID NO: 213219 - DNA, 25 bp, Artificial
  Probe
caggcttagtctgtggctactgttc

SEQ ID NO: 213220 - DNA, 25 bp, Artificial
  Probe
gtaccgctgtattactctctcagaa

SEQ ID NO: 213221 - DNA, 25 bp, Artificial
  Probe
gggtctgtctgtatagctctcgatg

SEQ ID NO: 213222 - DNA, 25 bp, Artificial
  Probe
ctgttctcttgtaccgctgtattac

SEQ ID NO: 213223 - DNA, 25 bp, Artificial
  Probe
gaccttcagctcagaaattaggcct

SEQ ID NO: 213224 - DNA, 25 bp, Artificial
  Probe
tactctctcagaaagaagaggccct

SEQ ID NO: 213225 - DNA, 25 bp, Artificial
  Probe
gccaaagtgttcttagtggctgatt

SEQ ID NO: 213226 - DNA, 25 bp, Artificial
  Probe
ttcctcatgccaaagtgttcttagt

SEQ ID NO: 213227 - DNA, 25 bp, Artificial
  Probe
caattgcaggcttagtctgtggcta

SEQ ID NO: 213228 - DNA, 25 bp, Artificial
  Probe
tcatgccaaagtgttcttagtggct

SEQ ID NO: 213229 - DNA, 25 bp, Artificial
  Probe
cctgcctgtgtgtgcccgtacagca

SEQ ID NO: 213230 - DNA, 25 bp, Artificial
  Probe
accgctgtattactctctcagaaag

SEQ ID NO: 213231 - DNA, 25 bp, Artificial
  Probe
gtctgtggctactgttctcttgtac

SEQ ID NO: 213232 - DNA, 25 bp, Artificial
  Probe
ttattatgcaccagccataggtctt

SEQ ID NO: 213233 - DNA, 25 bp, Artificial
  Probe
cacatgaacacagagtgtattttct

SEQ ID NO: 213234 - DNA, 25 bp, Artificial
  Probe
tgtgctcctgcctgtgtgtgcccgt

SEQ ID NO: 213235 - DNA, 25 bp, Artificial
  Probe
ttgtaccgctgtattactctctcag

SEQ ID NO: 213236 - DNA, 25 bp, Artificial
  Probe
ttcgtatgtacttattatgcaccag

SEQ ID NO: 213237 - DNA, 25 bp, Artificial
  Probe
cttattatgcaccagccataggtct

SEQ ID NO: 213238 - DNA, 25 bp, Artificial
  Probe
tgtgtgtgcccgtacagcagtgact

SEQ ID NO: 213239 - DNA, 25 bp, Artificial
  Probe
tgtgcccgtacagcagtgacttccc

SEQ ID NO: 213240 - DNA, 25 bp, Artificial
  Probe
ccctggcggtgtgctcctgcctgtg

SEQ ID NO: 213241 - DNA, 25 bp, Artificial
  Probe
aggcttagtctgtggctactgttct

SEQ ID NO: 213242 - DNA, 25 bp, Artificial
  Probe
tagtctgtggctactgttctcttgt

SEQ ID NO: 213243 - DNA, 25 bp, Artificial
  Probe
gtggctactgttctcttgtaccgct

SEQ ID NO: 213244 - DNA, 25 bp, Artificial
  Probe
caaagtgttcttagtggctgattcg

SEQ ID NO: 213245 - DNA, 25 bp, Artificial
  Probe
ccgctgtattactctctcagaaaga

SEQ ID NO: 213246 - DNA, 25 bp, Artificial
  Probe
ggctactgttctcttgtaccgctgt

SEQ ID NO: 213247 - DNA, 25 bp, Artificial
  Probe
ctgtggctactgttctcttgtaccg

SEQ ID NO: 213248 - DNA, 25 bp, Artificial
  Probe
tatgcaccagccataggtctttgtt

SEQ ID NO: 213249 - DNA, 25 bp, Artificial
  Probe
ccataggtctttgttctgtgtaatt

SEQ ID NO: 213250 - DNA, 25 bp, Artificial
  Probe
ggggttcacatgaacacagagtgta

SEQ ID NO: 213251 - DNA, 25 bp, Artificial
  Probe
atgccaaagtgttcttagtggctga

SEQ ID NO: 213252 - DNA, 25 bp, Artificial
  Probe
gctgtattactctctcagaaagaag

SEQ ID NO: 213253 - DNA, 25 bp, Artificial
  Probe
ttattgagaccataccttctctgtg

SEQ ID NO: 213254 - DNA, 25 bp, Artificial
  Probe
ttgcttttgtaatggaaaggaaaga

SEQ ID NO: 213255 - DNA, 25 bp, Artificial
  Probe
gtgggtgttggtggtggaatctggg

SEQ ID NO: 213256 - DNA, 25 bp, Artificial
  Probe
cggtccatgtttgtttagttgcttt

SEQ ID NO: 213257 - DNA, 25 bp, Artificial
  Probe
tgtctgcctggcatctgtgggtgtt

SEQ ID NO: 213258 - DNA, 25 bp, Artificial
  Probe
ggaatctgggagttgctttgccttg

SEQ ID NO: 213259 - DNA, 25 bp, Artificial
  Probe
ctccggtccatgtttgtttagttgc

SEQ ID NO: 213260 - DNA, 25 bp, Artificial
  Probe
cttgcaaatgttaggttttgccctc

SEQ ID NO: 213261 - DNA, 25 bp, Artificial
  Probe
ccggtccatgtttgtttagttgctt

SEQ ID NO: 213262 - DNA, 25 bp, Artificial
  Probe
gctttgccttgcaaatgttaggttt

SEQ ID NO: 213263 - DNA, 25 bp, Artificial
  Probe
ctggtcccctgagggctgtctgcct

SEQ ID NO: 213264 - DNA, 25 bp, Artificial
  Probe
taggttttgccctccggtccatgtt

SEQ ID NO: 213265 - DNA, 25 bp, Artificial
  Probe
tgccctccggtccatgtttgtttag

SEQ ID NO: 213266 - DNA, 25 bp, Artificial
  Probe
gtttagttgcttttgtaatggaaag

SEQ ID NO: 213267 - DNA, 25 bp, Artificial
  Probe
tgccttgcaaatgttaggttttgcc

SEQ ID NO: 213268 - DNA, 25 bp, Artificial
  Probe
ggttttgccctccggtccatgtttg

SEQ ID NO: 213269 - DNA, 25 bp, Artificial
  Probe
tagttgcttttgtaatggaaaggaa

SEQ ID NO: 213270 - DNA, 25 bp, Artificial
  Probe
ggtgttggtggtggaatctgggagt

SEQ ID NO: 213271 - DNA, 25 bp, Artificial
  Probe
tccatgtttgtttagttgcttttgt

SEQ ID NO: 213272 - DNA, 25 bp, Artificial
  Probe
tgctttgccttgcaaatgttaggtt

SEQ ID NO: 213273 - DNA, 25 bp, Artificial
  Probe
gaatctgggagttgctttgccttgc

SEQ ID NO: 213274 - DNA, 25 bp, Artificial
  Probe
gccctccggtccatgtttgtttagt

SEQ ID NO: 213275 - DNA, 25 bp, Artificial
  Probe
tggtggaatctgggagttgctttgc

SEQ ID NO: 213276 - DNA, 25 bp, Artificial
  Probe
cccctgagggctgtctgcctggcat

SEQ ID NO: 213277 - DNA, 25 bp, Artificial
  Probe
aatctgggagttgctttgccttgca

SEQ ID NO: 213278 - DNA, 25 bp, Artificial
  Probe
agggctgtctgcctggcatctgtgg

SEQ ID NO: 213279 - DNA, 25 bp, Artificial
  Probe
ccctgagggctgtctgcctggcatc

SEQ ID NO: 213280 - DNA, 25 bp, Artificial
  Probe
ttgccttgcaaatgttaggttttgc

SEQ ID NO: 213281 - DNA, 25 bp, Artificial
  Probe
tccggtccatgtttgtttagttgct

SEQ ID NO: 213282 - DNA, 25 bp, Artificial
  Probe
ttgccctccggtccatgtttgttta

SEQ ID NO: 213283 - DNA, 25 bp, Artificial
  Probe
cctccggtccatgtttgtttagttg

SEQ ID NO: 213284 - DNA, 25 bp, Artificial
  Probe
tttgccctccggtccatgtttgttt

SEQ ID NO: 213285 - DNA, 25 bp, Artificial
  Probe
cctgagggctgtctgcctggcatct

SEQ ID NO: 213286 - DNA, 25 bp, Artificial
  Probe
tcccctgagggctgtctgcctggca

SEQ ID NO: 213287 - DNA, 25 bp, Artificial
  Probe
ctttgccttgcaaatgttaggtttt

SEQ ID NO: 213288 - DNA, 25 bp, Artificial
  Probe
tgagggctgtctgcctggcatctgt

SEQ ID NO: 213289 - DNA, 25 bp, Artificial
  Probe
ttaggttttgccctccggtccatgt

SEQ ID NO: 213290 - DNA, 25 bp, Artificial
  Probe
tttgccttgcaaatgttaggttttg

SEQ ID NO: 213291 - DNA, 25 bp, Artificial
  Probe
ttgctttgccttgcaaatgttaggt

SEQ ID NO: 213292 - DNA, 25 bp, Artificial
  Probe
gtcccctgagggctgtctgcctggc

SEQ ID NO: 213293 - DNA, 25 bp, Artificial
  Probe
gtggtggaatctgggagttgctttg

SEQ ID NO: 213294 - DNA, 25 bp, Artificial
  Probe
tgttaggttttgccctccggtccat

SEQ ID NO: 213295 - DNA, 25 bp, Artificial
  Probe
actggtcccctgagggctgtctgcc

SEQ ID NO: 213296 - DNA, 25 bp, Artificial
  Probe
ttggtggtggaatctgggagttgct

SEQ ID NO: 213297 - DNA, 25 bp, Artificial
  Probe
gccttgcaaatgttaggttttgccc

SEQ ID NO: 213298 - DNA, 25 bp, Artificial
  Probe
ttttgccctccggtccatgtttgtt

SEQ ID NO: 213299 - DNA, 25 bp, Artificial
  Probe
ctgagggctgtctgcctggcatctg

SEQ ID NO: 213300 - DNA, 25 bp, Artificial
  Probe
tagaaggtgctgaccctgtggccca

SEQ ID NO: 213301 - DNA, 25 bp, Artificial
  Probe
ccaggtgggattcgactggtctatg

SEQ ID NO: 213302 - DNA, 25 bp, Artificial
  Probe
gggatcagcttcttcattttgggtc

SEQ ID NO: 213303 - DNA, 25 bp, Artificial
  Probe
ctgtgaggcctttaggacaagctgg

SEQ ID NO: 213304 - DNA, 25 bp, Artificial
  Probe
aacagcagcgctgagaccccgagca

SEQ ID NO: 213305 - DNA, 25 bp, Artificial
  Probe
ctctgttcccgcatccagtaaaaag

SEQ ID NO: 213306 - DNA, 25 bp, Artificial
  Probe
ctctgtgaggcctttaggacaagct

SEQ ID NO: 213307 - DNA, 25 bp, Artificial
  Probe
cctcctagaaggtgctgaccctgtg

SEQ ID NO: 213308 - DNA, 25 bp, Artificial
  Probe
cctagaaggtgctgaccctgtggcc

SEQ ID NO: 213309 - DNA, 25 bp, Artificial
  Probe
gcagggaccaacagcagcgctgaga

SEQ ID NO: 213310 - DNA, 25 bp, Artificial
  Probe
agagaggtgcccagagcacttgctc

SEQ ID NO: 213311 - DNA, 25 bp, Artificial
  Probe
tccctcctagaaggtgctgaccctg

SEQ ID NO: 213312 - DNA, 25 bp, Artificial
  Probe
gcttcattcctcaaaggtctccaga

SEQ ID NO: 213313 - DNA, 25 bp, Artificial
  Probe
ttcctcaaaggtctccagagaggtg

SEQ ID NO: 213314 - DNA, 25 bp, Artificial
  Probe
cctggtcgggatcagcttcttcatt

SEQ ID NO: 213315 - DNA, 25 bp, Artificial
  Probe
ttcattcctcaaaggtctccagaga

SEQ ID NO: 213316 - DNA, 25 bp, Artificial
  Probe
tctccagagaggtgcccagagcact

SEQ ID NO: 213317 - DNA, 25 bp, Artificial
  Probe
aaggcctctgtgaggcctttaggac

SEQ ID NO: 213318 - DNA, 25 bp, Artificial
  Probe
cagctaccacctggtcgggatcagc

SEQ ID NO: 213319 - DNA, 25 bp, Artificial
  Probe
cgggacagctaccacctggtcggga

SEQ ID NO: 213320 - DNA, 25 bp, Artificial
  Probe
ccgcatccagtaaaaagtgttcatt

SEQ ID NO: 213321 - DNA, 25 bp, Artificial
  Probe
gcttgcttcattcctcaaaggtctc

SEQ ID NO: 213322 - DNA, 25 bp, Artificial
  Probe
aggtgcccagagcacttgctcccat

SEQ ID NO: 213323 - DNA, 25 bp, Artificial
  Probe
aggtctccagagaggtgcccagagc

SEQ ID NO: 213324 - DNA, 25 bp, Artificial
  Probe
aaggtctccagagaggtgcccagag

SEQ ID NO: 213325 - DNA, 25 bp, Artificial
  Probe
gtcgggatcagcttcttcattttgg

SEQ ID NO: 213326 - DNA, 25 bp, Artificial
  Probe
gagaggtgcccagagcacttgctcc

SEQ ID NO: 213327 - DNA, 25 bp, Artificial
  Probe
tccccaggtgggattcgactggtct

SEQ ID NO: 213328 - DNA, 25 bp, Artificial
  Probe
gggaccaacagcagcgctgagaccc

SEQ ID NO: 213329 - DNA, 25 bp, Artificial
  Probe
ctgttcccgcatccagtaaaaagtg

SEQ ID NO: 213330 - DNA, 25 bp, Artificial
  Probe
cttcattttgggtctgggcaccctc

SEQ ID NO: 213331 - DNA, 25 bp, Artificial
  Probe
tgcttcattcctcaaaggtctccag

SEQ ID NO: 213332 - DNA, 25 bp, Artificial
  Probe
gacagctaccacctggtcgggatca

SEQ ID NO: 213333 - DNA, 25 bp, Artificial
  Probe
ttcccgcatccagtaaaaagtgttc

SEQ ID NO: 213334 - DNA, 25 bp, Artificial
  Probe
caccgcttgcttcattcctcaaagg

SEQ ID NO: 213335 - DNA, 25 bp, Artificial
  Probe
tctgtgaggcctttaggacaagctg

SEQ ID NO: 213336 - DNA, 25 bp, Artificial
  Probe
ttggcagggaccaacagcagcgctg

SEQ ID NO: 213337 - DNA, 25 bp, Artificial
  Probe
ccccaggtgggattcgactggtcta

SEQ ID NO: 213338 - DNA, 25 bp, Artificial
  Probe
tggtcgggatcagcttcttcatttt

SEQ ID NO: 213339 - DNA, 25 bp, Artificial
  Probe
gcttcttcattttgggtctgggcac

SEQ ID NO: 213340 - DNA, 25 bp, Artificial
  Probe
atcagcttcttcattttgggtctgg

SEQ ID NO: 213341 - DNA, 25 bp, Artificial
  Probe
tgaggcctttaggacaagctgggca

SEQ ID NO: 213342 - DNA, 25 bp, Artificial
  Probe
cacctggtcgggatcagcttcttca

SEQ ID NO: 213343 - DNA, 25 bp, Artificial
  Probe
gctaccacctggtcgggatcagctt

SEQ ID NO: 213344 - DNA, 25 bp, Artificial
  Probe
ccgcttgcttcattcctcaaaggtc

SEQ ID NO: 213345 - DNA, 25 bp, Artificial
  Probe
gacaaaaaggcctctgtgaggcctt

SEQ ID NO: 213346 - DNA, 25 bp, Artificial
  Probe
ggactgaccggaaacccgtatctag

SEQ ID NO: 213347 - DNA, 25 bp, Artificial
  Probe
ggtgcttacaagaggccccagtcat

SEQ ID NO: 213348 - DNA, 25 bp, Artificial
  Probe
actgtagaggtggatggtgcttaca

SEQ ID NO: 213349 - DNA, 25 bp, Artificial
  Probe
cactgtagaggtggatggtgcttac

SEQ ID NO: 213350 - DNA, 25 bp, Artificial
  Probe
agaggccccagtcatgggtatttaa

SEQ ID NO: 213351 - DNA, 25 bp, Artificial
  Probe
cgtatctagcaggatcgaagtgcac

SEQ ID NO: 213352 - DNA, 25 bp, Artificial
  Probe
ggaaaatgcttgccactgtagaggt

SEQ ID NO: 213353 - DNA, 25 bp, Artificial
  Probe
ccggaaacccgtatctagcaggatc

SEQ ID NO: 213354 - DNA, 25 bp, Artificial
  Probe
gtgcttacaagaggccccagtcatg

SEQ ID NO: 213355 - DNA, 25 bp, Artificial
  Probe
aaacccgtatctagcaggatcgaag

SEQ ID NO: 213356 - DNA, 25 bp, Artificial
  Probe
ccgtatctagcaggatcgaagtgca

SEQ ID NO: 213357 - DNA, 25 bp, Artificial
  Probe
atgcttgccactgtagaggtggatg

SEQ ID NO: 213358 - DNA, 25 bp, Artificial
  Probe
aggggcgctgttagtgcttacaggg

SEQ ID NO: 213359 - DNA, 25 bp, Artificial
  Probe
tctagcaggatcgaagtgcactgta

SEQ ID NO: 213360 - DNA, 25 bp, Artificial
  Probe
ggaaacccgtatctagcaggatcga

SEQ ID NO: 213361 - DNA, 25 bp, Artificial
  Probe
aggatcgaagtgcactgtaaaaaaa

SEQ ID NO: 213362 - DNA, 25 bp, Artificial
  Probe
accggaaacccgtatctagcaggat

SEQ ID NO: 213363 - DNA, 25 bp, Artificial
  Probe
tagcaggatcgaagtgcactgtaaa

SEQ ID NO: 213364 - DNA, 25 bp, Artificial
  Probe
caagaggccccagtcatgggtattt

SEQ ID NO: 213365 - DNA, 25 bp, Artificial
  Probe
atggtgcttacaagaggccccagtc

SEQ ID NO: 213366 - DNA, 25 bp, Artificial
  Probe
atggactgaccggaaacccgtatct

SEQ ID NO: 213367 - DNA, 25 bp, Artificial
  Probe
gaggccccagtcatgggtatttaaa

SEQ ID NO: 213368 - DNA, 25 bp, Artificial
  Probe
aacccgtatctagcaggatcgaagt

SEQ ID NO: 213369 - DNA, 25 bp, Artificial
  Probe
aggtggatggtgcttacaagaggcc

SEQ ID NO: 213370 - DNA, 25 bp, Artificial
  Probe
aatgcttgccactgtagaggtggat

SEQ ID NO: 213371 - DNA, 25 bp, Artificial
  Probe
cccgtatctagcaggatcgaagtgc

SEQ ID NO: 213372 - DNA, 25 bp, Artificial
  Probe
atctagcaggatcgaagtgcactgt

SEQ ID NO: 213373 - DNA, 25 bp, Artificial
  Probe
tggactgaccggaaacccgtatcta

SEQ ID NO: 213374 - DNA, 25 bp, Artificial
  Probe
tggtgcttacaagaggccccagtca

SEQ ID NO: 213375 - DNA, 25 bp, Artificial
  Probe
tggatggtgcttacaagaggcccca

SEQ ID NO: 213376 - DNA, 25 bp, Artificial
  Probe
gaaacccgtatctagcaggatcgaa

SEQ ID NO: 213377 - DNA, 25 bp, Artificial
  Probe
acaagaggccccagtcatgggtatt

SEQ ID NO: 213378 - DNA, 25 bp, Artificial
  Probe
caggatcgaagtgcactgtaaaaaa

SEQ ID NO: 213379 - DNA, 25 bp, Artificial
  Probe
tatctagcaggatcgaagtgcactg

SEQ ID NO: 213380 - DNA, 25 bp, Artificial
  Probe
gactgaccggaaacccgtatctagc

SEQ ID NO: 213381 - DNA, 25 bp, Artificial
  Probe
ccactgtagaggtggatggtgctta

SEQ ID NO: 213382 - DNA, 25 bp, Artificial
  Probe
aaatgcttgccactgtagaggtgga

SEQ ID NO: 213383 - DNA, 25 bp, Artificial
  Probe
cggaaacccgtatctagcaggatcg

SEQ ID NO: 213384 - DNA, 25 bp, Artificial
  Probe
tacaagaggccccagtcatgggtat

SEQ ID NO: 213385 - DNA, 25 bp, Artificial
  Probe
gtatctagcaggatcgaagtgcact

SEQ ID NO: 213386 - DNA, 25 bp, Artificial
  Probe
ggtggggggaggggcgctgttagtg

SEQ ID NO: 213387 - DNA, 25 bp, Artificial
  Probe
acccgtatctagcaggatcgaagtg

SEQ ID NO: 213388 - DNA, 25 bp, Artificial
  Probe
tacagtagtttgcttgggggtgggg

SEQ ID NO: 213389 - DNA, 25 bp, Artificial
  Probe
agcaggatcgaagtgcactgtaaaa

SEQ ID NO: 213390 - DNA, 25 bp, Artificial
  Probe
aagaggccccagtcatgggtattta

SEQ ID NO: 213391 - DNA, 25 bp, Artificial
  Probe
gaccggaaacccgtatctagcagga

SEQ ID NO: 213392 - DNA, 25 bp, Artificial
  Probe
cggctccgtggtggtctccagccta

SEQ ID NO: 213393 - DNA, 25 bp, Artificial
  Probe
cgcttatttccgatgtctttggggg

SEQ ID NO: 213394 - DNA, 25 bp, Artificial
  Probe
tgcaggtgaactcaggcggctccgt

SEQ ID NO: 213395 - DNA, 25 bp, Artificial
  Probe
tactggtgcttgtggcggtactgtt

SEQ ID NO: 213396 - DNA, 25 bp, Artificial
  Probe
ccaatagttggcaggtcacagcctg

SEQ ID NO: 213397 - DNA, 25 bp, Artificial
  Probe
tcctggcaaccctaaggatgtgaag

SEQ ID NO: 213398 - DNA, 25 bp, Artificial
  Probe
cgtggtggtctccagcctactggtg

SEQ ID NO: 213399 - DNA, 25 bp, Artificial
  Probe
caggtcacagcctgtgtgaggtcat

SEQ ID NO: 213400 - DNA, 25 bp, Artificial
  Probe
ggtcacagcctgtgtgaggtcattg

SEQ ID NO: 213401 - DNA, 25 bp, Artificial
  Probe
gggccgcttatttccgatgtctttg

SEQ ID NO: 213402 - DNA, 25 bp, Artificial
  Probe
tcacagcctgtgtgaggtcattgtg

SEQ ID NO: 213403 - DNA, 25 bp, Artificial
  Probe
ggtactgttcctgcacttttgagga

SEQ ID NO: 213404 - DNA, 25 bp, Artificial
  Probe
ccagcctactggtgcttgtggcggt

SEQ ID NO: 213405 - DNA, 25 bp, Artificial
  Probe
ctccgtggtggtctccagcctactg

SEQ ID NO: 213406 - DNA, 25 bp, Artificial
  Probe
cacagcctgtgtgaggtcattgtgg

SEQ ID NO: 213407 - DNA, 25 bp, Artificial
  Probe
tcctgcacttttgaggacccaatag

SEQ ID NO: 213408 - DNA, 25 bp, Artificial
  Probe
ggtggagcccagattgcatctcctg

SEQ ID NO: 213409 - DNA, 25 bp, Artificial
  Probe
gtggtggtctccagcctactggtgc

SEQ ID NO: 213410 - DNA, 25 bp, Artificial
  Probe
tgcttgtggcggtactgttcctgca

SEQ ID NO: 213411 - DNA, 25 bp, Artificial
  Probe
aggggccgcttatttccgatgtctt

SEQ ID NO: 213412 - DNA, 25 bp, Artificial
  Probe
ggcggtactgttcctgcacttttga

SEQ ID NO: 213413 - DNA, 25 bp, Artificial
  Probe
aggacccaatagttggcaggtcaca

SEQ ID NO: 213414 - DNA, 25 bp, Artificial
  Probe
ctactggtgcttgtggcggtactgt

SEQ ID NO: 213415 - DNA, 25 bp, Artificial
  Probe
cccagattgcatctcctgctttgaa

SEQ ID NO: 213416 - DNA, 25 bp, Artificial
  Probe
ctgctttactgctttcatggttatc

SEQ ID NO: 213417 - DNA, 25 bp, Artificial
  Probe
agattgcatctcctgctttgaactg

SEQ ID NO: 213418 - DNA, 25 bp, Artificial
  Probe
gcacttttgaggacccaatagttgg

SEQ ID NO: 213419 - DNA, 25 bp, Artificial
  Probe
agttggcaggtcacagcctgtgtga

SEQ ID NO: 213420 - DNA, 25 bp, Artificial
  Probe
ggggtcctggcaaccctaaggatgt

SEQ ID NO: 213421 - DNA, 25 bp, Artificial
  Probe
gaggggccgcttatttccgatgtct

SEQ ID NO: 213422 - DNA, 25 bp, Artificial
  Probe
gcggctccgtggtggtctccagcct

SEQ ID NO: 213423 - DNA, 25 bp, Artificial
  Probe
aggggtcctggcaaccctaaggatg

SEQ ID NO: 213424 - DNA, 25 bp, Artificial
  Probe
aactcaggcggctccgtggtggtct

SEQ ID NO: 213425 - DNA, 25 bp, Artificial
  Probe
ggacccaatagttggcaggtcacag

SEQ ID NO: 213426 - DNA, 25 bp, Artificial
  Probe
agtgcaggtgaactcaggcggctcc

SEQ ID NO: 213427 - DNA, 25 bp, Artificial
  Probe
taggtggagcccagattgcatctcc

SEQ ID NO: 213428 - DNA, 25 bp, Artificial
  Probe
gcatctcctgctttgaactggggag

SEQ ID NO: 213429 - DNA, 25 bp, Artificial
  Probe
tctccagcctactggtgcttgtggc

SEQ ID NO: 213430 - DNA, 25 bp, Artificial
  Probe
ctgttcctgcacttttgaggaccca

SEQ ID NO: 213431 - DNA, 25 bp, Artificial
  Probe
tactgctttcatggttatcggggag

SEQ ID NO: 213432 - DNA, 25 bp, Artificial
  Probe
gagggagttctgctttactgctttc

SEQ ID NO: 213433 - DNA, 25 bp, Artificial
  Probe
agttctgctttactgctttcatggt

SEQ ID NO: 213434 - DNA, 25 bp, Artificial
  Probe
ttttgaggacccaatagttggcagg

SEQ ID NO: 213435 - DNA, 25 bp, Artificial
  Probe
tggtctccagcctactggtgcttgt

SEQ ID NO: 213436 - DNA, 25 bp, Artificial
  Probe
ggagttctgctttactgctttcatg

SEQ ID NO: 213437 - DNA, 25 bp, Artificial
  Probe
cagattgcatctcctgctttgaact

SEQ ID NO: 213438 - DNA, 25 bp, Artificial
  Probe
tcctacaaagccagactttgatggc

SEQ ID NO: 213439 - DNA, 25 bp, Artificial
  Probe
catggccgcggttcccgagttactg

SEQ ID NO: 213440 - DNA, 25 bp, Artificial
  Probe
tgaaacaacagattatgccgggctt

SEQ ID NO: 213441 - DNA, 25 bp, Artificial
  Probe
tgcactcagtgagagagataaggtc

SEQ ID NO: 213442 - DNA, 25 bp, Artificial
  Probe
ttttctgttacaaggcaacatgaag

SEQ ID NO: 213443 - DNA, 25 bp, Artificial
  Probe
acctgaatgttgacccatcgcttca

SEQ ID NO: 213444 - DNA, 25 bp, Artificial
  Probe
ccatcgcttcagattgacatacctg

SEQ ID NO: 213445 - DNA, 25 bp, Artificial
  Probe
gctgcatgacactcttactgaaaca

SEQ ID NO: 213446 - DNA, 25 bp, Artificial
  Probe
attatgccgggcttatcatccctcc

SEQ ID NO: 213447 - DNA, 25 bp, Artificial
  Probe
tggacctgaatgttgacccatcgct

SEQ ID NO: 213448 - DNA, 25 bp, Artificial
  Probe
gaagactttgtgtggctgcatgaca

SEQ ID NO: 213449 - DNA, 25 bp, Artificial
  Probe
ctttgatggccctcgagagaagatg

SEQ ID NO: 213450 - DNA, 25 bp, Artificial
  Probe
atttgccaagatgaagcaagaactg

SEQ ID NO: 213451 - DNA, 25 bp, Artificial
  Probe
gaatttgccaagatgaagcaagaac

SEQ ID NO: 213452 - DNA, 25 bp, Artificial
  Probe
actggaagctgagtatctcgctgtc

SEQ ID NO: 213453 - DNA, 25 bp, Artificial
  Probe
aggatcgcagcaagttgaggtctgt

SEQ ID NO: 213454 - DNA, 25 bp, Artificial
  Probe
ctgttacaaggcaacatgaagactt

SEQ ID NO: 213455 - DNA, 25 bp, Artificial
  Probe
atttcagagcccagagttttctgtt

SEQ ID NO: 213456 - DNA, 25 bp, Artificial
  Probe
ccgcggttcccgagttactggagca

SEQ ID NO: 213457 - DNA, 25 bp, Artificial
  Probe
tactgaaacaacagattatgccggg

SEQ ID NO: 213458 - DNA, 25 bp, Artificial
  Probe
caacatgaagactttgtgtggctgc

SEQ ID NO: 213459 - DNA, 25 bp, Artificial
  Probe
aagctgagtatctcgctgtctttaa

SEQ ID NO: 213460 - DNA, 25 bp, Artificial
  Probe
gaaacaacagattatgccgggctta

SEQ ID NO: 213461 - DNA, 25 bp, Artificial
  Probe
ctgtctttaagaagactgtgtcctc

SEQ ID NO: 213462 - DNA, 25 bp, Artificial
  Probe
cccacatttcagagcccagagtttt

SEQ ID NO: 213463 - DNA, 25 bp, Artificial
  Probe
gtcaagtttacagttcacaccaaga

SEQ ID NO: 213464 - DNA, 25 bp, Artificial
  Probe
ctgatgcactcagtgagagagataa

SEQ ID NO: 213465 - DNA, 25 bp, Artificial
  Probe
gacccatcgcttcagattgacatac

SEQ ID NO: 213466 - DNA, 25 bp, Artificial
  Probe
cagcaagttgaggtctgtgtctgtg

SEQ ID NO: 213467 - DNA, 25 bp, Artificial
  Probe
gccagactttgatggccctcgagag

SEQ ID NO: 213468 - DNA, 25 bp, Artificial
  Probe
cctgctcctacaaagccagactttg

SEQ ID NO: 213469 - DNA, 25 bp, Artificial
  Probe
aatgttgacccatcgcttcagattg

SEQ ID NO: 213470 - DNA, 25 bp, Artificial
  Probe
tatgccgggcttatcatccctcctg

SEQ ID NO: 213471 - DNA, 25 bp, Artificial
  Probe
tcccgagttactggagcagcaggag

SEQ ID NO: 213472 - DNA, 25 bp, Artificial
  Probe
tgagtatctcgctgtctttaagaag

SEQ ID NO: 213473 - DNA, 25 bp, Artificial
  Probe
ctgtggacctgaatgttgacccatc

SEQ ID NO: 213474 - DNA, 25 bp, Artificial
  Probe
ttgaggtctgtgtctgtggacctga

SEQ ID NO: 213475 - DNA, 25 bp, Artificial
  Probe
tttaagaagactgtgtcctcacatg

SEQ ID NO: 213476 - DNA, 25 bp, Artificial
  Probe
cttactgaaacaacagattatgccg

SEQ ID NO: 213477 - DNA, 25 bp, Artificial
  Probe
actgcccacatttcagagcccagag

SEQ ID NO: 213478 - DNA, 25 bp, Artificial
  Probe
tgttacaaggcaacatgaagacttt

SEQ ID NO: 213479 - DNA, 25 bp, Artificial
  Probe
gaatgttgacccatcgcttcagatt

SEQ ID NO: 213480 - DNA, 25 bp, Artificial
  Probe
ttgacccatcgcttcagattgacat

SEQ ID NO: 213481 - DNA, 25 bp, Artificial
  Probe
actttgtgtggctgcatgacactct

SEQ ID NO: 213482 - DNA, 25 bp, Artificial
  Probe
ctgctcctacaaagccagactttga

SEQ ID NO: 213483 - DNA, 25 bp, Artificial
  Probe
ccctcgagagaagatgcagaaactg

SEQ ID NO: 213484 - DNA, 25 bp, Artificial
  Probe
cagtctgttgagtaccatgatccta

SEQ ID NO: 213485 - DNA, 25 bp, Artificial
  Probe
gaacgtgtgattctgcttaactgaa

SEQ ID NO: 213486 - DNA, 25 bp, Artificial
  Probe
gttgagtaccatgatcctatgggtc

SEQ ID NO: 213487 - DNA, 25 bp, Artificial
  Probe
gttttcagtctgttgagtaccatga

SEQ ID NO: 213488 - DNA, 25 bp, Artificial
  Probe
ctgttgagtaccatgatcctatggg

SEQ ID NO: 213489 - DNA, 25 bp, Artificial
  Probe
aatatccatggaacgtgtgattctg

SEQ ID NO: 213490 - DNA, 25 bp, Artificial
  Probe
tcaacaactgtaactgaatgtagtc

SEQ ID NO: 213491 - DNA, 25 bp, Artificial
  Probe
gttagctgaaatatccatggaacgt

SEQ ID NO: 213492 - DNA, 25 bp, Artificial
  Probe
ctgttttcagtctgttgagtaccat

SEQ ID NO: 213493 - DNA, 25 bp, Artificial
  Probe
tctgttgagtaccatgatcctatgg

SEQ ID NO: 213494 - DNA, 25 bp, Artificial
  Probe
tttcagtctgttgagtaccatgatc

SEQ ID NO: 213495 - DNA, 25 bp, Artificial
  Probe
tatccatggaacgtgtgattctgct

SEQ ID NO: 213496 - DNA, 25 bp, Artificial
  Probe
gagtaccatgatcctatgggtctaa

SEQ ID NO: 213497 - DNA, 25 bp, Artificial
  Probe
tcagtctgttgagtaccatgatcct

SEQ ID NO: 213498 - DNA, 25 bp, Artificial
  Probe
ttttcagtctgttgagtaccatgat

SEQ ID NO: 213499 - DNA, 25 bp, Artificial
  Probe
ctcaacaactgtaactgaatgtagt

SEQ ID NO: 213500 - DNA, 25 bp, Artificial
  Probe
tgttgagtaccatgatcctatgggt

SEQ ID NO: 213501 - DNA, 25 bp, Artificial
  Probe
agtaccatgatcctatgggtctaac

SEQ ID NO: 213502 - DNA, 25 bp, Artificial
  Probe
actcaacaactgtaactgaatgtag

SEQ ID NO: 213503 - DNA, 25 bp, Artificial
  Probe
ggaacgtgtgattctgcttaactga

SEQ ID NO: 213504 - DNA, 25 bp, Artificial
  Probe
ttagctgaaatatccatggaacgtg

SEQ ID NO: 213505 - DNA, 25 bp, Artificial
  Probe
tgagtaccatgatcctatgggtcta

SEQ ID NO: 213506 - DNA, 25 bp, Artificial
  Probe
aactgttttcagtctgttgagtacc

SEQ ID NO: 213507 - DNA, 25 bp, Artificial
  Probe
gtgcttttgacatttggggcattca

SEQ ID NO: 213508 - DNA, 25 bp, Artificial
  Probe
tggaacgtgtgattctgcttaactg

SEQ ID NO: 213509 - DNA, 25 bp, Artificial
  Probe
gtctgttgagtaccatgatcctatg

SEQ ID NO: 213510 - DNA, 25 bp, Artificial
  Probe
accatgatcctatgggtctaaccct

SEQ ID NO: 213511 - DNA, 25 bp, Artificial
  Probe
taccatgatcctatgggtctaaccc

SEQ ID NO: 213512 - DNA, 25 bp, Artificial
  Probe
actgttttcagtctgttgagtacca

SEQ ID NO: 213513 - DNA, 25 bp, Artificial
  Probe
ctgaaatatccatggaacgtgtgat

SEQ ID NO: 213514 - DNA, 25 bp, Artificial
  Probe
aacgtgtgattctgcttaactgaag

SEQ ID NO: 213515 - DNA, 25 bp, Artificial
  Probe
tgcttttgacatttggggcattcac

SEQ ID NO: 213516 - DNA, 25 bp, Artificial
  Probe
agtgcttttgacatttggggcattc

SEQ ID NO: 213517 - DNA, 25 bp, Artificial
  Probe
tccatggaacgtgtgattctgctta

SEQ ID NO: 213518 - DNA, 25 bp, Artificial
  Probe
agtctgttgagtaccatgatcctat

SEQ ID NO: 213519 - DNA, 25 bp, Artificial
  Probe
ttcagtctgttgagtaccatgatcc

SEQ ID NO: 213520 - DNA, 25 bp, Artificial
  Probe
gtgttttactcaacaactgtaactg

SEQ ID NO: 213521 - DNA, 25 bp, Artificial
  Probe
gaaatatccatggaacgtgtgattc

SEQ ID NO: 213522 - DNA, 25 bp, Artificial
  Probe
atatccatggaacgtgtgattctgc

SEQ ID NO: 213523 - DNA, 25 bp, Artificial
  Probe
tgttttcagtctgttgagtaccatg

SEQ ID NO: 213524 - DNA, 25 bp, Artificial
  Probe
gcttttgacatttggggcattcaca

SEQ ID NO: 213525 - DNA, 25 bp, Artificial
  Probe
gaactgttttcagtctgttgagtac

SEQ ID NO: 213526 - DNA, 25 bp, Artificial
  Probe
atccatggaacgtgtgattctgctt

SEQ ID NO: 213527 - DNA, 25 bp, Artificial
  Probe
ccatggaacgtgtgattctgcttaa

SEQ ID NO: 213528 - DNA, 25 bp, Artificial
  Probe
ttgagtaccatgatcctatgggtct

SEQ ID NO: 213529 - DNA, 25 bp, Artificial
  Probe
gtaccatgatcctatgggtctaacc

SEQ ID NO: 213530 - DNA, 25 bp, Artificial
  Probe
caaggatcgtttcctaggactggaa

SEQ ID NO: 213531 - DNA, 25 bp, Artificial
  Probe
taaacaagcatctgtcatttgctgc

SEQ ID NO: 213532 - DNA, 25 bp, Artificial
  Probe
tttttgagaatcctactatggttca

SEQ ID NO: 213533 - DNA, 25 bp, Artificial
  Probe
gccctgggaattcatcaccaagaac

SEQ ID NO: 213534 - DNA, 25 bp, Artificial
  Probe
tcctaggactggaactgccctggga

SEQ ID NO: 213535 - DNA, 25 bp, Artificial
  Probe
gccacggtttccaaattggtcaggt

SEQ ID NO: 213536 - DNA, 25 bp, Artificial
  Probe
gttgcataaacaagcatctgtcatt

SEQ ID NO: 213537 - DNA, 25 bp, Artificial
  Probe
gaatgtcactaaggtgttcttatac

SEQ ID NO: 213538 - DNA, 25 bp, Artificial
  Probe
ttcctaggactggaactgccctggg

SEQ ID NO: 213539 - DNA, 25 bp, Artificial
  Probe
tcaagaatgtcactaaggtgttctt

SEQ ID NO: 213540 - DNA, 25 bp, Artificial
  Probe
aggccacggtttccaaattggtcag

SEQ ID NO: 213541 - DNA, 25 bp, Artificial
  Probe
tctgcttatgtatgtgccaactccg

SEQ ID NO: 213542 - DNA, 25 bp, Artificial
  Probe
aactgttgcataaacaagcatctgt

SEQ ID NO: 213543 - DNA, 25 bp, Artificial
  Probe
cactctgcttatgtatgtgccaact

SEQ ID NO: 213544 - DNA, 25 bp, Artificial
  Probe
gtttttgagaatcctactatggttc

SEQ ID NO: 213545 - DNA, 25 bp, Artificial
  Probe
atcaccaagaacaagaccttttcgg

SEQ ID NO: 213546 - DNA, 25 bp, Artificial
  Probe
cacggtttccaaattggtcaggtca

SEQ ID NO: 213547 - DNA, 25 bp, Artificial
  Probe
ttctccaaggatcgtttcctaggac

SEQ ID NO: 213548 - DNA, 25 bp, Artificial
  Probe
aggctccttggctcatgaatgaact

SEQ ID NO: 213549 - DNA, 25 bp, Artificial
  Probe
gtttccaaattggtcaggtcattca

SEQ ID NO: 213550 - DNA, 25 bp, Artificial
  Probe
taattctccaaggatcgtttcctag

SEQ ID NO: 213551 - DNA, 25 bp, Artificial
  Probe
ccttggctcatgaatgaactccgaa

SEQ ID NO: 213552 - DNA, 25 bp, Artificial
  Probe
tcactaaggtgttcttataccagag

SEQ ID NO: 213553 - DNA, 25 bp, Artificial
  Probe
gacaggccacggtttccaaattggt

SEQ ID NO: 213554 - DNA, 25 bp, Artificial
  Probe
gtgttcttataccagaggtttcctt

SEQ ID NO: 213555 - DNA, 25 bp, Artificial
  Probe
tgtggcagcctgtggacctcctgac

SEQ ID NO: 213556 - DNA, 25 bp, Artificial
  Probe
tattgacaggccacggtttccaaat

SEQ ID NO: 213557 - DNA, 25 bp, Artificial
  Probe
ggatcgtttcctaggactggaactg

SEQ ID NO: 213558 - DNA, 25 bp, Artificial
  Probe
aatcaagaatgtcactaaggtgttc

SEQ ID NO: 213559 - DNA, 25 bp, Artificial
  Probe
actgtggcagcctgtggacctcctg

SEQ ID NO: 213560 - DNA, 25 bp, Artificial
  Probe
aactgccctgggaattcatcaccaa

SEQ ID NO: 213561 - DNA, 25 bp, Artificial
  Probe
aggatcgtttcctaggactggaact

SEQ ID NO: 213562 - DNA, 25 bp, Artificial
  Probe
ctaaggtgttcttataccagaggtt

SEQ ID NO: 213563 - DNA, 25 bp, Artificial
  Probe
ctggaactgccctgggaattcatca

SEQ ID NO: 213564 - DNA, 25 bp, Artificial
  Probe
tcaccaagaacaagaccttttcggg

SEQ ID NO: 213565 - DNA, 25 bp, Artificial
  Probe
agaatcctactatggttcagtttga

SEQ ID NO: 213566 - DNA, 25 bp, Artificial
  Probe
atcgtttcctaggactggaactgcc

SEQ ID NO: 213567 - DNA, 25 bp, Artificial
  Probe
taggactggaactgccctgggaatt

SEQ ID NO: 213568 - DNA, 25 bp, Artificial
  Probe
tgcataaacaagcatctgtcatttg

SEQ ID NO: 213569 - DNA, 25 bp, Artificial
  Probe
tgttcttataccagaggtttccttt

SEQ ID NO: 213570 - DNA, 25 bp, Artificial
  Probe
caggccacggtttccaaattggtca

SEQ ID NO: 213571 - DNA, 25 bp, Artificial
  Probe
ggtgttcttataccagaggtttcct

SEQ ID NO: 213572 - DNA, 25 bp, Artificial
  Probe
tggcagcctgtggacctcctgacct

SEQ ID NO: 213573 - DNA, 25 bp, Artificial
  Probe
ggcagcctgtggacctcctgacctt

SEQ ID NO: 213574 - DNA, 25 bp, Artificial
  Probe
actgccctgggaattcatcaccaag

SEQ ID NO: 213575 - DNA, 25 bp, Artificial
  Probe
ggccacggtttccaaattggtcagg

SEQ ID NO: 213576 - DNA, 25 bp, Artificial
  Probe
aagcaggctcaacgtggctcttcca

SEQ ID NO: 213577 - DNA, 25 bp, Artificial
  Probe
cgtggctcttccaatgtcttctcaa

SEQ ID NO: 213578 - DNA, 25 bp, Artificial
  Probe
ctcaacgtggctcttccaatgtctt

SEQ ID NO: 213579 - DNA, 25 bp, Artificial
  Probe
accaagcaggctcaacgtggctctt

SEQ ID NO: 213580 - DNA, 25 bp, Artificial
  Probe
acactggggtcacctcaataaactc

SEQ ID NO: 213581 - DNA, 25 bp, Artificial
  Probe
ccttcagctgcattgaccagaacag

SEQ ID NO: 213582 - DNA, 25 bp, Artificial
  Probe
agcaggctcaacgtggctcttccaa

SEQ ID NO: 213583 - DNA, 25 bp, Artificial
  Probe
aaggaagccttcagctgcattgacc

SEQ ID NO: 213584 - DNA, 25 bp, Artificial
  Probe
tggggtcacctcaataaactctgtg

SEQ ID NO: 213585 - DNA, 25 bp, Artificial
  Probe
tcagctgcattgaccagaacagaga

SEQ ID NO: 213586 - DNA, 25 bp, Artificial
  Probe
gcaggctcaacgtggctcttccaat

SEQ ID NO: 213587 - DNA, 25 bp, Artificial
  Probe
tcaaggaagccttcagctgcattga

SEQ ID NO: 213588 - DNA, 25 bp, Artificial
  Probe
aacgtggctcttccaatgtcttctc

SEQ ID NO: 213589 - DNA, 25 bp, Artificial
  Probe
agccttcagctgcattgaccagaac

SEQ ID NO: 213590 - DNA, 25 bp, Artificial
  Probe
gagtagagacacactggggtcacct

SEQ ID NO: 213591 - DNA, 25 bp, Artificial
  Probe
acacactggggtcacctcaataaac

SEQ ID NO: 213592 - DNA, 25 bp, Artificial
  Probe
tcacccacggggatgagaaagagga

SEQ ID NO: 213593 - DNA, 25 bp, Artificial
  Probe
caagcaggctcaacgtggctcttcc

SEQ ID NO: 213594 - DNA, 25 bp, Artificial
  Probe
caacgtggctcttccaatgtcttct

SEQ ID NO: 213595 - DNA, 25 bp, Artificial
  Probe
aaggctgcagccaccaagcaggctc

SEQ ID NO: 213596 - DNA, 25 bp, Artificial
  Probe
ggtcacctcaataaactctgtgcct

SEQ ID NO: 213597 - DNA, 25 bp, Artificial
  Probe
ttcagctgcattgaccagaacagag

SEQ ID NO: 213598 - DNA, 25 bp, Artificial
  Probe
tcgagcaagcccagattcaggaatt

SEQ ID NO: 213599 - DNA, 25 bp, Artificial
  Probe
ccaagcaggctcaacgtggctcttc

SEQ ID NO: 213600 - DNA, 25 bp, Artificial
  Probe
cgagcaagcccagattcaggaattc

SEQ ID NO: 213601 - DNA, 25 bp, Artificial
  Probe
ctggggtcacctcaataaactctgt

SEQ ID NO: 213602 - DNA, 25 bp, Artificial
  Probe
gctcaacgtggctcttccaatgtct

SEQ ID NO: 213603 - DNA, 25 bp, Artificial
  Probe
gtcacctcaataaactctgtgcctg

SEQ ID NO: 213604 - DNA, 25 bp, Artificial
  Probe
cggggcaaggctgcagccaccaagc

SEQ ID NO: 213605 - DNA, 25 bp, Artificial
  Probe
ttcaaggaagccttcagctgcattg

SEQ ID NO: 213606 - DNA, 25 bp, Artificial
  Probe
gtagagacacactggggtcacctca

SEQ ID NO: 213607 - DNA, 25 bp, Artificial
  Probe
aggaagccttcagctgcattgacca

SEQ ID NO: 213608 - DNA, 25 bp, Artificial
  Probe
aagccttcagctgcattgaccagaa

SEQ ID NO: 213609 - DNA, 25 bp, Artificial
  Probe
ggctgcagccaccaagcaggctcaa

SEQ ID NO: 213610 - DNA, 25 bp, Artificial
  Probe
acgtggctcttccaatgtcttctca

SEQ ID NO: 213611 - DNA, 25 bp, Artificial
  Probe
gacacactggggtcacctcaataaa

SEQ ID NO: 213612 - DNA, 25 bp, Artificial
  Probe
agtagagacacactggggtcacctc

SEQ ID NO: 213613 - DNA, 25 bp, Artificial
  Probe
ggggtcacctcaataaactctgtgc

SEQ ID NO: 213614 - DNA, 25 bp, Artificial
  Probe
cacactggggtcacctcaataaact

SEQ ID NO: 213615 - DNA, 25 bp, Artificial
  Probe
cttcagctgcattgaccagaacaga

SEQ ID NO: 213616 - DNA, 25 bp, Artificial
  Probe
cactggggtcacctcaataaactct

SEQ ID NO: 213617 - DNA, 25 bp, Artificial
  Probe
ggaagccttcagctgcattgaccag

SEQ ID NO: 213618 - DNA, 25 bp, Artificial
  Probe
gggcaaggctgcagccaccaagcag

SEQ ID NO: 213619 - DNA, 25 bp, Artificial
  Probe
gtggctcttccaatgtcttctcaat

SEQ ID NO: 213620 - DNA, 25 bp, Artificial
  Probe
tgcagccaccaagcaggctcaacgt

SEQ ID NO: 213621 - DNA, 25 bp, Artificial
  Probe
caccaagcaggctcaacgtggctct

SEQ ID NO: 213622 - DNA, 25 bp, Artificial
  Probe
gccatatggcccagcagaactgagc

SEQ ID NO: 213623 - DNA, 25 bp, Artificial
  Probe
gcctttggttcagtgtcccagcctc

SEQ ID NO: 213624 - DNA, 25 bp, Artificial
  Probe
gagacaatctaaagctgctctccct

SEQ ID NO: 213625 - DNA, 25 bp, Artificial
  Probe
tcagtcattctttagggactagagt

SEQ ID NO: 213626 - DNA, 25 bp, Artificial
  Probe
atgggcctttggttcagtgtcccag

SEQ ID NO: 213627 - DNA, 25 bp, Artificial
  Probe
ggctcaggtgccaatcgcaatgggc

SEQ ID NO: 213628 - DNA, 25 bp, Artificial
  Probe
cattctttagggactagagtcattg

SEQ ID NO: 213629 - DNA, 25 bp, Artificial
  Probe
agcaggctcaggtgccaatcgcaat

SEQ ID NO: 213630 - DNA, 25 bp, Artificial
  Probe
tgccaatcgcaatgggcctttggtt

SEQ ID NO: 213631 - DNA, 25 bp, Artificial
  Probe
actttggcaccatgaaagaaaggcc

SEQ ID NO: 213632 - DNA, 25 bp, Artificial
  Probe
cagtcattctttagggactagagtc

SEQ ID NO: 213633 - DNA, 25 bp, Artificial
  Probe
ctggttctgcacagctggccaatgg

SEQ ID NO: 213634 - DNA, 25 bp, Artificial
  Probe
tatggcccagcagaactgagcaaag

SEQ ID NO: 213635 - DNA, 25 bp, Artificial
  Probe
atatggcccagcagaactgagcaaa

SEQ ID NO: 213636 - DNA, 25 bp, Artificial
  Probe
tctggcctcagtcattctttaggga

SEQ ID NO: 213637 - DNA, 25 bp, Artificial
  Probe
cccagcagaactgagcaaagtcaat

SEQ ID NO: 213638 - DNA, 25 bp, Artificial
  Probe
ccaggtctgtgatctgcagctatgg

SEQ ID NO: 213639 - DNA, 25 bp, Artificial
  Probe
ccagcaggctcaggtgccaatcgca

SEQ ID NO: 213640 - DNA, 25 bp, Artificial
  Probe
tcgcaatgggcctttggttcagtgt

SEQ ID NO: 213641 - DNA, 25 bp, Artificial
  Probe
agctactttggcaccatgaaagaaa

SEQ ID NO: 213642 - DNA, 25 bp, Artificial
  Probe
aaggccgagacaatctaaagctgct

SEQ ID NO: 213643 - DNA, 25 bp, Artificial
  Probe
caatagaggggtttctggagtacac

SEQ ID NO: 213644 - DNA, 25 bp, Artificial
  Probe
tcctggttctgcacagctggccaat

SEQ ID NO: 213645 - DNA, 25 bp, Artificial
  Probe
caggtctgtgatctgcagctatggg

SEQ ID NO: 213646 - DNA, 25 bp, Artificial
  Probe
atagaggggtttctggagtacactc

SEQ ID NO: 213647 - DNA, 25 bp, Artificial
  Probe
ggtgccaatcgcaatgggcctttgg

SEQ ID NO: 213648 - DNA, 25 bp, Artificial
  Probe
atggcccagcagaactgagcaaagt

SEQ ID NO: 213649 - DNA, 25 bp, Artificial
  Probe
tactttggcaccatgaaagaaaggc

SEQ ID NO: 213650 - DNA, 25 bp, Artificial
  Probe
tctgtgatctgcagctatggggctg

SEQ ID NO: 213651 - DNA, 25 bp, Artificial
  Probe
ctcaggtgccaatcgcaatgggcct

SEQ ID NO: 213652 - DNA, 25 bp, Artificial
  Probe
tggcctcagtcattctttagggact

SEQ ID NO: 213653 - DNA, 25 bp, Artificial
  Probe
ggttctgcacagctggccaatggac

SEQ ID NO: 213654 - DNA, 25 bp, Artificial
  Probe
ccagcagaactgagcaaagtcaata

SEQ ID NO: 213655 - DNA, 25 bp, Artificial
  Probe
gcaatgggcctttggttcagtgtcc

SEQ ID NO: 213656 - DNA, 25 bp, Artificial
  Probe
gttcagtgtcccagcctcttttgct

SEQ ID NO: 213657 - DNA, 25 bp, Artificial
  Probe
gggaagctactttggcaccatgaaa

SEQ ID NO: 213658 - DNA, 25 bp, Artificial
  Probe
ctttggcaccatgaaagaaaggccg

SEQ ID NO: 213659 - DNA, 25 bp, Artificial
  Probe
gtgccaatcgcaatgggcctttggt

SEQ ID NO: 213660 - DNA, 25 bp, Artificial
  Probe
cctcagtcattctttagggactaga

SEQ ID NO: 213661 - DNA, 25 bp, Artificial
  Probe
ggcctcagtcattctttagggacta

SEQ ID NO: 213662 - DNA, 25 bp, Artificial
  Probe
ctctggcctcagtcattctttaggg

SEQ ID NO: 213663 - DNA, 25 bp, Artificial
  Probe
aaaggccgagacaatctaaagctgc

SEQ ID NO: 213664 - DNA, 25 bp, Artificial
  Probe
gtctgtgatctgcagctatggggct

SEQ ID NO: 213665 - DNA, 25 bp, Artificial
  Probe
gccgagacaatctaaagctgctctc

SEQ ID NO: 213666 - DNA, 25 bp, Artificial
  Probe
gctactttggcaccatgaaagaaag

SEQ ID NO: 213667 - DNA, 25 bp, Artificial
  Probe
ggcctttggttcagtgtcccagcct

SEQ ID NO: 213668 - DNA, 25 bp, Artificial
  Probe
ccctggcgaggaaggacctggatca

SEQ ID NO: 213669 - DNA, 25 bp, Artificial
  Probe
tccaagtccaagtgatcgtgtgtcg

SEQ ID NO: 213670 - DNA, 25 bp, Artificial
  Probe
cccaagatgcactggggaccaagag

SEQ ID NO: 213671 - DNA, 25 bp, Artificial
  Probe
actccaaatggcagctctttgtcca

SEQ ID NO: 213672 - DNA, 25 bp, Artificial
  Probe
actccaagtccaagtgatcgtgtgt

SEQ ID NO: 213673 - DNA, 25 bp, Artificial
  Probe
cctcaccttggcattgcactgggta

SEQ ID NO: 213674 - DNA, 25 bp, Artificial
  Probe
agtggagacactgtcaccaggcatg

SEQ ID NO: 213675 - DNA, 25 bp, Artificial
  Probe
caaagcctgagcacttactttacag

SEQ ID NO: 213676 - DNA, 25 bp, Artificial
  Probe
gacccagaacccaagatgcactggg

SEQ ID NO: 213677 - DNA, 25 bp, Artificial
  Probe
caaatgtggcaactccaagtccaag

SEQ ID NO: 213678 - DNA, 25 bp, Artificial
  Probe
gaaaggacccagaacccaagatgca

SEQ ID NO: 213679 - DNA, 25 bp, Artificial
  Probe
caggacgaccatggtaatactccaa

SEQ ID NO: 213680 - DNA, 25 bp, Artificial
  Probe
aaaggacccagaacccaagatgcac

SEQ ID NO: 213681 - DNA, 25 bp, Artificial
  Probe
ctccatctgatctcacggagaaagg

SEQ ID NO: 213682 - DNA, 25 bp, Artificial
  Probe
cggcagacagtgtgcccctgaagac

SEQ ID NO: 213683 - DNA, 25 bp, Artificial
  Probe
tggcaactccaagtccaagtgatcg

SEQ ID NO: 213684 - DNA, 25 bp, Artificial
  Probe
cccaaatgtggcaactccaagtcca

SEQ ID NO: 213685 - DNA, 25 bp, Artificial
  Probe
gagaaaggacccagaacccaagatg

SEQ ID NO: 213686 - DNA, 25 bp, Artificial
  Probe
atggcagctctttgtccagtaataa

SEQ ID NO: 213687 - DNA, 25 bp, Artificial
  Probe
gaaggacctggatcagccggcagac

SEQ ID NO: 213688 - DNA, 25 bp, Artificial
  Probe
ggatcagccggcagacagtgtgccc

SEQ ID NO: 213689 - DNA, 25 bp, Artificial
  Probe
taaaggctcagagagctagactgga

SEQ ID NO: 213690 - DNA, 25 bp, Artificial
  Probe
ctgatctcacggagaaaggacccag

SEQ ID NO: 213691 - DNA, 25 bp, Artificial
  Probe
gtccccaaagcctgagcacttactt

SEQ ID NO: 213692 - DNA, 25 bp, Artificial
  Probe
accttgttggagtggagacactgtc

SEQ ID NO: 213693 - DNA, 25 bp, Artificial
  Probe
aagcagccccagctgggaggtctac

SEQ ID NO: 213694 - DNA, 25 bp, Artificial
  Probe
agtgatctaagcagccccagctggg

SEQ ID NO: 213695 - DNA, 25 bp, Artificial
  Probe
gcatgtccccaaagcctgagcactt

SEQ ID NO: 213696 - DNA, 25 bp, Artificial
  Probe
aagcctgagcacttactttacagga

SEQ ID NO: 213697 - DNA, 25 bp, Artificial
  Probe
aggacctggatcagccggcagacag

SEQ ID NO: 213698 - DNA, 25 bp, Artificial
  Probe
aggcatgtccccaaagcctgagcac

SEQ ID NO: 213699 - DNA, 25 bp, Artificial
  Probe
ccatctgatctcacggagaaaggac

SEQ ID NO: 213700 - DNA, 25 bp, Artificial
  Probe
ctaagcagccccagctgggaggtct

SEQ ID NO: 213701 - DNA, 25 bp, Artificial
  Probe
tctcacggagaaaggacccagaacc

SEQ ID NO: 213702 - DNA, 25 bp, Artificial
  Probe
ggggaccaagagtccttcaccttgt

SEQ ID NO: 213703 - DNA, 25 bp, Artificial
  Probe
tgagtgatctaagcagccccagctg

SEQ ID NO: 213704 - DNA, 25 bp, Artificial
  Probe
gatgcactggggaccaagagtcctt

SEQ ID NO: 213705 - DNA, 25 bp, Artificial
  Probe
ccagctccatctgatctcacggaga

SEQ ID NO: 213706 - DNA, 25 bp, Artificial
  Probe
taatactccaaatggcagctctttg

SEQ ID NO: 213707 - DNA, 25 bp, Artificial
  Probe
tggagacactgtcaccaggcatgtc

SEQ ID NO: 213708 - DNA, 25 bp, Artificial
  Probe
ttgttggagtggagacactgtcacc

SEQ ID NO: 213709 - DNA, 25 bp, Artificial
  Probe
cagctctttgtccagtaataaaggc

SEQ ID NO: 213710 - DNA, 25 bp, Artificial
  Probe
tctttgtccagtaataaaggctcag

SEQ ID NO: 213711 - DNA, 25 bp, Artificial
  Probe
cacacctggccctggcgaggaagga

SEQ ID NO: 213712 - DNA, 25 bp, Artificial
  Probe
agcagccccagctgggaggtctacc

SEQ ID NO: 213713 - DNA, 25 bp, Artificial
  Probe
ctctttgtccagtaataaaggctca

SEQ ID NO: 213714 - DNA, 25 bp, Artificial
  Probe
tccaatggagcaatctcctgtttta

SEQ ID NO: 213715 - DNA, 25 bp, Artificial
  Probe
tcttagctcaaaatgttgagtcatt

SEQ ID NO: 213716 - DNA, 25 bp, Artificial
  Probe
tatccaatggagcaatctcctgttt

SEQ ID NO: 213717 - DNA, 25 bp, Artificial
  Probe
acctcttagctcaaaatgttgagtc

SEQ ID NO: 213718 - DNA, 25 bp, Artificial
  Probe
aatggagcaatctcctgttttatat

SEQ ID NO: 213719 - DNA, 25 bp, Artificial
  Probe
tgtgatccgggataagcccctcttc

SEQ ID NO: 213720 - DNA, 25 bp, Artificial
  Probe
atccaatggagcaatctcctgtttt

SEQ ID NO: 213721 - DNA, 25 bp, Artificial
  Probe
tgcttggtcttctcccttcaattag

SEQ ID NO: 213722 - DNA, 25 bp, Artificial
  Probe
tcatatccaatggagcaatctcctg

SEQ ID NO: 213723 - DNA, 25 bp, Artificial
  Probe
gtgatccgggataagcccctcttct

SEQ ID NO: 213724 - DNA, 25 bp, Artificial
  Probe
ctcctgtaggctcatttgtataaga

SEQ ID NO: 213725 - DNA, 25 bp, Artificial
  Probe
atgtgatccgggataagcccctctt

SEQ ID NO: 213726 - DNA, 25 bp, Artificial
  Probe
aacctcttagctcaaaatgttgagt

SEQ ID NO: 213727 - DNA, 25 bp, Artificial
  Probe
catatccaatggagcaatctcctgt

SEQ ID NO: 213728 - DNA, 25 bp, Artificial
  Probe
caacctcttagctcaaaatgttgag

SEQ ID NO: 213729 - DNA, 25 bp, Artificial
  Probe
gaaatcttactctatagacagcaag

SEQ ID NO: 213730 - DNA, 25 bp, Artificial
  Probe
catttagatgtgatccgggataagc

SEQ ID NO: 213731 - DNA, 25 bp, Artificial
  Probe
attatcctggtgcttcccatgtaag

SEQ ID NO: 213732 - DNA, 25 bp, Artificial
  Probe
caatggagcaatctcctgttttata

SEQ ID NO: 213733 - DNA, 25 bp, Artificial
  Probe
tcctgtaggctcatttgtataagaa

SEQ ID NO: 213734 - DNA, 25 bp, Artificial
  Probe
ttatcctggtgcttcccatgtaaga

SEQ ID NO: 213735 - DNA, 25 bp, Artificial
  Probe
cttagctcaaaatgttgagtcattt

SEQ ID NO: 213736 - DNA, 25 bp, Artificial
  Probe
tctcctgtaggctcatttgtataag

SEQ ID NO: 213737 - DNA, 25 bp, Artificial
  Probe
ctctatagacagcaagatattcatg

SEQ ID NO: 213738 - DNA, 25 bp, Artificial
  Probe
atatccaatggagcaatctcctgtt

SEQ ID NO: 213739 - DNA, 25 bp, Artificial
  Probe
ctcttagctcaaaatgttgagtcat

SEQ ID NO: 213740 - DNA, 25 bp, Artificial
  Probe
tcttattatcctggtgcttcccatg

SEQ ID NO: 213741 - DNA, 25 bp, Artificial
  Probe
cctcttagctcaaaatgttgagtca

SEQ ID NO: 213742 - DNA, 25 bp, Artificial
  Probe
atttagatgtgatccgggataagcc

SEQ ID NO: 213743 - DNA, 25 bp, Artificial
  Probe
tatcctggtgcttcccatgtaagaa

SEQ ID NO: 213744 - DNA, 25 bp, Artificial
  Probe
ttattatcctggtgcttcccatgta

SEQ ID NO: 213745 - DNA, 25 bp, Artificial
  Probe
ccaatggagcaatctcctgttttat

SEQ ID NO: 213746 - DNA, 25 bp, Artificial
  Probe
tgatccgggataagcccctcttctg

SEQ ID NO: 213747 - DNA, 25 bp, Artificial
  Probe
cttattatcctggtgcttcccatgt

SEQ ID NO: 213748 - DNA, 25 bp, Artificial
  Probe
cctgtaggctcatttgtataagaag

SEQ ID NO: 213749 - DNA, 25 bp, Artificial
  Probe
tattatcctggtgcttcccatgtaa

SEQ ID NO: 213750 - DNA, 25 bp, Artificial
  Probe
aagaggcccttctctcagtgcttgt

SEQ ID NO: 213751 - DNA, 25 bp, Artificial
  Probe
acttcccaaagaggcccttctctca

SEQ ID NO: 213752 - DNA, 25 bp, Artificial
  Probe
ggcccttctctcagtgcttgtccac

SEQ ID NO: 213753 - DNA, 25 bp, Artificial
  Probe
aagatgaaagacttcccaaagaggc

SEQ ID NO: 213754 - DNA, 25 bp, Artificial
  Probe
cagtgcttgtccacaatcatttctc

SEQ ID NO: 213755 - DNA, 25 bp, Artificial
  Probe
tcccaaagaggcccttctctcagtg

SEQ ID NO: 213756 - DNA, 25 bp, Artificial
  Probe
gcccttctctcagtgcttgtccaca

SEQ ID NO: 213757 - DNA, 25 bp, Artificial
  Probe
tcagtgcttgtccacaatcatttct

SEQ ID NO: 213758 - DNA, 25 bp, Artificial
  Probe
gaacggaactcttcagccctcagat

SEQ ID NO: 213759 - DNA, 25 bp, Artificial
  Probe
tctctcagtgcttgtccacaatcat

SEQ ID NO: 213760 - DNA, 25 bp, Artificial
  Probe
ccaaagaggcccttctctcagtgct

SEQ ID NO: 213761 - DNA, 25 bp, Artificial
  Probe
cccttctctcagtgcttgtccacaa

SEQ ID NO: 213762 - DNA, 25 bp, Artificial
  Probe
tgaaagacttcccaaagaggccctt

SEQ ID NO: 213763 - DNA, 25 bp, Artificial
  Probe
gaggcccttctctcagtgcttgtcc

SEQ ID NO: 213764 - DNA, 25 bp, Artificial
  Probe
agccctcagatttggaaagaaataa

SEQ ID NO: 213765 - DNA, 25 bp, Artificial
  Probe
cggaactcttcagccctcagatttg

SEQ ID NO: 213766 - DNA, 25 bp, Artificial
  Probe
ttcccaaagaggcccttctctcagt

SEQ ID NO: 213767 - DNA, 25 bp, Artificial
  Probe
agatgaaagacttcccaaagaggcc

SEQ ID NO: 213768 - DNA, 25 bp, Artificial
  Probe
ctctcagtgcttgtccacaatcatt

SEQ ID NO: 213769 - DNA, 25 bp, Artificial
  Probe
agacttcccaaagaggcccttctct

SEQ ID NO: 213770 - DNA, 25 bp, Artificial
  Probe
agaggcccttctctcagtgcttgtc

SEQ ID NO: 213771 - DNA, 25 bp, Artificial
  Probe
aatctggagaacggaactcttcagc

SEQ ID NO: 213772 - DNA, 25 bp, Artificial
  Probe
cttctctcagtgcttgtccacaatc

SEQ ID NO: 213773 - DNA, 25 bp, Artificial
  Probe
cttcccaaagaggcccttctctcag

SEQ ID NO: 213774 - DNA, 25 bp, Artificial
  Probe
aaagaggcccttctctcagtgcttg

SEQ ID NO: 213775 - DNA, 25 bp, Artificial
  Probe
gatgaaagacttcccaaagaggccc

SEQ ID NO: 213776 - DNA, 25 bp, Artificial
  Probe
atgaaagacttcccaaagaggccct

SEQ ID NO: 213777 - DNA, 25 bp, Artificial
  Probe
ctcagtgcttgtccacaatcatttc

SEQ ID NO: 213778 - DNA, 25 bp, Artificial
  Probe
ccttctctcagtgcttgtccacaat

SEQ ID NO: 213779 - DNA, 25 bp, Artificial
  Probe
cccaaagaggcccttctctcagtgc

SEQ ID NO: 213780 - DNA, 25 bp, Artificial
  Probe
tctcagtgcttgtccacaatcattt

SEQ ID NO: 213781 - DNA, 25 bp, Artificial
  Probe
agaacggaactcttcagccctcaga

SEQ ID NO: 213782 - DNA, 25 bp, Artificial
  Probe
gccctcagatttggaaagaaataag

SEQ ID NO: 213783 - DNA, 25 bp, Artificial
  Probe
ttctctcagtgcttgtccacaatca

SEQ ID NO: 213784 - DNA, 25 bp, Artificial
  Probe
aacggaactcttcagccctcagatt

SEQ ID NO: 213785 - DNA, 25 bp, Artificial
  Probe
acggaactcttcagccctcagattt

SEQ ID NO: 213786 - DNA, 25 bp, Artificial
  Probe
caaagaggcccttctctcagtgctt

SEQ ID NO: 213787 - DNA, 25 bp, Artificial
  Probe
gacttcccaaagaggcccttctctc

SEQ ID NO: 213788 - DNA, 25 bp, Artificial
  Probe
aggcccttctctcagtgcttgtcca

SEQ ID NO: 213789 - DNA, 25 bp, Artificial
  Probe
ggacaaaatacaaacggcagaagct

SEQ ID NO: 213790 - DNA, 25 bp, Artificial
  Probe
ttccagaatcggaggacaaaataca

SEQ ID NO: 213791 - DNA, 25 bp, Artificial
  Probe
actaggggaacagtcgagagcccac

SEQ ID NO: 213792 - DNA, 25 bp, Artificial
  Probe
accggtggcgcatcgccacgaagca

SEQ ID NO: 213793 - DNA, 25 bp, Artificial
  Probe
gacaaaatacaaacggcagaagctg

SEQ ID NO: 213794 - DNA, 25 bp, Artificial
  Probe
cttctggtggagagcctgctgcttg

SEQ ID NO: 213795 - DNA, 25 bp, Artificial
  Probe
gggccatcaccgtcagagggacaag

SEQ ID NO: 213796 - DNA, 25 bp, Artificial
  Probe
aatacaaacggcagaagctggagga

SEQ ID NO: 213797 - DNA, 25 bp, Artificial
  Probe
cgagagcccacaagggcagagcatt

SEQ ID NO: 213798 - DNA, 25 bp, Artificial
  Probe
tgctgcttgggtggaccgcccatcc

SEQ ID NO: 213799 - DNA, 25 bp, Artificial
  Probe
gttctgagacatgtctcttttaatt

SEQ ID NO: 213800 - DNA, 25 bp, Artificial
  Probe
gtggttccagaatcggaggacaaaa

SEQ ID NO: 213801 - DNA, 25 bp, Artificial
  Probe
agctgctctccgtgtctctgtcttt

SEQ ID NO: 213802 - DNA, 25 bp, Artificial
  Probe
cctctaatgactaggggaacagtcg

SEQ ID NO: 213803 - DNA, 25 bp, Artificial
  Probe
tggactctggccactccttagccag

SEQ ID NO: 213804 - DNA, 25 bp, Artificial
  Probe
ctgctgcttgggtggaccgcccatc

SEQ ID NO: 213805 - DNA, 25 bp, Artificial
  Probe
gttcccaccatatcaaccggtggcg

SEQ ID NO: 213806 - DNA, 25 bp, Artificial
  Probe
tgtctctgtctttgttctgagacat

SEQ ID NO: 213807 - DNA, 25 bp, Artificial
  Probe
catcaccgtcagagggacaagaaaa

SEQ ID NO: 213808 - DNA, 25 bp, Artificial
  Probe
agcctggggccatcaccgtcagagg

SEQ ID NO: 213809 - DNA, 25 bp, Artificial
  Probe
gtcacggccccacagggcttggagc

SEQ ID NO: 213810 - DNA, 25 bp, Artificial
  Probe
ggaacagtcgagagcccacaagggc

SEQ ID NO: 213811 - DNA, 25 bp, Artificial
  Probe
gcccacaagggcagagcattgcttg

SEQ ID NO: 213812 - DNA, 25 bp, Artificial
  Probe
cactccttagccaggctgcagggag

SEQ ID NO: 213813 - DNA, 25 bp, Artificial
  Probe
agaagggttcccaccatatcaaccg

SEQ ID NO: 213814 - DNA, 25 bp, Artificial
  Probe
aggacattgatgtcacctctaatga

SEQ ID NO: 213815 - DNA, 25 bp, Artificial
  Probe
catatcaaccggtggcgcatcgcca

SEQ ID NO: 213816 - DNA, 25 bp, Artificial
  Probe
ggcgcatcgccacgaagcaggccaa

SEQ ID NO: 213817 - DNA, 25 bp, Artificial
  Probe
aaccggtggcgcatcgccacgaagc

SEQ ID NO: 213818 - DNA, 25 bp, Artificial
  Probe
tcgccacgaagcaggccaacgggga

SEQ ID NO: 213819 - DNA, 25 bp, Artificial
  Probe
ccacaagggcagagcattgcttgct

SEQ ID NO: 213820 - DNA, 25 bp, Artificial
  Probe
gagcctggggccatcaccgtcagag

SEQ ID NO: 213821 - DNA, 25 bp, Artificial
  Probe
ctccgtgtctctgtctttgttctga

SEQ ID NO: 213822 - DNA, 25 bp, Artificial
  Probe
ggactctggccactccttagccagg

SEQ ID NO: 213823 - DNA, 25 bp, Artificial
  Probe
ttattttccaggtcctgctgtagtt

SEQ ID NO: 213824 - DNA, 25 bp, Artificial
  Probe
gactgctcagccttctggtggagag

SEQ ID NO: 213825 - DNA, 25 bp, Artificial
  Probe
ctgaggcctgggactgctcagcctt

SEQ ID NO: 213826 - DNA, 25 bp, Artificial
  Probe
atacaaacggcagaagctggaggag

SEQ ID NO: 213827 - DNA, 25 bp, Artificial
  Probe
ttgttctgagacatgtctcttttaa

SEQ ID NO: 213828 - DNA, 25 bp, Artificial
  Probe
tggccactccttagccaggctgcag

SEQ ID NO: 213829 - DNA, 25 bp, Artificial
  Probe
gctctccgtgtctctgtctttgttc

SEQ ID NO: 213830 - DNA, 25 bp, Artificial
  Probe
aggggcccacgctggactctggcca

SEQ ID NO: 213831 - DNA, 25 bp, Artificial
  Probe
tccgtgtctctgtctttgttctgag

SEQ ID NO: 213832 - DNA, 25 bp, Artificial
  Probe
agtcgagagcccacaagggcagagc

SEQ ID NO: 213833 - DNA, 25 bp, Artificial
  Probe
tgactaggggaacagtcgagagccc

SEQ ID NO: 213834 - DNA, 25 bp, Artificial
  Probe
ggcctgggactgctcagccttctgg

SEQ ID NO: 213835 - DNA, 25 bp, Artificial
  Probe
gaactactctttttgacgcaccagg

SEQ ID NO: 213836 - DNA, 25 bp, Artificial
  Probe
tgcaggtttctgctcctttttatca

SEQ ID NO: 213837 - DNA, 25 bp, Artificial
  Probe
tacctaggcatttttcgaagcttca

SEQ ID NO: 213838 - DNA, 25 bp, Artificial
  Probe
agccttagaactactctttttgacg

SEQ ID NO: 213839 - DNA, 25 bp, Artificial
  Probe
cgccagccttcttggctgcaggttt

SEQ ID NO: 213840 - DNA, 25 bp, Artificial
  Probe
aactactctttttgacgcaccaggc

SEQ ID NO: 213841 - DNA, 25 bp, Artificial
  Probe
ttcttggctgcaggtttctgctcct

SEQ ID NO: 213842 - DNA, 25 bp, Artificial
  Probe
tgtacaaggcctttctggaatacat

SEQ ID NO: 213843 - DNA, 25 bp, Artificial
  Probe
accaggacagggttccggctgcaat

SEQ ID NO: 213844 - DNA, 25 bp, Artificial
  Probe
ttcctctcaccaggacagggttccg

SEQ ID NO: 213845 - DNA, 25 bp, Artificial
  Probe
caggtttctgctcctttttatcagg

SEQ ID NO: 213846 - DNA, 25 bp, Artificial
  Probe
ttccggctgcaatggggcttactct

SEQ ID NO: 213847 - DNA, 25 bp, Artificial
  Probe
ccaggacagggttccggctgcaatg

SEQ ID NO: 213848 - DNA, 25 bp, Artificial
  Probe
cttcttggctgcaggtttctgctcc

SEQ ID NO: 213849 - DNA, 25 bp, Artificial
  Probe
gccttagaactactctttttgacgc

SEQ ID NO: 213850 - DNA, 25 bp, Artificial
  Probe
actactctttttgacgcaccaggcc

SEQ ID NO: 213851 - DNA, 25 bp, Artificial
  Probe
acccgccatcttgcaagacgggaaa

SEQ ID NO: 213852 - DNA, 25 bp, Artificial
  Probe
ctgcaggtttctgctcctttttatc

SEQ ID NO: 213853 - DNA, 25 bp, Artificial
  Probe
tgctcctttttatcaggcttctccg

SEQ ID NO: 213854 - DNA, 25 bp, Artificial
  Probe
ttggctgcaggtttctgctcctttt

SEQ ID NO: 213855 - DNA, 25 bp, Artificial
  Probe
gattcctctcaccaggacagggttc

SEQ ID NO: 213856 - DNA, 25 bp, Artificial
  Probe
agccttcttggctgcaggtttctgc

SEQ ID NO: 213857 - DNA, 25 bp, Artificial
  Probe
ccgccatcttgcaagacgggaaaga

SEQ ID NO: 213858 - DNA, 25 bp, Artificial
  Probe
ggcttactcttcctcagctttttag

SEQ ID NO: 213859 - DNA, 25 bp, Artificial
  Probe
ccttcttggctgcaggtttctgctc

SEQ ID NO: 213860 - DNA, 25 bp, Artificial
  Probe
ggttccggctgcaatggggcttact

SEQ ID NO: 213861 - DNA, 25 bp, Artificial
  Probe
tgcaatggggcttactcttcctcag

SEQ ID NO: 213862 - DNA, 25 bp, Artificial
  Probe
tgccgattcctctcaccaggacagg

SEQ ID NO: 213863 - DNA, 25 bp, Artificial
  Probe
atggggcttactcttcctcagcttt

SEQ ID NO: 213864 - DNA, 25 bp, Artificial
  Probe
ggtttctgctcctttttatcaggct

SEQ ID NO: 213865 - DNA, 25 bp, Artificial
  Probe
agaactactctttttgacgcaccag

SEQ ID NO: 213866 - DNA, 25 bp, Artificial
  Probe
tcctctcaccaggacagggttccgg

SEQ ID NO: 213867 - DNA, 25 bp, Artificial
  Probe
ccgccagccttcttggctgcaggtt

SEQ ID NO: 213868 - DNA, 25 bp, Artificial
  Probe
tctcaccaggacagggttccggctg

SEQ ID NO: 213869 - DNA, 25 bp, Artificial
  Probe
cccgccatcttgcaagacgggaaag

SEQ ID NO: 213870 - DNA, 25 bp, Artificial
  Probe
aatggggcttactcttcctcagctt

SEQ ID NO: 213871 - DNA, 25 bp, Artificial
  Probe
cttggctgcaggtttctgctccttt

SEQ ID NO: 213872 - DNA, 25 bp, Artificial
  Probe
atacctaggcatttttcgaagcttc

SEQ ID NO: 213873 - DNA, 25 bp, Artificial
  Probe
ggggcttactcttcctcagcttttt

SEQ ID NO: 213874 - DNA, 25 bp, Artificial
  Probe
ctctcaccaggacagggttccggct

SEQ ID NO: 213875 - DNA, 25 bp, Artificial
  Probe
gctcctttttatcaggcttctccgc

SEQ ID NO: 213876 - DNA, 25 bp, Artificial
  Probe
aggcatttttcgaagcttcaccacc

SEQ ID NO: 213877 - DNA, 25 bp, Artificial
  Probe
acctaggcatttttcgaagcttcac

SEQ ID NO: 213878 - DNA, 25 bp, Artificial
  Probe
ctgcaatggggcttactcttcctca

SEQ ID NO: 213879 - DNA, 25 bp, Artificial
  Probe
ctgaagggcttcttgccgtggctca

SEQ ID NO: 213880 - DNA, 25 bp, Artificial
  Probe
taggcatttttcgaagcttcaccac

SEQ ID NO: 213881 - DNA, 25 bp, Artificial
  Probe
gtccttcacagaccaagaacacaca

SEQ ID NO: 213882 - DNA, 25 bp, Artificial
  Probe
cacacacgtaggccttcaacacgcg

SEQ ID NO: 213883 - DNA, 25 bp, Artificial
  Probe
cagaccaagaacacacacgtaggcc

SEQ ID NO: 213884 - DNA, 25 bp, Artificial
  Probe
agagctgcagctgttgaagaggcag

SEQ ID NO: 213885 - DNA, 25 bp, Artificial
  Probe
cttcacagaccaagaacacacacgt

SEQ ID NO: 213886 - DNA, 25 bp, Artificial
  Probe
aacacacacgtaggccttcaacacg

SEQ ID NO: 213887 - DNA, 25 bp, Artificial
  Probe
gaacacacacgtaggccttcaacac

SEQ ID NO: 213888 - DNA, 25 bp, Artificial
  Probe
gtaggccttcaacacgcgtccctcc

SEQ ID NO: 213889 - DNA, 25 bp, Artificial
  Probe
acacacacgtaggccttcaacacgc

SEQ ID NO: 213890 - DNA, 25 bp, Artificial
  Probe
caagaacacacacgtaggccttcaa

SEQ ID NO: 213891 - DNA, 25 bp, Artificial
  Probe
cacagaccaagaacacacacgtagg

SEQ ID NO: 213892 - DNA, 25 bp, Artificial
  Probe
agaccaagaacacacacgtaggcct

SEQ ID NO: 213893 - DNA, 25 bp, Artificial
  Probe
aggccttcaacacgcgtccctcctc

SEQ ID NO: 213894 - DNA, 25 bp, Artificial
  Probe
tcacagaccaagaacacacacgtag

SEQ ID NO: 213895 - DNA, 25 bp, Artificial
  Probe
agaacacacacgtaggccttcaaca

SEQ ID NO: 213896 - DNA, 25 bp, Artificial
  Probe
acacacgtaggccttcaacacgcgt

SEQ ID NO: 213897 - DNA, 25 bp, Artificial
  Probe
ccaagaacacacacgtaggccttca

SEQ ID NO: 213898 - DNA, 25 bp, Artificial
  Probe
cacgtaggccttcaacacgcgtccc

SEQ ID NO: 213899 - DNA, 25 bp, Artificial
  Probe
ggccttcaacacgcgtccctcctcc

SEQ ID NO: 213900 - DNA, 25 bp, Artificial
  Probe
taggccttcaacacgcgtccctcct

SEQ ID NO: 213901 - DNA, 25 bp, Artificial
  Probe
tccttcacagaccaagaacacacac

SEQ ID NO: 213902 - DNA, 25 bp, Artificial
  Probe
ttcacagaccaagaacacacacgta

SEQ ID NO: 213903 - DNA, 25 bp, Artificial
  Probe
accaagaacacacacgtaggccttc

SEQ ID NO: 213904 - DNA, 25 bp, Artificial
  Probe
agtccttcacagaccaagaacacac

SEQ ID NO: 213905 - DNA, 25 bp, Artificial
  Probe
aagaacacacacgtaggccttcaac

SEQ ID NO: 213906 - DNA, 25 bp, Artificial
  Probe
cacacgtaggccttcaacacgcgtc

SEQ ID NO: 213907 - DNA, 25 bp, Artificial
  Probe
gaccaagaacacacacgtaggcctt

SEQ ID NO: 213908 - DNA, 25 bp, Artificial
  Probe
tccgcagagagctgcagctgttgaa

SEQ ID NO: 213909 - DNA, 25 bp, Artificial
  Probe
acacgtaggccttcaacacgcgtcc

SEQ ID NO: 213910 - DNA, 25 bp, Artificial
  Probe
acagaccaagaacacacacgtaggc

SEQ ID NO: 213911 - DNA, 25 bp, Artificial
  Probe
gccttcaacacgcgtccctcctcct

SEQ ID NO: 213912 - DNA, 25 bp, Artificial
  Probe
acgtaggccttcaacacgcgtccct

SEQ ID NO: 213913 - DNA, 25 bp, Artificial
  Probe
ccttcacagaccaagaacacacacg

SEQ ID NO: 213914 - DNA, 25 bp, Artificial
  Probe
ccttcaacacgcgtccctcctcctc

SEQ ID NO: 213915 - DNA, 25 bp, Artificial
  Probe
cgtaggccttcaacacgcgtccctc

SEQ ID NO: 213916 - DNA, 25 bp, Artificial
  Probe
ccctttgctaacaagaatctgtctg

SEQ ID NO: 213917 - DNA, 25 bp, Artificial
  Probe
aggcattaagtcctaatactgaaga

SEQ ID NO: 213918 - DNA, 25 bp, Artificial
  Probe
tctttttcagtcactgtagggacag

SEQ ID NO: 213919 - DNA, 25 bp, Artificial
  Probe
gcctggaagcctggagcttatgcac

SEQ ID NO: 213920 - DNA, 25 bp, Artificial
  Probe
atgtgagcttatttaccacgccaaa

SEQ ID NO: 213921 - DNA, 25 bp, Artificial
  Probe
ataccaaacatggagacaaattccg

SEQ ID NO: 213922 - DNA, 25 bp, Artificial
  Probe
ggggcccaccttgtcatccatacag

SEQ ID NO: 213923 - DNA, 25 bp, Artificial
  Probe
ccccttgtatcatgggagtgtctgt

SEQ ID NO: 213924 - DNA, 25 bp, Artificial
  Probe
tgctcaaataataccaaacatggag

SEQ ID NO: 213925 - DNA, 25 bp, Artificial
  Probe
aaagtggctacatcctgttgatagc

SEQ ID NO: 213926 - DNA, 25 bp, Artificial
  Probe
cactgtaagtccagtggatgttaat

SEQ ID NO: 213927 - DNA, 25 bp, Artificial
  Probe
cttagccactggattgatagaaaaa

SEQ ID NO: 213928 - DNA, 25 bp, Artificial
  Probe
gacagaacaggctttgcctacctac

SEQ ID NO: 213929 - DNA, 25 bp, Artificial
  Probe
tcctaagaaacatgagtctaacctg

SEQ ID NO: 213930 - DNA, 25 bp, Artificial
  Probe
gtccttgtcatctgataacatttgt

SEQ ID NO: 213931 - DNA, 25 bp, Artificial
  Probe
cactgtagggacagaacaggctttg

SEQ ID NO: 213932 - DNA, 25 bp, Artificial
  Probe
aaaggacaatattcctgacagtctg

SEQ ID NO: 213933 - DNA, 25 bp, Artificial
  Probe
atgcccttttcctaagaaacatgag

SEQ ID NO: 213934 - DNA, 25 bp, Artificial
  Probe
gtcctcaaggatccaggtgatgcct

SEQ ID NO: 213935 - DNA, 25 bp, Artificial
  Probe
tcactcctccgacttgtccttgaga

SEQ ID NO: 213936 - DNA, 25 bp, Artificial
  Probe
acagaacaggctttgcctacctacc

SEQ ID NO: 213937 - DNA, 25 bp, Artificial
  Probe
cttatgcacgtgagataactatgtg

SEQ ID NO: 213938 - DNA, 25 bp, Artificial
  Probe
tcagagttccccttgtatcatggga

SEQ ID NO: 213939 - DNA, 25 bp, Artificial
  Probe
gatggtattgtgtcctttgtagacc

SEQ ID NO: 213940 - DNA, 25 bp, Artificial
  Probe
ataacatttgtaaacatgtgcagcg

SEQ ID NO: 213941 - DNA, 25 bp, Artificial
  Probe
caacaggcaggcattaagtcctaat

SEQ ID NO: 213942 - DNA, 25 bp, Artificial
  Probe
caagattgcttatcaatgaaagaca

SEQ ID NO: 213943 - DNA, 25 bp, Artificial
  Probe
acatggagacaaattccgtgatata

SEQ ID NO: 213944 - DNA, 25 bp, Artificial
  Probe
acattggagaagctgccttgagggt

SEQ ID NO: 213945 - DNA, 25 bp, Artificial
  Probe
gtgagcttatttaccacgccaaaac

SEQ ID NO: 213946 - DNA, 25 bp, Artificial
  Probe
acactaggcacttcttaacaacagg

SEQ ID NO: 213947 - DNA, 25 bp, Artificial
  Probe
agcttccaaagaagcgataattcac

SEQ ID NO: 213948 - DNA, 25 bp, Artificial
  Probe
tagcttccaaagaagcgataattca

SEQ ID NO: 213949 - DNA, 25 bp, Artificial
  Probe
cttgagggtcctcaaggatccaggt

SEQ ID NO: 213950 - DNA, 25 bp, Artificial
  Probe
ctgttgatagcatatgctcaaataa

SEQ ID NO: 213951 - DNA, 25 bp, Artificial
  Probe
ccatacagcactgtttacaagattg

SEQ ID NO: 213952 - DNA, 25 bp, Artificial
  Probe
aaagttgattctctccactgtaagt

SEQ ID NO: 213953 - DNA, 25 bp, Artificial
  Probe
gtagaccaaatttcagagttcccct

SEQ ID NO: 213954 - DNA, 25 bp, Artificial
  Probe
ttcttcgctgatgtccgtttacacg

SEQ ID NO: 213955 - DNA, 25 bp, Artificial
  Probe
acccagttcagataaaggacaatat

SEQ ID NO: 213956 - DNA, 25 bp, Artificial
  Probe
ttgtccttgagaaaagtggctacat

SEQ ID NO: 213957 - DNA, 25 bp, Artificial
  Probe
tggggcccaccttgtcatccataca

SEQ ID NO: 213958 - DNA, 25 bp, Artificial
  Probe
aagtcctaatactgaagaagattcc

SEQ ID NO: 213959 - DNA, 25 bp, Artificial
  Probe
aagatgacacaggaccacaaagcca

SEQ ID NO: 213960 - DNA, 25 bp, Artificial
  Probe
gaagaagattccagttcccagagat

SEQ ID NO: 213961 - DNA, 25 bp, Artificial
  Probe
gctcaaataataccaaacatggaga

SEQ ID NO: 213962 - DNA, 25 bp, Artificial
  Probe
gacgtctcgaatgtgtgtaatcccc

SEQ ID NO: 213963 - DNA, 25 bp, Artificial
  Probe
tggacagcgtctgtcaaagtaactc

SEQ ID NO: 213964 - DNA, 25 bp, Artificial
  Probe
ccagccaagagcaagaagtagtgct

SEQ ID NO: 213965 - DNA, 25 bp, Artificial
  Probe
agcgtctgtcaaagtaactctgcat

SEQ ID NO: 213966 - DNA, 25 bp, Artificial
  Probe
attcacatcagtaaggttacggtgc

SEQ ID NO: 213967 - DNA, 25 bp, Artificial
  Probe
gtgacgtctcgaatgtgtgtaatcc

SEQ ID NO: 213968 - DNA, 25 bp, Artificial
  Probe
gggggctaacccacagaaaggtcag

SEQ ID NO: 213969 - DNA, 25 bp, Artificial
  Probe
gtctgtcaaagtaactctgcataca

SEQ ID NO: 213970 - DNA, 25 bp, Artificial
  Probe
gttaacccacagcacgtactggaca

SEQ ID NO: 213971 - DNA, 25 bp, Artificial
  Probe
gtgtccagccaagagcaagaagtag

SEQ ID NO: 213972 - DNA, 25 bp, Artificial
  Probe
ttcacatcagtaaggttacggtgcg

SEQ ID NO: 213973 - DNA, 25 bp, Artificial
  Probe
tgcttgggggctaacccacagaaag

SEQ ID NO: 213974 - DNA, 25 bp, Artificial
  Probe
ggttaacccacagcacgtactggac

SEQ ID NO: 213975 - DNA, 25 bp, Artificial
  Probe
tggactccagctcaaaggggaaaga

SEQ ID NO: 213976 - DNA, 25 bp, Artificial
  Probe
actccagctcaaaggggaaagatag

SEQ ID NO: 213977 - DNA, 25 bp, Artificial
  Probe
gggctaacccacagaaaggtcagtt

SEQ ID NO: 213978 - DNA, 25 bp, Artificial
  Probe
tgtccagccaagagcaagaagtagt

SEQ ID NO: 213979 - DNA, 25 bp, Artificial
  Probe
gctggttaacccacagcacgtactg

SEQ ID NO: 213980 - DNA, 25 bp, Artificial
  Probe
acagcgtctgtcaaagtaactctgc

SEQ ID NO: 213981 - DNA, 25 bp, Artificial
  Probe
actggacagcgtctgtcaaagtaac

SEQ ID NO: 213982 - DNA, 25 bp, Artificial
  Probe
cgtctgtcaaagtaactctgcatac

SEQ ID NO: 213983 - DNA, 25 bp, Artificial
  Probe
ggtgacgtctcgaatgtgtgtaatc

SEQ ID NO: 213984 - DNA, 25 bp, Artificial
  Probe
agcacgtactggacagcgtctgtca

SEQ ID NO: 213985 - DNA, 25 bp, Artificial
  Probe
gtgcttgggggctaacccacagaaa

SEQ ID NO: 213986 - DNA, 25 bp, Artificial
  Probe
acccacagcacgtactggacagcgt

SEQ ID NO: 213987 - DNA, 25 bp, Artificial
  Probe
tgacgtctcgaatgtgtgtaatccc

SEQ ID NO: 213988 - DNA, 25 bp, Artificial
  Probe
ggctaacccacagaaaggtcagttt

SEQ ID NO: 213989 - DNA, 25 bp, Artificial
  Probe
ccacagcacgtactggacagcgtct

SEQ ID NO: 213990 - DNA, 25 bp, Artificial
  Probe
cacatcagtaaggttacggtgcgaa

SEQ ID NO: 213991 - DNA, 25 bp, Artificial
  Probe
taacccacagcacgtactggacagc

SEQ ID NO: 213992 - DNA, 25 bp, Artificial
  Probe
atattcacatcagtaaggttacggt

SEQ ID NO: 213993 - DNA, 25 bp, Artificial
  Probe
aatattcacatcagtaaggttacgg

SEQ ID NO: 213994 - DNA, 25 bp, Artificial
  Probe
ggacagcgtctgtcaaagtaactct

SEQ ID NO: 213995 - DNA, 25 bp, Artificial
  Probe
tccagccaagagcaagaagtagtgc

SEQ ID NO: 213996 - DNA, 25 bp, Artificial
  Probe
gcacgtactggacagcgtctgtcaa

SEQ ID NO: 213997 - DNA, 25 bp, Artificial
  Probe
gcttgggggctaacccacagaaagg

SEQ ID NO: 213998 - DNA, 25 bp, Artificial
  Probe
cacgtactggacagcgtctgtcaaa

SEQ ID NO: 213999 - DNA, 25 bp, Artificial
  Probe
cagcgtctgtcaaagtaactctgca

SEQ ID NO: 214000 - DNA, 25 bp, Artificial
  Probe
caagaagtagtgcttgggggctaac

SEQ ID NO: 214001 - DNA, 25 bp, Artificial
  Probe
cagcacgtactggacagcgtctgtc

SEQ ID NO: 214002 - DNA, 25 bp, Artificial
  Probe
cgtctcgaatgtgtgtaatcccctt

SEQ ID NO: 214003 - DNA, 25 bp, Artificial
  Probe
cacagcacgtactggacagcgtctg

SEQ ID NO: 214004 - DNA, 25 bp, Artificial
  Probe
catcagtaaggttacggtgcgaagg

SEQ ID NO: 214005 - DNA, 25 bp, Artificial
  Probe
aacccacagcacgtactggacagcg

SEQ ID NO: 214006 - DNA, 25 bp, Artificial
  Probe
aggtgtccagccaagagcaagaagt

SEQ ID NO: 214007 - DNA, 25 bp, Artificial
  Probe
ggactccagctcaaaggggaaagat

SEQ ID NO: 214008 - DNA, 25 bp, Artificial
  Probe
gcttatgaccccaaggcaggtgaac

SEQ ID NO: 214009 - DNA, 25 bp, Artificial
  Probe
ctctttgacaagttcacatggagca

SEQ ID NO: 214010 - DNA, 25 bp, Artificial
  Probe
gatttctcaggcaacaccaaagatg

SEQ ID NO: 214011 - DNA, 25 bp, Artificial
  Probe
agtagcccttgttgccactctcaag

SEQ ID NO: 214012 - DNA, 25 bp, Artificial
  Probe
aggtgaacctatacatcccgaaatt

SEQ ID NO: 214013 - DNA, 25 bp, Artificial
  Probe
ttcccttgacattaacgatggtcca

SEQ ID NO: 214014 - DNA, 25 bp, Artificial
  Probe
gttcccttgacattaacgatggtcc

SEQ ID NO: 214015 - DNA, 25 bp, Artificial
  Probe
cactctcaagacaaagtcacttgag

SEQ ID NO: 214016 - DNA, 25 bp, Artificial
  Probe
ccttgttgccactctcaagacaaag

SEQ ID NO: 214017 - DNA, 25 bp, Artificial
  Probe
atgagccaagtggtcaatccagcct

SEQ ID NO: 214018 - DNA, 25 bp, Artificial
  Probe
caagacaaagtcacttgagaaggga

SEQ ID NO: 214019 - DNA, 25 bp, Artificial
  Probe
cttatgaccccaaggcaggtgaacc

SEQ ID NO: 214020 - DNA, 25 bp, Artificial
  Probe
cacttagtcgggacacaattgatag

SEQ ID NO: 214021 - DNA, 25 bp, Artificial
  Probe
gacaaagtcacttgagaagggagca

SEQ ID NO: 214022 - DNA, 25 bp, Artificial
  Probe
aactagcaatgagtagcccttgttg

SEQ ID NO: 214023 - DNA, 25 bp, Artificial
  Probe
agcctaagaacgtgtcctgagaagc

SEQ ID NO: 214024 - DNA, 25 bp, Artificial
  Probe
aatgtgttgcctaattctaccaacg

SEQ ID NO: 214025 - DNA, 25 bp, Artificial
  Probe
tcgctgcacttagtcgggacacaat

SEQ ID NO: 214026 - DNA, 25 bp, Artificial
  Probe
ggggcaagcttatgaccccaaggca

SEQ ID NO: 214027 - DNA, 25 bp, Artificial
  Probe
gcccttgttgccactctcaagacaa

SEQ ID NO: 214028 - DNA, 25 bp, Artificial
  Probe
gaatgtgttgcctaattctaccaac

SEQ ID NO: 214029 - DNA, 25 bp, Artificial
  Probe
tcaagacaaagtcacttgagaaggg

SEQ ID NO: 214030 - DNA, 25 bp, Artificial
  Probe
agacaaagtcacttgagaagggagc

SEQ ID NO: 214031 - DNA, 25 bp, Artificial
  Probe
acattaacgatggtccacaaggcca

SEQ ID NO: 214032 - DNA, 25 bp, Artificial
  Probe
gaacattaaggacttgctcaccaac

SEQ ID NO: 214033 - DNA, 25 bp, Artificial
  Probe
gttgccactctcaagacaaagtcac

SEQ ID NO: 214034 - DNA, 25 bp, Artificial
  Probe
tgagtagcccttgttgccactctca

SEQ ID NO: 214035 - DNA, 25 bp, Artificial
  Probe
ctacttttagataactagcaatgag

SEQ ID NO: 214036 - DNA, 25 bp, Artificial
  Probe
catgctacaactggatgaagggaat

SEQ ID NO: 214037 - DNA, 25 bp, Artificial
  Probe
gcaacaccaaagatgttcccttgac

SEQ ID NO: 214038 - DNA, 25 bp, Artificial
  Probe
caaagtcacttgagaagggagcact

SEQ ID NO: 214039 - DNA, 25 bp, Artificial
  Probe
gccactctcaagacaaagtcacttg

SEQ ID NO: 214040 - DNA, 25 bp, Artificial
  Probe
aatgagtagcccttgttgccactct

SEQ ID NO: 214041 - DNA, 25 bp, Artificial
  Probe
ctagcaatgagtagcccttgttgcc

SEQ ID NO: 214042 - DNA, 25 bp, Artificial
  Probe
tgtgttgcctaattctaccaacggg

SEQ ID NO: 214043 - DNA, 25 bp, Artificial
  Probe
gtcaatccagcctaagaacgtgtcc

SEQ ID NO: 214044 - DNA, 25 bp, Artificial
  Probe
agtggtcaatccagcctaagaacgt

SEQ ID NO: 214045 - DNA, 25 bp, Artificial
  Probe
ctcaagacaaagtcacttgagaagg

SEQ ID NO: 214046 - DNA, 25 bp, Artificial
  Probe
aaggacttgctcaccaaccaatcag

SEQ ID NO: 214047 - DNA, 25 bp, Artificial
  Probe
ggcaagcttatgaccccaaggcagg

SEQ ID NO: 214048 - DNA, 25 bp, Artificial
  Probe
cttagtcgggacacaattgataggt

SEQ ID NO: 214049 - DNA, 25 bp, Artificial
  Probe
caggtgaacctatacatcccgaaat

SEQ ID NO: 214050 - DNA, 25 bp, Artificial
  Probe
ggccatgctacaactggatgaaggg

SEQ ID NO: 214051 - DNA, 25 bp, Artificial
  Probe
cttgttgccactctcaagacaaagt

SEQ ID NO: 214052 - DNA, 25 bp, Artificial
  Probe
tgctctttgacaagttcacatggag

SEQ ID NO: 214053 - DNA, 25 bp, Artificial
  Probe
aagatgttcccttgacattaacgat

SEQ ID NO: 214054 - DNA, 25 bp, Artificial
  Probe
ctcccaaacctcaggtctgaaacag

SEQ ID NO: 214055 - DNA, 25 bp, Artificial
  Probe
ccaaaactcccttgagagaggcagc

SEQ ID NO: 214056 - DNA, 25 bp, Artificial
  Probe
gctcttgctttccattgttgtcatc

SEQ ID NO: 214057 - DNA, 25 bp, Artificial
  Probe
tgtgtcagactgtactacgggagta

SEQ ID NO: 214058 - DNA, 25 bp, Artificial
  Probe
agtagtgttcctggttggcattaac

SEQ ID NO: 214059 - DNA, 25 bp, Artificial
  Probe
ctcccttgagagaggcagcagatga

SEQ ID NO: 214060 - DNA, 25 bp, Artificial
  Probe
tcctgaggatcctgtgtcagactgt

SEQ ID NO: 214061 - DNA, 25 bp, Artificial
  Probe
ccagccttggcctgtgtgcctggag

SEQ ID NO: 214062 - DNA, 25 bp, Artificial
  Probe
cttgctttccattgttgtcatcctg

SEQ ID NO: 214063 - DNA, 25 bp, Artificial
  Probe
cattgttgtcatcctgaggatcctg

SEQ ID NO: 214064 - DNA, 25 bp, Artificial
  Probe
gaatatctgtccattattagagcac

SEQ ID NO: 214065 - DNA, 25 bp, Artificial
  Probe
cacctatgctgaggttgattataga

SEQ ID NO: 214066 - DNA, 25 bp, Artificial
  Probe
atcctgaggatcctgtgtcagactg

SEQ ID NO: 214067 - DNA, 25 bp, Artificial
  Probe
ggatcctgtgtcagactgtactacg

SEQ ID NO: 214068 - DNA, 25 bp, Artificial
  Probe
atcctgtgtcagactgtactacggg

SEQ ID NO: 214069 - DNA, 25 bp, Artificial
  Probe
ccagtccacctatgctgaggttgat

SEQ ID NO: 214070 - DNA, 25 bp, Artificial
  Probe
tgaggatcctgtgtcagactgtact

SEQ ID NO: 214071 - DNA, 25 bp, Artificial
  Probe
ctgtactacgggagtagtgttcctg

SEQ ID NO: 214072 - DNA, 25 bp, Artificial
  Probe
gtcagactgtactacgggagtagtg

SEQ ID NO: 214073 - DNA, 25 bp, Artificial
  Probe
tctccagtccacctatgctgaggtt

SEQ ID NO: 214074 - DNA, 25 bp, Artificial
  Probe
actacgggagtagtgttcctggttg

SEQ ID NO: 214075 - DNA, 25 bp, Artificial
  Probe
caagctcccaaacctcaggtctgaa

SEQ ID NO: 214076 - DNA, 25 bp, Artificial
  Probe
gtccacctatgctgaggttgattat

SEQ ID NO: 214077 - DNA, 25 bp, Artificial
  Probe
aaactcccttgagagaggcagcaga

SEQ ID NO: 214078 - DNA, 25 bp, Artificial
  Probe
gtgaatatctgtccattattagagc

SEQ ID NO: 214079 - DNA, 25 bp, Artificial
  Probe
tccagtccacctatgctgaggttga

SEQ ID NO: 214080 - DNA, 25 bp, Artificial
  Probe
tcatcctgaggatcctgtgtcagac

SEQ ID NO: 214081 - DNA, 25 bp, Artificial
  Probe
cctgtgtcagactgtactacgggag

SEQ ID NO: 214082 - DNA, 25 bp, Artificial
  Probe
cccaaaactcccttgagagaggcag

SEQ ID NO: 214083 - DNA, 25 bp, Artificial
  Probe
caaacctcaggtctgaaacaggaaa

SEQ ID NO: 214084 - DNA, 25 bp, Artificial
  Probe
ttgctttccattgttgtcatcctga

SEQ ID NO: 214085 - DNA, 25 bp, Artificial
  Probe
cctgaggatcctgtgtcagactgta

SEQ ID NO: 214086 - DNA, 25 bp, Artificial
  Probe
gtactacgggagtagtgttcctggt

SEQ ID NO: 214087 - DNA, 25 bp, Artificial
  Probe
ccattgttgtcatcctgaggatcct

SEQ ID NO: 214088 - DNA, 25 bp, Artificial
  Probe
agtgttcctggttggcattaaccaa

SEQ ID NO: 214089 - DNA, 25 bp, Artificial
  Probe
acctcaggtctgaaacaggaaacct

SEQ ID NO: 214090 - DNA, 25 bp, Artificial
  Probe
ccaaacctcaggtctgaaacaggaa

SEQ ID NO: 214091 - DNA, 25 bp, Artificial
  Probe
cctcaggtctgaaacaggaaacctg

SEQ ID NO: 214092 - DNA, 25 bp, Artificial
  Probe
tccattgttgtcatcctgaggatcc

SEQ ID NO: 214093 - DNA, 25 bp, Artificial
  Probe
ttcctggttggcattaaccaaaaat

SEQ ID NO: 214094 - DNA, 25 bp, Artificial
  Probe
gctttccattgttgtcatcctgagg

SEQ ID NO: 214095 - DNA, 25 bp, Artificial
  Probe
tgaatatctgtccattattagagca

SEQ ID NO: 214096 - DNA, 25 bp, Artificial
  Probe
tcagactgtactacgggagtagtgt

SEQ ID NO: 214097 - DNA, 25 bp, Artificial
  Probe
gaaacccaaaactcccttgagagag

SEQ ID NO: 214098 - DNA, 25 bp, Artificial
  Probe
ctttccattgttgtcatcctgagga

SEQ ID NO: 214099 - DNA, 25 bp, Artificial
  Probe
tgttgtcatcctgaggatcctgtgt

SEQ ID NO: 214100 - DNA, 25 bp, Artificial
  Probe
ccaggagcagtttgtgctgcagtcg

SEQ ID NO: 214101 - DNA, 25 bp, Artificial
  Probe
gacacatctgcttcgggccttggag

SEQ ID NO: 214102 - DNA, 25 bp, Artificial
  Probe
actcggtgccggtggtcagcttgcc

SEQ ID NO: 214103 - DNA, 25 bp, Artificial
  Probe
tgctgaccctactagttttggccat

SEQ ID NO: 214104 - DNA, 25 bp, Artificial
  Probe
catgtggaaggctggcttcttcaag

SEQ ID NO: 214105 - DNA, 25 bp, Artificial
  Probe
ctagttttggccatgtggaaggctg

SEQ ID NO: 214106 - DNA, 25 bp, Artificial
  Probe
ttttggccatgtggaaggctggctt

SEQ ID NO: 214107 - DNA, 25 bp, Artificial
  Probe
ctggcttcttcaagcggaatcgacc

SEQ ID NO: 214108 - DNA, 25 bp, Artificial
  Probe
cagacacatctgcttcgggccttgg

SEQ ID NO: 214109 - DNA, 25 bp, Artificial
  Probe
gggcggtctgctgctgctgacccta

SEQ ID NO: 214110 - DNA, 25 bp, Artificial
  Probe
ggctggcttcttcaagcggaatcga

SEQ ID NO: 214111 - DNA, 25 bp, Artificial
  Probe
ccctactagttttggccatgtggaa

SEQ ID NO: 214112 - DNA, 25 bp, Artificial
  Probe
agcagtttgtgctgcagtcgcacgc

SEQ ID NO: 214113 - DNA, 25 bp, Artificial
  Probe
tgctcagaactccatgggttcgaac

SEQ ID NO: 214114 - DNA, 25 bp, Artificial
  Probe
tttgtgctgcagtcgcacgcctggt

SEQ ID NO: 214115 - DNA, 25 bp, Artificial
  Probe
cagtcgcacgcctggttcaacgtct

SEQ ID NO: 214116 - DNA, 25 bp, Artificial
  Probe
tgctgctgaccctactagttttggc

SEQ ID NO: 214117 - DNA, 25 bp, Artificial
  Probe
aaggctggcttcttcaagcggaatc

SEQ ID NO: 214118 - DNA, 25 bp, Artificial
  Probe
tggaaggctggcttcttcaagcgga

SEQ ID NO: 214119 - DNA, 25 bp, Artificial
  Probe
tcggtgccggtggtcagcttgccca

SEQ ID NO: 214120 - DNA, 25 bp, Artificial
  Probe
tttggccatgtggaaggctggcttc

SEQ ID NO: 214121 - DNA, 25 bp, Artificial
  Probe
gtgcagacacatctgcttcgggcct

SEQ ID NO: 214122 - DNA, 25 bp, Artificial
  Probe
tgctgcagtcgcacgcctggttcaa

SEQ ID NO: 214123 - DNA, 25 bp, Artificial
  Probe
tggtgcagacacatctgcttcgggc

SEQ ID NO: 214124 - DNA, 25 bp, Artificial
  Probe
cagtttgtgctgcagtcgcacgcct

SEQ ID NO: 214125 - DNA, 25 bp, Artificial
  Probe
agtcgcacgcctggttcaacgtctc

SEQ ID NO: 214126 - DNA, 25 bp, Artificial
  Probe
ggtctggtgcagacacatctgcttc

SEQ ID NO: 214127 - DNA, 25 bp, Artificial
  Probe
ctgctgctgctgaccctactagttt

SEQ ID NO: 214128 - DNA, 25 bp, Artificial
  Probe
ggcaaggtctggtgcagacacatct

SEQ ID NO: 214129 - DNA, 25 bp, Artificial
  Probe
aaggtctggtgcagacacatctgct

SEQ ID NO: 214130 - DNA, 25 bp, Artificial
  Probe
gctcagaactccatgggttcgaacc

SEQ ID NO: 214131 - DNA, 25 bp, Artificial
  Probe
tgaccctactagttttggccatgtg

SEQ ID NO: 214132 - DNA, 25 bp, Artificial
  Probe
gtgataaggccaagtacctgttttt

SEQ ID NO: 214133 - DNA, 25 bp, Artificial
  Probe
cgggcaaggtctggtgcagacacat

SEQ ID NO: 214134 - DNA, 25 bp, Artificial
  Probe
tgggcggtctgctgctgctgaccct

SEQ ID NO: 214135 - DNA, 25 bp, Artificial
  Probe
ctcagaactccatgggttcgaacca

SEQ ID NO: 214136 - DNA, 25 bp, Artificial
  Probe
tagcagaccaggtgcatcccttttt

SEQ ID NO: 214137 - DNA, 25 bp, Artificial
  Probe
aggagcagtttgtgctgcagtcgca

SEQ ID NO: 214138 - DNA, 25 bp, Artificial
  Probe
ctgggcggtctgctgctgctgaccc

SEQ ID NO: 214139 - DNA, 25 bp, Artificial
  Probe
gtctggtgcagacacatctgcttcg

SEQ ID NO: 214140 - DNA, 25 bp, Artificial
  Probe
catgggttcgaaccatggggtcctc

SEQ ID NO: 214141 - DNA, 25 bp, Artificial
  Probe
tggccatgtggaaggctggcttctt

SEQ ID NO: 214142 - DNA, 25 bp, Artificial
  Probe
tccctaccgtactcggtgccggtgg

SEQ ID NO: 214143 - DNA, 25 bp, Artificial
  Probe
tccatgggttcgaaccatggggtcc

SEQ ID NO: 214144 - DNA, 25 bp, Artificial
  Probe
cggtctgctgctgctgaccctacta

SEQ ID NO: 214145 - DNA, 25 bp, Artificial
  Probe
ccatgggttcgaaccatggggtcct

SEQ ID NO: 214146 - DNA, 25 bp, Artificial
  Probe
cgttctcagtgaaaattcaaaggcc

SEQ ID NO: 214147 - DNA, 25 bp, Artificial
  Probe
attgttaacaagtactcaataaagg

SEQ ID NO: 214148 - DNA, 25 bp, Artificial
  Probe
ttgttaacaagtactcaataaagga

SEQ ID NO: 214149 - DNA, 25 bp, Artificial
  Probe
gggttcaaaggtctagaaggcgatc

SEQ ID NO: 214150 - DNA, 25 bp, Artificial
  Probe
caagagaaggccgttctcagtgaaa

SEQ ID NO: 214151 - DNA, 25 bp, Artificial
  Probe
gattcttgcaaaaagacacacctgc

SEQ ID NO: 214152 - DNA, 25 bp, Artificial
  Probe
tcttgcaaaaagacacacctgcaaa

SEQ ID NO: 214153 - DNA, 25 bp, Artificial
  Probe
ggtctagaaggcgatcaagagaagg

SEQ ID NO: 214154 - DNA, 25 bp, Artificial
  Probe
tgcaaaaagacacacctgcaaagaa

SEQ ID NO: 214155 - DNA, 25 bp, Artificial
  Probe
tatataatcctaaatcaacaatctg

SEQ ID NO: 214156 - DNA, 25 bp, Artificial
  Probe
tcctaaatcaacaatctgattttta

SEQ ID NO: 214157 - DNA, 25 bp, Artificial
  Probe
gagaaggccgttctcagtgaaaatt

SEQ ID NO: 214158 - DNA, 25 bp, Artificial
  Probe
aatcctaaatcaacaatctgatttt

SEQ ID NO: 214159 - DNA, 25 bp, Artificial
  Probe
cctaaatcaacaatctgatttttaa

SEQ ID NO: 214160 - DNA, 25 bp, Artificial
  Probe
agaaggccgttctcagtgaaaattc

SEQ ID NO: 214161 - DNA, 25 bp, Artificial
  Probe
ggccgttctcagtgaaaattcaaag

SEQ ID NO: 214162 - DNA, 25 bp, Artificial
  Probe
gaaaattcaaaggccagacaacaga

SEQ ID NO: 214163 - DNA, 25 bp, Artificial
  Probe
ccgttctcagtgaaaattcaaaggc

SEQ ID NO: 214164 - DNA, 25 bp, Artificial
  Probe
acacctgcaaagaagatacaaccca

SEQ ID NO: 214165 - DNA, 25 bp, Artificial
  Probe
aggccgttctcagtgaaaattcaaa

SEQ ID NO: 214166 - DNA, 25 bp, Artificial
  Probe
ttcttgcaaaaagacacacctgcaa

SEQ ID NO: 214167 - DNA, 25 bp, Artificial
  Probe
cttgcaaaaagacacacctgcaaag

SEQ ID NO: 214168 - DNA, 25 bp, Artificial
  Probe
ttattgttaacaagtactcaataaa

SEQ ID NO: 214169 - DNA, 25 bp, Artificial
  Probe
ttgcaaaaagacacacctgcaaaga

SEQ ID NO: 214170 - DNA, 25 bp, Artificial
  Probe
agacacacctgcaaagaagatacaa

SEQ ID NO: 214171 - DNA, 25 bp, Artificial
  Probe
ataatcctaaatcaacaatctgatt

SEQ ID NO: 214172 - DNA, 25 bp, Artificial
  Probe
aggtctagaaggcgatcaagagaag

SEQ ID NO: 214173 - DNA, 25 bp, Artificial
  Probe
caaagaagatacaacccaacaaaag

SEQ ID NO: 214174 - DNA, 25 bp, Artificial
  Probe
gacacacctgcaaagaagatacaac

SEQ ID NO: 214175 - DNA, 25 bp, Artificial
  Probe
gtctagaaggcgatcaagagaaggc

SEQ ID NO: 214176 - DNA, 25 bp, Artificial
  Probe
acacacctgcaaagaagatacaacc

SEQ ID NO: 214177 - DNA, 25 bp, Artificial
  Probe
gttcaaaggtctagaaggcgatcaa

SEQ ID NO: 214178 - DNA, 25 bp, Artificial
  Probe
aagagaaggccgttctcagtgaaaa

SEQ ID NO: 214179 - DNA, 25 bp, Artificial
  Probe
aaggccgttctcagtgaaaattcaa

SEQ ID NO: 214180 - DNA, 25 bp, Artificial
  Probe
gccgttctcagtgaaaattcaaagg

SEQ ID NO: 214181 - DNA, 25 bp, Artificial
  Probe
aaaaagacacacctgcaaagaagat

SEQ ID NO: 214182 - DNA, 25 bp, Artificial
  Probe
taacaagtactcaataaaggaatct

SEQ ID NO: 214183 - DNA, 25 bp, Artificial
  Probe
caaaaagacacacctgcaaagaaga

SEQ ID NO: 214184 - DNA, 25 bp, Artificial
  Probe
ttatataatcctaaatcaacaatct

SEQ ID NO: 214185 - DNA, 25 bp, Artificial
  Probe
tataatcctaaatcaacaatctgat

SEQ ID NO: 214186 - DNA, 25 bp, Artificial
  Probe
atcaagagaaggccgttctcagtga

SEQ ID NO: 214187 - DNA, 25 bp, Artificial
  Probe
ttcaaaggtctagaaggcgatcaag

SEQ ID NO: 214188 - DNA, 25 bp, Artificial
  Probe
agagaaggccgttctcagtgaaaat

SEQ ID NO: 214189 - DNA, 25 bp, Artificial
  Probe
aatcaacaatctgatttttaaggga

SEQ ID NO: 214190 - DNA, 25 bp, Artificial
  Probe
gaaggccgttctcagtgaaaattca

SEQ ID NO: 214191 - DNA, 25 bp, Artificial
  Probe
aaaattcaaaggccagacaacagag

SEQ ID NO: 214192 - DNA, 25 bp, Artificial
  Probe
tcaggggacactgtgaggtactata

SEQ ID NO: 214193 - DNA, 25 bp, Artificial
  Probe
ttgccacctttttctgttcaagtag

SEQ ID NO: 214194 - DNA, 25 bp, Artificial
  Probe
gaggtactatacagctagtgctgga

SEQ ID NO: 214195 - DNA, 25 bp, Artificial
  Probe
gctgcacagttgaggggaaagaaca

SEQ ID NO: 214196 - DNA, 25 bp, Artificial
  Probe
gaggcagcatttcatgtagatcagg

SEQ ID NO: 214197 - DNA, 25 bp, Artificial
  Probe
gactcaggctgttccattccgatgt

SEQ ID NO: 214198 - DNA, 25 bp, Artificial
  Probe
gtttgtgccactatgtttaactaaa

SEQ ID NO: 214199 - DNA, 25 bp, Artificial
  Probe
attaaccaaagaacagaggtcactt

SEQ ID NO: 214200 - DNA, 25 bp, Artificial
  Probe
aaagtttaggactcaggctgttcca

SEQ ID NO: 214201 - DNA, 25 bp, Artificial
  Probe
tttcaggggacactgtgaggtacta

SEQ ID NO: 214202 - DNA, 25 bp, Artificial
  Probe
tctgttcaagtagtaccaaactgga

SEQ ID NO: 214203 - DNA, 25 bp, Artificial
  Probe
aggaagcagacttccattttgccac

SEQ ID NO: 214204 - DNA, 25 bp, Artificial
  Probe
gccacctttttctgttcaagtagta

SEQ ID NO: 214205 - DNA, 25 bp, Artificial
  Probe
gtcacttgacctctaaaaagtttag

SEQ ID NO: 214206 - DNA, 25 bp, Artificial
  Probe
cattaaccaaagaacagaggtcact

SEQ ID NO: 214207 - DNA, 25 bp, Artificial
  Probe
aggactcaggctgttccattccgat

SEQ ID NO: 214208 - DNA, 25 bp, Artificial
  Probe
ttcaagtagtaccaaactggagaca

SEQ ID NO: 214209 - DNA, 25 bp, Artificial
  Probe
ggacactgtgaggtactatacagct

SEQ ID NO: 214210 - DNA, 25 bp, Artificial
  Probe
tgttcaagtagtaccaaactggaga

SEQ ID NO: 214211 - DNA, 25 bp, Artificial
  Probe
gttttcaggggacactgtgaggtac

SEQ ID NO: 214212 - DNA, 25 bp, Artificial
  Probe
agtttaggactcaggctgttccatt

SEQ ID NO: 214213 - DNA, 25 bp, Artificial
  Probe
tagtgctggatgctgcacagttgag

SEQ ID NO: 214214 - DNA, 25 bp, Artificial
  Probe
aggctgttccattccgatgttggag

SEQ ID NO: 214215 - DNA, 25 bp, Artificial
  Probe
actcaggctgttccattccgatgtt

SEQ ID NO: 214216 - DNA, 25 bp, Artificial
  Probe
acactgtgaggtactatacagctag

SEQ ID NO: 214217 - DNA, 25 bp, Artificial
  Probe
ttcaatttacagttttcaggggaca

SEQ ID NO: 214218 - DNA, 25 bp, Artificial
  Probe
tcaatttacagttttcaggggacac

SEQ ID NO: 214219 - DNA, 25 bp, Artificial
  Probe
gtacttcattaaccaaagaacagag

SEQ ID NO: 214220 - DNA, 25 bp, Artificial
  Probe
cactttcaatttacagttttcaggg

SEQ ID NO: 214221 - DNA, 25 bp, Artificial
  Probe
tttacagttttcaggggacactgtg

SEQ ID NO: 214222 - DNA, 25 bp, Artificial
  Probe
ctatacagctagtgctggatgctgc

SEQ ID NO: 214223 - DNA, 25 bp, Artificial
  Probe
tttctgttcaagtagtaccaaactg

SEQ ID NO: 214224 - DNA, 25 bp, Artificial
  Probe
gaagcagacttccattttgccacct

SEQ ID NO: 214225 - DNA, 25 bp, Artificial
  Probe
taggactcaggctgttccattccga

SEQ ID NO: 214226 - DNA, 25 bp, Artificial
  Probe
caaagaacagaggtcacttgacctc

SEQ ID NO: 214227 - DNA, 25 bp, Artificial
  Probe
tgctgcacagttgaggggaaagaac

SEQ ID NO: 214228 - DNA, 25 bp, Artificial
  Probe
tacttcattaaccaaagaacagagg

SEQ ID NO: 214229 - DNA, 25 bp, Artificial
  Probe
atacagctagtgctggatgctgcac

SEQ ID NO: 214230 - DNA, 25 bp, Artificial
  Probe
tcacttgacctctaaaaagtttagg

SEQ ID NO: 214231 - DNA, 25 bp, Artificial
  Probe
gtagtaccaaactggagacaagaag

SEQ ID NO: 214232 - DNA, 25 bp, Artificial
  Probe
aagtttaggactcaggctgttccat

SEQ ID NO: 214233 - DNA, 25 bp, Artificial
  Probe
gaggtcacttgacctctaaaaagtt

SEQ ID NO: 214234 - DNA, 25 bp, Artificial
  Probe
acagaggtcacttgacctctaaaaa

SEQ ID NO: 214235 - DNA, 25 bp, Artificial
  Probe
agaggtcacttgacctctaaaaagt

SEQ ID NO: 214236 - DNA, 25 bp, Artificial
  Probe
agaacagaggtcacttgacctctaa

SEQ ID NO: 214237 - DNA, 25 bp, Artificial
  Probe
ttctgttcaagtagtaccaaactgg

SEQ ID NO: 214238 - DNA, 25 bp, Artificial
  Probe
tagactgtgtcactgtaaatgccac

SEQ ID NO: 214239 - DNA, 25 bp, Artificial
  Probe
ggcatcactagactgtgtcactgta

SEQ ID NO: 214240 - DNA, 25 bp, Artificial
  Probe
aacgcagactaacttctaatggccg

SEQ ID NO: 214241 - DNA, 25 bp, Artificial
  Probe
cacaatctagaggtagttcttactc

SEQ ID NO: 214242 - DNA, 25 bp, Artificial
  Probe
caatctagaggtagttcttactcaa

SEQ ID NO: 214243 - DNA, 25 bp, Artificial
  Probe
gtagttcttactcaaggatggtggc

SEQ ID NO: 214244 - DNA, 25 bp, Artificial
  Probe
cactgcggtctgacagactggagca

SEQ ID NO: 214245 - DNA, 25 bp, Artificial
  Probe
ccacaatctagaggtagttcttact

SEQ ID NO: 214246 - DNA, 25 bp, Artificial
  Probe
caaacgcagactaacttctaatggc

SEQ ID NO: 214247 - DNA, 25 bp, Artificial
  Probe
tcttactcaaggatggtggcatcac

SEQ ID NO: 214248 - DNA, 25 bp, Artificial
  Probe
actcaaggatggtggcatcactaga

SEQ ID NO: 214249 - DNA, 25 bp, Artificial
  Probe
aggatggtggcatcactagactgtg

SEQ ID NO: 214250 - DNA, 25 bp, Artificial
  Probe
gtgtcactgtaaatgccactccgaa

SEQ ID NO: 214251 - DNA, 25 bp, Artificial
  Probe
actaacttctaatggccgctgttta

SEQ ID NO: 214252 - DNA, 25 bp, Artificial
  Probe
cgcttaccacaatctagaggtagtt

SEQ ID NO: 214253 - DNA, 25 bp, Artificial
  Probe
cttactcaaggatggtggcatcact

SEQ ID NO: 214254 - DNA, 25 bp, Artificial
  Probe
gatggtggcatcactagactgtgtc

SEQ ID NO: 214255 - DNA, 25 bp, Artificial
  Probe
catcactagactgtgtcactgtaaa

SEQ ID NO: 214256 - DNA, 25 bp, Artificial
  Probe
cggtctgacagactggagcagtttg

SEQ ID NO: 214257 - DNA, 25 bp, Artificial
  Probe
taccacaatctagaggtagttctta

SEQ ID NO: 214258 - DNA, 25 bp, Artificial
  Probe
cgcagactaacttctaatggccgct

SEQ ID NO: 214259 - DNA, 25 bp, Artificial
  Probe
ttcttactcaaggatggtggcatca

SEQ ID NO: 214260 - DNA, 25 bp, Artificial
  Probe
gttcttactcaaggatggtggcatc

SEQ ID NO: 214261 - DNA, 25 bp, Artificial
  Probe
agtaaacgcttaccacaatctagag

SEQ ID NO: 214262 - DNA, 25 bp, Artificial
  Probe
actgcggtctgacagactggagcag

SEQ ID NO: 214263 - DNA, 25 bp, Artificial
  Probe
gtggcatcactagactgtgtcactg

SEQ ID NO: 214264 - DNA, 25 bp, Artificial
  Probe
atggccgctgtttaagggacagtaa

SEQ ID NO: 214265 - DNA, 25 bp, Artificial
  Probe
tgtcactgtaaatgccactccgaac

SEQ ID NO: 214266 - DNA, 25 bp, Artificial
  Probe
ctgcggtctgacagactggagcagt

SEQ ID NO: 214267 - DNA, 25 bp, Artificial
  Probe
atggtggcatcactagactgtgtca

SEQ ID NO: 214268 - DNA, 25 bp, Artificial
  Probe
gtctgacagactggagcagtttgca

SEQ ID NO: 214269 - DNA, 25 bp, Artificial
  Probe
tcactagactgtgtcactgtaaatg

SEQ ID NO: 214270 - DNA, 25 bp, Artificial
  Probe
aaggatggtggcatcactagactgt

SEQ ID NO: 214271 - DNA, 25 bp, Artificial
  Probe
gcactgcggtctgacagactggagc

SEQ ID NO: 214272 - DNA, 25 bp, Artificial
  Probe
aacgcttaccacaatctagaggtag

SEQ ID NO: 214273 - DNA, 25 bp, Artificial
  Probe
gtaaacgcttaccacaatctagagg

SEQ ID NO: 214274 - DNA, 25 bp, Artificial
  Probe
cagactaacttctaatggccgctgt

SEQ ID NO: 214275 - DNA, 25 bp, Artificial
  Probe
ctaatggccgctgtttaagggacag

SEQ ID NO: 214276 - DNA, 25 bp, Artificial
  Probe
taatggccgctgtttaagggacagt

SEQ ID NO: 214277 - DNA, 25 bp, Artificial
  Probe
cttaccacaatctagaggtagttct

SEQ ID NO: 214278 - DNA, 25 bp, Artificial
  Probe
actgtgtcactgtaaatgccactcc

SEQ ID NO: 214279 - DNA, 25 bp, Artificial
  Probe
gactgtgtcactgtaaatgccactc

SEQ ID NO: 214280 - DNA, 25 bp, Artificial
  Probe
acgcttaccacaatctagaggtagt

SEQ ID NO: 214281 - DNA, 25 bp, Artificial
  Probe
ggtggcatcactagactgtgtcact

SEQ ID NO: 214282 - DNA, 25 bp, Artificial
  Probe
agttcttactcaaggatggtggcat

SEQ ID NO: 214283 - DNA, 25 bp, Artificial
  Probe
tggccgctgtttaagggacagtaaa

SEQ ID NO: 214284 - DNA, 25 bp, Artificial
  Probe
tgccaacagcaaggagagctacgag

SEQ ID NO: 214285 - DNA, 25 bp, Artificial
  Probe
tacgagctgcgctacttccagatca

SEQ ID NO: 214286 - DNA, 25 bp, Artificial
  Probe
gctgcgctacttccagatcaaccag

SEQ ID NO: 214287 - DNA, 25 bp, Artificial
  Probe
ccagatcaaccaggacgaggaggag

SEQ ID NO: 214288 - DNA, 25 bp, Artificial
  Probe
acagcaaggagagctacgagctgcg

SEQ ID NO: 214289 - DNA, 25 bp, Artificial
  Probe
cgagctgcgctacttccagatcaac

SEQ ID NO: 214290 - DNA, 25 bp, Artificial
  Probe
gcgctacttccagatcaaccaggac

SEQ ID NO: 214291 - DNA, 25 bp, Artificial
  Probe
gctacttccagatcaaccaggacga

SEQ ID NO: 214292 - DNA, 25 bp, Artificial
  Probe
acgagctgcgctacttccagatcaa

SEQ ID NO: 214293 - DNA, 25 bp, Artificial
  Probe
cttccagatcaaccaggacgaggag

SEQ ID NO: 214294 - DNA, 25 bp, Artificial
  Probe
gttgccaacagcaaggagagctacg

SEQ ID NO: 214295 - DNA, 25 bp, Artificial
  Probe
tgcgctacttccagatcaaccagga

SEQ ID NO: 214296 - DNA, 25 bp, Artificial
  Probe
ttccagatcaaccaggacgaggagg

SEQ ID NO: 214297 - DNA, 25 bp, Artificial
  Probe
gagctgcgctacttccagatcaacc

SEQ ID NO: 214298 - DNA, 25 bp, Artificial
  Probe
agctgcgctacttccagatcaacca

SEQ ID NO: 214299 - DNA, 25 bp, Artificial
  Probe
acttccagatcaaccaggacgagga

SEQ ID NO: 214300 - DNA, 25 bp, Artificial
  Probe
ctacttccagatcaaccaggacgag

SEQ ID NO: 214301 - DNA, 25 bp, Artificial
  Probe
aggagagctacgagctgcgctactt

SEQ ID NO: 214302 - DNA, 25 bp, Artificial
  Probe
agagctacgagctgcgctacttcca

SEQ ID NO: 214303 - DNA, 25 bp, Artificial
  Probe
acaacctccgagactggctgcgcgt

SEQ ID NO: 214304 - DNA, 25 bp, Artificial
  Probe
tccagatcaaccaggacgaggagga

SEQ ID NO: 214305 - DNA, 25 bp, Artificial
  Probe
ctgcgctacttccagatcaaccagg

SEQ ID NO: 214306 - DNA, 25 bp, Artificial
  Probe
gccaacagcaaggagagctacgagc

SEQ ID NO: 214307 - DNA, 25 bp, Artificial
  Probe
cgctacttccagatcaaccaggacg

SEQ ID NO: 214308 - DNA, 25 bp, Artificial
  Probe
ttgccaacagcaaggagagctacga

SEQ ID NO: 214309 - DNA, 25 bp, Artificial
  Probe
gaacaacctccgagactggctgcgc

SEQ ID NO: 214310 - DNA, 25 bp, Artificial
  Probe
ccaacagcaaggagagctacgagct

SEQ ID NO: 214311 - DNA, 25 bp, Artificial
  Probe
tacttccagatcaaccaggacgagg

SEQ ID NO: 214312 - DNA, 25 bp, Artificial
  Probe
aaggagagctacgagctgcgctact

SEQ ID NO: 214313 - DNA, 25 bp, Artificial
  Probe
caacagcaaggagagctacgagctg

SEQ ID NO: 214314 - DNA, 25 bp, Artificial
  Probe
ggctggctttgcaccggacagcagc

SEQ ID NO: 214315 - DNA, 25 bp, Artificial
  Probe
gaacggctggctttgcaccggacag

SEQ ID NO: 214316 - DNA, 25 bp, Artificial
  Probe
agacggcgacttccagacagaggtg

SEQ ID NO: 214317 - DNA, 25 bp, Artificial
  Probe
tttcaaatctatgacactgggctca

SEQ ID NO: 214318 - DNA, 25 bp, Artificial
  Probe
gaataaacttcactctgtggaaaaa

SEQ ID NO: 214319 - DNA, 25 bp, Artificial
  Probe
cgccagacggcgacttccagacaga

SEQ ID NO: 214320 - DNA, 25 bp, Artificial
  Probe
gctttgcaccggacagcagcctggg

SEQ ID NO: 214321 - DNA, 25 bp, Artificial
  Probe
ctcgagaacggctggctttgcaccg

SEQ ID NO: 214322 - DNA, 25 bp, Artificial
  Probe
tttggaactaccaggagccagcgcc

SEQ ID NO: 214323 - DNA, 25 bp, Artificial
  Probe
acggcgacttccagacagaggtgtg

SEQ ID NO: 214324 - DNA, 25 bp, Artificial
  Probe
aatctatgacactgggctcactgcc

SEQ ID NO: 214325 - DNA, 25 bp, Artificial
  Probe
tgcaccggacagcagcctgggagcc

SEQ ID NO: 214326 - DNA, 25 bp, Artificial
  Probe
tttgcaccggacagcagcctgggag

SEQ ID NO: 214327 - DNA, 25 bp, Artificial
  Probe
agcactttcaaatctatgacactgg

SEQ ID NO: 214328 - DNA, 25 bp, Artificial
  Probe
tccactttggaactaccaggagcca

SEQ ID NO: 214329 - DNA, 25 bp, Artificial
  Probe
cacactccactttggaactaccagg

SEQ ID NO: 214330 - DNA, 25 bp, Artificial
  Probe
ctggttctcagaggtcccttagcca

SEQ ID NO: 214331 - DNA, 25 bp, Artificial
  Probe
ccagacggcgacttccagacagagg

SEQ ID NO: 214332 - DNA, 25 bp, Artificial
  Probe
cccaaacctcgagaacggctggctt

SEQ ID NO: 214333 - DNA, 25 bp, Artificial
  Probe
caaacctcgagaacggctggctttg

SEQ ID NO: 214334 - DNA, 25 bp, Artificial
  Probe
ggttctcagaggtcccttagccact

SEQ ID NO: 214335 - DNA, 25 bp, Artificial
  Probe
ccagacagaggtgtgagtgccacgc

SEQ ID NO: 214336 - DNA, 25 bp, Artificial
  Probe
ctcctggttctcagaggtcccttag

SEQ ID NO: 214337 - DNA, 25 bp, Artificial
  Probe
actccactttggaactaccaggagc

SEQ ID NO: 214338 - DNA, 25 bp, Artificial
  Probe
cactttcaaatctatgacactgggc

SEQ ID NO: 214339 - DNA, 25 bp, Artificial
  Probe
gactgcccactgcacagaaatatat

SEQ ID NO: 214340 - DNA, 25 bp, Artificial
  Probe
cgacttccagacagaggtgtgagtg

SEQ ID NO: 214341 - DNA, 25 bp, Artificial
  Probe
agaacggctggctttgcaccggaca

SEQ ID NO: 214342 - DNA, 25 bp, Artificial
  Probe
cactttggaactaccaggagccagc

SEQ ID NO: 214343 - DNA, 25 bp, Artificial
  Probe
ttcaaatctatgacactgggctcac

SEQ ID NO: 214344 - DNA, 25 bp, Artificial
  Probe
actttggaactaccaggagccagcg

SEQ ID NO: 214345 - DNA, 25 bp, Artificial
  Probe
cggactgcccactgcacagaaatat

SEQ ID NO: 214346 - DNA, 25 bp, Artificial
  Probe
cggcgacttccagacagaggtgtga

SEQ ID NO: 214347 - DNA, 25 bp, Artificial
  Probe
gcactttcaaatctatgacactggg

SEQ ID NO: 214348 - DNA, 25 bp, Artificial
  Probe
cggacagcagcctgggagcccacag

SEQ ID NO: 214349 - DNA, 25 bp, Artificial
  Probe
tgggagcccacagaaccgccagacg

SEQ ID NO: 214350 - DNA, 25 bp, Artificial
  Probe
tgggaataaacttcactctgtggaa

SEQ ID NO: 214351 - DNA, 25 bp, Artificial
  Probe
aaatctatgacactgggctcactgc

SEQ ID NO: 214352 - DNA, 25 bp, Artificial
  Probe
gggaataaacttcactctgtggaaa

SEQ ID NO: 214353 - DNA, 25 bp, Artificial
  Probe
ccggactgcccactgcacagaaata

SEQ ID NO: 214354 - DNA, 25 bp, Artificial
  Probe
ggagcactttcaaatctatgacact

SEQ ID NO: 214355 - DNA, 25 bp, Artificial
  Probe
acactccactttggaactaccagga

SEQ ID NO: 214356 - DNA, 25 bp, Artificial
  Probe
cctcctggttctcagaggtccctta

SEQ ID NO: 214357 - DNA, 25 bp, Artificial
  Probe
gggagcccacagaaccgccagacgg

SEQ ID NO: 214358 - DNA, 25 bp, Artificial
  Probe
cggctggctttgcaccggacagcag

SEQ ID NO: 214359 - DNA, 25 bp, Artificial
  Probe
gccggactgcccactgcacagaaat

SEQ ID NO: 214360 - DNA, 25 bp, Artificial
  Probe
tacccagggctgtagggagcctctg

SEQ ID NO: 214361 - DNA, 25 bp, Artificial
  Probe
ctaaaagagacctttcagagtgact

SEQ ID NO: 214362 - DNA, 25 bp, Artificial
  Probe
taataaccctcttaggggaagcctg

SEQ ID NO: 214363 - DNA, 25 bp, Artificial
  Probe
gtgttcctttcactaaaagagacct

SEQ ID NO: 214364 - DNA, 25 bp, Artificial
  Probe
gacaccctaaatctcggggctcgct

SEQ ID NO: 214365 - DNA, 25 bp, Artificial
  Probe
ggggacctttccttgggatgacact

SEQ ID NO: 214366 - DNA, 25 bp, Artificial
  Probe
ctttgtgttcctttcactaaaagag

SEQ ID NO: 214367 - DNA, 25 bp, Artificial
  Probe
ctgtagggagcctctggcctccgca

SEQ ID NO: 214368 - DNA, 25 bp, Artificial
  Probe
tgacactggcacatcagtgtgtatc

SEQ ID NO: 214369 - DNA, 25 bp, Artificial
  Probe
tttcagagtgactcggctaatcatt

SEQ ID NO: 214370 - DNA, 25 bp, Artificial
  Probe
tgtagggagcctctggcctccgcat

SEQ ID NO: 214371 - DNA, 25 bp, Artificial
  Probe
ccgcgtctgtagacgcgggtatgcc

SEQ ID NO: 214372 - DNA, 25 bp, Artificial
  Probe
ttaggggaagcctgcacctgcaaga

SEQ ID NO: 214373 - DNA, 25 bp, Artificial
  Probe
ttcaaggggcttctgaccccgacac

SEQ ID NO: 214374 - DNA, 25 bp, Artificial
  Probe
taaagttgagattcctgcgctccgc

SEQ ID NO: 214375 - DNA, 25 bp, Artificial
  Probe
tcccctgagtaaagttgagattcct

SEQ ID NO: 214376 - DNA, 25 bp, Artificial
  Probe
cggtgtgacccctttcggcaggttg

SEQ ID NO: 214377 - DNA, 25 bp, Artificial
  Probe
gacactggcacatcagtgtgtatcc

SEQ ID NO: 214378 - DNA, 25 bp, Artificial
  Probe
ccctcttaggggaagcctgcacctg

SEQ ID NO: 214379 - DNA, 25 bp, Artificial
  Probe
actcggctaatcattgtgacccctc

SEQ ID NO: 214380 - DNA, 25 bp, Artificial
  Probe
tttcactaaaagagacctttcagag

SEQ ID NO: 214381 - DNA, 25 bp, Artificial
  Probe
gggacctttccttgggatgacactg

SEQ ID NO: 214382 - DNA, 25 bp, Artificial
  Probe
gaagcctgcacctgcaagaaagccc

SEQ ID NO: 214383 - DNA, 25 bp, Artificial
  Probe
cctcttaggggaagcctgcacctgc

SEQ ID NO: 214384 - DNA, 25 bp, Artificial
  Probe
cttgggatgacactggcacatcagt

SEQ ID NO: 214385 - DNA, 25 bp, Artificial
  Probe
gtacccagggctgtagggagcctct

SEQ ID NO: 214386 - DNA, 25 bp, Artificial
  Probe
ttctccggtcgtggtacccagggct

SEQ ID NO: 214387 - DNA, 25 bp, Artificial
  Probe
tcagggggacctttccttgggatga

SEQ ID NO: 214388 - DNA, 25 bp, Artificial
  Probe
tccggtcgtggtacccagggctgta

SEQ ID NO: 214389 - DNA, 25 bp, Artificial
  Probe
ctcggggctcgctaacacctgtttt

SEQ ID NO: 214390 - DNA, 25 bp, Artificial
  Probe
ggcacatcagtgtgtatccagagcc

SEQ ID NO: 214391 - DNA, 25 bp, Artificial
  Probe
acaccctaaatctcggggctcgcta

SEQ ID NO: 214392 - DNA, 25 bp, Artificial
  Probe
ttcagggggacctttccttgggatg

SEQ ID NO: 214393 - DNA, 25 bp, Artificial
  Probe
aaagttgagattcctgcgctccgcc

SEQ ID NO: 214394 - DNA, 25 bp, Artificial
  Probe
taacacctgttttctccggtcgtgg

SEQ ID NO: 214395 - DNA, 25 bp, Artificial
  Probe
gtgtgtatccagagccccttagtgc

SEQ ID NO: 214396 - DNA, 25 bp, Artificial
  Probe
gagtgactcggctaatcattgtgac

SEQ ID NO: 214397 - DNA, 25 bp, Artificial
  Probe
aaatctcggggctcgctaacacctg

SEQ ID NO: 214398 - DNA, 25 bp, Artificial
  Probe
tgttttctccggtcgtggtacccag

SEQ ID NO: 214399 - DNA, 25 bp, Artificial
  Probe
gctaacacctgttttctccggtcgt

SEQ ID NO: 214400 - DNA, 25 bp, Artificial
  Probe
ttgtgttcctttcactaaaagagac

SEQ ID NO: 214401 - DNA, 25 bp, Artificial
  Probe
gtgtgacccctttcggcaggttgcg

SEQ ID NO: 214402 - DNA, 25 bp, Artificial
  Probe
aagagacctttcagagtgactcggc

SEQ ID NO: 214403 - DNA, 25 bp, Artificial
  Probe
cctttccttgggatgacactggcac

SEQ ID NO: 214404 - DNA, 25 bp, Artificial
  Probe
gatgacactggcacatcagtgtgta

SEQ ID NO: 214405 - DNA, 25 bp, Artificial
  Probe
tctccattcccctgagtaaagttga

SEQ ID NO: 214406 - DNA, 25 bp, Artificial
  Probe
ctcggctcgggaggacaaaagacaa

SEQ ID NO: 214407 - DNA, 25 bp, Artificial
  Probe
cggatgtacatagcctacaagtctt

SEQ ID NO: 214408 - DNA, 25 bp, Artificial
  Probe
tgccctctcagacggtggggttata

SEQ ID NO: 214409 - DNA, 25 bp, Artificial
  Probe
gtaaaactctgtatccgagcatttg

SEQ ID NO: 214410 - DNA, 25 bp, Artificial
  Probe
agtcggatgtacatagcctacaagt

SEQ ID NO: 214411 - DNA, 25 bp, Artificial
  Probe
cgaggcgatgccaacttttgtatga

SEQ ID NO: 214412 - DNA, 25 bp, Artificial
  Probe
tgtgacatttttattttaggcgttg

SEQ ID NO: 214413 - DNA, 25 bp, Artificial
  Probe
taaaactctgtatccgagcatttgc

SEQ ID NO: 214414 - DNA, 25 bp, Artificial
  Probe
tatttcttgtaaaggagttgtgaca

SEQ ID NO: 214415 - DNA, 25 bp, Artificial
  Probe
tacaagtctttcatctaaaaacgaa

SEQ ID NO: 214416 - DNA, 25 bp, Artificial
  Probe
ggcgatgccaacttttgtatgaccg

SEQ ID NO: 214417 - DNA, 25 bp, Artificial
  Probe
ttccctacgaaatcgaaacgtgcta

SEQ ID NO: 214418 - DNA, 25 bp, Artificial
  Probe
ttgtaaaactctgtatccgagcatt

SEQ ID NO: 214419 - DNA, 25 bp, Artificial
  Probe
tatgcatgtttgtttttttttttag

SEQ ID NO: 214420 - DNA, 25 bp, Artificial
  Probe
tgtaaaactctgtatccgagcattt

SEQ ID NO: 214421 - DNA, 25 bp, Artificial
  Probe
tcggctcgggaggacaaaagacaaa

SEQ ID NO: 214422 - DNA, 25 bp, Artificial
  Probe
tccctacgaaatcgaaacgtgctaa

SEQ ID NO: 214423 - DNA, 25 bp, Artificial
  Probe
tttgtatgaccgccggctctgtaac

SEQ ID NO: 214424 - DNA, 25 bp, Artificial
  Probe
aatcaatacattgaagagagaatag

SEQ ID NO: 214425 - DNA, 25 bp, Artificial
  Probe
agacaaaaacccagcgaggcgatgc

SEQ ID NO: 214426 - DNA, 25 bp, Artificial
  Probe
caaaatgcatcaaatttgaatcaat

SEQ ID NO: 214427 - DNA, 25 bp, Artificial
  Probe
gatgccaacttttgtatgaccgccg

SEQ ID NO: 214428 - DNA, 25 bp, Artificial
  Probe
tgccaacttttgtatgaccgccggc

SEQ ID NO: 214429 - DNA, 25 bp, Artificial
  Probe
cccagcgaggcgatgccaacttttg

SEQ ID NO: 214430 - DNA, 25 bp, Artificial
  Probe
gaaatcgaaacgtgctaattttata

SEQ ID NO: 214431 - DNA, 25 bp, Artificial
  Probe
aaactctgtatccgagcatttgcaa

SEQ ID NO: 214432 - DNA, 25 bp, Artificial
  Probe
gcgatgccaacttttgtatgaccgc

SEQ ID NO: 214433 - DNA, 25 bp, Artificial
  Probe
tacgaaatcgaaacgtgctaatttt

SEQ ID NO: 214434 - DNA, 25 bp, Artificial
  Probe
gaggcgatgccaacttttgtatgac

SEQ ID NO: 214435 - DNA, 25 bp, Artificial
  Probe
ccctacgaaatcgaaacgtgctaat

SEQ ID NO: 214436 - DNA, 25 bp, Artificial
  Probe
ggttaatttataccgcaatgccctc

SEQ ID NO: 214437 - DNA, 25 bp, Artificial
  Probe
atgccaacttttgtatgaccgccgg

SEQ ID NO: 214438 - DNA, 25 bp, Artificial
  Probe
gccaacttttgtatgaccgccggct

SEQ ID NO: 214439 - DNA, 25 bp, Artificial
  Probe
ccaacttttgtatgaccgccggctc

SEQ ID NO: 214440 - DNA, 25 bp, Artificial
  Probe
ctacgaaatcgaaacgtgctaattt

SEQ ID NO: 214441 - DNA, 25 bp, Artificial
  Probe
caacttttgtatgaccgccggctct

SEQ ID NO: 214442 - DNA, 25 bp, Artificial
  Probe
ccccccccaaaatgcatcaaatttg

SEQ ID NO: 214443 - DNA, 25 bp, Artificial
  Probe
aacttttgtatgaccgccggctctg

SEQ ID NO: 214444 - DNA, 25 bp, Artificial
  Probe
tttgtaaaactctgtatccgagcat

SEQ ID NO: 214445 - DNA, 25 bp, Artificial
  Probe
ccagcgaggcgatgccaacttttgt

SEQ ID NO: 214446 - DNA, 25 bp, Artificial
  Probe
aggcgatgccaacttttgtatgacc

SEQ ID NO: 214447 - DNA, 25 bp, Artificial
  Probe
tttagttcaaaatacaattagaaat

SEQ ID NO: 214448 - DNA, 25 bp, Artificial
  Probe
tttccctacgaaatcgaaacgtgct

SEQ ID NO: 214449 - DNA, 25 bp, Artificial
  Probe
cgatgccaacttttgtatgaccgcc

SEQ ID NO: 214450 - DNA, 25 bp, Artificial
  Probe
cctacgaaatcgaaacgtgctaatt

SEQ ID NO: 214451 - DNA, 25 bp, Artificial
  Probe
ttttgtaaaactctgtatccgagca

SEQ ID NO: 214452 - DNA, 25 bp, Artificial
  Probe
ctggcccacaggaagaagatggaga

SEQ ID NO: 214453 - DNA, 25 bp, Artificial
  Probe
cacctgggaggcagcgcccctgtga

SEQ ID NO: 214454 - DNA, 25 bp, Artificial
  Probe
cagccagaatgaagtctctggagca

SEQ ID NO: 214455 - DNA, 25 bp, Artificial
  Probe
tcacctggcactgtgggccctgaag

SEQ ID NO: 214456 - DNA, 25 bp, Artificial
  Probe
ctctagaggccgagaagcgagcact

SEQ ID NO: 214457 - DNA, 25 bp, Artificial
  Probe
gactttggcctccagaccagtacct

SEQ ID NO: 214458 - DNA, 25 bp, Artificial
  Probe
ctgtgccctcctagggccaggtgct

SEQ ID NO: 214459 - DNA, 25 bp, Artificial
  Probe
tctggtgctccttggcaggccctca

SEQ ID NO: 214460 - DNA, 25 bp, Artificial
  Probe
cagtcctggcccacaggaagaagat

SEQ ID NO: 214461 - DNA, 25 bp, Artificial
  Probe
ctgcgtatgcagagccctgagctgc

SEQ ID NO: 214462 - DNA, 25 bp, Artificial
  Probe
tcccctggacgcttgtcaccagatt

SEQ ID NO: 214463 - DNA, 25 bp, Artificial
  Probe
gatgtttgtacatctcaaagactct

SEQ ID NO: 214464 - DNA, 25 bp, Artificial
  Probe
agcattttaaagagacccctcagga

SEQ ID NO: 214465 - DNA, 25 bp, Artificial
  Probe
agctgaggactttggacccatctcc

SEQ ID NO: 214466 - DNA, 25 bp, Artificial
  Probe
actgtggagagcagccagaatgaag

SEQ ID NO: 214467 - DNA, 25 bp, Artificial
  Probe
cagagcgggccctgtctcctgcaga

SEQ ID NO: 214468 - DNA, 25 bp, Artificial
  Probe
gatctcgtggcgagactgtaactag

SEQ ID NO: 214469 - DNA, 25 bp, Artificial
  Probe
aggcagcgcccctgtgaggacagcc

SEQ ID NO: 214470 - DNA, 25 bp, Artificial
  Probe
ctgtaactagtgatgtttgtacatc

SEQ ID NO: 214471 - DNA, 25 bp, Artificial
  Probe
gttatggcttctgattaactgcccc

SEQ ID NO: 214472 - DNA, 25 bp, Artificial
  Probe
cacctggcactgtgggccctgaaga

SEQ ID NO: 214473 - DNA, 25 bp, Artificial
  Probe
agcggctgcgtatgcagagccctga

SEQ ID NO: 214474 - DNA, 25 bp, Artificial
  Probe
caccagatttcgtggaggagctgag

SEQ ID NO: 214475 - DNA, 25 bp, Artificial
  Probe
tgatgtttgtacatctcaaagactc

SEQ ID NO: 214476 - DNA, 25 bp, Artificial
  Probe
tcacgcacacacctgggaggcagcg

SEQ ID NO: 214477 - DNA, 25 bp, Artificial
  Probe
gagcggctggctgaggccccttcac

SEQ ID NO: 214478 - DNA, 25 bp, Artificial
  Probe
tcctagggccaggtgcttccccaga

SEQ ID NO: 214479 - DNA, 25 bp, Artificial
  Probe
aggtgcttccccagacttagggtgg

SEQ ID NO: 214480 - DNA, 25 bp, Artificial
  Probe
tgaggactttggacccatctcccag

SEQ ID NO: 214481 - DNA, 25 bp, Artificial
  Probe
tcctgcagagcgaagggctctagag

SEQ ID NO: 214482 - DNA, 25 bp, Artificial
  Probe
atagccgggatctcgtggcgagact

SEQ ID NO: 214483 - DNA, 25 bp, Artificial
  Probe
cgtggcgagactgtaactagtgatg

SEQ ID NO: 214484 - DNA, 25 bp, Artificial
  Probe
tggctctggtgctccttggcaggcc

SEQ ID NO: 214485 - DNA, 25 bp, Artificial
  Probe
agcaggatgccctccgtgcacagat

SEQ ID NO: 214486 - DNA, 25 bp, Artificial
  Probe
aaggccgtggcaagagaggaccctt

SEQ ID NO: 214487 - DNA, 25 bp, Artificial
  Probe
cccatagccgggatctcgtggcgag

SEQ ID NO: 214488 - DNA, 25 bp, Artificial
  Probe
caagtcccaggaaggccgtggcaag

SEQ ID NO: 214489 - DNA, 25 bp, Artificial
  Probe
gacgtcatcaggagcggctgcgtat

SEQ ID NO: 214490 - DNA, 25 bp, Artificial
  Probe
taccccaggtcttttagccttggtg

SEQ ID NO: 214491 - DNA, 25 bp, Artificial
  Probe
acatctcaaagactctattttgtgg

SEQ ID NO: 214492 - DNA, 25 bp, Artificial
  Probe
ctagaggccgagaagcgagcactgt

SEQ ID NO: 214493 - DNA, 25 bp, Artificial
  Probe
cacctacaccattagaagactttgg

SEQ ID NO: 214494 - DNA, 25 bp, Artificial
  Probe
ggggagcctgccagcttcatcacct

SEQ ID NO: 214495 - DNA, 25 bp, Artificial
  Probe
aagcgagcactgtggagagcagcca

SEQ ID NO: 214496 - DNA, 25 bp, Artificial
  Probe
gtcttttagccttggtgttagcatt

SEQ ID NO: 214497 - DNA, 25 bp, Artificial
  Probe
tatgcagtagtcgtcgggccatgcg

SEQ ID NO: 214498 - DNA, 25 bp, Artificial
  Probe
ctgcctgactccacagatcgtgagt

SEQ ID NO: 214499 - DNA, 25 bp, Artificial
  Probe
agatggtcagtctgtttaacctgtc

SEQ ID NO: 214500 - DNA, 25 bp, Artificial
  Probe
cggggaagtcctttgctgtcctgcc

SEQ ID NO: 214501 - DNA, 25 bp, Artificial
  Probe
actccacagatcgtgagtgtgtgtg

SEQ ID NO: 214502 - DNA, 25 bp, Artificial
  Probe
caggagagcacctcttggggcccca

SEQ ID NO: 214503 - DNA, 25 bp, Artificial
  Probe
cataaacgaatcagcacttgaatgg

SEQ ID NO: 214504 - DNA, 25 bp, Artificial
  Probe
gcctgactccacagatcgtgagtgt

SEQ ID NO: 214505 - DNA, 25 bp, Artificial
  Probe
tctgtcaattcttcctctggacctg

SEQ ID NO: 214506 - DNA, 25 bp, Artificial
  Probe
tcttcctctggacctggggcagcca

SEQ ID NO: 214507 - DNA, 25 bp, Artificial
  Probe
ctcaagctgagcttggaaaagccta

SEQ ID NO: 214508 - DNA, 25 bp, Artificial
  Probe
agtctgtttaacctgtctgtcaatt

SEQ ID NO: 214509 - DNA, 25 bp, Artificial
  Probe
acataaacgaatcagcacttgaatg

SEQ ID NO: 214510 - DNA, 25 bp, Artificial
  Probe
cgaatcagcacttgaatggggaaag

SEQ ID NO: 214511 - DNA, 25 bp, Artificial
  Probe
tcagtctgtttaacctgtctgtcaa

SEQ ID NO: 214512 - DNA, 25 bp, Artificial
  Probe
gtctgtttaacctgtctgtcaattc

SEQ ID NO: 214513 - DNA, 25 bp, Artificial
  Probe
ggagagcacctcttggggccccatg

SEQ ID NO: 214514 - DNA, 25 bp, Artificial
  Probe
tggtcagtctgtttaacctgtctgt

SEQ ID NO: 214515 - DNA, 25 bp, Artificial
  Probe
gactccacagatcgtgagtgtgtgt

SEQ ID NO: 214516 - DNA, 25 bp, Artificial
  Probe
ggagctgcctgactccacagatcgt

SEQ ID NO: 214517 - DNA, 25 bp, Artificial
  Probe
tgcctgactccacagatcgtgagtg

SEQ ID NO: 214518 - DNA, 25 bp, Artificial
  Probe
gcggggaagtcctttgctgtcctgc

SEQ ID NO: 214519 - DNA, 25 bp, Artificial
  Probe
tgtcaattcttcctctggacctggg

SEQ ID NO: 214520 - DNA, 25 bp, Artificial
  Probe
acgaatcagcacttgaatggggaaa

SEQ ID NO: 214521 - DNA, 25 bp, Artificial
  Probe
gcaggagagcacctcttggggcccc

SEQ ID NO: 214522 - DNA, 25 bp, Artificial
  Probe
gagagcacctcttggggccccatga

SEQ ID NO: 214523 - DNA, 25 bp, Artificial
  Probe
tctcaagctgagcttggaaaagcct

SEQ ID NO: 214524 - DNA, 25 bp, Artificial
  Probe
tgtctgtcaattcttcctctggacc

SEQ ID NO: 214525 - DNA, 25 bp, Artificial
  Probe
cctgtctgtcaattcttcctctgga

SEQ ID NO: 214526 - DNA, 25 bp, Artificial
  Probe
ttcctctggacctggggcagccaag

SEQ ID NO: 214527 - DNA, 25 bp, Artificial
  Probe
tcaattcttcctctggacctggggc

SEQ ID NO: 214528 - DNA, 25 bp, Artificial
  Probe
acctgtctgtcaattcttcctctgg

SEQ ID NO: 214529 - DNA, 25 bp, Artificial
  Probe
caagctgagcttggaaaagcctaca

SEQ ID NO: 214530 - DNA, 25 bp, Artificial
  Probe
ccacagatcgtgagtgtgtgtgagt

SEQ ID NO: 214531 - DNA, 25 bp, Artificial
  Probe
gtctgtcaattcttcctctggacct

SEQ ID NO: 214532 - DNA, 25 bp, Artificial
  Probe
aaacgaatcagcacttgaatgggga

SEQ ID NO: 214533 - DNA, 25 bp, Artificial
  Probe
ggtctcaagctgagcttggaaaagc

SEQ ID NO: 214534 - DNA, 25 bp, Artificial
  Probe
atggtcagtctgtttaacctgtctg

SEQ ID NO: 214535 - DNA, 25 bp, Artificial
  Probe
ctgactccacagatcgtgagtgtgt

SEQ ID NO: 214536 - DNA, 25 bp, Artificial
  Probe
gtcagtctgtttaacctgtctgtca

SEQ ID NO: 214537 - DNA, 25 bp, Artificial
  Probe
agagatggtcagtctgtttaacctg

SEQ ID NO: 214538 - DNA, 25 bp, Artificial
  Probe
ctgtctgtcaattcttcctctggac

SEQ ID NO: 214539 - DNA, 25 bp, Artificial
  Probe
aacgaatcagcacttgaatggggaa

SEQ ID NO: 214540 - DNA, 25 bp, Artificial
  Probe
gagatggtcagtctgtttaacctgt

SEQ ID NO: 214541 - DNA, 25 bp, Artificial
  Probe
gagctgcctgactccacagatcgtg

SEQ ID NO: 214542 - DNA, 25 bp, Artificial
  Probe
cttcctctggacctggggcagccaa

SEQ ID NO: 214543 - DNA, 25 bp, Artificial
  Probe
taaacgaatcagcacttgaatgggg

SEQ ID NO: 214544 - DNA, 25 bp, Artificial
  Probe
aatgatgcaatatatcctttctgag

SEQ ID NO: 214545 - DNA, 25 bp, Artificial
  Probe
gtggcccttaacacttgacactctt

SEQ ID NO: 214546 - DNA, 25 bp, Artificial
  Probe
tgtggcccttaacacttgacactct

SEQ ID NO: 214547 - DNA, 25 bp, Artificial
  Probe
catgtggcccttaacacttgacact

SEQ ID NO: 214548 - DNA, 25 bp, Artificial
  Probe
cactcttaacactactcatggggct

SEQ ID NO: 214549 - DNA, 25 bp, Artificial
  Probe
tgatgtctgtcaccatagacacacg

SEQ ID NO: 214550 - DNA, 25 bp, Artificial
  Probe
caacccaaagagcacaagattgtct

SEQ ID NO: 214551 - DNA, 25 bp, Artificial
  Probe
tgtctgtcaccatagacacacgtgt

SEQ ID NO: 214552 - DNA, 25 bp, Artificial
  Probe
gatccctgatgtctgtcaccataga

SEQ ID NO: 214553 - DNA, 25 bp, Artificial
  Probe
agcacaagattgtctgtctgctcgt

SEQ ID NO: 214554 - DNA, 25 bp, Artificial
  Probe
tccctgatgtctgtcaccatagaca

SEQ ID NO: 214555 - DNA, 25 bp, Artificial
  Probe
acactcttaacactactcatggggc

SEQ ID NO: 214556 - DNA, 25 bp, Artificial
  Probe
agatccctgatgtctgtcaccatag

SEQ ID NO: 214557 - DNA, 25 bp, Artificial
  Probe
ccctgatgtctgtcaccatagacac

SEQ ID NO: 214558 - DNA, 25 bp, Artificial
  Probe
atgtggcccttaacacttgacactc

SEQ ID NO: 214559 - DNA, 25 bp, Artificial
  Probe
ggcaacccaaagagcacaagattgt

SEQ ID NO: 214560 - DNA, 25 bp, Artificial
  Probe
gacactcttaacactactcatgggg

SEQ ID NO: 214561 - DNA, 25 bp, Artificial
  Probe
acatgtggcccttaacacttgacac

SEQ ID NO: 214562 - DNA, 25 bp, Artificial
  Probe
aacccaaagagcacaagattgtctg

SEQ ID NO: 214563 - DNA, 25 bp, Artificial
  Probe
agacagatccctgatgtctgtcacc

SEQ ID NO: 214564 - DNA, 25 bp, Artificial
  Probe
acagatccctgatgtctgtcaccat

SEQ ID NO: 214565 - DNA, 25 bp, Artificial
  Probe
gtctgtcaccatagacacacgtgtt

SEQ ID NO: 214566 - DNA, 25 bp, Artificial
  Probe
gacagatccctgatgtctgtcacca

SEQ ID NO: 214567 - DNA, 25 bp, Artificial
  Probe
agattgtctgtctgctcgtttttaa

SEQ ID NO: 214568 - DNA, 25 bp, Artificial
  Probe
atccctgatgtctgtcaccatagac

SEQ ID NO: 214569 - DNA, 25 bp, Artificial
  Probe
acccaaagagcacaagattgtctgt

SEQ ID NO: 214570 - DNA, 25 bp, Artificial
  Probe
acaagattgtctgtctgctcgtttt

SEQ ID NO: 214571 - DNA, 25 bp, Artificial
  Probe
gatgtctgtcaccatagacacacgt

SEQ ID NO: 214572 - DNA, 25 bp, Artificial
  Probe
ttgggctgttttgcttaacaaactt

SEQ ID NO: 214573 - DNA, 25 bp, Artificial
  Probe
cagatccctgatgtctgtcaccata

SEQ ID NO: 214574 - DNA, 25 bp, Artificial
  Probe
tggacagacagatccctgatgtctg

SEQ ID NO: 214575 - DNA, 25 bp, Artificial
  Probe
actcttaacactactcatggggctg

SEQ ID NO: 214576 - DNA, 25 bp, Artificial
  Probe
gttgggctgttttgcttaacaaact

SEQ ID NO: 214577 - DNA, 25 bp, Artificial
  Probe
gatggacagacagatccctgatgtc

SEQ ID NO: 214578 - DNA, 25 bp, Artificial
  Probe
tgggctgttttgcttaacaaacttt

SEQ ID NO: 214579 - DNA, 25 bp, Artificial
  Probe
tggcaacccaaagagcacaagattg

SEQ ID NO: 214580 - DNA, 25 bp, Artificial
  Probe
gatgcaatatatcctttctgagata

SEQ ID NO: 214581 - DNA, 25 bp, Artificial
  Probe
cctgatgtctgtcaccatagacaca

SEQ ID NO: 214582 - DNA, 25 bp, Artificial
  Probe
tctgtcaccatagacacacgtgttg

SEQ ID NO: 214583 - DNA, 25 bp, Artificial
  Probe
attggcaacccaaagagcacaagat

SEQ ID NO: 214584 - DNA, 25 bp, Artificial
  Probe
cagacagatccctgatgtctgtcac

SEQ ID NO: 214585 - DNA, 25 bp, Artificial
  Probe
tgacactcttaacactactcatggg

SEQ ID NO: 214586 - DNA, 25 bp, Artificial
  Probe
caagattgtctgtctgctcgttttt

SEQ ID NO: 214587 - DNA, 25 bp, Artificial
  Probe
tgatgcaatatatcctttctgagat

SEQ ID NO: 214588 - DNA, 25 bp, Artificial
  Probe
gcacaagattgtctgtctgctcgtt

SEQ ID NO: 214589 - DNA, 25 bp, Artificial
  Probe
tattggcaacccaaagagcacaaga

SEQ ID NO: 214590 - DNA, 25 bp, Artificial
  Probe
gccaacacagcagcatcaatttgca

SEQ ID NO: 214591 - DNA, 25 bp, Artificial
  Probe
ttgcaccattcatctacagtggatg

SEQ ID NO: 214592 - DNA, 25 bp, Artificial
  Probe
tttgcaccattcatctacagtggat

SEQ ID NO: 214593 - DNA, 25 bp, Artificial
  Probe
tacagtggatgtctttggcttcagg

SEQ ID NO: 214594 - DNA, 25 bp, Artificial
  Probe
tctacagtggatgtctttggcttca

SEQ ID NO: 214595 - DNA, 25 bp, Artificial
  Probe
ttttaacctgagtatataatttgcc

SEQ ID NO: 214596 - DNA, 25 bp, Artificial
  Probe
cagtggatgtctttggcttcaggtt

SEQ ID NO: 214597 - DNA, 25 bp, Artificial
  Probe
atctacagtggatgtctttggcttc

SEQ ID NO: 214598 - DNA, 25 bp, Artificial
  Probe
ttcatctacagtggatgtctttggc

SEQ ID NO: 214599 - DNA, 25 bp, Artificial
  Probe
tcatctacagtggatgtctttggct

SEQ ID NO: 214600 - DNA, 25 bp, Artificial
  Probe
caccatattgtatatttatgtgtag

SEQ ID NO: 214601 - DNA, 25 bp, Artificial
  Probe
caccattcatctacagtggatgtct

SEQ ID NO: 214602 - DNA, 25 bp, Artificial
  Probe
tatattttttttaacctgagtatat

SEQ ID NO: 214603 - DNA, 25 bp, Artificial
  Probe
accattcatctacagtggatgtctt

SEQ ID NO: 214604 - DNA, 25 bp, Artificial
  Probe
caatttgcaccattcatctacagtg

SEQ ID NO: 214605 - DNA, 25 bp, Artificial
  Probe
ttttttaacctgagtatataatttg

SEQ ID NO: 214606 - DNA, 25 bp, Artificial
  Probe
ggatgtctttggcttcaggttttgt

SEQ ID NO: 214607 - DNA, 25 bp, Artificial
  Probe
tgccaacgtgatgatttttttagct

SEQ ID NO: 214608 - DNA, 25 bp, Artificial
  Probe
catctacagtggatgtctttggctt

SEQ ID NO: 214609 - DNA, 25 bp, Artificial
  Probe
tataatttgccaacacagcagcatc

SEQ ID NO: 214610 - DNA, 25 bp, Artificial
  Probe
gtctttggcttcaggttttgtgtgt

SEQ ID NO: 214611 - DNA, 25 bp, Artificial
  Probe
agcatcaatttgcaccattcatcta

SEQ ID NO: 214612 - DNA, 25 bp, Artificial
  Probe
tgtgtattctttctacaccatattg

SEQ ID NO: 214613 - DNA, 25 bp, Artificial
  Probe
acagtggatgtctttggcttcaggt

SEQ ID NO: 214614 - DNA, 25 bp, Artificial
  Probe
agtggatgtctttggcttcaggttt

SEQ ID NO: 214615 - DNA, 25 bp, Artificial
  Probe
tgtatattttttttaacctgagtat

SEQ ID NO: 214616 - DNA, 25 bp, Artificial
  Probe
gttctacagcaccttttgtgtattc

SEQ ID NO: 214617 - DNA, 25 bp, Artificial
  Probe
ttcaggttttgtgtgtagaatttat

SEQ ID NO: 214618 - DNA, 25 bp, Artificial
  Probe
agttctacagcaccttttgtgtatt

SEQ ID NO: 214619 - DNA, 25 bp, Artificial
  Probe
aatttgcaccattcatctacagtgg

SEQ ID NO: 214620 - DNA, 25 bp, Artificial
  Probe
tttgccaacacagcagcatcaattt

SEQ ID NO: 214621 - DNA, 25 bp, Artificial
  Probe
attcatctacagtggatgtctttgg

SEQ ID NO: 214622 - DNA, 25 bp, Artificial
  Probe
ctacagtggatgtctttggcttcag

SEQ ID NO: 214623 - DNA, 25 bp, Artificial
  Probe
ccattcatctacagtggatgtcttt

SEQ ID NO: 214624 - DNA, 25 bp, Artificial
  Probe
ctttctacaccatattgtatattta

SEQ ID NO: 214625 - DNA, 25 bp, Artificial
  Probe
acagcagcatcaatttgcaccattc

SEQ ID NO: 214626 - DNA, 25 bp, Artificial
  Probe
ttgccaacacagcagcatcaatttg

SEQ ID NO: 214627 - DNA, 25 bp, Artificial
  Probe
gtatataatttgccaacacagcagc

SEQ ID NO: 214628 - DNA, 25 bp, Artificial
  Probe
ttattgccaacgtgatgattttttt

SEQ ID NO: 214629 - DNA, 25 bp, Artificial
  Probe
tagaatttattgccaacgtgatgat

SEQ ID NO: 214630 - DNA, 25 bp, Artificial
  Probe
tgcaccattcatctacagtggatgt

SEQ ID NO: 214631 - DNA, 25 bp, Artificial
  Probe
atttgcaccattcatctacagtgga

SEQ ID NO: 214632 - DNA, 25 bp, Artificial
  Probe
gcaccattcatctacagtggatgtc

SEQ ID NO: 214633 - DNA, 25 bp, Artificial
  Probe
tgccaacacagcagcatcaatttgc

SEQ ID NO: 214634 - DNA, 25 bp, Artificial
  Probe
cagcagcatcaatttgcaccattca

SEQ ID NO: 214635 - DNA, 25 bp, Artificial
  Probe
cattcatctacagtggatgtctttg

SEQ ID NO: 214636 - DNA, 25 bp, Artificial
  Probe
ccacaaccatggtgtctaaagatat

SEQ ID NO: 214637 - DNA, 25 bp, Artificial
  Probe
aaactccatactctcttaagcggtg

SEQ ID NO: 214638 - DNA, 25 bp, Artificial
  Probe
gaggtcaacaacaatggcagtgaca

SEQ ID NO: 214639 - DNA, 25 bp, Artificial
  Probe
gtgagtcaacgcaggatggcaaatc

SEQ ID NO: 214640 - DNA, 25 bp, Artificial
  Probe
caacaatggcagtgacagggcagtc

SEQ ID NO: 214641 - DNA, 25 bp, Artificial
  Probe
gagtcaacgcaggatggcaaatcag

SEQ ID NO: 214642 - DNA, 25 bp, Artificial
  Probe
tcagaacaagatgtccctacacaag

SEQ ID NO: 214643 - DNA, 25 bp, Artificial
  Probe
catactctcttaagcggtggcgccc

SEQ ID NO: 214644 - DNA, 25 bp, Artificial
  Probe
ggtggcgcccatccacctgggtcat

SEQ ID NO: 214645 - DNA, 25 bp, Artificial
  Probe
cagaacaagatgtccctacacaagg

SEQ ID NO: 214646 - DNA, 25 bp, Artificial
  Probe
aggtgttacaagcacagctgcagac

SEQ ID NO: 214647 - DNA, 25 bp, Artificial
  Probe
gcccaattctctggatctttcagcc

SEQ ID NO: 214648 - DNA, 25 bp, Artificial
  Probe
acaatggcagtgacagggcagtcca

SEQ ID NO: 214649 - DNA, 25 bp, Artificial
  Probe
caaatcaggatcaggcgaaaagatc

SEQ ID NO: 214650 - DNA, 25 bp, Artificial
  Probe
gatggcaaatcaggatcaggcgaaa

SEQ ID NO: 214651 - DNA, 25 bp, Artificial
  Probe
actggactgtgaggtcaacaacaat

SEQ ID NO: 214652 - DNA, 25 bp, Artificial
  Probe
gcagtccattctaaatctagcactg

SEQ ID NO: 214653 - DNA, 25 bp, Artificial
  Probe
agaagagcacagaggcccaattctc

SEQ ID NO: 214654 - DNA, 25 bp, Artificial
  Probe
ataggtgagtcaacgcaggatggca

SEQ ID NO: 214655 - DNA, 25 bp, Artificial
  Probe
aatggcagtgacagggcagtccatt

SEQ ID NO: 214656 - DNA, 25 bp, Artificial
  Probe
cagcaatccatgttcagaacaagat

SEQ ID NO: 214657 - DNA, 25 bp, Artificial
  Probe
agtgacagggcagtccattctaaat

SEQ ID NO: 214658 - DNA, 25 bp, Artificial
  Probe
ggtgttacaagcacagctgcagacc

SEQ ID NO: 214659 - DNA, 25 bp, Artificial
  Probe
gcacagaggcccaattctctggatc

SEQ ID NO: 214660 - DNA, 25 bp, Artificial
  Probe
acgcaggatggcaaatcaggatcag

SEQ ID NO: 214661 - DNA, 25 bp, Artificial
  Probe
gtcaacgcaggatggcaaatcagga

SEQ ID NO: 214662 - DNA, 25 bp, Artificial
  Probe
ggtcaacaacaatggcagtgacagg

SEQ ID NO: 214663 - DNA, 25 bp, Artificial
  Probe
actgctgtgtacctcgcagagggag

SEQ ID NO: 214664 - DNA, 25 bp, Artificial
  Probe
caaccatggtgtctaaagatatagg

SEQ ID NO: 214665 - DNA, 25 bp, Artificial
  Probe
tctcttaagcggtggcgcccatcca

SEQ ID NO: 214666 - DNA, 25 bp, Artificial
  Probe
ccactggactgtgaggtcaacaaca

SEQ ID NO: 214667 - DNA, 25 bp, Artificial
  Probe
atggcagcagcatgcagataggtga

SEQ ID NO: 214668 - DNA, 25 bp, Artificial
  Probe
gacagggcagtccattctaaatcta

SEQ ID NO: 214669 - DNA, 25 bp, Artificial
  Probe
ccatgttcagaacaagatgtcccta

SEQ ID NO: 214670 - DNA, 25 bp, Artificial
  Probe
tggcaaatcaggatcaggcgaaaag

SEQ ID NO: 214671 - DNA, 25 bp, Artificial
  Probe
cagcatgcagataggtgagtcaacg

SEQ ID NO: 214672 - DNA, 25 bp, Artificial
  Probe
ctacacaaggtgttacaagcacagc

SEQ ID NO: 214673 - DNA, 25 bp, Artificial
  Probe
gttcagaacaagatgtccctacaca

SEQ ID NO: 214674 - DNA, 25 bp, Artificial
  Probe
aacagcaatccatgttcagaacaag

SEQ ID NO: 214675 - DNA, 25 bp, Artificial
  Probe
ccattctaaatctagcactgctgtg

SEQ ID NO: 214676 - DNA, 25 bp, Artificial
  Probe
ttgcatcatttaaacatgcagaaga

SEQ ID NO: 214677 - DNA, 25 bp, Artificial
  Probe
gtccattctaaatctagcactgctg

SEQ ID NO: 214678 - DNA, 25 bp, Artificial
  Probe
acaacaatggcagtgacagggcagt

SEQ ID NO: 214679 - DNA, 25 bp, Artificial
  Probe
gcagcagcatgcagataggtgagtc

SEQ ID NO: 214680 - DNA, 25 bp, Artificial
  Probe
gaacggccattagaaggtggccgaa

SEQ ID NO: 214681 - DNA, 25 bp, Artificial
  Probe
acaagatgtccctacacaaggtgtt

SEQ ID NO: 214682 - DNA, 25 bp, Artificial
  Probe
gcaaagctccactgttaacgctgcg

SEQ ID NO: 214683 - DNA, 25 bp, Artificial
  Probe
ctgcgcgccatacgtctcatgactg

SEQ ID NO: 214684 - DNA, 25 bp, Artificial
  Probe
agccaggcgttaggatggattttcc

SEQ ID NO: 214685 - DNA, 25 bp, Artificial
  Probe
acagccaggcgttaggatggatttt

SEQ ID NO: 214686 - DNA, 25 bp, Artificial
  Probe
ttgttttgcccctcaacagttgttg

SEQ ID NO: 214687 - DNA, 25 bp, Artificial
  Probe
tagcaaagctccactgttaacgctg

SEQ ID NO: 214688 - DNA, 25 bp, Artificial
  Probe
cgcgccatacgtctcatgactgttt

SEQ ID NO: 214689 - DNA, 25 bp, Artificial
  Probe
cactgttaacgctgcgcgccatacg

SEQ ID NO: 214690 - DNA, 25 bp, Artificial
  Probe
ggcgatagcaaagctccactgttaa

SEQ ID NO: 214691 - DNA, 25 bp, Artificial
  Probe
aagctccactgttaacgctgcgcgc

SEQ ID NO: 214692 - DNA, 25 bp, Artificial
  Probe
acgctgcgcgccatacgtctcatga

SEQ ID NO: 214693 - DNA, 25 bp, Artificial
  Probe
cagccaggcgttaggatggattttc

SEQ ID NO: 214694 - DNA, 25 bp, Artificial
  Probe
tcaacagttgttgctggtttgctga

SEQ ID NO: 214695 - DNA, 25 bp, Artificial
  Probe
ttaggatggattttcccatttgtca

SEQ ID NO: 214696 - DNA, 25 bp, Artificial
  Probe
tgcgcgccatacgtctcatgactgt

SEQ ID NO: 214697 - DNA, 25 bp, Artificial
  Probe
tgcccctcaacagttgttgctggtt

SEQ ID NO: 214698 - DNA, 25 bp, Artificial
  Probe
gcgatagcaaagctccactgttaac

SEQ ID NO: 214699 - DNA, 25 bp, Artificial
  Probe
caaagctccactgttaacgctgcgc

SEQ ID NO: 214700 - DNA, 25 bp, Artificial
  Probe
gatagcaaagctccactgttaacgc

SEQ ID NO: 214701 - DNA, 25 bp, Artificial
  Probe
agcaaagctccactgttaacgctgc

SEQ ID NO: 214702 - DNA, 25 bp, Artificial
  Probe
taagtttgaagcttgttttgcccct

SEQ ID NO: 214703 - DNA, 25 bp, Artificial
  Probe
ttttgcccctcaacagttgttgctg

SEQ ID NO: 214704 - DNA, 25 bp, Artificial
  Probe
tttgcccctcaacagttgttgctgg

SEQ ID NO: 214705 - DNA, 25 bp, Artificial
  Probe
agtccagagaacaaggcgatagcaa

SEQ ID NO: 214706 - DNA, 25 bp, Artificial
  Probe
gccatacgtctcatgactgtttttc

SEQ ID NO: 214707 - DNA, 25 bp, Artificial
  Probe
cctcaacagttgttgctggtttgct

SEQ ID NO: 214708 - DNA, 25 bp, Artificial
  Probe
cgccatacgtctcatgactgttttt

SEQ ID NO: 214709 - DNA, 25 bp, Artificial
  Probe
gcccctcaacagttgttgctggttt

SEQ ID NO: 214710 - DNA, 25 bp, Artificial
  Probe
agtttgaagcttgttttgcccctca

SEQ ID NO: 214711 - DNA, 25 bp, Artificial
  Probe
ttgcccctcaacagttgttgctggt

SEQ ID NO: 214712 - DNA, 25 bp, Artificial
  Probe
cgatagcaaagctccactgttaacg

SEQ ID NO: 214713 - DNA, 25 bp, Artificial
  Probe
cccctcaacagttgttgctggtttg

SEQ ID NO: 214714 - DNA, 25 bp, Artificial
  Probe
atagcaaagctccactgttaacgct

SEQ ID NO: 214715 - DNA, 25 bp, Artificial
  Probe
caacagttgttgctggtttgctgag

SEQ ID NO: 214716 - DNA, 25 bp, Artificial
  Probe
tttgaagcttgttttgcccctcaac

SEQ ID NO: 214717 - DNA, 25 bp, Artificial
  Probe
ctcaacagttgttgctggtttgctg

SEQ ID NO: 214718 - DNA, 25 bp, Artificial
  Probe
ccctcaacagttgttgctggtttgc

SEQ ID NO: 214719 - DNA, 25 bp, Artificial
  Probe
aaagctccactgttaacgctgcgcg

SEQ ID NO: 214720 - DNA, 25 bp, Artificial
  Probe
ttgaagcttgttttgcccctcaaca

SEQ ID NO: 214721 - DNA, 25 bp, Artificial
  Probe
gttttgcccctcaacagttgttgct

SEQ ID NO: 214722 - DNA, 25 bp, Artificial
  Probe
gcgccatacgtctcatgactgtttt

SEQ ID NO: 214723 - DNA, 25 bp, Artificial
  Probe
gcgcgccatacgtctcatgactgtt

SEQ ID NO: 214724 - DNA, 25 bp, Artificial
  Probe
gctgcgcgccatacgtctcatgact

SEQ ID NO: 214725 - DNA, 25 bp, Artificial
  Probe
gtttgaagcttgttttgcccctcaa

SEQ ID NO: 214726 - DNA, 25 bp, Artificial
  Probe
tgttttgcccctcaacagttgttgc

SEQ ID NO: 214727 - DNA, 25 bp, Artificial
  Probe
gacagccaggcgttaggatggattt

SEQ ID NO: 214728 - DNA, 25 bp, Artificial
  Probe
tatgctgtacttggctcctttaacc

SEQ ID NO: 214729 - DNA, 25 bp, Artificial
  Probe
aattgagaaaatccctgagttgata

SEQ ID NO: 214730 - DNA, 25 bp, Artificial
  Probe
ctctaaaggcagatatgctgtactt

SEQ ID NO: 214731 - DNA, 25 bp, Artificial
  Probe
atgctgtacttggctcctttaaccc

SEQ ID NO: 214732 - DNA, 25 bp, Artificial
  Probe
tgagttgatagctctaaaggcagat

SEQ ID NO: 214733 - DNA, 25 bp, Artificial
  Probe
atatgctgtacttggctcctttaac

SEQ ID NO: 214734 - DNA, 25 bp, Artificial
  Probe
tgatagctctaaaggcagatatgct

SEQ ID NO: 214735 - DNA, 25 bp, Artificial
  Probe
atagctctaaaggcagatatgctgt

SEQ ID NO: 214736 - DNA, 25 bp, Artificial
  Probe
tgctgtacttggctcctttaaccca

SEQ ID NO: 214737 - DNA, 25 bp, Artificial
  Probe
gatatgctgtacttggctcctttaa

SEQ ID NO: 214738 - DNA, 25 bp, Artificial
  Probe
tagctctaaaggcagatatgctgta

SEQ ID NO: 214739 - DNA, 25 bp, Artificial
  Probe
ccctgagttgatagctctaaaggca

SEQ ID NO: 214740 - DNA, 25 bp, Artificial
  Probe
tgagaaaatccctgagttgatagct

SEQ ID NO: 214741 - DNA, 25 bp, Artificial
  Probe
taattgagaaaatccctgagttgat

SEQ ID NO: 214742 - DNA, 25 bp, Artificial
  Probe
atccctgagttgatagctctaaagg

SEQ ID NO: 214743 - DNA, 25 bp, Artificial
  Probe
aatccctgagttgatagctctaaag

SEQ ID NO: 214744 - DNA, 25 bp, Artificial
  Probe
agttgatagctctaaaggcagatat

SEQ ID NO: 214745 - DNA, 25 bp, Artificial
  Probe
gatagctctaaaggcagatatgctg

SEQ ID NO: 214746 - DNA, 25 bp, Artificial
  Probe
gttgatagctctaaaggcagatatg

SEQ ID NO: 214747 - DNA, 25 bp, Artificial
  Probe
ttgatagctctaaaggcagatatgc

SEQ ID NO: 214748 - DNA, 25 bp, Artificial
  Probe
ttgagaaaatccctgagttgatagc

SEQ ID NO: 214749 - DNA, 25 bp, Artificial
  Probe
gagaaaatccctgagttgatagctc

SEQ ID NO: 214750 - DNA, 25 bp, Artificial
  Probe
aggcagatatgctgtacttggctcc

SEQ ID NO: 214751 - DNA, 25 bp, Artificial
  Probe
ctgtacttggctcctttaacccatt

SEQ ID NO: 214752 - DNA, 25 bp, Artificial
  Probe
agaaaatccctgagttgatagctct

SEQ ID NO: 214753 - DNA, 25 bp, Artificial
  Probe
agctctaaaggcagatatgctgtac

SEQ ID NO: 214754 - DNA, 25 bp, Artificial
  Probe
attgagaaaatccctgagttgatag

SEQ ID NO: 214755 - DNA, 25 bp, Artificial
  Probe
cagatatgctgtacttggctccttt

SEQ ID NO: 214756 - DNA, 25 bp, Artificial
  Probe
tccctgagttgatagctctaaaggc

SEQ ID NO: 214757 - DNA, 25 bp, Artificial
  Probe
aaatccctgagttgatagctctaaa

SEQ ID NO: 214758 - DNA, 25 bp, Artificial
  Probe
gctgtacttggctcctttaacccat

SEQ ID NO: 214759 - DNA, 25 bp, Artificial
  Probe
gaaaatccctgagttgatagctcta

SEQ ID NO: 214760 - DNA, 25 bp, Artificial
  Probe
tgtacttggctcctttaacccattt

SEQ ID NO: 214761 - DNA, 25 bp, Artificial
  Probe
agatatgctgtacttggctccttta

SEQ ID NO: 214762 - DNA, 25 bp, Artificial
  Probe
aaaatccctgagttgatagctctaa

SEQ ID NO: 214763 - DNA, 25 bp, Artificial
  Probe
actcagacaagtacttcgacgagca

SEQ ID NO: 214764 - DNA, 25 bp, Artificial
  Probe
aaatgaagtacagctgggatcatct

SEQ ID NO: 214765 - DNA, 25 bp, Artificial
  Probe
atgagctgtattcttcacagcaaca

SEQ ID NO: 214766 - DNA, 25 bp, Artificial
  Probe
ctgtgcatgagctgtattcttcaca

SEQ ID NO: 214767 - DNA, 25 bp, Artificial
  Probe
atgaagtacagctgggatcatctaa

SEQ ID NO: 214768 - DNA, 25 bp, Artificial
  Probe
gcccacaagcagatctactactcag

SEQ ID NO: 214769 - DNA, 25 bp, Artificial
  Probe
gatccatgagccagaaccgcatatt

SEQ ID NO: 214770 - DNA, 25 bp, Artificial
  Probe
tcaacagagtctaggatgggttcat

SEQ ID NO: 214771 - DNA, 25 bp, Artificial
  Probe
gcaggatggcccacaagcagatcta

SEQ ID NO: 214772 - DNA, 25 bp, Artificial
  Probe
atacctgtgcatgagctgtattctt

SEQ ID NO: 214773 - DNA, 25 bp, Artificial
  Probe
agtacagctgggatcatctaataat

SEQ ID NO: 214774 - DNA, 25 bp, Artificial
  Probe
acagctgggatcatctaataatctt

SEQ ID NO: 214775 - DNA, 25 bp, Artificial
  Probe
gtacagctgggatcatctaataatc

SEQ ID NO: 214776 - DNA, 25 bp, Artificial
  Probe
cctgtgcatgagctgtattcttcac

SEQ ID NO: 214777 - DNA, 25 bp, Artificial
  Probe
atggcccacaagcagatctactact

SEQ ID NO: 214778 - DNA, 25 bp, Artificial
  Probe
tactcagacaagtacttcgacgagc

SEQ ID NO: 214779 - DNA, 25 bp, Artificial
  Probe
caacagagtctaggatgggttcatt

SEQ ID NO: 214780 - DNA, 25 bp, Artificial
  Probe
agcagatctactactcagacaagta

SEQ ID NO: 214781 - DNA, 25 bp, Artificial
  Probe
gtaccggcatgtcatgttacccaga

SEQ ID NO: 214782 - DNA, 25 bp, Artificial
  Probe
catgagctgtattcttcacagcaac

SEQ ID NO: 214783 - DNA, 25 bp, Artificial
  Probe
tactactcagacaagtacttcgacg

SEQ ID NO: 214784 - DNA, 25 bp, Artificial
  Probe
catacctgtgcatgagctgtattct

SEQ ID NO: 214785 - DNA, 25 bp, Artificial
  Probe
gagtaccggcatgtcatgttaccca

SEQ ID NO: 214786 - DNA, 25 bp, Artificial
  Probe
tttttccttcgcacgccagcaggat

SEQ ID NO: 214787 - DNA, 25 bp, Artificial
  Probe
ccggcatgtcatgttacccagagaa

SEQ ID NO: 214788 - DNA, 25 bp, Artificial
  Probe
tgtgcatgagctgtattcttcacag

SEQ ID NO: 214789 - DNA, 25 bp, Artificial
  Probe
gttcaacagagtctaggatgggttc

SEQ ID NO: 214790 - DNA, 25 bp, Artificial
  Probe
actactcagacaagtacttcgacga

SEQ ID NO: 214791 - DNA, 25 bp, Artificial
  Probe
acgccagcaggatggcccacaagca

SEQ ID NO: 214792 - DNA, 25 bp, Artificial
  Probe
accggcatgtcatgttacccagaga

SEQ ID NO: 214793 - DNA, 25 bp, Artificial
  Probe
cggttaaatgcaactgcaagtaggg

SEQ ID NO: 214794 - DNA, 25 bp, Artificial
  Probe
caagcagatctactactcagacaag

SEQ ID NO: 214795 - DNA, 25 bp, Artificial
  Probe
gcatgtcatgttacccagagaactt

SEQ ID NO: 214796 - DNA, 25 bp, Artificial
  Probe
agctcggttaaatgcaactgcaagt

SEQ ID NO: 214797 - DNA, 25 bp, Artificial
  Probe
gacttggtgttcaacagagtctagg

SEQ ID NO: 214798 - DNA, 25 bp, Artificial
  Probe
gcatgagctgtattcttcacagcaa

SEQ ID NO: 214799 - DNA, 25 bp, Artificial
  Probe
acgagtaccggcatgtcatgttacc

SEQ ID NO: 214800 - DNA, 25 bp, Artificial
  Probe
gcagatctactactcagacaagtac

SEQ ID NO: 214801 - DNA, 25 bp, Artificial
  Probe
gcacgccagcaggatggcccacaag

SEQ ID NO: 214802 - DNA, 25 bp, Artificial
  Probe
caggatggcccacaagcagatctac

SEQ ID NO: 214803 - DNA, 25 bp, Artificial
  Probe
aagcagatctactactcagacaagt

SEQ ID NO: 214804 - DNA, 25 bp, Artificial
  Probe
ttcaacagagtctaggatgggttca

SEQ ID NO: 214805 - DNA, 25 bp, Artificial
  Probe
ccatacctgtgcatgagctgtattc

SEQ ID NO: 214806 - DNA, 25 bp, Artificial
  Probe
acttggtgttcaacagagtctagga

SEQ ID NO: 214807 - DNA, 25 bp, Artificial
  Probe
agtaccggcatgtcatgttacccag

SEQ ID NO: 214808 - DNA, 25 bp, Artificial
  Probe
ggatggcccacaagcagatctacta

SEQ ID NO: 214809 - DNA, 25 bp, Artificial
  Probe
aaaatagtagggctgggatttagct

SEQ ID NO: 214810 - DNA, 25 bp, Artificial
  Probe
cggagtttgatctctagctcaccac

SEQ ID NO: 214811 - DNA, 25 bp, Artificial
  Probe
gcaggcgaaacaaccaaacacgtag

SEQ ID NO: 214812 - DNA, 25 bp, Artificial
  Probe
gagtttgatctctagctcaccacca

SEQ ID NO: 214813 - DNA, 25 bp, Artificial
  Probe
agggggagggggctggcaagatggc

SEQ ID NO: 214814 - DNA, 25 bp, Artificial
  Probe
actggtgcaggcgaaacaaccaaac

SEQ ID NO: 214815 - DNA, 25 bp, Artificial
  Probe
gacctctgccgtgaccaggaacacg

SEQ ID NO: 214816 - DNA, 25 bp, Artificial
  Probe
tctgccgtgaccaggaacacgtgcc

SEQ ID NO: 214817 - DNA, 25 bp, Artificial
  Probe
cactgactggtgcaggcgaaacaac

SEQ ID NO: 214818 - DNA, 25 bp, Artificial
  Probe
ctgacctctgccgtgaccaggaaca

SEQ ID NO: 214819 - DNA, 25 bp, Artificial
  Probe
tgatctctagctcaccaccatctgt

SEQ ID NO: 214820 - DNA, 25 bp, Artificial
  Probe
tgcccggggcattggatgcccctct

SEQ ID NO: 214821 - DNA, 25 bp, Artificial
  Probe
attggatgcccctctctgacctctg

SEQ ID NO: 214822 - DNA, 25 bp, Artificial
  Probe
tgacctctgccgtgaccaggaacac

SEQ ID NO: 214823 - DNA, 25 bp, Artificial
  Probe
cccctctctgacctctgccgtgacc

SEQ ID NO: 214824 - DNA, 25 bp, Artificial
  Probe
tgctggcctctcctgcagaggcccg

SEQ ID NO: 214825 - DNA, 25 bp, Artificial
  Probe
gcccggagtttgatctctagctcac

SEQ ID NO: 214826 - DNA, 25 bp, Artificial
  Probe
tgtagctccagtgcccggggcattg

SEQ ID NO: 214827 - DNA, 25 bp, Artificial
  Probe
ggagtttgatctctagctcaccacc

SEQ ID NO: 214828 - DNA, 25 bp, Artificial
  Probe
acctctgccgtgaccaggaacacgt

SEQ ID NO: 214829 - DNA, 25 bp, Artificial
  Probe
gctggcctctcctgcagaggcccgg

SEQ ID NO: 214830 - DNA, 25 bp, Artificial
  Probe
caccatctgtagctccagtgcccgg

SEQ ID NO: 214831 - DNA, 25 bp, Artificial
  Probe
cggttaagagtgctggcctctcctg

SEQ ID NO: 214832 - DNA, 25 bp, Artificial
  Probe
gaggcccggagtttgatctctagct

SEQ ID NO: 214833 - DNA, 25 bp, Artificial
  Probe
cccggagtttgatctctagctcacc

SEQ ID NO: 214834 - DNA, 25 bp, Artificial
  Probe
tgccgtgaccaggaacacgtgccgg

SEQ ID NO: 214835 - DNA, 25 bp, Artificial
  Probe
ccaccatctgtagctccagtgcccg

SEQ ID NO: 214836 - DNA, 25 bp, Artificial
  Probe
agaggcccggagtttgatctctagc

SEQ ID NO: 214837 - DNA, 25 bp, Artificial
  Probe
ggcccggagtttgatctctagctca

SEQ ID NO: 214838 - DNA, 25 bp, Artificial
  Probe
cctctgccgtgaccaggaacacgtg

SEQ ID NO: 214839 - DNA, 25 bp, Artificial
  Probe
cagaggcccggagtttgatctctag

SEQ ID NO: 214840 - DNA, 25 bp, Artificial
  Probe
agtgcccggggcattggatgcccct

SEQ ID NO: 214841 - DNA, 25 bp, Artificial
  Probe
ctgactggtgcaggcgaaacaacca

SEQ ID NO: 214842 - DNA, 25 bp, Artificial
  Probe
ctgccgtgaccaggaacacgtgccg

SEQ ID NO: 214843 - DNA, 25 bp, Artificial
  Probe
agtttgatctctagctcaccaccat

SEQ ID NO: 214844 - DNA, 25 bp, Artificial
  Probe
gcagaggcccggagtttgatctcta

SEQ ID NO: 214845 - DNA, 25 bp, Artificial
  Probe
gtgcccggggcattggatgcccctc

SEQ ID NO: 214846 - DNA, 25 bp, Artificial
  Probe
atctgtagctccagtgcccggggca

SEQ ID NO: 214847 - DNA, 25 bp, Artificial
  Probe
gcgaaacaaccaaacacgtagaatt

SEQ ID NO: 214848 - DNA, 25 bp, Artificial
  Probe
ggcgaaacaaccaaacacgtagaat

SEQ ID NO: 214849 - DNA, 25 bp, Artificial
  Probe
ggttaagagtgctggcctctcctgc

SEQ ID NO: 214850 - DNA, 25 bp, Artificial
  Probe
ctctgccgtgaccaggaacacgtgc

SEQ ID NO: 214851 - DNA, 25 bp, Artificial
  Probe
tgcagaggcccggagtttgatctct

SEQ ID NO: 214852 - DNA, 25 bp, Artificial
  Probe
gcccggggcattggatgcccctctc

SEQ ID NO: 214853 - DNA, 25 bp, Artificial
  Probe
actgactggtgcaggcgaaacaacc

SEQ ID NO: 214854 - DNA, 25 bp, Artificial
  Probe
caggcgaaacaaccaaacacgtaga

SEQ ID NO: 214855 - DNA, 25 bp, Artificial
  Probe
tttgggctaacatgccttgattctc

SEQ ID NO: 214856 - DNA, 25 bp, Artificial
  Probe
cagttttgggctaacatgccttgat

SEQ ID NO: 214857 - DNA, 25 bp, Artificial
  Probe
tcaaaccgtaattcatgttgtaaag

SEQ ID NO: 214858 - DNA, 25 bp, Artificial
  Probe
ttcatgttgtaaagtctcagcagag

SEQ ID NO: 214859 - DNA, 25 bp, Artificial
  Probe
aaccgtaattcatgttgtaaagtct

SEQ ID NO: 214860 - DNA, 25 bp, Artificial
  Probe
gagactgccacatttcgttcctatc

SEQ ID NO: 214861 - DNA, 25 bp, Artificial
  Probe
gatttcaaaccgtaattcatgttgt

SEQ ID NO: 214862 - DNA, 25 bp, Artificial
  Probe
catttcgttcctatcatgattggct

SEQ ID NO: 214863 - DNA, 25 bp, Artificial
  Probe
tttaattactaattggcaagcagca

SEQ ID NO: 214864 - DNA, 25 bp, Artificial
  Probe
ctaattggcaagcagcagcttccca

SEQ ID NO: 214865 - DNA, 25 bp, Artificial
  Probe
ttgattctctgcacctctttatgag

SEQ ID NO: 214866 - DNA, 25 bp, Artificial
  Probe
ttggcaagcagcagcttcccactca

SEQ ID NO: 214867 - DNA, 25 bp, Artificial
  Probe
cacatttcgttcctatcatgattgg

SEQ ID NO: 214868 - DNA, 25 bp, Artificial
  Probe
agcagcttcccactcagtgggagac

SEQ ID NO: 214869 - DNA, 25 bp, Artificial
  Probe
tcctatcatgattggctgggcctgc

SEQ ID NO: 214870 - DNA, 25 bp, Artificial
  Probe
ggagactgccacatttcgttcctat

SEQ ID NO: 214871 - DNA, 25 bp, Artificial
  Probe
ttactaattggcaagcagcagcttc

SEQ ID NO: 214872 - DNA, 25 bp, Artificial
  Probe
tgctgctgtccctagtaagatattc

SEQ ID NO: 214873 - DNA, 25 bp, Artificial
  Probe
ccactcagtgggagactgccacatt

SEQ ID NO: 214874 - DNA, 25 bp, Artificial
  Probe
ctgtccctagtaagatattccgaat

SEQ ID NO: 214875 - DNA, 25 bp, Artificial
  Probe
ccgtaattcatgttgtaaagtctca

SEQ ID NO: 214876 - DNA, 25 bp, Artificial
  Probe
cgttcctatcatgattggctgggcc

SEQ ID NO: 214877 - DNA, 25 bp, Artificial
  Probe
caaaccgtaattcatgttgtaaagt

SEQ ID NO: 214878 - DNA, 25 bp, Artificial
  Probe
gctgctgtccctagtaagatattcc

SEQ ID NO: 214879 - DNA, 25 bp, Artificial
  Probe
atcatgattggctgggcctgctgct

SEQ ID NO: 214880 - DNA, 25 bp, Artificial
  Probe
cagcagcttcccactcagtgggaga

SEQ ID NO: 214881 - DNA, 25 bp, Artificial
  Probe
agcgtgatttcaaaccgtaattcat

SEQ ID NO: 214882 - DNA, 25 bp, Artificial
  Probe
caagcagcagcttcccactcagtgg

SEQ ID NO: 214883 - DNA, 25 bp, Artificial
  Probe
cttcccactcagtgggagactgcca

SEQ ID NO: 214884 - DNA, 25 bp, Artificial
  Probe
ggctaacatgccttgattctctgca

SEQ ID NO: 214885 - DNA, 25 bp, Artificial
  Probe
tggctgggcctgctgctgtccctag

SEQ ID NO: 214886 - DNA, 25 bp, Artificial
  Probe
tcgttcctatcatgattggctgggc

SEQ ID NO: 214887 - DNA, 25 bp, Artificial
  Probe
attggctgggcctgctgctgtccct

SEQ ID NO: 214888 - DNA, 25 bp, Artificial
  Probe
acgttagccagtgagaacatcccca

SEQ ID NO: 214889 - DNA, 25 bp, Artificial
  Probe
gctaacatgccttgattctctgcac

SEQ ID NO: 214890 - DNA, 25 bp, Artificial
  Probe
ttaattactaattggcaagcagcag

SEQ ID NO: 214891 - DNA, 25 bp, Artificial
  Probe
cgttagccagtgagaacatccccag

SEQ ID NO: 214892 - DNA, 25 bp, Artificial
  Probe
gattctctgcacctctttatgagtt

SEQ ID NO: 214893 - DNA, 25 bp, Artificial
  Probe
actcagtgggagactgccacatttc

SEQ ID NO: 214894 - DNA, 25 bp, Artificial
  Probe
ggcctgctgctgtccctagtaagat

SEQ ID NO: 214895 - DNA, 25 bp, Artificial
  Probe
cgcacgttagccagtgagaacatcc

SEQ ID NO: 214896 - DNA, 25 bp, Artificial
  Probe
tcagtgggagactgccacatttcgt

SEQ ID NO: 214897 - DNA, 25 bp, Artificial
  Probe
atgttgtaaagtctcagcagaggcg

SEQ ID NO: 214898 - DNA, 25 bp, Artificial
  Probe
tgggagactgccacatttcgttcct

SEQ ID NO: 214899 - DNA, 25 bp, Artificial
  Probe
gttttgggctaacatgccttgattc

SEQ ID NO: 214900 - DNA, 25 bp, Artificial
  Probe
ctgggcctgctgctgtccctagtaa

SEQ ID NO: 214901 - DNA, 25 bp, Artificial
  Probe
gcatttcagggctggttctgttcat

SEQ ID NO: 214902 - DNA, 25 bp, Artificial
  Probe
cagaggcctcaagtggctactgcat

SEQ ID NO: 214903 - DNA, 25 bp, Artificial
  Probe
gcaaacagtcccacgcacgtggagc

SEQ ID NO: 214904 - DNA, 25 bp, Artificial
  Probe
ggcactgtcggtgagagtaagccat

SEQ ID NO: 214905 - DNA, 25 bp, Artificial
  Probe
tcactaccagccagaagttacagcc

SEQ ID NO: 214906 - DNA, 25 bp, Artificial
  Probe
cctaagcatttcagggctggttctg

SEQ ID NO: 214907 - DNA, 25 bp, Artificial
  Probe
tacaccagatctgcttggcaccacg

SEQ ID NO: 214908 - DNA, 25 bp, Artificial
  Probe
ctattaaggggcatcctgaccctga

SEQ ID NO: 214909 - DNA, 25 bp, Artificial
  Probe
ccagcaagggcaaccctaggctttg

SEQ ID NO: 214910 - DNA, 25 bp, Artificial
  Probe
ccttgtgctgggtttgtttacaaag

SEQ ID NO: 214911 - DNA, 25 bp, Artificial
  Probe
gtccattggcactgtcggtgagagt

SEQ ID NO: 214912 - DNA, 25 bp, Artificial
  Probe
tacagatctgcttgggcctttgcaa

SEQ ID NO: 214913 - DNA, 25 bp, Artificial
  Probe
gcctcaagtggctactgcattgcgc

SEQ ID NO: 214914 - DNA, 25 bp, Artificial
  Probe
cactgtcggtgagagtaagccattt

SEQ ID NO: 214915 - DNA, 25 bp, Artificial
  Probe
ttcaagtagcagaggcctcaagtgg

SEQ ID NO: 214916 - DNA, 25 bp, Artificial
  Probe
agaggcctcaagtggctactgcatt

SEQ ID NO: 214917 - DNA, 25 bp, Artificial
  Probe
aagatgcctaagcatttcagggctg

SEQ ID NO: 214918 - DNA, 25 bp, Artificial
  Probe
gctcagccatggtcatctgcaccat

SEQ ID NO: 214919 - DNA, 25 bp, Artificial
  Probe
tgcgctcagccatggtcatctgcac

SEQ ID NO: 214920 - DNA, 25 bp, Artificial
  Probe
ttgcgctcagccatggtcatctgca

SEQ ID NO: 214921 - DNA, 25 bp, Artificial
  Probe
ccctttctttgttggccttgtgctg

SEQ ID NO: 214922 - DNA, 25 bp, Artificial
  Probe
ttctggtgcttaggaacagggaccc

SEQ ID NO: 214923 - DNA, 25 bp, Artificial
  Probe
ctgatgcccagcaagggcaacccta

SEQ ID NO: 214924 - DNA, 25 bp, Artificial
  Probe
tgcattgcgctcagccatggtcatc

SEQ ID NO: 214925 - DNA, 25 bp, Artificial
  Probe
cagccagaagttacagccgaccttg

SEQ ID NO: 214926 - DNA, 25 bp, Artificial
  Probe
actgcattgcgctcagccatggtca

SEQ ID NO: 214927 - DNA, 25 bp, Artificial
  Probe
gcaaaaagccccattcctattaagg

SEQ ID NO: 214928 - DNA, 25 bp, Artificial
  Probe
ccatttcttgggaagaggagactcc

SEQ ID NO: 214929 - DNA, 25 bp, Artificial
  Probe
tagcagaggcctcaagtggctactg

SEQ ID NO: 214930 - DNA, 25 bp, Artificial
  Probe
agtcccacgcacgtggagcccatga

SEQ ID NO: 214931 - DNA, 25 bp, Artificial
  Probe
tggtccattggcactgtcggtgaga

SEQ ID NO: 214932 - DNA, 25 bp, Artificial
  Probe
tgatgcccagcaagggcaaccctag

SEQ ID NO: 214933 - DNA, 25 bp, Artificial
  Probe
aggggcatcctgaccctgatgccca

SEQ ID NO: 214934 - DNA, 25 bp, Artificial
  Probe
aagccccattcctattaaggggcat

SEQ ID NO: 214935 - DNA, 25 bp, Artificial
  Probe
cattttctacaccagatctgcttgg

SEQ ID NO: 214936 - DNA, 25 bp, Artificial
  Probe
ccattggcactgtcggtgagagtaa

SEQ ID NO: 214937 - DNA, 25 bp, Artificial
  Probe
atcctgaccctgatgcccagcaagg

SEQ ID NO: 214938 - DNA, 25 bp, Artificial
  Probe
agtggctactgcattgcgctcagcc

SEQ ID NO: 214939 - DNA, 25 bp, Artificial
  Probe
cccagcaagggcaaccctaggcttt

SEQ ID NO: 214940 - DNA, 25 bp, Artificial
  Probe
gtcccacgcacgtggagcccatgag

SEQ ID NO: 214941 - DNA, 25 bp, Artificial
  Probe
tcctgaccctgatgcccagcaaggg

SEQ ID NO: 214942 - DNA, 25 bp, Artificial
  Probe
ttggccttgtgctgggtttgtttac

SEQ ID NO: 214943 - DNA, 25 bp, Artificial
  Probe
gccatggtcatctgcaccattttct

SEQ ID NO: 214944 - DNA, 25 bp, Artificial
  Probe
ctccctacagatctgcttgggcctt

SEQ ID NO: 214945 - DNA, 25 bp, Artificial
  Probe
atttcttgggaagaggagactcctc

SEQ ID NO: 214946 - DNA, 25 bp, Artificial
  Probe
ctttgttggccttgtgctgggtttg

SEQ ID NO: 214947 - DNA, 25 bp, Artificial
  Probe
tgtcattatgcagtgtgacagcatt

SEQ ID NO: 214948 - DNA, 25 bp, Artificial
  Probe
acagtccttttgaattttgcacagc

SEQ ID NO: 214949 - DNA, 25 bp, Artificial
  Probe
tttgaattttgcacagccctagata

SEQ ID NO: 214950 - DNA, 25 bp, Artificial
  Probe
aatggactcaactttctcaaaagga

SEQ ID NO: 214951 - DNA, 25 bp, Artificial
  Probe
gaccattcgactcattgtaagttgc

SEQ ID NO: 214952 - DNA, 25 bp, Artificial
  Probe
cttgtcattatgcagtgtgacagca

SEQ ID NO: 214953 - DNA, 25 bp, Artificial
  Probe
tatgcagtgtgacagcattaaagac

SEQ ID NO: 214954 - DNA, 25 bp, Artificial
  Probe
tgaattttgcacagccctagatata

SEQ ID NO: 214955 - DNA, 25 bp, Artificial
  Probe
gtaatggactcaactttctcaaaag

SEQ ID NO: 214956 - DNA, 25 bp, Artificial
  Probe
tcgcggccgcaagcttattcccttt

SEQ ID NO: 214957 - DNA, 25 bp, Artificial
  Probe
tcattatgcagtgtgacagcattaa

SEQ ID NO: 214958 - DNA, 25 bp, Artificial
  Probe
tggactcaactttctcaaaaggata

SEQ ID NO: 214959 - DNA, 25 bp, Artificial
  Probe
agaccaaagtgtgtgacttgtcatt

SEQ ID NO: 214960 - DNA, 25 bp, Artificial
  Probe
cttttgaattttgcacagccctaga

SEQ ID NO: 214961 - DNA, 25 bp, Artificial
  Probe
cagtccttttgaattttgcacagcc

SEQ ID NO: 214962 - DNA, 25 bp, Artificial
  Probe
agtccttttgaattttgcacagccc

SEQ ID NO: 214963 - DNA, 25 bp, Artificial
  Probe
ggactcaactttctcaaaaggatac

SEQ ID NO: 214964 - DNA, 25 bp, Artificial
  Probe
ccattcgactcattgtaagttgcca

SEQ ID NO: 214965 - DNA, 25 bp, Artificial
  Probe
aggatacagtccttttgaattttgc

SEQ ID NO: 214966 - DNA, 25 bp, Artificial
  Probe
cattcgactcattgtaagttgccac

SEQ ID NO: 214967 - DNA, 25 bp, Artificial
  Probe
ccttttgaattttgcacagccctag

SEQ ID NO: 214968 - DNA, 25 bp, Artificial
  Probe
gatacagtccttttgaattttgcac

SEQ ID NO: 214969 - DNA, 25 bp, Artificial
  Probe
ttgaattttgcacagccctagatat

SEQ ID NO: 214970 - DNA, 25 bp, Artificial
  Probe
aagaccaaagtgtgtgacttgtcat

SEQ ID NO: 214971 - DNA, 25 bp, Artificial
  Probe
caagaccaaagtgtgtgacttgtca

SEQ ID NO: 214972 - DNA, 25 bp, Artificial
  Probe
cgactcattgtaagttgccactacc

SEQ ID NO: 214973 - DNA, 25 bp, Artificial
  Probe
tgaccattcgactcattgtaagttg

SEQ ID NO: 214974 - DNA, 25 bp, Artificial
  Probe
gtgacttgtcattatgcagtgtgac

SEQ ID NO: 214975 - DNA, 25 bp, Artificial
  Probe
attcgactcattgtaagttgccact

SEQ ID NO: 214976 - DNA, 25 bp, Artificial
  Probe
ttgtcattatgcagtgtgacagcat

SEQ ID NO: 214977 - DNA, 25 bp, Artificial
  Probe
acttgtcattatgcagtgtgacagc

SEQ ID NO: 214978 - DNA, 25 bp, Artificial
  Probe
tcgactcattgtaagttgccactac

SEQ ID NO: 214979 - DNA, 25 bp, Artificial
  Probe
gacttgtcattatgcagtgtgacag

SEQ ID NO: 214980 - DNA, 25 bp, Artificial
  Probe
cattatgcagtgtgacagcattaaa

SEQ ID NO: 214981 - DNA, 25 bp, Artificial
  Probe
atggactcaactttctcaaaaggat

SEQ ID NO: 214982 - DNA, 25 bp, Artificial
  Probe
tactgcctgtccagggctgtgatga

SEQ ID NO: 214983 - DNA, 25 bp, Artificial
  Probe
gtcattatgcagtgtgacagcatta

SEQ ID NO: 214984 - DNA, 25 bp, Artificial
  Probe
tgacttgtcattatgcagtgtgaca

SEQ ID NO: 214985 - DNA, 25 bp, Artificial
  Probe
tacagtccttttgaattttgcacag

SEQ ID NO: 214986 - DNA, 25 bp, Artificial
  Probe
accattcgactcattgtaagttgcc

SEQ ID NO: 214987 - DNA, 25 bp, Artificial
  Probe
taatggactcaactttctcaaaagg

SEQ ID NO: 214988 - DNA, 25 bp, Artificial
  Probe
acacaagaccaaagtgtgtgacttg

SEQ ID NO: 214989 - DNA, 25 bp, Artificial
  Probe
ttttgaattttgcacagccctagat

SEQ ID NO: 214990 - DNA, 25 bp, Artificial
  Probe
gtccttttgaattttgcacagccct

SEQ ID NO: 214991 - DNA, 25 bp, Artificial
  Probe
ttcgactcattgtaagttgccacta

SEQ ID NO: 214992 - DNA, 25 bp, Artificial
  Probe
ggatacagtccttttgaattttgca

SEQ ID NO: 214993 - DNA, 25 bp, Artificial
  Probe
tgccctctagagaatgaggacaact

SEQ ID NO: 214994 - DNA, 25 bp, Artificial
  Probe
ttactatgtctgctacacagaaagc

SEQ ID NO: 214995 - DNA, 25 bp, Artificial
  Probe
aacacctggtgctagaggatttctc

SEQ ID NO: 214996 - DNA, 25 bp, Artificial
  Probe
gtagagctgacgtgccctctagaga

SEQ ID NO: 214997 - DNA, 25 bp, Artificial
  Probe
cgaggacactgttacagatgatgga

SEQ ID NO: 214998 - DNA, 25 bp, Artificial
  Probe
actgttacagatgatggagcacaga

SEQ ID NO: 214999 - DNA, 25 bp, Artificial
  Probe
atgacaaagtcctgcctgataagaa

SEQ ID NO: 215000 - DNA, 25 bp, Artificial
  Probe
gagaaacacctggtgctagaggatt

SEQ ID NO: 215001 - DNA, 25 bp, Artificial
  Probe
tctcggaagtcaaggacagtggtta

SEQ ID NO: 215002 - DNA, 25 bp, Artificial
  Probe
gtgtccgccatcttagttgagagag

SEQ ID NO: 215003 - DNA, 25 bp, Artificial
  Probe
gctttctggagcatcctgggcctca

SEQ ID NO: 215004 - DNA, 25 bp, Artificial
  Probe
ttctggagcatcctgggcctcagcc

SEQ ID NO: 215005 - DNA, 25 bp, Artificial
  Probe
gcacttgccaggaagatatcgagga

SEQ ID NO: 215006 - DNA, 25 bp, Artificial
  Probe
aatgagaaacacctggtgctagagg

SEQ ID NO: 215007 - DNA, 25 bp, Artificial
  Probe
acctggtgctagaggatttctcgga

SEQ ID NO: 215008 - DNA, 25 bp, Artificial
  Probe
tctggagcatcctgggcctcagcct

SEQ ID NO: 215009 - DNA, 25 bp, Artificial
  Probe
gctgacgtgccctctagagaatgag

SEQ ID NO: 215010 - DNA, 25 bp, Artificial
  Probe
ctatgtctgctacacagaaagctca

SEQ ID NO: 215011 - DNA, 25 bp, Artificial
  Probe
cgtgccctctagagaatgaggacaa

SEQ ID NO: 215012 - DNA, 25 bp, Artificial
  Probe
cctgtacctgaaagccagagtgtgc

SEQ ID NO: 215013 - DNA, 25 bp, Artificial
  Probe
tcctgcctgataagaatgagaaaca

SEQ ID NO: 215014 - DNA, 25 bp, Artificial
  Probe
ttgccaggaagatatcgaggacact

SEQ ID NO: 215015 - DNA, 25 bp, Artificial
  Probe
aacacgtacctgtacctgaaagcca

SEQ ID NO: 215016 - DNA, 25 bp, Artificial
  Probe
acagtggttactatgtctgctacac

SEQ ID NO: 215017 - DNA, 25 bp, Artificial
  Probe
gcagttggcacttgccaggaagata

SEQ ID NO: 215018 - DNA, 25 bp, Artificial
  Probe
ggcctcagcctcctagcagttggca

SEQ ID NO: 215019 - DNA, 25 bp, Artificial
  Probe
tgggcctcagcctcctagcagttgg

SEQ ID NO: 215020 - DNA, 25 bp, Artificial
  Probe
aggatttctcggaagtcaaggacag

SEQ ID NO: 215021 - DNA, 25 bp, Artificial
  Probe
tacctgaaagccagagtgtgcgaga

SEQ ID NO: 215022 - DNA, 25 bp, Artificial
  Probe
aacagtatgaagtctccatctcagg

SEQ ID NO: 215023 - DNA, 25 bp, Artificial
  Probe
acagtatgaagtctccatctcagga

SEQ ID NO: 215024 - DNA, 25 bp, Artificial
  Probe
aagatatcgaggacactgttacaga

SEQ ID NO: 215025 - DNA, 25 bp, Artificial
  Probe
cctcctagcagttggcacttgccag

SEQ ID NO: 215026 - DNA, 25 bp, Artificial
  Probe
aaatgacaaagtcctgcctgataag

SEQ ID NO: 215027 - DNA, 25 bp, Artificial
  Probe
caaagtcctgcctgataagaatgag

SEQ ID NO: 215028 - DNA, 25 bp, Artificial
  Probe
ccagtgtagagctgacgtgccctct

SEQ ID NO: 215029 - DNA, 25 bp, Artificial
  Probe
ggtgctagaggatttctcggaagtc

SEQ ID NO: 215030 - DNA, 25 bp, Artificial
  Probe
ctcagcctcctagcagttggcactt

SEQ ID NO: 215031 - DNA, 25 bp, Artificial
  Probe
ggacactgttacagatgatggagca

SEQ ID NO: 215032 - DNA, 25 bp, Artificial
  Probe
ggaacgctttctggagcatcctggg

SEQ ID NO: 215033 - DNA, 25 bp, Artificial
  Probe
agaatgagaaacacctggtgctaga

SEQ ID NO: 215034 - DNA, 25 bp, Artificial
  Probe
ctagaggatttctcggaagtcaagg

SEQ ID NO: 215035 - DNA, 25 bp, Artificial
  Probe
atgtctgctacacagaaagctcaag

SEQ ID NO: 215036 - DNA, 25 bp, Artificial
  Probe
ccctctagagaatgaggacaactta

SEQ ID NO: 215037 - DNA, 25 bp, Artificial
  Probe
tctgctacacagaaagctcaaggaa

SEQ ID NO: 215038 - DNA, 25 bp, Artificial
  Probe
ctagcagttggcacttgccaggaag

SEQ ID NO: 215039 - DNA, 25 bp, Artificial
  Probe
ctacgtcgtggtccaggcgcgtctg

SEQ ID NO: 215040 - DNA, 25 bp, Artificial
  Probe
gcggtacacgccgctcaccgcagcc

SEQ ID NO: 215041 - DNA, 25 bp, Artificial
  Probe
ctaggacaggggtctcctcggtgcc

SEQ ID NO: 215042 - DNA, 25 bp, Artificial
  Probe
gtctcccggcgcgaccctgggctcc

SEQ ID NO: 215043 - DNA, 25 bp, Artificial
  Probe
ccgctacgtcgtggtccaggcgcgt

SEQ ID NO: 215044 - DNA, 25 bp, Artificial
  Probe
gcgtctggctctcagccaacctgag

SEQ ID NO: 215045 - DNA, 25 bp, Artificial
  Probe
tcagccaacctgagctgcagcagag

SEQ ID NO: 215046 - DNA, 25 bp, Artificial
  Probe
cagcccgatggcatgggcagctgcc

SEQ ID NO: 215047 - DNA, 25 bp, Artificial
  Probe
tcaggctcggagtcggtctccgccg

SEQ ID NO: 215048 - DNA, 25 bp, Artificial
  Probe
tctactttttgtatttagtagttat

SEQ ID NO: 215049 - DNA, 25 bp, Artificial
  Probe
agcccgatggcatgggcagctgcca

SEQ ID NO: 215050 - DNA, 25 bp, Artificial
  Probe
ggctctcagccaacctgagctgcag

SEQ ID NO: 215051 - DNA, 25 bp, Artificial
  Probe
acatcgcgacccgcacggcggtaca

SEQ ID NO: 215052 - DNA, 25 bp, Artificial
  Probe
ggcagctgccagcctcccggccagg

SEQ ID NO: 215053 - DNA, 25 bp, Artificial
  Probe
caggcgctaggacaggggtctcctc

SEQ ID NO: 215054 - DNA, 25 bp, Artificial
  Probe
aaaaatggaagcggccgccagcccg

SEQ ID NO: 215055 - DNA, 25 bp, Artificial
  Probe
gcagccgctacgtcgtggtccaggc

SEQ ID NO: 215056 - DNA, 25 bp, Artificial
  Probe
cgcagccgctacgtcgtggtccagg

SEQ ID NO: 215057 - DNA, 25 bp, Artificial
  Probe
ggtccaggcgcgtctggctctcagc

SEQ ID NO: 215058 - DNA, 25 bp, Artificial
  Probe
ctgcatcccgttgcaccacgagggg

SEQ ID NO: 215059 - DNA, 25 bp, Artificial
  Probe
gcctccactgcatcccgttgcacca

SEQ ID NO: 215060 - DNA, 25 bp, Artificial
  Probe
taggacaggggtctcctcggtgccc

SEQ ID NO: 215061 - DNA, 25 bp, Artificial
  Probe
tggctctcagccaacctgagctgca

SEQ ID NO: 215062 - DNA, 25 bp, Artificial
  Probe
agccaacctgagctgcagcagagag

SEQ ID NO: 215063 - DNA, 25 bp, Artificial
  Probe
ttaatctactttttgtatttagtag

SEQ ID NO: 215064 - DNA, 25 bp, Artificial
  Probe
ccaacctgagctgcagcagagagcg

SEQ ID NO: 215065 - DNA, 25 bp, Artificial
  Probe
gccaacctgagctgcagcagagagc

SEQ ID NO: 215066 - DNA, 25 bp, Artificial
  Probe
gcatttaaactctgccagaaaaaaa

SEQ ID NO: 215067 - DNA, 25 bp, Artificial
  Probe
cagccgctacgtcgtggtccaggcg

SEQ ID NO: 215068 - DNA, 25 bp, Artificial
  Probe
tccggctcaggctcggagtcggtct

SEQ ID NO: 215069 - DNA, 25 bp, Artificial
  Probe
cctcccggccagggcggccacatcg

SEQ ID NO: 215070 - DNA, 25 bp, Artificial
  Probe
cgctacgtcgtggtccaggcgcgtc

SEQ ID NO: 215071 - DNA, 25 bp, Artificial
  Probe
gctcaggctcggagtcggtctccgc

SEQ ID NO: 215072 - DNA, 25 bp, Artificial
  Probe
gaattttagtcccaaacgctgtggg

SEQ ID NO: 215073 - DNA, 25 bp, Artificial
  Probe
ggacaggggtctcctcggtgcccca

SEQ ID NO: 215074 - DNA, 25 bp, Artificial
  Probe
actgcatcccgttgcaccacgaggg

SEQ ID NO: 215075 - DNA, 25 bp, Artificial
  Probe
acctgagctgcagcagagagcgcgc

SEQ ID NO: 215076 - DNA, 25 bp, Artificial
  Probe
aacctgagctgcagcagagagcgcg

SEQ ID NO: 215077 - DNA, 25 bp, Artificial
  Probe
tgcagcagagagcgcgcaggcgcta

SEQ ID NO: 215078 - DNA, 25 bp, Artificial
  Probe
gctaggacaggggtctcctcggtgc

SEQ ID NO: 215079 - DNA, 25 bp, Artificial
  Probe
cctgagctgcagcagagagcgcgca

SEQ ID NO: 215080 - DNA, 25 bp, Artificial
  Probe
gcaccacgagggggggcaggtctcc

SEQ ID NO: 215081 - DNA, 25 bp, Artificial
  Probe
gctacgtcgtggtccaggcgcgtct

SEQ ID NO: 215082 - DNA, 25 bp, Artificial
  Probe
caacctgagctgcagcagagagcgc

SEQ ID NO: 215083 - DNA, 25 bp, Artificial
  Probe
agccgctacgtcgtggtccaggcgc

SEQ ID NO: 215084 - DNA, 25 bp, Artificial
  Probe
cagccaacctgagctgcagcagaga

SEQ ID NO: 215085 - DNA, 25 bp, Artificial
  Probe
aggtacaacagactatgcaatagtc

SEQ ID NO: 215086 - DNA, 25 bp, Artificial
  Probe
ttactggacacatgtccaggtgccc

SEQ ID NO: 215087 - DNA, 25 bp, Artificial
  Probe
ttcaggccaccttcctcgaggtaca

SEQ ID NO: 215088 - DNA, 25 bp, Artificial
  Probe
tcaggccaccttcctcgaggtacaa

SEQ ID NO: 215089 - DNA, 25 bp, Artificial
  Probe
gtggttactggacacatgtccaggt

SEQ ID NO: 215090 - DNA, 25 bp, Artificial
  Probe
ccttcctcgaggtacaacagactat

SEQ ID NO: 215091 - DNA, 25 bp, Artificial
  Probe
ctgtctcacagcagtttaactgtct

SEQ ID NO: 215092 - DNA, 25 bp, Artificial
  Probe
cctcgaggtacaacagactatgcaa

SEQ ID NO: 215093 - DNA, 25 bp, Artificial
  Probe
acagcagtttaactgtctcagaagg

SEQ ID NO: 215094 - DNA, 25 bp, Artificial
  Probe
tctcacagcagtttaactgtctcag

SEQ ID NO: 215095 - DNA, 25 bp, Artificial
  Probe
tcggcagggtggttactggacacat

SEQ ID NO: 215096 - DNA, 25 bp, Artificial
  Probe
gccaccttcctcgaggtacaacaga

SEQ ID NO: 215097 - DNA, 25 bp, Artificial
  Probe
caccttcctcgaggtacaacagact

SEQ ID NO: 215098 - DNA, 25 bp, Artificial
  Probe
ctcacagcagtttaactgtctcaga

SEQ ID NO: 215099 - DNA, 25 bp, Artificial
  Probe
accttcctcgaggtacaacagacta

SEQ ID NO: 215100 - DNA, 25 bp, Artificial
  Probe
ggccaccttcctcgaggtacaacag

SEQ ID NO: 215101 - DNA, 25 bp, Artificial
  Probe
ctcggcagggtggttactggacaca

SEQ ID NO: 215102 - DNA, 25 bp, Artificial
  Probe
tcacagcagtttaactgtctcagaa

SEQ ID NO: 215103 - DNA, 25 bp, Artificial
  Probe
gggacacctgtctcacagcagttta

SEQ ID NO: 215104 - DNA, 25 bp, Artificial
  Probe
acctgtctcacagcagtttaactgt

SEQ ID NO: 215105 - DNA, 25 bp, Artificial
  Probe
cacagcagtttaactgtctcagaag

SEQ ID NO: 215106 - DNA, 25 bp, Artificial
  Probe
gacacctgtctcacagcagtttaac

SEQ ID NO: 215107 - DNA, 25 bp, Artificial
  Probe
tcctcgaggtacaacagactatgca

SEQ ID NO: 215108 - DNA, 25 bp, Artificial
  Probe
gcagtttaactgtctcagaagggac

SEQ ID NO: 215109 - DNA, 25 bp, Artificial
  Probe
ttaactgtctcagaagggaccatga

SEQ ID NO: 215110 - DNA, 25 bp, Artificial
  Probe
cttcctcgaggtacaacagactatg

SEQ ID NO: 215111 - DNA, 25 bp, Artificial
  Probe
gtacaacagactatgcaatagtccc

SEQ ID NO: 215112 - DNA, 25 bp, Artificial
  Probe
tttaactgtctcagaagggaccatg

SEQ ID NO: 215113 - DNA, 25 bp, Artificial
  Probe
aggccaccttcctcgaggtacaaca

SEQ ID NO: 215114 - DNA, 25 bp, Artificial
  Probe
gggtggttactggacacatgtccag

SEQ ID NO: 215115 - DNA, 25 bp, Artificial
  Probe
ccatgcctcggcagggtggttactg

SEQ ID NO: 215116 - DNA, 25 bp, Artificial
  Probe
gaataatggccgtcacttgttaggg

SEQ ID NO: 215117 - DNA, 25 bp, Artificial
  Probe
agtttaactgtctcagaagggacca

SEQ ID NO: 215118 - DNA, 25 bp, Artificial
  Probe
aactgtctcagaagggaccatgaat

SEQ ID NO: 215119 - DNA, 25 bp, Artificial
  Probe
tctcagaagggaccatgaataatgg

SEQ ID NO: 215120 - DNA, 25 bp, Artificial
  Probe
cacctgtctcacagcagtttaactg

SEQ ID NO: 215121 - DNA, 25 bp, Artificial
  Probe
cagcagtttaactgtctcagaaggg

SEQ ID NO: 215122 - DNA, 25 bp, Artificial
  Probe
ggtacaacagactatgcaatagtcc

SEQ ID NO: 215123 - DNA, 25 bp, Artificial
  Probe
cagtttaactgtctcagaagggacc

SEQ ID NO: 215124 - DNA, 25 bp, Artificial
  Probe
tggttactggacacatgtccaggtg

SEQ ID NO: 215125 - DNA, 25 bp, Artificial
  Probe
cctcggcagggtggttactggacac

SEQ ID NO: 215126 - DNA, 25 bp, Artificial
  Probe
cttcgagccatagaactaaagccaa

SEQ ID NO: 215127 - DNA, 25 bp, Artificial
  Probe
gtttaactgtctcagaagggaccat

SEQ ID NO: 215128 - DNA, 25 bp, Artificial
  Probe
gtctcacagcagtttaactgtctca

SEQ ID NO: 215129 - DNA, 25 bp, Artificial
  Probe
gtctcagaagggaccatgaataatg

SEQ ID NO: 215130 - DNA, 25 bp, Artificial
  Probe
ctttcaggccaccttcctcgaggta

SEQ ID NO: 215131 - DNA, 25 bp, Artificial
  Probe
tccgccagacctcaaccaggatttt

SEQ ID NO: 215132 - DNA, 25 bp, Artificial
  Probe
agagtggtcttttcaacactcctcc

SEQ ID NO: 215133 - DNA, 25 bp, Artificial
  Probe
gttcccagtatcatgtgatcttctc

SEQ ID NO: 215134 - DNA, 25 bp, Artificial
  Probe
gcttcctgttactaagatgtcttca

SEQ ID NO: 215135 - DNA, 25 bp, Artificial
  Probe
tttgcacatgggattgctcaaacga

SEQ ID NO: 215136 - DNA, 25 bp, Artificial
  Probe
tttacagacgcctctctcaggtacc

SEQ ID NO: 215137 - DNA, 25 bp, Artificial
  Probe
acttagaagcccttgtgcctctctg

SEQ ID NO: 215138 - DNA, 25 bp, Artificial
  Probe
ttttcaagactgtgcaatacttaga

SEQ ID NO: 215139 - DNA, 25 bp, Artificial
  Probe
tagaagcccttgtgcctctctgttc

SEQ ID NO: 215140 - DNA, 25 bp, Artificial
  Probe
cctggtggacgttgcgctcaagcag

SEQ ID NO: 215141 - DNA, 25 bp, Artificial
  Probe
agagatggagcttcaggccaaactc

SEQ ID NO: 215142 - DNA, 25 bp, Artificial
  Probe
acagcttaaccgagtgtcaaacaaa

SEQ ID NO: 215143 - DNA, 25 bp, Artificial
  Probe
ccttgtgcctctctgttcccatgtg

SEQ ID NO: 215144 - DNA, 25 bp, Artificial
  Probe
tttttcaagactgtgcaatacttag

SEQ ID NO: 215145 - DNA, 25 bp, Artificial
  Probe
actcacagcttaaccgagtgtcaaa

SEQ ID NO: 215146 - DNA, 25 bp, Artificial
  Probe
aatatttgcacatgggattgctcaa

SEQ ID NO: 215147 - DNA, 25 bp, Artificial
  Probe
agatggagcttcaggccaaactcac

SEQ ID NO: 215148 - DNA, 25 bp, Artificial
  Probe
ctgttcccatgtggaacatgacccc

SEQ ID NO: 215149 - DNA, 25 bp, Artificial
  Probe
gcaatacttagaagcccttgtgcct

SEQ ID NO: 215150 - DNA, 25 bp, Artificial
  Probe
actaaagctactgtagaaacagagg

SEQ ID NO: 215151 - DNA, 25 bp, Artificial
  Probe
gctactgtagaaacagagggttttc

SEQ ID NO: 215152 - DNA, 25 bp, Artificial
  Probe
agcaggcagcagagatggagcttca

SEQ ID NO: 215153 - DNA, 25 bp, Artificial
  Probe
tctcataatgtgagacgttcccagt

SEQ ID NO: 215154 - DNA, 25 bp, Artificial
  Probe
gcaactttacagacgcctctctcag

SEQ ID NO: 215155 - DNA, 25 bp, Artificial
  Probe
tggacgttgcgctcaagcaggcagc

SEQ ID NO: 215156 - DNA, 25 bp, Artificial
  Probe
tagtttctcataatgtgagacgttc

SEQ ID NO: 215157 - DNA, 25 bp, Artificial
  Probe
agcagagatggagcttcaggccaaa

SEQ ID NO: 215158 - DNA, 25 bp, Artificial
  Probe
gaatagtcattccaagaactgcaga

SEQ ID NO: 215159 - DNA, 25 bp, Artificial
  Probe
agacgcctctctcaggtacccagag

SEQ ID NO: 215160 - DNA, 25 bp, Artificial
  Probe
tgagacgttcccagtatcatgtgat

SEQ ID NO: 215161 - DNA, 25 bp, Artificial
  Probe
cataatgtgagacgttcccagtatc

SEQ ID NO: 215162 - DNA, 25 bp, Artificial
  Probe
gtgcctctctgttcccatgtggaac

SEQ ID NO: 215163 - DNA, 25 bp, Artificial
  Probe
tctcaggtacccagaggacacttgc

SEQ ID NO: 215164 - DNA, 25 bp, Artificial
  Probe
actgtgcaatacttagaagcccttg

SEQ ID NO: 215165 - DNA, 25 bp, Artificial
  Probe
taatatttgcacatgggattgctca

SEQ ID NO: 215166 - DNA, 25 bp, Artificial
  Probe
aatgtgagacgttcccagtatcatg

SEQ ID NO: 215167 - DNA, 25 bp, Artificial
  Probe
atctggacccagtccaaatcctcag

SEQ ID NO: 215168 - DNA, 25 bp, Artificial
  Probe
ttgcaaatctggacccagtccaaat

SEQ ID NO: 215169 - DNA, 25 bp, Artificial
  Probe
gagcttcaggccaaactcacagctt

SEQ ID NO: 215170 - DNA, 25 bp, Artificial
  Probe
caaccaggattttagtggatttcag

SEQ ID NO: 215171 - DNA, 25 bp, Artificial
  Probe
gcctctctcaggtacccagaggaca

SEQ ID NO: 215172 - DNA, 25 bp, Artificial
  Probe
attttagtggatttcagctcctggt

SEQ ID NO: 215173 - DNA, 25 bp, Artificial
  Probe
ggattgctcaaacgaagcttcctgt

SEQ ID NO: 215174 - DNA, 25 bp, Artificial
  Probe
ctcaagcaggcagcagagatggagc

SEQ ID NO: 215175 - DNA, 25 bp, Artificial
  Probe
ttgcgctcaagcaggcagcagagat

SEQ ID NO: 215176 - DNA, 25 bp, Artificial
  Probe
tcaagactgtgcaatacttagaagc

SEQ ID NO: 215177 - DNA, 25 bp, Artificial
  Probe
gcttatctgggaaaccctcattcac

SEQ ID NO: 215178 - DNA, 25 bp, Artificial
  Probe
ctcagtgatgcatgcttatctggga

SEQ ID NO: 215179 - DNA, 25 bp, Artificial
  Probe
ccgtctgggtctgtgttttagcgaa

SEQ ID NO: 215180 - DNA, 25 bp, Artificial
  Probe
agtttccaacatggtcccagcagat

SEQ ID NO: 215181 - DNA, 25 bp, Artificial
  Probe
taggtgcacggatccaggtttctgg

SEQ ID NO: 215182 - DNA, 25 bp, Artificial
  Probe
ccattggtttgagaagtccgtctgg

SEQ ID NO: 215183 - DNA, 25 bp, Artificial
  Probe
tgagcctcagtgatgcatgcttatc

SEQ ID NO: 215184 - DNA, 25 bp, Artificial
  Probe
tgcttatctgggaaaccctcattca

SEQ ID NO: 215185 - DNA, 25 bp, Artificial
  Probe
tgtctctgactactgactgttctat

SEQ ID NO: 215186 - DNA, 25 bp, Artificial
  Probe
ttacttcaaggcaagtagcccattg

SEQ ID NO: 215187 - DNA, 25 bp, Artificial
  Probe
tcccagcagatgttgatgaataaca

SEQ ID NO: 215188 - DNA, 25 bp, Artificial
  Probe
tctgggaaaccctcattcacaagta

SEQ ID NO: 215189 - DNA, 25 bp, Artificial
  Probe
taacaccatggcttcatcagaggat

SEQ ID NO: 215190 - DNA, 25 bp, Artificial
  Probe
tacttcaaggcaagtagcccattgg

SEQ ID NO: 215191 - DNA, 25 bp, Artificial
  Probe
cttcaaggcaagtagcccattggtt

SEQ ID NO: 215192 - DNA, 25 bp, Artificial
  Probe
caacatggtcccagcagatgttgat

SEQ ID NO: 215193 - DNA, 25 bp, Artificial
  Probe
tttcttacttcaaggcaagtagccc

SEQ ID NO: 215194 - DNA, 25 bp, Artificial
  Probe
cttcatcagaggatgtggggctgta

SEQ ID NO: 215195 - DNA, 25 bp, Artificial
  Probe
tgaataacaccatggcttcatcaga

SEQ ID NO: 215196 - DNA, 25 bp, Artificial
  Probe
tttccaacatggtcccagcagatgt

SEQ ID NO: 215197 - DNA, 25 bp, Artificial
  Probe
ttcaaggcaagtagcccattggttt

SEQ ID NO: 215198 - DNA, 25 bp, Artificial
  Probe
ccatgagcaagactggcaaataaca

SEQ ID NO: 215199 - DNA, 25 bp, Artificial
  Probe
gtaggtgcacggatccaggtttctg

SEQ ID NO: 215200 - DNA, 25 bp, Artificial
  Probe
gcctcagtgatgcatgcttatctgg

SEQ ID NO: 215201 - DNA, 25 bp, Artificial
  Probe
ctgtaggtcctctgggtgtgaagct

SEQ ID NO: 215202 - DNA, 25 bp, Artificial
  Probe
gaacattctactgagcctcagtgat

SEQ ID NO: 215203 - DNA, 25 bp, Artificial
  Probe
tctaaatgtctctgactactgactg

SEQ ID NO: 215204 - DNA, 25 bp, Artificial
  Probe
ctgggaaaccctcattcacaagtat

SEQ ID NO: 215205 - DNA, 25 bp, Artificial
  Probe
agcccattggtttgagaagtccgtc

SEQ ID NO: 215206 - DNA, 25 bp, Artificial
  Probe
aggtgcacggatccaggtttctgga

SEQ ID NO: 215207 - DNA, 25 bp, Artificial
  Probe
tgatgaataacaccatggcttcatc

SEQ ID NO: 215208 - DNA, 25 bp, Artificial
  Probe
ggcaagtagcccattggtttgagaa

SEQ ID NO: 215209 - DNA, 25 bp, Artificial
  Probe
tggtttgagaagtccgtctgggtct

SEQ ID NO: 215210 - DNA, 25 bp, Artificial
  Probe
tgtagtttccaacatggtcccagca

SEQ ID NO: 215211 - DNA, 25 bp, Artificial
  Probe
gtagtttccaacatggtcccagcag

SEQ ID NO: 215212 - DNA, 25 bp, Artificial
  Probe
tgcatgcttatctgggaaaccctca

SEQ ID NO: 215213 - DNA, 25 bp, Artificial
  Probe
gagaagtccgtctgggtctgtgttt

SEQ ID NO: 215214 - DNA, 25 bp, Artificial
  Probe
ttctactgagcctcagtgatgcatg

SEQ ID NO: 215215 - DNA, 25 bp, Artificial
  Probe
ttgagaagtccgtctgggtctgtgt

SEQ ID NO: 215216 - DNA, 25 bp, Artificial
  Probe
agtccgtctgggtctgtgttttagc

SEQ ID NO: 215217 - DNA, 25 bp, Artificial
  Probe
aacatggtcccagcagatgttgatg

SEQ ID NO: 215218 - DNA, 25 bp, Artificial
  Probe
ccatggcttcatcagaggatgtggg

SEQ ID NO: 215219 - DNA, 25 bp, Artificial
  Probe
cgtctgggtctgtgttttagcgaag

SEQ ID NO: 215220 - DNA, 25 bp, Artificial
  Probe
gtccgtctgggtctgtgttttagcg

SEQ ID NO: 215221 - DNA, 25 bp, Artificial
  Probe
agtgagaacattctactgagcctca

SEQ ID NO: 215222 - DNA, 25 bp, Artificial
  Probe
aaatgtctctgactactgactgttc

SEQ ID NO: 215223 - DNA, 25 bp, Artificial
  Probe
gcaacatcctagaagaggatctgga

SEQ ID NO: 215224 - DNA, 25 bp, Artificial
  Probe
ctcatgctgtgcaatcatgtgacat

SEQ ID NO: 215225 - DNA, 25 bp, Artificial
  Probe
tttgacgttcccaagaggaatggag

SEQ ID NO: 215226 - DNA, 25 bp, Artificial
  Probe
cgacgttcatgtgtgtggttgtgac

SEQ ID NO: 215227 - DNA, 25 bp, Artificial
  Probe
ctgtgcaatcatgtgacatagccca

SEQ ID NO: 215228 - DNA, 25 bp, Artificial
  Probe
aagcaacatcctagaagaggatctg

SEQ ID NO: 215229 - DNA, 25 bp, Artificial
  Probe
gagccaggcagactgtctactttta

SEQ ID NO: 215230 - DNA, 25 bp, Artificial
  Probe
gtgacatagcccacagaggcaggcg

SEQ ID NO: 215231 - DNA, 25 bp, Artificial
  Probe
ggagccaggcagactgtctactttt

SEQ ID NO: 215232 - DNA, 25 bp, Artificial
  Probe
tgcaatcatgtgacatagcccacag

SEQ ID NO: 215233 - DNA, 25 bp, Artificial
  Probe
caatcatgtgacatagcccacagag

SEQ ID NO: 215234 - DNA, 25 bp, Artificial
  Probe
atcatgtgacatagcccacagaggc

SEQ ID NO: 215235 - DNA, 25 bp, Artificial
  Probe
atgctgtgcaatcatgtgacatagc

SEQ ID NO: 215236 - DNA, 25 bp, Artificial
  Probe
ggacatcgacgttcatgtgtgtggt

SEQ ID NO: 215237 - DNA, 25 bp, Artificial
  Probe
aacccctggagacaagcaacatcct

SEQ ID NO: 215238 - DNA, 25 bp, Artificial
  Probe
caagcaacatcctagaagaggatct

SEQ ID NO: 215239 - DNA, 25 bp, Artificial
  Probe
ttgacgttcccaagaggaatggagg

SEQ ID NO: 215240 - DNA, 25 bp, Artificial
  Probe
catgctgtgcaatcatgtgacatag

SEQ ID NO: 215241 - DNA, 25 bp, Artificial
  Probe
agacaagcaacatcctagaagagga

SEQ ID NO: 215242 - DNA, 25 bp, Artificial
  Probe
tgctgtgcaatcatgtgacatagcc

SEQ ID NO: 215243 - DNA, 25 bp, Artificial
  Probe
gacgttcccaagaggaatggaggaa

SEQ ID NO: 215244 - DNA, 25 bp, Artificial
  Probe
ttcccaagaggaatggaggaacgat

SEQ ID NO: 215245 - DNA, 25 bp, Artificial
  Probe
acatcctagaagaggatctggagcc

SEQ ID NO: 215246 - DNA, 25 bp, Artificial
  Probe
gccaggcagactgtctacttttatt

SEQ ID NO: 215247 - DNA, 25 bp, Artificial
  Probe
catcgacgttcatgtgtgtggttgt

SEQ ID NO: 215248 - DNA, 25 bp, Artificial
  Probe
cccctggagacaagcaacatcctag

SEQ ID NO: 215249 - DNA, 25 bp, Artificial
  Probe
ggatctggagccaggcagactgtct

SEQ ID NO: 215250 - DNA, 25 bp, Artificial
  Probe
tggagacaagcaacatcctagaaga

SEQ ID NO: 215251 - DNA, 25 bp, Artificial
  Probe
acccctggagacaagcaacatccta

SEQ ID NO: 215252 - DNA, 25 bp, Artificial
  Probe
tttatttgacgttcccaagaggaat

SEQ ID NO: 215253 - DNA, 25 bp, Artificial
  Probe
aatcatgtgacatagcccacagagg

SEQ ID NO: 215254 - DNA, 25 bp, Artificial
  Probe
tcctagaagaggatctggagccagg

SEQ ID NO: 215255 - DNA, 25 bp, Artificial
  Probe
atcctagaagaggatctggagccag

SEQ ID NO: 215256 - DNA, 25 bp, Artificial
  Probe
catcctagaagaggatctggagcca

SEQ ID NO: 215257 - DNA, 25 bp, Artificial
  Probe
gacatcgacgttcatgtgtgtggtt

SEQ ID NO: 215258 - DNA, 25 bp, Artificial
  Probe
aagaggatctggagccaggcagact

SEQ ID NO: 215259 - DNA, 25 bp, Artificial
  Probe
catagcccacagaggcaggcgctgg

SEQ ID NO: 215260 - DNA, 25 bp, Artificial
  Probe
caacatcctagaagaggatctggag

SEQ ID NO: 215261 - DNA, 25 bp, Artificial
  Probe
tgtgcaatcatgtgacatagcccac

SEQ ID NO: 215262 - DNA, 25 bp, Artificial
  Probe
ctggagccaggcagactgtctactt

SEQ ID NO: 215263 - DNA, 25 bp, Artificial
  Probe
actcatgctgtgcaatcatgtgaca

SEQ ID NO: 215264 - DNA, 25 bp, Artificial
  Probe
gacaagcaacatcctagaagaggat

SEQ ID NO: 215265 - DNA, 25 bp, Artificial
  Probe
cgttcccaagaggaatggaggaacg

SEQ ID NO: 215266 - DNA, 25 bp, Artificial
  Probe
acatagcccacagaggcaggcgctg

SEQ ID NO: 215267 - DNA, 25 bp, Artificial
  Probe
acatcgacgttcatgtgtgtggttg

SEQ ID NO: 215268 - DNA, 25 bp, Artificial
  Probe
tgacgttcccaagaggaatggagga

SEQ ID NO: 215269 - DNA, 25 bp, Artificial
  Probe
gaacgggacttgtgcgtttgcccgc

SEQ ID NO: 215270 - DNA, 25 bp, Artificial
  Probe
gcgtttgcccgcacactgttttaac

SEQ ID NO: 215271 - DNA, 25 bp, Artificial
  Probe
cttttccaggaaatctggcctaact

SEQ ID NO: 215272 - DNA, 25 bp, Artificial
  Probe
ttgtggatctgtctttggtaaaacc

SEQ ID NO: 215273 - DNA, 25 bp, Artificial
  Probe
ctgttttaacacagtgaggaaacct

SEQ ID NO: 215274 - DNA, 25 bp, Artificial
  Probe
aggtgaccaaataagccttaattca

SEQ ID NO: 215275 - DNA, 25 bp, Artificial
  Probe
gaaatctggcctaactttaggattt

SEQ ID NO: 215276 - DNA, 25 bp, Artificial
  Probe
ggaaatctggcctaactttaggatt

SEQ ID NO: 215277 - DNA, 25 bp, Artificial
  Probe
caacctgaacttttgaaacgtgcaa

SEQ ID NO: 215278 - DNA, 25 bp, Artificial
  Probe
gtctttggtaaaaccacacatgtat

SEQ ID NO: 215279 - DNA, 25 bp, Artificial
  Probe
aaagcaactctaaagattgaacggg

SEQ ID NO: 215280 - DNA, 25 bp, Artificial
  Probe
ctgtctttggtaaaaccacacatgt

SEQ ID NO: 215281 - DNA, 25 bp, Artificial
  Probe
gcaattgtcgagattttgcaaaatc

SEQ ID NO: 215282 - DNA, 25 bp, Artificial
  Probe
aacttttgaaacgtgcaattgtcga

SEQ ID NO: 215283 - DNA, 25 bp, Artificial
  Probe
aaacgtgcaattgtcgagattttgc

SEQ ID NO: 215284 - DNA, 25 bp, Artificial
  Probe
ttgcccgcacactgttttaacacag

SEQ ID NO: 215285 - DNA, 25 bp, Artificial
  Probe
gcacgaggccccttttccaggaaat

SEQ ID NO: 215286 - DNA, 25 bp, Artificial
  Probe
gattgaacgggacttgtgcgtttgc

SEQ ID NO: 215287 - DNA, 25 bp, Artificial
  Probe
gaggccccttttccaggaaatctgg

SEQ ID NO: 215288 - DNA, 25 bp, Artificial
  Probe
gtatagaactcaaacaatattggac

SEQ ID NO: 215289 - DNA, 25 bp, Artificial
  Probe
acgtgcaattgtcgagattttgcaa

SEQ ID NO: 215290 - DNA, 25 bp, Artificial
  Probe
cttttgaaacgtgcaattgtcgaga

SEQ ID NO: 215291 - DNA, 25 bp, Artificial
  Probe
actctaaagattgaacgggacttgt

SEQ ID NO: 215292 - DNA, 25 bp, Artificial
  Probe
gacttgtgcgtttgcccgcacactg

SEQ ID NO: 215293 - DNA, 25 bp, Artificial
  Probe
gccccttttccaggaaatctggcct

SEQ ID NO: 215294 - DNA, 25 bp, Artificial
  Probe
gcaactctaaagattgaacgggact

SEQ ID NO: 215295 - DNA, 25 bp, Artificial
  Probe
gaaaccaatcaataattgacgtgtg

SEQ ID NO: 215296 - DNA, 25 bp, Artificial
  Probe
gcctctaatcaaataaggtgaccaa

SEQ ID NO: 215297 - DNA, 25 bp, Artificial
  Probe
cactgttttaacacagtgaggaaac

SEQ ID NO: 215298 - DNA, 25 bp, Artificial
  Probe
ttgttgtttgacttggtccctaata

SEQ ID NO: 215299 - DNA, 25 bp, Artificial
  Probe
gggacttgtgcgtttgcccgcacac

SEQ ID NO: 215300 - DNA, 25 bp, Artificial
  Probe
ggtgaccaaataagccttaattcac

SEQ ID NO: 215301 - DNA, 25 bp, Artificial
  Probe
ttttaacacagtgaggaaacctact

SEQ ID NO: 215302 - DNA, 25 bp, Artificial
  Probe
aatcaacctgaacttttgaaacgtg

SEQ ID NO: 215303 - DNA, 25 bp, Artificial
  Probe
tgtgatagcctctaatcaaataagg

SEQ ID NO: 215304 - DNA, 25 bp, Artificial
  Probe
ttccaggaaatctggcctaacttta

SEQ ID NO: 215305 - DNA, 25 bp, Artificial
  Probe
gtttgcccgcacactgttttaacac

SEQ ID NO: 215306 - DNA, 25 bp, Artificial
  Probe
tgttttaacacagtgaggaaaccta

SEQ ID NO: 215307 - DNA, 25 bp, Artificial
  Probe
gatctgtctttggtaaaaccacaca

SEQ ID NO: 215308 - DNA, 25 bp, Artificial
  Probe
caatattggacttttgctccttttg

SEQ ID NO: 215309 - DNA, 25 bp, Artificial
  Probe
cgaggccccttttccaggaaatctg

SEQ ID NO: 215310 - DNA, 25 bp, Artificial
  Probe
tctgtctttggtaaaaccacacatg

SEQ ID NO: 215311 - DNA, 25 bp, Artificial
  Probe
tgaacttttgaaacgtgcaattgtc

SEQ ID NO: 215312 - DNA, 25 bp, Artificial
  Probe
aagcaactctaaagattgaacggga

SEQ ID NO: 215313 - DNA, 25 bp, Artificial
  Probe
caattgtcgagattttgcaaaatca

SEQ ID NO: 215314 - DNA, 25 bp, Artificial
  Probe
caatcaataattgacgtgtgtgatc

SEQ ID NO: 215315 - DNA, 25 bp, Artificial
  Probe
ttgtcctacaaggaataccagtttt

SEQ ID NO: 215316 - DNA, 25 bp, Artificial
  Probe
ccgacggcactgacggacatgtgac

SEQ ID NO: 215317 - DNA, 25 bp, Artificial
  Probe
gaccacgctgaaaagagaagataga

SEQ ID NO: 215318 - DNA, 25 bp, Artificial
  Probe
agcgctacagaaattactagttctg

SEQ ID NO: 215319 - DNA, 25 bp, Artificial
  Probe
ctgaagaaactcagcgctacagaaa

SEQ ID NO: 215320 - DNA, 25 bp, Artificial
  Probe
ggccaggttcggtttctttggcatt

SEQ ID NO: 215321 - DNA, 25 bp, Artificial
  Probe
cctcactgtgagtgcggacatggag

SEQ ID NO: 215322 - DNA, 25 bp, Artificial
  Probe
cctacaaggaataccagttttctgt

SEQ ID NO: 215323 - DNA, 25 bp, Artificial
  Probe
gactctttcacctcctggtggctgt

SEQ ID NO: 215324 - DNA, 25 bp, Artificial
  Probe
gcctcactgtgagtgcggacatgga

SEQ ID NO: 215325 - DNA, 25 bp, Artificial
  Probe
aactgcctcgcatgacggaggccca

SEQ ID NO: 215326 - DNA, 25 bp, Artificial
  Probe
taaggaaagttctacactggccagg

SEQ ID NO: 215327 - DNA, 25 bp, Artificial
  Probe
ctttggcattgtttgttagcatctg

SEQ ID NO: 215328 - DNA, 25 bp, Artificial
  Probe
caaggaataccagttttctgttagg

SEQ ID NO: 215329 - DNA, 25 bp, Artificial
  Probe
ctagttctgtcttctggaattaaat

SEQ ID NO: 215330 - DNA, 25 bp, Artificial
  Probe
gtgacaatgggctgtccggttgtcc

SEQ ID NO: 215331 - DNA, 25 bp, Artificial
  Probe
caggttcggtttctttggcattgtt

SEQ ID NO: 215332 - DNA, 25 bp, Artificial
  Probe
gaaactcagcgctacagaaattact

SEQ ID NO: 215333 - DNA, 25 bp, Artificial
  Probe
gaaattactagttctgtcttctgga

SEQ ID NO: 215334 - DNA, 25 bp, Artificial
  Probe
tgggctgtccggttgtcctacaagg

SEQ ID NO: 215335 - DNA, 25 bp, Artificial
  Probe
catggagcggcaagccaagccggaa

SEQ ID NO: 215336 - DNA, 25 bp, Artificial
  Probe
tagcatctgaagaaactcagcgcta

SEQ ID NO: 215337 - DNA, 25 bp, Artificial
  Probe
gaaggaccacgctgaaaagagaaga

SEQ ID NO: 215338 - DNA, 25 bp, Artificial
  Probe
aactcagcgctacagaaattactag

SEQ ID NO: 215339 - DNA, 25 bp, Artificial
  Probe
ctacactggccaggttcggtttctt

SEQ ID NO: 215340 - DNA, 25 bp, Artificial
  Probe
ttagcatctgaagaaactcagcgct

SEQ ID NO: 215341 - DNA, 25 bp, Artificial
  Probe
aaattactagttctgtcttctggaa

SEQ ID NO: 215342 - DNA, 25 bp, Artificial
  Probe
tctacactggccaggttcggtttct

SEQ ID NO: 215343 - DNA, 25 bp, Artificial
  Probe
tttgttagcatctgaagaaactcag

SEQ ID NO: 215344 - DNA, 25 bp, Artificial
  Probe
cagcccgacggcactgacggacatg

SEQ ID NO: 215345 - DNA, 25 bp, Artificial
  Probe
aaagttctacactggccaggttcgg

SEQ ID NO: 215346 - DNA, 25 bp, Artificial
  Probe
tcctacaaggaataccagttttctg

SEQ ID NO: 215347 - DNA, 25 bp, Artificial
  Probe
gcatctgaagaaactcagcgctaca

SEQ ID NO: 215348 - DNA, 25 bp, Artificial
  Probe
ggttgtcctacaaggaataccagtt

SEQ ID NO: 215349 - DNA, 25 bp, Artificial
  Probe
ccttcaactgcctcgcatgacggag

SEQ ID NO: 215350 - DNA, 25 bp, Artificial
  Probe
cggcactgacggacatgtgacaatg

SEQ ID NO: 215351 - DNA, 25 bp, Artificial
  Probe
gacatgtgacaatgggctgtccggt

SEQ ID NO: 215352 - DNA, 25 bp, Artificial
  Probe
ttcacctcctggtggctgtggatgg

SEQ ID NO: 215353 - DNA, 25 bp, Artificial
  Probe
tgtttgttagcatctgaagaaactc

SEQ ID NO: 215354 - DNA, 25 bp, Artificial
  Probe
acatggagcggcaagccaagccgga

SEQ ID NO: 215355 - DNA, 25 bp, Artificial
  Probe
gacggacatgtgacaatgggctgtc

SEQ ID NO: 215356 - DNA, 25 bp, Artificial
  Probe
aggaaagttctacactggccaggtt

SEQ ID NO: 215357 - DNA, 25 bp, Artificial
  Probe
tgacaatgggctgtccggttgtcct

SEQ ID NO: 215358 - DNA, 25 bp, Artificial
  Probe
cactggccaggttcggtttctttgg

SEQ ID NO: 215359 - DNA, 25 bp, Artificial
  Probe
gacaatgggctgtccggttgtccta

SEQ ID NO: 215360 - DNA, 25 bp, Artificial
  Probe
tgtccggttgtcctacaaggaatac

SEQ ID NO: 215361 - DNA, 25 bp, Artificial
  Probe
ccccgggactacagcaaatactaca

SEQ ID NO: 215362 - DNA, 25 bp, Artificial
  Probe
ggtccgggatctggaagagtcaaac

SEQ ID NO: 215363 - DNA, 25 bp, Artificial
  Probe
cagatcgtcaacctgacaactgaca

SEQ ID NO: 215364 - DNA, 25 bp, Artificial
  Probe
aggtccgggatctggaagagtcaaa

SEQ ID NO: 215365 - DNA, 25 bp, Artificial
  Probe
ccatcgaagaccttaaagggcagat

SEQ ID NO: 215366 - DNA, 25 bp, Artificial
  Probe
ggccttctctctggaaatgaaaagg

SEQ ID NO: 215367 - DNA, 25 bp, Artificial
  Probe
gcctcctacatgaacaaggtccggg

SEQ ID NO: 215368 - DNA, 25 bp, Artificial
  Probe
gcacggcaactccagccagcgagag

SEQ ID NO: 215369 - DNA, 25 bp, Artificial
  Probe
agaagcacggcaactccagccagcg

SEQ ID NO: 215370 - DNA, 25 bp, Artificial
  Probe
atcgtcaacctgacaactgacaatg

SEQ ID NO: 215371 - DNA, 25 bp, Artificial
  Probe
gggactacagcaaatactacaaaac

SEQ ID NO: 215372 - DNA, 25 bp, Artificial
  Probe
gccccgggactacagcaaatactac

SEQ ID NO: 215373 - DNA, 25 bp, Artificial
  Probe
ggcctcctacatgaacaaggtccgg

SEQ ID NO: 215374 - DNA, 25 bp, Artificial
  Probe
aacctgacaactgacaatgccaatg

SEQ ID NO: 215375 - DNA, 25 bp, Artificial
  Probe
aaccatcgaagaccttaaagggcag

SEQ ID NO: 215376 - DNA, 25 bp, Artificial
  Probe
cctgacaactgacaatgccaatgtc

SEQ ID NO: 215377 - DNA, 25 bp, Artificial
  Probe
gagagccccgggactacagcaaata

SEQ ID NO: 215378 - DNA, 25 bp, Artificial
  Probe
ctggcctcctacatgaacaaggtcc

SEQ ID NO: 215379 - DNA, 25 bp, Artificial
  Probe
accttaaagggcagatcgtcaacct

SEQ ID NO: 215380 - DNA, 25 bp, Artificial
  Probe
ccttaaagggcagatcgtcaacctg

SEQ ID NO: 215381 - DNA, 25 bp, Artificial
  Probe
aaagggcagatcgtcaacctgacaa

SEQ ID NO: 215382 - DNA, 25 bp, Artificial
  Probe
tgacaactgacaatgccaatgtcct

SEQ ID NO: 215383 - DNA, 25 bp, Artificial
  Probe
atcgaagaccttaaagggcagatcg

SEQ ID NO: 215384 - DNA, 25 bp, Artificial
  Probe
ggcagatcgtcaacctgacaactga

SEQ ID NO: 215385 - DNA, 25 bp, Artificial
  Probe
agagccccgggactacagcaaatac

SEQ ID NO: 215386 - DNA, 25 bp, Artificial
  Probe
ctacatgaacaaggtccgggatctg

SEQ ID NO: 215387 - DNA, 25 bp, Artificial
  Probe
cgaagaccttaaagggcagatcgtc

SEQ ID NO: 215388 - DNA, 25 bp, Artificial
  Probe
ctcctacatgaacaaggtccgggat

SEQ ID NO: 215389 - DNA, 25 bp, Artificial
  Probe
gtccgggatctggaagagtcaaact

SEQ ID NO: 215390 - DNA, 25 bp, Artificial
  Probe
cccgggactacagcaaatactacaa

SEQ ID NO: 215391 - DNA, 25 bp, Artificial
  Probe
tctctctggaaatgaaaaggtgacc

SEQ ID NO: 215392 - DNA, 25 bp, Artificial
  Probe
aagcacggcaactccagccagcgag

SEQ ID NO: 215393 - DNA, 25 bp, Artificial
  Probe
acaaggtccgggatctggaagagtc

SEQ ID NO: 215394 - DNA, 25 bp, Artificial
  Probe
tcgtcaacctgacaactgacaatgc

SEQ ID NO: 215395 - DNA, 25 bp, Artificial
  Probe
agggcagatcgtcaacctgacaact

SEQ ID NO: 215396 - DNA, 25 bp, Artificial
  Probe
ccttctctctggaaatgaaaaggtg

SEQ ID NO: 215397 - DNA, 25 bp, Artificial
  Probe
cgggactacagcaaatactacaaaa

SEQ ID NO: 215398 - DNA, 25 bp, Artificial
  Probe
aaggtccgggatctggaagagtcaa

SEQ ID NO: 215399 - DNA, 25 bp, Artificial
  Probe
gtggccttctctctggaaatgaaaa

SEQ ID NO: 215400 - DNA, 25 bp, Artificial
  Probe
cctcctacatgaacaaggtccggga

SEQ ID NO: 215401 - DNA, 25 bp, Artificial
  Probe
agccccgggactacagcaaatacta

SEQ ID NO: 215402 - DNA, 25 bp, Artificial
  Probe
gtcaacctgacaactgacaatgcca

SEQ ID NO: 215403 - DNA, 25 bp, Artificial
  Probe
cgtcaacctgacaactgacaatgcc

SEQ ID NO: 215404 - DNA, 25 bp, Artificial
  Probe
gagaagcacggcaactccagccagc

SEQ ID NO: 215405 - DNA, 25 bp, Artificial
  Probe
aatcaaggagtggtacgagaagcac

SEQ ID NO: 215406 - DNA, 25 bp, Artificial
  Probe
gatcgtcaacctgacaactgacaat

SEQ ID NO: 215407 - DNA, 25 bp, Artificial
  Probe
attttgaaacatccaggatgtccca

SEQ ID NO: 215408 - DNA, 25 bp, Artificial
  Probe
cagtccaggttggaaagaagtctcc

SEQ ID NO: 215409 - DNA, 25 bp, Artificial
  Probe
agaagtctcctctgtgtcagattaa

SEQ ID NO: 215410 - DNA, 25 bp, Artificial
  Probe
tggaccgaattcatatgcagatcga

SEQ ID NO: 215411 - DNA, 25 bp, Artificial
  Probe
ccctttttgctaatccagtccaggt

SEQ ID NO: 215412 - DNA, 25 bp, Artificial
  Probe
ctttttgctaatccagtccaggttg

SEQ ID NO: 215413 - DNA, 25 bp, Artificial
  Probe
ttaagccctgtctcttaatgatatg

SEQ ID NO: 215414 - DNA, 25 bp, Artificial
  Probe
gattaagccctgtctcttaatgata

SEQ ID NO: 215415 - DNA, 25 bp, Artificial
  Probe
gatgtttcctaatgcagaaggaatc

SEQ ID NO: 215416 - DNA, 25 bp, Artificial
  Probe
gctaatccagtccaggttggaaaga

SEQ ID NO: 215417 - DNA, 25 bp, Artificial
  Probe
ggatgtcccaatattaccatgattt

SEQ ID NO: 215418 - DNA, 25 bp, Artificial
  Probe
cagattaagccctgtctcttaatga

SEQ ID NO: 215419 - DNA, 25 bp, Artificial
  Probe
ttggaaagaagtctcctctgtgtca

SEQ ID NO: 215420 - DNA, 25 bp, Artificial
  Probe
tttgaaacatccaggatgtcccaat

SEQ ID NO: 215421 - DNA, 25 bp, Artificial
  Probe
atgtttcctaatgcagaaggaatct

SEQ ID NO: 215422 - DNA, 25 bp, Artificial
  Probe
cctgtctcttaatgatatggacaaa

SEQ ID NO: 215423 - DNA, 25 bp, Artificial
  Probe
ctgtctcttaatgatatggacaaat

SEQ ID NO: 215424 - DNA, 25 bp, Artificial
  Probe
gctggaccgaattcatatgcagatc

SEQ ID NO: 215425 - DNA, 25 bp, Artificial
  Probe
ttgctaatccagtccaggttggaaa

SEQ ID NO: 215426 - DNA, 25 bp, Artificial
  Probe
ctcctctgtgtcagattaagccctg

SEQ ID NO: 215427 - DNA, 25 bp, Artificial
  Probe
cccattttgaaacatccaggatgtc

SEQ ID NO: 215428 - DNA, 25 bp, Artificial
  Probe
atccagtccaggttggaaagaagtc

SEQ ID NO: 215429 - DNA, 25 bp, Artificial
  Probe
ccaggatgtcccaatattaccatga

SEQ ID NO: 215430 - DNA, 25 bp, Artificial
  Probe
ttgaaacatccaggatgtcccaata

SEQ ID NO: 215431 - DNA, 25 bp, Artificial
  Probe
tctgtgtcagattaagccctgtctc

SEQ ID NO: 215432 - DNA, 25 bp, Artificial
  Probe
aagccctgtctcttaatgatatgga

SEQ ID NO: 215433 - DNA, 25 bp, Artificial
  Probe
agattaagccctgtctcttaatgat

SEQ ID NO: 215434 - DNA, 25 bp, Artificial
  Probe
agccctgtctcttaatgatatggac

SEQ ID NO: 215435 - DNA, 25 bp, Artificial
  Probe
aagtctcctctgtgtcagattaagc

SEQ ID NO: 215436 - DNA, 25 bp, Artificial
  Probe
tggaaagaagtctcctctgtgtcag

SEQ ID NO: 215437 - DNA, 25 bp, Artificial
  Probe
gaagtctcctctgtgtcagattaag

SEQ ID NO: 215438 - DNA, 25 bp, Artificial
  Probe
accccattttgaaacatccaggatg

SEQ ID NO: 215439 - DNA, 25 bp, Artificial
  Probe
gccctgtctcttaatgatatggaca

SEQ ID NO: 215440 - DNA, 25 bp, Artificial
  Probe
gtctcctctgtgtcagattaagccc

SEQ ID NO: 215441 - DNA, 25 bp, Artificial
  Probe
cattttgaaacatccaggatgtccc

SEQ ID NO: 215442 - DNA, 25 bp, Artificial
  Probe
ctgtgtcagattaagccctgtctct

SEQ ID NO: 215443 - DNA, 25 bp, Artificial
  Probe
tttttgctaatccagtccaggttgg

SEQ ID NO: 215444 - DNA, 25 bp, Artificial
  Probe
tgctaatccagtccaggttggaaag

SEQ ID NO: 215445 - DNA, 25 bp, Artificial
  Probe
ctaatccagtccaggttggaaagaa

SEQ ID NO: 215446 - DNA, 25 bp, Artificial
  Probe
caggatgtcccaatattaccatgat

SEQ ID NO: 215447 - DNA, 25 bp, Artificial
  Probe
tgtgtcagattaagccctgtctctt

SEQ ID NO: 215448 - DNA, 25 bp, Artificial
  Probe
tcctctgtgtcagattaagccctgt

SEQ ID NO: 215449 - DNA, 25 bp, Artificial
  Probe
cccctttttgctaatccagtccagg

SEQ ID NO: 215450 - DNA, 25 bp, Artificial
  Probe
gaaacatccaggatgtcccaatatt

SEQ ID NO: 215451 - DNA, 25 bp, Artificial
  Probe
gaaagaagtctcctctgtgtcagat

SEQ ID NO: 215452 - DNA, 25 bp, Artificial
  Probe
tgtttcctaatgcagaaggaatctg

SEQ ID NO: 215453 - DNA, 25 bp, Artificial
  Probe
catttgccctgtgagcaaatgcgaa

SEQ ID NO: 215454 - DNA, 25 bp, Artificial
  Probe
gtaatgttgtaccatttgccctgtg

SEQ ID NO: 215455 - DNA, 25 bp, Artificial
  Probe
aggtgagattcttcaccaacatttc

SEQ ID NO: 215456 - DNA, 25 bp, Artificial
  Probe
ctttgttgccaaaaggttgtgctat

SEQ ID NO: 215457 - DNA, 25 bp, Artificial
  Probe
atgttgtaccatttgccctgtgagc

SEQ ID NO: 215458 - DNA, 25 bp, Artificial
  Probe
aggaaaaacccatggggaatgatat

SEQ ID NO: 215459 - DNA, 25 bp, Artificial
  Probe
atttgccctgtgagcaaatgcgaat

SEQ ID NO: 215460 - DNA, 25 bp, Artificial
  Probe
atatgtctgcatgtttgaaacacaa

SEQ ID NO: 215461 - DNA, 25 bp, Artificial
  Probe
tttgttgccaaaaggttgtgctatc

SEQ ID NO: 215462 - DNA, 25 bp, Artificial
  Probe
atgcactctaacttatgtgaactga

SEQ ID NO: 215463 - DNA, 25 bp, Artificial
  Probe
aacttatgtgaactgagagaaaaaa

SEQ ID NO: 215464 - DNA, 25 bp, Artificial
  Probe
taatgttgtaccatttgccctgtga

SEQ ID NO: 215465 - DNA, 25 bp, Artificial
  Probe
tgttgtaccatttgccctgtgagca

SEQ ID NO: 215466 - DNA, 25 bp, Artificial
  Probe
aactttgttgccaaaaggttgtgct

SEQ ID NO: 215467 - DNA, 25 bp, Artificial
  Probe
actctaacttatgtgaactgagaga

SEQ ID NO: 215468 - DNA, 25 bp, Artificial
  Probe
gatttatagtaccttatactaaggt

SEQ ID NO: 215469 - DNA, 25 bp, Artificial
  Probe
aatgttgtaccatttgccctgtgag

SEQ ID NO: 215470 - DNA, 25 bp, Artificial
  Probe
tgtctgcatgtttgaaacacaaaaa

SEQ ID NO: 215471 - DNA, 25 bp, Artificial
  Probe
aatgcactctaacttatgtgaactg

SEQ ID NO: 215472 - DNA, 25 bp, Artificial
  Probe
gccctgtgagcaaatgcgaatacag

SEQ ID NO: 215473 - DNA, 25 bp, Artificial
  Probe
ttgttgccaaaaggttgtgctatcc

SEQ ID NO: 215474 - DNA, 25 bp, Artificial
  Probe
taaatatattgtgtttgctgacaaa

SEQ ID NO: 215475 - DNA, 25 bp, Artificial
  Probe
gcactctaacttatgtgaactgaga

SEQ ID NO: 215476 - DNA, 25 bp, Artificial
  Probe
tgcactctaacttatgtgaactgag

SEQ ID NO: 215477 - DNA, 25 bp, Artificial
  Probe
tctgcatgtttgaaacacaaaaaaa

SEQ ID NO: 215478 - DNA, 25 bp, Artificial
  Probe
ttgccaaaaggttgtgctatcccaa

SEQ ID NO: 215479 - DNA, 25 bp, Artificial
  Probe
atgcttgatattgtgaaaggtgaga

SEQ ID NO: 215480 - DNA, 25 bp, Artificial
  Probe
tatatgtctgcatgtttgaaacaca

SEQ ID NO: 215481 - DNA, 25 bp, Artificial
  Probe
caaaagaaaatgcactctaacttat

SEQ ID NO: 215482 - DNA, 25 bp, Artificial
  Probe
tgttgccaaaaggttgtgctatccc

SEQ ID NO: 215483 - DNA, 25 bp, Artificial
  Probe
ttgccctgtgagcaaatgcgaatac

SEQ ID NO: 215484 - DNA, 25 bp, Artificial
  Probe
ctctaacttatgtgaactgagagaa

SEQ ID NO: 215485 - DNA, 25 bp, Artificial
  Probe
tgccctgtgagcaaatgcgaataca

SEQ ID NO: 215486 - DNA, 25 bp, Artificial
  Probe
ggtgagattcttcaccaacatttca

SEQ ID NO: 215487 - DNA, 25 bp, Artificial
  Probe
cactctaacttatgtgaactgagag

SEQ ID NO: 215488 - DNA, 25 bp, Artificial
  Probe
aaggtgagattcttcaccaacattt

SEQ ID NO: 215489 - DNA, 25 bp, Artificial
  Probe
actttgttgccaaaaggttgtgcta

SEQ ID NO: 215490 - DNA, 25 bp, Artificial
  Probe
taccatttgccctgtgagcaaatgc

SEQ ID NO: 215491 - DNA, 25 bp, Artificial
  Probe
gttgccaaaaggttgtgctatccca

SEQ ID NO: 215492 - DNA, 25 bp, Artificial
  Probe
tgtaatgttgtaccatttgccctgt

SEQ ID NO: 215493 - DNA, 25 bp, Artificial
  Probe
atgtctgcatgtttgaaacacaaaa

SEQ ID NO: 215494 - DNA, 25 bp, Artificial
  Probe
tatgtctgcatgtttgaaacacaaa

SEQ ID NO: 215495 - DNA, 25 bp, Artificial
  Probe
tttgccctgtgagcaaatgcgaata

SEQ ID NO: 215496 - DNA, 25 bp, Artificial
  Probe
aatgaaaacagcatttttaaaagca

SEQ ID NO: 215497 - DNA, 25 bp, Artificial
  Probe
ttatatgtctgcatgtttgaaacac

SEQ ID NO: 215498 - DNA, 25 bp, Artificial
  Probe
ccatttgccctgtgagcaaatgcga

SEQ ID NO: 215499 - DNA, 25 bp, Artificial
  Probe
ttatgtgctctccatatttaagggg

SEQ ID NO: 215500 - DNA, 25 bp, Artificial
  Probe
aacacgcattagaaggagcatccgc

SEQ ID NO: 215501 - DNA, 25 bp, Artificial
  Probe
gcatgttcagatctaactcgaccct

SEQ ID NO: 215502 - DNA, 25 bp, Artificial
  Probe
atcctcaatggcactgtgatggtca

SEQ ID NO: 215503 - DNA, 25 bp, Artificial
  Probe
aggtctctgacaacccttgtggaaa

SEQ ID NO: 215504 - DNA, 25 bp, Artificial
  Probe
gctctgcatgtgtgcagacggcaca

SEQ ID NO: 215505 - DNA, 25 bp, Artificial
  Probe
gcatgtgtgcagacggcacactctt

SEQ ID NO: 215506 - DNA, 25 bp, Artificial
  Probe
attagaaggagcatccgcagggctc

SEQ ID NO: 215507 - DNA, 25 bp, Artificial
  Probe
aacagcatcatcctcaatggcactg

SEQ ID NO: 215508 - DNA, 25 bp, Artificial
  Probe
gggctcagcatgttcagatctaact

SEQ ID NO: 215509 - DNA, 25 bp, Artificial
  Probe
aggagcatccgcagggctcagcatg

SEQ ID NO: 215510 - DNA, 25 bp, Artificial
  Probe
agccatgtttctacagtttgcgtaa

SEQ ID NO: 215511 - DNA, 25 bp, Artificial
  Probe
tattatgtgctctccatatttaagg

SEQ ID NO: 215512 - DNA, 25 bp, Artificial
  Probe
gtgcggtacaagctctgcatgtgtg

SEQ ID NO: 215513 - DNA, 25 bp, Artificial
  Probe
acatgggctgccaggtctctgacaa

SEQ ID NO: 215514 - DNA, 25 bp, Artificial
  Probe
agtacaagtaacaagccacaacatg

SEQ ID NO: 215515 - DNA, 25 bp, Artificial
  Probe
gaaacaccactgtatctattatgtg

SEQ ID NO: 215516 - DNA, 25 bp, Artificial
  Probe
ggtgcggtacaagctctgcatgtgt

SEQ ID NO: 215517 - DNA, 25 bp, Artificial
  Probe
actgtgatggtcagcccaacgcgtc

SEQ ID NO: 215518 - DNA, 25 bp, Artificial
  Probe
gtacaagtaacaagccacaacatgg

SEQ ID NO: 215519 - DNA, 25 bp, Artificial
  Probe
tgaaaacagcatcatcctcaatggc

SEQ ID NO: 215520 - DNA, 25 bp, Artificial
  Probe
ccttttgaagaatgcatgtgagcca

SEQ ID NO: 215521 - DNA, 25 bp, Artificial
  Probe
gaaacacgcattagaaggagcatcc

SEQ ID NO: 215522 - DNA, 25 bp, Artificial
  Probe
gtttctacagtttgcgtaacttgta

SEQ ID NO: 215523 - DNA, 25 bp, Artificial
  Probe
caagccacaacatgggctgccaggt

SEQ ID NO: 215524 - DNA, 25 bp, Artificial
  Probe
gttttgagtgcctaaattctaatac

SEQ ID NO: 215525 - DNA, 25 bp, Artificial
  Probe
tgtgcagacggcacactcttcaaag

SEQ ID NO: 215526 - DNA, 25 bp, Artificial
  Probe
gtggaaacacgcattagaaggagca

SEQ ID NO: 215527 - DNA, 25 bp, Artificial
  Probe
tgcatgtgagccatgtttctacagt

SEQ ID NO: 215528 - DNA, 25 bp, Artificial
  Probe
ctctgacaacccttgtggaaacacg

SEQ ID NO: 215529 - DNA, 25 bp, Artificial
  Probe
ctgacaacccttgtggaaacacgca

SEQ ID NO: 215530 - DNA, 25 bp, Artificial
  Probe
ttagaaggagcatccgcagggctca

SEQ ID NO: 215531 - DNA, 25 bp, Artificial
  Probe
ccttgtggaaacacgcattagaagg

SEQ ID NO: 215532 - DNA, 25 bp, Artificial
  Probe
ctacagtttgcgtaacttgtaatta

SEQ ID NO: 215533 - DNA, 25 bp, Artificial
  Probe
ctctccatatttaaggggttttgag

SEQ ID NO: 215534 - DNA, 25 bp, Artificial
  Probe
acaagccacaacatgggctgccagg

SEQ ID NO: 215535 - DNA, 25 bp, Artificial
  Probe
gcatcatcctcaatggcactgtgat

SEQ ID NO: 215536 - DNA, 25 bp, Artificial
  Probe
aagtaacaagccacaacatgggctg

SEQ ID NO: 215537 - DNA, 25 bp, Artificial
  Probe
taagttgcactgatattcaaaggac

SEQ ID NO: 215538 - DNA, 25 bp, Artificial
  Probe
taacaagccacaacatgggctgcca

SEQ ID NO: 215539 - DNA, 25 bp, Artificial
  Probe
catccgcagggctcagcatgttcag

SEQ ID NO: 215540 - DNA, 25 bp, Artificial
  Probe
cacaacatgggctgccaggtctctg

SEQ ID NO: 215541 - DNA, 25 bp, Artificial
  Probe
gtacaagctctgcatgtgtgcagac

SEQ ID NO: 215542 - DNA, 25 bp, Artificial
  Probe
ctccccttttgaagaatgcatgtga

SEQ ID NO: 215543 - DNA, 25 bp, Artificial
  Probe
ggcacactcttcaaagtacaagtaa

SEQ ID NO: 215544 - DNA, 25 bp, Artificial
  Probe
ttttaactgggaaacaccactgtat

SEQ ID NO: 215545 - DNA, 25 bp, Artificial
  Probe
gcttctcaaagttgtgcacacaatt

SEQ ID NO: 215546 - DNA, 25 bp, Artificial
  Probe
taaatgccttctgtggtctcagatc

SEQ ID NO: 215547 - DNA, 25 bp, Artificial
  Probe
ctatgttttctagtagtacttgacc

SEQ ID NO: 215548 - DNA, 25 bp, Artificial
  Probe
gttgtttacctgacagtctttctta

SEQ ID NO: 215549 - DNA, 25 bp, Artificial
  Probe
actgtgttcacaagcctcggatcct

SEQ ID NO: 215550 - DNA, 25 bp, Artificial
  Probe
tgttcacaagcctcggatccttaga

SEQ ID NO: 215551 - DNA, 25 bp, Artificial
  Probe
ccctgcaagtgaaattcgtaaacag

SEQ ID NO: 215552 - DNA, 25 bp, Artificial
  Probe
gcttttctcattggtatgtacctaa

SEQ ID NO: 215553 - DNA, 25 bp, Artificial
  Probe
acatcccatgggttggtctttgttg

SEQ ID NO: 215554 - DNA, 25 bp, Artificial
  Probe
ggtctcagatcagctgggagaccat

SEQ ID NO: 215555 - DNA, 25 bp, Artificial
  Probe
tccctgcaagtgaaattcgtaaaca

SEQ ID NO: 215556 - DNA, 25 bp, Artificial
  Probe
aggctactcgtttccctgcaagtga

SEQ ID NO: 215557 - DNA, 25 bp, Artificial
  Probe
ctcgtttccctgcaagtgaaattcg

SEQ ID NO: 215558 - DNA, 25 bp, Artificial
  Probe
agccaggctactcgtttccctgcaa

SEQ ID NO: 215559 - DNA, 25 bp, Artificial
  Probe
gccttctgtggtctcagatcagctg

SEQ ID NO: 215560 - DNA, 25 bp, Artificial
  Probe
gtaaacagtatacatcccatgggtt

SEQ ID NO: 215561 - DNA, 25 bp, Artificial
  Probe
gtctttcttaaatgccttctgtggt

SEQ ID NO: 215562 - DNA, 25 bp, Artificial
  Probe
ctgtgactaaccacagtgaccactt

SEQ ID NO: 215563 - DNA, 25 bp, Artificial
  Probe
gaccggcttctcaaagttgtgcaca

SEQ ID NO: 215564 - DNA, 25 bp, Artificial
  Probe
tctcagatcagctgggagaccataa

SEQ ID NO: 215565 - DNA, 25 bp, Artificial
  Probe
ttctgtggtctcagatcagctggga

SEQ ID NO: 215566 - DNA, 25 bp, Artificial
  Probe
gtggtctcagatcagctgggagacc

SEQ ID NO: 215567 - DNA, 25 bp, Artificial
  Probe
tactcgtttccctgcaagtgaaatt

SEQ ID NO: 215568 - DNA, 25 bp, Artificial
  Probe
tactgtgttcacaagcctcggatcc

SEQ ID NO: 215569 - DNA, 25 bp, Artificial
  Probe
taagccaggctactcgtttccctgc

SEQ ID NO: 215570 - DNA, 25 bp, Artificial
  Probe
gtctagaacacaaaaattctgttga

SEQ ID NO: 215571 - DNA, 25 bp, Artificial
  Probe
tcgtaaacagtatacatcccatggg

SEQ ID NO: 215572 - DNA, 25 bp, Artificial
  Probe
tagtagtacttgaccggcttctcaa

SEQ ID NO: 215573 - DNA, 25 bp, Artificial
  Probe
catcccatgggttggtctttgttgt

SEQ ID NO: 215574 - DNA, 25 bp, Artificial
  Probe
gtatacatcccatgggttggtcttt

SEQ ID NO: 215575 - DNA, 25 bp, Artificial
  Probe
tgcttttctcattggtatgtaccta

SEQ ID NO: 215576 - DNA, 25 bp, Artificial
  Probe
gtctttgttgtttacctgacagtct

SEQ ID NO: 215577 - DNA, 25 bp, Artificial
  Probe
actatgttttctagtagtacttgac

SEQ ID NO: 215578 - DNA, 25 bp, Artificial
  Probe
tttctagtagtacttgaccggcttc

SEQ ID NO: 215579 - DNA, 25 bp, Artificial
  Probe
ttcttaaatgccttctgtggtctca

SEQ ID NO: 215580 - DNA, 25 bp, Artificial
  Probe
gttggtctttgttgtttacctgaca

SEQ ID NO: 215581 - DNA, 25 bp, Artificial
  Probe
gtgactaaccacagtgaccacttct

SEQ ID NO: 215582 - DNA, 25 bp, Artificial
  Probe
tacttgaccggcttctcaaagttgt

SEQ ID NO: 215583 - DNA, 25 bp, Artificial
  Probe
atcccatgggttggtctttgttgtt

SEQ ID NO: 215584 - DNA, 25 bp, Artificial
  Probe
cttctcaaagttgtgcacacaattg

SEQ ID NO: 215585 - DNA, 25 bp, Artificial
  Probe
cttgaccggcttctcaaagttgtgc

SEQ ID NO: 215586 - DNA, 25 bp, Artificial
  Probe
gactaaccacagtgaccacttcttg

SEQ ID NO: 215587 - DNA, 25 bp, Artificial
  Probe
agtatacatcccatgggttggtctt

SEQ ID NO: 215588 - DNA, 25 bp, Artificial
  Probe
gacagtctttcttaaatgccttctg

SEQ ID NO: 215589 - DNA, 25 bp, Artificial
  Probe
cagtctttcttaaatgccttctgtg

SEQ ID NO: 215590 - DNA, 25 bp, Artificial
  Probe
taaacagtatacatcccatgggttg

SEQ ID NO: 215591 - DNA, 25 bp, Artificial
  Probe
tgatgtggtgctgttcttcatccac

SEQ ID NO: 215592 - DNA, 25 bp, Artificial
  Probe
tgtggtgctgttcttcatccacgga

SEQ ID NO: 215593 - DNA, 25 bp, Artificial
  Probe
ctgatgtggtgctgttcttcatcca

SEQ ID NO: 215594 - DNA, 25 bp, Artificial
  Probe
acccgcctggctcacttgaggtaga

SEQ ID NO: 215595 - DNA, 25 bp, Artificial
  Probe
ggtgctgttcttcatccacggagtg

SEQ ID NO: 215596 - DNA, 25 bp, Artificial
  Probe
cctggctcacttgaggtagagttgg

SEQ ID NO: 215597 - DNA, 25 bp, Artificial
  Probe
cactcgccatctggaaggagcagct

SEQ ID NO: 215598 - DNA, 25 bp, Artificial
  Probe
tcgccatctggaaggagcagctgga

SEQ ID NO: 215599 - DNA, 25 bp, Artificial
  Probe
cgccatctggaaggagcagctggac

SEQ ID NO: 215600 - DNA, 25 bp, Artificial
  Probe
gggtcaagacgggccttgtgcgctg

SEQ ID NO: 215601 - DNA, 25 bp, Artificial
  Probe
cgcctggctcacttgaggtagagtt

SEQ ID NO: 215602 - DNA, 25 bp, Artificial
  Probe
atccacatcgactgcgagcagcgca

SEQ ID NO: 215603 - DNA, 25 bp, Artificial
  Probe
aaagcatgcgtgccccgcgcccatc

SEQ ID NO: 215604 - DNA, 25 bp, Artificial
  Probe
actcgccatctggaaggagcagctg

SEQ ID NO: 215605 - DNA, 25 bp, Artificial
  Probe
cgcaggctgatgtggtgctgttctt

SEQ ID NO: 215606 - DNA, 25 bp, Artificial
  Probe
tcaagacgggccttgtgcgctgcca

SEQ ID NO: 215607 - DNA, 25 bp, Artificial
  Probe
cacagtgtaccgaaatgggaggctg

SEQ ID NO: 215608 - DNA, 25 bp, Artificial
  Probe
atgtggtgctgttcttcatccacgg

SEQ ID NO: 215609 - DNA, 25 bp, Artificial
  Probe
gaatcacagtgtaccgaaatgggag

SEQ ID NO: 215610 - DNA, 25 bp, Artificial
  Probe
gtgctgttcttcatccacggagtgg

SEQ ID NO: 215611 - DNA, 25 bp, Artificial
  Probe
tgctgcgggtaaagcatgcgtgccc

SEQ ID NO: 215612 - DNA, 25 bp, Artificial
  Probe
ccgcctggctcacttgaggtagagt

SEQ ID NO: 215613 - DNA, 25 bp, Artificial
  Probe
ggacccgcctggctcacttgaggta

SEQ ID NO: 215614 - DNA, 25 bp, Artificial
  Probe
ccatctggaaggagcagctggactt

SEQ ID NO: 215615 - DNA, 25 bp, Artificial
  Probe
gtggtgctgttcttcatccacggag

SEQ ID NO: 215616 - DNA, 25 bp, Artificial
  Probe
gatgtggtgctgttcttcatccacg

SEQ ID NO: 215617 - DNA, 25 bp, Artificial
  Probe
ctcactcgccatctggaaggagcag

SEQ ID NO: 215618 - DNA, 25 bp, Artificial
  Probe
ccgaatcacagtgtaccgaaatggg

SEQ ID NO: 215619 - DNA, 25 bp, Artificial
  Probe
cgccgaatcacagtgtaccgaaatg

SEQ ID NO: 215620 - DNA, 25 bp, Artificial
  Probe
tggtgctgttcttcatccacggagt

SEQ ID NO: 215621 - DNA, 25 bp, Artificial
  Probe
gccgaatcacagtgtaccgaaatgg

SEQ ID NO: 215622 - DNA, 25 bp, Artificial
  Probe
cccgcctggctcacttgaggtagag

SEQ ID NO: 215623 - DNA, 25 bp, Artificial
  Probe
tcactcgccatctggaaggagcagc

SEQ ID NO: 215624 - DNA, 25 bp, Artificial
  Probe
ggctgatgtggtgctgttcttcatc

SEQ ID NO: 215625 - DNA, 25 bp, Artificial
  Probe
aggctgatgtggtgctgttcttcat

SEQ ID NO: 215626 - DNA, 25 bp, Artificial
  Probe
cgaatcacagtgtaccgaaatggga

SEQ ID NO: 215627 - DNA, 25 bp, Artificial
  Probe
gccatctggaaggagcagctggact

SEQ ID NO: 215628 - DNA, 25 bp, Artificial
  Probe
gcaggctgatgtggtgctgttcttc

SEQ ID NO: 215629 - DNA, 25 bp, Artificial
  Probe
accatccacatcgactgcgagcagc

SEQ ID NO: 215630 - DNA, 25 bp, Artificial
  Probe
gcctggctcacttgaggtagagttg

SEQ ID NO: 215631 - DNA, 25 bp, Artificial
  Probe
caggctgatgtggtgctgttcttca

SEQ ID NO: 215632 - DNA, 25 bp, Artificial
  Probe
gctgatgtggtgctgttcttcatcc

SEQ ID NO: 215633 - DNA, 25 bp, Artificial
  Probe
gacccgcctggctcacttgaggtag

SEQ ID NO: 215634 - DNA, 25 bp, Artificial
  Probe
gaccatccacatcgactgcgagcag

SEQ ID NO: 215635 - DNA, 25 bp, Artificial
  Probe
ctcgccatctggaaggagcagctgg

SEQ ID NO: 215636 - DNA, 25 bp, Artificial
  Probe
ctgcgggtaaagcatgcgtgccccg

SEQ ID NO: 215637 - DNA, 25 bp, Artificial
  Probe
ttcattggagatgtaggcctgccca

SEQ ID NO: 215638 - DNA, 25 bp, Artificial
  Probe
cagtgcagcccagagtagcctaggg

SEQ ID NO: 215639 - DNA, 25 bp, Artificial
  Probe
caatgttctcataaggccataaagg

SEQ ID NO: 215640 - DNA, 25 bp, Artificial
  Probe
ggtttcattggagatgtaggcctgc

SEQ ID NO: 215641 - DNA, 25 bp, Artificial
  Probe
acaatgttctcataaggccataaag

SEQ ID NO: 215642 - DNA, 25 bp, Artificial
  Probe
cataaggccataaagggctggcaca

SEQ ID NO: 215643 - DNA, 25 bp, Artificial
  Probe
gccataaagggctggcacagttccc

SEQ ID NO: 215644 - DNA, 25 bp, Artificial
  Probe
gggctggcacagttccctagtaaat

SEQ ID NO: 215645 - DNA, 25 bp, Artificial
  Probe
tgtagacaatgttctcataaggcca

SEQ ID NO: 215646 - DNA, 25 bp, Artificial
  Probe
ccccattgtgcagctgaggtttcat

SEQ ID NO: 215647 - DNA, 25 bp, Artificial
  Probe
tcattggagatgtaggcctgcccag

SEQ ID NO: 215648 - DNA, 25 bp, Artificial
  Probe
tgcagcccagagtagcctaggggct

SEQ ID NO: 215649 - DNA, 25 bp, Artificial
  Probe
aacactttatgcagataaagatctg

SEQ ID NO: 215650 - DNA, 25 bp, Artificial
  Probe
ataaggccataaagggctggcacag

SEQ ID NO: 215651 - DNA, 25 bp, Artificial
  Probe
cttccccattgtgcagctgaggttt

SEQ ID NO: 215652 - DNA, 25 bp, Artificial
  Probe
aacttatttcttatatggccaagga

SEQ ID NO: 215653 - DNA, 25 bp, Artificial
  Probe
gtttcattggagatgtaggcctgcc

SEQ ID NO: 215654 - DNA, 25 bp, Artificial
  Probe
cattgtgcagctgaggtttcattgg

SEQ ID NO: 215655 - DNA, 25 bp, Artificial
  Probe
ttgtagacaatgttctcataaggcc

SEQ ID NO: 215656 - DNA, 25 bp, Artificial
  Probe
ctcataaggccataaagggctggca

SEQ ID NO: 215657 - DNA, 25 bp, Artificial
  Probe
tctcataaggccataaagggctggc

SEQ ID NO: 215658 - DNA, 25 bp, Artificial
  Probe
tccccattgtgcagctgaggtttca

SEQ ID NO: 215659 - DNA, 25 bp, Artificial
  Probe
gtaggcctgcccagtgcagcccaga

SEQ ID NO: 215660 - DNA, 25 bp, Artificial
  Probe
ggcacagttccctagtaaatcattt

SEQ ID NO: 215661 - DNA, 25 bp, Artificial
  Probe
taaagggctggcacagttccctagt

SEQ ID NO: 215662 - DNA, 25 bp, Artificial
  Probe
agacaatgttctcataaggccataa

SEQ ID NO: 215663 - DNA, 25 bp, Artificial
  Probe
taacttatttcttatatggccaagg

SEQ ID NO: 215664 - DNA, 25 bp, Artificial
  Probe
ccattgtgcagctgaggtttcattg

SEQ ID NO: 215665 - DNA, 25 bp, Artificial
  Probe
acttatttcttatatggccaaggat

SEQ ID NO: 215666 - DNA, 25 bp, Artificial
  Probe
aatgttctcataaggccataaaggg

SEQ ID NO: 215667 - DNA, 25 bp, Artificial
  Probe
tttgtagacaatgttctcataaggc

SEQ ID NO: 215668 - DNA, 25 bp, Artificial
  Probe
tagacaatgttctcataaggccata

SEQ ID NO: 215669 - DNA, 25 bp, Artificial
  Probe
taggcctgcccagtgcagcccagag

SEQ ID NO: 215670 - DNA, 25 bp, Artificial
  Probe
gtagacaatgttctcataaggccat

SEQ ID NO: 215671 - DNA, 25 bp, Artificial
  Probe
tcataaggccataaagggctggcac

SEQ ID NO: 215672 - DNA, 25 bp, Artificial
  Probe
aggcctgcccagtgcagcccagagt

SEQ ID NO: 215673 - DNA, 25 bp, Artificial
  Probe
aagggctggcacagttccctagtaa

SEQ ID NO: 215674 - DNA, 25 bp, Artificial
  Probe
gcctgcccagtgcagcccagagtag

SEQ ID NO: 215675 - DNA, 25 bp, Artificial
  Probe
ggcctgcccagtgcagcccagagta

SEQ ID NO: 215676 - DNA, 25 bp, Artificial
  Probe
acactttatgcagataaagatctga

SEQ ID NO: 215677 - DNA, 25 bp, Artificial
  Probe
cttatttcttatatggccaaggatg

SEQ ID NO: 215678 - DNA, 25 bp, Artificial
  Probe
ttccccattgtgcagctgaggtttc

SEQ ID NO: 215679 - DNA, 25 bp, Artificial
  Probe
gacaatgttctcataaggccataaa

SEQ ID NO: 215680 - DNA, 25 bp, Artificial
  Probe
ggctggcacagttccctagtaaatc

SEQ ID NO: 215681 - DNA, 25 bp, Artificial
  Probe
gagatgtaggcctgcccagtgcagc

SEQ ID NO: 215682 - DNA, 25 bp, Artificial
  Probe
aaagggctggcacagttccctagta

SEQ ID NO: 215683 - DNA, 25 bp, Artificial
  Probe
gctgccgagagtgaactgcatctgc

SEQ ID NO: 215684 - DNA, 25 bp, Artificial
  Probe
tcagcctttctctcagaccctgaag

SEQ ID NO: 215685 - DNA, 25 bp, Artificial
  Probe
atgcaggtcccatgcctctggtgcc

SEQ ID NO: 215686 - DNA, 25 bp, Artificial
  Probe
atttccagctgcacttgctcagctg

SEQ ID NO: 215687 - DNA, 25 bp, Artificial
  Probe
tgaggccatataaaccaaagacaga

SEQ ID NO: 215688 - DNA, 25 bp, Artificial
  Probe
cgcatgagcctcaggaagccgccta

SEQ ID NO: 215689 - DNA, 25 bp, Artificial
  Probe
gagcatcagccacctcatagactat

SEQ ID NO: 215690 - DNA, 25 bp, Artificial
  Probe
tctcagaccctgaagccacgagaac

SEQ ID NO: 215691 - DNA, 25 bp, Artificial
  Probe
ctgtggccccgaaggctcagccttt

SEQ ID NO: 215692 - DNA, 25 bp, Artificial
  Probe
gccatgagccaggtgacagtcgtca

SEQ ID NO: 215693 - DNA, 25 bp, Artificial
  Probe
tcacaggcatgcacgcggggcagcc

SEQ ID NO: 215694 - DNA, 25 bp, Artificial
  Probe
tgagcctcaggaagccgcctatttc

SEQ ID NO: 215695 - DNA, 25 bp, Artificial
  Probe
ctcatagactatcacctgaagaacg

SEQ ID NO: 215696 - DNA, 25 bp, Artificial
  Probe
tccttgtgagagacagcatcaccaa

SEQ ID NO: 215697 - DNA, 25 bp, Artificial
  Probe
gccagtgagacagagtcagggttca

SEQ ID NO: 215698 - DNA, 25 bp, Artificial
  Probe
agaatggttaccacctctccttccg

SEQ ID NO: 215699 - DNA, 25 bp, Artificial
  Probe
tttaacaaagacatccaaatgcagg

SEQ ID NO: 215700 - DNA, 25 bp, Artificial
  Probe
acgggttgcccatcgtggctgccga

SEQ ID NO: 215701 - DNA, 25 bp, Artificial
  Probe
agaaccagaatggttaccacctctc

SEQ ID NO: 215702 - DNA, 25 bp, Artificial
  Probe
tccttccgcatgagcctcaggaagc

SEQ ID NO: 215703 - DNA, 25 bp, Artificial
  Probe
aagacagaccgagtcgcctttaaca

SEQ ID NO: 215704 - DNA, 25 bp, Artificial
  Probe
gaaggctcagcctttctctcagacc

SEQ ID NO: 215705 - DNA, 25 bp, Artificial
  Probe
gtgagagacagcatcaccaacccgg

SEQ ID NO: 215706 - DNA, 25 bp, Artificial
  Probe
caggaagccgcctatttccagctgc

SEQ ID NO: 215707 - DNA, 25 bp, Artificial
  Probe
gagtcgcctttaacaaagacatcca

SEQ ID NO: 215708 - DNA, 25 bp, Artificial
  Probe
ctgaagaacgggttgcccatcgtgg

SEQ ID NO: 215709 - DNA, 25 bp, Artificial
  Probe
gaccgagtcgcctttaacaaagaca

SEQ ID NO: 215710 - DNA, 25 bp, Artificial
  Probe
gctgtggccccgaaggctcagcctt

SEQ ID NO: 215711 - DNA, 25 bp, Artificial
  Probe
acagcatcaccaacccggggcagta

SEQ ID NO: 215712 - DNA, 25 bp, Artificial
  Probe
tctctcagaccctgaagccacgaga

SEQ ID NO: 215713 - DNA, 25 bp, Artificial
  Probe
acagagtcagggttcaagcccctcg

SEQ ID NO: 215714 - DNA, 25 bp, Artificial
  Probe
tctccttccgcatgagcctcaggaa

SEQ ID NO: 215715 - DNA, 25 bp, Artificial
  Probe
gagacatcgggctgtgtccacagag

SEQ ID NO: 215716 - DNA, 25 bp, Artificial
  Probe
ctcgggagccatgagccaggtgaca

SEQ ID NO: 215717 - DNA, 25 bp, Artificial
  Probe
ctctcgggagccatgagccaggtga

SEQ ID NO: 215718 - DNA, 25 bp, Artificial
  Probe
gagtcagggttcaagcccctcgtcc

SEQ ID NO: 215719 - DNA, 25 bp, Artificial
  Probe
aacgggttgcccatcgtggctgccg

SEQ ID NO: 215720 - DNA, 25 bp, Artificial
  Probe
gtatgtcctcacaggcatgcacgcg

SEQ ID NO: 215721 - DNA, 25 bp, Artificial
  Probe
ccagtgagacagagtcagggttcaa

SEQ ID NO: 215722 - DNA, 25 bp, Artificial
  Probe
gtgacagtcgtcagcccttgctgtg

SEQ ID NO: 215723 - DNA, 25 bp, Artificial
  Probe
ctcacaggcatgcacgcggggcagc

SEQ ID NO: 215724 - DNA, 25 bp, Artificial
  Probe
gcccatcgtggctgccgagagtgaa

SEQ ID NO: 215725 - DNA, 25 bp, Artificial
  Probe
gaaccagaatggttaccacctctcc

SEQ ID NO: 215726 - DNA, 25 bp, Artificial
  Probe
caacccggggcagtatgtcctcaca

SEQ ID NO: 215727 - DNA, 25 bp, Artificial
  Probe
agagcatcagccacctcatagacta

SEQ ID NO: 215728 - DNA, 25 bp, Artificial
  Probe
gaccctgaagccacgagaaccagaa

SEQ ID NO: 215729 - DNA, 25 bp, Artificial
  Probe
tcaaaagccccgtgagagaggtttc

SEQ ID NO: 215730 - DNA, 25 bp, Artificial
  Probe
gagaggtttccttcaagttcaaatt

SEQ ID NO: 215731 - DNA, 25 bp, Artificial
  Probe
aggaaaccctgagcttgccctgcgc

SEQ ID NO: 215732 - DNA, 25 bp, Artificial
  Probe
ttcctagtcaggaagagtaccacca

SEQ ID NO: 215733 - DNA, 25 bp, Artificial
  Probe
acctcattacttaccacctggagag

SEQ ID NO: 215734 - DNA, 25 bp, Artificial
  Probe
ctttgtcctcacaggcatgcacaat

SEQ ID NO: 215735 - DNA, 25 bp, Artificial
  Probe
tgagagaggtttccttcaagttcaa

SEQ ID NO: 215736 - DNA, 25 bp, Artificial
  Probe
tgttgagcaaagctgcgtctgtgga

SEQ ID NO: 215737 - DNA, 25 bp, Artificial
  Probe
gaggcagaggctctactacaggaag

SEQ ID NO: 215738 - DNA, 25 bp, Artificial
  Probe
cggcaaccagtggagaggaaaccct

SEQ ID NO: 215739 - DNA, 25 bp, Artificial
  Probe
ccccgtgagagaggtttccttcaag

SEQ ID NO: 215740 - DNA, 25 bp, Artificial
  Probe
aatctggggcaactgtctgtgggcc

SEQ ID NO: 215741 - DNA, 25 bp, Artificial
  Probe
cccaggtcaggaggacctgggctcc

SEQ ID NO: 215742 - DNA, 25 bp, Artificial
  Probe
gcccattgtctctgccgggagtgag

SEQ ID NO: 215743 - DNA, 25 bp, Artificial
  Probe
tgcacaatggccaggccaagcacct

SEQ ID NO: 215744 - DNA, 25 bp, Artificial
  Probe
cggctcctttgtcctcacaggcatg

SEQ ID NO: 215745 - DNA, 25 bp, Artificial
  Probe
ggagcttaatgctgagccctggtac

SEQ ID NO: 215746 - DNA, 25 bp, Artificial
  Probe
aatggccaggccaagcacctgctgc

SEQ ID NO: 215747 - DNA, 25 bp, Artificial
  Probe
ggctccgctgctctcagcctatgga

SEQ ID NO: 215748 - DNA, 25 bp, Artificial
  Probe
gggagtgagctttgtctccggcaac

SEQ ID NO: 215749 - DNA, 25 bp, Artificial
  Probe
gcctatggaatctggggcaactgtc

SEQ ID NO: 215750 - DNA, 25 bp, Artificial
  Probe
gtctgtgggcccatcaccttcttca

SEQ ID NO: 215751 - DNA, 25 bp, Artificial
  Probe
tgccctgcgcccaggtcaggaggac

SEQ ID NO: 215752 - DNA, 25 bp, Artificial
  Probe
aagatggagacttcctagtcaggaa

SEQ ID NO: 215753 - DNA, 25 bp, Artificial
  Probe
cctgcgcccaggtcaggaggacctg

SEQ ID NO: 215754 - DNA, 25 bp, Artificial
  Probe
tttgtctccggcaaccagtggagag

SEQ ID NO: 215755 - DNA, 25 bp, Artificial
  Probe
ccccggacgccaagatgctggagga

SEQ ID NO: 215756 - DNA, 25 bp, Artificial
  Probe
gggtctttgacagcatcagtcacct

SEQ ID NO: 215757 - DNA, 25 bp, Artificial
  Probe
gccctggtaccaaggcgagatgagc

SEQ ID NO: 215758 - DNA, 25 bp, Artificial
  Probe
taaatatgttcacacgactcagatg

SEQ ID NO: 215759 - DNA, 25 bp, Artificial
  Probe
caccttcttcaaaagccccgtgaga

SEQ ID NO: 215760 - DNA, 25 bp, Artificial
  Probe
aaggacagggtctttgacagcatca

SEQ ID NO: 215761 - DNA, 25 bp, Artificial
  Probe
tgggcccatcaccttcttcaaaagc

SEQ ID NO: 215762 - DNA, 25 bp, Artificial
  Probe
tccggacgaaggacagggtctttga

SEQ ID NO: 215763 - DNA, 25 bp, Artificial
  Probe
ctcacaggcatgcacaatggccagg

SEQ ID NO: 215764 - DNA, 25 bp, Artificial
  Probe
cacctggagagcagcctgcccattg

SEQ ID NO: 215765 - DNA, 25 bp, Artificial
  Probe
gtgagctttgtctccggcaaccagt

SEQ ID NO: 215766 - DNA, 25 bp, Artificial
  Probe
ggcaactgtctgtgggcccatcacc

SEQ ID NO: 215767 - DNA, 25 bp, Artificial
  Probe
atgctggaggagcttaatgctgagc

SEQ ID NO: 215768 - DNA, 25 bp, Artificial
  Probe
tggagagcagcctgcccattgtctc

SEQ ID NO: 215769 - DNA, 25 bp, Artificial
  Probe
ctactacaggaagatggagacttcc

SEQ ID NO: 215770 - DNA, 25 bp, Artificial
  Probe
aggcatgcacaatggccaggccaag

SEQ ID NO: 215771 - DNA, 25 bp, Artificial
  Probe
cgtctgtggagtgtatcagccccgt

SEQ ID NO: 215772 - DNA, 25 bp, Artificial
  Probe
gtctctgccgggagtgagctttgtc

SEQ ID NO: 215773 - DNA, 25 bp, Artificial
  Probe
agcctgcccattgtctctgccggga

SEQ ID NO: 215774 - DNA, 25 bp, Artificial
  Probe
acttaccacctggagagcagcctgc

SEQ ID NO: 215775 - DNA, 25 bp, Artificial
  Probe
atcgctcattgctctacacccgaag

SEQ ID NO: 215776 - DNA, 25 bp, Artificial
  Probe
ggcagaacctcagtttggggattag

SEQ ID NO: 215777 - DNA, 25 bp, Artificial
  Probe
cagggtccacgcagattgatctgct

SEQ ID NO: 215778 - DNA, 25 bp, Artificial
  Probe
ggggctactggcagctttgcagctc

SEQ ID NO: 215779 - DNA, 25 bp, Artificial
  Probe
aggcagaacctcagtttggggatta

SEQ ID NO: 215780 - DNA, 25 bp, Artificial
  Probe
cagaacctcagtttggggattagag

SEQ ID NO: 215781 - DNA, 25 bp, Artificial
  Probe
tccgggaccagaaccacaagcagac

SEQ ID NO: 215782 - DNA, 25 bp, Artificial
  Probe
cgcagattgatctgcttgtgcgccc

SEQ ID NO: 215783 - DNA, 25 bp, Artificial
  Probe
cagattgatctgcttgtgcgcccac

SEQ ID NO: 215784 - DNA, 25 bp, Artificial
  Probe
gaccagaaccacaagcagacagtga

SEQ ID NO: 215785 - DNA, 25 bp, Artificial
  Probe
aaagtcgagcatcaacacatgacag

SEQ ID NO: 215786 - DNA, 25 bp, Artificial
  Probe
acaaagtcgagcatcaacacatgac

SEQ ID NO: 215787 - DNA, 25 bp, Artificial
  Probe
gagcatcaacacatgacagcacatc

SEQ ID NO: 215788 - DNA, 25 bp, Artificial
  Probe
cgagcatcaacacatgacagcacat

SEQ ID NO: 215789 - DNA, 25 bp, Artificial
  Probe
agtcgagcatcaacacatgacagca

SEQ ID NO: 215790 - DNA, 25 bp, Artificial
  Probe
ggaccagaaccacaagcagacagtg

SEQ ID NO: 215791 - DNA, 25 bp, Artificial
  Probe
ttattggggctactggcagctttgc

SEQ ID NO: 215792 - DNA, 25 bp, Artificial
  Probe
tgacagcacatcccatctctccgcc

SEQ ID NO: 215793 - DNA, 25 bp, Artificial
  Probe
gaggcagaacctcagtttggggatt

SEQ ID NO: 215794 - DNA, 25 bp, Artificial
  Probe
ggtccacgcagattgatctgcttgt

SEQ ID NO: 215795 - DNA, 25 bp, Artificial
  Probe
gtcgagcatcaacacatgacagcac

SEQ ID NO: 215796 - DNA, 25 bp, Artificial
  Probe
agatgcttgctgtggtggtgtttgc

SEQ ID NO: 215797 - DNA, 25 bp, Artificial
  Probe
tcgagcatcaacacatgacagcaca

SEQ ID NO: 215798 - DNA, 25 bp, Artificial
  Probe
cacccgaagccgtagccaagcggga

SEQ ID NO: 215799 - DNA, 25 bp, Artificial
  Probe
accagaaccacaagcagacagtgaa

SEQ ID NO: 215800 - DNA, 25 bp, Artificial
  Probe
tattggggctactggcagctttgca

SEQ ID NO: 215801 - DNA, 25 bp, Artificial
  Probe
agagcactcatgtgcaacccctgca

SEQ ID NO: 215802 - DNA, 25 bp, Artificial
  Probe
gggtccacgcagattgatctgcttg

SEQ ID NO: 215803 - DNA, 25 bp, Artificial
  Probe
ccgggaccagaaccacaagcagaca

SEQ ID NO: 215804 - DNA, 25 bp, Artificial
  Probe
agggtccacgcagattgatctgctt

SEQ ID NO: 215805 - DNA, 25 bp, Artificial
  Probe
tattattggggctactggcagcttt

SEQ ID NO: 215806 - DNA, 25 bp, Artificial
  Probe
attattggggctactggcagctttg

SEQ ID NO: 215807 - DNA, 25 bp, Artificial
  Probe
ttagagacaaatgggtctggaaaca

SEQ ID NO: 215808 - DNA, 25 bp, Artificial
  Probe
tctccgccatcgctcattgctctac

SEQ ID NO: 215809 - DNA, 25 bp, Artificial
  Probe
ccagaaccacaagcagacagtgaag

SEQ ID NO: 215810 - DNA, 25 bp, Artificial
  Probe
gggaccagaaccacaagcagacagt

SEQ ID NO: 215811 - DNA, 25 bp, Artificial
  Probe
cgggaccagaaccacaagcagacag

SEQ ID NO: 215812 - DNA, 25 bp, Artificial
  Probe
ctccgggaccagaaccacaagcaga

SEQ ID NO: 215813 - DNA, 25 bp, Artificial
  Probe
gcagattgatctgcttgtgcgccca

SEQ ID NO: 215814 - DNA, 25 bp, Artificial
  Probe
tctggaaacaattgggggtggggag

SEQ ID NO: 215815 - DNA, 25 bp, Artificial
  Probe
tcattgctctacacccgaagccgta

SEQ ID NO: 215816 - DNA, 25 bp, Artificial
  Probe
acgcagattgatctgcttgtgcgcc

SEQ ID NO: 215817 - DNA, 25 bp, Artificial
  Probe
gcagaacctcagtttggggattaga

SEQ ID NO: 215818 - DNA, 25 bp, Artificial
  Probe
aagtcgagcatcaacacatgacagc

SEQ ID NO: 215819 - DNA, 25 bp, Artificial
  Probe
gggctactggcagctttgcagctca

SEQ ID NO: 215820 - DNA, 25 bp, Artificial
  Probe
caaagtcgagcatcaacacatgaca

SEQ ID NO: 215821 - DNA, 25 bp, Artificial
  Probe
gctgttctgctctttagccactcta

SEQ ID NO: 215822 - DNA, 25 bp, Artificial
  Probe
ttaaagctccccttggctgttctgc

SEQ ID NO: 215823 - DNA, 25 bp, Artificial
  Probe
ccatgtgagctctttgagaagagtg

SEQ ID NO: 215824 - DNA, 25 bp, Artificial
  Probe
ccaagtgttgggttacggacattag

SEQ ID NO: 215825 - DNA, 25 bp, Artificial
  Probe
taaagctccccttggctgttctgct

SEQ ID NO: 215826 - DNA, 25 bp, Artificial
  Probe
agtgatgactactgggcttttagct

SEQ ID NO: 215827 - DNA, 25 bp, Artificial
  Probe
gtctgcacctggttgcgtctctgcc

SEQ ID NO: 215828 - DNA, 25 bp, Artificial
  Probe
gagtgatgactactgggcttttagc

SEQ ID NO: 215829 - DNA, 25 bp, Artificial
  Probe
gtactccatgctgtccttgaaccca

SEQ ID NO: 215830 - DNA, 25 bp, Artificial
  Probe
agcatccattgcagcacaaactaag

SEQ ID NO: 215831 - DNA, 25 bp, Artificial
  Probe
tccatgctgtccttgaacccacaag

SEQ ID NO: 215832 - DNA, 25 bp, Artificial
  Probe
ctgccatggtctatccccggctatt

SEQ ID NO: 215833 - DNA, 25 bp, Artificial
  Probe
ttttctctaggaaagtgaatctctc

SEQ ID NO: 215834 - DNA, 25 bp, Artificial
  Probe
tgccatggtctatccccggctattt

SEQ ID NO: 215835 - DNA, 25 bp, Artificial
  Probe
ttagtctttctatctcctgccatgg

SEQ ID NO: 215836 - DNA, 25 bp, Artificial
  Probe
gtctttctatctcctgccatggtct

SEQ ID NO: 215837 - DNA, 25 bp, Artificial
  Probe
caagtgttgggttacggacattagc

SEQ ID NO: 215838 - DNA, 25 bp, Artificial
  Probe
cagattgaatctggaccatgtggta

SEQ ID NO: 215839 - DNA, 25 bp, Artificial
  Probe
tgctctttagccactctaaagtgga

SEQ ID NO: 215840 - DNA, 25 bp, Artificial
  Probe
ctggtctgcacctggtctgcacctg

SEQ ID NO: 215841 - DNA, 25 bp, Artificial
  Probe
tcttttcctttttgggacacagtct

SEQ ID NO: 215842 - DNA, 25 bp, Artificial
  Probe
ccattgcagcacaaactaagtgact

SEQ ID NO: 215843 - DNA, 25 bp, Artificial
  Probe
acctggttgcgtctctgcctgacca

SEQ ID NO: 215844 - DNA, 25 bp, Artificial
  Probe
cttaatcttttctctaggaaagtga

SEQ ID NO: 215845 - DNA, 25 bp, Artificial
  Probe
gttctgctctttagccactctaaag

SEQ ID NO: 215846 - DNA, 25 bp, Artificial
  Probe
tagctcttttcctttttgggacaca

SEQ ID NO: 215847 - DNA, 25 bp, Artificial
  Probe
aatcttttctctaggaaagtgaatc

SEQ ID NO: 215848 - DNA, 25 bp, Artificial
  Probe
gtgaatctctccttgccttacagca

SEQ ID NO: 215849 - DNA, 25 bp, Artificial
  Probe
tctcagattgaatctggaccatgtg

SEQ ID NO: 215850 - DNA, 25 bp, Artificial
  Probe
cgtctctgcctgaccatgtgagctc

SEQ ID NO: 215851 - DNA, 25 bp, Artificial
  Probe
agcacaaactaagtgactgtgcacc

SEQ ID NO: 215852 - DNA, 25 bp, Artificial
  Probe
tcaccttcccaagtgttgggttacg

SEQ ID NO: 215853 - DNA, 25 bp, Artificial
  Probe
gtctaagcatccattgcagcacaaa

SEQ ID NO: 215854 - DNA, 25 bp, Artificial
  Probe
tcttaatcttttctctaggaaagtg

SEQ ID NO: 215855 - DNA, 25 bp, Artificial
  Probe
ttctcagattgaatctggaccatgt

SEQ ID NO: 215856 - DNA, 25 bp, Artificial
  Probe
ttcctttttgggacacagtcttgct

SEQ ID NO: 215857 - DNA, 25 bp, Artificial
  Probe
gcattttaaagctccccttggctgt

SEQ ID NO: 215858 - DNA, 25 bp, Artificial
  Probe
tgactactgggcttttagctctttt

SEQ ID NO: 215859 - DNA, 25 bp, Artificial
  Probe
ggaaagtgaatctctccttgcctta

SEQ ID NO: 215860 - DNA, 25 bp, Artificial
  Probe
gcacctggtctgcacctggtctgca

SEQ ID NO: 215861 - DNA, 25 bp, Artificial
  Probe
gctccccttggctgttctgctcttt

SEQ ID NO: 215862 - DNA, 25 bp, Artificial
  Probe
ctatatattctcagattgaatctgg

SEQ ID NO: 215863 - DNA, 25 bp, Artificial
  Probe
ctgcctgaccatgtgagctctttga

SEQ ID NO: 215864 - DNA, 25 bp, Artificial
  Probe
tacagcattttaaagctccccttgg

SEQ ID NO: 215865 - DNA, 25 bp, Artificial
  Probe
atattctcagattgaatctggacca

SEQ ID NO: 215866 - DNA, 25 bp, Artificial
  Probe
ctactgggcttttagctcttttcct

SEQ ID NO: 215867 - DNA, 25 bp, Artificial
  Probe
ccccagaagaggagcacatgggcaa

SEQ ID NO: 215868 - DNA, 25 bp, Artificial
  Probe
atgggcaagaccacgtcactcatcg

SEQ ID NO: 215869 - DNA, 25 bp, Artificial
  Probe
tgagcagatgtttgagcagaactgc

SEQ ID NO: 215870 - DNA, 25 bp, Artificial
  Probe
gcttagaaaagaccactgggttatc

SEQ ID NO: 215871 - DNA, 25 bp, Artificial
  Probe
gggttatcctatcttgtggatgatc

SEQ ID NO: 215872 - DNA, 25 bp, Artificial
  Probe
tcaagaaccacgagtttattgatga

SEQ ID NO: 215873 - DNA, 25 bp, Artificial
  Probe
ctgggttatcctatcttgtggatga

SEQ ID NO: 215874 - DNA, 25 bp, Artificial
  Probe
tgcaagagctcagcaccatccacat

SEQ ID NO: 215875 - DNA, 25 bp, Artificial
  Probe
caagaaccacgagtttattgatgag

SEQ ID NO: 215876 - DNA, 25 bp, Artificial
  Probe
agagctcaatgcagaactacccatc

SEQ ID NO: 215877 - DNA, 25 bp, Artificial
  Probe
acatccagggcagtgagcagccctc

SEQ ID NO: 215878 - DNA, 25 bp, Artificial
  Probe
cacatccagggcagtgagcagccct

SEQ ID NO: 215879 - DNA, 25 bp, Artificial
  Probe
acactgcttagaaaagaccactggg

SEQ ID NO: 215880 - DNA, 25 bp, Artificial
  Probe
ccatccacatccagggcagtgagca

SEQ ID NO: 215881 - DNA, 25 bp, Artificial
  Probe
tgcttagaaaagaccactgggttat

SEQ ID NO: 215882 - DNA, 25 bp, Artificial
  Probe
gcatgcaagagctcagcaccatcca

SEQ ID NO: 215883 - DNA, 25 bp, Artificial
  Probe
tcttgtggatgatcccctgttgtct

SEQ ID NO: 215884 - DNA, 25 bp, Artificial
  Probe
gaccacgtcactcatcgagagccag

SEQ ID NO: 215885 - DNA, 25 bp, Artificial
  Probe
gagaccaaactgcaaaacatcccag

SEQ ID NO: 215886 - DNA, 25 bp, Artificial
  Probe
ccatcaagaaccacgagtttattga

SEQ ID NO: 215887 - DNA, 25 bp, Artificial
  Probe
aagaccactgggttatcctatcttg

SEQ ID NO: 215888 - DNA, 25 bp, Artificial
  Probe
atcccctgttgtctgtacgaacctc

SEQ ID NO: 215889 - DNA, 25 bp, Artificial
  Probe
taatttgaaagcagacgacggactg

SEQ ID NO: 215890 - DNA, 25 bp, Artificial
  Probe
gactgagaccaaactgcaaaacatc

SEQ ID NO: 215891 - DNA, 25 bp, Artificial
  Probe
caccatccacatccagggcagtgag

SEQ ID NO: 215892 - DNA, 25 bp, Artificial
  Probe
accatcaagaaccacgagtttattg

SEQ ID NO: 215893 - DNA, 25 bp, Artificial
  Probe
tgaaagcagacgacggactgagacc

SEQ ID NO: 215894 - DNA, 25 bp, Artificial
  Probe
gcgcagcatgcaagagctcagcacc

SEQ ID NO: 215895 - DNA, 25 bp, Artificial
  Probe
acatgggcaagaccacgtcactcat

SEQ ID NO: 215896 - DNA, 25 bp, Artificial
  Probe
agccttaatttgaaagcagacgacg

SEQ ID NO: 215897 - DNA, 25 bp, Artificial
  Probe
catggagagctcaatgcagaactac

SEQ ID NO: 215898 - DNA, 25 bp, Artificial
  Probe
gtcgctccagccttaatttgaaagc

SEQ ID NO: 215899 - DNA, 25 bp, Artificial
  Probe
tggatgatcccctgttgtctgtacg

SEQ ID NO: 215900 - DNA, 25 bp, Artificial
  Probe
agcagacgacggactgagaccaaac

SEQ ID NO: 215901 - DNA, 25 bp, Artificial
  Probe
agctctaaccccagagggagaaagt

SEQ ID NO: 215902 - DNA, 25 bp, Artificial
  Probe
gagctcaatgcagaactacccatcc

SEQ ID NO: 215903 - DNA, 25 bp, Artificial
  Probe
ttagaaaagaccactgggttatcct

SEQ ID NO: 215904 - DNA, 25 bp, Artificial
  Probe
atttgaaagcagacgacggactgag

SEQ ID NO: 215905 - DNA, 25 bp, Artificial
  Probe
tagaaaagaccactgggttatccta

SEQ ID NO: 215906 - DNA, 25 bp, Artificial
  Probe
ccacctgctacactgcttagaaaag

SEQ ID NO: 215907 - DNA, 25 bp, Artificial
  Probe
ttgagcagaactgcatggagagctc

SEQ ID NO: 215908 - DNA, 25 bp, Artificial
  Probe
gagcacatgggcaagaccacgtcac

SEQ ID NO: 215909 - DNA, 25 bp, Artificial
  Probe
accacgagtttattgatgagcagat

SEQ ID NO: 215910 - DNA, 25 bp, Artificial
  Probe
agaaccacgagtttattgatgagca

SEQ ID NO: 215911 - DNA, 25 bp, Artificial
  Probe
aagaggagcacatgggcaagaccac

SEQ ID NO: 215912 - DNA, 25 bp, Artificial
  Probe
atgcaagagctcagcaccatccaca

SEQ ID NO: 215913 - DNA, 25 bp, Artificial
  Probe
ggattcaacccatctttcagatgaa

SEQ ID NO: 215914 - DNA, 25 bp, Artificial
  Probe
catttgaatatggacctgtgggctt

SEQ ID NO: 215915 - DNA, 25 bp, Artificial
  Probe
tccgggaaggaccacggttcacagt

SEQ ID NO: 215916 - DNA, 25 bp, Artificial
  Probe
cagcacattggcttcctgaggagtc

SEQ ID NO: 215917 - DNA, 25 bp, Artificial
  Probe
ccagttggggcctgcagctacatcc

SEQ ID NO: 215918 - DNA, 25 bp, Artificial
  Probe
cacggttcacagtggcacctagaag

SEQ ID NO: 215919 - DNA, 25 bp, Artificial
  Probe
gtggcacctagaagggaatgccaga

SEQ ID NO: 215920 - DNA, 25 bp, Artificial
  Probe
tttctgtccccatgtttgggacagg

SEQ ID NO: 215921 - DNA, 25 bp, Artificial
  Probe
gggcctgcagctacatccccagaaa

SEQ ID NO: 215922 - DNA, 25 bp, Artificial
  Probe
gacttgttggaatctgcaaatggac

SEQ ID NO: 215923 - DNA, 25 bp, Artificial
  Probe
gttcacagtggcacctagaagggaa

SEQ ID NO: 215924 - DNA, 25 bp, Artificial
  Probe
gaaggaccacggttcacagtggcac

SEQ ID NO: 215925 - DNA, 25 bp, Artificial
  Probe
aagcagagacttgttggaatctgca

SEQ ID NO: 215926 - DNA, 25 bp, Artificial
  Probe
aaggaccacggttcacagtggcacc

SEQ ID NO: 215927 - DNA, 25 bp, Artificial
  Probe
tatggttctgtaagctacagtgaca

SEQ ID NO: 215928 - DNA, 25 bp, Artificial
  Probe
gactcagcacattggcttcctgagg

SEQ ID NO: 215929 - DNA, 25 bp, Artificial
  Probe
ccgccctggaacagttgctggagaa

SEQ ID NO: 215930 - DNA, 25 bp, Artificial
  Probe
ggaatgccagaatgccacttctccc

SEQ ID NO: 215931 - DNA, 25 bp, Artificial
  Probe
gtatggttctgtaagctacagtgac

SEQ ID NO: 215932 - DNA, 25 bp, Artificial
  Probe
attggcttcctgaggagtccgggaa

SEQ ID NO: 215933 - DNA, 25 bp, Artificial
  Probe
aggattcaacccatctttcagatga

SEQ ID NO: 215934 - DNA, 25 bp, Artificial
  Probe
cctgtgggcttatgaaactgtggga

SEQ ID NO: 215935 - DNA, 25 bp, Artificial
  Probe
ggacctgtgggcttatgaaactgtg

SEQ ID NO: 215936 - DNA, 25 bp, Artificial
  Probe
cttcattaaaccattaagagagaga

SEQ ID NO: 215937 - DNA, 25 bp, Artificial
  Probe
ccatgtttgggacaggaaagcagag

SEQ ID NO: 215938 - DNA, 25 bp, Artificial
  Probe
tgtccccatgtttgggacaggaaag

SEQ ID NO: 215939 - DNA, 25 bp, Artificial
  Probe
ccagggatcccctaaagcctatagc

SEQ ID NO: 215940 - DNA, 25 bp, Artificial
  Probe
acatttgaatatggacctgtgggct

SEQ ID NO: 215941 - DNA, 25 bp, Artificial
  Probe
cacctagaagggaatgccagaatgc

SEQ ID NO: 215942 - DNA, 25 bp, Artificial
  Probe
gaataaacagcgtatctgacaccag

SEQ ID NO: 215943 - DNA, 25 bp, Artificial
  Probe
gtccgggaaggaccacggttcacag

SEQ ID NO: 215944 - DNA, 25 bp, Artificial
  Probe
tatagcccatcctcctgtggaataa

SEQ ID NO: 215945 - DNA, 25 bp, Artificial
  Probe
gatgaacagcaataccctcatcctg

SEQ ID NO: 215946 - DNA, 25 bp, Artificial
  Probe
gggatcccctaaagcctatagccca

SEQ ID NO: 215947 - DNA, 25 bp, Artificial
  Probe
attcctgctgggtatggtggtacat

SEQ ID NO: 215948 - DNA, 25 bp, Artificial
  Probe
cctggaacagttgctggagaaagag

SEQ ID NO: 215949 - DNA, 25 bp, Artificial
  Probe
ctgtccccatgtttgggacaggaaa

SEQ ID NO: 215950 - DNA, 25 bp, Artificial
  Probe
tgttggaatctgcaaatggactcag

SEQ ID NO: 215951 - DNA, 25 bp, Artificial
  Probe
aaagcagagacttgttggaatctgc

SEQ ID NO: 215952 - DNA, 25 bp, Artificial
  Probe
gaatctgcaaatggactcagcacat

SEQ ID NO: 215953 - DNA, 25 bp, Artificial
  Probe
cccatgtttgggacaggaaagcaga

SEQ ID NO: 215954 - DNA, 25 bp, Artificial
  Probe
taaaccattaagagagagagattcc

SEQ ID NO: 215955 - DNA, 25 bp, Artificial
  Probe
cctcctgtggaataaacagcgtatc

SEQ ID NO: 215956 - DNA, 25 bp, Artificial
  Probe
ctgtaagctacagtgacatttgaat

SEQ ID NO: 215957 - DNA, 25 bp, Artificial
  Probe
gcctatagcccatcctcctgtggaa

SEQ ID NO: 215958 - DNA, 25 bp, Artificial
  Probe
cagggatcccctaaagcctatagcc

SEQ ID NO: 215959 - DNA, 25 bp, Artificial
  Probe
atttctgttcaggaaatcctgtagt

SEQ ID NO: 215960 - DNA, 25 bp, Artificial
  Probe
aacattcagggtcctctcatttctg

SEQ ID NO: 215961 - DNA, 25 bp, Artificial
  Probe
ttggaccactgctgcttttcacgat

SEQ ID NO: 215962 - DNA, 25 bp, Artificial
  Probe
ggaccactgctgcttttcacgattg

SEQ ID NO: 215963 - DNA, 25 bp, Artificial
  Probe
ctcatttctgttcaggaaatcctgt

SEQ ID NO: 215964 - DNA, 25 bp, Artificial
  Probe
cagggtcctctcatttctgttcagg

SEQ ID NO: 215965 - DNA, 25 bp, Artificial
  Probe
tttcacgattgtcagctggttttat

SEQ ID NO: 215966 - DNA, 25 bp, Artificial
  Probe
cttttcacgattgtcagctggtttt

SEQ ID NO: 215967 - DNA, 25 bp, Artificial
  Probe
agccccgtagcctaactgctgttat

SEQ ID NO: 215968 - DNA, 25 bp, Artificial
  Probe
tcagctggttttatgttaagccccg

SEQ ID NO: 215969 - DNA, 25 bp, Artificial
  Probe
gccccgtagcctaactgctgttatt

SEQ ID NO: 215970 - DNA, 25 bp, Artificial
  Probe
gtgaatattggaccactgctgcttt

SEQ ID NO: 215971 - DNA, 25 bp, Artificial
  Probe
accactgctgcttttcacgattgtc

SEQ ID NO: 215972 - DNA, 25 bp, Artificial
  Probe
gttaagccccgtagcctaactgctg

SEQ ID NO: 215973 - DNA, 25 bp, Artificial
  Probe
tctgttcaggaaatcctgtagttta

SEQ ID NO: 215974 - DNA, 25 bp, Artificial
  Probe
tgtaaaacattcagggtcctctcat

SEQ ID NO: 215975 - DNA, 25 bp, Artificial
  Probe
cactgctgcttttcacgattgtcag

SEQ ID NO: 215976 - DNA, 25 bp, Artificial
  Probe
tgctgttatttctaactgacagaca

SEQ ID NO: 215977 - DNA, 25 bp, Artificial
  Probe
tcacgattgtcagctggttttatgt

SEQ ID NO: 215978 - DNA, 25 bp, Artificial
  Probe
ttgtcagctggttttatgttaagcc

SEQ ID NO: 215979 - DNA, 25 bp, Artificial
  Probe
cactgtaaaacattcagggtcctct

SEQ ID NO: 215980 - DNA, 25 bp, Artificial
  Probe
gtagcctaactgctgttatttctaa

SEQ ID NO: 215981 - DNA, 25 bp, Artificial
  Probe
tctcatttctgttcaggaaatcctg

SEQ ID NO: 215982 - DNA, 25 bp, Artificial
  Probe
aactgctgttatttctaactgacag

SEQ ID NO: 215983 - DNA, 25 bp, Artificial
  Probe
tcactgtaaaacattcagggtcctc

SEQ ID NO: 215984 - DNA, 25 bp, Artificial
  Probe
actgctgttatttctaactgacaga

SEQ ID NO: 215985 - DNA, 25 bp, Artificial
  Probe
ctgttatttctaactgacagacatg

SEQ ID NO: 215986 - DNA, 25 bp, Artificial
  Probe
gcctaactgctgttatttctaactg

SEQ ID NO: 215987 - DNA, 25 bp, Artificial
  Probe
gtcctctcatttctgttcaggaaat

SEQ ID NO: 215988 - DNA, 25 bp, Artificial
  Probe
cattcagggtcctctcatttctgtt

SEQ ID NO: 215989 - DNA, 25 bp, Artificial
  Probe
gaatattggaccactgctgcttttc

SEQ ID NO: 215990 - DNA, 25 bp, Artificial
  Probe
ggtcctctcatttctgttcaggaaa

SEQ ID NO: 215991 - DNA, 25 bp, Artificial
  Probe
tgtcagctggttttatgttaagccc

SEQ ID NO: 215992 - DNA, 25 bp, Artificial
  Probe
gggtcctctcatttctgttcaggaa

SEQ ID NO: 215993 - DNA, 25 bp, Artificial
  Probe
attcactgtaaaacattcagggtcc

SEQ ID NO: 215994 - DNA, 25 bp, Artificial
  Probe
tgctgcttttcacgattgtcagctg

SEQ ID NO: 215995 - DNA, 25 bp, Artificial
  Probe
tgttaagccccgtagcctaactgct

SEQ ID NO: 215996 - DNA, 25 bp, Artificial
  Probe
tgccattcactgtaaaacattcagg

SEQ ID NO: 215997 - DNA, 25 bp, Artificial
  Probe
tattggaccactgctgcttttcacg

SEQ ID NO: 215998 - DNA, 25 bp, Artificial
  Probe
ttcagggtcctctcatttctgttca

SEQ ID NO: 215999 - DNA, 25 bp, Artificial
  Probe
atattggaccactgctgcttttcac

SEQ ID NO: 216000 - DNA, 25 bp, Artificial
  Probe
tgcttttcacgattgtcagctggtt

SEQ ID NO: 216001 - DNA, 25 bp, Artificial
  Probe
cacgattgtcagctggttttatgtt

SEQ ID NO: 216002 - DNA, 25 bp, Artificial
  Probe
gttatttctaactgacagacatgta

SEQ ID NO: 216003 - DNA, 25 bp, Artificial
  Probe
catttctgttcaggaaatcctgtag

SEQ ID NO: 216004 - DNA, 25 bp, Artificial
  Probe
ctgctgcttttcacgattgtcagct

SEQ ID NO: 216005 - DNA, 25 bp, Artificial
  Probe
agctaacctttcgaagttatgacag

SEQ ID NO: 216006 - DNA, 25 bp, Artificial
  Probe
cattctgttcctttagcagaggtag

SEQ ID NO: 216007 - DNA, 25 bp, Artificial
  Probe
ttctgttcctttagcagaggtagct

SEQ ID NO: 216008 - DNA, 25 bp, Artificial
  Probe
gggttggagcgcattcatagttacc

SEQ ID NO: 216009 - DNA, 25 bp, Artificial
  Probe
tagctaacctttcgaagttatgaca

SEQ ID NO: 216010 - DNA, 25 bp, Artificial
  Probe
cctttagcagaggtagctaaccttt

SEQ ID NO: 216011 - DNA, 25 bp, Artificial
  Probe
actgttttgggttggagcgcattca

SEQ ID NO: 216012 - DNA, 25 bp, Artificial
  Probe
tgcattctgttcctttagcagaggt

SEQ ID NO: 216013 - DNA, 25 bp, Artificial
  Probe
accctcagctgcatgtggcctttgg

SEQ ID NO: 216014 - DNA, 25 bp, Artificial
  Probe
gggaacatcttttcccaggatgcat

SEQ ID NO: 216015 - DNA, 25 bp, Artificial
  Probe
tagttaccctcagctgcatgtggcc

SEQ ID NO: 216016 - DNA, 25 bp, Artificial
  Probe
ctaacctttcgaagttatgacagat

SEQ ID NO: 216017 - DNA, 25 bp, Artificial
  Probe
agcgcattcatagttaccctcagct

SEQ ID NO: 216018 - DNA, 25 bp, Artificial
  Probe
caggatgcattctgttcctttagca

SEQ ID NO: 216019 - DNA, 25 bp, Artificial
  Probe
tcatagttaccctcagctgcatgtg

SEQ ID NO: 216020 - DNA, 25 bp, Artificial
  Probe
gttggagcgcattcatagttaccct

SEQ ID NO: 216021 - DNA, 25 bp, Artificial
  Probe
ttcctttagcagaggtagctaacct

SEQ ID NO: 216022 - DNA, 25 bp, Artificial
  Probe
aacctttcgaagttatgacagattt

SEQ ID NO: 216023 - DNA, 25 bp, Artificial
  Probe
ggtagctaacctttcgaagttatga

SEQ ID NO: 216024 - DNA, 25 bp, Artificial
  Probe
tcccaggatgcattctgttccttta

SEQ ID NO: 216025 - DNA, 25 bp, Artificial
  Probe
ctgttttgggttggagcgcattcat

SEQ ID NO: 216026 - DNA, 25 bp, Artificial
  Probe
gagggaacatcttttcccaggatgc

SEQ ID NO: 216027 - DNA, 25 bp, Artificial
  Probe
tggagcgcattcatagttaccctca

SEQ ID NO: 216028 - DNA, 25 bp, Artificial
  Probe
aatacactgttttgggttggagcgc

SEQ ID NO: 216029 - DNA, 25 bp, Artificial
  Probe
ctcagctgcatgtggcctttggact

SEQ ID NO: 216030 - DNA, 25 bp, Artificial
  Probe
aggtagctaacctttcgaagttatg

SEQ ID NO: 216031 - DNA, 25 bp, Artificial
  Probe
catcttttcccaggatgcattctgt

SEQ ID NO: 216032 - DNA, 25 bp, Artificial
  Probe
cgcattcatagttaccctcagctgc

SEQ ID NO: 216033 - DNA, 25 bp, Artificial
  Probe
cctttcgaagttatgacagatttca

SEQ ID NO: 216034 - DNA, 25 bp, Artificial
  Probe
gaggtagctaacctttcgaagttat

SEQ ID NO: 216035 - DNA, 25 bp, Artificial
  Probe
atgcattctgttcctttagcagagg

SEQ ID NO: 216036 - DNA, 25 bp, Artificial
  Probe
cttttcccaggatgcattctgttcc

SEQ ID NO: 216037 - DNA, 25 bp, Artificial
  Probe
ttggagcgcattcatagttaccctc

SEQ ID NO: 216038 - DNA, 25 bp, Artificial
  Probe
agttaccctcagctgcatgtggcct

SEQ ID NO: 216039 - DNA, 25 bp, Artificial
  Probe
ctgttcctttagcagaggtagctaa

SEQ ID NO: 216040 - DNA, 25 bp, Artificial
  Probe
cagaggtagctaacctttcgaagtt

SEQ ID NO: 216041 - DNA, 25 bp, Artificial
  Probe
cctcagctgcatgtggcctttggac

SEQ ID NO: 216042 - DNA, 25 bp, Artificial
  Probe
gttcctttagcagaggtagctaacc

SEQ ID NO: 216043 - DNA, 25 bp, Artificial
  Probe
tttcccaggatgcattctgttcctt

SEQ ID NO: 216044 - DNA, 25 bp, Artificial
  Probe
ttcccaggatgcattctgttccttt

SEQ ID NO: 216045 - DNA, 25 bp, Artificial
  Probe
acatcttttcccaggatgcattctg

SEQ ID NO: 216046 - DNA, 25 bp, Artificial
  Probe
ggatgcattctgttcctttagcaga

SEQ ID NO: 216047 - DNA, 25 bp, Artificial
  Probe
cactgttttgggttggagcgcattc

SEQ ID NO: 216048 - DNA, 25 bp, Artificial
  Probe
gagcgcattcatagttaccctcagc

SEQ ID NO: 216049 - DNA, 25 bp, Artificial
  Probe
ttaccctcagctgcatgtggccttt

SEQ ID NO: 216050 - DNA, 25 bp, Artificial
  Probe
gcattcatagttaccctcagctgca

SEQ ID NO: 216051 - DNA, 25 bp, Artificial
  Probe
tgggctcacggatgccttgctgtac

SEQ ID NO: 216052 - DNA, 25 bp, Artificial
  Probe
catgcgatgccctcaagatgccaat

SEQ ID NO: 216053 - DNA, 25 bp, Artificial
  Probe
ggaaaatacagctgcattcatcaca

SEQ ID NO: 216054 - DNA, 25 bp, Artificial
  Probe
cctcaagatgccaatcatccaggac

SEQ ID NO: 216055 - DNA, 25 bp, Artificial
  Probe
aacgccactgggtgcctaaggaatg

SEQ ID NO: 216056 - DNA, 25 bp, Artificial
  Probe
tgtgagactccttcgcaagaccaca

SEQ ID NO: 216057 - DNA, 25 bp, Artificial
  Probe
cacatgggcacagacgagctggacg

SEQ ID NO: 216058 - DNA, 25 bp, Artificial
  Probe
aaactgtggtggtatcccagcactt

SEQ ID NO: 216059 - DNA, 25 bp, Artificial
  Probe
gatgccctcaagatgccaatcatcc

SEQ ID NO: 216060 - DNA, 25 bp, Artificial
  Probe
tgtgtgcatcttgaggaacctctca

SEQ ID NO: 216061 - DNA, 25 bp, Artificial
  Probe
ccactgggtgcctaaggaatgtaag

SEQ ID NO: 216062 - DNA, 25 bp, Artificial
  Probe
tctcataccggctagcagcagaaac

SEQ ID NO: 216063 - DNA, 25 bp, Artificial
  Probe
gaaatcccaggatcagtgggatgga

SEQ ID NO: 216064 - DNA, 25 bp, Artificial
  Probe
acagacgagctggacgggctgctct

SEQ ID NO: 216065 - DNA, 25 bp, Artificial
  Probe
ctcacggatgccttgctgtacgtga

SEQ ID NO: 216066 - DNA, 25 bp, Artificial
  Probe
agtgtgatgggctcacggatgcctt

SEQ ID NO: 216067 - DNA, 25 bp, Artificial
  Probe
tcatcacaggtgctgcgcaacgcca

SEQ ID NO: 216068 - DNA, 25 bp, Artificial
  Probe
ctcatcatgcgatgccctcaagatg

SEQ ID NO: 216069 - DNA, 25 bp, Artificial
  Probe
agggacagcacatgggcacagacga

SEQ ID NO: 216070 - DNA, 25 bp, Artificial
  Probe
cagaaacgtctcagggacagcacat

SEQ ID NO: 216071 - DNA, 25 bp, Artificial
  Probe
ggaacctctcatcatgcgatgccct

SEQ ID NO: 216072 - DNA, 25 bp, Artificial
  Probe
ccgttgaaaactgtgtgtgcatctt

SEQ ID NO: 216073 - DNA, 25 bp, Artificial
  Probe
acgaccggaaaatacagctgcattc

SEQ ID NO: 216074 - DNA, 25 bp, Artificial
  Probe
aaactgtgtgtgcatcttgaggaac

SEQ ID NO: 216075 - DNA, 25 bp, Artificial
  Probe
agtgatcatccctcactcgggctgg

SEQ ID NO: 216076 - DNA, 25 bp, Artificial
  Probe
caggtgctgcgcaacgccactgggt

SEQ ID NO: 216077 - DNA, 25 bp, Artificial
  Probe
tccttcgcaagaccacagacctgga

SEQ ID NO: 216078 - DNA, 25 bp, Artificial
  Probe
ttcagtctgcactggggagcagtga

SEQ ID NO: 216079 - DNA, 25 bp, Artificial
  Probe
gccctgaaaaactgtggtggtatcc

SEQ ID NO: 216080 - DNA, 25 bp, Artificial
  Probe
agatcgatagcaagaccgttgaaaa

SEQ ID NO: 216081 - DNA, 25 bp, Artificial
  Probe
aggacgaccggaaaatacagctgca

SEQ ID NO: 216082 - DNA, 25 bp, Artificial
  Probe
tctcatcatgcgatgccctcaagat

SEQ ID NO: 216083 - DNA, 25 bp, Artificial
  Probe
actgtggtggtatcccagcacttgt

SEQ ID NO: 216084 - DNA, 25 bp, Artificial
  Probe
tgtgatgggctcacggatgccttgc

SEQ ID NO: 216085 - DNA, 25 bp, Artificial
  Probe
caatcatccaggacgccctggcagt

SEQ ID NO: 216086 - DNA, 25 bp, Artificial
  Probe
ctgcgcaacgccactgggtgcctaa

SEQ ID NO: 216087 - DNA, 25 bp, Artificial
  Probe
ctgggagaattcacctcttcaggac

SEQ ID NO: 216088 - DNA, 25 bp, Artificial
  Probe
cacagacgagctggacgggctgctc

SEQ ID NO: 216089 - DNA, 25 bp, Artificial
  Probe
cagcacatgggcacagacgagctgg

SEQ ID NO: 216090 - DNA, 25 bp, Artificial
  Probe
ctcttcaggacgaccggaaaataca

SEQ ID NO: 216091 - DNA, 25 bp, Artificial
  Probe
ggacgccctggcagtgctgaccaat

SEQ ID NO: 216092 - DNA, 25 bp, Artificial
  Probe
atgcagtgatcatccctcactcggg

SEQ ID NO: 216093 - DNA, 25 bp, Artificial
  Probe
cagacctggagatccgggaactggt

SEQ ID NO: 216094 - DNA, 25 bp, Artificial
  Probe
atccgggaactggtcacaggagtcc

SEQ ID NO: 216095 - DNA, 25 bp, Artificial
  Probe
cactgggtgcctaaggaatgtaagt

SEQ ID NO: 216096 - DNA, 25 bp, Artificial
  Probe
atgccaatcatccaggacgccctgg

SEQ ID NO: 216097 - DNA, 25 bp, Artificial
  Probe
tctgtcatcacttgcgagtacctgg

SEQ ID NO: 216098 - DNA, 25 bp, Artificial
  Probe
agcactggagctcaatgagtgtata

SEQ ID NO: 216099 - DNA, 25 bp, Artificial
  Probe
gactggaagcactggagctcaatga

SEQ ID NO: 216100 - DNA, 25 bp, Artificial
  Probe
gagtacctggatgaagcatacccgg

SEQ ID NO: 216101 - DNA, 25 bp, Artificial
  Probe
ccagaagatgacctttgagttattc

SEQ ID NO: 216102 - DNA, 25 bp, Artificial
  Probe
tgccagaagatgacctttgagttat

SEQ ID NO: 216103 - DNA, 25 bp, Artificial
  Probe
agaagatgacctttgagttattctc

SEQ ID NO: 216104 - DNA, 25 bp, Artificial
  Probe
tcatcacttgcgagtacctggatga

SEQ ID NO: 216105 - DNA, 25 bp, Artificial
  Probe
cacttgcgagtacctggatgaagca

SEQ ID NO: 216106 - DNA, 25 bp, Artificial
  Probe
agatgacctttgagttattctcaaa

SEQ ID NO: 216107 - DNA, 25 bp, Artificial
  Probe
aaagcttgccagaagatgacctttg

SEQ ID NO: 216108 - DNA, 25 bp, Artificial
  Probe
tcacttgcgagtacctggatgaagc

SEQ ID NO: 216109 - DNA, 25 bp, Artificial
  Probe
ttgccagaagatgacctttgagtta

SEQ ID NO: 216110 - DNA, 25 bp, Artificial
  Probe
caagacctaccgtgattacttaagt

SEQ ID NO: 216111 - DNA, 25 bp, Artificial
  Probe
gatcactgaatctgtcatcacttgc

SEQ ID NO: 216112 - DNA, 25 bp, Artificial
  Probe
actgaatctgtcatcacttgcgagt

SEQ ID NO: 216113 - DNA, 25 bp, Artificial
  Probe
atgacctttgagttattctcaaagg

SEQ ID NO: 216114 - DNA, 25 bp, Artificial
  Probe
actggagctcaatgagtgtatagac

SEQ ID NO: 216115 - DNA, 25 bp, Artificial
  Probe
gatgacctttgagttattctcaaag

SEQ ID NO: 216116 - DNA, 25 bp, Artificial
  Probe
acctggatgaagcatacccggagaa

SEQ ID NO: 216117 - DNA, 25 bp, Artificial
  Probe
aagatgacctttgagttattctcaa

SEQ ID NO: 216118 - DNA, 25 bp, Artificial
  Probe
tcactgaatctgtcatcacttgcga

SEQ ID NO: 216119 - DNA, 25 bp, Artificial
  Probe
cactgaatctgtcatcacttgcgag

SEQ ID NO: 216120 - DNA, 25 bp, Artificial
  Probe
acttgcgagtacctggatgaagcat

SEQ ID NO: 216121 - DNA, 25 bp, Artificial
  Probe
gtcacttgatcactgaatctgtcat

SEQ ID NO: 216122 - DNA, 25 bp, Artificial
  Probe
cctggatgaagcatacccggagaag

SEQ ID NO: 216123 - DNA, 25 bp, Artificial
  Probe
gcttgccagaagatgacctttgagt

SEQ ID NO: 216124 - DNA, 25 bp, Artificial
  Probe
agcttgccagaagatgacctttgag

SEQ ID NO: 216125 - DNA, 25 bp, Artificial
  Probe
atcacttgcgagtacctggatgaag

SEQ ID NO: 216126 - DNA, 25 bp, Artificial
  Probe
tgaatctgtcatcacttgcgagtac

SEQ ID NO: 216127 - DNA, 25 bp, Artificial
  Probe
ggtcacttgatcactgaatctgtca

SEQ ID NO: 216128 - DNA, 25 bp, Artificial
  Probe
cactggagctcaatgagtgtataga

SEQ ID NO: 216129 - DNA, 25 bp, Artificial
  Probe
tgcgagtacctggatgaagcatacc

SEQ ID NO: 216130 - DNA, 25 bp, Artificial
  Probe
aagcatacccggagaagaagttatt

SEQ ID NO: 216131 - DNA, 25 bp, Artificial
  Probe
ggaagcactggagctcaatgagtgt

SEQ ID NO: 216132 - DNA, 25 bp, Artificial
  Probe
tggatgaagcatacccggagaagaa

SEQ ID NO: 216133 - DNA, 25 bp, Artificial
  Probe
gaatctgtcatcacttgcgagtacc

SEQ ID NO: 216134 - DNA, 25 bp, Artificial
  Probe
tgatcactgaatctgtcatcacttg

SEQ ID NO: 216135 - DNA, 25 bp, Artificial
  Probe
cttgcgagtacctggatgaagcata

SEQ ID NO: 216136 - DNA, 25 bp, Artificial
  Probe
gcgagtacctggatgaagcataccc

SEQ ID NO: 216137 - DNA, 25 bp, Artificial
  Probe
tggaagcactggagctcaatgagtg

SEQ ID NO: 216138 - DNA, 25 bp, Artificial
  Probe
gaaagcttgccagaagatgaccttt

SEQ ID NO: 216139 - DNA, 25 bp, Artificial
  Probe
ctggatgaagcatacccggagaaga

SEQ ID NO: 216140 - DNA, 25 bp, Artificial
  Probe
atctgtcatcacttgcgagtacctg

SEQ ID NO: 216141 - DNA, 25 bp, Artificial
  Probe
ctggaagcactggagctcaatgagt

SEQ ID NO: 216142 - DNA, 25 bp, Artificial
  Probe
gaagcactggagctcaatgagtgta

SEQ ID NO: 216143 - DNA, 25 bp, Artificial
  Probe
agagatagcctgtacaacttctcca

SEQ ID NO: 216144 - DNA, 25 bp, Artificial
  Probe
gagctctagcgcacattctgcaccg

SEQ ID NO: 216145 - DNA, 25 bp, Artificial
  Probe
ttgaaccctccttgggccagaagtg

SEQ ID NO: 216146 - DNA, 25 bp, Artificial
  Probe
gcttataaaggcaaatcccacaaga

SEQ ID NO: 216147 - DNA, 25 bp, Artificial
  Probe
cttgaaccctccttgggccagaagt

SEQ ID NO: 216148 - DNA, 25 bp, Artificial
  Probe
cctttgagcagaggaagcaagattg

SEQ ID NO: 216149 - DNA, 25 bp, Artificial
  Probe
gatagcctgtacaacttctccatgt

SEQ ID NO: 216150 - DNA, 25 bp, Artificial
  Probe
aagtgccaccaatcctggctggtcc

SEQ ID NO: 216151 - DNA, 25 bp, Artificial
  Probe
atactggcacccagactgattgggg

SEQ ID NO: 216152 - DNA, 25 bp, Artificial
  Probe
acccagactgattggggccaaggtc

SEQ ID NO: 216153 - DNA, 25 bp, Artificial
  Probe
tctagcgcacattctgcaccgtaca

SEQ ID NO: 216154 - DNA, 25 bp, Artificial
  Probe
agcccagagcttataaaggcaaatc

SEQ ID NO: 216155 - DNA, 25 bp, Artificial
  Probe
tgtcctagtcatcctttgagcagag

SEQ ID NO: 216156 - DNA, 25 bp, Artificial
  Probe
ctagctattatcagcccagagctta

SEQ ID NO: 216157 - DNA, 25 bp, Artificial
  Probe
taacatatatgtcttgtagttgtcc

SEQ ID NO: 216158 - DNA, 25 bp, Artificial
  Probe
atagcagttagtcgtacaactaaat

SEQ ID NO: 216159 - DNA, 25 bp, Artificial
  Probe
ctggggtcgctcagagattaagcaa

SEQ ID NO: 216160 - DNA, 25 bp, Artificial
  Probe
agagcaggtctctgccgcggagctc

SEQ ID NO: 216161 - DNA, 25 bp, Artificial
  Probe
ctgattggggccaaggtctacacct

SEQ ID NO: 216162 - DNA, 25 bp, Artificial
  Probe
accctgagagatagcctgtacaact

SEQ ID NO: 216163 - DNA, 25 bp, Artificial
  Probe
ttcaaaatagtcttcaatatctggg

SEQ ID NO: 216164 - DNA, 25 bp, Artificial
  Probe
ccgcggagctctagcgcacattctg

SEQ ID NO: 216165 - DNA, 25 bp, Artificial
  Probe
ttcaaggtcccaactaggcccggtg

SEQ ID NO: 216166 - DNA, 25 bp, Artificial
  Probe
tgttgaatacctacggtgtacattc

SEQ ID NO: 216167 - DNA, 25 bp, Artificial
  Probe
ttccaagatgcaagccctagctatt

SEQ ID NO: 216168 - DNA, 25 bp, Artificial
  Probe
taattttagatactggcacccagac

SEQ ID NO: 216169 - DNA, 25 bp, Artificial
  Probe
tattatcagcccagagcttataaag

SEQ ID NO: 216170 - DNA, 25 bp, Artificial
  Probe
taatgttgaatacctacggtgtaca

SEQ ID NO: 216171 - DNA, 25 bp, Artificial
  Probe
ctcaagcgtagtgagtctaaacttc

SEQ ID NO: 216172 - DNA, 25 bp, Artificial
  Probe
tctgccgcggagctctagcgcacat

SEQ ID NO: 216173 - DNA, 25 bp, Artificial
  Probe
tgaaacttcaaggtcccaactaggc

SEQ ID NO: 216174 - DNA, 25 bp, Artificial
  Probe
cccacctgtctttgaaacttcaagg

SEQ ID NO: 216175 - DNA, 25 bp, Artificial
  Probe
gtgtacattctgcaccctgtaccct

SEQ ID NO: 216176 - DNA, 25 bp, Artificial
  Probe
ttagatactggcacccagactgatt

SEQ ID NO: 216177 - DNA, 25 bp, Artificial
  Probe
agtcatcctttgagcagaggaagca

SEQ ID NO: 216178 - DNA, 25 bp, Artificial
  Probe
caccatactgttaggggtctggggt

SEQ ID NO: 216179 - DNA, 25 bp, Artificial
  Probe
gtctggggtcgctcagagattaagc

SEQ ID NO: 216180 - DNA, 25 bp, Artificial
  Probe
tagtgcaacctgcaccttgaaccct

SEQ ID NO: 216181 - DNA, 25 bp, Artificial
  Probe
ccaccctgagagatagcctgtacaa

SEQ ID NO: 216182 - DNA, 25 bp, Artificial
  Probe
gtacaccgcgcaccatactgttagg

SEQ ID NO: 216183 - DNA, 25 bp, Artificial
  Probe
tcaaaatagtcttcaatatctggga

SEQ ID NO: 216184 - DNA, 25 bp, Artificial
  Probe
cgtacaactaaatttgctagaacag

SEQ ID NO: 216185 - DNA, 25 bp, Artificial
  Probe
ggaagtggactgctagtgtacagcc

SEQ ID NO: 216186 - DNA, 25 bp, Artificial
  Probe
ctccttgggccagaagtgccaccaa

SEQ ID NO: 216187 - DNA, 25 bp, Artificial
  Probe
tgctagaacagcaaattttacaaga

SEQ ID NO: 216188 - DNA, 25 bp, Artificial
  Probe
cctacatagtgcaacctgcaccttg

SEQ ID NO: 216189 - DNA, 25 bp, Artificial
  Probe
actaggtctcattgtgtcttcaagg

SEQ ID NO: 216190 - DNA, 25 bp, Artificial
  Probe
ctcattgtgtcttcaagggcttgtc

SEQ ID NO: 216191 - DNA, 25 bp, Artificial
  Probe
tcaagggcttgtccgtgatgggcaa

SEQ ID NO: 216192 - DNA, 25 bp, Artificial
  Probe
gggcttgtccgtgatgggcaatggg

SEQ ID NO: 216193 - DNA, 25 bp, Artificial
  Probe
ctggcccatggggccattttcctcc

SEQ ID NO: 216194 - DNA, 25 bp, Artificial
  Probe
agggctggcccatggggccattttc

SEQ ID NO: 216195 - DNA, 25 bp, Artificial
  Probe
cgtgatgggcaatggggagggctgg

SEQ ID NO: 216196 - DNA, 25 bp, Artificial
  Probe
ctcctcctccagggagccctggggg

SEQ ID NO: 216197 - DNA, 25 bp, Artificial
  Probe
ttgtgtcttcaagggcttgtccgtg

SEQ ID NO: 216198 - DNA, 25 bp, Artificial
  Probe
tcttcaagggcttgtccgtgatggg

SEQ ID NO: 216199 - DNA, 25 bp, Artificial
  Probe
tcattgtgtcttcaagggcttgtcc

SEQ ID NO: 216200 - DNA, 25 bp, Artificial
  Probe
gtcttcaagggcttgtccgtgatgg

SEQ ID NO: 216201 - DNA, 25 bp, Artificial
  Probe
gtctcattgtgtcttcaagggcttg

SEQ ID NO: 216202 - DNA, 25 bp, Artificial
  Probe
tgtcttcaagggcttgtccgtgatg

SEQ ID NO: 216203 - DNA, 25 bp, Artificial
  Probe
ggtaaaccacgaaacacagctcctg

SEQ ID NO: 216204 - DNA, 25 bp, Artificial
  Probe
tctactaggtctcattgtgtcttca

SEQ ID NO: 216205 - DNA, 25 bp, Artificial
  Probe
taggtctcattgtgtcttcaagggc

SEQ ID NO: 216206 - DNA, 25 bp, Artificial
  Probe
gatgggcaatggggagggctggccc

SEQ ID NO: 216207 - DNA, 25 bp, Artificial
  Probe
atggggagggctggcccatggggcc

SEQ ID NO: 216208 - DNA, 25 bp, Artificial
  Probe
ttcaagggcttgtccgtgatgggca

SEQ ID NO: 216209 - DNA, 25 bp, Artificial
  Probe
gctggcccatggggccattttcctc

SEQ ID NO: 216210 - DNA, 25 bp, Artificial
  Probe
gcttgtccgtgatgggcaatgggga

SEQ ID NO: 216211 - DNA, 25 bp, Artificial
  Probe
cttcaagggcttgtccgtgatgggc

SEQ ID NO: 216212 - DNA, 25 bp, Artificial
  Probe
aggtctcattgtgtcttcaagggct

SEQ ID NO: 216213 - DNA, 25 bp, Artificial
  Probe
attgtgtcttcaagggcttgtccgt

SEQ ID NO: 216214 - DNA, 25 bp, Artificial
  Probe
tccgtgatgggcaatggggagggct

SEQ ID NO: 216215 - DNA, 25 bp, Artificial
  Probe
ggcttgtccgtgatgggcaatgggg

SEQ ID NO: 216216 - DNA, 25 bp, Artificial
  Probe
catggggccattttcctcctcctcc

SEQ ID NO: 216217 - DNA, 25 bp, Artificial
  Probe
ggcccatggggccattttcctcctc

SEQ ID NO: 216218 - DNA, 25 bp, Artificial
  Probe
aagggcttgtccgtgatgggcaatg

SEQ ID NO: 216219 - DNA, 25 bp, Artificial
  Probe
ctaggtctcattgtgtcttcaaggg

SEQ ID NO: 216220 - DNA, 25 bp, Artificial
  Probe
tctcattgtgtcttcaagggcttgt

SEQ ID NO: 216221 - DNA, 25 bp, Artificial
  Probe
tcctcctccagggagccctgggggt

SEQ ID NO: 216222 - DNA, 25 bp, Artificial
  Probe
tgggcaatggggagggctggcccat

SEQ ID NO: 216223 - DNA, 25 bp, Artificial
  Probe
gcaatggggagggctggcccatggg

SEQ ID NO: 216224 - DNA, 25 bp, Artificial
  Probe
ggtctcattgtgtcttcaagggctt

SEQ ID NO: 216225 - DNA, 25 bp, Artificial
  Probe
cattgtgtcttcaagggcttgtccg

SEQ ID NO: 216226 - DNA, 25 bp, Artificial
  Probe
ctactaggtctcattgtgtcttcaa

SEQ ID NO: 216227 - DNA, 25 bp, Artificial
  Probe
tgtccgtgatgggcaatggggaggg

SEQ ID NO: 216228 - DNA, 25 bp, Artificial
  Probe
cccatggggccattttcctcctcct

SEQ ID NO: 216229 - DNA, 25 bp, Artificial
  Probe
gggccattttcctcctcctccaggg

SEQ ID NO: 216230 - DNA, 25 bp, Artificial
  Probe
tactaggtctcattgtgtcttcaag

SEQ ID NO: 216231 - DNA, 25 bp, Artificial
  Probe
gggctggcccatggggccattttcc

SEQ ID NO: 216232 - DNA, 25 bp, Artificial
  Probe
caatggggagggctggcccatgggg

SEQ ID NO: 216233 - DNA, 25 bp, Artificial
  Probe
tggggccattttcctcctcctccag

SEQ ID NO: 216234 - DNA, 25 bp, Artificial
  Probe
gggtaaaccacgaaacacagctcct

SEQ ID NO: 216235 - DNA, 25 bp, Artificial
  Probe
tgggccccaaatcacagtggtcctc

SEQ ID NO: 216236 - DNA, 25 bp, Artificial
  Probe
cgcctctttgcgtgttaaatactct

SEQ ID NO: 216237 - DNA, 25 bp, Artificial
  Probe
actgcacttgaaccaacaccttgtg

SEQ ID NO: 216238 - DNA, 25 bp, Artificial
  Probe
taaggttccaggtcattggatcttg

SEQ ID NO: 216239 - DNA, 25 bp, Artificial
  Probe
ccagtgtcattgtgtcttccagcct

SEQ ID NO: 216240 - DNA, 25 bp, Artificial
  Probe
tcaatccagtgtcattgtgtcttcc

SEQ ID NO: 216241 - DNA, 25 bp, Artificial
  Probe
ttgatcaatccagtgtcattgtgtc

SEQ ID NO: 216242 - DNA, 25 bp, Artificial
  Probe
atctcacagtttgtcacctgtgtaa

SEQ ID NO: 216243 - DNA, 25 bp, Artificial
  Probe
atagtgctttcgttattgtagcttc

SEQ ID NO: 216244 - DNA, 25 bp, Artificial
  Probe
caggtcattggatcttgtctgtaat

SEQ ID NO: 216245 - DNA, 25 bp, Artificial
  Probe
cacctgtgtaacaggcaaacccaga

SEQ ID NO: 216246 - DNA, 25 bp, Artificial
  Probe
ggcatcaaactatatatcccagctg

SEQ ID NO: 216247 - DNA, 25 bp, Artificial
  Probe
caggtgggccccaaatcacagtggt

SEQ ID NO: 216248 - DNA, 25 bp, Artificial
  Probe
gcctctttgcgtgttaaatactctc

SEQ ID NO: 216249 - DNA, 25 bp, Artificial
  Probe
agtttgtcacctgtgtaacaggcaa

SEQ ID NO: 216250 - DNA, 25 bp, Artificial
  Probe
ctaaaactcctgtattcctgtgggg

SEQ ID NO: 216251 - DNA, 25 bp, Artificial
  Probe
ttgctatgttgaccaggtgggcccc

SEQ ID NO: 216252 - DNA, 25 bp, Artificial
  Probe
gcgtgttaaatactctcactgcact

SEQ ID NO: 216253 - DNA, 25 bp, Artificial
  Probe
ctaaggttccaggtcattggatctt

SEQ ID NO: 216254 - DNA, 25 bp, Artificial
  Probe
agatagatgatctcacagtttgtca

SEQ ID NO: 216255 - DNA, 25 bp, Artificial
  Probe
ttcatgcatgtatatagtgctttcg

SEQ ID NO: 216256 - DNA, 25 bp, Artificial
  Probe
cagtgtcattgtgtcttccagcctc

SEQ ID NO: 216257 - DNA, 25 bp, Artificial
  Probe
ggtgggccccaaatcacagtggtcc

SEQ ID NO: 216258 - DNA, 25 bp, Artificial
  Probe
ctccaagataatcaaactggaggtt

SEQ ID NO: 216259 - DNA, 25 bp, Artificial
  Probe
ttccaggtcattggatcttgtctgt

SEQ ID NO: 216260 - DNA, 25 bp, Artificial
  Probe
cgcacggaccagatagatgatctca

SEQ ID NO: 216261 - DNA, 25 bp, Artificial
  Probe
tcccagctgacctagagcttgctat

SEQ ID NO: 216262 - DNA, 25 bp, Artificial
  Probe
gtgttaaatactctcactgcacttg

SEQ ID NO: 216263 - DNA, 25 bp, Artificial
  Probe
ttgtcacctgtgtaacaggcaaacc

SEQ ID NO: 216264 - DNA, 25 bp, Artificial
  Probe
actatatatcccagctgacctagag

SEQ ID NO: 216265 - DNA, 25 bp, Artificial
  Probe
gctatgttgaccaggtgggccccaa

SEQ ID NO: 216266 - DNA, 25 bp, Artificial
  Probe
atgttgaccaggtgggccccaaatc

SEQ ID NO: 216267 - DNA, 25 bp, Artificial
  Probe
tttgatattgatcaatccagtgtca

SEQ ID NO: 216268 - DNA, 25 bp, Artificial
  Probe
tatatcccagctgacctagagcttg

SEQ ID NO: 216269 - DNA, 25 bp, Artificial
  Probe
tcccgaccgctaaggttccaggtca

SEQ ID NO: 216270 - DNA, 25 bp, Artificial
  Probe
agtgctttcgttattgtagcttctc

SEQ ID NO: 216271 - DNA, 25 bp, Artificial
  Probe
ccgaccgctaaggttccaggtcatt

SEQ ID NO: 216272 - DNA, 25 bp, Artificial
  Probe
acagtttgtcacctgtgtaacaggc

SEQ ID NO: 216273 - DNA, 25 bp, Artificial
  Probe
ctctaaaactcctgtattcctgtgg

SEQ ID NO: 216274 - DNA, 25 bp, Artificial
  Probe
tcgcacggaccagatagatgatctc

SEQ ID NO: 216275 - DNA, 25 bp, Artificial
  Probe
cagctgacctagagcttgctatgtt

SEQ ID NO: 216276 - DNA, 25 bp, Artificial
  Probe
tatgttgaccaggtgggccccaaat

SEQ ID NO: 216277 - DNA, 25 bp, Artificial
  Probe
gatgatctcacagtttgtcacctgt

SEQ ID NO: 216278 - DNA, 25 bp, Artificial
  Probe
tcacctgtgtaacaggcaaacccag

SEQ ID NO: 216279 - DNA, 25 bp, Artificial
  Probe
gatattgatcaatccagtgtcattg

SEQ ID NO: 216280 - DNA, 25 bp, Artificial
  Probe
gttccaggtcattggatcttgtctg

SEQ ID NO: 216281 - DNA, 25 bp, Artificial
  Probe
caaggcaagggcttgctccagttcc

SEQ ID NO: 216282 - DNA, 25 bp, Artificial
  Probe
tttgcaaaacccagatggaattaat

SEQ ID NO: 216283 - DNA, 25 bp, Artificial
  Probe
tctgtggctggctctctcagctcgt

SEQ ID NO: 216284 - DNA, 25 bp, Artificial
  Probe
cccgctttaagagactgggcgaact

SEQ ID NO: 216285 - DNA, 25 bp, Artificial
  Probe
ggagtccaccacatcagactcagac

SEQ ID NO: 216286 - DNA, 25 bp, Artificial
  Probe
actgagcattctgtaatattctagg

SEQ ID NO: 216287 - DNA, 25 bp, Artificial
  Probe
gaattttgactacctcagtgactgg

SEQ ID NO: 216288 - DNA, 25 bp, Artificial
  Probe
attaaaccagatttgcagtttatgc

SEQ ID NO: 216289 - DNA, 25 bp, Artificial
  Probe
cttcatgaggcagataatgacccca

SEQ ID NO: 216290 - DNA, 25 bp, Artificial
  Probe
ttatgccaaggcaagggcttgctcc

SEQ ID NO: 216291 - DNA, 25 bp, Artificial
  Probe
gcaaaacccagatggaattaatgga

SEQ ID NO: 216292 - DNA, 25 bp, Artificial
  Probe
gctttaagagactgggcgaactcta

SEQ ID NO: 216293 - DNA, 25 bp, Artificial
  Probe
agagactgggcgaactctactctgt

SEQ ID NO: 216294 - DNA, 25 bp, Artificial
  Probe
ttatggctatgaaggccgagggtct

SEQ ID NO: 216295 - DNA, 25 bp, Artificial
  Probe
tggaactgagcattctgtaatattc

SEQ ID NO: 216296 - DNA, 25 bp, Artificial
  Probe
catatgactccattcagatttatgg

SEQ ID NO: 216297 - DNA, 25 bp, Artificial
  Probe
cagttccaaatggtgttgatgtcga

SEQ ID NO: 216298 - DNA, 25 bp, Artificial
  Probe
ctactctgttggtgaaagtgacaaa

SEQ ID NO: 216299 - DNA, 25 bp, Artificial
  Probe
actccccttagatgcaacaaatgtg

SEQ ID NO: 216300 - DNA, 25 bp, Artificial
  Probe
cagatttatggctatgaaggccgag

SEQ ID NO: 216301 - DNA, 25 bp, Artificial
  Probe
tctcagctcgttggagtccaccaca

SEQ ID NO: 216302 - DNA, 25 bp, Artificial
  Probe
cagtttatgccaaggcaagggcttg

SEQ ID NO: 216303 - DNA, 25 bp, Artificial
  Probe
ggtccccgctttaagagactgggcg

SEQ ID NO: 216304 - DNA, 25 bp, Artificial
  Probe
atttgcagtttatgccaaggcaagg

SEQ ID NO: 216305 - DNA, 25 bp, Artificial
  Probe
gcagtttatgccaaggcaagggctt

SEQ ID NO: 216306 - DNA, 25 bp, Artificial
  Probe
gcttttgacattgcaactttgcaaa

SEQ ID NO: 216307 - DNA, 25 bp, Artificial
  Probe
tccattcagatttatggctatgaag

SEQ ID NO: 216308 - DNA, 25 bp, Artificial
  Probe
attgcaactttgcaaaacccagatg

SEQ ID NO: 216309 - DNA, 25 bp, Artificial
  Probe
agggtctgtggctggctctctcagc

SEQ ID NO: 216310 - DNA, 25 bp, Artificial
  Probe
cagatttgcagtttatgccaaggca

SEQ ID NO: 216311 - DNA, 25 bp, Artificial
  Probe
gcttcatgaggcagataatgacccc

SEQ ID NO: 216312 - DNA, 25 bp, Artificial
  Probe
accagaattttgactacctcagtga

SEQ ID NO: 216313 - DNA, 25 bp, Artificial
  Probe
ataatcaatggaactgagcattctg

SEQ ID NO: 216314 - DNA, 25 bp, Artificial
  Probe
tctctcagctcgttggagtccacca

SEQ ID NO: 216315 - DNA, 25 bp, Artificial
  Probe
tatgccaaggcaagggcttgctcca

SEQ ID NO: 216316 - DNA, 25 bp, Artificial
  Probe
ttctgtaatattctagggtcactcc

SEQ ID NO: 216317 - DNA, 25 bp, Artificial
  Probe
caatggaactgagcattctgtaata

SEQ ID NO: 216318 - DNA, 25 bp, Artificial
  Probe
ggcaagtttagcaccaatcatctat

SEQ ID NO: 216319 - DNA, 25 bp, Artificial
  Probe
cttagatgcaacaaatgtggctatt

SEQ ID NO: 216320 - DNA, 25 bp, Artificial
  Probe
caactttgcaaaacccagatggaat

SEQ ID NO: 216321 - DNA, 25 bp, Artificial
  Probe
tttatggctatgaaggccgagggtc

SEQ ID NO: 216322 - DNA, 25 bp, Artificial
  Probe
cagactcagaccagaattttgacta

SEQ ID NO: 216323 - DNA, 25 bp, Artificial
  Probe
agcattctgtaatattctagggtca

SEQ ID NO: 216324 - DNA, 25 bp, Artificial
  Probe
acatcagactcagaccagaattttg

SEQ ID NO: 216325 - DNA, 25 bp, Artificial
  Probe
ttttgactacctcagtgactggggt

SEQ ID NO: 216326 - DNA, 25 bp, Artificial
  Probe
gacattgcaactttgcaaaacccag

SEQ ID NO: 216327 - DNA, 25 bp, Artificial
  Probe
tgtctgaatcggacagcaagtagct

SEQ ID NO: 216328 - DNA, 25 bp, Artificial
  Probe
gtagagttccggaactattcggtgc

SEQ ID NO: 216329 - DNA, 25 bp, Artificial
  Probe
ctggaggcatcttctatgggatggc

SEQ ID NO: 216330 - DNA, 25 bp, Artificial
  Probe
accgcccgggcctcgagttggtgct

SEQ ID NO: 216331 - DNA, 25 bp, Artificial
  Probe
tggcctccatgacctgcgttcacaa

SEQ ID NO: 216332 - DNA, 25 bp, Artificial
  Probe
tccctttggccgttactcggacgag

SEQ ID NO: 216333 - DNA, 25 bp, Artificial
  Probe
ctgcagcatggatttgatggcaacg

SEQ ID NO: 216334 - DNA, 25 bp, Artificial
  Probe
ctgttctcgggcacgctgcgcatga

SEQ ID NO: 216335 - DNA, 25 bp, Artificial
  Probe
tcaaggagtactctaagacggagac

SEQ ID NO: 216336 - DNA, 25 bp, Artificial
  Probe
ggtctcctagacctagtctaccatt

SEQ ID NO: 216337 - DNA, 25 bp, Artificial
  Probe
tacccagtttgaagactgcactgta

SEQ ID NO: 216338 - DNA, 25 bp, Artificial
  Probe
cctggtcttggacaaaggagtagta

SEQ ID NO: 216339 - DNA, 25 bp, Artificial
  Probe
gtactgcagtttttaagagaccctg

SEQ ID NO: 216340 - DNA, 25 bp, Artificial
  Probe
gaatctgcattccaaaggtttcttc

SEQ ID NO: 216341 - DNA, 25 bp, Artificial
  Probe
ggcacgctgcgcatgaacctcgatc

SEQ ID NO: 216342 - DNA, 25 bp, Artificial
  Probe
atggccaaagatgcaggactcgcct

SEQ ID NO: 216343 - DNA, 25 bp, Artificial
  Probe
ggggataatctcagtgttggccaga

SEQ ID NO: 216344 - DNA, 25 bp, Artificial
  Probe
ctaagacggagactgaggctccctg

SEQ ID NO: 216345 - DNA, 25 bp, Artificial
  Probe
tggcaaatcttccatgactctttgc

SEQ ID NO: 216346 - DNA, 25 bp, Artificial
  Probe
cgtactgcagtttttaagagaccct

SEQ ID NO: 216347 - DNA, 25 bp, Artificial
  Probe
aagtgggtccttggaggtcacagcc

SEQ ID NO: 216348 - DNA, 25 bp, Artificial
  Probe
agactgcactgtactgaccatcgcc

SEQ ID NO: 216349 - DNA, 25 bp, Artificial
  Probe
gactctttgcctattccgaatcctg

SEQ ID NO: 216350 - DNA, 25 bp, Artificial
  Probe
cctcgagttggtgctgaagaatttg

SEQ ID NO: 216351 - DNA, 25 bp, Artificial
  Probe
ttggccagaggcagctcgtgtgcct

SEQ ID NO: 216352 - DNA, 25 bp, Artificial
  Probe
ccgtgctccagaaggctggcccagg

SEQ ID NO: 216353 - DNA, 25 bp, Artificial
  Probe
gggctggcaaatcttccatgactct

SEQ ID NO: 216354 - DNA, 25 bp, Artificial
  Probe
tcatagccgtggagagagtcaagga

SEQ ID NO: 216355 - DNA, 25 bp, Artificial
  Probe
gcatgaacctcgatccctttggccg

SEQ ID NO: 216356 - DNA, 25 bp, Artificial
  Probe
atttgactctgcatgtgcagggtgg

SEQ ID NO: 216357 - DNA, 25 bp, Artificial
  Probe
ccatacttaacagtggaatgaggaa

SEQ ID NO: 216358 - DNA, 25 bp, Artificial
  Probe
aggcagctcgtgtgcctagcccgag

SEQ ID NO: 216359 - DNA, 25 bp, Artificial
  Probe
ttagacgaggccaccgctgccattg

SEQ ID NO: 216360 - DNA, 25 bp, Artificial
  Probe
ggtaccatccgtacccagtttgaag

SEQ ID NO: 216361 - DNA, 25 bp, Artificial
  Probe
gctccctgggtgttggagagcaacc

SEQ ID NO: 216362 - DNA, 25 bp, Artificial
  Probe
gaagaatttgactctgcatgtgcag

SEQ ID NO: 216363 - DNA, 25 bp, Artificial
  Probe
ggccgcagagggtgagatcttcatt

SEQ ID NO: 216364 - DNA, 25 bp, Artificial
  Probe
gagttccggaactattcggtgcggt

SEQ ID NO: 216365 - DNA, 25 bp, Artificial
  Probe
gattctccagtaaacctcattgcag

SEQ ID NO: 216366 - DNA, 25 bp, Artificial
  Probe
agccctgctccgaaagagccgtgtc

SEQ ID NO: 216367 - DNA, 25 bp, Artificial
  Probe
caccggctcaacacaatcatggact

SEQ ID NO: 216368 - DNA, 25 bp, Artificial
  Probe
ctgcaaattgccttacagactagcc

SEQ ID NO: 216369 - DNA, 25 bp, Artificial
  Probe
agctgaatttgattctccagtaaac

SEQ ID NO: 216370 - DNA, 25 bp, Artificial
  Probe
ttccgaatcctggaggccgcagagg

SEQ ID NO: 216371 - DNA, 25 bp, Artificial
  Probe
ctggattttcagtgctctgagggtg

SEQ ID NO: 216372 - DNA, 25 bp, Artificial
  Probe
tacaaccgggtcctggtcttggaca

SEQ ID NO: 216373 - DNA, 25 bp, Artificial
  Probe
agaatatcgcccattttggaggcaa

SEQ ID NO: 216374 - DNA, 25 bp, Artificial
  Probe
gatgagtactgttgcaccattccta

SEQ ID NO: 216375 - DNA, 25 bp, Artificial
  Probe
ttcctcctgagtgtggtgacctgct

SEQ ID NO: 216376 - DNA, 25 bp, Artificial
  Probe
ccatcatggagagtggagtggccct

SEQ ID NO: 216377 - DNA, 25 bp, Artificial
  Probe
tcgcccattttggaggcaaccctaa

SEQ ID NO: 216378 - DNA, 25 bp, Artificial
  Probe
ccaaagagctgttggcatctgagga

SEQ ID NO: 216379 - DNA, 25 bp, Artificial
  Probe
cggtctccactacagtggccaagct

SEQ ID NO: 216380 - DNA, 25 bp, Artificial
  Probe
tctatgagttccaacatgcacccag

SEQ ID NO: 216381 - DNA, 25 bp, Artificial
  Probe
tgtcctgggctttttcagcactgga

SEQ ID NO: 216382 - DNA, 25 bp, Artificial
  Probe
ggatacagcagcacaaatgatgctt

SEQ ID NO: 216383 - DNA, 25 bp, Artificial
  Probe
tcgtctgggtgtcctgggctttttc

SEQ ID NO: 216384 - DNA, 25 bp, Artificial
  Probe
tgtctcaagggctcttccatggtgc

SEQ ID NO: 216385 - DNA, 25 bp, Artificial
  Probe
tatcccccatgtctcaagggctctt

SEQ ID NO: 216386 - DNA, 25 bp, Artificial
  Probe
gctcttccatggtgccatcatggag

SEQ ID NO: 216387 - DNA, 25 bp, Artificial
  Probe
cctgctgcctgaccttatctctgaa

SEQ ID NO: 216388 - DNA, 25 bp, Artificial
  Probe
tggccaagctctctggatgtgaggc

SEQ ID NO: 216389 - DNA, 25 bp, Artificial
  Probe
cctgggctttttcagcactggagat

SEQ ID NO: 216390 - DNA, 25 bp, Artificial
  Probe
gtgtgtcttcacatgttatatcccc

SEQ ID NO: 216391 - DNA, 25 bp, Artificial
  Probe
agctatttcaagaatgtcaggccac

SEQ ID NO: 216392 - DNA, 25 bp, Artificial
  Probe
acggtctccactacagtggccaagc

SEQ ID NO: 216393 - DNA, 25 bp, Artificial
  Probe
actacagtggccaagctctctggat

SEQ ID NO: 216394 - DNA, 25 bp, Artificial
  Probe
gcatcccaaagagctgttggcatct

SEQ ID NO: 216395 - DNA, 25 bp, Artificial
  Probe
gatacagcagcacaaatgatgcttc

SEQ ID NO: 216396 - DNA, 25 bp, Artificial
  Probe
tggagtggccctgctgcctgacctt

SEQ ID NO: 216397 - DNA, 25 bp, Artificial
  Probe
tgttctaaaggatacagcagcacaa

SEQ ID NO: 216398 - DNA, 25 bp, Artificial
  Probe
gagttcctacccaggcatcccaaag

SEQ ID NO: 216399 - DNA, 25 bp, Artificial
  Probe
aaaggatacagcagcacaaatgatg

SEQ ID NO: 216400 - DNA, 25 bp, Artificial
  Probe
gtatcgtctgggtgtcctgggcttt

SEQ ID NO: 216401 - DNA, 25 bp, Artificial
  Probe
cttcctcctgagtgtggtgacctgc

SEQ ID NO: 216402 - DNA, 25 bp, Artificial
  Probe
tccagcagaatatcgcccattttgg

SEQ ID NO: 216403 - DNA, 25 bp, Artificial
  Probe
caagtgtgtcttcacatgttatatc

SEQ ID NO: 216404 - DNA, 25 bp, Artificial
  Probe
agtactgttgcaccattcctatggt

SEQ ID NO: 216405 - DNA, 25 bp, Artificial
  Probe
tatatcccccatgtctcaagggctc

SEQ ID NO: 216406 - DNA, 25 bp, Artificial
  Probe
gtctccactacagtggccaagctct

SEQ ID NO: 216407 - DNA, 25 bp, Artificial
  Probe
catgcacccagctatttcaagaatg

SEQ ID NO: 216408 - DNA, 25 bp, Artificial
  Probe
agtgtgtcttcacatgttatatccc

SEQ ID NO: 216409 - DNA, 25 bp, Artificial
  Probe
cccaggcatcccaaagagctgttgg

SEQ ID NO: 216410 - DNA, 25 bp, Artificial
  Probe
ttccatggtgccatcatggagagtg

SEQ ID NO: 216411 - DNA, 25 bp, Artificial
  Probe
aggtggcacaagtgtgtcttcacat

SEQ ID NO: 216412 - DNA, 25 bp, Artificial
  Probe
gctttttcagcactggagatgagca

SEQ ID NO: 216413 - DNA, 25 bp, Artificial
  Probe
ccatggtgccatcatggagagtgga

SEQ ID NO: 216414 - DNA, 25 bp, Artificial
  Probe
gagttccaacatgcacccagctatt

SEQ ID NO: 216415 - DNA, 25 bp, Artificial
  Probe
ctacagtggccaagctctctggatg

SEQ ID NO: 216416 - DNA, 25 bp, Artificial
  Probe
gctgcctgaccttatctctgaaacc

SEQ ID NO: 216417 - DNA, 25 bp, Artificial
  Probe
tgggtccagcagaatatcgcccatt

SEQ ID NO: 216418 - DNA, 25 bp, Artificial
  Probe
cagtggccaagctctctggatgtga

SEQ ID NO: 216419 - DNA, 25 bp, Artificial
  Probe
cctcaatgccacattgcgaggctgg

SEQ ID NO: 216420 - DNA, 25 bp, Artificial
  Probe
ccagaagctgtgatttctgttacga

SEQ ID NO: 216421 - DNA, 25 bp, Artificial
  Probe
tggagttctcctaccctggctatct

SEQ ID NO: 216422 - DNA, 25 bp, Artificial
  Probe
aggctcatgaagaggctctgcccca

SEQ ID NO: 216423 - DNA, 25 bp, Artificial
  Probe
cctacacaagaaaggcaaagtatac

SEQ ID NO: 216424 - DNA, 25 bp, Artificial
  Probe
agctgagccagctccagcctctgtg

SEQ ID NO: 216425 - DNA, 25 bp, Artificial
  Probe
acctactcctggagggtccgagtga

SEQ ID NO: 216426 - DNA, 25 bp, Artificial
  Probe
cgagtgaggagctgagccagctcca

SEQ ID NO: 216427 - DNA, 25 bp, Artificial
  Probe
aaggcacctacacatgtgtggtacg

SEQ ID NO: 216428 - DNA, 25 bp, Artificial
  Probe
gtgatgtccgccagaggctcatgaa

SEQ ID NO: 216429 - DNA, 25 bp, Artificial
  Probe
tacaaggaccaggaacccctggagt

SEQ ID NO: 216430 - DNA, 25 bp, Artificial
  Probe
gtacaaggaccaggaacccctggag

SEQ ID NO: 216431 - DNA, 25 bp, Artificial
  Probe
cgccagaggctcatgaagaggctct

SEQ ID NO: 216432 - DNA, 25 bp, Artificial
  Probe
tgagctgtggggactacaccgactc

SEQ ID NO: 216433 - DNA, 25 bp, Artificial
  Probe
ctccagcctctgtgctggaagccag

SEQ ID NO: 216434 - DNA, 25 bp, Artificial
  Probe
ggtaggaacatgaccttccactgtg

SEQ ID NO: 216435 - DNA, 25 bp, Artificial
  Probe
ctaccctggctatctggccctgggt

SEQ ID NO: 216436 - DNA, 25 bp, Artificial
  Probe
acctacacatgtgtggtacgccacc

SEQ ID NO: 216437 - DNA, 25 bp, Artificial
  Probe
cattgcgaggctggaaggcactgtc

SEQ ID NO: 216438 - DNA, 25 bp, Artificial
  Probe
gtgctggaagccagcagataaagca

SEQ ID NO: 216439 - DNA, 25 bp, Artificial
  Probe
tatactggtacaaggaccaggaacc

SEQ ID NO: 216440 - DNA, 25 bp, Artificial
  Probe
gaccaggcactcatgcacctcaatg

SEQ ID NO: 216441 - DNA, 25 bp, Artificial
  Probe
ggacagaagatcctacacaagaaag

SEQ ID NO: 216442 - DNA, 25 bp, Artificial
  Probe
catgcacctcaatgccacattgcga

SEQ ID NO: 216443 - DNA, 25 bp, Artificial
  Probe
caccagaacgaaaacgaggttcgtg

SEQ ID NO: 216444 - DNA, 25 bp, Artificial
  Probe
tgccacattgcgaggctggaaggca

SEQ ID NO: 216445 - DNA, 25 bp, Artificial
  Probe
caaagtatactggtacaaggaccag

SEQ ID NO: 216446 - DNA, 25 bp, Artificial
  Probe
gtgatttctgttacgaattcccatt

SEQ ID NO: 216447 - DNA, 25 bp, Artificial
  Probe
tacgaattcccatttcccacggttg

SEQ ID NO: 216448 - DNA, 25 bp, Artificial
  Probe
catgaagaggctctgccccagaagc

SEQ ID NO: 216449 - DNA, 25 bp, Artificial
  Probe
ggattttgtgatgtccgccagaggc

SEQ ID NO: 216450 - DNA, 25 bp, Artificial
  Probe
accacctactcctggagggtccgag

SEQ ID NO: 216451 - DNA, 25 bp, Artificial
  Probe
gtgaggcacggctgagcatcattgc

SEQ ID NO: 216452 - DNA, 25 bp, Artificial
  Probe
tccgccagaggctcatgaagaggct

SEQ ID NO: 216453 - DNA, 25 bp, Artificial
  Probe
accctggctatctggccctgggtga

SEQ ID NO: 216454 - DNA, 25 bp, Artificial
  Probe
gctgagcatcattgccaatgcagtc

SEQ ID NO: 216455 - DNA, 25 bp, Artificial
  Probe
tcatgcacctcaatgccacattgcg

SEQ ID NO: 216456 - DNA, 25 bp, Artificial
  Probe
aaagtatactggtacaaggaccagg

SEQ ID NO: 216457 - DNA, 25 bp, Artificial
  Probe
cctggagttctcctaccctggctat

SEQ ID NO: 216458 - DNA, 25 bp, Artificial
  Probe
tgtggggactacaccgactctatgg

SEQ ID NO: 216459 - DNA, 25 bp, Artificial
  Probe
tcaatgccacattgcgaggctggaa

SEQ ID NO: 216460 - DNA, 25 bp, Artificial
  Probe
cagaagatcctacacaagaaaggca

SEQ ID NO: 216461 - DNA, 25 bp, Artificial
  Probe
atgaagaggctctgccccagaagct

SEQ ID NO: 216462 - DNA, 25 bp, Artificial
  Probe
ctacacatgtgtggtacgccaccgc

SEQ ID NO: 216463 - DNA, 25 bp, Artificial
  Probe
tccactgtggacagaagatcctaca

SEQ ID NO: 216464 - DNA, 25 bp, Artificial
  Probe
ggctctgccccagaagctgtgattt

SEQ ID NO: 216465 - DNA, 25 bp, Artificial
  Probe
cagatgtcaaaccattagtctcgtt

SEQ ID NO: 216466 - DNA, 25 bp, Artificial
  Probe
ttagtctcgttgtcactagctaggc

SEQ ID NO: 216467 - DNA, 25 bp, Artificial
  Probe
agatcagcagccaggcatatgcatg

SEQ ID NO: 216468 - DNA, 25 bp, Artificial
  Probe
tgtcaaaccattagtctcgttgtca

SEQ ID NO: 216469 - DNA, 25 bp, Artificial
  Probe
ctacacagagatcagcagccaggca

SEQ ID NO: 216470 - DNA, 25 bp, Artificial
  Probe
agctaggcccagacctatgtctaca

SEQ ID NO: 216471 - DNA, 25 bp, Artificial
  Probe
cagacctatgtctacacatagagaa

SEQ ID NO: 216472 - DNA, 25 bp, Artificial
  Probe
cccagacctatgtctacacatagag

SEQ ID NO: 216473 - DNA, 25 bp, Artificial
  Probe
caagatcaaatcttttctggtcagt

SEQ ID NO: 216474 - DNA, 25 bp, Artificial
  Probe
gacctatgtctacacatagagaacc

SEQ ID NO: 216475 - DNA, 25 bp, Artificial
  Probe
cacatagagaaccaaggcaggccaa

SEQ ID NO: 216476 - DNA, 25 bp, Artificial
  Probe
attgctacacagagatcagcagcca

SEQ ID NO: 216477 - DNA, 25 bp, Artificial
  Probe
taggcccagacctatgtctacacat

SEQ ID NO: 216478 - DNA, 25 bp, Artificial
  Probe
acagagatcagcagccaggcatatg

SEQ ID NO: 216479 - DNA, 25 bp, Artificial
  Probe
acatagagaaccaaggcaggccaaa

SEQ ID NO: 216480 - DNA, 25 bp, Artificial
  Probe
gtacaccaactgagaaaagaacagt

SEQ ID NO: 216481 - DNA, 25 bp, Artificial
  Probe
ctatgtctacacatagagaaccaag

SEQ ID NO: 216482 - DNA, 25 bp, Artificial
  Probe
caaatcttttctggtcagttattag

SEQ ID NO: 216483 - DNA, 25 bp, Artificial
  Probe
agccaggcatatgcatgaaaaacag

SEQ ID NO: 216484 - DNA, 25 bp, Artificial
  Probe
ggcccagacctatgtctacacatag

SEQ ID NO: 216485 - DNA, 25 bp, Artificial
  Probe
ctcgttgtcactagctaggcccaga

SEQ ID NO: 216486 - DNA, 25 bp, Artificial
  Probe
catagagaaccaaggcaggccaaag

SEQ ID NO: 216487 - DNA, 25 bp, Artificial
  Probe
gctacacagagatcagcagccaggc

SEQ ID NO: 216488 - DNA, 25 bp, Artificial
  Probe
atgtctacacatagagaaccaaggc

SEQ ID NO: 216489 - DNA, 25 bp, Artificial
  Probe
gtctcgttgtcactagctaggccca

SEQ ID NO: 216490 - DNA, 25 bp, Artificial
  Probe
ttgtcactagctaggcccagaccta

SEQ ID NO: 216491 - DNA, 25 bp, Artificial
  Probe
tacaccaactgagaaaagaacagtg

SEQ ID NO: 216492 - DNA, 25 bp, Artificial
  Probe
gcagccaggcatatgcatgaaaaac

SEQ ID NO: 216493 - DNA, 25 bp, Artificial
  Probe
tacacagagatcagcagccaggcat

SEQ ID NO: 216494 - DNA, 25 bp, Artificial
  Probe
gatcaaatcttttctggtcagttat

SEQ ID NO: 216495 - DNA, 25 bp, Artificial
  Probe
cagccaggcatatgcatgaaaaaca

SEQ ID NO: 216496 - DNA, 25 bp, Artificial
  Probe
gtcaaaccattagtctcgttgtcac

SEQ ID NO: 216497 - DNA, 25 bp, Artificial
  Probe
agatgtcaaaccattagtctcgttg

SEQ ID NO: 216498 - DNA, 25 bp, Artificial
  Probe
gttgtcactagctaggcccagacct

SEQ ID NO: 216499 - DNA, 25 bp, Artificial
  Probe
atgtcaaaccattagtctcgttgtc

SEQ ID NO: 216500 - DNA, 25 bp, Artificial
  Probe
attagtctcgttgtcactagctagg

SEQ ID NO: 216501 - DNA, 25 bp, Artificial
  Probe
aaaccattagtctcgttgtcactag

SEQ ID NO: 216502 - DNA, 25 bp, Artificial
  Probe
tagtctcgttgtcactagctaggcc

SEQ ID NO: 216503 - DNA, 25 bp, Artificial
  Probe
cacagagatcagcagccaggcatat

SEQ ID NO: 216504 - DNA, 25 bp, Artificial
  Probe
ttgctacacagagatcagcagccag

SEQ ID NO: 216505 - DNA, 25 bp, Artificial
  Probe
accattagtctcgttgtcactagct

SEQ ID NO: 216506 - DNA, 25 bp, Artificial
  Probe
gacagatgtcaaaccattagtctcg

SEQ ID NO: 216507 - DNA, 25 bp, Artificial
  Probe
cgttgtcactagctaggcccagacc

SEQ ID NO: 216508 - DNA, 25 bp, Artificial
  Probe
gacaagatcaaatcttttctggtca

SEQ ID NO: 216509 - DNA, 25 bp, Artificial
  Probe
cagcagccaggcatatgcatgaaaa

SEQ ID NO: 216510 - DNA, 25 bp, Artificial
  Probe
ctaggcccagacctatgtctacaca

SEQ ID NO: 216511 - DNA, 25 bp, Artificial
  Probe
gttccttggcttggtcattccctac

SEQ ID NO: 216512 - DNA, 25 bp, Artificial
  Probe
gtagccaccatcttaaagcaaagta

SEQ ID NO: 216513 - DNA, 25 bp, Artificial
  Probe
ccaaatctgccattggaggtgtctt

SEQ ID NO: 216514 - DNA, 25 bp, Artificial
  Probe
ccagttctaagaactcaagagagta

SEQ ID NO: 216515 - DNA, 25 bp, Artificial
  Probe
tctaagaactcaagagagtagccac

SEQ ID NO: 216516 - DNA, 25 bp, Artificial
  Probe
ttccttggcttggtcattccctacc

SEQ ID NO: 216517 - DNA, 25 bp, Artificial
  Probe
cggcctcaggagaggtattaacagt

SEQ ID NO: 216518 - DNA, 25 bp, Artificial
  Probe
gagagtagccaccatcttaaagcaa

SEQ ID NO: 216519 - DNA, 25 bp, Artificial
  Probe
ccagcccagttctaagaactcaaga

SEQ ID NO: 216520 - DNA, 25 bp, Artificial
  Probe
aatctgccattggaggtgtcttccc

SEQ ID NO: 216521 - DNA, 25 bp, Artificial
  Probe
gcccagttctaagaactcaagagag

SEQ ID NO: 216522 - DNA, 25 bp, Artificial
  Probe
caaatctgccattggaggtgtcttc

SEQ ID NO: 216523 - DNA, 25 bp, Artificial
  Probe
cagttctaagaactcaagagagtag

SEQ ID NO: 216524 - DNA, 25 bp, Artificial
  Probe
attggaggtgtcttcccctgtgttg

SEQ ID NO: 216525 - DNA, 25 bp, Artificial
  Probe
cattggaggtgtcttcccctgtgtt

SEQ ID NO: 216526 - DNA, 25 bp, Artificial
  Probe
tgccattggaggtgtcttcccctgt

SEQ ID NO: 216527 - DNA, 25 bp, Artificial
  Probe
agccaccatcttaaagcaaagtagc

SEQ ID NO: 216528 - DNA, 25 bp, Artificial
  Probe
cagcccagttctaagaactcaagag

SEQ ID NO: 216529 - DNA, 25 bp, Artificial
  Probe
tctgccattggaggtgtcttcccct

SEQ ID NO: 216530 - DNA, 25 bp, Artificial
  Probe
ctgccattggaggtgtcttcccctg

SEQ ID NO: 216531 - DNA, 25 bp, Artificial
  Probe
aagagagtagccaccatcttaaagc

SEQ ID NO: 216532 - DNA, 25 bp, Artificial
  Probe
cccagttctaagaactcaagagagt

SEQ ID NO: 216533 - DNA, 25 bp, Artificial
  Probe
tccttggcttggtcattccctacct

SEQ ID NO: 216534 - DNA, 25 bp, Artificial
  Probe
tcggcctcaggagaggtattaacag

SEQ ID NO: 216535 - DNA, 25 bp, Artificial
  Probe
actcaagagagtagccaccatctta

SEQ ID NO: 216536 - DNA, 25 bp, Artificial
  Probe
gccattggaggtgtcttcccctgtg

SEQ ID NO: 216537 - DNA, 25 bp, Artificial
  Probe
tgttccttggcttggtcattcccta

SEQ ID NO: 216538 - DNA, 25 bp, Artificial
  Probe
cttggcttggtcattccctaccttt

SEQ ID NO: 216539 - DNA, 25 bp, Artificial
  Probe
agagagtagccaccatcttaaagca

SEQ ID NO: 216540 - DNA, 25 bp, Artificial
  Probe
ctgttccttggcttggtcattccct

SEQ ID NO: 216541 - DNA, 25 bp, Artificial
  Probe
tagccaccatcttaaagcaaagtag

SEQ ID NO: 216542 - DNA, 25 bp, Artificial
  Probe
agcccagttctaagaactcaagaga

SEQ ID NO: 216543 - DNA, 25 bp, Artificial
  Probe
ccttggcttggtcattccctacctt

SEQ ID NO: 216544 - DNA, 25 bp, Artificial
  Probe
aaatctgccattggaggtgtcttcc

SEQ ID NO: 216545 - DNA, 25 bp, Artificial
  Probe
agagtagccaccatcttaaagcaaa

SEQ ID NO: 216546 - DNA, 25 bp, Artificial
  Probe
agtagccaccatcttaaagcaaagt

SEQ ID NO: 216547 - DNA, 25 bp, Artificial
  Probe
agttctaagaactcaagagagtagc

SEQ ID NO: 216548 - DNA, 25 bp, Artificial
  Probe
ttctaagaactcaagagagtagcca

SEQ ID NO: 216549 - DNA, 25 bp, Artificial
  Probe
atctgccattggaggtgtcttcccc

SEQ ID NO: 216550 - DNA, 25 bp, Artificial
  Probe
gttctaagaactcaagagagtagcc

SEQ ID NO: 216551 - DNA, 25 bp, Artificial
  Probe
ccattggaggtgtcttcccctgtgt

SEQ ID NO: 216552 - DNA, 25 bp, Artificial
  Probe
ttggaggtgtcttcccctgtgttgg

SEQ ID NO: 216553 - DNA, 25 bp, Artificial
  Probe
gagtagccaccatcttaaagcaaag

SEQ ID NO: 216554 - DNA, 25 bp, Artificial
  Probe
aagcagagcctgaagaccttcagtc

SEQ ID NO: 216555 - DNA, 25 bp, Artificial
  Probe
aaactacatggcaagttctgtggct

SEQ ID NO: 216556 - DNA, 25 bp, Artificial
  Probe
cccatcgaggagaccctaagacaag

SEQ ID NO: 216557 - DNA, 25 bp, Artificial
  Probe
cagtaccgtatctccctgcaatttg

SEQ ID NO: 216558 - DNA, 25 bp, Artificial
  Probe
tccaaaaagggcttcaaggcccact

SEQ ID NO: 216559 - DNA, 25 bp, Artificial
  Probe
gaggtcatcacttcccagtacaaca

SEQ ID NO: 216560 - DNA, 25 bp, Artificial
  Probe
agttcaagtctgacaatactgtgtc

SEQ ID NO: 216561 - DNA, 25 bp, Artificial
  Probe
caaggcccacttcttctcaggaggg

SEQ ID NO: 216562 - DNA, 25 bp, Artificial
  Probe
ctctaaactacatggcaagttctgt

SEQ ID NO: 216563 - DNA, 25 bp, Artificial
  Probe
gaccctaagacaagaaggagaagca

SEQ ID NO: 216564 - DNA, 25 bp, Artificial
  Probe
ggctgtgtggacttttgggacaccc

SEQ ID NO: 216565 - DNA, 25 bp, Artificial
  Probe
aagttctgtggctccgagaaaccag

SEQ ID NO: 216566 - DNA, 25 bp, Artificial
  Probe
agaagcagagcctgaagaccttcag

SEQ ID NO: 216567 - DNA, 25 bp, Artificial
  Probe
ctccctgcaatttgacttcttcgag

SEQ ID NO: 216568 - DNA, 25 bp, Artificial
  Probe
ctgtgtccaaaaagggcttcaaggc

SEQ ID NO: 216569 - DNA, 25 bp, Artificial
  Probe
tgtgagcagcggtgcctaaacaccc

SEQ ID NO: 216570 - DNA, 25 bp, Artificial
  Probe
tgcatctggcagttggtggccccca

SEQ ID NO: 216571 - DNA, 25 bp, Artificial
  Probe
cccagacaagcgtcggtgtgaagct

SEQ ID NO: 216572 - DNA, 25 bp, Artificial
  Probe
tggccccagacaagcgtcggtgtga

SEQ ID NO: 216573 - DNA, 25 bp, Artificial
  Probe
tcttcgagactgagggcaatgatgt

SEQ ID NO: 216574 - DNA, 25 bp, Artificial
  Probe
gcttcaaggcccacttcttctcagg

SEQ ID NO: 216575 - DNA, 25 bp, Artificial
  Probe
ggtgcgcagcggactcacagccgac

SEQ ID NO: 216576 - DNA, 25 bp, Artificial
  Probe
tgagctggccccagacaagcgtcgg

SEQ ID NO: 216577 - DNA, 25 bp, Artificial
  Probe
gcagctacaagtgcagctgtgaccc

SEQ ID NO: 216578 - DNA, 25 bp, Artificial
  Probe
caagcgtcggtgtgaagctgcctgc

SEQ ID NO: 216579 - DNA, 25 bp, Artificial
  Probe
agcctgaagaccttcagtctgaccc

SEQ ID NO: 216580 - DNA, 25 bp, Artificial
  Probe
tcacagccgactctaaactacatgg

SEQ ID NO: 216581 - DNA, 25 bp, Artificial
  Probe
tcgaggagaccctaagacaagaagg

SEQ ID NO: 216582 - DNA, 25 bp, Artificial
  Probe
gacttttgggacacccatcgaggag

SEQ ID NO: 216583 - DNA, 25 bp, Artificial
  Probe
gattcctcaccaagctcaatggctc

SEQ ID NO: 216584 - DNA, 25 bp, Artificial
  Probe
acttcccagtacaacaacatgcgtg

SEQ ID NO: 216585 - DNA, 25 bp, Artificial
  Probe
gaagaccttcagtctgaccccagca

SEQ ID NO: 216586 - DNA, 25 bp, Artificial
  Probe
tctgtggctccgagaaaccagaggt

SEQ ID NO: 216587 - DNA, 25 bp, Artificial
  Probe
tgtgtggacttttgggacacccatc

SEQ ID NO: 216588 - DNA, 25 bp, Artificial
  Probe
agctgcctgcggtggattcctcacc

SEQ ID NO: 216589 - DNA, 25 bp, Artificial
  Probe
cagcggactcacagccgactctaaa

SEQ ID NO: 216590 - DNA, 25 bp, Artificial
  Probe
tggacttttgggacacccatcgagg

SEQ ID NO: 216591 - DNA, 25 bp, Artificial
  Probe
tgtgaagctgcctgcggtggattcc

SEQ ID NO: 216592 - DNA, 25 bp, Artificial
  Probe
agtgcagctgtgaccccggctatga

SEQ ID NO: 216593 - DNA, 25 bp, Artificial
  Probe
caacaacatgcgtgtggagttcaag

SEQ ID NO: 216594 - DNA, 25 bp, Artificial
  Probe
cacctccggggcatttgggcactgt

SEQ ID NO: 216595 - DNA, 25 bp, Artificial
  Probe
catgcgtgtggagttcaagtctgac

SEQ ID NO: 216596 - DNA, 25 bp, Artificial
  Probe
actgcatctggcagttggtggcccc

SEQ ID NO: 216597 - DNA, 25 bp, Artificial
  Probe
caagtatgatttcgtggaggtgcgc

SEQ ID NO: 216598 - DNA, 25 bp, Artificial
  Probe
cgagaaaccagaggtcatcacttcc

SEQ ID NO: 216599 - DNA, 25 bp, Artificial
  Probe
tggcaagttctgtggctccgagaaa

SEQ ID NO: 216600 - DNA, 25 bp, Artificial
  Probe
tgcggctgagagatggcgtcataac

SEQ ID NO: 216601 - DNA, 25 bp, Artificial
  Probe
gacagtatggtgtggcccagacacg

SEQ ID NO: 216602 - DNA, 25 bp, Artificial
  Probe
catcccgagcagcaccgggtcgtga

SEQ ID NO: 216603 - DNA, 25 bp, Artificial
  Probe
gagtgggatggcttcttcagtacca

SEQ ID NO: 216604 - DNA, 25 bp, Artificial
  Probe
ttaagctctgtctgctggccagcgc

SEQ ID NO: 216605 - DNA, 25 bp, Artificial
  Probe
cccgtgcctgccagctgagtgttgt

SEQ ID NO: 216606 - DNA, 25 bp, Artificial
  Probe
gctcctgtgcggaaggcaagacctg

SEQ ID NO: 216607 - DNA, 25 bp, Artificial
  Probe
agatccagaatggagcctcagcccc

SEQ ID NO: 216608 - DNA, 25 bp, Artificial
  Probe
cccgctgtccccaggatcggattgg

SEQ ID NO: 216609 - DNA, 25 bp, Artificial
  Probe
tgttctgctcagtgtctgtgaccat

SEQ ID NO: 216610 - DNA, 25 bp, Artificial
  Probe
acgacacgaagaacggctgcagcag

SEQ ID NO: 216611 - DNA, 25 bp, Artificial
  Probe
ctgtattctatcagatctgccactg

SEQ ID NO: 216612 - DNA, 25 bp, Artificial
  Probe
ccagagccccacgtgcactgatgtt

SEQ ID NO: 216613 - DNA, 25 bp, Artificial
  Probe
tggcccagacacgaaggagggccat

SEQ ID NO: 216614 - DNA, 25 bp, Artificial
  Probe
ctcagctgcagttaaaggaaaggag

SEQ ID NO: 216615 - DNA, 25 bp, Artificial
  Probe
gtcctggttccagaggcagctgcga

SEQ ID NO: 216616 - DNA, 25 bp, Artificial
  Probe
tcgctacactttccacgacacgaag

SEQ ID NO: 216617 - DNA, 25 bp, Artificial
  Probe
gcgaccctgcttccagacaattcaa

SEQ ID NO: 216618 - DNA, 25 bp, Artificial
  Probe
ggcgtcataaccaataaacttcgct

SEQ ID NO: 216619 - DNA, 25 bp, Artificial
  Probe
ccatcctcagggaccatatctgcaa

SEQ ID NO: 216620 - DNA, 25 bp, Artificial
  Probe
atcggcctggagattaagctctgtc

SEQ ID NO: 216621 - DNA, 25 bp, Artificial
  Probe
agcccccgagatctcctacaatgga

SEQ ID NO: 216622 - DNA, 25 bp, Artificial
  Probe
tctgcaaggacatgagcgcgctggt

SEQ ID NO: 216623 - DNA, 25 bp, Artificial
  Probe
caaccactgggctggcctctacggg

SEQ ID NO: 216624 - DNA, 25 bp, Artificial
  Probe
ccaacatacaagtgcggctgagaga

SEQ ID NO: 216625 - DNA, 25 bp, Artificial
  Probe
gtgcctgccgcacactgggaaccgg

SEQ ID NO: 216626 - DNA, 25 bp, Artificial
  Probe
aattcaacacgctcatcccctggtg

SEQ ID NO: 216627 - DNA, 25 bp, Artificial
  Probe
actgggctggcctctacgggcgtct

SEQ ID NO: 216628 - DNA, 25 bp, Artificial
  Probe
gatacctaccggttattcggcaaca

SEQ ID NO: 216629 - DNA, 25 bp, Artificial
  Probe
tcccagaacctctacacgtgtttgc

SEQ ID NO: 216630 - DNA, 25 bp, Artificial
  Probe
ccgtgcctgccagctgagtgttgtg

SEQ ID NO: 216631 - DNA, 25 bp, Artificial
  Probe
tgcgaccctgcttccagacaattca

SEQ ID NO: 216632 - DNA, 25 bp, Artificial
  Probe
aagccatcggcctggagattaagct

SEQ ID NO: 216633 - DNA, 25 bp, Artificial
  Probe
ctgggaaccggcacaaccactgggc

SEQ ID NO: 216634 - DNA, 25 bp, Artificial
  Probe
atcctggacagacaccggcaggtgg

SEQ ID NO: 216635 - DNA, 25 bp, Artificial
  Probe
gaaggcaagacctgcgaccctgctt

SEQ ID NO: 216636 - DNA, 25 bp, Artificial
  Probe
aggactagtgctctcacccagagcc

SEQ ID NO: 216637 - DNA, 25 bp, Artificial
  Probe
gggtcccttccgaaccatcacggtg

SEQ ID NO: 216638 - DNA, 25 bp, Artificial
  Probe
ggtgcctgccgcacactgggaaccg

SEQ ID NO: 216639 - DNA, 25 bp, Artificial
  Probe
ctgacactaagctgtttggaggttt

SEQ ID NO: 216640 - DNA, 25 bp, Artificial
  Probe
aggaggagactactaccgaggacta

SEQ ID NO: 216641 - DNA, 25 bp, Artificial
  Probe
cactgatgtttttaacccgtcgagc

SEQ ID NO: 216642 - DNA, 25 bp, Artificial
  Probe
gctgacactaagctgtttggaggtt

SEQ ID NO: 216643 - DNA, 25 bp, Artificial
  Probe
atggcttcttcagtaccaccgtcac

SEQ ID NO: 216644 - DNA, 25 bp, Artificial
  Probe
ccgtcgagccccatcatttgaagtg

SEQ ID NO: 216645 - DNA, 25 bp, Artificial
  Probe
atcccgagcagcaccgggtcgtgag

SEQ ID NO: 216646 - DNA, 25 bp, Artificial
  Probe
ggagccagcagcaggaccccctggt

SEQ ID NO: 216647 - DNA, 25 bp, Artificial
  Probe
tgtgagggctccttcaatggcaatg

SEQ ID NO: 216648 - DNA, 25 bp, Artificial
  Probe
tgcaattggttctgtgagggctcct

SEQ ID NO: 216649 - DNA, 25 bp, Artificial
  Probe
cgccaatgtgggcaactgcaattgg

SEQ ID NO: 216650 - DNA, 25 bp, Artificial
  Probe
agctggaaagcaggatccaggagag

SEQ ID NO: 216651 - DNA, 25 bp, Artificial
  Probe
atgtgggcaactgcaattggttctg

SEQ ID NO: 216652 - DNA, 25 bp, Artificial
  Probe
caatgtgggcaactgcaattggttc

SEQ ID NO: 216653 - DNA, 25 bp, Artificial
  Probe
ctccttcaatggcaatgagaaggag

SEQ ID NO: 216654 - DNA, 25 bp, Artificial
  Probe
gggctccttcaatggcaatgagaag

SEQ ID NO: 216655 - DNA, 25 bp, Artificial
  Probe
aggagccagcagcaggaccccctgg

SEQ ID NO: 216656 - DNA, 25 bp, Artificial
  Probe
ctgcaattggttctgtgagggctcc

SEQ ID NO: 216657 - DNA, 25 bp, Artificial
  Probe
aaagcaggatccaggagaggagcca

SEQ ID NO: 216658 - DNA, 25 bp, Artificial
  Probe
cttcaatggcaatgagaaggagacc

SEQ ID NO: 216659 - DNA, 25 bp, Artificial
  Probe
aattggttctgtgagggctccttca

SEQ ID NO: 216660 - DNA, 25 bp, Artificial
  Probe
caattggttctgtgagggctccttc

SEQ ID NO: 216661 - DNA, 25 bp, Artificial
  Probe
ggcaactgcaattggttctgtgagg

SEQ ID NO: 216662 - DNA, 25 bp, Artificial
  Probe
ctcctacctggagaaggtgaggcag

SEQ ID NO: 216663 - DNA, 25 bp, Artificial
  Probe
attggttctgtgagggctccttcaa

SEQ ID NO: 216664 - DNA, 25 bp, Artificial
  Probe
agccagcagcaggaccccctggtgt

SEQ ID NO: 216665 - DNA, 25 bp, Artificial
  Probe
gccaatgtgggcaactgcaattggt

SEQ ID NO: 216666 - DNA, 25 bp, Artificial
  Probe
gggcaactgcaattggttctgtgag

SEQ ID NO: 216667 - DNA, 25 bp, Artificial
  Probe
tctgtgagggctccttcaatggcaa

SEQ ID NO: 216668 - DNA, 25 bp, Artificial
  Probe
gcaactgcaattggttctgtgaggg

SEQ ID NO: 216669 - DNA, 25 bp, Artificial
  Probe
caactgcaattggttctgtgagggc

SEQ ID NO: 216670 - DNA, 25 bp, Artificial
  Probe
actgcaattggttctgtgagggctc

SEQ ID NO: 216671 - DNA, 25 bp, Artificial
  Probe
tccttcaatggcaatgagaaggaga

SEQ ID NO: 216672 - DNA, 25 bp, Artificial
  Probe
aatgtgggcaactgcaattggttct

SEQ ID NO: 216673 - DNA, 25 bp, Artificial
  Probe
ccttcaatggcaatgagaaggagac

SEQ ID NO: 216674 - DNA, 25 bp, Artificial
  Probe
ccaatgtgggcaactgcaattggtt

SEQ ID NO: 216675 - DNA, 25 bp, Artificial
  Probe
tgagggctccttcaatggcaatgag

SEQ ID NO: 216676 - DNA, 25 bp, Artificial
  Probe
gtgagggctccttcaatggcaatga

SEQ ID NO: 216677 - DNA, 25 bp, Artificial
  Probe
tcctacctggagaaggtgaggcagc

SEQ ID NO: 216678 - DNA, 25 bp, Artificial
  Probe
tgtgggcaactgcaattggttctgt

SEQ ID NO: 216679 - DNA, 25 bp, Artificial
  Probe
gcaattggttctgtgagggctcctt

SEQ ID NO: 216680 - DNA, 25 bp, Artificial
  Probe
ttctgtgagggctccttcaatggca

SEQ ID NO: 216681 - DNA, 25 bp, Artificial
  Probe
ctgtgagggctccttcaatggcaat

SEQ ID NO: 216682 - DNA, 25 bp, Artificial
  Probe
gagccagcagcaggaccccctggtg

SEQ ID NO: 216683 - DNA, 25 bp, Artificial
  Probe
cctcctacctggagaaggtgaggca

SEQ ID NO: 216684 - DNA, 25 bp, Artificial
  Probe
ttggttctgtgagggctccttcaat

SEQ ID NO: 216685 - DNA, 25 bp, Artificial
  Probe
agggctccttcaatggcaatgagaa

SEQ ID NO: 216686 - DNA, 25 bp, Artificial
  Probe
aactgcaattggttctgtgagggct

SEQ ID NO: 216687 - DNA, 25 bp, Artificial
  Probe
atgcagagctggaaagcaggatcca

SEQ ID NO: 216688 - DNA, 25 bp, Artificial
  Probe
tgggcaactgcaattggttctgtga

SEQ ID NO: 216689 - DNA, 25 bp, Artificial
  Probe
gtgggcaactgcaattggttctgtg

SEQ ID NO: 216690 - DNA, 25 bp, Artificial
  Probe
gagggctccttcaatggcaatgaga

SEQ ID NO: 216691 - DNA, 25 bp, Artificial
  Probe
tgaggcagctggagagagagaatgc

SEQ ID NO: 216692 - DNA, 25 bp, Artificial
  Probe
acacgcacagcgtccgcagcgtgtt

SEQ ID NO: 216693 - DNA, 25 bp, Artificial
  Probe
agggatcctgtccaagtcctcctgt

SEQ ID NO: 216694 - DNA, 25 bp, Artificial
  Probe
gactccaattaaagattgacttttg

SEQ ID NO: 216695 - DNA, 25 bp, Artificial
  Probe
atcctgtccaagtcctcctgtgggc

SEQ ID NO: 216696 - DNA, 25 bp, Artificial
  Probe
tcctagctgttagagaaaggacctt

SEQ ID NO: 216697 - DNA, 25 bp, Artificial
  Probe
accggatagaactgtccggggcttg

SEQ ID NO: 216698 - DNA, 25 bp, Artificial
  Probe
tccaagtcctcctgtgggcctcatg

SEQ ID NO: 216699 - DNA, 25 bp, Artificial
  Probe
actgtccggggcttgtgacttccca

SEQ ID NO: 216700 - DNA, 25 bp, Artificial
  Probe
gcgtccgcagcgtgttcaaggacgt

SEQ ID NO: 216701 - DNA, 25 bp, Artificial
  Probe
agttctacttgctgtctacccattg

SEQ ID NO: 216702 - DNA, 25 bp, Artificial
  Probe
tgctggcccggtacctggacgagat

SEQ ID NO: 216703 - DNA, 25 bp, Artificial
  Probe
ccggatagaactgtccggggcttgt

SEQ ID NO: 216704 - DNA, 25 bp, Artificial
  Probe
actgaggtagactccaattaaagat

SEQ ID NO: 216705 - DNA, 25 bp, Artificial
  Probe
cgagctgtgcagagccccacgacgg

SEQ ID NO: 216706 - DNA, 25 bp, Artificial
  Probe
gggactcagtgctggcccggtacct

SEQ ID NO: 216707 - DNA, 25 bp, Artificial
  Probe
tgggcctcatgctgggtaagtgaaa

SEQ ID NO: 216708 - DNA, 25 bp, Artificial
  Probe
gcgagctgtgcagagccccacgacg

SEQ ID NO: 216709 - DNA, 25 bp, Artificial
  Probe
ctcatgctgggtaagtgaaatgtgc

SEQ ID NO: 216710 - DNA, 25 bp, Artificial
  Probe
tggtggccactctcggaactgcagg

SEQ ID NO: 216711 - DNA, 25 bp, Artificial
  Probe
cacagcgtccgcagcgtgttcaagg

SEQ ID NO: 216712 - DNA, 25 bp, Artificial
  Probe
gacttcccagggatcctgtccaagt

SEQ ID NO: 216713 - DNA, 25 bp, Artificial
  Probe
tcaacctgttgtgacacggggaacc

SEQ ID NO: 216714 - DNA, 25 bp, Artificial
  Probe
ctcctgtgggcctcatgctgggtaa

SEQ ID NO: 216715 - DNA, 25 bp, Artificial
  Probe
caagtcctcctgtgggcctcatgct

SEQ ID NO: 216716 - DNA, 25 bp, Artificial
  Probe
ttcccagggatcctgtccaagtcct

SEQ ID NO: 216717 - DNA, 25 bp, Artificial
  Probe
ttgtgacttcccagggatcctgtcc

SEQ ID NO: 216718 - DNA, 25 bp, Artificial
  Probe
cgtgttcaaggacgtgcgggactca

SEQ ID NO: 216719 - DNA, 25 bp, Artificial
  Probe
tgtccaagtcctcctgtgggcctca

SEQ ID NO: 216720 - DNA, 25 bp, Artificial
  Probe
gaaggaagttctacttgctgtctac

SEQ ID NO: 216721 - DNA, 25 bp, Artificial
  Probe
acttcccagggatcctgtccaagtc

SEQ ID NO: 216722 - DNA, 25 bp, Artificial
  Probe
gaagttctacttgctgtctacccat

SEQ ID NO: 216723 - DNA, 25 bp, Artificial
  Probe
tgtccggggcttgtgacttcccagg

SEQ ID NO: 216724 - DNA, 25 bp, Artificial
  Probe
cctcatgctgggtaagtgaaatgtg

SEQ ID NO: 216725 - DNA, 25 bp, Artificial
  Probe
ctacttgctgtctacccattggttg

SEQ ID NO: 216726 - DNA, 25 bp, Artificial
  Probe
cagagccccacgacggtggcaggaa

SEQ ID NO: 216727 - DNA, 25 bp, Artificial
  Probe
cctgtgggcctcatgctgggtaagt

SEQ ID NO: 216728 - DNA, 25 bp, Artificial
  Probe
tccggggcttgtgacttcccaggga

SEQ ID NO: 216729 - DNA, 25 bp, Artificial
  Probe
acgcgagctgtgcagagccccacga

SEQ ID NO: 216730 - DNA, 25 bp, Artificial
  Probe
tccgcagcgtgttcaaggacgtgcg

SEQ ID NO: 216731 - DNA, 25 bp, Artificial
  Probe
gtagactccaattaaagattgactt

SEQ ID NO: 216732 - DNA, 25 bp, Artificial
  Probe
tgttcaaggacgtgcgggactcagt

SEQ ID NO: 216733 - DNA, 25 bp, Artificial
  Probe
gggcttgtgacttcccagggatcct

SEQ ID NO: 216734 - DNA, 25 bp, Artificial
  Probe
ctcactctcctagctgttagagaaa

SEQ ID NO: 216735 - DNA, 25 bp, Artificial
  Probe
cgggactcagtgctggcccggtacc

SEQ ID NO: 216736 - DNA, 25 bp, Artificial
  Probe
cctcactctcctagctgttagagaa

SEQ ID NO: 216737 - DNA, 25 bp, Artificial
  Probe
aggtagactccaattaaagattgac

SEQ ID NO: 216738 - DNA, 25 bp, Artificial
  Probe
ccagtcgctggctgagcctgaggac

SEQ ID NO: 216739 - DNA, 25 bp, Artificial
  Probe
gactcagtcgcgaggatgttccaac

SEQ ID NO: 216740 - DNA, 25 bp, Artificial
  Probe
tttccgatggccatcaggcggccac

SEQ ID NO: 216741 - DNA, 25 bp, Artificial
  Probe
ttgtctttccgatggccatcaggcg

SEQ ID NO: 216742 - DNA, 25 bp, Artificial
  Probe
tcatccctgctctggggagctcagg

SEQ ID NO: 216743 - DNA, 25 bp, Artificial
  Probe
ggtgactcagcctactcaagctgtt

SEQ ID NO: 216744 - DNA, 25 bp, Artificial
  Probe
gctgagcctgaggacagcaggcctc

SEQ ID NO: 216745 - DNA, 25 bp, Artificial
  Probe
gctgtttctggcttcctggctggat

SEQ ID NO: 216746 - DNA, 25 bp, Artificial
  Probe
agacgaggcggcaggaaaagccttt

SEQ ID NO: 216747 - DNA, 25 bp, Artificial
  Probe
cctgaggacagcaggcctctgggtc

SEQ ID NO: 216748 - DNA, 25 bp, Artificial
  Probe
agtgggcagccctgcaagagactct

SEQ ID NO: 216749 - DNA, 25 bp, Artificial
  Probe
cctgggtgactcagcctactcaagc

SEQ ID NO: 216750 - DNA, 25 bp, Artificial
  Probe
ttcctgaaggagatcactatttgtc

SEQ ID NO: 216751 - DNA, 25 bp, Artificial
  Probe
tcggtcctgagacctcaaggtggag

SEQ ID NO: 216752 - DNA, 25 bp, Artificial
  Probe
tctgaacccactttgccagctgctg

SEQ ID NO: 216753 - DNA, 25 bp, Artificial
  Probe
ttgctgagggacagcccagtcgctg

SEQ ID NO: 216754 - DNA, 25 bp, Artificial
  Probe
cctgctctggggagctcaggtgctc

SEQ ID NO: 216755 - DNA, 25 bp, Artificial
  Probe
tgcaagagactctgccaagtgagct

SEQ ID NO: 216756 - DNA, 25 bp, Artificial
  Probe
gcaggaaaagcctttgctgagggac

SEQ ID NO: 216757 - DNA, 25 bp, Artificial
  Probe
atcacagtgggcagccctgcaagag

SEQ ID NO: 216758 - DNA, 25 bp, Artificial
  Probe
ctctgtgacgggagacctcaggaag

SEQ ID NO: 216759 - DNA, 25 bp, Artificial
  Probe
aatgtgcaggcctggctctctgaac

SEQ ID NO: 216760 - DNA, 25 bp, Artificial
  Probe
tttgtctttccgatggccatcaggc

SEQ ID NO: 216761 - DNA, 25 bp, Artificial
  Probe
ccaccctgcaaatgtggtcagtgat

SEQ ID NO: 216762 - DNA, 25 bp, Artificial
  Probe
agagactctgccaagtgagctcaac

SEQ ID NO: 216763 - DNA, 25 bp, Artificial
  Probe
cagcccagtcgctggctgagcctga

SEQ ID NO: 216764 - DNA, 25 bp, Artificial
  Probe
aggagatcactatttgtctttccga

SEQ ID NO: 216765 - DNA, 25 bp, Artificial
  Probe
acaagcagggctgtttgctctgtga

SEQ ID NO: 216766 - DNA, 25 bp, Artificial
  Probe
tgccctgcataccacgtctactgga

SEQ ID NO: 216767 - DNA, 25 bp, Artificial
  Probe
ctcgaccccaaatgtgcaggcctgg

SEQ ID NO: 216768 - DNA, 25 bp, Artificial
  Probe
accccaaatgtgcaggcctggctct

SEQ ID NO: 216769 - DNA, 25 bp, Artificial
  Probe
gtttgctctgtgacgggagacctca

SEQ ID NO: 216770 - DNA, 25 bp, Artificial
  Probe
ccacgtctactggaggcgcgctgcg

SEQ ID NO: 216771 - DNA, 25 bp, Artificial
  Probe
ctttgctgagggacagcccagtcgc

SEQ ID NO: 216772 - DNA, 25 bp, Artificial
  Probe
atcctatctcggtcctgagacctca

SEQ ID NO: 216773 - DNA, 25 bp, Artificial
  Probe
gtgactcatccctgctctggggagc

SEQ ID NO: 216774 - DNA, 25 bp, Artificial
  Probe
actttgccagctgctgccctgcata

SEQ ID NO: 216775 - DNA, 25 bp, Artificial
  Probe
aaatgtggtcagtgatcctatctcg

SEQ ID NO: 216776 - DNA, 25 bp, Artificial
  Probe
aagcagggctgtttgctctgtgacg

SEQ ID NO: 216777 - DNA, 25 bp, Artificial
  Probe
cctgcaaatgtggtcagtgatccta

SEQ ID NO: 216778 - DNA, 25 bp, Artificial
  Probe
ggtcggcctgggtgactcagcctac

SEQ ID NO: 216779 - DNA, 25 bp, Artificial
  Probe
aagcctttgctgagggacagcccag

SEQ ID NO: 216780 - DNA, 25 bp, Artificial
  Probe
gttccaacaagcagggctgtttgct

SEQ ID NO: 216781 - DNA, 25 bp, Artificial
  Probe
gctgtttgctctgtgacgggagacc

SEQ ID NO: 216782 - DNA, 25 bp, Artificial
  Probe
cgcgaggatgttccaacaagcaggg

SEQ ID NO: 216783 - DNA, 25 bp, Artificial
  Probe
tttctggcttcctggctggatgtgg

SEQ ID NO: 216784 - DNA, 25 bp, Artificial
  Probe
ggattcagggactcattttgctttc

SEQ ID NO: 216785 - DNA, 25 bp, Artificial
  Probe
ttcccagaaatcgaaagaatggtga

SEQ ID NO: 216786 - DNA, 25 bp, Artificial
  Probe
aagatgtgaacttggcctgacccta

SEQ ID NO: 216787 - DNA, 25 bp, Artificial
  Probe
agatactgccccaaggaggctattc

SEQ ID NO: 216788 - DNA, 25 bp, Artificial
  Probe
caacaagaacgcaaacttgattgcc

SEQ ID NO: 216789 - DNA, 25 bp, Artificial
  Probe
cattttgctttctcccacagcagtg

SEQ ID NO: 216790 - DNA, 25 bp, Artificial
  Probe
ggcccagttgtggaaagcaacaaga

SEQ ID NO: 216791 - DNA, 25 bp, Artificial
  Probe
aggcccattctgtccacccaataga

SEQ ID NO: 216792 - DNA, 25 bp, Artificial
  Probe
gaaactcgcagctggcctggcagtg

SEQ ID NO: 216793 - DNA, 25 bp, Artificial
  Probe
ctcacaagggattcagggactcatt

SEQ ID NO: 216794 - DNA, 25 bp, Artificial
  Probe
gactgcagtctgactgcattctgga

SEQ ID NO: 216795 - DNA, 25 bp, Artificial
  Probe
ctgctgtcccagcttggcccagttg

SEQ ID NO: 216796 - DNA, 25 bp, Artificial
  Probe
ccaggctcaggactgtctgctcgtg

SEQ ID NO: 216797 - DNA, 25 bp, Artificial
  Probe
accaccactggcagccaaggcgaga

SEQ ID NO: 216798 - DNA, 25 bp, Artificial
  Probe
ctggtcctagaaactcgcagctggc

SEQ ID NO: 216799 - DNA, 25 bp, Artificial
  Probe
attcttaagccctgggctctcctag

SEQ ID NO: 216800 - DNA, 25 bp, Artificial
  Probe
ggctctcctagctcttgttgcccta

SEQ ID NO: 216801 - DNA, 25 bp, Artificial
  Probe
ctcggactgagactagaagcagagc

SEQ ID NO: 216802 - DNA, 25 bp, Artificial
  Probe
cctacctttgggacacctagtatgt

SEQ ID NO: 216803 - DNA, 25 bp, Artificial
  Probe
ttgggaggccctaactagtggaaat

SEQ ID NO: 216804 - DNA, 25 bp, Artificial
  Probe
aggtcccagtggacaccaccactgg

SEQ ID NO: 216805 - DNA, 25 bp, Artificial
  Probe
aaggcgagaccacaagggaactgtg

SEQ ID NO: 216806 - DNA, 25 bp, Artificial
  Probe
tgctgatattcttaagccctgggct

SEQ ID NO: 216807 - DNA, 25 bp, Artificial
  Probe
agtctgactgcattctggaggacgg

SEQ ID NO: 216808 - DNA, 25 bp, Artificial
  Probe
ctagaaactcgcagctggcctggca

SEQ ID NO: 216809 - DNA, 25 bp, Artificial
  Probe
gcagagcctgctgtcccagcttggc

SEQ ID NO: 216810 - DNA, 25 bp, Artificial
  Probe
ccagcttggcccagttgtggaaagc

SEQ ID NO: 216811 - DNA, 25 bp, Artificial
  Probe
ccagtaaacaaacacagcagcctag

SEQ ID NO: 216812 - DNA, 25 bp, Artificial
  Probe
tgtctgctcgtgtccctacctttgg

SEQ ID NO: 216813 - DNA, 25 bp, Artificial
  Probe
ttcctccaagccagggaagtgcttc

SEQ ID NO: 216814 - DNA, 25 bp, Artificial
  Probe
gtggacaccaccactggcagccaag

SEQ ID NO: 216815 - DNA, 25 bp, Artificial
  Probe
cactggcagccaaggcgagaccaca

SEQ ID NO: 216816 - DNA, 25 bp, Artificial
  Probe
ttctgtccacccaatagaccgtttg

SEQ ID NO: 216817 - DNA, 25 bp, Artificial
  Probe
aagttcagagcctggctgtctcccc

SEQ ID NO: 216818 - DNA, 25 bp, Artificial
  Probe
agtggacaccaccactggcagccaa

SEQ ID NO: 216819 - DNA, 25 bp, Artificial
  Probe
tctgtccacccaatagaccgtttgc

SEQ ID NO: 216820 - DNA, 25 bp, Artificial
  Probe
cccaaggaggctattcattgaacag

SEQ ID NO: 216821 - DNA, 25 bp, Artificial
  Probe
gccctaactagtggaaattttgagt

SEQ ID NO: 216822 - DNA, 25 bp, Artificial
  Probe
cctagtatgtttgcaaggagggcag

SEQ ID NO: 216823 - DNA, 25 bp, Artificial
  Probe
cccaatagaccgtttgcccaaggct

SEQ ID NO: 216824 - DNA, 25 bp, Artificial
  Probe
tggccagaagccagggctcccagga

SEQ ID NO: 216825 - DNA, 25 bp, Artificial
  Probe
atggcagatggcagactgcagtctg

SEQ ID NO: 216826 - DNA, 25 bp, Artificial
  Probe
cagtggcttgggaggccctaactag

SEQ ID NO: 216827 - DNA, 25 bp, Artificial
  Probe
ccctcacaagggattcagggactca

SEQ ID NO: 216828 - DNA, 25 bp, Artificial
  Probe
acagaagaggtcacgtggagctcta

SEQ ID NO: 216829 - DNA, 25 bp, Artificial
  Probe
aggctattcattgaacagctcggac

SEQ ID NO: 216830 - DNA, 25 bp, Artificial
  Probe
ctgggccagcggattctcccaggga

SEQ ID NO: 216831 - DNA, 25 bp, Artificial
  Probe
ctacctcttggaacggctaaatgac

SEQ ID NO: 216832 - DNA, 25 bp, Artificial
  Probe
ctgtgctgctggacctggagccccg

SEQ ID NO: 216833 - DNA, 25 bp, Artificial
  Probe
gggatttgtactgtgtcactccatt

SEQ ID NO: 216834 - DNA, 25 bp, Artificial
  Probe
taccccaaaaaactagtgcagacgt

SEQ ID NO: 216835 - DNA, 25 bp, Artificial
  Probe
ccaaaaaactagtgcagacgtactc

SEQ ID NO: 216836 - DNA, 25 bp, Artificial
  Probe
tctggcttgggctcctacctcttgg

SEQ ID NO: 216837 - DNA, 25 bp, Artificial
  Probe
gtaccccaaaaaactagtgcagacg

SEQ ID NO: 216838 - DNA, 25 bp, Artificial
  Probe
aggcagatggcagtgacagcctaga

SEQ ID NO: 216839 - DNA, 25 bp, Artificial
  Probe
aaactagtgcagacgtactccgtgt

SEQ ID NO: 216840 - DNA, 25 bp, Artificial
  Probe
aacccagagaacatctacctgtccg

SEQ ID NO: 216841 - DNA, 25 bp, Artificial
  Probe
atgagtgacgtggtggtccagccct

SEQ ID NO: 216842 - DNA, 25 bp, Artificial
  Probe
acaggctctggcttgggctcctacc

SEQ ID NO: 216843 - DNA, 25 bp, Artificial
  Probe
ctatgccaagctctacaacccagag

SEQ ID NO: 216844 - DNA, 25 bp, Artificial
  Probe
ggagccccgggtgatccattccatc

SEQ ID NO: 216845 - DNA, 25 bp, Artificial
  Probe
gcagtgacagcctagagggatttgt

SEQ ID NO: 216846 - DNA, 25 bp, Artificial
  Probe
ggccagcggattctcccagggagaa

SEQ ID NO: 216847 - DNA, 25 bp, Artificial
  Probe
tggagccccgggtgatccattccat

SEQ ID NO: 216848 - DNA, 25 bp, Artificial
  Probe
actgtgtggtggtgctggacaacac

SEQ ID NO: 216849 - DNA, 25 bp, Artificial
  Probe
ccacgaggacatttttgacatcatt

SEQ ID NO: 216850 - DNA, 25 bp, Artificial
  Probe
cctcctcacgttaaagaggctgacc

SEQ ID NO: 216851 - DNA, 25 bp, Artificial
  Probe
acgtggtggtccagccctacaactc

SEQ ID NO: 216852 - DNA, 25 bp, Artificial
  Probe
agaggctgacccagaacgcggactg

SEQ ID NO: 216853 - DNA, 25 bp, Artificial
  Probe
gctggcaacaactgggccagcggat

SEQ ID NO: 216854 - DNA, 25 bp, Artificial
  Probe
gccaagctctacaacccagagaaca

SEQ ID NO: 216855 - DNA, 25 bp, Artificial
  Probe
gtgctggacaacacggccctgaacc

SEQ ID NO: 216856 - DNA, 25 bp, Artificial
  Probe
actagtgcagacgtactccgtgttc

SEQ ID NO: 216857 - DNA, 25 bp, Artificial
  Probe
ttaaagaggctgacccagaacgcgg

SEQ ID NO: 216858 - DNA, 25 bp, Artificial
  Probe
cgttaaagaggctgacccagaacgc

SEQ ID NO: 216859 - DNA, 25 bp, Artificial
  Probe
agtgacgtggtggtccagccctaca

SEQ ID NO: 216860 - DNA, 25 bp, Artificial
  Probe
cccaaccaggacgagatgagtgacg

SEQ ID NO: 216861 - DNA, 25 bp, Artificial
  Probe
cgggtgatccattccatcctcaact

SEQ ID NO: 216862 - DNA, 25 bp, Artificial
  Probe
aacatctacctgtccgagcatggag

SEQ ID NO: 216863 - DNA, 25 bp, Artificial
  Probe
tgacatcattgatcgggaggcagat

SEQ ID NO: 216864 - DNA, 25 bp, Artificial
  Probe
gggtgatccattccatcctcaactc

SEQ ID NO: 216865 - DNA, 25 bp, Artificial
  Probe
aaatccacgaggacatttttgacat

SEQ ID NO: 216866 - DNA, 25 bp, Artificial
  Probe
ctcacgttaaagaggctgacccaga

SEQ ID NO: 216867 - DNA, 25 bp, Artificial
  Probe
caggtaccccaaaaaactagtgcag

SEQ ID NO: 216868 - DNA, 25 bp, Artificial
  Probe
ggctgacccagaacgcggactgtgt

SEQ ID NO: 216869 - DNA, 25 bp, Artificial
  Probe
gtactgtgtcactccattgctgggg

SEQ ID NO: 216870 - DNA, 25 bp, Artificial
  Probe
gtgacagcctagagggatttgtact

SEQ ID NO: 216871 - DNA, 25 bp, Artificial
  Probe
tcttggaacggctaaatgacaggta

SEQ ID NO: 216872 - DNA, 25 bp, Artificial
  Probe
caaccaggacgagatgagtgacgtg

SEQ ID NO: 216873 - DNA, 25 bp, Artificial
  Probe
gccagcggattctcccagggagaaa

SEQ ID NO: 216874 - DNA, 25 bp, Artificial
  Probe
aggacatttttgacatcattgatcg

SEQ ID NO: 216875 - DNA, 25 bp, Artificial
  Probe
gtgcagacgtactccgtgttcccca

SEQ ID NO: 216876 - DNA, 25 bp, Artificial
  Probe
tcatctaccacagccctgggaatga

SEQ ID NO: 216877 - DNA, 25 bp, Artificial
  Probe
atctaccacagccctgggaatgaaa

SEQ ID NO: 216878 - DNA, 25 bp, Artificial
  Probe
atccagaatttcagtgaattcaaga

SEQ ID NO: 216879 - DNA, 25 bp, Artificial
  Probe
agggagcacatcaatttccacaatt

SEQ ID NO: 216880 - DNA, 25 bp, Artificial
  Probe
agtatccagaatttcagtgaattca

SEQ ID NO: 216881 - DNA, 25 bp, Artificial
  Probe
atttccacaattgtgatctaatatg

SEQ ID NO: 216882 - DNA, 25 bp, Artificial
  Probe
agcacatcaatttccacaattgtga

SEQ ID NO: 216883 - DNA, 25 bp, Artificial
  Probe
ctactcatctaccacagccctggga

SEQ ID NO: 216884 - DNA, 25 bp, Artificial
  Probe
tccacaattgtgatctaatatggct

SEQ ID NO: 216885 - DNA, 25 bp, Artificial
  Probe
gagtatccagaatttcagtgaattc

SEQ ID NO: 216886 - DNA, 25 bp, Artificial
  Probe
ggagcacatcaatttccacaattgt

SEQ ID NO: 216887 - DNA, 25 bp, Artificial
  Probe
taccacagccctgggaatgaaatat

SEQ ID NO: 216888 - DNA, 25 bp, Artificial
  Probe
acaattgtgatctaatatggctact

SEQ ID NO: 216889 - DNA, 25 bp, Artificial
  Probe
ccacagccctgggaatgaaatatat

SEQ ID NO: 216890 - DNA, 25 bp, Artificial
  Probe
acacaccccattggctacaaagata

SEQ ID NO: 216891 - DNA, 25 bp, Artificial
  Probe
tttctgatctttccctggctaaaag

SEQ ID NO: 216892 - DNA, 25 bp, Artificial
  Probe
agatgaaaccatggggaatgtaggt

SEQ ID NO: 216893 - DNA, 25 bp, Artificial
  Probe
taagtttctgatctttccctggcta

SEQ ID NO: 216894 - DNA, 25 bp, Artificial
  Probe
cccattggctacaaagataaaagct

SEQ ID NO: 216895 - DNA, 25 bp, Artificial
  Probe
tgagtatccagaatttcagtgaatt

SEQ ID NO: 216896 - DNA, 25 bp, Artificial
  Probe
agtttctgatctttccctggctaaa

SEQ ID NO: 216897 - DNA, 25 bp, Artificial
  Probe
acagccctgggaatgaaatatatgg

SEQ ID NO: 216898 - DNA, 25 bp, Artificial
  Probe
gtatccagaatttcagtgaattcaa

SEQ ID NO: 216899 - DNA, 25 bp, Artificial
  Probe
tgatctaatatggctactcatctac

SEQ ID NO: 216900 - DNA, 25 bp, Artificial
  Probe
caccccattggctacaaagataaaa

SEQ ID NO: 216901 - DNA, 25 bp, Artificial
  Probe
gagttttacacacacacacacacac

SEQ ID NO: 216902 - DNA, 25 bp, Artificial
  Probe
tatccagaatttcagtgaattcaag

SEQ ID NO: 216903 - DNA, 25 bp, Artificial
  Probe
ttccacaattgtgatctaatatggc

SEQ ID NO: 216904 - DNA, 25 bp, Artificial
  Probe
atgaaaccatggggaatgtaggtaa

SEQ ID NO: 216905 - DNA, 25 bp, Artificial
  Probe
gggagcacatcaatttccacaattg

SEQ ID NO: 216906 - DNA, 25 bp, Artificial
  Probe
tgatctttccctggctaaaaggata

SEQ ID NO: 216907 - DNA, 25 bp, Artificial
  Probe
gtaagtttctgatctttccctggct

SEQ ID NO: 216908 - DNA, 25 bp, Artificial
  Probe
gtttctgatctttccctggctaaaa

SEQ ID NO: 216909 - DNA, 25 bp, Artificial
  Probe
atatggctactcatctaccacagcc

SEQ ID NO: 216910 - DNA, 25 bp, Artificial
  Probe
aagtttctgatctttccctggctaa

SEQ ID NO: 216911 - DNA, 25 bp, Artificial
  Probe
tttccacaattgtgatctaatatgg

SEQ ID NO: 216912 - DNA, 25 bp, Artificial
  Probe
accccattggctacaaagataaaag

SEQ ID NO: 216913 - DNA, 25 bp, Artificial
  Probe
tctgatctttccctggctaaaagga

SEQ ID NO: 216914 - DNA, 25 bp, Artificial
  Probe
tctaccacagccctgggaatgaaat

SEQ ID NO: 216915 - DNA, 25 bp, Artificial
  Probe
gaaaccatggggaatgtaggtaagt

SEQ ID NO: 216916 - DNA, 25 bp, Artificial
  Probe
ctaccacagccctgggaatgaaata

SEQ ID NO: 216917 - DNA, 25 bp, Artificial
  Probe
ctgatctttccctggctaaaaggat

SEQ ID NO: 216918 - DNA, 25 bp, Artificial
  Probe
ccccattggctacaaagataaaagc

SEQ ID NO: 216919 - DNA, 25 bp, Artificial
  Probe
taatatggctactcatctaccacag

SEQ ID NO: 216920 - DNA, 25 bp, Artificial
  Probe
gagcacatcaatttccacaattgtg

SEQ ID NO: 216921 - DNA, 25 bp, Artificial
  Probe
cacagccctgggaatgaaatatatg

SEQ ID NO: 216922 - DNA, 25 bp, Artificial
  Probe
tcgcattcatagctgagttgagcag

SEQ ID NO: 216923 - DNA, 25 bp, Artificial
  Probe
ttctaaaggctgagcttcattactt

SEQ ID NO: 216924 - DNA, 25 bp, Artificial
  Probe
ggaagcttaagctctagaaagcaaa

SEQ ID NO: 216925 - DNA, 25 bp, Artificial
  Probe
cttaagctctagaaagcaaagaact

SEQ ID NO: 216926 - DNA, 25 bp, Artificial
  Probe
agatcagctcttctgtagagaggat

SEQ ID NO: 216927 - DNA, 25 bp, Artificial
  Probe
aggctgagcttcattacttcagtct

SEQ ID NO: 216928 - DNA, 25 bp, Artificial
  Probe
aaggaacacttagcattgttctaaa

SEQ ID NO: 216929 - DNA, 25 bp, Artificial
  Probe
tattacttcccgtgccaggaaggaa

SEQ ID NO: 216930 - DNA, 25 bp, Artificial
  Probe
ttcccgtgccaggaaggaacactta

SEQ ID NO: 216931 - DNA, 25 bp, Artificial
  Probe
taaaggctgagcttcattacttcag

SEQ ID NO: 216932 - DNA, 25 bp, Artificial
  Probe
ctaaaggctgagcttcattacttca

SEQ ID NO: 216933 - DNA, 25 bp, Artificial
  Probe
ttcactattacttcccgtgccagga

SEQ ID NO: 216934 - DNA, 25 bp, Artificial
  Probe
ccgtgccaggaaggaacacttagca

SEQ ID NO: 216935 - DNA, 25 bp, Artificial
  Probe
tagagagatcagctcttctgtagag

SEQ ID NO: 216936 - DNA, 25 bp, Artificial
  Probe
acttcccgtgccaggaaggaacact

SEQ ID NO: 216937 - DNA, 25 bp, Artificial
  Probe
agagatcagctcttctgtagagagg

SEQ ID NO: 216938 - DNA, 25 bp, Artificial
  Probe
agagagatcagctcttctgtagaga

SEQ ID NO: 216939 - DNA, 25 bp, Artificial
  Probe
tcccgtgccaggaaggaacacttag

SEQ ID NO: 216940 - DNA, 25 bp, Artificial
  Probe
atgtggtcgcattcatagctgagtt

SEQ ID NO: 216941 - DNA, 25 bp, Artificial
  Probe
aaggctgagcttcattacttcagtc

SEQ ID NO: 216942 - DNA, 25 bp, Artificial
  Probe
tggtcgcattcatagctgagttgag

SEQ ID NO: 216943 - DNA, 25 bp, Artificial
  Probe
gaagcttaagctctagaaagcaaag

SEQ ID NO: 216944 - DNA, 25 bp, Artificial
  Probe
attcactattacttcccgtgccagg

SEQ ID NO: 216945 - DNA, 25 bp, Artificial
  Probe
gctgagcttcattacttcagtctaa

SEQ ID NO: 216946 - DNA, 25 bp, Artificial
  Probe
tgtggtcgcattcatagctgagttg

SEQ ID NO: 216947 - DNA, 25 bp, Artificial
  Probe
acttagcattgttctaaaggctgag

SEQ ID NO: 216948 - DNA, 25 bp, Artificial
  Probe
cgcattcatagctgagttgagcaga

SEQ ID NO: 216949 - DNA, 25 bp, Artificial
  Probe
cacttagcattgttctaaaggctga

SEQ ID NO: 216950 - DNA, 25 bp, Artificial
  Probe
ttagcattgttctaaaggctgagct

SEQ ID NO: 216951 - DNA, 25 bp, Artificial
  Probe
agcttaagctctagaaagcaaagaa

SEQ ID NO: 216952 - DNA, 25 bp, Artificial
  Probe
cagctcttctgtagagaggataaat

SEQ ID NO: 216953 - DNA, 25 bp, Artificial
  Probe
gttctaaaggctgagcttcattact

SEQ ID NO: 216954 - DNA, 25 bp, Artificial
  Probe
gcattgttctaaaggctgagcttca

SEQ ID NO: 216955 - DNA, 25 bp, Artificial
  Probe
acacttagcattgttctaaaggctg

SEQ ID NO: 216956 - DNA, 25 bp, Artificial
  Probe
gagcttcattacttcagtctaacgt

SEQ ID NO: 216957 - DNA, 25 bp, Artificial
  Probe
cccgtgccaggaaggaacacttagc

SEQ ID NO: 216958 - DNA, 25 bp, Artificial
  Probe
tgttctaaaggctgagcttcattac

SEQ ID NO: 216959 - DNA, 25 bp, Artificial
  Probe
tcagctcttctgtagagaggataaa

SEQ ID NO: 216960 - DNA, 25 bp, Artificial
  Probe
cattcatagctgagttgagcagaaa

SEQ ID NO: 216961 - DNA, 25 bp, Artificial
  Probe
taatgtggtcgcattcatagctgag

SEQ ID NO: 216962 - DNA, 25 bp, Artificial
  Probe
aacacttagcattgttctaaaggct

SEQ ID NO: 216963 - DNA, 25 bp, Artificial
  Probe
cttagcattgttctaaaggctgagc

SEQ ID NO: 216964 - DNA, 25 bp, Artificial
  Probe
tgagcttcattacttcagtctaacg

SEQ ID NO: 216965 - DNA, 25 bp, Artificial
  Probe
gcttaagctctagaaagcaaagaac

SEQ ID NO: 216966 - DNA, 25 bp, Artificial
  Probe
ggtcgcattcatagctgagttgagc

SEQ ID NO: 216967 - DNA, 25 bp, Artificial
  Probe
ttaagctctagaaagcaaagaactg

SEQ ID NO: 216968 - DNA, 25 bp, Artificial
  Probe
cactgtcaccagttgagtggtcagc

SEQ ID NO: 216969 - DNA, 25 bp, Artificial
  Probe
ctcaggttgctgattgctgtgtggt

SEQ ID NO: 216970 - DNA, 25 bp, Artificial
  Probe
cttctgctgtcatttctaagcaagg

SEQ ID NO: 216971 - DNA, 25 bp, Artificial
  Probe
cgtgaccaattagacattctatcgc

SEQ ID NO: 216972 - DNA, 25 bp, Artificial
  Probe
gtcagcgttgcatgtcgtgaccaat

SEQ ID NO: 216973 - DNA, 25 bp, Artificial
  Probe
ttctaagcaaggtccagtctgctgc

SEQ ID NO: 216974 - DNA, 25 bp, Artificial
  Probe
ggtccagtctgctgccagtgttccg

SEQ ID NO: 216975 - DNA, 25 bp, Artificial
  Probe
gagacctacctcaggttgctgattg

SEQ ID NO: 216976 - DNA, 25 bp, Artificial
  Probe
gtgaccaattagacattctatcgcc

SEQ ID NO: 216977 - DNA, 25 bp, Artificial
  Probe
ttagacattctatcgccttagcatg

SEQ ID NO: 216978 - DNA, 25 bp, Artificial
  Probe
gagagcttctttctgcctcccttct

SEQ ID NO: 216979 - DNA, 25 bp, Artificial
  Probe
gctgtcatttctaagcaaggtccag

SEQ ID NO: 216980 - DNA, 25 bp, Artificial
  Probe
tcagtctcctctgcaaagtctgcac

SEQ ID NO: 216981 - DNA, 25 bp, Artificial
  Probe
ttgctgtgtggtttggtgcgctcct

SEQ ID NO: 216982 - DNA, 25 bp, Artificial
  Probe
tctgctgtcatttctaagcaaggtc

SEQ ID NO: 216983 - DNA, 25 bp, Artificial
  Probe
agagacctacctcaggttgctgatt

SEQ ID NO: 216984 - DNA, 25 bp, Artificial
  Probe
tctaagcaaggtccagtctgctgcc

SEQ ID NO: 216985 - DNA, 25 bp, Artificial
  Probe
acttcagtctcctctgcaaagtctg

SEQ ID NO: 216986 - DNA, 25 bp, Artificial
  Probe
ttgccactgtcaccagttgagtggt

SEQ ID NO: 216987 - DNA, 25 bp, Artificial
  Probe
cagtctgctgccagtgttccgtgct

SEQ ID NO: 216988 - DNA, 25 bp, Artificial
  Probe
tcttctgctgtcatttctaagcaag

SEQ ID NO: 216989 - DNA, 25 bp, Artificial
  Probe
attctatcgccttagcatgtttgct

SEQ ID NO: 216990 - DNA, 25 bp, Artificial
  Probe
gtcgtgaccaattagacattctatc

SEQ ID NO: 216991 - DNA, 25 bp, Artificial
  Probe
ttcagtctcctctgcaaagtctgca

SEQ ID NO: 216992 - DNA, 25 bp, Artificial
  Probe
gtcaccagttgagtggtcagcgttg

SEQ ID NO: 216993 - DNA, 25 bp, Artificial
  Probe
taaagagacctacctcaggttgctg

SEQ ID NO: 216994 - DNA, 25 bp, Artificial
  Probe
gtggtcagcgttgcatgtcgtgacc

SEQ ID NO: 216995 - DNA, 25 bp, Artificial
  Probe
agtggtcagcgttgcatgtcgtgac

SEQ ID NO: 216996 - DNA, 25 bp, Artificial
  Probe
ggtcagcgttgcatgtcgtgaccaa

SEQ ID NO: 216997 - DNA, 25 bp, Artificial
  Probe
ctgtcaccagttgagtggtcagcgt

SEQ ID NO: 216998 - DNA, 25 bp, Artificial
  Probe
ttgcatgtcgtgaccaattagacat

SEQ ID NO: 216999 - DNA, 25 bp, Artificial
  Probe
gtggggtccgttcttcctcacttca

SEQ ID NO: 217000 - DNA, 25 bp, Artificial
  Probe
cctcaggttgctgattgctgtgtgg

SEQ ID NO: 217001 - DNA, 25 bp, Artificial
  Probe
agttgagtggtcagcgttgcatgtc

SEQ ID NO: 217002 - DNA, 25 bp, Artificial
  Probe
tgtggttgccactgtcaccagttga

SEQ ID NO: 217003 - DNA, 25 bp, Artificial
  Probe
ggtttggtgcgctcctgcagacccc

SEQ ID NO: 217004 - DNA, 25 bp, Artificial
  Probe
attgctgtgtggtttggtgcgctcc

SEQ ID NO: 217005 - DNA, 25 bp, Artificial
  Probe
cattctatcgccttagcatgtttgc

SEQ ID NO: 217006 - DNA, 25 bp, Artificial
  Probe
ggtccgttcttcctcacttcagtct

SEQ ID NO: 217007 - DNA, 25 bp, Artificial
  Probe
ccactgtcaccagttgagtggtcag

SEQ ID NO: 217008 - DNA, 25 bp, Artificial
  Probe
tgctgccagtgttccgtgcttcagg

SEQ ID NO: 217009 - DNA, 25 bp, Artificial
  Probe
tactgtaaagagacctacctcaggt

SEQ ID NO: 217010 - DNA, 25 bp, Artificial
  Probe
ctgtgtggtttggtgcgctcctgca

SEQ ID NO: 217011 - DNA, 25 bp, Artificial
  Probe
ctgtaaagagacctacctcaggttg

SEQ ID NO: 217012 - DNA, 25 bp, Artificial
  Probe
agtctgctgccagtgttccgtgctt

SEQ ID NO: 217013 - DNA, 25 bp, Artificial
  Probe
ggtgtggttgccactgtcaccagtt

SEQ ID NO: 217014 - DNA, 25 bp, Artificial
  Probe
agaggagcttttccactccatccgc

SEQ ID NO: 217015 - DNA, 25 bp, Artificial
  Probe
caaccattccgttgactggtggtcc

SEQ ID NO: 217016 - DNA, 25 bp, Artificial
  Probe
gaaatacaaccattccgttgactgg

SEQ ID NO: 217017 - DNA, 25 bp, Artificial
  Probe
agacatccgccagcatcctttgttt

SEQ ID NO: 217018 - DNA, 25 bp, Artificial
  Probe
ggaggccaaggatcttctagtgaag

SEQ ID NO: 217019 - DNA, 25 bp, Artificial
  Probe
tcgctccggagatcttgctgggtca

SEQ ID NO: 217020 - DNA, 25 bp, Artificial
  Probe
tgagaggagacatccgccagcatcc

SEQ ID NO: 217021 - DNA, 25 bp, Artificial
  Probe
gccagtcgcctttccacgggcagga

SEQ ID NO: 217022 - DNA, 25 bp, Artificial
  Probe
ccatatgactgtagcaatttcgaca

SEQ ID NO: 217023 - DNA, 25 bp, Artificial
  Probe
ctttgtttcgagagatcaactggga

SEQ ID NO: 217024 - DNA, 25 bp, Artificial
  Probe
cagtcgcctttccacgggcaggacg

SEQ ID NO: 217025 - DNA, 25 bp, Artificial
  Probe
accattccgttgactggtggtcctt

SEQ ID NO: 217026 - DNA, 25 bp, Artificial
  Probe
tcaccatatgactgtagcaatttcg

SEQ ID NO: 217027 - DNA, 25 bp, Artificial
  Probe
aagtgaaatcaccatatgactgtag

SEQ ID NO: 217028 - DNA, 25 bp, Artificial
  Probe
cagcatcctttgtttcgagagatca

SEQ ID NO: 217029 - DNA, 25 bp, Artificial
  Probe
tggacaatcccttttacccaaggtg

SEQ ID NO: 217030 - DNA, 25 bp, Artificial
  Probe
tcttgctgggtcagaaatacaacca

SEQ ID NO: 217031 - DNA, 25 bp, Artificial
  Probe
ccattccgttgactggtggtccttt

SEQ ID NO: 217032 - DNA, 25 bp, Artificial
  Probe
gccaaggatcttctagtgaagcttt

SEQ ID NO: 217033 - DNA, 25 bp, Artificial
  Probe
acaaccattccgttgactggtggtc

SEQ ID NO: 217034 - DNA, 25 bp, Artificial
  Probe
cggagatcttgctgggtcagaaata

SEQ ID NO: 217035 - DNA, 25 bp, Artificial
  Probe
ggccaaggatcttctagtgaagctt

SEQ ID NO: 217036 - DNA, 25 bp, Artificial
  Probe
gaaatcaccatatgactgtagcaat

SEQ ID NO: 217037 - DNA, 25 bp, Artificial
  Probe
gttcttctttacgagatgctgattg

SEQ ID NO: 217038 - DNA, 25 bp, Artificial
  Probe
tggccagtcgcctttccacgggcag

SEQ ID NO: 217039 - DNA, 25 bp, Artificial
  Probe
caaatactttctgtgggacgcctga

SEQ ID NO: 217040 - DNA, 25 bp, Artificial
  Probe
gtcagaaatacaaccattccgttga

SEQ ID NO: 217041 - DNA, 25 bp, Artificial
  Probe
ccgccagcatcctttgtttcgagag

SEQ ID NO: 217042 - DNA, 25 bp, Artificial
  Probe
gctccggagatcttgctgggtcaga

SEQ ID NO: 217043 - DNA, 25 bp, Artificial
  Probe
aggagcttttccactccatccgcat

SEQ ID NO: 217044 - DNA, 25 bp, Artificial
  Probe
gaagacaaatactttctgtgggacg

SEQ ID NO: 217045 - DNA, 25 bp, Artificial
  Probe
catcgctccggagatcttgctgggt

SEQ ID NO: 217046 - DNA, 25 bp, Artificial
  Probe
tcttctttacgagatgctgattggc

SEQ ID NO: 217047 - DNA, 25 bp, Artificial
  Probe
aagaggagcttttccactccatccg

SEQ ID NO: 217048 - DNA, 25 bp, Artificial
  Probe
atccgccagcatcctttgtttcgag

SEQ ID NO: 217049 - DNA, 25 bp, Artificial
  Probe
ctttccacgggcaggacgaagagga

SEQ ID NO: 217050 - DNA, 25 bp, Artificial
  Probe
agtcgcctttccacgggcaggacga

SEQ ID NO: 217051 - DNA, 25 bp, Artificial
  Probe
aaagtgaaatcaccatatgactgta

SEQ ID NO: 217052 - DNA, 25 bp, Artificial
  Probe
atgactgtagcaatttcgacaagga

SEQ ID NO: 217053 - DNA, 25 bp, Artificial
  Probe
ccagcatcctttgtttcgagagatc

SEQ ID NO: 217054 - DNA, 25 bp, Artificial
  Probe
atcttgctgggtcagaaatacaacc

SEQ ID NO: 217055 - DNA, 25 bp, Artificial
  Probe
gacaaatactttctgtgggacgcct

SEQ ID NO: 217056 - DNA, 25 bp, Artificial
  Probe
gatcttgctgggtcagaaatacaac

SEQ ID NO: 217057 - DNA, 25 bp, Artificial
  Probe
atatgactgtagcaatttcgacaag

SEQ ID NO: 217058 - DNA, 25 bp, Artificial
  Probe
tggggttcttctttacgagatgctg

SEQ ID NO: 217059 - DNA, 25 bp, Artificial
  Probe
ggagcttttccactccatccgcatg

SEQ ID NO: 217060 - DNA, 25 bp, Artificial
  Probe
cactttgggttaaggcatggaaggc

SEQ ID NO: 217061 - DNA, 25 bp, Artificial
  Probe
tggtttctgagttccctcagtttga

SEQ ID NO: 217062 - DNA, 25 bp, Artificial
  Probe
tcagtctcccacagttgtcactttg

SEQ ID NO: 217063 - DNA, 25 bp, Artificial
  Probe
gtcaaactccagttatgcttgctct

SEQ ID NO: 217064 - DNA, 25 bp, Artificial
  Probe
gaaagcctctgctgcgttgtgacac

SEQ ID NO: 217065 - DNA, 25 bp, Artificial
  Probe
tcatgggatgacatcatcagtctcc

SEQ ID NO: 217066 - DNA, 25 bp, Artificial
  Probe
ttagcattttatgttgtccctacag

SEQ ID NO: 217067 - DNA, 25 bp, Artificial
  Probe
ttctgagttccctcagtttgaatcc

SEQ ID NO: 217068 - DNA, 25 bp, Artificial
  Probe
tcatatagctaagcagagctaaaaa

SEQ ID NO: 217069 - DNA, 25 bp, Artificial
  Probe
ctgttagcgactataggaatcatat

SEQ ID NO: 217070 - DNA, 25 bp, Artificial
  Probe
aaggaaacagcctagcttgtcaaag

SEQ ID NO: 217071 - DNA, 25 bp, Artificial
  Probe
gacactcatgggatgacatcatcag

SEQ ID NO: 217072 - DNA, 25 bp, Artificial
  Probe
ctctccagaggctcctaatgagaaa

SEQ ID NO: 217073 - DNA, 25 bp, Artificial
  Probe
ctgcttactgccatttagtgcatgg

SEQ ID NO: 217074 - DNA, 25 bp, Artificial
  Probe
gaatcatatagctaagcagagctaa

SEQ ID NO: 217075 - DNA, 25 bp, Artificial
  Probe
ccgttagcccggtcacagttagcat

SEQ ID NO: 217076 - DNA, 25 bp, Artificial
  Probe
aggaaacagcctagcttgtcaaaga

SEQ ID NO: 217077 - DNA, 25 bp, Artificial
  Probe
gcctctgctgcgttgtgacactcat

SEQ ID NO: 217078 - DNA, 25 bp, Artificial
  Probe
caaagaaagcctctgctgcgttgtg

SEQ ID NO: 217079 - DNA, 25 bp, Artificial
  Probe
tatatctgctagtgttactggtttc

SEQ ID NO: 217080 - DNA, 25 bp, Artificial
  Probe
ggccatgctaagtatatctgctagt

SEQ ID NO: 217081 - DNA, 25 bp, Artificial
  Probe
acagtcatgtcaaactccagttatg

SEQ ID NO: 217082 - DNA, 25 bp, Artificial
  Probe
ctaagtatatctgctagtgttactg

SEQ ID NO: 217083 - DNA, 25 bp, Artificial
  Probe
tggagggccatgctaagtatatctg

SEQ ID NO: 217084 - DNA, 25 bp, Artificial
  Probe
gtgcatggatcaaccgttagcccgg

SEQ ID NO: 217085 - DNA, 25 bp, Artificial
  Probe
cagttgtcactttgggttaaggcat

SEQ ID NO: 217086 - DNA, 25 bp, Artificial
  Probe
tcaaagaaagcctctgctgcgttgt

SEQ ID NO: 217087 - DNA, 25 bp, Artificial
  Probe
ttgtgacactcatgggatgacatca

SEQ ID NO: 217088 - DNA, 25 bp, Artificial
  Probe
gcattttatgttgtccctacagaaa

SEQ ID NO: 217089 - DNA, 25 bp, Artificial
  Probe
aggctcctaatgagaaaggacagtg

SEQ ID NO: 217090 - DNA, 25 bp, Artificial
  Probe
acagttagcattttatgttgtccct

SEQ ID NO: 217091 - DNA, 25 bp, Artificial
  Probe
caatatcctgttagcgactatagga

SEQ ID NO: 217092 - DNA, 25 bp, Artificial
  Probe
gggatgacatcatcagtctcccaca

SEQ ID NO: 217093 - DNA, 25 bp, Artificial
  Probe
gcctagcttgtcaaagaaagcctct

SEQ ID NO: 217094 - DNA, 25 bp, Artificial
  Probe
atcctgttagcgactataggaatca

SEQ ID NO: 217095 - DNA, 25 bp, Artificial
  Probe
cttgatgtctgcagaagagtgtgtc

SEQ ID NO: 217096 - DNA, 25 bp, Artificial
  Probe
agcctagcttgtcaaagaaagcctc

SEQ ID NO: 217097 - DNA, 25 bp, Artificial
  Probe
ggatcaaccgttagcccggtcacag

SEQ ID NO: 217098 - DNA, 25 bp, Artificial
  Probe
atggatcaaccgttagcccggtcac

SEQ ID NO: 217099 - DNA, 25 bp, Artificial
  Probe
ctcaatatcctgttagcgactatag

SEQ ID NO: 217100 - DNA, 25 bp, Artificial
  Probe
aagagtgtgtctgattctgcttact

SEQ ID NO: 217101 - DNA, 25 bp, Artificial
  Probe
ctgattctgcttactgccatttagt

SEQ ID NO: 217102 - DNA, 25 bp, Artificial
  Probe
aactccagttatgcttgctctccag

SEQ ID NO: 217103 - DNA, 25 bp, Artificial
  Probe
cttgctctccagaggctcctaatga

SEQ ID NO: 217104 - DNA, 25 bp, Artificial
  Probe
cttgtcaaagaaagcctctgctgcg

SEQ ID NO: 217105 - DNA, 25 bp, Artificial
  Probe
gacatcatcagtctcccacagttgt

SEQ ID NO: 217106 - DNA, 25 bp, Artificial
  Probe
gagaactctaactcccccatggagt

SEQ ID NO: 217107 - DNA, 25 bp, Artificial
  Probe
cggtatctgcgagcacgacacgtct

SEQ ID NO: 217108 - DNA, 25 bp, Artificial
  Probe
agagaaggcaggctctaagacccag

SEQ ID NO: 217109 - DNA, 25 bp, Artificial
  Probe
cgccttggaaagtcacaagagaagg

SEQ ID NO: 217110 - DNA, 25 bp, Artificial
  Probe
cgcaagccgggttcgcctagcagcg

SEQ ID NO: 217111 - DNA, 25 bp, Artificial
  Probe
gagttggggtactgggtgggcggcg

SEQ ID NO: 217112 - DNA, 25 bp, Artificial
  Probe
ggcaggctctaagacccagcaggca

SEQ ID NO: 217113 - DNA, 25 bp, Artificial
  Probe
ccactcaccgccttggaaagtcaca

SEQ ID NO: 217114 - DNA, 25 bp, Artificial
  Probe
tatctgcgagcacgacacgtctata

SEQ ID NO: 217115 - DNA, 25 bp, Artificial
  Probe
tccggcaggcgccctccgcccaaga

SEQ ID NO: 217116 - DNA, 25 bp, Artificial
  Probe
tgcgagcacgacacgtctatataca

SEQ ID NO: 217117 - DNA, 25 bp, Artificial
  Probe
caagacccgcttggacaccaggggg

SEQ ID NO: 217118 - DNA, 25 bp, Artificial
  Probe
ctgcgagcacgacacgtctatatac

SEQ ID NO: 217119 - DNA, 25 bp, Artificial
  Probe
gccatgccgggagaactctaactcc

SEQ ID NO: 217120 - DNA, 25 bp, Artificial
  Probe
ggttcgcctagcagcgcaggagtca

SEQ ID NO: 217121 - DNA, 25 bp, Artificial
  Probe
tgagcagccacctccagagcccccc

SEQ ID NO: 217122 - DNA, 25 bp, Artificial
  Probe
tctataaaagcggtccccgcgcggg

SEQ ID NO: 217123 - DNA, 25 bp, Artificial
  Probe
aggctcgccatgccgggagaactct

SEQ ID NO: 217124 - DNA, 25 bp, Artificial
  Probe
caggctctaagacccagcaggcacc

SEQ ID NO: 217125 - DNA, 25 bp, Artificial
  Probe
cactcaccgccttggaaagtcacaa

SEQ ID NO: 217126 - DNA, 25 bp, Artificial
  Probe
ctgccgccccggagctgctgggcgg

SEQ ID NO: 217127 - DNA, 25 bp, Artificial
  Probe
tcaccgccttggaaagtcacaagag

SEQ ID NO: 217128 - DNA, 25 bp, Artificial
  Probe
ctcaccgccttggaaagtcacaaga

SEQ ID NO: 217129 - DNA, 25 bp, Artificial
  Probe
gcccagcaacgccgcctttggcttt

SEQ ID NO: 217130 - DNA, 25 bp, Artificial
  Probe
aaggcaggctctaagacccagcagg

SEQ ID NO: 217131 - DNA, 25 bp, Artificial
  Probe
ccccgatgagcagccacctccagag

SEQ ID NO: 217132 - DNA, 25 bp, Artificial
  Probe
tctgcgagcacgacacgtctatata

SEQ ID NO: 217133 - DNA, 25 bp, Artificial
  Probe
accgccttggaaagtcacaagagaa

SEQ ID NO: 217134 - DNA, 25 bp, Artificial
  Probe
cgagcacgacacgtctatatacatc

SEQ ID NO: 217135 - DNA, 25 bp, Artificial
  Probe
actcaccgccttggaaagtcacaag

SEQ ID NO: 217136 - DNA, 25 bp, Artificial
  Probe
gcgggcgagttggggtactgggtgg

SEQ ID NO: 217137 - DNA, 25 bp, Artificial
  Probe
agaaggcaggctctaagacccagca

SEQ ID NO: 217138 - DNA, 25 bp, Artificial
  Probe
ccgccttggaaagtcacaagagaag

SEQ ID NO: 217139 - DNA, 25 bp, Artificial
  Probe
aagtcacaagagaaggcaggctcta

SEQ ID NO: 217140 - DNA, 25 bp, Artificial
  Probe
ggtatctgcgagcacgacacgtcta

SEQ ID NO: 217141 - DNA, 25 bp, Artificial
  Probe
gagcacgacacgtctatatacatca

SEQ ID NO: 217142 - DNA, 25 bp, Artificial
  Probe
atctgcgagcacgacacgtctatat

SEQ ID NO: 217143 - DNA, 25 bp, Artificial
  Probe
ccaagacccgcttggacaccagggg

SEQ ID NO: 217144 - DNA, 25 bp, Artificial
  Probe
cccagcaacgccgcctttggctttc

SEQ ID NO: 217145 - DNA, 25 bp, Artificial
  Probe
ctgggcggtatctgcgagcacgaca

SEQ ID NO: 217146 - DNA, 25 bp, Artificial
  Probe
gcgagcacgacacgtctatatacat

SEQ ID NO: 217147 - DNA, 25 bp, Artificial
  Probe
aggcaggctctaagacccagcaggc

SEQ ID NO: 217148 - DNA, 25 bp, Artificial
  Probe
cgccatgccgggagaactctaactc

SEQ ID NO: 217149 - DNA, 25 bp, Artificial
  Probe
caccgccttggaaagtcacaagaga

SEQ ID NO: 217150 - DNA, 25 bp, Artificial
  Probe
gcaggctctaagacccagcaggcac

SEQ ID NO: 217151 - DNA, 25 bp, Artificial
  Probe
gtatctgcgagcacgacacgtctat

SEQ ID NO: 217152 - DNA, 25 bp, Artificial
  Probe
ggcagaggcagcaccctagtttgct

SEQ ID NO: 217153 - DNA, 25 bp, Artificial
  Probe
gacacagcagcaggttcaggacctg

SEQ ID NO: 217154 - DNA, 25 bp, Artificial
  Probe
tggagacccggaatgcagaactgga

SEQ ID NO: 217155 - DNA, 25 bp, Artificial
  Probe
cgccactcagtggaggcagcagctg

SEQ ID NO: 217156 - DNA, 25 bp, Artificial
  Probe
agaggctcctgacaccgccgagcgg

SEQ ID NO: 217157 - DNA, 25 bp, Artificial
  Probe
caaggaccaggagatccagactttg

SEQ ID NO: 217158 - DNA, 25 bp, Artificial
  Probe
gccgccactcagtggaggcagcagc

SEQ ID NO: 217159 - DNA, 25 bp, Artificial
  Probe
gcaaccagccagtcggtggagcagc

SEQ ID NO: 217160 - DNA, 25 bp, Artificial
  Probe
cggccgccactcagtggaggcagca

SEQ ID NO: 217161 - DNA, 25 bp, Artificial
  Probe
aggaccaggagatccagactttgaa

SEQ ID NO: 217162 - DNA, 25 bp, Artificial
  Probe
aggctcgggtgcagaccaaggacca

SEQ ID NO: 217163 - DNA, 25 bp, Artificial
  Probe
acagcagcaggttcaggacctggag

SEQ ID NO: 217164 - DNA, 25 bp, Artificial
  Probe
aggagacacagcagcaggttcagga

SEQ ID NO: 217165 - DNA, 25 bp, Artificial
  Probe
gaatgcagaactggagcagcagctg

SEQ ID NO: 217166 - DNA, 25 bp, Artificial
  Probe
ggtgcagaccaaggaccaggagatc

SEQ ID NO: 217167 - DNA, 25 bp, Artificial
  Probe
atccagactttgaagaatcagagca

SEQ ID NO: 217168 - DNA, 25 bp, Artificial
  Probe
gcactggcccacgagaggctcctga

SEQ ID NO: 217169 - DNA, 25 bp, Artificial
  Probe
ctcgggtgcagaccaaggaccagga

SEQ ID NO: 217170 - DNA, 25 bp, Artificial
  Probe
caggacctggagacccggaatgcag

SEQ ID NO: 217171 - DNA, 25 bp, Artificial
  Probe
ttgaagaatcagagcactggcccac

SEQ ID NO: 217172 - DNA, 25 bp, Artificial
  Probe
atgcagaactggagcagcagctgcg

SEQ ID NO: 217173 - DNA, 25 bp, Artificial
  Probe
cagctgcgggcgatggaaagcaacc

SEQ ID NO: 217174 - DNA, 25 bp, Artificial
  Probe
gaggcagcaccctagtttgctctgg

SEQ ID NO: 217175 - DNA, 25 bp, Artificial
  Probe
tccagcgtgcagaggctgaacactt

SEQ ID NO: 217176 - DNA, 25 bp, Artificial
  Probe
agtttgctctggaggcctgcggccc

SEQ ID NO: 217177 - DNA, 25 bp, Artificial
  Probe
agaatcagagcactggcccacgaga

SEQ ID NO: 217178 - DNA, 25 bp, Artificial
  Probe
gacccggaatgcagaactggagcag

SEQ ID NO: 217179 - DNA, 25 bp, Artificial
  Probe
gaatcagagcactggcccacgagag

SEQ ID NO: 217180 - DNA, 25 bp, Artificial
  Probe
acgagaggctcctgacaccgccgag

SEQ ID NO: 217181 - DNA, 25 bp, Artificial
  Probe
aagcaaccagccagtcggtggagca

SEQ ID NO: 217182 - DNA, 25 bp, Artificial
  Probe
gagacacagcagcaggttcaggacc

SEQ ID NO: 217183 - DNA, 25 bp, Artificial
  Probe
cctggcagaggcagcaccctagttt

SEQ ID NO: 217184 - DNA, 25 bp, Artificial
  Probe
agctgcgggcgatggaaagcaacct

SEQ ID NO: 217185 - DNA, 25 bp, Artificial
  Probe
aggtccagcgtgcagaggctgaaca

SEQ ID NO: 217186 - DNA, 25 bp, Artificial
  Probe
actggcccacgagaggctcctgaca

SEQ ID NO: 217187 - DNA, 25 bp, Artificial
  Probe
ggttcaggacctggagacccggaat

SEQ ID NO: 217188 - DNA, 25 bp, Artificial
  Probe
ctggagacccggaatgcagaactgg

SEQ ID NO: 217189 - DNA, 25 bp, Artificial
  Probe
gagaggctcctgacaccgccgagcg

SEQ ID NO: 217190 - DNA, 25 bp, Artificial
  Probe
gaaagaagcaaccagccagtcggtg

SEQ ID NO: 217191 - DNA, 25 bp, Artificial
  Probe
caggttcaggacctggagacccgga

SEQ ID NO: 217192 - DNA, 25 bp, Artificial
  Probe
gggggccccagctgtctctgagctt

SEQ ID NO: 217193 - DNA, 25 bp, Artificial
  Probe
gagacccggaatgcagaactggagc

SEQ ID NO: 217194 - DNA, 25 bp, Artificial
  Probe
cgtgcagaggctgaacacttgcggc

SEQ ID NO: 217195 - DNA, 25 bp, Artificial
  Probe
gagcactggcccacgagaggctcct

SEQ ID NO: 217196 - DNA, 25 bp, Artificial
  Probe
agcaggttcaggacctggagacccg

SEQ ID NO: 217197 - DNA, 25 bp, Artificial
  Probe
tcaggacctggagacccggaatgca

SEQ ID NO: 217198 - DNA, 25 bp, Artificial
  Probe
tcttacacctaccaagtgaaccagg

SEQ ID NO: 217199 - DNA, 25 bp, Artificial
  Probe
gtatccactgtttcaaagtcttaga

SEQ ID NO: 217200 - DNA, 25 bp, Artificial
  Probe
ggtcttgaaatcctatcctcctgcc

SEQ ID NO: 217201 - DNA, 25 bp, Artificial
  Probe
aaacgcccaggctgcgtagatacct

SEQ ID NO: 217202 - DNA, 25 bp, Artificial
  Probe
accatagctttcagggctatgccca

SEQ ID NO: 217203 - DNA, 25 bp, Artificial
  Probe
tgacaaacgcccaggctgcgtagat

SEQ ID NO: 217204 - DNA, 25 bp, Artificial
  Probe
gcaaacttctgtctctgcagcccaa

SEQ ID NO: 217205 - DNA, 25 bp, Artificial
  Probe
ttccatgtgccaaactgacaggagg

SEQ ID NO: 217206 - DNA, 25 bp, Artificial
  Probe
ttagtttattagtgacctctgactt

SEQ ID NO: 217207 - DNA, 25 bp, Artificial
  Probe
ctttcagggctatgcccagttctgc

SEQ ID NO: 217208 - DNA, 25 bp, Artificial
  Probe
ccaggattgccgataactcatttct

SEQ ID NO: 217209 - DNA, 25 bp, Artificial
  Probe
ggcatcagccagcatttcttacacc

SEQ ID NO: 217210 - DNA, 25 bp, Artificial
  Probe
tcccttaagcaggaaagtactctgc

SEQ ID NO: 217211 - DNA, 25 bp, Artificial
  Probe
tgccaaactgacaggaggaagaaaa

SEQ ID NO: 217212 - DNA, 25 bp, Artificial
  Probe
acctcctagtactgggaccatagct

SEQ ID NO: 217213 - DNA, 25 bp, Artificial
  Probe
caggcttccatgtgccaaactgaca

SEQ ID NO: 217214 - DNA, 25 bp, Artificial
  Probe
caaatcctatagttaatggtcttga

SEQ ID NO: 217215 - DNA, 25 bp, Artificial
  Probe
ccctgagcagcctcaaatcctatag

SEQ ID NO: 217216 - DNA, 25 bp, Artificial
  Probe
atggtcttgaaatcctatcctcctg

SEQ ID NO: 217217 - DNA, 25 bp, Artificial
  Probe
tgtaacaccctcagggaccaagatc

SEQ ID NO: 217218 - DNA, 25 bp, Artificial
  Probe
atcaggtgttttagctttcttccct

SEQ ID NO: 217219 - DNA, 25 bp, Artificial
  Probe
agctttcagggctatgcccagttct

SEQ ID NO: 217220 - DNA, 25 bp, Artificial
  Probe
ctccagagtgggaacactgttttac

SEQ ID NO: 217221 - DNA, 25 bp, Artificial
  Probe
cctatagttaatggtcttgaaatcc

SEQ ID NO: 217222 - DNA, 25 bp, Artificial
  Probe
tcctatagttaatggtcttgaaatc

SEQ ID NO: 217223 - DNA, 25 bp, Artificial
  Probe
gttttagctttcttcccttaagcag

SEQ ID NO: 217224 - DNA, 25 bp, Artificial
  Probe
ttttttaaggctagtgtctcatgtc

SEQ ID NO: 217225 - DNA, 25 bp, Artificial
  Probe
caggaaagtactctgccatcccagg

SEQ ID NO: 217226 - DNA, 25 bp, Artificial
  Probe
ggctatgcccagttctgctcagttt

SEQ ID NO: 217227 - DNA, 25 bp, Artificial
  Probe
taactcatttctctctccagagtgg

SEQ ID NO: 217228 - DNA, 25 bp, Artificial
  Probe
gttacttttggtatccactgtttca

SEQ ID NO: 217229 - DNA, 25 bp, Artificial
  Probe
aagtactctgccatcccaggcatca

SEQ ID NO: 217230 - DNA, 25 bp, Artificial
  Probe
gtgaaccaggattgccgataactca

SEQ ID NO: 217231 - DNA, 25 bp, Artificial
  Probe
gtaatgcaatgcaaacttctgtctc

SEQ ID NO: 217232 - DNA, 25 bp, Artificial
  Probe
gtctcatgtcagcaccctgagcagc

SEQ ID NO: 217233 - DNA, 25 bp, Artificial
  Probe
atcccaggcatcagccagcatttct

SEQ ID NO: 217234 - DNA, 25 bp, Artificial
  Probe
gtcagcaccctgagcagcctcaaat

SEQ ID NO: 217235 - DNA, 25 bp, Artificial
  Probe
ccaatcacttgtaacaccctcaggg

SEQ ID NO: 217236 - DNA, 25 bp, Artificial
  Probe
ctcagtttatgtggtgctggagatc

SEQ ID NO: 217237 - DNA, 25 bp, Artificial
  Probe
agctttcttcccttaagcaggaaag

SEQ ID NO: 217238 - DNA, 25 bp, Artificial
  Probe
atgtcagcaccctgagcagcctcaa

SEQ ID NO: 217239 - DNA, 25 bp, Artificial
  Probe
cctagtactgggaccatagctttca

SEQ ID NO: 217240 - DNA, 25 bp, Artificial
  Probe
gacctctgacttgagttcacctcta

SEQ ID NO: 217241 - DNA, 25 bp, Artificial
  Probe
ataaggttacttttggtatccactg

SEQ ID NO: 217242 - DNA, 25 bp, Artificial
  Probe
ggattgccgataactcatttctctc

SEQ ID NO: 217243 - DNA, 25 bp, Artificial
  Probe
cacctcctagtactgggaccatagc

SEQ ID NO: 217244 - DNA, 25 bp, Artificial
  Probe
ccgatgggaccgtggttaccgtcat

SEQ ID NO: 217245 - DNA, 25 bp, Artificial
  Probe
gactctaaacctagtttgttctctg

SEQ ID NO: 217246 - DNA, 25 bp, Artificial
  Probe
ctaaacctagtttgttctctgaccg

SEQ ID NO: 217247 - DNA, 25 bp, Artificial
  Probe
tgatgagaactactctgccgagcta

SEQ ID NO: 217248 - DNA, 25 bp, Artificial
  Probe
tacgaaatgcctctgctgttatgaa

SEQ ID NO: 217249 - DNA, 25 bp, Artificial
  Probe
acgatctgagatttgtaggccggag

SEQ ID NO: 217250 - DNA, 25 bp, Artificial
  Probe
cctctgctgttatgaaaaaccaagt

SEQ ID NO: 217251 - DNA, 25 bp, Artificial
  Probe
actactctgccgagctacgaaatgc

SEQ ID NO: 217252 - DNA, 25 bp, Artificial
  Probe
acttaccacagagctattaaagtga

SEQ ID NO: 217253 - DNA, 25 bp, Artificial
  Probe
cgagctacgaaatgcctctgctgtt

SEQ ID NO: 217254 - DNA, 25 bp, Artificial
  Probe
gccacttaccacagagctattaaag

SEQ ID NO: 217255 - DNA, 25 bp, Artificial
  Probe
ccaagtggccacttaccacagagct

SEQ ID NO: 217256 - DNA, 25 bp, Artificial
  Probe
tctctgaccgcctcagtgatttagg

SEQ ID NO: 217257 - DNA, 25 bp, Artificial
  Probe
agtggccaggttcaacgatctgaga

SEQ ID NO: 217258 - DNA, 25 bp, Artificial
  Probe
tgggaccgtggttaccgtcatggcc

SEQ ID NO: 217259 - DNA, 25 bp, Artificial
  Probe
tagccctcggagaggtacccgatgg

SEQ ID NO: 217260 - DNA, 25 bp, Artificial
  Probe
gtccccgggaaccaagaaggcacag

SEQ ID NO: 217261 - DNA, 25 bp, Artificial
  Probe
acgaaatgcctctgctgttatgaaa

SEQ ID NO: 217262 - DNA, 25 bp, Artificial
  Probe
cttcaaggttgtagccctcggagag

SEQ ID NO: 217263 - DNA, 25 bp, Artificial
  Probe
ccgtggccttcaaggttgtagccct

SEQ ID NO: 217264 - DNA, 25 bp, Artificial
  Probe
caggttcaacgatctgagatttgta

SEQ ID NO: 217265 - DNA, 25 bp, Artificial
  Probe
aaccaagaaggcacagacagaagct

SEQ ID NO: 217266 - DNA, 25 bp, Artificial
  Probe
tgagaactactctgccgagctacga

SEQ ID NO: 217267 - DNA, 25 bp, Artificial
  Probe
tccccgggaaccaagaaggcacaga

SEQ ID NO: 217268 - DNA, 25 bp, Artificial
  Probe
aagcttgatgactctaaacctagtt

SEQ ID NO: 217269 - DNA, 25 bp, Artificial
  Probe
aaggcacagacagaagcttgatgac

SEQ ID NO: 217270 - DNA, 25 bp, Artificial
  Probe
cacagacagaagcttgatgactcta

SEQ ID NO: 217271 - DNA, 25 bp, Artificial
  Probe
gcccgtggccttcaaggttgtagcc

SEQ ID NO: 217272 - DNA, 25 bp, Artificial
  Probe
taaacctagtttgttctctgaccgc

SEQ ID NO: 217273 - DNA, 25 bp, Artificial
  Probe
gaaatgcctctgctgttatgaaaaa

SEQ ID NO: 217274 - DNA, 25 bp, Artificial
  Probe
ctacgaaatgcctctgctgttatga

SEQ ID NO: 217275 - DNA, 25 bp, Artificial
  Probe
accaagaaggcacagacagaagctt

SEQ ID NO: 217276 - DNA, 25 bp, Artificial
  Probe
aacctagtttgttctctgaccgcct

SEQ ID NO: 217277 - DNA, 25 bp, Artificial
  Probe
ttcaacgatctgagatttgtaggcc

SEQ ID NO: 217278 - DNA, 25 bp, Artificial
  Probe
tgtagccctcggagaggtacccgat

SEQ ID NO: 217279 - DNA, 25 bp, Artificial
  Probe
taaagtgacagtggacggtccccgg

SEQ ID NO: 217280 - DNA, 25 bp, Artificial
  Probe
accacagagctattaaagtgacagt

SEQ ID NO: 217281 - DNA, 25 bp, Artificial
  Probe
gaccgcctcagtgatttagggcgca

SEQ ID NO: 217282 - DNA, 25 bp, Artificial
  Probe
tggccaggttcaacgatctgagatt

SEQ ID NO: 217283 - DNA, 25 bp, Artificial
  Probe
tggccacttaccacagagctattaa

SEQ ID NO: 217284 - DNA, 25 bp, Artificial
  Probe
gtttgttctctgaccgcctcagtga

SEQ ID NO: 217285 - DNA, 25 bp, Artificial
  Probe
ctactctgccgagctacgaaatgcc

SEQ ID NO: 217286 - DNA, 25 bp, Artificial
  Probe
gatgactctaaacctagtttgttct

SEQ ID NO: 217287 - DNA, 25 bp, Artificial
  Probe
tgatgactctaaacctagtttgttc

SEQ ID NO: 217288 - DNA, 25 bp, Artificial
  Probe
agtggccacttaccacagagctatt

SEQ ID NO: 217289 - DNA, 25 bp, Artificial
  Probe
gttcaacgatctgagatttgtaggc

SEQ ID NO: 217290 - DNA, 25 bp, Artificial
  Probe
actttctgaagctgagaacaatgct

SEQ ID NO: 217291 - DNA, 25 bp, Artificial
  Probe
acccatctacattgaagtgcctgtg

SEQ ID NO: 217292 - DNA, 25 bp, Artificial
  Probe
gaacccagaacataatgactttctg

SEQ ID NO: 217293 - DNA, 25 bp, Artificial
  Probe
cgttgtcgaggtggagaacccagaa

SEQ ID NO: 217294 - DNA, 25 bp, Artificial
  Probe
tcttagctccgtggaagggtaccca

SEQ ID NO: 217295 - DNA, 25 bp, Artificial
  Probe
gcggcgacactgacagcagcactct

SEQ ID NO: 217296 - DNA, 25 bp, Artificial
  Probe
caagtttcttagctccgtggaaggg

SEQ ID NO: 217297 - DNA, 25 bp, Artificial
  Probe
gaaagtcttcctgataagtgctaca

SEQ ID NO: 217298 - DNA, 25 bp, Artificial
  Probe
cagcttcaatgttggaaacactttg

SEQ ID NO: 217299 - DNA, 25 bp, Artificial
  Probe
tccgtggaagggtacccatctacat

SEQ ID NO: 217300 - DNA, 25 bp, Artificial
  Probe
tacagcatcaagtttcttagctccg

SEQ ID NO: 217301 - DNA, 25 bp, Artificial
  Probe
ccatctacattgaagtgcctgtgtc

SEQ ID NO: 217302 - DNA, 25 bp, Artificial
  Probe
aagtgcctgtgtctgaggatttcag

SEQ ID NO: 217303 - DNA, 25 bp, Artificial
  Probe
acaatgctcatcacccacatgcagg

SEQ ID NO: 217304 - DNA, 25 bp, Artificial
  Probe
ttctgaagctgagaacaatgctcat

SEQ ID NO: 217305 - DNA, 25 bp, Artificial
  Probe
tcacccacatgcaggacctacagga

SEQ ID NO: 217306 - DNA, 25 bp, Artificial
  Probe
ggaagggtacccatctacattgaag

SEQ ID NO: 217307 - DNA, 25 bp, Artificial
  Probe
acatgcaggacctacaggaagtgac

SEQ ID NO: 217308 - DNA, 25 bp, Artificial
  Probe
agtcttcctgataagtgctacagca

SEQ ID NO: 217309 - DNA, 25 bp, Artificial
  Probe
ggcgacactgacagcagcactcttg

SEQ ID NO: 217310 - DNA, 25 bp, Artificial
  Probe
ctttctgaagctgagaacaatgctc

SEQ ID NO: 217311 - DNA, 25 bp, Artificial
  Probe
ccgccgaatgcaagagatgattgcg

SEQ ID NO: 217312 - DNA, 25 bp, Artificial
  Probe
tagctccgtggaagggtacccatct

SEQ ID NO: 217313 - DNA, 25 bp, Artificial
  Probe
tcttgggcaccacgtgtgaggtcca

SEQ ID NO: 217314 - DNA, 25 bp, Artificial
  Probe
gagaacccagaacataatgactttc

SEQ ID NO: 217315 - DNA, 25 bp, Artificial
  Probe
ttgggcaccacgtgtgaggtccagc

SEQ ID NO: 217316 - DNA, 25 bp, Artificial
  Probe
cccagaacataatgactttctgaag

SEQ ID NO: 217317 - DNA, 25 bp, Artificial
  Probe
cattgaagtgcctgtgtctgaggat

SEQ ID NO: 217318 - DNA, 25 bp, Artificial
  Probe
tgtcgaggtggagaacccagaacat

SEQ ID NO: 217319 - DNA, 25 bp, Artificial
  Probe
tgagctccgccgaatgcaagagatg

SEQ ID NO: 217320 - DNA, 25 bp, Artificial
  Probe
atcacccacatgcaggacctacagg

SEQ ID NO: 217321 - DNA, 25 bp, Artificial
  Probe
gtggagaacccagaacataatgact

SEQ ID NO: 217322 - DNA, 25 bp, Artificial
  Probe
cagcatcaagtttcttagctccgtg

SEQ ID NO: 217323 - DNA, 25 bp, Artificial
  Probe
ttgtcgaggtggagaacccagaaca

SEQ ID NO: 217324 - DNA, 25 bp, Artificial
  Probe
gtacccatctacattgaagtgcctg

SEQ ID NO: 217325 - DNA, 25 bp, Artificial
  Probe
gcactcttgggcaccacgtgtgagg

SEQ ID NO: 217326 - DNA, 25 bp, Artificial
  Probe
cagcagcactcttgggcaccacgtg

SEQ ID NO: 217327 - DNA, 25 bp, Artificial
  Probe
gctacagcatcaagtttcttagctc

SEQ ID NO: 217328 - DNA, 25 bp, Artificial
  Probe
tctacattgaagtgcctgtgtctga

SEQ ID NO: 217329 - DNA, 25 bp, Artificial
  Probe
ggcggcgacactgacagcagcactc

SEQ ID NO: 217330 - DNA, 25 bp, Artificial
  Probe
cgtgtgaggtccagcttcaatgttg

SEQ ID NO: 217331 - DNA, 25 bp, Artificial
  Probe
tgaagtgcctgtgtctgaggatttc

SEQ ID NO: 217332 - DNA, 25 bp, Artificial
  Probe
caggcgcagatgcagatgcagatgc

SEQ ID NO: 217333 - DNA, 25 bp, Artificial
  Probe
cacatgcaggacctacaggaagtga

SEQ ID NO: 217334 - DNA, 25 bp, Artificial
  Probe
tagaggccgtctctacccgtggggc

SEQ ID NO: 217335 - DNA, 25 bp, Artificial
  Probe
gagaacaatgctcatcacccacatg

SEQ ID NO: 217336 - DNA, 25 bp, Artificial
  Probe
gcacctagaattccttagaggaaac

SEQ ID NO: 217337 - DNA, 25 bp, Artificial
  Probe
ctagaattccttagaggaaactgtc

SEQ ID NO: 217338 - DNA, 25 bp, Artificial
  Probe
gaggaaactgtccttgaagctagga

SEQ ID NO: 217339 - DNA, 25 bp, Artificial
  Probe
aaactgcctgttaatgttagccatg

SEQ ID NO: 217340 - DNA, 25 bp, Artificial
  Probe
gacacagtatccttattacaaggtt

SEQ ID NO: 217341 - DNA, 25 bp, Artificial
  Probe
ggttttatagcctgcccgccaaggg

SEQ ID NO: 217342 - DNA, 25 bp, Artificial
  Probe
ctgtccttgaagctaggaaagggag

SEQ ID NO: 217343 - DNA, 25 bp, Artificial
  Probe
caaggagttcatttctctgtagact

SEQ ID NO: 217344 - DNA, 25 bp, Artificial
  Probe
ttagaggaaactgtccttgaagcta

SEQ ID NO: 217345 - DNA, 25 bp, Artificial
  Probe
ggacacagtatccttattacaaggt

SEQ ID NO: 217346 - DNA, 25 bp, Artificial
  Probe
ttgatggacacagtatccttattac

SEQ ID NO: 217347 - DNA, 25 bp, Artificial
  Probe
ccaaggggctttattctaagagacg

SEQ ID NO: 217348 - DNA, 25 bp, Artificial
  Probe
agcctgcccgccaaggggctttatt

SEQ ID NO: 217349 - DNA, 25 bp, Artificial
  Probe
ggctttattctaagagacgtgcatg

SEQ ID NO: 217350 - DNA, 25 bp, Artificial
  Probe
aaggagttcatttctctgtagactg

SEQ ID NO: 217351 - DNA, 25 bp, Artificial
  Probe
ccgccaaggggctttattctaagag

SEQ ID NO: 217352 - DNA, 25 bp, Artificial
  Probe
acccgtttcaaactgcctgttaatg

SEQ ID NO: 217353 - DNA, 25 bp, Artificial
  Probe
agaagactttgtgacttccgatgag

SEQ ID NO: 217354 - DNA, 25 bp, Artificial
  Probe
tcaaactgcctgttaatgttagcca

SEQ ID NO: 217355 - DNA, 25 bp, Artificial
  Probe
cccgtttcaaactgcctgttaatgt

SEQ ID NO: 217356 - DNA, 25 bp, Artificial
  Probe
cctgttaatgttagccatgtatgta

SEQ ID NO: 217357 - DNA, 25 bp, Artificial
  Probe
taatgttagccatgtatgtatacct

SEQ ID NO: 217358 - DNA, 25 bp, Artificial
  Probe
attccttagaggaaactgtccttga

SEQ ID NO: 217359 - DNA, 25 bp, Artificial
  Probe
tttcaaactgcctgttaatgttagc

SEQ ID NO: 217360 - DNA, 25 bp, Artificial
  Probe
tttaaggtttatgctgcacctagaa

SEQ ID NO: 217361 - DNA, 25 bp, Artificial
  Probe
actgcctgttaatgttagccatgta

SEQ ID NO: 217362 - DNA, 25 bp, Artificial
  Probe
tgttagccatgtatgtatacctctc

SEQ ID NO: 217363 - DNA, 25 bp, Artificial
  Probe
gttcatttctctgtagactgtaatt

SEQ ID NO: 217364 - DNA, 25 bp, Artificial
  Probe
gaattccttagaggaaactgtcctt

SEQ ID NO: 217365 - DNA, 25 bp, Artificial
  Probe
tagcatagacaggatctgcggctgg

SEQ ID NO: 217366 - DNA, 25 bp, Artificial
  Probe
aggtttatgctgcacctagaattcc

SEQ ID NO: 217367 - DNA, 25 bp, Artificial
  Probe
cgccaaggggctttattctaagaga

SEQ ID NO: 217368 - DNA, 25 bp, Artificial
  Probe
ttctggttatgcatatttagagcac

SEQ ID NO: 217369 - DNA, 25 bp, Artificial
  Probe
acaaggagttcatttctctgtagac

SEQ ID NO: 217370 - DNA, 25 bp, Artificial
  Probe
ggagttcatttctctgtagactgta

SEQ ID NO: 217371 - DNA, 25 bp, Artificial
  Probe
cctagaattccttagaggaaactgt

SEQ ID NO: 217372 - DNA, 25 bp, Artificial
  Probe
ctttattctaagagacgtgcatgtg

SEQ ID NO: 217373 - DNA, 25 bp, Artificial
  Probe
tttattgatggacacagtatcctta

SEQ ID NO: 217374 - DNA, 25 bp, Artificial
  Probe
ttttattgatggacacagtatcctt

SEQ ID NO: 217375 - DNA, 25 bp, Artificial
  Probe
ctgcacctagaattccttagaggaa

SEQ ID NO: 217376 - DNA, 25 bp, Artificial
  Probe
ctagacttagtgtttctggttatgc

SEQ ID NO: 217377 - DNA, 25 bp, Artificial
  Probe
ttaatgttagccatgtatgtatacc

SEQ ID NO: 217378 - DNA, 25 bp, Artificial
  Probe
gtttatgctgcacctagaattcctt

SEQ ID NO: 217379 - DNA, 25 bp, Artificial
  Probe
gcctgcccgccaaggggctttattc

SEQ ID NO: 217380 - DNA, 25 bp, Artificial
  Probe
ttatttaaggtttatgctgcaccta

SEQ ID NO: 217381 - DNA, 25 bp, Artificial
  Probe
ttatgctgcacctagaattccttag

SEQ ID NO: 217382 - DNA, 25 bp, Artificial
  Probe
aactggagttcagatatcggacggc

SEQ ID NO: 217383 - DNA, 25 bp, Artificial
  Probe
accactaactggagttcagatatcg

SEQ ID NO: 217384 - DNA, 25 bp, Artificial
  Probe
ctctgtgccttgtgtgatgtgggca

SEQ ID NO: 217385 - DNA, 25 bp, Artificial
  Probe
gtacaggatgccttactatgaaaaa

SEQ ID NO: 217386 - DNA, 25 bp, Artificial
  Probe
ctgcagctgacttgtttggttatta

SEQ ID NO: 217387 - DNA, 25 bp, Artificial
  Probe
tgcaagtgtcctctgtgccttgtgt

SEQ ID NO: 217388 - DNA, 25 bp, Artificial
  Probe
taactggagttcagatatcggacgg

SEQ ID NO: 217389 - DNA, 25 bp, Artificial
  Probe
ggctgtatatttctgcctattaata

SEQ ID NO: 217390 - DNA, 25 bp, Artificial
  Probe
tctccgagttctgaacctttgggaa

SEQ ID NO: 217391 - DNA, 25 bp, Artificial
  Probe
cataggatgcatgcagtggtgttgc

SEQ ID NO: 217392 - DNA, 25 bp, Artificial
  Probe
ttcagatatcggacggcttatggca

SEQ ID NO: 217393 - DNA, 25 bp, Artificial
  Probe
actaactggagttcagatatcggac

SEQ ID NO: 217394 - DNA, 25 bp, Artificial
  Probe
ctccctgggtttaagtatggctgta

SEQ ID NO: 217395 - DNA, 25 bp, Artificial
  Probe
cactaactggagttcagatatcgga

SEQ ID NO: 217396 - DNA, 25 bp, Artificial
  Probe
acttgaaagtgttaccttcgcagtc

SEQ ID NO: 217397 - DNA, 25 bp, Artificial
  Probe
tcggacggcttatggcaatggtgta

SEQ ID NO: 217398 - DNA, 25 bp, Artificial
  Probe
gctgacttgtttggttattagctct

SEQ ID NO: 217399 - DNA, 25 bp, Artificial
  Probe
actggagttcagatatcggacggct

SEQ ID NO: 217400 - DNA, 25 bp, Artificial
  Probe
ccttgtgtgatgtgggcagtgttac

SEQ ID NO: 217401 - DNA, 25 bp, Artificial
  Probe
tcttgaatcgagtcaaaagttaact

SEQ ID NO: 217402 - DNA, 25 bp, Artificial
  Probe
tgcatgcagtggtgttgcaagtgtc

SEQ ID NO: 217403 - DNA, 25 bp, Artificial
  Probe
atgtgtacaggatgccttactatga

SEQ ID NO: 217404 - DNA, 25 bp, Artificial
  Probe
tctgcatgtgtacaggatgccttac

SEQ ID NO: 217405 - DNA, 25 bp, Artificial
  Probe
aagtgtcctctgtgccttgtgtgat

SEQ ID NO: 217406 - DNA, 25 bp, Artificial
  Probe
gcatgtgtacaggatgccttactat

SEQ ID NO: 217407 - DNA, 25 bp, Artificial
  Probe
ggagttcagatatcggacggcttat

SEQ ID NO: 217408 - DNA, 25 bp, Artificial
  Probe
tgcatgtgtacaggatgccttacta

SEQ ID NO: 217409 - DNA, 25 bp, Artificial
  Probe
agtgttacagggtctgcatgtgtac

SEQ ID NO: 217410 - DNA, 25 bp, Artificial
  Probe
tctaacacagaaccactaactggag

SEQ ID NO: 217411 - DNA, 25 bp, Artificial
  Probe
atatcggacggcttatggcaatggt

SEQ ID NO: 217412 - DNA, 25 bp, Artificial
  Probe
cgcagtcaaatttcagatgagagtg

SEQ ID NO: 217413 - DNA, 25 bp, Artificial
  Probe
gaaagtgttaccttcgcagtcaaat

SEQ ID NO: 217414 - DNA, 25 bp, Artificial
  Probe
tcactccctgggtttaagtatggct

SEQ ID NO: 217415 - DNA, 25 bp, Artificial
  Probe
gcatgcagtggtgttgcaagtgtcc

SEQ ID NO: 217416 - DNA, 25 bp, Artificial
  Probe
acgtcactgcagctgacttgtttgg

SEQ ID NO: 217417 - DNA, 25 bp, Artificial
  Probe
tgcttaacgtcactgcagctgactt

SEQ ID NO: 217418 - DNA, 25 bp, Artificial
  Probe
agagtgtgcttaacgtcactgcagc

SEQ ID NO: 217419 - DNA, 25 bp, Artificial
  Probe
agtatggctgtatatttctgcctat

SEQ ID NO: 217420 - DNA, 25 bp, Artificial
  Probe
tccctgggtttaagtatggctgtat

SEQ ID NO: 217421 - DNA, 25 bp, Artificial
  Probe
gtcctctgtgccttgtgtgatgtgg

SEQ ID NO: 217422 - DNA, 25 bp, Artificial
  Probe
ccttcgcagtcaaatttcagatgag

SEQ ID NO: 217423 - DNA, 25 bp, Artificial
  Probe
aacatttatgatctcttgaatcgag

SEQ ID NO: 217424 - DNA, 25 bp, Artificial
  Probe
gcagctgacttgtttggttattagc

SEQ ID NO: 217425 - DNA, 25 bp, Artificial
  Probe
tacaggatgccttactatgaaaaaa

SEQ ID NO: 217426 - DNA, 25 bp, Artificial
  Probe
aaagtgttaccttcgcagtcaaatt

SEQ ID NO: 217427 - DNA, 25 bp, Artificial
  Probe
ggtgttgcaagtgtcctctgtgcct

SEQ ID NO: 217428 - DNA, 25 bp, Artificial
  Probe
ttagtccttcattcccagttttccg

SEQ ID NO: 217429 - DNA, 25 bp, Artificial
  Probe
ggaaagactgaccttcctgctcacg

SEQ ID NO: 217430 - DNA, 25 bp, Artificial
  Probe
ctgatgacaaaaccaagcaacacgg

SEQ ID NO: 217431 - DNA, 25 bp, Artificial
  Probe
gaccttttagtccttcattcccagt

SEQ ID NO: 217432 - DNA, 25 bp, Artificial
  Probe
ccccagatctgatgacaaaaccaag

SEQ ID NO: 217433 - DNA, 25 bp, Artificial
  Probe
tgacaaaaccaagcaacacggtgcc

SEQ ID NO: 217434 - DNA, 25 bp, Artificial
  Probe
cttctatttatcgttgactccggcc

SEQ ID NO: 217435 - DNA, 25 bp, Artificial
  Probe
gtgccttctatttatcgttgactcc

SEQ ID NO: 217436 - DNA, 25 bp, Artificial
  Probe
gactgaccttcctgctcacgctgca

SEQ ID NO: 217437 - DNA, 25 bp, Artificial
  Probe
tctgatgacaaaaccaagcaacacg

SEQ ID NO: 217438 - DNA, 25 bp, Artificial
  Probe
aggaaagactgaccttcctgctcac

SEQ ID NO: 217439 - DNA, 25 bp, Artificial
  Probe
gccttctatttatcgttgactccgg

SEQ ID NO: 217440 - DNA, 25 bp, Artificial
  Probe
ttcattcccagttttccggaatgat

SEQ ID NO: 217441 - DNA, 25 bp, Artificial
  Probe
tcccacgagaaaacaaaccccagat

SEQ ID NO: 217442 - DNA, 25 bp, Artificial
  Probe
tgccttctatttatcgttgactccg

SEQ ID NO: 217443 - DNA, 25 bp, Artificial
  Probe
caagcaacacggtgccttctattta

SEQ ID NO: 217444 - DNA, 25 bp, Artificial
  Probe
caacacggtgccttctatttatcgt

SEQ ID NO: 217445 - DNA, 25 bp, Artificial
  Probe
atgacaaaaccaagcaacacggtgc

SEQ ID NO: 217446 - DNA, 25 bp, Artificial
  Probe
ggtgccttctatttatcgttgactc

SEQ ID NO: 217447 - DNA, 25 bp, Artificial
  Probe
aagactgaccttcctgctcacgctg

SEQ ID NO: 217448 - DNA, 25 bp, Artificial
  Probe
tcattcccagttttccggaatgata

SEQ ID NO: 217449 - DNA, 25 bp, Artificial
  Probe
tcccttgaccttttagtccttcatt

SEQ ID NO: 217450 - DNA, 25 bp, Artificial
  Probe
ccagttttccggaatgatactttag

SEQ ID NO: 217451 - DNA, 25 bp, Artificial
  Probe
aaaccaagcaacacggtgccttcta

SEQ ID NO: 217452 - DNA, 25 bp, Artificial
  Probe
cttcattcccagttttccggaatga

SEQ ID NO: 217453 - DNA, 25 bp, Artificial
  Probe
aaagactgaccttcctgctcacgct

SEQ ID NO: 217454 - DNA, 25 bp, Artificial
  Probe
acggtgccttctatttatcgttgac

SEQ ID NO: 217455 - DNA, 25 bp, Artificial
  Probe
agatctgatgacaaaaccaagcaac

SEQ ID NO: 217456 - DNA, 25 bp, Artificial
  Probe
cacggtgccttctatttatcgttga

SEQ ID NO: 217457 - DNA, 25 bp, Artificial
  Probe
ttccggaatgatactttaggaggaa

SEQ ID NO: 217458 - DNA, 25 bp, Artificial
  Probe
cggtgccttctatttatcgttgact

SEQ ID NO: 217459 - DNA, 25 bp, Artificial
  Probe
gacaaaaccaagcaacacggtgcct

SEQ ID NO: 217460 - DNA, 25 bp, Artificial
  Probe
gaaagactgaccttcctgctcacgc

SEQ ID NO: 217461 - DNA, 25 bp, Artificial
  Probe
attcccagttttccggaatgatact

SEQ ID NO: 217462 - DNA, 25 bp, Artificial
  Probe
cagttttccggaatgatactttagg

SEQ ID NO: 217463 - DNA, 25 bp, Artificial
  Probe
gatgacaaaaccaagcaacacggtg

SEQ ID NO: 217464 - DNA, 25 bp, Artificial
  Probe
acaaaaccaagcaacacggtgcctt

SEQ ID NO: 217465 - DNA, 25 bp, Artificial
  Probe
accccagatctgatgacaaaaccaa

SEQ ID NO: 217466 - DNA, 25 bp, Artificial
  Probe
tccttcattcccagttttccggaat

SEQ ID NO: 217467 - DNA, 25 bp, Artificial
  Probe
aacacggtgccttctatttatcgtt

SEQ ID NO: 217468 - DNA, 25 bp, Artificial
  Probe
acacggtgccttctatttatcgttg

SEQ ID NO: 217469 - DNA, 25 bp, Artificial
  Probe
tgatgacaaaaccaagcaacacggt

SEQ ID NO: 217470 - DNA, 25 bp, Artificial
  Probe
ccttctatttatcgttgactccggc

SEQ ID NO: 217471 - DNA, 25 bp, Artificial
  Probe
ccttcattcccagttttccggaatg

SEQ ID NO: 217472 - DNA, 25 bp, Artificial
  Probe
cattcccagttttccggaatgatac

SEQ ID NO: 217473 - DNA, 25 bp, Artificial
  Probe
ttctatttatcgttgactccggccc

SEQ ID NO: 217474 - DNA, 25 bp, Artificial
  Probe
ttcaagccgggatgactgaagttgg

SEQ ID NO: 217475 - DNA, 25 bp, Artificial
  Probe
tgcaggaagcaaacccttgtttaca

SEQ ID NO: 217476 - DNA, 25 bp, Artificial
  Probe
tgtgtgtgcacacacacgggcgcac

SEQ ID NO: 217477 - DNA, 25 bp, Artificial
  Probe
ggggctcctcgctttaacagctacc

SEQ ID NO: 217478 - DNA, 25 bp, Artificial
  Probe
ggaagcaaacccttgtttacatctt

SEQ ID NO: 217479 - DNA, 25 bp, Artificial
  Probe
accagaaatgcacctcatcgcagca

SEQ ID NO: 217480 - DNA, 25 bp, Artificial
  Probe
tacttctgactctctgtgtgtgcgc

SEQ ID NO: 217481 - DNA, 25 bp, Artificial
  Probe
gggaccagaaatgcacctcatcgca

SEQ ID NO: 217482 - DNA, 25 bp, Artificial
  Probe
actcaccttgcaggaagcaaaccct

SEQ ID NO: 217483 - DNA, 25 bp, Artificial
  Probe
tctgattccggctgtggcagcatgg

SEQ ID NO: 217484 - DNA, 25 bp, Artificial
  Probe
cttcaagccgggatgactgaagttg

SEQ ID NO: 217485 - DNA, 25 bp, Artificial
  Probe
ttgcaggaagcaaacccttgtttac

SEQ ID NO: 217486 - DNA, 25 bp, Artificial
  Probe
tgaatcagagcttgtaacagccaga

SEQ ID NO: 217487 - DNA, 25 bp, Artificial
  Probe
gcttgaatcagagcttgtaacagcc

SEQ ID NO: 217488 - DNA, 25 bp, Artificial
  Probe
gtgtgcacacacacgggcgcactct

SEQ ID NO: 217489 - DNA, 25 bp, Artificial
  Probe
tgattccggctgtggcagcatggat

SEQ ID NO: 217490 - DNA, 25 bp, Artificial
  Probe
ctcaccttgcaggaagcaaaccctt

SEQ ID NO: 217491 - DNA, 25 bp, Artificial
  Probe
acgaagcactcaccttgcaggaagc

SEQ ID NO: 217492 - DNA, 25 bp, Artificial
  Probe
agcaccaccagagaagctgtcgatc

SEQ ID NO: 217493 - DNA, 25 bp, Artificial
  Probe
gaatcagagcttgtaacagccagac

SEQ ID NO: 217494 - DNA, 25 bp, Artificial
  Probe
aaccaatcagcttgaatcagagctt

SEQ ID NO: 217495 - DNA, 25 bp, Artificial
  Probe
cgccgctacttctgactctctgtgt

SEQ ID NO: 217496 - DNA, 25 bp, Artificial
  Probe
gtgtgtgcacacacacgggcgcact

SEQ ID NO: 217497 - DNA, 25 bp, Artificial
  Probe
tttacatcttcaagccgggatgact

SEQ ID NO: 217498 - DNA, 25 bp, Artificial
  Probe
tcatcgcagcaccaccagagaagct

SEQ ID NO: 217499 - DNA, 25 bp, Artificial
  Probe
tcagcttgaatcagagcttgtaaca

SEQ ID NO: 217500 - DNA, 25 bp, Artificial
  Probe
acacacgggcgcactctctcttgtg

SEQ ID NO: 217501 - DNA, 25 bp, Artificial
  Probe
actctctgtgtgtgcgctcgctcgc

SEQ ID NO: 217502 - DNA, 25 bp, Artificial
  Probe
tccacgaagcactcaccttgcagga

SEQ ID NO: 217503 - DNA, 25 bp, Artificial
  Probe
agagcttgtaacagccagacccctc

SEQ ID NO: 217504 - DNA, 25 bp, Artificial
  Probe
acgggcgcactctctcttgtgcaca

SEQ ID NO: 217505 - DNA, 25 bp, Artificial
  Probe
aacagctacccgatatttcccagcg

SEQ ID NO: 217506 - DNA, 25 bp, Artificial
  Probe
gctacttctgactctctgtgtgtgc

SEQ ID NO: 217507 - DNA, 25 bp, Artificial
  Probe
gggcgcactctctcttgtgcacatt

SEQ ID NO: 217508 - DNA, 25 bp, Artificial
  Probe
aaaccaatcagcttgaatcagagct

SEQ ID NO: 217509 - DNA, 25 bp, Artificial
  Probe
ggaactccacgaagcactcaccttg

SEQ ID NO: 217510 - DNA, 25 bp, Artificial
  Probe
gcactcaccttgcaggaagcaaacc

SEQ ID NO: 217511 - DNA, 25 bp, Artificial
  Probe
ctgactctctgtgtgtgcgctcgct

SEQ ID NO: 217512 - DNA, 25 bp, Artificial
  Probe
gcgcactctctcttgtgcacatttt

SEQ ID NO: 217513 - DNA, 25 bp, Artificial
  Probe
gcaccaccagagaagctgtcgatca

SEQ ID NO: 217514 - DNA, 25 bp, Artificial
  Probe
gacccctctgattccggctgtggca

SEQ ID NO: 217515 - DNA, 25 bp, Artificial
  Probe
cttgtaacagccagacccctctgat

SEQ ID NO: 217516 - DNA, 25 bp, Artificial
  Probe
acccttgtttacatcttcaagccgg

SEQ ID NO: 217517 - DNA, 25 bp, Artificial
  Probe
acacgggcgcactctctcttgtgca

SEQ ID NO: 217518 - DNA, 25 bp, Artificial
  Probe
tgtaacagccagacccctctgattc

SEQ ID NO: 217519 - DNA, 25 bp, Artificial
  Probe
cagacccctctgattccggctgtgg

SEQ ID NO: 217520 - DNA, 25 bp, Artificial
  Probe
ctcactgacacttcagactaaagcg

SEQ ID NO: 217521 - DNA, 25 bp, Artificial
  Probe
cccaggcaaaatctgtggctctgcc

SEQ ID NO: 217522 - DNA, 25 bp, Artificial
  Probe
ggagctggtgccaccgtcattgccc

SEQ ID NO: 217523 - DNA, 25 bp, Artificial
  Probe
gtcaacctgtgaagtcatcaagtcc

SEQ ID NO: 217524 - DNA, 25 bp, Artificial
  Probe
aaggtttctgcagttcgctacagta

SEQ ID NO: 217525 - DNA, 25 bp, Artificial
  Probe
ttagcgatggccaagagaacaagtg

SEQ ID NO: 217526 - DNA, 25 bp, Artificial
  Probe
aatggggtctgactattcccagttt

SEQ ID NO: 217527 - DNA, 25 bp, Artificial
  Probe
catgtcctatcatctgttcattgtg

SEQ ID NO: 217528 - DNA, 25 bp, Artificial
  Probe
cttgtgctggagctggtgccaccgt

SEQ ID NO: 217529 - DNA, 25 bp, Artificial
  Probe
actattcccagtttgaaagggattg

SEQ ID NO: 217530 - DNA, 25 bp, Artificial
  Probe
ttgcttgcttgataaccagccttag

SEQ ID NO: 217531 - DNA, 25 bp, Artificial
  Probe
gtaatagcttcagttactcactttg

SEQ ID NO: 217532 - DNA, 25 bp, Artificial
  Probe
tgatctacatgatggctactacata

SEQ ID NO: 217533 - DNA, 25 bp, Artificial
  Probe
ctgacacttcagactaaagcgggcc

SEQ ID NO: 217534 - DNA, 25 bp, Artificial
  Probe
atggctactacatataactatgcgg

SEQ ID NO: 217535 - DNA, 25 bp, Artificial
  Probe
ggtttctgcagttcgctacagtaat

SEQ ID NO: 217536 - DNA, 25 bp, Artificial
  Probe
gcaacaccaatgagttctacatgtc

SEQ ID NO: 217537 - DNA, 25 bp, Artificial
  Probe
gcaactgttcccttacaactaggtt

SEQ ID NO: 217538 - DNA, 25 bp, Artificial
  Probe
gaacgctttcccaggcaaaatctgt

SEQ ID NO: 217539 - DNA, 25 bp, Artificial
  Probe
actttgcatggagactaaataggac

SEQ ID NO: 217540 - DNA, 25 bp, Artificial
  Probe
aggagtctggcctttaaggaaactg

SEQ ID NO: 217541 - DNA, 25 bp, Artificial
  Probe
gtgccaccgtcattgccctgctgat

SEQ ID NO: 217542 - DNA, 25 bp, Artificial
  Probe
gtcattgccctgctgatctacatga

SEQ ID NO: 217543 - DNA, 25 bp, Artificial
  Probe
agcagatctgtgtggatgtccggca

SEQ ID NO: 217544 - DNA, 25 bp, Artificial
  Probe
ttttcatgaagagaagttgggccca

SEQ ID NO: 217545 - DNA, 25 bp, Artificial
  Probe
ctggcctttaaggaaactgagttgt

SEQ ID NO: 217546 - DNA, 25 bp, Artificial
  Probe
ggctcactaccaaataaatgccaag

SEQ ID NO: 217547 - DNA, 25 bp, Artificial
  Probe
cttactgtacgtgaattacaaaaga

SEQ ID NO: 217548 - DNA, 25 bp, Artificial
  Probe
attttcatgaagagaagttgggccc

SEQ ID NO: 217549 - DNA, 25 bp, Artificial
  Probe
cagccttagcgatggccaagagaac

SEQ ID NO: 217550 - DNA, 25 bp, Artificial
  Probe
agactaaataggacttactgtacgt

SEQ ID NO: 217551 - DNA, 25 bp, Artificial
  Probe
actggtgagcatcctttgaaaaata

SEQ ID NO: 217552 - DNA, 25 bp, Artificial
  Probe
atacatgggaaggatgcatgtgcca

SEQ ID NO: 217553 - DNA, 25 bp, Artificial
  Probe
gaagtcatcaagtccccacaaagca

SEQ ID NO: 217554 - DNA, 25 bp, Artificial
  Probe
acaactaggttcttaaattacatgg

SEQ ID NO: 217555 - DNA, 25 bp, Artificial
  Probe
gagttctacatgtcctatcatctgt

SEQ ID NO: 217556 - DNA, 25 bp, Artificial
  Probe
atgatggctactacatataactatg

SEQ ID NO: 217557 - DNA, 25 bp, Artificial
  Probe
tgacactggtgagcatcctttgaaa

SEQ ID NO: 217558 - DNA, 25 bp, Artificial
  Probe
ttcattgtggcttgtgctggagctg

SEQ ID NO: 217559 - DNA, 25 bp, Artificial
  Probe
gatacaacaccattaaggtctttag

SEQ ID NO: 217560 - DNA, 25 bp, Artificial
  Probe
tgcatgtgccacagaaactgtaaag

SEQ ID NO: 217561 - DNA, 25 bp, Artificial
  Probe
cctttctagaaaagattttgcaagt

SEQ ID NO: 217562 - DNA, 25 bp, Artificial
  Probe
cccacaaagcaatgggacctcgggt

SEQ ID NO: 217563 - DNA, 25 bp, Artificial
  Probe
tgagttctacatgtcctatcatctg

SEQ ID NO: 217564 - DNA, 25 bp, Artificial
  Probe
tgccagtgtttatgttctacaatat

SEQ ID NO: 217565 - DNA, 25 bp, Artificial
  Probe
aaatctgtggctctgccctggagaa

SEQ ID NO: 217566 - DNA, 25 bp, Artificial
  Probe
tccgggaattccattcgcggcctgc

SEQ ID NO: 217567 - DNA, 25 bp, Artificial
  Probe
acctgcgtctcctcttcaagtggct

SEQ ID NO: 217568 - DNA, 25 bp, Artificial
  Probe
actggaaggcgcagcgctacagcct

SEQ ID NO: 217569 - DNA, 25 bp, Artificial
  Probe
aacactgttctcgagtcctgacttg

SEQ ID NO: 217570 - DNA, 25 bp, Artificial
  Probe
agctacaccttcaacaaagtgcatg

SEQ ID NO: 217571 - DNA, 25 bp, Artificial
  Probe
ctctaaggaagcagagaggacgctg

SEQ ID NO: 217572 - DNA, 25 bp, Artificial
  Probe
tgcgcctgctgcacatcttcacggt

SEQ ID NO: 217573 - DNA, 25 bp, Artificial
  Probe
acgctgctgacttgggagtctgtgc

SEQ ID NO: 217574 - DNA, 25 bp, Artificial
  Probe
tcagagagtatgaccggcgtctgag

SEQ ID NO: 217575 - DNA, 25 bp, Artificial
  Probe
tggctgaggcccttagccactctgc

SEQ ID NO: 217576 - DNA, 25 bp, Artificial
  Probe
tggatgtggccctcatgaatcccag

SEQ ID NO: 217577 - DNA, 25 bp, Artificial
  Probe
cagtctgcctcaagctacacaactg

SEQ ID NO: 217578 - DNA, 25 bp, Artificial
  Probe
cacagaggggatcctgaggccccag

SEQ ID NO: 217579 - DNA, 25 bp, Artificial
  Probe
aaggtcctggggtgcaggaaccaca

SEQ ID NO: 217580 - DNA, 25 bp, Artificial
  Probe
agagctgcgcccagtctgcctcaag

SEQ ID NO: 217581 - DNA, 25 bp, Artificial
  Probe
tcctggggtgcaggaaccacagacc

SEQ ID NO: 217582 - DNA, 25 bp, Artificial
  Probe
agatcagagagtatgaccggcgtct

SEQ ID NO: 217583 - DNA, 25 bp, Artificial
  Probe
gccaatatcctgctgctcaatctgc

SEQ ID NO: 217584 - DNA, 25 bp, Artificial
  Probe
tctgcgtgtggcttgtagcttatgg

SEQ ID NO: 217585 - DNA, 25 bp, Artificial
  Probe
ccagtcttcgagcacttccgtgtct

SEQ ID NO: 217586 - DNA, 25 bp, Artificial
  Probe
acagcttccccacaatggggaaata

SEQ ID NO: 217587 - DNA, 25 bp, Artificial
  Probe
tgatcttcacactgcgcctgctgca

SEQ ID NO: 217588 - DNA, 25 bp, Artificial
  Probe
ggaccgcagtctaccgagcatcctg

SEQ ID NO: 217589 - DNA, 25 bp, Artificial
  Probe
tgggagtctgtgcacaaagagaact

SEQ ID NO: 217590 - DNA, 25 bp, Artificial
  Probe
tccccaggaggaaatggatgtggcc

SEQ ID NO: 217591 - DNA, 25 bp, Artificial
  Probe
agcgctacagcctcatccgggaatt

SEQ ID NO: 217592 - DNA, 25 bp, Artificial
  Probe
ttgacttcatgatcttcacactgcg

SEQ ID NO: 217593 - DNA, 25 bp, Artificial
  Probe
ttgtcctcaccgtagaccccatgtt

SEQ ID NO: 217594 - DNA, 25 bp, Artificial
  Probe
tcttcaagtggctgcgcaggtgtca

SEQ ID NO: 217595 - DNA, 25 bp, Artificial
  Probe
agccccactgggtccaaagactgag

SEQ ID NO: 217596 - DNA, 25 bp, Artificial
  Probe
tgctcatcgccatgttcagctacac

SEQ ID NO: 217597 - DNA, 25 bp, Artificial
  Probe
actcacctgcttcctgctgggcgtt

SEQ ID NO: 217598 - DNA, 25 bp, Artificial
  Probe
tgtcataggactaacttgcccgcct

SEQ ID NO: 217599 - DNA, 25 bp, Artificial
  Probe
caagattgtcatcgtgagcaagatg

SEQ ID NO: 217600 - DNA, 25 bp, Artificial
  Probe
ctgcaggctgactcctggcctgttt

SEQ ID NO: 217601 - DNA, 25 bp, Artificial
  Probe
agtgcgacttgctggcactcacctg

SEQ ID NO: 217602 - DNA, 25 bp, Artificial
  Probe
gccacagaggggatcctgaggcccc

SEQ ID NO: 217603 - DNA, 25 bp, Artificial
  Probe
cggtcgcaggctcctgtgtgtccca

SEQ ID NO: 217604 - DNA, 25 bp, Artificial
  Probe
cacaaagagaacttcctattggcac

SEQ ID NO: 217605 - DNA, 25 bp, Artificial
  Probe
gagagaggtccaacactgttctcga

SEQ ID NO: 217606 - DNA, 25 bp, Artificial
  Probe
tttcctcttcttcctctgcgtgtgg

SEQ ID NO: 217607 - DNA, 25 bp, Artificial
  Probe
cccagtaactgctctgccgagcggg

SEQ ID NO: 217608 - DNA, 25 bp, Artificial
  Probe
gttggcccctttgtgggcccagcca

SEQ ID NO: 217609 - DNA, 25 bp, Artificial
  Probe
cctgcttcctgctgggcgttggctg

SEQ ID NO: 217610 - DNA, 25 bp, Artificial
  Probe
catgttcaggggttgctgtctcgcc

SEQ ID NO: 217611 - DNA, 25 bp, Artificial
  Probe
ctgctcaatctgctcatcgccatgt

SEQ ID NO: 217612 - DNA, 25 bp, Artificial
  Probe
acctgtagccgagaagtgggtttga

SEQ ID NO: 217613 - DNA, 25 bp, Artificial
  Probe
cataaacaccaagacctgggtcaca

SEQ ID NO: 217614 - DNA, 25 bp, Artificial
  Probe
gtgcagggctcagttctttcccaac

SEQ ID NO: 217615 - DNA, 25 bp, Artificial
  Probe
ccaagacctgggtcacaggtagtac

SEQ ID NO: 217616 - DNA, 25 bp, Artificial
  Probe
tttgatctgtttgaacaagaaccag

SEQ ID NO: 217617 - DNA, 25 bp, Artificial
  Probe
caagagctgggacaggatgtgacct

SEQ ID NO: 217618 - DNA, 25 bp, Artificial
  Probe
caacacaccactgcaagagctggga

SEQ ID NO: 217619 - DNA, 25 bp, Artificial
  Probe
gacaccagcaccagctctgtgcaga

SEQ ID NO: 217620 - DNA, 25 bp, Artificial
  Probe
cactgcaagagctgggacaggatgt

SEQ ID NO: 217621 - DNA, 25 bp, Artificial
  Probe
tctgtttgaacaagaaccagctgcc

SEQ ID NO: 217622 - DNA, 25 bp, Artificial
  Probe
agatccggatagaatgctgcaccat

SEQ ID NO: 217623 - DNA, 25 bp, Artificial
  Probe
ccttttccaccgagaataccagtgg

SEQ ID NO: 217624 - DNA, 25 bp, Artificial
  Probe
aacaccaagacctgggtcacaggta

SEQ ID NO: 217625 - DNA, 25 bp, Artificial
  Probe
gtcataaacaccaagacctgggtca

SEQ ID NO: 217626 - DNA, 25 bp, Artificial
  Probe
tgggtcacaggtagtacacacacaa

SEQ ID NO: 217627 - DNA, 25 bp, Artificial
  Probe
aacagtcataaacaccaagacctgg

SEQ ID NO: 217628 - DNA, 25 bp, Artificial
  Probe
gtggtcactcaacagtcataaacac

SEQ ID NO: 217629 - DNA, 25 bp, Artificial
  Probe
acaactatgagatccggatagaatg

SEQ ID NO: 217630 - DNA, 25 bp, Artificial
  Probe
tgtttgaacaagaaccagctgccac

SEQ ID NO: 217631 - DNA, 25 bp, Artificial
  Probe
gaacaaggccgacacccagcatagt

SEQ ID NO: 217632 - DNA, 25 bp, Artificial
  Probe
taaacaccaagacctgggtcacagg

SEQ ID NO: 217633 - DNA, 25 bp, Artificial
  Probe
agacgaactggatcacaaacacata

SEQ ID NO: 217634 - DNA, 25 bp, Artificial
  Probe
gccacccatttgctacaactatgag

SEQ ID NO: 217635 - DNA, 25 bp, Artificial
  Probe
caggatgtgacctgtagccgagaag

SEQ ID NO: 217636 - DNA, 25 bp, Artificial
  Probe
gctgcaccatagtaaacatctgttc

SEQ ID NO: 217637 - DNA, 25 bp, Artificial
  Probe
gtcacaggtagtacacacacaaccc

SEQ ID NO: 217638 - DNA, 25 bp, Artificial
  Probe
ttccaccgagaataccagtggtcac

SEQ ID NO: 217639 - DNA, 25 bp, Artificial
  Probe
aagacgaactggatcacaaacacat

SEQ ID NO: 217640 - DNA, 25 bp, Artificial
  Probe
ccatttgctacaactatgagatccg

SEQ ID NO: 217641 - DNA, 25 bp, Artificial
  Probe
accagcaccagctctgtgcagacag

SEQ ID NO: 217642 - DNA, 25 bp, Artificial
  Probe
cagggctcagttctttcccaacaca

SEQ ID NO: 217643 - DNA, 25 bp, Artificial
  Probe
caaagacgaactggatcacaaacac

SEQ ID NO: 217644 - DNA, 25 bp, Artificial
  Probe
ggatagaatgctgcaccatagtaaa

SEQ ID NO: 217645 - DNA, 25 bp, Artificial
  Probe
ggtttgatctgtttgaacaagaacc

SEQ ID NO: 217646 - DNA, 25 bp, Artificial
  Probe
aggacaccagcaccagctctgtgca

SEQ ID NO: 217647 - DNA, 25 bp, Artificial
  Probe
aggatgtgacctgtagccgagaagt

SEQ ID NO: 217648 - DNA, 25 bp, Artificial
  Probe
ccacctcacatggagtcagcataaa

SEQ ID NO: 217649 - DNA, 25 bp, Artificial
  Probe
tatgagatccggatagaatgctgca

SEQ ID NO: 217650 - DNA, 25 bp, Artificial
  Probe
acaagaaccagctgccacccatttg

SEQ ID NO: 217651 - DNA, 25 bp, Artificial
  Probe
cctgggtcacaggtagtacacacac

SEQ ID NO: 217652 - DNA, 25 bp, Artificial
  Probe
gaacaagaaccagctgccacccatt

SEQ ID NO: 217653 - DNA, 25 bp, Artificial
  Probe
agcatagtgtccacccaggacacca

SEQ ID NO: 217654 - DNA, 25 bp, Artificial
  Probe
cctcacatggagtcagcataaaaac

SEQ ID NO: 217655 - DNA, 25 bp, Artificial
  Probe
ggaacaaggccgacacccagcatag

SEQ ID NO: 217656 - DNA, 25 bp, Artificial
  Probe
aggccgacacccagcatagtgtcca

SEQ ID NO: 217657 - DNA, 25 bp, Artificial
  Probe
ctgtagccgagaagtgggtttgatc

SEQ ID NO: 217658 - DNA, 25 bp, Artificial
  Probe
tgggagcgctgtacggagtttccct

SEQ ID NO: 217659 - DNA, 25 bp, Artificial
  Probe
caggtcccaggacagccagatctct

SEQ ID NO: 217660 - DNA, 25 bp, Artificial
  Probe
ttggctgctccatccaggaaccact

SEQ ID NO: 217661 - DNA, 25 bp, Artificial
  Probe
gcccgtgaccgtgtccgtgaatcag

SEQ ID NO: 217662 - DNA, 25 bp, Artificial
  Probe
cccgtgaccgtgtccgtgaatcagt

SEQ ID NO: 217663 - DNA, 25 bp, Artificial
  Probe
tcgtgacccatgagcccgtgaccgt

SEQ ID NO: 217664 - DNA, 25 bp, Artificial
  Probe
gagctgtacatacagtgtgcaaagt

SEQ ID NO: 217665 - DNA, 25 bp, Artificial
  Probe
ggctagcagcggagctgtacataca

SEQ ID NO: 217666 - DNA, 25 bp, Artificial
  Probe
aatcagtgagtctgtggcctgtgcc

SEQ ID NO: 217667 - DNA, 25 bp, Artificial
  Probe
agcccgtgaccgtgtccgtgaatca

SEQ ID NO: 217668 - DNA, 25 bp, Artificial
  Probe
cagccagatctcttgggttctcttt

SEQ ID NO: 217669 - DNA, 25 bp, Artificial
  Probe
tcttggctgctccatccaggaacca

SEQ ID NO: 217670 - DNA, 25 bp, Artificial
  Probe
ttcgtgacccatgagcccgtgaccg

SEQ ID NO: 217671 - DNA, 25 bp, Artificial
  Probe
tgtccccgtgggaaagaaattcact

SEQ ID NO: 217672 - DNA, 25 bp, Artificial
  Probe
gtccccgtgggaaagaaattcactg

SEQ ID NO: 217673 - DNA, 25 bp, Artificial
  Probe
catgagcccgtgaccgtgtccgtga

SEQ ID NO: 217674 - DNA, 25 bp, Artificial
  Probe
ccttcttgcgcctctgcgggacagg

SEQ ID NO: 217675 - DNA, 25 bp, Artificial
  Probe
tgtccgtgaatcagtgagtctgtgg

SEQ ID NO: 217676 - DNA, 25 bp, Artificial
  Probe
cggagctgtacatacagtgtgcaaa

SEQ ID NO: 217677 - DNA, 25 bp, Artificial
  Probe
cttcttgcgcctctgcgggacaggg

SEQ ID NO: 217678 - DNA, 25 bp, Artificial
  Probe
aggtcccaggacagccagatctctt

SEQ ID NO: 217679 - DNA, 25 bp, Artificial
  Probe
agcagcggagctgtacatacagtgt

SEQ ID NO: 217680 - DNA, 25 bp, Artificial
  Probe
gaatcagtgagtctgtggcctgtgc

SEQ ID NO: 217681 - DNA, 25 bp, Artificial
  Probe
tgaccgtgtccgtgaatcagtgagt

SEQ ID NO: 217682 - DNA, 25 bp, Artificial
  Probe
agcggagctgtacatacagtgtgca

SEQ ID NO: 217683 - DNA, 25 bp, Artificial
  Probe
gaccgtgtccgtgaatcagtgagtc

SEQ ID NO: 217684 - DNA, 25 bp, Artificial
  Probe
ccatgagcccgtgaccgtgtccgtg

SEQ ID NO: 217685 - DNA, 25 bp, Artificial
  Probe
gacagccagatctcttgggttctct

SEQ ID NO: 217686 - DNA, 25 bp, Artificial
  Probe
tctcttggctgctccatccaggaac

SEQ ID NO: 217687 - DNA, 25 bp, Artificial
  Probe
cgccggatgtacatatgcgcccctg

SEQ ID NO: 217688 - DNA, 25 bp, Artificial
  Probe
cccaggacagccagatctcttgggt

SEQ ID NO: 217689 - DNA, 25 bp, Artificial
  Probe
ttttattctccctgagccccgggct

SEQ ID NO: 217690 - DNA, 25 bp, Artificial
  Probe
cgcagcccagtgtccccgtgggaaa

SEQ ID NO: 217691 - DNA, 25 bp, Artificial
  Probe
ccccgggctagcagcggagctgtac

SEQ ID NO: 217692 - DNA, 25 bp, Artificial
  Probe
gctgtacatacagtgtgcaaagtgt

SEQ ID NO: 217693 - DNA, 25 bp, Artificial
  Probe
tattcgtgacccatgagcccgtgac

SEQ ID NO: 217694 - DNA, 25 bp, Artificial
  Probe
tcagtgagtctgtggcctgtgccct

SEQ ID NO: 217695 - DNA, 25 bp, Artificial
  Probe
attcgtgacccatgagcccgtgacc

SEQ ID NO: 217696 - DNA, 25 bp, Artificial
  Probe
tttattctccctgagccccgggcta

SEQ ID NO: 217697 - DNA, 25 bp, Artificial
  Probe
ctagcagcggagctgtacatacagt

SEQ ID NO: 217698 - DNA, 25 bp, Artificial
  Probe
tatttattcgtgacccatgagcccg

SEQ ID NO: 217699 - DNA, 25 bp, Artificial
  Probe
ttcttgcgcctctgcgggacagggt

SEQ ID NO: 217700 - DNA, 25 bp, Artificial
  Probe
cgtgtccgtgaatcagtgagtctgt

SEQ ID NO: 217701 - DNA, 25 bp, Artificial
  Probe
caggacagccagatctcttgggttc

SEQ ID NO: 217702 - DNA, 25 bp, Artificial
  Probe
ctctcttggctgctccatccaggaa

SEQ ID NO: 217703 - DNA, 25 bp, Artificial
  Probe
ctgtacatacagtgtgcaaagtgta

SEQ ID NO: 217704 - DNA, 25 bp, Artificial
  Probe
ctttggtcaagacatgatgttaacg

SEQ ID NO: 217705 - DNA, 25 bp, Artificial
  Probe
gggtgttttcacagccagctgtata

SEQ ID NO: 217706 - DNA, 25 bp, Artificial
  Probe
cctcgaggacgcttatgttactgga

SEQ ID NO: 217707 - DNA, 25 bp, Artificial
  Probe
cagctgtatatgtgcccactaatta

SEQ ID NO: 217708 - DNA, 25 bp, Artificial
  Probe
gaggaacacggtcttcaggtggaca

SEQ ID NO: 217709 - DNA, 25 bp, Artificial
  Probe
tgcacagctaaagcagatgctgctg

SEQ ID NO: 217710 - DNA, 25 bp, Artificial
  Probe
ggccttgtaatcaggcagttttcac

SEQ ID NO: 217711 - DNA, 25 bp, Artificial
  Probe
cccagaaagctgctggatgacataa

SEQ ID NO: 217712 - DNA, 25 bp, Artificial
  Probe
gtttcctttcttaaggatgagtagc

SEQ ID NO: 217713 - DNA, 25 bp, Artificial
  Probe
cactggatacttatgctgaaattag

SEQ ID NO: 217714 - DNA, 25 bp, Artificial
  Probe
attagtgcgggcaaaaacgactttg

SEQ ID NO: 217715 - DNA, 25 bp, Artificial
  Probe
gacacctcgaggacgcttatgttac

SEQ ID NO: 217716 - DNA, 25 bp, Artificial
  Probe
gtgggtgttttcacagccagctgta

SEQ ID NO: 217717 - DNA, 25 bp, Artificial
  Probe
ttcaggtggacacctcgaggacgct

SEQ ID NO: 217718 - DNA, 25 bp, Artificial
  Probe
caagacatgatgttaacgggccttg

SEQ ID NO: 217719 - DNA, 25 bp, Artificial
  Probe
cgaggacgcttatgttactggattt

SEQ ID NO: 217720 - DNA, 25 bp, Artificial
  Probe
tatgtgcccactaattactcactgg

SEQ ID NO: 217721 - DNA, 25 bp, Artificial
  Probe
atgctgctgcggtcactgaagcggt

SEQ ID NO: 217722 - DNA, 25 bp, Artificial
  Probe
agcagatgctgctgcggtcactgaa

SEQ ID NO: 217723 - DNA, 25 bp, Artificial
  Probe
tgcggtcactgaagcggtgtaaata

SEQ ID NO: 217724 - DNA, 25 bp, Artificial
  Probe
aagctgctggatgacataaaaatgc

SEQ ID NO: 217725 - DNA, 25 bp, Artificial
  Probe
gctttggtcaagacatgatgttaac

SEQ ID NO: 217726 - DNA, 25 bp, Artificial
  Probe
cttatgctgaaattagtgcgggcaa

SEQ ID NO: 217727 - DNA, 25 bp, Artificial
  Probe
ggttttgttaacatgcacagctaaa

SEQ ID NO: 217728 - DNA, 25 bp, Artificial
  Probe
gcttatgttactggatttgccattt

SEQ ID NO: 217729 - DNA, 25 bp, Artificial
  Probe
gacttcactgtgtatattacctgca

SEQ ID NO: 217730 - DNA, 25 bp, Artificial
  Probe
tgttaacgggccttgtaatcaggca

SEQ ID NO: 217731 - DNA, 25 bp, Artificial
  Probe
tggagcagaacctgttctgaggtgt

SEQ ID NO: 217732 - DNA, 25 bp, Artificial
  Probe
gttttcacagccagctgtatatgtg

SEQ ID NO: 217733 - DNA, 25 bp, Artificial
  Probe
tgcagtttcttaagactgaaattca

SEQ ID NO: 217734 - DNA, 25 bp, Artificial
  Probe
tgttactggatttgccatttctaat

SEQ ID NO: 217735 - DNA, 25 bp, Artificial
  Probe
cttcactgtgtatattacctgcaag

SEQ ID NO: 217736 - DNA, 25 bp, Artificial
  Probe
atgcagtttcttaagactgaaattc

SEQ ID NO: 217737 - DNA, 25 bp, Artificial
  Probe
acagctaaagcagatgctgctgcgg

SEQ ID NO: 217738 - DNA, 25 bp, Artificial
  Probe
aattactcactggatacttatgctg

SEQ ID NO: 217739 - DNA, 25 bp, Artificial
  Probe
aacatgcacagctaaagcagatgct

SEQ ID NO: 217740 - DNA, 25 bp, Artificial
  Probe
cctttcttaaggatgagtagctttt

SEQ ID NO: 217741 - DNA, 25 bp, Artificial
  Probe
acggtcttcaggtggacacctcgag

SEQ ID NO: 217742 - DNA, 25 bp, Artificial
  Probe
ctgctgcggtcactgaagcggtgta

SEQ ID NO: 217743 - DNA, 25 bp, Artificial
  Probe
tacttatgctgaaattagtgcgggc

SEQ ID NO: 217744 - DNA, 25 bp, Artificial
  Probe
atgatgacttcactgtgtatattac

SEQ ID NO: 217745 - DNA, 25 bp, Artificial
  Probe
gtgcccactaattactcactggata

SEQ ID NO: 217746 - DNA, 25 bp, Artificial
  Probe
ttgtaatcaggcagttttcaccttg

SEQ ID NO: 217747 - DNA, 25 bp, Artificial
  Probe
tttaagtactgttgctgctttggtc

SEQ ID NO: 217748 - DNA, 25 bp, Artificial
  Probe
ctgctttggtcaagacatgatgtta

SEQ ID NO: 217749 - DNA, 25 bp, Artificial
  Probe
ttttgttaacatgcacagctaaagc

SEQ ID NO: 217750 - DNA, 25 bp, Artificial
  Probe
accctgcctccaggttggttttgtg

SEQ ID NO: 217751 - DNA, 25 bp, Artificial
  Probe
tgcttttccggaccccgctctgccc

SEQ ID NO: 217752 - DNA, 25 bp, Artificial
  Probe
ccctgcctccaggttggttttgtgt

SEQ ID NO: 217753 - DNA, 25 bp, Artificial
  Probe
cctcaacaacatcaacaacctcacg

SEQ ID NO: 217754 - DNA, 25 bp, Artificial
  Probe
ccatgttctcggcccccagctccat

SEQ ID NO: 217755 - DNA, 25 bp, Artificial
  Probe
ggcgccgctgtccaccaagagcttt

SEQ ID NO: 217756 - DNA, 25 bp, Artificial
  Probe
tgagtccgctatcctctcagtccat

SEQ ID NO: 217757 - DNA, 25 bp, Artificial
  Probe
tgcctccaggttggttttgtgtttg

SEQ ID NO: 217758 - DNA, 25 bp, Artificial
  Probe
cctacagcgtctaccgggacacgtg

SEQ ID NO: 217759 - DNA, 25 bp, Artificial
  Probe
gctatcctctcagtccatgttctcg

SEQ ID NO: 217760 - DNA, 25 bp, Artificial
  Probe
agggtccagcgtcgggcctcaacgc

SEQ ID NO: 217761 - DNA, 25 bp, Artificial
  Probe
gctgtccaccaagagctttaccttc

SEQ ID NO: 217762 - DNA, 25 bp, Artificial
  Probe
gggcgctcgcagcacctgggacctc

SEQ ID NO: 217763 - DNA, 25 bp, Artificial
  Probe
acctcacgggctcctcgctcaactc

SEQ ID NO: 217764 - DNA, 25 bp, Artificial
  Probe
catgagtccgctatcctctcagtcc

SEQ ID NO: 217765 - DNA, 25 bp, Artificial
  Probe
cctccaggttggttttgtgtttgct

SEQ ID NO: 217766 - DNA, 25 bp, Artificial
  Probe
gcgtctaccgggacacgtgcaactc

SEQ ID NO: 217767 - DNA, 25 bp, Artificial
  Probe
gagtccgctatcctctcagtccatg

SEQ ID NO: 217768 - DNA, 25 bp, Artificial
  Probe
agcatgggcccgggctccgtgcccg

SEQ ID NO: 217769 - DNA, 25 bp, Artificial
  Probe
gcgccgctgtccaccaagagcttta

SEQ ID NO: 217770 - DNA, 25 bp, Artificial
  Probe
ctccaggttggttttgtgtttgctt

SEQ ID NO: 217771 - DNA, 25 bp, Artificial
  Probe
ctccgtgcccggcatgcccaactcg

SEQ ID NO: 217772 - DNA, 25 bp, Artificial
  Probe
atgagtccgctatcctctcagtcca

SEQ ID NO: 217773 - DNA, 25 bp, Artificial
  Probe
ctatcctctcagtccatgttctcgg

SEQ ID NO: 217774 - DNA, 25 bp, Artificial
  Probe
catgaccatgccatccagcatgggc

SEQ ID NO: 217775 - DNA, 25 bp, Artificial
  Probe
cctgcctccaggttggttttgtgtt

SEQ ID NO: 217776 - DNA, 25 bp, Artificial
  Probe
gcctccaggttggttttgtgtttgc

SEQ ID NO: 217777 - DNA, 25 bp, Artificial
  Probe
tctgcagggtccagcgtcgggcctc

SEQ ID NO: 217778 - DNA, 25 bp, Artificial
  Probe
atgaccatgccatccagcatgggcc

SEQ ID NO: 217779 - DNA, 25 bp, Artificial
  Probe
gcctcgccctacagcgtctaccggg

SEQ ID NO: 217780 - DNA, 25 bp, Artificial
  Probe
cagggtccagcgtcgggcctcaacg

SEQ ID NO: 217781 - DNA, 25 bp, Artificial
  Probe
cgctgtccaccaagagctttacctt

SEQ ID NO: 217782 - DNA, 25 bp, Artificial
  Probe
ctgcctccaggttggttttgtgttt

SEQ ID NO: 217783 - DNA, 25 bp, Artificial
  Probe
gtccgctatcctctcagtccatgtt

SEQ ID NO: 217784 - DNA, 25 bp, Artificial
  Probe
agtccgctatcctctcagtccatgt

SEQ ID NO: 217785 - DNA, 25 bp, Artificial
  Probe
ctgtccaccaagagctttaccttct

SEQ ID NO: 217786 - DNA, 25 bp, Artificial
  Probe
tgtttgcttttccggaccccgctct

SEQ ID NO: 217787 - DNA, 25 bp, Artificial
  Probe
caccctgcctccaggttggttttgt

SEQ ID NO: 217788 - DNA, 25 bp, Artificial
  Probe
tcgtttggctacggcggtctgcagg

SEQ ID NO: 217789 - DNA, 25 bp, Artificial
  Probe
ccagctccatctcttccatgaccat

SEQ ID NO: 217790 - DNA, 25 bp, Artificial
  Probe
gggagcgcgcggagcacacggggcg

SEQ ID NO: 217791 - DNA, 25 bp, Artificial
  Probe
agcgtctaccgggacacgtgcaact

SEQ ID NO: 217792 - DNA, 25 bp, Artificial
  Probe
gctctgcccccaatgaataaaaaag

SEQ ID NO: 217793 - DNA, 25 bp, Artificial
  Probe
tgtgtttgcttttccggaccccgct

SEQ ID NO: 217794 - DNA, 25 bp, Artificial
  Probe
tatcctctcagtccatgttctcggc

SEQ ID NO: 217795 - DNA, 25 bp, Artificial
  Probe
ctgggacctcacctctgcgcagccc

SEQ ID NO: 217796 - DNA, 25 bp, Artificial
  Probe
agtgtccctccagagtcctcctgag

SEQ ID NO: 217797 - DNA, 25 bp, Artificial
  Probe
tcctgtgaaaaatctcacctatgtg

SEQ ID NO: 217798 - DNA, 25 bp, Artificial
  Probe
tcagagcttccctgtcccctgttga

SEQ ID NO: 217799 - DNA, 25 bp, Artificial
  Probe
tacctgtaattctggcacagccaga

SEQ ID NO: 217800 - DNA, 25 bp, Artificial
  Probe
cggttcaggcttagccattaaacag

SEQ ID NO: 217801 - DNA, 25 bp, Artificial
  Probe
aaaccgcacctgtgaggtttgaaga

SEQ ID NO: 217802 - DNA, 25 bp, Artificial
  Probe
actggtgtgtgtctcagggcgtcct

SEQ ID NO: 217803 - DNA, 25 bp, Artificial
  Probe
acagaagattgtccaacagagccat

SEQ ID NO: 217804 - DNA, 25 bp, Artificial
  Probe
attgtccaacagagccatcatgcca

SEQ ID NO: 217805 - DNA, 25 bp, Artificial
  Probe
agacacgtgactggtgtgtgtctca

SEQ ID NO: 217806 - DNA, 25 bp, Artificial
  Probe
cagaagattgtccaacagagccatc

SEQ ID NO: 217807 - DNA, 25 bp, Artificial
  Probe
aagaggcccagcagtggccggctcc

SEQ ID NO: 217808 - DNA, 25 bp, Artificial
  Probe
caggctcagggtgaagcaaatgttc

SEQ ID NO: 217809 - DNA, 25 bp, Artificial
  Probe
ctgtcccctgttgatacctctctgt

SEQ ID NO: 217810 - DNA, 25 bp, Artificial
  Probe
tcagggcgtcctcacaagaggccca

SEQ ID NO: 217811 - DNA, 25 bp, Artificial
  Probe
ctccaaagactgaaagtcaaggatg

SEQ ID NO: 217812 - DNA, 25 bp, Artificial
  Probe
atcatgccatatagggctaaggatg

SEQ ID NO: 217813 - DNA, 25 bp, Artificial
  Probe
ctgttgatacctctctgtcctgcct

SEQ ID NO: 217814 - DNA, 25 bp, Artificial
  Probe
gatgccaaacatctactcctgtgaa

SEQ ID NO: 217815 - DNA, 25 bp, Artificial
  Probe
ttacccataaagcaaaggacagaag

SEQ ID NO: 217816 - DNA, 25 bp, Artificial
  Probe
tctcagggcgtcctcacaagaggcc

SEQ ID NO: 217817 - DNA, 25 bp, Artificial
  Probe
tcctgagaccggttcaggcttagcc

SEQ ID NO: 217818 - DNA, 25 bp, Artificial
  Probe
agatgccaaacatctactcctgtga

SEQ ID NO: 217819 - DNA, 25 bp, Artificial
  Probe
ttgatacctctctgtcctgccttag

SEQ ID NO: 217820 - DNA, 25 bp, Artificial
  Probe
aaatctcacctatgtgtgtgcagtg

SEQ ID NO: 217821 - DNA, 25 bp, Artificial
  Probe
agccatcatgccatatagggctaag

SEQ ID NO: 217822 - DNA, 25 bp, Artificial
  Probe
ccggttcaggcttagccattaaaca

SEQ ID NO: 217823 - DNA, 25 bp, Artificial
  Probe
ccaacagagccatcatgccatatag

SEQ ID NO: 217824 - DNA, 25 bp, Artificial
  Probe
acagagccatcatgccatatagggc

SEQ ID NO: 217825 - DNA, 25 bp, Artificial
  Probe
gtgtgtgcagtgtccctccagagtc

SEQ ID NO: 217826 - DNA, 25 bp, Artificial
  Probe
accgcacctgtgaggtttgaagatg

SEQ ID NO: 217827 - DNA, 25 bp, Artificial
  Probe
acctgtgaggtttgaagatgccaaa

SEQ ID NO: 217828 - DNA, 25 bp, Artificial
  Probe
tgaagatgccaaacatctactcctg

SEQ ID NO: 217829 - DNA, 25 bp, Artificial
  Probe
cgtcctcacaagaggcccagcagtg

SEQ ID NO: 217830 - DNA, 25 bp, Artificial
  Probe
tgtctcagggcgtcctcacaagagg

SEQ ID NO: 217831 - DNA, 25 bp, Artificial
  Probe
gaagattgtccaacagagccatcat

SEQ ID NO: 217832 - DNA, 25 bp, Artificial
  Probe
cacaagaggcccagcagtggccggc

SEQ ID NO: 217833 - DNA, 25 bp, Artificial
  Probe
ggtgtgtgtctcagggcgtcctcac

SEQ ID NO: 217834 - DNA, 25 bp, Artificial
  Probe
tgagaccggttcaggcttagccatt

SEQ ID NO: 217835 - DNA, 25 bp, Artificial
  Probe
tgaaaaatctcacctatgtgtgtgc

SEQ ID NO: 217836 - DNA, 25 bp, Artificial
  Probe
acacgtgactggtgtgtgtctcagg

SEQ ID NO: 217837 - DNA, 25 bp, Artificial
  Probe
tcaggcttagccattaaacagcaga

SEQ ID NO: 217838 - DNA, 25 bp, Artificial
  Probe
gcggccttggctcctccaaagactg

SEQ ID NO: 217839 - DNA, 25 bp, Artificial
  Probe
gtgtccctccagagtcctcctgaga

SEQ ID NO: 217840 - DNA, 25 bp, Artificial
  Probe
tgtcccctgttgatacctctctgtc

SEQ ID NO: 217841 - DNA, 25 bp, Artificial
  Probe
ccatatagggctaaggatgagggct

SEQ ID NO: 217842 - DNA, 25 bp, Artificial
  Probe
tgctcctgccgatggcctgaggcga

SEQ ID NO: 217843 - DNA, 25 bp, Artificial
  Probe
gcgcgctctggctgctagtggcaat

SEQ ID NO: 217844 - DNA, 25 bp, Artificial
  Probe
tcttcagatggctccaggtgctcct

SEQ ID NO: 217845 - DNA, 25 bp, Artificial
  Probe
agttcgagcgcgtcttccgagccca

SEQ ID NO: 217846 - DNA, 25 bp, Artificial
  Probe
caccctcgtgggagttctgctgcaa

SEQ ID NO: 217847 - DNA, 25 bp, Artificial
  Probe
tctgcctgtggctggcaacatgaag

SEQ ID NO: 217848 - DNA, 25 bp, Artificial
  Probe
taaattgcagcgagtactttccgct

SEQ ID NO: 217849 - DNA, 25 bp, Artificial
  Probe
tctggctgctagtggcaatggctgc

SEQ ID NO: 217850 - DNA, 25 bp, Artificial
  Probe
gaagaactttccacgtgtcgccgcc

SEQ ID NO: 217851 - DNA, 25 bp, Artificial
  Probe
gcaagtgatctctgcgcgaagaact

SEQ ID NO: 217852 - DNA, 25 bp, Artificial
  Probe
ggcatcttcttccacgaaggcgccg

SEQ ID NO: 217853 - DNA, 25 bp, Artificial
  Probe
cgcgctctggctgctagtggcaatg

SEQ ID NO: 217854 - DNA, 25 bp, Artificial
  Probe
ggctggatcccctgtacgcgagcgc

SEQ ID NO: 217855 - DNA, 25 bp, Artificial
  Probe
tggcaatggctgcactgggcttgct

SEQ ID NO: 217856 - DNA, 25 bp, Artificial
  Probe
tccaggtgctcctgccgatggcctg

SEQ ID NO: 217857 - DNA, 25 bp, Artificial
  Probe
agcagaactggagatcttcgaacta

SEQ ID NO: 217858 - DNA, 25 bp, Artificial
  Probe
ctgctagtggcaatggctgcactgg

SEQ ID NO: 217859 - DNA, 25 bp, Artificial
  Probe
cacactacgggctgcgctcttcaga

SEQ ID NO: 217860 - DNA, 25 bp, Artificial
  Probe
tggctggcaacatgaaggaagaaac

SEQ ID NO: 217861 - DNA, 25 bp, Artificial
  Probe
aggaagaaacagctcttctggctac

SEQ ID NO: 217862 - DNA, 25 bp, Artificial
  Probe
gaagaaacagctcttctggctaccg

SEQ ID NO: 217863 - DNA, 25 bp, Artificial
  Probe
ctggctaccgtcaccctcgtgggag

SEQ ID NO: 217864 - DNA, 25 bp, Artificial
  Probe
ccgtcaccctcgtgggagttctgct

SEQ ID NO: 217865 - DNA, 25 bp, Artificial
  Probe
gctgctagtggcaatggctgcactg

SEQ ID NO: 217866 - DNA, 25 bp, Artificial
  Probe
gccggcatcttcttccacgaaggcg

SEQ ID NO: 217867 - DNA, 25 bp, Artificial
  Probe
cagcgagtactttccgctgttcctc

SEQ ID NO: 217868 - DNA, 25 bp, Artificial
  Probe
ttctggctaccgtcaccctcgtggg

SEQ ID NO: 217869 - DNA, 25 bp, Artificial
  Probe
ctaccgtcaccctcgtgggagttct

SEQ ID NO: 217870 - DNA, 25 bp, Artificial
  Probe
ctgtggctggcaacatgaaggaaga

SEQ ID NO: 217871 - DNA, 25 bp, Artificial
  Probe
atcttcttccacgaaggcgccgcag

SEQ ID NO: 217872 - DNA, 25 bp, Artificial
  Probe
tcttccgagcccaggtaaattgcag

SEQ ID NO: 217873 - DNA, 25 bp, Artificial
  Probe
gctgcactgggcttgctagtccact

SEQ ID NO: 217874 - DNA, 25 bp, Artificial
  Probe
gaaacagctcttctggctaccgtca

SEQ ID NO: 217875 - DNA, 25 bp, Artificial
  Probe
tgggtcgccggcatcttcttccacg

SEQ ID NO: 217876 - DNA, 25 bp, Artificial
  Probe
gcgctcttcagatggctccaggtgc

SEQ ID NO: 217877 - DNA, 25 bp, Artificial
  Probe
gatctctgcgcgaagaactttccac

SEQ ID NO: 217878 - DNA, 25 bp, Artificial
  Probe
tcgagcgcgtcttccgagcccaggt

SEQ ID NO: 217879 - DNA, 25 bp, Artificial
  Probe
gcgcgtcttccgagcccaggtaaat

SEQ ID NO: 217880 - DNA, 25 bp, Artificial
  Probe
cactgggcttgctagtccacttcct

SEQ ID NO: 217881 - DNA, 25 bp, Artificial
  Probe
taattctgcctgtggctggcaacat

SEQ ID NO: 217882 - DNA, 25 bp, Artificial
  Probe
cagcacaggctggatcccctgtacg

SEQ ID NO: 217883 - DNA, 25 bp, Artificial
  Probe
tacgggctgcgctcttcagatggct

SEQ ID NO: 217884 - DNA, 25 bp, Artificial
  Probe
cctgtggctggcaacatgaaggaag

SEQ ID NO: 217885 - DNA, 25 bp, Artificial
  Probe
cccaggtaaattgcagcgagtactt

SEQ ID NO: 217886 - DNA, 25 bp, Artificial
  Probe
caatggctgcactgggcttgctagt

SEQ ID NO: 217887 - DNA, 25 bp, Artificial
  Probe
tggatcccctgtacgcgagcgcgcg

SEQ ID NO: 217888 - DNA, 25 bp, Artificial
  Probe
accccagaaaagagtggcacctatg

SEQ ID NO: 217889 - DNA, 25 bp, Artificial
  Probe
gatcttctgtgctggtggcccagcc

SEQ ID NO: 217890 - DNA, 25 bp, Artificial
  Probe
ttcgggactggatcaaagagcaaac

SEQ ID NO: 217891 - DNA, 25 bp, Artificial
  Probe
ctagggaccccagaaaagagtggca

SEQ ID NO: 217892 - DNA, 25 bp, Artificial
  Probe
ggctgcagggtctttcaggaagctc

SEQ ID NO: 217893 - DNA, 25 bp, Artificial
  Probe
ccaggcgtgtacacaaggatccctg

SEQ ID NO: 217894 - DNA, 25 bp, Artificial
  Probe
ttccaaagtgggacccctcaggagt

SEQ ID NO: 217895 - DNA, 25 bp, Artificial
  Probe
cctaggactcagaatccttccctga

SEQ ID NO: 217896 - DNA, 25 bp, Artificial
  Probe
aagagtggcacctatggctgagttt

SEQ ID NO: 217897 - DNA, 25 bp, Artificial
  Probe
ccctgaactgggtaaagacgatgct

SEQ ID NO: 217898 - DNA, 25 bp, Artificial
  Probe
gtaaagacgatgctttcctggagaa

SEQ ID NO: 217899 - DNA, 25 bp, Artificial
  Probe
agaatccttccctgagcttccaaag

SEQ ID NO: 217900 - DNA, 25 bp, Artificial
  Probe
ccacatcccagactgtgaactgctt

SEQ ID NO: 217901 - DNA, 25 bp, Artificial
  Probe
cgctcagaggaacaagccaggcgtg

SEQ ID NO: 217902 - DNA, 25 bp, Artificial
  Probe
cccaccatgaactcgcaaagggatg

SEQ ID NO: 217903 - DNA, 25 bp, Artificial
  Probe
gaactgcttccctaggactcagaat

SEQ ID NO: 217904 - DNA, 25 bp, Artificial
  Probe
tgggacccctcaggagttggccaga

SEQ ID NO: 217905 - DNA, 25 bp, Artificial
  Probe
cacaaggatccctgaagttcgggac

SEQ ID NO: 217906 - DNA, 25 bp, Artificial
  Probe
gaggaacaagccaggcgtgtacaca

SEQ ID NO: 217907 - DNA, 25 bp, Artificial
  Probe
tgtacacaaggatccctgaagttcg

SEQ ID NO: 217908 - DNA, 25 bp, Artificial
  Probe
gcgtgtacacaaggatccctgaagt

SEQ ID NO: 217909 - DNA, 25 bp, Artificial
  Probe
ctgtgaactgcttccctaggactca

SEQ ID NO: 217910 - DNA, 25 bp, Artificial
  Probe
agtgggacccctcaggagttggcca

SEQ ID NO: 217911 - DNA, 25 bp, Artificial
  Probe
ggatccctgaagttcgggactggat

SEQ ID NO: 217912 - DNA, 25 bp, Artificial
  Probe
ccatgaactcgcaaagggatgcccc

SEQ ID NO: 217913 - DNA, 25 bp, Artificial
  Probe
ggatcgctgaggacatttgtgctgt

SEQ ID NO: 217914 - DNA, 25 bp, Artificial
  Probe
cccctcaggagttggccagagatct

SEQ ID NO: 217915 - DNA, 25 bp, Artificial
  Probe
gagcttccaaagtgggacccctcag

SEQ ID NO: 217916 - DNA, 25 bp, Artificial
  Probe
aactgcttccctaggactcagaatc

SEQ ID NO: 217917 - DNA, 25 bp, Artificial
  Probe
catgaactcgcaaagggatgccccc

SEQ ID NO: 217918 - DNA, 25 bp, Artificial
  Probe
tcaggaagctccagccctagggacc

SEQ ID NO: 217919 - DNA, 25 bp, Artificial
  Probe
aagcatggacagacaacccaccatg

SEQ ID NO: 217920 - DNA, 25 bp, Artificial
  Probe
ctgaagttcgggactggatcaaaga

SEQ ID NO: 217921 - DNA, 25 bp, Artificial
  Probe
gagttggccagagatcttctgtgct

SEQ ID NO: 217922 - DNA, 25 bp, Artificial
  Probe
tatcgtcgcgctcctgggggcccta

SEQ ID NO: 217923 - DNA, 25 bp, Artificial
  Probe
aggacatttgtgctgtggcctctcc

SEQ ID NO: 217924 - DNA, 25 bp, Artificial
  Probe
ggactcagaatccttccctgagctt

SEQ ID NO: 217925 - DNA, 25 bp, Artificial
  Probe
gacaacccaccatgaactcgcaaag

SEQ ID NO: 217926 - DNA, 25 bp, Artificial
  Probe
catggacagacaacccaccatgaac

SEQ ID NO: 217927 - DNA, 25 bp, Artificial
  Probe
ggaaaactatcgtcgcgctcctggg

SEQ ID NO: 217928 - DNA, 25 bp, Artificial
  Probe
cctgagcttccaaagtgggacccct

SEQ ID NO: 217929 - DNA, 25 bp, Artificial
  Probe
aaaggaaaactatcgtcgcgctcct

SEQ ID NO: 217930 - DNA, 25 bp, Artificial
  Probe
taaagacgatgctttcctggagaac

SEQ ID NO: 217931 - DNA, 25 bp, Artificial
  Probe
gcttccagactctaaaggaaaacta

SEQ ID NO: 217932 - DNA, 25 bp, Artificial
  Probe
acaagccaggcgtgtacacaaggat

SEQ ID NO: 217933 - DNA, 25 bp, Artificial
  Probe
tctaaccctgaactgggtaaagacg

SEQ ID NO: 217934 - DNA, 25 bp, Artificial
  Probe
tggtcacatgggatgcagattcatg

SEQ ID NO: 217935 - DNA, 25 bp, Artificial
  Probe
ctctgtgggattatatgggtcttca

SEQ ID NO: 217936 - DNA, 25 bp, Artificial
  Probe
gagctgaatctccaaaagtttaaaa

SEQ ID NO: 217937 - DNA, 25 bp, Artificial
  Probe
gttaggagtgcctggatcctctgtg

SEQ ID NO: 217938 - DNA, 25 bp, Artificial
  Probe
tgaccttggctgcagccaacagctg

SEQ ID NO: 217939 - DNA, 25 bp, Artificial
  Probe
ccatctgctacctgttgatcatccg

SEQ ID NO: 217940 - DNA, 25 bp, Artificial
  Probe
agaatcaggtccacgggatgctcag

SEQ ID NO: 217941 - DNA, 25 bp, Artificial
  Probe
tgatcatccgggtcttgttaaaggt

SEQ ID NO: 217942 - DNA, 25 bp, Artificial
  Probe
tccacgggatgctcagaggaaggca

SEQ ID NO: 217943 - DNA, 25 bp, Artificial
  Probe
caggtccacgggatgctcagaggaa

SEQ ID NO: 217944 - DNA, 25 bp, Artificial
  Probe
atcctctgtgggattatatgggtct

SEQ ID NO: 217945 - DNA, 25 bp, Artificial
  Probe
ttacataaggccacggtcatcactc

SEQ ID NO: 217946 - DNA, 25 bp, Artificial
  Probe
tcactctgaccttggctgcagccaa

SEQ ID NO: 217947 - DNA, 25 bp, Artificial
  Probe
catccgggtcttgttaaaggtggag

SEQ ID NO: 217948 - DNA, 25 bp, Artificial
  Probe
gagtgcctggatcctctgtgggatt

SEQ ID NO: 217949 - DNA, 25 bp, Artificial
  Probe
gttttctgccataccatgcacttcg

SEQ ID NO: 217950 - DNA, 25 bp, Artificial
  Probe
agtattgtgcgcttcctggccactg

SEQ ID NO: 217951 - DNA, 25 bp, Artificial
  Probe
ataacactacattgtgctttgagct

SEQ ID NO: 217952 - DNA, 25 bp, Artificial
  Probe
gaccactatcgtcattgccatgatc

SEQ ID NO: 217953 - DNA, 25 bp, Artificial
  Probe
tgctgagtattgtgcgcttcctggc

SEQ ID NO: 217954 - DNA, 25 bp, Artificial
  Probe
catgcacttcggaccatccacttgg

SEQ ID NO: 217955 - DNA, 25 bp, Artificial
  Probe
gattatatgggtcttcatcatggct

SEQ ID NO: 217956 - DNA, 25 bp, Artificial
  Probe
cacttggtcacatgggatgcagatt

SEQ ID NO: 217957 - DNA, 25 bp, Artificial
  Probe
ttaggagtgcctggatcctctgtgg

SEQ ID NO: 217958 - DNA, 25 bp, Artificial
  Probe
ttggctgcagccaacagctgcttca

SEQ ID NO: 217959 - DNA, 25 bp, Artificial
  Probe
gcttctgaagcatggccaagagaag

SEQ ID NO: 217960 - DNA, 25 bp, Artificial
  Probe
atccacttggtcacatgggatgcag

SEQ ID NO: 217961 - DNA, 25 bp, Artificial
  Probe
tgccataccatgcacttcggaccat

SEQ ID NO: 217962 - DNA, 25 bp, Artificial
  Probe
atgctcagaggaaggcactgaccac

SEQ ID NO: 217963 - DNA, 25 bp, Artificial
  Probe
gtcatcttgaactacattgcattag

SEQ ID NO: 217964 - DNA, 25 bp, Artificial
  Probe
acctgttgatcatccgggtcttgtt

SEQ ID NO: 217965 - DNA, 25 bp, Artificial
  Probe
agaatttcaaagcacgattaagggc

SEQ ID NO: 217966 - DNA, 25 bp, Artificial
  Probe
ttccagatgctccatatcaccagcg

SEQ ID NO: 217967 - DNA, 25 bp, Artificial
  Probe
atatcaccagcgttaggagtgcctg

SEQ ID NO: 217968 - DNA, 25 bp, Artificial
  Probe
gaccatccacttggtcacatgggat

SEQ ID NO: 217969 - DNA, 25 bp, Artificial
  Probe
ggtcacatgggatgcagattcatgt

SEQ ID NO: 217970 - DNA, 25 bp, Artificial
  Probe
gagattccagaatcaggtccacggg

SEQ ID NO: 217971 - DNA, 25 bp, Artificial
  Probe
gggcttcttgcttccatttttcata

SEQ ID NO: 217972 - DNA, 25 bp, Artificial
  Probe
cttgaactacattgcattaggggtg

SEQ ID NO: 217973 - DNA, 25 bp, Artificial
  Probe
atgaattacataaggccacggtcat

SEQ ID NO: 217974 - DNA, 25 bp, Artificial
  Probe
tattgtgcgcttcctggccactgcc

SEQ ID NO: 217975 - DNA, 25 bp, Artificial
  Probe
cttcatcatggcttcctcaggactg

SEQ ID NO: 217976 - DNA, 25 bp, Artificial
  Probe
gctgcagccaacagctgcttcaatc

SEQ ID NO: 217977 - DNA, 25 bp, Artificial
  Probe
cacgggatgctcagaggaaggcact

SEQ ID NO: 217978 - DNA, 25 bp, Artificial
  Probe
cagcgttaggagtgcctggatcctc

SEQ ID NO: 217979 - DNA, 25 bp, Artificial
  Probe
aaggcactgaccactatcgtcattg

SEQ ID NO: 217980 - DNA, 25 bp, Artificial
  Probe
gcctttttagtcagcttcatgccat

SEQ ID NO: 217981 - DNA, 25 bp, Artificial
  Probe
gcattctttgtccagtatgacttac

SEQ ID NO: 217982 - DNA, 25 bp, Artificial
  Probe
ctctgtccttaggatgcagaagtca

SEQ ID NO: 217983 - DNA, 25 bp, Artificial
  Probe
ctaaatgttttgagcctccacagga

SEQ ID NO: 217984 - DNA, 25 bp, Artificial
  Probe
aaactttaggagaaggctgtctaca

SEQ ID NO: 217985 - DNA, 25 bp, Artificial
  Probe
acagctgcctttttagtcagcttca

SEQ ID NO: 217986 - DNA, 25 bp, Artificial
  Probe
tccttaggatgcagaagtcagtggt

SEQ ID NO: 217987 - DNA, 25 bp, Artificial
  Probe
ccttaggatgcagaagtcagtggtc

SEQ ID NO: 217988 - DNA, 25 bp, Artificial
  Probe
ggtcataaccttatctctagctgca

SEQ ID NO: 217989 - DNA, 25 bp, Artificial
  Probe
gagcaaatcttaccaagatgagaaa

SEQ ID NO: 217990 - DNA, 25 bp, Artificial
  Probe
tcaaattgttgctttgatcctctgc

SEQ ID NO: 217991 - DNA, 25 bp, Artificial
  Probe
ttactgagcaaatcttaccaagatg

SEQ ID NO: 217992 - DNA, 25 bp, Artificial
  Probe
agaaggctgtctacatttagaaagc

SEQ ID NO: 217993 - DNA, 25 bp, Artificial
  Probe
tagaaagcattctttgtccagtatg

SEQ ID NO: 217994 - DNA, 25 bp, Artificial
  Probe
aaacctgccaagtcgaaggaaggct

SEQ ID NO: 217995 - DNA, 25 bp, Artificial
  Probe
aatgatcatagttgtgacagctgcc

SEQ ID NO: 217996 - DNA, 25 bp, Artificial
  Probe
tgtccttaggatgcagaagtcagtg

SEQ ID NO: 217997 - DNA, 25 bp, Artificial
  Probe
agcttccttgccagaaaaaggagaa

SEQ ID NO: 217998 - DNA, 25 bp, Artificial
  Probe
cacagtgaaactagatcctgtgact

SEQ ID NO: 217999 - DNA, 25 bp, Artificial
  Probe
gtcttgcattatgtgtcattaatct

SEQ ID NO: 218000 - DNA, 25 bp, Artificial
  Probe
actaaatgttttgagcctccacagg

SEQ ID NO: 218001 - DNA, 25 bp, Artificial
  Probe
gtgtcattaatctttggtttcatca

SEQ ID NO: 218002 - DNA, 25 bp, Artificial
  Probe
agatcctgtgactctgtccttagga

SEQ ID NO: 218003 - DNA, 25 bp, Artificial
  Probe
tgactctgtccttaggatgcagaag

SEQ ID NO: 218004 - DNA, 25 bp, Artificial
  Probe
agttgtgacagctgcctttttagtc

SEQ ID NO: 218005 - DNA, 25 bp, Artificial
  Probe
tgtctgttacacaatgatcattctg

SEQ ID NO: 218006 - DNA, 25 bp, Artificial
  Probe
gtgacagctgcctttttagtcagct

SEQ ID NO: 218007 - DNA, 25 bp, Artificial
  Probe
gagcctccacaggacaaacaaacta

SEQ ID NO: 218008 - DNA, 25 bp, Artificial
  Probe
cagtgaaactagatcctgtgactct

SEQ ID NO: 218009 - DNA, 25 bp, Artificial
  Probe
atgttttgagcctccacaggacaaa

SEQ ID NO: 218010 - DNA, 25 bp, Artificial
  Probe
aagtcagtggtcataaccttatctc

SEQ ID NO: 218011 - DNA, 25 bp, Artificial
  Probe
tctagctgcatcaaattgttgcttt

SEQ ID NO: 218012 - DNA, 25 bp, Artificial
  Probe
gacaagttctccatttttactgagc

SEQ ID NO: 218013 - DNA, 25 bp, Artificial
  Probe
tatctctagctgcatcaaattgttg

SEQ ID NO: 218014 - DNA, 25 bp, Artificial
  Probe
ttttacacagtgaaactagatcctg

SEQ ID NO: 218015 - DNA, 25 bp, Artificial
  Probe
tttacacagtgaaactagatcctgt

SEQ ID NO: 218016 - DNA, 25 bp, Artificial
  Probe
catttagaaagcattctttgtccag

SEQ ID NO: 218017 - DNA, 25 bp, Artificial
  Probe
gaaagcattctttgtccagtatgac

SEQ ID NO: 218018 - DNA, 25 bp, Artificial
  Probe
gcatcaaattgttgctttgatcctc

SEQ ID NO: 218019 - DNA, 25 bp, Artificial
  Probe
gtctgttacacaatgatcattctga

SEQ ID NO: 218020 - DNA, 25 bp, Artificial
  Probe
tcctgtgactctgtccttaggatgc

SEQ ID NO: 218021 - DNA, 25 bp, Artificial
  Probe
tgacagctgcctttttagtcagctt

SEQ ID NO: 218022 - DNA, 25 bp, Artificial
  Probe
tgccaagtcgaaggaaggctatagg

SEQ ID NO: 218023 - DNA, 25 bp, Artificial
  Probe
ggtcttgcattatgtgtcattaatc

SEQ ID NO: 218024 - DNA, 25 bp, Artificial
  Probe
agtcagtggtcataaccttatctct

SEQ ID NO: 218025 - DNA, 25 bp, Artificial
  Probe
gctgtctacatttagaaagcattct

SEQ ID NO: 218026 - DNA, 25 bp, Artificial
  Probe
ctccttggaatgaaaccaaaattga

SEQ ID NO: 218027 - DNA, 25 bp, Artificial
  Probe
gctgttcactctatatgccattgat

SEQ ID NO: 218028 - DNA, 25 bp, Artificial
  Probe
acaattctctctatatacaatgggg

SEQ ID NO: 218029 - DNA, 25 bp, Artificial
  Probe
gttgtttccaccagttccggcgcca

SEQ ID NO: 218030 - DNA, 25 bp, Artificial
  Probe
aaccaagcccttggatcagctgttc

SEQ ID NO: 218031 - DNA, 25 bp, Artificial
  Probe
agcatcaaagatctccctgtggtga

SEQ ID NO: 218032 - DNA, 25 bp, Artificial
  Probe
ccaatgaatgtcacagtggaaattg

SEQ ID NO: 218033 - DNA, 25 bp, Artificial
  Probe
aagtcatggaaaattccctgttttg

SEQ ID NO: 218034 - DNA, 25 bp, Artificial
  Probe
ggtagaatggcatctcatcgtgctc

SEQ ID NO: 218035 - DNA, 25 bp, Artificial
  Probe
gatggaaaacctggtcaccaataag

SEQ ID NO: 218036 - DNA, 25 bp, Artificial
  Probe
cctgtggtgactgaatatgagaaac

SEQ ID NO: 218037 - DNA, 25 bp, Artificial
  Probe
actctatatgccattgatcaagtga

SEQ ID NO: 218038 - DNA, 25 bp, Artificial
  Probe
accttgcaggatgtcaggaagctgg

SEQ ID NO: 218039 - DNA, 25 bp, Artificial
  Probe
ctctcagatggaaaacctggtcacc

SEQ ID NO: 218040 - DNA, 25 bp, Artificial
  Probe
aagtgagagcagctgtgagctcacc

SEQ ID NO: 218041 - DNA, 25 bp, Artificial
  Probe
gagaaacctccttggaatgaaacca

SEQ ID NO: 218042 - DNA, 25 bp, Artificial
  Probe
ttgatcaagtgaatcctccaatgaa

SEQ ID NO: 218043 - DNA, 25 bp, Artificial
  Probe
agtccattgctttaagtataaactg

SEQ ID NO: 218044 - DNA, 25 bp, Artificial
  Probe
cggcgccaaagagtagcatcaaaga

SEQ ID NO: 218045 - DNA, 25 bp, Artificial
  Probe
agtagcatcaaagatctccctgtgg

SEQ ID NO: 218046 - DNA, 25 bp, Artificial
  Probe
ctctatatacaatggggaaaaccac

SEQ ID NO: 218047 - DNA, 25 bp, Artificial
  Probe
ctccaatgaatgtcacagtggaaat

SEQ ID NO: 218048 - DNA, 25 bp, Artificial
  Probe
aagcccttggtagaatggcatctca

SEQ ID NO: 218049 - DNA, 25 bp, Artificial
  Probe
gtgagagcagctgtgagctcacctt

SEQ ID NO: 218050 - DNA, 25 bp, Artificial
  Probe
agaagcccttggtagaatggcatct

SEQ ID NO: 218051 - DNA, 25 bp, Artificial
  Probe
tctacatattccattcaagtgagag

SEQ ID NO: 218052 - DNA, 25 bp, Artificial
  Probe
atgccattgatcaagtgaatcctcc

SEQ ID NO: 218053 - DNA, 25 bp, Artificial
  Probe
tgaatatgagaaacctccttggaat

SEQ ID NO: 218054 - DNA, 25 bp, Artificial
  Probe
gtccattgctttaagtataaactga

SEQ ID NO: 218055 - DNA, 25 bp, Artificial
  Probe
gatcagctgttcactctatatgcca

SEQ ID NO: 218056 - DNA, 25 bp, Artificial
  Probe
tgcctttccagtccattgctttaag

SEQ ID NO: 218057 - DNA, 25 bp, Artificial
  Probe
cctatggacaaggttgtttccacca

SEQ ID NO: 218058 - DNA, 25 bp, Artificial
  Probe
atcttctcactcatctgcagagtgt

SEQ ID NO: 218059 - DNA, 25 bp, Artificial
  Probe
cacctatggacaaggttgtttccac

SEQ ID NO: 218060 - DNA, 25 bp, Artificial
  Probe
tccggcgccaaagagtagcatcaaa

SEQ ID NO: 218061 - DNA, 25 bp, Artificial
  Probe
tggaaaacctggtcaccaataagtt

SEQ ID NO: 218062 - DNA, 25 bp, Artificial
  Probe
cctccttggaatgaaaccaaaattg

SEQ ID NO: 218063 - DNA, 25 bp, Artificial
  Probe
gcctttccagtccattgctttaagt

SEQ ID NO: 218064 - DNA, 25 bp, Artificial
  Probe
gcccttggtagaatggcatctcatc

SEQ ID NO: 218065 - DNA, 25 bp, Artificial
  Probe
tggcatctcatcgtgctcccaacag

SEQ ID NO: 218066 - DNA, 25 bp, Artificial
  Probe
gacaaggttgtttccaccagttccg

SEQ ID NO: 218067 - DNA, 25 bp, Artificial
  Probe
agttccggcgccaaagagtagcatc

SEQ ID NO: 218068 - DNA, 25 bp, Artificial
  Probe
aagatctccctgtggtgactgaata

SEQ ID NO: 218069 - DNA, 25 bp, Artificial
  Probe
acgctgcaaccaagcccttggatca

SEQ ID NO: 218070 - DNA, 25 bp, Artificial
  Probe
aaatggttactctcagatggaaaac

SEQ ID NO: 218071 - DNA, 25 bp, Artificial
  Probe
cagctgttcactctatatgccattg

SEQ ID NO: 218072 - DNA, 25 bp, Artificial
  Probe
gctgaagacccattcattgcaatcc

SEQ ID NO: 218073 - DNA, 25 bp, Artificial
  Probe
actggtcttcctgctggcacatact

SEQ ID NO: 218074 - DNA, 25 bp, Artificial
  Probe
attgtcgtctgtctggccttctgga

SEQ ID NO: 218075 - DNA, 25 bp, Artificial
  Probe
acatgtggcctggagacataaaggc

SEQ ID NO: 218076 - DNA, 25 bp, Artificial
  Probe
tgtagcagggttcagacttgatgct

SEQ ID NO: 218077 - DNA, 25 bp, Artificial
  Probe
cattgtctttaacaatgatgactgg

SEQ ID NO: 218078 - DNA, 25 bp, Artificial
  Probe
gtctgtctggccttctggatcttgc

SEQ ID NO: 218079 - DNA, 25 bp, Artificial
  Probe
gtggcctggagacataaaggcagtt

SEQ ID NO: 218080 - DNA, 25 bp, Artificial
  Probe
ttgtcgtctgtctggccttctggat

SEQ ID NO: 218081 - DNA, 25 bp, Artificial
  Probe
tacagactggtcttcctgctggcac

SEQ ID NO: 218082 - DNA, 25 bp, Artificial
  Probe
acagactggtcttcctgctggcaca

SEQ ID NO: 218083 - DNA, 25 bp, Artificial
  Probe
cagccttttgcaaactggtgggata

SEQ ID NO: 218084 - DNA, 25 bp, Artificial
  Probe
actctacagactggtcttcctgctg

SEQ ID NO: 218085 - DNA, 25 bp, Artificial
  Probe
gaagacccattcattgcaatccatg

SEQ ID NO: 218086 - DNA, 25 bp, Artificial
  Probe
agccttttgcaaactggtgggataa

SEQ ID NO: 218087 - DNA, 25 bp, Artificial
  Probe
tcattgtctttaacaatgatgactg

SEQ ID NO: 218088 - DNA, 25 bp, Artificial
  Probe
ggtcagccttttgcaaactggtggg

SEQ ID NO: 218089 - DNA, 25 bp, Artificial
  Probe
tggtcttcctgctggcacatactgt

SEQ ID NO: 218090 - DNA, 25 bp, Artificial
  Probe
ttagtaactctgctgaagacccatt

SEQ ID NO: 218091 - DNA, 25 bp, Artificial
  Probe
atgactgggtctgtgaacatcgatg

SEQ ID NO: 218092 - DNA, 25 bp, Artificial
  Probe
ccttttgcaaactggtgggataatg

SEQ ID NO: 218093 - DNA, 25 bp, Artificial
  Probe
tcagccttttgcaaactggtgggat

SEQ ID NO: 218094 - DNA, 25 bp, Artificial
  Probe
gtgtagcagggttcagacttgatgc

SEQ ID NO: 218095 - DNA, 25 bp, Artificial
  Probe
tgtggcaatgactgggtctgtgaac

SEQ ID NO: 218096 - DNA, 25 bp, Artificial
  Probe
gactgggtctgtgaacatcgatggc

SEQ ID NO: 218097 - DNA, 25 bp, Artificial
  Probe
tgggtctgtgaacatcgatggcgtc

SEQ ID NO: 218098 - DNA, 25 bp, Artificial
  Probe
tgtctggccttctggatcttgcact

SEQ ID NO: 218099 - DNA, 25 bp, Artificial
  Probe
actctgctgaagacccattcattgc

SEQ ID NO: 218100 - DNA, 25 bp, Artificial
  Probe
tctattagtaactctgctgaagacc

SEQ ID NO: 218101 - DNA, 25 bp, Artificial
  Probe
tgctgaagacccattcattgcaatc

SEQ ID NO: 218102 - DNA, 25 bp, Artificial
  Probe
attagtaactctgctgaagacccat

SEQ ID NO: 218103 - DNA, 25 bp, Artificial
  Probe
acttgtggcaatgactgggtctgtg

SEQ ID NO: 218104 - DNA, 25 bp, Artificial
  Probe
gcaatgactgggtctgtgaacatcg

SEQ ID NO: 218105 - DNA, 25 bp, Artificial
  Probe
ctgtctggccttctggatcttgcac

SEQ ID NO: 218106 - DNA, 25 bp, Artificial
  Probe
ctggtcttcctgctggcacatactg

SEQ ID NO: 218107 - DNA, 25 bp, Artificial
  Probe
catgtggcctggagacataaaggca

SEQ ID NO: 218108 - DNA, 25 bp, Artificial
  Probe
cagactggtcttcctgctggcacat

SEQ ID NO: 218109 - DNA, 25 bp, Artificial
  Probe
gtaactctgctgaagacccattcat

SEQ ID NO: 218110 - DNA, 25 bp, Artificial
  Probe
aactctgctgaagacccattcattg

SEQ ID NO: 218111 - DNA, 25 bp, Artificial
  Probe
cacatgtggcctggagacataaagg

SEQ ID NO: 218112 - DNA, 25 bp, Artificial
  Probe
tctgtgaacatcgatggcgtcaaat

SEQ ID NO: 218113 - DNA, 25 bp, Artificial
  Probe
caatgactgggtctgtgaacatcga

SEQ ID NO: 218114 - DNA, 25 bp, Artificial
  Probe
ttctctattagtaactctgctgaag

SEQ ID NO: 218115 - DNA, 25 bp, Artificial
  Probe
ggtctgtgaacatcgatggcgtcaa

SEQ ID NO: 218116 - DNA, 25 bp, Artificial
  Probe
ctgggtctgtgaacatcgatggcgt

SEQ ID NO: 218117 - DNA, 25 bp, Artificial
  Probe
tagtaactctgctgaagacccattc

SEQ ID NO: 218118 - DNA, 25 bp, Artificial
  Probe
gtcgtgcaccgatgagaactctcct

SEQ ID NO: 218119 - DNA, 25 bp, Artificial
  Probe
ggtggcttccagtggtcttcagtct

SEQ ID NO: 218120 - DNA, 25 bp, Artificial
  Probe
tccagtggtcttcagtctgtcgtgc

SEQ ID NO: 218121 - DNA, 25 bp, Artificial
  Probe
gtggcttccagtggtcttcagtctg

SEQ ID NO: 218122 - DNA, 25 bp, Artificial
  Probe
cagattcccggtcgggtggcttcca

SEQ ID NO: 218123 - DNA, 25 bp, Artificial
  Probe
cacctcacagattcccggtcgggtg

SEQ ID NO: 218124 - DNA, 25 bp, Artificial
  Probe
gtggtcttcagtctgtcgtgcaccg

SEQ ID NO: 218125 - DNA, 25 bp, Artificial
  Probe
gattcccggtcgggtggcttccagt

SEQ ID NO: 218126 - DNA, 25 bp, Artificial
  Probe
tcccggtcgggtggcttccagtggt

SEQ ID NO: 218127 - DNA, 25 bp, Artificial
  Probe
tcacagattcccggtcgggtggctt

SEQ ID NO: 218128 - DNA, 25 bp, Artificial
  Probe
cagtctgtcgtgcaccgatgagaac

SEQ ID NO: 218129 - DNA, 25 bp, Artificial
  Probe
ccggtcgggtggcttccagtggtct

SEQ ID NO: 218130 - DNA, 25 bp, Artificial
  Probe
tgtccacctcacagattcccggtcg

SEQ ID NO: 218131 - DNA, 25 bp, Artificial
  Probe
cagtggtcttcagtctgtcgtgcac

SEQ ID NO: 218132 - DNA, 25 bp, Artificial
  Probe
gtctgtcgtgcaccgatgagaactc

SEQ ID NO: 218133 - DNA, 25 bp, Artificial
  Probe
ccacctcacagattcccggtcgggt

SEQ ID NO: 218134 - DNA, 25 bp, Artificial
  Probe
tcttcagtctgtcgtgcaccgatga

SEQ ID NO: 218135 - DNA, 25 bp, Artificial
  Probe
tggtcttcagtctgtcgtgcaccga

SEQ ID NO: 218136 - DNA, 25 bp, Artificial
  Probe
tccacctcacagattcccggtcggg

SEQ ID NO: 218137 - DNA, 25 bp, Artificial
  Probe
tcagtctgtcgtgcaccgatgagaa

SEQ ID NO: 218138 - DNA, 25 bp, Artificial
  Probe
gtcgggtggcttccagtggtcttca

SEQ ID NO: 218139 - DNA, 25 bp, Artificial
  Probe
tctgtcgtgcaccgatgagaactct

SEQ ID NO: 218140 - DNA, 25 bp, Artificial
  Probe
cgggtggcttccagtggtcttcagt

SEQ ID NO: 218141 - DNA, 25 bp, Artificial
  Probe
ttcagtctgtcgtgcaccgatgaga

SEQ ID NO: 218142 - DNA, 25 bp, Artificial
  Probe
cctcacagattcccggtcgggtggc

SEQ ID NO: 218143 - DNA, 25 bp, Artificial
  Probe
atgtccacctcacagattcccggtc

SEQ ID NO: 218144 - DNA, 25 bp, Artificial
  Probe
gtcttcagtctgtcgtgcaccgatg

SEQ ID NO: 218145 - DNA, 25 bp, Artificial
  Probe
tcgggtggcttccagtggtcttcag

SEQ ID NO: 218146 - DNA, 25 bp, Artificial
  Probe
tggcttccagtggtcttcagtctgt

SEQ ID NO: 218147 - DNA, 25 bp, Artificial
  Probe
ttccagtggtcttcagtctgtcgtg

SEQ ID NO: 218148 - DNA, 25 bp, Artificial
  Probe
cacagattcccggtcgggtggcttc

SEQ ID NO: 218149 - DNA, 25 bp, Artificial
  Probe
tgtcgtgcaccgatgagaactctcc

SEQ ID NO: 218150 - DNA, 25 bp, Artificial
  Probe
cttcagtctgtcgtgcaccgatgag

SEQ ID NO: 218151 - DNA, 25 bp, Artificial
  Probe
ggtcgggtggcttccagtggtcttc

SEQ ID NO: 218152 - DNA, 25 bp, Artificial
  Probe
agtggtcttcagtctgtcgtgcacc

SEQ ID NO: 218153 - DNA, 25 bp, Artificial
  Probe
cttccagtggtcttcagtctgtcgt

SEQ ID NO: 218154 - DNA, 25 bp, Artificial
  Probe
gggtggcttccagtggtcttcagtc

SEQ ID NO: 218155 - DNA, 25 bp, Artificial
  Probe
agtctgtcgtgcaccgatgagaact

SEQ ID NO: 218156 - DNA, 25 bp, Artificial
  Probe
cggtcgggtggcttccagtggtctt

SEQ ID NO: 218157 - DNA, 25 bp, Artificial
  Probe
acctcacagattcccggtcgggtgg

SEQ ID NO: 218158 - DNA, 25 bp, Artificial
  Probe
ggtcttcagtctgtcgtgcaccgat

SEQ ID NO: 218159 - DNA, 25 bp, Artificial
  Probe
catgtccacctcacagattcccggt

SEQ ID NO: 218160 - DNA, 25 bp, Artificial
  Probe
gcttccagtggtcttcagtctgtcg

SEQ ID NO: 218161 - DNA, 25 bp, Artificial
  Probe
ttcccggtcgggtggcttccagtgg

SEQ ID NO: 218162 - DNA, 25 bp, Artificial
  Probe
ccagtggtcttcagtctgtcgtgca

SEQ ID NO: 218163 - DNA, 25 bp, Artificial
  Probe
ggcttccagtggtcttcagtctgtc

SEQ ID NO: 218164 - DNA, 25 bp, Artificial
  Probe
cataaggtcgggttgacttaagcag

SEQ ID NO: 218165 - DNA, 25 bp, Artificial
  Probe
ctgtttcataaggtcgggttgactt

SEQ ID NO: 218166 - DNA, 25 bp, Artificial
  Probe
cggtcataatcaaaggctttcacgc

SEQ ID NO: 218167 - DNA, 25 bp, Artificial
  Probe
cactgggacggtatagtttctccag

SEQ ID NO: 218168 - DNA, 25 bp, Artificial
  Probe
agctttgatatcaccctgtggtgtt

SEQ ID NO: 218169 - DNA, 25 bp, Artificial
  Probe
cagggcactgggacggtatagtttc

SEQ ID NO: 218170 - DNA, 25 bp, Artificial
  Probe
aggctttcacgcagaagggcaatga

SEQ ID NO: 218171 - DNA, 25 bp, Artificial
  Probe
cagaaaggttccaaaccttagtgag

SEQ ID NO: 218172 - DNA, 25 bp, Artificial
  Probe
gtttgatggcacgattgtttacaac

SEQ ID NO: 218173 - DNA, 25 bp, Artificial
  Probe
ataatcaaaggctttcacgcagaag

SEQ ID NO: 218174 - DNA, 25 bp, Artificial
  Probe
aggagaatcccatggcacccctgag

SEQ ID NO: 218175 - DNA, 25 bp, Artificial
  Probe
gtgagctttgatatcaccctgtggt

SEQ ID NO: 218176 - DNA, 25 bp, Artificial
  Probe
gcctcatcattagtgttcctttaga

SEQ ID NO: 218177 - DNA, 25 bp, Artificial
  Probe
ggctgtttcataaggtcgggttgac

SEQ ID NO: 218178 - DNA, 25 bp, Artificial
  Probe
ccttagtgagctttgatatcaccct

SEQ ID NO: 218179 - DNA, 25 bp, Artificial
  Probe
caaaccttagtgagctttgatatca

SEQ ID NO: 218180 - DNA, 25 bp, Artificial
  Probe
ttgacttaagcagaaaccacagctt

SEQ ID NO: 218181 - DNA, 25 bp, Artificial
  Probe
caggacactgccaacaggagatccc

SEQ ID NO: 218182 - DNA, 25 bp, Artificial
  Probe
cctgtggtgttaggaaacggtcata

SEQ ID NO: 218183 - DNA, 25 bp, Artificial
  Probe
aggttccaaaccttagtgagctttg

SEQ ID NO: 218184 - DNA, 25 bp, Artificial
  Probe
agtgttcctttagaataatgaagcc

SEQ ID NO: 218185 - DNA, 25 bp, Artificial
  Probe
tgcctcatcattagtgttcctttag

SEQ ID NO: 218186 - DNA, 25 bp, Artificial
  Probe
aaggaacaggacactgccaacagga

SEQ ID NO: 218187 - DNA, 25 bp, Artificial
  Probe
catggcacccctgagtcagggcact

SEQ ID NO: 218188 - DNA, 25 bp, Artificial
  Probe
attaactctattgaaggaacaggac

SEQ ID NO: 218189 - DNA, 25 bp, Artificial
  Probe
ctttcacgcagaagggcaatgaaac

SEQ ID NO: 218190 - DNA, 25 bp, Artificial
  Probe
ccgttgagcagttgctttatgattg

SEQ ID NO: 218191 - DNA, 25 bp, Artificial
  Probe
cactaagtgttgcaggagaatccca

SEQ ID NO: 218192 - DNA, 25 bp, Artificial
  Probe
gtcgggttgacttaagcagaaacca

SEQ ID NO: 218193 - DNA, 25 bp, Artificial
  Probe
gccaacaggagatcccactaagtgt

SEQ ID NO: 218194 - DNA, 25 bp, Artificial
  Probe
gaatcccatggcacccctgagtcag

SEQ ID NO: 218195 - DNA, 25 bp, Artificial
  Probe
tctccaggagtacagaaaggttcca

SEQ ID NO: 218196 - DNA, 25 bp, Artificial
  Probe
ggcaatgaaaccagaactcttgtgt

SEQ ID NO: 218197 - DNA, 25 bp, Artificial
  Probe
cacccctgagtcagggcactgggac

SEQ ID NO: 218198 - DNA, 25 bp, Artificial
  Probe
actctattgaaggaacaggacactg

SEQ ID NO: 218199 - DNA, 25 bp, Artificial
  Probe
tgttgcaggagaatcccatggcacc

SEQ ID NO: 218200 - DNA, 25 bp, Artificial
  Probe
ctgtggtgtgctgaggtattaactc

SEQ ID NO: 218201 - DNA, 25 bp, Artificial
  Probe
cggtatagtttctccaggagtacag

SEQ ID NO: 218202 - DNA, 25 bp, Artificial
  Probe
atcaccctgtggtgttaggaaacgg

SEQ ID NO: 218203 - DNA, 25 bp, Artificial
  Probe
gaaaggttccaaaccttagtgagct

SEQ ID NO: 218204 - DNA, 25 bp, Artificial
  Probe
caggagaatcccatggcacccctga

SEQ ID NO: 218205 - DNA, 25 bp, Artificial
  Probe
atggcacgattgtttacaacccttg

SEQ ID NO: 218206 - DNA, 25 bp, Artificial
  Probe
ccctgctcccgttgagcagttgctt

SEQ ID NO: 218207 - DNA, 25 bp, Artificial
  Probe
accagaactcttgtgtgaaataata

SEQ ID NO: 218208 - DNA, 25 bp, Artificial
  Probe
gcaccaatggagacaaagggtcggc

SEQ ID NO: 218209 - DNA, 25 bp, Artificial
  Probe
gcacgattgtttacaacccttgact

SEQ ID NO: 218210 - DNA, 25 bp, Artificial
  Probe
gtccagtgtctccatgaaatccgcc

SEQ ID NO: 218211 - DNA, 25 bp, Artificial
  Probe
gaattccacgtctgtcagcatttca

SEQ ID NO: 218212 - DNA, 25 bp, Artificial
  Probe
gatgggacagcattctgctcagggt

SEQ ID NO: 218213 - DNA, 25 bp, Artificial
  Probe
tcagataggccctggctcttcaact

SEQ ID NO: 218214 - DNA, 25 bp, Artificial
  Probe
tgccggctatatggactgtgagagt

SEQ ID NO: 218215 - DNA, 25 bp, Artificial
  Probe
taaagtctaccttttcttggtgtcg

SEQ ID NO: 218216 - DNA, 25 bp, Artificial
  Probe
agtgtctcctgatgggacagcattc

SEQ ID NO: 218217 - DNA, 25 bp, Artificial
  Probe
tgtggtttctagagccatcgtctgg

SEQ ID NO: 218218 - DNA, 25 bp, Artificial
  Probe
tgatgggacagcattctgctcaggg

SEQ ID NO: 218219 - DNA, 25 bp, Artificial
  Probe
ctattcagtggtctgtaacagaagg

SEQ ID NO: 218220 - DNA, 25 bp, Artificial
  Probe
gttccaaatgtacagaatcacacag

SEQ ID NO: 218221 - DNA, 25 bp, Artificial
  Probe
caccagaattccacgtctgtcagca

SEQ ID NO: 218222 - DNA, 25 bp, Artificial
  Probe
ccagggcttcccacaggtagcctat

SEQ ID NO: 218223 - DNA, 25 bp, Artificial
  Probe
ggacacgtgctctcccgtgtggata

SEQ ID NO: 218224 - DNA, 25 bp, Artificial
  Probe
gccatcgtctggacatgccggctat

SEQ ID NO: 218225 - DNA, 25 bp, Artificial
  Probe
gtcttcagagcactttaaagtctac

SEQ ID NO: 218226 - DNA, 25 bp, Artificial
  Probe
cttgatgagcccagggcttcccaca

SEQ ID NO: 218227 - DNA, 25 bp, Artificial
  Probe
ggacatgccggctatatggactgtg

SEQ ID NO: 218228 - DNA, 25 bp, Artificial
  Probe
tcattgcttccttgaatccagtctg

SEQ ID NO: 218229 - DNA, 25 bp, Artificial
  Probe
aaggacacgtgctctcccgtgtgga

SEQ ID NO: 218230 - DNA, 25 bp, Artificial
  Probe
gggagcaatcccagtcagcactcac

SEQ ID NO: 218231 - DNA, 25 bp, Artificial
  Probe
ccacaggtagcctatgggagcaatc

SEQ ID NO: 218232 - DNA, 25 bp, Artificial
  Probe
acaggtagcctatgggagcaatccc

SEQ ID NO: 218233 - DNA, 25 bp, Artificial
  Probe
ggcttcccacaggtagcctatggga

SEQ ID NO: 218234 - DNA, 25 bp, Artificial
  Probe
tccacgtctgtcagcatttcaaatg

SEQ ID NO: 218235 - DNA, 25 bp, Artificial
  Probe
tctcctgatgggacagcattctgct

SEQ ID NO: 218236 - DNA, 25 bp, Artificial
  Probe
ttcttggtgtcgactgtggtttcta

SEQ ID NO: 218237 - DNA, 25 bp, Artificial
  Probe
gtttctagagccatcgtctggacat

SEQ ID NO: 218238 - DNA, 25 bp, Artificial
  Probe
agtctaccttttcttggtgtcgact

SEQ ID NO: 218239 - DNA, 25 bp, Artificial
  Probe
gtctgtcagcatttcaaatgtccct

SEQ ID NO: 218240 - DNA, 25 bp, Artificial
  Probe
tcacccgtccagtgtctccatgaaa

SEQ ID NO: 218241 - DNA, 25 bp, Artificial
  Probe
tgagcccagggcttcccacaggtag

SEQ ID NO: 218242 - DNA, 25 bp, Artificial
  Probe
gagcccagggcttcccacaggtagc

SEQ ID NO: 218243 - DNA, 25 bp, Artificial
  Probe
tcctgatgggacagcattctgctca

SEQ ID NO: 218244 - DNA, 25 bp, Artificial
  Probe
ggaaatttcagttccaaatgtacag

SEQ ID NO: 218245 - DNA, 25 bp, Artificial
  Probe
ggagcaatcccagtcagcactcact

SEQ ID NO: 218246 - DNA, 25 bp, Artificial
  Probe
tttgtccgtttttgaagctattcca

SEQ ID NO: 218247 - DNA, 25 bp, Artificial
  Probe
gaaatactcagataggccctggctc

SEQ ID NO: 218248 - DNA, 25 bp, Artificial
  Probe
cgtgctctcccgtgtggatacgacc

SEQ ID NO: 218249 - DNA, 25 bp, Artificial
  Probe
gagtggctattcagtggtctgtaac

SEQ ID NO: 218250 - DNA, 25 bp, Artificial
  Probe
ccttttcttggtgtcgactgtggtt

SEQ ID NO: 218251 - DNA, 25 bp, Artificial
  Probe
gacctcttgatgagcccagggcttc

SEQ ID NO: 218252 - DNA, 25 bp, Artificial
  Probe
atcgtctggacatgccggctatatg

SEQ ID NO: 218253 - DNA, 25 bp, Artificial
  Probe
gaaatttcagttccaaatgtacaga

SEQ ID NO: 218254 - DNA, 25 bp, Artificial
  Probe
ctatgggagcaatcccagtcagcac

SEQ ID NO: 218255 - DNA, 25 bp, Artificial
  Probe
gtagcctatgggagcaatcccagtc

SEQ ID NO: 218256 - DNA, 25 bp, Artificial
  Probe
aacctcaagcagaaaggttacttct

SEQ ID NO: 218257 - DNA, 25 bp, Artificial
  Probe
accggcaccccgagtgctttgtgtg

SEQ ID NO: 218258 - DNA, 25 bp, Artificial
  Probe
gcaccccgagtgctttgtgtgtgct

SEQ ID NO: 218259 - DNA, 25 bp, Artificial
  Probe
tgttacacgcccatccgatgcgtga

SEQ ID NO: 218260 - DNA, 25 bp, Artificial
  Probe
ccggcaccccgagtgctttgtgtgt

SEQ ID NO: 218261 - DNA, 25 bp, Artificial
  Probe
ctcaacctcaagcagaaaggttact

SEQ ID NO: 218262 - DNA, 25 bp, Artificial
  Probe
caccccgagtgctttgtgtgtgctg

SEQ ID NO: 218263 - DNA, 25 bp, Artificial
  Probe
gtgtgctgactgtaacctcaacctc

SEQ ID NO: 218264 - DNA, 25 bp, Artificial
  Probe
tgactgtaacctcaacctcaagcag

SEQ ID NO: 218265 - DNA, 25 bp, Artificial
  Probe
aggcttttagtcatttatcttactg

SEQ ID NO: 218266 - DNA, 25 bp, Artificial
  Probe
aagcgaggcttttagtcatttatct

SEQ ID NO: 218267 - DNA, 25 bp, Artificial
  Probe
gctttgtgtgtgctgactgtaacct

SEQ ID NO: 218268 - DNA, 25 bp, Artificial
  Probe
tcaacctcaagcagaaaggttactt

SEQ ID NO: 218269 - DNA, 25 bp, Artificial
  Probe
tgtgtgtgctgactgtaacctcaac

SEQ ID NO: 218270 - DNA, 25 bp, Artificial
  Probe
gctgactgtaacctcaacctcaagc

SEQ ID NO: 218271 - DNA, 25 bp, Artificial
  Probe
ggcaccccgagtgctttgtgtgtgc

SEQ ID NO: 218272 - DNA, 25 bp, Artificial
  Probe
cctcaacctcaagcagaaaggttac

SEQ ID NO: 218273 - DNA, 25 bp, Artificial
  Probe
tgtgtgctgactgtaacctcaacct

SEQ ID NO: 218274 - DNA, 25 bp, Artificial
  Probe
acctcaacctcaagcagaaaggtta

SEQ ID NO: 218275 - DNA, 25 bp, Artificial
  Probe
accccgagtgctttgtgtgtgctga

SEQ ID NO: 218276 - DNA, 25 bp, Artificial
  Probe
acctcaagcagaaaggttacttctt

SEQ ID NO: 218277 - DNA, 25 bp, Artificial
  Probe
gtgctttgtgtgtgctgactgtaac

SEQ ID NO: 218278 - DNA, 25 bp, Artificial
  Probe
caacctcaagcagaaaggttacttc

SEQ ID NO: 218279 - DNA, 25 bp, Artificial
  Probe
ccgagtgctttgtgtgtgctgactg

SEQ ID NO: 218280 - DNA, 25 bp, Artificial
  Probe
gtgtgtgctgactgtaacctcaacc

SEQ ID NO: 218281 - DNA, 25 bp, Artificial
  Probe
cagaaaggttacttcttcgtggagg

SEQ ID NO: 218282 - DNA, 25 bp, Artificial
  Probe
ccccgagtgctttgtgtgtgctgac

SEQ ID NO: 218283 - DNA, 25 bp, Artificial
  Probe
taacctcaacctcaagcagaaaggt

SEQ ID NO: 218284 - DNA, 25 bp, Artificial
  Probe
cggcaccccgagtgctttgtgtgtg

SEQ ID NO: 218285 - DNA, 25 bp, Artificial
  Probe
ctttgtgtgtgctgactgtaacctc

SEQ ID NO: 218286 - DNA, 25 bp, Artificial
  Probe
cgagtgctttgtgtgtgctgactgt

SEQ ID NO: 218287 - DNA, 25 bp, Artificial
  Probe
ataagtaccggcaccccgagtgctt

SEQ ID NO: 218288 - DNA, 25 bp, Artificial
  Probe
gtaacctcaacctcaagcagaaagg

SEQ ID NO: 218289 - DNA, 25 bp, Artificial
  Probe
cccgagtgctttgtgtgtgctgact

SEQ ID NO: 218290 - DNA, 25 bp, Artificial
  Probe
tgtgctgactgtaacctcaacctca

SEQ ID NO: 218291 - DNA, 25 bp, Artificial
  Probe
tttgtgtgtgctgactgtaacctca

SEQ ID NO: 218292 - DNA, 25 bp, Artificial
  Probe
gactgtaacctcaacctcaagcaga

SEQ ID NO: 218293 - DNA, 25 bp, Artificial
  Probe
tgctgactgtaacctcaacctcaag

SEQ ID NO: 218294 - DNA, 25 bp, Artificial
  Probe
gtgctgactgtaacctcaacctcaa

SEQ ID NO: 218295 - DNA, 25 bp, Artificial
  Probe
tgtaacctcaacctcaagcagaaag

SEQ ID NO: 218296 - DNA, 25 bp, Artificial
  Probe
tgctttgtgtgtgctgactgtaacc

SEQ ID NO: 218297 - DNA, 25 bp, Artificial
  Probe
aacctcaacctcaagcagaaaggtt

SEQ ID NO: 218298 - DNA, 25 bp, Artificial
  Probe
tccctctgacccaggaggctgactg

SEQ ID NO: 218299 - DNA, 25 bp, Artificial
  Probe
gctggtcctggcttaccggctctca

SEQ ID NO: 218300 - DNA, 25 bp, Artificial
  Probe
tggcttaccggctctcagtggaagt

SEQ ID NO: 218301 - DNA, 25 bp, Artificial
  Probe
gggcaacaaacagtcgctgtccctc

SEQ ID NO: 218302 - DNA, 25 bp, Artificial
  Probe
accgccttgagtacagccgctttga

SEQ ID NO: 218303 - DNA, 25 bp, Artificial
  Probe
agtgcggtcacaactaccgtcaacc

SEQ ID NO: 218304 - DNA, 25 bp, Artificial
  Probe
cgccttgagtacagccgctttgaga

SEQ ID NO: 218305 - DNA, 25 bp, Artificial
  Probe
ctatgaccgccttgagtacagccgc

SEQ ID NO: 218306 - DNA, 25 bp, Artificial
  Probe
ttcagactggccttcagagggcagc

SEQ ID NO: 218307 - DNA, 25 bp, Artificial
  Probe
gaattcggccagaggggtcatactg

SEQ ID NO: 218308 - DNA, 25 bp, Artificial
  Probe
ccttcagagggcagcgtaaccacgg

SEQ ID NO: 218309 - DNA, 25 bp, Artificial
  Probe
aaagtgcggtcacaactaccgtcaa

SEQ ID NO: 218310 - DNA, 25 bp, Artificial
  Probe
cagagggcagcgtaaccacggcaac

SEQ ID NO: 218311 - DNA, 25 bp, Artificial
  Probe
tctatgaccgccttgagtacagccg

SEQ ID NO: 218312 - DNA, 25 bp, Artificial
  Probe
caggggcagtgtctgttgcaaagtt

SEQ ID NO: 218313 - DNA, 25 bp, Artificial
  Probe
acacccgtgccatcatactgggctg

SEQ ID NO: 218314 - DNA, 25 bp, Artificial
  Probe
ctctcagtggaagtctatgaccgcc

SEQ ID NO: 218315 - DNA, 25 bp, Artificial
  Probe
caactggaagcaggacagcaatcct

SEQ ID NO: 218316 - DNA, 25 bp, Artificial
  Probe
cttaggattcttgtcttggaggaca

SEQ ID NO: 218317 - DNA, 25 bp, Artificial
  Probe
gagaggcagcaactcaactggaagc

SEQ ID NO: 218318 - DNA, 25 bp, Artificial
  Probe
tttcggcctgtgctgtacttcaccc

SEQ ID NO: 218319 - DNA, 25 bp, Artificial
  Probe
actggccttcagagggcagcgtaac

SEQ ID NO: 218320 - DNA, 25 bp, Artificial
  Probe
actgagagtgagaccccaagagaag

SEQ ID NO: 218321 - DNA, 25 bp, Artificial
  Probe
agaccccaagagaagggagcagacc

SEQ ID NO: 218322 - DNA, 25 bp, Artificial
  Probe
agactttcggcctgtgctgtacttc

SEQ ID NO: 218323 - DNA, 25 bp, Artificial
  Probe
ttccaagggggcaacaaacagtcgc

SEQ ID NO: 218324 - DNA, 25 bp, Artificial
  Probe
taaagttctgcctcagactttcggc

SEQ ID NO: 218325 - DNA, 25 bp, Artificial
  Probe
agtgagaccccaagagaagggagca

SEQ ID NO: 218326 - DNA, 25 bp, Artificial
  Probe
tagggctggtcctggcttaccggct

SEQ ID NO: 218327 - DNA, 25 bp, Artificial
  Probe
ggattagggctggtcctggcttacc

SEQ ID NO: 218328 - DNA, 25 bp, Artificial
  Probe
ttcctggtggagaattcggccagag

SEQ ID NO: 218329 - DNA, 25 bp, Artificial
  Probe
tggtcctggcttaccggctctcagt

SEQ ID NO: 218330 - DNA, 25 bp, Artificial
  Probe
gagaattcggccagaggggtcatac

SEQ ID NO: 218331 - DNA, 25 bp, Artificial
  Probe
ctctgacccaggaggctgactgact

SEQ ID NO: 218332 - DNA, 25 bp, Artificial
  Probe
tctctacaaaagtgcggtcacaact

SEQ ID NO: 218333 - DNA, 25 bp, Artificial
  Probe
aagcaggacagcaatcctctctaca

SEQ ID NO: 218334 - DNA, 25 bp, Artificial
  Probe
gtgccatcatactgggctgcgtagg

SEQ ID NO: 218335 - DNA, 25 bp, Artificial
  Probe
tggaagtctatgaccgccttgagta

SEQ ID NO: 218336 - DNA, 25 bp, Artificial
  Probe
ggggcaacaaacagtcgctgtccct

SEQ ID NO: 218337 - DNA, 25 bp, Artificial
  Probe
gacccaggaggctgactgacttagg

SEQ ID NO: 218338 - DNA, 25 bp, Artificial
  Probe
ctgcctcagactttcggcctgtgct

SEQ ID NO: 218339 - DNA, 25 bp, Artificial
  Probe
ctgacttaggattcttgtcttggag

SEQ ID NO: 218340 - DNA, 25 bp, Artificial
  Probe
ggcagcgtaaccacggcaacagcca

SEQ ID NO: 218341 - DNA, 25 bp, Artificial
  Probe
ggcctgtgctgtacttcaccccggg

SEQ ID NO: 218342 - DNA, 25 bp, Artificial
  Probe
aaagttctgcctcagactttcggcc

SEQ ID NO: 218343 - DNA, 25 bp, Artificial
  Probe
atactgagagtgagaccccaagaga

SEQ ID NO: 218344 - DNA, 25 bp, Artificial
  Probe
tcatggaccaggtgcgtgccttcca

SEQ ID NO: 218345 - DNA, 25 bp, Artificial
  Probe
atgaaaccaaaaagattcggatctc

SEQ ID NO: 218346 - DNA, 25 bp, Artificial
  Probe
gagcacctttaactggccctatggc

SEQ ID NO: 218347 - DNA, 25 bp, Artificial
  Probe
ccagcccatgttgagagcctgcagg

SEQ ID NO: 218348 - DNA, 25 bp, Artificial
  Probe
ttcggatctcccaggctccagcttt

SEQ ID NO: 218349 - DNA, 25 bp, Artificial
  Probe
tcttcatgcgcctggtgggcaagac

SEQ ID NO: 218350 - DNA, 25 bp, Artificial
  Probe
tcatgcgcctggtgggcaagacacc

SEQ ID NO: 218351 - DNA, 25 bp, Artificial
  Probe
aagattcggatctcccaggctccag

SEQ ID NO: 218352 - DNA, 25 bp, Artificial
  Probe
caggctccagctttgtcctggcagc

SEQ ID NO: 218353 - DNA, 25 bp, Artificial
  Probe
tcccagcttttcttcatgcgcctgg

SEQ ID NO: 218354 - DNA, 25 bp, Artificial
  Probe
gcccatgttgagagcctgcaggaga

SEQ ID NO: 218355 - DNA, 25 bp, Artificial
  Probe
agcacctttaactggccctatggct

SEQ ID NO: 218356 - DNA, 25 bp, Artificial
  Probe
ggcaagacacccatcgagacgctca

SEQ ID NO: 218357 - DNA, 25 bp, Artificial
  Probe
ttctgtcagggagcacctttaactg

SEQ ID NO: 218358 - DNA, 25 bp, Artificial
  Probe
gcccatggagggaaccatgaaatca

SEQ ID NO: 218359 - DNA, 25 bp, Artificial
  Probe
ccagcgctttggacgcctgctgctg

SEQ ID NO: 218360 - DNA, 25 bp, Artificial
  Probe
ggtctggagccagcatgctagtgcc

SEQ ID NO: 218361 - DNA, 25 bp, Artificial
  Probe
agcttttcttcatgcgcctggtggg

SEQ ID NO: 218362 - DNA, 25 bp, Artificial
  Probe
ccaggctccagctttgtcctggcag

SEQ ID NO: 218363 - DNA, 25 bp, Artificial
  Probe
ctcaccgagtatgtccgtgcccagt

SEQ ID NO: 218364 - DNA, 25 bp, Artificial
  Probe
cgagtatgtccgtgcccagtaccca

SEQ ID NO: 218365 - DNA, 25 bp, Artificial
  Probe
cagggccccagcttctcttctgaga

SEQ ID NO: 218366 - DNA, 25 bp, Artificial
  Probe
ggccccagcttctcttctgagactg

SEQ ID NO: 218367 - DNA, 25 bp, Artificial
  Probe
ttggacgcctgctgctgcggctgcc

SEQ ID NO: 218368 - DNA, 25 bp, Artificial
  Probe
ccagcatgctagtgcctctggtgtc

SEQ ID NO: 218369 - DNA, 25 bp, Artificial
  Probe
gctttggacgcctgctgctgcggct

SEQ ID NO: 218370 - DNA, 25 bp, Artificial
  Probe
ggtgggcaagacacccatcgagacg

SEQ ID NO: 218371 - DNA, 25 bp, Artificial
  Probe
tagtgatggtcctttcctaggacac

SEQ ID NO: 218372 - DNA, 25 bp, Artificial
  Probe
catgaaaccaaaaagattcggatct

SEQ ID NO: 218373 - DNA, 25 bp, Artificial
  Probe
catgcttctgtcagggagcaccttt

SEQ ID NO: 218374 - DNA, 25 bp, Artificial
  Probe
agggagcacctttaactggccctat

SEQ ID NO: 218375 - DNA, 25 bp, Artificial
  Probe
cgcctggtgggcaagacacccatcg

SEQ ID NO: 218376 - DNA, 25 bp, Artificial
  Probe
tcctttcctaggacacatggaagct

SEQ ID NO: 218377 - DNA, 25 bp, Artificial
  Probe
gggacatgcttctgtcagggagcac

SEQ ID NO: 218378 - DNA, 25 bp, Artificial
  Probe
gacacatggaagctggggccttgta

SEQ ID NO: 218379 - DNA, 25 bp, Artificial
  Probe
atggtcctttcctaggacacatgga

SEQ ID NO: 218380 - DNA, 25 bp, Artificial
  Probe
ggtcctttcctaggacacatggaag

SEQ ID NO: 218381 - DNA, 25 bp, Artificial
  Probe
cttctgtcagggagcacctttaact

SEQ ID NO: 218382 - DNA, 25 bp, Artificial
  Probe
ctgagggtctggagccagcatgcta

SEQ ID NO: 218383 - DNA, 25 bp, Artificial
  Probe
ttgagagcctgcaggagaaggcaca

SEQ ID NO: 218384 - DNA, 25 bp, Artificial
  Probe
taatcatgaaaccaaaaagattcgg

SEQ ID NO: 218385 - DNA, 25 bp, Artificial
  Probe
tcaccgagtatgtccgtgcccagta

SEQ ID NO: 218386 - DNA, 25 bp, Artificial
  Probe
gcaagacacccatcgagacgctcat

SEQ ID NO: 218387 - DNA, 25 bp, Artificial
  Probe
ttcctaggacacatggaagctgggg

SEQ ID NO: 218388 - DNA, 25 bp, Artificial
  Probe
acacatggaagctggggccttgtag

SEQ ID NO: 218389 - DNA, 25 bp, Artificial
  Probe
taggacacatggaagctggggcctt

SEQ ID NO: 218390 - DNA, 25 bp, Artificial
  Probe
tcgaaaccctcatccgggatatgtt

SEQ ID NO: 218391 - DNA, 25 bp, Artificial
  Probe
tccttctgttaagaaaggatgttac

SEQ ID NO: 218392 - DNA, 25 bp, Artificial
  Probe
cctcatccgggatatgttactgtcc

SEQ ID NO: 218393 - DNA, 25 bp, Artificial
  Probe
ctgccaaatgaacttttacagaatg

SEQ ID NO: 218394 - DNA, 25 bp, Artificial
  Probe
atcgaaaccctcatccgggatatgt

SEQ ID NO: 218395 - DNA, 25 bp, Artificial
  Probe
agagactgccaaatgaacttttaca

SEQ ID NO: 218396 - DNA, 25 bp, Artificial
  Probe
agactgccaaatgaacttttacaga

SEQ ID NO: 218397 - DNA, 25 bp, Artificial
  Probe
gccaaatgaacttttacagaatgca

SEQ ID NO: 218398 - DNA, 25 bp, Artificial
  Probe
cgggatatgttactgtccggcagca

SEQ ID NO: 218399 - DNA, 25 bp, Artificial
  Probe
catccgggatatgttactgtccggc

SEQ ID NO: 218400 - DNA, 25 bp, Artificial
  Probe
tgccaaatgaacttttacagaatgc

SEQ ID NO: 218401 - DNA, 25 bp, Artificial
  Probe
ccatcgaaaccctcatccgggatat

SEQ ID NO: 218402 - DNA, 25 bp, Artificial
  Probe
gactgccaaatgaacttttacagaa

SEQ ID NO: 218403 - DNA, 25 bp, Artificial
  Probe
gggatatgttactgtccggcagcag

SEQ ID NO: 218404 - DNA, 25 bp, Artificial
  Probe
aagagactgccaaatgaacttttac

SEQ ID NO: 218405 - DNA, 25 bp, Artificial
  Probe
gagactgccaaatgaacttttacag

SEQ ID NO: 218406 - DNA, 25 bp, Artificial
  Probe
atccgggatatgttactgtccggca

SEQ ID NO: 218407 - DNA, 25 bp, Artificial
  Probe
ccttctgttaagaaaggatgttaca

SEQ ID NO: 218408 - DNA, 25 bp, Artificial
  Probe
tactgtccggcagcagttttaactg

SEQ ID NO: 218409 - DNA, 25 bp, Artificial
  Probe
tcatccgggatatgttactgtccgg

SEQ ID NO: 218410 - DNA, 25 bp, Artificial
  Probe
ctcatccgggatatgttactgtccg

SEQ ID NO: 218411 - DNA, 25 bp, Artificial
  Probe
ccctcatccgggatatgttactgtc

SEQ ID NO: 218412 - DNA, 25 bp, Artificial
  Probe
ttactgtccggcagcagttttaact

SEQ ID NO: 218413 - DNA, 25 bp, Artificial
  Probe
ggatatgttactgtccggcagcagt

SEQ ID NO: 218414 - DNA, 25 bp, Artificial
  Probe
gatatgttactgtccggcagcagtt

SEQ ID NO: 218415 - DNA, 25 bp, Artificial
  Probe
gcttaatttccttctgttaagaaag

SEQ ID NO: 218416 - DNA, 25 bp, Artificial
  Probe
catcgaaaccctcatccgggatatg

SEQ ID NO: 218417 - DNA, 25 bp, Artificial
  Probe
ctggagcgcctgtggcttgatgcca

SEQ ID NO: 218418 - DNA, 25 bp, Artificial
  Probe
tgccagccggtgtacacctacaaca

SEQ ID NO: 218419 - DNA, 25 bp, Artificial
  Probe
gacactggctacttactggcccggt

SEQ ID NO: 218420 - DNA, 25 bp, Artificial
  Probe
ctcgacctaagagacgttagtgaaa

SEQ ID NO: 218421 - DNA, 25 bp, Artificial
  Probe
cagcctcaggaataactccttgcag

SEQ ID NO: 218422 - DNA, 25 bp, Artificial
  Probe
gggacgactgccagccggtgtacac

SEQ ID NO: 218423 - DNA, 25 bp, Artificial
  Probe
gctttgttcagactgtctgtgaggg

SEQ ID NO: 218424 - DNA, 25 bp, Artificial
  Probe
ggggacaggtcctggctgctcactt

SEQ ID NO: 218425 - DNA, 25 bp, Artificial
  Probe
acaacaatatcacttgcgctggccc

SEQ ID NO: 218426 - DNA, 25 bp, Artificial
  Probe
ctggaagctatgtggcctagaaagg

SEQ ID NO: 218427 - DNA, 25 bp, Artificial
  Probe
tcgggcctcgacctaagagacgtta

SEQ ID NO: 218428 - DNA, 25 bp, Artificial
  Probe
caggctgtactggaagctatgtggc

SEQ ID NO: 218429 - DNA, 25 bp, Artificial
  Probe
tgcactgctgacactggctacttac

SEQ ID NO: 218430 - DNA, 25 bp, Artificial
  Probe
ctcacttcctggaagcaggctgtac

SEQ ID NO: 218431 - DNA, 25 bp, Artificial
  Probe
gctacctcagcctcaggaataactc

SEQ ID NO: 218432 - DNA, 25 bp, Artificial
  Probe
cttcctggaagcaggctgtactgga

SEQ ID NO: 218433 - DNA, 25 bp, Artificial
  Probe
cctacaacaatatcacttgcgctgg

SEQ ID NO: 218434 - DNA, 25 bp, Artificial
  Probe
gagactttgccctgcagaaccctgg

SEQ ID NO: 218435 - DNA, 25 bp, Artificial
  Probe
agcaggctgtactggaagctatgtg

SEQ ID NO: 218436 - DNA, 25 bp, Artificial
  Probe
gaaacacattttgtgcactgctgac

SEQ ID NO: 218437 - DNA, 25 bp, Artificial
  Probe
gtctcattgttaacagaataagctg

SEQ ID NO: 218438 - DNA, 25 bp, Artificial
  Probe
agcgcctgtggcttgatgccaaccc

SEQ ID NO: 218439 - DNA, 25 bp, Artificial
  Probe
ggtcctggctgctcacttcctggaa

SEQ ID NO: 218440 - DNA, 25 bp, Artificial
  Probe
ccccgctttgttcagactgtctgtg

SEQ ID NO: 218441 - DNA, 25 bp, Artificial
  Probe
gctgacactggctacttactggccc

SEQ ID NO: 218442 - DNA, 25 bp, Artificial
  Probe
actgccagccggtgtacacctacaa

SEQ ID NO: 218443 - DNA, 25 bp, Artificial
  Probe
acttcctggaagcaggctgtactgg

SEQ ID NO: 218444 - DNA, 25 bp, Artificial
  Probe
taggggacaggtcctggctgctcac

SEQ ID NO: 218445 - DNA, 25 bp, Artificial
  Probe
caggaataactccttgcagaccttt

SEQ ID NO: 218446 - DNA, 25 bp, Artificial
  Probe
ctggctgctcacttcctggaagcag

SEQ ID NO: 218447 - DNA, 25 bp, Artificial
  Probe
aaggccttttctcatctctggggcg

SEQ ID NO: 218448 - DNA, 25 bp, Artificial
  Probe
gacctaagagacgttagtgaaacac

SEQ ID NO: 218449 - DNA, 25 bp, Artificial
  Probe
ctggaagcaggctgtactggaagct

SEQ ID NO: 218450 - DNA, 25 bp, Artificial
  Probe
gaataagctggctctcaaattccta

SEQ ID NO: 218451 - DNA, 25 bp, Artificial
  Probe
gccggtgtacacctacaacaatatc

SEQ ID NO: 218452 - DNA, 25 bp, Artificial
  Probe
cctcagcctcaggaataactccttg

SEQ ID NO: 218453 - DNA, 25 bp, Artificial
  Probe
aacacattttgtgcactgctgacac

SEQ ID NO: 218454 - DNA, 25 bp, Artificial
  Probe
ttagtgaaacacattttgtgcactg

SEQ ID NO: 218455 - DNA, 25 bp, Artificial
  Probe
cctggagcgcctgtggcttgatgcc

SEQ ID NO: 218456 - DNA, 25 bp, Artificial
  Probe
ggaataactccttgcagaccttttc

SEQ ID NO: 218457 - DNA, 25 bp, Artificial
  Probe
tgaaacacattttgtgcactgctga

SEQ ID NO: 218458 - DNA, 25 bp, Artificial
  Probe
ttttgtgcactgctgacactggcta

SEQ ID NO: 218459 - DNA, 25 bp, Artificial
  Probe
ttgccctgcagaaccctggtgttgt

SEQ ID NO: 218460 - DNA, 25 bp, Artificial
  Probe
ttgtgcactgctgacactggctact

SEQ ID NO: 218461 - DNA, 25 bp, Artificial
  Probe
tgcagaaccctggtgttgtcccccg

SEQ ID NO: 218462 - DNA, 25 bp, Artificial
  Probe
ggctcaggccaagtgtccaagggcc

SEQ ID NO: 218463 - DNA, 25 bp, Artificial
  Probe
acttgaacacggtgcagagtcccgg

SEQ ID NO: 218464 - DNA, 25 bp, Artificial
  Probe
ttgaacacggtgcagagtcccggga

SEQ ID NO: 218465 - DNA, 25 bp, Artificial
  Probe
agcgccaacagcaacttcgtgaact

SEQ ID NO: 218466 - DNA, 25 bp, Artificial
  Probe
cagcgccaacagcaacttcgtgaac

SEQ ID NO: 218467 - DNA, 25 bp, Artificial
  Probe
cttgcgcaggcctgggacctttctc

SEQ ID NO: 218468 - DNA, 25 bp, Artificial
  Probe
aacacggtgcagagtcccgggatgc

SEQ ID NO: 218469 - DNA, 25 bp, Artificial
  Probe
ggcctgggacctttctccgatccat

SEQ ID NO: 218470 - DNA, 25 bp, Artificial
  Probe
ccacagggcaattcgggcgtctcca

SEQ ID NO: 218471 - DNA, 25 bp, Artificial
  Probe
cagagtcccgggatgccacagggca

SEQ ID NO: 218472 - DNA, 25 bp, Artificial
  Probe
ccagcgccaacagcaacttcgtgaa

SEQ ID NO: 218473 - DNA, 25 bp, Artificial
  Probe
atgccacagggcaattcgggcgtct

SEQ ID NO: 218474 - DNA, 25 bp, Artificial
  Probe
acacggtgcagagtcccgggatgcc

SEQ ID NO: 218475 - DNA, 25 bp, Artificial
  Probe
cttgaacacggtgcagagtcccggg

SEQ ID NO: 218476 - DNA, 25 bp, Artificial
  Probe
gccacagggcaattcgggcgtctcc

SEQ ID NO: 218477 - DNA, 25 bp, Artificial
  Probe
cacggtgcagagtcccgggatgcca

SEQ ID NO: 218478 - DNA, 25 bp, Artificial
  Probe
cccgggatgccacagggcaattcgg

SEQ ID NO: 218479 - DNA, 25 bp, Artificial
  Probe
agagtcccgggatgccacagggcaa

SEQ ID NO: 218480 - DNA, 25 bp, Artificial
  Probe
aattcgggcgtctccacgctgcacg

SEQ ID NO: 218481 - DNA, 25 bp, Artificial
  Probe
ccactgtgtcctgtccctcggattt

SEQ ID NO: 218482 - DNA, 25 bp, Artificial
  Probe
gtgtcctgtccctcggatttcacac

SEQ ID NO: 218483 - DNA, 25 bp, Artificial
  Probe
attcgggcgtctccacgctgcacgg

SEQ ID NO: 218484 - DNA, 25 bp, Artificial
  Probe
gccagcgccaacagcaacttcgtga

SEQ ID NO: 218485 - DNA, 25 bp, Artificial
  Probe
tgaacacggtgcagagtcccgggat

SEQ ID NO: 218486 - DNA, 25 bp, Artificial
  Probe
aggcctgggacctttctccgatcca

SEQ ID NO: 218487 - DNA, 25 bp, Artificial
  Probe
cactgtgtcctgtccctcggatttc

SEQ ID NO: 218488 - DNA, 25 bp, Artificial
  Probe
tgccacagggcaattcgggcgtctc

SEQ ID NO: 218489 - DNA, 25 bp, Artificial
  Probe
gcgccaacagcaacttcgtgaactt

SEQ ID NO: 218490 - DNA, 25 bp, Artificial
  Probe
gcaggcctgggacctttctccgatc

SEQ ID NO: 218491 - DNA, 25 bp, Artificial
  Probe
cgcaggcctgggacctttctccgat

SEQ ID NO: 218492 - DNA, 25 bp, Artificial
  Probe
gaaaggctcccactgtgtcctgtcc

SEQ ID NO: 218493 - DNA, 25 bp, Artificial
  Probe
tcccgggatgccacagggcaattcg

SEQ ID NO: 218494 - DNA, 25 bp, Artificial
  Probe
gcaattcgggcgtctccacgctgca

SEQ ID NO: 218495 - DNA, 25 bp, Artificial
  Probe
ctacccagagaagagccccctttga

SEQ ID NO: 218496 - DNA, 25 bp, Artificial
  Probe
agctctcatttctacggcatgcttt

SEQ ID NO: 218497 - DNA, 25 bp, Artificial
  Probe
accaaaggagggtctcagagatgcc

SEQ ID NO: 218498 - DNA, 25 bp, Artificial
  Probe
tcaaaagagggctttccagagcaca

SEQ ID NO: 218499 - DNA, 25 bp, Artificial
  Probe
ggtctgtggcacctgtttgtttgtt

SEQ ID NO: 218500 - DNA, 25 bp, Artificial
  Probe
cccctttgtacaagccgagctgtta

SEQ ID NO: 218501 - DNA, 25 bp, Artificial
  Probe
agccgagctgttatggaatcacggt

SEQ ID NO: 218502 - DNA, 25 bp, Artificial
  Probe
cagactgagctttctgctaaggtgg

SEQ ID NO: 218503 - DNA, 25 bp, Artificial
  Probe
tggtttgggcaaatttccgcaggtc

SEQ ID NO: 218504 - DNA, 25 bp, Artificial
  Probe
ctgcctctgatgaataaagacaatg

SEQ ID NO: 218505 - DNA, 25 bp, Artificial
  Probe
agaagagccccctttgatacaaatc

SEQ ID NO: 218506 - DNA, 25 bp, Artificial
  Probe
ctgctaaggtggtgaggtagccaac

SEQ ID NO: 218507 - DNA, 25 bp, Artificial
  Probe
caaccctgcctctgatgaataaaga

SEQ ID NO: 218508 - DNA, 25 bp, Artificial
  Probe
cactggcatgtctcggtagtggttt

SEQ ID NO: 218509 - DNA, 25 bp, Artificial
  Probe
ttggattttcatatgcttcaaaggc

SEQ ID NO: 218510 - DNA, 25 bp, Artificial
  Probe
gacccaggtctgtggcacctgtttg

SEQ ID NO: 218511 - DNA, 25 bp, Artificial
  Probe
aatggtcccctttgtacaagccgag

SEQ ID NO: 218512 - DNA, 25 bp, Artificial
  Probe
agctgttatggaatcacggtgaacc

SEQ ID NO: 218513 - DNA, 25 bp, Artificial
  Probe
tactttcaaaagagggctttccaga

SEQ ID NO: 218514 - DNA, 25 bp, Artificial
  Probe
ttgtacaagccgagctgttatggaa

SEQ ID NO: 218515 - DNA, 25 bp, Artificial
  Probe
tacccagagaagagccccctttgat

SEQ ID NO: 218516 - DNA, 25 bp, Artificial
  Probe
atcagttggattttcatatgcttca

SEQ ID NO: 218517 - DNA, 25 bp, Artificial
  Probe
tttccagagcacagctcacagccag

SEQ ID NO: 218518 - DNA, 25 bp, Artificial
  Probe
caatgagtacagttccttaattcag

SEQ ID NO: 218519 - DNA, 25 bp, Artificial
  Probe
tgacatcagatgacaagaggtctat

SEQ ID NO: 218520 - DNA, 25 bp, Artificial
  Probe
agctcacagccagctgttaggaccc

SEQ ID NO: 218521 - DNA, 25 bp, Artificial
  Probe
ggtgaggtagccaacactggcatgt

SEQ ID NO: 218522 - DNA, 25 bp, Artificial
  Probe
ttttagctctcatttctacggcatg

SEQ ID NO: 218523 - DNA, 25 bp, Artificial
  Probe
tccaaggaaccaaaggagggtctca

SEQ ID NO: 218524 - DNA, 25 bp, Artificial
  Probe
aggtctgtggcacctgtttgtttgt

SEQ ID NO: 218525 - DNA, 25 bp, Artificial
  Probe
ttaattcaggcttttgtgactagct

SEQ ID NO: 218526 - DNA, 25 bp, Artificial
  Probe
atggaatcacggtgaaccagaccca

SEQ ID NO: 218527 - DNA, 25 bp, Artificial
  Probe
gaggtctatagcacatctctgggct

SEQ ID NO: 218528 - DNA, 25 bp, Artificial
  Probe
cataggtctgtctgtggctttgaga

SEQ ID NO: 218529 - DNA, 25 bp, Artificial
  Probe
atagcacatctctgggcttttccct

SEQ ID NO: 218530 - DNA, 25 bp, Artificial
  Probe
ctttctgctaaggtggtgaggtagc

SEQ ID NO: 218531 - DNA, 25 bp, Artificial
  Probe
tgactagcttactacggaaccgaaa

SEQ ID NO: 218532 - DNA, 25 bp, Artificial
  Probe
catgtctcggtagtggtttgggcaa

SEQ ID NO: 218533 - DNA, 25 bp, Artificial
  Probe
cctttgatacaaatcagttggattt

SEQ ID NO: 218534 - DNA, 25 bp, Artificial
  Probe
tttgggcaaatttccgcaggtctct

SEQ ID NO: 218535 - DNA, 25 bp, Artificial
  Probe
ccacccttctcctttattgtggagg

SEQ ID NO: 218536 - DNA, 25 bp, Artificial
  Probe
tcaggcttttgtgactagcttacta

SEQ ID NO: 218537 - DNA, 25 bp, Artificial
  Probe
gtactttcaaaagagggctttccag

SEQ ID NO: 218538 - DNA, 25 bp, Artificial
  Probe
gtcagactgagctttctgctaaggt

SEQ ID NO: 218539 - DNA, 25 bp, Artificial
  Probe
atttctacggcatgctttccaagga

SEQ ID NO: 218540 - DNA, 25 bp, Artificial
  Probe
tgctttccaaggaaccaaaggaggg

SEQ ID NO: 218541 - DNA, 25 bp, Artificial
  Probe
cacccaacgagttaacactggtgaa

SEQ ID NO: 218542 - DNA, 25 bp, Artificial
  Probe
cgagttaacactggtgaaaacacca

SEQ ID NO: 218543 - DNA, 25 bp, Artificial
  Probe
agagtttggttgaggcctatccaaa

SEQ ID NO: 218544 - DNA, 25 bp, Artificial
  Probe
aacaccaagcggaacctgtgctgtc

SEQ ID NO: 218545 - DNA, 25 bp, Artificial
  Probe
tccaaacccgggaaatctggccctg

SEQ ID NO: 218546 - DNA, 25 bp, Artificial
  Probe
cttgttgcccagtagactctccctt

SEQ ID NO: 218547 - DNA, 25 bp, Artificial
  Probe
aacagccaggacaagagaattgtcc

SEQ ID NO: 218548 - DNA, 25 bp, Artificial
  Probe
agttaacactggtgaaaacaccaag

SEQ ID NO: 218549 - DNA, 25 bp, Artificial
  Probe
acactggtgaaaacaccaagcggaa

SEQ ID NO: 218550 - DNA, 25 bp, Artificial
  Probe
taatagttggacatatcgtgtccgg

SEQ ID NO: 218551 - DNA, 25 bp, Artificial
  Probe
gaaacagccaggacaagagaattgt

SEQ ID NO: 218552 - DNA, 25 bp, Artificial
  Probe
aacactggtgaaaacaccaagcgga

SEQ ID NO: 218553 - DNA, 25 bp, Artificial
  Probe
gagaattgtcccaggagaaactgga

SEQ ID NO: 218554 - DNA, 25 bp, Artificial
  Probe
cagaaacagccaggacaagagaatt

SEQ ID NO: 218555 - DNA, 25 bp, Artificial
  Probe
gtgaaaacaccaagcggaacctgtg

SEQ ID NO: 218556 - DNA, 25 bp, Artificial
  Probe
tccacagaactaatagttggacata

SEQ ID NO: 218557 - DNA, 25 bp, Artificial
  Probe
aggaggccttgttgcccagtagact

SEQ ID NO: 218558 - DNA, 25 bp, Artificial
  Probe
tctcacagaaacagccaggacaaga

SEQ ID NO: 218559 - DNA, 25 bp, Artificial
  Probe
catacatctgtatgaaaagggcagt

SEQ ID NO: 218560 - DNA, 25 bp, Artificial
  Probe
ttgtcccaggagaaactggaactaa

SEQ ID NO: 218561 - DNA, 25 bp, Artificial
  Probe
tttaaggcctacacagaagactgtt

SEQ ID NO: 218562 - DNA, 25 bp, Artificial
  Probe
ctgtgctgtctatggctcaagcttt

SEQ ID NO: 218563 - DNA, 25 bp, Artificial
  Probe
cctccacagaactaatagttggaca

SEQ ID NO: 218564 - DNA, 25 bp, Artificial
  Probe
gcctacacagaagactgttcaaatc

SEQ ID NO: 218565 - DNA, 25 bp, Artificial
  Probe
gctgtctatggctcaagctttaagg

SEQ ID NO: 218566 - DNA, 25 bp, Artificial
  Probe
gcccagtagactctcccttataaga

SEQ ID NO: 218567 - DNA, 25 bp, Artificial
  Probe
tgtccggtaaaacaaggggagcctg

SEQ ID NO: 218568 - DNA, 25 bp, Artificial
  Probe
gaagatggctcctctctatcaccca

SEQ ID NO: 218569 - DNA, 25 bp, Artificial
  Probe
ttggttgaggcctatccaaacccgg

SEQ ID NO: 218570 - DNA, 25 bp, Artificial
  Probe
caacgagttaacactggtgaaaaca

SEQ ID NO: 218571 - DNA, 25 bp, Artificial
  Probe
tgaggcctatccaaacccgggaaat

SEQ ID NO: 218572 - DNA, 25 bp, Artificial
  Probe
acaagagaattgtcccaggagaaac

SEQ ID NO: 218573 - DNA, 25 bp, Artificial
  Probe
gctcaagctttaaggcctacacaga

SEQ ID NO: 218574 - DNA, 25 bp, Artificial
  Probe
ctggtgaaaacaccaagcggaacct

SEQ ID NO: 218575 - DNA, 25 bp, Artificial
  Probe
gtagactctcccttataagatcaag

SEQ ID NO: 218576 - DNA, 25 bp, Artificial
  Probe
tggttgaggcctatccaaacccggg

SEQ ID NO: 218577 - DNA, 25 bp, Artificial
  Probe
ctatcacccaacgagttaacactgg

SEQ ID NO: 218578 - DNA, 25 bp, Artificial
  Probe
gacaagagaattgtcccaggagaaa

SEQ ID NO: 218579 - DNA, 25 bp, Artificial
  Probe
ggacatatcgtgtccggtaaaacaa

SEQ ID NO: 218580 - DNA, 25 bp, Artificial
  Probe
taagatcaagtctatcaacacctgg

SEQ ID NO: 218581 - DNA, 25 bp, Artificial
  Probe
gaggaggccttgttgcccagtagac

SEQ ID NO: 218582 - DNA, 25 bp, Artificial
  Probe
ttaaccgtctcacagaaacagccag

SEQ ID NO: 218583 - DNA, 25 bp, Artificial
  Probe
aacacatacatctgtatgaaaaggg

SEQ ID NO: 218584 - DNA, 25 bp, Artificial
  Probe
agctttaaggcctacacagaagact

SEQ ID NO: 218585 - DNA, 25 bp, Artificial
  Probe
gttgcccagtagactctcccttata

SEQ ID NO: 218586 - DNA, 25 bp, Artificial
  Probe
attgtcccaggagaaactggaacta

SEQ ID NO: 218587 - DNA, 25 bp, Artificial
  Probe
cgtttgaagaattgcccatgacccc

SEQ ID NO: 218588 - DNA, 25 bp, Artificial
  Probe
ggcctcagaagagtttgagcagata

SEQ ID NO: 218589 - DNA, 25 bp, Artificial
  Probe
tacatatcacggaggctgacgctga

SEQ ID NO: 218590 - DNA, 25 bp, Artificial
  Probe
ctggcagccagatattacaactgtg

SEQ ID NO: 218591 - DNA, 25 bp, Artificial
  Probe
gatattacaactgtgtgtcctttcc

SEQ ID NO: 218592 - DNA, 25 bp, Artificial
  Probe
atgcattgccacagcctggcagcca

SEQ ID NO: 218593 - DNA, 25 bp, Artificial
  Probe
tatcacggaggctgacgctgagagc

SEQ ID NO: 218594 - DNA, 25 bp, Artificial
  Probe
gctctacatatcacggaggctgacg

SEQ ID NO: 218595 - DNA, 25 bp, Artificial
  Probe
cctacaacctacaaagcctctgtgg

SEQ ID NO: 218596 - DNA, 25 bp, Artificial
  Probe
gaggctgacgctgagagcagtccac

SEQ ID NO: 218597 - DNA, 25 bp, Artificial
  Probe
gggactaaggctccaggttcctcca

SEQ ID NO: 218598 - DNA, 25 bp, Artificial
  Probe
taaccaaacagacagcgggatggtg

SEQ ID NO: 218599 - DNA, 25 bp, Artificial
  Probe
gccgtaaagatcctggccagcacat

SEQ ID NO: 218600 - DNA, 25 bp, Artificial
  Probe
ctacaaagcctctgtggataaccaa

SEQ ID NO: 218601 - DNA, 25 bp, Artificial
  Probe
gcagccagatattacaactgtgtgt

SEQ ID NO: 218602 - DNA, 25 bp, Artificial
  Probe
ctctgtggataaccaaacagacagc

SEQ ID NO: 218603 - DNA, 25 bp, Artificial
  Probe
ttcagccgtaaagatcctggccagc

SEQ ID NO: 218604 - DNA, 25 bp, Artificial
  Probe
atcacggaggctgacgctgagagca

SEQ ID NO: 218605 - DNA, 25 bp, Artificial
  Probe
caagaaggcagcttcagccgtaaag

SEQ ID NO: 218606 - DNA, 25 bp, Artificial
  Probe
ggataaccaaacagacagcgggatg

SEQ ID NO: 218607 - DNA, 25 bp, Artificial
  Probe
gatcctggccagcacatggatattt

SEQ ID NO: 218608 - DNA, 25 bp, Artificial
  Probe
tattacaactgtgtgtcctttcctg

SEQ ID NO: 218609 - DNA, 25 bp, Artificial
  Probe
agaaggcagcttcagccgtaaagat

SEQ ID NO: 218610 - DNA, 25 bp, Artificial
  Probe
gctgacgctgagagcagtccaccca

SEQ ID NO: 218611 - DNA, 25 bp, Artificial
  Probe
caccacagctctacatatcacggag

SEQ ID NO: 218612 - DNA, 25 bp, Artificial
  Probe
gtggataaccaaacagacagcggga

SEQ ID NO: 218613 - DNA, 25 bp, Artificial
  Probe
acatggatatttccagaggacaccc

SEQ ID NO: 218614 - DNA, 25 bp, Artificial
  Probe
agcctggcagccagatattacaact

SEQ ID NO: 218615 - DNA, 25 bp, Artificial
  Probe
acctacaaagcctctgtggataacc

SEQ ID NO: 218616 - DNA, 25 bp, Artificial
  Probe
acaagaaggcagcttcagccgtaaa

SEQ ID NO: 218617 - DNA, 25 bp, Artificial
  Probe
atggcttcatgcaggcatccaccac

SEQ ID NO: 218618 - DNA, 25 bp, Artificial
  Probe
tgtgtcctttcctgggcgcctggtc

SEQ ID NO: 218619 - DNA, 25 bp, Artificial
  Probe
atggatatttccagaggacacccgg

SEQ ID NO: 218620 - DNA, 25 bp, Artificial
  Probe
tacaacctacaaagcctctgtggat

SEQ ID NO: 218621 - DNA, 25 bp, Artificial
  Probe
tggcctcagaagagtttgagcagat

SEQ ID NO: 218622 - DNA, 25 bp, Artificial
  Probe
ctccaggatgaagacgtttgaagaa

SEQ ID NO: 218623 - DNA, 25 bp, Artificial
  Probe
gcatgcattgccacagcctggcagc

SEQ ID NO: 218624 - DNA, 25 bp, Artificial
  Probe
gaaggcagcttcagccgtaaagatc

SEQ ID NO: 218625 - DNA, 25 bp, Artificial
  Probe
tgagagcagtccacccagcatgcat

SEQ ID NO: 218626 - DNA, 25 bp, Artificial
  Probe
cagcttcagccgtaaagatcctggc

SEQ ID NO: 218627 - DNA, 25 bp, Artificial
  Probe
attgccacagcctggcagccagata

SEQ ID NO: 218628 - DNA, 25 bp, Artificial
  Probe
agacaagaaggcagcttcagccgta

SEQ ID NO: 218629 - DNA, 25 bp, Artificial
  Probe
tcctggccagcacatggatatttcc

SEQ ID NO: 218630 - DNA, 25 bp, Artificial
  Probe
cagccgtaaagatcctggccagcac

SEQ ID NO: 218631 - DNA, 25 bp, Artificial
  Probe
gaagaattgcccatgacccctacaa

SEQ ID NO: 218632 - DNA, 25 bp, Artificial
  Probe
aagcctctgtggataaccaaacaga

SEQ ID NO: 218633 - DNA, 25 bp, Artificial
  Probe
cacaggttacctcagcaagacgttg

SEQ ID NO: 218634 - DNA, 25 bp, Artificial
  Probe
atgaacaccagcacaggttacctca

SEQ ID NO: 218635 - DNA, 25 bp, Artificial
  Probe
agcacaggttacctcagcaagacgt

SEQ ID NO: 218636 - DNA, 25 bp, Artificial
  Probe
aatgcatgaacaccagcacaggtta

SEQ ID NO: 218637 - DNA, 25 bp, Artificial
  Probe
ttacctcagcaagacgttgtttgaa

SEQ ID NO: 218638 - DNA, 25 bp, Artificial
  Probe
cagcaagacgttgtttgaaattaca

SEQ ID NO: 218639 - DNA, 25 bp, Artificial
  Probe
aacaccagcacaggttacctcagca

SEQ ID NO: 218640 - DNA, 25 bp, Artificial
  Probe
tgctgcaacagtgaagggctgcaat

SEQ ID NO: 218641 - DNA, 25 bp, Artificial
  Probe
tgcaacagtgaagggctgcaatgca

SEQ ID NO: 218642 - DNA, 25 bp, Artificial
  Probe
tgcaatgcatgaacaccagcacagg

SEQ ID NO: 218643 - DNA, 25 bp, Artificial
  Probe
acaggttacctcagcaagacgttgt

SEQ ID NO: 218644 - DNA, 25 bp, Artificial
  Probe
gctgcaatgcatgaacaccagcaca

SEQ ID NO: 218645 - DNA, 25 bp, Artificial
  Probe
aggttacctcagcaagacgttgttt

SEQ ID NO: 218646 - DNA, 25 bp, Artificial
  Probe
gcaatgcatgaacaccagcacaggt

SEQ ID NO: 218647 - DNA, 25 bp, Artificial
  Probe
ggttgctgcaacagtgaagggctgc

SEQ ID NO: 218648 - DNA, 25 bp, Artificial
  Probe
ggctgcaatgcatgaacaccagcac

SEQ ID NO: 218649 - DNA, 25 bp, Artificial
  Probe
accagcacaggttacctcagcaaga

SEQ ID NO: 218650 - DNA, 25 bp, Artificial
  Probe
atgcatgaacaccagcacaggttac

SEQ ID NO: 218651 - DNA, 25 bp, Artificial
  Probe
gcatgaacaccagcacaggttacct

SEQ ID NO: 218652 - DNA, 25 bp, Artificial
  Probe
ggttacctcagcaagacgttgtttg

SEQ ID NO: 218653 - DNA, 25 bp, Artificial
  Probe
gctgcaacagtgaagggctgcaatg

SEQ ID NO: 218654 - DNA, 25 bp, Artificial
  Probe
tgaagggctgcaatgcatgaacacc

SEQ ID NO: 218655 - DNA, 25 bp, Artificial
  Probe
acctcagcaagacgttgtttgaaat

SEQ ID NO: 218656 - DNA, 25 bp, Artificial
  Probe
gttgctgcaacagtgaagggctgca

SEQ ID NO: 218657 - DNA, 25 bp, Artificial
  Probe
tgcatgaacaccagcacaggttacc

SEQ ID NO: 218658 - DNA, 25 bp, Artificial
  Probe
acagtgaagggctgcaatgcatgaa

SEQ ID NO: 218659 - DNA, 25 bp, Artificial
  Probe
gcacaggttacctcagcaagacgtt

SEQ ID NO: 218660 - DNA, 25 bp, Artificial
  Probe
ttgctgcaacagtgaagggctgcaa

SEQ ID NO: 218661 - DNA, 25 bp, Artificial
  Probe
caatgcatgaacaccagcacaggtt

SEQ ID NO: 218662 - DNA, 25 bp, Artificial
  Probe
caccagcacaggttacctcagcaag

SEQ ID NO: 218663 - DNA, 25 bp, Artificial
  Probe
cctcagcaagacgttgtttgaaatt

SEQ ID NO: 218664 - DNA, 25 bp, Artificial
  Probe
catgaacaccagcacaggttacctc

SEQ ID NO: 218665 - DNA, 25 bp, Artificial
  Probe
tgaacaccagcacaggttacctcag

SEQ ID NO: 218666 - DNA, 25 bp, Artificial
  Probe
caacagtgaagggctgcaatgcatg

SEQ ID NO: 218667 - DNA, 25 bp, Artificial
  Probe
caggttacctcagcaagacgttgtt

SEQ ID NO: 218668 - DNA, 25 bp, Artificial
  Probe
tcagcaagacgttgtttgaaattac

SEQ ID NO: 218669 - DNA, 25 bp, Artificial
  Probe
tacctcagcaagacgttgtttgaaa

SEQ ID NO: 218670 - DNA, 25 bp, Artificial
  Probe
ctgcaatgcatgaacaccagcacag

SEQ ID NO: 218671 - DNA, 25 bp, Artificial
  Probe
gaacaccagcacaggttacctcagc

SEQ ID NO: 218672 - DNA, 25 bp, Artificial
  Probe
ctgcaacagtgaagggctgcaatgc

SEQ ID NO: 218673 - DNA, 25 bp, Artificial
  Probe
ctcagcaagacgttgtttgaaatta

SEQ ID NO: 218674 - DNA, 25 bp, Artificial
  Probe
gttacctcagcaagacgttgtttga

SEQ ID NO: 218675 - DNA, 25 bp, Artificial
  Probe
ccagcacaggttacctcagcaagac

SEQ ID NO: 218676 - DNA, 25 bp, Artificial
  Probe
gtgaagggctgcaatgcatgaacac

SEQ ID NO: 218677 - DNA, 25 bp, Artificial
  Probe
cagcacaggttacctcagcaagacg

SEQ ID NO: 218678 - DNA, 25 bp, Artificial
  Probe
acaccagcacaggttacctcagcaa

SEQ ID NO: 218679 - DNA, 25 bp, Artificial
  Probe
gttggctacactgttctgcagatcc

SEQ ID NO: 218680 - DNA, 25 bp, Artificial
  Probe
atcctcccattggtggtgcttgggg

SEQ ID NO: 218681 - DNA, 25 bp, Artificial
  Probe
ggctacactgttctgcagatcctcc

SEQ ID NO: 218682 - DNA, 25 bp, Artificial
  Probe
gcagatcctcccattggtggtgctt

SEQ ID NO: 218683 - DNA, 25 bp, Artificial
  Probe
acgcacagtcacacatctgttactg

SEQ ID NO: 218684 - DNA, 25 bp, Artificial
  Probe
gtcacacatctgttactgactgcct

SEQ ID NO: 218685 - DNA, 25 bp, Artificial
  Probe
cagtcacacatctgttactgactgc

SEQ ID NO: 218686 - DNA, 25 bp, Artificial
  Probe
tggctacactgttctgcagatcctc

SEQ ID NO: 218687 - DNA, 25 bp, Artificial
  Probe
cactgttctgcagatcctcccattg

SEQ ID NO: 218688 - DNA, 25 bp, Artificial
  Probe
cgtttgtggtgtgttggctacactg

SEQ ID NO: 218689 - DNA, 25 bp, Artificial
  Probe
gcctgctgactttcttcacgcacat

SEQ ID NO: 218690 - DNA, 25 bp, Artificial
  Probe
actgactgcctgctgactttcttca

SEQ ID NO: 218691 - DNA, 25 bp, Artificial
  Probe
ctcccattggtggtgcttggggtca

SEQ ID NO: 218692 - DNA, 25 bp, Artificial
  Probe
cctcccattggtggtgcttggggtc

SEQ ID NO: 218693 - DNA, 25 bp, Artificial
  Probe
acatctgttactgactgcctgctga

SEQ ID NO: 218694 - DNA, 25 bp, Artificial
  Probe
attggtggtgcttggggtcaccttt

SEQ ID NO: 218695 - DNA, 25 bp, Artificial
  Probe
agtcacacatctgttactgactgcc

SEQ ID NO: 218696 - DNA, 25 bp, Artificial
  Probe
ttctgcagatcctcccattggtggt

SEQ ID NO: 218697 - DNA, 25 bp, Artificial
  Probe
ttactgactgcctgctgactttctt

SEQ ID NO: 218698 - DNA, 25 bp, Artificial
  Probe
agatcctcccattggtggtgcttgg

SEQ ID NO: 218699 - DNA, 25 bp, Artificial
  Probe
gtgtgttggctacactgttctgcag

SEQ ID NO: 218700 - DNA, 25 bp, Artificial
  Probe
tggtgtgttggctacactgttctgc

SEQ ID NO: 218701 - DNA, 25 bp, Artificial
  Probe
gcgtttgtggtgtgttggctacact

SEQ ID NO: 218702 - DNA, 25 bp, Artificial
  Probe
cacacatctgttactgactgcctgc

SEQ ID NO: 218703 - DNA, 25 bp, Artificial
  Probe
atctgttactgactgcctgctgact

SEQ ID NO: 218704 - DNA, 25 bp, Artificial
  Probe
tcccattggtggtgcttggggtcac

SEQ ID NO: 218705 - DNA, 25 bp, Artificial
  Probe
tcacacatctgttactgactgcctg

SEQ ID NO: 218706 - DNA, 25 bp, Artificial
  Probe
ccattggtggtgcttggggtcacct

SEQ ID NO: 218707 - DNA, 25 bp, Artificial
  Probe
ggtgtgttggctacactgttctgca

SEQ ID NO: 218708 - DNA, 25 bp, Artificial
  Probe
tgttggctacactgttctgcagatc

SEQ ID NO: 218709 - DNA, 25 bp, Artificial
  Probe
gactgcctgctgactttcttcacgc

SEQ ID NO: 218710 - DNA, 25 bp, Artificial
  Probe
actgcctgctgactttcttcacgca

SEQ ID NO: 218711 - DNA, 25 bp, Artificial
  Probe
cagatcctcccattggtggtgcttg

SEQ ID NO: 218712 - DNA, 25 bp, Artificial
  Probe
tactgactgcctgctgactttcttc

SEQ ID NO: 218713 - DNA, 25 bp, Artificial
  Probe
actgttctgcagatcctcccattgg

SEQ ID NO: 218714 - DNA, 25 bp, Artificial
  Probe
tgtgttggctacactgttctgcaga

SEQ ID NO: 218715 - DNA, 25 bp, Artificial
  Probe
tgttctgcagatcctcccattggtg

SEQ ID NO: 218716 - DNA, 25 bp, Artificial
  Probe
tctgttactgactgcctgctgactt

SEQ ID NO: 218717 - DNA, 25 bp, Artificial
  Probe
ctgactgcctgctgactttcttcac

SEQ ID NO: 218718 - DNA, 25 bp, Artificial
  Probe
catctgttactgactgcctgctgac

SEQ ID NO: 218719 - DNA, 25 bp, Artificial
  Probe
tgcctgctgactttcttcacgcaca

SEQ ID NO: 218720 - DNA, 25 bp, Artificial
  Probe
gttctgcagatcctcccattggtgg

SEQ ID NO: 218721 - DNA, 25 bp, Artificial
  Probe
gcacagtcacacatctgttactgac

SEQ ID NO: 218722 - DNA, 25 bp, Artificial
  Probe
ttggctacactgttctgcagatcct

SEQ ID NO: 218723 - DNA, 25 bp, Artificial
  Probe
cacatctgttactgactgcctgctg

SEQ ID NO: 218724 - DNA, 25 bp, Artificial
  Probe
acagtcacacatctgttactgactg

SEQ ID NO: 218725 - DNA, 25 bp, Artificial
  Probe
tatctggaggaactggcaaaaggac

SEQ ID NO: 218726 - DNA, 25 bp, Artificial
  Probe
acactcattgaaagcctagaaagtc

SEQ ID NO: 218727 - DNA, 25 bp, Artificial
  Probe
agcaacaacataagtgtcatcgaat

SEQ ID NO: 218728 - DNA, 25 bp, Artificial
  Probe
tcagactctttgaagtcttgaaaga

SEQ ID NO: 218729 - DNA, 25 bp, Artificial
  Probe
ctctttgaagtcttgaaagacaacc

SEQ ID NO: 218730 - DNA, 25 bp, Artificial
  Probe
catgagtgctacacgccgcgtcttg

SEQ ID NO: 218731 - DNA, 25 bp, Artificial
  Probe
ctcaagtagcatggatgctatggaa

SEQ ID NO: 218732 - DNA, 25 bp, Artificial
  Probe
aagagcctcctcttggatatctgga

SEQ ID NO: 218733 - DNA, 25 bp, Artificial
  Probe
ctgttactgccaaggcacactcatt

SEQ ID NO: 218734 - DNA, 25 bp, Artificial
  Probe
accaggccatcagcaacaacataag

SEQ ID NO: 218735 - DNA, 25 bp, Artificial
  Probe
gtaacacgaaaatacttgagagcca

SEQ ID NO: 218736 - DNA, 25 bp, Artificial
  Probe
cctcagactctttgaagtcttgaaa

SEQ ID NO: 218737 - DNA, 25 bp, Artificial
  Probe
aaggaaagagcctcctcttggatat

SEQ ID NO: 218738 - DNA, 25 bp, Artificial
  Probe
ttgagagccagattatctctttcta

SEQ ID NO: 218739 - DNA, 25 bp, Artificial
  Probe
aggatgcattcatgagcatcgccaa

SEQ ID NO: 218740 - DNA, 25 bp, Artificial
  Probe
tactgccaaggcacactcattgaaa

SEQ ID NO: 218741 - DNA, 25 bp, Artificial
  Probe
agtgtcatcgaatcgcacctgatca

SEQ ID NO: 218742 - DNA, 25 bp, Artificial
  Probe
tcattgaaagcctagaaagtctgaa

SEQ ID NO: 218743 - DNA, 25 bp, Artificial
  Probe
caacaacataagtgtcatcgaatcg

SEQ ID NO: 218744 - DNA, 25 bp, Artificial
  Probe
tcttggatatctggaggaactggca

SEQ ID NO: 218745 - DNA, 25 bp, Artificial
  Probe
catggccctctctggctgttactgc

SEQ ID NO: 218746 - DNA, 25 bp, Artificial
  Probe
atcagcaacaacataagtgtcatcg

SEQ ID NO: 218747 - DNA, 25 bp, Artificial
  Probe
cattcatgagcatcgccaagttcga

SEQ ID NO: 218748 - DNA, 25 bp, Artificial
  Probe
ctacacgccgcgtcttggttttgca

SEQ ID NO: 218749 - DNA, 25 bp, Artificial
  Probe
cgaaaatacttgagagccagattat

SEQ ID NO: 218750 - DNA, 25 bp, Artificial
  Probe
gttttgcagctctgcctcatggccc

SEQ ID NO: 218751 - DNA, 25 bp, Artificial
  Probe
agtcttgaaagacaaccaggccatc

SEQ ID NO: 218752 - DNA, 25 bp, Artificial
  Probe
attttaactcaagtagcatggatgc

SEQ ID NO: 218753 - DNA, 25 bp, Artificial
  Probe
ctcctcttggatatctggaggaact

SEQ ID NO: 218754 - DNA, 25 bp, Artificial
  Probe
gccatcagcaacaacataagtgtca

SEQ ID NO: 218755 - DNA, 25 bp, Artificial
  Probe
gccctctctggctgttactgccaag

SEQ ID NO: 218756 - DNA, 25 bp, Artificial
  Probe
cggtaacacgaaaatacttgagagc

SEQ ID NO: 218757 - DNA, 25 bp, Artificial
  Probe
acaacataagtgtcatcgaatcgca

SEQ ID NO: 218758 - DNA, 25 bp, Artificial
  Probe
tcttgaaagacaaccaggccatcag

SEQ ID NO: 218759 - DNA, 25 bp, Artificial
  Probe
aagtcttgaaagacaaccaggccat

SEQ ID NO: 218760 - DNA, 25 bp, Artificial
  Probe
ctctggctgttactgccaaggcaca

SEQ ID NO: 218761 - DNA, 25 bp, Artificial
  Probe
gaactattttaactcaagtagcatg

SEQ ID NO: 218762 - DNA, 25 bp, Artificial
  Probe
gagagccagattatctctttctacc

SEQ ID NO: 218763 - DNA, 25 bp, Artificial
  Probe
tacttgagagccagattatctcttt

SEQ ID NO: 218764 - DNA, 25 bp, Artificial
  Probe
atgagcatcgccaagttcgaggtga

SEQ ID NO: 218765 - DNA, 25 bp, Artificial
  Probe
gctgttactgccaaggcacactcat

SEQ ID NO: 218766 - DNA, 25 bp, Artificial
  Probe
gacaaccaggccatcagcaacaaca

SEQ ID NO: 218767 - DNA, 25 bp, Artificial
  Probe
ctacctcagactctttgaagtcttg

SEQ ID NO: 218768 - DNA, 25 bp, Artificial
  Probe
gaaagagcctcctcttggatatctg

SEQ ID NO: 218769 - DNA, 25 bp, Artificial
  Probe
gcctcatggccctctctggctgtta

SEQ ID NO: 218770 - DNA, 25 bp, Artificial
  Probe
tgaaagacaaccaggccatcagcaa

SEQ ID NO: 218771 - DNA, 25 bp, Artificial
  Probe
ggtgctaactcagatgggctcccca

SEQ ID NO: 218772 - DNA, 25 bp, Artificial
  Probe
cggctttgaagttgtctatgaactg

SEQ ID NO: 218773 - DNA, 25 bp, Artificial
  Probe
tctaccactgcaactcgcagctagt

SEQ ID NO: 218774 - DNA, 25 bp, Artificial
  Probe
gtgcaccacggctttgaagttgtct

SEQ ID NO: 218775 - DNA, 25 bp, Artificial
  Probe
aacacgtacgatgcacacgattccc

SEQ ID NO: 218776 - DNA, 25 bp, Artificial
  Probe
ggggcttctaccactgcaactcgca

SEQ ID NO: 218777 - DNA, 25 bp, Artificial
  Probe
gtgctcagctgcatttccacagaat

SEQ ID NO: 218778 - DNA, 25 bp, Artificial
  Probe
actgacgaagatgtgcacgattcgg

SEQ ID NO: 218779 - DNA, 25 bp, Artificial
  Probe
gtaaaagaccctggacgcagatgta

SEQ ID NO: 218780 - DNA, 25 bp, Artificial
  Probe
cacggctttgaagttgtctatgaac

SEQ ID NO: 218781 - DNA, 25 bp, Artificial
  Probe
ttcagtgtcttaagtcatgtgctca

SEQ ID NO: 218782 - DNA, 25 bp, Artificial
  Probe
caggggcttctaccactgcaactcg

SEQ ID NO: 218783 - DNA, 25 bp, Artificial
  Probe
actgcaactcgcagctagtaaaaga

SEQ ID NO: 218784 - DNA, 25 bp, Artificial
  Probe
gtggctgcagcctcaaggtcttcaa

SEQ ID NO: 218785 - DNA, 25 bp, Artificial
  Probe
tccccagtggctgcagcctcaaggt

SEQ ID NO: 218786 - DNA, 25 bp, Artificial
  Probe
atagaaaacaccagaaggcacattg

SEQ ID NO: 218787 - DNA, 25 bp, Artificial
  Probe
ctatgaactgacgaagatgtgcacg

SEQ ID NO: 218788 - DNA, 25 bp, Artificial
  Probe
cgatagaaaacaccagaaggcacat

SEQ ID NO: 218789 - DNA, 25 bp, Artificial
  Probe
gtacgatgcacacgattcccatttc

SEQ ID NO: 218790 - DNA, 25 bp, Artificial
  Probe
atttctatccccattggttctgtgc

SEQ ID NO: 218791 - DNA, 25 bp, Artificial
  Probe
ttctaccactgcaactcgcagctag

SEQ ID NO: 218792 - DNA, 25 bp, Artificial
  Probe
aggtcttcaacaaccagctcttcgc

SEQ ID NO: 218793 - DNA, 25 bp, Artificial
  Probe
tgtctatgaactgacgaagatgtgc

SEQ ID NO: 218794 - DNA, 25 bp, Artificial
  Probe
aagtcatgtgctcagctgcatttcc

SEQ ID NO: 218795 - DNA, 25 bp, Artificial
  Probe
ctgcatttccacagaatagacgaag

SEQ ID NO: 218796 - DNA, 25 bp, Artificial
  Probe
aaggtcttcaacaaccagctcttcg

SEQ ID NO: 218797 - DNA, 25 bp, Artificial
  Probe
ttccacagaatagacgaaggcaggg

SEQ ID NO: 218798 - DNA, 25 bp, Artificial
  Probe
agctagtaaaagaccctggacgcag

SEQ ID NO: 218799 - DNA, 25 bp, Artificial
  Probe
taaacacgtacgatgcacacgattc

SEQ ID NO: 218800 - DNA, 25 bp, Artificial
  Probe
caccagaaggcacattggaaagggt

SEQ ID NO: 218801 - DNA, 25 bp, Artificial
  Probe
actcgcagctagtaaaagaccctgg

SEQ ID NO: 218802 - DNA, 25 bp, Artificial
  Probe
atccccagtggctgcagcctcaagg

SEQ ID NO: 218803 - DNA, 25 bp, Artificial
  Probe
gcagctagtaaaagaccctggacgc

SEQ ID NO: 218804 - DNA, 25 bp, Artificial
  Probe
ccctggacgcagatgtaaacacgta

SEQ ID NO: 218805 - DNA, 25 bp, Artificial
  Probe
acaccagaaggcacattggaaaggg

SEQ ID NO: 218806 - DNA, 25 bp, Artificial
  Probe
cccagtggctgcagcctcaaggtct

SEQ ID NO: 218807 - DNA, 25 bp, Artificial
  Probe
gcatttccacagaatagacgaaggc

SEQ ID NO: 218808 - DNA, 25 bp, Artificial
  Probe
tatttcttcagtgtcttaagtcatg

SEQ ID NO: 218809 - DNA, 25 bp, Artificial
  Probe
gaccctggacgcagatgtaaacacg

SEQ ID NO: 218810 - DNA, 25 bp, Artificial
  Probe
tttcttcagtgtcttaagtcatgtg

SEQ ID NO: 218811 - DNA, 25 bp, Artificial
  Probe
agtcagtgcaccacggctttgaagt

SEQ ID NO: 218812 - DNA, 25 bp, Artificial
  Probe
agatgtaaacacgtacgatgcacac

SEQ ID NO: 218813 - DNA, 25 bp, Artificial
  Probe
gggcttctaccactgcaactcgcag

SEQ ID NO: 218814 - DNA, 25 bp, Artificial
  Probe
cacgtacgatgcacacgattcccat

SEQ ID NO: 218815 - DNA, 25 bp, Artificial
  Probe
agtaaaagaccctggacgcagatgt

SEQ ID NO: 218816 - DNA, 25 bp, Artificial
  Probe
cccattggttctgtgctacctactt

SEQ ID NO: 218817 - DNA, 25 bp, Artificial
  Probe
ttttgtcatccattgtgacaatgtt

SEQ ID NO: 218818 - DNA, 25 bp, Artificial
  Probe
tttttgtcatccattgtgacaatgt

SEQ ID NO: 218819 - DNA, 25 bp, Artificial
  Probe
ttgtcatccattgtgacaatgtttc

SEQ ID NO: 218820 - DNA, 25 bp, Artificial
  Probe
ttgcaatgtggtactactatgtcct

SEQ ID NO: 218821 - DNA, 25 bp, Artificial
  Probe
gtcagtggtggtgactgacatactt

SEQ ID NO: 218822 - DNA, 25 bp, Artificial
  Probe
cgagggctccttggtgaccttggac

SEQ ID NO: 218823 - DNA, 25 bp, Artificial
  Probe
actcattggagtttcttgctcaccg

SEQ ID NO: 218824 - DNA, 25 bp, Artificial
  Probe
gtggtactactatgtccttcgtaga

SEQ ID NO: 218825 - DNA, 25 bp, Artificial
  Probe
acccccaaacccatgtgaatgtgaa

SEQ ID NO: 218826 - DNA, 25 bp, Artificial
  Probe
tcccatggaagctgttggtgtaagg

SEQ ID NO: 218827 - DNA, 25 bp, Artificial
  Probe
catactttttcagtttagtgtcctg

SEQ ID NO: 218828 - DNA, 25 bp, Artificial
  Probe
caatgtggtactactatgtccttcg

SEQ ID NO: 218829 - DNA, 25 bp, Artificial
  Probe
gtgactgacatactttttcagttta

SEQ ID NO: 218830 - DNA, 25 bp, Artificial
  Probe
gcatcgtttgcaatgtggtactact

SEQ ID NO: 218831 - DNA, 25 bp, Artificial
  Probe
aacccatgtgaatgtgaagaaaagc

SEQ ID NO: 218832 - DNA, 25 bp, Artificial
  Probe
gagaagctcctgactcattggagtt

SEQ ID NO: 218833 - DNA, 25 bp, Artificial
  Probe
ggctccttggtgaccttggactttg

SEQ ID NO: 218834 - DNA, 25 bp, Artificial
  Probe
tcttgctcaccgagggctccttggt

SEQ ID NO: 218835 - DNA, 25 bp, Artificial
  Probe
ctactatgtccttcgtagattgttt

SEQ ID NO: 218836 - DNA, 25 bp, Artificial
  Probe
gactgacatactttttcagtttagt

SEQ ID NO: 218837 - DNA, 25 bp, Artificial
  Probe
attctggggtctgcatcgtttgcaa

SEQ ID NO: 218838 - DNA, 25 bp, Artificial
  Probe
gacatactttttcagtttagtgtcc

SEQ ID NO: 218839 - DNA, 25 bp, Artificial
  Probe
ttctgtctaggatcccatggaagct

SEQ ID NO: 218840 - DNA, 25 bp, Artificial
  Probe
gtcatccattgtgacaatgtttccc

SEQ ID NO: 218841 - DNA, 25 bp, Artificial
  Probe
tcagtggtggtgactgacatacttt

SEQ ID NO: 218842 - DNA, 25 bp, Artificial
  Probe
gagtcgttttcaaactactgattct

SEQ ID NO: 218843 - DNA, 25 bp, Artificial
  Probe
taaggagaagctcctgactcattgg

SEQ ID NO: 218844 - DNA, 25 bp, Artificial
  Probe
caaacccatgtgaatgtgaagaaaa

SEQ ID NO: 218845 - DNA, 25 bp, Artificial
  Probe
aactactgattctggggtctgcatc

SEQ ID NO: 218846 - DNA, 25 bp, Artificial
  Probe
tgcaatgtggtactactatgtcctt

SEQ ID NO: 218847 - DNA, 25 bp, Artificial
  Probe
cccatggaagctgttggtgtaagga

SEQ ID NO: 218848 - DNA, 25 bp, Artificial
  Probe
ctcctgactcattggagtttcttgc

SEQ ID NO: 218849 - DNA, 25 bp, Artificial
  Probe
gtactactatgtccttcgtagattg

SEQ ID NO: 218850 - DNA, 25 bp, Artificial
  Probe
tggggtctgcatcgtttgcaatgtg

SEQ ID NO: 218851 - DNA, 25 bp, Artificial
  Probe
tgaccttggactttggcatggtttt

SEQ ID NO: 218852 - DNA, 25 bp, Artificial
  Probe
tggtgactgacatactttttcagtt

SEQ ID NO: 218853 - DNA, 25 bp, Artificial
  Probe
agtttcttgctcaccgagggctcct

SEQ ID NO: 218854 - DNA, 25 bp, Artificial
  Probe
gtctaggatcccatggaagctgttg

SEQ ID NO: 218855 - DNA, 25 bp, Artificial
  Probe
gggtctgcatcgtttgcaatgtggt

SEQ ID NO: 218856 - DNA, 25 bp, Artificial
  Probe
ctgattctggggtctgcatcgtttg

SEQ ID NO: 218857 - DNA, 25 bp, Artificial
  Probe
aagctcctgactcattggagtttct

SEQ ID NO: 218858 - DNA, 25 bp, Artificial
  Probe
ggtgaccttggactttggcatggtt

SEQ ID NO: 218859 - DNA, 25 bp, Artificial
  Probe
ctcaccgagggctccttggtgacct

SEQ ID NO: 218860 - DNA, 25 bp, Artificial
  Probe
gaggttctgtctaggatcccatgga

SEQ ID NO: 218861 - DNA, 25 bp, Artificial
  Probe
tttcaaactactgattctggggtct

SEQ ID NO: 218862 - DNA, 25 bp, Artificial
  Probe
tcgtttgcaatgtggtactactatg

SEQ ID NO: 218863 - DNA, 25 bp, Artificial
  Probe
accttgtcaaggatatatcgttaaa

SEQ ID NO: 218864 - DNA, 25 bp, Artificial
  Probe
acccacagttcctccaagctttgtg

SEQ ID NO: 218865 - DNA, 25 bp, Artificial
  Probe
ccagcagtgggtcagagagaatctt

SEQ ID NO: 218866 - DNA, 25 bp, Artificial
  Probe
ttgaagaccttgtcaaggatatatc

SEQ ID NO: 218867 - DNA, 25 bp, Artificial
  Probe
gtgactgaagcaagccaagtgatcc

SEQ ID NO: 218868 - DNA, 25 bp, Artificial
  Probe
agcacatgttgtaagtgaggccaac

SEQ ID NO: 218869 - DNA, 25 bp, Artificial
  Probe
atctgttcttcagtgggcgaagaaa

SEQ ID NO: 218870 - DNA, 25 bp, Artificial
  Probe
cagcctctggctgaagcccagcagt

SEQ ID NO: 218871 - DNA, 25 bp, Artificial
  Probe
cttgctcaactgtgaggagatgaga

SEQ ID NO: 218872 - DNA, 25 bp, Artificial
  Probe
agtgatccacggaattggcttctca

SEQ ID NO: 218873 - DNA, 25 bp, Artificial
  Probe
ctgaagcccagcagtgggtcagaga

SEQ ID NO: 218874 - DNA, 25 bp, Artificial
  Probe
cttactcagggcagcgaatacccac

SEQ ID NO: 218875 - DNA, 25 bp, Artificial
  Probe
aacgtccattcatcgtcagcctctg

SEQ ID NO: 218876 - DNA, 25 bp, Artificial
  Probe
gcaatttgaagaccttgtcaaggat

SEQ ID NO: 218877 - DNA, 25 bp, Artificial
  Probe
cccagcagtgggtcagagagaatct

SEQ ID NO: 218878 - DNA, 25 bp, Artificial
  Probe
agcgaatacccacagttcctccaag

SEQ ID NO: 218879 - DNA, 25 bp, Artificial
  Probe
caccttctgctctaatcgggaacct

SEQ ID NO: 218880 - DNA, 25 bp, Artificial
  Probe
tcagcctctggctgaagcccagcag

SEQ ID NO: 218881 - DNA, 25 bp, Artificial
  Probe
ctgaagcaagccaagtgatccacgg

SEQ ID NO: 218882 - DNA, 25 bp, Artificial
  Probe
taatcgggaacctttgagtcaacgt

SEQ ID NO: 218883 - DNA, 25 bp, Artificial
  Probe
tcgggaacctttgagtcaacgtcca

SEQ ID NO: 218884 - DNA, 25 bp, Artificial
  Probe
atcgtcagcctctggctgaagccca

SEQ ID NO: 218885 - DNA, 25 bp, Artificial
  Probe
tattataccatgaaaagcaacttgg

SEQ ID NO: 218886 - DNA, 25 bp, Artificial
  Probe
caaattgcagcacatgttgtaagtg

SEQ ID NO: 218887 - DNA, 25 bp, Artificial
  Probe
ccattcatcgtcagcctctggctga

SEQ ID NO: 218888 - DNA, 25 bp, Artificial
  Probe
tgaggccaacagtaatgcagcatct

SEQ ID NO: 218889 - DNA, 25 bp, Artificial
  Probe
gctctaatcgggaacctttgagtca

SEQ ID NO: 218890 - DNA, 25 bp, Artificial
  Probe
ttgcagcacatgttgtaagtgaggc

SEQ ID NO: 218891 - DNA, 25 bp, Artificial
  Probe
gcaacagtccattcacttgggcgga

SEQ ID NO: 218892 - DNA, 25 bp, Artificial
  Probe
tgatgaggatcctcaaattgcagca

SEQ ID NO: 218893 - DNA, 25 bp, Artificial
  Probe
cacagttcctccaagctttgtgagc

SEQ ID NO: 218894 - DNA, 25 bp, Artificial
  Probe
accatgaaaagcaacttggtagtgc

SEQ ID NO: 218895 - DNA, 25 bp, Artificial
  Probe
gtcaacgtccattcatcgtcagcct

SEQ ID NO: 218896 - DNA, 25 bp, Artificial
  Probe
caatttgaagaccttgtcaaggata

SEQ ID NO: 218897 - DNA, 25 bp, Artificial
  Probe
ccaagctttgtgagcaacagtccat

SEQ ID NO: 218898 - DNA, 25 bp, Artificial
  Probe
gaattacaagcaggtgcttctgtgt

SEQ ID NO: 218899 - DNA, 25 bp, Artificial
  Probe
atttgaattacaagcaggtgcttct

SEQ ID NO: 218900 - DNA, 25 bp, Artificial
  Probe
ggactctattatgtctacacccaag

SEQ ID NO: 218901 - DNA, 25 bp, Artificial
  Probe
tcatcgtcagcctctggctgaagcc

SEQ ID NO: 218902 - DNA, 25 bp, Artificial
  Probe
agaatcttactcagggcagcgaata

SEQ ID NO: 218903 - DNA, 25 bp, Artificial
  Probe
cagagagaatcttactcagggcagc

SEQ ID NO: 218904 - DNA, 25 bp, Artificial
  Probe
ctcaactgtgaggagatgagaaggc

SEQ ID NO: 218905 - DNA, 25 bp, Artificial
  Probe
ctcagggcagcgaatacccacagtt

SEQ ID NO: 218906 - DNA, 25 bp, Artificial
  Probe
agggcagcgaatacccacagttcct

SEQ ID NO: 218907 - DNA, 25 bp, Artificial
  Probe
ccaagtcaccttctgctctaatcgg

SEQ ID NO: 218908 - DNA, 25 bp, Artificial
  Probe
caagccaagtgatccacggaattgg

SEQ ID NO: 218909 - DNA, 25 bp, Artificial
  Probe
aacggttgagccatttggatcccat

SEQ ID NO: 218910 - DNA, 25 bp, Artificial
  Probe
atcaacacgtcctgactgcactcga

SEQ ID NO: 218911 - DNA, 25 bp, Artificial
  Probe
cggttgagccatttggatcccatga

SEQ ID NO: 218912 - DNA, 25 bp, Artificial
  Probe
cagaggcagcacagctccatgcatt

SEQ ID NO: 218913 - DNA, 25 bp, Artificial
  Probe
ttgagccatttggatcccatgaacc

SEQ ID NO: 218914 - DNA, 25 bp, Artificial
  Probe
ccatgcattcgtgatctgctgggaa

SEQ ID NO: 218915 - DNA, 25 bp, Artificial
  Probe
gggaaaccaagctgcctaacaggaa

SEQ ID NO: 218916 - DNA, 25 bp, Artificial
  Probe
gagccatttggatcccatgaaccct

SEQ ID NO: 218917 - DNA, 25 bp, Artificial
  Probe
aagctgcctaacaggaaacggttga

SEQ ID NO: 218918 - DNA, 25 bp, Artificial
  Probe
gctccatgcattcgtgatctgctgg

SEQ ID NO: 218919 - DNA, 25 bp, Artificial
  Probe
aaccaagctgcctaacaggaaacgg

SEQ ID NO: 218920 - DNA, 25 bp, Artificial
  Probe
aggcagcacagctccatgcattcgt

SEQ ID NO: 218921 - DNA, 25 bp, Artificial
  Probe
ttggatcccatgaaccctcgggaat

SEQ ID NO: 218922 - DNA, 25 bp, Artificial
  Probe
tgcattcgtgatctgctgggaaacc

SEQ ID NO: 218923 - DNA, 25 bp, Artificial
  Probe
tcagtgtttctgttattaagacacc

SEQ ID NO: 218924 - DNA, 25 bp, Artificial
  Probe
cagtgtttctgttattaagacacct

SEQ ID NO: 218925 - DNA, 25 bp, Artificial
  Probe
cagcacagctccatgcattcgtgat

SEQ ID NO: 218926 - DNA, 25 bp, Artificial
  Probe
gttgagccatttggatcccatgaac

SEQ ID NO: 218927 - DNA, 25 bp, Artificial
  Probe
tgagccatttggatcccatgaaccc

SEQ ID NO: 218928 - DNA, 25 bp, Artificial
  Probe
catttggatcccatgaaccctcggg

SEQ ID NO: 218929 - DNA, 25 bp, Artificial
  Probe
accaagctgcctaacaggaaacggt

SEQ ID NO: 218930 - DNA, 25 bp, Artificial
  Probe
ccaagctgcctaacaggaaacggtt

SEQ ID NO: 218931 - DNA, 25 bp, Artificial
  Probe
gtcagtgtttctgttattaagacac

SEQ ID NO: 218932 - DNA, 25 bp, Artificial
  Probe
atgcattcgtgatctgctgggaaac

SEQ ID NO: 218933 - DNA, 25 bp, Artificial
  Probe
agctccatgcattcgtgatctgctg

SEQ ID NO: 218934 - DNA, 25 bp, Artificial
  Probe
ccagaggcagcacagctccatgcat

SEQ ID NO: 218935 - DNA, 25 bp, Artificial
  Probe
tcaacacgtcctgactgcactcgaa

SEQ ID NO: 218936 - DNA, 25 bp, Artificial
  Probe
aatgttcatcaacacgtcctgactg

SEQ ID NO: 218937 - DNA, 25 bp, Artificial
  Probe
gcacagctccatgcattcgtgatct

SEQ ID NO: 218938 - DNA, 25 bp, Artificial
  Probe
acagctccatgcattcgtgatctgc

SEQ ID NO: 218939 - DNA, 25 bp, Artificial
  Probe
cagctccatgcattcgtgatctgct

SEQ ID NO: 218940 - DNA, 25 bp, Artificial
  Probe
ggcagcacagctccatgcattcgtg

SEQ ID NO: 218941 - DNA, 25 bp, Artificial
  Probe
gaggcagcacagctccatgcattcg

SEQ ID NO: 218942 - DNA, 25 bp, Artificial
  Probe
ctgggaaaccaagctgcctaacagg

SEQ ID NO: 218943 - DNA, 25 bp, Artificial
  Probe
atgttcatcaacacgtcctgactgc

SEQ ID NO: 218944 - DNA, 25 bp, Artificial
  Probe
cacagctccatgcattcgtgatctg

SEQ ID NO: 218945 - DNA, 25 bp, Artificial
  Probe
cattcgtgatctgctgggaaaccaa

SEQ ID NO: 218946 - DNA, 25 bp, Artificial
  Probe
tggatcccatgaaccctcgggaatg

SEQ ID NO: 218947 - DNA, 25 bp, Artificial
  Probe
tgcccagaggcagcacagctccatg

SEQ ID NO: 218948 - DNA, 25 bp, Artificial
  Probe
ttcgtgatctgctgggaaaccaagc

SEQ ID NO: 218949 - DNA, 25 bp, Artificial
  Probe
gcattcgtgatctgctgggaaacca

SEQ ID NO: 218950 - DNA, 25 bp, Artificial
  Probe
tttggatcccatgaaccctcgggaa

SEQ ID NO: 218951 - DNA, 25 bp, Artificial
  Probe
acggttgagccatttggatcccatg

SEQ ID NO: 218952 - DNA, 25 bp, Artificial
  Probe
tcccatgaaccctcgggaatgaaga

SEQ ID NO: 218953 - DNA, 25 bp, Artificial
  Probe
gcctaacaggaaacggttgagccat

SEQ ID NO: 218954 - DNA, 25 bp, Artificial
  Probe
gctgcctaacaggaaacggttgagc

SEQ ID NO: 218955 - DNA, 25 bp, Artificial
  Probe
tttttaatcattgtgcacagaagca

SEQ ID NO: 218956 - DNA, 25 bp, Artificial
  Probe
actacaaagaagtcccccatgtgga

SEQ ID NO: 218957 - DNA, 25 bp, Artificial
  Probe
gtgtttcctcatcattgagtttggg

SEQ ID NO: 218958 - DNA, 25 bp, Artificial
  Probe
tgggctagctgtggatagcttgcat

SEQ ID NO: 218959 - DNA, 25 bp, Artificial
  Probe
agcctgctccagtgtttcctcatca

SEQ ID NO: 218960 - DNA, 25 bp, Artificial
  Probe
ttgtgcacagaagcatcattggtag

SEQ ID NO: 218961 - DNA, 25 bp, Artificial
  Probe
gtgcacagaagcatcattggtagct

SEQ ID NO: 218962 - DNA, 25 bp, Artificial
  Probe
gtttcctcatcattgagtttgggct

SEQ ID NO: 218963 - DNA, 25 bp, Artificial
  Probe
ctaagcctgctccagtgtttcctca

SEQ ID NO: 218964 - DNA, 25 bp, Artificial
  Probe
gtcccccatgtggatatttcttata

SEQ ID NO: 218965 - DNA, 25 bp, Artificial
  Probe
tgtttcctcatcattgagtttgggc

SEQ ID NO: 218966 - DNA, 25 bp, Artificial
  Probe
cactacaaagaagtcccccatgtgg

SEQ ID NO: 218967 - DNA, 25 bp, Artificial
  Probe
ctcatcattgagtttgggctagctg

SEQ ID NO: 218968 - DNA, 25 bp, Artificial
  Probe
catcattgagtttgggctagctgtg

SEQ ID NO: 218969 - DNA, 25 bp, Artificial
  Probe
gctccagtgtttcctcatcattgag

SEQ ID NO: 218970 - DNA, 25 bp, Artificial
  Probe
tcatcattgagtttgggctagctgt

SEQ ID NO: 218971 - DNA, 25 bp, Artificial
  Probe
ttaatcattgtgcacagaagcatca

SEQ ID NO: 218972 - DNA, 25 bp, Artificial
  Probe
cattgtgcacagaagcatcattggt

SEQ ID NO: 218973 - DNA, 25 bp, Artificial
  Probe
gaactaagcctgctccagtgtttcc

SEQ ID NO: 218974 - DNA, 25 bp, Artificial
  Probe
tttgggctagctgtggatagcttgc

SEQ ID NO: 218975 - DNA, 25 bp, Artificial
  Probe
agctgtttattcttccttgtaagaa

SEQ ID NO: 218976 - DNA, 25 bp, Artificial
  Probe
cagtgtttcctcatcattgagtttg

SEQ ID NO: 218977 - DNA, 25 bp, Artificial
  Probe
gaagtcccccatgtggatatttctt

SEQ ID NO: 218978 - DNA, 25 bp, Artificial
  Probe
acactacaaagaagtcccccatgtg

SEQ ID NO: 218979 - DNA, 25 bp, Artificial
  Probe
aagtcccccatgtggatatttctta

SEQ ID NO: 218980 - DNA, 25 bp, Artificial
  Probe
ctagctgtggatagcttgcattaat

SEQ ID NO: 218981 - DNA, 25 bp, Artificial
  Probe
tcattgtgcacagaagcatcattgg

SEQ ID NO: 218982 - DNA, 25 bp, Artificial
  Probe
agtgtttcctcatcattgagtttgg

SEQ ID NO: 218983 - DNA, 25 bp, Artificial
  Probe
ttcctcatcattgagtttgggctag

SEQ ID NO: 218984 - DNA, 25 bp, Artificial
  Probe
atcattgtgcacagaagcatcattg

SEQ ID NO: 218985 - DNA, 25 bp, Artificial
  Probe
aaagctgtttattcttccttgtaag

SEQ ID NO: 218986 - DNA, 25 bp, Artificial
  Probe
agtcccccatgtggatatttcttat

SEQ ID NO: 218987 - DNA, 25 bp, Artificial
  Probe
aatcattgtgcacagaagcatcatt

SEQ ID NO: 218988 - DNA, 25 bp, Artificial
  Probe
tttcctcatcattgagtttgggcta

SEQ ID NO: 218989 - DNA, 25 bp, Artificial
  Probe
ttgggctagctgtggatagcttgca

SEQ ID NO: 218990 - DNA, 25 bp, Artificial
  Probe
aagcctgctccagtgtttcctcatc

SEQ ID NO: 218991 - DNA, 25 bp, Artificial
  Probe
cctcatcattgagtttgggctagct

SEQ ID NO: 218992 - DNA, 25 bp, Artificial
  Probe
agaagtcccccatgtggatatttct

SEQ ID NO: 218993 - DNA, 25 bp, Artificial
  Probe
gctgtttattcttccttgtaagaat

SEQ ID NO: 218994 - DNA, 25 bp, Artificial
  Probe
ggaactaagcctgctccagtgtttc

SEQ ID NO: 218995 - DNA, 25 bp, Artificial
  Probe
ctgctccagtgtttcctcatcattg

SEQ ID NO: 218996 - DNA, 25 bp, Artificial
  Probe
ggctagctgtggatagcttgcatta

SEQ ID NO: 218997 - DNA, 25 bp, Artificial
  Probe
gggctagctgtggatagcttgcatt

SEQ ID NO: 218998 - DNA, 25 bp, Artificial
  Probe
aactaagcctgctccagtgtttcct

SEQ ID NO: 218999 - DNA, 25 bp, Artificial
  Probe
gcctgctccagtgtttcctcatcat

SEQ ID NO: 219000 - DNA, 25 bp, Artificial
  Probe
taatcattgtgcacagaagcatcat

SEQ ID NO: 219001 - DNA, 25 bp, Artificial
  Probe
catgtgacctatagcccagtgccta

SEQ ID NO: 219002 - DNA, 25 bp, Artificial
  Probe
tccgcttttgcatcgctacgtgcag

SEQ ID NO: 219003 - DNA, 25 bp, Artificial
  Probe
gggacaccaatgtccgcttttgcat

SEQ ID NO: 219004 - DNA, 25 bp, Artificial
  Probe
aggtgactgcggtaacaacaggaat

SEQ ID NO: 219005 - DNA, 25 bp, Artificial
  Probe
cttctcggaaactgcaaaatccaag

SEQ ID NO: 219006 - DNA, 25 bp, Artificial
  Probe
ttcactgtaagctcggaagggcatc

SEQ ID NO: 219007 - DNA, 25 bp, Artificial
  Probe
taaccacatttcaggggacaccaat

SEQ ID NO: 219008 - DNA, 25 bp, Artificial
  Probe
ggcgttgttcagtgggctctttcga

SEQ ID NO: 219009 - DNA, 25 bp, Artificial
  Probe
gctcggaagggcatccgcgatgcca

SEQ ID NO: 219010 - DNA, 25 bp, Artificial
  Probe
acatttcaggggacaccaatgtccg

SEQ ID NO: 219011 - DNA, 25 bp, Artificial
  Probe
ctgtaagctcggaagggcatccgcg

SEQ ID NO: 219012 - DNA, 25 bp, Artificial
  Probe
ctacgtgcagcgagcacaggaaaaa

SEQ ID NO: 219013 - DNA, 25 bp, Artificial
  Probe
gctttcactgtaagctcggaagggc

SEQ ID NO: 219014 - DNA, 25 bp, Artificial
  Probe
caagcaggtgactgcggtaacaaca

SEQ ID NO: 219015 - DNA, 25 bp, Artificial
  Probe
ttcgtttgggtaatcagaagccagt

SEQ ID NO: 219016 - DNA, 25 bp, Artificial
  Probe
gattcttctcggaaactgcaaaatc

SEQ ID NO: 219017 - DNA, 25 bp, Artificial
  Probe
gccatgccaggcttttctcaggagc

SEQ ID NO: 219018 - DNA, 25 bp, Artificial
  Probe
tagcccagtgcctagagcatattag

SEQ ID NO: 219019 - DNA, 25 bp, Artificial
  Probe
ttctccttaccctgtggtggattct

SEQ ID NO: 219020 - DNA, 25 bp, Artificial
  Probe
tacagacacaagcaggtgactgcgg

SEQ ID NO: 219021 - DNA, 25 bp, Artificial
  Probe
ctgctttcactgtaagctgggaagg

SEQ ID NO: 219022 - DNA, 25 bp, Artificial
  Probe
tgtaagctcggaagggcatccgcga

SEQ ID NO: 219023 - DNA, 25 bp, Artificial
  Probe
atattagcataaccacatttcaggg

SEQ ID NO: 219024 - DNA, 25 bp, Artificial
  Probe
accaatgtccgcttttgcatcgcta

SEQ ID NO: 219025 - DNA, 25 bp, Artificial
  Probe
ctcggaagggcatccgcgatgccat

SEQ ID NO: 219026 - DNA, 25 bp, Artificial
  Probe
tgttcagtgggctctttcgatggac

SEQ ID NO: 219027 - DNA, 25 bp, Artificial
  Probe
caggaatcatgtacagcctgctttc

SEQ ID NO: 219028 - DNA, 25 bp, Artificial
  Probe
tgcctagagcatattagcataacca

SEQ ID NO: 219029 - DNA, 25 bp, Artificial
  Probe
gacctatagcccagtgcctagagca

SEQ ID NO: 219030 - DNA, 25 bp, Artificial
  Probe
ggtggattcttctcggaaactgcaa

SEQ ID NO: 219031 - DNA, 25 bp, Artificial
  Probe
gatgctggcactaggcgttgttcag

SEQ ID NO: 219032 - DNA, 25 bp, Artificial
  Probe
tccgcgatgccatgccaggcttttc

SEQ ID NO: 219033 - DNA, 25 bp, Artificial
  Probe
cgatgccatgccaggcttttctcag

SEQ ID NO: 219034 - DNA, 25 bp, Artificial
  Probe
caagatgctggcactaggcgttgtt

SEQ ID NO: 219035 - DNA, 25 bp, Artificial
  Probe
gcatcgctacgtgcagcgagcacag

SEQ ID NO: 219036 - DNA, 25 bp, Artificial
  Probe
ggaatcatgtacagcctgctttctt

SEQ ID NO: 219037 - DNA, 25 bp, Artificial
  Probe
aatccaagatgctggcactaggcgt

SEQ ID NO: 219038 - DNA, 25 bp, Artificial
  Probe
gggcatccgcgatgccatgccaggc

SEQ ID NO: 219039 - DNA, 25 bp, Artificial
  Probe
agggcatccgcgatgccatgccagg

SEQ ID NO: 219040 - DNA, 25 bp, Artificial
  Probe
gcactaggcgttgttcagtgggctc

SEQ ID NO: 219041 - DNA, 25 bp, Artificial
  Probe
cttttgcatcgctacgtgcagcgag

SEQ ID NO: 219042 - DNA, 25 bp, Artificial
  Probe
atccgcgatgccatgccaggctttt

SEQ ID NO: 219043 - DNA, 25 bp, Artificial
  Probe
tctcaggagcttcaatgagcatcac

SEQ ID NO: 219044 - DNA, 25 bp, Artificial
  Probe
ttttgcatcgctacgtgcagcgagc

SEQ ID NO: 219045 - DNA, 25 bp, Artificial
  Probe
actgcggtaacaacaggaatcatgt

SEQ ID NO: 219046 - DNA, 25 bp, Artificial
  Probe
gtaacaacaggaatcatgtacagcc

SEQ ID NO: 219047 - DNA, 25 bp, Artificial
  Probe
agcaccagcactcgaggacacagag

SEQ ID NO: 219048 - DNA, 25 bp, Artificial
  Probe
ccagcagatggtacagcagccttca

SEQ ID NO: 219049 - DNA, 25 bp, Artificial
  Probe
agcgctgcccagcagatggtacagc

SEQ ID NO: 219050 - DNA, 25 bp, Artificial
  Probe
gcgctgcccagcagatggtacagca

SEQ ID NO: 219051 - DNA, 25 bp, Artificial
  Probe
cgagcaccagcactcgaggacacag

SEQ ID NO: 219052 - DNA, 25 bp, Artificial
  Probe
ccttggacccaccagtgagcgagga

SEQ ID NO: 219053 - DNA, 25 bp, Artificial
  Probe
gacccaccagtgagcgaggagcgat

SEQ ID NO: 219054 - DNA, 25 bp, Artificial
  Probe
actcgaggacacagaggaagagaga

SEQ ID NO: 219055 - DNA, 25 bp, Artificial
  Probe
gcccggctgggaaagggtaccatat

SEQ ID NO: 219056 - DNA, 25 bp, Artificial
  Probe
cagcgctgcccagcagatggtacag

SEQ ID NO: 219057 - DNA, 25 bp, Artificial
  Probe
gctgcccagcagatggtacagcagc

SEQ ID NO: 219058 - DNA, 25 bp, Artificial
  Probe
cactcgaggacacagaggaagagag

SEQ ID NO: 219059 - DNA, 25 bp, Artificial
  Probe
agccgagcaccagcactcgaggaca

SEQ ID NO: 219060 - DNA, 25 bp, Artificial
  Probe
tgcccagcagatggtacagcagcct

SEQ ID NO: 219061 - DNA, 25 bp, Artificial
  Probe
aggagtgaccttggacccaccagtg

SEQ ID NO: 219062 - DNA, 25 bp, Artificial
  Probe
gcaccagcactcgaggacacagagg

SEQ ID NO: 219063 - DNA, 25 bp, Artificial
  Probe
tgcccggctgggaaagggtaccata

SEQ ID NO: 219064 - DNA, 25 bp, Artificial
  Probe
ctgcccagcagatggtacagcagcc

SEQ ID NO: 219065 - DNA, 25 bp, Artificial
  Probe
ccagcgctgcccagcagatggtaca

SEQ ID NO: 219066 - DNA, 25 bp, Artificial
  Probe
ggagtgaccttggacccaccagtga

SEQ ID NO: 219067 - DNA, 25 bp, Artificial
  Probe
gaccttggacccaccagtgagcgag

SEQ ID NO: 219068 - DNA, 25 bp, Artificial
  Probe
tgaaagtgatttctccctcttcctg

SEQ ID NO: 219069 - DNA, 25 bp, Artificial
  Probe
gcactcgaggacacagaggaagaga

SEQ ID NO: 219070 - DNA, 25 bp, Artificial
  Probe
caccatccagggtgaaagtgatttc

SEQ ID NO: 219071 - DNA, 25 bp, Artificial
  Probe
gaaagtgatttctccctcttcctgc

SEQ ID NO: 219072 - DNA, 25 bp, Artificial
  Probe
ccatccagggtgaaagtgatttctc

SEQ ID NO: 219073 - DNA, 25 bp, Artificial
  Probe
agcgatcggtgcaacagagccaccc

SEQ ID NO: 219074 - DNA, 25 bp, Artificial
  Probe
cagatggtacagcagccttcaagga

SEQ ID NO: 219075 - DNA, 25 bp, Artificial
  Probe
cagcactcgaggacacagaggaaga

SEQ ID NO: 219076 - DNA, 25 bp, Artificial
  Probe
agatggtacagcagccttcaaggag

SEQ ID NO: 219077 - DNA, 25 bp, Artificial
  Probe
gctctgctgctgcagtgtgggtaaa

SEQ ID NO: 219078 - DNA, 25 bp, Artificial
  Probe
acgccagctctgctgctgcagtgtg

SEQ ID NO: 219079 - DNA, 25 bp, Artificial
  Probe
ttggacccaccagtgagcgaggagc

SEQ ID NO: 219080 - DNA, 25 bp, Artificial
  Probe
gcagatggtacagcagccttcaagg

SEQ ID NO: 219081 - DNA, 25 bp, Artificial
  Probe
aggagcgatcggtgcaacagagcca

SEQ ID NO: 219082 - DNA, 25 bp, Artificial
  Probe
ggccttacccagagctgatctctcg

SEQ ID NO: 219083 - DNA, 25 bp, Artificial
  Probe
gaaagggtaccatatcctcacctcc

SEQ ID NO: 219084 - DNA, 25 bp, Artificial
  Probe
cgccagctctgctgctgcagtgtgg

SEQ ID NO: 219085 - DNA, 25 bp, Artificial
  Probe
cccagcagatggtacagcagccttc

SEQ ID NO: 219086 - DNA, 25 bp, Artificial
  Probe
gagtgaccttggacccaccagtgag

SEQ ID NO: 219087 - DNA, 25 bp, Artificial
  Probe
ccagcactcgaggacacagaggaag

SEQ ID NO: 219088 - DNA, 25 bp, Artificial
  Probe
accagcactcgaggacacagaggaa

SEQ ID NO: 219089 - DNA, 25 bp, Artificial
  Probe
ccagctctgctgctgcagtgtgggt

SEQ ID NO: 219090 - DNA, 25 bp, Artificial
  Probe
accttggacccaccagtgagcgagg

SEQ ID NO: 219091 - DNA, 25 bp, Artificial
  Probe
ctctgctgctgcagtgtgggtaaag

SEQ ID NO: 219092 - DNA, 25 bp, Artificial
  Probe
gagcaccagcactcgaggacacaga

SEQ ID NO: 219093 - DNA, 25 bp, Artificial
  Probe
tgttcaaagagtaccgtgcaccagt

SEQ ID NO: 219094 - DNA, 25 bp, Artificial
  Probe
cttgtgtgtcctgtctggtgcccgc

SEQ ID NO: 219095 - DNA, 25 bp, Artificial
  Probe
tcatgcgaagccacctcagagaagg

SEQ ID NO: 219096 - DNA, 25 bp, Artificial
  Probe
tacccttgttaattgccctttggca

SEQ ID NO: 219097 - DNA, 25 bp, Artificial
  Probe
agagtaccgtgcaccagtgcaccag

SEQ ID NO: 219098 - DNA, 25 bp, Artificial
  Probe
catacctggtgctgtccctgggctc

SEQ ID NO: 219099 - DNA, 25 bp, Artificial
  Probe
aactcccacatcatacctggtgctg

SEQ ID NO: 219100 - DNA, 25 bp, Artificial
  Probe
ccacctcagagaaggaaacagaggg

SEQ ID NO: 219101 - DNA, 25 bp, Artificial
  Probe
atgcgaagccacctcagagaaggaa

SEQ ID NO: 219102 - DNA, 25 bp, Artificial
  Probe
ggcaactaacttaatcatgtgcttc

SEQ ID NO: 219103 - DNA, 25 bp, Artificial
  Probe
gccctgttcaaagagtaccgtgcac

SEQ ID NO: 219104 - DNA, 25 bp, Artificial
  Probe
cacatcatacctggtgctgtccctg

SEQ ID NO: 219105 - DNA, 25 bp, Artificial
  Probe
ccactcttgtgtgtcctgtctggtg

SEQ ID NO: 219106 - DNA, 25 bp, Artificial
  Probe
ctgggctctgctggtcatgcgaagc

SEQ ID NO: 219107 - DNA, 25 bp, Artificial
  Probe
gcgaagccacctcagagaaggaaac

SEQ ID NO: 219108 - DNA, 25 bp, Artificial
  Probe
gagtaccgtgcaccagtgcaccagc

SEQ ID NO: 219109 - DNA, 25 bp, Artificial
  Probe
ccatccgtggacagccctgttcaaa

SEQ ID NO: 219110 - DNA, 25 bp, Artificial
  Probe
cacctcagagaaggaaacagagggt

SEQ ID NO: 219111 - DNA, 25 bp, Artificial
  Probe
ttggcaactaacttaatcatgtgct

SEQ ID NO: 219112 - DNA, 25 bp, Artificial
  Probe
cagccctgttcaaagagtaccgtgc

SEQ ID NO: 219113 - DNA, 25 bp, Artificial
  Probe
ctggtcatgcgaagccacctcagag

SEQ ID NO: 219114 - DNA, 25 bp, Artificial
  Probe
gctctgctggtcatgcgaagccacc

SEQ ID NO: 219115 - DNA, 25 bp, Artificial
  Probe
actcccacatcatacctggtgctgt

SEQ ID NO: 219116 - DNA, 25 bp, Artificial
  Probe
agccacctcagagaaggaaacagag

SEQ ID NO: 219117 - DNA, 25 bp, Artificial
  Probe
ctgtccctgggctctgctggtcatg

SEQ ID NO: 219118 - DNA, 25 bp, Artificial
  Probe
gaagccacctcagagaaggaaacag

SEQ ID NO: 219119 - DNA, 25 bp, Artificial
  Probe
ttgtgtgtcctgtctggtgcccgcc

SEQ ID NO: 219120 - DNA, 25 bp, Artificial
  Probe
actcttgtgtgtcctgtctggtgcc

SEQ ID NO: 219121 - DNA, 25 bp, Artificial
  Probe
tgtccctgggctctgctggtcatgc

SEQ ID NO: 219122 - DNA, 25 bp, Artificial
  Probe
gacagccctgttcaaagagtaccgt

SEQ ID NO: 219123 - DNA, 25 bp, Artificial
  Probe
acatcatacctggtgctgtccctgg

SEQ ID NO: 219124 - DNA, 25 bp, Artificial
  Probe
ctctgctggtcatgcgaagccacct

SEQ ID NO: 219125 - DNA, 25 bp, Artificial
  Probe
gctggtcatgcgaagccacctcaga

SEQ ID NO: 219126 - DNA, 25 bp, Artificial
  Probe
caaagagtaccgtgcaccagtgcac

SEQ ID NO: 219127 - DNA, 25 bp, Artificial
  Probe
ctttggcaactaacttaatcatgtg

SEQ ID NO: 219128 - DNA, 25 bp, Artificial
  Probe
taggcaatacccttgttaattgccc

SEQ ID NO: 219129 - DNA, 25 bp, Artificial
  Probe
cgtggacagccctgttcaaagagta

SEQ ID NO: 219130 - DNA, 25 bp, Artificial
  Probe
ggcaatacccttgttaattgccctt

SEQ ID NO: 219131 - DNA, 25 bp, Artificial
  Probe
tcttgtgtgtcctgtctggtgcccg

SEQ ID NO: 219132 - DNA, 25 bp, Artificial
  Probe
cctgggctctgctggtcatgcgaag

SEQ ID NO: 219133 - DNA, 25 bp, Artificial
  Probe
atcatacctggtgctgtccctgggc

SEQ ID NO: 219134 - DNA, 25 bp, Artificial
  Probe
tacctggtgctgtccctgggctctg

SEQ ID NO: 219135 - DNA, 25 bp, Artificial
  Probe
tccatccgtggacagccctgttcaa

SEQ ID NO: 219136 - DNA, 25 bp, Artificial
  Probe
aagagtaccgtgcaccagtgcacca

SEQ ID NO: 219137 - DNA, 25 bp, Artificial
  Probe
aagccacctcagagaaggaaacaga

SEQ ID NO: 219138 - DNA, 25 bp, Artificial
  Probe
tggacagccctgttcaaagagtacc

SEQ ID NO: 219139 - DNA, 25 bp, Artificial
  Probe
gggcggatccagagtctgaacccgt

SEQ ID NO: 219140 - DNA, 25 bp, Artificial
  Probe
gcaccgaagataccatctctccgga

SEQ ID NO: 219141 - DNA, 25 bp, Artificial
  Probe
ttggaccactgcaccgaagatacca

SEQ ID NO: 219142 - DNA, 25 bp, Artificial
  Probe
cacgcagctggcatcctgaccatgg

SEQ ID NO: 219143 - DNA, 25 bp, Artificial
  Probe
gtctgaacccgtcttctatccctgt

SEQ ID NO: 219144 - DNA, 25 bp, Artificial
  Probe
ggtatttggaccactgcaccgaaga

SEQ ID NO: 219145 - DNA, 25 bp, Artificial
  Probe
gttgcacggagctggcaaccacgcc

SEQ ID NO: 219146 - DNA, 25 bp, Artificial
  Probe
cggtaaccacgcagctggcatcctg

SEQ ID NO: 219147 - DNA, 25 bp, Artificial
  Probe
tccttgggtatttggaccactgcac

SEQ ID NO: 219148 - DNA, 25 bp, Artificial
  Probe
tccagagtctgaacccgtcttctat

SEQ ID NO: 219149 - DNA, 25 bp, Artificial
  Probe
ccaacggtaaccacgcagctggcat

SEQ ID NO: 219150 - DNA, 25 bp, Artificial
  Probe
gcaggcgcagagctagagccatatc

SEQ ID NO: 219151 - DNA, 25 bp, Artificial
  Probe
cctcagactccttgggtatttggac

SEQ ID NO: 219152 - DNA, 25 bp, Artificial
  Probe
agctggcatcctgaccatgggccgc

SEQ ID NO: 219153 - DNA, 25 bp, Artificial
  Probe
gccaacggtaaccacgcagctggca

SEQ ID NO: 219154 - DNA, 25 bp, Artificial
  Probe
caggcgcagagctagagccatatcc

SEQ ID NO: 219155 - DNA, 25 bp, Artificial
  Probe
ctgagctccagacaccatgaacctt

SEQ ID NO: 219156 - DNA, 25 bp, Artificial
  Probe
gcctcagactccttgggtatttgga

SEQ ID NO: 219157 - DNA, 25 bp, Artificial
  Probe
ggccaacggtaaccacgcagctggc

SEQ ID NO: 219158 - DNA, 25 bp, Artificial
  Probe
tttggaccactgcaccgaagatacc

SEQ ID NO: 219159 - DNA, 25 bp, Artificial
  Probe
cgcgcaggcgcagagctagagccat

SEQ ID NO: 219160 - DNA, 25 bp, Artificial
  Probe
gtatttggaccactgcaccgaagat

SEQ ID NO: 219161 - DNA, 25 bp, Artificial
  Probe
actgttgcacggagctggcaaccac

SEQ ID NO: 219162 - DNA, 25 bp, Artificial
  Probe
atccagagtctgaacccgtcttcta

SEQ ID NO: 219163 - DNA, 25 bp, Artificial
  Probe
agactccttgggtatttggaccact

SEQ ID NO: 219164 - DNA, 25 bp, Artificial
  Probe
gatccagagtctgaacccgtcttct

SEQ ID NO: 219165 - DNA, 25 bp, Artificial
  Probe
tcaggccaacggtaaccacgcagct

SEQ ID NO: 219166 - DNA, 25 bp, Artificial
  Probe
agtctgaacccgtcttctatccctg

SEQ ID NO: 219167 - DNA, 25 bp, Artificial
  Probe
ccgcgcaggcgcagagctagagcca

SEQ ID NO: 219168 - DNA, 25 bp, Artificial
  Probe
acgaactgttgcacggagctggcaa

SEQ ID NO: 219169 - DNA, 25 bp, Artificial
  Probe
tgttgcacggagctggcaaccacgc

SEQ ID NO: 219170 - DNA, 25 bp, Artificial
  Probe
gccagaagacgtgttcctgccgtct

SEQ ID NO: 219171 - DNA, 25 bp, Artificial
  Probe
tgagctccagacaccatgaaccttc

SEQ ID NO: 219172 - DNA, 25 bp, Artificial
  Probe
ccttgggtatttggaccactgcacc

SEQ ID NO: 219173 - DNA, 25 bp, Artificial
  Probe
gtaaccacgcagctggcatcctgac

SEQ ID NO: 219174 - DNA, 25 bp, Artificial
  Probe
cgccagaagacgtgttcctgccgtc

SEQ ID NO: 219175 - DNA, 25 bp, Artificial
  Probe
cggatccagagtctgaacccgtctt

SEQ ID NO: 219176 - DNA, 25 bp, Artificial
  Probe
tgcaccgaagataccatctctccgg

SEQ ID NO: 219177 - DNA, 25 bp, Artificial
  Probe
aggcgcagagctagagccatatccc

SEQ ID NO: 219178 - DNA, 25 bp, Artificial
  Probe
aggccaacggtaaccacgcagctgg

SEQ ID NO: 219179 - DNA, 25 bp, Artificial
  Probe
gcagctggcatcctgaccatgggcc

SEQ ID NO: 219180 - DNA, 25 bp, Artificial
  Probe
gtccctaggcaataaagacgtttct

SEQ ID NO: 219181 - DNA, 25 bp, Artificial
  Probe
cagctggcatcctgaccatgggccg

SEQ ID NO: 219182 - DNA, 25 bp, Artificial
  Probe
tgggtatttggaccactgcaccgaa

SEQ ID NO: 219183 - DNA, 25 bp, Artificial
  Probe
ggcgcagagctagagccatatccct

SEQ ID NO: 219184 - DNA, 25 bp, Artificial
  Probe
cttgggtatttggaccactgcaccg

SEQ ID NO: 219185 - DNA, 25 bp, Artificial
  Probe
gaggagaagccacactccctgcctc

SEQ ID NO: 219186 - DNA, 25 bp, Artificial
  Probe
gatcctctagagtctcgcgaagcac

SEQ ID NO: 219187 - DNA, 25 bp, Artificial
  Probe
tcagcaagacctggtggtgggtatc

SEQ ID NO: 219188 - DNA, 25 bp, Artificial
  Probe
cctctagagtctcgcgaagcactag

SEQ ID NO: 219189 - DNA, 25 bp, Artificial
  Probe
tcctctagagtctcgcgaagcacta

SEQ ID NO: 219190 - DNA, 25 bp, Artificial
  Probe
ctctagagtctcgcgaagcactaga

SEQ ID NO: 219191 - DNA, 25 bp, Artificial
  Probe
cttgaggcagtctggaagaagcccg

SEQ ID NO: 219192 - DNA, 25 bp, Artificial
  Probe
tcgcgaagcactagaatgttctcga

SEQ ID NO: 219193 - DNA, 25 bp, Artificial
  Probe
tctcgcgaagcactagaatgttctc

SEQ ID NO: 219194 - DNA, 25 bp, Artificial
  Probe
gaagaagcccggataccccctgtcg

SEQ ID NO: 219195 - DNA, 25 bp, Artificial
  Probe
aggagaagccacactccctgcctct

SEQ ID NO: 219196 - DNA, 25 bp, Artificial
  Probe
ggagaagccacactccctgcctcta

SEQ ID NO: 219197 - DNA, 25 bp, Artificial
  Probe
tagagtctcgcgaagcactagaatg

SEQ ID NO: 219198 - DNA, 25 bp, Artificial
  Probe
gcttgaggcagtctggaagaagccc

SEQ ID NO: 219199 - DNA, 25 bp, Artificial
  Probe
tctcagcaagacctggtggtgggta

SEQ ID NO: 219200 - DNA, 25 bp, Artificial
  Probe
ctcagcaagacctggtggtgggtat

SEQ ID NO: 219201 - DNA, 25 bp, Artificial
  Probe
gaagcactagaatgttctcgaggcc

SEQ ID NO: 219202 - DNA, 25 bp, Artificial
  Probe
ggggatcctctagagtctcgcgaag

SEQ ID NO: 219203 - DNA, 25 bp, Artificial
  Probe
tctagagtctcgcgaagcactagaa

SEQ ID NO: 219204 - DNA, 25 bp, Artificial
  Probe
cagtctggaagaagcccggataccc

SEQ ID NO: 219205 - DNA, 25 bp, Artificial
  Probe
agcttgaggcagtctggaagaagcc

SEQ ID NO: 219206 - DNA, 25 bp, Artificial
  Probe
ggatcctctagagtctcgcgaagca

SEQ ID NO: 219207 - DNA, 25 bp, Artificial
  Probe
ttgaggcagtctggaagaagcccgg

SEQ ID NO: 219208 - DNA, 25 bp, Artificial
  Probe
accgccatctctcagcaagacctgg

SEQ ID NO: 219209 - DNA, 25 bp, Artificial
  Probe
gggagcttgaggcagtctggaagaa

SEQ ID NO: 219210 - DNA, 25 bp, Artificial
  Probe
tgaggcagtctggaagaagcccgga

SEQ ID NO: 219211 - DNA, 25 bp, Artificial
  Probe
tggaagaagcccggataccccctgt

SEQ ID NO: 219212 - DNA, 25 bp, Artificial
  Probe
gagcttgaggcagtctggaagaagc

SEQ ID NO: 219213 - DNA, 25 bp, Artificial
  Probe
gcagtctggaagaagcccggatacc

SEQ ID NO: 219214 - DNA, 25 bp, Artificial
  Probe
gagtctcgcgaagcactagaatgtt

SEQ ID NO: 219215 - DNA, 25 bp, Artificial
  Probe
atcctctagagtctcgcgaagcact

SEQ ID NO: 219216 - DNA, 25 bp, Artificial
  Probe
aagcactagaatgttctcgaggcct

SEQ ID NO: 219217 - DNA, 25 bp, Artificial
  Probe
ctcgcgaagcactagaatgttctcg

SEQ ID NO: 219218 - DNA, 25 bp, Artificial
  Probe
gtctcgcgaagcactagaatgttct

SEQ ID NO: 219219 - DNA, 25 bp, Artificial
  Probe
gggatcctctagagtctcgcgaagc

SEQ ID NO: 219220 - DNA, 25 bp, Artificial
  Probe
ccgccatctctcagcaagacctggt

SEQ ID NO: 219221 - DNA, 25 bp, Artificial
  Probe
agtctcgcgaagcactagaatgttc

SEQ ID NO: 219222 - DNA, 25 bp, Artificial
  Probe
ctagagtctcgcgaagcactagaat

SEQ ID NO: 219223 - DNA, 25 bp, Artificial
  Probe
tctccacagtgtctgtgaattgtga

SEQ ID NO: 219224 - DNA, 25 bp, Artificial
  Probe
ggagcttgaggcagtctggaagaag

SEQ ID NO: 219225 - DNA, 25 bp, Artificial
  Probe
agagtctcgcgaagcactagaatgt

SEQ ID NO: 219226 - DNA, 25 bp, Artificial
  Probe
ctgcgcagacgcagcgctaagagta

SEQ ID NO: 219227 - DNA, 25 bp, Artificial
  Probe
gaaaggcctcaagtgacatttataa

SEQ ID NO: 219228 - DNA, 25 bp, Artificial
  Probe
cctaggcagctgtggtcacagggaa

SEQ ID NO: 219229 - DNA, 25 bp, Artificial
  Probe
gtttcttatctgtttcccagctaag

SEQ ID NO: 219230 - DNA, 25 bp, Artificial
  Probe
tgtctgtcctcaagcctaggcagct

SEQ ID NO: 219231 - DNA, 25 bp, Artificial
  Probe
aagtctaatgtctggagattactcg

SEQ ID NO: 219232 - DNA, 25 bp, Artificial
  Probe
aacccccaggtagcttctgtagaca

SEQ ID NO: 219233 - DNA, 25 bp, Artificial
  Probe
taaagacacagaagtcaggtcccgg

SEQ ID NO: 219234 - DNA, 25 bp, Artificial
  Probe
caaagaagcatctcttgtgttcgat

SEQ ID NO: 219235 - DNA, 25 bp, Artificial
  Probe
ctgtagacagactgcgcagacgcag

SEQ ID NO: 219236 - DNA, 25 bp, Artificial
  Probe
aggtagcttctgtagacagactgcg

SEQ ID NO: 219237 - DNA, 25 bp, Artificial
  Probe
tataaagacacagaagtcaggtccc

SEQ ID NO: 219238 - DNA, 25 bp, Artificial
  Probe
cctccatgagcgtcagctgactgtt

SEQ ID NO: 219239 - DNA, 25 bp, Artificial
  Probe
agcagcctccatgagcgtcagctga

SEQ ID NO: 219240 - DNA, 25 bp, Artificial
  Probe
tgttctcaccgtagccctcacgtag

SEQ ID NO: 219241 - DNA, 25 bp, Artificial
  Probe
tcaagcctaggcagctgtggtcaca

SEQ ID NO: 219242 - DNA, 25 bp, Artificial
  Probe
gtttcccagctaagtcataatacag

SEQ ID NO: 219243 - DNA, 25 bp, Artificial
  Probe
tagtcaaagaagcatctcttgtgtt

SEQ ID NO: 219244 - DNA, 25 bp, Artificial
  Probe
ctgactgttgccaggaaataaaccc

SEQ ID NO: 219245 - DNA, 25 bp, Artificial
  Probe
tgccaggaaataaaccctcatgaat

SEQ ID NO: 219246 - DNA, 25 bp, Artificial
  Probe
agcgtcagctgactgttgccaggaa

SEQ ID NO: 219247 - DNA, 25 bp, Artificial
  Probe
tgacaacgcgcctggcagcagcatc

SEQ ID NO: 219248 - DNA, 25 bp, Artificial
  Probe
agagtagaccggttgtgttctcacc

SEQ ID NO: 219249 - DNA, 25 bp, Artificial
  Probe
gtgttctcaccgtagccctcacgta

SEQ ID NO: 219250 - DNA, 25 bp, Artificial
  Probe
aagcctaggcagctgtggtcacagg

SEQ ID NO: 219251 - DNA, 25 bp, Artificial
  Probe
agctgtggtcacagggaagtctaat

SEQ ID NO: 219252 - DNA, 25 bp, Artificial
  Probe
gaggattccttcacagccaggcccg

SEQ ID NO: 219253 - DNA, 25 bp, Artificial
  Probe
acagaagtcaggtcccggtggtgtc

SEQ ID NO: 219254 - DNA, 25 bp, Artificial
  Probe
gactgttgccaggaaataaaccctc

SEQ ID NO: 219255 - DNA, 25 bp, Artificial
  Probe
gccaggaaataaaccctcatgaatt

SEQ ID NO: 219256 - DNA, 25 bp, Artificial
  Probe
gtcctcaagcctaggcagctgtggt

SEQ ID NO: 219257 - DNA, 25 bp, Artificial
  Probe
caccgaggattccttcacagccagg

SEQ ID NO: 219258 - DNA, 25 bp, Artificial
  Probe
cagactgcgcagacgcagcgctaag

SEQ ID NO: 219259 - DNA, 25 bp, Artificial
  Probe
cagacgcagcgctaagagtagaccg

SEQ ID NO: 219260 - DNA, 25 bp, Artificial
  Probe
gtcaggtcccggtggtgtctgtcct

SEQ ID NO: 219261 - DNA, 25 bp, Artificial
  Probe
gacagactgcgcagacgcagcgcta

SEQ ID NO: 219262 - DNA, 25 bp, Artificial
  Probe
ccagctaagtcataatacagggtag

SEQ ID NO: 219263 - DNA, 25 bp, Artificial
  Probe
ggttgtgttctcaccgtagccctca

SEQ ID NO: 219264 - DNA, 25 bp, Artificial
  Probe
catctcttgtgttcgatgaaagatg

SEQ ID NO: 219265 - DNA, 25 bp, Artificial
  Probe
ggtagaaaggcctcaagtgacattt

SEQ ID NO: 219266 - DNA, 25 bp, Artificial
  Probe
cgctaagagtagaccggttgtgttc

SEQ ID NO: 219267 - DNA, 25 bp, Artificial
  Probe
gcagcctccatgagcgtcagctgac

SEQ ID NO: 219268 - DNA, 25 bp, Artificial
  Probe
catgagcgtcagctgactgttgcca

SEQ ID NO: 219269 - DNA, 25 bp, Artificial
  Probe
tagaaaggcctcaagtgacatttat

SEQ ID NO: 219270 - DNA, 25 bp, Artificial
  Probe
tcagctgactgttgccaggaaataa

SEQ ID NO: 219271 - DNA, 25 bp, Artificial
  Probe
gcagctgtggtcacagggaagtcta

SEQ ID NO: 219272 - DNA, 25 bp, Artificial
  Probe
agcccaggaggaaaagcagggtcct

SEQ ID NO: 219273 - DNA, 25 bp, Artificial
  Probe
gcatagcaccatagggccagggagc

SEQ ID NO: 219274 - DNA, 25 bp, Artificial
  Probe
aagccctatgtctcatggccgtcct

SEQ ID NO: 219275 - DNA, 25 bp, Artificial
  Probe
aaggcctggaccagccagcctgcga

SEQ ID NO: 219276 - DNA, 25 bp, Artificial
  Probe
tcagagacccggaactgagatccaa

SEQ ID NO: 219277 - DNA, 25 bp, Artificial
  Probe
caagactgagctgaccctccagtgt

SEQ ID NO: 219278 - DNA, 25 bp, Artificial
  Probe
cagggagccagatggccccaacatc

SEQ ID NO: 219279 - DNA, 25 bp, Artificial
  Probe
catccaggaacaagccctatgtctc

SEQ ID NO: 219280 - DNA, 25 bp, Artificial
  Probe
agatgctcagagacccggaactgag

SEQ ID NO: 219281 - DNA, 25 bp, Artificial
  Probe
aggaacaagccctatgtctcatggc

SEQ ID NO: 219282 - DNA, 25 bp, Artificial
  Probe
ctgagcctggagtgcctgtgcctct

SEQ ID NO: 219283 - DNA, 25 bp, Artificial
  Probe
cccgaccaggattttgacaaagagc

SEQ ID NO: 219284 - DNA, 25 bp, Artificial
  Probe
gtctgagcctggagtgcctgtgcct

SEQ ID NO: 219285 - DNA, 25 bp, Artificial
  Probe
agtgcctgtgcctctgaggagcatg

SEQ ID NO: 219286 - DNA, 25 bp, Artificial
  Probe
tgacaaagagcctgactctgactcc

SEQ ID NO: 219287 - DNA, 25 bp, Artificial
  Probe
tctgaggagcatgtctgaccccgac

SEQ ID NO: 219288 - DNA, 25 bp, Artificial
  Probe
caccatagggccagggagccagatg

SEQ ID NO: 219289 - DNA, 25 bp, Artificial
  Probe
tgctcatggacctgcctctgagcgt

SEQ ID NO: 219290 - DNA, 25 bp, Artificial
  Probe
gccgtcctcaggtgggtctgagcct

SEQ ID NO: 219291 - DNA, 25 bp, Artificial
  Probe
gattttgacaaagagcctgactctg

SEQ ID NO: 219292 - DNA, 25 bp, Artificial
  Probe
aaccacgtggctcacatgggccctg

SEQ ID NO: 219293 - DNA, 25 bp, Artificial
  Probe
acgtggctcacatgggccctggcga

SEQ ID NO: 219294 - DNA, 25 bp, Artificial
  Probe
agccagctccctctgaaggcctgga

SEQ ID NO: 219295 - DNA, 25 bp, Artificial
  Probe
tgcaggtgctcatggacctgcctct

SEQ ID NO: 219296 - DNA, 25 bp, Artificial
  Probe
caacttcaaccacgtggctcacatg

SEQ ID NO: 219297 - DNA, 25 bp, Artificial
  Probe
acttcaaccacgtggctcacatggg

SEQ ID NO: 219298 - DNA, 25 bp, Artificial
  Probe
cagatggccccaacatcagtgccaa

SEQ ID NO: 219299 - DNA, 25 bp, Artificial
  Probe
agcggcgagagatgctcagagaccc

SEQ ID NO: 219300 - DNA, 25 bp, Artificial
  Probe
cccggaactgagatccaaaatgata

SEQ ID NO: 219301 - DNA, 25 bp, Artificial
  Probe
ggccagggagccagatggccccaac

SEQ ID NO: 219302 - DNA, 25 bp, Artificial
  Probe
tctgaaggcctggaccagccagcct

SEQ ID NO: 219303 - DNA, 25 bp, Artificial
  Probe
gagccagctccctctgaaggcctgg

SEQ ID NO: 219304 - DNA, 25 bp, Artificial
  Probe
tcagtgccaagactgagctgaccct

SEQ ID NO: 219305 - DNA, 25 bp, Artificial
  Probe
cctggagtgcctgtgcctctgagga

SEQ ID NO: 219306 - DNA, 25 bp, Artificial
  Probe
ctgagctgaccctccagtgttgtcc

SEQ ID NO: 219307 - DNA, 25 bp, Artificial
  Probe
gtctcatggccgtcctcaggtgggt

SEQ ID NO: 219308 - DNA, 25 bp, Artificial
  Probe
tgactctgactccacgaagcactca

SEQ ID NO: 219309 - DNA, 25 bp, Artificial
  Probe
cgaccaggattttgacaaagagcct

SEQ ID NO: 219310 - DNA, 25 bp, Artificial
  Probe
aatccgaccaacttcaaccacgtgg

SEQ ID NO: 219311 - DNA, 25 bp, Artificial
  Probe
gagagatgctcagagacccggaact

SEQ ID NO: 219312 - DNA, 25 bp, Artificial
  Probe
agcctgactctgactccacgaagca

SEQ ID NO: 219313 - DNA, 25 bp, Artificial
  Probe
cgcccacagcccaggaggaaaagca

SEQ ID NO: 219314 - DNA, 25 bp, Artificial
  Probe
tcccatccaggaacaagccctatgt

SEQ ID NO: 219315 - DNA, 25 bp, Artificial
  Probe
aacatcagtgccaagactgagctga

SEQ ID NO: 219316 - DNA, 25 bp, Artificial
  Probe
atgggatgcaggtgctcatggacct

SEQ ID NO: 219317 - DNA, 25 bp, Artificial
  Probe
ctgaggccgccagcatagcaccata

SEQ ID NO: 219318 - DNA, 25 bp, Artificial
  Probe
cacgtgcgggaggatcctctcatca

SEQ ID NO: 219319 - DNA, 25 bp, Artificial
  Probe
catcatccctgtgcctgcctcagaa

SEQ ID NO: 219320 - DNA, 25 bp, Artificial
  Probe
atccctgtgcctgcctcagaaaacc

SEQ ID NO: 219321 - DNA, 25 bp, Artificial
  Probe
tccctgtgcctgcctcagaaaaccc

SEQ ID NO: 219322 - DNA, 25 bp, Artificial
  Probe
gctgcctcggacctcctggcctact

SEQ ID NO: 219323 - DNA, 25 bp, Artificial
  Probe
tcctggcctactgtgaagcccacgt

SEQ ID NO: 219324 - DNA, 25 bp, Artificial
  Probe
tcatccctgtgcctgcctcagaaaa

SEQ ID NO: 219325 - DNA, 25 bp, Artificial
  Probe
cctcggacctcctggcctactgtga

SEQ ID NO: 219326 - DNA, 25 bp, Artificial
  Probe
tcctctcatcatccctgtgcctgcc

SEQ ID NO: 219327 - DNA, 25 bp, Artificial
  Probe
tgtgcctgcctcagaaaaccccttc

SEQ ID NO: 219328 - DNA, 25 bp, Artificial
  Probe
tgcctcggacctcctggcctactgt

SEQ ID NO: 219329 - DNA, 25 bp, Artificial
  Probe
cctggcctactgtgaagcccacgtg

SEQ ID NO: 219330 - DNA, 25 bp, Artificial
  Probe
caggctgcctcggacctcctggcct

SEQ ID NO: 219331 - DNA, 25 bp, Artificial
  Probe
cctactgtgaagcccacgtgcggga

SEQ ID NO: 219332 - DNA, 25 bp, Artificial
  Probe
ggtctcccaggctgcctcggacctc

SEQ ID NO: 219333 - DNA, 25 bp, Artificial
  Probe
tctcccaggctgcctcggacctcct

SEQ ID NO: 219334 - DNA, 25 bp, Artificial
  Probe
gcctactgtgaagcccacgtgcggg

SEQ ID NO: 219335 - DNA, 25 bp, Artificial
  Probe
tactgtgaagcccacgtgcgggagg

SEQ ID NO: 219336 - DNA, 25 bp, Artificial
  Probe
gaagcccacgtgcgggaggatcctc

SEQ ID NO: 219337 - DNA, 25 bp, Artificial
  Probe
ctgtgcctgcctcagaaaacccctt

SEQ ID NO: 219338 - DNA, 25 bp, Artificial
  Probe
ctggcctactgtgaagcccacgtgc

SEQ ID NO: 219339 - DNA, 25 bp, Artificial
  Probe
ctcctggcctactgtgaagcccacg

SEQ ID NO: 219340 - DNA, 25 bp, Artificial
  Probe
atcatccctgtgcctgcctcagaaa

SEQ ID NO: 219341 - DNA, 25 bp, Artificial
  Probe
actgtgaagcccacgtgcgggagga

SEQ ID NO: 219342 - DNA, 25 bp, Artificial
  Probe
tgtgaagcccacgtgcgggaggatc

SEQ ID NO: 219343 - DNA, 25 bp, Artificial
  Probe
ggacctcctggcctactgtgaagcc

SEQ ID NO: 219344 - DNA, 25 bp, Artificial
  Probe
tggcctactgtgaagcccacgtgcg

SEQ ID NO: 219345 - DNA, 25 bp, Artificial
  Probe
ctcccaggctgcctcggacctcctg

SEQ ID NO: 219346 - DNA, 25 bp, Artificial
  Probe
aggctgcctcggacctcctggccta

SEQ ID NO: 219347 - DNA, 25 bp, Artificial
  Probe
tcggacctcctggcctactgtgaag

SEQ ID NO: 219348 - DNA, 25 bp, Artificial
  Probe
cccacgtgcgggaggatcctctcat

SEQ ID NO: 219349 - DNA, 25 bp, Artificial
  Probe
gcccacgtgcgggaggatcctctca

SEQ ID NO: 219350 - DNA, 25 bp, Artificial
  Probe
acgtgcgggaggatcctctcatcat

SEQ ID NO: 219351 - DNA, 25 bp, Artificial
  Probe
gaaggtctcccaggctgcctcggac

SEQ ID NO: 219352 - DNA, 25 bp, Artificial
  Probe
aggtctcccaggctgcctcggacct

SEQ ID NO: 219353 - DNA, 25 bp, Artificial
  Probe
gtgcgggaggatcctctcatcatcc

SEQ ID NO: 219354 - DNA, 25 bp, Artificial
  Probe
cctgtgcctgcctcagaaaacccct

SEQ ID NO: 219355 - DNA, 25 bp, Artificial
  Probe
gatcctctcatcatccctgtgcctg

SEQ ID NO: 219356 - DNA, 25 bp, Artificial
  Probe
cccaggctgcctcggacctcctggc

SEQ ID NO: 219357 - DNA, 25 bp, Artificial
  Probe
tgaaggtctcccaggctgcctcgga

SEQ ID NO: 219358 - DNA, 25 bp, Artificial
  Probe
gtgaagcccacgtgcgggaggatcc

SEQ ID NO: 219359 - DNA, 25 bp, Artificial
  Probe
ggcctactgtgaagcccacgtgcgg

SEQ ID NO: 219360 - DNA, 25 bp, Artificial
  Probe
cgggaggatcctctcatcatccctg

SEQ ID NO: 219361 - DNA, 25 bp, Artificial
  Probe
ctcatcatccctgtgcctgcctcag

SEQ ID NO: 219362 - DNA, 25 bp, Artificial
  Probe
ctctcatcatccctgtgcctgcctc

SEQ ID NO: 219363 - DNA, 25 bp, Artificial
  Probe
aagcccacgtgcgggaggatcctct

SEQ ID NO: 219364 - DNA, 25 bp, Artificial
  Probe
tggacagagacgagcgcatgccgac

SEQ ID NO: 219365 - DNA, 25 bp, Artificial
  Probe
ccccaggtgacaagtcacctaacgt

SEQ ID NO: 219366 - DNA, 25 bp, Artificial
  Probe
cctccggtgatgtcgccccaggtga

SEQ ID NO: 219367 - DNA, 25 bp, Artificial
  Probe
tcggcagacgggatcctacggtcct

SEQ ID NO: 219368 - DNA, 25 bp, Artificial
  Probe
aaagcctttcctgaacttgtaaatg

SEQ ID NO: 219369 - DNA, 25 bp, Artificial
  Probe
gcctccggtgatgtcgccccaggtg

SEQ ID NO: 219370 - DNA, 25 bp, Artificial
  Probe
atttccggtggacagagacgagcgc

SEQ ID NO: 219371 - DNA, 25 bp, Artificial
  Probe
tcatgtcggcagacgggatcctacg

SEQ ID NO: 219372 - DNA, 25 bp, Artificial
  Probe
agagacgagcgcatgccgacgtgcc

SEQ ID NO: 219373 - DNA, 25 bp, Artificial
  Probe
gccgacgtgccgtgatgacgcacag

SEQ ID NO: 219374 - DNA, 25 bp, Artificial
  Probe
acgcacaggcgtgcagtgcctgcat

SEQ ID NO: 219375 - DNA, 25 bp, Artificial
  Probe
gccccaggtgacaagtcacctaacg

SEQ ID NO: 219376 - DNA, 25 bp, Artificial
  Probe
gcgcatgccgacgtgccgtgatgac

SEQ ID NO: 219377 - DNA, 25 bp, Artificial
  Probe
ccagtttttcctagaggtgacagcc

SEQ ID NO: 219378 - DNA, 25 bp, Artificial
  Probe
cctgcattgcggagtccagtgctgt

SEQ ID NO: 219379 - DNA, 25 bp, Artificial
  Probe
gcctttcctgaacttgtaaatgtga

SEQ ID NO: 219380 - DNA, 25 bp, Artificial
  Probe
tccagtgctgtctgcagactgtcaa

SEQ ID NO: 219381 - DNA, 25 bp, Artificial
  Probe
gttcatgtcggcagacgggatccta

SEQ ID NO: 219382 - DNA, 25 bp, Artificial
  Probe
agcgcatgccgacgtgccgtgatga

SEQ ID NO: 219383 - DNA, 25 bp, Artificial
  Probe
ctgcattgcggagtccagtgctgtc

SEQ ID NO: 219384 - DNA, 25 bp, Artificial
  Probe
aagtccgttcatgtcggcagacggg

SEQ ID NO: 219385 - DNA, 25 bp, Artificial
  Probe
gtgcagtgcctgcattgcggagtcc

SEQ ID NO: 219386 - DNA, 25 bp, Artificial
  Probe
gtgctgtctgcagactgtcaagtcc

SEQ ID NO: 219387 - DNA, 25 bp, Artificial
  Probe
ctgtctgcagactgtcaagtccgtt

SEQ ID NO: 219388 - DNA, 25 bp, Artificial
  Probe
ctgcagactgtcaagtccgttcatg

SEQ ID NO: 219389 - DNA, 25 bp, Artificial
  Probe
ccgtgatgacgcacaggcgtgcagt

SEQ ID NO: 219390 - DNA, 25 bp, Artificial
  Probe
ttccggtggacagagacgagcgcat

SEQ ID NO: 219391 - DNA, 25 bp, Artificial
  Probe
cgtgcagtgcctgcattgcggagtc

SEQ ID NO: 219392 - DNA, 25 bp, Artificial
  Probe
tgcggagtccagtgctgtctgcaga

SEQ ID NO: 219393 - DNA, 25 bp, Artificial
  Probe
tcgccccaggtgacaagtcacctaa

SEQ ID NO: 219394 - DNA, 25 bp, Artificial
  Probe
agccccagcaagaaagccacagcag

SEQ ID NO: 219395 - DNA, 25 bp, Artificial
  Probe
gtcgccccaggtgacaagtcaccta

SEQ ID NO: 219396 - DNA, 25 bp, Artificial
  Probe
cagtgcctgcattgcggagtccagt

SEQ ID NO: 219397 - DNA, 25 bp, Artificial
  Probe
acgtgccgtgatgacgcacaggcgt

SEQ ID NO: 219398 - DNA, 25 bp, Artificial
  Probe
gacgcacaggcgtgcagtgcctgca

SEQ ID NO: 219399 - DNA, 25 bp, Artificial
  Probe
cctttcctgaacttgtaaatgtgaa

SEQ ID NO: 219400 - DNA, 25 bp, Artificial
  Probe
cgacgtgccgtgatgacgcacaggc

SEQ ID NO: 219401 - DNA, 25 bp, Artificial
  Probe
cagacgggatcctacggtcctgaat

SEQ ID NO: 219402 - DNA, 25 bp, Artificial
  Probe
agtccgttcatgtcggcagacggga

SEQ ID NO: 219403 - DNA, 25 bp, Artificial
  Probe
cagactgtcaagtccgttcatgtcg

SEQ ID NO: 219404 - DNA, 25 bp, Artificial
  Probe
attgcggagtccagtgctgtctgca

SEQ ID NO: 219405 - DNA, 25 bp, Artificial
  Probe
ctgtcaagtccgttcatgtcggcag

SEQ ID NO: 219406 - DNA, 25 bp, Artificial
  Probe
acaggcgtgcagtgcctgcattgcg

SEQ ID NO: 219407 - DNA, 25 bp, Artificial
  Probe
tgtcaagtccgttcatgtcggcaga

SEQ ID NO: 219408 - DNA, 25 bp, Artificial
  Probe
gatgtcgccccaggtgacaagtcac

SEQ ID NO: 219409 - DNA, 25 bp, Artificial
  Probe
ggagtccagtgctgtctgcagactg

SEQ ID NO: 219410 - DNA, 25 bp, Artificial
  Probe
gttggaaaggccttcctctatgcac

SEQ ID NO: 219411 - DNA, 25 bp, Artificial
  Probe
ttgccccgaggctggtccaggagct

SEQ ID NO: 219412 - DNA, 25 bp, Artificial
  Probe
acaagctccctgataccttgacctg

SEQ ID NO: 219413 - DNA, 25 bp, Artificial
  Probe
atgcgcactctaaccctcagtgtga

SEQ ID NO: 219414 - DNA, 25 bp, Artificial
  Probe
ccgaagcccctattggcctctgggt

SEQ ID NO: 219415 - DNA, 25 bp, Artificial
  Probe
gcaaaaggcatacctgggcaactac

SEQ ID NO: 219416 - DNA, 25 bp, Artificial
  Probe
cctctgggatcaagggcacaaaata

SEQ ID NO: 219417 - DNA, 25 bp, Artificial
  Probe
aggctggtccaggagctgagttaaa

SEQ ID NO: 219418 - DNA, 25 bp, Artificial
  Probe
ggcaggtgctacagatccacaggga

SEQ ID NO: 219419 - DNA, 25 bp, Artificial
  Probe
agctccctgataccttgacctgcaa

SEQ ID NO: 219420 - DNA, 25 bp, Artificial
  Probe
ctctgaaggttcttgagggctcaca

SEQ ID NO: 219421 - DNA, 25 bp, Artificial
  Probe
gtgaccctgcggagctgagcaaccc

SEQ ID NO: 219422 - DNA, 25 bp, Artificial
  Probe
cgaagcccctattggcctctgggtt

SEQ ID NO: 219423 - DNA, 25 bp, Artificial
  Probe
cctctatgcactgaagtttgggtgg

SEQ ID NO: 219424 - DNA, 25 bp, Artificial
  Probe
caaggtcctatttgccccgaggctg

SEQ ID NO: 219425 - DNA, 25 bp, Artificial
  Probe
atctcgatttgctcgggccttgggt

SEQ ID NO: 219426 - DNA, 25 bp, Artificial
  Probe
tggccggctgacctccctgggctga

SEQ ID NO: 219427 - DNA, 25 bp, Artificial
  Probe
agtttcaaattctaaagccagagca

SEQ ID NO: 219428 - DNA, 25 bp, Artificial
  Probe
acaagccagtgtttggggaccgagc

SEQ ID NO: 219429 - DNA, 25 bp, Artificial
  Probe
tccagctttgaggtttccccgaagc

SEQ ID NO: 219430 - DNA, 25 bp, Artificial
  Probe
tcctccagcctggaggacagaccta

SEQ ID NO: 219431 - DNA, 25 bp, Artificial
  Probe
tgacaagcctagaggggactcaggt

SEQ ID NO: 219432 - DNA, 25 bp, Artificial
  Probe
gcacactctctggaggaagattcag

SEQ ID NO: 219433 - DNA, 25 bp, Artificial
  Probe
ccattactgaggtggccggctgacc

SEQ ID NO: 219434 - DNA, 25 bp, Artificial
  Probe
tcagtgtgaccctgcggagctgagc

SEQ ID NO: 219435 - DNA, 25 bp, Artificial
  Probe
tcccagtcacatctcgatttgctcg

SEQ ID NO: 219436 - DNA, 25 bp, Artificial
  Probe
caccacattcccagtgtaagcctgg

SEQ ID NO: 219437 - DNA, 25 bp, Artificial
  Probe
ctgagttaaatccagctttgaggtt

SEQ ID NO: 219438 - DNA, 25 bp, Artificial
  Probe
tctaaccctcagtgtgaccctgcgg

SEQ ID NO: 219439 - DNA, 25 bp, Artificial
  Probe
gaggccagagcaaggtcctatttgc

SEQ ID NO: 219440 - DNA, 25 bp, Artificial
  Probe
ggagcaccaggctgtccctattcct

SEQ ID NO: 219441 - DNA, 25 bp, Artificial
  Probe
cttgacctgcaactcaacaagccag

SEQ ID NO: 219442 - DNA, 25 bp, Artificial
  Probe
ccctctctgaaggttcttgagggct

SEQ ID NO: 219443 - DNA, 25 bp, Artificial
  Probe
ggtccaggagctgagttaaatccag

SEQ ID NO: 219444 - DNA, 25 bp, Artificial
  Probe
gacagtgacagtgactcagatctca

SEQ ID NO: 219445 - DNA, 25 bp, Artificial
  Probe
gcatacctgggcaactacccattac

SEQ ID NO: 219446 - DNA, 25 bp, Artificial
  Probe
atatgacaagcctagaggggactca

SEQ ID NO: 219447 - DNA, 25 bp, Artificial
  Probe
ctacagatccacagggaggcaccct

SEQ ID NO: 219448 - DNA, 25 bp, Artificial
  Probe
ctatttgccccgaggctggtccagg

SEQ ID NO: 219449 - DNA, 25 bp, Artificial
  Probe
cacaaaatatgacaagcctagaggg

SEQ ID NO: 219450 - DNA, 25 bp, Artificial
  Probe
cggcctgagcccagggtatccggca

SEQ ID NO: 219451 - DNA, 25 bp, Artificial
  Probe
gtttctagtgacagtgacagtgact

SEQ ID NO: 219452 - DNA, 25 bp, Artificial
  Probe
ttcttgagggctcacaagctccctg

SEQ ID NO: 219453 - DNA, 25 bp, Artificial
  Probe
ggtgggacacacagggctttctttg

SEQ ID NO: 219454 - DNA, 25 bp, Artificial
  Probe
gtgactcagatctcagctcctccag

SEQ ID NO: 219455 - DNA, 25 bp, Artificial
  Probe
ctgggctgaggcacactctctggag

SEQ ID NO: 219456 - DNA, 25 bp, Artificial
  Probe
agatgaagtcgtacagcagcagtaa

SEQ ID NO: 219457 - DNA, 25 bp, Artificial
  Probe
acaccatagacatgagctagggcca

SEQ ID NO: 219458 - DNA, 25 bp, Artificial
  Probe
atgaagtcgtacagcagcagtaagg

SEQ ID NO: 219459 - DNA, 25 bp, Artificial
  Probe
ggagtcccagaatgcctcggacaag

SEQ ID NO: 219460 - DNA, 25 bp, Artificial
  Probe
cccattcatgccttggaaagtattc

SEQ ID NO: 219461 - DNA, 25 bp, Artificial
  Probe
tccaacagcgaccagctagaggagc

SEQ ID NO: 219462 - DNA, 25 bp, Artificial
  Probe
ttggacagtgcacaatacaacaact

SEQ ID NO: 219463 - DNA, 25 bp, Artificial
  Probe
tcatattggacagtgcacaatacaa

SEQ ID NO: 219464 - DNA, 25 bp, Artificial
  Probe
gtacagcagcagtaaggactcctct

SEQ ID NO: 219465 - DNA, 25 bp, Artificial
  Probe
agagcctcattttttgctgctagtg

SEQ ID NO: 219466 - DNA, 25 bp, Artificial
  Probe
cctaaagcacccattcatgccttgg

SEQ ID NO: 219467 - DNA, 25 bp, Artificial
  Probe
tttgctgctagtgatgaaaaccatc

SEQ ID NO: 219468 - DNA, 25 bp, Artificial
  Probe
gtccagagagcctcattttttgctg

SEQ ID NO: 219469 - DNA, 25 bp, Artificial
  Probe
gtgatgaaaaccatcgccccttgag

SEQ ID NO: 219470 - DNA, 25 bp, Artificial
  Probe
gagtgcggcctccaacagcgaccag

SEQ ID NO: 219471 - DNA, 25 bp, Artificial
  Probe
gggcaccctaaagcacccattcatg

SEQ ID NO: 219472 - DNA, 25 bp, Artificial
  Probe
tcccactctggcttctaaagtggac

SEQ ID NO: 219473 - DNA, 25 bp, Artificial
  Probe
ttcaacaccatagacatgagctagg

SEQ ID NO: 219474 - DNA, 25 bp, Artificial
  Probe
cttctaaagtggaccagttggaagg

SEQ ID NO: 219475 - DNA, 25 bp, Artificial
  Probe
tgaggtccagagagcctcatttttt

SEQ ID NO: 219476 - DNA, 25 bp, Artificial
  Probe
tgatgaaaaccatcgccccttgagt

SEQ ID NO: 219477 - DNA, 25 bp, Artificial
  Probe
ggacagtgcacaatacaacaactgc

SEQ ID NO: 219478 - DNA, 25 bp, Artificial
  Probe
tattggacagtgcacaatacaacaa

SEQ ID NO: 219479 - DNA, 25 bp, Artificial
  Probe
aaagcacccattcatgccttggaaa

SEQ ID NO: 219480 - DNA, 25 bp, Artificial
  Probe
caccatagacatgagctagggccag

SEQ ID NO: 219481 - DNA, 25 bp, Artificial
  Probe
gtgcacaatacaacaactgcagatc

SEQ ID NO: 219482 - DNA, 25 bp, Artificial
  Probe
ggaggagtcccagaatgcctcggac

SEQ ID NO: 219483 - DNA, 25 bp, Artificial
  Probe
ccactctggcttctaaagtggacca

SEQ ID NO: 219484 - DNA, 25 bp, Artificial
  Probe
ttttttgctgctagtgatgaaaacc

SEQ ID NO: 219485 - DNA, 25 bp, Artificial
  Probe
gtatgggcaccctaaagcacccatt

SEQ ID NO: 219486 - DNA, 25 bp, Artificial
  Probe
ctgcaggaggagtcccagaatgcct

SEQ ID NO: 219487 - DNA, 25 bp, Artificial
  Probe
acctgcaggcagaggttgagcactt

SEQ ID NO: 219488 - DNA, 25 bp, Artificial
  Probe
tcaacaccatagacatgagctaggg

SEQ ID NO: 219489 - DNA, 25 bp, Artificial
  Probe
cagcgaccagctagaggagcaggcc

SEQ ID NO: 219490 - DNA, 25 bp, Artificial
  Probe
ccacctgcaggcagaggttgagcac

SEQ ID NO: 219491 - DNA, 25 bp, Artificial
  Probe
atgaggtccagagagcctcattttt

SEQ ID NO: 219492 - DNA, 25 bp, Artificial
  Probe
cctccaacagcgaccagctagagga

SEQ ID NO: 219493 - DNA, 25 bp, Artificial
  Probe
aacagcgaccagctagaggagcagg

SEQ ID NO: 219494 - DNA, 25 bp, Artificial
  Probe
ttgagtgcggcctccaacagcgacc

SEQ ID NO: 219495 - DNA, 25 bp, Artificial
  Probe
ctcattttttgctgctagtgatgaa

SEQ ID NO: 219496 - DNA, 25 bp, Artificial
  Probe
tcatgccttggaaagtattctcaga

SEQ ID NO: 219497 - DNA, 25 bp, Artificial
  Probe
agcacccattcatgccttggaaagt

SEQ ID NO: 219498 - DNA, 25 bp, Artificial
  Probe
tacagcagcagtaaggactcctctc

SEQ ID NO: 219499 - DNA, 25 bp, Artificial
  Probe
gtattctcagagtcccagcttccca

SEQ ID NO: 219500 - DNA, 25 bp, Artificial
  Probe
gctgcaggaggagtcccagaatgcc

SEQ ID NO: 219501 - DNA, 25 bp, Artificial
  Probe
gaaagtattctcagagtcccagctt

SEQ ID NO: 219502 - DNA, 25 bp, Artificial
  Probe
gaatgtctagcgagcctaaacttcc

SEQ ID NO: 219503 - DNA, 25 bp, Artificial
  Probe
atcaccaccgaatgtctagcgagcc

SEQ ID NO: 219504 - DNA, 25 bp, Artificial
  Probe
acagcagcagctggcgttaaatccg

SEQ ID NO: 219505 - DNA, 25 bp, Artificial
  Probe
cacagcagcagctggcgttaaatcc

SEQ ID NO: 219506 - DNA, 25 bp, Artificial
  Probe
ccacagcagcagctggcgttaaatc

SEQ ID NO: 219507 - DNA, 25 bp, Artificial
  Probe
agcagctggcgttaaatccgcctcc

SEQ ID NO: 219508 - DNA, 25 bp, Artificial
  Probe
cgttaaatccgcctccaacgacgag

SEQ ID NO: 219509 - DNA, 25 bp, Artificial
  Probe
ttccacaacaaaccctccacagcag

SEQ ID NO: 219510 - DNA, 25 bp, Artificial
  Probe
tctagcgagcctaaacttccacaac

SEQ ID NO: 219511 - DNA, 25 bp, Artificial
  Probe
gctcgttatcaccaccgaatgtcta

SEQ ID NO: 219512 - DNA, 25 bp, Artificial
  Probe
cagacaagacccaaccttgctcgtt

SEQ ID NO: 219513 - DNA, 25 bp, Artificial
  Probe
ccctccacagcagcagctggcgtta

SEQ ID NO: 219514 - DNA, 25 bp, Artificial
  Probe
ggacagacaagacccaaccttgctc

SEQ ID NO: 219515 - DNA, 25 bp, Artificial
  Probe
accaccgaatgtctagcgagcctaa

SEQ ID NO: 219516 - DNA, 25 bp, Artificial
  Probe
tcgttatcaccaccgaatgtctagc

SEQ ID NO: 219517 - DNA, 25 bp, Artificial
  Probe
atccgcctccaacgacgaggtgccc

SEQ ID NO: 219518 - DNA, 25 bp, Artificial
  Probe
ttgctcgttatcaccaccgaatgtc

SEQ ID NO: 219519 - DNA, 25 bp, Artificial
  Probe
ctggcgttaaatccgcctccaacga

SEQ ID NO: 219520 - DNA, 25 bp, Artificial
  Probe
aggacagacaagacccaaccttgct

SEQ ID NO: 219521 - DNA, 25 bp, Artificial
  Probe
caagacccaaccttgctcgttatca

SEQ ID NO: 219522 - DNA, 25 bp, Artificial
  Probe
ggcgttaaatccgcctccaacgacg

SEQ ID NO: 219523 - DNA, 25 bp, Artificial
  Probe
agacaagacccaaccttgctcgtta

SEQ ID NO: 219524 - DNA, 25 bp, Artificial
  Probe
accgaatgtctagcgagcctaaact

SEQ ID NO: 219525 - DNA, 25 bp, Artificial
  Probe
cttgctcgttatcaccaccgaatgt

SEQ ID NO: 219526 - DNA, 25 bp, Artificial
  Probe
acttccacaacaaaccctccacagc

SEQ ID NO: 219527 - DNA, 25 bp, Artificial
  Probe
gcgagcctaaacttccacaacaaac

SEQ ID NO: 219528 - DNA, 25 bp, Artificial
  Probe
accctccacagcagcagctggcgtt

SEQ ID NO: 219529 - DNA, 25 bp, Artificial
  Probe
gacaagacccaaccttgctcgttat

SEQ ID NO: 219530 - DNA, 25 bp, Artificial
  Probe
cctccacagcagcagctggcgttaa

SEQ ID NO: 219531 - DNA, 25 bp, Artificial
  Probe
tccacagcagcagctggcgttaaat

SEQ ID NO: 219532 - DNA, 25 bp, Artificial
  Probe
accttgctcgttatcaccaccgaat

SEQ ID NO: 219533 - DNA, 25 bp, Artificial
  Probe
acagacaagacccaaccttgctcgt

SEQ ID NO: 219534 - DNA, 25 bp, Artificial
  Probe
caccaccgaatgtctagcgagccta

SEQ ID NO: 219535 - DNA, 25 bp, Artificial
  Probe
ccaccgaatgtctagcgagcctaaa

SEQ ID NO: 219536 - DNA, 25 bp, Artificial
  Probe
tgctcgttatcaccaccgaatgtct

SEQ ID NO: 219537 - DNA, 25 bp, Artificial
  Probe
gttatcaccaccgaatgtctagcga

SEQ ID NO: 219538 - DNA, 25 bp, Artificial
  Probe
gtctagcgagcctaaacttccacaa

SEQ ID NO: 219539 - DNA, 25 bp, Artificial
  Probe
gcagcagctggcgttaaatccgcct

SEQ ID NO: 219540 - DNA, 25 bp, Artificial
  Probe
ttcagaaggtggggtgaggacagac

SEQ ID NO: 219541 - DNA, 25 bp, Artificial
  Probe
tgtctagcgagcctaaacttccaca

SEQ ID NO: 219542 - DNA, 25 bp, Artificial
  Probe
cagctggcgttaaatccgcctccaa

SEQ ID NO: 219543 - DNA, 25 bp, Artificial
  Probe
ctcgttatcaccaccgaatgtctag

SEQ ID NO: 219544 - DNA, 25 bp, Artificial
  Probe
ccgaatgtctagcgagcctaaactt

SEQ ID NO: 219545 - DNA, 25 bp, Artificial
  Probe
ccttgctcgttatcaccaccgaatg

SEQ ID NO: 219546 - DNA, 25 bp, Artificial
  Probe
caccgaatgtctagcgagcctaaac

SEQ ID NO: 219547 - DNA, 25 bp, Artificial
  Probe
ctccacagcagcagctggcgttaaa

SEQ ID NO: 219548 - DNA, 25 bp, Artificial
  Probe
atgctaaccgccatctgctgctcag

SEQ ID NO: 219549 - DNA, 25 bp, Artificial
  Probe
caagtcaaacgatccggacatgcgt

SEQ ID NO: 219550 - DNA, 25 bp, Artificial
  Probe
aagctggagcatgctaaccgccatc

SEQ ID NO: 219551 - DNA, 25 bp, Artificial
  Probe
cagcgagctaaggaccttgaaaacc

SEQ ID NO: 219552 - DNA, 25 bp, Artificial
  Probe
ccgtggactacatccgaaagttgca

SEQ ID NO: 219553 - DNA, 25 bp, Artificial
  Probe
taggtactttgattcccaagtcaaa

SEQ ID NO: 219554 - DNA, 25 bp, Artificial
  Probe
caaacgatccggacatgcgttggaa

SEQ ID NO: 219555 - DNA, 25 bp, Artificial
  Probe
ggaccatcctcaaggcctccgtgga

SEQ ID NO: 219556 - DNA, 25 bp, Artificial
  Probe
tcagagtgcaggagctcgagatgca

SEQ ID NO: 219557 - DNA, 25 bp, Artificial
  Probe
tccgaaagttgcaacgggaacagca

SEQ ID NO: 219558 - DNA, 25 bp, Artificial
  Probe
tgctgctcagagtgcaggagctcga

SEQ ID NO: 219559 - DNA, 25 bp, Artificial
  Probe
tttaacataaatgaccgcattaagg

SEQ ID NO: 219560 - DNA, 25 bp, Artificial
  Probe
gagctcgagatgcaggctagagcac

SEQ ID NO: 219561 - DNA, 25 bp, Artificial
  Probe
ggactacatccgaaagttgcaacgg

SEQ ID NO: 219562 - DNA, 25 bp, Artificial
  Probe
aaaccggcagaagaagctggagcat

SEQ ID NO: 219563 - DNA, 25 bp, Artificial
  Probe
agctggagcatgctaaccgccatct

SEQ ID NO: 219564 - DNA, 25 bp, Artificial
  Probe
catgcgttggaacaaggggaccatc

SEQ ID NO: 219565 - DNA, 25 bp, Artificial
  Probe
tgtattttccccacagagtctgaag

SEQ ID NO: 219566 - DNA, 25 bp, Artificial
  Probe
taaggaccttgaaaaccggcagaag

SEQ ID NO: 219567 - DNA, 25 bp, Artificial
  Probe
acgatccggacatgcgttggaacaa

SEQ ID NO: 219568 - DNA, 25 bp, Artificial
  Probe
ttaacataaatgaccgcattaagga

SEQ ID NO: 219569 - DNA, 25 bp, Artificial
  Probe
tggagcatgctaaccgccatctgct

SEQ ID NO: 219570 - DNA, 25 bp, Artificial
  Probe
agcgagctaaggaccttgaaaaccg

SEQ ID NO: 219571 - DNA, 25 bp, Artificial
  Probe
ggaacagcagcgagctaaggacctt

SEQ ID NO: 219572 - DNA, 25 bp, Artificial
  Probe
gacatgcgttggaacaaggggacca

SEQ ID NO: 219573 - DNA, 25 bp, Artificial
  Probe
tcaaggcctccgtggactacatccg

SEQ ID NO: 219574 - DNA, 25 bp, Artificial
  Probe
atcctcaaggcctccgtggactaca

SEQ ID NO: 219575 - DNA, 25 bp, Artificial
  Probe
agttgcaacgggaacagcagcgagc

SEQ ID NO: 219576 - DNA, 25 bp, Artificial
  Probe
ctgctcagagtgcaggagctcgaga

SEQ ID NO: 219577 - DNA, 25 bp, Artificial
  Probe
acaaggggaccatcctcaaggcctc

SEQ ID NO: 219578 - DNA, 25 bp, Artificial
  Probe
ctcagagtgcaggagctcgagatgc

SEQ ID NO: 219579 - DNA, 25 bp, Artificial
  Probe
gaccgcattaaggaactaggtactt

SEQ ID NO: 219580 - DNA, 25 bp, Artificial
  Probe
tcacaacttgattgaacggagaaga

SEQ ID NO: 219581 - DNA, 25 bp, Artificial
  Probe
aaccggcagaagaagctggagcatg

SEQ ID NO: 219582 - DNA, 25 bp, Artificial
  Probe
cagcagcgagctaaggaccttgaaa

SEQ ID NO: 219583 - DNA, 25 bp, Artificial
  Probe
taaatgaccgcattaaggaactagg

SEQ ID NO: 219584 - DNA, 25 bp, Artificial
  Probe
cagcgtgtattttccccacagagtc

SEQ ID NO: 219585 - DNA, 25 bp, Artificial
  Probe
ggacaatcacaacttgattgaacgg

SEQ ID NO: 219586 - DNA, 25 bp, Artificial
  Probe
aacgggaacagcagcgagctaagga

SEQ ID NO: 219587 - DNA, 25 bp, Artificial
  Probe
cacagagtctgaagcaagagcattg

SEQ ID NO: 219588 - DNA, 25 bp, Artificial
  Probe
gaacaaggggaccatcctcaaggcc

SEQ ID NO: 219589 - DNA, 25 bp, Artificial
  Probe
gtctgaagcaagagcattggctaaa

SEQ ID NO: 219590 - DNA, 25 bp, Artificial
  Probe
tttgattcccaagtcaaacgatccg

SEQ ID NO: 219591 - DNA, 25 bp, Artificial
  Probe
actaggtactttgattcccaagtca

SEQ ID NO: 219592 - DNA, 25 bp, Artificial
  Probe
agtctgaagcaagagcattggctaa

SEQ ID NO: 219593 - DNA, 25 bp, Artificial
  Probe
gctaaggaccttgaaaaccggcaga

SEQ ID NO: 219594 - DNA, 25 bp, Artificial
  Probe
ggtgaagagaccatcctgcagttca

SEQ ID NO: 219595 - DNA, 25 bp, Artificial
  Probe
tgcctacatcggagacataccttca

SEQ ID NO: 219596 - DNA, 25 bp, Artificial
  Probe
ctacctcttccgtgtgcgggccagt

SEQ ID NO: 219597 - DNA, 25 bp, Artificial
  Probe
tcctggctgcccttttagccctggt

SEQ ID NO: 219598 - DNA, 25 bp, Artificial
  Probe
taccagtcaggatcgggtgaagaga

SEQ ID NO: 219599 - DNA, 25 bp, Artificial
  Probe
ttcagctcagggaccttgacattga

SEQ ID NO: 219600 - DNA, 25 bp, Artificial
  Probe
tccgtggtctcaatgccagcacacg

SEQ ID NO: 219601 - DNA, 25 bp, Artificial
  Probe
gctgaagacggtctggatcagcagc

SEQ ID NO: 219602 - DNA, 25 bp, Artificial
  Probe
tggatcagcagctggtcctggctgt

SEQ ID NO: 219603 - DNA, 25 bp, Artificial
  Probe
gcagttcagctcagggaccttgaca

SEQ ID NO: 219604 - DNA, 25 bp, Artificial
  Probe
ccctggtgtgtatccgaagaagctg

SEQ ID NO: 219605 - DNA, 25 bp, Artificial
  Probe
acacgctacctcttccgtgtgcggg

SEQ ID NO: 219606 - DNA, 25 bp, Artificial
  Probe
accgtccgtggtctcaatgccagca

SEQ ID NO: 219607 - DNA, 25 bp, Artificial
  Probe
gtctggatcagcagctggtcctggc

SEQ ID NO: 219608 - DNA, 25 bp, Artificial
  Probe
agggtctcggcgactggagcaacac

SEQ ID NO: 219609 - DNA, 25 bp, Artificial
  Probe
gtcaggatcgggtgaagagaccatc

SEQ ID NO: 219610 - DNA, 25 bp, Artificial
  Probe
ggctgcccttttagccctggtgtgt

SEQ ID NO: 219611 - DNA, 25 bp, Artificial
  Probe
actggagcaacacagtggaagagac

SEQ ID NO: 219612 - DNA, 25 bp, Artificial
  Probe
agccacagcctgagcctttgagtta

SEQ ID NO: 219613 - DNA, 25 bp, Artificial
  Probe
gtcctggctgtggtaggctccgtct

SEQ ID NO: 219614 - DNA, 25 bp, Artificial
  Probe
cggtctggatcagcagctggtcctg

SEQ ID NO: 219615 - DNA, 25 bp, Artificial
  Probe
tcagcagctggtcctggctgtggta

SEQ ID NO: 219616 - DNA, 25 bp, Artificial
  Probe
accttgacattgacccgacggccaa

SEQ ID NO: 219617 - DNA, 25 bp, Artificial
  Probe
aagacggtctggatcagcagctggt

SEQ ID NO: 219618 - DNA, 25 bp, Artificial
  Probe
cccttttagccctggtgtgtatccg

SEQ ID NO: 219619 - DNA, 25 bp, Artificial
  Probe
tggtaggctccgtctctgccacctg

SEQ ID NO: 219620 - DNA, 25 bp, Artificial
  Probe
acctcttccgtgtgcgggccagtgt

SEQ ID NO: 219621 - DNA, 25 bp, Artificial
  Probe
ggagacataccttcacctaccagtc

SEQ ID NO: 219622 - DNA, 25 bp, Artificial
  Probe
cctggctgtggtaggctccgtctct

SEQ ID NO: 219623 - DNA, 25 bp, Artificial
  Probe
accttcacctaccagtcaggatcgg

SEQ ID NO: 219624 - DNA, 25 bp, Artificial
  Probe
ggccaaagccacagcctgagccttt

SEQ ID NO: 219625 - DNA, 25 bp, Artificial
  Probe
gacattgacccgacggccaaagcca

SEQ ID NO: 219626 - DNA, 25 bp, Artificial
  Probe
atcagcagctggtcctggctgtggt

SEQ ID NO: 219627 - DNA, 25 bp, Artificial
  Probe
cgagcccagtccaagagagccgggt

SEQ ID NO: 219628 - DNA, 25 bp, Artificial
  Probe
gagtgcgagcccagtccaagagagc

SEQ ID NO: 219629 - DNA, 25 bp, Artificial
  Probe
aaagccacagcctgagcctttgagt

SEQ ID NO: 219630 - DNA, 25 bp, Artificial
  Probe
ctgcagagtgcgagcccagtccaag

SEQ ID NO: 219631 - DNA, 25 bp, Artificial
  Probe
cccagtccaagagagccgggtggct

SEQ ID NO: 219632 - DNA, 25 bp, Artificial
  Probe
gcctacatcggagacataccttcac

SEQ ID NO: 219633 - DNA, 25 bp, Artificial
  Probe
gaagaagctgcctacatcggagaca

SEQ ID NO: 219634 - DNA, 25 bp, Artificial
  Probe
ggagcaacacagtggaagagaccac

SEQ ID NO: 219635 - DNA, 25 bp, Artificial
  Probe
tcggagacataccttcacctaccag

SEQ ID NO: 219636 - DNA, 25 bp, Artificial
  Probe
acagcctgagcctttgagttaccct

SEQ ID NO: 219637 - DNA, 25 bp, Artificial
  Probe
gtgtgtatccgaagaagctgcctac

SEQ ID NO: 219638 - DNA, 25 bp, Artificial
  Probe
aagctgcctacatcggagacatacc

SEQ ID NO: 219639 - DNA, 25 bp, Artificial
  Probe
atccgaagaagctgcctacatcgga

SEQ ID NO: 219640 - DNA, 25 bp, Artificial
  Probe
cttccagaacgtgagagaagaacca

SEQ ID NO: 219641 - DNA, 25 bp, Artificial
  Probe
agagccagagactacataccatgtg

SEQ ID NO: 219642 - DNA, 25 bp, Artificial
  Probe
catcaccgtgctattggcgtttctg

SEQ ID NO: 219643 - DNA, 25 bp, Artificial
  Probe
ttcagttcaactcaggaactctggc

SEQ ID NO: 219644 - DNA, 25 bp, Artificial
  Probe
agatgctacttatagccattcttgg

SEQ ID NO: 219645 - DNA, 25 bp, Artificial
  Probe
acataccatgtggatatttttgctg

SEQ ID NO: 219646 - DNA, 25 bp, Artificial
  Probe
tgttcagttcaactcaggaactctg

SEQ ID NO: 219647 - DNA, 25 bp, Artificial
  Probe
gaagaatggcctaggccttccagaa

SEQ ID NO: 219648 - DNA, 25 bp, Artificial
  Probe
tggcctaggccttccagaacgtgag

SEQ ID NO: 219649 - DNA, 25 bp, Artificial
  Probe
acataggatcaagcaacccagcctt

SEQ ID NO: 219650 - DNA, 25 bp, Artificial
  Probe
gttcaactcaggaactctggcccta

SEQ ID NO: 219651 - DNA, 25 bp, Artificial
  Probe
taggatcaagcaacccagccttttc

SEQ ID NO: 219652 - DNA, 25 bp, Artificial
  Probe
aataccagctcaagggcctagagcc

SEQ ID NO: 219653 - DNA, 25 bp, Artificial
  Probe
cttgcatcaccgtgctattggcgtt

SEQ ID NO: 219654 - DNA, 25 bp, Artificial
  Probe
agaaccagctgttcagttcaactca

SEQ ID NO: 219655 - DNA, 25 bp, Artificial
  Probe
ttggcgtttctgattatgttgcaac

SEQ ID NO: 219656 - DNA, 25 bp, Artificial
  Probe
tcaccgtgctattggcgtttctgat

SEQ ID NO: 219657 - DNA, 25 bp, Artificial
  Probe
aaccagctgttcagttcaactcagg

SEQ ID NO: 219658 - DNA, 25 bp, Artificial
  Probe
agaagaatggcctaggccttccaga

SEQ ID NO: 219659 - DNA, 25 bp, Artificial
  Probe
tttgctgagaacaacataggatcaa

SEQ ID NO: 219660 - DNA, 25 bp, Artificial
  Probe
tcttgggtcggctggaatgacttgc

SEQ ID NO: 219661 - DNA, 25 bp, Artificial
  Probe
cgtttctgattatgttgcaactgaa

SEQ ID NO: 219662 - DNA, 25 bp, Artificial
  Probe
atgacttgcatcaccgtgctattgg

SEQ ID NO: 219663 - DNA, 25 bp, Artificial
  Probe
actctggccctaaacaggaaggcca

SEQ ID NO: 219664 - DNA, 25 bp, Artificial
  Probe
ggaatgacttgcatcaccgtgctat

SEQ ID NO: 219665 - DNA, 25 bp, Artificial
  Probe
ggtcggctggaatgacttgcatcac

SEQ ID NO: 219666 - DNA, 25 bp, Artificial
  Probe
gggcctagagccagagactacatac

SEQ ID NO: 219667 - DNA, 25 bp, Artificial
  Probe
ccagagactacataccatgtggata

SEQ ID NO: 219668 - DNA, 25 bp, Artificial
  Probe
agagaagaaccagctgttcagttca

SEQ ID NO: 219669 - DNA, 25 bp, Artificial
  Probe
acttatagccattcttgggtcggct

SEQ ID NO: 219670 - DNA, 25 bp, Artificial
  Probe
gatgctacttatagccattcttggg

SEQ ID NO: 219671 - DNA, 25 bp, Artificial
  Probe
actcaggaactctggccctaaacag

SEQ ID NO: 219672 - DNA, 25 bp, Artificial
  Probe
ccatcactcaataccagctcaaggg

SEQ ID NO: 219673 - DNA, 25 bp, Artificial
  Probe
gaagaaccagctgttcagttcaact

SEQ ID NO: 219674 - DNA, 25 bp, Artificial
  Probe
aatgacttgcatcaccgtgctattg

SEQ ID NO: 219675 - DNA, 25 bp, Artificial
  Probe
ctacttatagccattcttgggtcgg

SEQ ID NO: 219676 - DNA, 25 bp, Artificial
  Probe
atggcctaggccttccagaacgtga

SEQ ID NO: 219677 - DNA, 25 bp, Artificial
  Probe
tcaagggcctagagccagagactac

SEQ ID NO: 219678 - DNA, 25 bp, Artificial
  Probe
tttttgctgagaacaacataggatc

SEQ ID NO: 219679 - DNA, 25 bp, Artificial
  Probe
agctgttcagttcaactcaggaact

SEQ ID NO: 219680 - DNA, 25 bp, Artificial
  Probe
tatagccattcttgggtcggctgga

SEQ ID NO: 219681 - DNA, 25 bp, Artificial
  Probe
agctcaagggcctagagccagagac

SEQ ID NO: 219682 - DNA, 25 bp, Artificial
  Probe
cataccatgtggatatttttgctga

SEQ ID NO: 219683 - DNA, 25 bp, Artificial
  Probe
ctattggcgtttctgattatgttgc

SEQ ID NO: 219684 - DNA, 25 bp, Artificial
  Probe
gaactctggccctaaacaggaaggc

SEQ ID NO: 219685 - DNA, 25 bp, Artificial
  Probe
tcaataccagctcaagggcctagag

SEQ ID NO: 219686 - DNA, 25 bp, Artificial
  Probe
aatctccaactgtgcgggctttcac

SEQ ID NO: 219687 - DNA, 25 bp, Artificial
  Probe
aactgtgcgggctttcaccagccag

SEQ ID NO: 219688 - DNA, 25 bp, Artificial
  Probe
ggtttggttctcgtgtctctctctc

SEQ ID NO: 219689 - DNA, 25 bp, Artificial
  Probe
cagagcccgaagaattctgagaaat

SEQ ID NO: 219690 - DNA, 25 bp, Artificial
  Probe
agcccgaagaattctgagaaatgtg

SEQ ID NO: 219691 - DNA, 25 bp, Artificial
  Probe
ggaaaccccagcagtccctaaagct

SEQ ID NO: 219692 - DNA, 25 bp, Artificial
  Probe
gctagtccccagagggcaagataga

SEQ ID NO: 219693 - DNA, 25 bp, Artificial
  Probe
ttcaccagccagcaggaggccgggc

SEQ ID NO: 219694 - DNA, 25 bp, Artificial
  Probe
ccttgcctcccaagggaactaatgt

SEQ ID NO: 219695 - DNA, 25 bp, Artificial
  Probe
gtgcgggctttcaccagccagcagg

SEQ ID NO: 219696 - DNA, 25 bp, Artificial
  Probe
accagccagcaggaggccgggctct

SEQ ID NO: 219697 - DNA, 25 bp, Artificial
  Probe
tcaccagccagcaggaggccgggct

SEQ ID NO: 219698 - DNA, 25 bp, Artificial
  Probe
ctcccaagggaactaatgttctagg

SEQ ID NO: 219699 - DNA, 25 bp, Artificial
  Probe
atcagagcccgaagaattctgagaa

SEQ ID NO: 219700 - DNA, 25 bp, Artificial
  Probe
ccctaaatctccaactgtgcgggct

SEQ ID NO: 219701 - DNA, 25 bp, Artificial
  Probe
caaggtgtctttgtccaggtcaccc

SEQ ID NO: 219702 - DNA, 25 bp, Artificial
  Probe
cccttgcctcccaagggaactaatg

SEQ ID NO: 219703 - DNA, 25 bp, Artificial
  Probe
agcagtccctaaagctagtccccag

SEQ ID NO: 219704 - DNA, 25 bp, Artificial
  Probe
tccccagagggcaagatagaagaaa

SEQ ID NO: 219705 - DNA, 25 bp, Artificial
  Probe
ccaaagcccaaggtgtctttgtcca

SEQ ID NO: 219706 - DNA, 25 bp, Artificial
  Probe
tttcaccagccagcaggaggccggg

SEQ ID NO: 219707 - DNA, 25 bp, Artificial
  Probe
tctccaaagcccaaggtgtctttgt

SEQ ID NO: 219708 - DNA, 25 bp, Artificial
  Probe
ctccaaagcccaaggtgtctttgtc

SEQ ID NO: 219709 - DNA, 25 bp, Artificial
  Probe
gagcccgaagaattctgagaaatgt

SEQ ID NO: 219710 - DNA, 25 bp, Artificial
  Probe
tgcgggctttcaccagccagcagga

SEQ ID NO: 219711 - DNA, 25 bp, Artificial
  Probe
gtccctaaagctagtccccagaggg

SEQ ID NO: 219712 - DNA, 25 bp, Artificial
  Probe
cctcccaagggaactaatgttctag

SEQ ID NO: 219713 - DNA, 25 bp, Artificial
  Probe
actgtgcgggctttcaccagccagc

SEQ ID NO: 219714 - DNA, 25 bp, Artificial
  Probe
aaatctccaactgtgcgggctttca

SEQ ID NO: 219715 - DNA, 25 bp, Artificial
  Probe
ctgggctctccaaagcccaaggtgt

SEQ ID NO: 219716 - DNA, 25 bp, Artificial
  Probe
aagcccaaggtgtctttgtccaggt

SEQ ID NO: 219717 - DNA, 25 bp, Artificial
  Probe
agcccaaggtgtctttgtccaggtc

SEQ ID NO: 219718 - DNA, 25 bp, Artificial
  Probe
cgggctttcaccagccagcaggagg

SEQ ID NO: 219719 - DNA, 25 bp, Artificial
  Probe
gcccctaaatctccaactgtgcggg

SEQ ID NO: 219720 - DNA, 25 bp, Artificial
  Probe
aagctagtccccagagggcaagata

SEQ ID NO: 219721 - DNA, 25 bp, Artificial
  Probe
cccaaggtgtctttgtccaggtcac

SEQ ID NO: 219722 - DNA, 25 bp, Artificial
  Probe
gcctcccaagggaactaatgttcta

SEQ ID NO: 219723 - DNA, 25 bp, Artificial
  Probe
tgggctctccaaagcccaaggtgtc

SEQ ID NO: 219724 - DNA, 25 bp, Artificial
  Probe
gcagtccctaaagctagtccccaga

SEQ ID NO: 219725 - DNA, 25 bp, Artificial
  Probe
ccacggggagctgctgagaagcccc

SEQ ID NO: 219726 - DNA, 25 bp, Artificial
  Probe
cacggggagctgctgagaagccccc

SEQ ID NO: 219727 - DNA, 25 bp, Artificial
  Probe
catcagagcccgaagaattctgaga

SEQ ID NO: 219728 - DNA, 25 bp, Artificial
  Probe
gaaaccccagcagtccctaaagcta

SEQ ID NO: 219729 - DNA, 25 bp, Artificial
  Probe
tgtgcgggctttcaccagccagcag

SEQ ID NO: 219730 - DNA, 25 bp, Artificial
  Probe
ctttcaccagccagcaggaggccgg

SEQ ID NO: 219731 - DNA, 25 bp, Artificial
  Probe
ccctaaagctagtccccagagggca

SEQ ID NO: 219732 - DNA, 25 bp, Artificial
  Probe
tggccatcatttcctgggagagatg

SEQ ID NO: 219733 - DNA, 25 bp, Artificial
  Probe
cgtatcctggggttcagtcttatat

SEQ ID NO: 219734 - DNA, 25 bp, Artificial
  Probe
atcgtcttctcctgggtctgggctg

SEQ ID NO: 219735 - DNA, 25 bp, Artificial
  Probe
tcatttcctgggagagatggctggt

SEQ ID NO: 219736 - DNA, 25 bp, Artificial
  Probe
agatttgatgctaaactggccactg

SEQ ID NO: 219737 - DNA, 25 bp, Artificial
  Probe
gtcttcgcatactgcctctgctggg

SEQ ID NO: 219738 - DNA, 25 bp, Artificial
  Probe
agatggctggtggtctgcaagccct

SEQ ID NO: 219739 - DNA, 25 bp, Artificial
  Probe
aactggccactgtgggaatcgtctt

SEQ ID NO: 219740 - DNA, 25 bp, Artificial
  Probe
ctgcaagccctttggcaatgtgaga

SEQ ID NO: 219741 - DNA, 25 bp, Artificial
  Probe
ttctcctgggtctgggctgctgtat

SEQ ID NO: 219742 - DNA, 25 bp, Artificial
  Probe
tcttctcctgggtctgggctgctgt

SEQ ID NO: 219743 - DNA, 25 bp, Artificial
  Probe
cgtgttcagcggtacctcgtatcct

SEQ ID NO: 219744 - DNA, 25 bp, Artificial
  Probe
tggtggtgatggtcttcgcatactg

SEQ ID NO: 219745 - DNA, 25 bp, Artificial
  Probe
tggtcacgtgctgcatcttcccact

SEQ ID NO: 219746 - DNA, 25 bp, Artificial
  Probe
gtctgcaagccctttggcaatgtga

SEQ ID NO: 219747 - DNA, 25 bp, Artificial
  Probe
ggccctatactttctttgcatgctt

SEQ ID NO: 219748 - DNA, 25 bp, Artificial
  Probe
ggccactgtgggaatcgtcttctcc

SEQ ID NO: 219749 - DNA, 25 bp, Artificial
  Probe
ttgctactgcccatcctggctatgc

SEQ ID NO: 219750 - DNA, 25 bp, Artificial
  Probe
ttgatgctaaactggccactgtggg

SEQ ID NO: 219751 - DNA, 25 bp, Artificial
  Probe
gatggtcttcgcatactgcctctgc

SEQ ID NO: 219752 - DNA, 25 bp, Artificial
  Probe
tctgggctgctgtatggacggcccc

SEQ ID NO: 219753 - DNA, 25 bp, Artificial
  Probe
cactcagcatcatcgtgctctgcta

SEQ ID NO: 219754 - DNA, 25 bp, Artificial
  Probe
cactgtgggaatcgtcttctcctgg

SEQ ID NO: 219755 - DNA, 25 bp, Artificial
  Probe
ctctgctacctccaagtgtggctgg

SEQ ID NO: 219756 - DNA, 25 bp, Artificial
  Probe
gcctctggtccttggccatcatttc

SEQ ID NO: 219757 - DNA, 25 bp, Artificial
  Probe
tcagcatcatcgtgctctgctacct

SEQ ID NO: 219758 - DNA, 25 bp, Artificial
  Probe
gaatctgagtccacccagaaggctg

SEQ ID NO: 219759 - DNA, 25 bp, Artificial
  Probe
tacctcgtatcctggggttcagtct

SEQ ID NO: 219760 - DNA, 25 bp, Artificial
  Probe
tgggctgctgtatggacggccccac

SEQ ID NO: 219761 - DNA, 25 bp, Artificial
  Probe
atcatcgtgctctgctacctccaag

SEQ ID NO: 219762 - DNA, 25 bp, Artificial
  Probe
tgtggtccagacgtgttcagcggta

SEQ ID NO: 219763 - DNA, 25 bp, Artificial
  Probe
gctaaactggccactgtgggaatcg

SEQ ID NO: 219764 - DNA, 25 bp, Artificial
  Probe
tggtgatggtcttcgcatactgcct

SEQ ID NO: 219765 - DNA, 25 bp, Artificial
  Probe
tggtccttggccatcatttcctggg

SEQ ID NO: 219766 - DNA, 25 bp, Artificial
  Probe
tggctggtggtctgcaagccctttg

SEQ ID NO: 219767 - DNA, 25 bp, Artificial
  Probe
gaaagaatctgagtccacccagaag

SEQ ID NO: 219768 - DNA, 25 bp, Artificial
  Probe
actttctttgcatgctttgctactg

SEQ ID NO: 219769 - DNA, 25 bp, Artificial
  Probe
atgctttgctactgcccatcctggc

SEQ ID NO: 219770 - DNA, 25 bp, Artificial
  Probe
cctttggcaatgtgagatttgatgc

SEQ ID NO: 219771 - DNA, 25 bp, Artificial
  Probe
ttatggcctgaagacatcgtgtggt

SEQ ID NO: 219772 - DNA, 25 bp, Artificial
  Probe
gggttcagtcttatatgatggtcct

SEQ ID NO: 219773 - DNA, 25 bp, Artificial
  Probe
aagccctttggcaatgtgagatttg

SEQ ID NO: 219774 - DNA, 25 bp, Artificial
  Probe
tcgtgtggtccagacgtgttcagcg

SEQ ID NO: 219775 - DNA, 25 bp, Artificial
  Probe
cctggggttcagtcttatatgatgg

SEQ ID NO: 219776 - DNA, 25 bp, Artificial
  Probe
ctgggggccctatactttctttgca

SEQ ID NO: 219777 - DNA, 25 bp, Artificial
  Probe
ccagacgtgttcagcggtacctcgt

SEQ ID NO: 219778 - DNA, 25 bp, Artificial
  Probe
ctgggactctgccccgggagcatcc

SEQ ID NO: 219779 - DNA, 25 bp, Artificial
  Probe
agctgggactctgccccgggagcat

SEQ ID NO: 219780 - DNA, 25 bp, Artificial
  Probe
tctgccccgggagcatcctccccag

SEQ ID NO: 219781 - DNA, 25 bp, Artificial
  Probe
gttctgagctgggactctgccccgg

SEQ ID NO: 219782 - DNA, 25 bp, Artificial
  Probe
cgctctgttctgagctgggactctg

SEQ ID NO: 219783 - DNA, 25 bp, Artificial
  Probe
tgaagccagacagggttgccatacc

SEQ ID NO: 219784 - DNA, 25 bp, Artificial
  Probe
tctgttctgagctgggactctgccc

SEQ ID NO: 219785 - DNA, 25 bp, Artificial
  Probe
tgttctgagctgggactctgccccg

SEQ ID NO: 219786 - DNA, 25 bp, Artificial
  Probe
ctgagctgggactctgccccgggag

SEQ ID NO: 219787 - DNA, 25 bp, Artificial
  Probe
gactctgccccgggagcatcctccc

SEQ ID NO: 219788 - DNA, 25 bp, Artificial
  Probe
agacagggttgccataccccaccac

SEQ ID NO: 219789 - DNA, 25 bp, Artificial
  Probe
cagacagggttgccataccccacca

SEQ ID NO: 219790 - DNA, 25 bp, Artificial
  Probe
ctctgttctgagctgggactctgcc

SEQ ID NO: 219791 - DNA, 25 bp, Artificial
  Probe
tctgagctgggactctgccccggga

SEQ ID NO: 219792 - DNA, 25 bp, Artificial
  Probe
ccagccccgctctgttctgagctgg

SEQ ID NO: 219793 - DNA, 25 bp, Artificial
  Probe
cccgctctgttctgagctgggactc

SEQ ID NO: 219794 - DNA, 25 bp, Artificial
  Probe
ggactctgccccgggagcatcctcc

SEQ ID NO: 219795 - DNA, 25 bp, Artificial
  Probe
gacagggttgccataccccaccacc

SEQ ID NO: 219796 - DNA, 25 bp, Artificial
  Probe
cagccccgctctgttctgagctggg

SEQ ID NO: 219797 - DNA, 25 bp, Artificial
  Probe
agccccgctctgttctgagctggga

SEQ ID NO: 219798 - DNA, 25 bp, Artificial
  Probe
ctgccccgggagcatcctccccagc

SEQ ID NO: 219799 - DNA, 25 bp, Artificial
  Probe
tgccccgggagcatcctccccagct

SEQ ID NO: 219800 - DNA, 25 bp, Artificial
  Probe
gccccgggagcatcctccccagctg

SEQ ID NO: 219801 - DNA, 25 bp, Artificial
  Probe
acagggttgccataccccaccaccg

SEQ ID NO: 219802 - DNA, 25 bp, Artificial
  Probe
gccccgctctgttctgagctgggac

SEQ ID NO: 219803 - DNA, 25 bp, Artificial
  Probe
ccccgctctgttctgagctgggact

SEQ ID NO: 219804 - DNA, 25 bp, Artificial
  Probe
gctgggactctgccccgggagcatc

SEQ ID NO: 219805 - DNA, 25 bp, Artificial
  Probe
ccgggagcatcctccccagctgaca

SEQ ID NO: 219806 - DNA, 25 bp, Artificial
  Probe
cccgggagcatcctccccagctgac

SEQ ID NO: 219807 - DNA, 25 bp, Artificial
  Probe
actctgccccgggagcatcctcccc

SEQ ID NO: 219808 - DNA, 25 bp, Artificial
  Probe
ttctgagctgggactctgccccggg

SEQ ID NO: 219809 - DNA, 25 bp, Artificial
  Probe
cgggagcatcctccccagctgacat

SEQ ID NO: 219810 - DNA, 25 bp, Artificial
  Probe
tgagctgggactctgccccgggagc

SEQ ID NO: 219811 - DNA, 25 bp, Artificial
  Probe
ccagacagggttgccataccccacc

SEQ ID NO: 219812 - DNA, 25 bp, Artificial
  Probe
ctctgccccgggagcatcctcccca

SEQ ID NO: 219813 - DNA, 25 bp, Artificial
  Probe
gccagacagggttgccataccccac

SEQ ID NO: 219814 - DNA, 25 bp, Artificial
  Probe
aagccagacagggttgccatacccc

SEQ ID NO: 219815 - DNA, 25 bp, Artificial
  Probe
gaagccagacagggttgccataccc

SEQ ID NO: 219816 - DNA, 25 bp, Artificial
  Probe
tgtgaagccagacagggttgccata

SEQ ID NO: 219817 - DNA, 25 bp, Artificial
  Probe
ccccgggagcatcctccccagctga

SEQ ID NO: 219818 - DNA, 25 bp, Artificial
  Probe
gctctgttctgagctgggactctgc

SEQ ID NO: 219819 - DNA, 25 bp, Artificial
  Probe
ccgctctgttctgagctgggactct

SEQ ID NO: 219820 - DNA, 25 bp, Artificial
  Probe
gtgaagccagacagggttgccatac

SEQ ID NO: 219821 - DNA, 25 bp, Artificial
  Probe
agccagacagggttgccatacccca

SEQ ID NO: 219822 - DNA, 25 bp, Artificial
  Probe
cagggttgccataccccaccaccgt

SEQ ID NO: 219823 - DNA, 25 bp, Artificial
  Probe
ctgttctgagctgggactctgcccc

SEQ ID NO: 219824 - DNA, 25 bp, Artificial
  Probe
gtattgtgcataattccctccatgt

SEQ ID NO: 219825 - DNA, 25 bp, Artificial
  Probe
agtattgtgcataattccctccatg

SEQ ID NO: 219826 - DNA, 25 bp, Artificial
  Probe
tgtttcttaaattcattgctccagg

SEQ ID NO: 219827 - DNA, 25 bp, Artificial
  Probe
cctattctggtcaggctctcagtgc

SEQ ID NO: 219828 - DNA, 25 bp, Artificial
  Probe
tttctggagtattgtgcataattcc

SEQ ID NO: 219829 - DNA, 25 bp, Artificial
  Probe
cttggatccaagtgaaacattacat

SEQ ID NO: 219830 - DNA, 25 bp, Artificial
  Probe
cggtatctttgtaaccctttatgat

SEQ ID NO: 219831 - DNA, 25 bp, Artificial
  Probe
gacacgtgtcacagcgtggcagcct

SEQ ID NO: 219832 - DNA, 25 bp, Artificial
  Probe
tcaactaaggccagcacaagggacg

SEQ ID NO: 219833 - DNA, 25 bp, Artificial
  Probe
ctcatgagggctttagtaaagggac

SEQ ID NO: 219834 - DNA, 25 bp, Artificial
  Probe
tacattggctccttcatccctcgtg

SEQ ID NO: 219835 - DNA, 25 bp, Artificial
  Probe
tgacacaaagcaactctagaaagga

SEQ ID NO: 219836 - DNA, 25 bp, Artificial
  Probe
agcacaagggacgtgaacagcactt

SEQ ID NO: 219837 - DNA, 25 bp, Artificial
  Probe
tcgctctttataacgctgtatgtca

SEQ ID NO: 219838 - DNA, 25 bp, Artificial
  Probe
gagctggttgttggacacgtgtcac

SEQ ID NO: 219839 - DNA, 25 bp, Artificial
  Probe
ttctggtcaggctctcagtgccctt

SEQ ID NO: 219840 - DNA, 25 bp, Artificial
  Probe
cgtgtcacagcgtggcagccttact

SEQ ID NO: 219841 - DNA, 25 bp, Artificial
  Probe
cctcagtcagcgacgttttaatctc

SEQ ID NO: 219842 - DNA, 25 bp, Artificial
  Probe
gacacctcagtcagcgacgttttaa

SEQ ID NO: 219843 - DNA, 25 bp, Artificial
  Probe
attgctccaggatcgctctttataa

SEQ ID NO: 219844 - DNA, 25 bp, Artificial
  Probe
taaccctttatgatcctaggggctg

SEQ ID NO: 219845 - DNA, 25 bp, Artificial
  Probe
agtcagcgacgttttaatctcccct

SEQ ID NO: 219846 - DNA, 25 bp, Artificial
  Probe
tcaggctctcagtgcccttcaacta

SEQ ID NO: 219847 - DNA, 25 bp, Artificial
  Probe
ttcggtatctttgtaaccctttatg

SEQ ID NO: 219848 - DNA, 25 bp, Artificial
  Probe
acgctgtatgtcatcaccccaggca

SEQ ID NO: 219849 - DNA, 25 bp, Artificial
  Probe
tcggggctcatgagggctttagtaa

SEQ ID NO: 219850 - DNA, 25 bp, Artificial
  Probe
ctccctattctggtcaggctctcag

SEQ ID NO: 219851 - DNA, 25 bp, Artificial
  Probe
agtaaagggactgcagcctgtgaca

SEQ ID NO: 219852 - DNA, 25 bp, Artificial
  Probe
ataacgctgtatgtcatcaccccag

SEQ ID NO: 219853 - DNA, 25 bp, Artificial
  Probe
ctccaggatcgctctttataacgct

SEQ ID NO: 219854 - DNA, 25 bp, Artificial
  Probe
tccatgtctccaccttggatccaag

SEQ ID NO: 219855 - DNA, 25 bp, Artificial
  Probe
cagtgcccttcaactaaggccagca

SEQ ID NO: 219856 - DNA, 25 bp, Artificial
  Probe
tcttaaattcattgctccaggatcg

SEQ ID NO: 219857 - DNA, 25 bp, Artificial
  Probe
tctcagtgcccttcaactaaggcca

SEQ ID NO: 219858 - DNA, 25 bp, Artificial
  Probe
atgagaggtcagacacctcagtcag

SEQ ID NO: 219859 - DNA, 25 bp, Artificial
  Probe
tttgtaaccctttatgatcctaggg

SEQ ID NO: 219860 - DNA, 25 bp, Artificial
  Probe
gcccttcaactaaggccagcacaag

SEQ ID NO: 219861 - DNA, 25 bp, Artificial
  Probe
gggactgcagcctgtgacacaaagc

SEQ ID NO: 219862 - DNA, 25 bp, Artificial
  Probe
ggacgtgaacagcacttgctctgac

SEQ ID NO: 219863 - DNA, 25 bp, Artificial
  Probe
ccagcacaagggacgtgaacagcac

SEQ ID NO: 219864 - DNA, 25 bp, Artificial
  Probe
caaggtttcctcttcggtatctttg

SEQ ID NO: 219865 - DNA, 25 bp, Artificial
  Probe
tggatgcgccccttttgtccctggg

SEQ ID NO: 219866 - DNA, 25 bp, Artificial
  Probe
gatgcgccccttttgtccctgggtt

SEQ ID NO: 219867 - DNA, 25 bp, Artificial
  Probe
acaccatgagaggtcagacacctca

SEQ ID NO: 219868 - DNA, 25 bp, Artificial
  Probe
aaggccagcacaagggacgtgaaca

SEQ ID NO: 219869 - DNA, 25 bp, Artificial
  Probe
taaagggactgcagcctgtgacaca

SEQ ID NO: 219870 - DNA, 25 bp, Artificial
  Probe
ctcgtgactgttccaaatactgaaa

SEQ ID NO: 219871 - DNA, 25 bp, Artificial
  Probe
tttttctcaacaagtacagggtttg

SEQ ID NO: 219872 - DNA, 25 bp, Artificial
  Probe
cagggcttcagtagacaacaagtgt

SEQ ID NO: 219873 - DNA, 25 bp, Artificial
  Probe
cagtttcaacagatggatgttttcg

SEQ ID NO: 219874 - DNA, 25 bp, Artificial
  Probe
gcagtttcaacagatggatgttttc

SEQ ID NO: 219875 - DNA, 25 bp, Artificial
  Probe
actgagcttggttatgtgaccggga

SEQ ID NO: 219876 - DNA, 25 bp, Artificial
  Probe
tctttttctcaacaagtacagggtt

SEQ ID NO: 219877 - DNA, 25 bp, Artificial
  Probe
ctggatctcatttggcaatgcagaa

SEQ ID NO: 219878 - DNA, 25 bp, Artificial
  Probe
tcatttggcaatgcagaatgactcg

SEQ ID NO: 219879 - DNA, 25 bp, Artificial
  Probe
ggttcttgctgacatccaaatatat

SEQ ID NO: 219880 - DNA, 25 bp, Artificial
  Probe
gtgtcctggatctcatttggcaatg

SEQ ID NO: 219881 - DNA, 25 bp, Artificial
  Probe
agaagtctgcctctgagttacatct

SEQ ID NO: 219882 - DNA, 25 bp, Artificial
  Probe
gcttcagtagacaacaagtgtcctg

SEQ ID NO: 219883 - DNA, 25 bp, Artificial
  Probe
gtctgcctctgagttacatcttttt

SEQ ID NO: 219884 - DNA, 25 bp, Artificial
  Probe
gcaatgcagaatgactcgtgactgt

SEQ ID NO: 219885 - DNA, 25 bp, Artificial
  Probe
tcgtgactgttccaaatactgaaaa

SEQ ID NO: 219886 - DNA, 25 bp, Artificial
  Probe
agggactgagcttggttatgtgacc

SEQ ID NO: 219887 - DNA, 25 bp, Artificial
  Probe
gttccaaatactgaaaagaagtctg

SEQ ID NO: 219888 - DNA, 25 bp, Artificial
  Probe
acaagtgtcctggatctcatttggc

SEQ ID NO: 219889 - DNA, 25 bp, Artificial
  Probe
gatgttttcgggttcttgctgacat

SEQ ID NO: 219890 - DNA, 25 bp, Artificial
  Probe
agaatgactcgtgactgttccaaat

SEQ ID NO: 219891 - DNA, 25 bp, Artificial
  Probe
catttggcaatgcagaatgactcgt

SEQ ID NO: 219892 - DNA, 25 bp, Artificial
  Probe
tcaacagatggatgttttcgggttc

SEQ ID NO: 219893 - DNA, 25 bp, Artificial
  Probe
tgaaaagaagtctgcctctgagtta

SEQ ID NO: 219894 - DNA, 25 bp, Artificial
  Probe
ctcaacaagtacagggtttgaggtt

SEQ ID NO: 219895 - DNA, 25 bp, Artificial
  Probe
ggcttcagtagacaacaagtgtcct

SEQ ID NO: 219896 - DNA, 25 bp, Artificial
  Probe
caatgcagaatgactcgtgactgtt

SEQ ID NO: 219897 - DNA, 25 bp, Artificial
  Probe
gttttcgggttcttgctgacatcca

SEQ ID NO: 219898 - DNA, 25 bp, Artificial
  Probe
cagatggatgttttcgggttcttgc

SEQ ID NO: 219899 - DNA, 25 bp, Artificial
  Probe
ttctcaacaagtacagggtttgagg

SEQ ID NO: 219900 - DNA, 25 bp, Artificial
  Probe
tctcatttggcaatgcagaatgact

SEQ ID NO: 219901 - DNA, 25 bp, Artificial
  Probe
atctttttctcaacaagtacagggt

SEQ ID NO: 219902 - DNA, 25 bp, Artificial
  Probe
agacaacaagtgtcctggatctcat

SEQ ID NO: 219903 - DNA, 25 bp, Artificial
  Probe
atctcatttggcaatgcagaatgac

SEQ ID NO: 219904 - DNA, 25 bp, Artificial
  Probe
gactcgtgactgttccaaatactga

SEQ ID NO: 219905 - DNA, 25 bp, Artificial
  Probe
cttggttatgtgaccgggagaagtc

SEQ ID NO: 219906 - DNA, 25 bp, Artificial
  Probe
gactgttccaaatactgaaaagaag

SEQ ID NO: 219907 - DNA, 25 bp, Artificial
  Probe
catctttttctcaacaagtacaggg

SEQ ID NO: 219908 - DNA, 25 bp, Artificial
  Probe
ttttctcaacaagtacagggtttga

SEQ ID NO: 219909 - DNA, 25 bp, Artificial
  Probe
gggcttcagtagacaacaagtgtcc

SEQ ID NO: 219910 - DNA, 25 bp, Artificial
  Probe
ggcagggcttcagtagacaacaagt

SEQ ID NO: 219911 - DNA, 25 bp, Artificial
  Probe
tgactgttccaaatactgaaaagaa

SEQ ID NO: 219912 - DNA, 25 bp, Artificial
  Probe
cctggatctcatttggcaatgcaga

SEQ ID NO: 219913 - DNA, 25 bp, Artificial
  Probe
caacaagtgtcctggatctcatttg

SEQ ID NO: 219914 - DNA, 25 bp, Artificial
  Probe
caacagatggatgttttcgggttct

SEQ ID NO: 219915 - DNA, 25 bp, Artificial
  Probe
ctgttccaaatactgaaaagaagtc

SEQ ID NO: 219916 - DNA, 25 bp, Artificial
  Probe
ccctcattagcatgtttccatggca

SEQ ID NO: 219917 - DNA, 25 bp, Artificial
  Probe
tcatgccagtcctcaaggttgtgct

SEQ ID NO: 219918 - DNA, 25 bp, Artificial
  Probe
cagcggtctccacagcattgcgagg

SEQ ID NO: 219919 - DNA, 25 bp, Artificial
  Probe
ggttgaccgtccacactcacatcgt

SEQ ID NO: 219920 - DNA, 25 bp, Artificial
  Probe
agcccctcattagcatgtttccatg

SEQ ID NO: 219921 - DNA, 25 bp, Artificial
  Probe
cacagcattgcgaggagcattgaga

SEQ ID NO: 219922 - DNA, 25 bp, Artificial
  Probe
gagctttgacatttctgcaggcaaa

SEQ ID NO: 219923 - DNA, 25 bp, Artificial
  Probe
tgggcgtctgagacagctgccatga

SEQ ID NO: 219924 - DNA, 25 bp, Artificial
  Probe
acagcattgcgaggagcattgagac

SEQ ID NO: 219925 - DNA, 25 bp, Artificial
  Probe
acttcagtgagacctcagccttcat

SEQ ID NO: 219926 - DNA, 25 bp, Artificial
  Probe
caggagctttgacatttctgcaggc

SEQ ID NO: 219927 - DNA, 25 bp, Artificial
  Probe
catcgtcagcaccagcaacttcagt

SEQ ID NO: 219928 - DNA, 25 bp, Artificial
  Probe
agacgaggaactactctgaagggtt

SEQ ID NO: 219929 - DNA, 25 bp, Artificial
  Probe
taagctgggcgtctgagacagctgc

SEQ ID NO: 219930 - DNA, 25 bp, Artificial
  Probe
gccacttctccaaagaaagccatgc

SEQ ID NO: 219931 - DNA, 25 bp, Artificial
  Probe
gctttgacatttctgcaggcaaact

SEQ ID NO: 219932 - DNA, 25 bp, Artificial
  Probe
aagggttgaccgtccacactcacat

SEQ ID NO: 219933 - DNA, 25 bp, Artificial
  Probe
tcatcagcggtctccacagcattgc

SEQ ID NO: 219934 - DNA, 25 bp, Artificial
  Probe
tctccacagcattgcgaggagcatt

SEQ ID NO: 219935 - DNA, 25 bp, Artificial
  Probe
gaggaactactctgaagggttgacc

SEQ ID NO: 219936 - DNA, 25 bp, Artificial
  Probe
acatcgtcagcaccagcaacttcag

SEQ ID NO: 219937 - DNA, 25 bp, Artificial
  Probe
agccttcatgccagtcctcaaggtt

SEQ ID NO: 219938 - DNA, 25 bp, Artificial
  Probe
agcattgcgaggagcattgagacga

SEQ ID NO: 219939 - DNA, 25 bp, Artificial
  Probe
cagtgagacctcagccttcatgcca

SEQ ID NO: 219940 - DNA, 25 bp, Artificial
  Probe
cttctccaaagaaagccatgctaag

SEQ ID NO: 219941 - DNA, 25 bp, Artificial
  Probe
gacgaggaactactctgaagggttg

SEQ ID NO: 219942 - DNA, 25 bp, Artificial
  Probe
tactctgaagggttgaccgtccaca

SEQ ID NO: 219943 - DNA, 25 bp, Artificial
  Probe
gaactactctgaagggttgaccgtc

SEQ ID NO: 219944 - DNA, 25 bp, Artificial
  Probe
agcaacttcagtgagacctcagcct

SEQ ID NO: 219945 - DNA, 25 bp, Artificial
  Probe
agctgggcgtctgagacagctgcca

SEQ ID NO: 219946 - DNA, 25 bp, Artificial
  Probe
agtcctcaaggttgtgctcagccag

SEQ ID NO: 219947 - DNA, 25 bp, Artificial
  Probe
gtcagcaccagcaacttcagtgaga

SEQ ID NO: 219948 - DNA, 25 bp, Artificial
  Probe
cttcatgccagtcctcaaggttgtg

SEQ ID NO: 219949 - DNA, 25 bp, Artificial
  Probe
caaagaaagccatgctaagactggg

SEQ ID NO: 219950 - DNA, 25 bp, Artificial
  Probe
gcccctcattagcatgtttccatgg

SEQ ID NO: 219951 - DNA, 25 bp, Artificial
  Probe
ttctccaaagaaagccatgctaaga

SEQ ID NO: 219952 - DNA, 25 bp, Artificial
  Probe
gcaccagcaacttcagtgagacctc

SEQ ID NO: 219953 - DNA, 25 bp, Artificial
  Probe
cgtctgagacagctgccatgacctc

SEQ ID NO: 219954 - DNA, 25 bp, Artificial
  Probe
gctgggcgtctgagacagctgccat

SEQ ID NO: 219955 - DNA, 25 bp, Artificial
  Probe
attagcatgtttccatggcacccgc

SEQ ID NO: 219956 - DNA, 25 bp, Artificial
  Probe
tttgacatttctgcaggcaaactcc

SEQ ID NO: 219957 - DNA, 25 bp, Artificial
  Probe
ccaaagaaagccatgctaagactgg

SEQ ID NO: 219958 - DNA, 25 bp, Artificial
  Probe
gcaacttcagtgagacctcagcctt

SEQ ID NO: 219959 - DNA, 25 bp, Artificial
  Probe
tctgaagggttgaccgtccacactc

SEQ ID NO: 219960 - DNA, 25 bp, Artificial
  Probe
gccttcatgccagtcctcaaggttg

SEQ ID NO: 219961 - DNA, 25 bp, Artificial
  Probe
cgccacttctccaaagaaagccatg

SEQ ID NO: 219962 - DNA, 25 bp, Artificial
  Probe
aggctactaatccttatactaagtg

SEQ ID NO: 219963 - DNA, 25 bp, Artificial
  Probe
gaaggctactaatccttatactaag

SEQ ID NO: 219964 - DNA, 25 bp, Artificial
  Probe
cagtctaagcaagactgttttccaa

SEQ ID NO: 219965 - DNA, 25 bp, Artificial
  Probe
ctgaatgtcgcaggataaaggtcaa

SEQ ID NO: 219966 - DNA, 25 bp, Artificial
  Probe
gttacaatacagtgcgtatgtcttg

SEQ ID NO: 219967 - DNA, 25 bp, Artificial
  Probe
cagatgacttcatatccccataagg

SEQ ID NO: 219968 - DNA, 25 bp, Artificial
  Probe
taggatgataccaccgagtactgca

SEQ ID NO: 219969 - DNA, 25 bp, Artificial
  Probe
tcttgaacctccagaaagtctgaag

SEQ ID NO: 219970 - DNA, 25 bp, Artificial
  Probe
agtgcgtatgtcttgaacctccaga

SEQ ID NO: 219971 - DNA, 25 bp, Artificial
  Probe
ttgaacctccagaaagtctgaaggc

SEQ ID NO: 219972 - DNA, 25 bp, Artificial
  Probe
cgagtactgcatcagtgatgtaaag

SEQ ID NO: 219973 - DNA, 25 bp, Artificial
  Probe
tctaagcaagactgttttccaagtt

SEQ ID NO: 219974 - DNA, 25 bp, Artificial
  Probe
agatgacttcatatccccataagga

SEQ ID NO: 219975 - DNA, 25 bp, Artificial
  Probe
caatacagtgcgtatgtcttgaacc

SEQ ID NO: 219976 - DNA, 25 bp, Artificial
  Probe
tccccataaggattatattgtgtta

SEQ ID NO: 219977 - DNA, 25 bp, Artificial
  Probe
actgaatgtcgcaggataaaggtca

SEQ ID NO: 219978 - DNA, 25 bp, Artificial
  Probe
atatccccataaggattatattgtg

SEQ ID NO: 219979 - DNA, 25 bp, Artificial
  Probe
taccaccgagtactgcatcagtgat

SEQ ID NO: 219980 - DNA, 25 bp, Artificial
  Probe
tgacagtctaagcaagactgttttc

SEQ ID NO: 219981 - DNA, 25 bp, Artificial
  Probe
tgtgttacaatacagtgcgtatgtc

SEQ ID NO: 219982 - DNA, 25 bp, Artificial
  Probe
ctatctaggatgataccaccgagta

SEQ ID NO: 219983 - DNA, 25 bp, Artificial
  Probe
aacctccagaaagtctgaaggctac

SEQ ID NO: 219984 - DNA, 25 bp, Artificial
  Probe
atgataccaccgagtactgcatcag

SEQ ID NO: 219985 - DNA, 25 bp, Artificial
  Probe
ctccagaaagtctgaaggctactaa

SEQ ID NO: 219986 - DNA, 25 bp, Artificial
  Probe
agctatctaggatgataccaccgag

SEQ ID NO: 219987 - DNA, 25 bp, Artificial
  Probe
gtctgaaggctactaatccttatac

SEQ ID NO: 219988 - DNA, 25 bp, Artificial
  Probe
ccttcaaagagctatctaggatgat

SEQ ID NO: 219989 - DNA, 25 bp, Artificial
  Probe
aagtctgaaggctactaatccttat

SEQ ID NO: 219990 - DNA, 25 bp, Artificial
  Probe
aacgtccttcaaagagctatctagg

SEQ ID NO: 219991 - DNA, 25 bp, Artificial
  Probe
acagtgcgtatgtcttgaacctcca

SEQ ID NO: 219992 - DNA, 25 bp, Artificial
  Probe
agtctaagcaagactgttttccaag

SEQ ID NO: 219993 - DNA, 25 bp, Artificial
  Probe
cctccagaaagtctgaaggctacta

SEQ ID NO: 219994 - DNA, 25 bp, Artificial
  Probe
ccagtagagctttgtttgttataca

SEQ ID NO: 219995 - DNA, 25 bp, Artificial
  Probe
tcaaagagctatctaggatgatacc

SEQ ID NO: 219996 - DNA, 25 bp, Artificial
  Probe
gataccaccgagtactgcatcagtg

SEQ ID NO: 219997 - DNA, 25 bp, Artificial
  Probe
gcaagactgttttccaagttctctt

SEQ ID NO: 219998 - DNA, 25 bp, Artificial
  Probe
gatgacttcatatccccataaggat

SEQ ID NO: 219999 - DNA, 25 bp, Artificial
  Probe
accagtagagctttgtttgttatac

SEQ ID NO: 220000 - DNA, 25 bp, Artificial
  Probe
ggttttgacagtctaagcaagactg

SEQ ID NO: 220001 - DNA, 25 bp, Artificial
  Probe
aaacgtccttcaaagagctatctag

SEQ ID NO: 220002 - DNA, 25 bp, Artificial
  Probe
taatagaaaacgtccttcaaagagc

SEQ ID NO: 220003 - DNA, 25 bp, Artificial
  Probe
gttttgacagtctaagcaagactgt

SEQ ID NO: 220004 - DNA, 25 bp, Artificial
  Probe
taagcaagactgttttccaagttct

SEQ ID NO: 220005 - DNA, 25 bp, Artificial
  Probe
tatccccataaggattatattgtgt

SEQ ID NO: 220006 - DNA, 25 bp, Artificial
  Probe
agtctgaaggctactaatccttata

SEQ ID NO: 220007 - DNA, 25 bp, Artificial
  Probe
tagaaaacgtccttcaaagagctat

SEQ ID NO: 220008 - DNA, 25 bp, Artificial
  Probe
tactatgcctttgtgtaagtctcag

SEQ ID NO: 220009 - DNA, 25 bp, Artificial
  Probe
tatgcctttgtgtaagtctcagaga

SEQ ID NO: 220010 - DNA, 25 bp, Artificial
  Probe
cttttcttgcctcaggggctgtgcc

SEQ ID NO: 220011 - DNA, 25 bp, Artificial
  Probe
cactgggcagtagtggtcagttttt

SEQ ID NO: 220012 - DNA, 25 bp, Artificial
  Probe
tgcctcaggggctgtgcctgcctaa

SEQ ID NO: 220013 - DNA, 25 bp, Artificial
  Probe
ttttcttgcctcaggggctgtgcct

SEQ ID NO: 220014 - DNA, 25 bp, Artificial
  Probe
ggtgacagcagtcacaagtcacagt

SEQ ID NO: 220015 - DNA, 25 bp, Artificial
  Probe
cagtcacaagtcacagtgaataaac

SEQ ID NO: 220016 - DNA, 25 bp, Artificial
  Probe
tgcctttgtgtaagtctcagagacc

SEQ ID NO: 220017 - DNA, 25 bp, Artificial
  Probe
ttccccaggccctggctgagatcag

SEQ ID NO: 220018 - DNA, 25 bp, Artificial
  Probe
aatatccccttttcttgcctcaggg

SEQ ID NO: 220019 - DNA, 25 bp, Artificial
  Probe
tcccttaagctgtaggagaattcct

SEQ ID NO: 220020 - DNA, 25 bp, Artificial
  Probe
cagtactatgcctttgtgtaagtct

SEQ ID NO: 220021 - DNA, 25 bp, Artificial
  Probe
cccttaagctgtaggagaattcctt

SEQ ID NO: 220022 - DNA, 25 bp, Artificial
  Probe
gcctcaggggctgtgcctgcctaag

SEQ ID NO: 220023 - DNA, 25 bp, Artificial
  Probe
tgtgtaagtctcagagacccagaac

SEQ ID NO: 220024 - DNA, 25 bp, Artificial
  Probe
ctgggcagtagtggtcagtttttac

SEQ ID NO: 220025 - DNA, 25 bp, Artificial
  Probe
cagcagtcacaagtcacagtgaata

SEQ ID NO: 220026 - DNA, 25 bp, Artificial
  Probe
gaggtgacagcagtcacaagtcaca

SEQ ID NO: 220027 - DNA, 25 bp, Artificial
  Probe
tatccccttttcttgcctcaggggc

SEQ ID NO: 220028 - DNA, 25 bp, Artificial
  Probe
attgaggaccctgcagggagagcct

SEQ ID NO: 220029 - DNA, 25 bp, Artificial
  Probe
agcatggaggtgacagcagtcacaa

SEQ ID NO: 220030 - DNA, 25 bp, Artificial
  Probe
gtgtaagtctcagagacccagaacc

SEQ ID NO: 220031 - DNA, 25 bp, Artificial
  Probe
tcacaagtcacagtgaataaactag

SEQ ID NO: 220032 - DNA, 25 bp, Artificial
  Probe
ctcccttaagctgtaggagaattcc

SEQ ID NO: 220033 - DNA, 25 bp, Artificial
  Probe
gtcacaagtcacagtgaataaacta

SEQ ID NO: 220034 - DNA, 25 bp, Artificial
  Probe
atatccccttttcttgcctcagggg

SEQ ID NO: 220035 - DNA, 25 bp, Artificial
  Probe
ccttttcttgcctcaggggctgtgc

SEQ ID NO: 220036 - DNA, 25 bp, Artificial
  Probe
tttgtgtaagtctcagagacccaga

SEQ ID NO: 220037 - DNA, 25 bp, Artificial
  Probe
attcttcagtttggaaaccatgccc

SEQ ID NO: 220038 - DNA, 25 bp, Artificial
  Probe
ctttgtgtaagtctcagagacccag

SEQ ID NO: 220039 - DNA, 25 bp, Artificial
  Probe
acagcagtcacaagtcacagtgaat

SEQ ID NO: 220040 - DNA, 25 bp, Artificial
  Probe
ccactgggcagtagtggtcagtttt

SEQ ID NO: 220041 - DNA, 25 bp, Artificial
  Probe
gtgattcttcagtttggaaaccatg

SEQ ID NO: 220042 - DNA, 25 bp, Artificial
  Probe
tgacagcagtcacaagtcacagtga

SEQ ID NO: 220043 - DNA, 25 bp, Artificial
  Probe
cctttgtgtaagtctcagagaccca

SEQ ID NO: 220044 - DNA, 25 bp, Artificial
  Probe
atgcctttgtgtaagtctcagagac

SEQ ID NO: 220045 - DNA, 25 bp, Artificial
  Probe
ggtgtgattcttcagtttggaaacc

SEQ ID NO: 220046 - DNA, 25 bp, Artificial
  Probe
cttcagtttggaaaccatgcccctt

SEQ ID NO: 220047 - DNA, 25 bp, Artificial
  Probe
cctccactgggcagtagtggtcagt

SEQ ID NO: 220048 - DNA, 25 bp, Artificial
  Probe
gcagtcacaagtcacagtgaataaa

SEQ ID NO: 220049 - DNA, 25 bp, Artificial
  Probe
ctccactgggcagtagtggtcagtt

SEQ ID NO: 220050 - DNA, 25 bp, Artificial
  Probe
gtaagtctcagagacccagaacccc

SEQ ID NO: 220051 - DNA, 25 bp, Artificial
  Probe
atccccttttcttgcctcaggggct

SEQ ID NO: 220052 - DNA, 25 bp, Artificial
  Probe
gtactatgcctttgtgtaagtctca

SEQ ID NO: 220053 - DNA, 25 bp, Artificial
  Probe
tgtgattcttcagtttggaaaccat

SEQ ID NO: 220054 - DNA, 25 bp, Artificial
  Probe
gccaccctgcgaggagtgcattgtg

SEQ ID NO: 220055 - DNA, 25 bp, Artificial
  Probe
gctctgagcacacagtggatggagt

SEQ ID NO: 220056 - DNA, 25 bp, Artificial
  Probe
catgacagtgagctcagaccagatg

SEQ ID NO: 220057 - DNA, 25 bp, Artificial
  Probe
ctgagcacacagtggatggagtgaa

SEQ ID NO: 220058 - DNA, 25 bp, Artificial
  Probe
ttgatgccctggacaaaattaagac

SEQ ID NO: 220059 - DNA, 25 bp, Artificial
  Probe
tgctactgaaagagcccatgacagt

SEQ ID NO: 220060 - DNA, 25 bp, Artificial
  Probe
gaaagagcccatgacagtgagctca

SEQ ID NO: 220061 - DNA, 25 bp, Artificial
  Probe
ctgctactgaaagagcccatgacag

SEQ ID NO: 220062 - DNA, 25 bp, Artificial
  Probe
tgtgtggctgctactgaaagagccc

SEQ ID NO: 220063 - DNA, 25 bp, Artificial
  Probe
tgaagtatgctgctgagcttcacct

SEQ ID NO: 220064 - DNA, 25 bp, Artificial
  Probe
tgccctggacaaaattaagactaag

SEQ ID NO: 220065 - DNA, 25 bp, Artificial
  Probe
aagagcccatgacagtgagctcaga

SEQ ID NO: 220066 - DNA, 25 bp, Artificial
  Probe
ggctgctactgaaagagcccatgac

SEQ ID NO: 220067 - DNA, 25 bp, Artificial
  Probe
tccttgatgccctggacaaaattaa

SEQ ID NO: 220068 - DNA, 25 bp, Artificial
  Probe
tctgagcacacagtggatggagtga

SEQ ID NO: 220069 - DNA, 25 bp, Artificial
  Probe
ctggttcactggaacccgaagtata

SEQ ID NO: 220070 - DNA, 25 bp, Artificial
  Probe
gtgcctgttccctgcttgccgggac

SEQ ID NO: 220071 - DNA, 25 bp, Artificial
  Probe
ctgaaagagcccatgacagtgagct

SEQ ID NO: 220072 - DNA, 25 bp, Artificial
  Probe
agtaaggctctggacgtgccctctt

SEQ ID NO: 220073 - DNA, 25 bp, Artificial
  Probe
gttcgccagtgcagagaatgagccc

SEQ ID NO: 220074 - DNA, 25 bp, Artificial
  Probe
gaggctccttttaatcacttcgacc

SEQ ID NO: 220075 - DNA, 25 bp, Artificial
  Probe
aaggaggctccttttaatcacttcg

SEQ ID NO: 220076 - DNA, 25 bp, Artificial
  Probe
ttcaagtaaggctctggacgtgccc

SEQ ID NO: 220077 - DNA, 25 bp, Artificial
  Probe
tgcgcagcctgttcgccagtgcaga

SEQ ID NO: 220078 - DNA, 25 bp, Artificial
  Probe
agcctgttcgccagtgcagagaatg

SEQ ID NO: 220079 - DNA, 25 bp, Artificial
  Probe
aggagtgcattgtgtggctgctact

SEQ ID NO: 220080 - DNA, 25 bp, Artificial
  Probe
aggctctgaagcagcccgatgggat

SEQ ID NO: 220081 - DNA, 25 bp, Artificial
  Probe
acagtgagctcagaccagatggcca

SEQ ID NO: 220082 - DNA, 25 bp, Artificial
  Probe
caccctgcgaggagtgcattgtgtg

SEQ ID NO: 220083 - DNA, 25 bp, Artificial
  Probe
gcattgtgtggctgctactgaaaga

SEQ ID NO: 220084 - DNA, 25 bp, Artificial
  Probe
ggcaaggaggctccttttaatcact

SEQ ID NO: 220085 - DNA, 25 bp, Artificial
  Probe
gagtgcattgtgtggctgctactga

SEQ ID NO: 220086 - DNA, 25 bp, Artificial
  Probe
cctgttccctgcttgccgggactat

SEQ ID NO: 220087 - DNA, 25 bp, Artificial
  Probe
catggctctgagcacacagtggatg

SEQ ID NO: 220088 - DNA, 25 bp, Artificial
  Probe
cagtgagctcagaccagatggccaa

SEQ ID NO: 220089 - DNA, 25 bp, Artificial
  Probe
agcccatgacagtgagctcagacca

SEQ ID NO: 220090 - DNA, 25 bp, Artificial
  Probe
tcgccagtgcagagaatgagccccc

SEQ ID NO: 220091 - DNA, 25 bp, Artificial
  Probe
cactggaacccgaagtataacacct

SEQ ID NO: 220092 - DNA, 25 bp, Artificial
  Probe
tggttcactggaacccgaagtataa

SEQ ID NO: 220093 - DNA, 25 bp, Artificial
  Probe
gtggctgctactgaaagagcccatg

SEQ ID NO: 220094 - DNA, 25 bp, Artificial
  Probe
tggctctgagcacacagtggatgga

SEQ ID NO: 220095 - DNA, 25 bp, Artificial
  Probe
ctgttccctgcttgccgggactatt

SEQ ID NO: 220096 - DNA, 25 bp, Artificial
  Probe
gcctgttcgccagtgcagagaatga

SEQ ID NO: 220097 - DNA, 25 bp, Artificial
  Probe
ccaccctgcgaggagtgcattgtgt

SEQ ID NO: 220098 - DNA, 25 bp, Artificial
  Probe
gacagtgagctcagaccagatggcc

SEQ ID NO: 220099 - DNA, 25 bp, Artificial
  Probe
tgaagcagcccgatgggattgctgt

SEQ ID NO: 220100 - DNA, 25 bp, Artificial
  Probe
agagcacacctgaagtgcccatgcc

SEQ ID NO: 220101 - DNA, 25 bp, Artificial
  Probe
taccctagtgcctcggtggaaaact

SEQ ID NO: 220102 - DNA, 25 bp, Artificial
  Probe
cgcccttcacccagaatgtggagac

SEQ ID NO: 220103 - DNA, 25 bp, Artificial
  Probe
tagtcccttggctgttacagttgac

SEQ ID NO: 220104 - DNA, 25 bp, Artificial
  Probe
gacagcccgagtccatgcctttctg

SEQ ID NO: 220105 - DNA, 25 bp, Artificial
  Probe
aggctggagtggatgccttcattca

SEQ ID NO: 220106 - DNA, 25 bp, Artificial
  Probe
gttacagttgacagcccgagtccat

SEQ ID NO: 220107 - DNA, 25 bp, Artificial
  Probe
agctctctggaccttcctgtggttt

SEQ ID NO: 220108 - DNA, 25 bp, Artificial
  Probe
ctcctaccctagtgcctcggtggaa

SEQ ID NO: 220109 - DNA, 25 bp, Artificial
  Probe
tgcctcggtggaaaactaccagcag

SEQ ID NO: 220110 - DNA, 25 bp, Artificial
  Probe
tccctggcctaccagcgttacaagg

SEQ ID NO: 220111 - DNA, 25 bp, Artificial
  Probe
caaacctgatgacgtgttggtggga

SEQ ID NO: 220112 - DNA, 25 bp, Artificial
  Probe
acttctctcaaggtttgctgtccag

SEQ ID NO: 220113 - DNA, 25 bp, Artificial
  Probe
gttgacagcccgagtccatgccttt

SEQ ID NO: 220114 - DNA, 25 bp, Artificial
  Probe
cattcagaactatgtggaccccacg

SEQ ID NO: 220115 - DNA, 25 bp, Artificial
  Probe
gtttcttctccatcttctcctgggg

SEQ ID NO: 220116 - DNA, 25 bp, Artificial
  Probe
cagtgggcagccaccaaacctgatg

SEQ ID NO: 220117 - DNA, 25 bp, Artificial
  Probe
cgttacaaggctggagtggatgcct

SEQ ID NO: 220118 - DNA, 25 bp, Artificial
  Probe
accctcaagggcatctttgaggaga

SEQ ID NO: 220119 - DNA, 25 bp, Artificial
  Probe
tcttctccatcttctcctggggtgt

SEQ ID NO: 220120 - DNA, 25 bp, Artificial
  Probe
ggcctaccagcgttacaaggctgga

SEQ ID NO: 220121 - DNA, 25 bp, Artificial
  Probe
accagcgttacaaggctggagtgga

SEQ ID NO: 220122 - DNA, 25 bp, Artificial
  Probe
gtggaaaactaccagcagccgccct

SEQ ID NO: 220123 - DNA, 25 bp, Artificial
  Probe
cgcctgaccctcaagggcatctttg

SEQ ID NO: 220124 - DNA, 25 bp, Artificial
  Probe
tggaaaactaccagcagccgccctt

SEQ ID NO: 220125 - DNA, 25 bp, Artificial
  Probe
ccagcagccagagcacacctgaagt

SEQ ID NO: 220126 - DNA, 25 bp, Artificial
  Probe
cctgaagtgcccatgcccagagggg

SEQ ID NO: 220127 - DNA, 25 bp, Artificial
  Probe
tggagactactgagggctaccagcc

SEQ ID NO: 220128 - DNA, 25 bp, Artificial
  Probe
cgggctgccatcaccttcagtttct

SEQ ID NO: 220129 - DNA, 25 bp, Artificial
  Probe
tgctcttctcagctctctggacctt

SEQ ID NO: 220130 - DNA, 25 bp, Artificial
  Probe
ctgaagtgcccatgcccagaggggc

SEQ ID NO: 220131 - DNA, 25 bp, Artificial
  Probe
taccagcgttacaaggctggagtgg

SEQ ID NO: 220132 - DNA, 25 bp, Artificial
  Probe
ggctgccatcaccttcagtttcttc

SEQ ID NO: 220133 - DNA, 25 bp, Artificial
  Probe
cacccagaatgtggagactactgag

SEQ ID NO: 220134 - DNA, 25 bp, Artificial
  Probe
ccctggacttctctcaaggtttgct

SEQ ID NO: 220135 - DNA, 25 bp, Artificial
  Probe
tcccccagtgtactgagcagccagg

SEQ ID NO: 220136 - DNA, 25 bp, Artificial
  Probe
gagtggatgccttcattcagaacta

SEQ ID NO: 220137 - DNA, 25 bp, Artificial
  Probe
gctttctgaccaaccagtgggcagc

SEQ ID NO: 220138 - DNA, 25 bp, Artificial
  Probe
ttctgaccaaccagtgggcagccac

SEQ ID NO: 220139 - DNA, 25 bp, Artificial
  Probe
tactgagcagccagggacaaagagg

SEQ ID NO: 220140 - DNA, 25 bp, Artificial
  Probe
gtgcccatgcccagaggggcttcac

SEQ ID NO: 220141 - DNA, 25 bp, Artificial
  Probe
aactgtagtcccttggctgttacag

SEQ ID NO: 220142 - DNA, 25 bp, Artificial
  Probe
tctctggaccttcctgtggtttgtc

SEQ ID NO: 220143 - DNA, 25 bp, Artificial
  Probe
gcctgaccctcaagggcatctttga

SEQ ID NO: 220144 - DNA, 25 bp, Artificial
  Probe
aatgtggagactactgagggctacc

SEQ ID NO: 220145 - DNA, 25 bp, Artificial
  Probe
ccaccctggacttctctcaaggttt

SEQ ID NO: 220146 - DNA, 25 bp, Artificial
  Probe
actcctgtcagctaatggcttcctc

SEQ ID NO: 220147 - DNA, 25 bp, Artificial
  Probe
gtgacagcaccacagtttcccttac

SEQ ID NO: 220148 - DNA, 25 bp, Artificial
  Probe
tgactgccatctgttggtaacttac

SEQ ID NO: 220149 - DNA, 25 bp, Artificial
  Probe
cactggtggccctgtgtttgagata

SEQ ID NO: 220150 - DNA, 25 bp, Artificial
  Probe
ctgccatctgttggtaacttacaga

SEQ ID NO: 220151 - DNA, 25 bp, Artificial
  Probe
aatatgtgatctgtttctccagtat

SEQ ID NO: 220152 - DNA, 25 bp, Artificial
  Probe
gtcattcctcactgtgctcatgttt

SEQ ID NO: 220153 - DNA, 25 bp, Artificial
  Probe
tcactgtgctcatgttttgtgggtg

SEQ ID NO: 220154 - DNA, 25 bp, Artificial
  Probe
attgtgttcccaaaccaagaacttg

SEQ ID NO: 220155 - DNA, 25 bp, Artificial
  Probe
acaatgactgccatctgttggtaac

SEQ ID NO: 220156 - DNA, 25 bp, Artificial
  Probe
cattcctcactgtgctcatgttttg

SEQ ID NO: 220157 - DNA, 25 bp, Artificial
  Probe
cccttactcctgtcagctaatggct

SEQ ID NO: 220158 - DNA, 25 bp, Artificial
  Probe
agtgttagtcattcctcactgtgct

SEQ ID NO: 220159 - DNA, 25 bp, Artificial
  Probe
cccatcagggaagatactggaatat

SEQ ID NO: 220160 - DNA, 25 bp, Artificial
  Probe
gccttcccagtgttagtcattcctc

SEQ ID NO: 220161 - DNA, 25 bp, Artificial
  Probe
gtgatctgtttctccagtatcttca

SEQ ID NO: 220162 - DNA, 25 bp, Artificial
  Probe
actggtggccctgtgtttgagataa

SEQ ID NO: 220163 - DNA, 25 bp, Artificial
  Probe
cttgtctctgaatttgatgaaaact

SEQ ID NO: 220164 - DNA, 25 bp, Artificial
  Probe
tcagtgacagcaccacagtttccct

SEQ ID NO: 220165 - DNA, 25 bp, Artificial
  Probe
ttgtgttcccaaaccaagaacttgt

SEQ ID NO: 220166 - DNA, 25 bp, Artificial
  Probe
catctgttggtaacttacagaaagt

SEQ ID NO: 220167 - DNA, 25 bp, Artificial
  Probe
tcctcactgtgctcatgttttgtgg

SEQ ID NO: 220168 - DNA, 25 bp, Artificial
  Probe
ccagtgttagtcattcctcactgtg

SEQ ID NO: 220169 - DNA, 25 bp, Artificial
  Probe
gttagtcattcctcactgtgctcat

SEQ ID NO: 220170 - DNA, 25 bp, Artificial
  Probe
cccagtgttagtcattcctcactgt

SEQ ID NO: 220171 - DNA, 25 bp, Artificial
  Probe
tgatctgtttctccagtatcttcag

SEQ ID NO: 220172 - DNA, 25 bp, Artificial
  Probe
gcacggcctttgagctttgggagaa

SEQ ID NO: 220173 - DNA, 25 bp, Artificial
  Probe
cacccatcagggaagatactggaat

SEQ ID NO: 220174 - DNA, 25 bp, Artificial
  Probe
agtgacagcaccacagtttccctta

SEQ ID NO: 220175 - DNA, 25 bp, Artificial
  Probe
cttactcctgtcagctaatggcttc

SEQ ID NO: 220176 - DNA, 25 bp, Artificial
  Probe
aagtatgtcttctattgtgttccca

SEQ ID NO: 220177 - DNA, 25 bp, Artificial
  Probe
tcccagtgttagtcattcctcactg

SEQ ID NO: 220178 - DNA, 25 bp, Artificial
  Probe
actgccatctgttggtaacttacag

SEQ ID NO: 220179 - DNA, 25 bp, Artificial
  Probe
atgtgatctgtttctccagtatctt

SEQ ID NO: 220180 - DNA, 25 bp, Artificial
  Probe
ttcctcactgtgctcatgttttgtg

SEQ ID NO: 220181 - DNA, 25 bp, Artificial
  Probe
tgtggccttcccagtgttagtcatt

SEQ ID NO: 220182 - DNA, 25 bp, Artificial
  Probe
gatctgtttctccagtatcttcagt

SEQ ID NO: 220183 - DNA, 25 bp, Artificial
  Probe
tactcctgtcagctaatggcttcct

SEQ ID NO: 220184 - DNA, 25 bp, Artificial
  Probe
tagtcattcctcactgtgctcatgt

SEQ ID NO: 220185 - DNA, 25 bp, Artificial
  Probe
cacggcctttgagctttgggagaaa

SEQ ID NO: 220186 - DNA, 25 bp, Artificial
  Probe
atgaggctgtgacactggtggccct

SEQ ID NO: 220187 - DNA, 25 bp, Artificial
  Probe
ctggtggccctgtgtttgagataat

SEQ ID NO: 220188 - DNA, 25 bp, Artificial
  Probe
gtatgtcttctattgtgttcccaaa

SEQ ID NO: 220189 - DNA, 25 bp, Artificial
  Probe
gcttgtctctgaatttgatgaaaac

SEQ ID NO: 220190 - DNA, 25 bp, Artificial
  Probe
gaaagtatgtcttctattgtgttcc

SEQ ID NO: 220191 - DNA, 25 bp, Artificial
  Probe
ttcccttactcctgtcagctaatgg

SEQ ID NO: 220192 - DNA, 25 bp, Artificial
  Probe
gcacagatttgagtcctttcgtagc

SEQ ID NO: 220193 - DNA, 25 bp, Artificial
  Probe
gaacacgtgtgttcttgatgtatac

SEQ ID NO: 220194 - DNA, 25 bp, Artificial
  Probe
agccgggcttactcagcgctaacgg

SEQ ID NO: 220195 - DNA, 25 bp, Artificial
  Probe
acacgtgtgttcttgatgtatactg

SEQ ID NO: 220196 - DNA, 25 bp, Artificial
  Probe
aacgaaggcacagatttgagtcctt

SEQ ID NO: 220197 - DNA, 25 bp, Artificial
  Probe
cagatttgagtcctttcgtagcagt

SEQ ID NO: 220198 - DNA, 25 bp, Artificial
  Probe
ccccacatgtgcaaagatgtggttg

SEQ ID NO: 220199 - DNA, 25 bp, Artificial
  Probe
gaagccgggcttactcagcgctaac

SEQ ID NO: 220200 - DNA, 25 bp, Artificial
  Probe
gtgcagcctgcgatcgccactttag

SEQ ID NO: 220201 - DNA, 25 bp, Artificial
  Probe
ggtgcacatgaagttgggtgcactt

SEQ ID NO: 220202 - DNA, 25 bp, Artificial
  Probe
ttcccttcttctgctggttattgaa

SEQ ID NO: 220203 - DNA, 25 bp, Artificial
  Probe
ctaacgggaacgaaggcacagattt

SEQ ID NO: 220204 - DNA, 25 bp, Artificial
  Probe
cgctgttccctgtgcagcctgcgat

SEQ ID NO: 220205 - DNA, 25 bp, Artificial
  Probe
cttactcagcgctaacgggaacgaa

SEQ ID NO: 220206 - DNA, 25 bp, Artificial
  Probe
tgttccctgtgcagcctgcgatcgc

SEQ ID NO: 220207 - DNA, 25 bp, Artificial
  Probe
cctgcgatcgccactttagaggaaa

SEQ ID NO: 220208 - DNA, 25 bp, Artificial
  Probe
ggagtctcagtgtccccgctgttcc

SEQ ID NO: 220209 - DNA, 25 bp, Artificial
  Probe
tatccccgcggcaaggctgggaagc

SEQ ID NO: 220210 - DNA, 25 bp, Artificial
  Probe
gaggaaatccccacatgtgcaaaga

SEQ ID NO: 220211 - DNA, 25 bp, Artificial
  Probe
ccgggcttactcagcgctaacggga

SEQ ID NO: 220212 - DNA, 25 bp, Artificial
  Probe
ttttgtcaagcaattttagcagaca

SEQ ID NO: 220213 - DNA, 25 bp, Artificial
  Probe
ttctgctggttattgaacaaagcag

SEQ ID NO: 220214 - DNA, 25 bp, Artificial
  Probe
tcccttcttctgctggttattgaac

SEQ ID NO: 220215 - DNA, 25 bp, Artificial
  Probe
attttgtcaagcaattttagcagac

SEQ ID NO: 220216 - DNA, 25 bp, Artificial
  Probe
gagtcctttcgtagcagtatttatt

SEQ ID NO: 220217 - DNA, 25 bp, Artificial
  Probe
tactcagcgctaacgggaacgaagg

SEQ ID NO: 220218 - DNA, 25 bp, Artificial
  Probe
agcgctaacgggaacgaaggcacag

SEQ ID NO: 220219 - DNA, 25 bp, Artificial
  Probe
tgtcaagcaattttagcagacaatg

SEQ ID NO: 220220 - DNA, 25 bp, Artificial
  Probe
atccccgcggcaaggctgggaagcc

SEQ ID NO: 220221 - DNA, 25 bp, Artificial
  Probe
ttattatgcccttactgtttgtaga

SEQ ID NO: 220222 - DNA, 25 bp, Artificial
  Probe
tatgcccttactgtttgtagagaca

SEQ ID NO: 220223 - DNA, 25 bp, Artificial
  Probe
ctgcgatcgccactttagaggaaaa

SEQ ID NO: 220224 - DNA, 25 bp, Artificial
  Probe
tgcagcctgcgatcgccactttaga

SEQ ID NO: 220225 - DNA, 25 bp, Artificial
  Probe
aatccccacatgtgcaaagatgtgg

SEQ ID NO: 220226 - DNA, 25 bp, Artificial
  Probe
gaacaaagcagttggttgagacaac

SEQ ID NO: 220227 - DNA, 25 bp, Artificial
  Probe
cacatgtgcaaagatgtggttgcaa

SEQ ID NO: 220228 - DNA, 25 bp, Artificial
  Probe
cgctaacgggaacgaaggcacagat

SEQ ID NO: 220229 - DNA, 25 bp, Artificial
  Probe
tgcacatgaagttgggtgcacttag

SEQ ID NO: 220230 - DNA, 25 bp, Artificial
  Probe
gatttgagtcctttcgtagcagtat

SEQ ID NO: 220231 - DNA, 25 bp, Artificial
  Probe
ccttactgtttgtagagacagtttt

SEQ ID NO: 220232 - DNA, 25 bp, Artificial
  Probe
ggcacagatttgagtcctttcgtag

SEQ ID NO: 220233 - DNA, 25 bp, Artificial
  Probe
gatcgccactttagaggaaaagtac

SEQ ID NO: 220234 - DNA, 25 bp, Artificial
  Probe
taacgggaacgaaggcacagatttg

SEQ ID NO: 220235 - DNA, 25 bp, Artificial
  Probe
cttctgctggttattgaacaaagca

SEQ ID NO: 220236 - DNA, 25 bp, Artificial
  Probe
agtgtccccgctgttccctgtgcag

SEQ ID NO: 220237 - DNA, 25 bp, Artificial
  Probe
gggaagccgggcttactcagcgcta

SEQ ID NO: 220238 - DNA, 25 bp, Artificial
  Probe
gcatttcaagggattttttgccagg

SEQ ID NO: 220239 - DNA, 25 bp, Artificial
  Probe
tgtcatcagatttgccaggagaaca

SEQ ID NO: 220240 - DNA, 25 bp, Artificial
  Probe
atttctatttcttgggcatctgaaa

SEQ ID NO: 220241 - DNA, 25 bp, Artificial
  Probe
ctttcctttgcctggctatgcacca

SEQ ID NO: 220242 - DNA, 25 bp, Artificial
  Probe
agcccacctggatttgtcctgtttg

SEQ ID NO: 220243 - DNA, 25 bp, Artificial
  Probe
caccacacgccagtgtcgagcatgt

SEQ ID NO: 220244 - DNA, 25 bp, Artificial
  Probe
ccccagcaagttagagagatatgca

SEQ ID NO: 220245 - DNA, 25 bp, Artificial
  Probe
tactccatgtctgtgtatcttgtac

SEQ ID NO: 220246 - DNA, 25 bp, Artificial
  Probe
tgccctttaggaaaaatgaggctga

SEQ ID NO: 220247 - DNA, 25 bp, Artificial
  Probe
ccctgaatattacatctttagtgag

SEQ ID NO: 220248 - DNA, 25 bp, Artificial
  Probe
tcccgccaaaaggaaatgcatcttt

SEQ ID NO: 220249 - DNA, 25 bp, Artificial
  Probe
agatcaaattccaggaagatggttc

SEQ ID NO: 220250 - DNA, 25 bp, Artificial
  Probe
aaacttactgcagatcctgatagtg

SEQ ID NO: 220251 - DNA, 25 bp, Artificial
  Probe
gttgatcctgctgctattccacctt

SEQ ID NO: 220252 - DNA, 25 bp, Artificial
  Probe
gttcaagtgtctttagtaaaccttg

SEQ ID NO: 220253 - DNA, 25 bp, Artificial
  Probe
cccatgagacctaagaaagaagcta

SEQ ID NO: 220254 - DNA, 25 bp, Artificial
  Probe
ggatcgaacagaagcgtcctggacg

SEQ ID NO: 220255 - DNA, 25 bp, Artificial
  Probe
cagccctgtacaaaagtagaaagtt

SEQ ID NO: 220256 - DNA, 25 bp, Artificial
  Probe
gaaattctcaatgactgttctgatg

SEQ ID NO: 220257 - DNA, 25 bp, Artificial
  Probe
agctcttctgatgaagaggaagacc

SEQ ID NO: 220258 - DNA, 25 bp, Artificial
  Probe
tgccaggtggcaggagagactacac

SEQ ID NO: 220259 - DNA, 25 bp, Artificial
  Probe
ttattgatctaacaatagagagctc

SEQ ID NO: 220260 - DNA, 25 bp, Artificial
  Probe
attccaggaagatggttcctggtgc

SEQ ID NO: 220261 - DNA, 25 bp, Artificial
  Probe
aatgggaaactctttcctttgcctg

SEQ ID NO: 220262 - DNA, 25 bp, Artificial
  Probe
agatcctgatagtgaaattgctaca

SEQ ID NO: 220263 - DNA, 25 bp, Artificial
  Probe
aaaggctgcctatgagagtctgata

SEQ ID NO: 220264 - DNA, 25 bp, Artificial
  Probe
tcttctgatgaagaggaagaccctc

SEQ ID NO: 220265 - DNA, 25 bp, Artificial
  Probe
acacatctgcagtgctttgatgctg

SEQ ID NO: 220266 - DNA, 25 bp, Artificial
  Probe
ctgacaatcccgtgccgcgcagtga

SEQ ID NO: 220267 - DNA, 25 bp, Artificial
  Probe
aaatgaggctgacaatcccgtgccg

SEQ ID NO: 220268 - DNA, 25 bp, Artificial
  Probe
ctcaatgactgttctgatgtggatg

SEQ ID NO: 220269 - DNA, 25 bp, Artificial
  Probe
gataactatcccaatagtttgtgta

SEQ ID NO: 220270 - DNA, 25 bp, Artificial
  Probe
agaagataactatcccaatagtttg

SEQ ID NO: 220271 - DNA, 25 bp, Artificial
  Probe
caccacctaaaaatgggatcgaaca

SEQ ID NO: 220272 - DNA, 25 bp, Artificial
  Probe
accacctaaaaatgggatcgaacag

SEQ ID NO: 220273 - DNA, 25 bp, Artificial
  Probe
atttttgctttgacaccccagcaag

SEQ ID NO: 220274 - DNA, 25 bp, Artificial
  Probe
tgcctatgagagtctgatactagat

SEQ ID NO: 220275 - DNA, 25 bp, Artificial
  Probe
ctatgaaagtaaccagccagccctg

SEQ ID NO: 220276 - DNA, 25 bp, Artificial
  Probe
agccagtgatgcaagcaagaagaag

SEQ ID NO: 220277 - DNA, 25 bp, Artificial
  Probe
cagccatgttattacagagattaaa

SEQ ID NO: 220278 - DNA, 25 bp, Artificial
  Probe
aaagcagtattcagcggtttcaaga

SEQ ID NO: 220279 - DNA, 25 bp, Artificial
  Probe
ttaataacgaagtgcagcttggaac

SEQ ID NO: 220280 - DNA, 25 bp, Artificial
  Probe
gtgctttgatgctgccctgtatctt

SEQ ID NO: 220281 - DNA, 25 bp, Artificial
  Probe
atctaacaatagagagctcttctga

SEQ ID NO: 220282 - DNA, 25 bp, Artificial
  Probe
tttgtcctgtttgtgacaaaaaggc

SEQ ID NO: 220283 - DNA, 25 bp, Artificial
  Probe
ctggtgccccatgagacctaagaaa

SEQ ID NO: 220284 - DNA, 25 bp, Artificial
  Probe
actaagcaggctgaggataaaggca

SEQ ID NO: 220285 - DNA, 25 bp, Artificial
  Probe
tcttgttttctcaccaagggcccca

SEQ ID NO: 220286 - DNA, 25 bp, Artificial
  Probe
atactcaggaggacagagagcctgt

SEQ ID NO: 220287 - DNA, 25 bp, Artificial
  Probe
gtgtatactcaggaggacagagagc

SEQ ID NO: 220288 - DNA, 25 bp, Artificial
  Probe
agctgcttcttgttttctcaccaag

SEQ ID NO: 220289 - DNA, 25 bp, Artificial
  Probe
accaagggccccagcatcttgagaa

SEQ ID NO: 220290 - DNA, 25 bp, Artificial
  Probe
gctgctgtggctgctgttgcataga

SEQ ID NO: 220291 - DNA, 25 bp, Artificial
  Probe
atgtgtaacattgcattccctgact

SEQ ID NO: 220292 - DNA, 25 bp, Artificial
  Probe
agagcctgtgggagtaagcaatcac

SEQ ID NO: 220293 - DNA, 25 bp, Artificial
  Probe
attgatcctgaactcctctgcttcg

SEQ ID NO: 220294 - DNA, 25 bp, Artificial
  Probe
ctgaactcctctgcttcggctgctg

SEQ ID NO: 220295 - DNA, 25 bp, Artificial
  Probe
tgtggctgctgttgcatagacctac

SEQ ID NO: 220296 - DNA, 25 bp, Artificial
  Probe
ctgtggctgctgttgcatagaccta

SEQ ID NO: 220297 - DNA, 25 bp, Artificial
  Probe
tctaaaaccatttaaagctaggaga

SEQ ID NO: 220298 - DNA, 25 bp, Artificial
  Probe
ggctgctgttgcatagacctactct

SEQ ID NO: 220299 - DNA, 25 bp, Artificial
  Probe
tgctgtggctgctgttgcatagacc

SEQ ID NO: 220300 - DNA, 25 bp, Artificial
  Probe
gccccagcatcttgagaagaaggat

SEQ ID NO: 220301 - DNA, 25 bp, Artificial
  Probe
tactcaggaggacagagagcctgtg

SEQ ID NO: 220302 - DNA, 25 bp, Artificial
  Probe
ccaagggccccagcatcttgagaag

SEQ ID NO: 220303 - DNA, 25 bp, Artificial
  Probe
gagtaagcaatcactgacctctcag

SEQ ID NO: 220304 - DNA, 25 bp, Artificial
  Probe
gaggaaagcaactgcctcagagaaa

SEQ ID NO: 220305 - DNA, 25 bp, Artificial
  Probe
attgcattccctgactctgcctggg

SEQ ID NO: 220306 - DNA, 25 bp, Artificial
  Probe
cctccacagatccagcaaattctgg

SEQ ID NO: 220307 - DNA, 25 bp, Artificial
  Probe
cacagatccagcaaattctggggtg

SEQ ID NO: 220308 - DNA, 25 bp, Artificial
  Probe
cttccactaagcaggctgaggataa

SEQ ID NO: 220309 - DNA, 25 bp, Artificial
  Probe
gcaactgcctcagagaaaagcatga

SEQ ID NO: 220310 - DNA, 25 bp, Artificial
  Probe
tgcattccctgactctgcctggggc

SEQ ID NO: 220311 - DNA, 25 bp, Artificial
  Probe
tctccttccactaagcaggctgagg

SEQ ID NO: 220312 - DNA, 25 bp, Artificial
  Probe
gtaacattgcattccctgactctgc

SEQ ID NO: 220313 - DNA, 25 bp, Artificial
  Probe
cagtgtatactcaggaggacagaga

SEQ ID NO: 220314 - DNA, 25 bp, Artificial
  Probe
caggattgatcctgaactcctctgc

SEQ ID NO: 220315 - DNA, 25 bp, Artificial
  Probe
ctgcctcagagaaaagcatgaaggg

SEQ ID NO: 220316 - DNA, 25 bp, Artificial
  Probe
cttgttttctcaccaagggccccag

SEQ ID NO: 220317 - DNA, 25 bp, Artificial
  Probe
tctctccttccactaagcaggctga

SEQ ID NO: 220318 - DNA, 25 bp, Artificial
  Probe
gttttctcaccaagggccccagcat

SEQ ID NO: 220319 - DNA, 25 bp, Artificial
  Probe
atcctgaactcctctgcttcggctg

SEQ ID NO: 220320 - DNA, 25 bp, Artificial
  Probe
aactcctctgcttcggctgctgctg

SEQ ID NO: 220321 - DNA, 25 bp, Artificial
  Probe
ctccacagatccagcaaattctggg

SEQ ID NO: 220322 - DNA, 25 bp, Artificial
  Probe
aaagcaactgcctcagagaaaagca

SEQ ID NO: 220323 - DNA, 25 bp, Artificial
  Probe
aaaggaggagctgcttcttgttttc

SEQ ID NO: 220324 - DNA, 25 bp, Artificial
  Probe
cagacagcagtgtatactcaggagg

SEQ ID NO: 220325 - DNA, 25 bp, Artificial
  Probe
gcttcttgttttctcaccaagggcc

SEQ ID NO: 220326 - DNA, 25 bp, Artificial
  Probe
cactaagcaggctgaggataaaggc

SEQ ID NO: 220327 - DNA, 25 bp, Artificial
  Probe
tgaactcctctgcttcggctgctgc

SEQ ID NO: 220328 - DNA, 25 bp, Artificial
  Probe
gagcctgtgggagtaagcaatcact

SEQ ID NO: 220329 - DNA, 25 bp, Artificial
  Probe
gtaagcaatcactgacctctcagaa

SEQ ID NO: 220330 - DNA, 25 bp, Artificial
  Probe
gcactagtacagagagcctatggga

SEQ ID NO: 220331 - DNA, 25 bp, Artificial
  Probe
tgccctctctaactctgcctggatt

SEQ ID NO: 220332 - DNA, 25 bp, Artificial
  Probe
gaacataacaatgtggcctggtacc

SEQ ID NO: 220333 - DNA, 25 bp, Artificial
  Probe
gtggcctggtaccaacagactcatg

SEQ ID NO: 220334 - DNA, 25 bp, Artificial
  Probe
ttctctagacccttactcggtgtcc

SEQ ID NO: 220335 - DNA, 25 bp, Artificial
  Probe
cccatctctgaacataacaatgtgg

SEQ ID NO: 220336 - DNA, 25 bp, Artificial
  Probe
ccaacagactcatgggcaggaacta

SEQ ID NO: 220337 - DNA, 25 bp, Artificial
  Probe
tgtggcctggtaccaacagactcat

SEQ ID NO: 220338 - DNA, 25 bp, Artificial
  Probe
tgctgcttctgcatggatctactct

SEQ ID NO: 220339 - DNA, 25 bp, Artificial
  Probe
gactaggtgcactagtacagagagc

SEQ ID NO: 220340 - DNA, 25 bp, Artificial
  Probe
tcccttctactgagcaggcggagac

SEQ ID NO: 220341 - DNA, 25 bp, Artificial
  Probe
tcggtgtccttcttccccaggttca

SEQ ID NO: 220342 - DNA, 25 bp, Artificial
  Probe
tgcactagtacagagagcctatggg

SEQ ID NO: 220343 - DNA, 25 bp, Artificial
  Probe
tgagactaggtgcactagtacagag

SEQ ID NO: 220344 - DNA, 25 bp, Artificial
  Probe
ctcatgggcaggaactaaagttcct

SEQ ID NO: 220345 - DNA, 25 bp, Artificial
  Probe
gcttgagactaggtgcactagtaca

SEQ ID NO: 220346 - DNA, 25 bp, Artificial
  Probe
aacataacaatgtggcctggtacca

SEQ ID NO: 220347 - DNA, 25 bp, Artificial
  Probe
ggatgtcaaacactgccctctctaa

SEQ ID NO: 220348 - DNA, 25 bp, Artificial
  Probe
ataacaggtcactgacctcagaacc

SEQ ID NO: 220349 - DNA, 25 bp, Artificial
  Probe
taacaggtcactgacctcagaacct

SEQ ID NO: 220350 - DNA, 25 bp, Artificial
  Probe
tcttccccaggttcagcacattctg

SEQ ID NO: 220351 - DNA, 25 bp, Artificial
  Probe
agactcatgggcaggaactaaagtt

SEQ ID NO: 220352 - DNA, 25 bp, Artificial
  Probe
ctaggtgcactagtacagagagcct

SEQ ID NO: 220353 - DNA, 25 bp, Artificial
  Probe
ggtaccaacagactcatgggcagga

SEQ ID NO: 220354 - DNA, 25 bp, Artificial
  Probe
cccaggttcagcacattctggggtt

SEQ ID NO: 220355 - DNA, 25 bp, Artificial
  Probe
ctagacccttactcggtgtccttct

SEQ ID NO: 220356 - DNA, 25 bp, Artificial
  Probe
acaatgtggcctggtaccaacagac

SEQ ID NO: 220357 - DNA, 25 bp, Artificial
  Probe
ctgctgctgcttctgcatggatcta

SEQ ID NO: 220358 - DNA, 25 bp, Artificial
  Probe
ctgagcaggcggagactaaaaagga

SEQ ID NO: 220359 - DNA, 25 bp, Artificial
  Probe
gccctctctaactctgcctggatta

SEQ ID NO: 220360 - DNA, 25 bp, Artificial
  Probe
ttactcggtgtccttcttccccagg

SEQ ID NO: 220361 - DNA, 25 bp, Artificial
  Probe
accaacagactcatgggcaggaact

SEQ ID NO: 220362 - DNA, 25 bp, Artificial
  Probe
caggaactaaagttcctcatccagc

SEQ ID NO: 220363 - DNA, 25 bp, Artificial
  Probe
agactaggtgcactagtacagagag

SEQ ID NO: 220364 - DNA, 25 bp, Artificial
  Probe
aggatgtcaaacactgccctctcta

SEQ ID NO: 220365 - DNA, 25 bp, Artificial
  Probe
cttctactgagcaggcggagactaa

SEQ ID NO: 220366 - DNA, 25 bp, Artificial
  Probe
aggtgcactagtacagagagcctat

SEQ ID NO: 220367 - DNA, 25 bp, Artificial
  Probe
tactcggtgtccttcttccccaggt

SEQ ID NO: 220368 - DNA, 25 bp, Artificial
  Probe
tctctagacccttactcggtgtcct

SEQ ID NO: 220369 - DNA, 25 bp, Artificial
  Probe
cggtgtccttcttccccaggttcag

SEQ ID NO: 220370 - DNA, 25 bp, Artificial
  Probe
cttccccaggttcagcacattctgg

SEQ ID NO: 220371 - DNA, 25 bp, Artificial
  Probe
ttccccaggttcagcacattctggg

SEQ ID NO: 220372 - DNA, 25 bp, Artificial
  Probe
ctggtaccaacagactcatgggcag

SEQ ID NO: 220373 - DNA, 25 bp, Artificial
  Probe
ctctgaacataacaatgtggcctgg

SEQ ID NO: 220374 - DNA, 25 bp, Artificial
  Probe
ccaggttcagcacattctggggttg

SEQ ID NO: 220375 - DNA, 25 bp, Artificial
  Probe
catctctgaacataacaatgtggcc

SEQ ID NO: 220376 - DNA, 25 bp, Artificial
  Probe
gccctttttcacagacctagaacag

SEQ ID NO: 220377 - DNA, 25 bp, Artificial
  Probe
gctgtcaaaggctgatccaggccct

SEQ ID NO: 220378 - DNA, 25 bp, Artificial
  Probe
taaacgctgctgtcaaaggctgatc

SEQ ID NO: 220379 - DNA, 25 bp, Artificial
  Probe
agcgtgtaattggtttgggctctca

SEQ ID NO: 220380 - DNA, 25 bp, Artificial
  Probe
ctagaacagtcagagagcgtgtaat

SEQ ID NO: 220381 - DNA, 25 bp, Artificial
  Probe
ctgtgaacctattgataaagcaaag

SEQ ID NO: 220382 - DNA, 25 bp, Artificial
  Probe
cctcgtgtggctttcattctgatga

SEQ ID NO: 220383 - DNA, 25 bp, Artificial
  Probe
gcaaaggttcactttgtaaataaca

SEQ ID NO: 220384 - DNA, 25 bp, Artificial
  Probe
caagagacaaactctgtgtagtttt

SEQ ID NO: 220385 - DNA, 25 bp, Artificial
  Probe
tttttcacagacctagaacagtcag

SEQ ID NO: 220386 - DNA, 25 bp, Artificial
  Probe
acgctgctgtcaaaggctgatccag

SEQ ID NO: 220387 - DNA, 25 bp, Artificial
  Probe
cctctcgtcctcgtgtggctttcat

SEQ ID NO: 220388 - DNA, 25 bp, Artificial
  Probe
aatgataaacgctgctgtcaaaggc

SEQ ID NO: 220389 - DNA, 25 bp, Artificial
  Probe
caaaggctgatccaggcccttggaa

SEQ ID NO: 220390 - DNA, 25 bp, Artificial
  Probe
acactaatgtgaccatggagaagca

SEQ ID NO: 220391 - DNA, 25 bp, Artificial
  Probe
ccttggaagggttgcctggctttga

SEQ ID NO: 220392 - DNA, 25 bp, Artificial
  Probe
ttcacagacctagaacagtcagaga

SEQ ID NO: 220393 - DNA, 25 bp, Artificial
  Probe
gataaacgctgctgtcaaaggctga

SEQ ID NO: 220394 - DNA, 25 bp, Artificial
  Probe
atccaggcccttggaagggttgcct

SEQ ID NO: 220395 - DNA, 25 bp, Artificial
  Probe
caaagcaaaggttcactttgtaaat

SEQ ID NO: 220396 - DNA, 25 bp, Artificial
  Probe
gcctggctttgatggcaagattttg

SEQ ID NO: 220397 - DNA, 25 bp, Artificial
  Probe
ttaaaactcggtctgtgaacctatt

SEQ ID NO: 220398 - DNA, 25 bp, Artificial
  Probe
gagcgtgtaattggtttgggctctc

SEQ ID NO: 220399 - DNA, 25 bp, Artificial
  Probe
cactttgtaaataacactggtttag

SEQ ID NO: 220400 - DNA, 25 bp, Artificial
  Probe
ttcattctgatgaatgataaacgct

SEQ ID NO: 220401 - DNA, 25 bp, Artificial
  Probe
tagcctaatttatgaacaagagaca

SEQ ID NO: 220402 - DNA, 25 bp, Artificial
  Probe
aaaggctgatccaggcccttggaag

SEQ ID NO: 220403 - DNA, 25 bp, Artificial
  Probe
acaagagacaaactctgtgtagttt

SEQ ID NO: 220404 - DNA, 25 bp, Artificial
  Probe
gtcaaaggctgatccaggcccttgg

SEQ ID NO: 220405 - DNA, 25 bp, Artificial
  Probe
ttagcctaatttatgaacaagagac

SEQ ID NO: 220406 - DNA, 25 bp, Artificial
  Probe
cgtgtaattggtttgggctctcaga

SEQ ID NO: 220407 - DNA, 25 bp, Artificial
  Probe
ggttgcctggctttgatggcaagat

SEQ ID NO: 220408 - DNA, 25 bp, Artificial
  Probe
cccttggaagggttgcctggctttg

SEQ ID NO: 220409 - DNA, 25 bp, Artificial
  Probe
gacctagaacagtcagagagcgtgt

SEQ ID NO: 220410 - DNA, 25 bp, Artificial
  Probe
gctgtcccacactaatgtgaccatg

SEQ ID NO: 220411 - DNA, 25 bp, Artificial
  Probe
tttcattctgatgaatgataaacgc

SEQ ID NO: 220412 - DNA, 25 bp, Artificial
  Probe
ctaatgtgaccatggagaagcaagc

SEQ ID NO: 220413 - DNA, 25 bp, Artificial
  Probe
cgctgctgtcaaaggctgatccagg

SEQ ID NO: 220414 - DNA, 25 bp, Artificial
  Probe
acagacctagaacagtcagagagcg

SEQ ID NO: 220415 - DNA, 25 bp, Artificial
  Probe
cgtgtggctttcattctgatgaatg

SEQ ID NO: 220416 - DNA, 25 bp, Artificial
  Probe
tgatccaggcccttggaagggttgc

SEQ ID NO: 220417 - DNA, 25 bp, Artificial
  Probe
cccacactaatgtgaccatggagaa

SEQ ID NO: 220418 - DNA, 25 bp, Artificial
  Probe
ctcggtctgtgaacctattgataaa

SEQ ID NO: 220419 - DNA, 25 bp, Artificial
  Probe
aaactcggtctgtgaacctattgat

SEQ ID NO: 220420 - DNA, 25 bp, Artificial
  Probe
tttaaaactcggtctgtgaacctat

SEQ ID NO: 220421 - DNA, 25 bp, Artificial
  Probe
tgaacaagagacaaactctgtgtag

SEQ ID NO: 220422 - DNA, 25 bp, Artificial
  Probe
cggacaattgcaattttcttagaat

SEQ ID NO: 220423 - DNA, 25 bp, Artificial
  Probe
agctgctccatggacctcgtttctc

SEQ ID NO: 220424 - DNA, 25 bp, Artificial
  Probe
agaagaatgccacagctccattgaa

SEQ ID NO: 220425 - DNA, 25 bp, Artificial
  Probe
aacactcaggagaatgaaagccaag

SEQ ID NO: 220426 - DNA, 25 bp, Artificial
  Probe
gagcaaaacctatctgatctgcttt

SEQ ID NO: 220427 - DNA, 25 bp, Artificial
  Probe
acaccgtgctgttccggcgtggcac

SEQ ID NO: 220428 - DNA, 25 bp, Artificial
  Probe
ttaagaagttcagctctctcccaag

SEQ ID NO: 220429 - DNA, 25 bp, Artificial
  Probe
attaggaccaggaaagccaggtcta

SEQ ID NO: 220430 - DNA, 25 bp, Artificial
  Probe
tgcgtttacccagctaccatcacgt

SEQ ID NO: 220431 - DNA, 25 bp, Artificial
  Probe
cagttgaccttaagagagaaacctg

SEQ ID NO: 220432 - DNA, 25 bp, Artificial
  Probe
ttggtcggaagatggctgcgtttac

SEQ ID NO: 220433 - DNA, 25 bp, Artificial
  Probe
tgagtcagcagcagggcatgcatag

SEQ ID NO: 220434 - DNA, 25 bp, Artificial
  Probe
tcagggtctccctgtcccgggagtc

SEQ ID NO: 220435 - DNA, 25 bp, Artificial
  Probe
aggagcaaaacctatctgatctgct

SEQ ID NO: 220436 - DNA, 25 bp, Artificial
  Probe
caatacagaacagaacactcaggag

SEQ ID NO: 220437 - DNA, 25 bp, Artificial
  Probe
tggaagtcagccaaactgtgactga

SEQ ID NO: 220438 - DNA, 25 bp, Artificial
  Probe
cactcctccagatcgctcagaagta

SEQ ID NO: 220439 - DNA, 25 bp, Artificial
  Probe
gaagtaaagcacacagcaagtccaa

SEQ ID NO: 220440 - DNA, 25 bp, Artificial
  Probe
ttggaggaaccgatcaatcgatcga

SEQ ID NO: 220441 - DNA, 25 bp, Artificial
  Probe
tcggaagatggctgcgtttacccag

SEQ ID NO: 220442 - DNA, 25 bp, Artificial
  Probe
gatcgctcagaagtaaagcacacag

SEQ ID NO: 220443 - DNA, 25 bp, Artificial
  Probe
catgcatagagcagcagttggagga

SEQ ID NO: 220444 - DNA, 25 bp, Artificial
  Probe
tcgatcagtggcagtgtgagtgcat

SEQ ID NO: 220445 - DNA, 25 bp, Artificial
  Probe
ggtgtccctggtcgataagaacaga

SEQ ID NO: 220446 - DNA, 25 bp, Artificial
  Probe
ccaggaaagccaggtctaaggttca

SEQ ID NO: 220447 - DNA, 25 bp, Artificial
  Probe
tctgccgtttggtcggaagatggct

SEQ ID NO: 220448 - DNA, 25 bp, Artificial
  Probe
gcagcagttggaggaaccgatcaat

SEQ ID NO: 220449 - DNA, 25 bp, Artificial
  Probe
agcagggcatgcatagagcagcagt

SEQ ID NO: 220450 - DNA, 25 bp, Artificial
  Probe
agctggtgacaaatgctctgccgtt

SEQ ID NO: 220451 - DNA, 25 bp, Artificial
  Probe
gagaaacctgtgtcgtggtttatac

SEQ ID NO: 220452 - DNA, 25 bp, Artificial
  Probe
aatgaaagccaagtttccacagacg

SEQ ID NO: 220453 - DNA, 25 bp, Artificial
  Probe
aggaagacaccgtgctgttccggcg

SEQ ID NO: 220454 - DNA, 25 bp, Artificial
  Probe
gcacaaacggacaattgcaattttc

SEQ ID NO: 220455 - DNA, 25 bp, Artificial
  Probe
agaacggtgacatgtgtgaaacttc

SEQ ID NO: 220456 - DNA, 25 bp, Artificial
  Probe
ctctgagcaggaagacaccgtgctg

SEQ ID NO: 220457 - DNA, 25 bp, Artificial
  Probe
ctgagcaggaagacaccgtgctgtt

SEQ ID NO: 220458 - DNA, 25 bp, Artificial
  Probe
tccattgaaacagtggaaagctggt

SEQ ID NO: 220459 - DNA, 25 bp, Artificial
  Probe
atgctctaaagaacggtgacatgtg

SEQ ID NO: 220460 - DNA, 25 bp, Artificial
  Probe
tgttggtgtccctggtcgataagaa

SEQ ID NO: 220461 - DNA, 25 bp, Artificial
  Probe
atcatcagggtctccctgtcccggg

SEQ ID NO: 220462 - DNA, 25 bp, Artificial
  Probe
caccggccagagtgatgattctgac

SEQ ID NO: 220463 - DNA, 25 bp, Artificial
  Probe
ctttaagcatgctctaaagaacggt

SEQ ID NO: 220464 - DNA, 25 bp, Artificial
  Probe
agttcagctctctcccaaggagatg

SEQ ID NO: 220465 - DNA, 25 bp, Artificial
  Probe
cctgtgtcgtggtttatactggata

SEQ ID NO: 220466 - DNA, 25 bp, Artificial
  Probe
cgcgggctctgagcaggaagacacc

SEQ ID NO: 220467 - DNA, 25 bp, Artificial
  Probe
gtggcaccggccagagtgatgattc

SEQ ID NO: 220468 - DNA, 25 bp, Artificial
  Probe
aaacgagtcatctgctgatgtcatg

SEQ ID NO: 220469 - DNA, 25 bp, Artificial
  Probe
tggactattcctagccacaggcttc

SEQ ID NO: 220470 - DNA, 25 bp, Artificial
  Probe
gctcaatgcatcacccaggtcgtgt

SEQ ID NO: 220471 - DNA, 25 bp, Artificial
  Probe
ctggacactcttggagatgtgtgta

SEQ ID NO: 220472 - DNA, 25 bp, Artificial
  Probe
ctattcctagccacaggcttcactg

SEQ ID NO: 220473 - DNA, 25 bp, Artificial
  Probe
cctcctctttgagaggtaccaatgt

SEQ ID NO: 220474 - DNA, 25 bp, Artificial
  Probe
ctttgctgtggcaaaagtacggtgc

SEQ ID NO: 220475 - DNA, 25 bp, Artificial
  Probe
taccaatgtgtgagtgtacaactaa

SEQ ID NO: 220476 - DNA, 25 bp, Artificial
  Probe
tctcagaagccaagagagatttcca

SEQ ID NO: 220477 - DNA, 25 bp, Artificial
  Probe
gcaaaagtacggtgctttgcaaata

SEQ ID NO: 220478 - DNA, 25 bp, Artificial
  Probe
atgaatagtaacctgtcagagctgg

SEQ ID NO: 220479 - DNA, 25 bp, Artificial
  Probe
tcgtgtctcagaagccaagagagat

SEQ ID NO: 220480 - DNA, 25 bp, Artificial
  Probe
ggacatacagattttcctcaagaaa

SEQ ID NO: 220481 - DNA, 25 bp, Artificial
  Probe
ctctttgagaggtaccaatgtgtga

SEQ ID NO: 220482 - DNA, 25 bp, Artificial
  Probe
cctgtcagagctggacactcttgga

SEQ ID NO: 220483 - DNA, 25 bp, Artificial
  Probe
ggcttcactggctcaatgcatcacc

SEQ ID NO: 220484 - DNA, 25 bp, Artificial
  Probe
agatgtgtgtactcggttctcttat

SEQ ID NO: 220485 - DNA, 25 bp, Artificial
  Probe
gccaataccatgaagaggaactcag

SEQ ID NO: 220486 - DNA, 25 bp, Artificial
  Probe
ccgaggctgattctagtaagaggtg

SEQ ID NO: 220487 - DNA, 25 bp, Artificial
  Probe
ctcacactggaaaaacgagtcatct

SEQ ID NO: 220488 - DNA, 25 bp, Artificial
  Probe
agaggaactcagacagctctgacct

SEQ ID NO: 220489 - DNA, 25 bp, Artificial
  Probe
gaatccctatgaagaacactatgac

SEQ ID NO: 220490 - DNA, 25 bp, Artificial
  Probe
gatgtcatgctgattctaaccaatc

SEQ ID NO: 220491 - DNA, 25 bp, Artificial
  Probe
aatgcatcacccaggtcgtgtctca

SEQ ID NO: 220492 - DNA, 25 bp, Artificial
  Probe
ctcggttctcttatgtttgtaaagg

SEQ ID NO: 220493 - DNA, 25 bp, Artificial
  Probe
tgctgtggcaaaagtacggtgcttt

SEQ ID NO: 220494 - DNA, 25 bp, Artificial
  Probe
gggtggactattcctagccacaggc

SEQ ID NO: 220495 - DNA, 25 bp, Artificial
  Probe
aggtaccaatgtgtgagtgtacaac

SEQ ID NO: 220496 - DNA, 25 bp, Artificial
  Probe
tcagacagctctgacctcatgagac

SEQ ID NO: 220497 - DNA, 25 bp, Artificial
  Probe
taaagccgaggctgattctagtaag

SEQ ID NO: 220498 - DNA, 25 bp, Artificial
  Probe
aaagggtggactattcctagccaca

SEQ ID NO: 220499 - DNA, 25 bp, Artificial
  Probe
aactcagacagctctgacctcatga

SEQ ID NO: 220500 - DNA, 25 bp, Artificial
  Probe
gtactcggttctcttatgtttgtaa

SEQ ID NO: 220501 - DNA, 25 bp, Artificial
  Probe
tagaatccctatgaagaacactatg

SEQ ID NO: 220502 - DNA, 25 bp, Artificial
  Probe
gtgtacaactaagtactacagtata

SEQ ID NO: 220503 - DNA, 25 bp, Artificial
  Probe
cttcacagtgccaataccatgaaga

SEQ ID NO: 220504 - DNA, 25 bp, Artificial
  Probe
gaaatgtctcacactggaaaaacga

SEQ ID NO: 220505 - DNA, 25 bp, Artificial
  Probe
ttcactggctcaatgcatcacccag

SEQ ID NO: 220506 - DNA, 25 bp, Artificial
  Probe
cacaggcttcactggctcaatgcat

SEQ ID NO: 220507 - DNA, 25 bp, Artificial
  Probe
ttggagatgtgtgtactcggttctc

SEQ ID NO: 220508 - DNA, 25 bp, Artificial
  Probe
ataccatgaagaggaactcagacag

SEQ ID NO: 220509 - DNA, 25 bp, Artificial
  Probe
gacataaagccgaggctgattctag

SEQ ID NO: 220510 - DNA, 25 bp, Artificial
  Probe
gtcagagctggacactcttggagat

SEQ ID NO: 220511 - DNA, 25 bp, Artificial
  Probe
ctagccacaggcttcactggctcaa

SEQ ID NO: 220512 - DNA, 25 bp, Artificial
  Probe
gtctcagaagccaagagagatttcc

SEQ ID NO: 220513 - DNA, 25 bp, Artificial
  Probe
attcctagccacaggcttcactggc

SEQ ID NO: 220514 - DNA, 25 bp, Artificial
  Probe
atgatggctacatgcccatgacccc

SEQ ID NO: 220515 - DNA, 25 bp, Artificial
  Probe
gagttccagcagtaacctgggggca

SEQ ID NO: 220516 - DNA, 25 bp, Artificial
  Probe
tccccaatggggactacctcaacat

SEQ ID NO: 220517 - DNA, 25 bp, Artificial
  Probe
cgtgtctgcccctaagcagatcctg

SEQ ID NO: 220518 - DNA, 25 bp, Artificial
  Probe
aatagctgcaagagcgatgactaca

SEQ ID NO: 220519 - DNA, 25 bp, Artificial
  Probe
ctcttacaaggctccctgtacttgc

SEQ ID NO: 220520 - DNA, 25 bp, Artificial
  Probe
tacatgcccatgacccctggggcag

SEQ ID NO: 220521 - DNA, 25 bp, Artificial
  Probe
cggtgaggccctcaaaggcgtccct

SEQ ID NO: 220522 - DNA, 25 bp, Artificial
  Probe
agtggtggccccaatagctgcaaga

SEQ ID NO: 220523 - DNA, 25 bp, Artificial
  Probe
tacctcaacatgtcccccagtgagg

SEQ ID NO: 220524 - DNA, 25 bp, Artificial
  Probe
gtctgcccctaagcagatcctgcaa

SEQ ID NO: 220525 - DNA, 25 bp, Artificial
  Probe
aacatgtcccccagtgaggcaggca

SEQ ID NO: 220526 - DNA, 25 bp, Artificial
  Probe
aagctgctccccaatggggactacc

SEQ ID NO: 220527 - DNA, 25 bp, Artificial
  Probe
atgtggtgtggctccaagctgtcca

SEQ ID NO: 220528 - DNA, 25 bp, Artificial
  Probe
gagagctccccagaagatagcgggt

SEQ ID NO: 220529 - DNA, 25 bp, Artificial
  Probe
tggagaacccagaccctaagctgct

SEQ ID NO: 220530 - DNA, 25 bp, Artificial
  Probe
cgggcaggactttcccagtgaacgg

SEQ ID NO: 220531 - DNA, 25 bp, Artificial
  Probe
gcagccctcaggagtggtggcccca

SEQ ID NO: 220532 - DNA, 25 bp, Artificial
  Probe
agaccctaagctgctccccaatggg

SEQ ID NO: 220533 - DNA, 25 bp, Artificial
  Probe
cattgagattggttctcacaagagt

SEQ ID NO: 220534 - DNA, 25 bp, Artificial
  Probe
accctaagctgctccccaatgggga

SEQ ID NO: 220535 - DNA, 25 bp, Artificial
  Probe
agacaacgaccagtatgtgctcatg

SEQ ID NO: 220536 - DNA, 25 bp, Artificial
  Probe
cctaagcagatcctgcaaccacgtt

SEQ ID NO: 220537 - DNA, 25 bp, Artificial
  Probe
tccccagaagatagcgggtacatgc

SEQ ID NO: 220538 - DNA, 25 bp, Artificial
  Probe
aaggctccctgtacttgcggtggtg

SEQ ID NO: 220539 - DNA, 25 bp, Artificial
  Probe
gcgggcaggactttcccagtgaacg

SEQ ID NO: 220540 - DNA, 25 bp, Artificial
  Probe
ggctacatgcccatgacccctgggg

SEQ ID NO: 220541 - DNA, 25 bp, Artificial
  Probe
cctcaggagtggtggccccaatagc

SEQ ID NO: 220542 - DNA, 25 bp, Artificial
  Probe
tgaggccctcaaaggcgtccctggc

SEQ ID NO: 220543 - DNA, 25 bp, Artificial
  Probe
tctcagcagctttgcgtccaggcgg

SEQ ID NO: 220544 - DNA, 25 bp, Artificial
  Probe
ccagcggagagctccccagaagata

SEQ ID NO: 220545 - DNA, 25 bp, Artificial
  Probe
agctgctccccaatggggactacct

SEQ ID NO: 220546 - DNA, 25 bp, Artificial
  Probe
gcgatgactacatgcccatgagccc

SEQ ID NO: 220547 - DNA, 25 bp, Artificial
  Probe
atgtcccccagtgaggcaggcaccg

SEQ ID NO: 220548 - DNA, 25 bp, Artificial
  Probe
acctgacttcttctcagcagctttg

SEQ ID NO: 220549 - DNA, 25 bp, Artificial
  Probe
gcgtccaggcggtgaggccctcaaa

SEQ ID NO: 220550 - DNA, 25 bp, Artificial
  Probe
atcctgcaaccacgttcggcagcgg

SEQ ID NO: 220551 - DNA, 25 bp, Artificial
  Probe
cgtccaggcggtgaggccctcaaag

SEQ ID NO: 220552 - DNA, 25 bp, Artificial
  Probe
atggggactacctcaacatgtcccc

SEQ ID NO: 220553 - DNA, 25 bp, Artificial
  Probe
tgcgaatgtggtgtggctccaagct

SEQ ID NO: 220554 - DNA, 25 bp, Artificial
  Probe
aggactttcccagtgaacggaggcg

SEQ ID NO: 220555 - DNA, 25 bp, Artificial
  Probe
cagatgatggctacatgcccatgac

SEQ ID NO: 220556 - DNA, 25 bp, Artificial
  Probe
cccagcggagagctccccagaagat

SEQ ID NO: 220557 - DNA, 25 bp, Artificial
  Probe
cttacccagaggactatggagacat

SEQ ID NO: 220558 - DNA, 25 bp, Artificial
  Probe
agagcgatgactacatgcccatgag

SEQ ID NO: 220559 - DNA, 25 bp, Artificial
  Probe
gtacatgcgaatgtggtgtggctcc

SEQ ID NO: 220560 - DNA, 25 bp, Artificial
  Probe
tggatgactactcactagagcgggt

SEQ ID NO: 220561 - DNA, 25 bp, Artificial
  Probe
cctggggacagatctgagcatgacc

SEQ ID NO: 220562 - DNA, 25 bp, Artificial
  Probe
caaagcccggcgactggatgactac

SEQ ID NO: 220563 - DNA, 25 bp, Artificial
  Probe
tgccctccaaagatcgggaccagga

SEQ ID NO: 220564 - DNA, 25 bp, Artificial
  Probe
gccctccaaagatcgggaccaggac

SEQ ID NO: 220565 - DNA, 25 bp, Artificial
  Probe
ggccgatacactgatgtggacacag

SEQ ID NO: 220566 - DNA, 25 bp, Artificial
  Probe
tgggccgatacactgatgtggacac

SEQ ID NO: 220567 - DNA, 25 bp, Artificial
  Probe
tctgagcgctctctgggccgataca

SEQ ID NO: 220568 - DNA, 25 bp, Artificial
  Probe
tggacacaggcctggggacagatct

SEQ ID NO: 220569 - DNA, 25 bp, Artificial
  Probe
aatcgggtgacctgccctccaaaga

SEQ ID NO: 220570 - DNA, 25 bp, Artificial
  Probe
acctctgagcgctctctgggccgat

SEQ ID NO: 220571 - DNA, 25 bp, Artificial
  Probe
ggccggcccaaggaccggaagcatc

SEQ ID NO: 220572 - DNA, 25 bp, Artificial
  Probe
cactagagcgggtaccacctgagga

SEQ ID NO: 220573 - DNA, 25 bp, Artificial
  Probe
caggcctggggacagatctgagcat

SEQ ID NO: 220574 - DNA, 25 bp, Artificial
  Probe
ctgagcgctctctgggccgatacac

SEQ ID NO: 220575 - DNA, 25 bp, Artificial
  Probe
taccacctgaggagaaccaaaggta

SEQ ID NO: 220576 - DNA, 25 bp, Artificial
  Probe
gcatgaccacccaatcgggtgacct

SEQ ID NO: 220577 - DNA, 25 bp, Artificial
  Probe
tctgagcatgaccacccaatcgggt

SEQ ID NO: 220578 - DNA, 25 bp, Artificial
  Probe
aagcccggcgactggatgactactc

SEQ ID NO: 220579 - DNA, 25 bp, Artificial
  Probe
tgactactcactagagcgggtacca

SEQ ID NO: 220580 - DNA, 25 bp, Artificial
  Probe
agcgggtaccacctgaggagaacca

SEQ ID NO: 220581 - DNA, 25 bp, Artificial
  Probe
gcctggggacagatctgagcatgac

SEQ ID NO: 220582 - DNA, 25 bp, Artificial
  Probe
aaggaccggaagcatcggccacacc

SEQ ID NO: 220583 - DNA, 25 bp, Artificial
  Probe
ctagagcgggtaccacctgaggaga

SEQ ID NO: 220584 - DNA, 25 bp, Artificial
  Probe
gctgggacccaaagcccggcgactg

SEQ ID NO: 220585 - DNA, 25 bp, Artificial
  Probe
atacactgatgtggacacaggcctg

SEQ ID NO: 220586 - DNA, 25 bp, Artificial
  Probe
gggtaccacctgaggagaaccaaag

SEQ ID NO: 220587 - DNA, 25 bp, Artificial
  Probe
gcgggtaccacctgaggagaaccaa

SEQ ID NO: 220588 - DNA, 25 bp, Artificial
  Probe
agagcgggtaccacctgaggagaac

SEQ ID NO: 220589 - DNA, 25 bp, Artificial
  Probe
cctctgagcgctctctgggccgata

SEQ ID NO: 220590 - DNA, 25 bp, Artificial
  Probe
ctgagcatgaccacccaatcgggtg

SEQ ID NO: 220591 - DNA, 25 bp, Artificial
  Probe
gactggatgactactcactagagcg

SEQ ID NO: 220592 - DNA, 25 bp, Artificial
  Probe
acactgatgtggacacaggcctggg

SEQ ID NO: 220593 - DNA, 25 bp, Artificial
  Probe
actactcactagagcgggtaccacc

SEQ ID NO: 220594 - DNA, 25 bp, Artificial
  Probe
ctctctgggccgatacactgatgtg

SEQ ID NO: 220595 - DNA, 25 bp, Artificial
  Probe
ctgccctccaaagatcgggaccagg

SEQ ID NO: 220596 - DNA, 25 bp, Artificial
  Probe
gacagatctgagcatgaccacccaa

SEQ ID NO: 220597 - DNA, 25 bp, Artificial
  Probe
cgctacgcacaggagcggccggaca

SEQ ID NO: 220598 - DNA, 25 bp, Artificial
  Probe
cacctgaggagaaccaaaggtacca

SEQ ID NO: 220599 - DNA, 25 bp, Artificial
  Probe
atgaccacccaatcgggtgacctgc

SEQ ID NO: 220600 - DNA, 25 bp, Artificial
  Probe
cgactggatgactactcactagagc

SEQ ID NO: 220601 - DNA, 25 bp, Artificial
  Probe
caatcgggtgacctgccctccaaag

SEQ ID NO: 220602 - DNA, 25 bp, Artificial
  Probe
ccggcgactggatgactactcacta

SEQ ID NO: 220603 - DNA, 25 bp, Artificial
  Probe
gccggcccaaggaccggaagcatcg

SEQ ID NO: 220604 - DNA, 25 bp, Artificial
  Probe
acaggcctggggacagatctgagca

SEQ ID NO: 220605 - DNA, 25 bp, Artificial
  Probe
acagatctgagcatgaccacccaat

SEQ ID NO: 220606 - DNA, 25 bp, Artificial
  Probe
gctgttcatcaacagattctcagca

SEQ ID NO: 220607 - DNA, 25 bp, Artificial
  Probe
gagcctacatccttgcccacaaaga

SEQ ID NO: 220608 - DNA, 25 bp, Artificial
  Probe
ttcgtgggagtttgggcctcactga

SEQ ID NO: 220609 - DNA, 25 bp, Artificial
  Probe
tgcctgttgaccagtcaggaaaacg

SEQ ID NO: 220610 - DNA, 25 bp, Artificial
  Probe
ctcattgtacgaatgagagaattgc

SEQ ID NO: 220611 - DNA, 25 bp, Artificial
  Probe
gtggtttccgccagcagagagatcg

SEQ ID NO: 220612 - DNA, 25 bp, Artificial
  Probe
tggcttccttaataaacttcgtgct

SEQ ID NO: 220613 - DNA, 25 bp, Artificial
  Probe
tcagcaacaagttcctcattgtacg

SEQ ID NO: 220614 - DNA, 25 bp, Artificial
  Probe
catatagccccagattcaattcgtg

SEQ ID NO: 220615 - DNA, 25 bp, Artificial
  Probe
cgccagcagagagatcgcagccttc

SEQ ID NO: 220616 - DNA, 25 bp, Artificial
  Probe
ccactgcgcagctgaaacaggaggc

SEQ ID NO: 220617 - DNA, 25 bp, Artificial
  Probe
ttggaggacactgatgggacccacc

SEQ ID NO: 220618 - DNA, 25 bp, Artificial
  Probe
gacactgatgggacccaccagagtg

SEQ ID NO: 220619 - DNA, 25 bp, Artificial
  Probe
ggacttcagtgaacagcgctggtac

SEQ ID NO: 220620 - DNA, 25 bp, Artificial
  Probe
cacaaagatgccatccaactttgga

SEQ ID NO: 220621 - DNA, 25 bp, Artificial
  Probe
ggaaggccgtctgaagacactgtct

SEQ ID NO: 220622 - DNA, 25 bp, Artificial
  Probe
tgaggactatgcagtgtgcagcctt

SEQ ID NO: 220623 - DNA, 25 bp, Artificial
  Probe
tcagactctgtggtttccgccagca

SEQ ID NO: 220624 - DNA, 25 bp, Artificial
  Probe
tcagaggctggtggagttcatgaca

SEQ ID NO: 220625 - DNA, 25 bp, Artificial
  Probe
tctatcagaggctggtggagttcat

SEQ ID NO: 220626 - DNA, 25 bp, Artificial
  Probe
cagctgaaacaggaggccccaaacc

SEQ ID NO: 220627 - DNA, 25 bp, Artificial
  Probe
tcaattcgtgggagtttgggcctca

SEQ ID NO: 220628 - DNA, 25 bp, Artificial
  Probe
agatcgcagccttcttcccggactt

SEQ ID NO: 220629 - DNA, 25 bp, Artificial
  Probe
ggacccaccagagtgtttcgagcac

SEQ ID NO: 220630 - DNA, 25 bp, Artificial
  Probe
tgcctgcctgtgtaaccagcatcca

SEQ ID NO: 220631 - DNA, 25 bp, Artificial
  Probe
ccagcttagtaaagtcctgtcggtc

SEQ ID NO: 220632 - DNA, 25 bp, Artificial
  Probe
tcaggaaggccgtctgaagacactg

SEQ ID NO: 220633 - DNA, 25 bp, Artificial
  Probe
gactgccggaggttttaccgagagc

SEQ ID NO: 220634 - DNA, 25 bp, Artificial
  Probe
tgatgcctccttcctcgagaaagag

SEQ ID NO: 220635 - DNA, 25 bp, Artificial
  Probe
caaagatgccatccaactttggagg

SEQ ID NO: 220636 - DNA, 25 bp, Artificial
  Probe
tacagcccagaggaaggcatccact

SEQ ID NO: 220637 - DNA, 25 bp, Artificial
  Probe
ccttcttcccggacttcagtgaaca

SEQ ID NO: 220638 - DNA, 25 bp, Artificial
  Probe
tgggccaatccgagcctacatcctt

SEQ ID NO: 220639 - DNA, 25 bp, Artificial
  Probe
gaggccccaaaccagcttagtaaag

SEQ ID NO: 220640 - DNA, 25 bp, Artificial
  Probe
aaacgcagtgcctgcctgtgtaacc

SEQ ID NO: 220641 - DNA, 25 bp, Artificial
  Probe
taccgagagcatgaaggtcgttttt

SEQ ID NO: 220642 - DNA, 25 bp, Artificial
  Probe
gacaagtgggccaatccgagcctac

SEQ ID NO: 220643 - DNA, 25 bp, Artificial
  Probe
ccagattcaattcgtgggagtttgg

SEQ ID NO: 220644 - DNA, 25 bp, Artificial
  Probe
gttcatgacaagtgggccaatccga

SEQ ID NO: 220645 - DNA, 25 bp, Artificial
  Probe
acaggaggccccaaaccagcttagt

SEQ ID NO: 220646 - DNA, 25 bp, Artificial
  Probe
cagagagatcgcagccttcttcccg

SEQ ID NO: 220647 - DNA, 25 bp, Artificial
  Probe
gccatccaactttggaggacactga

SEQ ID NO: 220648 - DNA, 25 bp, Artificial
  Probe
ggactatgcagtgtgcagcctttct

SEQ ID NO: 220649 - DNA, 25 bp, Artificial
  Probe
gactctgtggtttccgccagcagag

SEQ ID NO: 220650 - DNA, 25 bp, Artificial
  Probe
tggagttcatgacaagtgggccaat

SEQ ID NO: 220651 - DNA, 25 bp, Artificial
  Probe
gaggtgatgcctccttcctcgagaa

SEQ ID NO: 220652 - DNA, 25 bp, Artificial
  Probe
actctgagagtaattcgctagtgta

SEQ ID NO: 220653 - DNA, 25 bp, Artificial
  Probe
ctgctagcgtctgactgggctaatc

SEQ ID NO: 220654 - DNA, 25 bp, Artificial
  Probe
gtctgactgggctaatccggcgact

SEQ ID NO: 220655 - DNA, 25 bp, Artificial
  Probe
gtttagaggctaaccggcacgagaa

SEQ ID NO: 220656 - DNA, 25 bp, Artificial
  Probe
ctgactgggctaatccggcgactac

SEQ ID NO: 220657 - DNA, 25 bp, Artificial
  Probe
gtcccaaggccgatacgtcatcgtc

SEQ ID NO: 220658 - DNA, 25 bp, Artificial
  Probe
aggccgatacgtcatcgtcatcaaa

SEQ ID NO: 220659 - DNA, 25 bp, Artificial
  Probe
ggcacgagaagacttgctgggcatc

SEQ ID NO: 220660 - DNA, 25 bp, Artificial
  Probe
ggcgactactaccagttgcctggct

SEQ ID NO: 220661 - DNA, 25 bp, Artificial
  Probe
ctctgagagtaattcgctagtgtaa

SEQ ID NO: 220662 - DNA, 25 bp, Artificial
  Probe
accggcacgagaagacttgctgggc

SEQ ID NO: 220663 - DNA, 25 bp, Artificial
  Probe
cttcagcactctgagagtaattcgc

SEQ ID NO: 220664 - DNA, 25 bp, Artificial
  Probe
aatgcgaacgacttcttcgccaagc

SEQ ID NO: 220665 - DNA, 25 bp, Artificial
  Probe
ctaccagttgcctggcttcagcact

SEQ ID NO: 220666 - DNA, 25 bp, Artificial
  Probe
tcatcaaaactgctagcgtctgact

SEQ ID NO: 220667 - DNA, 25 bp, Artificial
  Probe
ccaaggccgatacgtcatcgtcatc

SEQ ID NO: 220668 - DNA, 25 bp, Artificial
  Probe
gcgaacgacttcttcgccaagcgca

SEQ ID NO: 220669 - DNA, 25 bp, Artificial
  Probe
actactaccagttgcctggcttcag

SEQ ID NO: 220670 - DNA, 25 bp, Artificial
  Probe
acgctggtcccaaggccgatacgtc

SEQ ID NO: 220671 - DNA, 25 bp, Artificial
  Probe
gcctggcttcagcactctgagagta

SEQ ID NO: 220672 - DNA, 25 bp, Artificial
  Probe
agttgcctggcttcagcactctgag

SEQ ID NO: 220673 - DNA, 25 bp, Artificial
  Probe
gtcatcgtcatcaaaactgctagcg

SEQ ID NO: 220674 - DNA, 25 bp, Artificial
  Probe
ctagcgtctgactgggctaatccgg

SEQ ID NO: 220675 - DNA, 25 bp, Artificial
  Probe
tagtttagaggctaaccggcacgag

SEQ ID NO: 220676 - DNA, 25 bp, Artificial
  Probe
ccaatgcgaacgacttcttcgccaa

SEQ ID NO: 220677 - DNA, 25 bp, Artificial
  Probe
aaactgctagcgtctgactgggcta

SEQ ID NO: 220678 - DNA, 25 bp, Artificial
  Probe
tcatcgtcatcaaaactgctagcgt

SEQ ID NO: 220679 - DNA, 25 bp, Artificial
  Probe
cagttgcctggcttcagcactctga

SEQ ID NO: 220680 - DNA, 25 bp, Artificial
  Probe
aggctaaccggcacgagaagacttg

SEQ ID NO: 220681 - DNA, 25 bp, Artificial
  Probe
gcgactactaccagttgcctggctt

SEQ ID NO: 220682 - DNA, 25 bp, Artificial
  Probe
tgactgggctaatccggcgactact

SEQ ID NO: 220683 - DNA, 25 bp, Artificial
  Probe
acgtcatcgtcatcaaaactgctag

SEQ ID NO: 220684 - DNA, 25 bp, Artificial
  Probe
tccggcgactactaccagttgcctg

SEQ ID NO: 220685 - DNA, 25 bp, Artificial
  Probe
attcgctagtgtaaagctttaaatc

SEQ ID NO: 220686 - DNA, 25 bp, Artificial
  Probe
cggcacgagaagacttgctgggcat

SEQ ID NO: 220687 - DNA, 25 bp, Artificial
  Probe
gccgatacgtcatcgtcatcaaaac

SEQ ID NO: 220688 - DNA, 25 bp, Artificial
  Probe
tcgtcatcaaaactgctagcgtctg

SEQ ID NO: 220689 - DNA, 25 bp, Artificial
  Probe
gctaatccggcgactactaccagtt

SEQ ID NO: 220690 - DNA, 25 bp, Artificial
  Probe
gcacgagaagacttgctgggcatct

SEQ ID NO: 220691 - DNA, 25 bp, Artificial
  Probe
tacgctggtcccaaggccgatacgt

SEQ ID NO: 220692 - DNA, 25 bp, Artificial
  Probe
gatacgtcatcgtcatcaaaactgc

SEQ ID NO: 220693 - DNA, 25 bp, Artificial
  Probe
cagcactctgagagtaattcgctag

SEQ ID NO: 220694 - DNA, 25 bp, Artificial
  Probe
agtttagaggctaaccggcacgaga

SEQ ID NO: 220695 - DNA, 25 bp, Artificial
  Probe
cgatacgtcatcgtcatcaaaactg

SEQ ID NO: 220696 - DNA, 25 bp, Artificial
  Probe
tgcgaacgacttcttcgccaagcgc

SEQ ID NO: 220697 - DNA, 25 bp, Artificial
  Probe
atcaaaactgctagcgtctgactgg

SEQ ID NO: 220698 - DNA, 25 bp, Artificial
  Probe
ctcatgcagatgctgatgatgggtt

SEQ ID NO: 220699 - DNA, 25 bp, Artificial
  Probe
ggtttcgatgatgaaggcggcctcc

SEQ ID NO: 220700 - DNA, 25 bp, Artificial
  Probe
cattcttgtagaatcttcagggtgg

SEQ ID NO: 220701 - DNA, 25 bp, Artificial
  Probe
cttgtatgtgcatcacgtagagcac

SEQ ID NO: 220702 - DNA, 25 bp, Artificial
  Probe
tgatagtgctgttggcaagccccac

SEQ ID NO: 220703 - DNA, 25 bp, Artificial
  Probe
tgagaccagaccacggtacccgtgg

SEQ ID NO: 220704 - DNA, 25 bp, Artificial
  Probe
cccggattctggagtccctcatgca

SEQ ID NO: 220705 - DNA, 25 bp, Artificial
  Probe
cccctcttgtcttgtatgtgcatca

SEQ ID NO: 220706 - DNA, 25 bp, Artificial
  Probe
cctctgcgagggactgcagcacaca

SEQ ID NO: 220707 - DNA, 25 bp, Artificial
  Probe
gtgcattcttgtagaatcttcaggg

SEQ ID NO: 220708 - DNA, 25 bp, Artificial
  Probe
tcttcagggtggaatgtgtgatgcc

SEQ ID NO: 220709 - DNA, 25 bp, Artificial
  Probe
cggattctggagtccctcatgcaga

SEQ ID NO: 220710 - DNA, 25 bp, Artificial
  Probe
tgaatcggaactacccagctctcta

SEQ ID NO: 220711 - DNA, 25 bp, Artificial
  Probe
ggcttctaatgataggcccatggtc

SEQ ID NO: 220712 - DNA, 25 bp, Artificial
  Probe
ctgagaccagaccacggtacccgtg

SEQ ID NO: 220713 - DNA, 25 bp, Artificial
  Probe
gcttctaatgataggcccatggtct

SEQ ID NO: 220714 - DNA, 25 bp, Artificial
  Probe
ccaccaagaattacgacatcgctgc

SEQ ID NO: 220715 - DNA, 25 bp, Artificial
  Probe
atgtgtgatgcctttcttggcaata

SEQ ID NO: 220716 - DNA, 25 bp, Artificial
  Probe
tccatgatagtgctgttggcaagcc

SEQ ID NO: 220717 - DNA, 25 bp, Artificial
  Probe
ccacggtacccgtggctgagctgag

SEQ ID NO: 220718 - DNA, 25 bp, Artificial
  Probe
gtccctcatgcagatgctgatgatg

SEQ ID NO: 220719 - DNA, 25 bp, Artificial
  Probe
gcagcattgcaccagcagtcccgaa

SEQ ID NO: 220720 - DNA, 25 bp, Artificial
  Probe
tccccggattctggagtccctcatg

SEQ ID NO: 220721 - DNA, 25 bp, Artificial
  Probe
ggtacccgtggctgagctgagcttc

SEQ ID NO: 220722 - DNA, 25 bp, Artificial
  Probe
gctgagctgagcttcccttgcttcc

SEQ ID NO: 220723 - DNA, 25 bp, Artificial
  Probe
ctgcgagggactgcagcacacactg

SEQ ID NO: 220724 - DNA, 25 bp, Artificial
  Probe
cctccatgatagtgctgttggcaag

SEQ ID NO: 220725 - DNA, 25 bp, Artificial
  Probe
ggtctgtgcattcttgtagaatctt

SEQ ID NO: 220726 - DNA, 25 bp, Artificial
  Probe
catgcagatgctgatgatgggtttc

SEQ ID NO: 220727 - DNA, 25 bp, Artificial
  Probe
tccaccaagaattacgacatcgctg

SEQ ID NO: 220728 - DNA, 25 bp, Artificial
  Probe
gtgtgatgcctttcttggcaatagg

SEQ ID NO: 220729 - DNA, 25 bp, Artificial
  Probe
ttttgaatgtgcatatgctgacgcc

SEQ ID NO: 220730 - DNA, 25 bp, Artificial
  Probe
acgtagagcacgagggcttctaatg

SEQ ID NO: 220731 - DNA, 25 bp, Artificial
  Probe
ctggcctctgcgagggactgcagca

SEQ ID NO: 220732 - DNA, 25 bp, Artificial
  Probe
gctgatccccggattctggagtccc

SEQ ID NO: 220733 - DNA, 25 bp, Artificial
  Probe
agggactgcagcacacactgcactc

SEQ ID NO: 220734 - DNA, 25 bp, Artificial
  Probe
cgagggcttctaatgataggcccat

SEQ ID NO: 220735 - DNA, 25 bp, Artificial
  Probe
aatgataggcccatggtctgtgcat

SEQ ID NO: 220736 - DNA, 25 bp, Artificial
  Probe
tatgctgacgcctgagaccagacca

SEQ ID NO: 220737 - DNA, 25 bp, Artificial
  Probe
gacgcctgagaccagaccacggtac

SEQ ID NO: 220738 - DNA, 25 bp, Artificial
  Probe
ttctggagtccctcatgcagatgct

SEQ ID NO: 220739 - DNA, 25 bp, Artificial
  Probe
gagcacgagggcttctaatgatagg

SEQ ID NO: 220740 - DNA, 25 bp, Artificial
  Probe
accctccatgatagtgctgttggca

SEQ ID NO: 220741 - DNA, 25 bp, Artificial
  Probe
cttcagggtggaatgtgtgatgcct

SEQ ID NO: 220742 - DNA, 25 bp, Artificial
  Probe
cgagggactgcagcacacactgcac

SEQ ID NO: 220743 - DNA, 25 bp, Artificial
  Probe
tttcgatgatgaaggcggcctcctc

SEQ ID NO: 220744 - DNA, 25 bp, Artificial
  Probe
gtgtcccagtggtcttgtccaatgg

SEQ ID NO: 220745 - DNA, 25 bp, Artificial
  Probe
acacagcccaaggaggaaatgatca

SEQ ID NO: 220746 - DNA, 25 bp, Artificial
  Probe
aaggattttgcacctcctcagccta

SEQ ID NO: 220747 - DNA, 25 bp, Artificial
  Probe
atccgtgtgcgctgacccaaagcag

SEQ ID NO: 220748 - DNA, 25 bp, Artificial
  Probe
ctcctcagcctaagaaccaagaaga

SEQ ID NO: 220749 - DNA, 25 bp, Artificial
  Probe
cacatcactgcacagacctgatttg

SEQ ID NO: 220750 - DNA, 25 bp, Artificial
  Probe
tagatccgaattttctatgtttagc

SEQ ID NO: 220751 - DNA, 25 bp, Artificial
  Probe
gctatcatctttcacctgaagtcga

SEQ ID NO: 220752 - DNA, 25 bp, Artificial
  Probe
gcacagacctgatttgtgtcccagt

SEQ ID NO: 220753 - DNA, 25 bp, Artificial
  Probe
tggaattggacacagcccaaggagg

SEQ ID NO: 220754 - DNA, 25 bp, Artificial
  Probe
ggaattggacacagcccaaggagga

SEQ ID NO: 220755 - DNA, 25 bp, Artificial
  Probe
aagtcgaaaagatccgtgtgcgctg

SEQ ID NO: 220756 - DNA, 25 bp, Artificial
  Probe
tgcacatcactgcacagacctgatt

SEQ ID NO: 220757 - DNA, 25 bp, Artificial
  Probe
gatccgaattttctatgtttagcta

SEQ ID NO: 220758 - DNA, 25 bp, Artificial
  Probe
gcttttctgggatggaattggacac

SEQ ID NO: 220759 - DNA, 25 bp, Artificial
  Probe
catcatagtgtgtcatatttaagct

SEQ ID NO: 220760 - DNA, 25 bp, Artificial
  Probe
ttggaggtttcacctgcacatcact

SEQ ID NO: 220761 - DNA, 25 bp, Artificial
  Probe
gtttcacctgcacatcactgcacag

SEQ ID NO: 220762 - DNA, 25 bp, Artificial
  Probe
catcactgcacagacctgatttgtg

SEQ ID NO: 220763 - DNA, 25 bp, Artificial
  Probe
gattcatattgcatcatagtgtgtc

SEQ ID NO: 220764 - DNA, 25 bp, Artificial
  Probe
gatttgtgtcccagtggtcttgtcc

SEQ ID NO: 220765 - DNA, 25 bp, Artificial
  Probe
acctgatttgtgtcccagtggtctt

SEQ ID NO: 220766 - DNA, 25 bp, Artificial
  Probe
ccaaagcagatctgggtgaaaagga

SEQ ID NO: 220767 - DNA, 25 bp, Artificial
  Probe
ctgcacatcactgcacagacctgat

SEQ ID NO: 220768 - DNA, 25 bp, Artificial
  Probe
tttatatggcccttcttggaaacaa

SEQ ID NO: 220769 - DNA, 25 bp, Artificial
  Probe
cttgtccaatggatgaagttgattc

SEQ ID NO: 220770 - DNA, 25 bp, Artificial
  Probe
atttgtgtcccagtggtcttgtcca

SEQ ID NO: 220771 - DNA, 25 bp, Artificial
  Probe
tttctgggatggaattggacacagc

SEQ ID NO: 220772 - DNA, 25 bp, Artificial
  Probe
gaggtttcacctgcacatcactgca

SEQ ID NO: 220773 - DNA, 25 bp, Artificial
  Probe
aaaggattttgcacctcctcagcct

SEQ ID NO: 220774 - DNA, 25 bp, Artificial
  Probe
cttttctgggatggaattggacaca

SEQ ID NO: 220775 - DNA, 25 bp, Artificial
  Probe
tcatattgcatcatagtgtgtcata

SEQ ID NO: 220776 - DNA, 25 bp, Artificial
  Probe
gcatcatagtgtgtcatatttaagc

SEQ ID NO: 220777 - DNA, 25 bp, Artificial
  Probe
tggacacagcccaaggaggaaatga

SEQ ID NO: 220778 - DNA, 25 bp, Artificial
  Probe
agatccgaattttctatgtttagct

SEQ ID NO: 220779 - DNA, 25 bp, Artificial
  Probe
gctgacccaaagcagatctgggtga

SEQ ID NO: 220780 - DNA, 25 bp, Artificial
  Probe
attcatattgcatcatagtgtgtca

SEQ ID NO: 220781 - DNA, 25 bp, Artificial
  Probe
cagcctaagaaccaagaagatgtaa

SEQ ID NO: 220782 - DNA, 25 bp, Artificial
  Probe
tcacctgaagtcgaaaagatccgtg

SEQ ID NO: 220783 - DNA, 25 bp, Artificial
  Probe
ctgacccaaagcagatctgggtgaa

SEQ ID NO: 220784 - DNA, 25 bp, Artificial
  Probe
ggattttgcacctcctcagcctaag

SEQ ID NO: 220785 - DNA, 25 bp, Artificial
  Probe
acagcccaaggaggaaatgatcaca

SEQ ID NO: 220786 - DNA, 25 bp, Artificial
  Probe
cagtggtcttgtccaatggatgaag

SEQ ID NO: 220787 - DNA, 25 bp, Artificial
  Probe
cgaaaagatccgtgtgcgctgaccc

SEQ ID NO: 220788 - DNA, 25 bp, Artificial
  Probe
ctttcacctgaagtcgaaaagatcc

SEQ ID NO: 220789 - DNA, 25 bp, Artificial
  Probe
ccgtgtgcgctgacccaaagcagat

SEQ ID NO: 220790 - DNA, 25 bp, Artificial
  Probe
tcagaggcaatcttcctcatgggtc

SEQ ID NO: 220791 - DNA, 25 bp, Artificial
  Probe
ggcctagcatacataacaccttgcc

SEQ ID NO: 220792 - DNA, 25 bp, Artificial
  Probe
acagtacttcttaatcataacggtg

SEQ ID NO: 220793 - DNA, 25 bp, Artificial
  Probe
ggcatgtccgagtgccttctgtccc

SEQ ID NO: 220794 - DNA, 25 bp, Artificial
  Probe
ctgtaactttatgctaacctgtgat

SEQ ID NO: 220795 - DNA, 25 bp, Artificial
  Probe
tctcaagaaagcagcattcatatcg

SEQ ID NO: 220796 - DNA, 25 bp, Artificial
  Probe
cttcttaatcataacggtgttttgt

SEQ ID NO: 220797 - DNA, 25 bp, Artificial
  Probe
atcataacggtgttttgttccttct

SEQ ID NO: 220798 - DNA, 25 bp, Artificial
  Probe
attgctggcttaactacttcttatg

SEQ ID NO: 220799 - DNA, 25 bp, Artificial
  Probe
acttcttaatcataacggtgttttg

SEQ ID NO: 220800 - DNA, 25 bp, Artificial
  Probe
ccatactgggggtaattagaactga

SEQ ID NO: 220801 - DNA, 25 bp, Artificial
  Probe
ttcatatcgtactgcctaggcatgt

SEQ ID NO: 220802 - DNA, 25 bp, Artificial
  Probe
caactctccagtaactgatcatgtg

SEQ ID NO: 220803 - DNA, 25 bp, Artificial
  Probe
aatatgccccctggttgtgtcatac

SEQ ID NO: 220804 - DNA, 25 bp, Artificial
  Probe
tagcttcaggagcatttaccttgga

SEQ ID NO: 220805 - DNA, 25 bp, Artificial
  Probe
tggccgactgcaacacaaggtgcag

SEQ ID NO: 220806 - DNA, 25 bp, Artificial
  Probe
atgctcacagagaaggaaagcgagc

SEQ ID NO: 220807 - DNA, 25 bp, Artificial
  Probe
tcccttcctcggaatcccgagagat

SEQ ID NO: 220808 - DNA, 25 bp, Artificial
  Probe
actctccagtaactgatcatgtgga

SEQ ID NO: 220809 - DNA, 25 bp, Artificial
  Probe
ggccgactgcaacacaaggtgcagc

SEQ ID NO: 220810 - DNA, 25 bp, Artificial
  Probe
acttcttatgaaggaattcagcagt

SEQ ID NO: 220811 - DNA, 25 bp, Artificial
  Probe
tactgcctaggcatgtccgagtgcc

SEQ ID NO: 220812 - DNA, 25 bp, Artificial
  Probe
gatgatgctcacagagaaggaaagc

SEQ ID NO: 220813 - DNA, 25 bp, Artificial
  Probe
tgcctaggcatgtccgagtgccttc

SEQ ID NO: 220814 - DNA, 25 bp, Artificial
  Probe
ccttaccttcagtatgtgttggata

SEQ ID NO: 220815 - DNA, 25 bp, Artificial
  Probe
agaatgcacacttcccttcctcgga

SEQ ID NO: 220816 - DNA, 25 bp, Artificial
  Probe
ggacatcaactctccagtaactgat

SEQ ID NO: 220817 - DNA, 25 bp, Artificial
  Probe
cgagcacacagatgtgcacagaagt

SEQ ID NO: 220818 - DNA, 25 bp, Artificial
  Probe
ctcggaatcccgagagatacaatag

SEQ ID NO: 220819 - DNA, 25 bp, Artificial
  Probe
cacaaggtgcagctgcttaacaaaa

SEQ ID NO: 220820 - DNA, 25 bp, Artificial
  Probe
ccttcctcggaatcccgagagatac

SEQ ID NO: 220821 - DNA, 25 bp, Artificial
  Probe
ggaaagcgagcacacagatgtgcac

SEQ ID NO: 220822 - DNA, 25 bp, Artificial
  Probe
taggcatgtccgagtgccttctgtc

SEQ ID NO: 220823 - DNA, 25 bp, Artificial
  Probe
gaaagcagcattcatatcgtactgc

SEQ ID NO: 220824 - DNA, 25 bp, Artificial
  Probe
gaactgaaaatatgccccctggttg

SEQ ID NO: 220825 - DNA, 25 bp, Artificial
  Probe
cggaatcccgagagatacaatagga

SEQ ID NO: 220826 - DNA, 25 bp, Artificial
  Probe
cccggggacatcaactctccagtaa

SEQ ID NO: 220827 - DNA, 25 bp, Artificial
  Probe
ttatcactcatacctgggtacatga

SEQ ID NO: 220828 - DNA, 25 bp, Artificial
  Probe
caacacaaggtgcagctgcttaaca

SEQ ID NO: 220829 - DNA, 25 bp, Artificial
  Probe
gagtgccttctgtccctctgtaact

SEQ ID NO: 220830 - DNA, 25 bp, Artificial
  Probe
attatcactcatacctgggtacatg

SEQ ID NO: 220831 - DNA, 25 bp, Artificial
  Probe
tataccttaccttcagtatgtgttg

SEQ ID NO: 220832 - DNA, 25 bp, Artificial
  Probe
taatcataacggtgttttgttcctt

SEQ ID NO: 220833 - DNA, 25 bp, Artificial
  Probe
ctcaagaaagcagcattcatatcgt

SEQ ID NO: 220834 - DNA, 25 bp, Artificial
  Probe
ctctgtaactttatgctaacctgtg

SEQ ID NO: 220835 - DNA, 25 bp, Artificial
  Probe
atggcctagcatacataacaccttg

SEQ ID NO: 220836 - DNA, 25 bp, Artificial
  Probe
tctatctatctatctatctatctat

SEQ ID NO: 220837 - DNA, 25 bp, Artificial
  Probe
gctacccttactttcctccattggt

SEQ ID NO: 220838 - DNA, 25 bp, Artificial
  Probe
ctctaaagagccatgatcatggcac

SEQ ID NO: 220839 - DNA, 25 bp, Artificial
  Probe
tgttttgttcattcaaatatatata

SEQ ID NO: 220840 - DNA, 25 bp, Artificial
  Probe
atctatctatctatctatctatcta

SEQ ID NO: 220841 - DNA, 25 bp, Artificial
  Probe
atctatctatctatctatctatctg

SEQ ID NO: 220842 - DNA, 25 bp, Artificial
  Probe
tttgttcattcaaatatatatatgt

SEQ ID NO: 220843 - DNA, 25 bp, Artificial
  Probe
agagccatgatcatggcactgcact

SEQ ID NO: 220844 - DNA, 25 bp, Artificial
  Probe
aaagagccatgatcatggcactgca

SEQ ID NO: 220845 - DNA, 25 bp, Artificial
  Probe
tgatcatggcactgcactccagcct

SEQ ID NO: 220846 - DNA, 25 bp, Artificial
  Probe
catggcactgcactccagcctggac

SEQ ID NO: 220847 - DNA, 25 bp, Artificial
  Probe
tgtatctatctatctatctatctat

SEQ ID NO: 220848 - DNA, 25 bp, Artificial
  Probe
gcactccagcctggacaatggagca

SEQ ID NO: 220849 - DNA, 25 bp, Artificial
  Probe
atggcactgcactccagcctggaca

SEQ ID NO: 220850 - DNA, 25 bp, Artificial
  Probe
gtatctatctatctatctatctatc

SEQ ID NO: 220851 - DNA, 25 bp, Artificial
  Probe
ttaatctggccacaaccaaaggggg

SEQ ID NO: 220852 - DNA, 25 bp, Artificial
  Probe
tttaatctggccacaaccaaagggg

SEQ ID NO: 220853 - DNA, 25 bp, Artificial
  Probe
ggaccctttaatctggccacaacca

SEQ ID NO: 220854 - DNA, 25 bp, Artificial
  Probe
cactgcactccagcctggacaatgg

SEQ ID NO: 220855 - DNA, 25 bp, Artificial
  Probe
tggaccctttaatctggccacaacc

SEQ ID NO: 220856 - DNA, 25 bp, Artificial
  Probe
gatcatggcactgcactccagcctg

SEQ ID NO: 220857 - DNA, 25 bp, Artificial
  Probe
aagagccatgatcatggcactgcac

SEQ ID NO: 220858 - DNA, 25 bp, Artificial
  Probe
ggcactgcactccagcctggacaat

SEQ ID NO: 220859 - DNA, 25 bp, Artificial
  Probe
tctaaagagccatgatcatggcact

SEQ ID NO: 220860 - DNA, 25 bp, Artificial
  Probe
ctgcactccagcctggacaatggag

SEQ ID NO: 220861 - DNA, 25 bp, Artificial
  Probe
tggcactgcactccagcctggacaa

SEQ ID NO: 220862 - DNA, 25 bp, Artificial
  Probe
agcctggacaatggagcaagaccct

SEQ ID NO: 220863 - DNA, 25 bp, Artificial
  Probe
atcatggcactgcactccagcctgg

SEQ ID NO: 220864 - DNA, 25 bp, Artificial
  Probe
tgcactccagcctggacaatggagc

SEQ ID NO: 220865 - DNA, 25 bp, Artificial
  Probe
tcatggcactgcactccagcctgga

SEQ ID NO: 220866 - DNA, 25 bp, Artificial
  Probe
ctatctatctatctatctatctatc

SEQ ID NO: 220867 - DNA, 25 bp, Artificial
  Probe
aattgctacccttactttcctccat

SEQ ID NO: 220868 - DNA, 25 bp, Artificial
  Probe
ctttaatctggccacaaccaaaggg

SEQ ID NO: 220869 - DNA, 25 bp, Artificial
  Probe
taaagagccatgatcatggcactgc

SEQ ID NO: 220870 - DNA, 25 bp, Artificial
  Probe
taatctggccacaaccaaagggggg

SEQ ID NO: 220871 - DNA, 25 bp, Artificial
  Probe
ctaaagagccatgatcatggcactg

SEQ ID NO: 220872 - DNA, 25 bp, Artificial
  Probe
catgatcatggcactgcactccagc

SEQ ID NO: 220873 - DNA, 25 bp, Artificial
  Probe
tatctatctgttttgttcattcaaa

SEQ ID NO: 220874 - DNA, 25 bp, Artificial
  Probe
gaccctttaatctggccacaaccaa

SEQ ID NO: 220875 - DNA, 25 bp, Artificial
  Probe
gagccatgatcatggcactgcactc

SEQ ID NO: 220876 - DNA, 25 bp, Artificial
  Probe
atgatcatggcactgcactccagcc

SEQ ID NO: 220877 - DNA, 25 bp, Artificial
  Probe
ccatgatcatggcactgcactccag

SEQ ID NO: 220878 - DNA, 25 bp, Artificial
  Probe
gcactgcactccagcctggacaatg

SEQ ID NO: 220879 - DNA, 25 bp, Artificial
  Probe
tatctatctatctatctatctatct

SEQ ID NO: 220880 - DNA, 25 bp, Artificial
  Probe
ccctttaatctggccacaaccaaag

SEQ ID NO: 220881 - DNA, 25 bp, Artificial
  Probe
tctgttttgttcattcaaatatata

SEQ ID NO: 220882 - DNA, 25 bp, Artificial
  Probe
tcagtgtcacctgcataaagtttgc

SEQ ID NO: 220883 - DNA, 25 bp, Artificial
  Probe
gtccttctagtttcgaaattgcatc

SEQ ID NO: 220884 - DNA, 25 bp, Artificial
  Probe
ataaagtttgcctccaacctgttgc

SEQ ID NO: 220885 - DNA, 25 bp, Artificial
  Probe
cacctgcataaagtttgcctccaac

SEQ ID NO: 220886 - DNA, 25 bp, Artificial
  Probe
agtttgcctccaacctgttgcatct

SEQ ID NO: 220887 - DNA, 25 bp, Artificial
  Probe
gtcacctgcataaagtttgcctcca

SEQ ID NO: 220888 - DNA, 25 bp, Artificial
  Probe
cctgcataaagtttgcctccaacct

SEQ ID NO: 220889 - DNA, 25 bp, Artificial
  Probe
cctccaacctgttgcatctaccaaa

SEQ ID NO: 220890 - DNA, 25 bp, Artificial
  Probe
tgtcacctgcataaagtttgcctcc

SEQ ID NO: 220891 - DNA, 25 bp, Artificial
  Probe
ctccaacctgttgcatctaccaaag

SEQ ID NO: 220892 - DNA, 25 bp, Artificial
  Probe
cttcagtgtcacctgcataaagttt

SEQ ID NO: 220893 - DNA, 25 bp, Artificial
  Probe
cataaagtttgcctccaacctgttg

SEQ ID NO: 220894 - DNA, 25 bp, Artificial
  Probe
cagtgtcacctgcataaagtttgcc

SEQ ID NO: 220895 - DNA, 25 bp, Artificial
  Probe
gtttgcctccaacctgttgcatcta

SEQ ID NO: 220896 - DNA, 25 bp, Artificial
  Probe
ttgcctccaacctgttgcatctacc

SEQ ID NO: 220897 - DNA, 25 bp, Artificial
  Probe
agtgtcacctgcataaagtttgcct

SEQ ID NO: 220898 - DNA, 25 bp, Artificial
  Probe
ttcagtgtcacctgcataaagtttg

SEQ ID NO: 220899 - DNA, 25 bp, Artificial
  Probe
ctgcataaagtttgcctccaacctg

SEQ ID NO: 220900 - DNA, 25 bp, Artificial
  Probe
tcttcagtgtcacctgcataaagtt

SEQ ID NO: 220901 - DNA, 25 bp, Artificial
  Probe
tctcttcagtgtcacctgcataaag

SEQ ID NO: 220902 - DNA, 25 bp, Artificial
  Probe
tgcctccaacctgttgcatctacca

SEQ ID NO: 220903 - DNA, 25 bp, Artificial
  Probe
ctcttcagtgtcacctgcataaagt

SEQ ID NO: 220904 - DNA, 25 bp, Artificial
  Probe
taaagtttgcctccaacctgttgca

SEQ ID NO: 220905 - DNA, 25 bp, Artificial
  Probe
tgcataaagtttgcctccaacctgt

SEQ ID NO: 220906 - DNA, 25 bp, Artificial
  Probe
tttgcctccaacctgttgcatctac

SEQ ID NO: 220907 - DNA, 25 bp, Artificial
  Probe
tccaacctgttgcatctaccaaagc

SEQ ID NO: 220908 - DNA, 25 bp, Artificial
  Probe
caacctgttgcatctaccaaagctt

SEQ ID NO: 220909 - DNA, 25 bp, Artificial
  Probe
gcataaagtttgcctccaacctgtt

SEQ ID NO: 220910 - DNA, 25 bp, Artificial
  Probe
acctgcataaagtttgcctccaacc

SEQ ID NO: 220911 - DNA, 25 bp, Artificial
  Probe
gtgtcacctgcataaagtttgcctc

SEQ ID NO: 220912 - DNA, 25 bp, Artificial
  Probe
aagtttgcctccaacctgttgcatc

SEQ ID NO: 220913 - DNA, 25 bp, Artificial
  Probe
gcctccaacctgttgcatctaccaa

SEQ ID NO: 220914 - DNA, 25 bp, Artificial
  Probe
ccaacctgttgcatctaccaaagct

SEQ ID NO: 220915 - DNA, 25 bp, Artificial
  Probe
aaagtttgcctccaacctgttgcat

SEQ ID NO: 220916 - DNA, 25 bp, Artificial
  Probe
tcacctgcataaagtttgcctccaa

SEQ ID NO: 220917 - DNA, 25 bp, Artificial
  Probe
gtctcttcagtgtcacctgcataaa

SEQ ID NO: 220918 - DNA, 25 bp, Artificial
  Probe
agtagatcagttctatgatgacaac

SEQ ID NO: 220919 - DNA, 25 bp, Artificial
  Probe
agctcttcagtttcagaaagacaga

SEQ ID NO: 220920 - DNA, 25 bp, Artificial
  Probe
ctgcggccaacatgcctatccaggg

SEQ ID NO: 220921 - DNA, 25 bp, Artificial
  Probe
aaagtttcacggaaatccaatgcat

SEQ ID NO: 220922 - DNA, 25 bp, Artificial
  Probe
acacaaagtggctgccattaaaaac

SEQ ID NO: 220923 - DNA, 25 bp, Artificial
  Probe
catgtagctgtggtcatttcaaatt

SEQ ID NO: 220924 - DNA, 25 bp, Artificial
  Probe
tggaaatccggcatctgctggccca

SEQ ID NO: 220925 - DNA, 25 bp, Artificial
  Probe
tccaatgcatgtagctgtggtcatt

SEQ ID NO: 220926 - DNA, 25 bp, Artificial
  Probe
tccggcatctgctggcccagtggat

SEQ ID NO: 220927 - DNA, 25 bp, Artificial
  Probe
gtttcacggaaatccaatgcatgta

SEQ ID NO: 220928 - DNA, 25 bp, Artificial
  Probe
aagagaaaaacctgctattgattca

SEQ ID NO: 220929 - DNA, 25 bp, Artificial
  Probe
agtagcttctaacaatgaaactatg

SEQ ID NO: 220930 - DNA, 25 bp, Artificial
  Probe
gagactcaagactgggaagtagctt

SEQ ID NO: 220931 - DNA, 25 bp, Artificial
  Probe
gaaatctttacagagctcttcagtt

SEQ ID NO: 220932 - DNA, 25 bp, Artificial
  Probe
tcttcagggaaagtttcacggaaat

SEQ ID NO: 220933 - DNA, 25 bp, Artificial
  Probe
gagaatactggctgcggccaacatg

SEQ ID NO: 220934 - DNA, 25 bp, Artificial
  Probe
atctgctggcccagtggattgagac

SEQ ID NO: 220935 - DNA, 25 bp, Artificial
  Probe
tctatgatgacaactttcctatgga

SEQ ID NO: 220936 - DNA, 25 bp, Artificial
  Probe
ggaagtagcttctaacaatgaaact

SEQ ID NO: 220937 - DNA, 25 bp, Artificial
  Probe
cctatccagggacctctggagaaat

SEQ ID NO: 220938 - DNA, 25 bp, Artificial
  Probe
caatgcatgtagctgtggtcatttc

SEQ ID NO: 220939 - DNA, 25 bp, Artificial
  Probe
agcttctaacaatgaaactatggca

SEQ ID NO: 220940 - DNA, 25 bp, Artificial
  Probe
acatgcctatccagggacctctgga

SEQ ID NO: 220941 - DNA, 25 bp, Artificial
  Probe
ttctatgatgacaactttcctatgg

SEQ ID NO: 220942 - DNA, 25 bp, Artificial
  Probe
tgtagctgtggtcatttcaaattgc

SEQ ID NO: 220943 - DNA, 25 bp, Artificial
  Probe
ctttacagagctcttcagtttcaga

SEQ ID NO: 220944 - DNA, 25 bp, Artificial
  Probe
gaagtagcttctaacaatgaaacta

SEQ ID NO: 220945 - DNA, 25 bp, Artificial
  Probe
tggctgcggccaacatgcctatcca

SEQ ID NO: 220946 - DNA, 25 bp, Artificial
  Probe
tctttacagagctcttcagtttcag

SEQ ID NO: 220947 - DNA, 25 bp, Artificial
  Probe
gagaaaaacctgctattgattcaca

SEQ ID NO: 220948 - DNA, 25 bp, Artificial
  Probe
ttcctatggaaatccggcatctgct

SEQ ID NO: 220949 - DNA, 25 bp, Artificial
  Probe
aatccaatgcatgtagctgtggtca

SEQ ID NO: 220950 - DNA, 25 bp, Artificial
  Probe
ggccaacatgcctatccagggacct

SEQ ID NO: 220951 - DNA, 25 bp, Artificial
  Probe
caacatgcctatccagggacctctg

SEQ ID NO: 220952 - DNA, 25 bp, Artificial
  Probe
tccagggacctctggagaaatcttt

SEQ ID NO: 220953 - DNA, 25 bp, Artificial
  Probe
gctgtggtcatttcaaattgcttaa

SEQ ID NO: 220954 - DNA, 25 bp, Artificial
  Probe
ttgagactcaagactgggaagtagc

SEQ ID NO: 220955 - DNA, 25 bp, Artificial
  Probe
actttcctatggaaatccggcatct

SEQ ID NO: 220956 - DNA, 25 bp, Artificial
  Probe
tggcccagtggattgagactcaaga

SEQ ID NO: 220957 - DNA, 25 bp, Artificial
  Probe
cttcagtttcagaaagacagaggaa

SEQ ID NO: 220958 - DNA, 25 bp, Artificial
  Probe
acctctggagaaatctttacagagc

SEQ ID NO: 220959 - DNA, 25 bp, Artificial
  Probe
gatcagttctatgatgacaactttc

SEQ ID NO: 220960 - DNA, 25 bp, Artificial
  Probe
gcctatccagggacctctggagaaa

SEQ ID NO: 220961 - DNA, 25 bp, Artificial
  Probe
tcttcagtttcagaaagacagagga

SEQ ID NO: 220962 - DNA, 25 bp, Artificial
  Probe
caagtagatcagttctatgatgaca

SEQ ID NO: 220963 - DNA, 25 bp, Artificial
  Probe
gctattgattcacaatctaaagaga

SEQ ID NO: 220964 - DNA, 25 bp, Artificial
  Probe
tccaaactttcaacttcagggtgat

SEQ ID NO: 220965 - DNA, 25 bp, Artificial
  Probe
cccctgagcactgggggacagaccc

SEQ ID NO: 220966 - DNA, 25 bp, Artificial
  Probe
tcctctgcctcacagttcccctgag

SEQ ID NO: 220967 - DNA, 25 bp, Artificial
  Probe
tttagcagtaaccagagctgacaat

SEQ ID NO: 220968 - DNA, 25 bp, Artificial
  Probe
tcccctgagcactgggggacagacc

SEQ ID NO: 220969 - DNA, 25 bp, Artificial
  Probe
gttcccctgagcactgggggacaga

SEQ ID NO: 220970 - DNA, 25 bp, Artificial
  Probe
taaccagagctgacaatctataacc

SEQ ID NO: 220971 - DNA, 25 bp, Artificial
  Probe
ttcaacttcagggtgatttttttag

SEQ ID NO: 220972 - DNA, 25 bp, Artificial
  Probe
gatttttttagcagtaaccagagct

SEQ ID NO: 220973 - DNA, 25 bp, Artificial
  Probe
agcagtaaccagagctgacaatcta

SEQ ID NO: 220974 - DNA, 25 bp, Artificial
  Probe
cagtaaccagagctgacaatctata

SEQ ID NO: 220975 - DNA, 25 bp, Artificial
  Probe
cagttcccctgagcactgggggaca

SEQ ID NO: 220976 - DNA, 25 bp, Artificial
  Probe
tttttttagcagtaaccagagctga

SEQ ID NO: 220977 - DNA, 25 bp, Artificial
  Probe
ctctggggtgctatccccatcctct

SEQ ID NO: 220978 - DNA, 25 bp, Artificial
  Probe
cctcacagttcccctgagcactggg

SEQ ID NO: 220979 - DNA, 25 bp, Artificial
  Probe
gcactgggggacagaccctcacccc

SEQ ID NO: 220980 - DNA, 25 bp, Artificial
  Probe
ttagcagtaaccagagctgacaatc

SEQ ID NO: 220981 - DNA, 25 bp, Artificial
  Probe
ttttttagcagtaaccagagctgac

SEQ ID NO: 220982 - DNA, 25 bp, Artificial
  Probe
cacagttcccctgagcactggggga

SEQ ID NO: 220983 - DNA, 25 bp, Artificial
  Probe
gtaaccagagctgacaatctataac

SEQ ID NO: 220984 - DNA, 25 bp, Artificial
  Probe
ctgcctcacagttcccctgagcact

SEQ ID NO: 220985 - DNA, 25 bp, Artificial
  Probe
ggtgtggcacctccaaactttcaac

SEQ ID NO: 220986 - DNA, 25 bp, Artificial
  Probe
agtaaccagagctgacaatctataa

SEQ ID NO: 220987 - DNA, 25 bp, Artificial
  Probe
gggtgctatccccatcctctgcctc

SEQ ID NO: 220988 - DNA, 25 bp, Artificial
  Probe
caaactttcaacttcagggtgattt

SEQ ID NO: 220989 - DNA, 25 bp, Artificial
  Probe
gggtgtggcacctccaaactttcaa

SEQ ID NO: 220990 - DNA, 25 bp, Artificial
  Probe
tagcagtaaccagagctgacaatct

SEQ ID NO: 220991 - DNA, 25 bp, Artificial
  Probe
gacaatctataacccccctctacca

SEQ ID NO: 220992 - DNA, 25 bp, Artificial
  Probe
ctcacagttcccctgagcactgggg

SEQ ID NO: 220993 - DNA, 25 bp, Artificial
  Probe
tcacccccacactgggggtgtggca

SEQ ID NO: 220994 - DNA, 25 bp, Artificial
  Probe
acagttcccctgagcactgggggac

SEQ ID NO: 220995 - DNA, 25 bp, Artificial
  Probe
gcagtaaccagagctgacaatctat

SEQ ID NO: 220996 - DNA, 25 bp, Artificial
  Probe
ccaaactttcaacttcagggtgatt

SEQ ID NO: 220997 - DNA, 25 bp, Artificial
  Probe
tttttagcagtaaccagagctgaca

SEQ ID NO: 220998 - DNA, 25 bp, Artificial
  Probe
ccagagctgacaatctataaccccc

SEQ ID NO: 220999 - DNA, 25 bp, Artificial
  Probe
ttttagcagtaaccagagctgacaa

SEQ ID NO: 221000 - DNA, 25 bp, Artificial
  Probe
ctccaaactttcaacttcagggtga

SEQ ID NO: 221001 - DNA, 25 bp, Artificial
  Probe
cctccaaactttcaacttcagggtg

SEQ ID NO: 221002 - DNA, 25 bp, Artificial
  Probe
cactgggggtgtggcacctccaaac

SEQ ID NO: 221003 - DNA, 25 bp, Artificial
  Probe
cacctccaaactttcaacttcaggg

SEQ ID NO: 221004 - DNA, 25 bp, Artificial
  Probe
taccaccccattttggcctcccctg

SEQ ID NO: 221005 - DNA, 25 bp, Artificial
  Probe
agttcccctgagcactgggggacag

SEQ ID NO: 221006 - DNA, 25 bp, Artificial
  Probe
ttcccctgagcactgggggacagac

SEQ ID NO: 221007 - DNA, 25 bp, Artificial
  Probe
gtgtggcacctccaaactttcaact

SEQ ID NO: 221008 - DNA, 25 bp, Artificial
  Probe
tgtggcacctccaaactttcaactt

SEQ ID NO: 221009 - DNA, 25 bp, Artificial
  Probe
cttcagggtgatttttttagcagta

SEQ ID NO: 221010 - DNA, 25 bp, Artificial
  Probe
gcacccatctgtcaaccccactgct

SEQ ID NO: 221011 - DNA, 25 bp, Artificial
  Probe
tcaccccttcttgcgtttggtattg

SEQ ID NO: 221012 - DNA, 25 bp, Artificial
  Probe
ccccttcttgcgtttggtattgaga

SEQ ID NO: 221013 - DNA, 25 bp, Artificial
  Probe
atgtgaaattttatcccattccctc

SEQ ID NO: 221014 - DNA, 25 bp, Artificial
  Probe
gccttgtctcttcaccccttcttgc

SEQ ID NO: 221015 - DNA, 25 bp, Artificial
  Probe
cccatctgtcaaccccactgctcca

SEQ ID NO: 221016 - DNA, 25 bp, Artificial
  Probe
tctcccttaacgcctccttggggca

SEQ ID NO: 221017 - DNA, 25 bp, Artificial
  Probe
acatcaggccttacccttgtacctc

SEQ ID NO: 221018 - DNA, 25 bp, Artificial
  Probe
ggacagggctgggcttccctctcac

SEQ ID NO: 221019 - DNA, 25 bp, Artificial
  Probe
ctgtacatagctctctggcggaaca

SEQ ID NO: 221020 - DNA, 25 bp, Artificial
  Probe
ccctcctgggtacccctcttctctg

SEQ ID NO: 221021 - DNA, 25 bp, Artificial
  Probe
ttcaccccttcttgcgtttggtatt

SEQ ID NO: 221022 - DNA, 25 bp, Artificial
  Probe
tgtacatagctctctggcggaacag

SEQ ID NO: 221023 - DNA, 25 bp, Artificial
  Probe
ccgccagctccacgctttttcggtg

SEQ ID NO: 221024 - DNA, 25 bp, Artificial
  Probe
ccccactgctccattccaggaggga

SEQ ID NO: 221025 - DNA, 25 bp, Artificial
  Probe
gtctgggtgggtaaaccatgaaggg

SEQ ID NO: 221026 - DNA, 25 bp, Artificial
  Probe
ttccaggagggagagtgggaccctc

SEQ ID NO: 221027 - DNA, 25 bp, Artificial
  Probe
taacgcctccttggggcacccatct

SEQ ID NO: 221028 - DNA, 25 bp, Artificial
  Probe
actcgacctttcttttgtatgaaca

SEQ ID NO: 221029 - DNA, 25 bp, Artificial
  Probe
ccttcttgcgtttggtattgagaat

SEQ ID NO: 221030 - DNA, 25 bp, Artificial
  Probe
ctctctggcggaacaggggaggtag

SEQ ID NO: 221031 - DNA, 25 bp, Artificial
  Probe
ccctgggggaggtaggacagggctg

SEQ ID NO: 221032 - DNA, 25 bp, Artificial
  Probe
tggcggaacaggggaggtaggatgg

SEQ ID NO: 221033 - DNA, 25 bp, Artificial
  Probe
ctctacccagccttgtctcttcacc

SEQ ID NO: 221034 - DNA, 25 bp, Artificial
  Probe
ctgggtacccctcttctctgactgc

SEQ ID NO: 221035 - DNA, 25 bp, Artificial
  Probe
tacatagctctctggcggaacaggg

SEQ ID NO: 221036 - DNA, 25 bp, Artificial
  Probe
acccctcttctctgactgctgccct

SEQ ID NO: 221037 - DNA, 25 bp, Artificial
  Probe
tctgactgctgccctctacccagcc

SEQ ID NO: 221038 - DNA, 25 bp, Artificial
  Probe
ggaggtaggacagggctgggcttcc

SEQ ID NO: 221039 - DNA, 25 bp, Artificial
  Probe
acctttcttttgtatgaacagctct

SEQ ID NO: 221040 - DNA, 25 bp, Artificial
  Probe
ctcttctctgactgctgccctctac

SEQ ID NO: 221041 - DNA, 25 bp, Artificial
  Probe
cttgcgtttggtattgagaattctt

SEQ ID NO: 221042 - DNA, 25 bp, Artificial
  Probe
ctctgcttccctacatcaggcctta

SEQ ID NO: 221043 - DNA, 25 bp, Artificial
  Probe
tgggaccctcagctgccctctcacc

SEQ ID NO: 221044 - DNA, 25 bp, Artificial
  Probe
aattttatcccattccctctcctct

SEQ ID NO: 221045 - DNA, 25 bp, Artificial
  Probe
gccagctccacgctttttcggtgtt

SEQ ID NO: 221046 - DNA, 25 bp, Artificial
  Probe
gtaggatggatggggtctgggtggg

SEQ ID NO: 221047 - DNA, 25 bp, Artificial
  Probe
ctgctccattccaggagggagagtg

SEQ ID NO: 221048 - DNA, 25 bp, Artificial
  Probe
ccagctccacgctttttcggtgttt

SEQ ID NO: 221049 - DNA, 25 bp, Artificial
  Probe
gctgggcttccctctcaccctcccc

SEQ ID NO: 221050 - DNA, 25 bp, Artificial
  Probe
gtacatagctctctggcggaacagg

SEQ ID NO: 221051 - DNA, 25 bp, Artificial
  Probe
gagagtgggaccctcagctgccctc

SEQ ID NO: 221052 - DNA, 25 bp, Artificial
  Probe
cagccggggccaaatttatacttat

SEQ ID NO: 221053 - DNA, 25 bp, Artificial
  Probe
cccttcttgcgtttggtattgagaa

SEQ ID NO: 221054 - DNA, 25 bp, Artificial
  Probe
acatagctctctggcggaacagggg

SEQ ID NO: 221055 - DNA, 25 bp, Artificial
  Probe
gatggatggggtctgggtgggtaaa

SEQ ID NO: 221056 - DNA, 25 bp, Artificial
  Probe
gcataaaaccttttctgtacaggta

SEQ ID NO: 221057 - DNA, 25 bp, Artificial
  Probe
tgacccagagggtctgagcagatag

SEQ ID NO: 221058 - DNA, 25 bp, Artificial
  Probe
agcctgagcaaagttaggaattctg

SEQ ID NO: 221059 - DNA, 25 bp, Artificial
  Probe
cccagacaaagagtttggggattag

SEQ ID NO: 221060 - DNA, 25 bp, Artificial
  Probe
cttctagcaggtgtggagcctgagc

SEQ ID NO: 221061 - DNA, 25 bp, Artificial
  Probe
tatcagcacataagggcagctttca

SEQ ID NO: 221062 - DNA, 25 bp, Artificial
  Probe
cagagggtctgagcagatagaaacc

SEQ ID NO: 221063 - DNA, 25 bp, Artificial
  Probe
tgagcagatagaaaccccagacaaa

SEQ ID NO: 221064 - DNA, 25 bp, Artificial
  Probe
aggaatgatgtcagcctctacagaa

SEQ ID NO: 221065 - DNA, 25 bp, Artificial
  Probe
atcctatgacccagagggtctgagc

SEQ ID NO: 221066 - DNA, 25 bp, Artificial
  Probe
gctttcaatgccaaatccactgctg

SEQ ID NO: 221067 - DNA, 25 bp, Artificial
  Probe
gatagaaaccccagacaaagagttt

SEQ ID NO: 221068 - DNA, 25 bp, Artificial
  Probe
taacaatcctatgacccagagggtc

SEQ ID NO: 221069 - DNA, 25 bp, Artificial
  Probe
acgtataatatcagcacataagggc

SEQ ID NO: 221070 - DNA, 25 bp, Artificial
  Probe
caggatcttgggaccgagaaggaat

SEQ ID NO: 221071 - DNA, 25 bp, Artificial
  Probe
agaagttgtcacaagcacagcggat

SEQ ID NO: 221072 - DNA, 25 bp, Artificial
  Probe
tacaggtattaacttactggtctga

SEQ ID NO: 221073 - DNA, 25 bp, Artificial
  Probe
aaaggcagagccacctctatactgt

SEQ ID NO: 221074 - DNA, 25 bp, Artificial
  Probe
agaactttccagtagaagttgtcac

SEQ ID NO: 221075 - DNA, 25 bp, Artificial
  Probe
ctttgtggcttctagcaggtgtgga

SEQ ID NO: 221076 - DNA, 25 bp, Artificial
  Probe
gacagcaaagccataaacgtataat

SEQ ID NO: 221077 - DNA, 25 bp, Artificial
  Probe
ggagcctgagcaaagttaggaattc

SEQ ID NO: 221078 - DNA, 25 bp, Artificial
  Probe
aggagggcagcatcactcatggacc

SEQ ID NO: 221079 - DNA, 25 bp, Artificial
  Probe
ttctagatcgtagaagcataaaacc

SEQ ID NO: 221080 - DNA, 25 bp, Artificial
  Probe
ttctgtacaggtattaacttactgg

SEQ ID NO: 221081 - DNA, 25 bp, Artificial
  Probe
caagcacagcggatgtaaaagacag

SEQ ID NO: 221082 - DNA, 25 bp, Artificial
  Probe
tttctgtacaggtattaacttactg

SEQ ID NO: 221083 - DNA, 25 bp, Artificial
  Probe
cctgtgagttctttcagtttggaaa

SEQ ID NO: 221084 - DNA, 25 bp, Artificial
  Probe
tagaaaccccagacaaagagtttgg

SEQ ID NO: 221085 - DNA, 25 bp, Artificial
  Probe
aagcacagcggatgtaaaagacagc

SEQ ID NO: 221086 - DNA, 25 bp, Artificial
  Probe
tggaaaacttaccaggatcttggga

SEQ ID NO: 221087 - DNA, 25 bp, Artificial
  Probe
tctttcagtttggaaaacttaccag

SEQ ID NO: 221088 - DNA, 25 bp, Artificial
  Probe
tctacagaacccttggagaactttc

SEQ ID NO: 221089 - DNA, 25 bp, Artificial
  Probe
cttggagaactttccagtagaagtt

SEQ ID NO: 221090 - DNA, 25 bp, Artificial
  Probe
tttccagtagaagttgtcacaagca

SEQ ID NO: 221091 - DNA, 25 bp, Artificial
  Probe
gagccacctctatactgtagcaaac

SEQ ID NO: 221092 - DNA, 25 bp, Artificial
  Probe
ttttttcctgagtgcctggttgtca

SEQ ID NO: 221093 - DNA, 25 bp, Artificial
  Probe
gaagcataaaaccttttctgtacag

SEQ ID NO: 221094 - DNA, 25 bp, Artificial
  Probe
aacttaccaggatcttgggaccgag

SEQ ID NO: 221095 - DNA, 25 bp, Artificial
  Probe
cttgggaccgagaaggaatgatgtc

SEQ ID NO: 221096 - DNA, 25 bp, Artificial
  Probe
actgtagcaaacaatttctagatcg

SEQ ID NO: 221097 - DNA, 25 bp, Artificial
  Probe
tgtcacaagcacagcggatgtaaaa

SEQ ID NO: 221098 - DNA, 25 bp, Artificial
  Probe
gtattaacttactggtctgattgac

SEQ ID NO: 221099 - DNA, 25 bp, Artificial
  Probe
tttggaaaacttaccaggatcttgg

SEQ ID NO: 221100 - DNA, 25 bp, Artificial
  Probe
cctcgttctcccaagtaggtcagag

SEQ ID NO: 221101 - DNA, 25 bp, Artificial
  Probe
ctagcaggtgtggagcctgagcaaa

SEQ ID NO: 221102 - DNA, 25 bp, Artificial
  Probe
tggccagcaggttccctttgctacc

SEQ ID NO: 221103 - DNA, 25 bp, Artificial
  Probe
tcctcagaggagctgaagtacatag

SEQ ID NO: 221104 - DNA, 25 bp, Artificial
  Probe
gctacaccaaggagaaagggaccct

SEQ ID NO: 221105 - DNA, 25 bp, Artificial
  Probe
gatttccggggctccttctgtgggc

SEQ ID NO: 221106 - DNA, 25 bp, Artificial
  Probe
tggctatgatgttgcccagatagcc

SEQ ID NO: 221107 - DNA, 25 bp, Artificial
  Probe
atctcatgacctatgatttccatgg

SEQ ID NO: 221108 - DNA, 25 bp, Artificial
  Probe
cttcactctggcatcttctgagaat

SEQ ID NO: 221109 - DNA, 25 bp, Artificial
  Probe
caacaagctagtgatgggtatcccc

SEQ ID NO: 221110 - DNA, 25 bp, Artificial
  Probe
gtacatagaattcttggccagcagg

SEQ ID NO: 221111 - DNA, 25 bp, Artificial
  Probe
cacctttggaaagagcttcactctg

SEQ ID NO: 221112 - DNA, 25 bp, Artificial
  Probe
agaacaagcagctggcaggagccat

SEQ ID NO: 221113 - DNA, 25 bp, Artificial
  Probe
gaaaggtgacccttgacagtggcta

SEQ ID NO: 221114 - DNA, 25 bp, Artificial
  Probe
agctccaatctcagggtcaggatta

SEQ ID NO: 221115 - DNA, 25 bp, Artificial
  Probe
atttggatgatttccggggctcctt

SEQ ID NO: 221116 - DNA, 25 bp, Artificial
  Probe
ttctgtgggcataacgtacacttcc

SEQ ID NO: 221117 - DNA, 25 bp, Artificial
  Probe
cagtgctgccgtgtcagcaggaaag

SEQ ID NO: 221118 - DNA, 25 bp, Artificial
  Probe
acatagaattcttggccagcaggtt

SEQ ID NO: 221119 - DNA, 25 bp, Artificial
  Probe
gggctccttctgtgggcataacgta

SEQ ID NO: 221120 - DNA, 25 bp, Artificial
  Probe
gatgacccggagagcgtcaaaaaca

SEQ ID NO: 221121 - DNA, 25 bp, Artificial
  Probe
ggacactgggcctgacagattcagc

SEQ ID NO: 221122 - DNA, 25 bp, Artificial
  Probe
ctgccgtgtcagcaggaaaggtgac

SEQ ID NO: 221123 - DNA, 25 bp, Artificial
  Probe
ccagcaggacactgggcctgacaga

SEQ ID NO: 221124 - DNA, 25 bp, Artificial
  Probe
ccaccaacaagctagtgatgggtat

SEQ ID NO: 221125 - DNA, 25 bp, Artificial
  Probe
ttctgagaatcaagtgggagctcca

SEQ ID NO: 221126 - DNA, 25 bp, Artificial
  Probe
atgatgacccggagagcgtcaaaaa

SEQ ID NO: 221127 - DNA, 25 bp, Artificial
  Probe
cttgacagtggctatgatgttgccc

SEQ ID NO: 221128 - DNA, 25 bp, Artificial
  Probe
ccctttgctaccaagggcaaccagt

SEQ ID NO: 221129 - DNA, 25 bp, Artificial
  Probe
tcttccgaggccagcaggacactgg

SEQ ID NO: 221130 - DNA, 25 bp, Artificial
  Probe
cgtgtcagcaggaaaggtgaccctt

SEQ ID NO: 221131 - DNA, 25 bp, Artificial
  Probe
acctgaagaacaagcagctggcagg

SEQ ID NO: 221132 - DNA, 25 bp, Artificial
  Probe
agcaggaaaggtgacccttgacagt

SEQ ID NO: 221133 - DNA, 25 bp, Artificial
  Probe
tgggcataacgtacacttcccgctc

SEQ ID NO: 221134 - DNA, 25 bp, Artificial
  Probe
cagcaggttccctttgctaccaagg

SEQ ID NO: 221135 - DNA, 25 bp, Artificial
  Probe
cccacctttggaaagagcttcactc

SEQ ID NO: 221136 - DNA, 25 bp, Artificial
  Probe
cagattcagcaatgtggactatggt

SEQ ID NO: 221137 - DNA, 25 bp, Artificial
  Probe
atttccatggaacctggcgccacac

SEQ ID NO: 221138 - DNA, 25 bp, Artificial
  Probe
aagagcttcactctggcatcttctg

SEQ ID NO: 221139 - DNA, 25 bp, Artificial
  Probe
tgttgcccagatagcccaacaccta

SEQ ID NO: 221140 - DNA, 25 bp, Artificial
  Probe
cctcgcctactacgagatatgcgac

SEQ ID NO: 221141 - DNA, 25 bp, Artificial
  Probe
gaattcttggccagcaggttccctt

SEQ ID NO: 221142 - DNA, 25 bp, Artificial
  Probe
atgatgttgcccagatagcccaaca

SEQ ID NO: 221143 - DNA, 25 bp, Artificial
  Probe
gaatcaagtgggagctccaatctca

SEQ ID NO: 221144 - DNA, 25 bp, Artificial
  Probe
tggatttggatgatttccggggctc

SEQ ID NO: 221145 - DNA, 25 bp, Artificial
  Probe
ttaccaggccgctacaccaaggaga

SEQ ID NO: 221146 - DNA, 25 bp, Artificial
  Probe
ggtcaggattaccaggccgctacac

SEQ ID NO: 221147 - DNA, 25 bp, Artificial
  Probe
ccttctgtgggcataacgtacactt

SEQ ID NO: 221148 - DNA, 25 bp, Artificial
  Probe
ggtcctatgttgactgtttctcaca

SEQ ID NO: 221149 - DNA, 25 bp, Artificial
  Probe
agactggggttggtcctatgttgac

SEQ ID NO: 221150 - DNA, 25 bp, Artificial
  Probe
actttttcattacagtgcacataat

SEQ ID NO: 221151 - DNA, 25 bp, Artificial
  Probe
atcactgtgttgacttactagggct

SEQ ID NO: 221152 - DNA, 25 bp, Artificial
  Probe
tggtcctatgttgactgtttctcac

SEQ ID NO: 221153 - DNA, 25 bp, Artificial
  Probe
taatacttccctgtatttatattat

SEQ ID NO: 221154 - DNA, 25 bp, Artificial
  Probe
atgttgactgtttctcacagaacct

SEQ ID NO: 221155 - DNA, 25 bp, Artificial
  Probe
agaaaatcactgtgttgacttacta

SEQ ID NO: 221156 - DNA, 25 bp, Artificial
  Probe
gtaactttttatatctgcttttgtt

SEQ ID NO: 221157 - DNA, 25 bp, Artificial
  Probe
gttgactgtttctcacagaaccttc

SEQ ID NO: 221158 - DNA, 25 bp, Artificial
  Probe
gaagagcagactggggttggtccta

SEQ ID NO: 221159 - DNA, 25 bp, Artificial
  Probe
tgtaactttttatatctgcttttgt

SEQ ID NO: 221160 - DNA, 25 bp, Artificial
  Probe
tcattacagtgcacataatacttcc

SEQ ID NO: 221161 - DNA, 25 bp, Artificial
  Probe
tgttgactgtttctcacagaacctt

SEQ ID NO: 221162 - DNA, 25 bp, Artificial
  Probe
agagcagactggggttggtcctatg

SEQ ID NO: 221163 - DNA, 25 bp, Artificial
  Probe
ggggttggtcctatgttgactgttt

SEQ ID NO: 221164 - DNA, 25 bp, Artificial
  Probe
ttttcattacagtgcacataatact

SEQ ID NO: 221165 - DNA, 25 bp, Artificial
  Probe
tttactttttcattacagtgcacat

SEQ ID NO: 221166 - DNA, 25 bp, Artificial
  Probe
tatgttgactgtttctcacagaacc

SEQ ID NO: 221167 - DNA, 25 bp, Artificial
  Probe
tttcattacagtgcacataatactt

SEQ ID NO: 221168 - DNA, 25 bp, Artificial
  Probe
tggggttggtcctatgttgactgtt

SEQ ID NO: 221169 - DNA, 25 bp, Artificial
  Probe
gtcctatgttgactgtttctcacag

SEQ ID NO: 221170 - DNA, 25 bp, Artificial
  Probe
aaatctttgtaactttttatatctg

SEQ ID NO: 221171 - DNA, 25 bp, Artificial
  Probe
tcctatgttgactgtttctcacaga

SEQ ID NO: 221172 - DNA, 25 bp, Artificial
  Probe
tacagtgcacataatacttccctgt

SEQ ID NO: 221173 - DNA, 25 bp, Artificial
  Probe
acagtgcacataatacttccctgta

SEQ ID NO: 221174 - DNA, 25 bp, Artificial
  Probe
cctatgttgactgtttctcacagaa

SEQ ID NO: 221175 - DNA, 25 bp, Artificial
  Probe
ttggtcctatgttgactgtttctca

SEQ ID NO: 221176 - DNA, 25 bp, Artificial
  Probe
gactggggttggtcctatgttgact

SEQ ID NO: 221177 - DNA, 25 bp, Artificial
  Probe
aaatcactgtgttgacttactaggg

SEQ ID NO: 221178 - DNA, 25 bp, Artificial
  Probe
tttgtaactttttatatctgctttt

SEQ ID NO: 221179 - DNA, 25 bp, Artificial
  Probe
ctatgttgactgtttctcacagaac

SEQ ID NO: 221180 - DNA, 25 bp, Artificial
  Probe
acagaaaatcactgtgttgacttac

SEQ ID NO: 221181 - DNA, 25 bp, Artificial
  Probe
gtgcacataatacttccctgtattt

SEQ ID NO: 221182 - DNA, 25 bp, Artificial
  Probe
gttggtcctatgttgactgtttctc

SEQ ID NO: 221183 - DNA, 25 bp, Artificial
  Probe
cattacagtgcacataatacttccc

SEQ ID NO: 221184 - DNA, 25 bp, Artificial
  Probe
ataatacttccctgtatttatatta

SEQ ID NO: 221185 - DNA, 25 bp, Artificial
  Probe
attacagtgcacataatacttccct

SEQ ID NO: 221186 - DNA, 25 bp, Artificial
  Probe
ttactttttcattacagtgcacata

SEQ ID NO: 221187 - DNA, 25 bp, Artificial
  Probe
gcagactggggttggtcctatgttg

SEQ ID NO: 221188 - DNA, 25 bp, Artificial
  Probe
aatcactgtgttgacttactagggc

SEQ ID NO: 221189 - DNA, 25 bp, Artificial
  Probe
atctttgtaactttttatatctgct

SEQ ID NO: 221190 - DNA, 25 bp, Artificial
  Probe
agtgcacataatacttccctgtatt

SEQ ID NO: 221191 - DNA, 25 bp, Artificial
  Probe
cacagaaaatcactgtgttgactta

SEQ ID NO: 221192 - DNA, 25 bp, Artificial
  Probe
aaaatcactgtgttgacttactagg

SEQ ID NO: 221193 - DNA, 25 bp, Artificial
  Probe
tttttcattacagtgcacataatac

SEQ ID NO: 221194 - DNA, 25 bp, Artificial
  Probe
tacccaaggcctttgccagagtgaa

SEQ ID NO: 221195 - DNA, 25 bp, Artificial
  Probe
agttcggctctgtgaacacccaaaa

SEQ ID NO: 221196 - DNA, 25 bp, Artificial
  Probe
tggaagagacgctttggctgcctga

SEQ ID NO: 221197 - DNA, 25 bp, Artificial
  Probe
tattgcgggcctgcaagtggatgat

SEQ ID NO: 221198 - DNA, 25 bp, Artificial
  Probe
ctacccaaggcctttgccagagtga

SEQ ID NO: 221199 - DNA, 25 bp, Artificial
  Probe
ctccctcaagtgtaaggatctggaa

SEQ ID NO: 221200 - DNA, 25 bp, Artificial
  Probe
ggctctgtgaacacccaaaacttcc

SEQ ID NO: 221201 - DNA, 25 bp, Artificial
  Probe
tccctcaagtgtaaggatctggaag

SEQ ID NO: 221202 - DNA, 25 bp, Artificial
  Probe
cttccagtctctgcagaacgtgggc

SEQ ID NO: 221203 - DNA, 25 bp, Artificial
  Probe
ctgcctgatgtagtctctgggttga

SEQ ID NO: 221204 - DNA, 25 bp, Artificial
  Probe
ctctcggctccctcaagtgtaagga

SEQ ID NO: 221205 - DNA, 25 bp, Artificial
  Probe
tcggctctgtgaacacccaaaactt

SEQ ID NO: 221206 - DNA, 25 bp, Artificial
  Probe
cctcaagtgtaaggatctggaagag

SEQ ID NO: 221207 - DNA, 25 bp, Artificial
  Probe
gctgcctgatgtagtctctgggttg

SEQ ID NO: 221208 - DNA, 25 bp, Artificial
  Probe
cggctctgtgaacacccaaaacttc

SEQ ID NO: 221209 - DNA, 25 bp, Artificial
  Probe
tttgccagagtgaacagtatcagcc

SEQ ID NO: 221210 - DNA, 25 bp, Artificial
  Probe
aaacttccagtctctgcagaacgtg

SEQ ID NO: 221211 - DNA, 25 bp, Artificial
  Probe
ggagttcggctctgtgaacacccaa

SEQ ID NO: 221212 - DNA, 25 bp, Artificial
  Probe
ggctgcctgatgtagtctctgggtt

SEQ ID NO: 221213 - DNA, 25 bp, Artificial
  Probe
ttcggctctgtgaacacccaaaact

SEQ ID NO: 221214 - DNA, 25 bp, Artificial
  Probe
tgcctgatgtagtctctgggttgag

SEQ ID NO: 221215 - DNA, 25 bp, Artificial
  Probe
tcggctccctcaagtgtaaggatct

SEQ ID NO: 221216 - DNA, 25 bp, Artificial
  Probe
acccaaggcctttgccagagtgaac

SEQ ID NO: 221217 - DNA, 25 bp, Artificial
  Probe
ctttgccagagtgaacagtatcagc

SEQ ID NO: 221218 - DNA, 25 bp, Artificial
  Probe
tggagttcggctctgtgaacaccca

SEQ ID NO: 221219 - DNA, 25 bp, Artificial
  Probe
cggctccctcaagtgtaaggatctg

SEQ ID NO: 221220 - DNA, 25 bp, Artificial
  Probe
cgggcctgcaagtggatgatgaaat

SEQ ID NO: 221221 - DNA, 25 bp, Artificial
  Probe
acttccagtctctgcagaacgtggg

SEQ ID NO: 221222 - DNA, 25 bp, Artificial
  Probe
ctgatgtagtctctgggttgaggca

SEQ ID NO: 221223 - DNA, 25 bp, Artificial
  Probe
cccagccagtattgcgggcctgcaa

SEQ ID NO: 221224 - DNA, 25 bp, Artificial
  Probe
ccctcaagtgtaaggatctggaaga

SEQ ID NO: 221225 - DNA, 25 bp, Artificial
  Probe
tctcggctccctcaagtgtaaggat

SEQ ID NO: 221226 - DNA, 25 bp, Artificial
  Probe
agtgaacagtatcagccctggttcc

SEQ ID NO: 221227 - DNA, 25 bp, Artificial
  Probe
cctttgccagagtgaacagtatcag

SEQ ID NO: 221228 - DNA, 25 bp, Artificial
  Probe
cctgatgtagtctctgggttgaggc

SEQ ID NO: 221229 - DNA, 25 bp, Artificial
  Probe
aaggcctttgccagagtgaacagta

SEQ ID NO: 221230 - DNA, 25 bp, Artificial
  Probe
gctccctcaagtgtaaggatctgga

SEQ ID NO: 221231 - DNA, 25 bp, Artificial
  Probe
ggcctttgccagagtgaacagtatc

SEQ ID NO: 221232 - DNA, 25 bp, Artificial
  Probe
ctcggctccctcaagtgtaaggatc

SEQ ID NO: 221233 - DNA, 25 bp, Artificial
  Probe
gccatgaaccgtaggctggcctcgg

SEQ ID NO: 221234 - DNA, 25 bp, Artificial
  Probe
gcctttgccagagtgaacagtatca

SEQ ID NO: 221235 - DNA, 25 bp, Artificial
  Probe
gaagagacgctttggctgcctgatg

SEQ ID NO: 221236 - DNA, 25 bp, Artificial
  Probe
agacgctttggctgcctgatgtagt

SEQ ID NO: 221237 - DNA, 25 bp, Artificial
  Probe
gtggagttcggctctgtgaacaccc

SEQ ID NO: 221238 - DNA, 25 bp, Artificial
  Probe
gtgaacagtatcagccctggttccc

SEQ ID NO: 221239 - DNA, 25 bp, Artificial
  Probe
cgtaggctggcctcggacagtcccg

SEQ ID NO: 221240 - DNA, 25 bp, Artificial
  Probe
acttttcacccgaggcagacgcagc

SEQ ID NO: 221241 - DNA, 25 bp, Artificial
  Probe
acgtgctccggcaaattaggtctga

SEQ ID NO: 221242 - DNA, 25 bp, Artificial
  Probe
agacagctgctatgccagcctttga

SEQ ID NO: 221243 - DNA, 25 bp, Artificial
  Probe
ctctgattcagctatggagtgtggt

SEQ ID NO: 221244 - DNA, 25 bp, Artificial
  Probe
agatgatgatcacttttcacccgag

SEQ ID NO: 221245 - DNA, 25 bp, Artificial
  Probe
tcctatgaggagaccaatgaggtgg

SEQ ID NO: 221246 - DNA, 25 bp, Artificial
  Probe
agctgctatgccagcctttgaccgt

SEQ ID NO: 221247 - DNA, 25 bp, Artificial
  Probe
tgggtagacagctgctatgccagcc

SEQ ID NO: 221248 - DNA, 25 bp, Artificial
  Probe
gtgtggttccgctgtcagatgatga

SEQ ID NO: 221249 - DNA, 25 bp, Artificial
  Probe
atgacaggcaatacagcactgctgg

SEQ ID NO: 221250 - DNA, 25 bp, Artificial
  Probe
ccgctgtcagatgatgatcactttt

SEQ ID NO: 221251 - DNA, 25 bp, Artificial
  Probe
tctgttactctcagcctggaatccc

SEQ ID NO: 221252 - DNA, 25 bp, Artificial
  Probe
ctccggcaaattaggtctgactttg

SEQ ID NO: 221253 - DNA, 25 bp, Artificial
  Probe
gctatgccagcctttgaccgtggct

SEQ ID NO: 221254 - DNA, 25 bp, Artificial
  Probe
tggcacagtgggtagacagctgcta

SEQ ID NO: 221255 - DNA, 25 bp, Artificial
  Probe
agcctttgaccgtggctcctgggct

SEQ ID NO: 221256 - DNA, 25 bp, Artificial
  Probe
ataacggttatctgcgctgcccctg

SEQ ID NO: 221257 - DNA, 25 bp, Artificial
  Probe
aggagcagaagtccttctggacagt

SEQ ID NO: 221258 - DNA, 25 bp, Artificial
  Probe
atacagcactgctggcccaggtgac

SEQ ID NO: 221259 - DNA, 25 bp, Artificial
  Probe
actttgtgaccctgccattccaagg

SEQ ID NO: 221260 - DNA, 25 bp, Artificial
  Probe
tggctcctgggctgcttcggtcttc

SEQ ID NO: 221261 - DNA, 25 bp, Artificial
  Probe
cgcagccatgagtgagatgacaggc

SEQ ID NO: 221262 - DNA, 25 bp, Artificial
  Probe
aagtcgacgtgctccggcaaattag

SEQ ID NO: 221263 - DNA, 25 bp, Artificial
  Probe
gtgaaagtcgacgtgctccggcaaa

SEQ ID NO: 221264 - DNA, 25 bp, Artificial
  Probe
ggttatctgcgctgcccctggtgcg

SEQ ID NO: 221265 - DNA, 25 bp, Artificial
  Probe
tgaccgtggctcctgggctgcttcg

SEQ ID NO: 221266 - DNA, 25 bp, Artificial
  Probe
gtggagattcgctacgtggactatg

SEQ ID NO: 221267 - DNA, 25 bp, Artificial
  Probe
tctgactttgtgaccctgccattcc

SEQ ID NO: 221268 - DNA, 25 bp, Artificial
  Probe
gagcccaagtagtggcctcctatga

SEQ ID NO: 221269 - DNA, 25 bp, Artificial
  Probe
tgccagcctttgaccgtggctcctg

SEQ ID NO: 221270 - DNA, 25 bp, Artificial
  Probe
ttgataaaccggtcgctggtggagc

SEQ ID NO: 221271 - DNA, 25 bp, Artificial
  Probe
gaaataacggttatctgcgctgccc

SEQ ID NO: 221272 - DNA, 25 bp, Artificial
  Probe
actggccttcctctgattcagctat

SEQ ID NO: 221273 - DNA, 25 bp, Artificial
  Probe
cacccgaggcagacgcagccatgag

SEQ ID NO: 221274 - DNA, 25 bp, Artificial
  Probe
ggacagtgtggttccgctgtcagat

SEQ ID NO: 221275 - DNA, 25 bp, Artificial
  Probe
cactgctggcccaggtgacaagcta

SEQ ID NO: 221276 - DNA, 25 bp, Artificial
  Probe
cattccaaggagcagaagtccttct

SEQ ID NO: 221277 - DNA, 25 bp, Artificial
  Probe
tgtgaccctgccattccaaggagca

SEQ ID NO: 221278 - DNA, 25 bp, Artificial
  Probe
cgctacgtggactatggtggatata

SEQ ID NO: 221279 - DNA, 25 bp, Artificial
  Probe
tggcccaggtgacaagctacagtgc

SEQ ID NO: 221280 - DNA, 25 bp, Artificial
  Probe
tttgaccgtggctcctgggctgctt

SEQ ID NO: 221281 - DNA, 25 bp, Artificial
  Probe
caagtagtggcctcctatgaggaga

SEQ ID NO: 221282 - DNA, 25 bp, Artificial
  Probe
gtggcgagcccaagtagtggcctcc

SEQ ID NO: 221283 - DNA, 25 bp, Artificial
  Probe
tgatcacttttcacccgaggcagac

SEQ ID NO: 221284 - DNA, 25 bp, Artificial
  Probe
gcagacgcagccatgagtgagatga

SEQ ID NO: 221285 - DNA, 25 bp, Artificial
  Probe
gcaaattaggtctgactttgtgacc

SEQ ID NO: 221286 - DNA, 25 bp, Artificial
  Probe
acatcgtggaggattggcagcagaa

SEQ ID NO: 221287 - DNA, 25 bp, Artificial
  Probe
tcgtggtggccatcctggtgagcac

SEQ ID NO: 221288 - DNA, 25 bp, Artificial
  Probe
atcgtggtggccatcctggtgagca

SEQ ID NO: 221289 - DNA, 25 bp, Artificial
  Probe
ggaaacatgaccactttagccaact

SEQ ID NO: 221290 - DNA, 25 bp, Artificial
  Probe
ttagccaacttgacgcagaccctgg

SEQ ID NO: 221291 - DNA, 25 bp, Artificial
  Probe
acaacaggcgctccaggccagagtg

SEQ ID NO: 221292 - DNA, 25 bp, Artificial
  Probe
atcctggtgagcacggtgaagtcga

SEQ ID NO: 221293 - DNA, 25 bp, Artificial
  Probe
tcatggtgatgatcggcatgttcgc

SEQ ID NO: 221294 - DNA, 25 bp, Artificial
  Probe
ggttttcattacttatatggacagc

SEQ ID NO: 221295 - DNA, 25 bp, Artificial
  Probe
ctctcatcctcaagggggaaacatg

SEQ ID NO: 221296 - DNA, 25 bp, Artificial
  Probe
aacaggcgctccaggccagagtgga

SEQ ID NO: 221297 - DNA, 25 bp, Artificial
  Probe
caccctgataaagaacgagagtcca

SEQ ID NO: 221298 - DNA, 25 bp, Artificial
  Probe
tgatcggcatgttcgccttcatcgt

SEQ ID NO: 221299 - DNA, 25 bp, Artificial
  Probe
cgctccaggccagagtggatgccga

SEQ ID NO: 221300 - DNA, 25 bp, Artificial
  Probe
aacagccgaacaacaggcgctccag

SEQ ID NO: 221301 - DNA, 25 bp, Artificial
  Probe
catcctgtacctcatggtgatgatc

SEQ ID NO: 221302 - DNA, 25 bp, Artificial
  Probe
tacgtcatcctgtacctcatggtga

SEQ ID NO: 221303 - DNA, 25 bp, Artificial
  Probe
acagccgaacaacaggcgctccagg

SEQ ID NO: 221304 - DNA, 25 bp, Artificial
  Probe
acacaacagccgaacaacaggcgct

SEQ ID NO: 221305 - DNA, 25 bp, Artificial
  Probe
gaggaacacaacagccgaacaacag

SEQ ID NO: 221306 - DNA, 25 bp, Artificial
  Probe
aggaggaacacaacagccgaacaac

SEQ ID NO: 221307 - DNA, 25 bp, Artificial
  Probe
ttgcatctggaagactccaaggcca

SEQ ID NO: 221308 - DNA, 25 bp, Artificial
  Probe
ggcatgttcgccttcatcgtggtgg

SEQ ID NO: 221309 - DNA, 25 bp, Artificial
  Probe
aggacccgtaccaccagtacatcgt

SEQ ID NO: 221310 - DNA, 25 bp, Artificial
  Probe
gccatcctggtgagcacggtgaagt

SEQ ID NO: 221311 - DNA, 25 bp, Artificial
  Probe
agaacgagagtccatctgcccagga

SEQ ID NO: 221312 - DNA, 25 bp, Artificial
  Probe
ggggaaacatgaccactttagccaa

SEQ ID NO: 221313 - DNA, 25 bp, Artificial
  Probe
catgaccactttagccaacttgacg

SEQ ID NO: 221314 - DNA, 25 bp, Artificial
  Probe
gaggatgccttcaaaaaggttttca

SEQ ID NO: 221315 - DNA, 25 bp, Artificial
  Probe
ccaacttgacgcagaccctggagga

SEQ ID NO: 221316 - DNA, 25 bp, Artificial
  Probe
gtgatgatcggcatgttcgccttca

SEQ ID NO: 221317 - DNA, 25 bp, Artificial
  Probe
ggccagagtggatgccgagaacttc

SEQ ID NO: 221318 - DNA, 25 bp, Artificial
  Probe
gaccctggaggatgccttcaaaaag

SEQ ID NO: 221319 - DNA, 25 bp, Artificial
  Probe
aggagtcagatcttgcatctggaag

SEQ ID NO: 221320 - DNA, 25 bp, Artificial
  Probe
agtggatgccgagaacttctactac

SEQ ID NO: 221321 - DNA, 25 bp, Artificial
  Probe
acagtgtcaccctgataaagaacga

SEQ ID NO: 221322 - DNA, 25 bp, Artificial
  Probe
tcctcaagggggaaacatgaccact

SEQ ID NO: 221323 - DNA, 25 bp, Artificial
  Probe
aacttgacgcagaccctggaggatg

SEQ ID NO: 221324 - DNA, 25 bp, Artificial
  Probe
cattacttatatggacagctggagg

SEQ ID NO: 221325 - DNA, 25 bp, Artificial
  Probe
tacatcgtggaggattggcagcaga

SEQ ID NO: 221326 - DNA, 25 bp, Artificial
  Probe
ccttcatcgtggtggccatcctggt

SEQ ID NO: 221327 - DNA, 25 bp, Artificial
  Probe
tactacgtcatcctgtacctcatgg

SEQ ID NO: 221328 - DNA, 25 bp, Artificial
  Probe
ggcgacggggttcacagtgtcaccc

SEQ ID NO: 221329 - DNA, 25 bp, Artificial
  Probe
ccagtacatcgtggaggattggcag

SEQ ID NO: 221330 - DNA, 25 bp, Artificial
  Probe
gagaacttctactacgtcatcctgt

SEQ ID NO: 221331 - DNA, 25 bp, Artificial
  Probe
gatgccttcaaaaaggttttcatta

SEQ ID NO: 221332 - DNA, 25 bp, Artificial
  Probe
attccagagtcagtgtcacaaaacc

SEQ ID NO: 221333 - DNA, 25 bp, Artificial
  Probe
ttcccttaggaatgacagcagtagc

SEQ ID NO: 221334 - DNA, 25 bp, Artificial
  Probe
ttatgttaccccctgttgcagccag

SEQ ID NO: 221335 - DNA, 25 bp, Artificial
  Probe
aaagattccagagtcagtgtcacaa

SEQ ID NO: 221336 - DNA, 25 bp, Artificial
  Probe
tccagagtcagtgtcacaaaaccat

SEQ ID NO: 221337 - DNA, 25 bp, Artificial
  Probe
tcccttaggaatgacagcagtagca

SEQ ID NO: 221338 - DNA, 25 bp, Artificial
  Probe
gagtcagtgtcacaaaaccatttat

SEQ ID NO: 221339 - DNA, 25 bp, Artificial
  Probe
agtcagtgtcacaaaaccatttatg

SEQ ID NO: 221340 - DNA, 25 bp, Artificial
  Probe
ttccagagtcagtgtcacaaaacca

SEQ ID NO: 221341 - DNA, 25 bp, Artificial
  Probe
agattccagagtcagtgtcacaaaa

SEQ ID NO: 221342 - DNA, 25 bp, Artificial
  Probe
gccagttcccttaggaatgacagca

SEQ ID NO: 221343 - DNA, 25 bp, Artificial
  Probe
gaaagattccagagtcagtgtcaca

SEQ ID NO: 221344 - DNA, 25 bp, Artificial
  Probe
tatgttaccccctgttgcagccagt

SEQ ID NO: 221345 - DNA, 25 bp, Artificial
  Probe
cccctgttgcagccagttcccttag

SEQ ID NO: 221346 - DNA, 25 bp, Artificial
  Probe
atttatgttaccccctgttgcagcc

SEQ ID NO: 221347 - DNA, 25 bp, Artificial
  Probe
acagcagtagcagtaataggaaagc

SEQ ID NO: 221348 - DNA, 25 bp, Artificial
  Probe
accatttatgttaccccctgttgca

SEQ ID NO: 221349 - DNA, 25 bp, Artificial
  Probe
accccctgttgcagccagttccctt

SEQ ID NO: 221350 - DNA, 25 bp, Artificial
  Probe
agttcccttaggaatgacagcagta

SEQ ID NO: 221351 - DNA, 25 bp, Artificial
  Probe
cagccagttcccttaggaatgacag

SEQ ID NO: 221352 - DNA, 25 bp, Artificial
  Probe
aacattaggtcctgagaaagattcc

SEQ ID NO: 221353 - DNA, 25 bp, Artificial
  Probe
tcagtgtcacaaaaccatttatgtt

SEQ ID NO: 221354 - DNA, 25 bp, Artificial
  Probe
gattccagagtcagtgtcacaaaac

SEQ ID NO: 221355 - DNA, 25 bp, Artificial
  Probe
aatgacagcagtagcagtaatagga

SEQ ID NO: 221356 - DNA, 25 bp, Artificial
  Probe
gcagccagttcccttaggaatgaca

SEQ ID NO: 221357 - DNA, 25 bp, Artificial
  Probe
ttgcagccagttcccttaggaatga

SEQ ID NO: 221358 - DNA, 25 bp, Artificial
  Probe
agccagttcccttaggaatgacagc

SEQ ID NO: 221359 - DNA, 25 bp, Artificial
  Probe
ccctgttgcagccagttcccttagg

SEQ ID NO: 221360 - DNA, 25 bp, Artificial
  Probe
gttcccttaggaatgacagcagtag

SEQ ID NO: 221361 - DNA, 25 bp, Artificial
  Probe
tgtcacaaaaccatttatgttaccc

SEQ ID NO: 221362 - DNA, 25 bp, Artificial
  Probe
tgttaccccctgttgcagccagttc

SEQ ID NO: 221363 - DNA, 25 bp, Artificial
  Probe
agaaagattccagagtcagtgtcac

SEQ ID NO: 221364 - DNA, 25 bp, Artificial
  Probe
aagattccagagtcagtgtcacaaa

SEQ ID NO: 221365 - DNA, 25 bp, Artificial
  Probe
attaggtcctgagaaagattccaga

SEQ ID NO: 221366 - DNA, 25 bp, Artificial
  Probe
ttaccccctgttgcagccagttccc

SEQ ID NO: 221367 - DNA, 25 bp, Artificial
  Probe
cattaggtcctgagaaagattccag

SEQ ID NO: 221368 - DNA, 25 bp, Artificial
  Probe
cccttaggaatgacagcagtagcag

SEQ ID NO: 221369 - DNA, 25 bp, Artificial
  Probe
ggaatgacagcagtagcagtaatag

SEQ ID NO: 221370 - DNA, 25 bp, Artificial
  Probe
ccagagtcagtgtcacaaaaccatt

SEQ ID NO: 221371 - DNA, 25 bp, Artificial
  Probe
ccagttcccttaggaatgacagcag

SEQ ID NO: 221372 - DNA, 25 bp, Artificial
  Probe
gttgcagccagttcccttaggaatg

SEQ ID NO: 221373 - DNA, 25 bp, Artificial
  Probe
gttaccccctgttgcagccagttcc

SEQ ID NO: 221374 - DNA, 25 bp, Artificial
  Probe
gtcagtgtcacaaaaccatttatgt

SEQ ID NO: 221375 - DNA, 25 bp, Artificial
  Probe
acattaggtcctgagaaagattcca

SEQ ID NO: 221376 - DNA, 25 bp, Artificial
  Probe
atgttaccccctgttgcagccagtt

SEQ ID NO: 221377 - DNA, 25 bp, Artificial
  Probe
cagttcccttaggaatgacagcagt

SEQ ID NO: 221378 - DNA, 25 bp, Artificial
  Probe
gttttgcctagtcattgttggttac

SEQ ID NO: 221379 - DNA, 25 bp, Artificial
  Probe
tttgcctagtcattgttggttacga

SEQ ID NO: 221380 - DNA, 25 bp, Artificial
  Probe
tcattgttggttacgagatatggta

SEQ ID NO: 221381 - DNA, 25 bp, Artificial
  Probe
tggtaacacacttatcagtcagctt

SEQ ID NO: 221382 - DNA, 25 bp, Artificial
  Probe
tcgccgggatggatgttttgcctag

SEQ ID NO: 221383 - DNA, 25 bp, Artificial
  Probe
gtcgccgggatggatgttttgccta

SEQ ID NO: 221384 - DNA, 25 bp, Artificial
  Probe
atgactatatgataaccctcaacta

SEQ ID NO: 221385 - DNA, 25 bp, Artificial
  Probe
tgttttgcctagtcattgttggtta

SEQ ID NO: 221386 - DNA, 25 bp, Artificial
  Probe
aacacacttatcagtcagcttgact

SEQ ID NO: 221387 - DNA, 25 bp, Artificial
  Probe
aaccctcaactatgtcgccgggatg

SEQ ID NO: 221388 - DNA, 25 bp, Artificial
  Probe
agtcattgttggttacgagatatgg

SEQ ID NO: 221389 - DNA, 25 bp, Artificial
  Probe
ttccaaatgactatatgataaccct

SEQ ID NO: 221390 - DNA, 25 bp, Artificial
  Probe
acacacttatcagtcagcttgacta

SEQ ID NO: 221391 - DNA, 25 bp, Artificial
  Probe
ctagtcattgttggttacgagatat

SEQ ID NO: 221392 - DNA, 25 bp, Artificial
  Probe
ctatgtcgccgggatggatgttttg

SEQ ID NO: 221393 - DNA, 25 bp, Artificial
  Probe
ggtaacacacttatcagtcagcttg

SEQ ID NO: 221394 - DNA, 25 bp, Artificial
  Probe
gtaacacacttatcagtcagcttga

SEQ ID NO: 221395 - DNA, 25 bp, Artificial
  Probe
ttaggtcctgagaaagggaaagccg

SEQ ID NO: 221396 - DNA, 25 bp, Artificial
  Probe
attgttggttacgagatatggtaac

SEQ ID NO: 221397 - DNA, 25 bp, Artificial
  Probe
cctagtcattgttggttacgagata

SEQ ID NO: 221398 - DNA, 25 bp, Artificial
  Probe
tatgtcgccgggatggatgttttgc

SEQ ID NO: 221399 - DNA, 25 bp, Artificial
  Probe
tgcctagtcattgttggttacgaga

SEQ ID NO: 221400 - DNA, 25 bp, Artificial
  Probe
cattaggtcctgagaaagggaaagc

SEQ ID NO: 221401 - DNA, 25 bp, Artificial
  Probe
ataaccctcaactatgtcgccggga

SEQ ID NO: 221402 - DNA, 25 bp, Artificial
  Probe
tgtcgccgggatggatgttttgcct

SEQ ID NO: 221403 - DNA, 25 bp, Artificial
  Probe
gataaccctcaactatgtcgccggg

SEQ ID NO: 221404 - DNA, 25 bp, Artificial
  Probe
tgataaccctcaactatgtcgccgg

SEQ ID NO: 221405 - DNA, 25 bp, Artificial
  Probe
tatgataaccctcaactatgtcgcc

SEQ ID NO: 221406 - DNA, 25 bp, Artificial
  Probe
accctcaactatgtcgccgggatgg

SEQ ID NO: 221407 - DNA, 25 bp, Artificial
  Probe
tatggtaacacacttatcagtcagc

SEQ ID NO: 221408 - DNA, 25 bp, Artificial
  Probe
atggatgttttgcctagtcattgtt

SEQ ID NO: 221409 - DNA, 25 bp, Artificial
  Probe
cgccgggatggatgttttgcctagt

SEQ ID NO: 221410 - DNA, 25 bp, Artificial
  Probe
actatatgataaccctcaactatgt

SEQ ID NO: 221411 - DNA, 25 bp, Artificial
  Probe
ttttgcctagtcattgttggttacg

SEQ ID NO: 221412 - DNA, 25 bp, Artificial
  Probe
cctcaactatgtcgccgggatggat

SEQ ID NO: 221413 - DNA, 25 bp, Artificial
  Probe
atgtcgccgggatggatgttttgcc

SEQ ID NO: 221414 - DNA, 25 bp, Artificial
  Probe
taacacacttatcagtcagcttgac

SEQ ID NO: 221415 - DNA, 25 bp, Artificial
  Probe
gcctagtcattgttggttacgagat

SEQ ID NO: 221416 - DNA, 25 bp, Artificial
  Probe
atatggtaacacacttatcagtcag

SEQ ID NO: 221417 - DNA, 25 bp, Artificial
  Probe
acattaggtcctgagaaagggaaag

SEQ ID NO: 221418 - DNA, 25 bp, Artificial
  Probe
atgataaccctcaactatgtcgccg

SEQ ID NO: 221419 - DNA, 25 bp, Artificial
  Probe
atggtaacacacttatcagtcagct

SEQ ID NO: 221420 - DNA, 25 bp, Artificial
  Probe
ttgcctagtcattgttggttacgag

SEQ ID NO: 221421 - DNA, 25 bp, Artificial
  Probe
taaccctcaactatgtcgccgggat

SEQ ID NO: 221422 - DNA, 25 bp, Artificial
  Probe
ccctcaactatgtcgccgggatgga

SEQ ID NO: 221423 - DNA, 25 bp, Artificial
  Probe
tgttggttacgagatatggtaacac

SEQ ID NO: 221424 - DNA, 25 bp, Artificial
  Probe
aactgggcgtcgactggccctgtgc

SEQ ID NO: 221425 - DNA, 25 bp, Artificial
  Probe
gggatgtgctgtacttcctgaccga

SEQ ID NO: 221426 - DNA, 25 bp, Artificial
  Probe
aatgacctcccgacttggcatatcc

SEQ ID NO: 221427 - DNA, 25 bp, Artificial
  Probe
cttgtggtgtctgtgggccagatat

SEQ ID NO: 221428 - DNA, 25 bp, Artificial
  Probe
gtggtgatcgcctttctccgtcatc

SEQ ID NO: 221429 - DNA, 25 bp, Artificial
  Probe
acttcgttatcatgaatgccatatg

SEQ ID NO: 221430 - DNA, 25 bp, Artificial
  Probe
gatgccatcaagcatctcacaaacg

SEQ ID NO: 221431 - DNA, 25 bp, Artificial
  Probe
ttttctctgtttatgtgcaaagctg

SEQ ID NO: 221432 - DNA, 25 bp, Artificial
  Probe
tgtcacagcttgtctctggggacca

SEQ ID NO: 221433 - DNA, 25 bp, Artificial
  Probe
gatcgcgccgccttgggtttttctg

SEQ ID NO: 221434 - DNA, 25 bp, Artificial
  Probe
atggttggtgataccgggcatcctt

SEQ ID NO: 221435 - DNA, 25 bp, Artificial
  Probe
gtgatcgcctttctccgtcatcaac

SEQ ID NO: 221436 - DNA, 25 bp, Artificial
  Probe
atcgcgccgccttgggtttttctgt

SEQ ID NO: 221437 - DNA, 25 bp, Artificial
  Probe
cgttatcatgaatgccatatggttg

SEQ ID NO: 221438 - DNA, 25 bp, Artificial
  Probe
gcagcccatagaaacatgaccacca

SEQ ID NO: 221439 - DNA, 25 bp, Artificial
  Probe
gaaatccttctcgaagaccaagcct

SEQ ID NO: 221440 - DNA, 25 bp, Artificial
  Probe
tcaagcatctcacaaacgctcagag

SEQ ID NO: 221441 - DNA, 25 bp, Artificial
  Probe
atatatggggatgtgctgtacttcc

SEQ ID NO: 221442 - DNA, 25 bp, Artificial
  Probe
agtgttaggaagtcgccccgtgatc

SEQ ID NO: 221443 - DNA, 25 bp, Artificial
  Probe
actgggcgtcgactggccctgtgct

SEQ ID NO: 221444 - DNA, 25 bp, Artificial
  Probe
tgaatgccatatggttggtgatacc

SEQ ID NO: 221445 - DNA, 25 bp, Artificial
  Probe
gctggttctctttctaccatgaaat

SEQ ID NO: 221446 - DNA, 25 bp, Artificial
  Probe
tccccgcttaccagaagactcgaat

SEQ ID NO: 221447 - DNA, 25 bp, Artificial
  Probe
aacttcgtgcctaatgacctcccga

SEQ ID NO: 221448 - DNA, 25 bp, Artificial
  Probe
cccacttggaactgggcgtcgactg

SEQ ID NO: 221449 - DNA, 25 bp, Artificial
  Probe
cttagtgatggcttcatcgtctgta

SEQ ID NO: 221450 - DNA, 25 bp, Artificial
  Probe
ctggggaccactcagcctatgggtg

SEQ ID NO: 221451 - DNA, 25 bp, Artificial
  Probe
ttggcctattctccttctctggggt

SEQ ID NO: 221452 - DNA, 25 bp, Artificial
  Probe
gcttaccagaagactcgaatcctcc

SEQ ID NO: 221453 - DNA, 25 bp, Artificial
  Probe
ctccttctcctcgaacagttttgga

SEQ ID NO: 221454 - DNA, 25 bp, Artificial
  Probe
ccttccgctttgtcctacagcttgt

SEQ ID NO: 221455 - DNA, 25 bp, Artificial
  Probe
tgctggacaacaaagtcatgaaaat

SEQ ID NO: 221456 - DNA, 25 bp, Artificial
  Probe
tattctccttctctggggtcctaat

SEQ ID NO: 221457 - DNA, 25 bp, Artificial
  Probe
gtcgactggccctgtgctggtttgc

SEQ ID NO: 221458 - DNA, 25 bp, Artificial
  Probe
ctcgaacagttttggagggtcagag

SEQ ID NO: 221459 - DNA, 25 bp, Artificial
  Probe
atgggaagtccctgtccaaaaccag

SEQ ID NO: 221460 - DNA, 25 bp, Artificial
  Probe
gtgataccgggcatccttgtgtttg

SEQ ID NO: 221461 - DNA, 25 bp, Artificial
  Probe
tattccaagggagacagccgatata

SEQ ID NO: 221462 - DNA, 25 bp, Artificial
  Probe
actggcccaggcacctgagactgga

SEQ ID NO: 221463 - DNA, 25 bp, Artificial
  Probe
ttctgttgtcccacttggaactggg

SEQ ID NO: 221464 - DNA, 25 bp, Artificial
  Probe
atcacgtggctgttgtctagccgag

SEQ ID NO: 221465 - DNA, 25 bp, Artificial
  Probe
atattccaagggagacagccgatat

SEQ ID NO: 221466 - DNA, 25 bp, Artificial
  Probe
ctgagacctgtctgaggaggcgctc

SEQ ID NO: 221467 - DNA, 25 bp, Artificial
  Probe
catgaaatccttctcgaagaccaag

SEQ ID NO: 221468 - DNA, 25 bp, Artificial
  Probe
gatggcttcatcgtctgtatggaga

SEQ ID NO: 221469 - DNA, 25 bp, Artificial
  Probe
gacctgtctgaggaggcgctctccc

SEQ ID NO: 221470 - DNA, 25 bp, Artificial
  Probe
tcatctgattgactactacgttcag

SEQ ID NO: 221471 - DNA, 25 bp, Artificial
  Probe
aagcagtttgacagcgtggttcatc

SEQ ID NO: 221472 - DNA, 25 bp, Artificial
  Probe
cttctgccgactcagcattaacaag

SEQ ID NO: 221473 - DNA, 25 bp, Artificial
  Probe
taccaagacgggaaattcagattgg

SEQ ID NO: 221474 - DNA, 25 bp, Artificial
  Probe
gattagagatagctcccactcagac

SEQ ID NO: 221475 - DNA, 25 bp, Artificial
  Probe
actttcttgattagagatagctccc

SEQ ID NO: 221476 - DNA, 25 bp, Artificial
  Probe
ggaatgggactgttcacctttacct

SEQ ID NO: 221477 - DNA, 25 bp, Artificial
  Probe
gagatagctcccactcagactacct

SEQ ID NO: 221478 - DNA, 25 bp, Artificial
  Probe
agcattaacaagtgtaccggtacca

SEQ ID NO: 221479 - DNA, 25 bp, Artificial
  Probe
accatatctgttaagacatcagccg

SEQ ID NO: 221480 - DNA, 25 bp, Artificial
  Probe
cgttcagatgtgcaaggacaaacgg

SEQ ID NO: 221481 - DNA, 25 bp, Artificial
  Probe
attagagatagctcccactcagact

SEQ ID NO: 221482 - DNA, 25 bp, Artificial
  Probe
cgccagaaggaactttcttgattag

SEQ ID NO: 221483 - DNA, 25 bp, Artificial
  Probe
agaggcgccagaaggaactttcttg

SEQ ID NO: 221484 - DNA, 25 bp, Artificial
  Probe
gtatacatcagcaccgacgctgcag

SEQ ID NO: 221485 - DNA, 25 bp, Artificial
  Probe
aaggacaaacggacaggccctgaag

SEQ ID NO: 221486 - DNA, 25 bp, Artificial
  Probe
ggactacctttaccaacaagactga

SEQ ID NO: 221487 - DNA, 25 bp, Artificial
  Probe
tgttaagacatcagccgggccgact

SEQ ID NO: 221488 - DNA, 25 bp, Artificial
  Probe
gagctcagtcaaacaggatggtact

SEQ ID NO: 221489 - DNA, 25 bp, Artificial
  Probe
cattaacaagtgtaccggtaccatc

SEQ ID NO: 221490 - DNA, 25 bp, Artificial
  Probe
gattgagtaccaagacgggaaattc

SEQ ID NO: 221491 - DNA, 25 bp, Artificial
  Probe
ggactgttcacctttacctgaccaa

SEQ ID NO: 221492 - DNA, 25 bp, Artificial
  Probe
gattgactactacgttcagatgtgc

SEQ ID NO: 221493 - DNA, 25 bp, Artificial
  Probe
cctgcggattgagtaccaagacggg

SEQ ID NO: 221494 - DNA, 25 bp, Artificial
  Probe
aagaggcgccagaaggaactttctt

SEQ ID NO: 221495 - DNA, 25 bp, Artificial
  Probe
agtttgacagcgtggttcatctgat

SEQ ID NO: 221496 - DNA, 25 bp, Artificial
  Probe
tgccgactcagcattaacaagtgta

SEQ ID NO: 221497 - DNA, 25 bp, Artificial
  Probe
ctcagtcaaacaggatggtactggg

SEQ ID NO: 221498 - DNA, 25 bp, Artificial
  Probe
ttgagtaccaagacgggaaattcag

SEQ ID NO: 221499 - DNA, 25 bp, Artificial
  Probe
agagtatcaccgaatgcagctatgt

SEQ ID NO: 221500 - DNA, 25 bp, Artificial
  Probe
gtgagctcagtcaaacaggatggta

SEQ ID NO: 221501 - DNA, 25 bp, Artificial
  Probe
tgactactacgttcagatgtgcaag

SEQ ID NO: 221502 - DNA, 25 bp, Artificial
  Probe
tcagccgggccgactaacctgcgga

SEQ ID NO: 221503 - DNA, 25 bp, Artificial
  Probe
gaactttcttgattagagatagctc

SEQ ID NO: 221504 - DNA, 25 bp, Artificial
  Probe
gcacttctgccgactcagcattaac

SEQ ID NO: 221505 - DNA, 25 bp, Artificial
  Probe
actaacctgcggattgagtaccaag

SEQ ID NO: 221506 - DNA, 25 bp, Artificial
  Probe
tggattctatcatatgtgtcaagtc

SEQ ID NO: 221507 - DNA, 25 bp, Artificial
  Probe
tctgattgactactacgttcagatg

SEQ ID NO: 221508 - DNA, 25 bp, Artificial
  Probe
ggacaaacggacaggccctgaagcc

SEQ ID NO: 221509 - DNA, 25 bp, Artificial
  Probe
cgactcagcattaacaagtgtaccg

SEQ ID NO: 221510 - DNA, 25 bp, Artificial
  Probe
atatagagtatcaccgaatgcagct

SEQ ID NO: 221511 - DNA, 25 bp, Artificial
  Probe
aaatgaatgcctcatatagagtatc

SEQ ID NO: 221512 - DNA, 25 bp, Artificial
  Probe
ggccgactaacctgcggattgagta

SEQ ID NO: 221513 - DNA, 25 bp, Artificial
  Probe
ctatcatatgtgtcaagtccaagct

SEQ ID NO: 221514 - DNA, 25 bp, Artificial
  Probe
gggactacctttaccaacaagactg

SEQ ID NO: 221515 - DNA, 25 bp, Artificial
  Probe
ctgtatacatcagcaccgacgctgc

SEQ ID NO: 221516 - DNA, 25 bp, Artificial
  Probe
ccacgaggcattggtgcgacatgtg

SEQ ID NO: 221517 - DNA, 25 bp, Artificial
  Probe
aagacgactacatcaatgctagctg

SEQ ID NO: 221518 - DNA, 25 bp, Artificial
  Probe
agcaggtcctgcagcgccacggcgt

SEQ ID NO: 221519 - DNA, 25 bp, Artificial
  Probe
agacgtgcccatcagctccattcag

SEQ ID NO: 221520 - DNA, 25 bp, Artificial
  Probe
ctacacttccctacttggcctgagt

SEQ ID NO: 221521 - DNA, 25 bp, Artificial
  Probe
cggatgcggcagcagaggaaacaca

SEQ ID NO: 221522 - DNA, 25 bp, Artificial
  Probe
atctggtccttggtggagacgtgcc

SEQ ID NO: 221523 - DNA, 25 bp, Artificial
  Probe
attatttgcaccagcgacccctgca

SEQ ID NO: 221524 - DNA, 25 bp, Artificial
  Probe
agaagagccaccttcctcaggactc

SEQ ID NO: 221525 - DNA, 25 bp, Artificial
  Probe
tgcgttgctgtatgccgccgtgcag

SEQ ID NO: 221526 - DNA, 25 bp, Artificial
  Probe
acattatttgcaccagcgacccctg

SEQ ID NO: 221527 - DNA, 25 bp, Artificial
  Probe
tgtggagcaggtcctgcagcgccac

SEQ ID NO: 221528 - DNA, 25 bp, Artificial
  Probe
atgcggcagcagaggaaacacatgc

SEQ ID NO: 221529 - DNA, 25 bp, Artificial
  Probe
ccaggatctggtccttggtggagac

SEQ ID NO: 221530 - DNA, 25 bp, Artificial
  Probe
ctccattcaggctaccattgccaag

SEQ ID NO: 221531 - DNA, 25 bp, Artificial
  Probe
ttggtggagacgtgcccatcagctc

SEQ ID NO: 221532 - DNA, 25 bp, Artificial
  Probe
cgacatgtggagcaggtcctgcagc

SEQ ID NO: 221533 - DNA, 25 bp, Artificial
  Probe
ccctacttggcctgagttaggcctg

SEQ ID NO: 221534 - DNA, 25 bp, Artificial
  Probe
cgactacatcaatgctagctgtgtg

SEQ ID NO: 221535 - DNA, 25 bp, Artificial
  Probe
gccagacagccctggcaatctgctg

SEQ ID NO: 221536 - DNA, 25 bp, Artificial
  Probe
agcgtggccctgagcagtgttcgta

SEQ ID NO: 221537 - DNA, 25 bp, Artificial
  Probe
ttggcctgagttaggcctgccagac

SEQ ID NO: 221538 - DNA, 25 bp, Artificial
  Probe
gtggcccgctacttccccattgaga

SEQ ID NO: 221539 - DNA, 25 bp, Artificial
  Probe
gaaacacatgctgcaggagaaactg

SEQ ID NO: 221540 - DNA, 25 bp, Artificial
  Probe
gggatcagagcctcaagcgctctct

SEQ ID NO: 221541 - DNA, 25 bp, Artificial
  Probe
ggattcctgagttgcctcagctggt

SEQ ID NO: 221542 - DNA, 25 bp, Artificial
  Probe
cttcctcaggactcccaggatctgg

SEQ ID NO: 221543 - DNA, 25 bp, Artificial
  Probe
gccagcctatggtgcacggggccct

SEQ ID NO: 221544 - DNA, 25 bp, Artificial
  Probe
agaggaaacacatgctgcaggagaa

SEQ ID NO: 221545 - DNA, 25 bp, Artificial
  Probe
cgcacaggagcctttgcgttgctgt

SEQ ID NO: 221546 - DNA, 25 bp, Artificial
  Probe
ctgccacgaggcattggtgcgacat

SEQ ID NO: 221547 - DNA, 25 bp, Artificial
  Probe
cacttccctacttggcctgagttag

SEQ ID NO: 221548 - DNA, 25 bp, Artificial
  Probe
ctactgatacccatgtggagcgagt

SEQ ID NO: 221549 - DNA, 25 bp, Artificial
  Probe
ctcaggactcccaggatctggtcct

SEQ ID NO: 221550 - DNA, 25 bp, Artificial
  Probe
tgagcctgcagttccgggatcagag

SEQ ID NO: 221551 - DNA, 25 bp, Artificial
  Probe
ggagacgtgcccatcagctccattc

SEQ ID NO: 221552 - DNA, 25 bp, Artificial
  Probe
tgggccgcacaggagcctttgcgtt

SEQ ID NO: 221553 - DNA, 25 bp, Artificial
  Probe
aatctgctgcgcttcatccaggagg

SEQ ID NO: 221554 - DNA, 25 bp, Artificial
  Probe
ctggcaatctgctgcgcttcatcca

SEQ ID NO: 221555 - DNA, 25 bp, Artificial
  Probe
tgcagttccgggatcagagcctcaa

SEQ ID NO: 221556 - DNA, 25 bp, Artificial
  Probe
aggttctgccacgaggcattggtgc

SEQ ID NO: 221557 - DNA, 25 bp, Artificial
  Probe
ctgagttaggcctgccagacagccc

SEQ ID NO: 221558 - DNA, 25 bp, Artificial
  Probe
cagcctatggtgcacggggccctga

SEQ ID NO: 221559 - DNA, 25 bp, Artificial
  Probe
caggagaaactgcacctcaaggttc

SEQ ID NO: 221560 - DNA, 25 bp, Artificial
  Probe
aggcctgccagacagccctggcaat

SEQ ID NO: 221561 - DNA, 25 bp, Artificial
  Probe
gactcccaggatctggtccttggtg

SEQ ID NO: 221562 - DNA, 25 bp, Artificial
  Probe
tgcaaacaagcatttatccaggttg

SEQ ID NO: 221563 - DNA, 25 bp, Artificial
  Probe
tatgttatgtaagcaactggactcc

SEQ ID NO: 221564 - DNA, 25 bp, Artificial
  Probe
aggctgatagctttttcaagtgcag

SEQ ID NO: 221565 - DNA, 25 bp, Artificial
  Probe
ccgagtgcatactctgctgctttga

SEQ ID NO: 221566 - DNA, 25 bp, Artificial
  Probe
tcagtacaggcctggagctccaggc

SEQ ID NO: 221567 - DNA, 25 bp, Artificial
  Probe
ctctgtctatatagacgattggatt

SEQ ID NO: 221568 - DNA, 25 bp, Artificial
  Probe
cttgtgtgcaaacaagcatttatcc

SEQ ID NO: 221569 - DNA, 25 bp, Artificial
  Probe
aggcaggccagatggcaactgatga

SEQ ID NO: 221570 - DNA, 25 bp, Artificial
  Probe
ttatgcaactgactgtccttaatga

SEQ ID NO: 221571 - DNA, 25 bp, Artificial
  Probe
ggccagatggcaactgatgacttgt

SEQ ID NO: 221572 - DNA, 25 bp, Artificial
  Probe
tggctgtgaggctgatagctttttc

SEQ ID NO: 221573 - DNA, 25 bp, Artificial
  Probe
ccagatggcaactgatgacttgtgt

SEQ ID NO: 221574 - DNA, 25 bp, Artificial
  Probe
acaagcatttatccaggttgcaata

SEQ ID NO: 221575 - DNA, 25 bp, Artificial
  Probe
ctgatgacttgtgtgcaaacaagca

SEQ ID NO: 221576 - DNA, 25 bp, Artificial
  Probe
aggaagtgctgtagctctcaagtgc

SEQ ID NO: 221577 - DNA, 25 bp, Artificial
  Probe
ctgctttgagtgctgcaggagtgcc

SEQ ID NO: 221578 - DNA, 25 bp, Artificial
  Probe
aaatcagatgatcagcttctgctct

SEQ ID NO: 221579 - DNA, 25 bp, Artificial
  Probe
tggactcccgctcagtacaggcctg

SEQ ID NO: 221580 - DNA, 25 bp, Artificial
  Probe
cagtacaggcctggagctccaggcc

SEQ ID NO: 221581 - DNA, 25 bp, Artificial
  Probe
tgacttgtgtgcaaacaagcattta

SEQ ID NO: 221582 - DNA, 25 bp, Artificial
  Probe
acaggaagtgctgtagctctcaagt

SEQ ID NO: 221583 - DNA, 25 bp, Artificial
  Probe
cagatgatcagcttctgctctgtct

SEQ ID NO: 221584 - DNA, 25 bp, Artificial
  Probe
gctctgtctatatagacgattggat

SEQ ID NO: 221585 - DNA, 25 bp, Artificial
  Probe
tgcatgcttatgttatgtaagcaac

SEQ ID NO: 221586 - DNA, 25 bp, Artificial
  Probe
aggccagatggcaactgatgacttg

SEQ ID NO: 221587 - DNA, 25 bp, Artificial
  Probe
caggagtgcccactggcctggctgt

SEQ ID NO: 221588 - DNA, 25 bp, Artificial
  Probe
caaacaagcatttatccaggttgca

SEQ ID NO: 221589 - DNA, 25 bp, Artificial
  Probe
tcccgctcagtacaggcctggagct

SEQ ID NO: 221590 - DNA, 25 bp, Artificial
  Probe
aagcaactggactcccgctcagtac

SEQ ID NO: 221591 - DNA, 25 bp, Artificial
  Probe
gtgctgcaggagtgcccactggcct

SEQ ID NO: 221592 - DNA, 25 bp, Artificial
  Probe
agctccaggccgagtgcatactctg

SEQ ID NO: 221593 - DNA, 25 bp, Artificial
  Probe
acacaggaagtgctgtagctctcaa

SEQ ID NO: 221594 - DNA, 25 bp, Artificial
  Probe
gcatgcttatgttatgtaagcaact

SEQ ID NO: 221595 - DNA, 25 bp, Artificial
  Probe
gactgtccttaatgatgatctcata

SEQ ID NO: 221596 - DNA, 25 bp, Artificial
  Probe
ggaagtgctgtagctctcaagtgct

SEQ ID NO: 221597 - DNA, 25 bp, Artificial
  Probe
cactggcctggctgtgaggctgata

SEQ ID NO: 221598 - DNA, 25 bp, Artificial
  Probe
agtgctgcaggagtgcccactggcc

SEQ ID NO: 221599 - DNA, 25 bp, Artificial
  Probe
gcctggagctccaggccgagtgcat

SEQ ID NO: 221600 - DNA, 25 bp, Artificial
  Probe
ttgagtgctgcaggagtgcccactg

SEQ ID NO: 221601 - DNA, 25 bp, Artificial
  Probe
tgtgcaaacaagcatttatccaggt

SEQ ID NO: 221602 - DNA, 25 bp, Artificial
  Probe
ctgctctgtctatatagacgattgg

SEQ ID NO: 221603 - DNA, 25 bp, Artificial
  Probe
gcatactctgctgctttgagtgctg

SEQ ID NO: 221604 - DNA, 25 bp, Artificial
  Probe
ctctgctgctttgagtgctgcagga

SEQ ID NO: 221605 - DNA, 25 bp, Artificial
  Probe
tatgtaagcaactggactcccgctc

SEQ ID NO: 221606 - DNA, 25 bp, Artificial
  Probe
ggctgatagctttttcaagtgcagg

SEQ ID NO: 221607 - DNA, 25 bp, Artificial
  Probe
actcccgctcagtacaggcctggag

SEQ ID NO: 221608 - DNA, 25 bp, Artificial
  Probe
ctgatgcttgcctatgcctgtttaa

SEQ ID NO: 221609 - DNA, 25 bp, Artificial
  Probe
tgctgcgctgggactgctccaagtc

SEQ ID NO: 221610 - DNA, 25 bp, Artificial
  Probe
tcttgcccttggtgttggtgtggac

SEQ ID NO: 221611 - DNA, 25 bp, Artificial
  Probe
ttaatccctattcctgcactgcgag

SEQ ID NO: 221612 - DNA, 25 bp, Artificial
  Probe
tacctactgatgcttgcctatgcct

SEQ ID NO: 221613 - DNA, 25 bp, Artificial
  Probe
tgggactgctccaagtcccagggtg

SEQ ID NO: 221614 - DNA, 25 bp, Artificial
  Probe
gccatggttctactcattttccctg

SEQ ID NO: 221615 - DNA, 25 bp, Artificial
  Probe
atgtcagtgtcatccgagtggccag

SEQ ID NO: 221616 - DNA, 25 bp, Artificial
  Probe
accatgctgcgctgggactgctcca

SEQ ID NO: 221617 - DNA, 25 bp, Artificial
  Probe
tcagtggctgcaggattgggcctct

SEQ ID NO: 221618 - DNA, 25 bp, Artificial
  Probe
tggtattcaattttgccatggttct

SEQ ID NO: 221619 - DNA, 25 bp, Artificial
  Probe
ctgccttcttcatggctgcattaat

SEQ ID NO: 221620 - DNA, 25 bp, Artificial
  Probe
aatgtcactgccttcttcatggctg

SEQ ID NO: 221621 - DNA, 25 bp, Artificial
  Probe
caactcaggttttgccatttcttgc

SEQ ID NO: 221622 - DNA, 25 bp, Artificial
  Probe
tggctgcattaatccctattcctgc

SEQ ID NO: 221623 - DNA, 25 bp, Artificial
  Probe
gatattttctgctgtttcacaagcc

SEQ ID NO: 221624 - DNA, 25 bp, Artificial
  Probe
ctaaaatccttctctgatgtcagtg

SEQ ID NO: 221625 - DNA, 25 bp, Artificial
  Probe
ggtattcaattttgccatggttcta

SEQ ID NO: 221626 - DNA, 25 bp, Artificial
  Probe
ttggctggtgtcctgttggttgcac

SEQ ID NO: 221627 - DNA, 25 bp, Artificial
  Probe
gaccctggacgacatcctaaaatcc

SEQ ID NO: 221628 - DNA, 25 bp, Artificial
  Probe
ttttctgctgtttcacaagcccctg

SEQ ID NO: 221629 - DNA, 25 bp, Artificial
  Probe
ctgctccttgattggcatttccttt

SEQ ID NO: 221630 - DNA, 25 bp, Artificial
  Probe
caggattgggcctctgctccttgat

SEQ ID NO: 221631 - DNA, 25 bp, Artificial
  Probe
tccttgattggcatttcctttaatg

SEQ ID NO: 221632 - DNA, 25 bp, Artificial
  Probe
ggcatttcctttaatgctgcaacaa

SEQ ID NO: 221633 - DNA, 25 bp, Artificial
  Probe
catttcttgcccttggtgttggtgt

SEQ ID NO: 221634 - DNA, 25 bp, Artificial
  Probe
ctcagcatggatttatacagacgtg

SEQ ID NO: 221635 - DNA, 25 bp, Artificial
  Probe
gtttaaccatgctgcgctgggactg

SEQ ID NO: 221636 - DNA, 25 bp, Artificial
  Probe
acgtctttctcctggcccatgcatt

SEQ ID NO: 221637 - DNA, 25 bp, Artificial
  Probe
tggctgcaggattgggcctctgctc

SEQ ID NO: 221638 - DNA, 25 bp, Artificial
  Probe
gatgcttgcctatgcctgtttaacc

SEQ ID NO: 221639 - DNA, 25 bp, Artificial
  Probe
attttccctgcaattctcagcatgg

SEQ ID NO: 221640 - DNA, 25 bp, Artificial
  Probe
ttgcactgtcagtggctgcaggatt

SEQ ID NO: 221641 - DNA, 25 bp, Artificial
  Probe
gttttgccatttcttgcccttggtg

SEQ ID NO: 221642 - DNA, 25 bp, Artificial
  Probe
cttgcctatgcctgtttaaccatgc

SEQ ID NO: 221643 - DNA, 25 bp, Artificial
  Probe
tcctttaatgctgcaacaactcagg

SEQ ID NO: 221644 - DNA, 25 bp, Artificial
  Probe
cagcaatgtcactgccttcttcatg

SEQ ID NO: 221645 - DNA, 25 bp, Artificial
  Probe
tgcgctgggactgctccaagtccca

SEQ ID NO: 221646 - DNA, 25 bp, Artificial
  Probe
atggctgcattaatccctattcctg

SEQ ID NO: 221647 - DNA, 25 bp, Artificial
  Probe
gactgctccaagtcccagggtgccg

SEQ ID NO: 221648 - DNA, 25 bp, Artificial
  Probe
gtgttggtgtggacgacgtctttct

SEQ ID NO: 221649 - DNA, 25 bp, Artificial
  Probe
ctattcctgcactgcgagcgttctc

SEQ ID NO: 221650 - DNA, 25 bp, Artificial
  Probe
tgcctcaagcgcacgggagccagcg

SEQ ID NO: 221651 - DNA, 25 bp, Artificial
  Probe
gattggatattttctgctgtttcac

SEQ ID NO: 221652 - DNA, 25 bp, Artificial
  Probe
ttctcctggcccatgcattcagtga

SEQ ID NO: 221653 - DNA, 25 bp, Artificial
  Probe
gcattcagtgaaacgggacagaata

SEQ ID NO: 221654 - DNA, 25 bp, Artificial
  Probe
tcagggatgctagtaccatagttcc

SEQ ID NO: 221655 - DNA, 25 bp, Artificial
  Probe
gaacacacaggaggacatcacaaga

SEQ ID NO: 221656 - DNA, 25 bp, Artificial
  Probe
taaactctttgagacagggtccagt

SEQ ID NO: 221657 - DNA, 25 bp, Artificial
  Probe
gaatgctgcactcttttgtattgag

SEQ ID NO: 221658 - DNA, 25 bp, Artificial
  Probe
actgcttctcagacacatgctcgat

SEQ ID NO: 221659 - DNA, 25 bp, Artificial
  Probe
tctcagacacatgctcgataaaagc

SEQ ID NO: 221660 - DNA, 25 bp, Artificial
  Probe
ccagtcagggatgctagtaccatag

SEQ ID NO: 221661 - DNA, 25 bp, Artificial
  Probe
cacacaggaggacatcacaagatgg

SEQ ID NO: 221662 - DNA, 25 bp, Artificial
  Probe
gaggacatcacaagatgggacacat

SEQ ID NO: 221663 - DNA, 25 bp, Artificial
  Probe
ctcttttgtattgagtggtctcatg

SEQ ID NO: 221664 - DNA, 25 bp, Artificial
  Probe
cagggtccagtcagggatgctagta

SEQ ID NO: 221665 - DNA, 25 bp, Artificial
  Probe
cataaactctttgagacagggtcca

SEQ ID NO: 221666 - DNA, 25 bp, Artificial
  Probe
aaactctttgagacagggtccagtc

SEQ ID NO: 221667 - DNA, 25 bp, Artificial
  Probe
tagtaccatagttccaatccccagg

SEQ ID NO: 221668 - DNA, 25 bp, Artificial
  Probe
aatccccaggactgcttctcagaca

SEQ ID NO: 221669 - DNA, 25 bp, Artificial
  Probe
gagtgtcataaactctttgagacag

SEQ ID NO: 221670 - DNA, 25 bp, Artificial
  Probe
gtcataaactctttgagacagggtc

SEQ ID NO: 221671 - DNA, 25 bp, Artificial
  Probe
gcttctcagacacatgctcgataaa

SEQ ID NO: 221672 - DNA, 25 bp, Artificial
  Probe
ggatgctagtaccatagttccaatc

SEQ ID NO: 221673 - DNA, 25 bp, Artificial
  Probe
gtggtctcatgtgagtgtcataaac

SEQ ID NO: 221674 - DNA, 25 bp, Artificial
  Probe
gacatcacaagatgggacacatatt

SEQ ID NO: 221675 - DNA, 25 bp, Artificial
  Probe
agacagggtccagtcagggatgcta

SEQ ID NO: 221676 - DNA, 25 bp, Artificial
  Probe
ggactgcttctcagacacatgctcg

SEQ ID NO: 221677 - DNA, 25 bp, Artificial
  Probe
cacatgctcgataaaagccccagtc

SEQ ID NO: 221678 - DNA, 25 bp, Artificial
  Probe
aggacatcacaagatgggacacata

SEQ ID NO: 221679 - DNA, 25 bp, Artificial
  Probe
gtaccatagttccaatccccaggac

SEQ ID NO: 221680 - DNA, 25 bp, Artificial
  Probe
accatagttccaatccccaggactg

SEQ ID NO: 221681 - DNA, 25 bp, Artificial
  Probe
caggactgcttctcagacacatgct

SEQ ID NO: 221682 - DNA, 25 bp, Artificial
  Probe
gatgctagtaccatagttccaatcc

SEQ ID NO: 221683 - DNA, 25 bp, Artificial
  Probe
agacacatgctcgataaaagcccca

SEQ ID NO: 221684 - DNA, 25 bp, Artificial
  Probe
cccaggactgcttctcagacacatg

SEQ ID NO: 221685 - DNA, 25 bp, Artificial
  Probe
tctcatgtgagtgtcataaactctt

SEQ ID NO: 221686 - DNA, 25 bp, Artificial
  Probe
tttgagacagggtccagtcagggat

SEQ ID NO: 221687 - DNA, 25 bp, Artificial
  Probe
actctttgagacagggtccagtcag

SEQ ID NO: 221688 - DNA, 25 bp, Artificial
  Probe
atgctcgataaaagccccagtcctt

SEQ ID NO: 221689 - DNA, 25 bp, Artificial
  Probe
gataaaagccccagtccttcccagt

SEQ ID NO: 221690 - DNA, 25 bp, Artificial
  Probe
actcttttgtattgagtggtctcat

SEQ ID NO: 221691 - DNA, 25 bp, Artificial
  Probe
gtccagtcagggatgctagtaccat

SEQ ID NO: 221692 - DNA, 25 bp, Artificial
  Probe
ttctcagacacatgctcgataaaag

SEQ ID NO: 221693 - DNA, 25 bp, Artificial
  Probe
aatgctgcactcttttgtattgagt

SEQ ID NO: 221694 - DNA, 25 bp, Artificial
  Probe
acagggtccagtcagggatgctagt

SEQ ID NO: 221695 - DNA, 25 bp, Artificial
  Probe
acacaggaggacatcacaagatggg

SEQ ID NO: 221696 - DNA, 25 bp, Artificial
  Probe
tgagtgtcataaactctttgagaca

SEQ ID NO: 221697 - DNA, 25 bp, Artificial
  Probe
gtacataagaacacacaggaggaca

SEQ ID NO: 221698 - DNA, 25 bp, Artificial
  Probe
ggaatgaatgctgcactcttttgta

SEQ ID NO: 221699 - DNA, 25 bp, Artificial
  Probe
ggtctcatgtgagtgtcataaactc

SEQ ID NO: 221700 - DNA, 25 bp, Artificial
  Probe
tctgcaggcagtattcctggggaga

SEQ ID NO: 221701 - DNA, 25 bp, Artificial
  Probe
ctgggccatatgtggagatcattga

SEQ ID NO: 221702 - DNA, 25 bp, Artificial
  Probe
cggggcatgcgtttccgttacaagt

SEQ ID NO: 221703 - DNA, 25 bp, Artificial
  Probe
gaccctggccatggacgatctgttt

SEQ ID NO: 221704 - DNA, 25 bp, Artificial
  Probe
gggccgctctgcaggcagtattcct

SEQ ID NO: 221705 - DNA, 25 bp, Artificial
  Probe
ggcttctgggccatatgtggagatc

SEQ ID NO: 221706 - DNA, 25 bp, Artificial
  Probe
catggacgatctgtttcccctcatc

SEQ ID NO: 221707 - DNA, 25 bp, Artificial
  Probe
cgctctgcaggcagtattcctgggg

SEQ ID NO: 221708 - DNA, 25 bp, Artificial
  Probe
ctggccatggacgatctgtttcccc

SEQ ID NO: 221709 - DNA, 25 bp, Artificial
  Probe
gagaagcacagataccactaagacg

SEQ ID NO: 221710 - DNA, 25 bp, Artificial
  Probe
aagcagcggggcatgcgtttccgtt

SEQ ID NO: 221711 - DNA, 25 bp, Artificial
  Probe
aagcacagataccactaagacgcac

SEQ ID NO: 221712 - DNA, 25 bp, Artificial
  Probe
gcgtttccgttacaagtgcgagggc

SEQ ID NO: 221713 - DNA, 25 bp, Artificial
  Probe
tggccatggacgatctgtttcccct

SEQ ID NO: 221714 - DNA, 25 bp, Artificial
  Probe
cagcccaggcttctgggccatatgt

SEQ ID NO: 221715 - DNA, 25 bp, Artificial
  Probe
catgcgtttccgttacaagtgcgag

SEQ ID NO: 221716 - DNA, 25 bp, Artificial
  Probe
tggacgatctgtttcccctcatctt

SEQ ID NO: 221717 - DNA, 25 bp, Artificial
  Probe
ttccgttacaagtgcgagggccgct

SEQ ID NO: 221718 - DNA, 25 bp, Artificial
  Probe
accctggccatggacgatctgtttc

SEQ ID NO: 221719 - DNA, 25 bp, Artificial
  Probe
ggggcatgcgtttccgttacaagtg

SEQ ID NO: 221720 - DNA, 25 bp, Artificial
  Probe
tttccgttacaagtgcgagggccgc

SEQ ID NO: 221721 - DNA, 25 bp, Artificial
  Probe
ggaccctggccatggacgatctgtt

SEQ ID NO: 221722 - DNA, 25 bp, Artificial
  Probe
ccagcccaggcttctgggccatatg

SEQ ID NO: 221723 - DNA, 25 bp, Artificial
  Probe
gaagcacagataccactaagacgca

SEQ ID NO: 221724 - DNA, 25 bp, Artificial
  Probe
gccagcccaggcttctgggccatat

SEQ ID NO: 221725 - DNA, 25 bp, Artificial
  Probe
tctgggccatatgtggagatcattg

SEQ ID NO: 221726 - DNA, 25 bp, Artificial
  Probe
ggagatcattgagcagcccaagcag

SEQ ID NO: 221727 - DNA, 25 bp, Artificial
  Probe
agcccaggcttctgggccatatgtg

SEQ ID NO: 221728 - DNA, 25 bp, Artificial
  Probe
gccatggacgatctgtttcccctca

SEQ ID NO: 221729 - DNA, 25 bp, Artificial
  Probe
atgcgtttccgttacaagtgcgagg

SEQ ID NO: 221730 - DNA, 25 bp, Artificial
  Probe
agatcattgagcagcccaagcagcg

SEQ ID NO: 221731 - DNA, 25 bp, Artificial
  Probe
agcacagataccactaagacgcacc

SEQ ID NO: 221732 - DNA, 25 bp, Artificial
  Probe
ccatggacgatctgtttcccctcat

SEQ ID NO: 221733 - DNA, 25 bp, Artificial
  Probe
agcagcggggcatgcgtttccgtta

SEQ ID NO: 221734 - DNA, 25 bp, Artificial
  Probe
cttctgggccatatgtggagatcat

SEQ ID NO: 221735 - DNA, 25 bp, Artificial
  Probe
gggaccctggccatggacgatctgt

SEQ ID NO: 221736 - DNA, 25 bp, Artificial
  Probe
ccctggccatggacgatctgtttcc

SEQ ID NO: 221737 - DNA, 25 bp, Artificial
  Probe
gagatcattgagcagcccaagcagc

SEQ ID NO: 221738 - DNA, 25 bp, Artificial
  Probe
ggacgatctgtttcccctcatcttt

SEQ ID NO: 221739 - DNA, 25 bp, Artificial
  Probe
agggccgctctgcaggcagtattcc

SEQ ID NO: 221740 - DNA, 25 bp, Artificial
  Probe
gtttccgttacaagtgcgagggccg

SEQ ID NO: 221741 - DNA, 25 bp, Artificial
  Probe
gttacaagtgcgagggccgctctgc

SEQ ID NO: 221742 - DNA, 25 bp, Artificial
  Probe
atggacgatctgtttcccctcatct

SEQ ID NO: 221743 - DNA, 25 bp, Artificial
  Probe
gcggggcatgcgtttccgttacaag

SEQ ID NO: 221744 - DNA, 25 bp, Artificial
  Probe
agaagcacagataccactaagacgc

SEQ ID NO: 221745 - DNA, 25 bp, Artificial
  Probe
gcttctgggccatatgtggagatca

SEQ ID NO: 221746 - DNA, 25 bp, Artificial
  Probe
atctgtgggctccacctctggacct

SEQ ID NO: 221747 - DNA, 25 bp, Artificial
  Probe
tggatgaattctggtccttcagaga

SEQ ID NO: 221748 - DNA, 25 bp, Artificial
  Probe
tgattgcaaatttcagaggcctggt

SEQ ID NO: 221749 - DNA, 25 bp, Artificial
  Probe
tctgtgggctccacctctggacctg

SEQ ID NO: 221750 - DNA, 25 bp, Artificial
  Probe
gagaatcggccctaccatggcatgc

SEQ ID NO: 221751 - DNA, 25 bp, Artificial
  Probe
gtctctcatgtctacaactcagagt

SEQ ID NO: 221752 - DNA, 25 bp, Artificial
  Probe
atcccatgcagcacaacccaaatgg

SEQ ID NO: 221753 - DNA, 25 bp, Artificial
  Probe
caggtgggcatggtggacatcccat

SEQ ID NO: 221754 - DNA, 25 bp, Artificial
  Probe
accctggatgaattctggtccttca

SEQ ID NO: 221755 - DNA, 25 bp, Artificial
  Probe
ggccagtgcaccaaggcctgctgct

SEQ ID NO: 221756 - DNA, 25 bp, Artificial
  Probe
gtcacattgcctctgattgcaaatt

SEQ ID NO: 221757 - DNA, 25 bp, Artificial
  Probe
gcatctgtgggctccacctctggac

SEQ ID NO: 221758 - DNA, 25 bp, Artificial
  Probe
gtcccttatggctgagctaggggaa

SEQ ID NO: 221759 - DNA, 25 bp, Artificial
  Probe
taaagagtatttgtcccttatggct

SEQ ID NO: 221760 - DNA, 25 bp, Artificial
  Probe
acaggtgggcatggtggacatccca

SEQ ID NO: 221761 - DNA, 25 bp, Artificial
  Probe
ttgcctctgattgcaaatttcagag

SEQ ID NO: 221762 - DNA, 25 bp, Artificial
  Probe
gctcctgtccctgcatctgtgggct

SEQ ID NO: 221763 - DNA, 25 bp, Artificial
  Probe
agaggcctggtgaccctcaatcagc

SEQ ID NO: 221764 - DNA, 25 bp, Artificial
  Probe
ctctcatgtctacaactcagagtcg

SEQ ID NO: 221765 - DNA, 25 bp, Artificial
  Probe
ctggtgaccctcaatcagctcagga

SEQ ID NO: 221766 - DNA, 25 bp, Artificial
  Probe
ctctgattgcaaatttcagaggcct

SEQ ID NO: 221767 - DNA, 25 bp, Artificial
  Probe
agctcaggataaagcacggatggat

SEQ ID NO: 221768 - DNA, 25 bp, Artificial
  Probe
tatggctgagctaggggaagctcct

SEQ ID NO: 221769 - DNA, 25 bp, Artificial
  Probe
ggtcacattgcctctgattgcaaat

SEQ ID NO: 221770 - DNA, 25 bp, Artificial
  Probe
ggtggacatcccatgcagcacaacc

SEQ ID NO: 221771 - DNA, 25 bp, Artificial
  Probe
tcggccctaccatggcatgcatgga

SEQ ID NO: 221772 - DNA, 25 bp, Artificial
  Probe
tccttcagagaatcggccctaccat

SEQ ID NO: 221773 - DNA, 25 bp, Artificial
  Probe
ggctggtcacattgcctctgattgc

SEQ ID NO: 221774 - DNA, 25 bp, Artificial
  Probe
ctggccagtgcaccaaggcctgctg

SEQ ID NO: 221775 - DNA, 25 bp, Artificial
  Probe
atgtctacaactcagagtcgcccac

SEQ ID NO: 221776 - DNA, 25 bp, Artificial
  Probe
agctcctgtccctgcatctgtgggc

SEQ ID NO: 221777 - DNA, 25 bp, Artificial
  Probe
atttgtcccttatggctgagctagg

SEQ ID NO: 221778 - DNA, 25 bp, Artificial
  Probe
cgtctctcatgtctacaactcagag

SEQ ID NO: 221779 - DNA, 25 bp, Artificial
  Probe
ttatggctgagctaggggaagctcc

SEQ ID NO: 221780 - DNA, 25 bp, Artificial
  Probe
taggggaagctcctgtccctgcatc

SEQ ID NO: 221781 - DNA, 25 bp, Artificial
  Probe
gcatggtggacatcccatgcagcac

SEQ ID NO: 221782 - DNA, 25 bp, Artificial
  Probe
agtatttgtcccttatggctgagct

SEQ ID NO: 221783 - DNA, 25 bp, Artificial
  Probe
ccaccctggatgaattctggtcctt

SEQ ID NO: 221784 - DNA, 25 bp, Artificial
  Probe
tgagctaggggaagctcctgtccct

SEQ ID NO: 221785 - DNA, 25 bp, Artificial
  Probe
gagctaggggaagctcctgtccctg

SEQ ID NO: 221786 - DNA, 25 bp, Artificial
  Probe
tgcaaatttcagaggcctggtgacc

SEQ ID NO: 221787 - DNA, 25 bp, Artificial
  Probe
attgcaaatttcagaggcctggtga

SEQ ID NO: 221788 - DNA, 25 bp, Artificial
  Probe
gcctggtgaccctcaatcagctcag

SEQ ID NO: 221789 - DNA, 25 bp, Artificial
  Probe
atttcagaggcctggtgaccctcaa

SEQ ID NO: 221790 - DNA, 25 bp, Artificial
  Probe
cattgcctctgattgcaaatttcag

SEQ ID NO: 221791 - DNA, 25 bp, Artificial
  Probe
aggggaagctcctgtccctgcatct

SEQ ID NO: 221792 - DNA, 25 bp, Artificial
  Probe
cttttgattaagtgaccagggttct

SEQ ID NO: 221793 - DNA, 25 bp, Artificial
  Probe
tcacagcacacgtggggaaatatac

SEQ ID NO: 221794 - DNA, 25 bp, Artificial
  Probe
ggattgaccagctccagcatttagc

SEQ ID NO: 221795 - DNA, 25 bp, Artificial
  Probe
aggattgaccagctccagcatttag

SEQ ID NO: 221796 - DNA, 25 bp, Artificial
  Probe
gtttggcaggattgaccagctccag

SEQ ID NO: 221797 - DNA, 25 bp, Artificial
  Probe
atcacagcacacgtggggaaatata

SEQ ID NO: 221798 - DNA, 25 bp, Artificial
  Probe
tttggcaggattgaccagctccagc

SEQ ID NO: 221799 - DNA, 25 bp, Artificial
  Probe
caggattgaccagctccagcattta

SEQ ID NO: 221800 - DNA, 25 bp, Artificial
  Probe
gcaggattgaccagctccagcattt

SEQ ID NO: 221801 - DNA, 25 bp, Artificial
  Probe
tccagcatttagcatgaagtcctca

SEQ ID NO: 221802 - DNA, 25 bp, Artificial
  Probe
gagtttcctcctcatgcattttgtt

SEQ ID NO: 221803 - DNA, 25 bp, Artificial
  Probe
aatcacagcacacgtggggaaatat

SEQ ID NO: 221804 - DNA, 25 bp, Artificial
  Probe
agaatcacagcacacgtggggaaat

SEQ ID NO: 221805 - DNA, 25 bp, Artificial
  Probe
ttcctttgggagtttcctcctcatg

SEQ ID NO: 221806 - DNA, 25 bp, Artificial
  Probe
tttgggagtttcctcctcatgcatt

SEQ ID NO: 221807 - DNA, 25 bp, Artificial
  Probe
attgaccagctccagcatttagcat

SEQ ID NO: 221808 - DNA, 25 bp, Artificial
  Probe
accagctccagcatttagcatgaag

SEQ ID NO: 221809 - DNA, 25 bp, Artificial
  Probe
gattgaccagctccagcatttagca

SEQ ID NO: 221810 - DNA, 25 bp, Artificial
  Probe
ccagtcttcttttaggatcaggttt

SEQ ID NO: 221811 - DNA, 25 bp, Artificial
  Probe
catttagcatgaagtcctcagccct

SEQ ID NO: 221812 - DNA, 25 bp, Artificial
  Probe
tacagaatcacagcacacgtgggga

SEQ ID NO: 221813 - DNA, 25 bp, Artificial
  Probe
agctccagcatttagcatgaagtcc

SEQ ID NO: 221814 - DNA, 25 bp, Artificial
  Probe
tcaggtttgcaaggtacagaatcac

SEQ ID NO: 221815 - DNA, 25 bp, Artificial
  Probe
tgggagtttcctcctcatgcatttt

SEQ ID NO: 221816 - DNA, 25 bp, Artificial
  Probe
cctttgggagtttcctcctcatgca

SEQ ID NO: 221817 - DNA, 25 bp, Artificial
  Probe
ccagcatttagcatgaagtcctcag

SEQ ID NO: 221818 - DNA, 25 bp, Artificial
  Probe
cttgccagtcttcttttaggatcag

SEQ ID NO: 221819 - DNA, 25 bp, Artificial
  Probe
gccagtcttcttttaggatcaggtt

SEQ ID NO: 221820 - DNA, 25 bp, Artificial
  Probe
gcatttagcatgaagtcctcagccc

SEQ ID NO: 221821 - DNA, 25 bp, Artificial
  Probe
gtacagaatcacagcacacgtgggg

SEQ ID NO: 221822 - DNA, 25 bp, Artificial
  Probe
acagaatcacagcacacgtggggaa

SEQ ID NO: 221823 - DNA, 25 bp, Artificial
  Probe
gaatcacagcacacgtggggaaata

SEQ ID NO: 221824 - DNA, 25 bp, Artificial
  Probe
atcaggtttgcaaggtacagaatca

SEQ ID NO: 221825 - DNA, 25 bp, Artificial
  Probe
ccagctccagcatttagcatgaagt

SEQ ID NO: 221826 - DNA, 25 bp, Artificial
  Probe
agtcttcttttaggatcaggtttgc

SEQ ID NO: 221827 - DNA, 25 bp, Artificial
  Probe
ggtacagaatcacagcacacgtggg

SEQ ID NO: 221828 - DNA, 25 bp, Artificial
  Probe
ctccagcatttagcatgaagtcctc

SEQ ID NO: 221829 - DNA, 25 bp, Artificial
  Probe
cttcttttaggatcaggtttgcaag

SEQ ID NO: 221830 - DNA, 25 bp, Artificial
  Probe
aggtacagaatcacagcacacgtgg

SEQ ID NO: 221831 - DNA, 25 bp, Artificial
  Probe
cagctccagcatttagcatgaagtc

SEQ ID NO: 221832 - DNA, 25 bp, Artificial
  Probe
ccttgccagtcttcttttaggatca

SEQ ID NO: 221833 - DNA, 25 bp, Artificial
  Probe
tcttcttttaggatcaggtttgcaa

SEQ ID NO: 221834 - DNA, 25 bp, Artificial
  Probe
tgaccagctccagcatttagcatga

SEQ ID NO: 221835 - DNA, 25 bp, Artificial
  Probe
gggagtttcctcctcatgcattttg

SEQ ID NO: 221836 - DNA, 25 bp, Artificial
  Probe
ttgaccagctccagcatttagcatg

SEQ ID NO: 221837 - DNA, 25 bp, Artificial
  Probe
ttgccagtcttcttttaggatcagg

SEQ ID NO: 221838 - DNA, 25 bp, Artificial
  Probe
ctcaagctctggtgtttgaagcctt

SEQ ID NO: 221839 - DNA, 25 bp, Artificial
  Probe
taaccttctcaagctctggtgtttg

SEQ ID NO: 221840 - DNA, 25 bp, Artificial
  Probe
cagccaatcagtgacaataagagac

SEQ ID NO: 221841 - DNA, 25 bp, Artificial
  Probe
tgccctctgcgctgggaagtgagcc

SEQ ID NO: 221842 - DNA, 25 bp, Artificial
  Probe
ccaatcagtgacaataagagactgt

SEQ ID NO: 221843 - DNA, 25 bp, Artificial
  Probe
tgcgctgggaagtgagccagccaat

SEQ ID NO: 221844 - DNA, 25 bp, Artificial
  Probe
gtttgaagcctttgtctgagtctgg

SEQ ID NO: 221845 - DNA, 25 bp, Artificial
  Probe
tctggtgtttgaagcctttgtctga

SEQ ID NO: 221846 - DNA, 25 bp, Artificial
  Probe
tgtttgaagcctttgtctgagtctg

SEQ ID NO: 221847 - DNA, 25 bp, Artificial
  Probe
ctgcgctgggaagtgagccagccaa

SEQ ID NO: 221848 - DNA, 25 bp, Artificial
  Probe
agccaatcagtgacaataagagact

SEQ ID NO: 221849 - DNA, 25 bp, Artificial
  Probe
ctgggtccatgcttcagaaggggta

SEQ ID NO: 221850 - DNA, 25 bp, Artificial
  Probe
catttcctgtttgattctatggatg

SEQ ID NO: 221851 - DNA, 25 bp, Artificial
  Probe
caatggaaaatctgccctctgcgct

SEQ ID NO: 221852 - DNA, 25 bp, Artificial
  Probe
ctctaaccttctcaagctctggtgt

SEQ ID NO: 221853 - DNA, 25 bp, Artificial
  Probe
ctgagtctgggtccatgcttcagaa

SEQ ID NO: 221854 - DNA, 25 bp, Artificial
  Probe
agtctgggtccatgcttcagaaggg

SEQ ID NO: 221855 - DNA, 25 bp, Artificial
  Probe
tctcaagctctggtgtttgaagcct

SEQ ID NO: 221856 - DNA, 25 bp, Artificial
  Probe
agactctaaccttctcaagctctgg

SEQ ID NO: 221857 - DNA, 25 bp, Artificial
  Probe
gccacatttcctgtttgattctatg

SEQ ID NO: 221858 - DNA, 25 bp, Artificial
  Probe
gacttctatcaatggaaaatctgcc

SEQ ID NO: 221859 - DNA, 25 bp, Artificial
  Probe
tgggtccatgcttcagaaggggtaa

SEQ ID NO: 221860 - DNA, 25 bp, Artificial
  Probe
gcctttgtctgagtctgggtccatg

SEQ ID NO: 221861 - DNA, 25 bp, Artificial
  Probe
gagccagccaatcagtgacaataag

SEQ ID NO: 221862 - DNA, 25 bp, Artificial
  Probe
agccagccaatcagtgacaataaga

SEQ ID NO: 221863 - DNA, 25 bp, Artificial
  Probe
cttctcaagctctggtgtttgaagc

SEQ ID NO: 221864 - DNA, 25 bp, Artificial
  Probe
taagagactgtcatacaaagaatca

SEQ ID NO: 221865 - DNA, 25 bp, Artificial
  Probe
gtccatgcttcagaaggggtaaggt

SEQ ID NO: 221866 - DNA, 25 bp, Artificial
  Probe
cttaaagtagacttctatcaatgga

SEQ ID NO: 221867 - DNA, 25 bp, Artificial
  Probe
tagacttctatcaatggaaaatctg

SEQ ID NO: 221868 - DNA, 25 bp, Artificial
  Probe
ctttgtctgagtctgggtccatgct

SEQ ID NO: 221869 - DNA, 25 bp, Artificial
  Probe
tctgggtccatgcttcagaaggggt

SEQ ID NO: 221870 - DNA, 25 bp, Artificial
  Probe
tgtcatacaaagaatcagtaaagac

SEQ ID NO: 221871 - DNA, 25 bp, Artificial
  Probe
gactgtcatacaaagaatcagtaaa

SEQ ID NO: 221872 - DNA, 25 bp, Artificial
  Probe
ccacatttcctgtttgattctatgg

SEQ ID NO: 221873 - DNA, 25 bp, Artificial
  Probe
tttgtctgagtctgggtccatgctt

SEQ ID NO: 221874 - DNA, 25 bp, Artificial
  Probe
gtagacttctatcaatggaaaatct

SEQ ID NO: 221875 - DNA, 25 bp, Artificial
  Probe
agtagacttctatcaatggaaaatc

SEQ ID NO: 221876 - DNA, 25 bp, Artificial
  Probe
ccatgcttcagaaggggtaaggtga

SEQ ID NO: 221877 - DNA, 25 bp, Artificial
  Probe
aagcctttgtctgagtctgggtcca

SEQ ID NO: 221878 - DNA, 25 bp, Artificial
  Probe
gtgtttgaagcctttgtctgagtct

SEQ ID NO: 221879 - DNA, 25 bp, Artificial
  Probe
atcaatggaaaatctgccctctgcg

SEQ ID NO: 221880 - DNA, 25 bp, Artificial
  Probe
ctctgcgctgggaagtgagccagcc

SEQ ID NO: 221881 - DNA, 25 bp, Artificial
  Probe
ctaaccttctcaagctctggtgttt

SEQ ID NO: 221882 - DNA, 25 bp, Artificial
  Probe
gctctggtgtttgaagcctttgtct

SEQ ID NO: 221883 - DNA, 25 bp, Artificial
  Probe
gcgctgggaagtgagccagccaatc

SEQ ID NO: 221884 - DNA, 25 bp, Artificial
  Probe
gaacgtccatacacctactgccagg

SEQ ID NO: 221885 - DNA, 25 bp, Artificial
  Probe
tttttctcttccttcactctggagg

SEQ ID NO: 221886 - DNA, 25 bp, Artificial
  Probe
ccagaacacggcatttggcaccttt

SEQ ID NO: 221887 - DNA, 25 bp, Artificial
  Probe
acccaccttggcaccagcttgggga

SEQ ID NO: 221888 - DNA, 25 bp, Artificial
  Probe
ggaatttcctctagacacagcaaac

SEQ ID NO: 221889 - DNA, 25 bp, Artificial
  Probe
gaatggaactcacaagagagcaaac

SEQ ID NO: 221890 - DNA, 25 bp, Artificial
  Probe
tgccacgggtgctgcccttggctca

SEQ ID NO: 221891 - DNA, 25 bp, Artificial
  Probe
tgtgcacgtagaacgcaaaaccctt

SEQ ID NO: 221892 - DNA, 25 bp, Artificial
  Probe
ccctgtaaggttgagaggcggatct

SEQ ID NO: 221893 - DNA, 25 bp, Artificial
  Probe
tacctgtctggcaaggataagtggg

SEQ ID NO: 221894 - DNA, 25 bp, Artificial
  Probe
ggctcagaggccagagtgcccacta

SEQ ID NO: 221895 - DNA, 25 bp, Artificial
  Probe
acataacttcatttggctttaagtg

SEQ ID NO: 221896 - DNA, 25 bp, Artificial
  Probe
cttcatttggctttaagtgtctgag

SEQ ID NO: 221897 - DNA, 25 bp, Artificial
  Probe
tcacatgacagttggcttggcgttg

SEQ ID NO: 221898 - DNA, 25 bp, Artificial
  Probe
gttgtagtggccttagctttaggcg

SEQ ID NO: 221899 - DNA, 25 bp, Artificial
  Probe
taaggtttcctagctgtggaacagg

SEQ ID NO: 221900 - DNA, 25 bp, Artificial
  Probe
ccttcactctggagggaaatggaat

SEQ ID NO: 221901 - DNA, 25 bp, Artificial
  Probe
ccaacgcacacgaggccacgtatgt

SEQ ID NO: 221902 - DNA, 25 bp, Artificial
  Probe
ttgctggttctgagccctggggctc

SEQ ID NO: 221903 - DNA, 25 bp, Artificial
  Probe
gcaacctcataaatcacatgggaat

SEQ ID NO: 221904 - DNA, 25 bp, Artificial
  Probe
agctctgactttgactgttaacatc

SEQ ID NO: 221905 - DNA, 25 bp, Artificial
  Probe
ggacctctggccttacaaagttgct

SEQ ID NO: 221906 - DNA, 25 bp, Artificial
  Probe
tcagtctgtcccaattgccaataga

SEQ ID NO: 221907 - DNA, 25 bp, Artificial
  Probe
gtcctctaggcttggcccattcttc

SEQ ID NO: 221908 - DNA, 25 bp, Artificial
  Probe
agagaaagctaacatctcagacaca

SEQ ID NO: 221909 - DNA, 25 bp, Artificial
  Probe
aaatcacatgggaatttcctctaga

SEQ ID NO: 221910 - DNA, 25 bp, Artificial
  Probe
caaagttacagttacctgtctggca

SEQ ID NO: 221911 - DNA, 25 bp, Artificial
  Probe
ctcagctctgactttgactgttaac

SEQ ID NO: 221912 - DNA, 25 bp, Artificial
  Probe
gctgccacgggtgctgcccttggct

SEQ ID NO: 221913 - DNA, 25 bp, Artificial
  Probe
gccaggcaacctcataaatcacatg

SEQ ID NO: 221914 - DNA, 25 bp, Artificial
  Probe
gcggatctgggtacgcgtctacagt

SEQ ID NO: 221915 - DNA, 25 bp, Artificial
  Probe
ccttggctcacttatgtggtcgcct

SEQ ID NO: 221916 - DNA, 25 bp, Artificial
  Probe
gcatttggcaccttttccccacttg

SEQ ID NO: 221917 - DNA, 25 bp, Artificial
  Probe
ttaggaaatgcctttctgatcccag

SEQ ID NO: 221918 - DNA, 25 bp, Artificial
  Probe
ccactggctcagctgcagacactaa

SEQ ID NO: 221919 - DNA, 25 bp, Artificial
  Probe
cattaagtcctctaggcttggccca

SEQ ID NO: 221920 - DNA, 25 bp, Artificial
  Probe
tctggcgcccctttggccatgggca

SEQ ID NO: 221921 - DNA, 25 bp, Artificial
  Probe
gtcccaattgccaatagaaaagcta

SEQ ID NO: 221922 - DNA, 25 bp, Artificial
  Probe
aggatccctgctacagctctggcgc

SEQ ID NO: 221923 - DNA, 25 bp, Artificial
  Probe
ctttaggcgaaggagcttgctggat

SEQ ID NO: 221924 - DNA, 25 bp, Artificial
  Probe
caaggcagacagtttaggtgcctaa

SEQ ID NO: 221925 - DNA, 25 bp, Artificial
  Probe
gagccctggggctccaacctctgga

SEQ ID NO: 221926 - DNA, 25 bp, Artificial
  Probe
cccaggagctcagctctgactttga

SEQ ID NO: 221927 - DNA, 25 bp, Artificial
  Probe
cccctttggccatgggcatgcttgc

SEQ ID NO: 221928 - DNA, 25 bp, Artificial
  Probe
caagactactatgaggtggtacccc

SEQ ID NO: 221929 - DNA, 25 bp, Artificial
  Probe
gaatctctcatgtgcctgtctgtag

SEQ ID NO: 221930 - DNA, 25 bp, Artificial
  Probe
ggcaatggcgcaaccctgaggactt

SEQ ID NO: 221931 - DNA, 25 bp, Artificial
  Probe
gcagcactgctgtggagttccctgg

SEQ ID NO: 221932 - DNA, 25 bp, Artificial
  Probe
gcgtcctcctcgtgggcagtctcgg

SEQ ID NO: 221933 - DNA, 25 bp, Artificial
  Probe
atggcgcaaccctgaggacttcccg

SEQ ID NO: 221934 - DNA, 25 bp, Artificial
  Probe
agcactgctgtggagttccctggca

SEQ ID NO: 221935 - DNA, 25 bp, Artificial
  Probe
ctggcagccaggacaagcaggcttg

SEQ ID NO: 221936 - DNA, 25 bp, Artificial
  Probe
tcctcgtgggcagtctcggatacat

SEQ ID NO: 221937 - DNA, 25 bp, Artificial
  Probe
gcagtctcggatacattggcttaaa

SEQ ID NO: 221938 - DNA, 25 bp, Artificial
  Probe
tggcagcactgctgtggagttccct

SEQ ID NO: 221939 - DNA, 25 bp, Artificial
  Probe
gcaggcttggcaatggcgcaaccct

SEQ ID NO: 221940 - DNA, 25 bp, Artificial
  Probe
agcaggcttggcaatggcgcaaccc

SEQ ID NO: 221941 - DNA, 25 bp, Artificial
  Probe
gatacattggcttaaacagggctgc

SEQ ID NO: 221942 - DNA, 25 bp, Artificial
  Probe
cgcaaccctgaggacttcccggagg

SEQ ID NO: 221943 - DNA, 25 bp, Artificial
  Probe
gccaggacaagcaggcttggcaatg

SEQ ID NO: 221944 - DNA, 25 bp, Artificial
  Probe
cactgctgtggagttccctggcagc

SEQ ID NO: 221945 - DNA, 25 bp, Artificial
  Probe
aacagggctgcctggcacttgtgcc

SEQ ID NO: 221946 - DNA, 25 bp, Artificial
  Probe
cagcactgctgtggagttccctggc

SEQ ID NO: 221947 - DNA, 25 bp, Artificial
  Probe
tccctggcagccaggacaagcaggc

SEQ ID NO: 221948 - DNA, 25 bp, Artificial
  Probe
acgccctgtggcagcactgctgtgg

SEQ ID NO: 221949 - DNA, 25 bp, Artificial
  Probe
actgctgtggagttccctggcagcc

SEQ ID NO: 221950 - DNA, 25 bp, Artificial
  Probe
cgccctgtggcagcactgctgtgga

SEQ ID NO: 221951 - DNA, 25 bp, Artificial
  Probe
ctgctgtggagttccctggcagcca

SEQ ID NO: 221952 - DNA, 25 bp, Artificial
  Probe
cttaaacagggctgcctggcacttg

SEQ ID NO: 221953 - DNA, 25 bp, Artificial
  Probe
gagttccctggcagccaggacaagc

SEQ ID NO: 221954 - DNA, 25 bp, Artificial
  Probe
agcgtcctcctcgtgggcagtctcg

SEQ ID NO: 221955 - DNA, 25 bp, Artificial
  Probe
ccctgtggcagcactgctgtggagt

SEQ ID NO: 221956 - DNA, 25 bp, Artificial
  Probe
tcgtgggcagtctcggatacattgg

SEQ ID NO: 221957 - DNA, 25 bp, Artificial
  Probe
ctcctcgtgggcagtctcggataca

SEQ ID NO: 221958 - DNA, 25 bp, Artificial
  Probe
cagtctcggatacattggcttaaac

SEQ ID NO: 221959 - DNA, 25 bp, Artificial
  Probe
tgtggagttccctggcagccaggac

SEQ ID NO: 221960 - DNA, 25 bp, Artificial
  Probe
tctcggatacattggcttaaacagg

SEQ ID NO: 221961 - DNA, 25 bp, Artificial
  Probe
atacattggcttaaacagggctgcc

SEQ ID NO: 221962 - DNA, 25 bp, Artificial
  Probe
ggatacattggcttaaacagggctg

SEQ ID NO: 221963 - DNA, 25 bp, Artificial
  Probe
tggcgcaaccctgaggacttcccgg

SEQ ID NO: 221964 - DNA, 25 bp, Artificial
  Probe
gcagccaggacaagcaggcttggca

SEQ ID NO: 221965 - DNA, 25 bp, Artificial
  Probe
gcgcaaccctgaggacttcccggag

SEQ ID NO: 221966 - DNA, 25 bp, Artificial
  Probe
acattggcttaaacagggctgcctg

SEQ ID NO: 221967 - DNA, 25 bp, Artificial
  Probe
agccaggacaagcaggcttggcaat

SEQ ID NO: 221968 - DNA, 25 bp, Artificial
  Probe
cattggcttaaacagggctgcctgg

SEQ ID NO: 221969 - DNA, 25 bp, Artificial
  Probe
attggcttaaacagggctgcctggc

SEQ ID NO: 221970 - DNA, 25 bp, Artificial
  Probe
ctcgtgggcagtctcggatacattg

SEQ ID NO: 221971 - DNA, 25 bp, Artificial
  Probe
cgtctctgggaagcttccccagcgt

SEQ ID NO: 221972 - DNA, 25 bp, Artificial
  Probe
gacaagcaggcttggcaatggcgca

SEQ ID NO: 221973 - DNA, 25 bp, Artificial
  Probe
cctgtggcagcactgctgtggagtt

SEQ ID NO: 221974 - DNA, 25 bp, Artificial
  Probe
gggcagtctcggatacattggctta

SEQ ID NO: 221975 - DNA, 25 bp, Artificial
  Probe
tggcaatggcgcaaccctgaggact

SEQ ID NO: 221976 - DNA, 25 bp, Artificial
  Probe
ctgatggcctggtccgctcctgaag

SEQ ID NO: 221977 - DNA, 25 bp, Artificial
  Probe
aggagaagatccagccacctatgga

SEQ ID NO: 221978 - DNA, 25 bp, Artificial
  Probe
tcctgatggcctggtccgctcctga

SEQ ID NO: 221979 - DNA, 25 bp, Artificial
  Probe
agcctgagcccctgatcatcaatga

SEQ ID NO: 221980 - DNA, 25 bp, Artificial
  Probe
acaatctcctgatggcctggtccgc

SEQ ID NO: 221981 - DNA, 25 bp, Artificial
  Probe
cagggcaaagccaactggaaaacat

SEQ ID NO: 221982 - DNA, 25 bp, Artificial
  Probe
ctgaagagcctgagcccctgatcat

SEQ ID NO: 221983 - DNA, 25 bp, Artificial
  Probe
ctcaaaccccaatggtattgcagaa

SEQ ID NO: 221984 - DNA, 25 bp, Artificial
  Probe
attcgttacttcaggcaaaaggcat

SEQ ID NO: 221985 - DNA, 25 bp, Artificial
  Probe
gaagatccagccacctatggacaat

SEQ ID NO: 221986 - DNA, 25 bp, Artificial
  Probe
tcctgaagagcctgagcccctgatc

SEQ ID NO: 221987 - DNA, 25 bp, Artificial
  Probe
tggtgggcactttctcaattcgtta

SEQ ID NO: 221988 - DNA, 25 bp, Artificial
  Probe
tgtccacagggcaaagccaactgga

SEQ ID NO: 221989 - DNA, 25 bp, Artificial
  Probe
acttcaggcaaaaggcatttactct

SEQ ID NO: 221990 - DNA, 25 bp, Artificial
  Probe
catttgcatcgctatcatcgtggtg

SEQ ID NO: 221991 - DNA, 25 bp, Artificial
  Probe
gtattgcagaactattccagatcca

SEQ ID NO: 221992 - DNA, 25 bp, Artificial
  Probe
gaagtcctctaccaaatgatcccag

SEQ ID NO: 221993 - DNA, 25 bp, Artificial
  Probe
atcccagtaggcagacaaccctatt

SEQ ID NO: 221994 - DNA, 25 bp, Artificial
  Probe
agggaattttgtccacagggcaaag

SEQ ID NO: 221995 - DNA, 25 bp, Artificial
  Probe
agaagtaccccattatggaggagaa

SEQ ID NO: 221996 - DNA, 25 bp, Artificial
  Probe
aacattcgtgatatcaagcatttgc

SEQ ID NO: 221997 - DNA, 25 bp, Artificial
  Probe
gatccagccacctatggacaatctc

SEQ ID NO: 221998 - DNA, 25 bp, Artificial
  Probe
gctgctggtgaaagtccccaaggaa

SEQ ID NO: 221999 - DNA, 25 bp, Artificial
  Probe
tggtccgctcctgaagagcctgagc

SEQ ID NO: 222000 - DNA, 25 bp, Artificial
  Probe
tgatatcaagcatttgcatcgctat

SEQ ID NO: 222001 - DNA, 25 bp, Artificial
  Probe
tccacagggcaaagccaactggaaa

SEQ ID NO: 222002 - DNA, 25 bp, Artificial
  Probe
caactggaaaacattcgtgatatca

SEQ ID NO: 222003 - DNA, 25 bp, Artificial
  Probe
cagcaaatagcacttgggtaaagaa

SEQ ID NO: 222004 - DNA, 25 bp, Artificial
  Probe
ttccagatccagcaaatagcacttg

SEQ ID NO: 222005 - DNA, 25 bp, Artificial
  Probe
accccaatggtattgcagaactatt

SEQ ID NO: 222006 - DNA, 25 bp, Artificial
  Probe
ctcaattcgttacttcaggcaaaag

SEQ ID NO: 222007 - DNA, 25 bp, Artificial
  Probe
aatgatcccagtaggcagacaaccc

SEQ ID NO: 222008 - DNA, 25 bp, Artificial
  Probe
gaactattccagatccagcaaatag

SEQ ID NO: 222009 - DNA, 25 bp, Artificial
  Probe
ggcagacaaccctattgcttcaaaa

SEQ ID NO: 222010 - DNA, 25 bp, Artificial
  Probe
caagcatttgcatcgctatcatcgt

SEQ ID NO: 222011 - DNA, 25 bp, Artificial
  Probe
gggcactttctcaattcgttacttc

SEQ ID NO: 222012 - DNA, 25 bp, Artificial
  Probe
aattttgtccacagggcaaagccaa

SEQ ID NO: 222013 - DNA, 25 bp, Artificial
  Probe
tcaagcatttgcatcgctatcatcg

SEQ ID NO: 222014 - DNA, 25 bp, Artificial
  Probe
ggcctggtccgctcctgaagagcct

SEQ ID NO: 222015 - DNA, 25 bp, Artificial
  Probe
atttgcatcgctatcatcgtggtgg

SEQ ID NO: 222016 - DNA, 25 bp, Artificial
  Probe
ccaaatgatcccagtaggcagacaa

SEQ ID NO: 222017 - DNA, 25 bp, Artificial
  Probe
cagccacctatggacaatctcctga

SEQ ID NO: 222018 - DNA, 25 bp, Artificial
  Probe
gcccctgatcatcaatgaagtcctc

SEQ ID NO: 222019 - DNA, 25 bp, Artificial
  Probe
ccccattatggaggagaagatccag

SEQ ID NO: 222020 - DNA, 25 bp, Artificial
  Probe
gttacttcaggcaaaaggcatttac

SEQ ID NO: 222021 - DNA, 25 bp, Artificial
  Probe
tgaaagtccccaaggaaatgaaagg

SEQ ID NO: 222022 - DNA, 25 bp, Artificial
  Probe
gacgtcgtcgccacagttcagagac

SEQ ID NO: 222023 - DNA, 25 bp, Artificial
  Probe
caggacaggcacagccctcggcagg

SEQ ID NO: 222024 - DNA, 25 bp, Artificial
  Probe
aggcagcagttctcccatgcgcaga

SEQ ID NO: 222025 - DNA, 25 bp, Artificial
  Probe
gcaacagcatcctgggaggaagtga

SEQ ID NO: 222026 - DNA, 25 bp, Artificial
  Probe
aggtatctggggtagaggccttcct

SEQ ID NO: 222027 - DNA, 25 bp, Artificial
  Probe
gtgaccagtcccacatcaggcttga

SEQ ID NO: 222028 - DNA, 25 bp, Artificial
  Probe
ctcatggatcaggtatctggggtag

SEQ ID NO: 222029 - DNA, 25 bp, Artificial
  Probe
tgaaggcaacagcatcctgggagga

SEQ ID NO: 222030 - DNA, 25 bp, Artificial
  Probe
tatctggggtagaggccttccttca

SEQ ID NO: 222031 - DNA, 25 bp, Artificial
  Probe
aggcccacaggctaggccatggaac

SEQ ID NO: 222032 - DNA, 25 bp, Artificial
  Probe
ttggctgtcctggaggcagcagttc

SEQ ID NO: 222033 - DNA, 25 bp, Artificial
  Probe
ccaccggggcgctaaggtcatccgt

SEQ ID NO: 222034 - DNA, 25 bp, Artificial
  Probe
ggaaccccggtcagcctggagcttt

SEQ ID NO: 222035 - DNA, 25 bp, Artificial
  Probe
tctctcaggaaaagcagtgaaggca

SEQ ID NO: 222036 - DNA, 25 bp, Artificial
  Probe
tgatgagccatccacatccccagga

SEQ ID NO: 222037 - DNA, 25 bp, Artificial
  Probe
cacaattcggcctctgtggaaaacg

SEQ ID NO: 222038 - DNA, 25 bp, Artificial
  Probe
ggtgcccgagtgaccagtcccacat

SEQ ID NO: 222039 - DNA, 25 bp, Artificial
  Probe
agcagttctcccatgcgcagagaga

SEQ ID NO: 222040 - DNA, 25 bp, Artificial
  Probe
aggtcatccgtgcagacccgcaggg

SEQ ID NO: 222041 - DNA, 25 bp, Artificial
  Probe
gggcgctaaggtcatccgtgcagac

SEQ ID NO: 222042 - DNA, 25 bp, Artificial
  Probe
ggcccacaggctaggccatggaacc

SEQ ID NO: 222043 - DNA, 25 bp, Artificial
  Probe
acatcaggcttgaggcggctaagtc

SEQ ID NO: 222044 - DNA, 25 bp, Artificial
  Probe
ccccggtcagcctggagctttgatt

SEQ ID NO: 222045 - DNA, 25 bp, Artificial
  Probe
caagcgccacaattcggcctctgtg

SEQ ID NO: 222046 - DNA, 25 bp, Artificial
  Probe
catcctgggaggaagtgatgagcca

SEQ ID NO: 222047 - DNA, 25 bp, Artificial
  Probe
gaggccttccttcaagtcagccagc

SEQ ID NO: 222048 - DNA, 25 bp, Artificial
  Probe
tcccatgcgcagagagacctccgtg

SEQ ID NO: 222049 - DNA, 25 bp, Artificial
  Probe
gcgctaaggtcatccgtgcagaccc

SEQ ID NO: 222050 - DNA, 25 bp, Artificial
  Probe
taaggtcatccgtgcagacccgcag

SEQ ID NO: 222051 - DNA, 25 bp, Artificial
  Probe
caggcacagccctcggcaggtgtgc

SEQ ID NO: 222052 - DNA, 25 bp, Artificial
  Probe
gggtagaggccttccttcaagtcag

SEQ ID NO: 222053 - DNA, 25 bp, Artificial
  Probe
cccacatcaggcttgaggcggctaa

SEQ ID NO: 222054 - DNA, 25 bp, Artificial
  Probe
tggagctttgattggctgtcctgga

SEQ ID NO: 222055 - DNA, 25 bp, Artificial
  Probe
gcagttctcccatgcgcagagagac

SEQ ID NO: 222056 - DNA, 25 bp, Artificial
  Probe
acaggctaggccatggaaccccggt

SEQ ID NO: 222057 - DNA, 25 bp, Artificial
  Probe
tgtcctggaggcagcagttctccca

SEQ ID NO: 222058 - DNA, 25 bp, Artificial
  Probe
accggggcgctaaggtcatccgtgc

SEQ ID NO: 222059 - DNA, 25 bp, Artificial
  Probe
atggaaccccggtcagcctggagct

SEQ ID NO: 222060 - DNA, 25 bp, Artificial
  Probe
aagcgccacaattcggcctctgtgg

SEQ ID NO: 222061 - DNA, 25 bp, Artificial
  Probe
gctaggccatggaaccccggtcagc

SEQ ID NO: 222062 - DNA, 25 bp, Artificial
  Probe
cagtcccacatcaggcttgaggcgg

SEQ ID NO: 222063 - DNA, 25 bp, Artificial
  Probe
aagtgatgagccatccacatcccca

SEQ ID NO: 222064 - DNA, 25 bp, Artificial
  Probe
tggctgtcctggaggcagcagttct

SEQ ID NO: 222065 - DNA, 25 bp, Artificial
  Probe
atcctgggaggaagtgatgagccat

SEQ ID NO: 222066 - DNA, 25 bp, Artificial
  Probe
gcttgaggcggctaagtctcatgga

SEQ ID NO: 222067 - DNA, 25 bp, Artificial
  Probe
gtcgccacagttcagagaccttctc

SEQ ID NO: 222068 - DNA, 25 bp, Artificial
  Probe
ccccaggctctgaggcggacagctt

SEQ ID NO: 222069 - DNA, 25 bp, Artificial
  Probe
aggagtccgcaatagcccccaggct

SEQ ID NO: 222070 - DNA, 25 bp, Artificial
  Probe
acggaacagggcatgagcagaagca

SEQ ID NO: 222071 - DNA, 25 bp, Artificial
  Probe
tcatcccatgggtggcacaccacaa

SEQ ID NO: 222072 - DNA, 25 bp, Artificial
  Probe
gcacgagtgtcacttcacaaatatc

SEQ ID NO: 222073 - DNA, 25 bp, Artificial
  Probe
gaaagtggcaattccgctggagctg

SEQ ID NO: 222074 - DNA, 25 bp, Artificial
  Probe
agggccaatgcaaggggtacctcga

SEQ ID NO: 222075 - DNA, 25 bp, Artificial
  Probe
cggaacagggcatgagcagaagcac

SEQ ID NO: 222076 - DNA, 25 bp, Artificial
  Probe
agcttggggtcatccgatgcaaggc

SEQ ID NO: 222077 - DNA, 25 bp, Artificial
  Probe
tcacttgggtactaccgggtggaag

SEQ ID NO: 222078 - DNA, 25 bp, Artificial
  Probe
atgggtggcacaccacaagcttggg

SEQ ID NO: 222079 - DNA, 25 bp, Artificial
  Probe
agcccccaggctctgaggcggacag

SEQ ID NO: 222080 - DNA, 25 bp, Artificial
  Probe
ggtggcacaccacaagcttggggtc

SEQ ID NO: 222081 - DNA, 25 bp, Artificial
  Probe
ggtacctcgaggtagcagtatagga

SEQ ID NO: 222082 - DNA, 25 bp, Artificial
  Probe
agcctcctcacttgggtactaccgg

SEQ ID NO: 222083 - DNA, 25 bp, Artificial
  Probe
tgaaagtggcaattccgctggagct

SEQ ID NO: 222084 - DNA, 25 bp, Artificial
  Probe
gggtcatccgatgcaaggcggaccc

SEQ ID NO: 222085 - DNA, 25 bp, Artificial
  Probe
agcagaagcacgagtgtcacttcac

SEQ ID NO: 222086 - DNA, 25 bp, Artificial
  Probe
tcctcacttgggtactaccgggtgg

SEQ ID NO: 222087 - DNA, 25 bp, Artificial
  Probe
acaagcttggggtcatccgatgcaa

SEQ ID NO: 222088 - DNA, 25 bp, Artificial
  Probe
tagcagtataggagtccgcaatagc

SEQ ID NO: 222089 - DNA, 25 bp, Artificial
  Probe
atgcaaggggtacctcgaggtagca

SEQ ID NO: 222090 - DNA, 25 bp, Artificial
  Probe
ataggagtccgcaatagcccccagg

SEQ ID NO: 222091 - DNA, 25 bp, Artificial
  Probe
cccctcagggccaatgcaaggggta

SEQ ID NO: 222092 - DNA, 25 bp, Artificial
  Probe
catgagcagaagcacgagtgtcact

SEQ ID NO: 222093 - DNA, 25 bp, Artificial
  Probe
caaggggtacctcgaggtagcagta

SEQ ID NO: 222094 - DNA, 25 bp, Artificial
  Probe
ccgctggagctgtctgccaaaagaa

SEQ ID NO: 222095 - DNA, 25 bp, Artificial
  Probe
atatccaatgggtcacacatgtctt

SEQ ID NO: 222096 - DNA, 25 bp, Artificial
  Probe
gaaactgcctacagacatcagcaca

SEQ ID NO: 222097 - DNA, 25 bp, Artificial
  Probe
cccatgggtggcacaccacaagctt

SEQ ID NO: 222098 - DNA, 25 bp, Artificial
  Probe
gatgtcatagtatttggctgccggg

SEQ ID NO: 222099 - DNA, 25 bp, Artificial
  Probe
tcatccgatgcaaggcggaccccaa

SEQ ID NO: 222100 - DNA, 25 bp, Artificial
  Probe
ctaccgggtggaagctgtgcatatg

SEQ ID NO: 222101 - DNA, 25 bp, Artificial
  Probe
gaacagggcatgagcagaagcacga

SEQ ID NO: 222102 - DNA, 25 bp, Artificial
  Probe
caatgggtcacacatgtcttacaca

SEQ ID NO: 222103 - DNA, 25 bp, Artificial
  Probe
caatgcaaggggtacctcgaggtag

SEQ ID NO: 222104 - DNA, 25 bp, Artificial
  Probe
aggggtacctcgaggtagcagtata

SEQ ID NO: 222105 - DNA, 25 bp, Artificial
  Probe
gtactaccgggtggaagctgtgcat

SEQ ID NO: 222106 - DNA, 25 bp, Artificial
  Probe
tgcctacagacatcagcacagcagc

SEQ ID NO: 222107 - DNA, 25 bp, Artificial
  Probe
atgagcagaagcacgagtgtcactt

SEQ ID NO: 222108 - DNA, 25 bp, Artificial
  Probe
gtcacttcacaaatatccaatgggt

SEQ ID NO: 222109 - DNA, 25 bp, Artificial
  Probe
gtgtcacttcacaaatatccaatgg

SEQ ID NO: 222110 - DNA, 25 bp, Artificial
  Probe
tggggtcatcccatgggtggcacac

SEQ ID NO: 222111 - DNA, 25 bp, Artificial
  Probe
tggcaattccgctggagctgtctgc

SEQ ID NO: 222112 - DNA, 25 bp, Artificial
  Probe
ctcgaggtagcagtataggagtccg

SEQ ID NO: 222113 - DNA, 25 bp, Artificial
  Probe
acaccacaagcttggggtcatccga

SEQ ID NO: 222114 - DNA, 25 bp, Artificial
  Probe
aaactgccggctctctctacacgag

SEQ ID NO: 222115 - DNA, 25 bp, Artificial
  Probe
aatatctggcccagaggtgcctggc

SEQ ID NO: 222116 - DNA, 25 bp, Artificial
  Probe
atgaagctggccatccagtccttta

SEQ ID NO: 222117 - DNA, 25 bp, Artificial
  Probe
gacgtcttcaaactgccggctctct

SEQ ID NO: 222118 - DNA, 25 bp, Artificial
  Probe
gcatggcctttgagcctggtcaagg

SEQ ID NO: 222119 - DNA, 25 bp, Artificial
  Probe
cttgggcagagctttatttacttct

SEQ ID NO: 222120 - DNA, 25 bp, Artificial
  Probe
gagagcatggcctttgagcctggtc

SEQ ID NO: 222121 - DNA, 25 bp, Artificial
  Probe
agagcttgtgcttgggcagagcttt

SEQ ID NO: 222122 - DNA, 25 bp, Artificial
  Probe
ggccagcactttaagagaatcacca

SEQ ID NO: 222123 - DNA, 25 bp, Artificial
  Probe
gtgcctggcattaaatgataacatt

SEQ ID NO: 222124 - DNA, 25 bp, Artificial
  Probe
taaatgacatgacgtcttcaaactg

SEQ ID NO: 222125 - DNA, 25 bp, Artificial
  Probe
tcactgaggacaagcgctacagagc

SEQ ID NO: 222126 - DNA, 25 bp, Artificial
  Probe
tgcctgctgcccacttggctatacg

SEQ ID NO: 222127 - DNA, 25 bp, Artificial
  Probe
ttgggaacaccttggcctctactct

SEQ ID NO: 222128 - DNA, 25 bp, Artificial
  Probe
tacacgagagcatggcctttgagcc

SEQ ID NO: 222129 - DNA, 25 bp, Artificial
  Probe
ctggtgtggcactggcctccaggct

SEQ ID NO: 222130 - DNA, 25 bp, Artificial
  Probe
cagctgactttagagggaaacatgg

SEQ ID NO: 222131 - DNA, 25 bp, Artificial
  Probe
ccccataatatctggcccagaggtg

SEQ ID NO: 222132 - DNA, 25 bp, Artificial
  Probe
tagatataatagagccctcggttgt

SEQ ID NO: 222133 - DNA, 25 bp, Artificial
  Probe
ataatagagccctcggttgtggccc

SEQ ID NO: 222134 - DNA, 25 bp, Artificial
  Probe
gcctccaggctgtggccagcacttt

SEQ ID NO: 222135 - DNA, 25 bp, Artificial
  Probe
caggctgtggccagcactttaagag

SEQ ID NO: 222136 - DNA, 25 bp, Artificial
  Probe
cactttaagagaatcaccagataag

SEQ ID NO: 222137 - DNA, 25 bp, Artificial
  Probe
aggaataatccctgtccatcctgtg

SEQ ID NO: 222138 - DNA, 25 bp, Artificial
  Probe
gaattgggaacaccttggcctctac

SEQ ID NO: 222139 - DNA, 25 bp, Artificial
  Probe
gaggacaagcgctacagagcttgtg

SEQ ID NO: 222140 - DNA, 25 bp, Artificial
  Probe
acggattcaggcagggctaaatgac

SEQ ID NO: 222141 - DNA, 25 bp, Artificial
  Probe
tcccaatgaagctggccatccagtc

SEQ ID NO: 222142 - DNA, 25 bp, Artificial
  Probe
ctactctggtgaggaataatccctg

SEQ ID NO: 222143 - DNA, 25 bp, Artificial
  Probe
gcttgggcagagctttatttacttc

SEQ ID NO: 222144 - DNA, 25 bp, Artificial
  Probe
agccctcggttgtggccccataata

SEQ ID NO: 222145 - DNA, 25 bp, Artificial
  Probe
gcatcttgggccatcagcagctgac

SEQ ID NO: 222146 - DNA, 25 bp, Artificial
  Probe
gcctttgagcctggtcaaggatcct

SEQ ID NO: 222147 - DNA, 25 bp, Artificial
  Probe
gcactggcctccaggctgtggccag

SEQ ID NO: 222148 - DNA, 25 bp, Artificial
  Probe
ccatcctgtgagtgggcatcttggg

SEQ ID NO: 222149 - DNA, 25 bp, Artificial
  Probe
ggccatccagtcctttatccaatag

SEQ ID NO: 222150 - DNA, 25 bp, Artificial
  Probe
ggttgtggccccataatatctggcc

SEQ ID NO: 222151 - DNA, 25 bp, Artificial
  Probe
ttcttccacccttttgaaatgtgtg

SEQ ID NO: 222152 - DNA, 25 bp, Artificial
  Probe
ttcaggcagggctaaatgacatgac

SEQ ID NO: 222153 - DNA, 25 bp, Artificial
  Probe
aagcgctacagagcttgtgcttggg

SEQ ID NO: 222154 - DNA, 25 bp, Artificial
  Probe
gagtgggcatcttgggccatcagca

SEQ ID NO: 222155 - DNA, 25 bp, Artificial
  Probe
agcagaccagccttagccagggcac

SEQ ID NO: 222156 - DNA, 25 bp, Artificial
  Probe
cccagaggtgcctggcattaaatga

SEQ ID NO: 222157 - DNA, 25 bp, Artificial
  Probe
taggtccctggtctgtggcccctgg

SEQ ID NO: 222158 - DNA, 25 bp, Artificial
  Probe
ctcttgccctcagttttcctggtca

SEQ ID NO: 222159 - DNA, 25 bp, Artificial
  Probe
aacaccttggcctctactctggtga

SEQ ID NO: 222160 - DNA, 25 bp, Artificial
  Probe
agatgtccacctttgcctctgtggg

SEQ ID NO: 222161 - DNA, 25 bp, Artificial
  Probe
gacaacgagtacaccacagagctgg

SEQ ID NO: 222162 - DNA, 25 bp, Artificial
  Probe
ccgatttaccggacaccatctatgt

SEQ ID NO: 222163 - DNA, 25 bp, Artificial
  Probe
gcatcatccccgagaatatctgcaa

SEQ ID NO: 222164 - DNA, 25 bp, Artificial
  Probe
tatatggattttgcatcatccccga

SEQ ID NO: 222165 - DNA, 25 bp, Artificial
  Probe
gcaacatcgtcactgcctacatggc

SEQ ID NO: 222166 - DNA, 25 bp, Artificial
  Probe
cccgagaatatctgcaacatcgtca

SEQ ID NO: 222167 - DNA, 25 bp, Artificial
  Probe
ccgccagctgagtaaggaggatttg

SEQ ID NO: 222168 - DNA, 25 bp, Artificial
  Probe
gagaatatctgcaacatcgtcactg

SEQ ID NO: 222169 - DNA, 25 bp, Artificial
  Probe
ttccttcgattttcatagcctgtga

SEQ ID NO: 222170 - DNA, 25 bp, Artificial
  Probe
cggctgctacttttgtctgcccaca

SEQ ID NO: 222171 - DNA, 25 bp, Artificial
  Probe
agatctctcccgatttaccggacac

SEQ ID NO: 222172 - DNA, 25 bp, Artificial
  Probe
atccgcagagagatgtccacctttg

SEQ ID NO: 222173 - DNA, 25 bp, Artificial
  Probe
cctttgcctctgtggggactcactg

SEQ ID NO: 222174 - DNA, 25 bp, Artificial
  Probe
tccagaagtcttccactgtgaccag

SEQ ID NO: 222175 - DNA, 25 bp, Artificial
  Probe
acctgctctctagtgaccgctcgga

SEQ ID NO: 222176 - DNA, 25 bp, Artificial
  Probe
aactactctagaactgattttgcag

SEQ ID NO: 222177 - DNA, 25 bp, Artificial
  Probe
ggcacttccggaagttgtcctccgc

SEQ ID NO: 222178 - DNA, 25 bp, Artificial
  Probe
tctcacttatgatggcgcacggctc

SEQ ID NO: 222179 - DNA, 25 bp, Artificial
  Probe
ccactgccaaacttgcagttatctg

SEQ ID NO: 222180 - DNA, 25 bp, Artificial
  Probe
atggcgcacggctctggtggtattt

SEQ ID NO: 222181 - DNA, 25 bp, Artificial
  Probe
cgggctgccaccaacgtccagatgt

SEQ ID NO: 222182 - DNA, 25 bp, Artificial
  Probe
ttgttcttcaagtcctgcgtcaccc

SEQ ID NO: 222183 - DNA, 25 bp, Artificial
  Probe
ctctagaactgattttgcagattaa

SEQ ID NO: 222184 - DNA, 25 bp, Artificial
  Probe
gtgtcactaccttcaccttatgtgc

SEQ ID NO: 222185 - DNA, 25 bp, Artificial
  Probe
ctgcgaggagtgcatccagaagtct

SEQ ID NO: 222186 - DNA, 25 bp, Artificial
  Probe
ctatgttttggctctcacttatgat

SEQ ID NO: 222187 - DNA, 25 bp, Artificial
  Probe
gctcagattccttcgattttcatag

SEQ ID NO: 222188 - DNA, 25 bp, Artificial
  Probe
tccgcaaggcggagaaagccagtac

SEQ ID NO: 222189 - DNA, 25 bp, Artificial
  Probe
gtctcagatcatttttcctgctctg

SEQ ID NO: 222190 - DNA, 25 bp, Artificial
  Probe
gttgctgctgcgaggagtgcatcca

SEQ ID NO: 222191 - DNA, 25 bp, Artificial
  Probe
ctccgccagctgagtaaggaggatt

SEQ ID NO: 222192 - DNA, 25 bp, Artificial
  Probe
gacaccatctatgttttggctctca

SEQ ID NO: 222193 - DNA, 25 bp, Artificial
  Probe
gtgtcataaagatctctcccgattt

SEQ ID NO: 222194 - DNA, 25 bp, Artificial
  Probe
agcagaccatggacctcctcaacat

SEQ ID NO: 222195 - DNA, 25 bp, Artificial
  Probe
gaccgctcggaagatccgcaaggcg

SEQ ID NO: 222196 - DNA, 25 bp, Artificial
  Probe
ctgcagaacggtgtgtcataaagat

SEQ ID NO: 222197 - DNA, 25 bp, Artificial
  Probe
ccttcagcaccatccgcagagagat

SEQ ID NO: 222198 - DNA, 25 bp, Artificial
  Probe
gatttgggctttagtggccaggctc

SEQ ID NO: 222199 - DNA, 25 bp, Artificial
  Probe
gaaggcagtcaacagtctcagatca

SEQ ID NO: 222200 - DNA, 25 bp, Artificial
  Probe
ggaacaagcggcagatccatctaga

SEQ ID NO: 222201 - DNA, 25 bp, Artificial
  Probe
cgtccagatgtactatgaaatgatt

SEQ ID NO: 222202 - DNA, 25 bp, Artificial
  Probe
gcagtcaacagtctcagatcatttt

SEQ ID NO: 222203 - DNA, 25 bp, Artificial
  Probe
cagccagttccttttgttcttcaag

SEQ ID NO: 222204 - DNA, 25 bp, Artificial
  Probe
gcctacatggccacgggtgtctctc

SEQ ID NO: 222205 - DNA, 25 bp, Artificial
  Probe
cagtggtggctctgaccattttata

SEQ ID NO: 222206 - DNA, 25 bp, Artificial
  Probe
tgagagtcagcttaacagcaccgtg

SEQ ID NO: 222207 - DNA, 25 bp, Artificial
  Probe
tccacgttcttcaagggcgccatca

SEQ ID NO: 222208 - DNA, 25 bp, Artificial
  Probe
acaatgctgttcttaccctcagagg

SEQ ID NO: 222209 - DNA, 25 bp, Artificial
  Probe
ctatcctggaccaggcacttctagg

SEQ ID NO: 222210 - DNA, 25 bp, Artificial
  Probe
cctatcctggaccaggcacttctag

SEQ ID NO: 222211 - DNA, 25 bp, Artificial
  Probe
cagccttgtccttcccacttgtaga

SEQ ID NO: 222212 - DNA, 25 bp, Artificial
  Probe
aaccagttctccacgttcttcaagg

SEQ ID NO: 222213 - DNA, 25 bp, Artificial
  Probe
ctgcctcccgttaggtgctttcctg

SEQ ID NO: 222214 - DNA, 25 bp, Artificial
  Probe
gggcttttcaaagctccatctacaa

SEQ ID NO: 222215 - DNA, 25 bp, Artificial
  Probe
catggtctcactttggcctctctct

SEQ ID NO: 222216 - DNA, 25 bp, Artificial
  Probe
cttcctggattgctgctgctgttgc

SEQ ID NO: 222217 - DNA, 25 bp, Artificial
  Probe
agtcagcttaacagcaccgtggtgg

SEQ ID NO: 222218 - DNA, 25 bp, Artificial
  Probe
gatgagctccaactattgttggacc

SEQ ID NO: 222219 - DNA, 25 bp, Artificial
  Probe
cccaccgggcaggaagcctgagtgt

SEQ ID NO: 222220 - DNA, 25 bp, Artificial
  Probe
ggccttttgcctgttctccctttgg

SEQ ID NO: 222221 - DNA, 25 bp, Artificial
  Probe
catcctgctgtttagagatggactt

SEQ ID NO: 222222 - DNA, 25 bp, Artificial
  Probe
gatggacttggcttattttgtcaac

SEQ ID NO: 222223 - DNA, 25 bp, Artificial
  Probe
atctacttccacaagcccagggagt

SEQ ID NO: 222224 - DNA, 25 bp, Artificial
  Probe
agccccaggattccattttctaaag

SEQ ID NO: 222225 - DNA, 25 bp, Artificial
  Probe
gtggcttacctctccactgagctca

SEQ ID NO: 222226 - DNA, 25 bp, Artificial
  Probe
cactgagctcacgaggcagaccctg

SEQ ID NO: 222227 - DNA, 25 bp, Artificial
  Probe
ggatctgactattggctgagcccct

SEQ ID NO: 222228 - DNA, 25 bp, Artificial
  Probe
ttagagttgcccagcatctccatct

SEQ ID NO: 222229 - DNA, 25 bp, Artificial
  Probe
ttcccttttcccagaggagtctctc

SEQ ID NO: 222230 - DNA, 25 bp, Artificial
  Probe
gggcatcagactcctcagccactgt

SEQ ID NO: 222231 - DNA, 25 bp, Artificial
  Probe
ggcaccccttgctgagcccatgggg

SEQ ID NO: 222232 - DNA, 25 bp, Artificial
  Probe
gggggctcacctaaccaagcccagg

SEQ ID NO: 222233 - DNA, 25 bp, Artificial
  Probe
ggctcacctaaccaagcccaggatt

SEQ ID NO: 222234 - DNA, 25 bp, Artificial
  Probe
agcttaaggccgaagtgtcctcctc

SEQ ID NO: 222235 - DNA, 25 bp, Artificial
  Probe
cacctgtcagctggtgacatggcgg

SEQ ID NO: 222236 - DNA, 25 bp, Artificial
  Probe
gtgggcctgactgtggtctatgcct

SEQ ID NO: 222237 - DNA, 25 bp, Artificial
  Probe
gaggcagaccctggacctcctgggc

SEQ ID NO: 222238 - DNA, 25 bp, Artificial
  Probe
gagttgcccagcatctccatctggc

SEQ ID NO: 222239 - DNA, 25 bp, Artificial
  Probe
ctgtcagcgcggacagcaagcttaa

SEQ ID NO: 222240 - DNA, 25 bp, Artificial
  Probe
ctgcggttgcattgcctgacccctg

SEQ ID NO: 222241 - DNA, 25 bp, Artificial
  Probe
cgtgctcctcctgtgcatctgcagg

SEQ ID NO: 222242 - DNA, 25 bp, Artificial
  Probe
ccctccatcatcatgatggatcctg

SEQ ID NO: 222243 - DNA, 25 bp, Artificial
  Probe
caccccttgctgagcccatggggga

SEQ ID NO: 222244 - DNA, 25 bp, Artificial
  Probe
gtggggcatcagactcctcagccac

SEQ ID NO: 222245 - DNA, 25 bp, Artificial
  Probe
gcagacatgagcagtgtgagagtca

SEQ ID NO: 222246 - DNA, 25 bp, Artificial
  Probe
tctgcaggccgctaggccaggcctt

SEQ ID NO: 222247 - DNA, 25 bp, Artificial
  Probe
gacatgagcagtgtgagagtcagct

SEQ ID NO: 222248 - DNA, 25 bp, Artificial
  Probe
gggccatgccgatccatggcggtct

SEQ ID NO: 222249 - DNA, 25 bp, Artificial
  Probe
tgtcttagccctgaatgtcccttcc

SEQ ID NO: 222250 - DNA, 25 bp, Artificial
  Probe
ccacttgtagatggagatctgtcta

SEQ ID NO: 222251 - DNA, 25 bp, Artificial
  Probe
gagggacctgccagccttgtccttc

SEQ ID NO: 222252 - DNA, 25 bp, Artificial
  Probe
tgtgtactctgcaagctttggagat

SEQ ID NO: 222253 - DNA, 25 bp, Artificial
  Probe
cacccaaagagtgtgtactctgcaa

SEQ ID NO: 222254 - DNA, 25 bp, Artificial
  Probe
agcgttgtccctgcacagtgaggat

SEQ ID NO: 222255 - DNA, 25 bp, Artificial
  Probe
aatgtgagcttgtcacccaaagagt

SEQ ID NO: 222256 - DNA, 25 bp, Artificial
  Probe
atgaagtgctgtagcgttgtccctg

SEQ ID NO: 222257 - DNA, 25 bp, Artificial
  Probe
aagagtgtgtactctgcaagctttg

SEQ ID NO: 222258 - DNA, 25 bp, Artificial
  Probe
agtgctgtagcgttgtccctgcaca

SEQ ID NO: 222259 - DNA, 25 bp, Artificial
  Probe
cagttaccttttaagtaatgagaca

SEQ ID NO: 222260 - DNA, 25 bp, Artificial
  Probe
agtgtgtactctgcaagctttggag

SEQ ID NO: 222261 - DNA, 25 bp, Artificial
  Probe
attcatttaggctatggaagaaacc

SEQ ID NO: 222262 - DNA, 25 bp, Artificial
  Probe
cctgcacagtgaggatatccaagtt

SEQ ID NO: 222263 - DNA, 25 bp, Artificial
  Probe
tctgcaagctttggagatgaagtgc

SEQ ID NO: 222264 - DNA, 25 bp, Artificial
  Probe
gtccctgcacagtgaggatatccaa

SEQ ID NO: 222265 - DNA, 25 bp, Artificial
  Probe
ctgcaagctttggagatgaagtgct

SEQ ID NO: 222266 - DNA, 25 bp, Artificial
  Probe
gttcgttcttggtgccagagcgtcg

SEQ ID NO: 222267 - DNA, 25 bp, Artificial
  Probe
tatggaagaaacctaccagttacct

SEQ ID NO: 222268 - DNA, 25 bp, Artificial
  Probe
gcgttgtccctgcacagtgaggata

SEQ ID NO: 222269 - DNA, 25 bp, Artificial
  Probe
agatgaagtgctgtagcgttgtccc

SEQ ID NO: 222270 - DNA, 25 bp, Artificial
  Probe
atgagacacacatgaaaggcaaagg

SEQ ID NO: 222271 - DNA, 25 bp, Artificial
  Probe
ccaagttcgttcttggtgccagagc

SEQ ID NO: 222272 - DNA, 25 bp, Artificial
  Probe
tgtgagcttgtcacccaaagagtgt

SEQ ID NO: 222273 - DNA, 25 bp, Artificial
  Probe
ttgtcacccaaagagtgtgtactct

SEQ ID NO: 222274 - DNA, 25 bp, Artificial
  Probe
tgaggatatccaagttcgttcttgg

SEQ ID NO: 222275 - DNA, 25 bp, Artificial
  Probe
aggatatccaagttcgttcttggtg

SEQ ID NO: 222276 - DNA, 25 bp, Artificial
  Probe
agcttgtcacccaaagagtgtgtac

SEQ ID NO: 222277 - DNA, 25 bp, Artificial
  Probe
tcatttaggctatggaagaaaccta

SEQ ID NO: 222278 - DNA, 25 bp, Artificial
  Probe
tagcgttgtccctgcacagtgagga

SEQ ID NO: 222279 - DNA, 25 bp, Artificial
  Probe
actctgcaagctttggagatgaagt

SEQ ID NO: 222280 - DNA, 25 bp, Artificial
  Probe
gttaccttttaagtaatgagacaca

SEQ ID NO: 222281 - DNA, 25 bp, Artificial
  Probe
cccaaagagtgtgtactctgcaagc

SEQ ID NO: 222282 - DNA, 25 bp, Artificial
  Probe
gcagtatgcctttctttaaagataa

SEQ ID NO: 222283 - DNA, 25 bp, Artificial
  Probe
taaagcctgtggttttccaagttat

SEQ ID NO: 222284 - DNA, 25 bp, Artificial
  Probe
atgcagtatgcctttctttaaagat

SEQ ID NO: 222285 - DNA, 25 bp, Artificial
  Probe
gtgtatgcagtatgcctttctttaa

SEQ ID NO: 222286 - DNA, 25 bp, Artificial
  Probe
gacacacatgaaaggcaaaggaatg

SEQ ID NO: 222287 - DNA, 25 bp, Artificial
  Probe
tgctgtagcgttgtccctgcacagt

SEQ ID NO: 222288 - DNA, 25 bp, Artificial
  Probe
gaatgtgagcttgtcacccaaagag

SEQ ID NO: 222289 - DNA, 25 bp, Artificial
  Probe
atccaagttcgttcttggtgccaga

SEQ ID NO: 222290 - DNA, 25 bp, Artificial
  Probe
ggatatccaagttcgttcttggtgc

SEQ ID NO: 222291 - DNA, 25 bp, Artificial
  Probe
caagttcgttcttggtgccagagcg

SEQ ID NO: 222292 - DNA, 25 bp, Artificial
  Probe
ttcatttaggctatggaagaaacct

SEQ ID NO: 222293 - DNA, 25 bp, Artificial
  Probe
atatccaagttcgttcttggtgcca

SEQ ID NO: 222294 - DNA, 25 bp, Artificial
  Probe
acccaaagagtgtgtactctgcaag

SEQ ID NO: 222295 - DNA, 25 bp, Artificial
  Probe
gctgtagcgttgtccctgcacagtg

SEQ ID NO: 222296 - DNA, 25 bp, Artificial
  Probe
tgtactctgcaagctttggagatga

SEQ ID NO: 222297 - DNA, 25 bp, Artificial
  Probe
tgagacacacatgaaaggcaaagga

SEQ ID NO: 222298 - DNA, 25 bp, Artificial
  Probe
cggcagcacaaggtaagagtctaca

SEQ ID NO: 222299 - DNA, 25 bp, Artificial
  Probe
atctgagttctccatccatgggaac

SEQ ID NO: 222300 - DNA, 25 bp, Artificial
  Probe
catctttctgaaaaagggcagaagg

SEQ ID NO: 222301 - DNA, 25 bp, Artificial
  Probe
cttctctgttcaggatgctacagat

SEQ ID NO: 222302 - DNA, 25 bp, Artificial
  Probe
attatcacagggttctcagctggac

SEQ ID NO: 222303 - DNA, 25 bp, Artificial
  Probe
tccatccatgggaaccatcttggac

SEQ ID NO: 222304 - DNA, 25 bp, Artificial
  Probe
tggacagagctgagcgccctaaatg

SEQ ID NO: 222305 - DNA, 25 bp, Artificial
  Probe
tttgacatctttctgaaaaagggca

SEQ ID NO: 222306 - DNA, 25 bp, Artificial
  Probe
gtcaattatcacagggttctcagct

SEQ ID NO: 222307 - DNA, 25 bp, Artificial
  Probe
ttttgctggtttatgctgtccagct

SEQ ID NO: 222308 - DNA, 25 bp, Artificial
  Probe
cttggaagccccacagtgccctgta

SEQ ID NO: 222309 - DNA, 25 bp, Artificial
  Probe
agatttcgtagtcaattatcacagg

SEQ ID NO: 222310 - DNA, 25 bp, Artificial
  Probe
ttctcagctggacagccaaggtccc

SEQ ID NO: 222311 - DNA, 25 bp, Artificial
  Probe
gccctaaatgtttgacatctttctg

SEQ ID NO: 222312 - DNA, 25 bp, Artificial
  Probe
tctttctgaaaaagggcagaaggtc

SEQ ID NO: 222313 - DNA, 25 bp, Artificial
  Probe
agctgagcgccctaaatgtttgaca

SEQ ID NO: 222314 - DNA, 25 bp, Artificial
  Probe
tgaaggcttggaagccccacagtgc

SEQ ID NO: 222315 - DNA, 25 bp, Artificial
  Probe
cagaaggtccagcaccttcttccaa

SEQ ID NO: 222316 - DNA, 25 bp, Artificial
  Probe
gaagccccacagtgccctgtatttg

SEQ ID NO: 222317 - DNA, 25 bp, Artificial
  Probe
tttacaccactcagtaagggaaaag

SEQ ID NO: 222318 - DNA, 25 bp, Artificial
  Probe
cttccaaggtcagtaggggtagaga

SEQ ID NO: 222319 - DNA, 25 bp, Artificial
  Probe
ccatcttggacagagctgagcgccc

SEQ ID NO: 222320 - DNA, 25 bp, Artificial
  Probe
cctctccgaggagaaaaagaggagg

SEQ ID NO: 222321 - DNA, 25 bp, Artificial
  Probe
gtcttctctgttcaggatgctacag

SEQ ID NO: 222322 - DNA, 25 bp, Artificial
  Probe
ggtttttgctggtttatgctgtcca

SEQ ID NO: 222323 - DNA, 25 bp, Artificial
  Probe
gttctccatccatgggaaccatctt

SEQ ID NO: 222324 - DNA, 25 bp, Artificial
  Probe
atcttggacagagctgagcgcccta

SEQ ID NO: 222325 - DNA, 25 bp, Artificial
  Probe
gtagtcaattatcacagggttctca

SEQ ID NO: 222326 - DNA, 25 bp, Artificial
  Probe
tgttcaggatgctacagatctgagt

SEQ ID NO: 222327 - DNA, 25 bp, Artificial
  Probe
gccctgtatttgtaggaagccttgg

SEQ ID NO: 222328 - DNA, 25 bp, Artificial
  Probe
gcgccctaaatgtttgacatctttc

SEQ ID NO: 222329 - DNA, 25 bp, Artificial
  Probe
tctgttcaggatgctacagatctga

SEQ ID NO: 222330 - DNA, 25 bp, Artificial
  Probe
cttcttccaaggtcagtaggggtag

SEQ ID NO: 222331 - DNA, 25 bp, Artificial
  Probe
ctctccgaggagaaaaagaggaggt

SEQ ID NO: 222332 - DNA, 25 bp, Artificial
  Probe
caccactcagtaagggaaaaggtgt

SEQ ID NO: 222333 - DNA, 25 bp, Artificial
  Probe
acatctttctgaaaaagggcagaag

SEQ ID NO: 222334 - DNA, 25 bp, Artificial
  Probe
ttgaaggcttggaagccccacagtg

SEQ ID NO: 222335 - DNA, 25 bp, Artificial
  Probe
gcggggtctttacaccactcagtaa

SEQ ID NO: 222336 - DNA, 25 bp, Artificial
  Probe
gcttcctgcggcagcacaaggtaag

SEQ ID NO: 222337 - DNA, 25 bp, Artificial
  Probe
gctacagatctgagttctccatcca

SEQ ID NO: 222338 - DNA, 25 bp, Artificial
  Probe
tctttacaccactcagtaagggaaa

SEQ ID NO: 222339 - DNA, 25 bp, Artificial
  Probe
caccttcttccaaggtcagtagggg

SEQ ID NO: 222340 - DNA, 25 bp, Artificial
  Probe
tacagatctgagttctccatccatg

SEQ ID NO: 222341 - DNA, 25 bp, Artificial
  Probe
aggtgtacttgaagcagcagccacc

SEQ ID NO: 222342 - DNA, 25 bp, Artificial
  Probe
ttgctggtttatgctgtccagctgg

SEQ ID NO: 222343 - DNA, 25 bp, Artificial
  Probe
cccacagtgccctgtatttgtagga

SEQ ID NO: 222344 - DNA, 25 bp, Artificial
  Probe
aattgagctacactcacgctccggc

SEQ ID NO: 222345 - DNA, 25 bp, Artificial
  Probe
acacagctggtttcgccagccacaa

SEQ ID NO: 222346 - DNA, 25 bp, Artificial
  Probe
ccacaaagcaactggggaatcgaga

SEQ ID NO: 222347 - DNA, 25 bp, Artificial
  Probe
ggaatcgagatcaacgcctttgatc

SEQ ID NO: 222348 - DNA, 25 bp, Artificial
  Probe
atccggatccggtcactaaaaattg

SEQ ID NO: 222349 - DNA, 25 bp, Artificial
  Probe
ctcacagtggacttcgaggcctctg

SEQ ID NO: 222350 - DNA, 25 bp, Artificial
  Probe
ctaagcgctacaaggccaattactg

SEQ ID NO: 222351 - DNA, 25 bp, Artificial
  Probe
agcagattatctacggcaagatccc

SEQ ID NO: 222352 - DNA, 25 bp, Artificial
  Probe
accctctcacagtggacttcgaggc

SEQ ID NO: 222353 - DNA, 25 bp, Artificial
  Probe
aagcaactggggaatcgagatcaac

SEQ ID NO: 222354 - DNA, 25 bp, Artificial
  Probe
gtcacatccggatccggtcactaaa

SEQ ID NO: 222355 - DNA, 25 bp, Artificial
  Probe
gtgcaacaggccaacccacgaggct

SEQ ID NO: 222356 - DNA, 25 bp, Artificial
  Probe
tcaacgcctttgatcccagtggcac

SEQ ID NO: 222357 - DNA, 25 bp, Artificial
  Probe
ccggccactggcagagcatcgactt

SEQ ID NO: 222358 - DNA, 25 bp, Artificial
  Probe
ccggccagtgtgaatacatgttcat

SEQ ID NO: 222359 - DNA, 25 bp, Artificial
  Probe
tcccggcggaacctaggcctagact

SEQ ID NO: 222360 - DNA, 25 bp, Artificial
  Probe
acttggtgcaacaggccaacccacg

SEQ ID NO: 222361 - DNA, 25 bp, Artificial
  Probe
aaattgagctacactcacgctccgg

SEQ ID NO: 222362 - DNA, 25 bp, Artificial
  Probe
gctggtttcgccagccacaaagcaa

SEQ ID NO: 222363 - DNA, 25 bp, Artificial
  Probe
attatctacggcaagatccctggca

SEQ ID NO: 222364 - DNA, 25 bp, Artificial
  Probe
cggcaagatccctggcatggtcgtc

SEQ ID NO: 222365 - DNA, 25 bp, Artificial
  Probe
agtgagtcccgctgctgccgatacc

SEQ ID NO: 222366 - DNA, 25 bp, Artificial
  Probe
ggccaacccacgaggctctgctggg

SEQ ID NO: 222367 - DNA, 25 bp, Artificial
  Probe
agcttcgagttctagagaacacaaa

SEQ ID NO: 222368 - DNA, 25 bp, Artificial
  Probe
cgtcacatccggatccggtcactaa

SEQ ID NO: 222369 - DNA, 25 bp, Artificial
  Probe
acactcgagtgagtcccgctgctgc

SEQ ID NO: 222370 - DNA, 25 bp, Artificial
  Probe
tccggtcactaaaaattgagctaca

SEQ ID NO: 222371 - DNA, 25 bp, Artificial
  Probe
cagtggacttcgaggcctctggctg

SEQ ID NO: 222372 - DNA, 25 bp, Artificial
  Probe
gaatcgagatcaacgcctttgatcc

SEQ ID NO: 222373 - DNA, 25 bp, Artificial
  Probe
ccggcggaacctaggcctagactgc

SEQ ID NO: 222374 - DNA, 25 bp, Artificial
  Probe
actgctccggccagtgtgaatacat

SEQ ID NO: 222375 - DNA, 25 bp, Artificial
  Probe
gagatcaacgcctttgatcccagtg

SEQ ID NO: 222376 - DNA, 25 bp, Artificial
  Probe
tcatcgcacctaagcgctacaaggc

SEQ ID NO: 222377 - DNA, 25 bp, Artificial
  Probe
gtggcacagacctggctgtcacctc

SEQ ID NO: 222378 - DNA, 25 bp, Artificial
  Probe
caaggccaattactgctccggccag

SEQ ID NO: 222379 - DNA, 25 bp, Artificial
  Probe
aggccaacccacgaggctctgctgg

SEQ ID NO: 222380 - DNA, 25 bp, Artificial
  Probe
ggaacctaggcctagactgcgatga

SEQ ID NO: 222381 - DNA, 25 bp, Artificial
  Probe
tctacttcaatgacaagcagcagat

SEQ ID NO: 222382 - DNA, 25 bp, Artificial
  Probe
ggatcatcgcacctaagcgctacaa

SEQ ID NO: 222383 - DNA, 25 bp, Artificial
  Probe
caccccttcatggagcttcgagttc

SEQ ID NO: 222384 - DNA, 25 bp, Artificial
  Probe
ggccggcgtcacatccggatccggt

SEQ ID NO: 222385 - DNA, 25 bp, Artificial
  Probe
gatcccagtggcacagacctggctg

SEQ ID NO: 222386 - DNA, 25 bp, Artificial
  Probe
gcacctaagcgctacaaggccaatt

SEQ ID NO: 222387 - DNA, 25 bp, Artificial
  Probe
acacccacttggtgcaacaggccaa

SEQ ID NO: 222388 - DNA, 25 bp, Artificial
  Probe
cgctacaaggccaattactgctccg

SEQ ID NO: 222389 - DNA, 25 bp, Artificial
  Probe
cgataccctctcacagtggacttcg

SEQ ID NO: 222390 - DNA, 25 bp, Artificial
  Probe
ccaaagttcttgaggcccacttggg

SEQ ID NO: 222391 - DNA, 25 bp, Artificial
  Probe
ttgaacccctctggtggccacacag

SEQ ID NO: 222392 - DNA, 25 bp, Artificial
  Probe
ttgtcgtgggccaagccacagcctt

SEQ ID NO: 222393 - DNA, 25 bp, Artificial
  Probe
atgtccccattctggggctatatca

SEQ ID NO: 222394 - DNA, 25 bp, Artificial
  Probe
tcttaaaacaagagacagcagttgt

SEQ ID NO: 222395 - DNA, 25 bp, Artificial
  Probe
tgcctgggacattcctggagggatc

SEQ ID NO: 222396 - DNA, 25 bp, Artificial
  Probe
tcatcgctactccaaagttcttgag

SEQ ID NO: 222397 - DNA, 25 bp, Artificial
  Probe
gtagtgttacccaactttcgctcaa

SEQ ID NO: 222398 - DNA, 25 bp, Artificial
  Probe
cctttgtcccctggagaaagtggtg

SEQ ID NO: 222399 - DNA, 25 bp, Artificial
  Probe
tccacacttgtcgtgggccaagcca

SEQ ID NO: 222400 - DNA, 25 bp, Artificial
  Probe
gtgagacctttgtcccctggagaaa

SEQ ID NO: 222401 - DNA, 25 bp, Artificial
  Probe
taggccagaccatccctgtttttgc

SEQ ID NO: 222402 - DNA, 25 bp, Artificial
  Probe
ctttcgctcaaatcgccctcaagtg

SEQ ID NO: 222403 - DNA, 25 bp, Artificial
  Probe
gaagtaggccagaccatccctgttt

SEQ ID NO: 222404 - DNA, 25 bp, Artificial
  Probe
cctctggtggccacacagcatcaga

SEQ ID NO: 222405 - DNA, 25 bp, Artificial
  Probe
atgcctggccgctacaaccaggaag

SEQ ID NO: 222406 - DNA, 25 bp, Artificial
  Probe
ccatccctgtttttgccttccttgg

SEQ ID NO: 222407 - DNA, 25 bp, Artificial
  Probe
agcgtccacaacttgcacagcaggc

SEQ ID NO: 222408 - DNA, 25 bp, Artificial
  Probe
ccatggtggccctggccttcttcgt

SEQ ID NO: 222409 - DNA, 25 bp, Artificial
  Probe
agccacagcctttgaatgagacggc

SEQ ID NO: 222410 - DNA, 25 bp, Artificial
  Probe
tgacctggacaaagtagtgttaccc

SEQ ID NO: 222411 - DNA, 25 bp, Artificial
  Probe
tatcagattccagctgaaggtggag

SEQ ID NO: 222412 - DNA, 25 bp, Artificial
  Probe
acaagagacagcagttgtcgacaat

SEQ ID NO: 222413 - DNA, 25 bp, Artificial
  Probe
gccggattgtgctgtatggagactc

SEQ ID NO: 222414 - DNA, 25 bp, Artificial
  Probe
ttcttgaggcccacttgggagaccc

SEQ ID NO: 222415 - DNA, 25 bp, Artificial
  Probe
acagaagctgacaagctttgaaccc

SEQ ID NO: 222416 - DNA, 25 bp, Artificial
  Probe
tgggacattcctggagggatcatgc

SEQ ID NO: 222417 - DNA, 25 bp, Artificial
  Probe
gcttctggatgcactccttcagtac

SEQ ID NO: 222418 - DNA, 25 bp, Artificial
  Probe
tgtcccctggagaaagtggtgcctg

SEQ ID NO: 222419 - DNA, 25 bp, Artificial
  Probe
caaccaggaagtaggccagaccatc

SEQ ID NO: 222420 - DNA, 25 bp, Artificial
  Probe
agtaatctttggaaacaccagaagc

SEQ ID NO: 222421 - DNA, 25 bp, Artificial
  Probe
cagcctcagccattcagggaaccgg

SEQ ID NO: 222422 - DNA, 25 bp, Artificial
  Probe
gaaagtggtgcctgggacattcctg

SEQ ID NO: 222423 - DNA, 25 bp, Artificial
  Probe
agggatcatgcctggccgctacaac

SEQ ID NO: 222424 - DNA, 25 bp, Artificial
  Probe
caaggaccaaggattggaagtctta

SEQ ID NO: 222425 - DNA, 25 bp, Artificial
  Probe
tacacatcctatggtgtgacccctc

SEQ ID NO: 222426 - DNA, 25 bp, Artificial
  Probe
ttggagccatggtggccctggcctt

SEQ ID NO: 222427 - DNA, 25 bp, Artificial
  Probe
agtcttaaaacaagagacagcagtt

SEQ ID NO: 222428 - DNA, 25 bp, Artificial
  Probe
gcaaggaccccgtcagtgtgatcat

SEQ ID NO: 222429 - DNA, 25 bp, Artificial
  Probe
attcctggagggatcatgcctggcc

SEQ ID NO: 222430 - DNA, 25 bp, Artificial
  Probe
ggcaaagcgtccacaacttgcacag

SEQ ID NO: 222431 - DNA, 25 bp, Artificial
  Probe
agccattcagggaaccggcagcgcc

SEQ ID NO: 222432 - DNA, 25 bp, Artificial
  Probe
ttccagcctgtccacacttgtcgtg

SEQ ID NO: 222433 - DNA, 25 bp, Artificial
  Probe
cttgaggcccacttgggagacccga

SEQ ID NO: 222434 - DNA, 25 bp, Artificial
  Probe
ctccttcagtacacatcctatggtg

SEQ ID NO: 222435 - DNA, 25 bp, Artificial
  Probe
gctttgaacccctctggtggccaca

SEQ ID NO: 222436 - DNA, 25 bp, Artificial
  Probe
tttacagcggctttagctctgcaga

SEQ ID NO: 222437 - DNA, 25 bp, Artificial
  Probe
ccactgcccggctgcagtgaaataa

SEQ ID NO: 222438 - DNA, 25 bp, Artificial
  Probe
gctatcaagttagacctgagagagc

SEQ ID NO: 222439 - DNA, 25 bp, Artificial
  Probe
tgcggcatacatgtttacatgtgtg

SEQ ID NO: 222440 - DNA, 25 bp, Artificial
  Probe
ttacatgtgtgtgcacaccacacac

SEQ ID NO: 222441 - DNA, 25 bp, Artificial
  Probe
aagcactgctctaggggctcataga

SEQ ID NO: 222442 - DNA, 25 bp, Artificial
  Probe
catagatccaggagatgtatgaaac

SEQ ID NO: 222443 - DNA, 25 bp, Artificial
  Probe
gctcactgttgtctgttttacagcg

SEQ ID NO: 222444 - DNA, 25 bp, Artificial
  Probe
cacactggtgtgagccgtggtgcta

SEQ ID NO: 222445 - DNA, 25 bp, Artificial
  Probe
cccggctgcagtgaaataactttct

SEQ ID NO: 222446 - DNA, 25 bp, Artificial
  Probe
ctcactgttgtctgttttacagcgg

SEQ ID NO: 222447 - DNA, 25 bp, Artificial
  Probe
tgtttacatgtgtgtgcacaccaca

SEQ ID NO: 222448 - DNA, 25 bp, Artificial
  Probe
agccgtggtgctatcaagttagacc

SEQ ID NO: 222449 - DNA, 25 bp, Artificial
  Probe
ctgggtctctctgctctctgtgtag

SEQ ID NO: 222450 - DNA, 25 bp, Artificial
  Probe
gcggcatacatgtttacatgtgtgt

SEQ ID NO: 222451 - DNA, 25 bp, Artificial
  Probe
gaagcactgctctaggggctcatag

SEQ ID NO: 222452 - DNA, 25 bp, Artificial
  Probe
actcacactggtgtgagccgtggtg

SEQ ID NO: 222453 - DNA, 25 bp, Artificial
  Probe
gctgcctggtgctcactgttgtctg

SEQ ID NO: 222454 - DNA, 25 bp, Artificial
  Probe
acttacacacactcacactggtgtg

SEQ ID NO: 222455 - DNA, 25 bp, Artificial
  Probe
caggctgcctggtgctcactgttgt

SEQ ID NO: 222456 - DNA, 25 bp, Artificial
  Probe
tagacctgagagagcccactgcagg

SEQ ID NO: 222457 - DNA, 25 bp, Artificial
  Probe
ggttggaatcatgtcctcctgggtc

SEQ ID NO: 222458 - DNA, 25 bp, Artificial
  Probe
tgctctaggggctcatagatccagg

SEQ ID NO: 222459 - DNA, 25 bp, Artificial
  Probe
gccaggctgcctggtgctcactgtt

SEQ ID NO: 222460 - DNA, 25 bp, Artificial
  Probe
ctcacactggtgtgagccgtggtgc

SEQ ID NO: 222461 - DNA, 25 bp, Artificial
  Probe
ccgtggtgctatcaagttagacctg

SEQ ID NO: 222462 - DNA, 25 bp, Artificial
  Probe
ctctctgctctctgtgtagccctgg

SEQ ID NO: 222463 - DNA, 25 bp, Artificial
  Probe
ctaggggctcatagatccaggagat

SEQ ID NO: 222464 - DNA, 25 bp, Artificial
  Probe
agttagacctgagagagcccactgc

SEQ ID NO: 222465 - DNA, 25 bp, Artificial
  Probe
actgttgtctgttttacagcggctt

SEQ ID NO: 222466 - DNA, 25 bp, Artificial
  Probe
cacacactcacactggtgtgagccg

SEQ ID NO: 222467 - DNA, 25 bp, Artificial
  Probe
ttacacacactcacactggtgtgag

SEQ ID NO: 222468 - DNA, 25 bp, Artificial
  Probe
acatgtttacatgtgtgtgcacacc

SEQ ID NO: 222469 - DNA, 25 bp, Artificial
  Probe
gggtctctctgctctctgtgtagcc

SEQ ID NO: 222470 - DNA, 25 bp, Artificial
  Probe
ttttacagcggctttagctctgcag

SEQ ID NO: 222471 - DNA, 25 bp, Artificial
  Probe
atcatgtcctcctgggtctctctgc

SEQ ID NO: 222472 - DNA, 25 bp, Artificial
  Probe
gttggaatcatgtcctcctgggtct

SEQ ID NO: 222473 - DNA, 25 bp, Artificial
  Probe
ctcctgggtctctctgctctctgtg

SEQ ID NO: 222474 - DNA, 25 bp, Artificial
  Probe
tgtctgttttacagcggctttagct

SEQ ID NO: 222475 - DNA, 25 bp, Artificial
  Probe
agaagcactgctctaggggctcata

SEQ ID NO: 222476 - DNA, 25 bp, Artificial
  Probe
cccactgcagggtggcagcagccag

SEQ ID NO: 222477 - DNA, 25 bp, Artificial
  Probe
tgagccgtggtgctatcaagttaga

SEQ ID NO: 222478 - DNA, 25 bp, Artificial
  Probe
gtgctatcaagttagacctgagaga

SEQ ID NO: 222479 - DNA, 25 bp, Artificial
  Probe
tacagcggctttagctctgcagaaa

SEQ ID NO: 222480 - DNA, 25 bp, Artificial
  Probe
ggctcatagatccaggagatgtatg

SEQ ID NO: 222481 - DNA, 25 bp, Artificial
  Probe
gtgtgagccgtggtgctatcaagtt

SEQ ID NO: 222482 - DNA, 25 bp, Artificial
  Probe
aggatggccagtgtggcagaaaaca

SEQ ID NO: 222483 - DNA, 25 bp, Artificial
  Probe
cagctcaacgcgatatctgtcctct

SEQ ID NO: 222484 - DNA, 25 bp, Artificial
  Probe
tacacactgcctctggaaacgacta

SEQ ID NO: 222485 - DNA, 25 bp, Artificial
  Probe
agcgtgcaaggcattagaaacctga

SEQ ID NO: 222486 - DNA, 25 bp, Artificial
  Probe
cgggcctgtggctgccactaggtct

SEQ ID NO: 222487 - DNA, 25 bp, Artificial
  Probe
agcacgacaaggaattcttccaccc

SEQ ID NO: 222488 - DNA, 25 bp, Artificial
  Probe
atctgtcctctacttcgacgacagc

SEQ ID NO: 222489 - DNA, 25 bp, Artificial
  Probe
ctccccagctggaagcgtgcaaggc

SEQ ID NO: 222490 - DNA, 25 bp, Artificial
  Probe
ggtatttgacatcacagccaccagc

SEQ ID NO: 222491 - DNA, 25 bp, Artificial
  Probe
ccatgctatcgtccagacactggtt

SEQ ID NO: 222492 - DNA, 25 bp, Artificial
  Probe
agcacaccgtggttgataagcagca

SEQ ID NO: 222493 - DNA, 25 bp, Artificial
  Probe
ttcttcaaggccacggaggttcatc

SEQ ID NO: 222494 - DNA, 25 bp, Artificial
  Probe
tgttagcttccgagaccttggctgg

SEQ ID NO: 222495 - DNA, 25 bp, Artificial
  Probe
tgaaggctatgctgcctactactgt

SEQ ID NO: 222496 - DNA, 25 bp, Artificial
  Probe
atctttccaagatccccgagggaga

SEQ ID NO: 222497 - DNA, 25 bp, Artificial
  Probe
gcgctcggaacctttgaggggtaat

SEQ ID NO: 222498 - DNA, 25 bp, Artificial
  Probe
atctccgtagcatccggtccacggg

SEQ ID NO: 222499 - DNA, 25 bp, Artificial
  Probe
gaccctgaccttttgggaccgcatt

SEQ ID NO: 222500 - DNA, 25 bp, Artificial
  Probe
tctataaggactacatccgggagcg

SEQ ID NO: 222501 - DNA, 25 bp, Artificial
  Probe
tagcttccgagaccttggctggcag

SEQ ID NO: 222502 - DNA, 25 bp, Artificial
  Probe
accctcgataccaccatcgagagtt

SEQ ID NO: 222503 - DNA, 25 bp, Artificial
  Probe
ggtggtcaaccctcggcacaacctg

SEQ ID NO: 222504 - DNA, 25 bp, Artificial
  Probe
ttggtatttgacatcacagccacca

SEQ ID NO: 222505 - DNA, 25 bp, Artificial
  Probe
ccaagaggcactgaggatggccagt

SEQ ID NO: 222506 - DNA, 25 bp, Artificial
  Probe
ggcaaacaacgcagccagaaccgct

SEQ ID NO: 222507 - DNA, 25 bp, Artificial
  Probe
cagcagtgaccagaggcaggcctgc

SEQ ID NO: 222508 - DNA, 25 bp, Artificial
  Probe
tacagaaacatggtggtccgggcct

SEQ ID NO: 222509 - DNA, 25 bp, Artificial
  Probe
cccagaacaagcaacccttcatggt

SEQ ID NO: 222510 - DNA, 25 bp, Artificial
  Probe
cagaaccgctccaagactccaaaga

SEQ ID NO: 222511 - DNA, 25 bp, Artificial
  Probe
aggagccaacagaccaagcacctct

SEQ ID NO: 222512 - DNA, 25 bp, Artificial
  Probe
ccccaagctggcaggcctgattgga

SEQ ID NO: 222513 - DNA, 25 bp, Artificial
  Probe
acagccaccagcaaccactgggtgg

SEQ ID NO: 222514 - DNA, 25 bp, Artificial
  Probe
cggtttgacaacgagaccttccaga

SEQ ID NO: 222515 - DNA, 25 bp, Artificial
  Probe
ggaccgcattttttccagatcccca

SEQ ID NO: 222516 - DNA, 25 bp, Artificial
  Probe
ccctggatgggcagagcatcaaccc

SEQ ID NO: 222517 - DNA, 25 bp, Artificial
  Probe
agccgtaccatctgggcttctgagg

SEQ ID NO: 222518 - DNA, 25 bp, Artificial
  Probe
cccaccttggcgaggagccaacaga

SEQ ID NO: 222519 - DNA, 25 bp, Artificial
  Probe
gcacctgaaggctatgctgcctact

SEQ ID NO: 222520 - DNA, 25 bp, Artificial
  Probe
tgaccgcagccgagttcaggatcta

SEQ ID NO: 222521 - DNA, 25 bp, Artificial
  Probe
ctctccgtggagaccctggatgggc

SEQ ID NO: 222522 - DNA, 25 bp, Artificial
  Probe
gtccagacactggttcacttcatca

SEQ ID NO: 222523 - DNA, 25 bp, Artificial
  Probe
cctctggaaacgactagcaggaaaa

SEQ ID NO: 222524 - DNA, 25 bp, Artificial
  Probe
aggcaggcctgcaagaaacacgagc

SEQ ID NO: 222525 - DNA, 25 bp, Artificial
  Probe
cgagttcaggatctataaggactac

SEQ ID NO: 222526 - DNA, 25 bp, Artificial
  Probe
cagaaacatggtggtccgggcctgt

SEQ ID NO: 222527 - DNA, 25 bp, Artificial
  Probe
caggcctgattggacggcatggacc

SEQ ID NO: 222528 - DNA, 25 bp, Artificial
  Probe
ctatgggcatcatgggcttttgttc

SEQ ID NO: 222529 - DNA, 25 bp, Artificial
  Probe
tggacaggctcctcgccatccagta

SEQ ID NO: 222530 - DNA, 25 bp, Artificial
  Probe
ggtccgaaagagagcctgcatcatc

SEQ ID NO: 222531 - DNA, 25 bp, Artificial
  Probe
gcatcatctggaccattgctaccaa

SEQ ID NO: 222532 - DNA, 25 bp, Artificial
  Probe
tcttctggtcaatcacttccggtcc

SEQ ID NO: 222533 - DNA, 25 bp, Artificial
  Probe
gagatctttggcttcctccttccta

SEQ ID NO: 222534 - DNA, 25 bp, Artificial
  Probe
aattgcagagtgaagcagggcatca

SEQ ID NO: 222535 - DNA, 25 bp, Artificial
  Probe
aaacctttgggatctgctgcatcat

SEQ ID NO: 222536 - DNA, 25 bp, Artificial
  Probe
tgctggtatgggttggaagcatccc

SEQ ID NO: 222537 - DNA, 25 bp, Artificial
  Probe
gtgtcttcaccatctgcttcatcag

SEQ ID NO: 222538 - DNA, 25 bp, Artificial
  Probe
ttcatcagcctggacaggctcctcg

SEQ ID NO: 222539 - DNA, 25 bp, Artificial
  Probe
cccaggaaaacctttgggatctgct

SEQ ID NO: 222540 - DNA, 25 bp, Artificial
  Probe
tctaacatcaactgctgcctcgatg

SEQ ID NO: 222541 - DNA, 25 bp, Artificial
  Probe
gtgaagcagggcatcagcttgttcc

SEQ ID NO: 222542 - DNA, 25 bp, Artificial
  Probe
gttgtctctgtgtttctctaacatc

SEQ ID NO: 222543 - DNA, 25 bp, Artificial
  Probe
tcatcagcatgtacgggagtgtctt

SEQ ID NO: 222544 - DNA, 25 bp, Artificial
  Probe
catcatctggatgctggtatgggtt

SEQ ID NO: 222545 - DNA, 25 bp, Artificial
  Probe
cagcacgtggagtgcgagagtcttc

SEQ ID NO: 222546 - DNA, 25 bp, Artificial
  Probe
tcgtggtctcctttctcccagtgca

SEQ ID NO: 222547 - DNA, 25 bp, Artificial
  Probe
tgggtccgaaagagagcctgcatca

SEQ ID NO: 222548 - DNA, 25 bp, Artificial
  Probe
tcctggtaaggaacggctttatctt

SEQ ID NO: 222549 - DNA, 25 bp, Artificial
  Probe
tttggcttcctccttcctatgggca

SEQ ID NO: 222550 - DNA, 25 bp, Artificial
  Probe
gggatacaagtgcttccacaacatg

SEQ ID NO: 222551 - DNA, 25 bp, Artificial
  Probe
cttcctatgggcatcatgggctttt

SEQ ID NO: 222552 - DNA, 25 bp, Artificial
  Probe
aaggaacggctttatcttgaattgc

SEQ ID NO: 222553 - DNA, 25 bp, Artificial
  Probe
atgtctgacagcacgtggagtgcga

SEQ ID NO: 222554 - DNA, 25 bp, Artificial
  Probe
tgtgtttctctaacatcaactgctg

SEQ ID NO: 222555 - DNA, 25 bp, Artificial
  Probe
cctcttctggtcaatcacttccggt

SEQ ID NO: 222556 - DNA, 25 bp, Artificial
  Probe
tcctttctcccagtgcacctgggtt

SEQ ID NO: 222557 - DNA, 25 bp, Artificial
  Probe
cggctttatcttgaattgcagagtg

SEQ ID NO: 222558 - DNA, 25 bp, Artificial
  Probe
cttcctccttcctatgggcatcatg

SEQ ID NO: 222559 - DNA, 25 bp, Artificial
  Probe
ggcatcatgggcttttgttcctata

SEQ ID NO: 222560 - DNA, 25 bp, Artificial
  Probe
tgggttggaagcatccccatctaca

SEQ ID NO: 222561 - DNA, 25 bp, Artificial
  Probe
tcctccttcctatgggcatcatggg

SEQ ID NO: 222562 - DNA, 25 bp, Artificial
  Probe
agcatgtacgggagtgtcttcacca

SEQ ID NO: 222563 - DNA, 25 bp, Artificial
  Probe
ccatctacactttccacaggggagt

SEQ ID NO: 222564 - DNA, 25 bp, Artificial
  Probe
cattctactgagcattcagggggac

SEQ ID NO: 222565 - DNA, 25 bp, Artificial
  Probe
ccaggaaaacctttgggatctgctg

SEQ ID NO: 222566 - DNA, 25 bp, Artificial
  Probe
atctggaccattgctaccaatcttg

SEQ ID NO: 222567 - DNA, 25 bp, Artificial
  Probe
aacatcaactgctgcctcgatgttt

SEQ ID NO: 222568 - DNA, 25 bp, Artificial
  Probe
gaattgcagagtgaagcagggcatc

SEQ ID NO: 222569 - DNA, 25 bp, Artificial
  Probe
acgaccagtgggtccgaaagagagc

SEQ ID NO: 222570 - DNA, 25 bp, Artificial
  Probe
cccatctacactttccacaggggag

SEQ ID NO: 222571 - DNA, 25 bp, Artificial
  Probe
gtgtttctctaacatcaactgctgc

SEQ ID NO: 222572 - DNA, 25 bp, Artificial
  Probe
ttccccctggagatctttggcttcc

SEQ ID NO: 222573 - DNA, 25 bp, Artificial
  Probe
acagcacgtggagtgcgagagtctt

SEQ ID NO: 222574 - DNA, 25 bp, Artificial
  Probe
cagtccaggtgggaagcacacttat

SEQ ID NO: 222575 - DNA, 25 bp, Artificial
  Probe
ctttactgcaatctcactgggagat

SEQ ID NO: 222576 - DNA, 25 bp, Artificial
  Probe
tctttactgcaatctcactgggaga

SEQ ID NO: 222577 - DNA, 25 bp, Artificial
  Probe
aaattaaataaatcctgtcatttct

SEQ ID NO: 222578 - DNA, 25 bp, Artificial
  Probe
ctgcaatctcactgggagatgaaat

SEQ ID NO: 222579 - DNA, 25 bp, Artificial
  Probe
agcacacttatgtccgcagctagat

SEQ ID NO: 222580 - DNA, 25 bp, Artificial
  Probe
aaaagtctcgagaagtttctgagtt

SEQ ID NO: 222581 - DNA, 25 bp, Artificial
  Probe
tctttcctttctctttctttactgc

SEQ ID NO: 222582 - DNA, 25 bp, Artificial
  Probe
cacttatgtccgcagctagatttaa

SEQ ID NO: 222583 - DNA, 25 bp, Artificial
  Probe
tactgcaatctcactgggagatgaa

SEQ ID NO: 222584 - DNA, 25 bp, Artificial
  Probe
tgtccgcagctagatttaaaagtct

SEQ ID NO: 222585 - DNA, 25 bp, Artificial
  Probe
ttatgtccgcagctagatttaaaag

SEQ ID NO: 222586 - DNA, 25 bp, Artificial
  Probe
gtttctgagttcgtctttcctttct

SEQ ID NO: 222587 - DNA, 25 bp, Artificial
  Probe
ggaagcacacttatgtccgcagcta

SEQ ID NO: 222588 - DNA, 25 bp, Artificial
  Probe
agtccaggtgggaagcacacttatg

SEQ ID NO: 222589 - DNA, 25 bp, Artificial
  Probe
ttctttactgcaatctcactgggag

SEQ ID NO: 222590 - DNA, 25 bp, Artificial
  Probe
gatttaaaagtctcgagaagtttct

SEQ ID NO: 222591 - DNA, 25 bp, Artificial
  Probe
tctcgagaagtttctgagttcgtct

SEQ ID NO: 222592 - DNA, 25 bp, Artificial
  Probe
tctttctttactgcaatctcactgg

SEQ ID NO: 222593 - DNA, 25 bp, Artificial
  Probe
cgtcagtccaggtgggaagcacact

SEQ ID NO: 222594 - DNA, 25 bp, Artificial
  Probe
aaagtctcgagaagtttctgagttc

SEQ ID NO: 222595 - DNA, 25 bp, Artificial
  Probe
gaagtttctgagttcgtctttcctt

SEQ ID NO: 222596 - DNA, 25 bp, Artificial
  Probe
acgtcagtccaggtgggaagcacac

SEQ ID NO: 222597 - DNA, 25 bp, Artificial
  Probe
gtctcgagaagtttctgagttcgtc

SEQ ID NO: 222598 - DNA, 25 bp, Artificial
  Probe
agtctcgagaagtttctgagttcgt

SEQ ID NO: 222599 - DNA, 25 bp, Artificial
  Probe
tttctttactgcaatctcactggga

SEQ ID NO: 222600 - DNA, 25 bp, Artificial
  Probe
gggaagcacacttatgtccgcagct

SEQ ID NO: 222601 - DNA, 25 bp, Artificial
  Probe
gaagcacacttatgtccgcagctag

SEQ ID NO: 222602 - DNA, 25 bp, Artificial
  Probe
tccgcagctagatttaaaagtctcg

SEQ ID NO: 222603 - DNA, 25 bp, Artificial
  Probe
tttactgcaatctcactgggagatg

SEQ ID NO: 222604 - DNA, 25 bp, Artificial
  Probe
gcacacttatgtccgcagctagatt

SEQ ID NO: 222605 - DNA, 25 bp, Artificial
  Probe
gacgtcagtccaggtgggaagcaca

SEQ ID NO: 222606 - DNA, 25 bp, Artificial
  Probe
cttatgtccgcagctagatttaaaa

SEQ ID NO: 222607 - DNA, 25 bp, Artificial
  Probe
gtccgcagctagatttaaaagtctc

SEQ ID NO: 222608 - DNA, 25 bp, Artificial
  Probe
gtcagtccaggtgggaagcacactt

SEQ ID NO: 222609 - DNA, 25 bp, Artificial
  Probe
ctttctttactgcaatctcactggg

SEQ ID NO: 222610 - DNA, 25 bp, Artificial
  Probe
atgtccgcagctagatttaaaagtc

SEQ ID NO: 222611 - DNA, 25 bp, Artificial
  Probe
cggtgacgtcagtccaggtgggaag

SEQ ID NO: 222612 - DNA, 25 bp, Artificial
  Probe
ttactgcaatctcactgggagatga

SEQ ID NO: 222613 - DNA, 25 bp, Artificial
  Probe
agaagtttctgagttcgtctttcct

SEQ ID NO: 222614 - DNA, 25 bp, Artificial
  Probe
atctcactgggagatgaaattaaat

SEQ ID NO: 222615 - DNA, 25 bp, Artificial
  Probe
acttatgtccgcagctagatttaaa

SEQ ID NO: 222616 - DNA, 25 bp, Artificial
  Probe
actgcaatctcactgggagatgaaa

SEQ ID NO: 222617 - DNA, 25 bp, Artificial
  Probe
tatgtccgcagctagatttaaaagt

SEQ ID NO: 222618 - DNA, 25 bp, Artificial
  Probe
aagcacacttatgtccgcagctaga

SEQ ID NO: 222619 - DNA, 25 bp, Artificial
  Probe
aagtctcgagaagtttctgagttcg

SEQ ID NO: 222620 - DNA, 25 bp, Artificial
  Probe
gaattgcctctgtgctctaaccatt

SEQ ID NO: 222621 - DNA, 25 bp, Artificial
  Probe
tgatctgaagaattttggggggaca

SEQ ID NO: 222622 - DNA, 25 bp, Artificial
  Probe
aagtcatatttattttattggcatt

SEQ ID NO: 222623 - DNA, 25 bp, Artificial
  Probe
cctcattaatgagtgtggtgactgt

SEQ ID NO: 222624 - DNA, 25 bp, Artificial
  Probe
atatttattttattggcatttaata

SEQ ID NO: 222625 - DNA, 25 bp, Artificial
  Probe
ttaatgagtgtggtgactgtgtatt

SEQ ID NO: 222626 - DNA, 25 bp, Artificial
  Probe
ggttcctcattaatgagtgtggtga

SEQ ID NO: 222627 - DNA, 25 bp, Artificial
  Probe
gtagttcttggtatagagaaataag

SEQ ID NO: 222628 - DNA, 25 bp, Artificial
  Probe
aaactttatgatctgaagaattttg

SEQ ID NO: 222629 - DNA, 25 bp, Artificial
  Probe
aaaactttatgatctgaagaatttt

SEQ ID NO: 222630 - DNA, 25 bp, Artificial
  Probe
gggggttcctcattaatgagtgtgg

SEQ ID NO: 222631 - DNA, 25 bp, Artificial
  Probe
taatgagtgtggtgactgtgtatta

SEQ ID NO: 222632 - DNA, 25 bp, Artificial
  Probe
atctgaagaattttggggggacagg

SEQ ID NO: 222633 - DNA, 25 bp, Artificial
  Probe
taaagattggtagttcttggtatag

SEQ ID NO: 222634 - DNA, 25 bp, Artificial
  Probe
agtcatatttattttattggcattt

SEQ ID NO: 222635 - DNA, 25 bp, Artificial
  Probe
ctaaagattggtagttcttggtata

SEQ ID NO: 222636 - DNA, 25 bp, Artificial
  Probe
agaattgcctctgtgctctaaccat

SEQ ID NO: 222637 - DNA, 25 bp, Artificial
  Probe
acagggggttcctcattaatgagtg

SEQ ID NO: 222638 - DNA, 25 bp, Artificial
  Probe
ccttagaattgcctctgtgctctaa

SEQ ID NO: 222639 - DNA, 25 bp, Artificial
  Probe
ttattttattggcatttaatattaa

SEQ ID NO: 222640 - DNA, 25 bp, Artificial
  Probe
tttattttattggcatttaatatta

SEQ ID NO: 222641 - DNA, 25 bp, Artificial
  Probe
tcaaataaaatcccttagtttggct

SEQ ID NO: 222642 - DNA, 25 bp, Artificial
  Probe
ttggtagttcttggtatagagaaat

SEQ ID NO: 222643 - DNA, 25 bp, Artificial
  Probe
ttagaattgcctctgtgctctaacc

SEQ ID NO: 222644 - DNA, 25 bp, Artificial
  Probe
attggtagttcttggtatagagaaa

SEQ ID NO: 222645 - DNA, 25 bp, Artificial
  Probe
aagattggtagttcttggtatagag

SEQ ID NO: 222646 - DNA, 25 bp, Artificial
  Probe
gacagggggttcctcattaatgagt

SEQ ID NO: 222647 - DNA, 25 bp, Artificial
  Probe
tcctcattaatgagtgtggtgactg

SEQ ID NO: 222648 - DNA, 25 bp, Artificial
  Probe
agattggtagttcttggtatagaga

SEQ ID NO: 222649 - DNA, 25 bp, Artificial
  Probe
cttagaattgcctctgtgctctaac

SEQ ID NO: 222650 - DNA, 25 bp, Artificial
  Probe
cagggggttcctcattaatgagtgt

SEQ ID NO: 222651 - DNA, 25 bp, Artificial
  Probe
attttattggcatttaatattaatg

SEQ ID NO: 222652 - DNA, 25 bp, Artificial
  Probe
ttcctcattaatgagtgtggtgact

SEQ ID NO: 222653 - DNA, 25 bp, Artificial
  Probe
tagaattgcctctgtgctctaacca

SEQ ID NO: 222654 - DNA, 25 bp, Artificial
  Probe
gttcctcattaatgagtgtggtgac

SEQ ID NO: 222655 - DNA, 25 bp, Artificial
  Probe
atttattttattggcatttaatatt

SEQ ID NO: 222656 - DNA, 25 bp, Artificial
  Probe
tgccttagaattgcctctgtgctct

SEQ ID NO: 222657 - DNA, 25 bp, Artificial
  Probe
agtgtggtgactgtgtattaatttt

SEQ ID NO: 222658 - DNA, 25 bp, Artificial
  Probe
tggtagttcttggtatagagaaata

SEQ ID NO: 222659 - DNA, 25 bp, Artificial
  Probe
attaatgagtgtggtgactgtgtat

SEQ ID NO: 222660 - DNA, 25 bp, Artificial
  Probe
atgagtgtggtgactgtgtattaat

SEQ ID NO: 222661 - DNA, 25 bp, Artificial
  Probe
taaaactttatgatctgaagaattt

SEQ ID NO: 222662 - DNA, 25 bp, Artificial
  Probe
agggggttcctcattaatgagtgtg

SEQ ID NO: 222663 - DNA, 25 bp, Artificial
  Probe
gggttcctcattaatgagtgtggtg

SEQ ID NO: 222664 - DNA, 25 bp, Artificial
  Probe
ggacagggggttcctcattaatgag

SEQ ID NO: 222665 - DNA, 25 bp, Artificial
  Probe
ctcattaatgagtgtggtgactgtg

SEQ ID NO: 222666 - DNA, 25 bp, Artificial
  Probe
acgatggctgagctgcggtgaggag

SEQ ID NO: 222667 - DNA, 25 bp, Artificial
  Probe
caacctatcggcgcggggctgctcc

SEQ ID NO: 222668 - DNA, 25 bp, Artificial
  Probe
cgatggctgagctgcggtgaggaga

SEQ ID NO: 222669 - DNA, 25 bp, Artificial
  Probe
acaacctatcggcgcggggctgctc

SEQ ID NO: 222670 - DNA, 25 bp, Artificial
  Probe
acatcaattcccaccgatttaccgg

SEQ ID NO: 222671 - DNA, 25 bp, Artificial
  Probe
tatcggcgcggggctgctcctggca

SEQ ID NO: 222672 - DNA, 25 bp, Artificial
  Probe
atcggcgcggggctgctcctggcaa

SEQ ID NO: 222673 - DNA, 25 bp, Artificial
  Probe
gctcctggcaaagaggaccagacgc

SEQ ID NO: 222674 - DNA, 25 bp, Artificial
  Probe
agctgcggtgaggagactcgctccg

SEQ ID NO: 222675 - DNA, 25 bp, Artificial
  Probe
aggagactcgctccgcccggctgct

SEQ ID NO: 222676 - DNA, 25 bp, Artificial
  Probe
atggctgagctgcggtgaggagact

SEQ ID NO: 222677 - DNA, 25 bp, Artificial
  Probe
tgctcctggcaaagaggaccagacg

SEQ ID NO: 222678 - DNA, 25 bp, Artificial
  Probe
cacgatggctgagctgcggtgagga

SEQ ID NO: 222679 - DNA, 25 bp, Artificial
  Probe
acctatcggcgcggggctgctcctg

SEQ ID NO: 222680 - DNA, 25 bp, Artificial
  Probe
ctgcggtgaggagactcgctccgcc

SEQ ID NO: 222681 - DNA, 25 bp, Artificial
  Probe
ccacaacctatcggcgcggggctgc

SEQ ID NO: 222682 - DNA, 25 bp, Artificial
  Probe
ctgctcctggcaaagaggaccagac

SEQ ID NO: 222683 - DNA, 25 bp, Artificial
  Probe
gctgagctgcggtgaggagactcgc

SEQ ID NO: 222684 - DNA, 25 bp, Artificial
  Probe
gacatcaattcccaccgatttaccg

SEQ ID NO: 222685 - DNA, 25 bp, Artificial
  Probe
tcctggcaaagaggaccagacgcga

SEQ ID NO: 222686 - DNA, 25 bp, Artificial
  Probe
cggggctgctcctggcaaagaggac

SEQ ID NO: 222687 - DNA, 25 bp, Artificial
  Probe
ctatcggcgcggggctgctcctggc

SEQ ID NO: 222688 - DNA, 25 bp, Artificial
  Probe
ctcctggcaaagaggaccagacgcg

SEQ ID NO: 222689 - DNA, 25 bp, Artificial
  Probe
tggcgacatcaattcccaccgattt

SEQ ID NO: 222690 - DNA, 25 bp, Artificial
  Probe
ggcgacatcaattcccaccgattta

SEQ ID NO: 222691 - DNA, 25 bp, Artificial
  Probe
gagctgcggtgaggagactcgctcc

SEQ ID NO: 222692 - DNA, 25 bp, Artificial
  Probe
tgagctgcggtgaggagactcgctc

SEQ ID NO: 222693 - DNA, 25 bp, Artificial
  Probe
aacctatcggcgcggggctgctcct

SEQ ID NO: 222694 - DNA, 25 bp, Artificial
  Probe
tggctgagctgcggtgaggagactc

SEQ ID NO: 222695 - DNA, 25 bp, Artificial
  Probe
gaggagactcgctccgcccggctgc

SEQ ID NO: 222696 - DNA, 25 bp, Artificial
  Probe
cacaacctatcggcgcggggctgct

SEQ ID NO: 222697 - DNA, 25 bp, Artificial
  Probe
ggctgctcctggcaaagaggaccag

SEQ ID NO: 222698 - DNA, 25 bp, Artificial
  Probe
ctgagctgcggtgaggagactcgct

SEQ ID NO: 222699 - DNA, 25 bp, Artificial
  Probe
ctcccacaacctatcggcgcggggc

SEQ ID NO: 222700 - DNA, 25 bp, Artificial
  Probe
cctatcggcgcggggctgctcctgg

SEQ ID NO: 222701 - DNA, 25 bp, Artificial
  Probe
gcgacatcaattcccaccgatttac

SEQ ID NO: 222702 - DNA, 25 bp, Artificial
  Probe
cctcccacaacctatcggcgcgggg

SEQ ID NO: 222703 - DNA, 25 bp, Artificial
  Probe
cgacatcaattcccaccgatttacc

SEQ ID NO: 222704 - DNA, 25 bp, Artificial
  Probe
gggctgctcctggcaaagaggacca

SEQ ID NO: 222705 - DNA, 25 bp, Artificial
  Probe
ctggcgacatcaattcccaccgatt

SEQ ID NO: 222706 - DNA, 25 bp, Artificial
  Probe
gctgctcctggcaaagaggaccaga

SEQ ID NO: 222707 - DNA, 25 bp, Artificial
  Probe
ggggctgctcctggcaaagaggacc

SEQ ID NO: 222708 - DNA, 25 bp, Artificial
  Probe
cccacaacctatcggcgcggggctg

SEQ ID NO: 222709 - DNA, 25 bp, Artificial
  Probe
tcccacaacctatcggcgcggggct

SEQ ID NO: 222710 - DNA, 25 bp, Artificial
  Probe
ggctgagctgcggtgaggagactcg

SEQ ID NO: 222711 - DNA, 25 bp, Artificial
  Probe
gatggctgagctgcggtgaggagac

SEQ ID NO: 222712 - DNA, 25 bp, Artificial
  Probe
aagatcatccgaacccacgtcctga

SEQ ID NO: 222713 - DNA, 25 bp, Artificial
  Probe
actgtctagggctcagggagctgct

SEQ ID NO: 222714 - DNA, 25 bp, Artificial
  Probe
ctagagtaggagcttcctcatggtc

SEQ ID NO: 222715 - DNA, 25 bp, Artificial
  Probe
acccacgtcctgaggcggcaggaac

SEQ ID NO: 222716 - DNA, 25 bp, Artificial
  Probe
aggaaggccaagagcaccctggcct

SEQ ID NO: 222717 - DNA, 25 bp, Artificial
  Probe
cagaccttccggaagatcatccgaa

SEQ ID NO: 222718 - DNA, 25 bp, Artificial
  Probe
tcctgaggcggcaggaacccttcca

SEQ ID NO: 222719 - DNA, 25 bp, Artificial
  Probe
cccaggagcgccaggaaggccaaga

SEQ ID NO: 222720 - DNA, 25 bp, Artificial
  Probe
agggagtgcccaaggctctcctcgg

SEQ ID NO: 222721 - DNA, 25 bp, Artificial
  Probe
ggacggcggcccaatggctacactc

SEQ ID NO: 222722 - DNA, 25 bp, Artificial
  Probe
gggccctggcagctcacagcactga

SEQ ID NO: 222723 - DNA, 25 bp, Artificial
  Probe
cgaacccacgtcctgaggcggcagg

SEQ ID NO: 222724 - DNA, 25 bp, Artificial
  Probe
gcccaatggctacactctggggctg

SEQ ID NO: 222725 - DNA, 25 bp, Artificial
  Probe
ccaatctcactaagggaagagaaac

SEQ ID NO: 222726 - DNA, 25 bp, Artificial
  Probe
gaaggattccagagcatgggctcag

SEQ ID NO: 222727 - DNA, 25 bp, Artificial
  Probe
acaggatccgggagttccgccagac

SEQ ID NO: 222728 - DNA, 25 bp, Artificial
  Probe
cgcgtggctcccactttgaactaca

SEQ ID NO: 222729 - DNA, 25 bp, Artificial
  Probe
aagagaaacccaatgggcgcgtggc

SEQ ID NO: 222730 - DNA, 25 bp, Artificial
  Probe
ctggcctggaagacagcaactatga

SEQ ID NO: 222731 - DNA, 25 bp, Artificial
  Probe
cagcaactatgaagggaaggattcc

SEQ ID NO: 222732 - DNA, 25 bp, Artificial
  Probe
ccaatgggcgcgtggctcccacttt

SEQ ID NO: 222733 - DNA, 25 bp, Artificial
  Probe
cagagcatgggctcaggtcccatga

SEQ ID NO: 222734 - DNA, 25 bp, Artificial
  Probe
agagaaacccaatgggcgcgtggct

SEQ ID NO: 222735 - DNA, 25 bp, Artificial
  Probe
ggatccgggagttccgccagacctt

SEQ ID NO: 222736 - DNA, 25 bp, Artificial
  Probe
tatctctgaccaacaaagctggcct

SEQ ID NO: 222737 - DNA, 25 bp, Artificial
  Probe
tttttggttggctggaccaatctca

SEQ ID NO: 222738 - DNA, 25 bp, Artificial
  Probe
cagctcacagcactgagggagagca

SEQ ID NO: 222739 - DNA, 25 bp, Artificial
  Probe
ttgaaggtggtcttcttgggctagc

SEQ ID NO: 222740 - DNA, 25 bp, Artificial
  Probe
gctctcctcgggatgtggagcttcc

SEQ ID NO: 222741 - DNA, 25 bp, Artificial
  Probe
cttcctgagggaaagacattttaat

SEQ ID NO: 222742 - DNA, 25 bp, Artificial
  Probe
tctccccagactgtctagggctcag

SEQ ID NO: 222743 - DNA, 25 bp, Artificial
  Probe
tgggccaacggcagtgccacccatt

SEQ ID NO: 222744 - DNA, 25 bp, Artificial
  Probe
caaagctggcctggaagacagcaac

SEQ ID NO: 222745 - DNA, 25 bp, Artificial
  Probe
tgcccaaggctctcctcgggatgtg

SEQ ID NO: 222746 - DNA, 25 bp, Artificial
  Probe
gctcccactttgaactacaaagagg

SEQ ID NO: 222747 - DNA, 25 bp, Artificial
  Probe
catggtcttcagagtttgccccttc

SEQ ID NO: 222748 - DNA, 25 bp, Artificial
  Probe
gaccaacaaagctggcctggaagac

SEQ ID NO: 222749 - DNA, 25 bp, Artificial
  Probe
ggattccagagcatgggctcaggtc

SEQ ID NO: 222750 - DNA, 25 bp, Artificial
  Probe
gtgcctgggccctggcagctcacag

SEQ ID NO: 222751 - DNA, 25 bp, Artificial
  Probe
ccaagagcaccctggcctaaggggt

SEQ ID NO: 222752 - DNA, 25 bp, Artificial
  Probe
tgaggcggcaggaacccttccaggc

SEQ ID NO: 222753 - DNA, 25 bp, Artificial
  Probe
ttcctacccaggagcgccaggaagg

SEQ ID NO: 222754 - DNA, 25 bp, Artificial
  Probe
catctacgcctacaggatccgggag

SEQ ID NO: 222755 - DNA, 25 bp, Artificial
  Probe
aggtggtcttcttgggctagcccaa

SEQ ID NO: 222756 - DNA, 25 bp, Artificial
  Probe
ttgccgctgcacatcatcaactgtt

SEQ ID NO: 222757 - DNA, 25 bp, Artificial
  Probe
gatgtggagcttcctacccaggagc

SEQ ID NO: 222758 - DNA, 25 bp, Artificial
  Probe
agctacatcggcagcaaccattcct

SEQ ID NO: 222759 - DNA, 25 bp, Artificial
  Probe
gagtattctgggacctacagttgca

SEQ ID NO: 222760 - DNA, 25 bp, Artificial
  Probe
cagaaatgacttcaccggttatatc

SEQ ID NO: 222761 - DNA, 25 bp, Artificial
  Probe
ggcagcaaccattcctccctggggt

SEQ ID NO: 222762 - DNA, 25 bp, Artificial
  Probe
agggacgctgcttgcccttgtgctc

SEQ ID NO: 222763 - DNA, 25 bp, Artificial
  Probe
ggagcggttcctgtgatgatcccag

SEQ ID NO: 222764 - DNA, 25 bp, Artificial
  Probe
cgctgcttgcccttgtgctcatcgg

SEQ ID NO: 222765 - DNA, 25 bp, Artificial
  Probe
aacagagtgggctctgatcagtgta

SEQ ID NO: 222766 - DNA, 25 bp, Artificial
  Probe
acgacatcagggaagatgtgcctcc

SEQ ID NO: 222767 - DNA, 25 bp, Artificial
  Probe
cagtgtatgctacgactagatgttg

SEQ ID NO: 222768 - DNA, 25 bp, Artificial
  Probe
cagaaaatgcctactccatggctag

SEQ ID NO: 222769 - DNA, 25 bp, Artificial
  Probe
caccggttatatctgtgaaaaatgc

SEQ ID NO: 222770 - DNA, 25 bp, Artificial
  Probe
agtataaccaagtccccagtgaaga

SEQ ID NO: 222771 - DNA, 25 bp, Artificial
  Probe
tgctacgactagatgttgtccctcc

SEQ ID NO: 222772 - DNA, 25 bp, Artificial
  Probe
tccaaaacagagtgggctctgatca

SEQ ID NO: 222773 - DNA, 25 bp, Artificial
  Probe
aggaagtgcatcacgacatcaggga

SEQ ID NO: 222774 - DNA, 25 bp, Artificial
  Probe
aaccaagtccccagtgaagactttg

SEQ ID NO: 222775 - DNA, 25 bp, Artificial
  Probe
ccagaaaatgcctactccatggcta

SEQ ID NO: 222776 - DNA, 25 bp, Artificial
  Probe
aaattgtcagattcccagaaaatgc

SEQ ID NO: 222777 - DNA, 25 bp, Artificial
  Probe
ctgatcagtgtatgctacgactaga

SEQ ID NO: 222778 - DNA, 25 bp, Artificial
  Probe
gaagactttgaacgtgctcctcaga

SEQ ID NO: 222779 - DNA, 25 bp, Artificial
  Probe
gaaattgtcagattcccagaaaatg

SEQ ID NO: 222780 - DNA, 25 bp, Artificial
  Probe
tccatggctagcagaaatgacttca

SEQ ID NO: 222781 - DNA, 25 bp, Artificial
  Probe
ccaggagctacatcggcagcaacca

SEQ ID NO: 222782 - DNA, 25 bp, Artificial
  Probe
tcatagggacgctgcttgcccttgt

SEQ ID NO: 222783 - DNA, 25 bp, Artificial
  Probe
tgcccttgtgctcatcggggccatc

SEQ ID NO: 222784 - DNA, 25 bp, Artificial
  Probe
aaatgcctactccatggctagcaga

SEQ ID NO: 222785 - DNA, 25 bp, Artificial
  Probe
ttccaacatggaagggtattccaag

SEQ ID NO: 222786 - DNA, 25 bp, Artificial
  Probe
agacccagtataaccaagtccccag

SEQ ID NO: 222787 - DNA, 25 bp, Artificial
  Probe
aatgccagttctgagtattctggga

SEQ ID NO: 222788 - DNA, 25 bp, Artificial
  Probe
gtcagattcccagaaaatgcctact

SEQ ID NO: 222789 - DNA, 25 bp, Artificial
  Probe
tccctccaacagagctggaacgatc

SEQ ID NO: 222790 - DNA, 25 bp, Artificial
  Probe
catcggggccatcctcttctgctgt

SEQ ID NO: 222791 - DNA, 25 bp, Artificial
  Probe
ccttccaacatggaagggtattcca

SEQ ID NO: 222792 - DNA, 25 bp, Artificial
  Probe
tccccagtgaagactttgaacgtgc

SEQ ID NO: 222793 - DNA, 25 bp, Artificial
  Probe
ggccatcctcttctgctgtcataaa

SEQ ID NO: 222794 - DNA, 25 bp, Artificial
  Probe
caacagagctggaacgatcgcggga

SEQ ID NO: 222795 - DNA, 25 bp, Artificial
  Probe
tgaaaaatgccagttctgagtattc

SEQ ID NO: 222796 - DNA, 25 bp, Artificial
  Probe
agagtccgactctggcacccgctaa

SEQ ID NO: 222797 - DNA, 25 bp, Artificial
  Probe
gtgctcctcagagtccgactctggc

SEQ ID NO: 222798 - DNA, 25 bp, Artificial
  Probe
cactgcagtatgaatggcagaaatt

SEQ ID NO: 222799 - DNA, 25 bp, Artificial
  Probe
tagcagaaatgacttcaccggttat

SEQ ID NO: 222800 - DNA, 25 bp, Artificial
  Probe
accgccaggagctacatcggcagca

SEQ ID NO: 222801 - DNA, 25 bp, Artificial
  Probe
tgacttcaccggttatatctgtgaa

SEQ ID NO: 222802 - DNA, 25 bp, Artificial
  Probe
gctgtcatagggacgctgcttgccc

SEQ ID NO: 222803 - DNA, 25 bp, Artificial
  Probe
atatctgtgaaaaatgccagttctg

SEQ ID NO: 222804 - DNA, 25 bp, Artificial
  Probe
cagtactaggacagctgactgctga

SEQ ID NO: 222805 - DNA, 25 bp, Artificial
  Probe
gtactaggacagctgactgctgaca

SEQ ID NO: 222806 - DNA, 25 bp, Artificial
  Probe
cctcagccccaggccagtactagga

SEQ ID NO: 222807 - DNA, 25 bp, Artificial
  Probe
gccccaggccagtactaggacagct

SEQ ID NO: 222808 - DNA, 25 bp, Artificial
  Probe
aggccagtactaggacagctgactg

SEQ ID NO: 222809 - DNA, 25 bp, Artificial
  Probe
aatgggggagtgagggctgttgggg

SEQ ID NO: 222810 - DNA, 25 bp, Artificial
  Probe
ccagtactaggacagctgactgctg

SEQ ID NO: 222811 - DNA, 25 bp, Artificial
  Probe
agctgactgctgacaggatgttgta

SEQ ID NO: 222812 - DNA, 25 bp, Artificial
  Probe
agatatctacttggagtagcagcaa

SEQ ID NO: 222813 - DNA, 25 bp, Artificial
  Probe
ccaggccagtactaggacagctgac

SEQ ID NO: 222814 - DNA, 25 bp, Artificial
  Probe
aagatatctacttggagtagcagca

SEQ ID NO: 222815 - DNA, 25 bp, Artificial
  Probe
tcagccccaggccagtactaggaca

SEQ ID NO: 222816 - DNA, 25 bp, Artificial
  Probe
aggatgttgtactgccacgagagaa

SEQ ID NO: 222817 - DNA, 25 bp, Artificial
  Probe
tactaggacagctgactgctgacag

SEQ ID NO: 222818 - DNA, 25 bp, Artificial
  Probe
ccccaggccagtactaggacagctg

SEQ ID NO: 222819 - DNA, 25 bp, Artificial
  Probe
tatctacttggagtagcagcaaccc

SEQ ID NO: 222820 - DNA, 25 bp, Artificial
  Probe
atctacttggagtagcagcaacccc

SEQ ID NO: 222821 - DNA, 25 bp, Artificial
  Probe
caggatgttgtactgccacgagaga

SEQ ID NO: 222822 - DNA, 25 bp, Artificial
  Probe
gaagatatctacttggagtagcagc

SEQ ID NO: 222823 - DNA, 25 bp, Artificial
  Probe
gactgctgacaggatgttgtactgc

SEQ ID NO: 222824 - DNA, 25 bp, Artificial
  Probe
ctaggacagctgactgctgacagga

SEQ ID NO: 222825 - DNA, 25 bp, Artificial
  Probe
tgccacgagagaatgggggagtgag

SEQ ID NO: 222826 - DNA, 25 bp, Artificial
  Probe
ctacttggagtagcagcaacccccc

SEQ ID NO: 222827 - DNA, 25 bp, Artificial
  Probe
caggccagtactaggacagctgact

SEQ ID NO: 222828 - DNA, 25 bp, Artificial
  Probe
agtactaggacagctgactgctgac

SEQ ID NO: 222829 - DNA, 25 bp, Artificial
  Probe
cagccccaggccagtactaggacag

SEQ ID NO: 222830 - DNA, 25 bp, Artificial
  Probe
gatatctacttggagtagcagcaac

SEQ ID NO: 222831 - DNA, 25 bp, Artificial
  Probe
taggacagctgactgctgacaggat

SEQ ID NO: 222832 - DNA, 25 bp, Artificial
  Probe
tgactgctgacaggatgttgtactg

SEQ ID NO: 222833 - DNA, 25 bp, Artificial
  Probe
ctgactgctgacaggatgttgtact

SEQ ID NO: 222834 - DNA, 25 bp, Artificial
  Probe
gagtagcagcaacccccctctctgc

SEQ ID NO: 222835 - DNA, 25 bp, Artificial
  Probe
tgttgtactgccacgagagaatggg

SEQ ID NO: 222836 - DNA, 25 bp, Artificial
  Probe
agccccaggccagtactaggacagc

SEQ ID NO: 222837 - DNA, 25 bp, Artificial
  Probe
acagctgactgctgacaggatgttg

SEQ ID NO: 222838 - DNA, 25 bp, Artificial
  Probe
atgttgtactgccacgagagaatgg

SEQ ID NO: 222839 - DNA, 25 bp, Artificial
  Probe
tggagtagcagcaacccccctctct

SEQ ID NO: 222840 - DNA, 25 bp, Artificial
  Probe
ggccagtactaggacagctgactgc

SEQ ID NO: 222841 - DNA, 25 bp, Artificial
  Probe
gctgactgctgacaggatgttgtac

SEQ ID NO: 222842 - DNA, 25 bp, Artificial
  Probe
ggatgttgtactgccacgagagaat

SEQ ID NO: 222843 - DNA, 25 bp, Artificial
  Probe
atatctacttggagtagcagcaacc

SEQ ID NO: 222844 - DNA, 25 bp, Artificial
  Probe
actgctgacaggatgttgtactgcc

SEQ ID NO: 222845 - DNA, 25 bp, Artificial
  Probe
gggagtgagggctgttggggtcggg

SEQ ID NO: 222846 - DNA, 25 bp, Artificial
  Probe
actaggacagctgactgctgacagg

SEQ ID NO: 222847 - DNA, 25 bp, Artificial
  Probe
cccaggccagtactaggacagctga

SEQ ID NO: 222848 - DNA, 25 bp, Artificial
  Probe
ctgctgacaggatgttgtactgcca

SEQ ID NO: 222849 - DNA, 25 bp, Artificial
  Probe
aggacagctgactgctgacaggatg

SEQ ID NO: 222850 - DNA, 25 bp, Artificial
  Probe
tcactctaatcatctgtgtataagg

SEQ ID NO: 222851 - DNA, 25 bp, Artificial
  Probe
acgccttctttaacagatgcacctg

SEQ ID NO: 222852 - DNA, 25 bp, Artificial
  Probe
gatggaatctgctttgacagctagc

SEQ ID NO: 222853 - DNA, 25 bp, Artificial
  Probe
ttgtctcgagtgactagcgagagga

SEQ ID NO: 222854 - DNA, 25 bp, Artificial
  Probe
tgactgtgagagtggctttattctc

SEQ ID NO: 222855 - DNA, 25 bp, Artificial
  Probe
gataccactcaagaattgaatcttg

SEQ ID NO: 222856 - DNA, 25 bp, Artificial
  Probe
acccgttcaccctgactggtaaatg

SEQ ID NO: 222857 - DNA, 25 bp, Artificial
  Probe
aggttaaagcccactgtaactggct

SEQ ID NO: 222858 - DNA, 25 bp, Artificial
  Probe
tgacagcaattcaggggagacttga

SEQ ID NO: 222859 - DNA, 25 bp, Artificial
  Probe
ctttattctctaacgcagagtcaga

SEQ ID NO: 222860 - DNA, 25 bp, Artificial
  Probe
gaaccgagaggcagcttgtctcgag

SEQ ID NO: 222861 - DNA, 25 bp, Artificial
  Probe
ttcatatttagaacttagcagttgc

SEQ ID NO: 222862 - DNA, 25 bp, Artificial
  Probe
acacgctgttcttgatgacagcaat

SEQ ID NO: 222863 - DNA, 25 bp, Artificial
  Probe
aaggtgggaagtgtcctttgagctc

SEQ ID NO: 222864 - DNA, 25 bp, Artificial
  Probe
ttgcttttaatccagaagtgaaccc

SEQ ID NO: 222865 - DNA, 25 bp, Artificial
  Probe
tgttggcacactgattgcttttaat

SEQ ID NO: 222866 - DNA, 25 bp, Artificial
  Probe
gttgttgcaaccatatctatattgc

SEQ ID NO: 222867 - DNA, 25 bp, Artificial
  Probe
acagcagtattgcagacatgtaatg

SEQ ID NO: 222868 - DNA, 25 bp, Artificial
  Probe
gttcgttcactctaatcatctgtgt

SEQ ID NO: 222869 - DNA, 25 bp, Artificial
  Probe
agagtggctttattctctaacgcag

SEQ ID NO: 222870 - DNA, 25 bp, Artificial
  Probe
tcccaaggtgggaagtgtcctttga

SEQ ID NO: 222871 - DNA, 25 bp, Artificial
  Probe
gcctttcgtattttatcaggaaagt

SEQ ID NO: 222872 - DNA, 25 bp, Artificial
  Probe
cgtcagtgactgtgagagtggcttt

SEQ ID NO: 222873 - DNA, 25 bp, Artificial
  Probe
atcttgaaattatcaggcaggctgc

SEQ ID NO: 222874 - DNA, 25 bp, Artificial
  Probe
tccggtacaattgtgagggaaacaa

SEQ ID NO: 222875 - DNA, 25 bp, Artificial
  Probe
gaatgagcagttcgttcactctaat

SEQ ID NO: 222876 - DNA, 25 bp, Artificial
  Probe
ctgtaactggctgttaggaacaggg

SEQ ID NO: 222877 - DNA, 25 bp, Artificial
  Probe
gaacacttggcttttgatttcttta

SEQ ID NO: 222878 - DNA, 25 bp, Artificial
  Probe
ttgaatgcttacatggtcttaacca

SEQ ID NO: 222879 - DNA, 25 bp, Artificial
  Probe
tagaacttagcagttgctttgatgc

SEQ ID NO: 222880 - DNA, 25 bp, Artificial
  Probe
gttcttgatgacagcaattcagggg

SEQ ID NO: 222881 - DNA, 25 bp, Artificial
  Probe
cagcagtattgcagacatgtaatga

SEQ ID NO: 222882 - DNA, 25 bp, Artificial
  Probe
tttgtcttggaggttaaagcccact

SEQ ID NO: 222883 - DNA, 25 bp, Artificial
  Probe
aaatgcactcccaaggtgggaagtg

SEQ ID NO: 222884 - DNA, 25 bp, Artificial
  Probe
gtcctttgttgttgcaaccatatct

SEQ ID NO: 222885 - DNA, 25 bp, Artificial
  Probe
tgttgttgcaaccatatctatattg

SEQ ID NO: 222886 - DNA, 25 bp, Artificial
  Probe
ggcttttgatttctttatacaaacg

SEQ ID NO: 222887 - DNA, 25 bp, Artificial
  Probe
gatgcacctgagaggacaggaagtt

SEQ ID NO: 222888 - DNA, 25 bp, Artificial
  Probe
gagaaaatgcctttcgtattttatc

SEQ ID NO: 222889 - DNA, 25 bp, Artificial
  Probe
ctaatcatctgtgtataaggcagtt

SEQ ID NO: 222890 - DNA, 25 bp, Artificial
  Probe
ctaacgcagagtcagatgtataaag

SEQ ID NO: 222891 - DNA, 25 bp, Artificial
  Probe
ctggctaaatgtagttctggttttc

SEQ ID NO: 222892 - DNA, 25 bp, Artificial
  Probe
atattttgttacaagtcccagttag

SEQ ID NO: 222893 - DNA, 25 bp, Artificial
  Probe
aggtgaaactaccaaggccagtgta

SEQ ID NO: 222894 - DNA, 25 bp, Artificial
  Probe
aaattatcaggcaggctgcttcaac

SEQ ID NO: 222895 - DNA, 25 bp, Artificial
  Probe
tctctaacgcagagtcagatgtata

SEQ ID NO: 222896 - DNA, 25 bp, Artificial
  Probe
ctcctttcaggcacacagaaactga

SEQ ID NO: 222897 - DNA, 25 bp, Artificial
  Probe
cttccagagttggaacttaagttat

SEQ ID NO: 222898 - DNA, 25 bp, Artificial
  Probe
cgcaacattcctctcttgggccaat

SEQ ID NO: 222899 - DNA, 25 bp, Artificial
  Probe
caactccaaaagtgccttagtcaag

SEQ ID NO: 222900 - DNA, 25 bp, Artificial
  Probe
cacattgtggggacgatcacttccc

SEQ ID NO: 222901 - DNA, 25 bp, Artificial
  Probe
tgtgtggccatatgggcacaaatgc

SEQ ID NO: 222902 - DNA, 25 bp, Artificial
  Probe
ccaaaagtgccttagtcaagagcat

SEQ ID NO: 222903 - DNA, 25 bp, Artificial
  Probe
atatcggatttgtgcctgtctccgg

SEQ ID NO: 222904 - DNA, 25 bp, Artificial
  Probe
gcatttctcctttcaggcacacaga

SEQ ID NO: 222905 - DNA, 25 bp, Artificial
  Probe
tccaaaagtgccttagtcaagagca

SEQ ID NO: 222906 - DNA, 25 bp, Artificial
  Probe
tataaaaacctggagaggcccaggc

SEQ ID NO: 222907 - DNA, 25 bp, Artificial
  Probe
tttgtgcctgtctccggcattccgt

SEQ ID NO: 222908 - DNA, 25 bp, Artificial
  Probe
cagcctctctgatgggcctgtataa

SEQ ID NO: 222909 - DNA, 25 bp, Artificial
  Probe
ggccatatgggcacaaatgcagaac

SEQ ID NO: 222910 - DNA, 25 bp, Artificial
  Probe
tagtcaagagcatttctcctttcag

SEQ ID NO: 222911 - DNA, 25 bp, Artificial
  Probe
ctctcttgggccaatgaacgctaat

SEQ ID NO: 222912 - DNA, 25 bp, Artificial
  Probe
tgtataaaaacctggagaggcccag

SEQ ID NO: 222913 - DNA, 25 bp, Artificial
  Probe
ctgatgggcctgtataaaaacctgg

SEQ ID NO: 222914 - DNA, 25 bp, Artificial
  Probe
tacatggtcccctgtgtagcttgct

SEQ ID NO: 222915 - DNA, 25 bp, Artificial
  Probe
acattgtggggacgatcacttcccc

SEQ ID NO: 222916 - DNA, 25 bp, Artificial
  Probe
cacaaatgcagaacacattgtgggg

SEQ ID NO: 222917 - DNA, 25 bp, Artificial
  Probe
cacacagaaactgaaaacggtcgag

SEQ ID NO: 222918 - DNA, 25 bp, Artificial
  Probe
tgtctccggcattccgtcctaacaa

SEQ ID NO: 222919 - DNA, 25 bp, Artificial
  Probe
gtaggctatattgactccaaattca

SEQ ID NO: 222920 - DNA, 25 bp, Artificial
  Probe
cagaacacattgtggggacgatcac

SEQ ID NO: 222921 - DNA, 25 bp, Artificial
  Probe
gaggcccaggccatctgatgatgtc

SEQ ID NO: 222922 - DNA, 25 bp, Artificial
  Probe
ctgtgtgtggccatatgggcacaaa

SEQ ID NO: 222923 - DNA, 25 bp, Artificial
  Probe
ttgggccaatgaacgctaattcctg

SEQ ID NO: 222924 - DNA, 25 bp, Artificial
  Probe
aattcatcagcctctctgatgggcc

SEQ ID NO: 222925 - DNA, 25 bp, Artificial
  Probe
ggatatcggatttgtgcctgtctcc

SEQ ID NO: 222926 - DNA, 25 bp, Artificial
  Probe
ctctgatgggcctgtataaaaacct

SEQ ID NO: 222927 - DNA, 25 bp, Artificial
  Probe
gccttagtcaagagcatttctcctt

SEQ ID NO: 222928 - DNA, 25 bp, Artificial
  Probe
ttaaatatggtctatccttccagag

SEQ ID NO: 222929 - DNA, 25 bp, Artificial
  Probe
tatgtggtaggctatattgactcca

SEQ ID NO: 222930 - DNA, 25 bp, Artificial
  Probe
acaccctacatggtcccctgtgtag

SEQ ID NO: 222931 - DNA, 25 bp, Artificial
  Probe
aggggctgtcacttaccaccgcaac

SEQ ID NO: 222932 - DNA, 25 bp, Artificial
  Probe
gctaattcctggtcctccatgcacg

SEQ ID NO: 222933 - DNA, 25 bp, Artificial
  Probe
tgtgtagcttgctagcctttgtggg

SEQ ID NO: 222934 - DNA, 25 bp, Artificial
  Probe
ggcacaaatgcagaacacattgtgg

SEQ ID NO: 222935 - DNA, 25 bp, Artificial
  Probe
aaagtgccttagtcaagagcatttc

SEQ ID NO: 222936 - DNA, 25 bp, Artificial
  Probe
taattcctggtcctccatgcacgca

SEQ ID NO: 222937 - DNA, 25 bp, Artificial
  Probe
cggatttgtgcctgtctccggcatt

SEQ ID NO: 222938 - DNA, 25 bp, Artificial
  Probe
ggctgtcacttaccaccgcaacatt

SEQ ID NO: 222939 - DNA, 25 bp, Artificial
  Probe
atatgggcacaaatgcagaacacat

SEQ ID NO: 222940 - DNA, 25 bp, Artificial
  Probe
acattcctctcttgggccaatgaac

SEQ ID NO: 222941 - DNA, 25 bp, Artificial
  Probe
gccaatgaacgctaattcctggtcc

SEQ ID NO: 222942 - DNA, 25 bp, Artificial
  Probe
cagattagcaggactctgagttttg

SEQ ID NO: 222943 - DNA, 25 bp, Artificial
  Probe
gcctcagattagcaggactctgagt

SEQ ID NO: 222944 - DNA, 25 bp, Artificial
  Probe
agagctgtgtgtcaaagccagcatc

SEQ ID NO: 222945 - DNA, 25 bp, Artificial
  Probe
gctggcacagcatatggaacggaaa

SEQ ID NO: 222946 - DNA, 25 bp, Artificial
  Probe
tcaggacagactcttctggacacgt

SEQ ID NO: 222947 - DNA, 25 bp, Artificial
  Probe
catcaggacagactcttctggacac

SEQ ID NO: 222948 - DNA, 25 bp, Artificial
  Probe
ccagagctgtgtgtcaaagccagca

SEQ ID NO: 222949 - DNA, 25 bp, Artificial
  Probe
tcagattagcaggactctgagtttt

SEQ ID NO: 222950 - DNA, 25 bp, Artificial
  Probe
ttatgccagtcctggctggaatgtt

SEQ ID NO: 222951 - DNA, 25 bp, Artificial
  Probe
aaagccagcatcaggacagactctt

SEQ ID NO: 222952 - DNA, 25 bp, Artificial
  Probe
tgtcaaagccagcatcaggacagac

SEQ ID NO: 222953 - DNA, 25 bp, Artificial
  Probe
cttctggacacgtgtacaatagaat

SEQ ID NO: 222954 - DNA, 25 bp, Artificial
  Probe
gtaccttataaatgcatttgaaagc

SEQ ID NO: 222955 - DNA, 25 bp, Artificial
  Probe
tcactatggatgtaccttataaatg

SEQ ID NO: 222956 - DNA, 25 bp, Artificial
  Probe
cattcattgttagctgattcgaaat

SEQ ID NO: 222957 - DNA, 25 bp, Artificial
  Probe
gctgtgtgtcaaagccagcatcagg

SEQ ID NO: 222958 - DNA, 25 bp, Artificial
  Probe
gccagagctgtgtgtcaaagccagc

SEQ ID NO: 222959 - DNA, 25 bp, Artificial
  Probe
ggacagactcttctggacacgtgta

SEQ ID NO: 222960 - DNA, 25 bp, Artificial
  Probe
ctgtgcagccagagctgtgtgtcaa

SEQ ID NO: 222961 - DNA, 25 bp, Artificial
  Probe
ggaaactgcccagcaatgcagtttg

SEQ ID NO: 222962 - DNA, 25 bp, Artificial
  Probe
tgcagccagagctgtgtgtcaaagc

SEQ ID NO: 222963 - DNA, 25 bp, Artificial
  Probe
cccagcaatgcagtttgtgacacga

SEQ ID NO: 222964 - DNA, 25 bp, Artificial
  Probe
gtaggcctcagattagcaggactct

SEQ ID NO: 222965 - DNA, 25 bp, Artificial
  Probe
gcagccagagctgtgtgtcaaagcc

SEQ ID NO: 222966 - DNA, 25 bp, Artificial
  Probe
gattagcaggactctgagttttgac

SEQ ID NO: 222967 - DNA, 25 bp, Artificial
  Probe
tttatgccagtcctggctggaatgt

SEQ ID NO: 222968 - DNA, 25 bp, Artificial
  Probe
actcttctggacacgtgtacaatag

SEQ ID NO: 222969 - DNA, 25 bp, Artificial
  Probe
gccagtcctggctggaatgttttat

SEQ ID NO: 222970 - DNA, 25 bp, Artificial
  Probe
tgcccagcaatgcagtttgtgacac

SEQ ID NO: 222971 - DNA, 25 bp, Artificial
  Probe
gcacagcatatggaacggaaactgc

SEQ ID NO: 222972 - DNA, 25 bp, Artificial
  Probe
taatgctggcacagcatatggaacg

SEQ ID NO: 222973 - DNA, 25 bp, Artificial
  Probe
cggaaactgcccagcaatgcagttt

SEQ ID NO: 222974 - DNA, 25 bp, Artificial
  Probe
atggaacggaaactgcccagcaatg

SEQ ID NO: 222975 - DNA, 25 bp, Artificial
  Probe
ctggacacgtgtacaatagaatctt

SEQ ID NO: 222976 - DNA, 25 bp, Artificial
  Probe
tggtgtttaatgctggcacagcata

SEQ ID NO: 222977 - DNA, 25 bp, Artificial
  Probe
actatggatgtaccttataaatgca

SEQ ID NO: 222978 - DNA, 25 bp, Artificial
  Probe
ctgtgtggtgtttaatgctggcaca

SEQ ID NO: 222979 - DNA, 25 bp, Artificial
  Probe
ccagtcctggctggaatgttttatt

SEQ ID NO: 222980 - DNA, 25 bp, Artificial
  Probe
tggaacggaaactgcccagcaatgc

SEQ ID NO: 222981 - DNA, 25 bp, Artificial
  Probe
ctgcccagcaatgcagtttgtgaca

SEQ ID NO: 222982 - DNA, 25 bp, Artificial
  Probe
ggtgtttaatgctggcacagcatat

SEQ ID NO: 222983 - DNA, 25 bp, Artificial
  Probe
agactcttctggacacgtgtacaat

SEQ ID NO: 222984 - DNA, 25 bp, Artificial
  Probe
tgtgtcaaagccagcatcaggacag

SEQ ID NO: 222985 - DNA, 25 bp, Artificial
  Probe
tagcaggactctgagttttgactaa

SEQ ID NO: 222986 - DNA, 25 bp, Artificial
  Probe
actgcccagcaatgcagtttgtgac

SEQ ID NO: 222987 - DNA, 25 bp, Artificial
  Probe
aaatttatgccagtcctggctggaa

SEQ ID NO: 222988 - DNA, 25 bp, Artificial
  Probe
cctcagagcgatttgaaggtccctg

SEQ ID NO: 222989 - DNA, 25 bp, Artificial
  Probe
gagcgatttgaaggtccctgcatag

SEQ ID NO: 222990 - DNA, 25 bp, Artificial
  Probe
tgaatgccagcagagccaggaagtg

SEQ ID NO: 222991 - DNA, 25 bp, Artificial
  Probe
cggcaccctcagagcgatttgaagg

SEQ ID NO: 222992 - DNA, 25 bp, Artificial
  Probe
actccagatgggaagtcattgctaa

SEQ ID NO: 222993 - DNA, 25 bp, Artificial
  Probe
aaagctgctcaggagcaggtgctga

SEQ ID NO: 222994 - DNA, 25 bp, Artificial
  Probe
agctcgtggagatggtgaaagccaa

SEQ ID NO: 222995 - DNA, 25 bp, Artificial
  Probe
tcaggctgacagtgcggcaccctca

SEQ ID NO: 222996 - DNA, 25 bp, Artificial
  Probe
tcaggagcaggtgctgaatgccagc

SEQ ID NO: 222997 - DNA, 25 bp, Artificial
  Probe
agtgcggcaccctcagagcgatttg

SEQ ID NO: 222998 - DNA, 25 bp, Artificial
  Probe
agcaggtgctgaatgccagcagagc

SEQ ID NO: 222999 - DNA, 25 bp, Artificial
  Probe
ttcttcttctggtgtcaaaagaact

SEQ ID NO: 223000 - DNA, 25 bp, Artificial
  Probe
agaaggactgcatgaggcgatacaa

SEQ ID NO: 223001 - DNA, 25 bp, Artificial
  Probe
caagaaagctgctcaggagcaggtg

SEQ ID NO: 223002 - DNA, 25 bp, Artificial
  Probe
aaggctgtcaatctcttccccgctg

SEQ ID NO: 223003 - DNA, 25 bp, Artificial
  Probe
ttccccgctgggacaaactccagat

SEQ ID NO: 223004 - DNA, 25 bp, Artificial
  Probe
tgacagtgcggcaccctcagagcga

SEQ ID NO: 223005 - DNA, 25 bp, Artificial
  Probe
gctgtcaatctcttccccgctggga

SEQ ID NO: 223006 - DNA, 25 bp, Artificial
  Probe
ctccagatgggaagtcattgctaat

SEQ ID NO: 223007 - DNA, 25 bp, Artificial
  Probe
tgcatgaggcgatacaaggagctcg

SEQ ID NO: 223008 - DNA, 25 bp, Artificial
  Probe
agcgatttgaaggtccctgcataga

SEQ ID NO: 223009 - DNA, 25 bp, Artificial
  Probe
ctgcatgaggcgatacaaggagctc

SEQ ID NO: 223010 - DNA, 25 bp, Artificial
  Probe
gctcaggagcaggtgctgaatgcca

SEQ ID NO: 223011 - DNA, 25 bp, Artificial
  Probe
gaaggactgcatgaggcgatacaag

SEQ ID NO: 223012 - DNA, 25 bp, Artificial
  Probe
gtgctgaatgccagcagagccagga

SEQ ID NO: 223013 - DNA, 25 bp, Artificial
  Probe
accctcagagcgatttgaaggtccc

SEQ ID NO: 223014 - DNA, 25 bp, Artificial
  Probe
gaacatacattcttcttctggtgtc

SEQ ID NO: 223015 - DNA, 25 bp, Artificial
  Probe
aaagccaagaaagctgctcaggagc

SEQ ID NO: 223016 - DNA, 25 bp, Artificial
  Probe
acattcttcttctggtgtcaaaaga

SEQ ID NO: 223017 - DNA, 25 bp, Artificial
  Probe
attaaggctgtcaatctcttccccg

SEQ ID NO: 223018 - DNA, 25 bp, Artificial
  Probe
aggcggtctcggtctgtgtgcactt

SEQ ID NO: 223019 - DNA, 25 bp, Artificial
  Probe
gcgatttgaaggtccctgcatagat

SEQ ID NO: 223020 - DNA, 25 bp, Artificial
  Probe
aaggactgcatgaggcgatacaagg

SEQ ID NO: 223021 - DNA, 25 bp, Artificial
  Probe
ggcggtctcggtctgtgtgcacttt

SEQ ID NO: 223022 - DNA, 25 bp, Artificial
  Probe
agccaagaaagctgctcaggagcag

SEQ ID NO: 223023 - DNA, 25 bp, Artificial
  Probe
agctgctcaggagcaggtgctgaat

SEQ ID NO: 223024 - DNA, 25 bp, Artificial
  Probe
ggcccctcaggctgacagtgcggca

SEQ ID NO: 223025 - DNA, 25 bp, Artificial
  Probe
gcgtggcccctcaggctgacagtgc

SEQ ID NO: 223026 - DNA, 25 bp, Artificial
  Probe
atgaacatacattcttcttctggtg

SEQ ID NO: 223027 - DNA, 25 bp, Artificial
  Probe
aagctgctcaggagcaggtgctgaa

SEQ ID NO: 223028 - DNA, 25 bp, Artificial
  Probe
tacattcttcttctggtgtcaaaag

SEQ ID NO: 223029 - DNA, 25 bp, Artificial
  Probe
tactccggaaagatgggaaaagatc

SEQ ID NO: 223030 - DNA, 25 bp, Artificial
  Probe
cgaagaaggactgcatgaggcgata

SEQ ID NO: 223031 - DNA, 25 bp, Artificial
  Probe
cgctgggacaaactccagatgggaa

SEQ ID NO: 223032 - DNA, 25 bp, Artificial
  Probe
ctgctcaggagcaggtgctgaatgc

SEQ ID NO: 223033 - DNA, 25 bp, Artificial
  Probe
gaatgccagcagagccaggaagtga

SEQ ID NO: 223034 - DNA, 25 bp, Artificial
  Probe
caaacatcggcaagtttgacaggat

SEQ ID NO: 223035 - DNA, 25 bp, Artificial
  Probe
acatcggcaagtttgacaggatttg

SEQ ID NO: 223036 - DNA, 25 bp, Artificial
  Probe
ggttgtcctttcttatgatccaaca

SEQ ID NO: 223037 - DNA, 25 bp, Artificial
  Probe
tactgttgcagcattttcgaccttc

SEQ ID NO: 223038 - DNA, 25 bp, Artificial
  Probe
tggttgtcctttcttatgatccaac

SEQ ID NO: 223039 - DNA, 25 bp, Artificial
  Probe
gaccttcccagagcaaacatcggca

SEQ ID NO: 223040 - DNA, 25 bp, Artificial
  Probe
gcagcattttcgaccttcccagagc

SEQ ID NO: 223041 - DNA, 25 bp, Artificial
  Probe
ggtacaaaatgcaacatgcaatgcc

SEQ ID NO: 223042 - DNA, 25 bp, Artificial
  Probe
tatgttccagatgctgaacttaaaa

SEQ ID NO: 223043 - DNA, 25 bp, Artificial
  Probe
cttatactgttgcagcattttcgac

SEQ ID NO: 223044 - DNA, 25 bp, Artificial
  Probe
gtacaaaatgcaacatgcaatgcct

SEQ ID NO: 223045 - DNA, 25 bp, Artificial
  Probe
gcattggtggctgtcaatccaggcg

SEQ ID NO: 223046 - DNA, 25 bp, Artificial
  Probe
gcattttcgaccttcccagagcaaa

SEQ ID NO: 223047 - DNA, 25 bp, Artificial
  Probe
accttcccagagcaaacatcggcaa

SEQ ID NO: 223048 - DNA, 25 bp, Artificial
  Probe
ccagagcaaacatcggcaagtttga

SEQ ID NO: 223049 - DNA, 25 bp, Artificial
  Probe
tccttatactgttgcagcattttcg

SEQ ID NO: 223050 - DNA, 25 bp, Artificial
  Probe
ttcccagagcaaacatcggcaagtt

SEQ ID NO: 223051 - DNA, 25 bp, Artificial
  Probe
tgcagcattttcgaccttcccagag

SEQ ID NO: 223052 - DNA, 25 bp, Artificial
  Probe
agcattggtggctgtcaatccaggc

SEQ ID NO: 223053 - DNA, 25 bp, Artificial
  Probe
aatgcaacatgcaatgccttgagga

SEQ ID NO: 223054 - DNA, 25 bp, Artificial
  Probe
tccagatgctgaacttaaaaagtta

SEQ ID NO: 223055 - DNA, 25 bp, Artificial
  Probe
tcgaccttcccagagcaaacatcgg

SEQ ID NO: 223056 - DNA, 25 bp, Artificial
  Probe
tggtggctgtcaatccaggcgatcg

SEQ ID NO: 223057 - DNA, 25 bp, Artificial
  Probe
cagcattttcgaccttcccagagca

SEQ ID NO: 223058 - DNA, 25 bp, Artificial
  Probe
atgcaacatgcaatgccttgaggag

SEQ ID NO: 223059 - DNA, 25 bp, Artificial
  Probe
ggtggctgtcaatccaggcgatcgt

SEQ ID NO: 223060 - DNA, 25 bp, Artificial
  Probe
atactgttgcagcattttcgacctt

SEQ ID NO: 223061 - DNA, 25 bp, Artificial
  Probe
tgttgcagcattttcgaccttccca

SEQ ID NO: 223062 - DNA, 25 bp, Artificial
  Probe
cattggtggctgtcaatccaggcga

SEQ ID NO: 223063 - DNA, 25 bp, Artificial
  Probe
ccttcccagagcaaacatcggcaag

SEQ ID NO: 223064 - DNA, 25 bp, Artificial
  Probe
catcggcaagtttgacaggatttgg

SEQ ID NO: 223065 - DNA, 25 bp, Artificial
  Probe
attggtggctgtcaatccaggcgat

SEQ ID NO: 223066 - DNA, 25 bp, Artificial
  Probe
agaggagcattggtggctgtcaatc

SEQ ID NO: 223067 - DNA, 25 bp, Artificial
  Probe
ggaacatttccttatactgttgcag

SEQ ID NO: 223068 - DNA, 25 bp, Artificial
  Probe
ttccagatgctgaacttaaaaagtt

SEQ ID NO: 223069 - DNA, 25 bp, Artificial
  Probe
atgttccagatgctgaacttaaaaa

SEQ ID NO: 223070 - DNA, 25 bp, Artificial
  Probe
ccgggaacatttccttatactgttg

SEQ ID NO: 223071 - DNA, 25 bp, Artificial
  Probe
ggctgtcaatccaggcgatcgtgac

SEQ ID NO: 223072 - DNA, 25 bp, Artificial
  Probe
ttcgaccttcccagagcaaacatcg

SEQ ID NO: 223073 - DNA, 25 bp, Artificial
  Probe
actgttgcagcattttcgaccttcc

SEQ ID NO: 223074 - DNA, 25 bp, Artificial
  Probe
gaacatttccttatactgttgcagc

SEQ ID NO: 223075 - DNA, 25 bp, Artificial
  Probe
aaatgcaacatgcaatgccttgagg

SEQ ID NO: 223076 - DNA, 25 bp, Artificial
  Probe
tgatccaacaaaacacacaggcccg

SEQ ID NO: 223077 - DNA, 25 bp, Artificial
  Probe
gcaaacatcggcaagtttgacagga

SEQ ID NO: 223078 - DNA, 25 bp, Artificial
  Probe
ttccgggaacatttccttatactgt

SEQ ID NO: 223079 - DNA, 25 bp, Artificial
  Probe
gggaacatttccttatactgttgca

SEQ ID NO: 223080 - DNA, 25 bp, Artificial
  Probe
aatacagcacacattcggacaaaga

SEQ ID NO: 223081 - DNA, 25 bp, Artificial
  Probe
ctctatgccatgcacaggcgccaga

SEQ ID NO: 223082 - DNA, 25 bp, Artificial
  Probe
gtgctcttcaccatgtgttccctgc

SEQ ID NO: 223083 - DNA, 25 bp, Artificial
  Probe
aggagctggaccactttgttctgct

SEQ ID NO: 223084 - DNA, 25 bp, Artificial
  Probe
tgggtccccgaatcctttggaggag

SEQ ID NO: 223085 - DNA, 25 bp, Artificial
  Probe
tgtccaacctctatgccatgcacag

SEQ ID NO: 223086 - DNA, 25 bp, Artificial
  Probe
atacagcacacattcggacaaagaa

SEQ ID NO: 223087 - DNA, 25 bp, Artificial
  Probe
ttacttttcttccagaagaccggag

SEQ ID NO: 223088 - DNA, 25 bp, Artificial
  Probe
gcatgttctggcaagctgaaaatac

SEQ ID NO: 223089 - DNA, 25 bp, Artificial
  Probe
aatcctttggaggagctggaccact

SEQ ID NO: 223090 - DNA, 25 bp, Artificial
  Probe
tggctctcacgacagtgctcttcac

SEQ ID NO: 223091 - DNA, 25 bp, Artificial
  Probe
cacattcggacaaagaactgtggtt

SEQ ID NO: 223092 - DNA, 25 bp, Artificial
  Probe
ggtccccgaatcctttggaggagct

SEQ ID NO: 223093 - DNA, 25 bp, Artificial
  Probe
ggaaaagccttacaattgaaatcct

SEQ ID NO: 223094 - DNA, 25 bp, Artificial
  Probe
gctggaccactttgttctgctggct

SEQ ID NO: 223095 - DNA, 25 bp, Artificial
  Probe
cggccctgaaagagcatttactttt

SEQ ID NO: 223096 - DNA, 25 bp, Artificial
  Probe
agctgaaaatacagcacacattcgg

SEQ ID NO: 223097 - DNA, 25 bp, Artificial
  Probe
tatgccatgcacaggcgccagaggc

SEQ ID NO: 223098 - DNA, 25 bp, Artificial
  Probe
tccccgaatcctttggaggagctgg

SEQ ID NO: 223099 - DNA, 25 bp, Artificial
  Probe
tgaaaatacagcacacattcggaca

SEQ ID NO: 223100 - DNA, 25 bp, Artificial
  Probe
atcggccctgaaagagcatttactt

SEQ ID NO: 223101 - DNA, 25 bp, Artificial
  Probe
atgcatcggccctgaaagagcattt

SEQ ID NO: 223102 - DNA, 25 bp, Artificial
  Probe
tctatgccatgcacaggcgccagag

SEQ ID NO: 223103 - DNA, 25 bp, Artificial
  Probe
acattcggacaaagaactgtggttg

SEQ ID NO: 223104 - DNA, 25 bp, Artificial
  Probe
tgccatgtccaacctctatgccatg

SEQ ID NO: 223105 - DNA, 25 bp, Artificial
  Probe
catgggtccccgaatcctttggagg

SEQ ID NO: 223106 - DNA, 25 bp, Artificial
  Probe
ttggaaaagccttacaattgaaatc

SEQ ID NO: 223107 - DNA, 25 bp, Artificial
  Probe
actttgttctgctggctctcacgac

SEQ ID NO: 223108 - DNA, 25 bp, Artificial
  Probe
cagactacaggcatgggtccccgaa

SEQ ID NO: 223109 - DNA, 25 bp, Artificial
  Probe
ggaccactttgttctgctggctctc

SEQ ID NO: 223110 - DNA, 25 bp, Artificial
  Probe
gagcatttacttttcttccagaaga

SEQ ID NO: 223111 - DNA, 25 bp, Artificial
  Probe
tacaggcatgggtccccgaatcctt

SEQ ID NO: 223112 - DNA, 25 bp, Artificial
  Probe
tacttttcttccagaagaccggagt

SEQ ID NO: 223113 - DNA, 25 bp, Artificial
  Probe
agactacaggcatgggtccccgaat

SEQ ID NO: 223114 - DNA, 25 bp, Artificial
  Probe
tctcacgacagtgctcttcaccatg

SEQ ID NO: 223115 - DNA, 25 bp, Artificial
  Probe
tggaggagctggaccactttgttct

SEQ ID NO: 223116 - DNA, 25 bp, Artificial
  Probe
ctgctggctctcacgacagtgctct

SEQ ID NO: 223117 - DNA, 25 bp, Artificial
  Probe
tttcttccagaagaccggagttcat

SEQ ID NO: 223118 - DNA, 25 bp, Artificial
  Probe
gttctggcaagctgaaaatacagca

SEQ ID NO: 223119 - DNA, 25 bp, Artificial
  Probe
gaggagctggaccactttgttctgc

SEQ ID NO: 223120 - DNA, 25 bp, Artificial
  Probe
gtccaacctctatgccatgcacagg

SEQ ID NO: 223121 - DNA, 25 bp, Artificial
  Probe
caggctcagactacaggcatgggtc

SEQ ID NO: 223122 - DNA, 25 bp, Artificial
  Probe
cattcggacaaagaactgtggttgg

SEQ ID NO: 223123 - DNA, 25 bp, Artificial
  Probe
gcccagtcaggctcagactacaggc

SEQ ID NO: 223124 - DNA, 25 bp, Artificial
  Probe
agtgctcttcaccatgtgttccctg

SEQ ID NO: 223125 - DNA, 25 bp, Artificial
  Probe
taaagagatgcatcggccctgaaag

SEQ ID NO: 223126 - DNA, 25 bp, Artificial
  Probe
cgactcccggcttttggagacccag

SEQ ID NO: 223127 - DNA, 25 bp, Artificial
  Probe
ctgctcatggctgcaacactaatca

SEQ ID NO: 223128 - DNA, 25 bp, Artificial
  Probe
ttgggtgtgtctgtcccgtgaagaa

SEQ ID NO: 223129 - DNA, 25 bp, Artificial
  Probe
tctgtggactccaggcttcatgacc

SEQ ID NO: 223130 - DNA, 25 bp, Artificial
  Probe
ccgactgtatgctgagaggcgagct

SEQ ID NO: 223131 - DNA, 25 bp, Artificial
  Probe
tcctccatctgaactgactgaagaa

SEQ ID NO: 223132 - DNA, 25 bp, Artificial
  Probe
ctgagaggcgagctgttgaccgact

SEQ ID NO: 223133 - DNA, 25 bp, Artificial
  Probe
gtggctgctgggaaacagtgccacc

SEQ ID NO: 223134 - DNA, 25 bp, Artificial
  Probe
ggtactgccttttctcatgggtgtg

SEQ ID NO: 223135 - DNA, 25 bp, Artificial
  Probe
ctgacgcggttggaaactgagtttt

SEQ ID NO: 223136 - DNA, 25 bp, Artificial
  Probe
atgaactttgggtgtgtctgtcccg

SEQ ID NO: 223137 - DNA, 25 bp, Artificial
  Probe
ccattgttggcatgcgagccgttag

SEQ ID NO: 223138 - DNA, 25 bp, Artificial
  Probe
gtggctgttaggttttgagttcctc

SEQ ID NO: 223139 - DNA, 25 bp, Artificial
  Probe
ccagtattgtccagaaactgagatt

SEQ ID NO: 223140 - DNA, 25 bp, Artificial
  Probe
agttttgtaatgtctgcctgattca

SEQ ID NO: 223141 - DNA, 25 bp, Artificial
  Probe
tatgtgcttttctagaaaaagctgc

SEQ ID NO: 223142 - DNA, 25 bp, Artificial
  Probe
ccatcacgttatagcactacgagag

SEQ ID NO: 223143 - DNA, 25 bp, Artificial
  Probe
gggcgagccaactgtagctgttctt

SEQ ID NO: 223144 - DNA, 25 bp, Artificial
  Probe
aggtactgccttttctcatgggtgt

SEQ ID NO: 223145 - DNA, 25 bp, Artificial
  Probe
tgtagctgttcttcagcgagggtga

SEQ ID NO: 223146 - DNA, 25 bp, Artificial
  Probe
gaccgactgtatgctgagagttctg

SEQ ID NO: 223147 - DNA, 25 bp, Artificial
  Probe
tgttgaccgactgtatgctgagagt

SEQ ID NO: 223148 - DNA, 25 bp, Artificial
  Probe
cacaatcattatgaactttgggtgt

SEQ ID NO: 223149 - DNA, 25 bp, Artificial
  Probe
agctgctgaggtactgccttttctc

SEQ ID NO: 223150 - DNA, 25 bp, Artificial
  Probe
ggctgcaacactaatcatgaacact

SEQ ID NO: 223151 - DNA, 25 bp, Artificial
  Probe
tgagagttctgtgtccgacatagag

SEQ ID NO: 223152 - DNA, 25 bp, Artificial
  Probe
gcttttagagcatcttcagactatt

SEQ ID NO: 223153 - DNA, 25 bp, Artificial
  Probe
tgctgtcacgactcccggcttttgg

SEQ ID NO: 223154 - DNA, 25 bp, Artificial
  Probe
gtgggagccgcttccccttctgtgg

SEQ ID NO: 223155 - DNA, 25 bp, Artificial
  Probe
actggtttctaagttaacagtcaag

SEQ ID NO: 223156 - DNA, 25 bp, Artificial
  Probe
acctaccagtattgtccagaaactg

SEQ ID NO: 223157 - DNA, 25 bp, Artificial
  Probe
tttgccagtttcaatcaaatcagcg

SEQ ID NO: 223158 - DNA, 25 bp, Artificial
  Probe
ctgttgaccgactgtatgctgagag

SEQ ID NO: 223159 - DNA, 25 bp, Artificial
  Probe
tagaaaaagctgctcatggctgcaa

SEQ ID NO: 223160 - DNA, 25 bp, Artificial
  Probe
agcactacgagagcttcagcactct

SEQ ID NO: 223161 - DNA, 25 bp, Artificial
  Probe
cacttgaacttggatttgcaattca

SEQ ID NO: 223162 - DNA, 25 bp, Artificial
  Probe
cgcctgacgcggttggaaactgagt

SEQ ID NO: 223163 - DNA, 25 bp, Artificial
  Probe
gcatgcgagccgttaggatgccatt

SEQ ID NO: 223164 - DNA, 25 bp, Artificial
  Probe
actgtatgctgagaggcgagctgtt

SEQ ID NO: 223165 - DNA, 25 bp, Artificial
  Probe
tgaactggtttctaagttaacagtc

SEQ ID NO: 223166 - DNA, 25 bp, Artificial
  Probe
tgcttttagagcatcttcagactat

SEQ ID NO: 223167 - DNA, 25 bp, Artificial
  Probe
tccgacatagagcagcggtatggtg

SEQ ID NO: 223168 - DNA, 25 bp, Artificial
  Probe
ggggttcatgcctctaaggtgctta

SEQ ID NO: 223169 - DNA, 25 bp, Artificial
  Probe
tggctgctgggaaacagtgccaccc

SEQ ID NO: 223170 - DNA, 25 bp, Artificial
  Probe
gttgaccgactgtatgctgagaggc

SEQ ID NO: 223171 - DNA, 25 bp, Artificial
  Probe
ttccccttctgtggactccaggctt

SEQ ID NO: 223172 - DNA, 25 bp, Artificial
  Probe
cagggtgacgcagacttacgatgca

SEQ ID NO: 223173 - DNA, 25 bp, Artificial
  Probe
ttgcctttaactacaggggaattag

SEQ ID NO: 223174 - DNA, 25 bp, Artificial
  Probe
tcagtttgcgcctctttctacgtgc

SEQ ID NO: 223175 - DNA, 25 bp, Artificial
  Probe
tcattgcatacatgcgtgatttggg

SEQ ID NO: 223176 - DNA, 25 bp, Artificial
  Probe
accgtgagaaggttcttcagcatga

SEQ ID NO: 223177 - DNA, 25 bp, Artificial
  Probe
tgtggaccccagtaacatctttgga

SEQ ID NO: 223178 - DNA, 25 bp, Artificial
  Probe
aaagcagtggctaaaggagagcatc

SEQ ID NO: 223179 - DNA, 25 bp, Artificial
  Probe
gagagcatctctgatgtcggctttg

SEQ ID NO: 223180 - DNA, 25 bp, Artificial
  Probe
acgtgcagggtgacgcagacttacg

SEQ ID NO: 223181 - DNA, 25 bp, Artificial
  Probe
ctaaaggagagcatctctgatgtcg

SEQ ID NO: 223182 - DNA, 25 bp, Artificial
  Probe
tcggctttgggatgctgaagtctgt

SEQ ID NO: 223183 - DNA, 25 bp, Artificial
  Probe
aagactatgtggaccccagtaacat

SEQ ID NO: 223184 - DNA, 25 bp, Artificial
  Probe
agagatgaaatccttgccaatggag

SEQ ID NO: 223185 - DNA, 25 bp, Artificial
  Probe
acaagtgtatgacatcgcagcaaaa

SEQ ID NO: 223186 - DNA, 25 bp, Artificial
  Probe
agatgaaatccttgccaatggaggg

SEQ ID NO: 223187 - DNA, 25 bp, Artificial
  Probe
aaaggagagcatctctgatgtcggc

SEQ ID NO: 223188 - DNA, 25 bp, Artificial
  Probe
gtgcatgtatctacttctattttgc

SEQ ID NO: 223189 - DNA, 25 bp, Artificial
  Probe
tcaaataagcgtagccacattactg

SEQ ID NO: 223190 - DNA, 25 bp, Artificial
  Probe
agaatcttttgagacttctgctcct

SEQ ID NO: 223191 - DNA, 25 bp, Artificial
  Probe
tggtctggctgctggagaagataac

SEQ ID NO: 223192 - DNA, 25 bp, Artificial
  Probe
taactacaggggaattagtgaccca

SEQ ID NO: 223193 - DNA, 25 bp, Artificial
  Probe
aattagtgacccactgactgtgttt

SEQ ID NO: 223194 - DNA, 25 bp, Artificial
  Probe
agaaggttcttcagcatgaaaaaca

SEQ ID NO: 223195 - DNA, 25 bp, Artificial
  Probe
actgactgtgtttgaacagactgag

SEQ ID NO: 223196 - DNA, 25 bp, Artificial
  Probe
tctgatgtcggctttgggatgctga

SEQ ID NO: 223197 - DNA, 25 bp, Artificial
  Probe
agggagcctgtcacatcaccatgga

SEQ ID NO: 223198 - DNA, 25 bp, Artificial
  Probe
ctgatgtcggctttgggatgctgaa

SEQ ID NO: 223199 - DNA, 25 bp, Artificial
  Probe
tctattttgcctttaactacagggg

SEQ ID NO: 223200 - DNA, 25 bp, Artificial
  Probe
ttctattttgcctttaactacaggg

SEQ ID NO: 223201 - DNA, 25 bp, Artificial
  Probe
gttatttgctgacttatgtcattgc

SEQ ID NO: 223202 - DNA, 25 bp, Artificial
  Probe
ctacgtgcagggtgacgcagactta

SEQ ID NO: 223203 - DNA, 25 bp, Artificial
  Probe
agcctgtcacatcaccatggagtgg

SEQ ID NO: 223204 - DNA, 25 bp, Artificial
  Probe
gcatctctgatgtcggctttgggat

SEQ ID NO: 223205 - DNA, 25 bp, Artificial
  Probe
cggctttgggatgctgaagtctgtc

SEQ ID NO: 223206 - DNA, 25 bp, Artificial
  Probe
acttctgctccttgggacagggtta

SEQ ID NO: 223207 - DNA, 25 bp, Artificial
  Probe
ggatgctgaagtctgtcaaagacta

SEQ ID NO: 223208 - DNA, 25 bp, Artificial
  Probe
acttatgtcattgcatacatgcgtg

SEQ ID NO: 223209 - DNA, 25 bp, Artificial
  Probe
gaggcagctgctagagatgaaatcc

SEQ ID NO: 223210 - DNA, 25 bp, Artificial
  Probe
gggagttcagtttgcgcctctttct

SEQ ID NO: 223211 - DNA, 25 bp, Artificial
  Probe
tacgatgcaggtgcatgtatctact

SEQ ID NO: 223212 - DNA, 25 bp, Artificial
  Probe
gagaaggttcttcagcatgaaaaac

SEQ ID NO: 223213 - DNA, 25 bp, Artificial
  Probe
cagacttacgatgcaggtgcatgta

SEQ ID NO: 223214 - DNA, 25 bp, Artificial
  Probe
gctccttgggacagggttatagatc

SEQ ID NO: 223215 - DNA, 25 bp, Artificial
  Probe
cattactgttcgagggagaccgtga

SEQ ID NO: 223216 - DNA, 25 bp, Artificial
  Probe
gcctttaactacaggggaattagtg

SEQ ID NO: 223217 - DNA, 25 bp, Artificial
  Probe
acatcgcagcaaaatttggtggtct

SEQ ID NO: 223218 - DNA, 25 bp, Artificial
  Probe
aggtgatagcaatcagctggcctgg

SEQ ID NO: 223219 - DNA, 25 bp, Artificial
  Probe
cacaggactacaagaaacggctttc

SEQ ID NO: 223220 - DNA, 25 bp, Artificial
  Probe
atatcgccaggacgatcccagctac

SEQ ID NO: 223221 - DNA, 25 bp, Artificial
  Probe
aagagtagctgcaggggtcctctgt

SEQ ID NO: 223222 - DNA, 25 bp, Artificial
  Probe
ctgtgaacttgctcaggacaaggag

SEQ ID NO: 223223 - DNA, 25 bp, Artificial
  Probe
accctggtgctgactatccagttga

SEQ ID NO: 223224 - DNA, 25 bp, Artificial
  Probe
gtgcccagggagaagcccttggata

SEQ ID NO: 223225 - DNA, 25 bp, Artificial
  Probe
tgggctgcctgacctgggacacgcc

SEQ ID NO: 223226 - DNA, 25 bp, Artificial
  Probe
ttggatatcgccaggacgatcccag

SEQ ID NO: 223227 - DNA, 25 bp, Artificial
  Probe
ccaggacctcatggacgggctgcct

SEQ ID NO: 223228 - DNA, 25 bp, Artificial
  Probe
agcccttggatatcgccaggacgat

SEQ ID NO: 223229 - DNA, 25 bp, Artificial
  Probe
ggtgctgactatccagttgatgggc

SEQ ID NO: 223230 - DNA, 25 bp, Artificial
  Probe
tgatgggctgcctgacctgggacac

SEQ ID NO: 223231 - DNA, 25 bp, Artificial
  Probe
tgaggctgagggagccacagctccc

SEQ ID NO: 223232 - DNA, 25 bp, Artificial
  Probe
tccgaatgtctgaggacaagccaca

SEQ ID NO: 223233 - DNA, 25 bp, Artificial
  Probe
tgaggacaagccacaggactacaag

SEQ ID NO: 223234 - DNA, 25 bp, Artificial
  Probe
tgggacacgcccaggacctcatgga

SEQ ID NO: 223235 - DNA, 25 bp, Artificial
  Probe
actctggtggatacggccaggacgc

SEQ ID NO: 223236 - DNA, 25 bp, Artificial
  Probe
taccattccactgtttgtgcagttg

SEQ ID NO: 223237 - DNA, 25 bp, Artificial
  Probe
acgggctgcctccaggtgatagcaa

SEQ ID NO: 223238 - DNA, 25 bp, Artificial
  Probe
gaatgagactgctgatctcggactg

SEQ ID NO: 223239 - DNA, 25 bp, Artificial
  Probe
acattggtgcccagggagaagccct

SEQ ID NO: 223240 - DNA, 25 bp, Artificial
  Probe
acaagaaacggctttcggttgagct

SEQ ID NO: 223241 - DNA, 25 bp, Artificial
  Probe
gagggagccacagctcccctgacag

SEQ ID NO: 223242 - DNA, 25 bp, Artificial
  Probe
accaccctggtgctgactatccagt

SEQ ID NO: 223243 - DNA, 25 bp, Artificial
  Probe
ctatccagttgatgggctgcctgac

SEQ ID NO: 223244 - DNA, 25 bp, Artificial
  Probe
ggatggaccctatgatggagcatga

SEQ ID NO: 223245 - DNA, 25 bp, Artificial
  Probe
ctgacagagttgctccactccagga

SEQ ID NO: 223246 - DNA, 25 bp, Artificial
  Probe
ctcggactggacattggtgcccagg

SEQ ID NO: 223247 - DNA, 25 bp, Artificial
  Probe
gcagttgctttattctcccattgaa

SEQ ID NO: 223248 - DNA, 25 bp, Artificial
  Probe
tgttctattccgaatgtctgaggac

SEQ ID NO: 223249 - DNA, 25 bp, Artificial
  Probe
tagctgcaggggtcctctgtgaact

SEQ ID NO: 223250 - DNA, 25 bp, Artificial
  Probe
actggacattggtgcccagggagaa

SEQ ID NO: 223251 - DNA, 25 bp, Artificial
  Probe
ccctatgatggagcatgagatgggt

SEQ ID NO: 223252 - DNA, 25 bp, Artificial
  Probe
cccattgaaaatatccaaagagtag

SEQ ID NO: 223253 - DNA, 25 bp, Artificial
  Probe
ctccaggaatgaaggcgtggcaaca

SEQ ID NO: 223254 - DNA, 25 bp, Artificial
  Probe
caggacgatcccagctaccgttctt

SEQ ID NO: 223255 - DNA, 25 bp, Artificial
  Probe
aatatccaaagagtagctgcagggg

SEQ ID NO: 223256 - DNA, 25 bp, Artificial
  Probe
gaggactcaataccattccactgtt

SEQ ID NO: 223257 - DNA, 25 bp, Artificial
  Probe
gacgatcccagctaccgttcttttc

SEQ ID NO: 223258 - DNA, 25 bp, Artificial
  Probe
ccattgaggctgagggagccacagc

SEQ ID NO: 223259 - DNA, 25 bp, Artificial
  Probe
gccaatggcttggaatgagactgct

SEQ ID NO: 223260 - DNA, 25 bp, Artificial
  Probe
aacggctttcggttgagctgaccag

SEQ ID NO: 223261 - DNA, 25 bp, Artificial
  Probe
gttccctcttcaggacagagccaat

SEQ ID NO: 223262 - DNA, 25 bp, Artificial
  Probe
gggagccacagctcccctgacagag

SEQ ID NO: 223263 - DNA, 25 bp, Artificial
  Probe
ccagctaccgttcttttcactctgg

SEQ ID NO: 223264 - DNA, 25 bp, Artificial
  Probe
agtggccccttgtccccagagggct

SEQ ID NO: 223265 - DNA, 25 bp, Artificial
  Probe
aatcctgattagtggctcagtgggt

SEQ ID NO: 223266 - DNA, 25 bp, Artificial
  Probe
gatggcgacagttacaaggacaaaa

SEQ ID NO: 223267 - DNA, 25 bp, Artificial
  Probe
tgcgtctcctgtgcagagcccaacg

SEQ ID NO: 223268 - DNA, 25 bp, Artificial
  Probe
aaggacgcagccacagaggagcctg

SEQ ID NO: 223269 - DNA, 25 bp, Artificial
  Probe
taaagtccacacctgcgtctcctgt

SEQ ID NO: 223270 - DNA, 25 bp, Artificial
  Probe
agcggtctctccttccaaggcttca

SEQ ID NO: 223271 - DNA, 25 bp, Artificial
  Probe
cagccacagaggagcctggttcacc

SEQ ID NO: 223272 - DNA, 25 bp, Artificial
  Probe
ggaccaagagtccagcggtctctcc

SEQ ID NO: 223273 - DNA, 25 bp, Artificial
  Probe
aggtggaatcctgattagtggctca

SEQ ID NO: 223274 - DNA, 25 bp, Artificial
  Probe
cagtgggtcctgatgcatccctgcc

SEQ ID NO: 223275 - DNA, 25 bp, Artificial
  Probe
agtccagcggtctctccttccaagg

SEQ ID NO: 223276 - DNA, 25 bp, Artificial
  Probe
acactgatggcgacagttacaagga

SEQ ID NO: 223277 - DNA, 25 bp, Artificial
  Probe
ttagtggctcagtgggtcctgatgc

SEQ ID NO: 223278 - DNA, 25 bp, Artificial
  Probe
tacaaggacaaaaccgagtcagtta

SEQ ID NO: 223279 - DNA, 25 bp, Artificial
  Probe
tctcctgtgcagagcccaacgaggg

SEQ ID NO: 223280 - DNA, 25 bp, Artificial
  Probe
cagaagtcagcgaagccaacacaga

SEQ ID NO: 223281 - DNA, 25 bp, Artificial
  Probe
gcagggaccaagagtccagcggtct

SEQ ID NO: 223282 - DNA, 25 bp, Artificial
  Probe
cctcagcaaaggaccgggccagatg

SEQ ID NO: 223283 - DNA, 25 bp, Artificial
  Probe
accgagtcagttaccagtggcccct

SEQ ID NO: 223284 - DNA, 25 bp, Artificial
  Probe
tgctgacactgatggcgacagttac

SEQ ID NO: 223285 - DNA, 25 bp, Artificial
  Probe
ggagatcctgggtacacactcagaa

SEQ ID NO: 223286 - DNA, 25 bp, Artificial
  Probe
aagccaacacagagcctgagccaga

SEQ ID NO: 223287 - DNA, 25 bp, Artificial
  Probe
agcctgagccagagaaaccagaggg

SEQ ID NO: 223288 - DNA, 25 bp, Artificial
  Probe
agttacaaggacaaaaccgagtcag

SEQ ID NO: 223289 - DNA, 25 bp, Artificial
  Probe
tggctcagtgggtcctgatgcatcc

SEQ ID NO: 223290 - DNA, 25 bp, Artificial
  Probe
agaagtcagcgaagccaacacagag

SEQ ID NO: 223291 - DNA, 25 bp, Artificial
  Probe
aacacagagcctgagccagagaaac

SEQ ID NO: 223292 - DNA, 25 bp, Artificial
  Probe
gtcagcgaagccaacacagagcctg

SEQ ID NO: 223293 - DNA, 25 bp, Artificial
  Probe
tgtgtggaagaggtcctcagcaaag

SEQ ID NO: 223294 - DNA, 25 bp, Artificial
  Probe
cacagaggagcctggttcacctgta

SEQ ID NO: 223295 - DNA, 25 bp, Artificial
  Probe
aggacaaaaccgagtcagttaccag

SEQ ID NO: 223296 - DNA, 25 bp, Artificial
  Probe
tggaagaggtcctcagcaaaggacc

SEQ ID NO: 223297 - DNA, 25 bp, Artificial
  Probe
acctgtaaagtccacacctgcgtct

SEQ ID NO: 223298 - DNA, 25 bp, Artificial
  Probe
tccttccaaggcttcagaggatgcc

SEQ ID NO: 223299 - DNA, 25 bp, Artificial
  Probe
gacgcagccacagaggagcctggtt

SEQ ID NO: 223300 - DNA, 25 bp, Artificial
  Probe
gtctctccttccaaggcttcagagg

SEQ ID NO: 223301 - DNA, 25 bp, Artificial
  Probe
gtcagttaccagtggccccttgtcc

SEQ ID NO: 223302 - DNA, 25 bp, Artificial
  Probe
ggcttcagaggatgccaagaagaca

SEQ ID NO: 223303 - DNA, 25 bp, Artificial
  Probe
aaggaccgggccagatgactaccaa

SEQ ID NO: 223304 - DNA, 25 bp, Artificial
  Probe
aactctgagccctgaacgccagggc

SEQ ID NO: 223305 - DNA, 25 bp, Artificial
  Probe
caacacagagcctgagccagagaaa

SEQ ID NO: 223306 - DNA, 25 bp, Artificial
  Probe
agagtccagcggtctctccttccaa

SEQ ID NO: 223307 - DNA, 25 bp, Artificial
  Probe
ctgattagtggctcagtgggtcctg

SEQ ID NO: 223308 - DNA, 25 bp, Artificial
  Probe
tgtaaagtccacacctgcgtctcct

SEQ ID NO: 223309 - DNA, 25 bp, Artificial
  Probe
gacaaaaccgagtcagttaccagtg

SEQ ID NO: 223310 - DNA, 25 bp, Artificial
  Probe
taggtcttattgtggcctcagatcc

SEQ ID NO: 223311 - DNA, 25 bp, Artificial
  Probe
gttttccatttcgtagtcccaatga

SEQ ID NO: 223312 - DNA, 25 bp, Artificial
  Probe
ctgctacttaaggatatggatcctg

SEQ ID NO: 223313 - DNA, 25 bp, Artificial
  Probe
tattgtcactttctgctacttaagg

SEQ ID NO: 223314 - DNA, 25 bp, Artificial
  Probe
cagtccgtcagctcggcgtacacga

SEQ ID NO: 223315 - DNA, 25 bp, Artificial
  Probe
catggcccccaggatcccggagtgg

SEQ ID NO: 223316 - DNA, 25 bp, Artificial
  Probe
ctgcaaaccggaactctccagtacg

SEQ ID NO: 223317 - DNA, 25 bp, Artificial
  Probe
cttaaggatatggatcctggttctt

SEQ ID NO: 223318 - DNA, 25 bp, Artificial
  Probe
accggacagcaaacccaaactgaag

SEQ ID NO: 223319 - DNA, 25 bp, Artificial
  Probe
ctagttactacctggcgtatttcaa

SEQ ID NO: 223320 - DNA, 25 bp, Artificial
  Probe
tgtggcctcagatccggccaccatg

SEQ ID NO: 223321 - DNA, 25 bp, Artificial
  Probe
actttttgccctgtgctgggcccca

SEQ ID NO: 223322 - DNA, 25 bp, Artificial
  Probe
ctgaaccaaaatttcagaaaggagt

SEQ ID NO: 223323 - DNA, 25 bp, Artificial
  Probe
agaggattatcatctcactgtgcac

SEQ ID NO: 223324 - DNA, 25 bp, Artificial
  Probe
cagttcaaatgatgcagcagataag

SEQ ID NO: 223325 - DNA, 25 bp, Artificial
  Probe
aactttgtcaccatgtttgtagttt

SEQ ID NO: 223326 - DNA, 25 bp, Artificial
  Probe
gacactgacactcatagccatcatg

SEQ ID NO: 223327 - DNA, 25 bp, Artificial
  Probe
cagtctcaagtatgataggatatac

SEQ ID NO: 223328 - DNA, 25 bp, Artificial
  Probe
gccctggtggttttccatttcgtag

SEQ ID NO: 223329 - DNA, 25 bp, Artificial
  Probe
gtcagctcggcgtacacgattgccc

SEQ ID NO: 223330 - DNA, 25 bp, Artificial
  Probe
gtagtcccaatgattattgtcactt

SEQ ID NO: 223331 - DNA, 25 bp, Artificial
  Probe
cttattgtggcctcagatccggcca

SEQ ID NO: 223332 - DNA, 25 bp, Artificial
  Probe
ctttgtggacagttcaaatgatgca

SEQ ID NO: 223333 - DNA, 25 bp, Artificial
  Probe
acacgattgccctggtggttttcca

SEQ ID NO: 223334 - DNA, 25 bp, Artificial
  Probe
acggactactgaaccaaaatttcag

SEQ ID NO: 223335 - DNA, 25 bp, Artificial
  Probe
ctaagatgttctttgtggacagttc

SEQ ID NO: 223336 - DNA, 25 bp, Artificial
  Probe
aacccaaactgaagccgcaggactt

SEQ ID NO: 223337 - DNA, 25 bp, Artificial
  Probe
ccaggatcccggagtggctcttcgt

SEQ ID NO: 223338 - DNA, 25 bp, Artificial
  Probe
tggcccccaggatcccggagtggct

SEQ ID NO: 223339 - DNA, 25 bp, Artificial
  Probe
tctttgtggacagttcaaatgatgc

SEQ ID NO: 223340 - DNA, 25 bp, Artificial
  Probe
tcccggagtggctcttcgtggctag

SEQ ID NO: 223341 - DNA, 25 bp, Artificial
  Probe
tttcgtagtcccaatgattattgtc

SEQ ID NO: 223342 - DNA, 25 bp, Artificial
  Probe
acgcaatcatatacggactactgaa

SEQ ID NO: 223343 - DNA, 25 bp, Artificial
  Probe
agtggctcttcgtggctagttacta

SEQ ID NO: 223344 - DNA, 25 bp, Artificial
  Probe
ctgcctcaacgcaatcatatacgga

SEQ ID NO: 223345 - DNA, 25 bp, Artificial
  Probe
ggcgtacacgattgccctggtggtt

SEQ ID NO: 223346 - DNA, 25 bp, Artificial
  Probe
tggttttccatttcgtagtcccaat

SEQ ID NO: 223347 - DNA, 25 bp, Artificial
  Probe
tactttttgccctgtgctgggcccc

SEQ ID NO: 223348 - DNA, 25 bp, Artificial
  Probe
tacagtaacaagaattccctgtgct

SEQ ID NO: 223349 - DNA, 25 bp, Artificial
  Probe
gcaaaccggaactctccagtacgac

SEQ ID NO: 223350 - DNA, 25 bp, Artificial
  Probe
tcttcaggtcagacggagggtaaaa

SEQ ID NO: 223351 - DNA, 25 bp, Artificial
  Probe
aactgaagccgcaggacttcaggaa

SEQ ID NO: 223352 - DNA, 25 bp, Artificial
  Probe
caggatcccggagtggctcttcgtg

SEQ ID NO: 223353 - DNA, 25 bp, Artificial
  Probe
gtcaccatgtttgtagtttttgtac

SEQ ID NO: 223354 - DNA, 25 bp, Artificial
  Probe
cttcgtggctagttactacctggcg

SEQ ID NO: 223355 - DNA, 25 bp, Artificial
  Probe
actcaacttcataggtcttattgtg

SEQ ID NO: 223356 - DNA, 25 bp, Artificial
  Probe
cgcaggccgatcttcctgggttccg

SEQ ID NO: 223357 - DNA, 25 bp, Artificial
  Probe
caggccgatcttcctgggttccgtc

SEQ ID NO: 223358 - DNA, 25 bp, Artificial
  Probe
gatcttcctgggttccgtctgacgg

SEQ ID NO: 223359 - DNA, 25 bp, Artificial
  Probe
tcacgcaaacatcacagagagactc

SEQ ID NO: 223360 - DNA, 25 bp, Artificial
  Probe
tcacagagagactcgtgccgaattc

SEQ ID NO: 223361 - DNA, 25 bp, Artificial
  Probe
tttggcagctatggaagaaccaaaa

SEQ ID NO: 223362 - DNA, 25 bp, Artificial
  Probe
catcacagagagactcgtgccgaat

SEQ ID NO: 223363 - DNA, 25 bp, Artificial
  Probe
cgcatagatctacacgaggcgccga

SEQ ID NO: 223364 - DNA, 25 bp, Artificial
  Probe
ggcagacctaaactgatcctaaagc

SEQ ID NO: 223365 - DNA, 25 bp, Artificial
  Probe
gtcacacgcatagatctacacgagg

SEQ ID NO: 223366 - DNA, 25 bp, Artificial
  Probe
gctttggcagctatggaagaaccaa

SEQ ID NO: 223367 - DNA, 25 bp, Artificial
  Probe
gagctttggcagctatggaagaacc

SEQ ID NO: 223368 - DNA, 25 bp, Artificial
  Probe
ggccgatcttcctgggttccgtctg

SEQ ID NO: 223369 - DNA, 25 bp, Artificial
  Probe
acgcaaacatcacagagagactcgt

SEQ ID NO: 223370 - DNA, 25 bp, Artificial
  Probe
tagatctacacgaggcgccgaggcc

SEQ ID NO: 223371 - DNA, 25 bp, Artificial
  Probe
cacgcaaacatcacagagagactcg

SEQ ID NO: 223372 - DNA, 25 bp, Artificial
  Probe
caaacatcacagagagactcgtgcc

SEQ ID NO: 223373 - DNA, 25 bp, Artificial
  Probe
catagatctacacgaggcgccgagg

SEQ ID NO: 223374 - DNA, 25 bp, Artificial
  Probe
cgcgcaggcagacctaaactgatcc

SEQ ID NO: 223375 - DNA, 25 bp, Artificial
  Probe
cgcaggcagacctaaactgatccta

SEQ ID NO: 223376 - DNA, 25 bp, Artificial
  Probe
cacgcatagatctacacgaggcgcc

SEQ ID NO: 223377 - DNA, 25 bp, Artificial
  Probe
cgcaaacatcacagagagactcgtg

SEQ ID NO: 223378 - DNA, 25 bp, Artificial
  Probe
ctttggcagctatggaagaaccaaa

SEQ ID NO: 223379 - DNA, 25 bp, Artificial
  Probe
aggccgatcttcctgggttccgtct

SEQ ID NO: 223380 - DNA, 25 bp, Artificial
  Probe
acagagagactcgtgccgaattcct

SEQ ID NO: 223381 - DNA, 25 bp, Artificial
  Probe
gcagacctaaactgatcctaaagcc

SEQ ID NO: 223382 - DNA, 25 bp, Artificial
  Probe
gcatagatctacacgaggcgccgag

SEQ ID NO: 223383 - DNA, 25 bp, Artificial
  Probe
aggcagacctaaactgatcctaaag

SEQ ID NO: 223384 - DNA, 25 bp, Artificial
  Probe
gcaaacatcacagagagactcgtgc

SEQ ID NO: 223385 - DNA, 25 bp, Artificial
  Probe
acgcatagatctacacgaggcgccg

SEQ ID NO: 223386 - DNA, 25 bp, Artificial
  Probe
agctttggcagctatggaagaacca

SEQ ID NO: 223387 - DNA, 25 bp, Artificial
  Probe
gcgcgcaggcagacctaaactgatc

SEQ ID NO: 223388 - DNA, 25 bp, Artificial
  Probe
tcctgggttccgtctgacggcgttt

SEQ ID NO: 223389 - DNA, 25 bp, Artificial
  Probe
acacgcatagatctacacgaggcgc

SEQ ID NO: 223390 - DNA, 25 bp, Artificial
  Probe
aatcacgcaaacatcacagagagac

SEQ ID NO: 223391 - DNA, 25 bp, Artificial
  Probe
aaggtgccgggctccgacaagctgc

SEQ ID NO: 223392 - DNA, 25 bp, Artificial
  Probe
actgtcacacgcatagatctacacg

SEQ ID NO: 223393 - DNA, 25 bp, Artificial
  Probe
tgcgcgcaggcagacctaaactgat

SEQ ID NO: 223394 - DNA, 25 bp, Artificial
  Probe
tcacacgcatagatctacacgaggc

SEQ ID NO: 223395 - DNA, 25 bp, Artificial
  Probe
aacatcacagagagactcgtgccga

SEQ ID NO: 223396 - DNA, 25 bp, Artificial
  Probe
acatcacagagagactcgtgccgaa

SEQ ID NO: 223397 - DNA, 25 bp, Artificial
  Probe
gcaggccgatcttcctgggttccgt

SEQ ID NO: 223398 - DNA, 25 bp, Artificial
  Probe
atcttcctgggttccgtctgacggc

SEQ ID NO: 223399 - DNA, 25 bp, Artificial
  Probe
gtgcgcgcaggcagacctaaactga

SEQ ID NO: 223400 - DNA, 25 bp, Artificial
  Probe
ggagctttggcagctatggaagaac

SEQ ID NO: 223401 - DNA, 25 bp, Artificial
  Probe
tgtcacacgcatagatctacacgag

SEQ ID NO: 223402 - DNA, 25 bp, Artificial
  Probe
aagacgctgcgcaccatcctttcat

SEQ ID NO: 223403 - DNA, 25 bp, Artificial
  Probe
ctgattattgatgctttcggggagc

SEQ ID NO: 223404 - DNA, 25 bp, Artificial
  Probe
aactgtaccgggtcgtcttcgacat

SEQ ID NO: 223405 - DNA, 25 bp, Artificial
  Probe
caaacacgggcacatcttcgggcgg

SEQ ID NO: 223406 - DNA, 25 bp, Artificial
  Probe
cagctggtgatgacagtagggctcc

SEQ ID NO: 223407 - DNA, 25 bp, Artificial
  Probe
atcctactggctatcatccagggtc

SEQ ID NO: 223408 - DNA, 25 bp, Artificial
  Probe
gtggtggccttcaacttcttccgca

SEQ ID NO: 223409 - DNA, 25 bp, Artificial
  Probe
tgacagtagggctcctggctgtagt

SEQ ID NO: 223410 - DNA, 25 bp, Artificial
  Probe
agacaactctttcctgtatctgggc

SEQ ID NO: 223411 - DNA, 25 bp, Artificial
  Probe
acaagtttgtcaagcggaaggttct

SEQ ID NO: 223412 - DNA, 25 bp, Artificial
  Probe
agggctcctggctgtagtggtctac

SEQ ID NO: 223413 - DNA, 25 bp, Artificial
  Probe
atccagggtctgattattgatgctt

SEQ ID NO: 223414 - DNA, 25 bp, Artificial
  Probe
cggaaagcagctggtgatgacagta

SEQ ID NO: 223415 - DNA, 25 bp, Artificial
  Probe
cgaggacccggctggtgatgaatat

SEQ ID NO: 223416 - DNA, 25 bp, Artificial
  Probe
tggtgatgtccctcctgggccacta

SEQ ID NO: 223417 - DNA, 25 bp, Artificial
  Probe
tccagggtctgattattgatgcttt

SEQ ID NO: 223418 - DNA, 25 bp, Artificial
  Probe
atgggagtcaagacgctgcgcacca

SEQ ID NO: 223419 - DNA, 25 bp, Artificial
  Probe
ccagatctggaagtttggagtcatc

SEQ ID NO: 223420 - DNA, 25 bp, Artificial
  Probe
ctgtagtggtctacttgtatacggt

SEQ ID NO: 223421 - DNA, 25 bp, Artificial
  Probe
ttctggacaaacacgggcacatctt

SEQ ID NO: 223422 - DNA, 25 bp, Artificial
  Probe
tgtcaaataccagatctggaagttt

SEQ ID NO: 223423 - DNA, 25 bp, Artificial
  Probe
cccggctggtgatgaatatgaactg

SEQ ID NO: 223424 - DNA, 25 bp, Artificial
  Probe
cagatctggaagtttggagtcatct

SEQ ID NO: 223425 - DNA, 25 bp, Artificial
  Probe
cggggagctccgagaccaacaagag

SEQ ID NO: 223426 - DNA, 25 bp, Artificial
  Probe
ctggctatcatccagggtctgatta

SEQ ID NO: 223427 - DNA, 25 bp, Artificial
  Probe
agctggtgatgacagtagggctcct

SEQ ID NO: 223428 - DNA, 25 bp, Artificial
  Probe
aaggttctggacaaacacgggcaca

SEQ ID NO: 223429 - DNA, 25 bp, Artificial
  Probe
ctccaccaggcctgctgacatggat

SEQ ID NO: 223430 - DNA, 25 bp, Artificial
  Probe
cagcccacaatgagcgcaaacctga

SEQ ID NO: 223431 - DNA, 25 bp, Artificial
  Probe
ccacctcttggatatcgccatggga

SEQ ID NO: 223432 - DNA, 25 bp, Artificial
  Probe
ttattgatgctttcggggagctccg

SEQ ID NO: 223433 - DNA, 25 bp, Artificial
  Probe
atgctttcggggagctccgagacca

SEQ ID NO: 223434 - DNA, 25 bp, Artificial
  Probe
ttcatccgtcactcacaacggaaag

SEQ ID NO: 223435 - DNA, 25 bp, Artificial
  Probe
gagtcaagacgctgcgcaccatcct

SEQ ID NO: 223436 - DNA, 25 bp, Artificial
  Probe
ttgcagagctgctgggcatggatct

SEQ ID NO: 223437 - DNA, 25 bp, Artificial
  Probe
ggccttcaacttcttccgcaagttc

SEQ ID NO: 223438 - DNA, 25 bp, Artificial
  Probe
attgcagagctgctgggcatggatc

SEQ ID NO: 223439 - DNA, 25 bp, Artificial
  Probe
aatatgaactgtaccgggtcgtctt

SEQ ID NO: 223440 - DNA, 25 bp, Artificial
  Probe
ctttcctgtatctgggctggtacat

SEQ ID NO: 223441 - DNA, 25 bp, Artificial
  Probe
agctgctgggcatggatctggcctc

SEQ ID NO: 223442 - DNA, 25 bp, Artificial
  Probe
ggtcgtcttcgacatcacctttttc

SEQ ID NO: 223443 - DNA, 25 bp, Artificial
  Probe
atgaatatgaactgtaccgggtcgt

SEQ ID NO: 223444 - DNA, 25 bp, Artificial
  Probe
ctgtatctgggctggtacatggtga

SEQ ID NO: 223445 - DNA, 25 bp, Artificial
  Probe
gacaagtttgtcaagcggaaggttc

SEQ ID NO: 223446 - DNA, 25 bp, Artificial
  Probe
tgacatggatcatgtccatcgatgt

SEQ ID NO: 223447 - DNA, 25 bp, Artificial
  Probe
caagcggaaggttctggacaaacac

SEQ ID NO: 223448 - DNA, 25 bp, Artificial
  Probe
atggaacggtacatcctatacatgg

SEQ ID NO: 223449 - DNA, 25 bp, Artificial
  Probe
ccggcagagcgcatggaacggtaca

SEQ ID NO: 223450 - DNA, 25 bp, Artificial
  Probe
tataccgtggaggtgagcatcaatg

SEQ ID NO: 223451 - DNA, 25 bp, Artificial
  Probe
gtgaccaccggcagcgaggcttcaa

SEQ ID NO: 223452 - DNA, 25 bp, Artificial
  Probe
ctggacatctattgcccgcactatg

SEQ ID NO: 223453 - DNA, 25 bp, Artificial
  Probe
gagttccgacctggacacgagtact

SEQ ID NO: 223454 - DNA, 25 bp, Artificial
  Probe
tgcgcctgggggacccctcaaattc

SEQ ID NO: 223455 - DNA, 25 bp, Artificial
  Probe
gaacggtacatcctatacatggtga

SEQ ID NO: 223456 - DNA, 25 bp, Artificial
  Probe
gcagagcgcatggaacggtacatcc

SEQ ID NO: 223457 - DNA, 25 bp, Artificial
  Probe
acctggacatctattgcccgcacta

SEQ ID NO: 223458 - DNA, 25 bp, Artificial
  Probe
tgggggacccctcaaattctccgag

SEQ ID NO: 223459 - DNA, 25 bp, Artificial
  Probe
aacggtacatcctatacatggtgaa

SEQ ID NO: 223460 - DNA, 25 bp, Artificial
  Probe
ggacccctcaaattctccgagaagt

SEQ ID NO: 223461 - DNA, 25 bp, Artificial
  Probe
ggtacatcctatacatggtgaacgg

SEQ ID NO: 223462 - DNA, 25 bp, Artificial
  Probe
acctggacacgagtactactacatc

SEQ ID NO: 223463 - DNA, 25 bp, Artificial
  Probe
agagcgcatggaacggtacatccta

SEQ ID NO: 223464 - DNA, 25 bp, Artificial
  Probe
catcctatacatggtgaacggcgag

SEQ ID NO: 223465 - DNA, 25 bp, Artificial
  Probe
gacccctcaaattctccgagaagtt

SEQ ID NO: 223466 - DNA, 25 bp, Artificial
  Probe
ttccgacctggacacgagtactact

SEQ ID NO: 223467 - DNA, 25 bp, Artificial
  Probe
attgcccgcactatggggcgccact

SEQ ID NO: 223468 - DNA, 25 bp, Artificial
  Probe
aagcgctgggaatgcaaccggcccg

SEQ ID NO: 223469 - DNA, 25 bp, Artificial
  Probe
tctattgcccgcactatggggcgcc

SEQ ID NO: 223470 - DNA, 25 bp, Artificial
  Probe
tggaacggtacatcctatacatggt

SEQ ID NO: 223471 - DNA, 25 bp, Artificial
  Probe
taccgtggaggtgagcatcaatgac

SEQ ID NO: 223472 - DNA, 25 bp, Artificial
  Probe
cgacctggacacgagtactactaca

SEQ ID NO: 223473 - DNA, 25 bp, Artificial
  Probe
ataccgtggaggtgagcatcaatga

SEQ ID NO: 223474 - DNA, 25 bp, Artificial
  Probe
gggacccctcaaattctccgagaag

SEQ ID NO: 223475 - DNA, 25 bp, Artificial
  Probe
tacatcctatacatggtgaacggcg

SEQ ID NO: 223476 - DNA, 25 bp, Artificial
  Probe
ccctgggctttgagttccgacctgg

SEQ ID NO: 223477 - DNA, 25 bp, Artificial
  Probe
cggcagagcgcatggaacggtacat

SEQ ID NO: 223478 - DNA, 25 bp, Artificial
  Probe
cagcgaggcttcaagcgctgggaat

SEQ ID NO: 223479 - DNA, 25 bp, Artificial
  Probe
ctttgagttccgacctggacacgag

SEQ ID NO: 223480 - DNA, 25 bp, Artificial
  Probe
ccgacctggacacgagtactactac

SEQ ID NO: 223481 - DNA, 25 bp, Artificial
  Probe
tacctggacatctattgcccgcact

SEQ ID NO: 223482 - DNA, 25 bp, Artificial
  Probe
tgggctttgagttccgacctggaca

SEQ ID NO: 223483 - DNA, 25 bp, Artificial
  Probe
cctggacacgagtactactacatct

SEQ ID NO: 223484 - DNA, 25 bp, Artificial
  Probe
ggcagagcgcatggaacggtacatc

SEQ ID NO: 223485 - DNA, 25 bp, Artificial
  Probe
ttgcccgcactatggggcgccactg

SEQ ID NO: 223486 - DNA, 25 bp, Artificial
  Probe
agttccgacctggacacgagtacta

SEQ ID NO: 223487 - DNA, 25 bp, Artificial
  Probe
ctataccgtggaggtgagcatcaat

SEQ ID NO: 223488 - DNA, 25 bp, Artificial
  Probe
tgagttccgacctggacacgagtac

SEQ ID NO: 223489 - DNA, 25 bp, Artificial
  Probe
agcgctgggaatgcaaccggcccgc

SEQ ID NO: 223490 - DNA, 25 bp, Artificial
  Probe
cgcatggaacggtacatcctataca

SEQ ID NO: 223491 - DNA, 25 bp, Artificial
  Probe
gcatggaacggtacatcctatacat

SEQ ID NO: 223492 - DNA, 25 bp, Artificial
  Probe
atcctatacatggtgaacggcgagg

SEQ ID NO: 223493 - DNA, 25 bp, Artificial
  Probe
gcgctgggaatgcaaccggcccgct

SEQ ID NO: 223494 - DNA, 25 bp, Artificial
  Probe
tgtcctgtaaaatggcatttgaagc

SEQ ID NO: 223495 - DNA, 25 bp, Artificial
  Probe
tggaggaatcacttaccaggatcag

SEQ ID NO: 223496 - DNA, 25 bp, Artificial
  Probe
tctctctgcaccatccatagggcaa

SEQ ID NO: 223497 - DNA, 25 bp, Artificial
  Probe
caagagtgggctttcacctctttca

SEQ ID NO: 223498 - DNA, 25 bp, Artificial
  Probe
cgctgtggaggaccagtattactgc

SEQ ID NO: 223499 - DNA, 25 bp, Artificial
  Probe
aggctccagtgtggtggcctatgaa

SEQ ID NO: 223500 - DNA, 25 bp, Artificial
  Probe
gcacgactactgcttccactgcaaa

SEQ ID NO: 223501 - DNA, 25 bp, Artificial
  Probe
gcctatgaaggacaatcctggcacg

SEQ ID NO: 223502 - DNA, 25 bp, Artificial
  Probe
catccatagggcaagagtgggcttt

SEQ ID NO: 223503 - DNA, 25 bp, Artificial
  Probe
gtggtggcctatgaaggacaatcct

SEQ ID NO: 223504 - DNA, 25 bp, Artificial
  Probe
gaggaccagtattactgcgtggatt

SEQ ID NO: 223505 - DNA, 25 bp, Artificial
  Probe
gggctttcacctctttcaaattgct

SEQ ID NO: 223506 - DNA, 25 bp, Artificial
  Probe
tgcaagaaccccatcactgggtttg

SEQ ID NO: 223507 - DNA, 25 bp, Artificial
  Probe
aactttgtggccaagaagtgtgctg

SEQ ID NO: 223508 - DNA, 25 bp, Artificial
  Probe
caagaaccccatcactgggtttggt

SEQ ID NO: 223509 - DNA, 25 bp, Artificial
  Probe
tcactgggtttggtaaaggctccag

SEQ ID NO: 223510 - DNA, 25 bp, Artificial
  Probe
ggaggaatcacttaccaggatcagc

SEQ ID NO: 223511 - DNA, 25 bp, Artificial
  Probe
ctttgtggccaagaagtgtgctgga

SEQ ID NO: 223512 - DNA, 25 bp, Artificial
  Probe
cttgacaggggctcctgtcctgtaa

SEQ ID NO: 223513 - DNA, 25 bp, Artificial
  Probe
tggcacgactactgcttccactgca

SEQ ID NO: 223514 - DNA, 25 bp, Artificial
  Probe
ccatagggcaagagtgggctttcac

SEQ ID NO: 223515 - DNA, 25 bp, Artificial
  Probe
tgccaaaaagctgtaacttgacagg

SEQ ID NO: 223516 - DNA, 25 bp, Artificial
  Probe
tgccgagtgctttgtgtgtgttacc

SEQ ID NO: 223517 - DNA, 25 bp, Artificial
  Probe
ctgactgtgccaaaaagctgtaact

SEQ ID NO: 223518 - DNA, 25 bp, Artificial
  Probe
taaaggctccagtgtggtggcctat

SEQ ID NO: 223519 - DNA, 25 bp, Artificial
  Probe
tgcaccatccatagggcaagagtgg

SEQ ID NO: 223520 - DNA, 25 bp, Artificial
  Probe
ataatttctctgttgctgcaatggc

SEQ ID NO: 223521 - DNA, 25 bp, Artificial
  Probe
acaagaactttgtggccaagaagtg

SEQ ID NO: 223522 - DNA, 25 bp, Artificial
  Probe
cccatcactgggtttggtaaaggct

SEQ ID NO: 223523 - DNA, 25 bp, Artificial
  Probe
acatctggaggaatcacttaccagg

SEQ ID NO: 223524 - DNA, 25 bp, Artificial
  Probe
ctgcaccatccatagggcaagagtg

SEQ ID NO: 223525 - DNA, 25 bp, Artificial
  Probe
caggatcagccctggcatgccgagt

SEQ ID NO: 223526 - DNA, 25 bp, Artificial
  Probe
aaagctgtaacttgacaggggctcc

SEQ ID NO: 223527 - DNA, 25 bp, Artificial
  Probe
gcgtttcaccgctgtggaggaccag

SEQ ID NO: 223528 - DNA, 25 bp, Artificial
  Probe
agtgctttgtgtgtgttacctgctc

SEQ ID NO: 223529 - DNA, 25 bp, Artificial
  Probe
ctgcgtggattgctacaagaacttt

SEQ ID NO: 223530 - DNA, 25 bp, Artificial
  Probe
gacacacagtgatcatattagaatt

SEQ ID NO: 223531 - DNA, 25 bp, Artificial
  Probe
tgcttccactgcaaaaaatgctccg

SEQ ID NO: 223532 - DNA, 25 bp, Artificial
  Probe
tttacagtattaatcaaccgaggac

SEQ ID NO: 223533 - DNA, 25 bp, Artificial
  Probe
ttccactgcaaaaaatgctccgtga

SEQ ID NO: 223534 - DNA, 25 bp, Artificial
  Probe
gactgtgccaaaaagctgtaacttg

SEQ ID NO: 223535 - DNA, 25 bp, Artificial
  Probe
gtgtggtggcctatgaaggacaatc

SEQ ID NO: 223536 - DNA, 25 bp, Artificial
  Probe
gttacctgctctaagaagctggcgg

SEQ ID NO: 223537 - DNA, 25 bp, Artificial
  Probe
aatcctggcacgactactgcttcca

SEQ ID NO: 223538 - DNA, 25 bp, Artificial
  Probe
ctgtaacttgacaggggctcctgtc

SEQ ID NO: 223539 - DNA, 25 bp, Artificial
  Probe
tagaaaagagcaacctcgcaggaaa

SEQ ID NO: 223540 - DNA, 25 bp, Artificial
  Probe
aggaccgtcccgagggagtgcaaca

SEQ ID NO: 223541 - DNA, 25 bp, Artificial
  Probe
atactcactgtttccttagtacagg

SEQ ID NO: 223542 - DNA, 25 bp, Artificial
  Probe
tatgccataggcaccatactcactg

SEQ ID NO: 223543 - DNA, 25 bp, Artificial
  Probe
agctatggtggctgggatacccaag

SEQ ID NO: 223544 - DNA, 25 bp, Artificial
  Probe
acacagagcaacacacgacacacga

SEQ ID NO: 223545 - DNA, 25 bp, Artificial
  Probe
gaacaagcacgcagcggactgacga

SEQ ID NO: 223546 - DNA, 25 bp, Artificial
  Probe
tgtgctatgccataggcaccatact

SEQ ID NO: 223547 - DNA, 25 bp, Artificial
  Probe
tcccgagggagtgcaacactgacgc

SEQ ID NO: 223548 - DNA, 25 bp, Artificial
  Probe
gttacaacacacagagcaacacacg

SEQ ID NO: 223549 - DNA, 25 bp, Artificial
  Probe
agcctcgatttgttacaacacacag

SEQ ID NO: 223550 - DNA, 25 bp, Artificial
  Probe
catgcagtgtctgtagagctatggt

SEQ ID NO: 223551 - DNA, 25 bp, Artificial
  Probe
accgatcacgacaacgaacacaacg

SEQ ID NO: 223552 - DNA, 25 bp, Artificial
  Probe
gcgggaacttcgatgtaggaccgtc

SEQ ID NO: 223553 - DNA, 25 bp, Artificial
  Probe
agaacacaaccgatcacgacaacga

SEQ ID NO: 223554 - DNA, 25 bp, Artificial
  Probe
cgagaacgcggtctacacgtctgac

SEQ ID NO: 223555 - DNA, 25 bp, Artificial
  Probe
gccataggcaccatactcactgttt

SEQ ID NO: 223556 - DNA, 25 bp, Artificial
  Probe
caagaagaacacaaccgatcacgac

SEQ ID NO: 223557 - DNA, 25 bp, Artificial
  Probe
aacgcgcacagcacacaaccgagga

SEQ ID NO: 223558 - DNA, 25 bp, Artificial
  Probe
cagtgtctgtagagctatggtggct

SEQ ID NO: 223559 - DNA, 25 bp, Artificial
  Probe
ggagtgcaacactgacgcccaacgg

SEQ ID NO: 223560 - DNA, 25 bp, Artificial
  Probe
agcacgcagcggactgacgataagc

SEQ ID NO: 223561 - DNA, 25 bp, Artificial
  Probe
ccgctcttttctccacacggaaaga

SEQ ID NO: 223562 - DNA, 25 bp, Artificial
  Probe
cagacagacacacgacacacaaacg

SEQ ID NO: 223563 - DNA, 25 bp, Artificial
  Probe
ttagtacagggagcagaagctcttg

SEQ ID NO: 223564 - DNA, 25 bp, Artificial
  Probe
agaacgcggtctacacgtctgacct

SEQ ID NO: 223565 - DNA, 25 bp, Artificial
  Probe
agtaagacactttcatgtcctatgt

SEQ ID NO: 223566 - DNA, 25 bp, Artificial
  Probe
ggagcagaagctcttggttaccact

SEQ ID NO: 223567 - DNA, 25 bp, Artificial
  Probe
gttaccactacacatggaatagcaa

SEQ ID NO: 223568 - DNA, 25 bp, Artificial
  Probe
cagcggactgacgataagcaagtac

SEQ ID NO: 223569 - DNA, 25 bp, Artificial
  Probe
cacagtgtgctatgccataggcacc

SEQ ID NO: 223570 - DNA, 25 bp, Artificial
  Probe
cttagtacagggagcagaagctctt

SEQ ID NO: 223571 - DNA, 25 bp, Artificial
  Probe
gcacagcacacaaccgaggaaacaa

SEQ ID NO: 223572 - DNA, 25 bp, Artificial
  Probe
agtgcaacactgacgcccaacggat

SEQ ID NO: 223573 - DNA, 25 bp, Artificial
  Probe
gacaacgaacacaacgcgcacagca

SEQ ID NO: 223574 - DNA, 25 bp, Artificial
  Probe
ggcaccatactcactgtttccttag

SEQ ID NO: 223575 - DNA, 25 bp, Artificial
  Probe
caaagaacaagcacgcagcggactg

SEQ ID NO: 223576 - DNA, 25 bp, Artificial
  Probe
ccgtcccgagggagtgcaacactga

SEQ ID NO: 223577 - DNA, 25 bp, Artificial
  Probe
gctgggatacccaagctggttcaca

SEQ ID NO: 223578 - DNA, 25 bp, Artificial
  Probe
tttccttagtacagggagcagaagc

SEQ ID NO: 223579 - DNA, 25 bp, Artificial
  Probe
cttcgatgtaggaccgtcccgaggg

SEQ ID NO: 223580 - DNA, 25 bp, Artificial
  Probe
gatttgttacaacacacagagcaac

SEQ ID NO: 223581 - DNA, 25 bp, Artificial
  Probe
caagtacagacagacacacgacaca

SEQ ID NO: 223582 - DNA, 25 bp, Artificial
  Probe
gaacacaaccgatcacgacaacgaa

SEQ ID NO: 223583 - DNA, 25 bp, Artificial
  Probe
acaacaaagaacaagcacgcagcgg

SEQ ID NO: 223584 - DNA, 25 bp, Artificial
  Probe
cctatgtcgagaacgcggtctacac

SEQ ID NO: 223585 - DNA, 25 bp, Artificial
  Probe
gctcttttctccacacggaaagaaa

SEQ ID NO: 223586 - DNA, 25 bp, Artificial
  Probe
cctgcgaatatggatactggtgctc

SEQ ID NO: 223587 - DNA, 25 bp, Artificial
  Probe
cctcaactgtattggccttgcagtg

SEQ ID NO: 223588 - DNA, 25 bp, Artificial
  Probe
atatgacccgcgaatctattcctgc

SEQ ID NO: 223589 - DNA, 25 bp, Artificial
  Probe
gtggttttcgccatatgctgggccc

SEQ ID NO: 223590 - DNA, 25 bp, Artificial
  Probe
tgtggggtctctagaatatgacccg

SEQ ID NO: 223591 - DNA, 25 bp, Artificial
  Probe
ggtctctagaatatgacccgcgaat

SEQ ID NO: 223592 - DNA, 25 bp, Artificial
  Probe
tggtggccttggtgcccaatttctt

SEQ ID NO: 223593 - DNA, 25 bp, Artificial
  Probe
tactggtgctccaggcccgaaggaa

SEQ ID NO: 223594 - DNA, 25 bp, Artificial
  Probe
tggtgcatctgtcacagtgcgacct

SEQ ID NO: 223595 - DNA, 25 bp, Artificial
  Probe
atgacccgcgaatctattcctgcac

SEQ ID NO: 223596 - DNA, 25 bp, Artificial
  Probe
gccttggtgcccaatttctttgtgg

SEQ ID NO: 223597 - DNA, 25 bp, Artificial
  Probe
tgtggtggccatccacttcctcctt

SEQ ID NO: 223598 - DNA, 25 bp, Artificial
  Probe
aatatggatactggtgctccaggcc

SEQ ID NO: 223599 - DNA, 25 bp, Artificial
  Probe
tcaacagctgccttaatgctattgt

SEQ ID NO: 223600 - DNA, 25 bp, Artificial
  Probe
gctacgcctgagacccagtgacctg

SEQ ID NO: 223601 - DNA, 25 bp, Artificial
  Probe
taccaccgagcctgcagtcagtggc

SEQ ID NO: 223602 - DNA, 25 bp, Artificial
  Probe
ctttgtggggtctctagaatatgac

SEQ ID NO: 223603 - DNA, 25 bp, Artificial
  Probe
ccaatttctttgtggggtctctaga

SEQ ID NO: 223604 - DNA, 25 bp, Artificial
  Probe
ctatggctgtggtggccatccactt

SEQ ID NO: 223605 - DNA, 25 bp, Artificial
  Probe
ttggccttgcagtggccatcaatcc

SEQ ID NO: 223606 - DNA, 25 bp, Artificial
  Probe
gacccagtgacctgcgcagtttcct

SEQ ID NO: 223607 - DNA, 25 bp, Artificial
  Probe
agccagcacccaatacactatggct

SEQ ID NO: 223608 - DNA, 25 bp, Artificial
  Probe
ccaggcccgaaggaaggcaaaggct

SEQ ID NO: 223609 - DNA, 25 bp, Artificial
  Probe
ctgtattggccttgcagtggccatc

SEQ ID NO: 223610 - DNA, 25 bp, Artificial
  Probe
gcctgagacccagtgacctgcgcag

SEQ ID NO: 223611 - DNA, 25 bp, Artificial
  Probe
agtgacctgcgcagtttcctaacca

SEQ ID NO: 223612 - DNA, 25 bp, Artificial
  Probe
agcctgcagtcagtggcatgctccc

SEQ ID NO: 223613 - DNA, 25 bp, Artificial
  Probe
tcccagaagggctttttgtcaccag

SEQ ID NO: 223614 - DNA, 25 bp, Artificial
  Probe
tgtttgtggttttcgccatatgctg

SEQ ID NO: 223615 - DNA, 25 bp, Artificial
  Probe
gaggcaatggctcttcagatcccag

SEQ ID NO: 223616 - DNA, 25 bp, Artificial
  Probe
tcagatcccagaagggctttttgtc

SEQ ID NO: 223617 - DNA, 25 bp, Artificial
  Probe
cccctcaactgtattggccttgcag

SEQ ID NO: 223618 - DNA, 25 bp, Artificial
  Probe
ggttttcgccatatgctgggccccc

SEQ ID NO: 223619 - DNA, 25 bp, Artificial
  Probe
cttcctccttccaattgctgtggtg

SEQ ID NO: 223620 - DNA, 25 bp, Artificial
  Probe
gaaagctacgcctgagacccagtga

SEQ ID NO: 223621 - DNA, 25 bp, Artificial
  Probe
cttgcagtggccatcaatccagagg

SEQ ID NO: 223622 - DNA, 25 bp, Artificial
  Probe
tgagagaaagctacgcctgagaccc

SEQ ID NO: 223623 - DNA, 25 bp, Artificial
  Probe
ctctagaatatgacccgcgaatcta

SEQ ID NO: 223624 - DNA, 25 bp, Artificial
  Probe
cccagaagggctttttgtcaccagt

SEQ ID NO: 223625 - DNA, 25 bp, Artificial
  Probe
ccttttgctacctgcgaatatggat

SEQ ID NO: 223626 - DNA, 25 bp, Artificial
  Probe
ttctcactctggtggccttggtgcc

SEQ ID NO: 223627 - DNA, 25 bp, Artificial
  Probe
ggcttctcactctggtggccttggt

SEQ ID NO: 223628 - DNA, 25 bp, Artificial
  Probe
tgtcacagtgcgacctaccaccgag

SEQ ID NO: 223629 - DNA, 25 bp, Artificial
  Probe
actctggtggccttggtgcccaatt

SEQ ID NO: 223630 - DNA, 25 bp, Artificial
  Probe
atccagaggcaatggctcttcagat

SEQ ID NO: 223631 - DNA, 25 bp, Artificial
  Probe
ctgagagaaagctacgcctgagacc

SEQ ID NO: 223632 - DNA, 25 bp, Artificial
  Probe
atgcaagcacagatgcggtctgtgc

SEQ ID NO: 223633 - DNA, 25 bp, Artificial
  Probe
gggtcaagagccagggcctagccaa

SEQ ID NO: 223634 - DNA, 25 bp, Artificial
  Probe
atctacgtatctcagccagagccca

SEQ ID NO: 223635 - DNA, 25 bp, Artificial
  Probe
agagccagggcctagccaaactcca

SEQ ID NO: 223636 - DNA, 25 bp, Artificial
  Probe
aaacgtgatatgcagtgcctgtgcc

SEQ ID NO: 223637 - DNA, 25 bp, Artificial
  Probe
cccatcattgaaccaagcatcacgg

SEQ ID NO: 223638 - DNA, 25 bp, Artificial
  Probe
ccagcccatgggtcaagagccaggg

SEQ ID NO: 223639 - DNA, 25 bp, Artificial
  Probe
tcctggaaatgcaagcacagatgcg

SEQ ID NO: 223640 - DNA, 25 bp, Artificial
  Probe
catccctgtgtccttgggttcaacc

SEQ ID NO: 223641 - DNA, 25 bp, Artificial
  Probe
ccacacatccctgtgtccttgggtt

SEQ ID NO: 223642 - DNA, 25 bp, Artificial
  Probe
aagcatcacgggtggcatctctctt

SEQ ID NO: 223643 - DNA, 25 bp, Artificial
  Probe
accacatcatccacagatgtgtgca

SEQ ID NO: 223644 - DNA, 25 bp, Artificial
  Probe
tgcctgtgcccctgggacgttctct

SEQ ID NO: 223645 - DNA, 25 bp, Artificial
  Probe
ttaggactggcgacctgcttcatcc

SEQ ID NO: 223646 - DNA, 25 bp, Artificial
  Probe
gcctcatctgcctgatgacaaatcc

SEQ ID NO: 223647 - DNA, 25 bp, Artificial
  Probe
tatctcagccagagcccacaagatc

SEQ ID NO: 223648 - DNA, 25 bp, Artificial
  Probe
gtctgctgatgttaggactggcgac

SEQ ID NO: 223649 - DNA, 25 bp, Artificial
  Probe
ggacgttctctgacaccacatcatc

SEQ ID NO: 223650 - DNA, 25 bp, Artificial
  Probe
acctcaaatggaaacgtgatatgca

SEQ ID NO: 223651 - DNA, 25 bp, Artificial
  Probe
tggtgcctcatctgcctgatgacaa

SEQ ID NO: 223652 - DNA, 25 bp, Artificial
  Probe
gcggtctgtgcatccgagtccccaa

SEQ ID NO: 223653 - DNA, 25 bp, Artificial
  Probe
atccacagatgtgtgcaggccccac

SEQ ID NO: 223654 - DNA, 25 bp, Artificial
  Probe
ctcctgcctacaacgagaaaccatg

SEQ ID NO: 223655 - DNA, 25 bp, Artificial
  Probe
gacaactctgggtctgctgatgtta

SEQ ID NO: 223656 - DNA, 25 bp, Artificial
  Probe
gagaaaccatggtgcctcatctgcc

SEQ ID NO: 223657 - DNA, 25 bp, Artificial
  Probe
atgcagtgcctgtgcccctgggacg

SEQ ID NO: 223658 - DNA, 25 bp, Artificial
  Probe
cgtatctcagccagagcccacaaga

SEQ ID NO: 223659 - DNA, 25 bp, Artificial
  Probe
gacctgcttcatcctggtgcagagg

SEQ ID NO: 223660 - DNA, 25 bp, Artificial
  Probe
aactccaagcgctggtccaaggaca

SEQ ID NO: 223661 - DNA, 25 bp, Artificial
  Probe
cccatgggtcaagagccagggccta

SEQ ID NO: 223662 - DNA, 25 bp, Artificial
  Probe
gtgcccctgggacgttctctgacac

SEQ ID NO: 223663 - DNA, 25 bp, Artificial
  Probe
gaaatgcaagcacagatgcggtctg

SEQ ID NO: 223664 - DNA, 25 bp, Artificial
  Probe
tgatgttaggactggcgacctgctt

SEQ ID NO: 223665 - DNA, 25 bp, Artificial
  Probe
tttgtagcatcctggctattcctgg

SEQ ID NO: 223666 - DNA, 25 bp, Artificial
  Probe
gactgacaactctgggtctgctgat

SEQ ID NO: 223667 - DNA, 25 bp, Artificial
  Probe
atatgcagtgcctgtgcccctggga

SEQ ID NO: 223668 - DNA, 25 bp, Artificial
  Probe
cctgggacgttctctgacaccacat

SEQ ID NO: 223669 - DNA, 25 bp, Artificial
  Probe
gcacagatgcggtctgtgcatccga

SEQ ID NO: 223670 - DNA, 25 bp, Artificial
  Probe
tggcgacctgcttcatcctggtgca

SEQ ID NO: 223671 - DNA, 25 bp, Artificial
  Probe
tgtgcccctgggacgttctctgaca

SEQ ID NO: 223672 - DNA, 25 bp, Artificial
  Probe
tctgggtctgctgatgttaggactg

SEQ ID NO: 223673 - DNA, 25 bp, Artificial
  Probe
ttcatcctggtgcagaggaaaaaga

SEQ ID NO: 223674 - DNA, 25 bp, Artificial
  Probe
ccaccgcatttgtagcatcctggct

SEQ ID NO: 223675 - DNA, 25 bp, Artificial
  Probe
atcacgggtggcatctctcttccaa

SEQ ID NO: 223676 - DNA, 25 bp, Artificial
  Probe
tgacaccacatcatccacagatgtg

SEQ ID NO: 223677 - DNA, 25 bp, Artificial
  Probe
gaaccaagcatcacgggtggcatct

SEQ ID NO: 223678 - DNA, 25 bp, Artificial
  Probe
ctggcccttgggtcaaggctatccc

SEQ ID NO: 223679 - DNA, 25 bp, Artificial
  Probe
gtcattggtgagtccctggctgtgt

SEQ ID NO: 223680 - DNA, 25 bp, Artificial
  Probe
ggaagtatgccagcagcatgctgaa

SEQ ID NO: 223681 - DNA, 25 bp, Artificial
  Probe
ctttcatgggcctatggccaggggc

SEQ ID NO: 223682 - DNA, 25 bp, Artificial
  Probe
cgggaccgcatgtggcttaagatca

SEQ ID NO: 223683 - DNA, 25 bp, Artificial
  Probe
tggtggactggctgtacacacacgt

SEQ ID NO: 223684 - DNA, 25 bp, Artificial
  Probe
ccctgactttcatgggcctatggcc

SEQ ID NO: 223685 - DNA, 25 bp, Artificial
  Probe
tctggtgtagcttcccagggctcag

SEQ ID NO: 223686 - DNA, 25 bp, Artificial
  Probe
gggtcaaggctatccctaccagtac

SEQ ID NO: 223687 - DNA, 25 bp, Artificial
  Probe
agcatggtttcctgcggcacacggt

SEQ ID NO: 223688 - DNA, 25 bp, Artificial
  Probe
ccagcagcatgctgaagcatggttt

SEQ ID NO: 223689 - DNA, 25 bp, Artificial
  Probe
cggcacacggtgaacaagatcactt

SEQ ID NO: 223690 - DNA, 25 bp, Artificial
  Probe
atcaccattgccaatgctgtcattg

SEQ ID NO: 223691 - DNA, 25 bp, Artificial
  Probe
tggtgacctgtgcagcagtgagtaa

SEQ ID NO: 223692 - DNA, 25 bp, Artificial
  Probe
cctgtgcagcagtgagtaagggtta

SEQ ID NO: 223693 - DNA, 25 bp, Artificial
  Probe
tgcggcacacggtgaacaagatcac

SEQ ID NO: 223694 - DNA, 25 bp, Artificial
  Probe
caggaccctggcttcagctatggca

SEQ ID NO: 223695 - DNA, 25 bp, Artificial
  Probe
acctgtgcagcagtgagtaagggtt

SEQ ID NO: 223696 - DNA, 25 bp, Artificial
  Probe
gatgtggtggactggctgtacacac

SEQ ID NO: 223697 - DNA, 25 bp, Artificial
  Probe
ttcagctatggcagtggcagtgctg

SEQ ID NO: 223698 - DNA, 25 bp, Artificial
  Probe
cctgaacctcaacagtggctccagt

SEQ ID NO: 223699 - DNA, 25 bp, Artificial
  Probe
cagggctcagctaccctgactttca

SEQ ID NO: 223700 - DNA, 25 bp, Artificial
  Probe
tcgcatccctgaacctcaacagtgg

SEQ ID NO: 223701 - DNA, 25 bp, Artificial
  Probe
aggaagtatgccagcagcatgctga

SEQ ID NO: 223702 - DNA, 25 bp, Artificial
  Probe
gtttcctgcggcacacggtgaacaa

SEQ ID NO: 223703 - DNA, 25 bp, Artificial
  Probe
agcctcagatcaggacacactggcc

SEQ ID NO: 223704 - DNA, 25 bp, Artificial
  Probe
atgtggcttaagatcaccattgcca

SEQ ID NO: 223705 - DNA, 25 bp, Artificial
  Probe
gcatccctgaacctcaacagtggct

SEQ ID NO: 223706 - DNA, 25 bp, Artificial
  Probe
tggcttcagctatggcagtggcagt

SEQ ID NO: 223707 - DNA, 25 bp, Artificial
  Probe
taagatcaccattgccaatgctgtc

SEQ ID NO: 223708 - DNA, 25 bp, Artificial
  Probe
ttattgtggggctcatccatttgcc

SEQ ID NO: 223709 - DNA, 25 bp, Artificial
  Probe
ttaccaggaccctggcttcagctat

SEQ ID NO: 223710 - DNA, 25 bp, Artificial
  Probe
ggactggctgtacacacacgtggag

SEQ ID NO: 223711 - DNA, 25 bp, Artificial
  Probe
gctcagctaccctgactttcatggg

SEQ ID NO: 223712 - DNA, 25 bp, Artificial
  Probe
agatcaggacacactggccccactg

SEQ ID NO: 223713 - DNA, 25 bp, Artificial
  Probe
ccgcatgtggcttaagatcaccatt

SEQ ID NO: 223714 - DNA, 25 bp, Artificial
  Probe
ttcctgcggcacacggtgaacaaga

SEQ ID NO: 223715 - DNA, 25 bp, Artificial
  Probe
gtaccctggcccttgggtcaaggct

SEQ ID NO: 223716 - DNA, 25 bp, Artificial
  Probe
ttgggtcaaggctatccctaccagt

SEQ ID NO: 223717 - DNA, 25 bp, Artificial
  Probe
ctcaacagtggctccagtggagcct

SEQ ID NO: 223718 - DNA, 25 bp, Artificial
  Probe
gggctcatccatttgccctcactta

SEQ ID NO: 223719 - DNA, 25 bp, Artificial
  Probe
tccctggctgtgtgggaaggaccca

SEQ ID NO: 223720 - DNA, 25 bp, Artificial
  Probe
tggctccagtggagcctcagatcag

SEQ ID NO: 223721 - DNA, 25 bp, Artificial
  Probe
gaacctcaacagtggctccagtgga

SEQ ID NO: 223722 - DNA, 25 bp, Artificial
  Probe
gtgaacaagatcactttctctgagc

SEQ ID NO: 223723 - DNA, 25 bp, Artificial
  Probe
gggaaggacccagtctgttcttcat

SEQ ID NO: 223724 - DNA, 25 bp, Artificial
  Probe
tctcagaagcccaaggaagagtggt

SEQ ID NO: 223725 - DNA, 25 bp, Artificial
  Probe
cttcaaagagcctgctcccagaggg

SEQ ID NO: 223726 - DNA, 25 bp, Artificial
  Probe
caaggaagagtggtcttgggcttca

SEQ ID NO: 223727 - DNA, 25 bp, Artificial
  Probe
ggccttcagacctaggactagatgg

SEQ ID NO: 223728 - DNA, 25 bp, Artificial
  Probe
ttcaaagagcctgctcccagagggc

SEQ ID NO: 223729 - DNA, 25 bp, Artificial
  Probe
gcaaattctgcttcacccagaagct

SEQ ID NO: 223730 - DNA, 25 bp, Artificial
  Probe
acaccctgagtcagcgtaagcctgg

SEQ ID NO: 223731 - DNA, 25 bp, Artificial
  Probe
aatcctgcttcaaagagcctgctcc

SEQ ID NO: 223732 - DNA, 25 bp, Artificial
  Probe
agaagcttcggttctcaccatgaac

SEQ ID NO: 223733 - DNA, 25 bp, Artificial
  Probe
gggtatctcagaagcccaaggaaga

SEQ ID NO: 223734 - DNA, 25 bp, Artificial
  Probe
tctgcttcacccagaagcttcggtt

SEQ ID NO: 223735 - DNA, 25 bp, Artificial
  Probe
gaagcttcggttctcaccatgaacc

SEQ ID NO: 223736 - DNA, 25 bp, Artificial
  Probe
cactgattcagttttcgtgcctctt

SEQ ID NO: 223737 - DNA, 25 bp, Artificial
  Probe
tttcctgtgggtctggggtcctgcc

SEQ ID NO: 223738 - DNA, 25 bp, Artificial
  Probe
cttttcccacagattctgcagtttg

SEQ ID NO: 223739 - DNA, 25 bp, Artificial
  Probe
aagcactttctttgggctgccccac

SEQ ID NO: 223740 - DNA, 25 bp, Artificial
  Probe
tgagtcaaagacactaacagggggt

SEQ ID NO: 223741 - DNA, 25 bp, Artificial
  Probe
tacaaggctgaccactcagggcctt

SEQ ID NO: 223742 - DNA, 25 bp, Artificial
  Probe
ccgcaaattctgcttcacccagaag

SEQ ID NO: 223743 - DNA, 25 bp, Artificial
  Probe
ccactcagggccttcagacctagga

SEQ ID NO: 223744 - DNA, 25 bp, Artificial
  Probe
caaagagcctgctcccagagggcag

SEQ ID NO: 223745 - DNA, 25 bp, Artificial
  Probe
ccacagattctgcagtttgcaaaaa

SEQ ID NO: 223746 - DNA, 25 bp, Artificial
  Probe
aaccacttccctgagtgctgtggtt

SEQ ID NO: 223747 - DNA, 25 bp, Artificial
  Probe
tccaggctgccctctggtcagggag

SEQ ID NO: 223748 - DNA, 25 bp, Artificial
  Probe
aagcttcggttctcaccatgaaccc

SEQ ID NO: 223749 - DNA, 25 bp, Artificial
  Probe
caaccacttccctgagtgctgtggt

SEQ ID NO: 223750 - DNA, 25 bp, Artificial
  Probe
ccaggctgccctctggtcagggaga

SEQ ID NO: 223751 - DNA, 25 bp, Artificial
  Probe
ttcagacctaggactagatggcccc

SEQ ID NO: 223752 - DNA, 25 bp, Artificial
  Probe
cagacctaggactagatggcccctc

SEQ ID NO: 223753 - DNA, 25 bp, Artificial
  Probe
agaagcccaaggaagagtggtcttg

SEQ ID NO: 223754 - DNA, 25 bp, Artificial
  Probe
ttcctgtgggtctggggtcctgcct

SEQ ID NO: 223755 - DNA, 25 bp, Artificial
  Probe
aaggctgaccactcagggccttcag

SEQ ID NO: 223756 - DNA, 25 bp, Artificial
  Probe
ccttcagacctaggactagatggcc

SEQ ID NO: 223757 - DNA, 25 bp, Artificial
  Probe
ggggctccaggctgccctctggtca

SEQ ID NO: 223758 - DNA, 25 bp, Artificial
  Probe
ttcacccagaagcttcggttctcac

SEQ ID NO: 223759 - DNA, 25 bp, Artificial
  Probe
gattcagttttcgtgcctctttaaa

SEQ ID NO: 223760 - DNA, 25 bp, Artificial
  Probe
aggggtatctcagaagcccaaggaa

SEQ ID NO: 223761 - DNA, 25 bp, Artificial
  Probe
ggctgaccactcagggccttcagac

SEQ ID NO: 223762 - DNA, 25 bp, Artificial
  Probe
gtagtgtaagcactttctttgggct

SEQ ID NO: 223763 - DNA, 25 bp, Artificial
  Probe
cacaccctgagtcagcgtaagcctg

SEQ ID NO: 223764 - DNA, 25 bp, Artificial
  Probe
cggggacactgattcagttttcgtg

SEQ ID NO: 223765 - DNA, 25 bp, Artificial
  Probe
gattctgcagtttgcaaaaactcaa

SEQ ID NO: 223766 - DNA, 25 bp, Artificial
  Probe
tttcccacagattctgcagtttgca

SEQ ID NO: 223767 - DNA, 25 bp, Artificial
  Probe
ccctgagtgctgtggtttcctgtgg

SEQ ID NO: 223768 - DNA, 25 bp, Artificial
  Probe
ggacactgattcagttttcgtgcct

SEQ ID NO: 223769 - DNA, 25 bp, Artificial
  Probe
ttcggttctcaccatgaacccctgg

SEQ ID NO: 223770 - DNA, 25 bp, Artificial
  Probe
gcagtttgtgcctagtatgcccgag

SEQ ID NO: 223771 - DNA, 25 bp, Artificial
  Probe
cgacataatcttcaaggatgaggag

SEQ ID NO: 223772 - DNA, 25 bp, Artificial
  Probe
atcttcaaggatgaggagaacagcg

SEQ ID NO: 223773 - DNA, 25 bp, Artificial
  Probe
tgtggcccggagtacgcctacgcgt

SEQ ID NO: 223774 - DNA, 25 bp, Artificial
  Probe
gcaagcaacttgtgcctctgctcta

SEQ ID NO: 223775 - DNA, 25 bp, Artificial
  Probe
agagcgggtgaatgctctagccatc

SEQ ID NO: 223776 - DNA, 25 bp, Artificial
  Probe
acgcacaggactcactgcactacga

SEQ ID NO: 223777 - DNA, 25 bp, Artificial
  Probe
ggcggcgttacgtgcgcaagcaact

SEQ ID NO: 223778 - DNA, 25 bp, Artificial
  Probe
tagccatcgcggtgatgaacatgtg

SEQ ID NO: 223779 - DNA, 25 bp, Artificial
  Probe
atgctctagccatcgcggtgatgaa

SEQ ID NO: 223780 - DNA, 25 bp, Artificial
  Probe
gtgatgaacatgtggcccggagtac

SEQ ID NO: 223781 - DNA, 25 bp, Artificial
  Probe
cctacgcgtgactgaaggttgggac

SEQ ID NO: 223782 - DNA, 25 bp, Artificial
  Probe
aggactcactgcactacgaaggccg

SEQ ID NO: 223783 - DNA, 25 bp, Artificial
  Probe
tctgtccagagctgcgggccaggcc

SEQ ID NO: 223784 - DNA, 25 bp, Artificial
  Probe
ttgtgcctagtatgcccgagcggac

SEQ ID NO: 223785 - DNA, 25 bp, Artificial
  Probe
tacgcctacgcgtgactgaaggttg

SEQ ID NO: 223786 - DNA, 25 bp, Artificial
  Probe
acgcctacgcgtgactgaaggttgg

SEQ ID NO: 223787 - DNA, 25 bp, Artificial
  Probe
atcgcggtgatgaacatgtggcccg

SEQ ID NO: 223788 - DNA, 25 bp, Artificial
  Probe
cgttacgtgcgcaagcaacttgtgc

SEQ ID NO: 223789 - DNA, 25 bp, Artificial
  Probe
gcgctgaccgcctgatgacagagcg

SEQ ID NO: 223790 - DNA, 25 bp, Artificial
  Probe
cggagtacgcctacgcgtgactgaa

SEQ ID NO: 223791 - DNA, 25 bp, Artificial
  Probe
cataatcttcaaggatgaggagaac

SEQ ID NO: 223792 - DNA, 25 bp, Artificial
  Probe
gcaacttgtgcctctgctctacaag

SEQ ID NO: 223793 - DNA, 25 bp, Artificial
  Probe
cgcaagcaacttgtgcctctgctct

SEQ ID NO: 223794 - DNA, 25 bp, Artificial
  Probe
ccccgacataatcttcaaggatgag

SEQ ID NO: 223795 - DNA, 25 bp, Artificial
  Probe
ctagtatgcccgagcggacccttgg

SEQ ID NO: 223796 - DNA, 25 bp, Artificial
  Probe
acgaggatggccaccacgcacagga

SEQ ID NO: 223797 - DNA, 25 bp, Artificial
  Probe
catgtggcccggagtacgcctacgc

SEQ ID NO: 223798 - DNA, 25 bp, Artificial
  Probe
aaccccgacataatcttcaaggatg

SEQ ID NO: 223799 - DNA, 25 bp, Artificial
  Probe
cgggtgaatgctctagccatcgcgg

SEQ ID NO: 223800 - DNA, 25 bp, Artificial
  Probe
gcctgatgacagagcgttgcaaaga

SEQ ID NO: 223801 - DNA, 25 bp, Artificial
  Probe
acaagcagtttgtgcctagtatgcc

SEQ ID NO: 223802 - DNA, 25 bp, Artificial
  Probe
ccggagtacgcctacgcgtgactga

SEQ ID NO: 223803 - DNA, 25 bp, Artificial
  Probe
aggatggccaccacgcacaggactc

SEQ ID NO: 223804 - DNA, 25 bp, Artificial
  Probe
tgaccgcctgatgacagagcgttgc

SEQ ID NO: 223805 - DNA, 25 bp, Artificial
  Probe
ccggcggcgttacgtgcgcaagcaa

SEQ ID NO: 223806 - DNA, 25 bp, Artificial
  Probe
gccatcgcggtgatgaacatgtggc

SEQ ID NO: 223807 - DNA, 25 bp, Artificial
  Probe
acaggactcactgcactacgaaggc

SEQ ID NO: 223808 - DNA, 25 bp, Artificial
  Probe
aatgctctagccatcgcggtgatga

SEQ ID NO: 223809 - DNA, 25 bp, Artificial
  Probe
gctgaccgcctgatgacagagcgtt

SEQ ID NO: 223810 - DNA, 25 bp, Artificial
  Probe
tgtgcctctgctctacaagcagttt

SEQ ID NO: 223811 - DNA, 25 bp, Artificial
  Probe
atgcccgagcggacccttggcgcga

SEQ ID NO: 223812 - DNA, 25 bp, Artificial
  Probe
ctctgctctacaagcagtttgtgcc

SEQ ID NO: 223813 - DNA, 25 bp, Artificial
  Probe
ggtgaatgctctagccatcgcggtg

SEQ ID NO: 223814 - DNA, 25 bp, Artificial
  Probe
tgctctacaagcagtttgtgcctag

SEQ ID NO: 223815 - DNA, 25 bp, Artificial
  Probe
ttacgtgcgcaagcaacttgtgcct

SEQ ID NO: 223816 - DNA, 25 bp, Artificial
  Probe
gaatactgaactgtaccaacattga

SEQ ID NO: 223817 - DNA, 25 bp, Artificial
  Probe
aagcactggtcctgttcaaagaaaa

SEQ ID NO: 223818 - DNA, 25 bp, Artificial
  Probe
ccccatcttgtcagaaagagggatg

SEQ ID NO: 223819 - DNA, 25 bp, Artificial
  Probe
acagagccctgcaagaatactgaac

SEQ ID NO: 223820 - DNA, 25 bp, Artificial
  Probe
attccccatcttgtcagaaagaggg

SEQ ID NO: 223821 - DNA, 25 bp, Artificial
  Probe
agtggtccagccccacagacagagc

SEQ ID NO: 223822 - DNA, 25 bp, Artificial
  Probe
tttagctttatggaagtgtggattc

SEQ ID NO: 223823 - DNA, 25 bp, Artificial
  Probe
acaattccccatcttgtcagaaaga

SEQ ID NO: 223824 - DNA, 25 bp, Artificial
  Probe
actgaactgtaccaacattgactgc

SEQ ID NO: 223825 - DNA, 25 bp, Artificial
  Probe
attcaagcactggtcctgttcaaag

SEQ ID NO: 223826 - DNA, 25 bp, Artificial
  Probe
tagctttatggaagtgtggattctt

SEQ ID NO: 223827 - DNA, 25 bp, Artificial
  Probe
tactgaactgtaccaacattgactg

SEQ ID NO: 223828 - DNA, 25 bp, Artificial
  Probe
agccctgcaagaatactgaactgta

SEQ ID NO: 223829 - DNA, 25 bp, Artificial
  Probe
aattccccatcttgtcagaaagagg

SEQ ID NO: 223830 - DNA, 25 bp, Artificial
  Probe
caattccccatcttgtcagaaagag

SEQ ID NO: 223831 - DNA, 25 bp, Artificial
  Probe
tgagctcagtgccttcttaagaaat

SEQ ID NO: 223832 - DNA, 25 bp, Artificial
  Probe
ccatcttgtcagaaagagggatgtg

SEQ ID NO: 223833 - DNA, 25 bp, Artificial
  Probe
atactgaactgtaccaacattgact

SEQ ID NO: 223834 - DNA, 25 bp, Artificial
  Probe
ctgaactgtaccaacattgactgct

SEQ ID NO: 223835 - DNA, 25 bp, Artificial
  Probe
tgccttcttaagaaatgctacaatt

SEQ ID NO: 223836 - DNA, 25 bp, Artificial
  Probe
tcaagcactggtcctgttcaaagaa

SEQ ID NO: 223837 - DNA, 25 bp, Artificial
  Probe
agacagagccctgcaagaatactga

SEQ ID NO: 223838 - DNA, 25 bp, Artificial
  Probe
aagaaatgctacaattccccatctt

SEQ ID NO: 223839 - DNA, 25 bp, Artificial
  Probe
cccatcttgtcagaaagagggatgt

SEQ ID NO: 223840 - DNA, 25 bp, Artificial
  Probe
ccttcttaagaaatgctacaattcc

SEQ ID NO: 223841 - DNA, 25 bp, Artificial
  Probe
gagccctgcaagaatactgaactgt

SEQ ID NO: 223842 - DNA, 25 bp, Artificial
  Probe
agaatactgaactgtaccaacattg

SEQ ID NO: 223843 - DNA, 25 bp, Artificial
  Probe
cagacagagccctgcaagaatactg

SEQ ID NO: 223844 - DNA, 25 bp, Artificial
  Probe
aatactgaactgtaccaacattgac

SEQ ID NO: 223845 - DNA, 25 bp, Artificial
  Probe
cagtgccttcttaagaaatgctaca

SEQ ID NO: 223846 - DNA, 25 bp, Artificial
  Probe
caagcactggtcctgttcaaagaaa

SEQ ID NO: 223847 - DNA, 25 bp, Artificial
  Probe
agctcagtgccttcttaagaaatgc

SEQ ID NO: 223848 - DNA, 25 bp, Artificial
  Probe
tcagtgccttcttaagaaatgctac

SEQ ID NO: 223849 - DNA, 25 bp, Artificial
  Probe
gagctcagtgccttcttaagaaatg

SEQ ID NO: 223850 - DNA, 25 bp, Artificial
  Probe
aaagagggatgtgccagtggtccag

SEQ ID NO: 223851 - DNA, 25 bp, Artificial
  Probe
ttccccatcttgtcagaaagaggga

SEQ ID NO: 223852 - DNA, 25 bp, Artificial
  Probe
tgaactgtaccaacattgactgctt

SEQ ID NO: 223853 - DNA, 25 bp, Artificial
  Probe
atcttgtcagaaagagggatgtgcc

SEQ ID NO: 223854 - DNA, 25 bp, Artificial
  Probe
ctcagtgccttcttaagaaatgcta

SEQ ID NO: 223855 - DNA, 25 bp, Artificial
  Probe
ttcaagcactggtcctgttcaaaga

SEQ ID NO: 223856 - DNA, 25 bp, Artificial
  Probe
gctcagtgccttcttaagaaatgct

SEQ ID NO: 223857 - DNA, 25 bp, Artificial
  Probe
gtgccttcttaagaaatgctacaat

SEQ ID NO: 223858 - DNA, 25 bp, Artificial
  Probe
tccagccccacagacagagccctgc

SEQ ID NO: 223859 - DNA, 25 bp, Artificial
  Probe
gacagagccctgcaagaatactgaa

SEQ ID NO: 223860 - DNA, 25 bp, Artificial
  Probe
cccacagacagagccctgcaagaat

SEQ ID NO: 223861 - DNA, 25 bp, Artificial
  Probe
agtgccttcttaagaaatgctacaa

SEQ ID NO: 223862 - DNA, 25 bp, Artificial
  Probe
cgggctgaggcctgttttgtgaact

SEQ ID NO: 223863 - DNA, 25 bp, Artificial
  Probe
gcttcattgatacaagccagttcat

SEQ ID NO: 223864 - DNA, 25 bp, Artificial
  Probe
aagcctgggcctaagttggacagtc

SEQ ID NO: 223865 - DNA, 25 bp, Artificial
  Probe
acggaactttgctgggagaagtgca

SEQ ID NO: 223866 - DNA, 25 bp, Artificial
  Probe
atggagtcctcctcgtcctcttcgg

SEQ ID NO: 223867 - DNA, 25 bp, Artificial
  Probe
gaacgcttcattgatacaagccagt

SEQ ID NO: 223868 - DNA, 25 bp, Artificial
  Probe
cagaagcagcgcttccagcagctgg

SEQ ID NO: 223869 - DNA, 25 bp, Artificial
  Probe
gtggaccctcagctgcagcatttca

SEQ ID NO: 223870 - DNA, 25 bp, Artificial
  Probe
ctgctgagtcggttaaagaaatggc

SEQ ID NO: 223871 - DNA, 25 bp, Artificial
  Probe
tccagcagctggtgcaccagatgac

SEQ ID NO: 223872 - DNA, 25 bp, Artificial
  Probe
agacacagaagcagcgcttccagca

SEQ ID NO: 223873 - DNA, 25 bp, Artificial
  Probe
tgtgaactgcgttgaacgcttcatt

SEQ ID NO: 223874 - DNA, 25 bp, Artificial
  Probe
agcagctggtgcaccagatgacgga

SEQ ID NO: 223875 - DNA, 25 bp, Artificial
  Probe
gcagcgcttccagcagctggtgcac

SEQ ID NO: 223876 - DNA, 25 bp, Artificial
  Probe
tgttttgtgaactgcgttgaacgct

SEQ ID NO: 223877 - DNA, 25 bp, Artificial
  Probe
gtgcaccagatgacggaactttgct

SEQ ID NO: 223878 - DNA, 25 bp, Artificial
  Probe
ctcagctgcagcatttcatcgaggt

SEQ ID NO: 223879 - DNA, 25 bp, Artificial
  Probe
tggtgcaccagatgacggaactttg

SEQ ID NO: 223880 - DNA, 25 bp, Artificial
  Probe
tgcgttgaacgcttcattgatacaa

SEQ ID NO: 223881 - DNA, 25 bp, Artificial
  Probe
agcctgggcctaagttggacagtcg

SEQ ID NO: 223882 - DNA, 25 bp, Artificial
  Probe
accagatgacggaactttgctggga

SEQ ID NO: 223883 - DNA, 25 bp, Artificial
  Probe
gcagctggtgcaccagatgacggaa

SEQ ID NO: 223884 - DNA, 25 bp, Artificial
  Probe
ggcctgttttgtgaactgcgttgaa

SEQ ID NO: 223885 - DNA, 25 bp, Artificial
  Probe
attgtcacctgagaatgaacaaaga

SEQ ID NO: 223886 - DNA, 25 bp, Artificial
  Probe
gaactgcgttgaacgcttcattgat

SEQ ID NO: 223887 - DNA, 25 bp, Artificial
  Probe
gaagagctgctgctgagtcggttaa

SEQ ID NO: 223888 - DNA, 25 bp, Artificial
  Probe
agcgcttccagcagctggtgcacca

SEQ ID NO: 223889 - DNA, 25 bp, Artificial
  Probe
tgtcacctgagaatgaacaaagacc

SEQ ID NO: 223890 - DNA, 25 bp, Artificial
  Probe
agctggtgcaccagatgacggaact

SEQ ID NO: 223891 - DNA, 25 bp, Artificial
  Probe
cctgttttgtgaactgcgttgaacg

SEQ ID NO: 223892 - DNA, 25 bp, Artificial
  Probe
taagcctgggcctaagttggacagt

SEQ ID NO: 223893 - DNA, 25 bp, Artificial
  Probe
gaccctcagctgcagcatttcatcg

SEQ ID NO: 223894 - DNA, 25 bp, Artificial
  Probe
catggataagcctgggcctaagttg

SEQ ID NO: 223895 - DNA, 25 bp, Artificial
  Probe
gagctgctgctgagtcggttaaaga

SEQ ID NO: 223896 - DNA, 25 bp, Artificial
  Probe
gctgctgctgagtcggttaaagaaa

SEQ ID NO: 223897 - DNA, 25 bp, Artificial
  Probe
catcgaggtggagacacagaagcag

SEQ ID NO: 223898 - DNA, 25 bp, Artificial
  Probe
gcagcatttcatcgaggtggagaca

SEQ ID NO: 223899 - DNA, 25 bp, Artificial
  Probe
gagacacagaagcagcgcttccagc

SEQ ID NO: 223900 - DNA, 25 bp, Artificial
  Probe
cctcagctgcagcatttcatcgagg

SEQ ID NO: 223901 - DNA, 25 bp, Artificial
  Probe
acgcttcattgatacaagccagttc

SEQ ID NO: 223902 - DNA, 25 bp, Artificial
  Probe
agtgcatggataagcctgggcctaa

SEQ ID NO: 223903 - DNA, 25 bp, Artificial
  Probe
ggctgaggcctgttttgtgaactgc

SEQ ID NO: 223904 - DNA, 25 bp, Artificial
  Probe
ttgtgaactgcgttgaacgcttcat

SEQ ID NO: 223905 - DNA, 25 bp, Artificial
  Probe
cagatgacggaactttgctgggaga

SEQ ID NO: 223906 - DNA, 25 bp, Artificial
  Probe
aagtgcatggataagcctgggccta

SEQ ID NO: 223907 - DNA, 25 bp, Artificial
  Probe
acagtcgggctgaggcctgttttgt

SEQ ID NO: 223908 - DNA, 25 bp, Artificial
  Probe
cacggaaacaggaacctgggagtgc

SEQ ID NO: 223909 - DNA, 25 bp, Artificial
  Probe
ggatttttcagaagggccatgaaac

SEQ ID NO: 223910 - DNA, 25 bp, Artificial
  Probe
aggagtacgtgctgatgcaggccat

SEQ ID NO: 223911 - DNA, 25 bp, Artificial
  Probe
accctgaaggcctacatcgagtgta

SEQ ID NO: 223912 - DNA, 25 bp, Artificial
  Probe
accagctgcaggagcgatttgccct

SEQ ID NO: 223913 - DNA, 25 bp, Artificial
  Probe
tccgcaaggggacctgcgagatcac

SEQ ID NO: 223914 - DNA, 25 bp, Artificial
  Probe
tttctcccacttcaaggatttccgg

SEQ ID NO: 223915 - DNA, 25 bp, Artificial
  Probe
acgtgctgatgcaggccatctccct

SEQ ID NO: 223916 - DNA, 25 bp, Artificial
  Probe
tctgatgccgctgtggaacagaggc

SEQ ID NO: 223917 - DNA, 25 bp, Artificial
  Probe
aagggggccactttcgagatgtgca

SEQ ID NO: 223918 - DNA, 25 bp, Artificial
  Probe
agtgcggtcggctggcttactgctt

SEQ ID NO: 223919 - DNA, 25 bp, Artificial
  Probe
ggcagcatctggaactaccaacctc

SEQ ID NO: 223920 - DNA, 25 bp, Artificial
  Probe
agctactgcgcatccaggacacgca

SEQ ID NO: 223921 - DNA, 25 bp, Artificial
  Probe
ttcaatgtcatgacctgtgaaggat

SEQ ID NO: 223922 - DNA, 25 bp, Artificial
  Probe
agcagacccagcagctactgcgcat

SEQ ID NO: 223923 - DNA, 25 bp, Artificial
  Probe
catttctcaggaaaaggacacagga

SEQ ID NO: 223924 - DNA, 25 bp, Artificial
  Probe
gcgtcatcaacttcgccaaagtcat

SEQ ID NO: 223925 - DNA, 25 bp, Artificial
  Probe
cgagatgtgcatcctgaggttcaac

SEQ ID NO: 223926 - DNA, 25 bp, Artificial
  Probe
aagacagtgttccaatgaagatctc

SEQ ID NO: 223927 - DNA, 25 bp, Artificial
  Probe
ttattcagcagcacggacggctgag

SEQ ID NO: 223928 - DNA, 25 bp, Artificial
  Probe
gagaagacggcagcatctggaacta

SEQ ID NO: 223929 - DNA, 25 bp, Artificial
  Probe
gctgcctatcgaggaccagatctcc

SEQ ID NO: 223930 - DNA, 25 bp, Artificial
  Probe
tgaagaagctacagctgcgtgagga

SEQ ID NO: 223931 - DNA, 25 bp, Artificial
  Probe
cgggccttgatcaagaggaagaaga

SEQ ID NO: 223932 - DNA, 25 bp, Artificial
  Probe
ccacatggagtcaaatcatgaaaga

SEQ ID NO: 223933 - DNA, 25 bp, Artificial
  Probe
cgccaaagtcatatcccacttcagg

SEQ ID NO: 223934 - DNA, 25 bp, Artificial
  Probe
gctcagatgcaaacctttgacacaa

SEQ ID NO: 223935 - DNA, 25 bp, Artificial
  Probe
cccagatcgccctggcgtggttcaa

SEQ ID NO: 223936 - DNA, 25 bp, Artificial
  Probe
agagatgatcatgtctgatgccgct

SEQ ID NO: 223937 - DNA, 25 bp, Artificial
  Probe
gggggccactttcgagatgtgcatc

SEQ ID NO: 223938 - DNA, 25 bp, Artificial
  Probe
gggaataaaccttcaaatcctgcta

SEQ ID NO: 223939 - DNA, 25 bp, Artificial
  Probe
tgatgaaattccactgcatgctgaa

SEQ ID NO: 223940 - DNA, 25 bp, Artificial
  Probe
atctctgtgcagctgcgcggagaag

SEQ ID NO: 223941 - DNA, 25 bp, Artificial
  Probe
cgcacctggccgatgtgtcaaccta

SEQ ID NO: 223942 - DNA, 25 bp, Artificial
  Probe
aaaggacacaggagctcagcctgtg

SEQ ID NO: 223943 - DNA, 25 bp, Artificial
  Probe
ccggaagacccgacggcagtgccag

SEQ ID NO: 223944 - DNA, 25 bp, Artificial
  Probe
catctctgtggttgggaataaacct

SEQ ID NO: 223945 - DNA, 25 bp, Artificial
  Probe
gtcggccctatcctgcacacaggtt

SEQ ID NO: 223946 - DNA, 25 bp, Artificial
  Probe
tatcaatgcccagcagacccagcag

SEQ ID NO: 223947 - DNA, 25 bp, Artificial
  Probe
cacggacggctgagtggctgcccct

SEQ ID NO: 223948 - DNA, 25 bp, Artificial
  Probe
caatgtccggctgaggtgccccttc

SEQ ID NO: 223949 - DNA, 25 bp, Artificial
  Probe
cctccaagagcgacgggaaagagat

SEQ ID NO: 223950 - DNA, 25 bp, Artificial
  Probe
gccacacctctcatgcaggagttat

SEQ ID NO: 223951 - DNA, 25 bp, Artificial
  Probe
cagaagaacagcaggcgctgatcca

SEQ ID NO: 223952 - DNA, 25 bp, Artificial
  Probe
cagtgccaggcctgccgtttgcgca

SEQ ID NO: 223953 - DNA, 25 bp, Artificial
  Probe
agtggctgcccctgagtggagatct

SEQ ID NO: 223954 - DNA, 25 bp, Artificial
  Probe
cccttggtattggtcaattatccta

SEQ ID NO: 223955 - DNA, 25 bp, Artificial
  Probe
cataccagacagtctgtgcctgtgt

SEQ ID NO: 223956 - DNA, 25 bp, Artificial
  Probe
gcagaagtcacacaactgtcaccct

SEQ ID NO: 223957 - DNA, 25 bp, Artificial
  Probe
ttcacaagtccctggccgtttctgc

SEQ ID NO: 223958 - DNA, 25 bp, Artificial
  Probe
gtacactctagctgggtggctaaaa

SEQ ID NO: 223959 - DNA, 25 bp, Artificial
  Probe
ttctgttcacaagtccctggccgtt

SEQ ID NO: 223960 - DNA, 25 bp, Artificial
  Probe
ctgcgctgagctgcagaagtcacac

SEQ ID NO: 223961 - DNA, 25 bp, Artificial
  Probe
ctaacgctaagtgcatgccttctgt

SEQ ID NO: 223962 - DNA, 25 bp, Artificial
  Probe
gtattggtcaattatcctagtgtct

SEQ ID NO: 223963 - DNA, 25 bp, Artificial
  Probe
ctaaaaaggcagtggctgtgccagc

SEQ ID NO: 223964 - DNA, 25 bp, Artificial
  Probe
ggttatgctgtgtttcatttgctgc

SEQ ID NO: 223965 - DNA, 25 bp, Artificial
  Probe
cctggccgtttctgcacataccaga

SEQ ID NO: 223966 - DNA, 25 bp, Artificial
  Probe
acgctaagtgcatgccttctgttca

SEQ ID NO: 223967 - DNA, 25 bp, Artificial
  Probe
cgctgagctgcagaagtcacacaac

SEQ ID NO: 223968 - DNA, 25 bp, Artificial
  Probe
attatcctagtgtcttgtttatagc

SEQ ID NO: 223969 - DNA, 25 bp, Artificial
  Probe
gccttcctttaaaggttatgctgtg

SEQ ID NO: 223970 - DNA, 25 bp, Artificial
  Probe
ctgtgcctgtgttctatggttgtgg

SEQ ID NO: 223971 - DNA, 25 bp, Artificial
  Probe
actctagctgggtggctaaaaaggc

SEQ ID NO: 223972 - DNA, 25 bp, Artificial
  Probe
cttctgttcacaagtccctggccgt

SEQ ID NO: 223973 - DNA, 25 bp, Artificial
  Probe
gtcacccttcactaacgctaagtgc

SEQ ID NO: 223974 - DNA, 25 bp, Artificial
  Probe
ggttcccttggtattggtcaattat

SEQ ID NO: 223975 - DNA, 25 bp, Artificial
  Probe
tgtagaacaggttcccttggtattg

SEQ ID NO: 223976 - DNA, 25 bp, Artificial
  Probe
tgccttctaggagatgaaaaggctc

SEQ ID NO: 223977 - DNA, 25 bp, Artificial
  Probe
tgccttctgttcacaagtccctggc

SEQ ID NO: 223978 - DNA, 25 bp, Artificial
  Probe
taccagacagtctgtgcctgtgttc

SEQ ID NO: 223979 - DNA, 25 bp, Artificial
  Probe
ccagacagtctgtgcctgtgttcta

SEQ ID NO: 223980 - DNA, 25 bp, Artificial
  Probe
acctcttcgtatgtgtacactctag

SEQ ID NO: 223981 - DNA, 25 bp, Artificial
  Probe
gaacaggttcccttggtattggtca

SEQ ID NO: 223982 - DNA, 25 bp, Artificial
  Probe
gccgtttctgcacataccagacagt

SEQ ID NO: 223983 - DNA, 25 bp, Artificial
  Probe
acaggttcccttggtattggtcaat

SEQ ID NO: 223984 - DNA, 25 bp, Artificial
  Probe
caggttcccttggtattggtcaatt

SEQ ID NO: 223985 - DNA, 25 bp, Artificial
  Probe
cttcctttaaaggttatgctgtgtt

SEQ ID NO: 223986 - DNA, 25 bp, Artificial
  Probe
acagtctgtgcctgtgttctatggt

SEQ ID NO: 223987 - DNA, 25 bp, Artificial
  Probe
cctttaaaggttatgctgtgtttca

SEQ ID NO: 223988 - DNA, 25 bp, Artificial
  Probe
tgcacataccagacagtctgtgcct

SEQ ID NO: 223989 - DNA, 25 bp, Artificial
  Probe
agtccctggccgtttctgcacatac

SEQ ID NO: 223990 - DNA, 25 bp, Artificial
  Probe
ttcctgcgctgagctgcagaagtca

SEQ ID NO: 223991 - DNA, 25 bp, Artificial
  Probe
ctgcagaagtcacacaactgtcacc

SEQ ID NO: 223992 - DNA, 25 bp, Artificial
  Probe
atctgtagaacaggttcccttggta

SEQ ID NO: 223993 - DNA, 25 bp, Artificial
  Probe
tatcctagtgtcttgtttatagctg

SEQ ID NO: 223994 - DNA, 25 bp, Artificial
  Probe
gtcaattatcctagtgtcttgttta

SEQ ID NO: 223995 - DNA, 25 bp, Artificial
  Probe
taagtgcatgccttctgttcacaag

SEQ ID NO: 223996 - DNA, 25 bp, Artificial
  Probe
tcctttaaaggttatgctgtgtttc

SEQ ID NO: 223997 - DNA, 25 bp, Artificial
  Probe
cttcactaacgctaagtgcatgcct

SEQ ID NO: 223998 - DNA, 25 bp, Artificial
  Probe
tctgttcacaagtccctggccgttt

SEQ ID NO: 223999 - DNA, 25 bp, Artificial
  Probe
tgtcacccttcactaacgctaagtg

SEQ ID NO: 224000 - DNA, 25 bp, Artificial
  Probe
tactatctcactgacaaaatttgtt

SEQ ID NO: 224001 - DNA, 25 bp, Artificial
  Probe
attctgaatatctgtataattacat

SEQ ID NO: 224002 - DNA, 25 bp, Artificial
  Probe
ttactccaagtgagtaaaaattgtg

SEQ ID NO: 224003 - DNA, 25 bp, Artificial
  Probe
tataattacattaatctcaaaatca

SEQ ID NO: 224004 - DNA, 25 bp, Artificial
  Probe
atctcactgacaaaatttgtttcag

SEQ ID NO: 224005 - DNA, 25 bp, Artificial
  Probe
ttcagatattactatctcactgaca

SEQ ID NO: 224006 - DNA, 25 bp, Artificial
  Probe
gaaacaaatgccatggataaaccat

SEQ ID NO: 224007 - DNA, 25 bp, Artificial
  Probe
ttcagaacaacagtattttatgaag

SEQ ID NO: 224008 - DNA, 25 bp, Artificial
  Probe
ttgtggttgattactccaagtgagt

SEQ ID NO: 224009 - DNA, 25 bp, Artificial
  Probe
tttaaaaatgcacatgtatgcccat

SEQ ID NO: 224010 - DNA, 25 bp, Artificial
  Probe
aaacaaatgccatggataaaccatt

SEQ ID NO: 224011 - DNA, 25 bp, Artificial
  Probe
gcaatcattttgtggttgattactc

SEQ ID NO: 224012 - DNA, 25 bp, Artificial
  Probe
gaaaatctatcatctcctgatggta

SEQ ID NO: 224013 - DNA, 25 bp, Artificial
  Probe
cagaacaacagtattttatgaagta

SEQ ID NO: 224014 - DNA, 25 bp, Artificial
  Probe
ttctctttggggaaacaaatgccat

SEQ ID NO: 224015 - DNA, 25 bp, Artificial
  Probe
tttgtttcagaacaacagtatttta

SEQ ID NO: 224016 - DNA, 25 bp, Artificial
  Probe
tgatggtaacatttctctttgggga

SEQ ID NO: 224017 - DNA, 25 bp, Artificial
  Probe
ccattttctttcagatattactatc

SEQ ID NO: 224018 - DNA, 25 bp, Artificial
  Probe
cacatgtatgcccattttctttcag

SEQ ID NO: 224019 - DNA, 25 bp, Artificial
  Probe
aaatttgtttcagaacaacagtatt

SEQ ID NO: 224020 - DNA, 25 bp, Artificial
  Probe
tttctctttggggaaacaaatgcca

SEQ ID NO: 224021 - DNA, 25 bp, Artificial
  Probe
ctcactgacaaaatttgtttcagaa

SEQ ID NO: 224022 - DNA, 25 bp, Artificial
  Probe
ccatggataaaccatttctacttat

SEQ ID NO: 224023 - DNA, 25 bp, Artificial
  Probe
tgaaaatctatcatctcctgatggt

SEQ ID NO: 224024 - DNA, 25 bp, Artificial
  Probe
atgtacttaattttgttcttgattg

SEQ ID NO: 224025 - DNA, 25 bp, Artificial
  Probe
aatcattttgtggttgattactcca

SEQ ID NO: 224026 - DNA, 25 bp, Artificial
  Probe
caatcattttgtggttgattactcc

SEQ ID NO: 224027 - DNA, 25 bp, Artificial
  Probe
acatttctctttggggaaacaaatg

SEQ ID NO: 224028 - DNA, 25 bp, Artificial
  Probe
tatgcccattttctttcagatatta

SEQ ID NO: 224029 - DNA, 25 bp, Artificial
  Probe
aaccatttctacttatatcagtaga

SEQ ID NO: 224030 - DNA, 25 bp, Artificial
  Probe
gtgcctttatgtactggtaagtatg

SEQ ID NO: 224031 - DNA, 25 bp, Artificial
  Probe
gatggtaacatttctctttggggaa

SEQ ID NO: 224032 - DNA, 25 bp, Artificial
  Probe
tctcctgatggtaacatttctcttt

SEQ ID NO: 224033 - DNA, 25 bp, Artificial
  Probe
aaatgcacatgtatgcccattttct

SEQ ID NO: 224034 - DNA, 25 bp, Artificial
  Probe
atcattttgtggttgattactccaa

SEQ ID NO: 224035 - DNA, 25 bp, Artificial
  Probe
ttatgtactggtaagtatggttttt

SEQ ID NO: 224036 - DNA, 25 bp, Artificial
  Probe
taaaaattgtgcctttatgtactgg

SEQ ID NO: 224037 - DNA, 25 bp, Artificial
  Probe
tctatcatctcctgatggtaacatt

SEQ ID NO: 224038 - DNA, 25 bp, Artificial
  Probe
gtaaaaattgtgcctttatgtactg

SEQ ID NO: 224039 - DNA, 25 bp, Artificial
  Probe
atatctgtataattacattaatctc

SEQ ID NO: 224040 - DNA, 25 bp, Artificial
  Probe
aattatattctgaatatctgtataa

SEQ ID NO: 224041 - DNA, 25 bp, Artificial
  Probe
cattttgtggttgattactccaagt

SEQ ID NO: 224042 - DNA, 25 bp, Artificial
  Probe
ctcctgatggtaacatttctctttg

SEQ ID NO: 224043 - DNA, 25 bp, Artificial
  Probe
tctctttggggaaacaaatgccatg

SEQ ID NO: 224044 - DNA, 25 bp, Artificial
  Probe
atgccattaagatgtacttaatttt

SEQ ID NO: 224045 - DNA, 25 bp, Artificial
  Probe
ggataaaccatttctacttatatca

SEQ ID NO: 224046 - DNA, 25 bp, Artificial
  Probe
ttcgtggaccagtgaagaagaagcc

SEQ ID NO: 224047 - DNA, 25 bp, Artificial
  Probe
ctgttccctctcatggtgctccttg

SEQ ID NO: 224048 - DNA, 25 bp, Artificial
  Probe
tcgtggaccagtgaagaagaagcct

SEQ ID NO: 224049 - DNA, 25 bp, Artificial
  Probe
cctgttccctctcatggtgctcctt

SEQ ID NO: 224050 - DNA, 25 bp, Artificial
  Probe
cctgttcccattcgtggaccagtga

SEQ ID NO: 224051 - DNA, 25 bp, Artificial
  Probe
tcatggtgctccttgctctgggtgt

SEQ ID NO: 224052 - DNA, 25 bp, Artificial
  Probe
ccctgctagaaagcctgcccagtgc

SEQ ID NO: 224053 - DNA, 25 bp, Artificial
  Probe
gcggcctgttccctctcatggtgct

SEQ ID NO: 224054 - DNA, 25 bp, Artificial
  Probe
agcctgccctgctagaaagcctgcc

SEQ ID NO: 224055 - DNA, 25 bp, Artificial
  Probe
ctcatggtgctccttgctctgggtg

SEQ ID NO: 224056 - DNA, 25 bp, Artificial
  Probe
tgttccctctcatggtgctccttgc

SEQ ID NO: 224057 - DNA, 25 bp, Artificial
  Probe
agaaagcctgcccagtgccttaaac

SEQ ID NO: 224058 - DNA, 25 bp, Artificial
  Probe
tcccattcgtggaccagtgaagaag

SEQ ID NO: 224059 - DNA, 25 bp, Artificial
  Probe
tcctgttcccattcgtggaccagtg

SEQ ID NO: 224060 - DNA, 25 bp, Artificial
  Probe
ttcccattcgtggaccagtgaagaa

SEQ ID NO: 224061 - DNA, 25 bp, Artificial
  Probe
gcctgaatcctgttcccattcgtgg

SEQ ID NO: 224062 - DNA, 25 bp, Artificial
  Probe
ccattcgtggaccagtgaagaagaa

SEQ ID NO: 224063 - DNA, 25 bp, Artificial
  Probe
tgccctgctagaaagcctgcccagt

SEQ ID NO: 224064 - DNA, 25 bp, Artificial
  Probe
ggagcctgccctgctagaaagcctg

SEQ ID NO: 224065 - DNA, 25 bp, Artificial
  Probe
aatcctgttcccattcgtggaccag

SEQ ID NO: 224066 - DNA, 25 bp, Artificial
  Probe
gcctgttccctctcatggtgctcct

SEQ ID NO: 224067 - DNA, 25 bp, Artificial
  Probe
tgcctgaatcctgttcccattcgtg

SEQ ID NO: 224068 - DNA, 25 bp, Artificial
  Probe
cctgaatcctgttcccattcgtgga

SEQ ID NO: 224069 - DNA, 25 bp, Artificial
  Probe
gttcccattcgtggaccagtgaaga

SEQ ID NO: 224070 - DNA, 25 bp, Artificial
  Probe
attcgtggaccagtgaagaagaagc

SEQ ID NO: 224071 - DNA, 25 bp, Artificial
  Probe
cctctcatggtgctccttgctctgg

SEQ ID NO: 224072 - DNA, 25 bp, Artificial
  Probe
ctagaaagcctgcccagtgccttaa

SEQ ID NO: 224073 - DNA, 25 bp, Artificial
  Probe
tgttcccattcgtggaccagtgaag

SEQ ID NO: 224074 - DNA, 25 bp, Artificial
  Probe
gctagaaagcctgcccagtgcctta

SEQ ID NO: 224075 - DNA, 25 bp, Artificial
  Probe
atcctgttcccattcgtggaccagt

SEQ ID NO: 224076 - DNA, 25 bp, Artificial
  Probe
tgctagaaagcctgcccagtgcctt

SEQ ID NO: 224077 - DNA, 25 bp, Artificial
  Probe
gagcctgccctgctagaaagcctgc

SEQ ID NO: 224078 - DNA, 25 bp, Artificial
  Probe
cctgctagaaagcctgcccagtgcc

SEQ ID NO: 224079 - DNA, 25 bp, Artificial
  Probe
gccctgctagaaagcctgcccagtg

SEQ ID NO: 224080 - DNA, 25 bp, Artificial
  Probe
cattcgtggaccagtgaagaagaag

SEQ ID NO: 224081 - DNA, 25 bp, Artificial
  Probe
tgaatcctgttcccattcgtggacc

SEQ ID NO: 224082 - DNA, 25 bp, Artificial
  Probe
ctgttcccattcgtggaccagtgaa

SEQ ID NO: 224083 - DNA, 25 bp, Artificial
  Probe
ctctcatggtgctccttgctctggg

SEQ ID NO: 224084 - DNA, 25 bp, Artificial
  Probe
ccctctcatggtgctccttgctctg

SEQ ID NO: 224085 - DNA, 25 bp, Artificial
  Probe
cccattcgtggaccagtgaagaaga

SEQ ID NO: 224086 - DNA, 25 bp, Artificial
  Probe
tctcatggtgctccttgctctgggt

SEQ ID NO: 224087 - DNA, 25 bp, Artificial
  Probe
gttccctctcatggtgctccttgct

SEQ ID NO: 224088 - DNA, 25 bp, Artificial
  Probe
ctgccctgctagaaagcctgcccag

SEQ ID NO: 224089 - DNA, 25 bp, Artificial
  Probe
ttccctctcatggtgctccttgctc

SEQ ID NO: 224090 - DNA, 25 bp, Artificial
  Probe
ctgctagaaagcctgcccagtgcct

SEQ ID NO: 224091 - DNA, 25 bp, Artificial
  Probe
ctgaatcctgttcccattcgtggac

SEQ ID NO: 224092 - DNA, 25 bp, Artificial
  Probe
gtccgctacgtggtgatctcacaca

SEQ ID NO: 224093 - DNA, 25 bp, Artificial
  Probe
aaccagtccgctacgtggtgatctc

SEQ ID NO: 224094 - DNA, 25 bp, Artificial
  Probe
tccgctacgtggtgatctcacacac

SEQ ID NO: 224095 - DNA, 25 bp, Artificial
  Probe
ctccaagggcctgaagaaaccagtc

SEQ ID NO: 224096 - DNA, 25 bp, Artificial
  Probe
gtgatctcacacacagccggcagct

SEQ ID NO: 224097 - DNA, 25 bp, Artificial
  Probe
acgtggtgatctcacacacagccgg

SEQ ID NO: 224098 - DNA, 25 bp, Artificial
  Probe
ccatccgagtgctccaagggcctga

SEQ ID NO: 224099 - DNA, 25 bp, Artificial
  Probe
cagcagcccagactcctgtgaacag

SEQ ID NO: 224100 - DNA, 25 bp, Artificial
  Probe
tccgagtgctccaagggcctgaaga

SEQ ID NO: 224101 - DNA, 25 bp, Artificial
  Probe
acacagccggcagcttctgcagcag

SEQ ID NO: 224102 - DNA, 25 bp, Artificial
  Probe
agtccgctacgtggtgatctcacac

SEQ ID NO: 224103 - DNA, 25 bp, Artificial
  Probe
gactcctgtgaacagcaggcccgca

SEQ ID NO: 224104 - DNA, 25 bp, Artificial
  Probe
tgaagaaaccagtccgctacgtggt

SEQ ID NO: 224105 - DNA, 25 bp, Artificial
  Probe
catccgagtgctccaagggcctgaa

SEQ ID NO: 224106 - DNA, 25 bp, Artificial
  Probe
tgatctcacacacagccggcagctt

SEQ ID NO: 224107 - DNA, 25 bp, Artificial
  Probe
agactcctgtgaacagcaggcccgc

SEQ ID NO: 224108 - DNA, 25 bp, Artificial
  Probe
tgccatccgagtgctccaagggcct

SEQ ID NO: 224109 - DNA, 25 bp, Artificial
  Probe
agcagcccagactcctgtgaacagc

SEQ ID NO: 224110 - DNA, 25 bp, Artificial
  Probe
accagtccgctacgtggtgatctca

SEQ ID NO: 224111 - DNA, 25 bp, Artificial
  Probe
ggcctgaagaaaccagtccgctacg

SEQ ID NO: 224112 - DNA, 25 bp, Artificial
  Probe
gtggtgatctcacacacagccggca

SEQ ID NO: 224113 - DNA, 25 bp, Artificial
  Probe
ctgaagaaaccagtccgctacgtgg

SEQ ID NO: 224114 - DNA, 25 bp, Artificial
  Probe
tccaagggcctgaagaaaccagtcc

SEQ ID NO: 224115 - DNA, 25 bp, Artificial
  Probe
cagcccagactcctgtgaacagcag

SEQ ID NO: 224116 - DNA, 25 bp, Artificial
  Probe
gccatccgagtgctccaagggcctg

SEQ ID NO: 224117 - DNA, 25 bp, Artificial
  Probe
agcccagactcctgtgaacagcagg

SEQ ID NO: 224118 - DNA, 25 bp, Artificial
  Probe
gcccagactcctgtgaacagcaggc

SEQ ID NO: 224119 - DNA, 25 bp, Artificial
  Probe
cagtccgctacgtggtgatctcaca

SEQ ID NO: 224120 - DNA, 25 bp, Artificial
  Probe
ggtgatctcacacacagccggcagc

SEQ ID NO: 224121 - DNA, 25 bp, Artificial
  Probe
cagactcctgtgaacagcaggcccg

SEQ ID NO: 224122 - DNA, 25 bp, Artificial
  Probe
gctccaagggcctgaagaaaccagt

SEQ ID NO: 224123 - DNA, 25 bp, Artificial
  Probe
tgcagcagcccagactcctgtgaac

SEQ ID NO: 224124 - DNA, 25 bp, Artificial
  Probe
agtggaaggccctgccatccgagtg

SEQ ID NO: 224125 - DNA, 25 bp, Artificial
  Probe
ggcagcttctgcagcagcccagact

SEQ ID NO: 224126 - DNA, 25 bp, Artificial
  Probe
tggtgatctcacacacagccggcag

SEQ ID NO: 224127 - DNA, 25 bp, Artificial
  Probe
tacgtggtgatctcacacacagccg

SEQ ID NO: 224128 - DNA, 25 bp, Artificial
  Probe
ctgcagcagcccagactcctgtgaa

SEQ ID NO: 224129 - DNA, 25 bp, Artificial
  Probe
gcctgaagaaaccagtccgctacgt

SEQ ID NO: 224130 - DNA, 25 bp, Artificial
  Probe
cctgaagaaaccagtccgctacgtg

SEQ ID NO: 224131 - DNA, 25 bp, Artificial
  Probe
gcagcccagactcctgtgaacagca

SEQ ID NO: 224132 - DNA, 25 bp, Artificial
  Probe
gcagcagcccagactcctgtgaaca

SEQ ID NO: 224133 - DNA, 25 bp, Artificial
  Probe
aaaccagtccgctacgtggtgatct

SEQ ID NO: 224134 - DNA, 25 bp, Artificial
  Probe
atccgagtgctccaagggcctgaag

SEQ ID NO: 224135 - DNA, 25 bp, Artificial
  Probe
ccgctacgtggtgatctcacacaca

SEQ ID NO: 224136 - DNA, 25 bp, Artificial
  Probe
ccagtccgctacgtggtgatctcac

SEQ ID NO: 224137 - DNA, 25 bp, Artificial
  Probe
ccgagtgctccaagggcctgaagaa

SEQ ID NO: 224138 - DNA, 25 bp, Artificial
  Probe
taaagccctggagacctcatgtcac

SEQ ID NO: 224139 - DNA, 25 bp, Artificial
  Probe
catgtcactttaatgttgtgttacc

SEQ ID NO: 224140 - DNA, 25 bp, Artificial
  Probe
ctcatgtcactttaatgttgtgtta

SEQ ID NO: 224141 - DNA, 25 bp, Artificial
  Probe
aagccctggagacctcatgtcactt

SEQ ID NO: 224142 - DNA, 25 bp, Artificial
  Probe
gtaaagccctggagacctcatgtca

SEQ ID NO: 224143 - DNA, 25 bp, Artificial
  Probe
gttgtgttacctgcagaattcttcc

SEQ ID NO: 224144 - DNA, 25 bp, Artificial
  Probe
aaagccctggagacctcatgtcact

SEQ ID NO: 224145 - DNA, 25 bp, Artificial
  Probe
atgttgtgttacctgcagaattctt

SEQ ID NO: 224146 - DNA, 25 bp, Artificial
  Probe
tgagcccttttccttcagcttcaag

SEQ ID NO: 224147 - DNA, 25 bp, Artificial
  Probe
taatgttgtgttacctgcagaattc

SEQ ID NO: 224148 - DNA, 25 bp, Artificial
  Probe
atttgaatgtaaagccctggagacc

SEQ ID NO: 224149 - DNA, 25 bp, Artificial
  Probe
acctcatgtcactttaatgttgtgt

SEQ ID NO: 224150 - DNA, 25 bp, Artificial
  Probe
ttgtgttacctgcagaattcttccc

SEQ ID NO: 224151 - DNA, 25 bp, Artificial
  Probe
aagttatatgctctctaactgagcc

SEQ ID NO: 224152 - DNA, 25 bp, Artificial
  Probe
ctttaatgttgtgttacctgcagaa

SEQ ID NO: 224153 - DNA, 25 bp, Artificial
  Probe
ggagacctcatgtcactttaatgtt

SEQ ID NO: 224154 - DNA, 25 bp, Artificial
  Probe
gtcactttaatgttgtgttacctgc

SEQ ID NO: 224155 - DNA, 25 bp, Artificial
  Probe
ctggagacctcatgtcactttaatg

SEQ ID NO: 224156 - DNA, 25 bp, Artificial
  Probe
tccttcagcttcaagaccaaaaagg

SEQ ID NO: 224157 - DNA, 25 bp, Artificial
  Probe
cactttaatgttgtgttacctgcag

SEQ ID NO: 224158 - DNA, 25 bp, Artificial
  Probe
tgttgtgttacctgcagaattcttc

SEQ ID NO: 224159 - DNA, 25 bp, Artificial
  Probe
agacctcatgtcactttaatgttgt

SEQ ID NO: 224160 - DNA, 25 bp, Artificial
  Probe
tgtaaagccctggagacctcatgtc

SEQ ID NO: 224161 - DNA, 25 bp, Artificial
  Probe
tcactttaatgttgtgttacctgca

SEQ ID NO: 224162 - DNA, 25 bp, Artificial
  Probe
taagttatatgctctctaactgagc

SEQ ID NO: 224163 - DNA, 25 bp, Artificial
  Probe
agttatatgctctctaactgagccc

SEQ ID NO: 224164 - DNA, 25 bp, Artificial
  Probe
gccccattgactttgttcctgtatt

SEQ ID NO: 224165 - DNA, 25 bp, Artificial
  Probe
ataagttatatgctctctaactgag

SEQ ID NO: 224166 - DNA, 25 bp, Artificial
  Probe
aactgtgctgaaatgggtggactac

SEQ ID NO: 224167 - DNA, 25 bp, Artificial
  Probe
gagcccttttccttcagcttcaaga

SEQ ID NO: 224168 - DNA, 25 bp, Artificial
  Probe
gctcctaaggaatggtctttaagtt

SEQ ID NO: 224169 - DNA, 25 bp, Artificial
  Probe
tggagacctcatgtcactttaatgt

SEQ ID NO: 224170 - DNA, 25 bp, Artificial
  Probe
gttatatgctctctaactgagccct

SEQ ID NO: 224171 - DNA, 25 bp, Artificial
  Probe
ccattgactttgttcctgtattatg

SEQ ID NO: 224172 - DNA, 25 bp, Artificial
  Probe
ccctggagacctcatgtcactttaa

SEQ ID NO: 224173 - DNA, 25 bp, Artificial
  Probe
actgtgctgaaatgggtggactacg

SEQ ID NO: 224174 - DNA, 25 bp, Artificial
  Probe
tgtgttacctgcagaattcttcccc

SEQ ID NO: 224175 - DNA, 25 bp, Artificial
  Probe
tcatgtcactttaatgttgtgttac

SEQ ID NO: 224176 - DNA, 25 bp, Artificial
  Probe
tgtcactttaatgttgtgttacctg

SEQ ID NO: 224177 - DNA, 25 bp, Artificial
  Probe
tgaaatgggtggactacggtcctaa

SEQ ID NO: 224178 - DNA, 25 bp, Artificial
  Probe
ccttcagcttcaagaccaaaaaggg

SEQ ID NO: 224179 - DNA, 25 bp, Artificial
  Probe
actttaatgttgtgttacctgcaga

SEQ ID NO: 224180 - DNA, 25 bp, Artificial
  Probe
cctcatgtcactttaatgttgtgtt

SEQ ID NO: 224181 - DNA, 25 bp, Artificial
  Probe
gccctggagacctcatgtcacttta

SEQ ID NO: 224182 - DNA, 25 bp, Artificial
  Probe
gagacctcatgtcactttaatgttg

SEQ ID NO: 224183 - DNA, 25 bp, Artificial
  Probe
aatgtaaagccctggagacctcatg

SEQ ID NO: 224184 - DNA, 25 bp, Artificial
  Probe
ctgggcaatggctccttcattgagc

SEQ ID NO: 224185 - DNA, 25 bp, Artificial
  Probe
ccactgaatggaacgctgaccttgt

SEQ ID NO: 224186 - DNA, 25 bp, Artificial
  Probe
gtgatctggccagagaaagaagtgc

SEQ ID NO: 224187 - DNA, 25 bp, Artificial
  Probe
ttcagcatcctctactggctgggca

SEQ ID NO: 224188 - DNA, 25 bp, Artificial
  Probe
gatctggccagagaaagaagtgcca

SEQ ID NO: 224189 - DNA, 25 bp, Artificial
  Probe
aatggctccttcattgagcacctcc

SEQ ID NO: 224190 - DNA, 25 bp, Artificial
  Probe
aacttcagcatcctctactggctgg

SEQ ID NO: 224191 - DNA, 25 bp, Artificial
  Probe
tgaccttgtcctgcactgcctgcag

SEQ ID NO: 224192 - DNA, 25 bp, Artificial
  Probe
tactggctgggcaatggctccttca

SEQ ID NO: 224193 - DNA, 25 bp, Artificial
  Probe
gccactgaatggaacgctgaccttg

SEQ ID NO: 224194 - DNA, 25 bp, Artificial
  Probe
gaaagaagtgccactgaatggaacg

SEQ ID NO: 224195 - DNA, 25 bp, Artificial
  Probe
tccagcagtcccaactaagcagtac

SEQ ID NO: 224196 - DNA, 25 bp, Artificial
  Probe
cagcatcctctactggctgggcaat

SEQ ID NO: 224197 - DNA, 25 bp, Artificial
  Probe
gcagtacccaacattggatgtgatc

SEQ ID NO: 224198 - DNA, 25 bp, Artificial
  Probe
ggcaatggctccttcattgagcacc

SEQ ID NO: 224199 - DNA, 25 bp, Artificial
  Probe
caatggctccttcattgagcacctc

SEQ ID NO: 224200 - DNA, 25 bp, Artificial
  Probe
agaagtgccactgaatggaacgctg

SEQ ID NO: 224201 - DNA, 25 bp, Artificial
  Probe
caacattggatgtgatctggccaga

SEQ ID NO: 224202 - DNA, 25 bp, Artificial
  Probe
gaacgctgaccttgtcctgcactgc

SEQ ID NO: 224203 - DNA, 25 bp, Artificial
  Probe
acaagccgggagcagaggaacgcaa

SEQ ID NO: 224204 - DNA, 25 bp, Artificial
  Probe
gcagtcccaactaagcagtacccaa

SEQ ID NO: 224205 - DNA, 25 bp, Artificial
  Probe
caacttcagcatcctctactggctg

SEQ ID NO: 224206 - DNA, 25 bp, Artificial
  Probe
acattggatgtgatctggccagaga

SEQ ID NO: 224207 - DNA, 25 bp, Artificial
  Probe
ctggctgggcaatggctccttcatt

SEQ ID NO: 224208 - DNA, 25 bp, Artificial
  Probe
atctggccagagaaagaagtgccac

SEQ ID NO: 224209 - DNA, 25 bp, Artificial
  Probe
agaggaacgcaagcacctggctaca

SEQ ID NO: 224210 - DNA, 25 bp, Artificial
  Probe
tgatctggccagagaaagaagtgcc

SEQ ID NO: 224211 - DNA, 25 bp, Artificial
  Probe
taagcagtacccaacattggatgtg

SEQ ID NO: 224212 - DNA, 25 bp, Artificial
  Probe
agcagtacccaacattggatgtgat

SEQ ID NO: 224213 - DNA, 25 bp, Artificial
  Probe
tggaacgctgaccttgtcctgcact

SEQ ID NO: 224214 - DNA, 25 bp, Artificial
  Probe
agcagtcccaactaagcagtaccca

SEQ ID NO: 224215 - DNA, 25 bp, Artificial
  Probe
aagtgccactgaatggaacgctgac

SEQ ID NO: 224216 - DNA, 25 bp, Artificial
  Probe
cagaggaacgcaagcacctggctac

SEQ ID NO: 224217 - DNA, 25 bp, Artificial
  Probe
cattggatgtgatctggccagagaa

SEQ ID NO: 224218 - DNA, 25 bp, Artificial
  Probe
caactaagcagtacccaacattgga

SEQ ID NO: 224219 - DNA, 25 bp, Artificial
  Probe
aatggaacgctgaccttgtcctgca

SEQ ID NO: 224220 - DNA, 25 bp, Artificial
  Probe
ccaacattggatgtgatctggccag

SEQ ID NO: 224221 - DNA, 25 bp, Artificial
  Probe
gtacccaacattggatgtgatctgg

SEQ ID NO: 224222 - DNA, 25 bp, Artificial
  Probe
tgggcaatggctccttcattgagca

SEQ ID NO: 224223 - DNA, 25 bp, Artificial
  Probe
acacaagccgggagcagaggaacgc

SEQ ID NO: 224224 - DNA, 25 bp, Artificial
  Probe
tcctctactggctgggcaatggctc

SEQ ID NO: 224225 - DNA, 25 bp, Artificial
  Probe
tgaatggaacgctgaccttgtcctg

SEQ ID NO: 224226 - DNA, 25 bp, Artificial
  Probe
agcatcctctactggctgggcaatg

SEQ ID NO: 224227 - DNA, 25 bp, Artificial
  Probe
acttcagcatcctctactggctggg

SEQ ID NO: 224228 - DNA, 25 bp, Artificial
  Probe
gtgccactgaatggaacgctgacct

SEQ ID NO: 224229 - DNA, 25 bp, Artificial
  Probe
ccaactaagcagtacccaacattgg

SEQ ID NO: 224230 - DNA, 25 bp, Artificial
  Probe
aacttgcctgtcacagctactggat

SEQ ID NO: 224231 - DNA, 25 bp, Artificial
  Probe
taaagactcgataccccatgttgga

SEQ ID NO: 224232 - DNA, 25 bp, Artificial
  Probe
acagctactggatataatgaaaagc

SEQ ID NO: 224233 - DNA, 25 bp, Artificial
  Probe
aattgcattgacagatgcttatctt

SEQ ID NO: 224234 - DNA, 25 bp, Artificial
  Probe
gaccttgcacttaatatggttacaa

SEQ ID NO: 224235 - DNA, 25 bp, Artificial
  Probe
gccacccagatctgaagaagttgct

SEQ ID NO: 224236 - DNA, 25 bp, Artificial
  Probe
ctctagggctggaattactatggaa

SEQ ID NO: 224237 - DNA, 25 bp, Artificial
  Probe
agcgatgtcattcttctgaccttgc

SEQ ID NO: 224238 - DNA, 25 bp, Artificial
  Probe
cacccagatctgaagaagttgctat

SEQ ID NO: 224239 - DNA, 25 bp, Artificial
  Probe
ggagcgatgtcattcttctgacctt

SEQ ID NO: 224240 - DNA, 25 bp, Artificial
  Probe
ccccatgttggagaatccagagatt

SEQ ID NO: 224241 - DNA, 25 bp, Artificial
  Probe
gtcacagctactggatataatgaaa

SEQ ID NO: 224242 - DNA, 25 bp, Artificial
  Probe
attgacagatgcttatcttttgtac

SEQ ID NO: 224243 - DNA, 25 bp, Artificial
  Probe
ccttgcacttaatatggttacaaag

SEQ ID NO: 224244 - DNA, 25 bp, Artificial
  Probe
acagaacttgcctgtcacagctact

SEQ ID NO: 224245 - DNA, 25 bp, Artificial
  Probe
cttctgaccttgcacttaatatggt

SEQ ID NO: 224246 - DNA, 25 bp, Artificial
  Probe
gcctgtcacagctactggatataat

SEQ ID NO: 224247 - DNA, 25 bp, Artificial
  Probe
agaacttgcctgtcacagctactgg

SEQ ID NO: 224248 - DNA, 25 bp, Artificial
  Probe
acttgcctgtcacagctactggata

SEQ ID NO: 224249 - DNA, 25 bp, Artificial
  Probe
tatgagccacccagatctgaagaag

SEQ ID NO: 224250 - DNA, 25 bp, Artificial
  Probe
cattgacagatgcttatcttttgta

SEQ ID NO: 224251 - DNA, 25 bp, Artificial
  Probe
gcctctagggctggaattactatgg

SEQ ID NO: 224252 - DNA, 25 bp, Artificial
  Probe
gatgtcattcttctgaccttgcact

SEQ ID NO: 224253 - DNA, 25 bp, Artificial
  Probe
agccacccagatctgaagaagttgc

SEQ ID NO: 224254 - DNA, 25 bp, Artificial
  Probe
actcgataccccatgttggagaatc

SEQ ID NO: 224255 - DNA, 25 bp, Artificial
  Probe
gacagatgcttatcttttgtacaca

SEQ ID NO: 224256 - DNA, 25 bp, Artificial
  Probe
acccagatctgaagaagttgctatt

SEQ ID NO: 224257 - DNA, 25 bp, Artificial
  Probe
gaacttgcctgtcacagctactgga

SEQ ID NO: 224258 - DNA, 25 bp, Artificial
  Probe
cacagctactggatataatgaaaag

SEQ ID NO: 224259 - DNA, 25 bp, Artificial
  Probe
ctgaccttgcacttaatatggttac

SEQ ID NO: 224260 - DNA, 25 bp, Artificial
  Probe
cgatgtcattcttctgaccttgcac

SEQ ID NO: 224261 - DNA, 25 bp, Artificial
  Probe
agttggagcgatgtcattcttctga

SEQ ID NO: 224262 - DNA, 25 bp, Artificial
  Probe
ttgcattgacagatgcttatctttt

SEQ ID NO: 224263 - DNA, 25 bp, Artificial
  Probe
ttggagcgatgtcattcttctgacc

SEQ ID NO: 224264 - DNA, 25 bp, Artificial
  Probe
tcttctgaccttgcacttaatatgg

SEQ ID NO: 224265 - DNA, 25 bp, Artificial
  Probe
ctgtcacagctactggatataatga

SEQ ID NO: 224266 - DNA, 25 bp, Artificial
  Probe
accccatgttggagaatccagagat

SEQ ID NO: 224267 - DNA, 25 bp, Artificial
  Probe
cttgcacttaatatggttacaaaga

SEQ ID NO: 224268 - DNA, 25 bp, Artificial
  Probe
ctcgataccccatgttggagaatcc

SEQ ID NO: 224269 - DNA, 25 bp, Artificial
  Probe
ctattctgaaacagaagttggagcg

SEQ ID NO: 224270 - DNA, 25 bp, Artificial
  Probe
aaagtatgagccacccagatctgaa

SEQ ID NO: 224271 - DNA, 25 bp, Artificial
  Probe
cgataccccatgttggagaatccag

SEQ ID NO: 224272 - DNA, 25 bp, Artificial
  Probe
ataccccatgttggagaatccagag

SEQ ID NO: 224273 - DNA, 25 bp, Artificial
  Probe
ttgcctgtcacagctactggatata

SEQ ID NO: 224274 - DNA, 25 bp, Artificial
  Probe
cccatgttggagaatccagagattt

SEQ ID NO: 224275 - DNA, 25 bp, Artificial
  Probe
tgagccacccagatctgaagaagtt

SEQ ID NO: 224276 - DNA, 25 bp, Artificial
  Probe
tgccagatacattggtcacattcaa

SEQ ID NO: 224277 - DNA, 25 bp, Artificial
  Probe
tccattgccagatacattggtcaca

SEQ ID NO: 224278 - DNA, 25 bp, Artificial
  Probe
gttatcctgataatcaccatatcgg

SEQ ID NO: 224279 - DNA, 25 bp, Artificial
  Probe
tcaagatgtctccaatccgatggca

SEQ ID NO: 224280 - DNA, 25 bp, Artificial
  Probe
tgtgcgttccattgccagatacatt

SEQ ID NO: 224281 - DNA, 25 bp, Artificial
  Probe
tcaccatatcggagccaccatgggg

SEQ ID NO: 224282 - DNA, 25 bp, Artificial
  Probe
gcataggttatcacatcagtaagcg

SEQ ID NO: 224283 - DNA, 25 bp, Artificial
  Probe
gatacattggtcacattcaagatgt

SEQ ID NO: 224284 - DNA, 25 bp, Artificial
  Probe
ttgccagatacattggtcacattca

SEQ ID NO: 224285 - DNA, 25 bp, Artificial
  Probe
tctccaatccgatggcataggttat

SEQ ID NO: 224286 - DNA, 25 bp, Artificial
  Probe
tttaactggacaccaacagtaagga

SEQ ID NO: 224287 - DNA, 25 bp, Artificial
  Probe
ttcttccagagcatttcattttgtg

SEQ ID NO: 224288 - DNA, 25 bp, Artificial
  Probe
attggtcacattcaagatgtctcca

SEQ ID NO: 224289 - DNA, 25 bp, Artificial
  Probe
acagtaaggacctaggcaaaggcta

SEQ ID NO: 224290 - DNA, 25 bp, Artificial
  Probe
cctgataatcaccatatcggagcca

SEQ ID NO: 224291 - DNA, 25 bp, Artificial
  Probe
gttccattgccagatacattggtca

SEQ ID NO: 224292 - DNA, 25 bp, Artificial
  Probe
cttttaactggacaccaacagtaag

SEQ ID NO: 224293 - DNA, 25 bp, Artificial
  Probe
caatccgatggcataggttatcaca

SEQ ID NO: 224294 - DNA, 25 bp, Artificial
  Probe
ggtcacattcaagatgtctccaatc

SEQ ID NO: 224295 - DNA, 25 bp, Artificial
  Probe
agatgtctccaatccgatggcatag

SEQ ID NO: 224296 - DNA, 25 bp, Artificial
  Probe
ctggacaccaacagtaaggacctag

SEQ ID NO: 224297 - DNA, 25 bp, Artificial
  Probe
cataggttatcacatcagtaagcga

SEQ ID NO: 224298 - DNA, 25 bp, Artificial
  Probe
caacagtaaggacctaggcaaaggc

SEQ ID NO: 224299 - DNA, 25 bp, Artificial
  Probe
agcatttcattttgtgttatcctga

SEQ ID NO: 224300 - DNA, 25 bp, Artificial
  Probe
gagcatttcattttgtgttatcctg

SEQ ID NO: 224301 - DNA, 25 bp, Artificial
  Probe
cgttccattgccagatacattggtc

SEQ ID NO: 224302 - DNA, 25 bp, Artificial
  Probe
gtctccaatccgatggcataggtta

SEQ ID NO: 224303 - DNA, 25 bp, Artificial
  Probe
tatcctgataatcaccatatcggag

SEQ ID NO: 224304 - DNA, 25 bp, Artificial
  Probe
cagtaaggacctaggcaaaggctaa

SEQ ID NO: 224305 - DNA, 25 bp, Artificial
  Probe
tacattggtcacattcaagatgtct

SEQ ID NO: 224306 - DNA, 25 bp, Artificial
  Probe
cattcaagatgtctccaatccgatg

SEQ ID NO: 224307 - DNA, 25 bp, Artificial
  Probe
atccgatggcataggttatcacatc

SEQ ID NO: 224308 - DNA, 25 bp, Artificial
  Probe
ccagatacattggtcacattcaaga

SEQ ID NO: 224309 - DNA, 25 bp, Artificial
  Probe
gttatcacatcagtaagcgatcccc

SEQ ID NO: 224310 - DNA, 25 bp, Artificial
  Probe
ccaacagtaaggacctaggcaaagg

SEQ ID NO: 224311 - DNA, 25 bp, Artificial
  Probe
tggtcacattcaagatgtctccaat

SEQ ID NO: 224312 - DNA, 25 bp, Artificial
  Probe
ggacaccaacagtaaggacctaggc

SEQ ID NO: 224313 - DNA, 25 bp, Artificial
  Probe
gataatcaccatatcggagccacca

SEQ ID NO: 224314 - DNA, 25 bp, Artificial
  Probe
ttcaagatgtctccaatccgatggc

SEQ ID NO: 224315 - DNA, 25 bp, Artificial
  Probe
actggacaccaacagtaaggaccta

SEQ ID NO: 224316 - DNA, 25 bp, Artificial
  Probe
tcttccagagcatttcattttgtgt

SEQ ID NO: 224317 - DNA, 25 bp, Artificial
  Probe
cattggtcacattcaagatgtctcc

SEQ ID NO: 224318 - DNA, 25 bp, Artificial
  Probe
cagagcatttcattttgtgttatcc

SEQ ID NO: 224319 - DNA, 25 bp, Artificial
  Probe
atcctgataatcaccatatcggagc

SEQ ID NO: 224320 - DNA, 25 bp, Artificial
  Probe
ggttatcacatcagtaagcgatccc

SEQ ID NO: 224321 - DNA, 25 bp, Artificial
  Probe
aaggacctaggcaaaggctaattga

SEQ ID NO: 224322 - DNA, 25 bp, Artificial
  Probe
tgccatcaagcagaaattgaacctc

SEQ ID NO: 224323 - DNA, 25 bp, Artificial
  Probe
tggtcagagtggagcagcagcacca

SEQ ID NO: 224324 - DNA, 25 bp, Artificial
  Probe
gctgagcaccctgaaatgtcaggag

SEQ ID NO: 224325 - DNA, 25 bp, Artificial
  Probe
gtctccggactcttcctttgaatat

SEQ ID NO: 224326 - DNA, 25 bp, Artificial
  Probe
atcattttgctaaaatagagaccga

SEQ ID NO: 224327 - DNA, 25 bp, Artificial
  Probe
cctgcagtattattcagagacttct

SEQ ID NO: 224328 - DNA, 25 bp, Artificial
  Probe
cagctgcagcaatgccaagtgacag

SEQ ID NO: 224329 - DNA, 25 bp, Artificial
  Probe
tccaagtagtcagcaaagagaaacc

SEQ ID NO: 224330 - DNA, 25 bp, Artificial
  Probe
tcccaacaaaattagtcaaggtgtc

SEQ ID NO: 224331 - DNA, 25 bp, Artificial
  Probe
accctgaaatgtcaggaggaagagc

SEQ ID NO: 224332 - DNA, 25 bp, Artificial
  Probe
attagtcaaggtgtccaagaagaac

SEQ ID NO: 224333 - DNA, 25 bp, Artificial
  Probe
aacagtgccatcaagcagaaattga

SEQ ID NO: 224334 - DNA, 25 bp, Artificial
  Probe
tgaccatgctgatgaggagtggatc

SEQ ID NO: 224335 - DNA, 25 bp, Artificial
  Probe
cagtgatgaccatgctgatgaggag

SEQ ID NO: 224336 - DNA, 25 bp, Artificial
  Probe
ctggtcagagtggagcagcagcacc

SEQ ID NO: 224337 - DNA, 25 bp, Artificial
  Probe
tgagtcagagcaaggccagctgtat

SEQ ID NO: 224338 - DNA, 25 bp, Artificial
  Probe
cagagaaaagcttcgccatcgagga

SEQ ID NO: 224339 - DNA, 25 bp, Artificial
  Probe
caccctgaaatgtcaggaggaagag

SEQ ID NO: 224340 - DNA, 25 bp, Artificial
  Probe
gcagcaccaggaaaaggtgttgtac

SEQ ID NO: 224341 - DNA, 25 bp, Artificial
  Probe
cagcaaagagaaaccccatcttgtg

SEQ ID NO: 224342 - DNA, 25 bp, Artificial
  Probe
caatgccaagtgacagagaaacagc

SEQ ID NO: 224343 - DNA, 25 bp, Artificial
  Probe
gagtggagcagcagcaccaggaaaa

SEQ ID NO: 224344 - DNA, 25 bp, Artificial
  Probe
tgagcaaaatcagcagcttctgcaa

SEQ ID NO: 224345 - DNA, 25 bp, Artificial
  Probe
ccagtctccggactcttcctttgaa

SEQ ID NO: 224346 - DNA, 25 bp, Artificial
  Probe
gagaaaccccatcttgtgagaaata

SEQ ID NO: 224347 - DNA, 25 bp, Artificial
  Probe
ggacagtgatgaccatgctgatgag

SEQ ID NO: 224348 - DNA, 25 bp, Artificial
  Probe
catgctgatgaggagtggatcccaa

SEQ ID NO: 224349 - DNA, 25 bp, Artificial
  Probe
aagagaaaccccatcttgtgagaaa

SEQ ID NO: 224350 - DNA, 25 bp, Artificial
  Probe
gtcagcaaagagaaaccccatcttg

SEQ ID NO: 224351 - DNA, 25 bp, Artificial
  Probe
agcagcaccaggaaaaggtgttgta

SEQ ID NO: 224352 - DNA, 25 bp, Artificial
  Probe
ggagtggatcccaacaaaattagtc

SEQ ID NO: 224353 - DNA, 25 bp, Artificial
  Probe
tcagctgcagcaatgccaagtgaca

SEQ ID NO: 224354 - DNA, 25 bp, Artificial
  Probe
gtattattcagagacttctgtggct

SEQ ID NO: 224355 - DNA, 25 bp, Artificial
  Probe
ctcctccaagtagtcagcaaagaga

SEQ ID NO: 224356 - DNA, 25 bp, Artificial
  Probe
aaaggtgttgtaccttctcagtcag

SEQ ID NO: 224357 - DNA, 25 bp, Artificial
  Probe
ccagctgtattgaagtgcagaagat

SEQ ID NO: 224358 - DNA, 25 bp, Artificial
  Probe
cagagcaaggccagctgtattgaag

SEQ ID NO: 224359 - DNA, 25 bp, Artificial
  Probe
aaagcttcgccatcgaggacctgca

SEQ ID NO: 224360 - DNA, 25 bp, Artificial
  Probe
aaatgcccagagaaaagcttcgcca

SEQ ID NO: 224361 - DNA, 25 bp, Artificial
  Probe
aatcattttgctaaaatagagaccg

SEQ ID NO: 224362 - DNA, 25 bp, Artificial
  Probe
cagctgctgagcaccctgaaatgtc

SEQ ID NO: 224363 - DNA, 25 bp, Artificial
  Probe
ccttctcagtcagctgcagcaatgc

SEQ ID NO: 224364 - DNA, 25 bp, Artificial
  Probe
ttgtgagaaatatcccccagtctcc

SEQ ID NO: 224365 - DNA, 25 bp, Artificial
  Probe
ttcagagacttctgtggctgaggag

SEQ ID NO: 224366 - DNA, 25 bp, Artificial
  Probe
agaaggaacagcagctgctgagcac

SEQ ID NO: 224367 - DNA, 25 bp, Artificial
  Probe
gcttctgcaagaaaacagtgccatc

SEQ ID NO: 224368 - DNA, 25 bp, Artificial
  Probe
atctgccacagctggcccaaaagct

SEQ ID NO: 224369 - DNA, 25 bp, Artificial
  Probe
tccagaactgcaaaatgtgctactc

SEQ ID NO: 224370 - DNA, 25 bp, Artificial
  Probe
tcaagatgacttctccttggatgag

SEQ ID NO: 224371 - DNA, 25 bp, Artificial
  Probe
aagacatctgctaaaagcccaggcc

SEQ ID NO: 224372 - DNA, 25 bp, Artificial
  Probe
tatgctcaagatgacttctccttgg

SEQ ID NO: 224373 - DNA, 25 bp, Artificial
  Probe
cttgtacctgccactgtcattggat

SEQ ID NO: 224374 - DNA, 25 bp, Artificial
  Probe
aggacttgtacctgccactgtcatt

SEQ ID NO: 224375 - DNA, 25 bp, Artificial
  Probe
cgcagcaagtctccagctgactcag

SEQ ID NO: 224376 - DNA, 25 bp, Artificial
  Probe
gcttttcaaaacactctgtagtatg

SEQ ID NO: 224377 - DNA, 25 bp, Artificial
  Probe
tgttgcttttcaaaacactctgtag

SEQ ID NO: 224378 - DNA, 25 bp, Artificial
  Probe
aactgcaaaatgtgctactccatga

SEQ ID NO: 224379 - DNA, 25 bp, Artificial
  Probe
cgaccaagacgcaaatggaacttct

SEQ ID NO: 224380 - DNA, 25 bp, Artificial
  Probe
aatgcgccgcagcaagtctccagct

SEQ ID NO: 224381 - DNA, 25 bp, Artificial
  Probe
cgattccatgtgaaagatgataggc

SEQ ID NO: 224382 - DNA, 25 bp, Artificial
  Probe
cttgtggccctgaaaagttccgcta

SEQ ID NO: 224383 - DNA, 25 bp, Artificial
  Probe
agcagaatactttcgctcaagtgac

SEQ ID NO: 224384 - DNA, 25 bp, Artificial
  Probe
tctccttggatgagaatgaatgcag

SEQ ID NO: 224385 - DNA, 25 bp, Artificial
  Probe
aatgcagagtcatgaaagggaatcc

SEQ ID NO: 224386 - DNA, 25 bp, Artificial
  Probe
acatctgctaaaagcccaggcccaa

SEQ ID NO: 224387 - DNA, 25 bp, Artificial
  Probe
caacaaggctattggtgcttagaat

SEQ ID NO: 224388 - DNA, 25 bp, Artificial
  Probe
gaaagggaatccatctgccacagct

SEQ ID NO: 224389 - DNA, 25 bp, Artificial
  Probe
tgcggaagcacaaggacttgtacct

SEQ ID NO: 224390 - DNA, 25 bp, Artificial
  Probe
cttggcgattccatgtgaaagatga

SEQ ID NO: 224391 - DNA, 25 bp, Artificial
  Probe
attcacttggcgattccatgtgaaa

SEQ ID NO: 224392 - DNA, 25 bp, Artificial
  Probe
gtcgaagcagtctcctatctctaca

SEQ ID NO: 224393 - DNA, 25 bp, Artificial
  Probe
agggaatccatctgccacagctggc

SEQ ID NO: 224394 - DNA, 25 bp, Artificial
  Probe
agcacaaggacttgtacctgccact

SEQ ID NO: 224395 - DNA, 25 bp, Artificial
  Probe
tgcgccgcagcaagtctccagctga

SEQ ID NO: 224396 - DNA, 25 bp, Artificial
  Probe
tgctaaaagcccaggcccaatgcgc

SEQ ID NO: 224397 - DNA, 25 bp, Artificial
  Probe
tatagcagaatactttcgctcaagt

SEQ ID NO: 224398 - DNA, 25 bp, Artificial
  Probe
gataaccatcttttgagtgactttt

SEQ ID NO: 224399 - DNA, 25 bp, Artificial
  Probe
gattgataaccatcttttgagtgac

SEQ ID NO: 224400 - DNA, 25 bp, Artificial
  Probe
gccctggaagtctgcggaagcacaa

SEQ ID NO: 224401 - DNA, 25 bp, Artificial
  Probe
gaatactttcgctcaagtgaccaac

SEQ ID NO: 224402 - DNA, 25 bp, Artificial
  Probe
acccacaagccctggaagtctgcgg

SEQ ID NO: 224403 - DNA, 25 bp, Artificial
  Probe
ttggatgactctgattcacttggcg

SEQ ID NO: 224404 - DNA, 25 bp, Artificial
  Probe
tgacttctcttctgggccactaatt

SEQ ID NO: 224405 - DNA, 25 bp, Artificial
  Probe
aaagttccgctatgctcaagatgac

SEQ ID NO: 224406 - DNA, 25 bp, Artificial
  Probe
ggaagtctgcggaagcacaaggact

SEQ ID NO: 224407 - DNA, 25 bp, Artificial
  Probe
ataggctaaatcaaagccgattatt

SEQ ID NO: 224408 - DNA, 25 bp, Artificial
  Probe
tttcttgtgacttctcttctgggcc

SEQ ID NO: 224409 - DNA, 25 bp, Artificial
  Probe
tcaaaacactctgtagtatgtaggg

SEQ ID NO: 224410 - DNA, 25 bp, Artificial
  Probe
ctctgattcacttggcgattccatg

SEQ ID NO: 224411 - DNA, 25 bp, Artificial
  Probe
cagtcagctctcaacacctaagtcg

SEQ ID NO: 224412 - DNA, 25 bp, Artificial
  Probe
aggctaaatcaaagccgattattat

SEQ ID NO: 224413 - DNA, 25 bp, Artificial
  Probe
gccctgaaaagttccgctatgctca

SEQ ID NO: 224414 - DNA, 25 bp, Artificial
  Probe
cctcagaccgcgaccgaaataagta

SEQ ID NO: 224415 - DNA, 25 bp, Artificial
  Probe
acgtttgccaaccacgtgcagccag

SEQ ID NO: 224416 - DNA, 25 bp, Artificial
  Probe
agcctgctcgggtggcagccatctc

SEQ ID NO: 224417 - DNA, 25 bp, Artificial
  Probe
agggccgcgcggtggatatcaccac

SEQ ID NO: 224418 - DNA, 25 bp, Artificial
  Probe
ccacgtggcccttgggtcctatgct

SEQ ID NO: 224419 - DNA, 25 bp, Artificial
  Probe
tgcagccaggccaatatgtgctggt

SEQ ID NO: 224420 - DNA, 25 bp, Artificial
  Probe
tgagcactcggctgctgccaagaca

SEQ ID NO: 224421 - DNA, 25 bp, Artificial
  Probe
ccaggtccacctagaaactggggag

SEQ ID NO: 224422 - DNA, 25 bp, Artificial
  Probe
tggatatcaccacctcagaccgcga

SEQ ID NO: 224423 - DNA, 25 bp, Artificial
  Probe
aggccggcttcgactgggtgtatta

SEQ ID NO: 224424 - DNA, 25 bp, Artificial
  Probe
tagcaggggtccaggcctccagcct

SEQ ID NO: 224425 - DNA, 25 bp, Artificial
  Probe
aaggcccacgttcattgctctgtca

SEQ ID NO: 224426 - DNA, 25 bp, Artificial
  Probe
aagacaggtggctgctttcctgccg

SEQ ID NO: 224427 - DNA, 25 bp, Artificial
  Probe
aatatgtgctggtagcaggggtcca

SEQ ID NO: 224428 - DNA, 25 bp, Artificial
  Probe
ggccgcgcggtggatatcaccacct

SEQ ID NO: 224429 - DNA, 25 bp, Artificial
  Probe
ccacgtgcagccaggccaatatgtg

SEQ ID NO: 224430 - DNA, 25 bp, Artificial
  Probe
cctgctcttcattgcggacaatcat

SEQ ID NO: 224431 - DNA, 25 bp, Artificial
  Probe
tcattttcctggaccgtgagccaaa

SEQ ID NO: 224432 - DNA, 25 bp, Artificial
  Probe
ctttacactatgagggccgcgcggt

SEQ ID NO: 224433 - DNA, 25 bp, Artificial
  Probe
ccctcacgaagcatggggacacttg

SEQ ID NO: 224434 - DNA, 25 bp, Artificial
  Probe
cggtggatatcaccacctcagaccg

SEQ ID NO: 224435 - DNA, 25 bp, Artificial
  Probe
gcactcggctgctgccaagacaggt

SEQ ID NO: 224436 - DNA, 25 bp, Artificial
  Probe
tcggctgctgccaagacaggtggct

SEQ ID NO: 224437 - DNA, 25 bp, Artificial
  Probe
agtccaaggcccacgttcattgctc

SEQ ID NO: 224438 - DNA, 25 bp, Artificial
  Probe
tccaggtcatcgagactcaggatcc

SEQ ID NO: 224439 - DNA, 25 bp, Artificial
  Probe
ccaccttcagcgatgtgctcatttt

SEQ ID NO: 224440 - DNA, 25 bp, Artificial
  Probe
cgtgagccaaacaggctgagagctt

SEQ ID NO: 224441 - DNA, 25 bp, Artificial
  Probe
attacgagtccaaggcccacgttca

SEQ ID NO: 224442 - DNA, 25 bp, Artificial
  Probe
ccacgttcattgctctgtcaagtct

SEQ ID NO: 224443 - DNA, 25 bp, Artificial
  Probe
tgccaagacaggtggctgctttcct

SEQ ID NO: 224444 - DNA, 25 bp, Artificial
  Probe
tcttcattgcggacaatcatgcaga

SEQ ID NO: 224445 - DNA, 25 bp, Artificial
  Probe
agtacggactactggcgcgcttagc

SEQ ID NO: 224446 - DNA, 25 bp, Artificial
  Probe
gcttcgactgggtgtattacgagtc

SEQ ID NO: 224447 - DNA, 25 bp, Artificial
  Probe
caggccaatatgtgctggtagcagg

SEQ ID NO: 224448 - DNA, 25 bp, Artificial
  Probe
aagtctgagcactcggctgctgcca

SEQ ID NO: 224449 - DNA, 25 bp, Artificial
  Probe
atcatgcagaaccagcagcccgctt

SEQ ID NO: 224450 - DNA, 25 bp, Artificial
  Probe
gtttgccaaccacgtgcagccaggc

SEQ ID NO: 224451 - DNA, 25 bp, Artificial
  Probe
aggcctccagcctgctcgggtggca

SEQ ID NO: 224452 - DNA, 25 bp, Artificial
  Probe
tgccggagcccaggtccacctagaa

SEQ ID NO: 224453 - DNA, 25 bp, Artificial
  Probe
ccacctgctcttcattgcggacaat

SEQ ID NO: 224454 - DNA, 25 bp, Artificial
  Probe
cgactgggtgtattacgagtccaag

SEQ ID NO: 224455 - DNA, 25 bp, Artificial
  Probe
aggatcctccacgtcggctggcact

SEQ ID NO: 224456 - DNA, 25 bp, Artificial
  Probe
tggctgctttcctgccggagcccag

SEQ ID NO: 224457 - DNA, 25 bp, Artificial
  Probe
ataagtacggactactggcgcgctt

SEQ ID NO: 224458 - DNA, 25 bp, Artificial
  Probe
agagctttccaggtcatcgagactc

SEQ ID NO: 224459 - DNA, 25 bp, Artificial
  Probe
ggtgtattacgagtccaaggcccac

SEQ ID NO: 224460 - DNA, 25 bp, Artificial
  Probe
gagaccctgaatgactgggactctc

SEQ ID NO: 224461 - DNA, 25 bp, Artificial
  Probe
cctctaaagcaaaactgcagtgttc

SEQ ID NO: 224462 - DNA, 25 bp, Artificial
  Probe
tgtacgtcacaaatccagaaagtga

SEQ ID NO: 224463 - DNA, 25 bp, Artificial
  Probe
accctgaatgactgggactctcagt

SEQ ID NO: 224464 - DNA, 25 bp, Artificial
  Probe
tcaactcgtcttagaatgcatgatg

SEQ ID NO: 224465 - DNA, 25 bp, Artificial
  Probe
gaccctgaatgactgggactctcag

SEQ ID NO: 224466 - DNA, 25 bp, Artificial
  Probe
ttaagtaacatcactagtgacaccg

SEQ ID NO: 224467 - DNA, 25 bp, Artificial
  Probe
atcaactcgtcttagaatgcatgat

SEQ ID NO: 224468 - DNA, 25 bp, Artificial
  Probe
gcaaaactgcagtgttccaaagtct

SEQ ID NO: 224469 - DNA, 25 bp, Artificial
  Probe
aagtaacatcactagtgacaccgat

SEQ ID NO: 224470 - DNA, 25 bp, Artificial
  Probe
acctctaaagcaaaactgcagtgtt

SEQ ID NO: 224471 - DNA, 25 bp, Artificial
  Probe
gaatgactgggactctcagttcagt

SEQ ID NO: 224472 - DNA, 25 bp, Artificial
  Probe
tacctctaaagcaaaactgcagtgt

SEQ ID NO: 224473 - DNA, 25 bp, Artificial
  Probe
tgggactctcagttcagttcacctt

SEQ ID NO: 224474 - DNA, 25 bp, Artificial
  Probe
cgtcacaaatccagaaagtgaactt

SEQ ID NO: 224475 - DNA, 25 bp, Artificial
  Probe
aagcaaaactgcagtgttccaaagt

SEQ ID NO: 224476 - DNA, 25 bp, Artificial
  Probe
agaccctgaatgactgggactctca

SEQ ID NO: 224477 - DNA, 25 bp, Artificial
  Probe
tgtttgtacgtcacaaatccagaaa

SEQ ID NO: 224478 - DNA, 25 bp, Artificial
  Probe
gtacgtcacaaatccagaaagtgaa

SEQ ID NO: 224479 - DNA, 25 bp, Artificial
  Probe
gtttgtacgtcacaaatccagaaag

SEQ ID NO: 224480 - DNA, 25 bp, Artificial
  Probe
tctaaagcaaaactgcagtgttcca

SEQ ID NO: 224481 - DNA, 25 bp, Artificial
  Probe
ttgtacgtcacaaatccagaaagtg

SEQ ID NO: 224482 - DNA, 25 bp, Artificial
  Probe
ctctaaagcaaaactgcagtgttcc

SEQ ID NO: 224483 - DNA, 25 bp, Artificial
  Probe
gggactctcagttcagttcaccttc

SEQ ID NO: 224484 - DNA, 25 bp, Artificial
  Probe
aatcaactcgtcttagaatgcatga

SEQ ID NO: 224485 - DNA, 25 bp, Artificial
  Probe
tgcatgatgtgtttgtacgtcacaa

SEQ ID NO: 224486 - DNA, 25 bp, Artificial
  Probe
catgatgtgtttgtacgtcacaaat

SEQ ID NO: 224487 - DNA, 25 bp, Artificial
  Probe
gtgtttgtacgtcacaaatccagaa

SEQ ID NO: 224488 - DNA, 25 bp, Artificial
  Probe
aaagctgtttctcttctatctgtag

SEQ ID NO: 224489 - DNA, 25 bp, Artificial
  Probe
aactcgtcttagaatgcatgatgtg

SEQ ID NO: 224490 - DNA, 25 bp, Artificial
  Probe
ccatgctatagtctgaaaacaagcc

SEQ ID NO: 224491 - DNA, 25 bp, Artificial
  Probe
ctaaagcaaaactgcagtgttccaa

SEQ ID NO: 224492 - DNA, 25 bp, Artificial
  Probe
agcaaaactgcagtgttccaaagtc

SEQ ID NO: 224493 - DNA, 25 bp, Artificial
  Probe
gactgggactctcagttcagttcac

SEQ ID NO: 224494 - DNA, 25 bp, Artificial
  Probe
taagtaacatcactagtgacaccga

SEQ ID NO: 224495 - DNA, 25 bp, Artificial
  Probe
atgactgggactctcagttcagttc

SEQ ID NO: 224496 - DNA, 25 bp, Artificial
  Probe
tgatgtgtttgtacgtcacaaatcc

SEQ ID NO: 224497 - DNA, 25 bp, Artificial
  Probe
ctgggactctcagttcagttcacct

SEQ ID NO: 224498 - DNA, 25 bp, Artificial
  Probe
tttgtacgtcacaaatccagaaagt

SEQ ID NO: 224499 - DNA, 25 bp, Artificial
  Probe
aaagcaaaactgcagtgttccaaag

SEQ ID NO: 224500 - DNA, 25 bp, Artificial
  Probe
ggactctcagttcagttcaccttca

SEQ ID NO: 224501 - DNA, 25 bp, Artificial
  Probe
ctcgtcttagaatgcatgatgtgtt

SEQ ID NO: 224502 - DNA, 25 bp, Artificial
  Probe
atgcatgatgtgtttgtacgtcaca

SEQ ID NO: 224503 - DNA, 25 bp, Artificial
  Probe
ctacctctaaagcaaaactgcagtg

SEQ ID NO: 224504 - DNA, 25 bp, Artificial
  Probe
tacgtcacaaatccagaaagtgaac

SEQ ID NO: 224505 - DNA, 25 bp, Artificial
  Probe
attccagtctgtctttacaacatgg

SEQ ID NO: 224506 - DNA, 25 bp, Artificial
  Probe
aaagcagctggttgtgggagctaca

SEQ ID NO: 224507 - DNA, 25 bp, Artificial
  Probe
tccagctcattctcttccaacgtgg

SEQ ID NO: 224508 - DNA, 25 bp, Artificial
  Probe
gactggtccactaggccccaaggga

SEQ ID NO: 224509 - DNA, 25 bp, Artificial
  Probe
cctggcttagctgagtgaatggatt

SEQ ID NO: 224510 - DNA, 25 bp, Artificial
  Probe
catgcctgtgtagttgataatcaaa

SEQ ID NO: 224511 - DNA, 25 bp, Artificial
  Probe
ccatagcttggtattataagctata

SEQ ID NO: 224512 - DNA, 25 bp, Artificial
  Probe
gaatataccctgctgcaggccctct

SEQ ID NO: 224513 - DNA, 25 bp, Artificial
  Probe
gcacttctggctagccttacccaat

SEQ ID NO: 224514 - DNA, 25 bp, Artificial
  Probe
tcagctgacagaatatgggaccaca

SEQ ID NO: 224515 - DNA, 25 bp, Artificial
  Probe
tcaaccgaatgttaggtcttttact

SEQ ID NO: 224516 - DNA, 25 bp, Artificial
  Probe
catccctcttcaaccgaatgttagg

SEQ ID NO: 224517 - DNA, 25 bp, Artificial
  Probe
atgaccagggccaccattagtggta

SEQ ID NO: 224518 - DNA, 25 bp, Artificial
  Probe
catccctgatgtaggcaaaagacag

SEQ ID NO: 224519 - DNA, 25 bp, Artificial
  Probe
ttgctcctttggagggaacagtggc

SEQ ID NO: 224520 - DNA, 25 bp, Artificial
  Probe
ccatccctgatgtaggcaaaagaca

SEQ ID NO: 224521 - DNA, 25 bp, Artificial
  Probe
ttctacttctgactccatgcctgtg

SEQ ID NO: 224522 - DNA, 25 bp, Artificial
  Probe
actcccactgctttaaatgagacag

SEQ ID NO: 224523 - DNA, 25 bp, Artificial
  Probe
ggctatgtaggtcaactgtgaccta

SEQ ID NO: 224524 - DNA, 25 bp, Artificial
  Probe
tcgggtccctgtacttcctgtccgt

SEQ ID NO: 224525 - DNA, 25 bp, Artificial
  Probe
cccacctacactcagaattctggga

SEQ ID NO: 224526 - DNA, 25 bp, Artificial
  Probe
ggagctacaggcacagtggcatagt

SEQ ID NO: 224527 - DNA, 25 bp, Artificial
  Probe
agccccatgcttcagacttccttgg

SEQ ID NO: 224528 - DNA, 25 bp, Artificial
  Probe
ccccttctcttcttacatgtaggga

SEQ ID NO: 224529 - DNA, 25 bp, Artificial
  Probe
tggatcctatgatgccttcccagtc

SEQ ID NO: 224530 - DNA, 25 bp, Artificial
  Probe
ggaacaccaatatctttcaagtatg

SEQ ID NO: 224531 - DNA, 25 bp, Artificial
  Probe
aatggattgcgtgagcctgaggaca

SEQ ID NO: 224532 - DNA, 25 bp, Artificial
  Probe
gagctgcaaattctaccagtaaaat

SEQ ID NO: 224533 - DNA, 25 bp, Artificial
  Probe
ctacaggcacagtggcatagttaaa

SEQ ID NO: 224534 - DNA, 25 bp, Artificial
  Probe
ctggagacaacagtgccccagggtg

SEQ ID NO: 224535 - DNA, 25 bp, Artificial
  Probe
ttgcccactgccatgcatgtcctga

SEQ ID NO: 224536 - DNA, 25 bp, Artificial
  Probe
cacggagactcaggttgttagaaag

SEQ ID NO: 224537 - DNA, 25 bp, Artificial
  Probe
ggctcagaatcagatttctgaaagg

SEQ ID NO: 224538 - DNA, 25 bp, Artificial
  Probe
atttgcttgctcctttggagggaac

SEQ ID NO: 224539 - DNA, 25 bp, Artificial
  Probe
cctcttcctcggaggctgctgggac

SEQ ID NO: 224540 - DNA, 25 bp, Artificial
  Probe
aagccccatgcttcagacttccttg

SEQ ID NO: 224541 - DNA, 25 bp, Artificial
  Probe
gctggggccaagtcaggaatttaaa

SEQ ID NO: 224542 - DNA, 25 bp, Artificial
  Probe
caacccacagggactgacagtgcca

SEQ ID NO: 224543 - DNA, 25 bp, Artificial
  Probe
ataatcaaagtcatgctatggtgac

SEQ ID NO: 224544 - DNA, 25 bp, Artificial
  Probe
cagtggcctggcttagctgagtgaa

SEQ ID NO: 224545 - DNA, 25 bp, Artificial
  Probe
gaggaggtccccacaagagctcctc

SEQ ID NO: 224546 - DNA, 25 bp, Artificial
  Probe
ggtcaactgtgacctaaattcacca

SEQ ID NO: 224547 - DNA, 25 bp, Artificial
  Probe
aggccaaatagacgaactggagagt

SEQ ID NO: 224548 - DNA, 25 bp, Artificial
  Probe
atcaattttggtttccctggagaca

SEQ ID NO: 224549 - DNA, 25 bp, Artificial
  Probe
aggcaaaagacagtctcctctcaac

SEQ ID NO: 224550 - DNA, 25 bp, Artificial
  Probe
gaggctgctgggaccggaatatacc

SEQ ID NO: 224551 - DNA, 25 bp, Artificial
  Probe
ttctcggtctccagcacaggagtgg

SEQ ID NO: 224552 - DNA, 25 bp, Artificial
  Probe
gtcatttgccagtgcccctgtggag

SEQ ID NO: 224553 - DNA, 25 bp, Artificial
  Probe
tccatgagagctgtgacatccaagc

SEQ ID NO: 224554 - DNA, 25 bp, Artificial
  Probe
gttggtcaatgtaccctgtggacac

SEQ ID NO: 224555 - DNA, 25 bp, Artificial
  Probe
aacctctcctctgagtggtcagcct

SEQ ID NO: 224556 - DNA, 25 bp, Artificial
  Probe
acagtaccagtcagaattctccatg

SEQ ID NO: 224557 - DNA, 25 bp, Artificial
  Probe
aacggagtttctcatcaggatggga

SEQ ID NO: 224558 - DNA, 25 bp, Artificial
  Probe
cccagaaaaccaggatcacacaacg

SEQ ID NO: 224559 - DNA, 25 bp, Artificial
  Probe
ggtgcacacaacctctcctctgagt

SEQ ID NO: 224560 - DNA, 25 bp, Artificial
  Probe
ctccagctggccagctaaaaggttc

SEQ ID NO: 224561 - DNA, 25 bp, Artificial
  Probe
cacgcagctggcaaataatctaaag

SEQ ID NO: 224562 - DNA, 25 bp, Artificial
  Probe
gaaaggacagctttcaatgttctac

SEQ ID NO: 224563 - DNA, 25 bp, Artificial
  Probe
ttgtcatttgccagtgcccctgtgg

SEQ ID NO: 224564 - DNA, 25 bp, Artificial
  Probe
gagctgtgacatccaagctctcggg

SEQ ID NO: 224565 - DNA, 25 bp, Artificial
  Probe
aagctctcgggcacctacaggtgct

SEQ ID NO: 224566 - DNA, 25 bp, Artificial
  Probe
agaatgtgaccctgctgtgttggtc

SEQ ID NO: 224567 - DNA, 25 bp, Artificial
  Probe
ctctctacctgttgtcatttgccag

SEQ ID NO: 224568 - DNA, 25 bp, Artificial
  Probe
aaaccaggatcacacaacggagttt

SEQ ID NO: 224569 - DNA, 25 bp, Artificial
  Probe
ccctggacatcctgatcacaggaca

SEQ ID NO: 224570 - DNA, 25 bp, Artificial
  Probe
atcacacaacggagtttctcatcag

SEQ ID NO: 224571 - DNA, 25 bp, Artificial
  Probe
agtgaccccctggacatcctgatca

SEQ ID NO: 224572 - DNA, 25 bp, Artificial
  Probe
ctggccagctaaaaggttcatcaca

SEQ ID NO: 224573 - DNA, 25 bp, Artificial
  Probe
ttctcatcaggatgggaatggctgt

SEQ ID NO: 224574 - DNA, 25 bp, Artificial
  Probe
tgccagtgcccctgtggagctcata

SEQ ID NO: 224575 - DNA, 25 bp, Artificial
  Probe
gatgggaatggctgtcctggtcctc

SEQ ID NO: 224576 - DNA, 25 bp, Artificial
  Probe
atcgaagcctccagctggccagcta

SEQ ID NO: 224577 - DNA, 25 bp, Artificial
  Probe
cctggcaaagtcatagacagaccca

SEQ ID NO: 224578 - DNA, 25 bp, Artificial
  Probe
ccaccacgcagctggcaaataatct

SEQ ID NO: 224579 - DNA, 25 bp, Artificial
  Probe
cagaaaaccaggatcacacaacgga

SEQ ID NO: 224580 - DNA, 25 bp, Artificial
  Probe
cacacaacggagtttctcatcagga

SEQ ID NO: 224581 - DNA, 25 bp, Artificial
  Probe
ctcagtgatgcctaactccacagta

SEQ ID NO: 224582 - DNA, 25 bp, Artificial
  Probe
gtgatgcctaactccacagtacact

SEQ ID NO: 224583 - DNA, 25 bp, Artificial
  Probe
ttctagctgctgagccctggcaaag

SEQ ID NO: 224584 - DNA, 25 bp, Artificial
  Probe
acaacctctcctctgagtggtcagc

SEQ ID NO: 224585 - DNA, 25 bp, Artificial
  Probe
gaagcctccagctggccagctaaaa

SEQ ID NO: 224586 - DNA, 25 bp, Artificial
  Probe
gtgctatggttctcccgactcatct

SEQ ID NO: 224587 - DNA, 25 bp, Artificial
  Probe
tgacatccaagctctcgggcaccta

SEQ ID NO: 224588 - DNA, 25 bp, Artificial
  Probe
ctctgagtggtcagcctccagtgac

SEQ ID NO: 224589 - DNA, 25 bp, Artificial
  Probe
gctgctgagccctggcaaagtcata

SEQ ID NO: 224590 - DNA, 25 bp, Artificial
  Probe
agaatccatcgaagcctccagctgg

SEQ ID NO: 224591 - DNA, 25 bp, Artificial
  Probe
aaagtcaaagttccaagatcaacag

SEQ ID NO: 224592 - DNA, 25 bp, Artificial
  Probe
catcaggatgggaatggctgtcctg

SEQ ID NO: 224593 - DNA, 25 bp, Artificial
  Probe
aggacagcttgatctcgctccttcc

SEQ ID NO: 224594 - DNA, 25 bp, Artificial
  Probe
acactcaggagagaatgtgaccctg

SEQ ID NO: 224595 - DNA, 25 bp, Artificial
  Probe
ttctgtcaaaggagggatcaggcca

SEQ ID NO: 224596 - DNA, 25 bp, Artificial
  Probe
gtcaatgtaccctgtggacactttc

SEQ ID NO: 224597 - DNA, 25 bp, Artificial
  Probe
gatcaacagtaccagtcagaattct

SEQ ID NO: 224598 - DNA, 25 bp, Artificial
  Probe
caacgtgatttagctgatgagccat

SEQ ID NO: 224599 - DNA, 25 bp, Artificial
  Probe
aggaagcataattccaacctgagga

SEQ ID NO: 224600 - DNA, 25 bp, Artificial
  Probe
tctgaaatgtctacggaaagcccac

SEQ ID NO: 224601 - DNA, 25 bp, Artificial
  Probe
ctgacattttatacagtcccctggt

SEQ ID NO: 224602 - DNA, 25 bp, Artificial
  Probe
cctaagtctgaggaagcataattcc

SEQ ID NO: 224603 - DNA, 25 bp, Artificial
  Probe
cccacctggcatctgatgagcagtt

SEQ ID NO: 224604 - DNA, 25 bp, Artificial
  Probe
tgaaaataggccacgtgggacttag

SEQ ID NO: 224605 - DNA, 25 bp, Artificial
  Probe
aagggtttcatcttaatctgcaatt

SEQ ID NO: 224606 - DNA, 25 bp, Artificial
  Probe
gggacttagtacttaagcggcttgc

SEQ ID NO: 224607 - DNA, 25 bp, Artificial
  Probe
gttggaacagttttcctcagttgca

SEQ ID NO: 224608 - DNA, 25 bp, Artificial
  Probe
ccatcttgatagagcttacctcctg

SEQ ID NO: 224609 - DNA, 25 bp, Artificial
  Probe
aagggagcctaagtctgaggaagca

SEQ ID NO: 224610 - DNA, 25 bp, Artificial
  Probe
aggacagagtgcatcacttcttcaa

SEQ ID NO: 224611 - DNA, 25 bp, Artificial
  Probe
agcccacctggcatctgatgagcag

SEQ ID NO: 224612 - DNA, 25 bp, Artificial
  Probe
cacttcttcaagttgtgtgaagggt

SEQ ID NO: 224613 - DNA, 25 bp, Artificial
  Probe
agccatcttgatagagcttacctcc

SEQ ID NO: 224614 - DNA, 25 bp, Artificial
  Probe
ggaaagcccacctggcatctgatga

SEQ ID NO: 224615 - DNA, 25 bp, Artificial
  Probe
taagcggcttgcataaaaactgctg

SEQ ID NO: 224616 - DNA, 25 bp, Artificial
  Probe
agtgtctgaaatgtctacggaaagc

SEQ ID NO: 224617 - DNA, 25 bp, Artificial
  Probe
gctgatgagccatcttgatagagct

SEQ ID NO: 224618 - DNA, 25 bp, Artificial
  Probe
atgtctacggaaagcccacctggca

SEQ ID NO: 224619 - DNA, 25 bp, Artificial
  Probe
ggtgctgcttcattggttttttaca

SEQ ID NO: 224620 - DNA, 25 bp, Artificial
  Probe
agtaatccagtgttcatgtttaaac

SEQ ID NO: 224621 - DNA, 25 bp, Artificial
  Probe
tgctgacattttatacagtcccctg

SEQ ID NO: 224622 - DNA, 25 bp, Artificial
  Probe
gcttgcataaaaactgctgacattt

SEQ ID NO: 224623 - DNA, 25 bp, Artificial
  Probe
gctgcttcattggttttttacaata

SEQ ID NO: 224624 - DNA, 25 bp, Artificial
  Probe
cattttatacagtcccctggtgctg

SEQ ID NO: 224625 - DNA, 25 bp, Artificial
  Probe
taattccaacctgaggacagagtgc

SEQ ID NO: 224626 - DNA, 25 bp, Artificial
  Probe
agttggaacagttttcctcagttgc

SEQ ID NO: 224627 - DNA, 25 bp, Artificial
  Probe
ccctggtgctgcttcattggttttt

SEQ ID NO: 224628 - DNA, 25 bp, Artificial
  Probe
tcagttgcatgcattgaaaataggc

SEQ ID NO: 224629 - DNA, 25 bp, Artificial
  Probe
acctgaggacagagtgcatcacttc

SEQ ID NO: 224630 - DNA, 25 bp, Artificial
  Probe
aaatgtctacggaaagcccacctgg

SEQ ID NO: 224631 - DNA, 25 bp, Artificial
  Probe
tgatagagcttacctcctggggatg

SEQ ID NO: 224632 - DNA, 25 bp, Artificial
  Probe
ttctgtgaagggagcctaagtctga

SEQ ID NO: 224633 - DNA, 25 bp, Artificial
  Probe
tacagtcccctggtgctgcttcatt

SEQ ID NO: 224634 - DNA, 25 bp, Artificial
  Probe
atgagccatcttgatagagcttacc

SEQ ID NO: 224635 - DNA, 25 bp, Artificial
  Probe
gggtttcatcttaatctgcaattca

SEQ ID NO: 224636 - DNA, 25 bp, Artificial
  Probe
tacttaagcggcttgcataaaaact

SEQ ID NO: 224637 - DNA, 25 bp, Artificial
  Probe
tgacattttatacagtcccctggtg

SEQ ID NO: 224638 - DNA, 25 bp, Artificial
  Probe
acttagtacttaagcggcttgcata

SEQ ID NO: 224639 - DNA, 25 bp, Artificial
  Probe
ggcttgcataaaaactgctgacatt

SEQ ID NO: 224640 - DNA, 25 bp, Artificial
  Probe
tacggaaagcccacctggcatctga

SEQ ID NO: 224641 - DNA, 25 bp, Artificial
  Probe
gtgctgcttcattggttttttacaa

SEQ ID NO: 224642 - DNA, 25 bp, Artificial
  Probe
ggccacgtgggacttagtacttaag

SEQ ID NO: 224643 - DNA, 25 bp, Artificial
  Probe
cacgtgggacttagtacttaagcgg

SEQ ID NO: 224644 - DNA, 25 bp, Artificial
  Probe
ggctactaaagagacttcttccata

SEQ ID NO: 224645 - DNA, 25 bp, Artificial
  Probe
tgtatcctgctccatgccttcagca

SEQ ID NO: 224646 - DNA, 25 bp, Artificial
  Probe
gcttaccactggaactccacaagaa

SEQ ID NO: 224647 - DNA, 25 bp, Artificial
  Probe
taataagagggagctgcctgcctcc

SEQ ID NO: 224648 - DNA, 25 bp, Artificial
  Probe
cttggtagcatctatgaggacttga

SEQ ID NO: 224649 - DNA, 25 bp, Artificial
  Probe
tctatgaggacttgaagatgtacca

SEQ ID NO: 224650 - DNA, 25 bp, Artificial
  Probe
cttgaagatgtaccagtcagagttc

SEQ ID NO: 224651 - DNA, 25 bp, Artificial
  Probe
tgaagacatcacacgggacaaaacc

SEQ ID NO: 224652 - DNA, 25 bp, Artificial
  Probe
aagatgaagctctgtatcctgctcc

SEQ ID NO: 224653 - DNA, 25 bp, Artificial
  Probe
accagcacactggaggcctgcttac

SEQ ID NO: 224654 - DNA, 25 bp, Artificial
  Probe
tatcaacagggtgatgaactatctg

SEQ ID NO: 224655 - DNA, 25 bp, Artificial
  Probe
gcactgctggagacatcgatcatga

SEQ ID NO: 224656 - DNA, 25 bp, Artificial
  Probe
atctgtaaccccaaaggtggcacgg

SEQ ID NO: 224657 - DNA, 25 bp, Artificial
  Probe
tatctgagctcctcctaaggaggag

SEQ ID NO: 224658 - DNA, 25 bp, Artificial
  Probe
ctaggagtcaggtagtcctggcctg

SEQ ID NO: 224659 - DNA, 25 bp, Artificial
  Probe
tggagacatcgatcatgaagacatc

SEQ ID NO: 224660 - DNA, 25 bp, Artificial
  Probe
aagacttctttgatgatgaccctgt

SEQ ID NO: 224661 - DNA, 25 bp, Artificial
  Probe
cagaaagctcccatgggagaagcag

SEQ ID NO: 224662 - DNA, 25 bp, Artificial
  Probe
cagaaacatgctgatggctattgat

SEQ ID NO: 224663 - DNA, 25 bp, Artificial
  Probe
acttcagagccacaatcatcagcag

SEQ ID NO: 224664 - DNA, 25 bp, Artificial
  Probe
tctgcaccagaaagctcccatggga

SEQ ID NO: 224665 - DNA, 25 bp, Artificial
  Probe
cccaaaggtggcacggctgcctcag

SEQ ID NO: 224666 - DNA, 25 bp, Artificial
  Probe
catgctgatggctattgatgagcta

SEQ ID NO: 224667 - DNA, 25 bp, Artificial
  Probe
gagctaatgcggtctctgaatcaca

SEQ ID NO: 224668 - DNA, 25 bp, Artificial
  Probe
gagaagcagatccttacagagtgaa

SEQ ID NO: 224669 - DNA, 25 bp, Artificial
  Probe
ctgatggctattgatgagctaatgc

SEQ ID NO: 224670 - DNA, 25 bp, Artificial
  Probe
ctcccatgggagaagcagatcctta

SEQ ID NO: 224671 - DNA, 25 bp, Artificial
  Probe
acactggaggcctgcttaccactgg

SEQ ID NO: 224672 - DNA, 25 bp, Artificial
  Probe
ggacagaaacatgctgatggctatt

SEQ ID NO: 224673 - DNA, 25 bp, Artificial
  Probe
gagttccaggccataaatgcagcac

SEQ ID NO: 224674 - DNA, 25 bp, Artificial
  Probe
tcttccataataagagggagctgcc

SEQ ID NO: 224675 - DNA, 25 bp, Artificial
  Probe
tgcctggctactaaagagacttctt

SEQ ID NO: 224676 - DNA, 25 bp, Artificial
  Probe
gtagtcctggcctggttgaccttca

SEQ ID NO: 224677 - DNA, 25 bp, Artificial
  Probe
ctattgatgagctaatgcggtctct

SEQ ID NO: 224678 - DNA, 25 bp, Artificial
  Probe
gtcatgactatcaacagggtgatga

SEQ ID NO: 224679 - DNA, 25 bp, Artificial
  Probe
agtcaggtagtcctggcctggttga

SEQ ID NO: 224680 - DNA, 25 bp, Artificial
  Probe
tccttacagagtgaagatgaagctc

SEQ ID NO: 224681 - DNA, 25 bp, Artificial
  Probe
agctcccatgggagaagcagatcct

SEQ ID NO: 224682 - DNA, 25 bp, Artificial
  Probe
agtcagagttccaggccataaatgc

SEQ ID NO: 224683 - DNA, 25 bp, Artificial
  Probe
gtcaggtagtcctggcctggttgac

SEQ ID NO: 224684 - DNA, 25 bp, Artificial
  Probe
gcctccacaaaagacttctttgatg

SEQ ID NO: 224685 - DNA, 25 bp, Artificial
  Probe
ttgatgagctaatgcggtctctgaa

SEQ ID NO: 224686 - DNA, 25 bp, Artificial
  Probe
cggtctctgaatcacagcggcgaga

SEQ ID NO: 224687 - DNA, 25 bp, Artificial
  Probe
catctatgaggacttgaagatgtac

SEQ ID NO: 224688 - DNA, 25 bp, Artificial
  Probe
tgatgaactatctgagctcctccta

SEQ ID NO: 224689 - DNA, 25 bp, Artificial
  Probe
aagagacttcttccataataagagg

SEQ ID NO: 224690 - DNA, 25 bp, Artificial
  Probe
cagtattagattcacagttgccata

SEQ ID NO: 224691 - DNA, 25 bp, Artificial
  Probe
taggcacgggacttttcctgttgta

SEQ ID NO: 224692 - DNA, 25 bp, Artificial
  Probe
ttacatgagtccaaaggccgggcgc

SEQ ID NO: 224693 - DNA, 25 bp, Artificial
  Probe
ttcctgttgtaacttctggtgtaca

SEQ ID NO: 224694 - DNA, 25 bp, Artificial
  Probe
aaatttttcaagctcgtgggcagaa

SEQ ID NO: 224695 - DNA, 25 bp, Artificial
  Probe
ttaggcacgggacttttcctgttgt

SEQ ID NO: 224696 - DNA, 25 bp, Artificial
  Probe
aatttttcaagctcgtgggcagaac

SEQ ID NO: 224697 - DNA, 25 bp, Artificial
  Probe
aacttctggtgtacatctgaagtgg

SEQ ID NO: 224698 - DNA, 25 bp, Artificial
  Probe
gcttacatgagtccaaaggccgggc

SEQ ID NO: 224699 - DNA, 25 bp, Artificial
  Probe
cttctggtgtacatctgaagtgggg

SEQ ID NO: 224700 - DNA, 25 bp, Artificial
  Probe
gacttctgtacagtattagattcac

SEQ ID NO: 224701 - DNA, 25 bp, Artificial
  Probe
atgacttctgtacagtattagattc

SEQ ID NO: 224702 - DNA, 25 bp, Artificial
  Probe
gttgtaacttctggtgtacatctga

SEQ ID NO: 224703 - DNA, 25 bp, Artificial
  Probe
gctcgtgggcagaacattcgactgg

SEQ ID NO: 224704 - DNA, 25 bp, Artificial
  Probe
ttgccgtctgttaggcacgggactt

SEQ ID NO: 224705 - DNA, 25 bp, Artificial
  Probe
gggacttttcctgttgtaacttctg

SEQ ID NO: 224706 - DNA, 25 bp, Artificial
  Probe
agctctttgtttgcaaccctccttg

SEQ ID NO: 224707 - DNA, 25 bp, Artificial
  Probe
caaatgacttctgtacagtattaga

SEQ ID NO: 224708 - DNA, 25 bp, Artificial
  Probe
ttagattcacagttgccatatatag

SEQ ID NO: 224709 - DNA, 25 bp, Artificial
  Probe
tgttgtaacttctggtgtacatctg

SEQ ID NO: 224710 - DNA, 25 bp, Artificial
  Probe
taacttctggtgtacatctgaagtg

SEQ ID NO: 224711 - DNA, 25 bp, Artificial
  Probe
agctcgtgggcagaacattcgactg

SEQ ID NO: 224712 - DNA, 25 bp, Artificial
  Probe
atttttcaagctcgtgggcagaaca

SEQ ID NO: 224713 - DNA, 25 bp, Artificial
  Probe
aagctcgtgggcagaacattcgact

SEQ ID NO: 224714 - DNA, 25 bp, Artificial
  Probe
aggaacttaactattgcactgaaaa

SEQ ID NO: 224715 - DNA, 25 bp, Artificial
  Probe
ttgtaacttctggtgtacatctgaa

SEQ ID NO: 224716 - DNA, 25 bp, Artificial
  Probe
agtattagattcacagttgccatat

SEQ ID NO: 224717 - DNA, 25 bp, Artificial
  Probe
gttaggcacgggacttttcctgttg

SEQ ID NO: 224718 - DNA, 25 bp, Artificial
  Probe
ctgttgtaacttctggtgtacatct

SEQ ID NO: 224719 - DNA, 25 bp, Artificial
  Probe
ctcgtgggcagaacattcgactggc

SEQ ID NO: 224720 - DNA, 25 bp, Artificial
  Probe
atttgccgtctgttaggcacgggac

SEQ ID NO: 224721 - DNA, 25 bp, Artificial
  Probe
ggaacttaactattgcactgaaaaa

SEQ ID NO: 224722 - DNA, 25 bp, Artificial
  Probe
gaaatttttcaagctcgtgggcaga

SEQ ID NO: 224723 - DNA, 25 bp, Artificial
  Probe
acttttcctgttgtaacttctggtg

SEQ ID NO: 224724 - DNA, 25 bp, Artificial
  Probe
ttttcaagctcgtgggcagaacatt

SEQ ID NO: 224725 - DNA, 25 bp, Artificial
  Probe
cttacatgagtccaaaggccgggcg

SEQ ID NO: 224726 - DNA, 25 bp, Artificial
  Probe
gtaacttctggtgtacatctgaagt

SEQ ID NO: 224727 - DNA, 25 bp, Artificial
  Probe
tttcctgttgtaacttctggtgtac

SEQ ID NO: 224728 - DNA, 25 bp, Artificial
  Probe
cttctgtacagtattagattcacag

SEQ ID NO: 224729 - DNA, 25 bp, Artificial
  Probe
gtattagattcacagttgccatata

SEQ ID NO: 224730 - DNA, 25 bp, Artificial
  Probe
gacttttcctgttgtaacttctggt

SEQ ID NO: 224731 - DNA, 25 bp, Artificial
  Probe
tgcttacatgagtccaaaggccggg

SEQ ID NO: 224732 - DNA, 25 bp, Artificial
  Probe
tcctgttgtaacttctggtgtacat

SEQ ID NO: 224733 - DNA, 25 bp, Artificial
  Probe
ggacttttcctgttgtaacttctgg

SEQ ID NO: 224734 - DNA, 25 bp, Artificial
  Probe
tttttcaagctcgtgggcagaacat

SEQ ID NO: 224735 - DNA, 25 bp, Artificial
  Probe
gcacgggacttttcctgttgtaact

SEQ ID NO: 224736 - DNA, 25 bp, Artificial
  Probe
gtccgggatttcattaatgagcgcc

SEQ ID NO: 224737 - DNA, 25 bp, Artificial
  Probe
taatgagcgcctcaaagagcacgac

SEQ ID NO: 224738 - DNA, 25 bp, Artificial
  Probe
tttgatattggaaccctgaggaatc

SEQ ID NO: 224739 - DNA, 25 bp, Artificial
  Probe
tgagcgcctcaaagagcacgacttg

SEQ ID NO: 224740 - DNA, 25 bp, Artificial
  Probe
ctacggccccggataacacggatgt

SEQ ID NO: 224741 - DNA, 25 bp, Artificial
  Probe
cctgaggaatcctgcagctatcgag

SEQ ID NO: 224742 - DNA, 25 bp, Artificial
  Probe
gataacacggatgtccgggatttca

SEQ ID NO: 224743 - DNA, 25 bp, Artificial
  Probe
cggccccggataacacggatgtccg

SEQ ID NO: 224744 - DNA, 25 bp, Artificial
  Probe
gcctttgatattggaaccctgagga

SEQ ID NO: 224745 - DNA, 25 bp, Artificial
  Probe
tacggccccggataacacggatgtc

SEQ ID NO: 224746 - DNA, 25 bp, Artificial
  Probe
ctttgatattggaaccctgaggaat

SEQ ID NO: 224747 - DNA, 25 bp, Artificial
  Probe
cgcctcaaagagcacgacttggacc

SEQ ID NO: 224748 - DNA, 25 bp, Artificial
  Probe
cacccaagcctttgatattggaacc

SEQ ID NO: 224749 - DNA, 25 bp, Artificial
  Probe
ggaatcctgcagctatcgaggagaa

SEQ ID NO: 224750 - DNA, 25 bp, Artificial
  Probe
atattggaaccctgaggaatcctgc

SEQ ID NO: 224751 - DNA, 25 bp, Artificial
  Probe
cggcgagatatcattcctgaaacgt

SEQ ID NO: 224752 - DNA, 25 bp, Artificial
  Probe
ctcaaagagcacgacttggacccca

SEQ ID NO: 224753 - DNA, 25 bp, Artificial
  Probe
tcaaagagcacgacttggaccccac

SEQ ID NO: 224754 - DNA, 25 bp, Artificial
  Probe
gaggaatcctgcagctatcgaggag

SEQ ID NO: 224755 - DNA, 25 bp, Artificial
  Probe
ggaaccctgaggaatcctgcagcta

SEQ ID NO: 224756 - DNA, 25 bp, Artificial
  Probe
cgagatatcattcctgaaacgttat

SEQ ID NO: 224757 - DNA, 25 bp, Artificial
  Probe
gcctcaaagagcacgacttggaccc

SEQ ID NO: 224758 - DNA, 25 bp, Artificial
  Probe
gccccggataacacggatgtccggg

SEQ ID NO: 224759 - DNA, 25 bp, Artificial
  Probe
ctgaggaatcctgcagctatcgagg

SEQ ID NO: 224760 - DNA, 25 bp, Artificial
  Probe
caagcctttgatattggaaccctga

SEQ ID NO: 224761 - DNA, 25 bp, Artificial
  Probe
ttggaaccctgaggaatcctgcagc

SEQ ID NO: 224762 - DNA, 25 bp, Artificial
  Probe
cggataacacggatgtccgggattt

SEQ ID NO: 224763 - DNA, 25 bp, Artificial
  Probe
tgcagctatcgaggagaaaaagctg

SEQ ID NO: 224764 - DNA, 25 bp, Artificial
  Probe
gagatatcattcctgaaacgttatt

SEQ ID NO: 224765 - DNA, 25 bp, Artificial
  Probe
gcgagatatcattcctgaaacgtta

SEQ ID NO: 224766 - DNA, 25 bp, Artificial
  Probe
aatcctgcagctatcgaggagaaaa

SEQ ID NO: 224767 - DNA, 25 bp, Artificial
  Probe
ggataacacggatgtccgggatttc

SEQ ID NO: 224768 - DNA, 25 bp, Artificial
  Probe
gcgcctcaaagagcacgacttggac

SEQ ID NO: 224769 - DNA, 25 bp, Artificial
  Probe
aagagcacgacttggaccccactgc

SEQ ID NO: 224770 - DNA, 25 bp, Artificial
  Probe
tattggaaccctgaggaatcctgca

SEQ ID NO: 224771 - DNA, 25 bp, Artificial
  Probe
gatgtccgggatttcattaatgagc

SEQ ID NO: 224772 - DNA, 25 bp, Artificial
  Probe
cccaagcctttgatattggaaccct

SEQ ID NO: 224773 - DNA, 25 bp, Artificial
  Probe
gaatcctgcagctatcgaggagaaa

SEQ ID NO: 224774 - DNA, 25 bp, Artificial
  Probe
cctgcagctatcgaggagaaaaagc

SEQ ID NO: 224775 - DNA, 25 bp, Artificial
  Probe
aaagctgcggcgagatatcattcct

SEQ ID NO: 224776 - DNA, 25 bp, Artificial
  Probe
ttaatgagcgcctcaaagagcacga

SEQ ID NO: 224777 - DNA, 25 bp, Artificial
  Probe
agctgcggcgagatatcattcctga

SEQ ID NO: 224778 - DNA, 25 bp, Artificial
  Probe
aatgagcgcctcaaagagcacgact

SEQ ID NO: 224779 - DNA, 25 bp, Artificial
  Probe
caaagagcacgacttggaccccact

SEQ ID NO: 224780 - DNA, 25 bp, Artificial
  Probe
cggatgtccgggatttcattaatga

SEQ ID NO: 224781 - DNA, 25 bp, Artificial
  Probe
ccaagcctttgatattggaaccctg

SEQ ID NO: 224782 - DNA, 25 bp, Artificial
  Probe
agcagcgacgtctactccactcaga

SEQ ID NO: 224783 - DNA, 25 bp, Artificial
  Probe
gacgtctactccactcagaagaact

SEQ ID NO: 224784 - DNA, 25 bp, Artificial
  Probe
tggagttcctgcagcctctggctga

SEQ ID NO: 224785 - DNA, 25 bp, Artificial
  Probe
catggtggcctttgcgggcaagtat

SEQ ID NO: 224786 - DNA, 25 bp, Artificial
  Probe
tcggccacaagttggcaaaggatac

SEQ ID NO: 224787 - DNA, 25 bp, Artificial
  Probe
gttgcggggcaactgtgagaacatc

SEQ ID NO: 224788 - DNA, 25 bp, Artificial
  Probe
cttcaagctggcacaggtggtgcag

SEQ ID NO: 224789 - DNA, 25 bp, Artificial
  Probe
caaggctggacctgcgagtcatcca

SEQ ID NO: 224790 - DNA, 25 bp, Artificial
  Probe
gcgcttcagcatacccttcaagctg

SEQ ID NO: 224791 - DNA, 25 bp, Artificial
  Probe
gcaactgtgagaacatccgcctgtc

SEQ ID NO: 224792 - DNA, 25 bp, Artificial
  Probe
tggaggactggatccagaagaacac

SEQ ID NO: 224793 - DNA, 25 bp, Artificial
  Probe
gatgtggcacgcaggccactgcaga

SEQ ID NO: 224794 - DNA, 25 bp, Artificial
  Probe
gagtcatccagctggtgcgcgaccc

SEQ ID NO: 224795 - DNA, 25 bp, Artificial
  Probe
tggacctgcgagtcatccagctggt

SEQ ID NO: 224796 - DNA, 25 bp, Artificial
  Probe
cgcctgtctgcagagctgggcttgc

SEQ ID NO: 224797 - DNA, 25 bp, Artificial
  Probe
cctttgcgggcaagtatgagagctg

SEQ ID NO: 224798 - DNA, 25 bp, Artificial
  Probe
atccagaagaacacgcaggcggcgc

SEQ ID NO: 224799 - DNA, 25 bp, Artificial
  Probe
gaacatccgcctgtctgcagagctg

SEQ ID NO: 224800 - DNA, 25 bp, Artificial
  Probe
gcagcctctggctgaggacccaagg

SEQ ID NO: 224801 - DNA, 25 bp, Artificial
  Probe
gcctttgcgggcaagtatgagagct

SEQ ID NO: 224802 - DNA, 25 bp, Artificial
  Probe
tactccactcagaagaactcctcgg

SEQ ID NO: 224803 - DNA, 25 bp, Artificial
  Probe
cggtcggtacatgctggtgcgctac

SEQ ID NO: 224804 - DNA, 25 bp, Artificial
  Probe
gagatgtatcgctccgcaggcatcc

SEQ ID NO: 224805 - DNA, 25 bp, Artificial
  Probe
cggcgcgcgacagcagcgacgtcta

SEQ ID NO: 224806 - DNA, 25 bp, Artificial
  Probe
accagctgagcgagaatgaggtgca

SEQ ID NO: 224807 - DNA, 25 bp, Artificial
  Probe
ggcacgcaggccactgcagaaggcc

SEQ ID NO: 224808 - DNA, 25 bp, Artificial
  Probe
aggacccaaggctggacctgcgagt

SEQ ID NO: 224809 - DNA, 25 bp, Artificial
  Probe
actgtgagaacatccgcctgtctgc

SEQ ID NO: 224810 - DNA, 25 bp, Artificial
  Probe
tcagcatacccttcaagctggcaca

SEQ ID NO: 224811 - DNA, 25 bp, Artificial
  Probe
ggccactgcagaaggcccgagagat

SEQ ID NO: 224812 - DNA, 25 bp, Artificial
  Probe
tgcggggcaactgtgagaacatccg

SEQ ID NO: 224813 - DNA, 25 bp, Artificial
  Probe
acctcttcggccacaagttggcaaa

SEQ ID NO: 224814 - DNA, 25 bp, Artificial
  Probe
tcggtacatgctggtgcgctacgag

SEQ ID NO: 224815 - DNA, 25 bp, Artificial
  Probe
ggcccgagagatgtatcgctccgca

SEQ ID NO: 224816 - DNA, 25 bp, Artificial
  Probe
gcagaaggcccgagagatgtatcgc

SEQ ID NO: 224817 - DNA, 25 bp, Artificial
  Probe
gcgcgcgacagcagcgacgtctact

SEQ ID NO: 224818 - DNA, 25 bp, Artificial
  Probe
cttcacgcatggtggcctttgcggg

SEQ ID NO: 224819 - DNA, 25 bp, Artificial
  Probe
ccgtgctggcttcacgcatggtggc

SEQ ID NO: 224820 - DNA, 25 bp, Artificial
  Probe
ttggcaaaggataccgcctcactca

SEQ ID NO: 224821 - DNA, 25 bp, Artificial
  Probe
gccaggaccagctgagcgagaatga

SEQ ID NO: 224822 - DNA, 25 bp, Artificial
  Probe
tcagaagaactcctcggagcagttt

SEQ ID NO: 224823 - DNA, 25 bp, Artificial
  Probe
agcggggcaccttctgggtcacgta

SEQ ID NO: 224824 - DNA, 25 bp, Artificial
  Probe
tcctcggagcagtttgagaagtggc

SEQ ID NO: 224825 - DNA, 25 bp, Artificial
  Probe
cctctggctgaggacccaaggctgg

SEQ ID NO: 224826 - DNA, 25 bp, Artificial
  Probe
gagaagtggcgcttcagcataccct

SEQ ID NO: 224827 - DNA, 25 bp, Artificial
  Probe
ggactggatccagaagaacacgcag

SEQ ID NO: 224828 - DNA, 25 bp, Artificial
  Probe
acaagagtggccacaggaaaatgac

SEQ ID NO: 224829 - DNA, 25 bp, Artificial
  Probe
acggagtcggacaagagtggccaca

SEQ ID NO: 224830 - DNA, 25 bp, Artificial
  Probe
gtcgactcggccagcccatgagcga

SEQ ID NO: 224831 - DNA, 25 bp, Artificial
  Probe
gaaatgcctttgagtttactatccc

SEQ ID NO: 224832 - DNA, 25 bp, Artificial
  Probe
acaggagcctgtgaagaatgttttc

SEQ ID NO: 224833 - DNA, 25 bp, Artificial
  Probe
actaccgcaagcacacgggtcacag

SEQ ID NO: 224834 - DNA, 25 bp, Artificial
  Probe
agcgacacatgtagcctgggtcgac

SEQ ID NO: 224835 - DNA, 25 bp, Artificial
  Probe
cgtggcaatctgtatgactataagg

SEQ ID NO: 224836 - DNA, 25 bp, Artificial
  Probe
ctctgcacatgaagcgacacatgta

SEQ ID NO: 224837 - DNA, 25 bp, Artificial
  Probe
agagtggccacaggaaaatgacttt

SEQ ID NO: 224838 - DNA, 25 bp, Artificial
  Probe
cgaccacctggctctgcacatgaag

SEQ ID NO: 224839 - DNA, 25 bp, Artificial
  Probe
ggaaaatgactttgccaccagttcc

SEQ ID NO: 224840 - DNA, 25 bp, Artificial
  Probe
gcccccttgcaacaaactgactgtt

SEQ ID NO: 224841 - DNA, 25 bp, Artificial
  Probe
taccgcaagcacacgggtcacaggc

SEQ ID NO: 224842 - DNA, 25 bp, Artificial
  Probe
ccttgtgagaaatgcctttgagttt

SEQ ID NO: 224843 - DNA, 25 bp, Artificial
  Probe
tgtatataagtgaccgtggcaatct

SEQ ID NO: 224844 - DNA, 25 bp, Artificial
  Probe
atgactttgccaccagttccggctc

SEQ ID NO: 224845 - DNA, 25 bp, Artificial
  Probe
cagtgccacttgtgcgaccgggcct

SEQ ID NO: 224846 - DNA, 25 bp, Artificial
  Probe
agttcgcgcgctctgacgagcttac

SEQ ID NO: 224847 - DNA, 25 bp, Artificial
  Probe
aatgactttgccaccagttccggct

SEQ ID NO: 224848 - DNA, 25 bp, Artificial
  Probe
cttccagtgccacttgtgcgaccgg

SEQ ID NO: 224849 - DNA, 25 bp, Artificial
  Probe
gtagcctgggtcgactcggccagcc

SEQ ID NO: 224850 - DNA, 25 bp, Artificial
  Probe
atggcatctctgtcgcctgcttcgt

SEQ ID NO: 224851 - DNA, 25 bp, Artificial
  Probe
atctctgtcgcctgcttcgttttta

SEQ ID NO: 224852 - DNA, 25 bp, Artificial
  Probe
gcacatgaagcgacacatgtagcct

SEQ ID NO: 224853 - DNA, 25 bp, Artificial
  Probe
ggcccccttgcaacaaactgactgt

SEQ ID NO: 224854 - DNA, 25 bp, Artificial
  Probe
agtcggacaagagtggccacaggaa

SEQ ID NO: 224855 - DNA, 25 bp, Artificial
  Probe
ggagacgatggcatctctgtcgcct

SEQ ID NO: 224856 - DNA, 25 bp, Artificial
  Probe
gcaataattgacttctttctctcgg

SEQ ID NO: 224857 - DNA, 25 bp, Artificial
  Probe
tcgaggctagccttgtgagaaatgc

SEQ ID NO: 224858 - DNA, 25 bp, Artificial
  Probe
acaggcccttccagtgccacttgtg

SEQ ID NO: 224859 - DNA, 25 bp, Artificial
  Probe
tttattggaccctgaggacggagtc

SEQ ID NO: 224860 - DNA, 25 bp, Artificial
  Probe
ctttctctcgggttcccactagagg

SEQ ID NO: 224861 - DNA, 25 bp, Artificial
  Probe
ttattggaccctgaggacggagtcg

SEQ ID NO: 224862 - DNA, 25 bp, Artificial
  Probe
ctcggccagcccatgagcgactgtg

SEQ ID NO: 224863 - DNA, 25 bp, Artificial
  Probe
cggccagcccatgagcgactgtggc

SEQ ID NO: 224864 - DNA, 25 bp, Artificial
  Probe
tttctctcgggttcccactagagga

SEQ ID NO: 224865 - DNA, 25 bp, Artificial
  Probe
gacttctttctctcgggttcccact

SEQ ID NO: 224866 - DNA, 25 bp, Artificial
  Probe
ttgtatataagtgaccgtggcaatc

SEQ ID NO: 224867 - DNA, 25 bp, Artificial
  Probe
aggatcgaggctagccttgtgagaa

SEQ ID NO: 224868 - DNA, 25 bp, Artificial
  Probe
agtgaccgtggcaatctgtatgact

SEQ ID NO: 224869 - DNA, 25 bp, Artificial
  Probe
acacatgtagcctgggtcgactcgg

SEQ ID NO: 224870 - DNA, 25 bp, Artificial
  Probe
aggcccttccagtgccacttgtgcg

SEQ ID NO: 224871 - DNA, 25 bp, Artificial
  Probe
atgtagcctgggtcgactcggccag

SEQ ID NO: 224872 - DNA, 25 bp, Artificial
  Probe
caatctgtatgactataagggagac

SEQ ID NO: 224873 - DNA, 25 bp, Artificial
  Probe
cactagaggatcgaggctagccttg

SEQ ID NO: 224874 - DNA, 25 bp, Artificial
  Probe
ggtcctgacccatttctatccctga

SEQ ID NO: 224875 - DNA, 25 bp, Artificial
  Probe
cgtgctcaagggttctgtctgctga

SEQ ID NO: 224876 - DNA, 25 bp, Artificial
  Probe
cgctctgagcgtgctcaagggttct

SEQ ID NO: 224877 - DNA, 25 bp, Artificial
  Probe
gtgtaccaggcgtggaaatcatctc

SEQ ID NO: 224878 - DNA, 25 bp, Artificial
  Probe
taccctgaagatagagagtgaacct

SEQ ID NO: 224879 - DNA, 25 bp, Artificial
  Probe
ttaggagtcatgtgtgacctacgga

SEQ ID NO: 224880 - DNA, 25 bp, Artificial
  Probe
aggcgatctgccatgattctgtgtc

SEQ ID NO: 224881 - DNA, 25 bp, Artificial
  Probe
gaaagtgacaaacctcacatttgtg

SEQ ID NO: 224882 - DNA, 25 bp, Artificial
  Probe
gaaatcatctcttgctgagtcccac

SEQ ID NO: 224883 - DNA, 25 bp, Artificial
  Probe
acctgcctgtcttctaggcgatctg

SEQ ID NO: 224884 - DNA, 25 bp, Artificial
  Probe
agcacattctctgttggacatgaag

SEQ ID NO: 224885 - DNA, 25 bp, Artificial
  Probe
atgattctgtgtccagtgtgggctg

SEQ ID NO: 224886 - DNA, 25 bp, Artificial
  Probe
gtgaacctccttcctgaggggtatt

SEQ ID NO: 224887 - DNA, 25 bp, Artificial
  Probe
ctgatgtctgctttctgattaaagt

SEQ ID NO: 224888 - DNA, 25 bp, Artificial
  Probe
tgccccgacaggtgcttcactcttt

SEQ ID NO: 224889 - DNA, 25 bp, Artificial
  Probe
tggcgtcccgagcagaaagagagat

SEQ ID NO: 224890 - DNA, 25 bp, Artificial
  Probe
cttggcagagtctggcccagcctca

SEQ ID NO: 224891 - DNA, 25 bp, Artificial
  Probe
gtcccgagcagaaagagagatgagc

SEQ ID NO: 224892 - DNA, 25 bp, Artificial
  Probe
tctagacatttcttggcagagtctg

SEQ ID NO: 224893 - DNA, 25 bp, Artificial
  Probe
tgaccctgacctctgctacgcttgg

SEQ ID NO: 224894 - DNA, 25 bp, Artificial
  Probe
catttgtgtaccaggcgtggaaatc

SEQ ID NO: 224895 - DNA, 25 bp, Artificial
  Probe
gtcttctaggcgatctgccatgatt

SEQ ID NO: 224896 - DNA, 25 bp, Artificial
  Probe
cgtggaaatcatctcttgctgagtc

SEQ ID NO: 224897 - DNA, 25 bp, Artificial
  Probe
gtgcttcactctttcttgggctagt

SEQ ID NO: 224898 - DNA, 25 bp, Artificial
  Probe
acctccttcctgaggggtattcctg

SEQ ID NO: 224899 - DNA, 25 bp, Artificial
  Probe
acaggtgcttcactctttcttgggc

SEQ ID NO: 224900 - DNA, 25 bp, Artificial
  Probe
catgtgtgacctacggacctgcctg

SEQ ID NO: 224901 - DNA, 25 bp, Artificial
  Probe
atagagagtgaacctccttcctgag

SEQ ID NO: 224902 - DNA, 25 bp, Artificial
  Probe
ttctaggcgatctgccatgattctg

SEQ ID NO: 224903 - DNA, 25 bp, Artificial
  Probe
tcatctggaaggtgtggcgtcccga

SEQ ID NO: 224904 - DNA, 25 bp, Artificial
  Probe
agagatgagcacattctctgttgga

SEQ ID NO: 224905 - DNA, 25 bp, Artificial
  Probe
tacggacctgcctgtcttctaggcg

SEQ ID NO: 224906 - DNA, 25 bp, Artificial
  Probe
ctgacctctgctacgcttggggcag

SEQ ID NO: 224907 - DNA, 25 bp, Artificial
  Probe
cctaccctgaagatagagagtgaac

SEQ ID NO: 224908 - DNA, 25 bp, Artificial
  Probe
tgagcgtgctcaagggttctgtctg

SEQ ID NO: 224909 - DNA, 25 bp, Artificial
  Probe
ctagacatttcttggcagagtctgg

SEQ ID NO: 224910 - DNA, 25 bp, Artificial
  Probe
aggtcctgacccatttctatccctg

SEQ ID NO: 224911 - DNA, 25 bp, Artificial
  Probe
ggctggagctgtgatttgtttaacc

SEQ ID NO: 224912 - DNA, 25 bp, Artificial
  Probe
aggcacgctctgagcgtgctcaagg

SEQ ID NO: 224913 - DNA, 25 bp, Artificial
  Probe
tgtgacctacggacctgcctgtctt

SEQ ID NO: 224914 - DNA, 25 bp, Artificial
  Probe
gacctacggacctgcctgtcttcta

SEQ ID NO: 224915 - DNA, 25 bp, Artificial
  Probe
taccaggcgtggaaatcatctcttg

SEQ ID NO: 224916 - DNA, 25 bp, Artificial
  Probe
aggctgccccgacaggtgcttcact

SEQ ID NO: 224917 - DNA, 25 bp, Artificial
  Probe
ttcactctttcttgggctagtggaa

SEQ ID NO: 224918 - DNA, 25 bp, Artificial
  Probe
ttgttaggagtcatgtgtgacctac

SEQ ID NO: 224919 - DNA, 25 bp, Artificial
  Probe
acatttcttggcagagtctggccca

SEQ ID NO: 224920 - DNA, 25 bp, Artificial
  Probe
agaagcgacgcatccatttctgtga

SEQ ID NO: 224921 - DNA, 25 bp, Artificial
  Probe
agaagccctacaagtgcacctggga

SEQ ID NO: 224922 - DNA, 25 bp, Artificial
  Probe
aagccgttccagtgcgtggtgtgca

SEQ ID NO: 224923 - DNA, 25 bp, Artificial
  Probe
ctgatagacaagctgagatgctcca

SEQ ID NO: 224924 - DNA, 25 bp, Artificial
  Probe
cgctgcacatgaagcgccaccagaa

SEQ ID NO: 224925 - DNA, 25 bp, Artificial
  Probe
tcaccaccgagctcagagcctggaa

SEQ ID NO: 224926 - DNA, 25 bp, Artificial
  Probe
tgcgtggtgtgcaaccgcagcttct

SEQ ID NO: 224927 - DNA, 25 bp, Artificial
  Probe
tcctgatagacaagctgagatgctc

SEQ ID NO: 224928 - DNA, 25 bp, Artificial
  Probe
cccggatctggagaagcgacgcatc

SEQ ID NO: 224929 - DNA, 25 bp, Artificial
  Probe
gagctcagagcctggaagtcctgat

SEQ ID NO: 224930 - DNA, 25 bp, Artificial
  Probe
aagtcctgatagacaagctgagatg

SEQ ID NO: 224931 - DNA, 25 bp, Artificial
  Probe
aaagctcacctgaggactcatacgg

SEQ ID NO: 224932 - DNA, 25 bp, Artificial
  Probe
tagacaagctgagatgctccagaat

SEQ ID NO: 224933 - DNA, 25 bp, Artificial
  Probe
gcgctgcacatgaagcgccaccaga

SEQ ID NO: 224934 - DNA, 25 bp, Artificial
  Probe
agtttcttccacagcaggccaccta

SEQ ID NO: 224935 - DNA, 25 bp, Artificial
  Probe
gaagcgccaccagaactgagcactg

SEQ ID NO: 224936 - DNA, 25 bp, Artificial
  Probe
gtcagtttcttccacagcaggccac

SEQ ID NO: 224937 - DNA, 25 bp, Artificial
  Probe
tgccactctgccagttaattcgcca

SEQ ID NO: 224938 - DNA, 25 bp, Artificial
  Probe
cgtctcatttaaaagctcacctgag

SEQ ID NO: 224939 - DNA, 25 bp, Artificial
  Probe
cgttccagtgcgtggtgtgcaaccg

SEQ ID NO: 224940 - DNA, 25 bp, Artificial
  Probe
gagaagcgacgcatccatttctgtg

SEQ ID NO: 224941 - DNA, 25 bp, Artificial
  Probe
agcgccaccagaactgagcactgcg

SEQ ID NO: 224942 - DNA, 25 bp, Artificial
  Probe
gagtaacccggatctggagaagcga

SEQ ID NO: 224943 - DNA, 25 bp, Artificial
  Probe
gtgccaagccgttccagtgcgtggt

SEQ ID NO: 224944 - DNA, 25 bp, Artificial
  Probe
cagaactgagcactgcgcacaaccg

SEQ ID NO: 224945 - DNA, 25 bp, Artificial
  Probe
gcctggaagtcctgatagacaagct

SEQ ID NO: 224946 - DNA, 25 bp, Artificial
  Probe
gagatgctccagaatctgaccccac

SEQ ID NO: 224947 - DNA, 25 bp, Artificial
  Probe
caccgagctcagagcctggaagtcc

SEQ ID NO: 224948 - DNA, 25 bp, Artificial
  Probe
ccaacctgtccgatacaacagaagg

SEQ ID NO: 224949 - DNA, 25 bp, Artificial
  Probe
tctcatttaaaagctcacctgagga

SEQ ID NO: 224950 - DNA, 25 bp, Artificial
  Probe
gtcgtctcatttaaaagctcacctg

SEQ ID NO: 224951 - DNA, 25 bp, Artificial
  Probe
tccgatacaacagaaggagtaaccc

SEQ ID NO: 224952 - DNA, 25 bp, Artificial
  Probe
ccatttctgtgattatgatggttgc

SEQ ID NO: 224953 - DNA, 25 bp, Artificial
  Probe
ctcacctgaggactcatacgggcga

SEQ ID NO: 224954 - DNA, 25 bp, Artificial
  Probe
ttaaaagctcacctgaggactcata

SEQ ID NO: 224955 - DNA, 25 bp, Artificial
  Probe
tcatttaaaagctcacctgaggact

SEQ ID NO: 224956 - DNA, 25 bp, Artificial
  Probe
caccagaactgagcactgcgcacaa

SEQ ID NO: 224957 - DNA, 25 bp, Artificial
  Probe
catccatttctgtgattatgatggt

SEQ ID NO: 224958 - DNA, 25 bp, Artificial
  Probe
tggaagtcctgatagacaagctgag

SEQ ID NO: 224959 - DNA, 25 bp, Artificial
  Probe
acatgaagcgccaccagaactgagc

SEQ ID NO: 224960 - DNA, 25 bp, Artificial
  Probe
aagccctacaagtgcacctgggagg

SEQ ID NO: 224961 - DNA, 25 bp, Artificial
  Probe
gccactctgccagttaattcgccaa

SEQ ID NO: 224962 - DNA, 25 bp, Artificial
  Probe
gaagcacacgggtgccaagccgttc

SEQ ID NO: 224963 - DNA, 25 bp, Artificial
  Probe
accagaactgagcactgcgcacaac

SEQ ID NO: 224964 - DNA, 25 bp, Artificial
  Probe
gcatccatttctgtgattatgatgg

SEQ ID NO: 224965 - DNA, 25 bp, Artificial
  Probe
gagtcagtttcttccacagcaggcc

SEQ ID NO: 224966 - DNA, 25 bp, Artificial
  Probe
gaggactttcctttccacgaggaat

SEQ ID NO: 224967 - DNA, 25 bp, Artificial
  Probe
gcagactctcacagggaaaagtgag

SEQ ID NO: 224968 - DNA, 25 bp, Artificial
  Probe
tttttgtgttcatcaaggtgcagac

SEQ ID NO: 224969 - DNA, 25 bp, Artificial
  Probe
ctgtggcctgtttgtcacaagcgat

SEQ ID NO: 224970 - DNA, 25 bp, Artificial
  Probe
gttcatcaaggtgcagactctcaca

SEQ ID NO: 224971 - DNA, 25 bp, Artificial
  Probe
tcactcctcctgaagcagattttag

SEQ ID NO: 224972 - DNA, 25 bp, Artificial
  Probe
gggcctgtggcctgtttgtcacaag

SEQ ID NO: 224973 - DNA, 25 bp, Artificial
  Probe
agccgggtagattcctttgtccttg

SEQ ID NO: 224974 - DNA, 25 bp, Artificial
  Probe
tgagactcactcctcctgaagcaga

SEQ ID NO: 224975 - DNA, 25 bp, Artificial
  Probe
ttccacgaggaatactgatgttggt

SEQ ID NO: 224976 - DNA, 25 bp, Artificial
  Probe
catcaggaatgcattaccatggtaa

SEQ ID NO: 224977 - DNA, 25 bp, Artificial
  Probe
gaagaggactttcctttccacgagg

SEQ ID NO: 224978 - DNA, 25 bp, Artificial
  Probe
actctcacagggaaaagtgagtcca

SEQ ID NO: 224979 - DNA, 25 bp, Artificial
  Probe
acaacctggatgtaggctaccattt

SEQ ID NO: 224980 - DNA, 25 bp, Artificial
  Probe
tgagcaaatgtttctcatcaggaat

SEQ ID NO: 224981 - DNA, 25 bp, Artificial
  Probe
gacactctcacacataaaggagaac

SEQ ID NO: 224982 - DNA, 25 bp, Artificial
  Probe
ctcacacataaaggagaacattcag

SEQ ID NO: 224983 - DNA, 25 bp, Artificial
  Probe
tgaagcagattttagccacgtctct

SEQ ID NO: 224984 - DNA, 25 bp, Artificial
  Probe
caacctggatgtaggctaccatttg

SEQ ID NO: 224985 - DNA, 25 bp, Artificial
  Probe
caagccgggtagattcctttgtcct

SEQ ID NO: 224986 - DNA, 25 bp, Artificial
  Probe
tggttttcactaatgagggctgagc

SEQ ID NO: 224987 - DNA, 25 bp, Artificial
  Probe
ttttcactaatgagggctgagcaaa

SEQ ID NO: 224988 - DNA, 25 bp, Artificial
  Probe
ccattctcagcctcaacaggaactg

SEQ ID NO: 224989 - DNA, 25 bp, Artificial
  Probe
cttgatgagattcaagccgggtaga

SEQ ID NO: 224990 - DNA, 25 bp, Artificial
  Probe
attcaagccgggtagattcctttgt

SEQ ID NO: 224991 - DNA, 25 bp, Artificial
  Probe
atgaagaggactttcctttccacga

SEQ ID NO: 224992 - DNA, 25 bp, Artificial
  Probe
gtcacaagcgatgaagaggactttc

SEQ ID NO: 224993 - DNA, 25 bp, Artificial
  Probe
ctgagcaaatgtttctcatcaggaa

SEQ ID NO: 224994 - DNA, 25 bp, Artificial
  Probe
tggatgtaggctaccatttggccat

SEQ ID NO: 224995 - DNA, 25 bp, Artificial
  Probe
ttcgcttgatgagattcaagccggg

SEQ ID NO: 224996 - DNA, 25 bp, Artificial
  Probe
gactttcctttccacgaggaatact

SEQ ID NO: 224997 - DNA, 25 bp, Artificial
  Probe
ttctcatcaggaatgcattaccatg

SEQ ID NO: 224998 - DNA, 25 bp, Artificial
  Probe
acgtctctctaaaacaacctggatg

SEQ ID NO: 224999 - DNA, 25 bp, Artificial
  Probe
ttgtcacaagcgatgaagaggactt

SEQ ID NO: 225000 - DNA, 25 bp, Artificial
  Probe
gccacgtctctctaaaacaacctgg

SEQ ID NO: 225001 - DNA, 25 bp, Artificial
  Probe
ctctcacagggaaaagtgagtccag

SEQ ID NO: 225002 - DNA, 25 bp, Artificial
  Probe
ccgggtagattcctttgtccttgtg

SEQ ID NO: 225003 - DNA, 25 bp, Artificial
  Probe
gtcaatggttttcactaatgagggc

SEQ ID NO: 225004 - DNA, 25 bp, Artificial
  Probe
caatggttttcactaatgagggctg

SEQ ID NO: 225005 - DNA, 25 bp, Artificial
  Probe
ttggttcgcttgatgagattcaagc

SEQ ID NO: 225006 - DNA, 25 bp, Artificial
  Probe
ctcctgaagcagattttagccacgt

SEQ ID NO: 225007 - DNA, 25 bp, Artificial
  Probe
ggatgtaggctaccatttggccatg

SEQ ID NO: 225008 - DNA, 25 bp, Artificial
  Probe
ctgtttgtcacaagcgatgaagagg

SEQ ID NO: 225009 - DNA, 25 bp, Artificial
  Probe
gtttctcatcaggaatgcattacca

SEQ ID NO: 225010 - DNA, 25 bp, Artificial
  Probe
ctaaaacaacctggatgtaggctac

SEQ ID NO: 225011 - DNA, 25 bp, Artificial
  Probe
tggcctgtttgtcacaagcgatgaa

SEQ ID NO: 225012 - DNA, 25 bp, Artificial
  Probe
tggacactactgctccctggggcag

SEQ ID NO: 225013 - DNA, 25 bp, Artificial
  Probe
gtctctcccatcagactgggcagga

SEQ ID NO: 225014 - DNA, 25 bp, Artificial
  Probe
ctcccatcagactgggcaggaggat

SEQ ID NO: 225015 - DNA, 25 bp, Artificial
  Probe
atcggggactggagtcttgcctccc

SEQ ID NO: 225016 - DNA, 25 bp, Artificial
  Probe
tcttgtccacccatctaagtctagg

SEQ ID NO: 225017 - DNA, 25 bp, Artificial
  Probe
gcttgatcttgtccacccatctaag

SEQ ID NO: 225018 - DNA, 25 bp, Artificial
  Probe
tctgctcctcttcaagctgcttctg

SEQ ID NO: 225019 - DNA, 25 bp, Artificial
  Probe
agggggacacaacgtcaggtactgc

SEQ ID NO: 225020 - DNA, 25 bp, Artificial
  Probe
tctagggtggtaacactggacacta

SEQ ID NO: 225021 - DNA, 25 bp, Artificial
  Probe
cccgctcagtgtttcttgttcaaac

SEQ ID NO: 225022 - DNA, 25 bp, Artificial
  Probe
tgcggctgagcgtcctgcgtctgct

SEQ ID NO: 225023 - DNA, 25 bp, Artificial
  Probe
agctatcggggactggagtcttgcc

SEQ ID NO: 225024 - DNA, 25 bp, Artificial
  Probe
acccaccaaagttggacttaatgag

SEQ ID NO: 225025 - DNA, 25 bp, Artificial
  Probe
agtcccggagctggtgatccccgct

SEQ ID NO: 225026 - DNA, 25 bp, Artificial
  Probe
acagacagaacctgccctcaggaga

SEQ ID NO: 225027 - DNA, 25 bp, Artificial
  Probe
tttgtgtatgtggtctccctcttcc

SEQ ID NO: 225028 - DNA, 25 bp, Artificial
  Probe
cacagacagaacctgccctcaggag

SEQ ID NO: 225029 - DNA, 25 bp, Artificial
  Probe
tctcagggggacacaacgtcaggta

SEQ ID NO: 225030 - DNA, 25 bp, Artificial
  Probe
ccatctaagtctagggtggtaacac

SEQ ID NO: 225031 - DNA, 25 bp, Artificial
  Probe
tgtttcttgttcaaactggggactt

SEQ ID NO: 225032 - DNA, 25 bp, Artificial
  Probe
atgtgttcctgacctgcagccgcct

SEQ ID NO: 225033 - DNA, 25 bp, Artificial
  Probe
tctcccatcagactgggcaggagga

SEQ ID NO: 225034 - DNA, 25 bp, Artificial
  Probe
tgcgtctgctcctcttcaagctgct

SEQ ID NO: 225035 - DNA, 25 bp, Artificial
  Probe
ctcccctatcagactgagactttgg

SEQ ID NO: 225036 - DNA, 25 bp, Artificial
  Probe
ggactatgtctctcccatcagactg

SEQ ID NO: 225037 - DNA, 25 bp, Artificial
  Probe
caggagactctcagggggacacaac

SEQ ID NO: 225038 - DNA, 25 bp, Artificial
  Probe
gggacacaacgtcaggtactgcggc

SEQ ID NO: 225039 - DNA, 25 bp, Artificial
  Probe
agaacctgccctcaggagactctca

SEQ ID NO: 225040 - DNA, 25 bp, Artificial
  Probe
gaagcttccacagacagaacctgcc

SEQ ID NO: 225041 - DNA, 25 bp, Artificial
  Probe
actctcagggggacacaacgtcagg

SEQ ID NO: 225042 - DNA, 25 bp, Artificial
  Probe
ggatgtgcccggtaactaggcacaa

SEQ ID NO: 225043 - DNA, 25 bp, Artificial
  Probe
cagggggacacaacgtcaggtactg

SEQ ID NO: 225044 - DNA, 25 bp, Artificial
  Probe
aaaggactatgtctctcccatcaga

SEQ ID NO: 225045 - DNA, 25 bp, Artificial
  Probe
tatgtctctcccatcagactgggca

SEQ ID NO: 225046 - DNA, 25 bp, Artificial
  Probe
tgtgcccggtaactaggcacaatat

SEQ ID NO: 225047 - DNA, 25 bp, Artificial
  Probe
gctcctcttcaagctgcttctgcta

SEQ ID NO: 225048 - DNA, 25 bp, Artificial
  Probe
aacgtcaggtactgcggctgagcgt

SEQ ID NO: 225049 - DNA, 25 bp, Artificial
  Probe
ttcttgttcaaactggggacttcct

SEQ ID NO: 225050 - DNA, 25 bp, Artificial
  Probe
agtctagggtggtaacactggacac

SEQ ID NO: 225051 - DNA, 25 bp, Artificial
  Probe
ctaagtctagggtggtaacactgga

SEQ ID NO: 225052 - DNA, 25 bp, Artificial
  Probe
ggctgagcgtcctgcgtctgctcct

SEQ ID NO: 225053 - DNA, 25 bp, Artificial
  Probe
caccaaagttggacttaatgaggtt

SEQ ID NO: 225054 - DNA, 25 bp, Artificial
  Probe
aggttatgagcttgatcttgtccac

SEQ ID NO: 225055 - DNA, 25 bp, Artificial
  Probe
ggtggtaacactggacactactgct

SEQ ID NO: 225056 - DNA, 25 bp, Artificial
  Probe
ctatcagactgagactttgggagga

SEQ ID NO: 225057 - DNA, 25 bp, Artificial
  Probe
tcttgttcaaactggggacttcctt

SEQ ID NO: 225058 - DNA, 25 bp, Artificial
  Probe
atgagtaagctggacggcatcaaca

SEQ ID NO: 225059 - DNA, 25 bp, Artificial
  Probe
tcagcatcgccctgatgagtaagct

SEQ ID NO: 225060 - DNA, 25 bp, Artificial
  Probe
atgcccacattggtgtcatggtgga

SEQ ID NO: 225061 - DNA, 25 bp, Artificial
  Probe
ctgatgagtaagctggacggcatca

SEQ ID NO: 225062 - DNA, 25 bp, Artificial
  Probe
gccctgatgagtaagctggacggca

SEQ ID NO: 225063 - DNA, 25 bp, Artificial
  Probe
ctgaagcccaagttcagcggcgtgg

SEQ ID NO: 225064 - DNA, 25 bp, Artificial
  Probe
tgaagcccaagttcagcggcgtgga

SEQ ID NO: 225065 - DNA, 25 bp, Artificial
  Probe
gcatgcccacattggtgtcatggtg

SEQ ID NO: 225066 - DNA, 25 bp, Artificial
  Probe
ctcagcgtcgcctcagggcacgaga

SEQ ID NO: 225067 - DNA, 25 bp, Artificial
  Probe
gtggagttcagcatcgccctgatga

SEQ ID NO: 225068 - DNA, 25 bp, Artificial
  Probe
cagcatgcccacattggtgtcatgg

SEQ ID NO: 225069 - DNA, 25 bp, Artificial
  Probe
aagctggacggcatcaacaggcact

SEQ ID NO: 225070 - DNA, 25 bp, Artificial
  Probe
tggagttcagcatcgccctgatgag

SEQ ID NO: 225071 - DNA, 25 bp, Artificial
  Probe
ctggagcggcagcatgcccacattg

SEQ ID NO: 225072 - DNA, 25 bp, Artificial
  Probe
tcgcctcagggcacgagaaccagga

SEQ ID NO: 225073 - DNA, 25 bp, Artificial
  Probe
cggcataaaccatgggcctgtgatt

SEQ ID NO: 225074 - DNA, 25 bp, Artificial
  Probe
tgtcatggtggagttcagcatcgcc

SEQ ID NO: 225075 - DNA, 25 bp, Artificial
  Probe
catggcagctgcagggctcagcgtc

SEQ ID NO: 225076 - DNA, 25 bp, Artificial
  Probe
agctcctactgaagcccaagttcag

SEQ ID NO: 225077 - DNA, 25 bp, Artificial
  Probe
cgtcggcataaaccatgggcctgtg

SEQ ID NO: 225078 - DNA, 25 bp, Artificial
  Probe
tacatggcagctgcagggctcagcg

SEQ ID NO: 225079 - DNA, 25 bp, Artificial
  Probe
ctccgcgtcggcataaaccatgggc

SEQ ID NO: 225080 - DNA, 25 bp, Artificial
  Probe
tggagcggcagcatgcccacattgg

SEQ ID NO: 225081 - DNA, 25 bp, Artificial
  Probe
acgtacatggcagctgcagggctca

SEQ ID NO: 225082 - DNA, 25 bp, Artificial
  Probe
gcctcagggcacgagaaccaggagc

SEQ ID NO: 225083 - DNA, 25 bp, Artificial
  Probe
cagcatcgccctgatgagtaagctg

SEQ ID NO: 225084 - DNA, 25 bp, Artificial
  Probe
atcgccctgatgagtaagctggacg

SEQ ID NO: 225085 - DNA, 25 bp, Artificial
  Probe
tggtgtcatggtggagttcagcatc

SEQ ID NO: 225086 - DNA, 25 bp, Artificial
  Probe
cacattggtgtcatggtggagttca

SEQ ID NO: 225087 - DNA, 25 bp, Artificial
  Probe
ccgcgtcggcataaaccatgggcct

SEQ ID NO: 225088 - DNA, 25 bp, Artificial
  Probe
ctactgaagcccaagttcagcggcg

SEQ ID NO: 225089 - DNA, 25 bp, Artificial
  Probe
agctggagcggcagcatgcccacat

SEQ ID NO: 225090 - DNA, 25 bp, Artificial
  Probe
ggcagcatgcccacattggtgtcat

SEQ ID NO: 225091 - DNA, 25 bp, Artificial
  Probe
cattggtgtcatggtggagttcagc

SEQ ID NO: 225092 - DNA, 25 bp, Artificial
  Probe
cacgtacatggcagctgcagggctc

SEQ ID NO: 225093 - DNA, 25 bp, Artificial
  Probe
cagcgtcgcctcagggcacgagaac

SEQ ID NO: 225094 - DNA, 25 bp, Artificial
  Probe
ctcagggcacgagaaccaggagctg

SEQ ID NO: 225095 - DNA, 25 bp, Artificial
  Probe
gtgtcatggtggagttcagcatcgc

SEQ ID NO: 225096 - DNA, 25 bp, Artificial
  Probe
gctgcagggctcagcgtcgcctcag

SEQ ID NO: 225097 - DNA, 25 bp, Artificial
  Probe
agctgcagggctcagcgtcgcctca

SEQ ID NO: 225098 - DNA, 25 bp, Artificial
  Probe
gcagcatgcccacattggtgtcatg

SEQ ID NO: 225099 - DNA, 25 bp, Artificial
  Probe
agctggacggcatcaacaggcactc

SEQ ID NO: 225100 - DNA, 25 bp, Artificial
  Probe
tcatggtggagttcagcatcgccct

SEQ ID NO: 225101 - DNA, 25 bp, Artificial
  Probe
tgagtaagctggacggcatcaacag

SEQ ID NO: 225102 - DNA, 25 bp, Artificial
  Probe
cagggctcagcgtcgcctcagggca

SEQ ID NO: 225103 - DNA, 25 bp, Artificial
  Probe
tgatgagtaagctggacggcatcaa

SEQ ID NO: 225104 - DNA, 25 bp, Artificial
  Probe
tgtccggtaggaagacgttcagcct

SEQ ID NO: 225105 - DNA, 25 bp, Artificial
  Probe
ccgagagatccatggcccttctgcg

SEQ ID NO: 225106 - DNA, 25 bp, Artificial
  Probe
atcctcttcctcatcgatgtggcct

SEQ ID NO: 225107 - DNA, 25 bp, Artificial
  Probe
cctgcagggcgaaggagtgctccat

SEQ ID NO: 225108 - DNA, 25 bp, Artificial
  Probe
ttctgcggaccgtagtgatcgtggt

SEQ ID NO: 225109 - DNA, 25 bp, Artificial
  Probe
tcgtcatcttgtacgcgcgcatcta

SEQ ID NO: 225110 - DNA, 25 bp, Artificial
  Probe
cttctgattgggatgtgctggctaa

SEQ ID NO: 225111 - DNA, 25 bp, Artificial
  Probe
tgaggccgtacgacgccaacaagaa

SEQ ID NO: 225112 - DNA, 25 bp, Artificial
  Probe
gtggccaaccacaactccgagagat

SEQ ID NO: 225113 - DNA, 25 bp, Artificial
  Probe
gcagtatgttcgtagccctgggcgc

SEQ ID NO: 225114 - DNA, 25 bp, Artificial
  Probe
tcagcatcttcacagccattctggt

SEQ ID NO: 225115 - DNA, 25 bp, Artificial
  Probe
ccaacagtgtggttcctcagggagg

SEQ ID NO: 225116 - DNA, 25 bp, Artificial
  Probe
tccatggcccttctgcggaccgtag

SEQ ID NO: 225117 - DNA, 25 bp, Artificial
  Probe
aacattctgatgtccggtaggaaga

SEQ ID NO: 225118 - DNA, 25 bp, Artificial
  Probe
tcctcatcgatgtggcctgcagggc

SEQ ID NO: 225119 - DNA, 25 bp, Artificial
  Probe
ggttcatcatgctggctgtcctcaa

SEQ ID NO: 225120 - DNA, 25 bp, Artificial
  Probe
agaagcaccgcgtgttccttctgat

SEQ ID NO: 225121 - DNA, 25 bp, Artificial
  Probe
tgagcgtgttcatcgcctgttggtc

SEQ ID NO: 225122 - DNA, 25 bp, Artificial
  Probe
ccaacaagaagcaccgcgtgttcct

SEQ ID NO: 225123 - DNA, 25 bp, Artificial
  Probe
agcttattggccattgccattgagc

SEQ ID NO: 225124 - DNA, 25 bp, Artificial
  Probe
gcctggagaactttcccgactgctc

SEQ ID NO: 225125 - DNA, 25 bp, Artificial
  Probe
accacaactccgagagatccatggc

SEQ ID NO: 225126 - DNA, 25 bp, Artificial
  Probe
tggctgtcctcaactccgccatgaa

SEQ ID NO: 225127 - DNA, 25 bp, Artificial
  Probe
cttattggccattgccattgagcgg

SEQ ID NO: 225128 - DNA, 25 bp, Artificial
  Probe
ctaattgccttctcgctgggtgccc

SEQ ID NO: 225129 - DNA, 25 bp, Artificial
  Probe
ctgcagggcgaaggagtgctccatc

SEQ ID NO: 225130 - DNA, 25 bp, Artificial
  Probe
gattgggatgtgctggctaattgcc

SEQ ID NO: 225131 - DNA, 25 bp, Artificial
  Probe
atgatcaagatgaggccgtacgacg

SEQ ID NO: 225132 - DNA, 25 bp, Artificial
  Probe
gatccatggcccttctgcggaccgt

SEQ ID NO: 225133 - DNA, 25 bp, Artificial
  Probe
ttgtacgcgcgcatctacttcctgg

SEQ ID NO: 225134 - DNA, 25 bp, Artificial
  Probe
catgcagcttattggccattgccat

SEQ ID NO: 225135 - DNA, 25 bp, Artificial
  Probe
cgaaggagtgctccatcctcttcaa

SEQ ID NO: 225136 - DNA, 25 bp, Artificial
  Probe
atcatgctggctgtcctcaactccg

SEQ ID NO: 225137 - DNA, 25 bp, Artificial
  Probe
ctgggctggaactgcctggagaact

SEQ ID NO: 225138 - DNA, 25 bp, Artificial
  Probe
gcccttctgcggaccgtagtgatcg

SEQ ID NO: 225139 - DNA, 25 bp, Artificial
  Probe
tggtcaagtccagcagccgcagggt

SEQ ID NO: 225140 - DNA, 25 bp, Artificial
  Probe
aagatgaggccgtacgacgccaaca

SEQ ID NO: 225141 - DNA, 25 bp, Artificial
  Probe
agtgatcgtggtgagcgtgttcatc

SEQ ID NO: 225142 - DNA, 25 bp, Artificial
  Probe
gcagccgcagggtggccaaccacaa

SEQ ID NO: 225143 - DNA, 25 bp, Artificial
  Probe
tgttcgtagccctgggcgcatccac

SEQ ID NO: 225144 - DNA, 25 bp, Artificial
  Probe
cctgggcgcatccacatgcagctta

SEQ ID NO: 225145 - DNA, 25 bp, Artificial
  Probe
ccattgagcggcacctgaccatgat

SEQ ID NO: 225146 - DNA, 25 bp, Artificial
  Probe
gtaggaagacgttcagcctgtctcc

SEQ ID NO: 225147 - DNA, 25 bp, Artificial
  Probe
gtgttccttctgattgggatgtgct

SEQ ID NO: 225148 - DNA, 25 bp, Artificial
  Probe
cgtacgacgccaacaagaagcaccg

SEQ ID NO: 225149 - DNA, 25 bp, Artificial
  Probe
cagggtggccaaccacaactccgag

SEQ ID NO: 225150 - DNA, 25 bp, Artificial
  Probe
agctgatacgtttccgcttctgcag

SEQ ID NO: 225151 - DNA, 25 bp, Artificial
  Probe
ctgggccacagctccgacgagctga

SEQ ID NO: 225152 - DNA, 25 bp, Artificial
  Probe
acaccgcacatctgtgcagcgaaag

SEQ ID NO: 225153 - DNA, 25 bp, Artificial
  Probe
gcctgcgctcacagctggtgccggt

SEQ ID NO: 225154 - DNA, 25 bp, Artificial
  Probe
gacacaccgcacatctgtgcagcga

SEQ ID NO: 225155 - DNA, 25 bp, Artificial
  Probe
gacgagctgatacgtttccgcttct

SEQ ID NO: 225156 - DNA, 25 bp, Artificial
  Probe
gcacatctgtgcagcgaaagagccc

SEQ ID NO: 225157 - DNA, 25 bp, Artificial
  Probe
ccgacgagctgatacgtttccgctt

SEQ ID NO: 225158 - DNA, 25 bp, Artificial
  Probe
tttccgcttctgcagcggttcgtgc

SEQ ID NO: 225159 - DNA, 25 bp, Artificial
  Probe
tgcagcggttcgtgccgccgagcac

SEQ ID NO: 225160 - DNA, 25 bp, Artificial
  Probe
cacaccgcacatctgtgcagcgaaa

SEQ ID NO: 225161 - DNA, 25 bp, Artificial
  Probe
cacagctccgacgagctgatacgtt

SEQ ID NO: 225162 - DNA, 25 bp, Artificial
  Probe
cgacgagctgatacgtttccgcttc

SEQ ID NO: 225163 - DNA, 25 bp, Artificial
  Probe
ttccgcttctgcagcggttcgtgcc

SEQ ID NO: 225164 - DNA, 25 bp, Artificial
  Probe
ctgcagcggttcgtgccgccgagca

SEQ ID NO: 225165 - DNA, 25 bp, Artificial
  Probe
accgcacatctgtgcagcgaaagag

SEQ ID NO: 225166 - DNA, 25 bp, Artificial
  Probe
ggacacaccgcacatctgtgcagcg

SEQ ID NO: 225167 - DNA, 25 bp, Artificial
  Probe
cgagctgatacgtttccgcttctgc

SEQ ID NO: 225168 - DNA, 25 bp, Artificial
  Probe
atctgtgcagcgaaagagccctgcg

SEQ ID NO: 225169 - DNA, 25 bp, Artificial
  Probe
cttctgcagcggttcgtgccgccga

SEQ ID NO: 225170 - DNA, 25 bp, Artificial
  Probe
acgtttccgcttctgcagcggttcg

SEQ ID NO: 225171 - DNA, 25 bp, Artificial
  Probe
acacaccgcacatctgtgcagcgaa

SEQ ID NO: 225172 - DNA, 25 bp, Artificial
  Probe
cagctccgacgagctgatacgtttc

SEQ ID NO: 225173 - DNA, 25 bp, Artificial
  Probe
agctccgacgagctgatacgtttcc

SEQ ID NO: 225174 - DNA, 25 bp, Artificial
  Probe
gctccgacgagctgatacgtttccg

SEQ ID NO: 225175 - DNA, 25 bp, Artificial
  Probe
caccgcacatctgtgcagcgaaaga

SEQ ID NO: 225176 - DNA, 25 bp, Artificial
  Probe
ctgcgctcacagctggtgccggtga

SEQ ID NO: 225177 - DNA, 25 bp, Artificial
  Probe
cgcacatctgtgcagcgaaagagcc

SEQ ID NO: 225178 - DNA, 25 bp, Artificial
  Probe
gtgcagcgaaagagccctgcgacca

SEQ ID NO: 225179 - DNA, 25 bp, Artificial
  Probe
tctgtgcagcgaaagagccctgcga

SEQ ID NO: 225180 - DNA, 25 bp, Artificial
  Probe
ccacagctccgacgagctgatacgt

SEQ ID NO: 225181 - DNA, 25 bp, Artificial
  Probe
ttctgcagcggttcgtgccgccgag

SEQ ID NO: 225182 - DNA, 25 bp, Artificial
  Probe
cgtttccgcttctgcagcggttcgt

SEQ ID NO: 225183 - DNA, 25 bp, Artificial
  Probe
ccgcacatctgtgcagcgaaagagc

SEQ ID NO: 225184 - DNA, 25 bp, Artificial
  Probe
acgagctgatacgtttccgcttctg

SEQ ID NO: 225185 - DNA, 25 bp, Artificial
  Probe
tctgcagcggttcgtgccgccgagc

SEQ ID NO: 225186 - DNA, 25 bp, Artificial
  Probe
gtttccgcttctgcagcggttcgtg

SEQ ID NO: 225187 - DNA, 25 bp, Artificial
  Probe
gccacagctccgacgagctgatacg

SEQ ID NO: 225188 - DNA, 25 bp, Artificial
  Probe
ctccgacgagctgatacgtttccgc

SEQ ID NO: 225189 - DNA, 25 bp, Artificial
  Probe
ctgtgcagcgaaagagccctgcgac

SEQ ID NO: 225190 - DNA, 25 bp, Artificial
  Probe
tgtgcagcgaaagagccctgcgacc

SEQ ID NO: 225191 - DNA, 25 bp, Artificial
  Probe
atacgtttccgcttctgcagcggtt

SEQ ID NO: 225192 - DNA, 25 bp, Artificial
  Probe
gagctgatacgtttccgcttctgca

SEQ ID NO: 225193 - DNA, 25 bp, Artificial
  Probe
acagctccgacgagctgatacgttt

SEQ ID NO: 225194 - DNA, 25 bp, Artificial
  Probe
gagcagccgcgcacgggctacagat

SEQ ID NO: 225195 - DNA, 25 bp, Artificial
  Probe
cctgcgctcacagctggtgccggtg

SEQ ID NO: 225196 - DNA, 25 bp, Artificial
  Probe
cctgcaggacgagtgtgaacagctg

SEQ ID NO: 225197 - DNA, 25 bp, Artificial
  Probe
tcttaacgacaggtgcgaccgcctc

SEQ ID NO: 225198 - DNA, 25 bp, Artificial
  Probe
catacctggggctaattgggactgc

SEQ ID NO: 225199 - DNA, 25 bp, Artificial
  Probe
gaccccaaacttcatcagcaaggtc

SEQ ID NO: 225200 - DNA, 25 bp, Artificial
  Probe
ggccattgcggctaaaatgcgtttc

SEQ ID NO: 225201 - DNA, 25 bp, Artificial
  Probe
gcgtgctcagggatccgctgccagc

SEQ ID NO: 225202 - DNA, 25 bp, Artificial
  Probe
cccaactgcctagatcttcggagct

SEQ ID NO: 225203 - DNA, 25 bp, Artificial
  Probe
ctgtacctgccgaggcagtggcaac

SEQ ID NO: 225204 - DNA, 25 bp, Artificial
  Probe
tgccaccctatggacatcctcggga

SEQ ID NO: 225205 - DNA, 25 bp, Artificial
  Probe
acgctcagggcctgctgctgtgtcc

SEQ ID NO: 225206 - DNA, 25 bp, Artificial
  Probe
ctgccgaggcagtggcaacctgcag

SEQ ID NO: 225207 - DNA, 25 bp, Artificial
  Probe
atgtctgcgggcatacctggggcta

SEQ ID NO: 225208 - DNA, 25 bp, Artificial
  Probe
cctgtgcacccgaagatgcgggctg

SEQ ID NO: 225209 - DNA, 25 bp, Artificial
  Probe
tctgtgcagatcacgcctgatggac

SEQ ID NO: 225210 - DNA, 25 bp, Artificial
  Probe
gtgtccctgtgcacccgaagatgcg

SEQ ID NO: 225211 - DNA, 25 bp, Artificial
  Probe
catggaggccattgcggctaaaatg

SEQ ID NO: 225212 - DNA, 25 bp, Artificial
  Probe
ccttcttcgagaaggcggcagagtc

SEQ ID NO: 225213 - DNA, 25 bp, Artificial
  Probe
agtccagatgtctgcgggcatacct

SEQ ID NO: 225214 - DNA, 25 bp, Artificial
  Probe
ttcatcagcaaggtcaacactactg

SEQ ID NO: 225215 - DNA, 25 bp, Artificial
  Probe
ctgctgtgtccctgtgcacccgaag

SEQ ID NO: 225216 - DNA, 25 bp, Artificial
  Probe
agagtcccacgctcagggcctgctg

SEQ ID NO: 225217 - DNA, 25 bp, Artificial
  Probe
ctatggacatcctcgggacttgtgc

SEQ ID NO: 225218 - DNA, 25 bp, Artificial
  Probe
ctgcgggcatacctggggctaattg

SEQ ID NO: 225219 - DNA, 25 bp, Artificial
  Probe
gctcagctgcgctccttcttcgaga

SEQ ID NO: 225220 - DNA, 25 bp, Artificial
  Probe
gcagatcacgcctgatggacttcca

SEQ ID NO: 225221 - DNA, 25 bp, Artificial
  Probe
ctgtgcacccgaagatgcgggctgt

SEQ ID NO: 225222 - DNA, 25 bp, Artificial
  Probe
tgatggacttccagacccactgcca

SEQ ID NO: 225223 - DNA, 25 bp, Artificial
  Probe
gctgcgctccttcttcgagaaggcg

SEQ ID NO: 225224 - DNA, 25 bp, Artificial
  Probe
gctccttcttcgagaaggcggcaga

SEQ ID NO: 225225 - DNA, 25 bp, Artificial
  Probe
tactgttgccttaggctgtacctgc

SEQ ID NO: 225226 - DNA, 25 bp, Artificial
  Probe
cagtggcaacctgcaggacgagtgt

SEQ ID NO: 225227 - DNA, 25 bp, Artificial
  Probe
gcctgatggacttccagacccactg

SEQ ID NO: 225228 - DNA, 25 bp, Artificial
  Probe
agaaggcggcagagtcccacgctca

SEQ ID NO: 225229 - DNA, 25 bp, Artificial
  Probe
ggcctgctgctgtgtccctgtgcac

SEQ ID NO: 225230 - DNA, 25 bp, Artificial
  Probe
ccgtgcggaccctctgtgcagatca

SEQ ID NO: 225231 - DNA, 25 bp, Artificial
  Probe
attgcggctaaaatgcgtttccaca

SEQ ID NO: 225232 - DNA, 25 bp, Artificial
  Probe
cctgcctcatggaggccattgcggc

SEQ ID NO: 225233 - DNA, 25 bp, Artificial
  Probe
atgaccccaaacttcatcagcaagg

SEQ ID NO: 225234 - DNA, 25 bp, Artificial
  Probe
gggactgccatgaccccaaacttca

SEQ ID NO: 225235 - DNA, 25 bp, Artificial
  Probe
ggctaaaatgcgtttccacagacaa

SEQ ID NO: 225236 - DNA, 25 bp, Artificial
  Probe
gctaaaatgcgtttccacagacaac

SEQ ID NO: 225237 - DNA, 25 bp, Artificial
  Probe
acagacaactcttctcccaggactg

SEQ ID NO: 225238 - DNA, 25 bp, Artificial
  Probe
gaaggcggcagagtcccacgctcag

SEQ ID NO: 225239 - DNA, 25 bp, Artificial
  Probe
atcttcggagcttccgccgtgcgga

SEQ ID NO: 225240 - DNA, 25 bp, Artificial
  Probe
agctggaaaagtccttctcccagaa

SEQ ID NO: 225241 - DNA, 25 bp, Artificial
  Probe
cgtgctcagggatccgctgccagcg

SEQ ID NO: 225242 - DNA, 25 bp, Artificial
  Probe
gacatgcctgtctggagtctgtcca

SEQ ID NO: 225243 - DNA, 25 bp, Artificial
  Probe
tggagtctgtccatctgtctctggg

SEQ ID NO: 225244 - DNA, 25 bp, Artificial
  Probe
cgacatgcctgtctggagtctgtcc

SEQ ID NO: 225245 - DNA, 25 bp, Artificial
  Probe
ggctgccccgaacaggatgtatgtt

SEQ ID NO: 225246 - DNA, 25 bp, Artificial
  Probe
ctgtctggagtctgtccatctgtct

SEQ ID NO: 225247 - DNA, 25 bp, Artificial
  Probe
ctggagtctgtccatctgtctctgg

SEQ ID NO: 225248 - DNA, 25 bp, Artificial
  Probe
gccccgaacaggatgtatgttggga

SEQ ID NO: 225249 - DNA, 25 bp, Artificial
  Probe
ctgagaggcatgtcgacatgcctgt

SEQ ID NO: 225250 - DNA, 25 bp, Artificial
  Probe
caccttcctgagaggcatgtcgaca

SEQ ID NO: 225251 - DNA, 25 bp, Artificial
  Probe
ttattttataatgtgggactcagtc

SEQ ID NO: 225252 - DNA, 25 bp, Artificial
  Probe
ggagtctgtccatctgtctctgggt

SEQ ID NO: 225253 - DNA, 25 bp, Artificial
  Probe
tcctgagaggcatgtcgacatgcct

SEQ ID NO: 225254 - DNA, 25 bp, Artificial
  Probe
tccagtgctccaactgagcggctgc

SEQ ID NO: 225255 - DNA, 25 bp, Artificial
  Probe
gcctgtctggagtctgtccatctgt

SEQ ID NO: 225256 - DNA, 25 bp, Artificial
  Probe
gtctgtccatctgtctctgggtttc

SEQ ID NO: 225257 - DNA, 25 bp, Artificial
  Probe
cccgaacaggatgtatgttgggaca

SEQ ID NO: 225258 - DNA, 25 bp, Artificial
  Probe
ctgccccgaacaggatgtatgttgg

SEQ ID NO: 225259 - DNA, 25 bp, Artificial
  Probe
agtctgtccatctgtctctgggttt

SEQ ID NO: 225260 - DNA, 25 bp, Artificial
  Probe
cctgtctggagtctgtccatctgtc

SEQ ID NO: 225261 - DNA, 25 bp, Artificial
  Probe
aggcatgtcgacatgcctgtctgga

SEQ ID NO: 225262 - DNA, 25 bp, Artificial
  Probe
catgcctgtctggagtctgtccatc

SEQ ID NO: 225263 - DNA, 25 bp, Artificial
  Probe
gggtgtctaaaacctgcccatctcc

SEQ ID NO: 225264 - DNA, 25 bp, Artificial
  Probe
cggctgccccgaacaggatgtatgt

SEQ ID NO: 225265 - DNA, 25 bp, Artificial
  Probe
acatgcctgtctggagtctgtccat

SEQ ID NO: 225266 - DNA, 25 bp, Artificial
  Probe
tgtcgacatgcctgtctggagtctg

SEQ ID NO: 225267 - DNA, 25 bp, Artificial
  Probe
tctggagtctgtccatctgtctctg

SEQ ID NO: 225268 - DNA, 25 bp, Artificial
  Probe
ggcatgtcgacatgcctgtctggag

SEQ ID NO: 225269 - DNA, 25 bp, Artificial
  Probe
caactgagcggctgccccgaacagg

SEQ ID NO: 225270 - DNA, 25 bp, Artificial
  Probe
tcgacatgcctgtctggagtctgtc

SEQ ID NO: 225271 - DNA, 25 bp, Artificial
  Probe
tgcctgtctggagtctgtccatctg

SEQ ID NO: 225272 - DNA, 25 bp, Artificial
  Probe
tgccccgaacaggatgtatgttggg

SEQ ID NO: 225273 - DNA, 25 bp, Artificial
  Probe
ggtgtctaaaacctgcccatctcca

SEQ ID NO: 225274 - DNA, 25 bp, Artificial
  Probe
tccatggatgtagcatatggaagag

SEQ ID NO: 225275 - DNA, 25 bp, Artificial
  Probe
gcaccttcctgagaggcatgtcgac

SEQ ID NO: 225276 - DNA, 25 bp, Artificial
  Probe
cctgagaggcatgtcgacatgcctg

SEQ ID NO: 225277 - DNA, 25 bp, Artificial
  Probe
gctgccccgaacaggatgtatgttg

SEQ ID NO: 225278 - DNA, 25 bp, Artificial
  Probe
ctccagtgctccaactgagcggctg

SEQ ID NO: 225279 - DNA, 25 bp, Artificial
  Probe
gtgtctaaaacctgcccatctccag

SEQ ID NO: 225280 - DNA, 25 bp, Artificial
  Probe
gtctggagtctgtccatctgtctct

SEQ ID NO: 225281 - DNA, 25 bp, Artificial
  Probe
tgtctggagtctgtccatctgtctc

SEQ ID NO: 225282 - DNA, 25 bp, Artificial
  Probe
gagtctgtccatctgtctctgggtt

SEQ ID NO: 225283 - DNA, 25 bp, Artificial
  Probe
gcggctgccccgaacaggatgtatg

SEQ ID NO: 225284 - DNA, 25 bp, Artificial
  Probe
ccccgaacaggatgtatgttgggac

SEQ ID NO: 225285 - DNA, 25 bp, Artificial
  Probe
gtcgacatgcctgtctggagtctgt

SEQ ID NO: 225286 - DNA, 25 bp, Artificial
  Probe
atgcctgtctggagtctgtccatct

SEQ ID NO: 225287 - DNA, 25 bp, Artificial
  Probe
ttcctgagaggcatgtcgacatgcc

SEQ ID NO: 225288 - DNA, 25 bp, Artificial
  Probe
catgatcgaggctgggccaagatct

SEQ ID NO: 225289 - DNA, 25 bp, Artificial
  Probe
tgttggatccggatcaagatgcgac

SEQ ID NO: 225290 - DNA, 25 bp, Artificial
  Probe
caagcctgaggctcagccgtttgct

SEQ ID NO: 225291 - DNA, 25 bp, Artificial
  Probe
cgaggctgggccaagatctctaaca

SEQ ID NO: 225292 - DNA, 25 bp, Artificial
  Probe
tactttggggctttcaaagttcaag

SEQ ID NO: 225293 - DNA, 25 bp, Artificial
  Probe
cattgtggggccacagcgcttctca

SEQ ID NO: 225294 - DNA, 25 bp, Artificial
  Probe
gaaacctcagggagcgtacctgcgg

SEQ ID NO: 225295 - DNA, 25 bp, Artificial
  Probe
ggttaaccaagatggcttctattac

SEQ ID NO: 225296 - DNA, 25 bp, Artificial
  Probe
tccataaacgttggaggatttttca

SEQ ID NO: 225297 - DNA, 25 bp, Artificial
  Probe
ctatgatggaaggttcgtggctcga

SEQ ID NO: 225298 - DNA, 25 bp, Artificial
  Probe
cttctcaggagttccagctatgatg

SEQ ID NO: 225299 - DNA, 25 bp, Artificial
  Probe
atgctgccgacatcccatcgggttc

SEQ ID NO: 225300 - DNA, 25 bp, Artificial
  Probe
gttcgcataacctgatgaaaggggg

SEQ ID NO: 225301 - DNA, 25 bp, Artificial
  Probe
aggaaattagcgtccaggtgtccaa

SEQ ID NO: 225302 - DNA, 25 bp, Artificial
  Probe
catgacgttaagcaacggaaaacta

SEQ ID NO: 225303 - DNA, 25 bp, Artificial
  Probe
gatttttcaagctccgggctggtga

SEQ ID NO: 225304 - DNA, 25 bp, Artificial
  Probe
ttccctgttggatccggatcaagat

SEQ ID NO: 225305 - DNA, 25 bp, Artificial
  Probe
agggagcgtacctgcggactatctt

SEQ ID NO: 225306 - DNA, 25 bp, Artificial
  Probe
ttagcgtccaggtgtccaacccttc

SEQ ID NO: 225307 - DNA, 25 bp, Artificial
  Probe
tcccaagttcgcataacctgatgaa

SEQ ID NO: 225308 - DNA, 25 bp, Artificial
  Probe
acaagcctttcaaggggccgtgcaa

SEQ ID NO: 225309 - DNA, 25 bp, Artificial
  Probe
gaggctcagccgtttgctcacctca

SEQ ID NO: 225310 - DNA, 25 bp, Artificial
  Probe
agcctgaggctcagccgtttgctca

SEQ ID NO: 225311 - DNA, 25 bp, Artificial
  Probe
tccagctatgatggaaggttcgtgg

SEQ ID NO: 225312 - DNA, 25 bp, Artificial
  Probe
cagcgcttctcaggagttccagcta

SEQ ID NO: 225313 - DNA, 25 bp, Artificial
  Probe
ttgtggggccacagcgcttctcagg

SEQ ID NO: 225314 - DNA, 25 bp, Artificial
  Probe
tgcgacgtactttggggctttcaaa

SEQ ID NO: 225315 - DNA, 25 bp, Artificial
  Probe
tcaaggggccgtgcaaagggaatta

SEQ ID NO: 225316 - DNA, 25 bp, Artificial
  Probe
tcaatgctgccgacatcccatcggg

SEQ ID NO: 225317 - DNA, 25 bp, Artificial
  Probe
cacttttattccataaacgttggag

SEQ ID NO: 225318 - DNA, 25 bp, Artificial
  Probe
catcccatcgggttcccataaagtc

SEQ ID NO: 225319 - DNA, 25 bp, Artificial
  Probe
ccttccctgttggatccggatcaag

SEQ ID NO: 225320 - DNA, 25 bp, Artificial
  Probe
gtatatgtcgttaaaaccagcatca

SEQ ID NO: 225321 - DNA, 25 bp, Artificial
  Probe
aactggtcagggaattctgaattcc

SEQ ID NO: 225322 - DNA, 25 bp, Artificial
  Probe
caagctccgggctggtgaggaaatt

SEQ ID NO: 225323 - DNA, 25 bp, Artificial
  Probe
gaggatttttcaagctccgggctgg

SEQ ID NO: 225324 - DNA, 25 bp, Artificial
  Probe
gggaattacaacacattgtggggcc

SEQ ID NO: 225325 - DNA, 25 bp, Artificial
  Probe
ttcaaggggccgtgcaaagggaatt

SEQ ID NO: 225326 - DNA, 25 bp, Artificial
  Probe
acctgtacgccaacatttgcttcag

SEQ ID NO: 225327 - DNA, 25 bp, Artificial
  Probe
cttcagctgatggtatatgtcgtta

SEQ ID NO: 225328 - DNA, 25 bp, Artificial
  Probe
gagcactaagaactggtcagggaat

SEQ ID NO: 225329 - DNA, 25 bp, Artificial
  Probe
gggaattctgaattccacttttatt

SEQ ID NO: 225330 - DNA, 25 bp, Artificial
  Probe
tacaacacattgtggggccacagcg

SEQ ID NO: 225331 - DNA, 25 bp, Artificial
  Probe
gggccacagcgcttctcaggagttc

SEQ ID NO: 225332 - DNA, 25 bp, Artificial
  Probe
ggcttctattacctgtacgccaaca

SEQ ID NO: 225333 - DNA, 25 bp, Artificial
  Probe
aagctccgggctggtgaggaaatta

SEQ ID NO: 225334 - DNA, 25 bp, Artificial
  Probe
tgtaagcttcctgtaatgttagcct

SEQ ID NO: 225335 - DNA, 25 bp, Artificial
  Probe
tggcaggctgtgacaaggcccttgc

SEQ ID NO: 225336 - DNA, 25 bp, Artificial
  Probe
tgaccttgtaagcttcctgtaatgt

SEQ ID NO: 225337 - DNA, 25 bp, Artificial
  Probe
ttcctgtaatgttagcctgcccatg

SEQ ID NO: 225338 - DNA, 25 bp, Artificial
  Probe
gaccttgtaagcttcctgtaatgtt

SEQ ID NO: 225339 - DNA, 25 bp, Artificial
  Probe
caggctgtgacaaggcccttgcacc

SEQ ID NO: 225340 - DNA, 25 bp, Artificial
  Probe
gcaggctgtgacaaggcccttgcac

SEQ ID NO: 225341 - DNA, 25 bp, Artificial
  Probe
caacagcaagatcctgaagctcaag

SEQ ID NO: 225342 - DNA, 25 bp, Artificial
  Probe
cagctgggacactgggccctgacct

SEQ ID NO: 225343 - DNA, 25 bp, Artificial
  Probe
agcaagatcctgaagctcaagtttg

SEQ ID NO: 225344 - DNA, 25 bp, Artificial
  Probe
ccttgtaagcttcctgtaatgttag

SEQ ID NO: 225345 - DNA, 25 bp, Artificial
  Probe
acagcaagatcctgaagctcaagtt

SEQ ID NO: 225346 - DNA, 25 bp, Artificial
  Probe
tgggccctgaccttgtaagcttcct

SEQ ID NO: 225347 - DNA, 25 bp, Artificial
  Probe
aacagcaagatcctgaagctcaagt

SEQ ID NO: 225348 - DNA, 25 bp, Artificial
  Probe
ggccctgaccttgtaagcttcctgt

SEQ ID NO: 225349 - DNA, 25 bp, Artificial
  Probe
tcctgtaatgttagcctgcccatgg

SEQ ID NO: 225350 - DNA, 25 bp, Artificial
  Probe
cttcctgtaatgttagcctgcccat

SEQ ID NO: 225351 - DNA, 25 bp, Artificial
  Probe
ccctgaccttgtaagcttcctgtaa

SEQ ID NO: 225352 - DNA, 25 bp, Artificial
  Probe
gaagctcaagtttgatcctaacaaa

SEQ ID NO: 225353 - DNA, 25 bp, Artificial
  Probe
ctgggccctgaccttgtaagcttcc

SEQ ID NO: 225354 - DNA, 25 bp, Artificial
  Probe
tcagctgggacactgggccctgacc

SEQ ID NO: 225355 - DNA, 25 bp, Artificial
  Probe
cagcaagatcctgaagctcaagttt

SEQ ID NO: 225356 - DNA, 25 bp, Artificial
  Probe
actgggccctgaccttgtaagcttc

SEQ ID NO: 225357 - DNA, 25 bp, Artificial
  Probe
gacactgggccctgaccttgtaagc

SEQ ID NO: 225358 - DNA, 25 bp, Artificial
  Probe
cccaacagcaagatcctgaagctca

SEQ ID NO: 225359 - DNA, 25 bp, Artificial
  Probe
ccaacagcaagatcctgaagctcaa

SEQ ID NO: 225360 - DNA, 25 bp, Artificial
  Probe
cactgggccctgaccttgtaagctt

SEQ ID NO: 225361 - DNA, 25 bp, Artificial
  Probe
agcttcctgtaatgttagcctgccc

SEQ ID NO: 225362 - DNA, 25 bp, Artificial
  Probe
cctgaccttgtaagcttcctgtaat

SEQ ID NO: 225363 - DNA, 25 bp, Artificial
  Probe
agtcagctgggacactgggccctga

SEQ ID NO: 225364 - DNA, 25 bp, Artificial
  Probe
ctgaccttgtaagcttcctgtaatg

SEQ ID NO: 225365 - DNA, 25 bp, Artificial
  Probe
aagatcctgaagctcaagtttgatc

SEQ ID NO: 225366 - DNA, 25 bp, Artificial
  Probe
cttgtaagcttcctgtaatgttagc

SEQ ID NO: 225367 - DNA, 25 bp, Artificial
  Probe
taagcttcctgtaatgttagcctgc

SEQ ID NO: 225368 - DNA, 25 bp, Artificial
  Probe
gtaatgttagcctgcccatggcacc

SEQ ID NO: 225369 - DNA, 25 bp, Artificial
  Probe
caagatcctgaagctcaagtttgat

SEQ ID NO: 225370 - DNA, 25 bp, Artificial
  Probe
gcttcctgtaatgttagcctgccca

SEQ ID NO: 225371 - DNA, 25 bp, Artificial
  Probe
ttgtaagcttcctgtaatgttagcc

SEQ ID NO: 225372 - DNA, 25 bp, Artificial
  Probe
accttgtaagcttcctgtaatgtta

SEQ ID NO: 225373 - DNA, 25 bp, Artificial
  Probe
gatcctgaagctcaagtttgatcct

SEQ ID NO: 225374 - DNA, 25 bp, Artificial
  Probe
gggccctgaccttgtaagcttcctg

SEQ ID NO: 225375 - DNA, 25 bp, Artificial
  Probe
atcctgaagctcaagtttgatccta

SEQ ID NO: 225376 - DNA, 25 bp, Artificial
  Probe
gccctgaccttgtaagcttcctgta

SEQ ID NO: 225377 - DNA, 25 bp, Artificial
  Probe
aagcttcctgtaatgttagcctgcc

SEQ ID NO: 225378 - DNA, 25 bp, Artificial
  Probe
tgaagctcaagtttgatcctaacaa

SEQ ID NO: 225379 - DNA, 25 bp, Artificial
  Probe
cctgaagctcaagtttgatcctaac

SEQ ID NO: 225380 - DNA, 25 bp, Artificial
  Probe
agttcaagccacatacggatgagga

SEQ ID NO: 225381 - DNA, 25 bp, Artificial
  Probe
gcgaaacgcgcagttcaagccacat

SEQ ID NO: 225382 - DNA, 25 bp, Artificial
  Probe
acgcgcagttcaagccacatacgga

SEQ ID NO: 225383 - DNA, 25 bp, Artificial
  Probe
actggtaccgcgaaacgcgcagttc

SEQ ID NO: 225384 - DNA, 25 bp, Artificial
  Probe
ggctcctgtgaggtaaagacatgct

SEQ ID NO: 225385 - DNA, 25 bp, Artificial
  Probe
cctggtgtacctggagccaagtcca

SEQ ID NO: 225386 - DNA, 25 bp, Artificial
  Probe
agccaagtccagacttctgtgagca

SEQ ID NO: 225387 - DNA, 25 bp, Artificial
  Probe
ttcaagccacatacggatgaggacc

SEQ ID NO: 225388 - DNA, 25 bp, Artificial
  Probe
gtgtcaggctcctgtgaggtaaaga

SEQ ID NO: 225389 - DNA, 25 bp, Artificial
  Probe
gctcctgtgaggtaaagacatgctg

SEQ ID NO: 225390 - DNA, 25 bp, Artificial
  Probe
ccacgcactaaaggagaagtttgac

SEQ ID NO: 225391 - DNA, 25 bp, Artificial
  Probe
gacctggtgtacctggagccaagtc

SEQ ID NO: 225392 - DNA, 25 bp, Artificial
  Probe
tggtgtacctggagccaagtccaga

SEQ ID NO: 225393 - DNA, 25 bp, Artificial
  Probe
aacgcgcagttcaagccacatacgg

SEQ ID NO: 225394 - DNA, 25 bp, Artificial
  Probe
gcagttcaagccacatacggatgag

SEQ ID NO: 225395 - DNA, 25 bp, Artificial
  Probe
gttcaagccacatacggatgaggac

SEQ ID NO: 225396 - DNA, 25 bp, Artificial
  Probe
caggctcctgtgaggtaaagacatg

SEQ ID NO: 225397 - DNA, 25 bp, Artificial
  Probe
gaaacgcgcagttcaagccacatac

SEQ ID NO: 225398 - DNA, 25 bp, Artificial
  Probe
gccaagtccagacttctgtgagcag

SEQ ID NO: 225399 - DNA, 25 bp, Artificial
  Probe
ggttggccacgcactaaaggagaag

SEQ ID NO: 225400 - DNA, 25 bp, Artificial
  Probe
acctggtgtacctggagccaagtcc

SEQ ID NO: 225401 - DNA, 25 bp, Artificial
  Probe
tggtaccgcgaaacgcgcagttcaa

SEQ ID NO: 225402 - DNA, 25 bp, Artificial
  Probe
ccgggcactggtaccgcgaaacgcg

SEQ ID NO: 225403 - DNA, 25 bp, Artificial
  Probe
gttggccacgcactaaaggagaagt

SEQ ID NO: 225404 - DNA, 25 bp, Artificial
  Probe
agccacatacggatgaggacctggt

SEQ ID NO: 225405 - DNA, 25 bp, Artificial
  Probe
cctgcgtggcccagggaaggccaat

SEQ ID NO: 225406 - DNA, 25 bp, Artificial
  Probe
ccacatacggatgaggacctggtgt

SEQ ID NO: 225407 - DNA, 25 bp, Artificial
  Probe
tacggatgaggacctggtgtacctg

SEQ ID NO: 225408 - DNA, 25 bp, Artificial
  Probe
gtacctggagccaagtccagacttc

SEQ ID NO: 225409 - DNA, 25 bp, Artificial
  Probe
aaacgcgcagttcaagccacatacg

SEQ ID NO: 225410 - DNA, 25 bp, Artificial
  Probe
tcccgggcactggtaccgcgaaacg

SEQ ID NO: 225411 - DNA, 25 bp, Artificial
  Probe
ccgcacttgcaacaagacgtctaag

SEQ ID NO: 225412 - DNA, 25 bp, Artificial
  Probe
ggacctggtgtacctggagccaagt

SEQ ID NO: 225413 - DNA, 25 bp, Artificial
  Probe
atgaggacctggtgtacctggagcc

SEQ ID NO: 225414 - DNA, 25 bp, Artificial
  Probe
acatacggatgaggacctggtgtac

SEQ ID NO: 225415 - DNA, 25 bp, Artificial
  Probe
gtcaggctcctgtgaggtaaagaca

SEQ ID NO: 225416 - DNA, 25 bp, Artificial
  Probe
cctggagccaagtccagacttctgt

SEQ ID NO: 225417 - DNA, 25 bp, Artificial
  Probe
tggagccaagtccagacttctgtga

SEQ ID NO: 225418 - DNA, 25 bp, Artificial
  Probe
cgtggcccagggaaggccaataact

SEQ ID NO: 225419 - DNA, 25 bp, Artificial
  Probe
ggccacgcactaaaggagaagtttg

SEQ ID NO: 225420 - DNA, 25 bp, Artificial
  Probe
tggccacgcactaaaggagaagttt

SEQ ID NO: 225421 - DNA, 25 bp, Artificial
  Probe
cgcgaaacgcgcagttcaagccaca

SEQ ID NO: 225422 - DNA, 25 bp, Artificial
  Probe
tacctggagccaagtccagacttct

SEQ ID NO: 225423 - DNA, 25 bp, Artificial
  Probe
ctggagccaagtccagacttctgtg

SEQ ID NO: 225424 - DNA, 25 bp, Artificial
  Probe
cttccgtcaggttggccacgcacta

SEQ ID NO: 225425 - DNA, 25 bp, Artificial
  Probe
gtcaggttggccacgcactaaagga

SEQ ID NO: 225426 - DNA, 25 bp, Artificial
  Probe
atttggaatacgtacacatattttt

SEQ ID NO: 225427 - DNA, 25 bp, Artificial
  Probe
ggtccgcgagtagtggtgtttacaa

SEQ ID NO: 225428 - DNA, 25 bp, Artificial
  Probe
caccatgacttataaaggatcaata

SEQ ID NO: 225429 - DNA, 25 bp, Artificial
  Probe
cgtgtgaggctcatatttggaatac

SEQ ID NO: 225430 - DNA, 25 bp, Artificial
  Probe
gtaatccaccatgacttataaagga

SEQ ID NO: 225431 - DNA, 25 bp, Artificial
  Probe
acgtgtgaggctcatatttggaata

SEQ ID NO: 225432 - DNA, 25 bp, Artificial
  Probe
tggaatacgtacacatatttttaag

SEQ ID NO: 225433 - DNA, 25 bp, Artificial
  Probe
ttcttacgtgtgaggctcatatttg

SEQ ID NO: 225434 - DNA, 25 bp, Artificial
  Probe
taagtttgtttccgtaatccaccat

SEQ ID NO: 225435 - DNA, 25 bp, Artificial
  Probe
cagatttctttgttccttctccact

SEQ ID NO: 225436 - DNA, 25 bp, Artificial
  Probe
ttattcttacgtgtgaggctcatat

SEQ ID NO: 225437 - DNA, 25 bp, Artificial
  Probe
ttggtccgcgagtagtggtgtttac

SEQ ID NO: 225438 - DNA, 25 bp, Artificial
  Probe
tcttacgtgtgaggctcatatttgg

SEQ ID NO: 225439 - DNA, 25 bp, Artificial
  Probe
attcttacgtgtgaggctcatattt

SEQ ID NO: 225440 - DNA, 25 bp, Artificial
  Probe
tccgcgagtagtggtgtttacaact

SEQ ID NO: 225441 - DNA, 25 bp, Artificial
  Probe
aaagcttatatatctacaaccacaa

SEQ ID NO: 225442 - DNA, 25 bp, Artificial
  Probe
gttacagatttctttgttccttctc

SEQ ID NO: 225443 - DNA, 25 bp, Artificial
  Probe
attgatcacaaccagttacagattt

SEQ ID NO: 225444 - DNA, 25 bp, Artificial
  Probe
ctttcggttggtccgcgagtagtgg

SEQ ID NO: 225445 - DNA, 25 bp, Artificial
  Probe
tgtttacaactaattgatcacaacc

SEQ ID NO: 225446 - DNA, 25 bp, Artificial
  Probe
ttttattcttacgtgtgaggctcat

SEQ ID NO: 225447 - DNA, 25 bp, Artificial
  Probe
aggctcatatttggaatacgtacac

SEQ ID NO: 225448 - DNA, 25 bp, Artificial
  Probe
actttcggttggtccgcgagtagtg

SEQ ID NO: 225449 - DNA, 25 bp, Artificial
  Probe
agcttatatatctacaaccacaaga

SEQ ID NO: 225450 - DNA, 25 bp, Artificial
  Probe
gttggtccgcgagtagtggtgttta

SEQ ID NO: 225451 - DNA, 25 bp, Artificial
  Probe
agtttgtttccgtaatccaccatga

SEQ ID NO: 225452 - DNA, 25 bp, Artificial
  Probe
acaactaattgatcacaaccagtta

SEQ ID NO: 225453 - DNA, 25 bp, Artificial
  Probe
gtttgtttccgtaatccaccatgac

SEQ ID NO: 225454 - DNA, 25 bp, Artificial
  Probe
tggtccgcgagtagtggtgtttaca

SEQ ID NO: 225455 - DNA, 25 bp, Artificial
  Probe
tacgtacacatatttttaagtttgt

SEQ ID NO: 225456 - DNA, 25 bp, Artificial
  Probe
tgtgaggctcatatttggaatacgt

SEQ ID NO: 225457 - DNA, 25 bp, Artificial
  Probe
tattcttacgtgtgaggctcatatt

SEQ ID NO: 225458 - DNA, 25 bp, Artificial
  Probe
gaacaactttcggttggtccgcgag

SEQ ID NO: 225459 - DNA, 25 bp, Artificial
  Probe
caaccacaagaacaactttcggttg

SEQ ID NO: 225460 - DNA, 25 bp, Artificial
  Probe
atcacaaccagttacagatttcttt

SEQ ID NO: 225461 - DNA, 25 bp, Artificial
  Probe
tttattcttacgtgtgaggctcata

SEQ ID NO: 225462 - DNA, 25 bp, Artificial
  Probe
tatatctacaaccacaagaacaact

SEQ ID NO: 225463 - DNA, 25 bp, Artificial
  Probe
accagttacagatttctttgttcct

SEQ ID NO: 225464 - DNA, 25 bp, Artificial
  Probe
taatccaccatgacttataaaggat

SEQ ID NO: 225465 - DNA, 25 bp, Artificial
  Probe
ttatatatctacaaccacaagaaca

SEQ ID NO: 225466 - DNA, 25 bp, Artificial
  Probe
ccgtaatccaccatgacttataaag

SEQ ID NO: 225467 - DNA, 25 bp, Artificial
  Probe
tttttattcttacgtgtgaggctca

SEQ ID NO: 225468 - DNA, 25 bp, Artificial
  Probe
tttccgtaatccaccatgacttata

SEQ ID NO: 225469 - DNA, 25 bp, Artificial
  Probe
cgtaatccaccatgacttataaagg

SEQ ID NO: 225470 - DNA, 25 bp, Artificial
  Probe
gtccgcgagtagtggtgtttacaac

SEQ ID NO: 225471 - DNA, 25 bp, Artificial
  Probe
caactttcggttggtccgcgagtag

SEQ ID NO: 225472 - DNA, 25 bp, Artificial
  Probe
tcctctaggctgcaggacctctaca

SEQ ID NO: 225473 - DNA, 25 bp, Artificial
  Probe
ttcctgtcctctaggctgcaggacc

SEQ ID NO: 225474 - DNA, 25 bp, Artificial
  Probe
gtatggcatggctcagaccccagtg

SEQ ID NO: 225475 - DNA, 25 bp, Artificial
  Probe
atgaggtactatctcccagctggga

SEQ ID NO: 225476 - DNA, 25 bp, Artificial
  Probe
cccagcctggccacagaagagcgta

SEQ ID NO: 225477 - DNA, 25 bp, Artificial
  Probe
ggctaggatacgaccctgtgtagtt

SEQ ID NO: 225478 - DNA, 25 bp, Artificial
  Probe
gctcagaccccagtgggcgcaggct

SEQ ID NO: 225479 - DNA, 25 bp, Artificial
  Probe
tcctgtgcattgagaatagcttcat

SEQ ID NO: 225480 - DNA, 25 bp, Artificial
  Probe
agagacgtcctgagacacccagcct

SEQ ID NO: 225481 - DNA, 25 bp, Artificial
  Probe
tcgtcctgtgcattgagaatagctt

SEQ ID NO: 225482 - DNA, 25 bp, Artificial
  Probe
aggatacgaccctgtgtagttcaca

SEQ ID NO: 225483 - DNA, 25 bp, Artificial
  Probe
acaggtcaggcctcttccctgctgt

SEQ ID NO: 225484 - DNA, 25 bp, Artificial
  Probe
ggtcaggcctcttccctgctgtcgg

SEQ ID NO: 225485 - DNA, 25 bp, Artificial
  Probe
cattgtacgccgtgctgaccgcagc

SEQ ID NO: 225486 - DNA, 25 bp, Artificial
  Probe
aacagctatatcgtcctgtgcattg

SEQ ID NO: 225487 - DNA, 25 bp, Artificial
  Probe
gagaatagcttcatgacctctttct

SEQ ID NO: 225488 - DNA, 25 bp, Artificial
  Probe
gacctctttctccaaatagggcctc

SEQ ID NO: 225489 - DNA, 25 bp, Artificial
  Probe
aagctactggggttacaggtcaggc

SEQ ID NO: 225490 - DNA, 25 bp, Artificial
  Probe
tcatgacctctttctccaaataggg

SEQ ID NO: 225491 - DNA, 25 bp, Artificial
  Probe
gtcaactgcactctggggcccgcat

SEQ ID NO: 225492 - DNA, 25 bp, Artificial
  Probe
cgatgcagaactttgacacagtgca

SEQ ID NO: 225493 - DNA, 25 bp, Artificial
  Probe
aggtcaggcctcttccctgctgtcg

SEQ ID NO: 225494 - DNA, 25 bp, Artificial
  Probe
tggcatggctcagaccccagtgggc

SEQ ID NO: 225495 - DNA, 25 bp, Artificial
  Probe
acctctacagcattgtacgccgtgc

SEQ ID NO: 225496 - DNA, 25 bp, Artificial
  Probe
ctgatggagagctactgtgagacgt

SEQ ID NO: 225497 - DNA, 25 bp, Artificial
  Probe
ctggctaggatacgaccctgtgtag

SEQ ID NO: 225498 - DNA, 25 bp, Artificial
  Probe
atggcagagacgtcctgagacaccc

SEQ ID NO: 225499 - DNA, 25 bp, Artificial
  Probe
tggcagagacgtcctgagacaccca

SEQ ID NO: 225500 - DNA, 25 bp, Artificial
  Probe
ctcagaccccagtgggcgcaggctg

SEQ ID NO: 225501 - DNA, 25 bp, Artificial
  Probe
atatcgtcctgtgcattgagaatag

SEQ ID NO: 225502 - DNA, 25 bp, Artificial
  Probe
gggttacaggtcaggcctcttccct

SEQ ID NO: 225503 - DNA, 25 bp, Artificial
  Probe
gaactttgacacagtgcagggagca

SEQ ID NO: 225504 - DNA, 25 bp, Artificial
  Probe
ccagggtctggctaggatacgaccc

SEQ ID NO: 225505 - DNA, 25 bp, Artificial
  Probe
agagcgtatggcatggctcagaccc

SEQ ID NO: 225506 - DNA, 25 bp, Artificial
  Probe
gtgctgaccgcagctctgtgcccat

SEQ ID NO: 225507 - DNA, 25 bp, Artificial
  Probe
ttgacacagtgcagggagcatccag

SEQ ID NO: 225508 - DNA, 25 bp, Artificial
  Probe
tggccacagaagagcgtatggcatg

SEQ ID NO: 225509 - DNA, 25 bp, Artificial
  Probe
tggggttacaggtcaggcctcttcc

SEQ ID NO: 225510 - DNA, 25 bp, Artificial
  Probe
gcagagacgtcctgagacacccagc

SEQ ID NO: 225511 - DNA, 25 bp, Artificial
  Probe
ctatatcgtcctgtgcattgagaat

SEQ ID NO: 225512 - DNA, 25 bp, Artificial
  Probe
gatgaggtactatctcccagctggg

SEQ ID NO: 225513 - DNA, 25 bp, Artificial
  Probe
tacgccgtgctgaccgcagctctgt

SEQ ID NO: 225514 - DNA, 25 bp, Artificial
  Probe
agacgtcctgagacacccagcctgg

SEQ ID NO: 225515 - DNA, 25 bp, Artificial
  Probe
cagggtcaactgcactctggggccc

SEQ ID NO: 225516 - DNA, 25 bp, Artificial
  Probe
gctactggggttacaggtcaggcct

SEQ ID NO: 225517 - DNA, 25 bp, Artificial
  Probe
ctacagcattgtacgccgtgctgac

SEQ ID NO: 225518 - DNA, 25 bp, Artificial
  Probe
gtgctccggcctgagcctcagtgca

SEQ ID NO: 225519 - DNA, 25 bp, Artificial
  Probe
agcggctaattggacagcagggcct

SEQ ID NO: 225520 - DNA, 25 bp, Artificial
  Probe
ggtcaggtcgaaagctttggaaacg

SEQ ID NO: 225521 - DNA, 25 bp, Artificial
  Probe
gtgtattcctggtccgggagagcca

SEQ ID NO: 225522 - DNA, 25 bp, Artificial
  Probe
ggcatatcccatgaagacctcatcc

SEQ ID NO: 225523 - DNA, 25 bp, Artificial
  Probe
tccgggagagccagcggaacccaca

SEQ ID NO: 225524 - DNA, 25 bp, Artificial
  Probe
acctgctgcagctggtggaattcca

SEQ ID NO: 225525 - DNA, 25 bp, Artificial
  Probe
tttcatggacgaatctcccgggagg

SEQ ID NO: 225526 - DNA, 25 bp, Artificial
  Probe
tcaggtcgaaagctttggaaacgat

SEQ ID NO: 225527 - DNA, 25 bp, Artificial
  Probe
tgagtccaatgtgtatgtggtgacc

SEQ ID NO: 225528 - DNA, 25 bp, Artificial
  Probe
cgccttccggctcttcaagtacggg

SEQ ID NO: 225529 - DNA, 25 bp, Artificial
  Probe
agcagagtcggacttgctggctgtc

SEQ ID NO: 225530 - DNA, 25 bp, Artificial
  Probe
ccaggcctggaggaagaagacaaac

SEQ ID NO: 225531 - DNA, 25 bp, Artificial
  Probe
agaattatcagcaggcccagtctcg

SEQ ID NO: 225532 - DNA, 25 bp, Artificial
  Probe
tgaaccgaggcatcctgccctgctt

SEQ ID NO: 225533 - DNA, 25 bp, Artificial
  Probe
ggaagaagacaaaccaccgtctcag

SEQ ID NO: 225534 - DNA, 25 bp, Artificial
  Probe
agcctcagtgcagctatccatcgca

SEQ ID NO: 225535 - DNA, 25 bp, Artificial
  Probe
tgccacagaggaagcccaggcctgg

SEQ ID NO: 225536 - DNA, 25 bp, Artificial
  Probe
gaaccgaggcatcctgccctgcttg

SEQ ID NO: 225537 - DNA, 25 bp, Artificial
  Probe
tccacccttgaggagtgtctcagat

SEQ ID NO: 225538 - DNA, 25 bp, Artificial
  Probe
ttctctggccatgctgggcgtgtca

SEQ ID NO: 225539 - DNA, 25 bp, Artificial
  Probe
caagtacggggtacagctatataag

SEQ ID NO: 225540 - DNA, 25 bp, Artificial
  Probe
gacttgctggctgtccgccttccgg

SEQ ID NO: 225541 - DNA, 25 bp, Artificial
  Probe
accctggtggccatggacttctctg

SEQ ID NO: 225542 - DNA, 25 bp, Artificial
  Probe
ttgccaagcgaagatgaaggctgcc

SEQ ID NO: 225543 - DNA, 25 bp, Artificial
  Probe
tgaagacctcatccagaacttcctg

SEQ ID NO: 225544 - DNA, 25 bp, Artificial
  Probe
ccagccctggtttcatggacgaatc

SEQ ID NO: 225545 - DNA, 25 bp, Artificial
  Probe
ctttggaaacgattcttctgcttcc

SEQ ID NO: 225546 - DNA, 25 bp, Artificial
  Probe
acccagggccgcaagctgtatggga

SEQ ID NO: 225547 - DNA, 25 bp, Artificial
  Probe
cacaagctgttacagccatggggct

SEQ ID NO: 225548 - DNA, 25 bp, Artificial
  Probe
aagcccaggcctggaggaagaagac

SEQ ID NO: 225549 - DNA, 25 bp, Artificial
  Probe
aatgtgtatgtggtgacccagggcc

SEQ ID NO: 225550 - DNA, 25 bp, Artificial
  Probe
agagccagcggctaattggacagca

SEQ ID NO: 225551 - DNA, 25 bp, Artificial
  Probe
gccatctgcagaaagtcaaacatta

SEQ ID NO: 225552 - DNA, 25 bp, Artificial
  Probe
cattatctcatcttgccaagcgaag

SEQ ID NO: 225553 - DNA, 25 bp, Artificial
  Probe
cttcctgcagcttcggggatcaggc

SEQ ID NO: 225554 - DNA, 25 bp, Artificial
  Probe
cacccacactctgtacagactgaga

SEQ ID NO: 225555 - DNA, 25 bp, Artificial
  Probe
attccaccagctgaaccgaggcatc

SEQ ID NO: 225556 - DNA, 25 bp, Artificial
  Probe
ttctgcagcgaggatgagcagagtc

SEQ ID NO: 225557 - DNA, 25 bp, Artificial
  Probe
gcttatcgtatttggggtctccacc

SEQ ID NO: 225558 - DNA, 25 bp, Artificial
  Probe
agaagacaaaccaccgtctcagcct

SEQ ID NO: 225559 - DNA, 25 bp, Artificial
  Probe
tggggctgcttatcgcccttctgct

SEQ ID NO: 225560 - DNA, 25 bp, Artificial
  Probe
acacctacagtacgtggcagatata

SEQ ID NO: 225561 - DNA, 25 bp, Artificial
  Probe
cagtctcgtcacctgcgcttatcgt

SEQ ID NO: 225562 - DNA, 25 bp, Artificial
  Probe
tcagcatggatgacggccagacccg

SEQ ID NO: 225563 - DNA, 25 bp, Artificial
  Probe
atgaaggctgcctttacttcagcat

SEQ ID NO: 225564 - DNA, 25 bp, Artificial
  Probe
gaaagtcaccaatagccggcgggcc

SEQ ID NO: 225565 - DNA, 25 bp, Artificial
  Probe
aaagtcaccaatagccggcgggcca

SEQ ID NO: 225566 - DNA, 25 bp, Artificial
  Probe
agcaggccgcttctccacacaggag

SEQ ID NO: 225567 - DNA, 25 bp, Artificial
  Probe
aggactaacccagcaggccgcttct

SEQ ID NO: 225568 - DNA, 25 bp, Artificial
  Probe
tcaagagcccgttaagaaagtcacc

SEQ ID NO: 225569 - DNA, 25 bp, Artificial
  Probe
ggagtacgagacgacccaggagtat

SEQ ID NO: 225570 - DNA, 25 bp, Artificial
  Probe
gccaccaaggctacgggagaagaaa

SEQ ID NO: 225571 - DNA, 25 bp, Artificial
  Probe
gcaacacaagttctgtgagcagtaa

SEQ ID NO: 225572 - DNA, 25 bp, Artificial
  Probe
agtatgagtcagttcaagagcccgt

SEQ ID NO: 225573 - DNA, 25 bp, Artificial
  Probe
gaaatggacagcaacacaagttctg

SEQ ID NO: 225574 - DNA, 25 bp, Artificial
  Probe
tgggcatacagaaccccctggcagc

SEQ ID NO: 225575 - DNA, 25 bp, Artificial
  Probe
ctggctgagagcaggactaacccag

SEQ ID NO: 225576 - DNA, 25 bp, Artificial
  Probe
tgagagcaggactaacccagcaggc

SEQ ID NO: 225577 - DNA, 25 bp, Artificial
  Probe
agagcccgttaagaaagtcaccaat

SEQ ID NO: 225578 - DNA, 25 bp, Artificial
  Probe
cattgccaataggttggaaatggac

SEQ ID NO: 225579 - DNA, 25 bp, Artificial
  Probe
ctgtctagtgtaatcgctaaccaag

SEQ ID NO: 225580 - DNA, 25 bp, Artificial
  Probe
acaaccctgcacatcagagtaccag

SEQ ID NO: 225581 - DNA, 25 bp, Artificial
  Probe
tccacacaggaggaattacaggcca

SEQ ID NO: 225582 - DNA, 25 bp, Artificial
  Probe
acgagacgacccaggagtatgagtc

SEQ ID NO: 225583 - DNA, 25 bp, Artificial
  Probe
tctgtgagcagtaactcagaaagtg

SEQ ID NO: 225584 - DNA, 25 bp, Artificial
  Probe
tacaggccaggctgtctagtgtaat

SEQ ID NO: 225585 - DNA, 25 bp, Artificial
  Probe
cccctggcagccagccttgaggtgg

SEQ ID NO: 225586 - DNA, 25 bp, Artificial
  Probe
acacaccattcctgggcatacagaa

SEQ ID NO: 225587 - DNA, 25 bp, Artificial
  Probe
gtaatcgctaaccaagaccctattg

SEQ ID NO: 225588 - DNA, 25 bp, Artificial
  Probe
agagcaggactaacccagcaggccg

SEQ ID NO: 225589 - DNA, 25 bp, Artificial
  Probe
ttcaagagcccgttaagaaagtcac

SEQ ID NO: 225590 - DNA, 25 bp, Artificial
  Probe
ggccacattgccaataggttggaaa

SEQ ID NO: 225591 - DNA, 25 bp, Artificial
  Probe
aggtgaagacacaccattcctgggc

SEQ ID NO: 225592 - DNA, 25 bp, Artificial
  Probe
ccccctagcccactgaggatagtgg

SEQ ID NO: 225593 - DNA, 25 bp, Artificial
  Probe
caatggccacattgccaataggttg

SEQ ID NO: 225594 - DNA, 25 bp, Artificial
  Probe
gaaccaagcccaatggccacattgc

SEQ ID NO: 225595 - DNA, 25 bp, Artificial
  Probe
tgccaataggttggaaatggacagc

SEQ ID NO: 225596 - DNA, 25 bp, Artificial
  Probe
agcagtaactcagaaagtgagacag

SEQ ID NO: 225597 - DNA, 25 bp, Artificial
  Probe
gacagcaacacaagttctgtgagca

SEQ ID NO: 225598 - DNA, 25 bp, Artificial
  Probe
agaaccaagcccaatggccacattg

SEQ ID NO: 225599 - DNA, 25 bp, Artificial
  Probe
ccaaaagaaccaagcccaatggcca

SEQ ID NO: 225600 - DNA, 25 bp, Artificial
  Probe
cttccgtctggctgagagcaggact

SEQ ID NO: 225601 - DNA, 25 bp, Artificial
  Probe
atcgctaaccaagaccctattgctg

SEQ ID NO: 225602 - DNA, 25 bp, Artificial
  Probe
attcctgggcatacagaaccccctg

SEQ ID NO: 225603 - DNA, 25 bp, Artificial
  Probe
tagtgtaatcgctaaccaagaccct

SEQ ID NO: 225604 - DNA, 25 bp, Artificial
  Probe
agtcagttcaagagcccgttaagaa

SEQ ID NO: 225605 - DNA, 25 bp, Artificial
  Probe
gaattacaggccaggctgtctagtg

SEQ ID NO: 225606 - DNA, 25 bp, Artificial
  Probe
agcccaatggccacattgccaatag

SEQ ID NO: 225607 - DNA, 25 bp, Artificial
  Probe
ggccaaaagaaccaagcccaatggc

SEQ ID NO: 225608 - DNA, 25 bp, Artificial
  Probe
acccaggagtatgagtcagttcaag

SEQ ID NO: 225609 - DNA, 25 bp, Artificial
  Probe
tagcccactgaggatagtggaggat

SEQ ID NO: 225610 - DNA, 25 bp, Artificial
  Probe
cctgaggtcactgctagcgctgact

SEQ ID NO: 225611 - DNA, 25 bp, Artificial
  Probe
gcctaaaagacctcatattaagaag

SEQ ID NO: 225612 - DNA, 25 bp, Artificial
  Probe
gctgactccacagacacagtcactg

SEQ ID NO: 225613 - DNA, 25 bp, Artificial
  Probe
tgttgaaaacccagactgtctccac

SEQ ID NO: 225614 - DNA, 25 bp, Artificial
  Probe
aagacctcatattaagaagcctctg

SEQ ID NO: 225615 - DNA, 25 bp, Artificial
  Probe
aaacccagactgtctccacagcttg

SEQ ID NO: 225616 - DNA, 25 bp, Artificial
  Probe
cccagaatgacagctgcctacatct

SEQ ID NO: 225617 - DNA, 25 bp, Artificial
  Probe
ctcattcccaacgtgcaaagccaag

SEQ ID NO: 225618 - DNA, 25 bp, Artificial
  Probe
tactgcaagcgctgacttccaaaag

SEQ ID NO: 225619 - DNA, 25 bp, Artificial
  Probe
ccgagtgtacgctaaaggagagcgc

SEQ ID NO: 225620 - DNA, 25 bp, Artificial
  Probe
cgagtgtacgctaaaggagagcgca

SEQ ID NO: 225621 - DNA, 25 bp, Artificial
  Probe
cggctgaccccaaggagcactgaca

SEQ ID NO: 225622 - DNA, 25 bp, Artificial
  Probe
acgtgcaaagccaaggcagcgaccc

SEQ ID NO: 225623 - DNA, 25 bp, Artificial
  Probe
tcccttctgtctactgcaagcgctg

SEQ ID NO: 225624 - DNA, 25 bp, Artificial
  Probe
gaattagcgcggaaagaaagacagc

SEQ ID NO: 225625 - DNA, 25 bp, Artificial
  Probe
gtagccgagtgtacgctaaaggaga

SEQ ID NO: 225626 - DNA, 25 bp, Artificial
  Probe
gcaactttaccctgaggtcactgct

SEQ ID NO: 225627 - DNA, 25 bp, Artificial
  Probe
catctgaaacatggtggcaaaagaa

SEQ ID NO: 225628 - DNA, 25 bp, Artificial
  Probe
actgctagcgctgactccacagaca

SEQ ID NO: 225629 - DNA, 25 bp, Artificial
  Probe
gcctctgaatgctttcatgttatac

SEQ ID NO: 225630 - DNA, 25 bp, Artificial
  Probe
gacagcaactttaccctgaggtcac

SEQ ID NO: 225631 - DNA, 25 bp, Artificial
  Probe
ctctcccgggaagagcaggccaaat

SEQ ID NO: 225632 - DNA, 25 bp, Artificial
  Probe
tctgaatgctttcatgttatacatg

SEQ ID NO: 225633 - DNA, 25 bp, Artificial
  Probe
aagcttgttgaaaacccagactgtc

SEQ ID NO: 225634 - DNA, 25 bp, Artificial
  Probe
cctctcctggagatggaagcttgtt

SEQ ID NO: 225635 - DNA, 25 bp, Artificial
  Probe
cccaacgtgcaaagccaaggcagcg

SEQ ID NO: 225636 - DNA, 25 bp, Artificial
  Probe
tccaggctggtcagcgagagacaat

SEQ ID NO: 225637 - DNA, 25 bp, Artificial
  Probe
tatgcagctctatccaggctggtca

SEQ ID NO: 225638 - DNA, 25 bp, Artificial
  Probe
tattaagaagcctctgaatgctttc

SEQ ID NO: 225639 - DNA, 25 bp, Artificial
  Probe
ctcatattaagaagcctctgaatgc

SEQ ID NO: 225640 - DNA, 25 bp, Artificial
  Probe
ggctggtcagcgagagacaattatg

SEQ ID NO: 225641 - DNA, 25 bp, Artificial
  Probe
atgtcgtagccgagtgtacgctaaa

SEQ ID NO: 225642 - DNA, 25 bp, Artificial
  Probe
ttcaggtacaggtcccagaatgaca

SEQ ID NO: 225643 - DNA, 25 bp, Artificial
  Probe
tacgctaaaggagagcgcagctatc

SEQ ID NO: 225644 - DNA, 25 bp, Artificial
  Probe
agcttgcccggctgaccccaaggag

SEQ ID NO: 225645 - DNA, 25 bp, Artificial
  Probe
tcccgggaagagcaggccaaatatt

SEQ ID NO: 225646 - DNA, 25 bp, Artificial
  Probe
ctgtctactgcaagcgctgacttcc

SEQ ID NO: 225647 - DNA, 25 bp, Artificial
  Probe
gaagctacaggaatctacttcaggt

SEQ ID NO: 225648 - DNA, 25 bp, Artificial
  Probe
ctggtcagcgagagacaattatggc

SEQ ID NO: 225649 - DNA, 25 bp, Artificial
  Probe
ctcctggagatggaagcttgttgaa

SEQ ID NO: 225650 - DNA, 25 bp, Artificial
  Probe
gcagctctatccaggctggtcagcg

SEQ ID NO: 225651 - DNA, 25 bp, Artificial
  Probe
aagacagctacatatgcagctctat

SEQ ID NO: 225652 - DNA, 25 bp, Artificial
  Probe
gaagcttgttgaaaacccagactgt

SEQ ID NO: 225653 - DNA, 25 bp, Artificial
  Probe
ctatccaggctggtcagcgagagac

SEQ ID NO: 225654 - DNA, 25 bp, Artificial
  Probe
gtacaggtcccagaatgacagctgc

SEQ ID NO: 225655 - DNA, 25 bp, Artificial
  Probe
atgacagctgcctacatctgaaaca

SEQ ID NO: 225656 - DNA, 25 bp, Artificial
  Probe
tggcttcatatgacagaacaaagca

SEQ ID NO: 225657 - DNA, 25 bp, Artificial
  Probe
gagagccacttcacacttcttgcaa

SEQ ID NO: 225658 - DNA, 25 bp, Artificial
  Probe
catgtttctgcacagaccacaagca

SEQ ID NO: 225659 - DNA, 25 bp, Artificial
  Probe
tttccctagtgtttgagattcttca

SEQ ID NO: 225660 - DNA, 25 bp, Artificial
  Probe
gcatccggtcatagtaaactcctat

SEQ ID NO: 225661 - DNA, 25 bp, Artificial
  Probe
catgctagtgagagccacttcacac

SEQ ID NO: 225662 - DNA, 25 bp, Artificial
  Probe
cacaagcagtgttgtttccctagtg

SEQ ID NO: 225663 - DNA, 25 bp, Artificial
  Probe
tttgagattcttcagttctgtgtgc

SEQ ID NO: 225664 - DNA, 25 bp, Artificial
  Probe
tgtctttctttgctttgccatgaca

SEQ ID NO: 225665 - DNA, 25 bp, Artificial
  Probe
ggagacagacaatcaacttgtgttt

SEQ ID NO: 225666 - DNA, 25 bp, Artificial
  Probe
caacttgtgttttgcctgtagtagt

SEQ ID NO: 225667 - DNA, 25 bp, Artificial
  Probe
caaactggaaattctcactctgtga

SEQ ID NO: 225668 - DNA, 25 bp, Artificial
  Probe
catgatcaagagcattgttggagac

SEQ ID NO: 225669 - DNA, 25 bp, Artificial
  Probe
atcaagagcattgttggagacagac

SEQ ID NO: 225670 - DNA, 25 bp, Artificial
  Probe
atatggcttcatatgacagaacaaa

SEQ ID NO: 225671 - DNA, 25 bp, Artificial
  Probe
cagattatttcatgatcaagagcat

SEQ ID NO: 225672 - DNA, 25 bp, Artificial
  Probe
gtttccctagtgtttgagattcttc

SEQ ID NO: 225673 - DNA, 25 bp, Artificial
  Probe
gagattcttcagttctgtgtgcttt

SEQ ID NO: 225674 - DNA, 25 bp, Artificial
  Probe
aatatggcttcatatgacagaacaa

SEQ ID NO: 225675 - DNA, 25 bp, Artificial
  Probe
ctgcatccggtcatagtaaactcct

SEQ ID NO: 225676 - DNA, 25 bp, Artificial
  Probe
agacagacaatcaacttgtgttttg

SEQ ID NO: 225677 - DNA, 25 bp, Artificial
  Probe
gttgtttccctagtgtttgagattc

SEQ ID NO: 225678 - DNA, 25 bp, Artificial
  Probe
acagacaatcaacttgtgttttgcc

SEQ ID NO: 225679 - DNA, 25 bp, Artificial
  Probe
aaaggtgtacttcacatgtttctgc

SEQ ID NO: 225680 - DNA, 25 bp, Artificial
  Probe
ttcgataatatgtcccaattgttgt

SEQ ID NO: 225681 - DNA, 25 bp, Artificial
  Probe
tccctagtgtttgagattcttcagt

SEQ ID NO: 225682 - DNA, 25 bp, Artificial
  Probe
tcactctgtgaaaaggtgtacttca

SEQ ID NO: 225683 - DNA, 25 bp, Artificial
  Probe
atggcttcatatgacagaacaaagc

SEQ ID NO: 225684 - DNA, 25 bp, Artificial
  Probe
gattcttcagttctgtgtgctttcg

SEQ ID NO: 225685 - DNA, 25 bp, Artificial
  Probe
agaacggacatgctagtgagagcca

SEQ ID NO: 225686 - DNA, 25 bp, Artificial
  Probe
gaacaaagcaagtcagtcaaaattg

SEQ ID NO: 225687 - DNA, 25 bp, Artificial
  Probe
cttcatatgacagaacaaagcaagt

SEQ ID NO: 225688 - DNA, 25 bp, Artificial
  Probe
ctagtgagagccacttcacacttct

SEQ ID NO: 225689 - DNA, 25 bp, Artificial
  Probe
acggacatgctagtgagagccactt

SEQ ID NO: 225690 - DNA, 25 bp, Artificial
  Probe
cacatgtttctgcacagaccacaag

SEQ ID NO: 225691 - DNA, 25 bp, Artificial
  Probe
ctttctttgctttgccatgacagga

SEQ ID NO: 225692 - DNA, 25 bp, Artificial
  Probe
gcttcatatgacagaacaaagcaag

SEQ ID NO: 225693 - DNA, 25 bp, Artificial
  Probe
gaaattctcactctgtgaaaaggtg

SEQ ID NO: 225694 - DNA, 25 bp, Artificial
  Probe
taagaacggacatgctagtgagagc

SEQ ID NO: 225695 - DNA, 25 bp, Artificial
  Probe
tttcgataatatgtcccaattgttg

SEQ ID NO: 225696 - DNA, 25 bp, Artificial
  Probe
ctttgctttgccatgacaggattag

SEQ ID NO: 225697 - DNA, 25 bp, Artificial
  Probe
agcagtgttgtttccctagtgtttg

SEQ ID NO: 225698 - DNA, 25 bp, Artificial
  Probe
gtacttcacatgtttctgcacagac

SEQ ID NO: 225699 - DNA, 25 bp, Artificial
  Probe
agaaccagattatttcatgatcaag

SEQ ID NO: 225700 - DNA, 25 bp, Artificial
  Probe
aaccagattatttcatgatcaagag

SEQ ID NO: 225701 - DNA, 25 bp, Artificial
  Probe
gacatgctagtgagagccacttcac

SEQ ID NO: 225702 - DNA, 25 bp, Artificial
  Probe
ccacacgtgttggtggacgtgcccg

SEQ ID NO: 225703 - DNA, 25 bp, Artificial
  Probe
acgtgttggtggacgtgcccgtgga

SEQ ID NO: 225704 - DNA, 25 bp, Artificial
  Probe
gggtatagactcacgggtgataccc

SEQ ID NO: 225705 - DNA, 25 bp, Artificial
  Probe
cgggtgatacccaggaactgtccta

SEQ ID NO: 225706 - DNA, 25 bp, Artificial
  Probe
cgtgcccgtggatggggagggcaag

SEQ ID NO: 225707 - DNA, 25 bp, Artificial
  Probe
gcccgtggatggggagggcaaggag

SEQ ID NO: 225708 - DNA, 25 bp, Artificial
  Probe
tgacaaaccacacgtgttggtggac

SEQ ID NO: 225709 - DNA, 25 bp, Artificial
  Probe
gtctttgattgggtatagactcacg

SEQ ID NO: 225710 - DNA, 25 bp, Artificial
  Probe
tgttggtggacgtgcccgtggatgg

SEQ ID NO: 225711 - DNA, 25 bp, Artificial
  Probe
caaaccacacgtgttggtggacgtg

SEQ ID NO: 225712 - DNA, 25 bp, Artificial
  Probe
tgatacccaggaactgtcctaaggc

SEQ ID NO: 225713 - DNA, 25 bp, Artificial
  Probe
ggtatagactcacgggtgataccca

SEQ ID NO: 225714 - DNA, 25 bp, Artificial
  Probe
atgacaaaccacacgtgttggtgga

SEQ ID NO: 225715 - DNA, 25 bp, Artificial
  Probe
attgggtatagactcacgggtgata

SEQ ID NO: 225716 - DNA, 25 bp, Artificial
  Probe
ggtgatacccaggaactgtcctaag

SEQ ID NO: 225717 - DNA, 25 bp, Artificial
  Probe
gtatagactcacgggtgatacccag

SEQ ID NO: 225718 - DNA, 25 bp, Artificial
  Probe
tatgacaaaccacacgtgttggtgg

SEQ ID NO: 225719 - DNA, 25 bp, Artificial
  Probe
actcacgggtgatacccaggaactg

SEQ ID NO: 225720 - DNA, 25 bp, Artificial
  Probe
gacaaaccacacgtgttggtggacg

SEQ ID NO: 225721 - DNA, 25 bp, Artificial
  Probe
ttgggtatagactcacgggtgatac

SEQ ID NO: 225722 - DNA, 25 bp, Artificial
  Probe
tagactcacgggtgatacccaggaa

SEQ ID NO: 225723 - DNA, 25 bp, Artificial
  Probe
cgtggatggggagggcaaggagtct

SEQ ID NO: 225724 - DNA, 25 bp, Artificial
  Probe
aaggagtctttgattgggtatagac

SEQ ID NO: 225725 - DNA, 25 bp, Artificial
  Probe
agactcacgggtgatacccaggaac

SEQ ID NO: 225726 - DNA, 25 bp, Artificial
  Probe
tgggtatagactcacgggtgatacc

SEQ ID NO: 225727 - DNA, 25 bp, Artificial
  Probe
aaccacacgtgttggtggacgtgcc

SEQ ID NO: 225728 - DNA, 25 bp, Artificial
  Probe
ggacgtgcccgtggatggggagggc

SEQ ID NO: 225729 - DNA, 25 bp, Artificial
  Probe
acaaaccacacgtgttggtggacgt

SEQ ID NO: 225730 - DNA, 25 bp, Artificial
  Probe
accacacgtgttggtggacgtgccc

SEQ ID NO: 225731 - DNA, 25 bp, Artificial
  Probe
cacgggtgatacccaggaactgtcc

SEQ ID NO: 225732 - DNA, 25 bp, Artificial
  Probe
gactcacgggtgatacccaggaact

SEQ ID NO: 225733 - DNA, 25 bp, Artificial
  Probe
tctttgattgggtatagactcacgg

SEQ ID NO: 225734 - DNA, 25 bp, Artificial
  Probe
cacacgtgttggtggacgtgcccgt

SEQ ID NO: 225735 - DNA, 25 bp, Artificial
  Probe
ctcacgggtgatacccaggaactgt

SEQ ID NO: 225736 - DNA, 25 bp, Artificial
  Probe
tggtggacgtgcccgtggatgggga

SEQ ID NO: 225737 - DNA, 25 bp, Artificial
  Probe
aaaccacacgtgttggtggacgtgc

SEQ ID NO: 225738 - DNA, 25 bp, Artificial
  Probe
ttatgacaaaccacacgtgttggtg

SEQ ID NO: 225739 - DNA, 25 bp, Artificial
  Probe
atagactcacgggtgatacccagga

SEQ ID NO: 225740 - DNA, 25 bp, Artificial
  Probe
gggtgatacccaggaactgtcctaa

SEQ ID NO: 225741 - DNA, 25 bp, Artificial
  Probe
tgcccgtggatggggagggcaagga

SEQ ID NO: 225742 - DNA, 25 bp, Artificial
  Probe
gagtctttgattgggtatagactca

SEQ ID NO: 225743 - DNA, 25 bp, Artificial
  Probe
gtgatacccaggaactgtcctaagg

SEQ ID NO: 225744 - DNA, 25 bp, Artificial
  Probe
gcaaggagtctttgattgggtatag

SEQ ID NO: 225745 - DNA, 25 bp, Artificial
  Probe
acacgtgttggtggacgtgcccgtg

SEQ ID NO: 225746 - DNA, 25 bp, Artificial
  Probe
tcacgggtgatacccaggaactgtc

SEQ ID NO: 225747 - DNA, 25 bp, Artificial
  Probe
gtgttggtggacgtgcccgtggatg

SEQ ID NO: 225748 - DNA, 25 bp, Artificial
  Probe
agctcctaaatgtgatcaactatag

SEQ ID NO: 225749 - DNA, 25 bp, Artificial
  Probe
aggagccaggattccaaagctccta

SEQ ID NO: 225750 - DNA, 25 bp, Artificial
  Probe
atgtgatcaactatagactttgccc

SEQ ID NO: 225751 - DNA, 25 bp, Artificial
  Probe
aagcatcgtctcagagctacaggat

SEQ ID NO: 225752 - DNA, 25 bp, Artificial
  Probe
tccaggagccaggattccaaagctc

SEQ ID NO: 225753 - DNA, 25 bp, Artificial
  Probe
tcgtctcagagctacaggatgacct

SEQ ID NO: 225754 - DNA, 25 bp, Artificial
  Probe
tccaaatatctaccaaggagtagcc

SEQ ID NO: 225755 - DNA, 25 bp, Artificial
  Probe
gttgtacagctcatttccctgcaac

SEQ ID NO: 225756 - DNA, 25 bp, Artificial
  Probe
attccaaatatctaccaaggagtag

SEQ ID NO: 225757 - DNA, 25 bp, Artificial
  Probe
tacaggatgacctggaacatactct

SEQ ID NO: 225758 - DNA, 25 bp, Artificial
  Probe
gatggttgtacagctcatttccctg

SEQ ID NO: 225759 - DNA, 25 bp, Artificial
  Probe
gaccagtccctcagctcaggggctt

SEQ ID NO: 225760 - DNA, 25 bp, Artificial
  Probe
gtacagctcatttccctgcaacaag

SEQ ID NO: 225761 - DNA, 25 bp, Artificial
  Probe
aggattccaaagctcctaaatgtga

SEQ ID NO: 225762 - DNA, 25 bp, Artificial
  Probe
agcatcgtctcagagctacaggatg

SEQ ID NO: 225763 - DNA, 25 bp, Artificial
  Probe
aagacatgtgctatcacgccatatt

SEQ ID NO: 225764 - DNA, 25 bp, Artificial
  Probe
gctcatttccctgcaacaagaccag

SEQ ID NO: 225765 - DNA, 25 bp, Artificial
  Probe
ctcagagctacaggatgacctggaa

SEQ ID NO: 225766 - DNA, 25 bp, Artificial
  Probe
tcaggggcttcctccatcaccagtt

SEQ ID NO: 225767 - DNA, 25 bp, Artificial
  Probe
gctacaggatgacctggaacatact

SEQ ID NO: 225768 - DNA, 25 bp, Artificial
  Probe
agacatgtgctatcacgccatattt

SEQ ID NO: 225769 - DNA, 25 bp, Artificial
  Probe
gagccaggattccaaagctcctaaa

SEQ ID NO: 225770 - DNA, 25 bp, Artificial
  Probe
ccaggagccaggattccaaagctcc

SEQ ID NO: 225771 - DNA, 25 bp, Artificial
  Probe
ccagttccatccaggagccaggatt

SEQ ID NO: 225772 - DNA, 25 bp, Artificial
  Probe
tcagagctacaggatgacctggaac

SEQ ID NO: 225773 - DNA, 25 bp, Artificial
  Probe
aattaacaagacatgtgctatcacg

SEQ ID NO: 225774 - DNA, 25 bp, Artificial
  Probe
agagctacaggatgacctggaacat

SEQ ID NO: 225775 - DNA, 25 bp, Artificial
  Probe
aatcaagcatcgtctcagagctaca

SEQ ID NO: 225776 - DNA, 25 bp, Artificial
  Probe
atggttgtacagctcatttccctgc

SEQ ID NO: 225777 - DNA, 25 bp, Artificial
  Probe
attaacaagacatgtgctatcacgc

SEQ ID NO: 225778 - DNA, 25 bp, Artificial
  Probe
taacaagacatgtgctatcacgcca

SEQ ID NO: 225779 - DNA, 25 bp, Artificial
  Probe
gagctacaggatgacctggaacata

SEQ ID NO: 225780 - DNA, 25 bp, Artificial
  Probe
gctcctaaatgtgatcaactataga

SEQ ID NO: 225781 - DNA, 25 bp, Artificial
  Probe
agatggttgtacagctcatttccct

SEQ ID NO: 225782 - DNA, 25 bp, Artificial
  Probe
tcaagcatcgtctcagagctacagg

SEQ ID NO: 225783 - DNA, 25 bp, Artificial
  Probe
gattccaaagctcctaaatgtgatc

SEQ ID NO: 225784 - DNA, 25 bp, Artificial
  Probe
gtctcagagctacaggatgacctgg

SEQ ID NO: 225785 - DNA, 25 bp, Artificial
  Probe
atcaccagttccatccaggagccag

SEQ ID NO: 225786 - DNA, 25 bp, Artificial
  Probe
cgtctcagagctacaggatgacctg

SEQ ID NO: 225787 - DNA, 25 bp, Artificial
  Probe
catcgtctcagagctacaggatgac

SEQ ID NO: 225788 - DNA, 25 bp, Artificial
  Probe
acaagacatgtgctatcacgccata

SEQ ID NO: 225789 - DNA, 25 bp, Artificial
  Probe
cagttccatccaggagccaggattc

SEQ ID NO: 225790 - DNA, 25 bp, Artificial
  Probe
tgtgatcaactatagactttgcccc

SEQ ID NO: 225791 - DNA, 25 bp, Artificial
  Probe
gccaggattccaaagctcctaaatg

SEQ ID NO: 225792 - DNA, 25 bp, Artificial
  Probe
gttccatccaggagccaggattcca

SEQ ID NO: 225793 - DNA, 25 bp, Artificial
  Probe
gtgatcaactatagactttgcccct

SEQ ID NO: 225794 - DNA, 25 bp, Artificial
  Probe
agaatgacccagagggaccccaatg

SEQ ID NO: 225795 - DNA, 25 bp, Artificial
  Probe
tgacccagagggaccccaatgtcct

SEQ ID NO: 225796 - DNA, 25 bp, Artificial
  Probe
agactgagtggctccctgatcatcc

SEQ ID NO: 225797 - DNA, 25 bp, Artificial
  Probe
catccatctggaggtttgaagggaa

SEQ ID NO: 225798 - DNA, 25 bp, Artificial
  Probe
ctgactcaaaagcacaagatccttg

SEQ ID NO: 225799 - DNA, 25 bp, Artificial
  Probe
gcctctgactcaaaagcacaagatc

SEQ ID NO: 225800 - DNA, 25 bp, Artificial
  Probe
tgcacacttgggtatgcaacaggaa

SEQ ID NO: 225801 - DNA, 25 bp, Artificial
  Probe
gatgagttagccacagtgaacaagg

SEQ ID NO: 225802 - DNA, 25 bp, Artificial
  Probe
gtcccttcactgcagacaatcttag

SEQ ID NO: 225803 - DNA, 25 bp, Artificial
  Probe
aggctccacctcaggcttttaatgc

SEQ ID NO: 225804 - DNA, 25 bp, Artificial
  Probe
accccaatgtcctggctggttcctt

SEQ ID NO: 225805 - DNA, 25 bp, Artificial
  Probe
agccacagtgaacaaggctccacct

SEQ ID NO: 225806 - DNA, 25 bp, Artificial
  Probe
tgcactaagtcaaggcccattctcc

SEQ ID NO: 225807 - DNA, 25 bp, Artificial
  Probe
agagtgatctgagttgcactaagtc

SEQ ID NO: 225808 - DNA, 25 bp, Artificial
  Probe
gtaggagtctgtcttcagagtgatc

SEQ ID NO: 225809 - DNA, 25 bp, Artificial
  Probe
tcctcttgcacacttgggtatgcaa

SEQ ID NO: 225810 - DNA, 25 bp, Artificial
  Probe
cagcttctgttatggacttggagaa

SEQ ID NO: 225811 - DNA, 25 bp, Artificial
  Probe
tgatcctactctacctaaggagaga

SEQ ID NO: 225812 - DNA, 25 bp, Artificial
  Probe
tgtgtttgatcctactctacctaag

SEQ ID NO: 225813 - DNA, 25 bp, Artificial
  Probe
acttggagaatgacccagagggacc

SEQ ID NO: 225814 - DNA, 25 bp, Artificial
  Probe
ccacctcaggcttttaatgcagctt

SEQ ID NO: 225815 - DNA, 25 bp, Artificial
  Probe
tctgttatggacttggagaatgacc

SEQ ID NO: 225816 - DNA, 25 bp, Artificial
  Probe
tccctgatcatccatctggaggttt

SEQ ID NO: 225817 - DNA, 25 bp, Artificial
  Probe
cttagccctagagaggtgttgatag

SEQ ID NO: 225818 - DNA, 25 bp, Artificial
  Probe
tactctacctaaggagagataagac

SEQ ID NO: 225819 - DNA, 25 bp, Artificial
  Probe
caggcttttaatgcagcttataatc

SEQ ID NO: 225820 - DNA, 25 bp, Artificial
  Probe
agtgaacaaggctccacctcaggct

SEQ ID NO: 225821 - DNA, 25 bp, Artificial
  Probe
gagaatgacccagagggaccccaat

SEQ ID NO: 225822 - DNA, 25 bp, Artificial
  Probe
tcccttcactgcagacaatcttagg

SEQ ID NO: 225823 - DNA, 25 bp, Artificial
  Probe
cttgggtatgcaacaggaagggaac

SEQ ID NO: 225824 - DNA, 25 bp, Artificial
  Probe
ctcttgcacacttgggtatgcaaca

SEQ ID NO: 225825 - DNA, 25 bp, Artificial
  Probe
tatagtactctgctgagaccctgag

SEQ ID NO: 225826 - DNA, 25 bp, Artificial
  Probe
caagcctctgactcaaaagcacaag

SEQ ID NO: 225827 - DNA, 25 bp, Artificial
  Probe
tccacctcaggcttttaatgcagct

SEQ ID NO: 225828 - DNA, 25 bp, Artificial
  Probe
tcaatcctgggctgctacagcttct

SEQ ID NO: 225829 - DNA, 25 bp, Artificial
  Probe
gagaaaactgcctgtcccttcactg

SEQ ID NO: 225830 - DNA, 25 bp, Artificial
  Probe
tactctgctgagaccctgagacagc

SEQ ID NO: 225831 - DNA, 25 bp, Artificial
  Probe
gttccttagccctagagaggtgttg

SEQ ID NO: 225832 - DNA, 25 bp, Artificial
  Probe
ggctggttccttagccctagagagg

SEQ ID NO: 225833 - DNA, 25 bp, Artificial
  Probe
tgttatggacttggagaatgaccca

SEQ ID NO: 225834 - DNA, 25 bp, Artificial
  Probe
tgcctgtcccttcactgcagacaat

SEQ ID NO: 225835 - DNA, 25 bp, Artificial
  Probe
cctgagacagctagatgagttagcc

SEQ ID NO: 225836 - DNA, 25 bp, Artificial
  Probe
gcacaagatccttgcatgcacacct

SEQ ID NO: 225837 - DNA, 25 bp, Artificial
  Probe
tgagtggctccctgatcatccatct

SEQ ID NO: 225838 - DNA, 25 bp, Artificial
  Probe
agtggctccctgatcatccatctgg

SEQ ID NO: 225839 - DNA, 25 bp, Artificial
  Probe
tctacctaaggagagataagacaga

SEQ ID NO: 225840 - DNA, 25 bp, Artificial
  Probe
tgcgacaccagtaccgcaggagctg

SEQ ID NO: 225841 - DNA, 25 bp, Artificial
  Probe
catcccagtgtgagggaacgatgtc

SEQ ID NO: 225842 - DNA, 25 bp, Artificial
  Probe
tcagcaccttcatagggaccttcct

SEQ ID NO: 225843 - DNA, 25 bp, Artificial
  Probe
cgtgccaccaagaagatcagcacct

SEQ ID NO: 225844 - DNA, 25 bp, Artificial
  Probe
aacgatgtctggaggaacagaagcg

SEQ ID NO: 225845 - DNA, 25 bp, Artificial
  Probe
aaggtggcccgtttccactgcaagc

SEQ ID NO: 225846 - DNA, 25 bp, Artificial
  Probe
ggatcttcaacagacgctccattca

SEQ ID NO: 225847 - DNA, 25 bp, Artificial
  Probe
gccaccattgtctggcgattgacat

SEQ ID NO: 225848 - DNA, 25 bp, Artificial
  Probe
tgaccccttcgtgtactccttgctg

SEQ ID NO: 225849 - DNA, 25 bp, Artificial
  Probe
gacgctccattcactctgtgggcct

SEQ ID NO: 225850 - DNA, 25 bp, Artificial
  Probe
aggctgcttctgaccccttcgtgta

SEQ ID NO: 225851 - DNA, 25 bp, Artificial
  Probe
tacagcaaggctgcttctgacccct

SEQ ID NO: 225852 - DNA, 25 bp, Artificial
  Probe
ggtgactctcacagccagaacattc

SEQ ID NO: 225853 - DNA, 25 bp, Artificial
  Probe
ctcctgttggggagttcagaatgag

SEQ ID NO: 225854 - DNA, 25 bp, Artificial
  Probe
acaggaactgccaccattgtctggc

SEQ ID NO: 225855 - DNA, 25 bp, Artificial
  Probe
cattgtctggcgattgacatgatgc

SEQ ID NO: 225856 - DNA, 25 bp, Artificial
  Probe
gactcctgggtggacaggaactgcc

SEQ ID NO: 225857 - DNA, 25 bp, Artificial
  Probe
tgcttggcctacagcaaggctgctt

SEQ ID NO: 225858 - DNA, 25 bp, Artificial
  Probe
tgtccaagtgcttggcctacagcaa

SEQ ID NO: 225859 - DNA, 25 bp, Artificial
  Probe
ccttcgtgtactccttgctgcgaca

SEQ ID NO: 225860 - DNA, 25 bp, Artificial
  Probe
cagcacccattgactcacactgggg

SEQ ID NO: 225861 - DNA, 25 bp, Artificial
  Probe
acagcacccattgactcacactggg

SEQ ID NO: 225862 - DNA, 25 bp, Artificial
  Probe
ggtgtgctgtccaagtgcttggcct

SEQ ID NO: 225863 - DNA, 25 bp, Artificial
  Probe
tcctgggtggacaggaactgccacc

SEQ ID NO: 225864 - DNA, 25 bp, Artificial
  Probe
gaacgatgtctggaggaacagaagc

SEQ ID NO: 225865 - DNA, 25 bp, Artificial
  Probe
cggcagcgtgccaccaagaagatca

SEQ ID NO: 225866 - DNA, 25 bp, Artificial
  Probe
tgtactccttgctgcgacaccagta

SEQ ID NO: 225867 - DNA, 25 bp, Artificial
  Probe
gccagtgtcggaatgaaggacagct

SEQ ID NO: 225868 - DNA, 25 bp, Artificial
  Probe
ttctgaccccttcgtgtactccttg

SEQ ID NO: 225869 - DNA, 25 bp, Artificial
  Probe
ccatgcagacgctcgtgctgttagt

SEQ ID NO: 225870 - DNA, 25 bp, Artificial
  Probe
ttcagaatgaggtggccagagcaga

SEQ ID NO: 225871 - DNA, 25 bp, Artificial
  Probe
agttcagaatgaggtggccagagca

SEQ ID NO: 225872 - DNA, 25 bp, Artificial
  Probe
cactgcaagcgcatcgacgtgatca

SEQ ID NO: 225873 - DNA, 25 bp, Artificial
  Probe
tctcacagccagaacattctgccag

SEQ ID NO: 225874 - DNA, 25 bp, Artificial
  Probe
caacagacgctccattcactctgtg

SEQ ID NO: 225875 - DNA, 25 bp, Artificial
  Probe
caccagtaccgcaggagctgcaagg

SEQ ID NO: 225876 - DNA, 25 bp, Artificial
  Probe
gtttccactgcaagcgcatcgacgt

SEQ ID NO: 225877 - DNA, 25 bp, Artificial
  Probe
aggtgctcaaggtggcccgtttcca

SEQ ID NO: 225878 - DNA, 25 bp, Artificial
  Probe
ccattcactctgtgggcctcacagg

SEQ ID NO: 225879 - DNA, 25 bp, Artificial
  Probe
tggtggaactcttctccacagcacc

SEQ ID NO: 225880 - DNA, 25 bp, Artificial
  Probe
actctgtgggcctcacaggtgactc

SEQ ID NO: 225881 - DNA, 25 bp, Artificial
  Probe
ccaagaagatcagcaccttcatagg

SEQ ID NO: 225882 - DNA, 25 bp, Artificial
  Probe
aatgaaggacagctctcctgttggg

SEQ ID NO: 225883 - DNA, 25 bp, Artificial
  Probe
cttgctgcgacaccagtaccgcagg

SEQ ID NO: 225884 - DNA, 25 bp, Artificial
  Probe
tggcctacagcaaggctgcttctga

SEQ ID NO: 225885 - DNA, 25 bp, Artificial
  Probe
tgtgctgtccaagtgcttggcctac

SEQ ID NO: 225886 - DNA, 25 bp, Artificial
  Probe
ggagccctggggagtagcaaccttc

SEQ ID NO: 225887 - DNA, 25 bp, Artificial
  Probe
gctcagagaccctttcctagccgtt

SEQ ID NO: 225888 - DNA, 25 bp, Artificial
  Probe
ttgggcagaggctcctttttccagt

SEQ ID NO: 225889 - DNA, 25 bp, Artificial
  Probe
gggcgctcccggacagattccttgc

SEQ ID NO: 225890 - DNA, 25 bp, Artificial
  Probe
tcaaggttgggcagaggctcctttt

SEQ ID NO: 225891 - DNA, 25 bp, Artificial
  Probe
agaccctttcctagccgttcctgat

SEQ ID NO: 225892 - DNA, 25 bp, Artificial
  Probe
gtagcaaccttccaccagagcaggt

SEQ ID NO: 225893 - DNA, 25 bp, Artificial
  Probe
accttccaccagagcaggtccgagg

SEQ ID NO: 225894 - DNA, 25 bp, Artificial
  Probe
ctgtagcctgacctgccaatgctgc

SEQ ID NO: 225895 - DNA, 25 bp, Artificial
  Probe
ccaatagcatatggtacgatattgc

SEQ ID NO: 225896 - DNA, 25 bp, Artificial
  Probe
agagaccctttcctagccgttcctg

SEQ ID NO: 225897 - DNA, 25 bp, Artificial
  Probe
aaagcagtgattacttcaaggtctg

SEQ ID NO: 225898 - DNA, 25 bp, Artificial
  Probe
caccagagcaggtccgaggaatgct

SEQ ID NO: 225899 - DNA, 25 bp, Artificial
  Probe
gttcctgatctctgcttgcctccaa

SEQ ID NO: 225900 - DNA, 25 bp, Artificial
  Probe
agccgttcctgatctctgcttgcct

SEQ ID NO: 225901 - DNA, 25 bp, Artificial
  Probe
caaggtctgtattcggtttgctttg

SEQ ID NO: 225902 - DNA, 25 bp, Artificial
  Probe
tccgaggaatgctgcagggcttgtc

SEQ ID NO: 225903 - DNA, 25 bp, Artificial
  Probe
ggagcttctcgcttccctggggcct

SEQ ID NO: 225904 - DNA, 25 bp, Artificial
  Probe
agccctggggagtagcaaccttcca

SEQ ID NO: 225905 - DNA, 25 bp, Artificial
  Probe
ctgatctctgcttgcctccaaaagc

SEQ ID NO: 225906 - DNA, 25 bp, Artificial
  Probe
ctttcctagccgttcctgatctctg

SEQ ID NO: 225907 - DNA, 25 bp, Artificial
  Probe
gcttgcctccaaaagcatgcttcaa

SEQ ID NO: 225908 - DNA, 25 bp, Artificial
  Probe
ctttggagcttctcgcttccctggg

SEQ ID NO: 225909 - DNA, 25 bp, Artificial
  Probe
cgaggaatgctgcagggcttgtcct

SEQ ID NO: 225910 - DNA, 25 bp, Artificial
  Probe
gggagtagcaaccttccaccagagc

SEQ ID NO: 225911 - DNA, 25 bp, Artificial
  Probe
ctgtgctcagagaccctttcctagc

SEQ ID NO: 225912 - DNA, 25 bp, Artificial
  Probe
ttttccagttcagtgtcaggggtag

SEQ ID NO: 225913 - DNA, 25 bp, Artificial
  Probe
gcctgacctgccaatgctgcagtgg

SEQ ID NO: 225914 - DNA, 25 bp, Artificial
  Probe
gtctgtattcggtttgctttggagc

SEQ ID NO: 225915 - DNA, 25 bp, Artificial
  Probe
tcagctcaaggttgggcagaggctc

SEQ ID NO: 225916 - DNA, 25 bp, Artificial
  Probe
ggtacgatattgctacttatattca

SEQ ID NO: 225917 - DNA, 25 bp, Artificial
  Probe
acccctggggcctgtgctcagagac

SEQ ID NO: 225918 - DNA, 25 bp, Artificial
  Probe
agacactccaccaatagcatatggt

SEQ ID NO: 225919 - DNA, 25 bp, Artificial
  Probe
gcatgcttcaactggcttccgcttc

SEQ ID NO: 225920 - DNA, 25 bp, Artificial
  Probe
tggggcctgtgctcagagacccttt

SEQ ID NO: 225921 - DNA, 25 bp, Artificial
  Probe
gctcccggacagattccttgccgag

SEQ ID NO: 225922 - DNA, 25 bp, Artificial
  Probe
tggtacgatattgctacttatattc

SEQ ID NO: 225923 - DNA, 25 bp, Artificial
  Probe
ctgagatttgccagcacaaagacac

SEQ ID NO: 225924 - DNA, 25 bp, Artificial
  Probe
ggacagattccttgccgagagtcac

SEQ ID NO: 225925 - DNA, 25 bp, Artificial
  Probe
gattccttgccgagagtcactcagc

SEQ ID NO: 225926 - DNA, 25 bp, Artificial
  Probe
tctctgcttgcctccaaaagcatgc

SEQ ID NO: 225927 - DNA, 25 bp, Artificial
  Probe
catgctgagatttgccagcacaaag

SEQ ID NO: 225928 - DNA, 25 bp, Artificial
  Probe
acctctgtagcctgacctgccaatg

SEQ ID NO: 225929 - DNA, 25 bp, Artificial
  Probe
gatttgccagcacaaagacactcca

SEQ ID NO: 225930 - DNA, 25 bp, Artificial
  Probe
cggtttgctttggagcttctcgctt

SEQ ID NO: 225931 - DNA, 25 bp, Artificial
  Probe
caaggttgggcagaggctccttttt

SEQ ID NO: 225932 - DNA, 25 bp, Artificial
  Probe
gataagtcacagttacccaaggatc

SEQ ID NO: 225933 - DNA, 25 bp, Artificial
  Probe
tgctgtgaggactgaaggagtcaac

SEQ ID NO: 225934 - DNA, 25 bp, Artificial
  Probe
ccccagatatgcaatcatacaggaa

SEQ ID NO: 225935 - DNA, 25 bp, Artificial
  Probe
ccagtctgcaaagcagagtgactca

SEQ ID NO: 225936 - DNA, 25 bp, Artificial
  Probe
ttctgtctgaaactggagtcaccca

SEQ ID NO: 225937 - DNA, 25 bp, Artificial
  Probe
tctgtctgaaactggagtcacccag

SEQ ID NO: 225938 - DNA, 25 bp, Artificial
  Probe
gtcccccagatatgcaatcatacag

SEQ ID NO: 225939 - DNA, 25 bp, Artificial
  Probe
ctttactggtatcagcaacacagag

SEQ ID NO: 225940 - DNA, 25 bp, Artificial
  Probe
ccagatatgcaatcatacaggaaag

SEQ ID NO: 225941 - DNA, 25 bp, Artificial
  Probe
agatccagtctgcaaagcagagtga

SEQ ID NO: 225942 - DNA, 25 bp, Artificial
  Probe
tccagtctgcaaagcagagtgactc

SEQ ID NO: 225943 - DNA, 25 bp, Artificial
  Probe
aaagcagagtgactcagccacctat

SEQ ID NO: 225944 - DNA, 25 bp, Artificial
  Probe
acagttctgtctgaaactggagtca

SEQ ID NO: 225945 - DNA, 25 bp, Artificial
  Probe
gtctgcaaagcagagtgactcagcc

SEQ ID NO: 225946 - DNA, 25 bp, Artificial
  Probe
ccggcttctagtttactttcagaat

SEQ ID NO: 225947 - DNA, 25 bp, Artificial
  Probe
tatgcaatcatacaggaaagtcaga

SEQ ID NO: 225948 - DNA, 25 bp, Artificial
  Probe
cagttctgtctgaaactggagtcac

SEQ ID NO: 225949 - DNA, 25 bp, Artificial
  Probe
tcaagatccagtctgcaaagcagag

SEQ ID NO: 225950 - DNA, 25 bp, Artificial
  Probe
ctctcaagatccagtctgcaaagca

SEQ ID NO: 225951 - DNA, 25 bp, Artificial
  Probe
gatccagtctgcaaagcagagtgac

SEQ ID NO: 225952 - DNA, 25 bp, Artificial
  Probe
gccccggcttctagtttactttcag

SEQ ID NO: 225953 - DNA, 25 bp, Artificial
  Probe
tttccacagttctgtctgaaactgg

SEQ ID NO: 225954 - DNA, 25 bp, Artificial
  Probe
aggagtcaactccactctcaagatc

SEQ ID NO: 225955 - DNA, 25 bp, Artificial
  Probe
cagtctgcaaagcagagtgactcag

SEQ ID NO: 225956 - DNA, 25 bp, Artificial
  Probe
ttccacagttctgtctgaaactgga

SEQ ID NO: 225957 - DNA, 25 bp, Artificial
  Probe
ataagtcacagttacccaaggatcg

SEQ ID NO: 225958 - DNA, 25 bp, Artificial
  Probe
tgtctgaaactggagtcacccagtc

SEQ ID NO: 225959 - DNA, 25 bp, Artificial
  Probe
tctgaaactggagtcacccagtccc

SEQ ID NO: 225960 - DNA, 25 bp, Artificial
  Probe
ccacagttctgtctgaaactggagt

SEQ ID NO: 225961 - DNA, 25 bp, Artificial
  Probe
gtctgaaactggagtcacccagtcc

SEQ ID NO: 225962 - DNA, 25 bp, Artificial
  Probe
gcagagtgactcagccacctatctc

SEQ ID NO: 225963 - DNA, 25 bp, Artificial
  Probe
gatatgcaatcatacaggaaagtca

SEQ ID NO: 225964 - DNA, 25 bp, Artificial
  Probe
tcccccagatatgcaatcatacagg

SEQ ID NO: 225965 - DNA, 25 bp, Artificial
  Probe
taagtcacagttacccaaggatcgt

SEQ ID NO: 225966 - DNA, 25 bp, Artificial
  Probe
tcacagttacccaaggatcgttttt

SEQ ID NO: 225967 - DNA, 25 bp, Artificial
  Probe
aatcatacaggaaagtcagactgtt

SEQ ID NO: 225968 - DNA, 25 bp, Artificial
  Probe
caatcatacaggaaagtcagactgt

SEQ ID NO: 225969 - DNA, 25 bp, Artificial
  Probe
agtctgcaaagcagagtgactcagc

SEQ ID NO: 225970 - DNA, 25 bp, Artificial
  Probe
agataagtcacagttacccaaggat

SEQ ID NO: 225971 - DNA, 25 bp, Artificial
  Probe
aaggagtcaactccactctcaagat

SEQ ID NO: 225972 - DNA, 25 bp, Artificial
  Probe
cagatatgcaatcatacaggaaagt

SEQ ID NO: 225973 - DNA, 25 bp, Artificial
  Probe
agttctgtctgaaactggagtcacc

SEQ ID NO: 225974 - DNA, 25 bp, Artificial
  Probe
ctcaagatccagtctgcaaagcaga

SEQ ID NO: 225975 - DNA, 25 bp, Artificial
  Probe
ggagtcaactccactctcaagatcc

SEQ ID NO: 225976 - DNA, 25 bp, Artificial
  Probe
gaaggagtcaactccactctcaaga

SEQ ID NO: 225977 - DNA, 25 bp, Artificial
  Probe
tgcaatcatacaggaaagtcagact

SEQ ID NO: 225978 - DNA, 25 bp, Artificial
  Probe
ctcatgtttctgttgtttacagatg

SEQ ID NO: 225979 - DNA, 25 bp, Artificial
  Probe
cttgtctttagtcatgattgtcctc

SEQ ID NO: 225980 - DNA, 25 bp, Artificial
  Probe
gtctccttccataggctaagactca

SEQ ID NO: 225981 - DNA, 25 bp, Artificial
  Probe
caaggttctctgatggtgtttaatc

SEQ ID NO: 225982 - DNA, 25 bp, Artificial
  Probe
gaagtggtaacctgacctctatgga

SEQ ID NO: 225983 - DNA, 25 bp, Artificial
  Probe
atcctttaagggacgccatgtagat

SEQ ID NO: 225984 - DNA, 25 bp, Artificial
  Probe
ggctaagactcaaggcctcttgtct

SEQ ID NO: 225985 - DNA, 25 bp, Artificial
  Probe
ggtaaatcctttaagggacgccatg

SEQ ID NO: 225986 - DNA, 25 bp, Artificial
  Probe
aagccaccttcgagattgcccagac

SEQ ID NO: 225987 - DNA, 25 bp, Artificial
  Probe
gtaacctgacctctatggaacccat

SEQ ID NO: 225988 - DNA, 25 bp, Artificial
  Probe
tgatggtgtttaatccagtgccctg

SEQ ID NO: 225989 - DNA, 25 bp, Artificial
  Probe
ccttgtataggctggtgagcacaca

SEQ ID NO: 225990 - DNA, 25 bp, Artificial
  Probe
cctcttgtctttagtcatgattgtc

SEQ ID NO: 225991 - DNA, 25 bp, Artificial
  Probe
ccatcaaggttctctgatggtgttt

SEQ ID NO: 225992 - DNA, 25 bp, Artificial
  Probe
aatccagtgccctgtgtgattaatg

SEQ ID NO: 225993 - DNA, 25 bp, Artificial
  Probe
ggaacccatcaaggttctctgatgg

SEQ ID NO: 225994 - DNA, 25 bp, Artificial
  Probe
tcgagattgcccagacccttgtata

SEQ ID NO: 225995 - DNA, 25 bp, Artificial
  Probe
tctatggaacccatcaaggttctct

SEQ ID NO: 225996 - DNA, 25 bp, Artificial
  Probe
gtttggtttgatcaccatcatcact

SEQ ID NO: 225997 - DNA, 25 bp, Artificial
  Probe
tgtttaatccagtgccctgtgtgat

SEQ ID NO: 225998 - DNA, 25 bp, Artificial
  Probe
gaaattgccagttcatttcacttcg

SEQ ID NO: 225999 - DNA, 25 bp, Artificial
  Probe
ataggctggtgagcacacatcagcc

SEQ ID NO: 226000 - DNA, 25 bp, Artificial
  Probe
tgagcacacatcagccagcatacag

SEQ ID NO: 226001 - DNA, 25 bp, Artificial
  Probe
gtcctcatgtttctgttgtttacag

SEQ ID NO: 226002 - DNA, 25 bp, Artificial
  Probe
tctgatggtgtttaatccagtgccc

SEQ ID NO: 226003 - DNA, 25 bp, Artificial
  Probe
catcaaggttctctgatggtgttta

SEQ ID NO: 226004 - DNA, 25 bp, Artificial
  Probe
tgtttgtttggtttgatcaccatca

SEQ ID NO: 226005 - DNA, 25 bp, Artificial
  Probe
tgcccagacccttgtataggctggt

SEQ ID NO: 226006 - DNA, 25 bp, Artificial
  Probe
cctgacctctatggaacccatcaag

SEQ ID NO: 226007 - DNA, 25 bp, Artificial
  Probe
tggtctccttccataggctaagact

SEQ ID NO: 226008 - DNA, 25 bp, Artificial
  Probe
gtaaatcctttaagggacgccatgt

SEQ ID NO: 226009 - DNA, 25 bp, Artificial
  Probe
agactcaaggcctcttgtctttagt

SEQ ID NO: 226010 - DNA, 25 bp, Artificial
  Probe
cgacactgaggaagtggtaacctga

SEQ ID NO: 226011 - DNA, 25 bp, Artificial
  Probe
attttaatgggcagatcaatagacc

SEQ ID NO: 226012 - DNA, 25 bp, Artificial
  Probe
tggaacccatcaaggttctctgatg

SEQ ID NO: 226013 - DNA, 25 bp, Artificial
  Probe
tggtgtttaatccagtgccctgtgt

SEQ ID NO: 226014 - DNA, 25 bp, Artificial
  Probe
catgattgtcctcatgtttctgttg

SEQ ID NO: 226015 - DNA, 25 bp, Artificial
  Probe
ccagacccttgtataggctggtgag

SEQ ID NO: 226016 - DNA, 25 bp, Artificial
  Probe
ccttccataggctaagactcaaggc

SEQ ID NO: 226017 - DNA, 25 bp, Artificial
  Probe
agacccttgtataggctggtgagca

SEQ ID NO: 226018 - DNA, 25 bp, Artificial
  Probe
ccagtgccctgtgtgattaatgtaa

SEQ ID NO: 226019 - DNA, 25 bp, Artificial
  Probe
ttgcccagacccttgtataggctgg

SEQ ID NO: 226020 - DNA, 25 bp, Artificial
  Probe
ctgacctctatggaacccatcaagg

SEQ ID NO: 226021 - DNA, 25 bp, Artificial
  Probe
gccagttcatttcacttcgacactg

SEQ ID NO: 226022 - DNA, 25 bp, Artificial
  Probe
aggctggtgagcacacatcagccag

SEQ ID NO: 226023 - DNA, 25 bp, Artificial
  Probe
gagattgcccagacccttgtatagg

SEQ ID NO: 226024 - DNA, 25 bp, Artificial
  Probe
gcaaccctatgctatagagatctac

SEQ ID NO: 226025 - DNA, 25 bp, Artificial
  Probe
agccaaagcttggttttatacaagt

SEQ ID NO: 226026 - DNA, 25 bp, Artificial
  Probe
attgatatgcactgggatgaggcac

SEQ ID NO: 226027 - DNA, 25 bp, Artificial
  Probe
cctgggttgcagaggctgctgcctt

SEQ ID NO: 226028 - DNA, 25 bp, Artificial
  Probe
tcttgtctgtgtaggcccaatctgg

SEQ ID NO: 226029 - DNA, 25 bp, Artificial
  Probe
aagatgcagcccatgcaggcatggt

SEQ ID NO: 226030 - DNA, 25 bp, Artificial
  Probe
gagggtcttacttgccaaagcgctt

SEQ ID NO: 226031 - DNA, 25 bp, Artificial
  Probe
tcagagcagaggacccttctctggt

SEQ ID NO: 226032 - DNA, 25 bp, Artificial
  Probe
gtggtgatcagagcagaggaccctt

SEQ ID NO: 226033 - DNA, 25 bp, Artificial
  Probe
tgatcagagcagaggacccttctct

SEQ ID NO: 226034 - DNA, 25 bp, Artificial
  Probe
gcttaaaagatgcagcccatgcagg

SEQ ID NO: 226035 - DNA, 25 bp, Artificial
  Probe
ggaaaactagttcctgggttgcaga

SEQ ID NO: 226036 - DNA, 25 bp, Artificial
  Probe
cccatgcaggcatggtggattggat

SEQ ID NO: 226037 - DNA, 25 bp, Artificial
  Probe
ttgcagaggctgctgcctttccttc

SEQ ID NO: 226038 - DNA, 25 bp, Artificial
  Probe
ggtggcagagcaaccctatgctata

SEQ ID NO: 226039 - DNA, 25 bp, Artificial
  Probe
gtaggcccaatctggctcaattgac

SEQ ID NO: 226040 - DNA, 25 bp, Artificial
  Probe
agctggtgagccaaagcttggtttt

SEQ ID NO: 226041 - DNA, 25 bp, Artificial
  Probe
cacagaaccaggttcatgggtttta

SEQ ID NO: 226042 - DNA, 25 bp, Artificial
  Probe
ggatgaggcacagaaccaggttcat

SEQ ID NO: 226043 - DNA, 25 bp, Artificial
  Probe
ctagttcctgggttgcagaggctgc

SEQ ID NO: 226044 - DNA, 25 bp, Artificial
  Probe
tgcactgggatgaggcacagaacca

SEQ ID NO: 226045 - DNA, 25 bp, Artificial
  Probe
gttttaaacctgttctgcccttgca

SEQ ID NO: 226046 - DNA, 25 bp, Artificial
  Probe
agatgcagcccatgcaggcatggtg

SEQ ID NO: 226047 - DNA, 25 bp, Artificial
  Probe
cttacttgccaaagcgcttgctttc

SEQ ID NO: 226048 - DNA, 25 bp, Artificial
  Probe
cttaaaagatgcagcccatgcaggc

SEQ ID NO: 226049 - DNA, 25 bp, Artificial
  Probe
tgggtagatgcctttcttcacagtt

SEQ ID NO: 226050 - DNA, 25 bp, Artificial
  Probe
ctcaattgaccctctggcagatggc

SEQ ID NO: 226051 - DNA, 25 bp, Artificial
  Probe
actcaggaacagtgggtagatgcct

SEQ ID NO: 226052 - DNA, 25 bp, Artificial
  Probe
ttcatgggttttaaacctgttctgc

SEQ ID NO: 226053 - DNA, 25 bp, Artificial
  Probe
ttaaacctgttctgcccttgcaagg

SEQ ID NO: 226054 - DNA, 25 bp, Artificial
  Probe
ccctctggcagatggcccttatcag

SEQ ID NO: 226055 - DNA, 25 bp, Artificial
  Probe
cctgttctgcccttgcaagggactt

SEQ ID NO: 226056 - DNA, 25 bp, Artificial
  Probe
atatgcactgggatgaggcacagaa

SEQ ID NO: 226057 - DNA, 25 bp, Artificial
  Probe
cccacactcaggaacagtgggtaga

SEQ ID NO: 226058 - DNA, 25 bp, Artificial
  Probe
acagagctggtgagccaaagcttgg

SEQ ID NO: 226059 - DNA, 25 bp, Artificial
  Probe
gctgcttgagcaaatctaaaaggag

SEQ ID NO: 226060 - DNA, 25 bp, Artificial
  Probe
ctgtgtaggcccaatctggctcaat

SEQ ID NO: 226061 - DNA, 25 bp, Artificial
  Probe
aagagggtcttacttgccaaagcgc

SEQ ID NO: 226062 - DNA, 25 bp, Artificial
  Probe
aggaaaactagttcctgggttgcag

SEQ ID NO: 226063 - DNA, 25 bp, Artificial
  Probe
tctgcccttgcaagggactttaagg

SEQ ID NO: 226064 - DNA, 25 bp, Artificial
  Probe
ccaatctggctcaattgaccctctg

SEQ ID NO: 226065 - DNA, 25 bp, Artificial
  Probe
ttgtggtgatcagagcagaggaccc

SEQ ID NO: 226066 - DNA, 25 bp, Artificial
  Probe
ttctttgtagactcttgctgcttga

SEQ ID NO: 226067 - DNA, 25 bp, Artificial
  Probe
ttgccaaagcgcttgctttcagtac

SEQ ID NO: 226068 - DNA, 25 bp, Artificial
  Probe
taccccctggctcttgtctgtgtag

SEQ ID NO: 226069 - DNA, 25 bp, Artificial
  Probe
gtagatgcctttcttcacagttttt

SEQ ID NO: 226070 - DNA, 25 bp, Artificial
  Probe
gagttcttgccgtgcggaatccctc

SEQ ID NO: 226071 - DNA, 25 bp, Artificial
  Probe
tctgtctgtttatgcccggtgtgag

SEQ ID NO: 226072 - DNA, 25 bp, Artificial
  Probe
tttggtatgtctggatcattcaggc

SEQ ID NO: 226073 - DNA, 25 bp, Artificial
  Probe
gagattgagtctgcacatcaccagt

SEQ ID NO: 226074 - DNA, 25 bp, Artificial
  Probe
cttcagtggtttgttagttaccatt

SEQ ID NO: 226075 - DNA, 25 bp, Artificial
  Probe
ttgccatgtccactgggccagtgcc

SEQ ID NO: 226076 - DNA, 25 bp, Artificial
  Probe
gttagttaccattacaccttgtctg

SEQ ID NO: 226077 - DNA, 25 bp, Artificial
  Probe
tagttaccattacaccttgtctgag

SEQ ID NO: 226078 - DNA, 25 bp, Artificial
  Probe
gtttgttagttaccattacaccttg

SEQ ID NO: 226079 - DNA, 25 bp, Artificial
  Probe
agttccatcgggtgtctttaaatag

SEQ ID NO: 226080 - DNA, 25 bp, Artificial
  Probe
cgtcatctgttaatgctttttgtga

SEQ ID NO: 226081 - DNA, 25 bp, Artificial
  Probe
ctgcctccaacttgtctcgggagat

SEQ ID NO: 226082 - DNA, 25 bp, Artificial
  Probe
cgtccacgttgctgacgttgccacg

SEQ ID NO: 226083 - DNA, 25 bp, Artificial
  Probe
aagggatacgtcatctgttaatgct

SEQ ID NO: 226084 - DNA, 25 bp, Artificial
  Probe
cacgttgctgacgttgccacgctgt

SEQ ID NO: 226085 - DNA, 25 bp, Artificial
  Probe
atgcccggtgtgagttccatcgggt

SEQ ID NO: 226086 - DNA, 25 bp, Artificial
  Probe
tgtcttcagtggtttgttagttacc

SEQ ID NO: 226087 - DNA, 25 bp, Artificial
  Probe
tctggatcattcaggcagtacattt

SEQ ID NO: 226088 - DNA, 25 bp, Artificial
  Probe
gtttatgcccggtgtgagttccatc

SEQ ID NO: 226089 - DNA, 25 bp, Artificial
  Probe
accagttgccatgtccactgggcca

SEQ ID NO: 226090 - DNA, 25 bp, Artificial
  Probe
acttgtctcgggagattgagtctgc

SEQ ID NO: 226091 - DNA, 25 bp, Artificial
  Probe
gatcattcaggcagtacatttgaat

SEQ ID NO: 226092 - DNA, 25 bp, Artificial
  Probe
tctcgggagattgagtctgcacatc

SEQ ID NO: 226093 - DNA, 25 bp, Artificial
  Probe
cgttgctgacgttgccacgctgtga

SEQ ID NO: 226094 - DNA, 25 bp, Artificial
  Probe
catcgggtgtctttaaatagttgca

SEQ ID NO: 226095 - DNA, 25 bp, Artificial
  Probe
tcaccagttgccatgtccactgggc

SEQ ID NO: 226096 - DNA, 25 bp, Artificial
  Probe
tgccgtgcggaatccctctgtctgt

SEQ ID NO: 226097 - DNA, 25 bp, Artificial
  Probe
gtgtgagttccatcgggtgtcttta

SEQ ID NO: 226098 - DNA, 25 bp, Artificial
  Probe
ctgtgttttggactcagtgtcttca

SEQ ID NO: 226099 - DNA, 25 bp, Artificial
  Probe
ctccaacttgtctcgggagattgag

SEQ ID NO: 226100 - DNA, 25 bp, Artificial
  Probe
tctgagtagtgttccgagttcttgc

SEQ ID NO: 226101 - DNA, 25 bp, Artificial
  Probe
ctctgcctccaacttgtctcgggag

SEQ ID NO: 226102 - DNA, 25 bp, Artificial
  Probe
cagtacatttgaattccgctgaatg

SEQ ID NO: 226103 - DNA, 25 bp, Artificial
  Probe
cttgccgtgcggaatccctctgtct

SEQ ID NO: 226104 - DNA, 25 bp, Artificial
  Probe
gtatgtctggatcattcaggcagta

SEQ ID NO: 226105 - DNA, 25 bp, Artificial
  Probe
tgcggaatccctctgtctgtttatg

SEQ ID NO: 226106 - DNA, 25 bp, Artificial
  Probe
tgttccgagttcttgccgtgcggaa

SEQ ID NO: 226107 - DNA, 25 bp, Artificial
  Probe
agataaaggcccaggctgcccctct

SEQ ID NO: 226108 - DNA, 25 bp, Artificial
  Probe
agtagtgttccgagttcttgccgtg

SEQ ID NO: 226109 - DNA, 25 bp, Artificial
  Probe
acgtcatctgttaatgctttttgtg

SEQ ID NO: 226110 - DNA, 25 bp, Artificial
  Probe
ctcagtgtcttcagtggtttgttag

SEQ ID NO: 226111 - DNA, 25 bp, Artificial
  Probe
tctgcacatcaccagttgccatgtc

SEQ ID NO: 226112 - DNA, 25 bp, Artificial
  Probe
cccggtgtgagttccatcgggtgtc

SEQ ID NO: 226113 - DNA, 25 bp, Artificial
  Probe
ttcaggcagtacatttgaattccgc

SEQ ID NO: 226114 - DNA, 25 bp, Artificial
  Probe
atacgtcatctgttaatgctttttg

SEQ ID NO: 226115 - DNA, 25 bp, Artificial
  Probe
gttccgagttcttgccgtgcggaat

SEQ ID NO: 226116 - DNA, 25 bp, Artificial
  Probe
agttagctgagcaaaccttgaacaa

SEQ ID NO: 226117 - DNA, 25 bp, Artificial
  Probe
tgttacttagacatcgataaagggc

SEQ ID NO: 226118 - DNA, 25 bp, Artificial
  Probe
gaatttaagtttccaccaaaagatg

SEQ ID NO: 226119 - DNA, 25 bp, Artificial
  Probe
aaagctcttattgtggaaccctcca

SEQ ID NO: 226120 - DNA, 25 bp, Artificial
  Probe
attgtggaaccctccagagagttag

SEQ ID NO: 226121 - DNA, 25 bp, Artificial
  Probe
ggaaaagaccttggtctggcatttg

SEQ ID NO: 226122 - DNA, 25 bp, Artificial
  Probe
ttggtctggcatttgaaatacctgc

SEQ ID NO: 226123 - DNA, 25 bp, Artificial
  Probe
tctggcatttgaaatacctgcacac

SEQ ID NO: 226124 - DNA, 25 bp, Artificial
  Probe
aggtaatgcacaggtgtcacaaaca

SEQ ID NO: 226125 - DNA, 25 bp, Artificial
  Probe
accattggatgttacttagacatcg

SEQ ID NO: 226126 - DNA, 25 bp, Artificial
  Probe
agacatcgataaagggcacgtgaag

SEQ ID NO: 226127 - DNA, 25 bp, Artificial
  Probe
ttgctctttccaaggcccctgatag

SEQ ID NO: 226128 - DNA, 25 bp, Artificial
  Probe
ctccagagagttagctgagcaaacc

SEQ ID NO: 226129 - DNA, 25 bp, Artificial
  Probe
tggcgttgcagctcgggatcagctc

SEQ ID NO: 226130 - DNA, 25 bp, Artificial
  Probe
caaaccttgaacaacgtgaaacagt

SEQ ID NO: 226131 - DNA, 25 bp, Artificial
  Probe
ctgcctgtgttttgaagaatgctga

SEQ ID NO: 226132 - DNA, 25 bp, Artificial
  Probe
tttccaccaaaagatggttttgttg

SEQ ID NO: 226133 - DNA, 25 bp, Artificial
  Probe
tcttattgtggaaccctccagagag

SEQ ID NO: 226134 - DNA, 25 bp, Artificial
  Probe
ctccaaaagctcttattgtggaacc

SEQ ID NO: 226135 - DNA, 25 bp, Artificial
  Probe
cttgaacaacgtgaaacagtttaag

SEQ ID NO: 226136 - DNA, 25 bp, Artificial
  Probe
tggttttgttgctctttccaaggcc

SEQ ID NO: 226137 - DNA, 25 bp, Artificial
  Probe
aagatggttttgttgctctttccaa

SEQ ID NO: 226138 - DNA, 25 bp, Artificial
  Probe
ttccaaggcccctgatagttacgtc

SEQ ID NO: 226139 - DNA, 25 bp, Artificial
  Probe
ctaaattgcgggagcttctcataat

SEQ ID NO: 226140 - DNA, 25 bp, Artificial
  Probe
tctcataattggtggcgttgcagct

SEQ ID NO: 226141 - DNA, 25 bp, Artificial
  Probe
aatgctccaaaagctcttattgtgg

SEQ ID NO: 226142 - DNA, 25 bp, Artificial
  Probe
ccttggtctggcatttgaaatacct

SEQ ID NO: 226143 - DNA, 25 bp, Artificial
  Probe
tcgataaagggcacgtgaagttctc

SEQ ID NO: 226144 - DNA, 25 bp, Artificial
  Probe
taatgctccaaaagctcttattgtg

SEQ ID NO: 226145 - DNA, 25 bp, Artificial
  Probe
ctcttccctgcctgtgttttgaaga

SEQ ID NO: 226146 - DNA, 25 bp, Artificial
  Probe
agggcacgtgaagttctctaagaat

SEQ ID NO: 226147 - DNA, 25 bp, Artificial
  Probe
tacgtcgtcaaatcgcagcacacag

SEQ ID NO: 226148 - DNA, 25 bp, Artificial
  Probe
ttttgttgctctttccaaggcccct

SEQ ID NO: 226149 - DNA, 25 bp, Artificial
  Probe
gtaatgcacaggtgtcacaaacaaa

SEQ ID NO: 226150 - DNA, 25 bp, Artificial
  Probe
gaagtacatcgataatcctaaattg

SEQ ID NO: 226151 - DNA, 25 bp, Artificial
  Probe
cacaggtaatgcacaggtgtcacaa

SEQ ID NO: 226152 - DNA, 25 bp, Artificial
  Probe
cttagacatcgataaagggcacgtg

SEQ ID NO: 226153 - DNA, 25 bp, Artificial
  Probe
ttgcagctcgggatcagctctccgt

SEQ ID NO: 226154 - DNA, 25 bp, Artificial
  Probe
ataatcctaaattgcgggagcttct

SEQ ID NO: 226155 - DNA, 25 bp, Artificial
  Probe
taaagggcacgtgaagttctctaag

SEQ ID NO: 226156 - DNA, 25 bp, Artificial
  Probe
cacgtgaagttctctaagaatggaa

SEQ ID NO: 226157 - DNA, 25 bp, Artificial
  Probe
atggaaaagaccttggtctggcatt

SEQ ID NO: 226158 - DNA, 25 bp, Artificial
  Probe
tcgtcaaatcgcagcacacaggtaa

SEQ ID NO: 226159 - DNA, 25 bp, Artificial
  Probe
ccaccaaaagatggttttgttgctc

SEQ ID NO: 226160 - DNA, 25 bp, Artificial
  Probe
gctcttattgtggaaccctccagag

SEQ ID NO: 226161 - DNA, 25 bp, Artificial
  Probe
aagaccttggtctggcatttgaaat

SEQ ID NO: 226162 - DNA, 25 bp, Artificial
  Probe
accttctcgcggttatgtcacttgg

SEQ ID NO: 226163 - DNA, 25 bp, Artificial
  Probe
ggtatgcatcgcagcattttgtgtt

SEQ ID NO: 226164 - DNA, 25 bp, Artificial
  Probe
aatgaaactcaaagctttctggttt

SEQ ID NO: 226165 - DNA, 25 bp, Artificial
  Probe
gaagcaggcacgattaccacagtaa

SEQ ID NO: 226166 - DNA, 25 bp, Artificial
  Probe
tggaagaactaccaattccagcatg

SEQ ID NO: 226167 - DNA, 25 bp, Artificial
  Probe
cgtggtttgcgcaccaaaaataggc

SEQ ID NO: 226168 - DNA, 25 bp, Artificial
  Probe
gcatcgcagcattttgtgttcgtgg

SEQ ID NO: 226169 - DNA, 25 bp, Artificial
  Probe
cgggctgacctagaactcttggact

SEQ ID NO: 226170 - DNA, 25 bp, Artificial
  Probe
tgagtaactgggactacagctccag

SEQ ID NO: 226171 - DNA, 25 bp, Artificial
  Probe
gtttgcgcaccaaaaataggctaaa

SEQ ID NO: 226172 - DNA, 25 bp, Artificial
  Probe
atcctgctgcaacttcctgagtaac

SEQ ID NO: 226173 - DNA, 25 bp, Artificial
  Probe
cacagtaacccagtcgatacaacag

SEQ ID NO: 226174 - DNA, 25 bp, Artificial
  Probe
acaggttactctaaatgtgactttt

SEQ ID NO: 226175 - DNA, 25 bp, Artificial
  Probe
ctccagtttcggtaaatagaggatt

SEQ ID NO: 226176 - DNA, 25 bp, Artificial
  Probe
cattttgtgttcgtggtttgcgcac

SEQ ID NO: 226177 - DNA, 25 bp, Artificial
  Probe
acagagaccttctcgcggttatgtc

SEQ ID NO: 226178 - DNA, 25 bp, Artificial
  Probe
aggaaaggccgtctccacagcatcc

SEQ ID NO: 226179 - DNA, 25 bp, Artificial
  Probe
gaactaccaattccagcatgcattg

SEQ ID NO: 226180 - DNA, 25 bp, Artificial
  Probe
cacgccggaagcaggcacgattacc

SEQ ID NO: 226181 - DNA, 25 bp, Artificial
  Probe
gacctagaactcttggactcctgct

SEQ ID NO: 226182 - DNA, 25 bp, Artificial
  Probe
ggttatgtcacttggctggtatgca

SEQ ID NO: 226183 - DNA, 25 bp, Artificial
  Probe
agctttctggtttcggatccagaaa

SEQ ID NO: 226184 - DNA, 25 bp, Artificial
  Probe
gtgttcgtggtttgcgcaccaaaaa

SEQ ID NO: 226185 - DNA, 25 bp, Artificial
  Probe
tccagcatgcattgcggaaggaaag

SEQ ID NO: 226186 - DNA, 25 bp, Artificial
  Probe
tacaacttgggctgatgttgaagct

SEQ ID NO: 226187 - DNA, 25 bp, Artificial
  Probe
aagtctccagtttcggtaaatagag

SEQ ID NO: 226188 - DNA, 25 bp, Artificial
  Probe
agcattcctgccatggaagtctcca

SEQ ID NO: 226189 - DNA, 25 bp, Artificial
  Probe
tgggactacagctccagcccgacag

SEQ ID NO: 226190 - DNA, 25 bp, Artificial
  Probe
cagcccgacagcatggaaccacagg

SEQ ID NO: 226191 - DNA, 25 bp, Artificial
  Probe
tcgggctgacctagaactcttggac

SEQ ID NO: 226192 - DNA, 25 bp, Artificial
  Probe
ttggactcctgctaccatcctgctg

SEQ ID NO: 226193 - DNA, 25 bp, Artificial
  Probe
atgcattgcggaaggaaaggccgtc

SEQ ID NO: 226194 - DNA, 25 bp, Artificial
  Probe
aactcaaagctttctggtttcggat

SEQ ID NO: 226195 - DNA, 25 bp, Artificial
  Probe
ccacagcatcccttggaaactgtag

SEQ ID NO: 226196 - DNA, 25 bp, Artificial
  Probe
atgtcacttggctggtatgcatcgc

SEQ ID NO: 226197 - DNA, 25 bp, Artificial
  Probe
gaactcttggactcctgctaccatc

SEQ ID NO: 226198 - DNA, 25 bp, Artificial
  Probe
gattaccacagtaacccagtcgata

SEQ ID NO: 226199 - DNA, 25 bp, Artificial
  Probe
cctcagcattcctgccatggaagtc

SEQ ID NO: 226200 - DNA, 25 bp, Artificial
  Probe
gtctccacagcatcccttggaaact

SEQ ID NO: 226201 - DNA, 25 bp, Artificial
  Probe
tcccttggaaactgtagtcttacgg

SEQ ID NO: 226202 - DNA, 25 bp, Artificial
  Probe
ccacgccggaagcaggcacgattac

SEQ ID NO: 226203 - DNA, 25 bp, Artificial
  Probe
taccatcctgctgcaacttcctgag

SEQ ID NO: 226204 - DNA, 25 bp, Artificial
  Probe
aaggaaaggccgtctccacagcatc

SEQ ID NO: 226205 - DNA, 25 bp, Artificial
  Probe
catgcattgcggaaggaaaggccgt

SEQ ID NO: 226206 - DNA, 25 bp, Artificial
  Probe
ggctggtatgcatcgcagcattttg

SEQ ID NO: 226207 - DNA, 25 bp, Artificial
  Probe
tccagaaaatacaacttgggctgat

SEQ ID NO: 226208 - DNA, 25 bp, Artificial
  Probe
ttggtagacaactgggcccgagatg

SEQ ID NO: 226209 - DNA, 25 bp, Artificial
  Probe
tgacctcaaacatgggtggctctac

SEQ ID NO: 226210 - DNA, 25 bp, Artificial
  Probe
aggaagggcacattcacagatgacc

SEQ ID NO: 226211 - DNA, 25 bp, Artificial
  Probe
aattttgacatgtgcccccgaaact

SEQ ID NO: 226212 - DNA, 25 bp, Artificial
  Probe
ttctgtttttgtacccaccagtaag

SEQ ID NO: 226213 - DNA, 25 bp, Artificial
  Probe
gtaggaaccacatccttgcaaaatt

SEQ ID NO: 226214 - DNA, 25 bp, Artificial
  Probe
tccttctccatttgttggagttaaa

SEQ ID NO: 226215 - DNA, 25 bp, Artificial
  Probe
agaagagagccttgttaccagaaag

SEQ ID NO: 226216 - DNA, 25 bp, Artificial
  Probe
agcctcctgccatgacttccagtag

SEQ ID NO: 226217 - DNA, 25 bp, Artificial
  Probe
gaggggctgcctgagactgcttttc

SEQ ID NO: 226218 - DNA, 25 bp, Artificial
  Probe
agacaaaaaggttctctcccactcg

SEQ ID NO: 226219 - DNA, 25 bp, Artificial
  Probe
accgttggaggaacagtgagtagcc

SEQ ID NO: 226220 - DNA, 25 bp, Artificial
  Probe
aacctacggaccacctagtcagcag

SEQ ID NO: 226221 - DNA, 25 bp, Artificial
  Probe
gagtggaacaggtggtccagcacca

SEQ ID NO: 226222 - DNA, 25 bp, Artificial
  Probe
gccccattcggcactcagtggagtg

SEQ ID NO: 226223 - DNA, 25 bp, Artificial
  Probe
tagagctcttaattttgacatgtgc

SEQ ID NO: 226224 - DNA, 25 bp, Artificial
  Probe
ggtcacttcaccaagtccatgtgcc

SEQ ID NO: 226225 - DNA, 25 bp, Artificial
  Probe
tctaggtcacttcaccaagtccatg

SEQ ID NO: 226226 - DNA, 25 bp, Artificial
  Probe
tctgcagcatctgctacctctctag

SEQ ID NO: 226227 - DNA, 25 bp, Artificial
  Probe
gcctatatactaactactagtgctg

SEQ ID NO: 226228 - DNA, 25 bp, Artificial
  Probe
ggtgccatttcaataccaagccttt

SEQ ID NO: 226229 - DNA, 25 bp, Artificial
  Probe
ttcggcactcagtggagtggaacag

SEQ ID NO: 226230 - DNA, 25 bp, Artificial
  Probe
acagtgcacaccttaagacaaaaag

SEQ ID NO: 226231 - DNA, 25 bp, Artificial
  Probe
agccaaatcccatatgtatctgaag

SEQ ID NO: 226232 - DNA, 25 bp, Artificial
  Probe
ctggttatttcttgccagaagggaa

SEQ ID NO: 226233 - DNA, 25 bp, Artificial
  Probe
cagtgagtagccaggctgcccaggc

SEQ ID NO: 226234 - DNA, 25 bp, Artificial
  Probe
gcacaccttaagacaaaaaggttct

SEQ ID NO: 226235 - DNA, 25 bp, Artificial
  Probe
gcatctgctacctctctaggtcact

SEQ ID NO: 226236 - DNA, 25 bp, Artificial
  Probe
agccctcagaatggagaaccaccct

SEQ ID NO: 226237 - DNA, 25 bp, Artificial
  Probe
caataccaagcctttctgctccagg

SEQ ID NO: 226238 - DNA, 25 bp, Artificial
  Probe
accctccttctccatttgttggagt

SEQ ID NO: 226239 - DNA, 25 bp, Artificial
  Probe
gaaagcctcatgtaagccaaatccc

SEQ ID NO: 226240 - DNA, 25 bp, Artificial
  Probe
caagttggtagacaactgggcccga

SEQ ID NO: 226241 - DNA, 25 bp, Artificial
  Probe
aataccattttgagccctcagaatg

SEQ ID NO: 226242 - DNA, 25 bp, Artificial
  Probe
gcaaggaagttctctgctcctgggc

SEQ ID NO: 226243 - DNA, 25 bp, Artificial
  Probe
agtcagcagcaaggatgttaactga

SEQ ID NO: 226244 - DNA, 25 bp, Artificial
  Probe
taactactagtgctgcatttaactg

SEQ ID NO: 226245 - DNA, 25 bp, Artificial
  Probe
ccccacagcagtatggttttccagc

SEQ ID NO: 226246 - DNA, 25 bp, Artificial
  Probe
ccagtaaggcctaggggctagaaga

SEQ ID NO: 226247 - DNA, 25 bp, Artificial
  Probe
tttcaacatcagcaatttgcagaag

SEQ ID NO: 226248 - DNA, 25 bp, Artificial
  Probe
ctgctcctgggcagctgtgcatttc

SEQ ID NO: 226249 - DNA, 25 bp, Artificial
  Probe
cccatatgtatctgaagtgggtaga

SEQ ID NO: 226250 - DNA, 25 bp, Artificial
  Probe
ctttcaggcaggagaggcagcaaag

SEQ ID NO: 226251 - DNA, 25 bp, Artificial
  Probe
tggttttccagctgccccattcggc

SEQ ID NO: 226252 - DNA, 25 bp, Artificial
  Probe
aggaagttctctgctcctgggcagc

SEQ ID NO: 226253 - DNA, 25 bp, Artificial
  Probe
tttgcagaagtccatcagcaacccc

SEQ ID NO: 226254 - DNA, 25 bp, Artificial
  Probe
tgaaaagtgtcatccatggacaagc

SEQ ID NO: 226255 - DNA, 25 bp, Artificial
  Probe
ggaaaccgactagttagccactgca

SEQ ID NO: 226256 - DNA, 25 bp, Artificial
  Probe
ctgcccggtcggattcttctccaat

SEQ ID NO: 226257 - DNA, 25 bp, Artificial
  Probe
gagaagacccaatgccaaccgtgcg

SEQ ID NO: 226258 - DNA, 25 bp, Artificial
  Probe
cttcaggttaagaaggagggcaccg

SEQ ID NO: 226259 - DNA, 25 bp, Artificial
  Probe
gcgatttgtgccagccgggaaaccg

SEQ ID NO: 226260 - DNA, 25 bp, Artificial
  Probe
gtgccagccgggaaaccgactagtt

SEQ ID NO: 226261 - DNA, 25 bp, Artificial
  Probe
ttctccaatgggtcatcactttttg

SEQ ID NO: 226262 - DNA, 25 bp, Artificial
  Probe
tgttgacagcggtccatctaggaca

SEQ ID NO: 226263 - DNA, 25 bp, Artificial
  Probe
cgctctggggctgcttgttgacagc

SEQ ID NO: 226264 - DNA, 25 bp, Artificial
  Probe
actgcgccagcaaggagtgcgagac

SEQ ID NO: 226265 - DNA, 25 bp, Artificial
  Probe
ccctggctttggagtcgtgcagatg

SEQ ID NO: 226266 - DNA, 25 bp, Artificial
  Probe
gctgcctttgcctcagctgtgcgcg

SEQ ID NO: 226267 - DNA, 25 bp, Artificial
  Probe
tcagacactgtttgtacctgcaagg

SEQ ID NO: 226268 - DNA, 25 bp, Artificial
  Probe
caatgccaaccgtgcgactcaggcg

SEQ ID NO: 226269 - DNA, 25 bp, Artificial
  Probe
tacgtgcagtgacaaacagtacctc

SEQ ID NO: 226270 - DNA, 25 bp, Artificial
  Probe
tgctgcgatttgtgccagccgggaa

SEQ ID NO: 226271 - DNA, 25 bp, Artificial
  Probe
gccctggctttggagtcgtgcagat

SEQ ID NO: 226272 - DNA, 25 bp, Artificial
  Probe
accgtgcgactcaggcgaattctca

SEQ ID NO: 226273 - DNA, 25 bp, Artificial
  Probe
ctgcttgttgacagcggtccatcta

SEQ ID NO: 226274 - DNA, 25 bp, Artificial
  Probe
gtacctccaaggtggcgagtgctgc

SEQ ID NO: 226275 - DNA, 25 bp, Artificial
  Probe
ttgcctcagctgtgcgcgctctggg

SEQ ID NO: 226276 - DNA, 25 bp, Artificial
  Probe
accgacactgcgaactcaatcaagg

SEQ ID NO: 226277 - DNA, 25 bp, Artificial
  Probe
gattcttctccaatgggtcatcact

SEQ ID NO: 226278 - DNA, 25 bp, Artificial
  Probe
gctctgcaatgctgcctttgcctca

SEQ ID NO: 226279 - DNA, 25 bp, Artificial
  Probe
gctttggagtcgtgcagatggccac

SEQ ID NO: 226280 - DNA, 25 bp, Artificial
  Probe
caatgggtcatcactttttgaaaag

SEQ ID NO: 226281 - DNA, 25 bp, Artificial
  Probe
gtgcgctcagcacaggccctgtggc

SEQ ID NO: 226282 - DNA, 25 bp, Artificial
  Probe
gcgagtgctgcgatttgtgccagcc

SEQ ID NO: 226283 - DNA, 25 bp, Artificial
  Probe
tcaatcaagggcttcaggttaagaa

SEQ ID NO: 226284 - DNA, 25 bp, Artificial
  Probe
cgaactcaatcaagggcttcaggtt

SEQ ID NO: 226285 - DNA, 25 bp, Artificial
  Probe
gggctgcttgttgacagcggtccat

SEQ ID NO: 226286 - DNA, 25 bp, Artificial
  Probe
tccaaggtggcgagtgctgcgattt

SEQ ID NO: 226287 - DNA, 25 bp, Artificial
  Probe
gccagccgggaaaccgactagttag

SEQ ID NO: 226288 - DNA, 25 bp, Artificial
  Probe
gagactactgataccgtctgccaac

SEQ ID NO: 226289 - DNA, 25 bp, Artificial
  Probe
cagcactgcgccagcaaggagtgcg

SEQ ID NO: 226290 - DNA, 25 bp, Artificial
  Probe
gtgcagatggccactgagactactg

SEQ ID NO: 226291 - DNA, 25 bp, Artificial
  Probe
gagacgtgcgctcagcacaggccct

SEQ ID NO: 226292 - DNA, 25 bp, Artificial
  Probe
cagtgacaaacagtacctccaaggt

SEQ ID NO: 226293 - DNA, 25 bp, Artificial
  Probe
tggaacagggagatccgctgccacc

SEQ ID NO: 226294 - DNA, 25 bp, Artificial
  Probe
ttggagtcgtgcagatggccactga

SEQ ID NO: 226295 - DNA, 25 bp, Artificial
  Probe
ttttgaaaagtgtcatccatggaca

SEQ ID NO: 226296 - DNA, 25 bp, Artificial
  Probe
tacctgcaaggaagggcagcactgc

SEQ ID NO: 226297 - DNA, 25 bp, Artificial
  Probe
caatcaagggcttcaggttaagaag

SEQ ID NO: 226298 - DNA, 25 bp, Artificial
  Probe
gctcactggaacagggagatccgct

SEQ ID NO: 226299 - DNA, 25 bp, Artificial
  Probe
gcaatgctgcctttgcctcagctgt

SEQ ID NO: 226300 - DNA, 25 bp, Artificial
  Probe
agctttccctagagggagctggact

SEQ ID NO: 226301 - DNA, 25 bp, Artificial
  Probe
gacacagacacaggtgaaaacccct

SEQ ID NO: 226302 - DNA, 25 bp, Artificial
  Probe
ttcaaacagctttccctagagggag

SEQ ID NO: 226303 - DNA, 25 bp, Artificial
  Probe
agtatgaagccctcagagaagaagg

SEQ ID NO: 226304 - DNA, 25 bp, Artificial
  Probe
gcccttttcagctgcatttagcacc

SEQ ID NO: 226305 - DNA, 25 bp, Artificial
  Probe
gggaatattcgaaccctgcgtctgt

SEQ ID NO: 226306 - DNA, 25 bp, Artificial
  Probe
agggtgcacacaacccacctgtttc

SEQ ID NO: 226307 - DNA, 25 bp, Artificial
  Probe
gggttctgcagcagccccagcatca

SEQ ID NO: 226308 - DNA, 25 bp, Artificial
  Probe
ccacctgtttcgtcatccaagtacg

SEQ ID NO: 226309 - DNA, 25 bp, Artificial
  Probe
gcacctcaaagtcagtttcctcaag

SEQ ID NO: 226310 - DNA, 25 bp, Artificial
  Probe
tctcctcagtggattgcagtgggga

SEQ ID NO: 226311 - DNA, 25 bp, Artificial
  Probe
ggtgaaaacccctctgaacttagca

SEQ ID NO: 226312 - DNA, 25 bp, Artificial
  Probe
cgaaccctgcgtctgttggggagca

SEQ ID NO: 226313 - DNA, 25 bp, Artificial
  Probe
tctgagccaaaagcagatgacaagt

SEQ ID NO: 226314 - DNA, 25 bp, Artificial
  Probe
tttccatcggcctttgcctcaggag

SEQ ID NO: 226315 - DNA, 25 bp, Artificial
  Probe
tgaaaacccctctgaacttagcaga

SEQ ID NO: 226316 - DNA, 25 bp, Artificial
  Probe
ggcgccttgtccaccagcactgtgg

SEQ ID NO: 226317 - DNA, 25 bp, Artificial
  Probe
cgccttgtccaccagcactgtggag

SEQ ID NO: 226318 - DNA, 25 bp, Artificial
  Probe
ttgcagatttcatggctttcggtaa

SEQ ID NO: 226319 - DNA, 25 bp, Artificial
  Probe
cctagagggagctggactggccatc

SEQ ID NO: 226320 - DNA, 25 bp, Artificial
  Probe
catggctttcggtaacagctccatc

SEQ ID NO: 226321 - DNA, 25 bp, Artificial
  Probe
ttcagctgcatttagcacctcaaag

SEQ ID NO: 226322 - DNA, 25 bp, Artificial
  Probe
agcatcactggcatccactaaagcg

SEQ ID NO: 226323 - DNA, 25 bp, Artificial
  Probe
aaagtgacggtgactttgctgactt

SEQ ID NO: 226324 - DNA, 25 bp, Artificial
  Probe
attttggagagttcaacctctttgg

SEQ ID NO: 226325 - DNA, 25 bp, Artificial
  Probe
aaagtcagtttcctcaagacctcag

SEQ ID NO: 226326 - DNA, 25 bp, Artificial
  Probe
tggctttcggtaacagctccatccc

SEQ ID NO: 226327 - DNA, 25 bp, Artificial
  Probe
gctggactggccatcgaggagttca

SEQ ID NO: 226328 - DNA, 25 bp, Artificial
  Probe
gacacaggtgaaaacccctctgaac

SEQ ID NO: 226329 - DNA, 25 bp, Artificial
  Probe
agacacaggtgaaaacccctctgaa

SEQ ID NO: 226330 - DNA, 25 bp, Artificial
  Probe
ggagcaggacgactttgcagatttc

SEQ ID NO: 226331 - DNA, 25 bp, Artificial
  Probe
gagggtgcacacaacccacctgttt

SEQ ID NO: 226332 - DNA, 25 bp, Artificial
  Probe
tccacaaaaagtgacggtgactttg

SEQ ID NO: 226333 - DNA, 25 bp, Artificial
  Probe
ccatcgaggagttcaaagagaacac

SEQ ID NO: 226334 - DNA, 25 bp, Artificial
  Probe
gactcttttccatcggcctttgcct

SEQ ID NO: 226335 - DNA, 25 bp, Artificial
  Probe
acccctctgaacttagcagacctag

SEQ ID NO: 226336 - DNA, 25 bp, Artificial
  Probe
aagcgtccagtttggcagatgattt

SEQ ID NO: 226337 - DNA, 25 bp, Artificial
  Probe
gttcaacctctttggggaatattcg

SEQ ID NO: 226338 - DNA, 25 bp, Artificial
  Probe
cccctctgagccaaaagcagatgac

SEQ ID NO: 226339 - DNA, 25 bp, Artificial
  Probe
aaaccagtgcccttttcagctgcat

SEQ ID NO: 226340 - DNA, 25 bp, Artificial
  Probe
acactccttccacaaaaagtgacgg

SEQ ID NO: 226341 - DNA, 25 bp, Artificial
  Probe
gcatttagcacctcaaagtcagttt

SEQ ID NO: 226342 - DNA, 25 bp, Artificial
  Probe
atattcgaaccctgcgtctgttggg

SEQ ID NO: 226343 - DNA, 25 bp, Artificial
  Probe
tcctcaagacctcagccggcgggtt

SEQ ID NO: 226344 - DNA, 25 bp, Artificial
  Probe
agcagacacagacacaggtgaaaac

SEQ ID NO: 226345 - DNA, 25 bp, Artificial
  Probe
gccctcagagaagaagggagccccg

SEQ ID NO: 226346 - DNA, 25 bp, Artificial
  Probe
aaatccagaagtacacgcagtccag

SEQ ID NO: 226347 - DNA, 25 bp, Artificial
  Probe
aaatgcctgaagagcatccacagaa

SEQ ID NO: 226348 - DNA, 25 bp, Artificial
  Probe
ctaaacaaattctgataggcgtgtg

SEQ ID NO: 226349 - DNA, 25 bp, Artificial
  Probe
aaatccattatgtaacctaggccag

SEQ ID NO: 226350 - DNA, 25 bp, Artificial
  Probe
tctgcatgtactaaaatgtattcag

SEQ ID NO: 226351 - DNA, 25 bp, Artificial
  Probe
ttagctgagctgctgtacagggtgc

SEQ ID NO: 226352 - DNA, 25 bp, Artificial
  Probe
cattacctaggcatgactactgtgg

SEQ ID NO: 226353 - DNA, 25 bp, Artificial
  Probe
gtgtgacttcttatgattaaacctt

SEQ ID NO: 226354 - DNA, 25 bp, Artificial
  Probe
gtgtgtgacttcttatgattaaacc

SEQ ID NO: 226355 - DNA, 25 bp, Artificial
  Probe
ttcttttgtgacaagaacttacctg

SEQ ID NO: 226356 - DNA, 25 bp, Artificial
  Probe
ctcgttccgaatgtaaatatagaaa

SEQ ID NO: 226357 - DNA, 25 bp, Artificial
  Probe
tcttgctgatatgtacattgcttcc

SEQ ID NO: 226358 - DNA, 25 bp, Artificial
  Probe
tcccaaaattgagtatcaaggaaca

SEQ ID NO: 226359 - DNA, 25 bp, Artificial
  Probe
ggaccatctgtgcagaagccctcac

SEQ ID NO: 226360 - DNA, 25 bp, Artificial
  Probe
aaccagttccagagatgtaataaaa

SEQ ID NO: 226361 - DNA, 25 bp, Artificial
  Probe
ctgaatttgattggttccgatcagt

SEQ ID NO: 226362 - DNA, 25 bp, Artificial
  Probe
atgtgactgagaacctggctccacc

SEQ ID NO: 226363 - DNA, 25 bp, Artificial
  Probe
cctcaccttgtttccgattataggg

SEQ ID NO: 226364 - DNA, 25 bp, Artificial
  Probe
tccaggcttctctcccaaaattgag

SEQ ID NO: 226365 - DNA, 25 bp, Artificial
  Probe
tatagctaaacaaattctgataggc

SEQ ID NO: 226366 - DNA, 25 bp, Artificial
  Probe
gtgcggcggtttgacctgctcaaga

SEQ ID NO: 226367 - DNA, 25 bp, Artificial
  Probe
atcaaatatgaatgctctccaggct

SEQ ID NO: 226368 - DNA, 25 bp, Artificial
  Probe
aatatacaccgcatgtcatatgttg

SEQ ID NO: 226369 - DNA, 25 bp, Artificial
  Probe
ccgaggcaaggtagccaaggacaag

SEQ ID NO: 226370 - DNA, 25 bp, Artificial
  Probe
cctgctcaagaggattttgaagaca

SEQ ID NO: 226371 - DNA, 25 bp, Artificial
  Probe
acgtcagggacctcctggattgttt

SEQ ID NO: 226372 - DNA, 25 bp, Artificial
  Probe
cctaggccagccttgaatttcaatg

SEQ ID NO: 226373 - DNA, 25 bp, Artificial
  Probe
aaggtagccaaggacaagagtttct

SEQ ID NO: 226374 - DNA, 25 bp, Artificial
  Probe
cctctgaacagagaagtcttagaca

SEQ ID NO: 226375 - DNA, 25 bp, Artificial
  Probe
agcctcccaagtgctgacataggca

SEQ ID NO: 226376 - DNA, 25 bp, Artificial
  Probe
tccacagaatagacttgaagacaaa

SEQ ID NO: 226377 - DNA, 25 bp, Artificial
  Probe
acctggtgattgaactggagaaact

SEQ ID NO: 226378 - DNA, 25 bp, Artificial
  Probe
ttttccttacaaaggattacacagg

SEQ ID NO: 226379 - DNA, 25 bp, Artificial
  Probe
cctcctggattgtttaagtgagaga

SEQ ID NO: 226380 - DNA, 25 bp, Artificial
  Probe
ctttccattaaggagactatccttg

SEQ ID NO: 226381 - DNA, 25 bp, Artificial
  Probe
ccgattatagggtgctgctgatgga

SEQ ID NO: 226382 - DNA, 25 bp, Artificial
  Probe
agacagataaagcagccgtggagga

SEQ ID NO: 226383 - DNA, 25 bp, Artificial
  Probe
ataactcaagggtgagtctggagcc

SEQ ID NO: 226384 - DNA, 25 bp, Artificial
  Probe
ccagccaagaagcaagatcaaatat

SEQ ID NO: 226385 - DNA, 25 bp, Artificial
  Probe
ctggagccagtgtgtggaatatcag

SEQ ID NO: 226386 - DNA, 25 bp, Artificial
  Probe
cgcatgtcatatgttgttatagcta

SEQ ID NO: 226387 - DNA, 25 bp, Artificial
  Probe
atttgtactatttggaatgacaccc

SEQ ID NO: 226388 - DNA, 25 bp, Artificial
  Probe
tgagtcttctcttgcttcagcctcc

SEQ ID NO: 226389 - DNA, 25 bp, Artificial
  Probe
tgcttcctttcctttgttcctggaa

SEQ ID NO: 226390 - DNA, 25 bp, Artificial
  Probe
tatttgtactatttggaatgacacc

SEQ ID NO: 226391 - DNA, 25 bp, Artificial
  Probe
tgagagaggccagctctccttcgct

SEQ ID NO: 226392 - DNA, 25 bp, Artificial
  Probe
agcaatgtaggactcagctttctcc

SEQ ID NO: 226393 - DNA, 25 bp, Artificial
  Probe
agcagattttccaggcagtctgcag

SEQ ID NO: 226394 - DNA, 25 bp, Artificial
  Probe
ctgtagcaaaacagctgaggtgatt

SEQ ID NO: 226395 - DNA, 25 bp, Artificial
  Probe
gtgcccctaagtagtcaactccatc

SEQ ID NO: 226396 - DNA, 25 bp, Artificial
  Probe
ggtgctacatcaaacacccaacaag

SEQ ID NO: 226397 - DNA, 25 bp, Artificial
  Probe
gatcctattgcgttgaaactataga

SEQ ID NO: 226398 - DNA, 25 bp, Artificial
  Probe
caggcagtctgcagctcacctcatt

SEQ ID NO: 226399 - DNA, 25 bp, Artificial
  Probe
atgtgcagtcttgtccaggggtctg

SEQ ID NO: 226400 - DNA, 25 bp, Artificial
  Probe
aatatgttggactctatccttgtct

SEQ ID NO: 226401 - DNA, 25 bp, Artificial
  Probe
cttgtccaggggtctgggcactctc

SEQ ID NO: 226402 - DNA, 25 bp, Artificial
  Probe
gaagcagattttccaggcagtctgc

SEQ ID NO: 226403 - DNA, 25 bp, Artificial
  Probe
gcatttcatgtttctgtcatgatcc

SEQ ID NO: 226404 - DNA, 25 bp, Artificial
  Probe
cagtcctggggctgtgctagcatcg

SEQ ID NO: 226405 - DNA, 25 bp, Artificial
  Probe
tttaccgctccaaaagaacaaatgg

SEQ ID NO: 226406 - DNA, 25 bp, Artificial
  Probe
gtcttctcttggaggctctctgagc

SEQ ID NO: 226407 - DNA, 25 bp, Artificial
  Probe
caaatgcagtcctggggctgtgcta

SEQ ID NO: 226408 - DNA, 25 bp, Artificial
  Probe
gtctgggcactctcacaaggaccca

SEQ ID NO: 226409 - DNA, 25 bp, Artificial
  Probe
tctgagcaaatgcagtcctggggct

SEQ ID NO: 226410 - DNA, 25 bp, Artificial
  Probe
tgtccaggggtctgggcactctcac

SEQ ID NO: 226411 - DNA, 25 bp, Artificial
  Probe
atagaagcagattttccaggcagtc

SEQ ID NO: 226412 - DNA, 25 bp, Artificial
  Probe
tcatgtttctgtcatgatcctattg

SEQ ID NO: 226413 - DNA, 25 bp, Artificial
  Probe
aattgggttcagcatttcatgtttc

SEQ ID NO: 226414 - DNA, 25 bp, Artificial
  Probe
tccctttctggctaagagagagggc

SEQ ID NO: 226415 - DNA, 25 bp, Artificial
  Probe
tccatccggttccaagacatataag

SEQ ID NO: 226416 - DNA, 25 bp, Artificial
  Probe
aatatatgagtcttctcttggaggc

SEQ ID NO: 226417 - DNA, 25 bp, Artificial
  Probe
ctatccttgtctggatgggaattag

SEQ ID NO: 226418 - DNA, 25 bp, Artificial
  Probe
ccctaagtagtcaactccatccggt

SEQ ID NO: 226419 - DNA, 25 bp, Artificial
  Probe
gtaggactcagctttctccctcttt

SEQ ID NO: 226420 - DNA, 25 bp, Artificial
  Probe
tgtgcccctaagtagtcaactccat

SEQ ID NO: 226421 - DNA, 25 bp, Artificial
  Probe
tgggtttagttactcttctgggtgc

SEQ ID NO: 226422 - DNA, 25 bp, Artificial
  Probe
cctattgcgttgaaactatagagag

SEQ ID NO: 226423 - DNA, 25 bp, Artificial
  Probe
aggggtctgggcactctcacaagga

SEQ ID NO: 226424 - DNA, 25 bp, Artificial
  Probe
tagagaggcagcacaacacggcagg

SEQ ID NO: 226425 - DNA, 25 bp, Artificial
  Probe
cctcatttagagtctgaatatgttg

SEQ ID NO: 226426 - DNA, 25 bp, Artificial
  Probe
gattttccaggcagtctgcagctca

SEQ ID NO: 226427 - DNA, 25 bp, Artificial
  Probe
ggcagtctgcagctcacctcattta

SEQ ID NO: 226428 - DNA, 25 bp, Artificial
  Probe
caagctgctccctttctggctaaga

SEQ ID NO: 226429 - DNA, 25 bp, Artificial
  Probe
ttggaggctctctgagcaaatgcag

SEQ ID NO: 226430 - DNA, 25 bp, Artificial
  Probe
gtagagtcaagctgctccctttctg

SEQ ID NO: 226431 - DNA, 25 bp, Artificial
  Probe
gagaaatactttaccgctccaaaag

SEQ ID NO: 226432 - DNA, 25 bp, Artificial
  Probe
agggcaatgtgcagtcttgtccagg

SEQ ID NO: 226433 - DNA, 25 bp, Artificial
  Probe
cgctccaaaagaacaaatggaatat

SEQ ID NO: 226434 - DNA, 25 bp, Artificial
  Probe
gccttgggtttagttactcttctgg

SEQ ID NO: 226435 - DNA, 25 bp, Artificial
  Probe
ctttctggctaagagagagggcaat

SEQ ID NO: 226436 - DNA, 25 bp, Artificial
  Probe
cagccttgggtttagttactcttct

SEQ ID NO: 226437 - DNA, 25 bp, Artificial
  Probe
tagtcaactccatccggttccaaga

SEQ ID NO: 226438 - DNA, 25 bp, Artificial
  Probe
aatgcccaagagaagttcaaaagac

SEQ ID NO: 226439 - DNA, 25 bp, Artificial
  Probe
cttgctgattgtcaaagcagaaaag

SEQ ID NO: 226440 - DNA, 25 bp, Artificial
  Probe
gatagagccctatagcctactctaa

SEQ ID NO: 226441 - DNA, 25 bp, Artificial
  Probe
ttcagacagatgtcctcgggagcca

SEQ ID NO: 226442 - DNA, 25 bp, Artificial
  Probe
cacagcgtgtcaccttgttcagaca

SEQ ID NO: 226443 - DNA, 25 bp, Artificial
  Probe
aagctctggcgtacatgcaaatgta

SEQ ID NO: 226444 - DNA, 25 bp, Artificial
  Probe
cagacagatgtcctcgggagccatt

SEQ ID NO: 226445 - DNA, 25 bp, Artificial
  Probe
tctaaatgcccaagagaagttcaaa

SEQ ID NO: 226446 - DNA, 25 bp, Artificial
  Probe
tatgattcttgctgattgtcaaagc

SEQ ID NO: 226447 - DNA, 25 bp, Artificial
  Probe
agatattttagaagctctggcgtac

SEQ ID NO: 226448 - DNA, 25 bp, Artificial
  Probe
ctggcgtacatgcaaatgtaaaaac

SEQ ID NO: 226449 - DNA, 25 bp, Artificial
  Probe
tgcagagagagtctccctcagtctt

SEQ ID NO: 226450 - DNA, 25 bp, Artificial
  Probe
cgtgccacagcgtgtcaccttgttc

SEQ ID NO: 226451 - DNA, 25 bp, Artificial
  Probe
accttgttcagacagatgtcctcgg

SEQ ID NO: 226452 - DNA, 25 bp, Artificial
  Probe
tctatctcatgatagagccctatag

SEQ ID NO: 226453 - DNA, 25 bp, Artificial
  Probe
gaagctctggcgtacatgcaaatgt

SEQ ID NO: 226454 - DNA, 25 bp, Artificial
  Probe
tgttcagacagatgtcctcgggagc

SEQ ID NO: 226455 - DNA, 25 bp, Artificial
  Probe
cttgttcagacagatgtcctcggga

SEQ ID NO: 226456 - DNA, 25 bp, Artificial
  Probe
gcaggagcaccgtgccacagcgtgt

SEQ ID NO: 226457 - DNA, 25 bp, Artificial
  Probe
ctaaatgcccaagagaagttcaaaa

SEQ ID NO: 226458 - DNA, 25 bp, Artificial
  Probe
gcagagagagtctccctcagtctta

SEQ ID NO: 226459 - DNA, 25 bp, Artificial
  Probe
atctcatgatagagccctatagcct

SEQ ID NO: 226460 - DNA, 25 bp, Artificial
  Probe
caccttgttcagacagatgtcctcg

SEQ ID NO: 226461 - DNA, 25 bp, Artificial
  Probe
gtataactttcagtgttatgtcttc

SEQ ID NO: 226462 - DNA, 25 bp, Artificial
  Probe
cttgtataactttcagtgttatgtc

SEQ ID NO: 226463 - DNA, 25 bp, Artificial
  Probe
agaccgcatcccactgtgggcgagt

SEQ ID NO: 226464 - DNA, 25 bp, Artificial
  Probe
gtcaccttgttcagacagatgtcct

SEQ ID NO: 226465 - DNA, 25 bp, Artificial
  Probe
tatatatctaaatgcccaagagaag

SEQ ID NO: 226466 - DNA, 25 bp, Artificial
  Probe
atgcccaagagaagttcaaaagact

SEQ ID NO: 226467 - DNA, 25 bp, Artificial
  Probe
tattttagaagctctggcgtacatg

SEQ ID NO: 226468 - DNA, 25 bp, Artificial
  Probe
tcttgctgattgtcaaagcagaaaa

SEQ ID NO: 226469 - DNA, 25 bp, Artificial
  Probe
agagagtctccctcagtcttaaata

SEQ ID NO: 226470 - DNA, 25 bp, Artificial
  Probe
gtgtcaccttgttcagacagatgtc

SEQ ID NO: 226471 - DNA, 25 bp, Artificial
  Probe
gcgtgtcaccttgttcagacagatg

SEQ ID NO: 226472 - DNA, 25 bp, Artificial
  Probe
gctctggcgtacatgcaaatgtaaa

SEQ ID NO: 226473 - DNA, 25 bp, Artificial
  Probe
tgattcttgctgattgtcaaagcag

SEQ ID NO: 226474 - DNA, 25 bp, Artificial
  Probe
agacagatgtcctcgggagccattc

SEQ ID NO: 226475 - DNA, 25 bp, Artificial
  Probe
atattttagaagctctggcgtacat

SEQ ID NO: 226476 - DNA, 25 bp, Artificial
  Probe
gccacagcgtgtcaccttgttcaga

SEQ ID NO: 226477 - DNA, 25 bp, Artificial
  Probe
taaatgcccaagagaagttcaaaag

SEQ ID NO: 226478 - DNA, 25 bp, Artificial
  Probe
gagagtctccctcagtcttaaataa

SEQ ID NO: 226479 - DNA, 25 bp, Artificial
  Probe
gattcttgctgattgtcaaagcaga

SEQ ID NO: 226480 - DNA, 25 bp, Artificial
  Probe
ctatctcatgatagagccctatagc

SEQ ID NO: 226481 - DNA, 25 bp, Artificial
  Probe
cagggagcaggagcaccgtgccaca

SEQ ID NO: 226482 - DNA, 25 bp, Artificial
  Probe
gtgccacagcgtgtcaccttgttca

SEQ ID NO: 226483 - DNA, 25 bp, Artificial
  Probe
ttttagaagctctggcgtacatgca

SEQ ID NO: 226484 - DNA, 25 bp, Artificial
  Probe
caccctggacatgcacagcaaactt

SEQ ID NO: 226485 - DNA, 25 bp, Artificial
  Probe
cttggactgtgacatggagtccatc

SEQ ID NO: 226486 - DNA, 25 bp, Artificial
  Probe
catggacggagataccttggatttt

SEQ ID NO: 226487 - DNA, 25 bp, Artificial
  Probe
ccaagtgacttggatggcatgttta

SEQ ID NO: 226488 - DNA, 25 bp, Artificial
  Probe
ggcacctcataacaaaatgatgaac

SEQ ID NO: 226489 - DNA, 25 bp, Artificial
  Probe
ttcggaacgacctcatggacggaga

SEQ ID NO: 226490 - DNA, 25 bp, Artificial
  Probe
ttttaactttgataatgtgttgccc

SEQ ID NO: 226491 - DNA, 25 bp, Artificial
  Probe
tggcatgtttattgagcgcttggac

SEQ ID NO: 226492 - DNA, 25 bp, Artificial
  Probe
ttgataatgtgttgcccaaccaaag

SEQ ID NO: 226493 - DNA, 25 bp, Artificial
  Probe
tgggccctaactcagtcatgccagc

SEQ ID NO: 226494 - DNA, 25 bp, Artificial
  Probe
tgtgttgcccaaccaaagcttcccg

SEQ ID NO: 226495 - DNA, 25 bp, Artificial
  Probe
cccatgcagatgagtgccctgggca

SEQ ID NO: 226496 - DNA, 25 bp, Artificial
  Probe
cttggatggcatgtttattgagcgc

SEQ ID NO: 226497 - DNA, 25 bp, Artificial
  Probe
ttcttcagtcaatggccgtgccctg

SEQ ID NO: 226498 - DNA, 25 bp, Artificial
  Probe
gacacctttacaagtgcctctgtcc

SEQ ID NO: 226499 - DNA, 25 bp, Artificial
  Probe
ctgccccatgtggtgaacaccatgc

SEQ ID NO: 226500 - DNA, 25 bp, Artificial
  Probe
gagcagtccaaagatgcccttcacc

SEQ ID NO: 226501 - DNA, 25 bp, Artificial
  Probe
tttattgagcgcttggactgtgaca

SEQ ID NO: 226502 - DNA, 25 bp, Artificial
  Probe
gaactgaggagcagtccaaagatgc

SEQ ID NO: 226503 - DNA, 25 bp, Artificial
  Probe
cgcttgaccccagtgaagacacctt

SEQ ID NO: 226504 - DNA, 25 bp, Artificial
  Probe
ctccaccaggagaagctcccaagtg

SEQ ID NO: 226505 - DNA, 25 bp, Artificial
  Probe
agtgccctgggcaactactcctctg

SEQ ID NO: 226506 - DNA, 25 bp, Artificial
  Probe
gcatgtttattgagcgcttggactg

SEQ ID NO: 226507 - DNA, 25 bp, Artificial
  Probe
gggcaactactcctctgtgagcagc

SEQ ID NO: 226508 - DNA, 25 bp, Artificial
  Probe
accgggaactgaggagcagtccaaa

SEQ ID NO: 226509 - DNA, 25 bp, Artificial
  Probe
accaggagaagctcccaagtgactt

SEQ ID NO: 226510 - DNA, 25 bp, Artificial
  Probe
agattgtctgacaccgggaactgag

SEQ ID NO: 226511 - DNA, 25 bp, Artificial
  Probe
ggacatgcacagcaaacttcttcag

SEQ ID NO: 226512 - DNA, 25 bp, Artificial
  Probe
cacacagctgggtgtcaggctagga

SEQ ID NO: 226513 - DNA, 25 bp, Artificial
  Probe
tggtgaacaccatgcctcacacatc

SEQ ID NO: 226514 - DNA, 25 bp, Artificial
  Probe
tctgacaccgggaactgaggagcag

SEQ ID NO: 226515 - DNA, 25 bp, Artificial
  Probe
aaagcttcccgcacagtgtcaagac

SEQ ID NO: 226516 - DNA, 25 bp, Artificial
  Probe
actgaggagcagtccaaagatgccc

SEQ ID NO: 226517 - DNA, 25 bp, Artificial
  Probe
caccccatgcagatgagtgccctgg

SEQ ID NO: 226518 - DNA, 25 bp, Artificial
  Probe
atttaaaagtccttcagattgtctg

SEQ ID NO: 226519 - DNA, 25 bp, Artificial
  Probe
ccatgaaccgcttgaccccagtgaa

SEQ ID NO: 226520 - DNA, 25 bp, Artificial
  Probe
cctatggcagccaggcacctcataa

SEQ ID NO: 226521 - DNA, 25 bp, Artificial
  Probe
ctcagtcatgccagcctatggcagc

SEQ ID NO: 226522 - DNA, 25 bp, Artificial
  Probe
aatgtgttgcccaaccaaagcttcc

SEQ ID NO: 226523 - DNA, 25 bp, Artificial
  Probe
tgagcagctgcaatggctatggtag

SEQ ID NO: 226524 - DNA, 25 bp, Artificial
  Probe
ttaactttgataatgtgttgcccaa

SEQ ID NO: 226525 - DNA, 25 bp, Artificial
  Probe
gcacagcaaacttcttcagtcaatg

SEQ ID NO: 226526 - DNA, 25 bp, Artificial
  Probe
catgccagcctatggcagccaggca

SEQ ID NO: 226527 - DNA, 25 bp, Artificial
  Probe
atgaaccgcttgaccccagtgaaga

SEQ ID NO: 226528 - DNA, 25 bp, Artificial
  Probe
actactcctctgtgagcagctgcaa

SEQ ID NO: 226529 - DNA, 25 bp, Artificial
  Probe
cctaactcagtcatgccagcctatg

SEQ ID NO: 226530 - DNA, 25 bp, Artificial
  Probe
gctgtgtacggcagctgtacattga

SEQ ID NO: 226531 - DNA, 25 bp, Artificial
  Probe
caggcaccggagagccctggatacc

SEQ ID NO: 226532 - DNA, 25 bp, Artificial
  Probe
acacagtacagcaaggtccttgccc

SEQ ID NO: 226533 - DNA, 25 bp, Artificial
  Probe
gagaagaactgctgtgtacggcagc

SEQ ID NO: 226534 - DNA, 25 bp, Artificial
  Probe
tgcccctacatttggagcctggaca

SEQ ID NO: 226535 - DNA, 25 bp, Artificial
  Probe
acctgggttggaagtggatccacga

SEQ ID NO: 226536 - DNA, 25 bp, Artificial
  Probe
tgtgtacggcagctgtacattgact

SEQ ID NO: 226537 - DNA, 25 bp, Artificial
  Probe
tggagcctggacacacagtacagca

SEQ ID NO: 226538 - DNA, 25 bp, Artificial
  Probe
tttggagcctggacacacagtacag

SEQ ID NO: 226539 - DNA, 25 bp, Artificial
  Probe
gaagaactgctgtgtacggcagctg

SEQ ID NO: 226540 - DNA, 25 bp, Artificial
  Probe
tccacagagaagaactgctgtgtac

SEQ ID NO: 226541 - DNA, 25 bp, Artificial
  Probe
cagctgtacattgactttaggaagg

SEQ ID NO: 226542 - DNA, 25 bp, Artificial
  Probe
agcagttgtccaacatgatcgtgcg

SEQ ID NO: 226543 - DNA, 25 bp, Artificial
  Probe
gttgtccaacatgatcgtgcgctcc

SEQ ID NO: 226544 - DNA, 25 bp, Artificial
  Probe
tgatcgtgcgctcctgcaagtgcag

SEQ ID NO: 226545 - DNA, 25 bp, Artificial
  Probe
ggcaccatccatgacatgaaccgac

SEQ ID NO: 226546 - DNA, 25 bp, Artificial
  Probe
agctccacagagaagaactgctgtg

SEQ ID NO: 226547 - DNA, 25 bp, Artificial
  Probe
gcctggacacacagtacagcaaggt

SEQ ID NO: 226548 - DNA, 25 bp, Artificial
  Probe
ggacacacagtacagcaaggtcctt

SEQ ID NO: 226549 - DNA, 25 bp, Artificial
  Probe
cagttgtccaacatgatcgtgcgct

SEQ ID NO: 226550 - DNA, 25 bp, Artificial
  Probe
cgcaagcccaaggtggagcagttgt

SEQ ID NO: 226551 - DNA, 25 bp, Artificial
  Probe
cagctccacagagaagaactgctgt

SEQ ID NO: 226552 - DNA, 25 bp, Artificial
  Probe
tacattgactttaggaaggacctgg

SEQ ID NO: 226553 - DNA, 25 bp, Artificial
  Probe
cacacagtacagcaaggtccttgcc

SEQ ID NO: 226554 - DNA, 25 bp, Artificial
  Probe
gatcgtgcgctcctgcaagtgcagc

SEQ ID NO: 226555 - DNA, 25 bp, Artificial
  Probe
atccacgagcccaagggctaccatg

SEQ ID NO: 226556 - DNA, 25 bp, Artificial
  Probe
ttcagctccacagagaagaactgct

SEQ ID NO: 226557 - DNA, 25 bp, Artificial
  Probe
agaactgctgtgtacggcagctgta

SEQ ID NO: 226558 - DNA, 25 bp, Artificial
  Probe
gaactgctgtgtacggcagctgtac

SEQ ID NO: 226559 - DNA, 25 bp, Artificial
  Probe
gctgtacattgactttaggaaggac

SEQ ID NO: 226560 - DNA, 25 bp, Artificial
  Probe
tccaggcaccggagagccctggata

SEQ ID NO: 226561 - DNA, 25 bp, Artificial
  Probe
tacaaccaacacaacccgggtgctt

SEQ ID NO: 226562 - DNA, 25 bp, Artificial
  Probe
acggcagctgtacattgactttagg

SEQ ID NO: 226563 - DNA, 25 bp, Artificial
  Probe
ttggagcctggacacacagtacagc

SEQ ID NO: 226564 - DNA, 25 bp, Artificial
  Probe
cggcagctgtacattgactttagga

SEQ ID NO: 226565 - DNA, 25 bp, Artificial
  Probe
atgatcgtgcgctcctgcaagtgca

SEQ ID NO: 226566 - DNA, 25 bp, Artificial
  Probe
gaagtggatccacgagcccaagggc

SEQ ID NO: 226567 - DNA, 25 bp, Artificial
  Probe
cgcaggctttggagccactgcccat

SEQ ID NO: 226568 - DNA, 25 bp, Artificial
  Probe
ctgcccctacatttggagcctggac

SEQ ID NO: 226569 - DNA, 25 bp, Artificial
  Probe
cccctacatttggagcctggacaca

SEQ ID NO: 226570 - DNA, 25 bp, Artificial
  Probe
acatttggagcctggacacacagta

SEQ ID NO: 226571 - DNA, 25 bp, Artificial
  Probe
agtggatccacgagcccaagggcta

SEQ ID NO: 226572 - DNA, 25 bp, Artificial
  Probe
gtcgcaagcccaaggtggagcagtt

SEQ ID NO: 226573 - DNA, 25 bp, Artificial
  Probe
ggtgacctgggcaccatccatgaca

SEQ ID NO: 226574 - DNA, 25 bp, Artificial
  Probe
gtccaacatgatcgtgcgctcctgc

SEQ ID NO: 226575 - DNA, 25 bp, Artificial
  Probe
cctgggcaccatccatgacatgaac

SEQ ID NO: 226576 - DNA, 25 bp, Artificial
  Probe
ttcctggtagccaaaaggaaattca

SEQ ID NO: 226577 - DNA, 25 bp, Artificial
  Probe
tcctggtagccaaaaggaaattcaa

SEQ ID NO: 226578 - DNA, 25 bp, Artificial
  Probe
agaagagctaccagtgtgagcttac

SEQ ID NO: 226579 - DNA, 25 bp, Artificial
  Probe
atccgttctgtcaggattctgaagt

SEQ ID NO: 226580 - DNA, 25 bp, Artificial
  Probe
aagctggagcttcaatgaccgcacc

SEQ ID NO: 226581 - DNA, 25 bp, Artificial
  Probe
gggcctctctaagactcaagcctcg

SEQ ID NO: 226582 - DNA, 25 bp, Artificial
  Probe
ttcagcaggacacctggacatgctg

SEQ ID NO: 226583 - DNA, 25 bp, Artificial
  Probe
ctgtgaagacggtcatccgttctgt

SEQ ID NO: 226584 - DNA, 25 bp, Artificial
  Probe
acctggacatgctgggacgaatcaa

SEQ ID NO: 226585 - DNA, 25 bp, Artificial
  Probe
gacgctgcggccatatgatgtgaag

SEQ ID NO: 226586 - DNA, 25 bp, Artificial
  Probe
ttccgggcctctctaagactcaagc

SEQ ID NO: 226587 - DNA, 25 bp, Artificial
  Probe
aaagctggagcttcaatgaccgcac

SEQ ID NO: 226588 - DNA, 25 bp, Artificial
  Probe
aagactcaagcctcgctgctctgct

SEQ ID NO: 226589 - DNA, 25 bp, Artificial
  Probe
cggccatatgatgtgaaggatgtca

SEQ ID NO: 226590 - DNA, 25 bp, Artificial
  Probe
gcggccatatgatgtgaaggatgtc

SEQ ID NO: 226591 - DNA, 25 bp, Artificial
  Probe
tcaggattctgaagttcctggtagc

SEQ ID NO: 226592 - DNA, 25 bp, Artificial
  Probe
tgcctgctgtgaagacggtcatccg

SEQ ID NO: 226593 - DNA, 25 bp, Artificial
  Probe
cagccccagcaaggtgcagaaaagc

SEQ ID NO: 226594 - DNA, 25 bp, Artificial
  Probe
agcatctcccagaagcggacaggcc

SEQ ID NO: 226595 - DNA, 25 bp, Artificial
  Probe
cgcataagcatctcccagaagcgga

SEQ ID NO: 226596 - DNA, 25 bp, Artificial
  Probe
gcttccgggcctctctaagactcaa

SEQ ID NO: 226597 - DNA, 25 bp, Artificial
  Probe
aagtggccgaggagaagagctacca

SEQ ID NO: 226598 - DNA, 25 bp, Artificial
  Probe
tggatgatgtcatgcctgctgtgaa

SEQ ID NO: 226599 - DNA, 25 bp, Artificial
  Probe
ctgtcaggattctgaagttcctggt

SEQ ID NO: 226600 - DNA, 25 bp, Artificial
  Probe
ggacgaatcaagagcctgcaagccc

SEQ ID NO: 226601 - DNA, 25 bp, Artificial
  Probe
gagcttacggtggatgatgtcatgc

SEQ ID NO: 226602 - DNA, 25 bp, Artificial
  Probe
gaaattcaaggagacgctgcggcca

SEQ ID NO: 226603 - DNA, 25 bp, Artificial
  Probe
gatgtcatgcctgctgtgaagacgg

SEQ ID NO: 226604 - DNA, 25 bp, Artificial
  Probe
taagcatctcccagaagcggacagg

SEQ ID NO: 226605 - DNA, 25 bp, Artificial
  Probe
tgcaagcccgggtggaccaaattgt

SEQ ID NO: 226606 - DNA, 25 bp, Artificial
  Probe
acctcgccaagcagtgagcaggtgg

SEQ ID NO: 226607 - DNA, 25 bp, Artificial
  Probe
gaatcaagagcctgcaagcccgggt

SEQ ID NO: 226608 - DNA, 25 bp, Artificial
  Probe
cccagcaaggtgcagaaaagctgga

SEQ ID NO: 226609 - DNA, 25 bp, Artificial
  Probe
ggacatgctgggacgaatcaagagc

SEQ ID NO: 226610 - DNA, 25 bp, Artificial
  Probe
ttacggtggatgatgtcatgcctgc

SEQ ID NO: 226611 - DNA, 25 bp, Artificial
  Probe
ccagtgtgagcttacggtggatgat

SEQ ID NO: 226612 - DNA, 25 bp, Artificial
  Probe
ccacctcgccaagcagtgagcaggt

SEQ ID NO: 226613 - DNA, 25 bp, Artificial
  Probe
aagcctcgctgctctgctgaggagg

SEQ ID NO: 226614 - DNA, 25 bp, Artificial
  Probe
tgtgaagacggtcatccgttctgtc

SEQ ID NO: 226615 - DNA, 25 bp, Artificial
  Probe
caagagcctgcaagcccgggtggac

SEQ ID NO: 226616 - DNA, 25 bp, Artificial
  Probe
gacggtcatccgttctgtcaggatt

SEQ ID NO: 226617 - DNA, 25 bp, Artificial
  Probe
tgaagttcctggtagccaaaaggaa

SEQ ID NO: 226618 - DNA, 25 bp, Artificial
  Probe
ctcaagcctcgctgctctgctgagg

SEQ ID NO: 226619 - DNA, 25 bp, Artificial
  Probe
tgatgtcatgcctgctgtgaagacg

SEQ ID NO: 226620 - DNA, 25 bp, Artificial
  Probe
cctgctgtgaagacggtcatccgtt

SEQ ID NO: 226621 - DNA, 25 bp, Artificial
  Probe
atgctgggacgaatcaagagcctgc

SEQ ID NO: 226622 - DNA, 25 bp, Artificial
  Probe
atcactttgcggaacctggaagagg

SEQ ID NO: 226623 - DNA, 25 bp, Artificial
  Probe
tgtccactggggacactagaatctt

SEQ ID NO: 226624 - DNA, 25 bp, Artificial
  Probe
accaggtgtccactggggacactag

SEQ ID NO: 226625 - DNA, 25 bp, Artificial
  Probe
ggaggagatcctcaacgtggacccg

SEQ ID NO: 226626 - DNA, 25 bp, Artificial
  Probe
cacacgtactcatgcaaggtccgag

SEQ ID NO: 226627 - DNA, 25 bp, Artificial
  Probe
tgagttgatgcttaactccagcctt

SEQ ID NO: 226628 - DNA, 25 bp, Artificial
  Probe
cgtggacccggtgcagcacacgtac

SEQ ID NO: 226629 - DNA, 25 bp, Artificial
  Probe
agcccacaagaatgagttgatgctt

SEQ ID NO: 226630 - DNA, 25 bp, Artificial
  Probe
aactccagccttatgcggatcactt

SEQ ID NO: 226631 - DNA, 25 bp, Artificial
  Probe
agagtctgctggatggtggcaacaa

SEQ ID NO: 226632 - DNA, 25 bp, Artificial
  Probe
acccggtgcagcacacgtactcatg

SEQ ID NO: 226633 - DNA, 25 bp, Artificial
  Probe
tcaccggcacagtggaggagatcct

SEQ ID NO: 226634 - DNA, 25 bp, Artificial
  Probe
catctgcgacaaccaggtgtccact

SEQ ID NO: 226635 - DNA, 25 bp, Artificial
  Probe
ttaactccagccttatgcggatcac

SEQ ID NO: 226636 - DNA, 25 bp, Artificial
  Probe
aatgtggtgctcaccggcacagtgg

SEQ ID NO: 226637 - DNA, 25 bp, Artificial
  Probe
ccaggtgtccactggggacactaga

SEQ ID NO: 226638 - DNA, 25 bp, Artificial
  Probe
ctcatctgcgacaaccaggtgtcca

SEQ ID NO: 226639 - DNA, 25 bp, Artificial
  Probe
ggtgcagcacacgtactcatgcaag

SEQ ID NO: 226640 - DNA, 25 bp, Artificial
  Probe
acgtggacccggtgcagcacacgta

SEQ ID NO: 226641 - DNA, 25 bp, Artificial
  Probe
tgctcaccggcacagtggaggagat

SEQ ID NO: 226642 - DNA, 25 bp, Artificial
  Probe
acgtactcatgcaaggtccgagtgt

SEQ ID NO: 226643 - DNA, 25 bp, Artificial
  Probe
acacgtactcatgcaaggtccgagt

SEQ ID NO: 226644 - DNA, 25 bp, Artificial
  Probe
tgtggccagcccacaagaatgagtt

SEQ ID NO: 226645 - DNA, 25 bp, Artificial
  Probe
tccactggggacactagaatctttt

SEQ ID NO: 226646 - DNA, 25 bp, Artificial
  Probe
agccttatgcggatcactttgcgga

SEQ ID NO: 226647 - DNA, 25 bp, Artificial
  Probe
tcctcaacgtggacccggtgcagca

SEQ ID NO: 226648 - DNA, 25 bp, Artificial
  Probe
cagcccacaagaatgagttgatgct

SEQ ID NO: 226649 - DNA, 25 bp, Artificial
  Probe
taattggtggctttggagaccccct

SEQ ID NO: 226650 - DNA, 25 bp, Artificial
  Probe
actcatgcaaggtccgagtgtggcg

SEQ ID NO: 226651 - DNA, 25 bp, Artificial
  Probe
tggaggagatcctcaacgtggaccc

SEQ ID NO: 226652 - DNA, 25 bp, Artificial
  Probe
accggcacagtggaggagatcctca

SEQ ID NO: 226653 - DNA, 25 bp, Artificial
  Probe
ctacatgtggccagcccacaagaat

SEQ ID NO: 226654 - DNA, 25 bp, Artificial
  Probe
tgcgacaaccaggtgtccactgggg

SEQ ID NO: 226655 - DNA, 25 bp, Artificial
  Probe
gttgatgcttaactccagccttatg

SEQ ID NO: 226656 - DNA, 25 bp, Artificial
  Probe
ttatgcggatcactttgcggaacct

SEQ ID NO: 226657 - DNA, 25 bp, Artificial
  Probe
gagttgatgcttaactccagcctta

SEQ ID NO: 226658 - DNA, 25 bp, Artificial
  Probe
gcacacgtactcatgcaaggtccga

SEQ ID NO: 226659 - DNA, 25 bp, Artificial
  Probe
tgcggatcactttgcggaacctgga

SEQ ID NO: 226660 - DNA, 25 bp, Artificial
  Probe
atcctcaacgtggacccggtgcagc

SEQ ID NO: 226661 - DNA, 25 bp, Artificial
  Probe
gccttatgcggatcactttgcggaa

SEQ ID NO: 226662 - DNA, 25 bp, Artificial
  Probe
ccggtgcagcacacgtactcatgca

SEQ ID NO: 226663 - DNA, 25 bp, Artificial
  Probe
cgaatgtggtgctcaccggcacagt

SEQ ID NO: 226664 - DNA, 25 bp, Artificial
  Probe
ccactggggacactagaatcttttt

SEQ ID NO: 226665 - DNA, 25 bp, Artificial
  Probe
atgcttaactccagccttatgcgga

SEQ ID NO: 226666 - DNA, 25 bp, Artificial
  Probe
actccagccttatgcggatcacttt

SEQ ID NO: 226667 - DNA, 25 bp, Artificial
  Probe
caaccaggtgtccactggggacact

SEQ ID NO: 226668 - DNA, 25 bp, Artificial
  Probe
caaatgtgtactcgtcatacaaatg

SEQ ID NO: 226669 - DNA, 25 bp, Artificial
  Probe
tctgagtctagatccctagcaccta

SEQ ID NO: 226670 - DNA, 25 bp, Artificial
  Probe
cacatacccattaacagaggactag

SEQ ID NO: 226671 - DNA, 25 bp, Artificial
  Probe
ccgtggtcagctagcctagccagca

SEQ ID NO: 226672 - DNA, 25 bp, Artificial
  Probe
tcactctatgggtaatgtgcctgat

SEQ ID NO: 226673 - DNA, 25 bp, Artificial
  Probe
gtcagctagcctagccagcataggg

SEQ ID NO: 226674 - DNA, 25 bp, Artificial
  Probe
cacctatgtaagcagaaaggtgtgg

SEQ ID NO: 226675 - DNA, 25 bp, Artificial
  Probe
agacagatcctatgggctccgtggt

SEQ ID NO: 226676 - DNA, 25 bp, Artificial
  Probe
ggtcagctagcctagccagcatagg

SEQ ID NO: 226677 - DNA, 25 bp, Artificial
  Probe
tgacacttaatcaaagtcaaaagga

SEQ ID NO: 226678 - DNA, 25 bp, Artificial
  Probe
aacatgagtatctgagtctagatcc

SEQ ID NO: 226679 - DNA, 25 bp, Artificial
  Probe
gtgtactcgtcatacaaatgccatc

SEQ ID NO: 226680 - DNA, 25 bp, Artificial
  Probe
tagcctttaaaacttagtctatggg

SEQ ID NO: 226681 - DNA, 25 bp, Artificial
  Probe
ctgtcacaaaggaaagcatttagtc

SEQ ID NO: 226682 - DNA, 25 bp, Artificial
  Probe
gcctgataatacacaaacatgagta

SEQ ID NO: 226683 - DNA, 25 bp, Artificial
  Probe
ttgtcacaaatgtgtactcgtcata

SEQ ID NO: 226684 - DNA, 25 bp, Artificial
  Probe
cttgttttgctcaaaatgcatgtga

SEQ ID NO: 226685 - DNA, 25 bp, Artificial
  Probe
aaagcatttagtccattttagagtc

SEQ ID NO: 226686 - DNA, 25 bp, Artificial
  Probe
tagggagctccaggttcagtgagaa

SEQ ID NO: 226687 - DNA, 25 bp, Artificial
  Probe
gtcacaaatgtgtactcgtcataca

SEQ ID NO: 226688 - DNA, 25 bp, Artificial
  Probe
gatcctatgggctccgtggtcagct

SEQ ID NO: 226689 - DNA, 25 bp, Artificial
  Probe
gaaacagacagatcctatgggctcc

SEQ ID NO: 226690 - DNA, 25 bp, Artificial
  Probe
ctatgggctccgtggtcagctagcc

SEQ ID NO: 226691 - DNA, 25 bp, Artificial
  Probe
gtaatgtgcctgataatacacaaac

SEQ ID NO: 226692 - DNA, 25 bp, Artificial
  Probe
cacaaacatgagtatctgagtctag

SEQ ID NO: 226693 - DNA, 25 bp, Artificial
  Probe
atgaaaatgccgtactgaaacacta

SEQ ID NO: 226694 - DNA, 25 bp, Artificial
  Probe
ggggtcactctatgggtaatgtgcc

SEQ ID NO: 226695 - DNA, 25 bp, Artificial
  Probe
ggaaaacacttactagaatagtcag

SEQ ID NO: 226696 - DNA, 25 bp, Artificial
  Probe
tgccagggctagaggcagaaacaga

SEQ ID NO: 226697 - DNA, 25 bp, Artificial
  Probe
taatgccagggctagaggcagaaac

SEQ ID NO: 226698 - DNA, 25 bp, Artificial
  Probe
agttatctatttcctgtcacaaagg

SEQ ID NO: 226699 - DNA, 25 bp, Artificial
  Probe
cattttagagtcttcagagactttg

SEQ ID NO: 226700 - DNA, 25 bp, Artificial
  Probe
aaagcgctcatgaactgtgaccatg

SEQ ID NO: 226701 - DNA, 25 bp, Artificial
  Probe
atatattctaccaactggagtattg

SEQ ID NO: 226702 - DNA, 25 bp, Artificial
  Probe
gtttgtaatgccagggctagaggca

SEQ ID NO: 226703 - DNA, 25 bp, Artificial
  Probe
gataatacacaaacatgagtatctg

SEQ ID NO: 226704 - DNA, 25 bp, Artificial
  Probe
ctagcctagccagcatagggagctc

SEQ ID NO: 226705 - DNA, 25 bp, Artificial
  Probe
ctatgggtaatgtgcctgataatac

SEQ ID NO: 226706 - DNA, 25 bp, Artificial
  Probe
cattaacagaggactagcaaggaaa

SEQ ID NO: 226707 - DNA, 25 bp, Artificial
  Probe
gccagcatagggagctccaggttca

SEQ ID NO: 226708 - DNA, 25 bp, Artificial
  Probe
cctagccagcatagggagctccagg

SEQ ID NO: 226709 - DNA, 25 bp, Artificial
  Probe
aggggtcactctatgggtaatgtgc

SEQ ID NO: 226710 - DNA, 25 bp, Artificial
  Probe
ttagcctttaaaacttagtctatgg

SEQ ID NO: 226711 - DNA, 25 bp, Artificial
  Probe
taccaactggagtattgtacataat

SEQ ID NO: 226712 - DNA, 25 bp, Artificial
  Probe
gttatctatttcctgtcacaaagga

SEQ ID NO: 226713 - DNA, 25 bp, Artificial
  Probe
agtctagatccctagcacctatgta

SEQ ID NO: 226714 - DNA, 25 bp, Artificial
  Probe
accatccaaggctttctgtcttgct

SEQ ID NO: 226715 - DNA, 25 bp, Artificial
  Probe
tgacccagagaactggacccagcgc

SEQ ID NO: 226716 - DNA, 25 bp, Artificial
  Probe
gcacctcctgctgttgctgagccag

SEQ ID NO: 226717 - DNA, 25 bp, Artificial
  Probe
cctaccagccgctggtgtggttctg

SEQ ID NO: 226718 - DNA, 25 bp, Artificial
  Probe
ccaggcgatggcaccgggcaaaact

SEQ ID NO: 226719 - DNA, 25 bp, Artificial
  Probe
ggctggttcttcacatccaaccatt

SEQ ID NO: 226720 - DNA, 25 bp, Artificial
  Probe
tacgccagggcttcgcccaggcatg

SEQ ID NO: 226721 - DNA, 25 bp, Artificial
  Probe
tcagacacgcagagtgagcgtggct

SEQ ID NO: 226722 - DNA, 25 bp, Artificial
  Probe
gagaatctggccttcatcgacgagt

SEQ ID NO: 226723 - DNA, 25 bp, Artificial
  Probe
attgcaacccggagaggagtccaat

SEQ ID NO: 226724 - DNA, 25 bp, Artificial
  Probe
gcctcacggcgcaggctgctagctg

SEQ ID NO: 226725 - DNA, 25 bp, Artificial
  Probe
acccggagaggagtccaatggttgc

SEQ ID NO: 226726 - DNA, 25 bp, Artificial
  Probe
ggcctcagctctggattaccccagt

SEQ ID NO: 226727 - DNA, 25 bp, Artificial
  Probe
agctggaccggcacagtgacagcac

SEQ ID NO: 226728 - DNA, 25 bp, Artificial
  Probe
gctgctagctggaccggcacagtga

SEQ ID NO: 226729 - DNA, 25 bp, Artificial
  Probe
ggtgtcccgccgaactcgcgcagag

SEQ ID NO: 226730 - DNA, 25 bp, Artificial
  Probe
gtcccgccgaactcgcgcagagatg

SEQ ID NO: 226731 - DNA, 25 bp, Artificial
  Probe
ttctttgcctgcacctcctgctgtt

SEQ ID NO: 226732 - DNA, 25 bp, Artificial
  Probe
agagccctcttttgttccacggaat

SEQ ID NO: 226733 - DNA, 25 bp, Artificial
  Probe
atggcaccgggcaaaactctccagc

SEQ ID NO: 226734 - DNA, 25 bp, Artificial
  Probe
ccaaagagccctcttttgttccacg

SEQ ID NO: 226735 - DNA, 25 bp, Artificial
  Probe
tgctcaccactatcggcaactggtt

SEQ ID NO: 226736 - DNA, 25 bp, Artificial
  Probe
cacggaattgcaacccggagaggag

SEQ ID NO: 226737 - DNA, 25 bp, Artificial
  Probe
gtcttgcttccctgccgattttgcc

SEQ ID NO: 226738 - DNA, 25 bp, Artificial
  Probe
acccgcagagaaggtcgagactcct

SEQ ID NO: 226739 - DNA, 25 bp, Artificial
  Probe
aggagtccaatggttgccaaatgcc

SEQ ID NO: 226740 - DNA, 25 bp, Artificial
  Probe
caactggttgcgagcggtgtcccgc

SEQ ID NO: 226741 - DNA, 25 bp, Artificial
  Probe
tggcctagcctacttcgcctcagtg

SEQ ID NO: 226742 - DNA, 25 bp, Artificial
  Probe
cgcacccgcagagaaggtcgagact

SEQ ID NO: 226743 - DNA, 25 bp, Artificial
  Probe
tcctgtttggcctagcctacttcgc

SEQ ID NO: 226744 - DNA, 25 bp, Artificial
  Probe
aactcgcgcagagatgggtggcctc

SEQ ID NO: 226745 - DNA, 25 bp, Artificial
  Probe
tcagtgctcaccactatcggcaact

SEQ ID NO: 226746 - DNA, 25 bp, Artificial
  Probe
ttgcgagcggtgtcccgccgaactc

SEQ ID NO: 226747 - DNA, 25 bp, Artificial
  Probe
ctcttccctggctggttcttcacat

SEQ ID NO: 226748 - DNA, 25 bp, Artificial
  Probe
ctcttttgttccacggaattgcaac

SEQ ID NO: 226749 - DNA, 25 bp, Artificial
  Probe
cgccgccagagaaggagcaaccact

SEQ ID NO: 226750 - DNA, 25 bp, Artificial
  Probe
acgtaccaggcgatggcaccgggca

SEQ ID NO: 226751 - DNA, 25 bp, Artificial
  Probe
ctatcggcaactggttgcgagcggt

SEQ ID NO: 226752 - DNA, 25 bp, Artificial
  Probe
tgagcgtggctgtgccctgcctcgt

SEQ ID NO: 226753 - DNA, 25 bp, Artificial
  Probe
agtgagcgtggctgtgccctgcctc

SEQ ID NO: 226754 - DNA, 25 bp, Artificial
  Probe
ctcgcgcagagatgggtggcctcac

SEQ ID NO: 226755 - DNA, 25 bp, Artificial
  Probe
atggttgccaaatgccaccgctctt

SEQ ID NO: 226756 - DNA, 25 bp, Artificial
  Probe
agggcttcgcccaggcatgcttagc

SEQ ID NO: 226757 - DNA, 25 bp, Artificial
  Probe
atttgaccaaagagccctcttttgt

SEQ ID NO: 226758 - DNA, 25 bp, Artificial
  Probe
cacggcgcaggctgctagctggacc

SEQ ID NO: 226759 - DNA, 25 bp, Artificial
  Probe
cacgactgtgcctcaaaacctgcat

SEQ ID NO: 226760 - DNA, 25 bp, Artificial
  Probe
ctcctaattagatgctgggaaggaa

SEQ ID NO: 226761 - DNA, 25 bp, Artificial
  Probe
aagcgagcgtagctcctctgggctg

SEQ ID NO: 226762 - DNA, 25 bp, Artificial
  Probe
agcgagcgtagctcctctgggctgc

SEQ ID NO: 226763 - DNA, 25 bp, Artificial
  Probe
agcacgcctcctaattagatgctgg

SEQ ID NO: 226764 - DNA, 25 bp, Artificial
  Probe
acagcacgcctcctaattagatgct

SEQ ID NO: 226765 - DNA, 25 bp, Artificial
  Probe
ctgttcatacatttgtgctgcccat

SEQ ID NO: 226766 - DNA, 25 bp, Artificial
  Probe
tttcctgttcatacatttgtgctgc

SEQ ID NO: 226767 - DNA, 25 bp, Artificial
  Probe
acgcctcctaattagatgctgggaa

SEQ ID NO: 226768 - DNA, 25 bp, Artificial
  Probe
cctgttcatacatttgtgctgccca

SEQ ID NO: 226769 - DNA, 25 bp, Artificial
  Probe
gcgagcgtagctcctctgggctgct

SEQ ID NO: 226770 - DNA, 25 bp, Artificial
  Probe
tcatacatttgtgctgcccatgtat

SEQ ID NO: 226771 - DNA, 25 bp, Artificial
  Probe
agcgtagctcctctgggctgctgga

SEQ ID NO: 226772 - DNA, 25 bp, Artificial
  Probe
tgttcatacatttgtgctgcccatg

SEQ ID NO: 226773 - DNA, 25 bp, Artificial
  Probe
ttcctgttcatacatttgtgctgcc

SEQ ID NO: 226774 - DNA, 25 bp, Artificial
  Probe
agtagaggcttaaccacaacaaatg

SEQ ID NO: 226775 - DNA, 25 bp, Artificial
  Probe
cacgcctcctaattagatgctggga

SEQ ID NO: 226776 - DNA, 25 bp, Artificial
  Probe
gcctcctaattagatgctgggaagg

SEQ ID NO: 226777 - DNA, 25 bp, Artificial
  Probe
cgagcgtagctcctctgggctgctg

SEQ ID NO: 226778 - DNA, 25 bp, Artificial
  Probe
tcctgttcatacatttgtgctgccc

SEQ ID NO: 226779 - DNA, 25 bp, Artificial
  Probe
gcacgcctcctaattagatgctggg

SEQ ID NO: 226780 - DNA, 25 bp, Artificial
  Probe
ttcatacatttgtgctgcccatgta

SEQ ID NO: 226781 - DNA, 25 bp, Artificial
  Probe
cgcctcctaattagatgctgggaag

SEQ ID NO: 226782 - DNA, 25 bp, Artificial
  Probe
cagcacgcctcctaattagatgctg

SEQ ID NO: 226783 - DNA, 25 bp, Artificial
  Probe
ttttcaggcaaaagcgagcgtagct

SEQ ID NO: 226784 - DNA, 25 bp, Artificial
  Probe
cctcctaattagatgctgggaagga

SEQ ID NO: 226785 - DNA, 25 bp, Artificial
  Probe
catacatttgtgctgcccatgtatc

SEQ ID NO: 226786 - DNA, 25 bp, Artificial
  Probe
gttcatacatttgtgctgcccatgt

SEQ ID NO: 226787 - DNA, 25 bp, Artificial
  Probe
aaagcgagcgtagctcctctgggct

SEQ ID NO: 226788 - DNA, 25 bp, Artificial
  Probe
atacatttgtgctgcccatgtatct

SEQ ID NO: 226789 - DNA, 25 bp, Artificial
  Probe
ttcttcgtggctatgagcagcaggg

SEQ ID NO: 226790 - DNA, 25 bp, Artificial
  Probe
agccggttcttcgtggctatgagca

SEQ ID NO: 226791 - DNA, 25 bp, Artificial
  Probe
taccccggtatgttcatggccctca

SEQ ID NO: 226792 - DNA, 25 bp, Artificial
  Probe
ggggcaagctcttcggtgtgccttt

SEQ ID NO: 226793 - DNA, 25 bp, Artificial
  Probe
cggtgtgcctttctttaccgacgag

SEQ ID NO: 226794 - DNA, 25 bp, Artificial
  Probe
catggccctcagtaagaacgggcgg

SEQ ID NO: 226795 - DNA, 25 bp, Artificial
  Probe
gtggccagccggttcttcgtggcta

SEQ ID NO: 226796 - DNA, 25 bp, Artificial
  Probe
ttctttaccgacgagtgtaaattca

SEQ ID NO: 226797 - DNA, 25 bp, Artificial
  Probe
gctatgagcagcaggggcaagctct

SEQ ID NO: 226798 - DNA, 25 bp, Artificial
  Probe
ccggtatgttcatggccctcagtaa

SEQ ID NO: 226799 - DNA, 25 bp, Artificial
  Probe
ttcatggccctcagtaagaacgggc

SEQ ID NO: 226800 - DNA, 25 bp, Artificial
  Probe
cagccggttcttcgtggctatgagc

SEQ ID NO: 226801 - DNA, 25 bp, Artificial
  Probe
aggggcaagctcttcggtgtgcctt

SEQ ID NO: 226802 - DNA, 25 bp, Artificial
  Probe
gaatcctacgcgtaccccggtatgt

SEQ ID NO: 226803 - DNA, 25 bp, Artificial
  Probe
gcatcttcggagtggccagccggtt

SEQ ID NO: 226804 - DNA, 25 bp, Artificial
  Probe
gccagccggttcttcgtggctatga

SEQ ID NO: 226805 - DNA, 25 bp, Artificial
  Probe
ggtgtgcctttctttaccgacgagt

SEQ ID NO: 226806 - DNA, 25 bp, Artificial
  Probe
tcatggccctcagtaagaacgggcg

SEQ ID NO: 226807 - DNA, 25 bp, Artificial
  Probe
ttcggtgtgcctttctttaccgacg

SEQ ID NO: 226808 - DNA, 25 bp, Artificial
  Probe
ttcggagtggccagccggttcttcg

SEQ ID NO: 226809 - DNA, 25 bp, Artificial
  Probe
accccggtatgttcatggccctcag

SEQ ID NO: 226810 - DNA, 25 bp, Artificial
  Probe
atggccctcagtaagaacgggcgga

SEQ ID NO: 226811 - DNA, 25 bp, Artificial
  Probe
tttaccgacgagtgtaaattcaaag

SEQ ID NO: 226812 - DNA, 25 bp, Artificial
  Probe
ttaccgacgagtgtaaattcaaaga

SEQ ID NO: 226813 - DNA, 25 bp, Artificial
  Probe
gttcttcgtggctatgagcagcagg

SEQ ID NO: 226814 - DNA, 25 bp, Artificial
  Probe
agcatcttcggagtggccagccggt

SEQ ID NO: 226815 - DNA, 25 bp, Artificial
  Probe
agctcttcggtgtgcctttctttac

SEQ ID NO: 226816 - DNA, 25 bp, Artificial
  Probe
tctttaccgacgagtgtaaattcaa

SEQ ID NO: 226817 - DNA, 25 bp, Artificial
  Probe
tgtgcctttctttaccgacgagtgt

SEQ ID NO: 226818 - DNA, 25 bp, Artificial
  Probe
gccggttcttcgtggctatgagcag

SEQ ID NO: 226819 - DNA, 25 bp, Artificial
  Probe
ccagccggttcttcgtggctatgag

SEQ ID NO: 226820 - DNA, 25 bp, Artificial
  Probe
gtgcctttctttaccgacgagtgta

SEQ ID NO: 226821 - DNA, 25 bp, Artificial
  Probe
acaacgcctacgaatcctacgcgta

SEQ ID NO: 226822 - DNA, 25 bp, Artificial
  Probe
tacaacgcctacgaatcctacgcgt

SEQ ID NO: 226823 - DNA, 25 bp, Artificial
  Probe
aagctcttcggtgtgcctttcttta

SEQ ID NO: 226824 - DNA, 25 bp, Artificial
  Probe
tcggtgtgcctttctttaccgacga

SEQ ID NO: 226825 - DNA, 25 bp, Artificial
  Probe
tggccctcagtaagaacgggcggac

SEQ ID NO: 226826 - DNA, 25 bp, Artificial
  Probe
caagctcttcggtgtgcctttcttt

SEQ ID NO: 226827 - DNA, 25 bp, Artificial
  Probe
tgttcatggccctcagtaagaacgg

SEQ ID NO: 226828 - DNA, 25 bp, Artificial
  Probe
caggggcaagctcttcggtgtgcct

SEQ ID NO: 226829 - DNA, 25 bp, Artificial
  Probe
cccggtatgttcatggccctcagta

SEQ ID NO: 226830 - DNA, 25 bp, Artificial
  Probe
gttcatggccctcagtaagaacggg

SEQ ID NO: 226831 - DNA, 25 bp, Artificial
  Probe
gtaccccggtatgttcatggccctc

SEQ ID NO: 226832 - DNA, 25 bp, Artificial
  Probe
cgcgtaccccggtatgttcatggcc

SEQ ID NO: 226833 - DNA, 25 bp, Artificial
  Probe
cgtaccccggtatgttcatggccct

SEQ ID NO: 226834 - DNA, 25 bp, Artificial
  Probe
ggccagccggttcttcgtggctatg

SEQ ID NO: 226835 - DNA, 25 bp, Artificial
  Probe
caggaactggtatccgttcggagag

SEQ ID NO: 226836 - DNA, 25 bp, Artificial
  Probe
aactggtatccgttcggagagtgag

SEQ ID NO: 226837 - DNA, 25 bp, Artificial
  Probe
atgccgattgcaaggaagatcatta

SEQ ID NO: 226838 - DNA, 25 bp, Artificial
  Probe
cagtcccacaggtccctgttgaagg

SEQ ID NO: 226839 - DNA, 25 bp, Artificial
  Probe
ccgttcggagagtgagacagagtct

SEQ ID NO: 226840 - DNA, 25 bp, Artificial
  Probe
gattgaatccctatcatggaataca

SEQ ID NO: 226841 - DNA, 25 bp, Artificial
  Probe
aagcctctgtgaatattttcatctg

SEQ ID NO: 226842 - DNA, 25 bp, Artificial
  Probe
tccctgacagggaatgggtggataa

SEQ ID NO: 226843 - DNA, 25 bp, Artificial
  Probe
gaatccctatcatggaatacacaag

SEQ ID NO: 226844 - DNA, 25 bp, Artificial
  Probe
agagcagtcaggaactggtatccgt

SEQ ID NO: 226845 - DNA, 25 bp, Artificial
  Probe
tggatagtagtttgcccacagttgg

SEQ ID NO: 226846 - DNA, 25 bp, Artificial
  Probe
taaagacggtgagcaacatgaagac

SEQ ID NO: 226847 - DNA, 25 bp, Artificial
  Probe
ggaacgtctttaaccgaatgccgat

SEQ ID NO: 226848 - DNA, 25 bp, Artificial
  Probe
tgggtcctgatgttggctatgaagc

SEQ ID NO: 226849 - DNA, 25 bp, Artificial
  Probe
tctttaaccgaatgccgattgcaag

SEQ ID NO: 226850 - DNA, 25 bp, Artificial
  Probe
atcttctacctcagggacaaagttg

SEQ ID NO: 226851 - DNA, 25 bp, Artificial
  Probe
tgtttttgcaaaagcaactgcacaa

SEQ ID NO: 226852 - DNA, 25 bp, Artificial
  Probe
agacaacccaaaatctgccacagag

SEQ ID NO: 226853 - DNA, 25 bp, Artificial
  Probe
ctgcagtcccacaggtccctgttga

SEQ ID NO: 226854 - DNA, 25 bp, Artificial
  Probe
actggtatccgttcggagagtgaga

SEQ ID NO: 226855 - DNA, 25 bp, Artificial
  Probe
ccaaaatctgccacagagcagtcag

SEQ ID NO: 226856 - DNA, 25 bp, Artificial
  Probe
agattgaatccctatcatggaatac

SEQ ID NO: 226857 - DNA, 25 bp, Artificial
  Probe
aaccgaatgccgattgcaaggaaga

SEQ ID NO: 226858 - DNA, 25 bp, Artificial
  Probe
tgagcaacatgaagacctcaatgaa

SEQ ID NO: 226859 - DNA, 25 bp, Artificial
  Probe
caatgttctggagtgatttgggtcc

SEQ ID NO: 226860 - DNA, 25 bp, Artificial
  Probe
agatcattaaagacggtgagcaaca

SEQ ID NO: 226861 - DNA, 25 bp, Artificial
  Probe
cctgatgttggctatgaagctattg

SEQ ID NO: 226862 - DNA, 25 bp, Artificial
  Probe
gaggactacggcaaaggtgtcatct

SEQ ID NO: 226863 - DNA, 25 bp, Artificial
  Probe
gattgtgctatggaacgtctttaac

SEQ ID NO: 226864 - DNA, 25 bp, Artificial
  Probe
caacccaaaatctgccacagagcag

SEQ ID NO: 226865 - DNA, 25 bp, Artificial
  Probe
gtatccgttcggagagtgagacaga

SEQ ID NO: 226866 - DNA, 25 bp, Artificial
  Probe
cacagttggtgtttttgcaaaagca

SEQ ID NO: 226867 - DNA, 25 bp, Artificial
  Probe
ccctgacagggaatgggtggataaa

SEQ ID NO: 226868 - DNA, 25 bp, Artificial
  Probe
ttccatccctgacagggaatgggtg

SEQ ID NO: 226869 - DNA, 25 bp, Artificial
  Probe
agtagtttgcccacagttggtgttt

SEQ ID NO: 226870 - DNA, 25 bp, Artificial
  Probe
caagcacttttccatccctgacagg

SEQ ID NO: 226871 - DNA, 25 bp, Artificial
  Probe
gtctgaagcttctgaaatcacaatc

SEQ ID NO: 226872 - DNA, 25 bp, Artificial
  Probe
caggaatcgaacaagcctctgtgaa

SEQ ID NO: 226873 - DNA, 25 bp, Artificial
  Probe
cccacaggtccctgttgaaggggag

SEQ ID NO: 226874 - DNA, 25 bp, Artificial
  Probe
gacagagtctgaagcttctgaaatc

SEQ ID NO: 226875 - DNA, 25 bp, Artificial
  Probe
gcaaaagcaactgcacaagacaacc

SEQ ID NO: 226876 - DNA, 25 bp, Artificial
  Probe
tacggcaaaggtgtcatcttctacc

SEQ ID NO: 226877 - DNA, 25 bp, Artificial
  Probe
ctttatgtaggagcaggaatcgaac

SEQ ID NO: 226878 - DNA, 25 bp, Artificial
  Probe
caaaggtgtcatcttctacctcagg

SEQ ID NO: 226879 - DNA, 25 bp, Artificial
  Probe
gacctcaatgaagtagccaaactct

SEQ ID NO: 226880 - DNA, 25 bp, Artificial
  Probe
cagtcaggaactggtatccgttcgg

SEQ ID NO: 226881 - DNA, 25 bp, Artificial
  Probe
agccctggtatgagcccatgtacct

SEQ ID NO: 226882 - DNA, 25 bp, Artificial
  Probe
tcaaaactcgagtgacaagcccgta

SEQ ID NO: 226883 - DNA, 25 bp, Artificial
  Probe
gatcatcttctcaaaactcgagtga

SEQ ID NO: 226884 - DNA, 25 bp, Artificial
  Probe
ctgaggtcaacctgcccaagtactt

SEQ ID NO: 226885 - DNA, 25 bp, Artificial
  Probe
gccctcctggccaatggcatggatc

SEQ ID NO: 226886 - DNA, 25 bp, Artificial
  Probe
actcgagtgacaagcccgtagccca

SEQ ID NO: 226887 - DNA, 25 bp, Artificial
  Probe
ttcataccaggagaaagtcagcctc

SEQ ID NO: 226888 - DNA, 25 bp, Artificial
  Probe
catcaagagcccttgccctaaggac

SEQ ID NO: 226889 - DNA, 25 bp, Artificial
  Probe
agatcatcttctcaaaactcgagtg

SEQ ID NO: 226890 - DNA, 25 bp, Artificial
  Probe
cttcaagggacaaggctgccccgac

SEQ ID NO: 226891 - DNA, 25 bp, Artificial
  Probe
gtatgagcccatgtacctgggagga

SEQ ID NO: 226892 - DNA, 25 bp, Artificial
  Probe
tagacatcacggagtccgggcaggt

SEQ ID NO: 226893 - DNA, 25 bp, Artificial
  Probe
tgacaagcccgtagcccacgtcgta

SEQ ID NO: 226894 - DNA, 25 bp, Artificial
  Probe
atcttctcaaaactcgagtgacaag

SEQ ID NO: 226895 - DNA, 25 bp, Artificial
  Probe
tgccctaaggacacccctgagggag

SEQ ID NO: 226896 - DNA, 25 bp, Artificial
  Probe
cagcagatgggctgtaccttatcta

SEQ ID NO: 226897 - DNA, 25 bp, Artificial
  Probe
tgggctgtaccttatctactcccag

SEQ ID NO: 226898 - DNA, 25 bp, Artificial
  Probe
atctactcccaggttctcttcaagg

SEQ ID NO: 226899 - DNA, 25 bp, Artificial
  Probe
tcataccaggagaaagtcagcctcc

SEQ ID NO: 226900 - DNA, 25 bp, Artificial
  Probe
aggacacccctgagggagctgagct

SEQ ID NO: 226901 - DNA, 25 bp, Artificial
  Probe
aagacaaccaactggtggtaccagc

SEQ ID NO: 226902 - DNA, 25 bp, Artificial
  Probe
gcgctgaggtcaacctgcccaagta

SEQ ID NO: 226903 - DNA, 25 bp, Artificial
  Probe
agcagatgggctgtaccttatctac

SEQ ID NO: 226904 - DNA, 25 bp, Artificial
  Probe
caaagacaaccaactggtggtacca

SEQ ID NO: 226905 - DNA, 25 bp, Artificial
  Probe
aggttctcttcaagggacaaggctg

SEQ ID NO: 226906 - DNA, 25 bp, Artificial
  Probe
cttgccctaaggacacccctgaggg

SEQ ID NO: 226907 - DNA, 25 bp, Artificial
  Probe
agtccgggcaggtctactttggagt

SEQ ID NO: 226908 - DNA, 25 bp, Artificial
  Probe
taaggacacccctgagggagctgag

SEQ ID NO: 226909 - DNA, 25 bp, Artificial
  Probe
tctcttcaagggacaaggctgcccc

SEQ ID NO: 226910 - DNA, 25 bp, Artificial
  Probe
tcagcgctgaggtcaacctgcccaa

SEQ ID NO: 226911 - DNA, 25 bp, Artificial
  Probe
aaactcgagtgacaagcccgtagcc

SEQ ID NO: 226912 - DNA, 25 bp, Artificial
  Probe
aactggtggtaccagcagatgggct

SEQ ID NO: 226913 - DNA, 25 bp, Artificial
  Probe
tgggctccctctcatcagttccatg

SEQ ID NO: 226914 - DNA, 25 bp, Artificial
  Probe
gctgtaccttatctactcccaggtt

SEQ ID NO: 226915 - DNA, 25 bp, Artificial
  Probe
cctgcccaagtacttagacatcacg

SEQ ID NO: 226916 - DNA, 25 bp, Artificial
  Probe
cagatgggctgtaccttatctactc

SEQ ID NO: 226917 - DNA, 25 bp, Artificial
  Probe
agtggctgagccagcgtgccaacgc

SEQ ID NO: 226918 - DNA, 25 bp, Artificial
  Probe
gacatcacggagtccgggcaggtct

SEQ ID NO: 226919 - DNA, 25 bp, Artificial
  Probe
atcaagagcccttgccctaaggaca

SEQ ID NO: 226920 - DNA, 25 bp, Artificial
  Probe
tacttagacatcacggagtccgggc

SEQ ID NO: 226921 - DNA, 25 bp, Artificial
  Probe
gtcaacctgcccaagtacttagaca

SEQ ID NO: 226922 - DNA, 25 bp, Artificial
  Probe
tctgtctactgaacttcggggtgat

SEQ ID NO: 226923 - DNA, 25 bp, Artificial
  Probe
agtacttagacatcacggagtccgg

SEQ ID NO: 226924 - DNA, 25 bp, Artificial
  Probe
tggtatgagcccatgtacctgggag

SEQ ID NO: 226925 - DNA, 25 bp, Artificial
  Probe
gtgacaagcccgtagcccacgtcgt

SEQ ID NO: 226926 - DNA, 25 bp, Artificial
  Probe
ttgccctaaggacacccctgaggga

SEQ ID NO: 226927 - DNA, 25 bp, Artificial
  Probe
cagccaatggtcagcggtacagcca

SEQ ID NO: 226928 - DNA, 25 bp, Artificial
  Probe
ttgtgccactgctggccatggtcct

SEQ ID NO: 226929 - DNA, 25 bp, Artificial
  Probe
gccatggtcctgtgctatggggcca

SEQ ID NO: 226930 - DNA, 25 bp, Artificial
  Probe
gcctggctgtcctgggctgctttgt

SEQ ID NO: 226931 - DNA, 25 bp, Artificial
  Probe
tcgtgcactggcagccaatggtcag

SEQ ID NO: 226932 - DNA, 25 bp, Artificial
  Probe
cttcctattggctggctccgatcgc

SEQ ID NO: 226933 - DNA, 25 bp, Artificial
  Probe
atgcgctgccattggcggagcagac

SEQ ID NO: 226934 - DNA, 25 bp, Artificial
  Probe
ctattggctggctccgatcgcatgc

SEQ ID NO: 226935 - DNA, 25 bp, Artificial
  Probe
tgttctcagcagtggccgctttcac

SEQ ID NO: 226936 - DNA, 25 bp, Artificial
  Probe
ctgcctggctgtcctgggctgcttt

SEQ ID NO: 226937 - DNA, 25 bp, Artificial
  Probe
acccttcgtgcactggcagccaatg

SEQ ID NO: 226938 - DNA, 25 bp, Artificial
  Probe
cccttcgtgcactggcagccaatgg

SEQ ID NO: 226939 - DNA, 25 bp, Artificial
  Probe
gtcatgatgcgctgccattggcgga

SEQ ID NO: 226940 - DNA, 25 bp, Artificial
  Probe
ccgatcgcatgctgtgtcatgatgc

SEQ ID NO: 226941 - DNA, 25 bp, Artificial
  Probe
agccctgaggcctggggcaatctct

SEQ ID NO: 226942 - DNA, 25 bp, Artificial
  Probe
tgccattggcggagcagacctccca

SEQ ID NO: 226943 - DNA, 25 bp, Artificial
  Probe
actgacagccctggtcctgttctca

SEQ ID NO: 226944 - DNA, 25 bp, Artificial
  Probe
gctttgtgccactgctggccatggt

SEQ ID NO: 226945 - DNA, 25 bp, Artificial
  Probe
tattcaaacccaagccctgaggcct

SEQ ID NO: 226946 - DNA, 25 bp, Artificial
  Probe
agacctcccattggagaccggcctt

SEQ ID NO: 226947 - DNA, 25 bp, Artificial
  Probe
aatggtcagcggtacagccatgcag

SEQ ID NO: 226948 - DNA, 25 bp, Artificial
  Probe
gctgtgtcatgatgcgctgccattg

SEQ ID NO: 226949 - DNA, 25 bp, Artificial
  Probe
acctagcaatgtgcttctggtgctg

SEQ ID NO: 226950 - DNA, 25 bp, Artificial
  Probe
gaccggccttcatctgcctggctgt

SEQ ID NO: 226951 - DNA, 25 bp, Artificial
  Probe
agcagtggccgctttcacacctagc

SEQ ID NO: 226952 - DNA, 25 bp, Artificial
  Probe
ggctccgatcgcatgctgtgtcatg

SEQ ID NO: 226953 - DNA, 25 bp, Artificial
  Probe
agcagacctcccattggagaccggc

SEQ ID NO: 226954 - DNA, 25 bp, Artificial
  Probe
tgggctgctttgtgccactgctggc

SEQ ID NO: 226955 - DNA, 25 bp, Artificial
  Probe
gactctgtttggtggcctggctctc

SEQ ID NO: 226956 - DNA, 25 bp, Artificial
  Probe
agaccttcctattggctggctccga

SEQ ID NO: 226957 - DNA, 25 bp, Artificial
  Probe
agcggtacagccatgcagtgagact

SEQ ID NO: 226958 - DNA, 25 bp, Artificial
  Probe
gctgtcctgggctgctttgtgccac

SEQ ID NO: 226959 - DNA, 25 bp, Artificial
  Probe
tgctatggggccacccttcgtgcac

SEQ ID NO: 226960 - DNA, 25 bp, Artificial
  Probe
atggggccacccttcgtgcactggc

SEQ ID NO: 226961 - DNA, 25 bp, Artificial
  Probe
ctggtgctgcactattcaaacccaa

SEQ ID NO: 226962 - DNA, 25 bp, Artificial
  Probe
aggcctggggcaatctctatggagc

SEQ ID NO: 226963 - DNA, 25 bp, Artificial
  Probe
agtgagactgacagccctggtcctg

SEQ ID NO: 226964 - DNA, 25 bp, Artificial
  Probe
ggtcctgtgctatggggccaccctt

SEQ ID NO: 226965 - DNA, 25 bp, Artificial
  Probe
atggtcagcggtacagccatgcagt

SEQ ID NO: 226966 - DNA, 25 bp, Artificial
  Probe
tggagaccggccttcatctgcctgg

SEQ ID NO: 226967 - DNA, 25 bp, Artificial
  Probe
ccttcatctgcctggctgtcctggg

SEQ ID NO: 226968 - DNA, 25 bp, Artificial
  Probe
tgtttggtggcctggctctctgcag

SEQ ID NO: 226969 - DNA, 25 bp, Artificial
  Probe
tagtcttgccactcacgtttcatcg

SEQ ID NO: 226970 - DNA, 25 bp, Artificial
  Probe
ccactgctggccatggtcctgtgct

SEQ ID NO: 226971 - DNA, 25 bp, Artificial
  Probe
actcacgtttcatcggcagaccttc

SEQ ID NO: 226972 - DNA, 25 bp, Artificial
  Probe
cgtttcatcggcagaccttcctatt

SEQ ID NO: 226973 - DNA, 25 bp, Artificial
  Probe
gtatctcatagctctctgcctgggc

SEQ ID NO: 226974 - DNA, 25 bp, Artificial
  Probe
ggcagcctgaatagttgcctagatc

SEQ ID NO: 226975 - DNA, 25 bp, Artificial
  Probe
cagcaacactgatagcttgtacttt

SEQ ID NO: 226976 - DNA, 25 bp, Artificial
  Probe
atgtatctcatagctctctgcctgg

SEQ ID NO: 226977 - DNA, 25 bp, Artificial
  Probe
tatctcatagctctctgcctgggca

SEQ ID NO: 226978 - DNA, 25 bp, Artificial
  Probe
ctgggcagcctgaatagttgcctag

SEQ ID NO: 226979 - DNA, 25 bp, Artificial
  Probe
ctctgcctgggcagcctgaatagtt

SEQ ID NO: 226980 - DNA, 25 bp, Artificial
  Probe
cctgggcagcctgaatagttgccta

SEQ ID NO: 226981 - DNA, 25 bp, Artificial
  Probe
actgatagcttgtactttatgtatc

SEQ ID NO: 226982 - DNA, 25 bp, Artificial
  Probe
acactgatagcttgtactttatgta

SEQ ID NO: 226983 - DNA, 25 bp, Artificial
  Probe
tctcatagctctctgcctgggcagc

SEQ ID NO: 226984 - DNA, 25 bp, Artificial
  Probe
accatctgctttgcccccaccaaca

SEQ ID NO: 226985 - DNA, 25 bp, Artificial
  Probe
actactacagcaacactgatagctt

SEQ ID NO: 226986 - DNA, 25 bp, Artificial
  Probe
actacagcaacactgatagcttgta

SEQ ID NO: 226987 - DNA, 25 bp, Artificial
  Probe
caacactgatagcttgtactttatg

SEQ ID NO: 226988 - DNA, 25 bp, Artificial
  Probe
agcctgaatagttgcctagatccat

SEQ ID NO: 226989 - DNA, 25 bp, Artificial
  Probe
tgaatagttgcctagatccattcct

SEQ ID NO: 226990 - DNA, 25 bp, Artificial
  Probe
tacagcaacactgatagcttgtact

SEQ ID NO: 226991 - DNA, 25 bp, Artificial
  Probe
agcttgtactttatgtatctcatag

SEQ ID NO: 226992 - DNA, 25 bp, Artificial
  Probe
acagcaacactgatagcttgtactt

SEQ ID NO: 226993 - DNA, 25 bp, Artificial
  Probe
tagctctctgcctgggcagcctgaa

SEQ ID NO: 226994 - DNA, 25 bp, Artificial
  Probe
atctcatagctctctgcctgggcag

SEQ ID NO: 226995 - DNA, 25 bp, Artificial
  Probe
gatagcttgtactttatgtatctca

SEQ ID NO: 226996 - DNA, 25 bp, Artificial
  Probe
ctgatagcttgtactttatgtatct

SEQ ID NO: 226997 - DNA, 25 bp, Artificial
  Probe
atgtgattttcaccatctgctttgc

SEQ ID NO: 226998 - DNA, 25 bp, Artificial
  Probe
catgtgattttcaccatctgctttg

SEQ ID NO: 226999 - DNA, 25 bp, Artificial
  Probe
tgatagcttgtactttatgtatctc

SEQ ID NO: 227000 - DNA, 25 bp, Artificial
  Probe
tatgtatctcatagctctctgcctg

SEQ ID NO: 227001 - DNA, 25 bp, Artificial
  Probe
ctactacagcaacactgatagcttg

SEQ ID NO: 227002 - DNA, 25 bp, Artificial
  Probe
tgtatctcatagctctctgcctggg

SEQ ID NO: 227003 - DNA, 25 bp, Artificial
  Probe
gcctgaatagttgcctagatccatt

SEQ ID NO: 227004 - DNA, 25 bp, Artificial
  Probe
aacactgatagcttgtactttatgt

SEQ ID NO: 227005 - DNA, 25 bp, Artificial
  Probe
gcaacactgatagcttgtactttat

SEQ ID NO: 227006 - DNA, 25 bp, Artificial
  Probe
tgggcagcctgaatagttgcctaga

SEQ ID NO: 227007 - DNA, 25 bp, Artificial
  Probe
gcagcctgaatagttgcctagatcc

SEQ ID NO: 227008 - DNA, 25 bp, Artificial
  Probe
gcctgggcagcctgaatagttgcct

SEQ ID NO: 227009 - DNA, 25 bp, Artificial
  Probe
gtgattttcaccatctgctttgccc

SEQ ID NO: 227010 - DNA, 25 bp, Artificial
  Probe
atagcttgtactttatgtatctcat

SEQ ID NO: 227011 - DNA, 25 bp, Artificial
  Probe
ctacagcaacactgatagcttgtac

SEQ ID NO: 227012 - DNA, 25 bp, Artificial
  Probe
ccccaccaacatcatactcataatt

SEQ ID NO: 227013 - DNA, 25 bp, Artificial
  Probe
tactacagcaacactgatagcttgt

SEQ ID NO: 227014 - DNA, 25 bp, Artificial
  Probe
cactgatagcttgtactttatgtat

SEQ ID NO: 227015 - DNA, 25 bp, Artificial
  Probe
cagcctgaatagttgcctagatcca

SEQ ID NO: 227016 - DNA, 25 bp, Artificial
  Probe
agcaacactgatagcttgtacttta

SEQ ID NO: 227017 - DNA, 25 bp, Artificial
  Probe
tgtgattttcaccatctgctttgcc

SEQ ID NO: 227018 - DNA, 25 bp, Artificial
  Probe
gaatagttgcctagatccattcctt

SEQ ID NO: 227019 - DNA, 25 bp, Artificial
  Probe
cctatactttgtgaatagataacag

SEQ ID NO: 227020 - DNA, 25 bp, Artificial
  Probe
gaactaaacctggaagaaggactgc

SEQ ID NO: 227021 - DNA, 25 bp, Artificial
  Probe
tatcagtgaggtttaccaaacacac

SEQ ID NO: 227022 - DNA, 25 bp, Artificial
  Probe
gattatcctcaagtgtagatttctc

SEQ ID NO: 227023 - DNA, 25 bp, Artificial
  Probe
acgtagccagtgagggcaaaacgag

SEQ ID NO: 227024 - DNA, 25 bp, Artificial
  Probe
tgaggtttaccaaacacacaggcag

SEQ ID NO: 227025 - DNA, 25 bp, Artificial
  Probe
agccccataatttagattaagcttg

SEQ ID NO: 227026 - DNA, 25 bp, Artificial
  Probe
atcgtcaaccccagtcagtaagata

SEQ ID NO: 227027 - DNA, 25 bp, Artificial
  Probe
cttaatccaaatcaaccgaggtcag

SEQ ID NO: 227028 - DNA, 25 bp, Artificial
  Probe
gttgtatcgtcaaccccagtcagta

SEQ ID NO: 227029 - DNA, 25 bp, Artificial
  Probe
cttgtgctgtactttgtgcgtagaa

SEQ ID NO: 227030 - DNA, 25 bp, Artificial
  Probe
ttgagttgtatcgtcaaccccagtc

SEQ ID NO: 227031 - DNA, 25 bp, Artificial
  Probe
aaacgagggctctataacagaacct

SEQ ID NO: 227032 - DNA, 25 bp, Artificial
  Probe
caaacaaattctgtgaactgtgctg

SEQ ID NO: 227033 - DNA, 25 bp, Artificial
  Probe
gccccataatttagattaagcttgt

SEQ ID NO: 227034 - DNA, 25 bp, Artificial
  Probe
acgagggctctataacagaacctta

SEQ ID NO: 227035 - DNA, 25 bp, Artificial
  Probe
ggcaaatccatgagccacaatgaat

SEQ ID NO: 227036 - DNA, 25 bp, Artificial
  Probe
tgtgaactgtgctgttttcttggct

SEQ ID NO: 227037 - DNA, 25 bp, Artificial
  Probe
atatttaacagcacgaatgctggtc

SEQ ID NO: 227038 - DNA, 25 bp, Artificial
  Probe
attatcaatgaactaaacctggaag

SEQ ID NO: 227039 - DNA, 25 bp, Artificial
  Probe
tctgtgtcaattagaactgtagcat

SEQ ID NO: 227040 - DNA, 25 bp, Artificial
  Probe
tccaggtgctgttgaattcttctaa

SEQ ID NO: 227041 - DNA, 25 bp, Artificial
  Probe
gcagagttccctattctatctgcca

SEQ ID NO: 227042 - DNA, 25 bp, Artificial
  Probe
atctgaattggcatctgagactcag

SEQ ID NO: 227043 - DNA, 25 bp, Artificial
  Probe
atccaaaagttcagacttatcagtg

SEQ ID NO: 227044 - DNA, 25 bp, Artificial
  Probe
tgaaacaagattatcctcaagtgta

SEQ ID NO: 227045 - DNA, 25 bp, Artificial
  Probe
ggactgccaaattttctcatgatct

SEQ ID NO: 227046 - DNA, 25 bp, Artificial
  Probe
gatctcacctatactttgtgaatag

SEQ ID NO: 227047 - DNA, 25 bp, Artificial
  Probe
tcaattagaactgtagcattctggt

SEQ ID NO: 227048 - DNA, 25 bp, Artificial
  Probe
agaatgccaagcattatcaatgaac

SEQ ID NO: 227049 - DNA, 25 bp, Artificial
  Probe
tataacagaaccttacctccaggtg

SEQ ID NO: 227050 - DNA, 25 bp, Artificial
  Probe
gttcagacttatcagtgaggtttac

SEQ ID NO: 227051 - DNA, 25 bp, Artificial
  Probe
taccaaacacacaggcagagttccc

SEQ ID NO: 227052 - DNA, 25 bp, Artificial
  Probe
ggtcaatttgcttcccaactaagaa

SEQ ID NO: 227053 - DNA, 25 bp, Artificial
  Probe
atccatgagccacaatgaatcaacg

SEQ ID NO: 227054 - DNA, 25 bp, Artificial
  Probe
agactcagagtaacggcgttcttaa

SEQ ID NO: 227055 - DNA, 25 bp, Artificial
  Probe
catatagtgcaactttatggtttct

SEQ ID NO: 227056 - DNA, 25 bp, Artificial
  Probe
gggctctataacagaaccttacctc

SEQ ID NO: 227057 - DNA, 25 bp, Artificial
  Probe
ccccagtcagtaagataagttgaaa

SEQ ID NO: 227058 - DNA, 25 bp, Artificial
  Probe
tcaaccgaggtcagggttgaatctg

SEQ ID NO: 227059 - DNA, 25 bp, Artificial
  Probe
gaatgccaagcattatcaatgaact

SEQ ID NO: 227060 - DNA, 25 bp, Artificial
  Probe
actttcatatagtgcaactttatgg

SEQ ID NO: 227061 - DNA, 25 bp, Artificial
  Probe
ccaaaagttcagacttatcagtgag

SEQ ID NO: 227062 - DNA, 25 bp, Artificial
  Probe
cctttttctgtgtcaattagaactg

SEQ ID NO: 227063 - DNA, 25 bp, Artificial
  Probe
acaagattatcctcaagtgtagatt

SEQ ID NO: 227064 - DNA, 25 bp, Artificial
  Probe
aacacacaggcagagttccctattc

SEQ ID NO: 227065 - DNA, 25 bp, Artificial
  Probe
tacgataaggctatccgcttcttgg

SEQ ID NO: 227066 - DNA, 25 bp, Artificial
  Probe
acgataaggctatccgcttcttggg

SEQ ID NO: 227067 - DNA, 25 bp, Artificial
  Probe
ctctcctatgtggatgctgaaggca

SEQ ID NO: 227068 - DNA, 25 bp, Artificial
  Probe
caaatgaccttcctgcggctgctga

SEQ ID NO: 227069 - DNA, 25 bp, Artificial
  Probe
aaggctatccgcttcttgggctcca

SEQ ID NO: 227070 - DNA, 25 bp, Artificial
  Probe
gctaccagtccgtggcctggcagga

SEQ ID NO: 227071 - DNA, 25 bp, Artificial
  Probe
cttcctgcggctgctgagtgcctct

SEQ ID NO: 227072 - DNA, 25 bp, Artificial
  Probe
ctgatttcccagacggcgaatactg

SEQ ID NO: 227073 - DNA, 25 bp, Artificial
  Probe
aaggaccttcaactctgccatcctg

SEQ ID NO: 227074 - DNA, 25 bp, Artificial
  Probe
ggcagctacgataaggctatccgct

SEQ ID NO: 227075 - DNA, 25 bp, Artificial
  Probe
tacaaatgaccttcctgcggctgct

SEQ ID NO: 227076 - DNA, 25 bp, Artificial
  Probe
gcggctgctgagtgcctctgcccag

SEQ ID NO: 227077 - DNA, 25 bp, Artificial
  Probe
gccatcctgatttcccagacggcga

SEQ ID NO: 227078 - DNA, 25 bp, Artificial
  Probe
catccgtgccctggtggatggctgt

SEQ ID NO: 227079 - DNA, 25 bp, Artificial
  Probe
caggatgccgccacaggcagctacg

SEQ ID NO: 227080 - DNA, 25 bp, Artificial
  Probe
ggtgctccagggactccttcaaagt

SEQ ID NO: 227081 - DNA, 25 bp, Artificial
  Probe
tcctgatttcccagacggcgaatac

SEQ ID NO: 227082 - DNA, 25 bp, Artificial
  Probe
aaagtctactgcaatttcacagctg

SEQ ID NO: 227083 - DNA, 25 bp, Artificial
  Probe
ctactgcaatttcacagctggaggg

SEQ ID NO: 227084 - DNA, 25 bp, Artificial
  Probe
tgccatcctgatttcccagacggcg

SEQ ID NO: 227085 - DNA, 25 bp, Artificial
  Probe
tacaactgctaccagtccgtggcct

SEQ ID NO: 227086 - DNA, 25 bp, Artificial
  Probe
ctacgataaggctatccgcttcttg

SEQ ID NO: 227087 - DNA, 25 bp, Artificial
  Probe
tatgtggatgctgaaggcaaccctg

SEQ ID NO: 227088 - DNA, 25 bp, Artificial
  Probe
ccacaggcagctacgataaggctat

SEQ ID NO: 227089 - DNA, 25 bp, Artificial
  Probe
ggactccttcaaagtctactgcaat

SEQ ID NO: 227090 - DNA, 25 bp, Artificial
  Probe
gggtcgatcccaaccaagggtgctc

SEQ ID NO: 227091 - DNA, 25 bp, Artificial
  Probe
aaaggctaccagaagacggtgctgg

SEQ ID NO: 227092 - DNA, 25 bp, Artificial
  Probe
caagggtgctccagggactccttca

SEQ ID NO: 227093 - DNA, 25 bp, Artificial
  Probe
tctgccatcctgatttcccagacgg

SEQ ID NO: 227094 - DNA, 25 bp, Artificial
  Probe
gccgccacaggcagctacgataagg

SEQ ID NO: 227095 - DNA, 25 bp, Artificial
  Probe
tcccagacggcgaatactgggtcga

SEQ ID NO: 227096 - DNA, 25 bp, Artificial
  Probe
acatccgtgccctggtggatggctg

SEQ ID NO: 227097 - DNA, 25 bp, Artificial
  Probe
aaatgaccttcctgcggctgctgag

SEQ ID NO: 227098 - DNA, 25 bp, Artificial
  Probe
tcctgcggctgctgagtgcctctgc

SEQ ID NO: 227099 - DNA, 25 bp, Artificial
  Probe
acaggcagctacgataaggctatcc

SEQ ID NO: 227100 - DNA, 25 bp, Artificial
  Probe
cgatcccaaccaagggtgctccagg

SEQ ID NO: 227101 - DNA, 25 bp, Artificial
  Probe
ggatgccgccacaggcagctacgat

SEQ ID NO: 227102 - DNA, 25 bp, Artificial
  Probe
cccagacggcgaatactgggtcgat

SEQ ID NO: 227103 - DNA, 25 bp, Artificial
  Probe
atgctgaaggcaaccctgtgggcgt

SEQ ID NO: 227104 - DNA, 25 bp, Artificial
  Probe
aactgctaccagtccgtggcctggc

SEQ ID NO: 227105 - DNA, 25 bp, Artificial
  Probe
tgcggctgctgagtgcctctgccca

SEQ ID NO: 227106 - DNA, 25 bp, Artificial
  Probe
accagaagacggtgctggagattga

SEQ ID NO: 227107 - DNA, 25 bp, Artificial
  Probe
gtggtacaaatgaccttcctgcggc

SEQ ID NO: 227108 - DNA, 25 bp, Artificial
  Probe
acctacaactgctaccagtccgtgg

SEQ ID NO: 227109 - DNA, 25 bp, Artificial
  Probe
gctatccgcttcttgggctccaacg

SEQ ID NO: 227110 - DNA, 25 bp, Artificial
  Probe
cccaaccaagggtgctccagggact

SEQ ID NO: 227111 - DNA, 25 bp, Artificial
  Probe
ggcctacactttaagtcccaagcac

SEQ ID NO: 227112 - DNA, 25 bp, Artificial
  Probe
tccgacctcgcgagtcacgagaaga

SEQ ID NO: 227113 - DNA, 25 bp, Artificial
  Probe
cttactactgattagatctgaggag

SEQ ID NO: 227114 - DNA, 25 bp, Artificial
  Probe
agagaggagccctttaaatgtacag

SEQ ID NO: 227115 - DNA, 25 bp, Artificial
  Probe
cttgtttctcggagcttgtctctca

SEQ ID NO: 227116 - DNA, 25 bp, Artificial
  Probe
tggagtgtcgcagtattacttacta

SEQ ID NO: 227117 - DNA, 25 bp, Artificial
  Probe
gatatagaggccagcctggtctctc

SEQ ID NO: 227118 - DNA, 25 bp, Artificial
  Probe
cagtattcgactgctgggcatggtg

SEQ ID NO: 227119 - DNA, 25 bp, Artificial
  Probe
gtgttaatacatagtgggcgaagcc

SEQ ID NO: 227120 - DNA, 25 bp, Artificial
  Probe
ttacttactactgattagatctgag

SEQ ID NO: 227121 - DNA, 25 bp, Artificial
  Probe
agaagagccacagaagagaggagcc

SEQ ID NO: 227122 - DNA, 25 bp, Artificial
  Probe
ccaaaccatccacgacatggagaaa

SEQ ID NO: 227123 - DNA, 25 bp, Artificial
  Probe
acatgtgcaaagacctttgctttag

SEQ ID NO: 227124 - DNA, 25 bp, Artificial
  Probe
agtcacgagaagagccacagaagag

SEQ ID NO: 227125 - DNA, 25 bp, Artificial
  Probe
agcactttacacacattccatggag

SEQ ID NO: 227126 - DNA, 25 bp, Artificial
  Probe
gaacccataggagaaacagcaagta

SEQ ID NO: 227127 - DNA, 25 bp, Artificial
  Probe
agagccacagaagagaggagccctt

SEQ ID NO: 227128 - DNA, 25 bp, Artificial
  Probe
tgttaatacatagtgggcgaagccg

SEQ ID NO: 227129 - DNA, 25 bp, Artificial
  Probe
ttttgctactgttgggctgctcggt

SEQ ID NO: 227130 - DNA, 25 bp, Artificial
  Probe
tccacgacatggagaaaactcataa

SEQ ID NO: 227131 - DNA, 25 bp, Artificial
  Probe
acttttccttgtttctcggagcttg

SEQ ID NO: 227132 - DNA, 25 bp, Artificial
  Probe
catcgctcataaacgaacccatagg

SEQ ID NO: 227133 - DNA, 25 bp, Artificial
  Probe
gcagtattacttactactgattaga

SEQ ID NO: 227134 - DNA, 25 bp, Artificial
  Probe
tccatttatatgagccagagaaaca

SEQ ID NO: 227135 - DNA, 25 bp, Artificial
  Probe
agagcttcagagtaaacgtgcagct

SEQ ID NO: 227136 - DNA, 25 bp, Artificial
  Probe
tgtgcagggccctgtgctaagcaag

SEQ ID NO: 227137 - DNA, 25 bp, Artificial
  Probe
cgactgctgggcatggtggcctaca

SEQ ID NO: 227138 - DNA, 25 bp, Artificial
  Probe
gcagctcatcgctcataaacgaacc

SEQ ID NO: 227139 - DNA, 25 bp, Artificial
  Probe
ggagcttgtctctcaccaaaccatc

SEQ ID NO: 227140 - DNA, 25 bp, Artificial
  Probe
gagccctttaaatgtacagtgtgtg

SEQ ID NO: 227141 - DNA, 25 bp, Artificial
  Probe
actttaagtcccaagcactcaggca

SEQ ID NO: 227142 - DNA, 25 bp, Artificial
  Probe
gtaaatacaggcttttgctactgtt

SEQ ID NO: 227143 - DNA, 25 bp, Artificial
  Probe
gaactcggtttctgatcaaattcca

SEQ ID NO: 227144 - DNA, 25 bp, Artificial
  Probe
gtgctaagcaagcactttacacaca

SEQ ID NO: 227145 - DNA, 25 bp, Artificial
  Probe
ggtaaactgctctgcctctgtgcag

SEQ ID NO: 227146 - DNA, 25 bp, Artificial
  Probe
aaactcataagtgcaaaacatgtgc

SEQ ID NO: 227147 - DNA, 25 bp, Artificial
  Probe
ttaagtcccaagcactcaggcagca

SEQ ID NO: 227148 - DNA, 25 bp, Artificial
  Probe
taaacgaacccataggagaaacagc

SEQ ID NO: 227149 - DNA, 25 bp, Artificial
  Probe
ctgttgggctgctcggtgtctgtct

SEQ ID NO: 227150 - DNA, 25 bp, Artificial
  Probe
agccgggatttgaactcggtttctg

SEQ ID NO: 227151 - DNA, 25 bp, Artificial
  Probe
caaattccatttatatgagccagag

SEQ ID NO: 227152 - DNA, 25 bp, Artificial
  Probe
gctgctcggtgtctgtctgatggta

SEQ ID NO: 227153 - DNA, 25 bp, Artificial
  Probe
tgctgggcatggtggcctacacttt

SEQ ID NO: 227154 - DNA, 25 bp, Artificial
  Probe
atttgaactcggtttctgatcaaat

SEQ ID NO: 227155 - DNA, 25 bp, Artificial
  Probe
ttaaaattcagtattcgactgctgg

SEQ ID NO: 227156 - DNA, 25 bp, Artificial
  Probe
ctcataagtgcaaaacatgtgcaaa

SEQ ID NO: 227157 - DNA, 25 bp, Artificial
  Probe
tttctgaaaactgactggagtcact

SEQ ID NO: 227158 - DNA, 25 bp, Artificial
  Probe
ggtccatatttgcaacacttctgcc

SEQ ID NO: 227159 - DNA, 25 bp, Artificial
  Probe
tctgcctctactccatatcatgtgg

SEQ ID NO: 227160 - DNA, 25 bp, Artificial
  Probe
tgatgccatttgattaaagttttcc

SEQ ID NO: 227161 - DNA, 25 bp, Artificial
  Probe
ttttggaaggctgcttattgcgttc

SEQ ID NO: 227162 - DNA, 25 bp, Artificial
  Probe
tcttctgagtaattggagctaccac

SEQ ID NO: 227163 - DNA, 25 bp, Artificial
  Probe
tggcgttcagttttggaaggctgct

SEQ ID NO: 227164 - DNA, 25 bp, Artificial
  Probe
ggaaaacctgagtttgggtccatat

SEQ ID NO: 227165 - DNA, 25 bp, Artificial
  Probe
ttctgccaagcgattggctatttct

SEQ ID NO: 227166 - DNA, 25 bp, Artificial
  Probe
ttcccgcagtctcttttagggcctt

SEQ ID NO: 227167 - DNA, 25 bp, Artificial
  Probe
agtattctacccacaggagctcgta

SEQ ID NO: 227168 - DNA, 25 bp, Artificial
  Probe
catatcatgtggaaaacctgagttt

SEQ ID NO: 227169 - DNA, 25 bp, Artificial
  Probe
agtgcattcagtattctacccacag

SEQ ID NO: 227170 - DNA, 25 bp, Artificial
  Probe
gccttctttgtgtatacagattacc

SEQ ID NO: 227171 - DNA, 25 bp, Artificial
  Probe
ttttagggccttctttgtgtataca

SEQ ID NO: 227172 - DNA, 25 bp, Artificial
  Probe
ctgccaagcgattggctatttctga

SEQ ID NO: 227173 - DNA, 25 bp, Artificial
  Probe
gaatctcatttatagaggcagaatc

SEQ ID NO: 227174 - DNA, 25 bp, Artificial
  Probe
aaggctgcttattgcgttctccatg

SEQ ID NO: 227175 - DNA, 25 bp, Artificial
  Probe
ctcttgtggttcagtgattccccca

SEQ ID NO: 227176 - DNA, 25 bp, Artificial
  Probe
ctgtagtcttctgagtaattggagc

SEQ ID NO: 227177 - DNA, 25 bp, Artificial
  Probe
agttatcaggagacatgatgccatt

SEQ ID NO: 227178 - DNA, 25 bp, Artificial
  Probe
tctccatggtaaaccctgtctacag

SEQ ID NO: 227179 - DNA, 25 bp, Artificial
  Probe
agtaattggagctaccacatctggt

SEQ ID NO: 227180 - DNA, 25 bp, Artificial
  Probe
cctgagtttgggtccatatttgcaa

SEQ ID NO: 227181 - DNA, 25 bp, Artificial
  Probe
aacacttctgccaagcgattggcta

SEQ ID NO: 227182 - DNA, 25 bp, Artificial
  Probe
gtctacagtgcattcagtattctac

SEQ ID NO: 227183 - DNA, 25 bp, Artificial
  Probe
tgtggaaaacctgagtttgggtcca

SEQ ID NO: 227184 - DNA, 25 bp, Artificial
  Probe
tatagaggcagaatctcctgctctg

SEQ ID NO: 227185 - DNA, 25 bp, Artificial
  Probe
cccctcttgtggttcagtgattccc

SEQ ID NO: 227186 - DNA, 25 bp, Artificial
  Probe
ttgcaacacttctgccaagcgattg

SEQ ID NO: 227187 - DNA, 25 bp, Artificial
  Probe
cttcagtcaggagaatctcatttat

SEQ ID NO: 227188 - DNA, 25 bp, Artificial
  Probe
tactccatatcatgtggaaaacctg

SEQ ID NO: 227189 - DNA, 25 bp, Artificial
  Probe
tgtgtatacagattaccttcagtca

SEQ ID NO: 227190 - DNA, 25 bp, Artificial
  Probe
acacttctgccaagcgattggctat

SEQ ID NO: 227191 - DNA, 25 bp, Artificial
  Probe
gcagtctcttttagggccttctttg

SEQ ID NO: 227192 - DNA, 25 bp, Artificial
  Probe
attcagtattctacccacaggagct

SEQ ID NO: 227193 - DNA, 25 bp, Artificial
  Probe
cgttcagttttggaaggctgcttat

SEQ ID NO: 227194 - DNA, 25 bp, Artificial
  Probe
tctcatttatagaggcagaatctcc

SEQ ID NO: 227195 - DNA, 25 bp, Artificial
  Probe
ggcagaatctcctgctctgcctcta

SEQ ID NO: 227196 - DNA, 25 bp, Artificial
  Probe
cacaggagctcgtaggaaacctaat

SEQ ID NO: 227197 - DNA, 25 bp, Artificial
  Probe
ccccactgtagtcttctgagtaatt

SEQ ID NO: 227198 - DNA, 25 bp, Artificial
  Probe
gcctctactccatatcatgtggaaa

SEQ ID NO: 227199 - DNA, 25 bp, Artificial
  Probe
ctgcttattgcgttctccatggtaa

SEQ ID NO: 227200 - DNA, 25 bp, Artificial
  Probe
atatttgcaacacttctgccaagcg

SEQ ID NO: 227201 - DNA, 25 bp, Artificial
  Probe
caagcgattggctatttctgaaaac

SEQ ID NO: 227202 - DNA, 25 bp, Artificial
  Probe
tgaaaactgactggagtcactccct

SEQ ID NO: 227203 - DNA, 25 bp, Artificial
  Probe
accccatgtatgtaagagttgtggg

SEQ ID NO: 227204 - DNA, 25 bp, Artificial
  Probe
ctgagcgtctttaagcaggaaggtg

SEQ ID NO: 227205 - DNA, 25 bp, Artificial
  Probe
atgacagtgcgtagggcagagaacc

SEQ ID NO: 227206 - DNA, 25 bp, Artificial
  Probe
acatgaacggattcacactggagaa

SEQ ID NO: 227207 - DNA, 25 bp, Artificial
  Probe
cccttcggtgccacgaaaggattca

SEQ ID NO: 227208 - DNA, 25 bp, Artificial
  Probe
tatgaaaacccctgaagtaacagaa

SEQ ID NO: 227209 - DNA, 25 bp, Artificial
  Probe
aagactcacagtagaagaaattcct

SEQ ID NO: 227210 - DNA, 25 bp, Artificial
  Probe
aaattcctaagtgtagaacacgtca

SEQ ID NO: 227211 - DNA, 25 bp, Artificial
  Probe
tccgaaaccatgaaaggattcacag

SEQ ID NO: 227212 - DNA, 25 bp, Artificial
  Probe
gatttaatgggctgtgtctttacac

SEQ ID NO: 227213 - DNA, 25 bp, Artificial
  Probe
ggaaaagccttcactcgtcatacct

SEQ ID NO: 227214 - DNA, 25 bp, Artificial
  Probe
ggaaagcctttactaatcccagtgc

SEQ ID NO: 227215 - DNA, 25 bp, Artificial
  Probe
ttctcttctttgagtggctgtcaga

SEQ ID NO: 227216 - DNA, 25 bp, Artificial
  Probe
agccctgtatatgtgagcagtgcgg

SEQ ID NO: 227217 - DNA, 25 bp, Artificial
  Probe
cagtgccctccgaaaccatgaaagg

SEQ ID NO: 227218 - DNA, 25 bp, Artificial
  Probe
gacatgaacaaattcacactggtga

SEQ ID NO: 227219 - DNA, 25 bp, Artificial
  Probe
tatatagaagtcttcagttggccaa

SEQ ID NO: 227220 - DNA, 25 bp, Artificial
  Probe
tccttctcttcttgtgttggataca

SEQ ID NO: 227221 - DNA, 25 bp, Artificial
  Probe
gaaggtacccagtatcaaaagttgt

SEQ ID NO: 227222 - DNA, 25 bp, Artificial
  Probe
gatacatagatgtatccctgatatg

SEQ ID NO: 227223 - DNA, 25 bp, Artificial
  Probe
tgaaaacccctgaagtaacagaatt

SEQ ID NO: 227224 - DNA, 25 bp, Artificial
  Probe
atcccagtgaataaacattaaatgg

SEQ ID NO: 227225 - DNA, 25 bp, Artificial
  Probe
tcccttcgacgtcatgaaaggattc

SEQ ID NO: 227226 - DNA, 25 bp, Artificial
  Probe
gagaaaccccatgtatgtaagagtt

SEQ ID NO: 227227 - DNA, 25 bp, Artificial
  Probe
gacacataccttaaacggatgtata

SEQ ID NO: 227228 - DNA, 25 bp, Artificial
  Probe
gccacgaaaggattcactgtgggga

SEQ ID NO: 227229 - DNA, 25 bp, Artificial
  Probe
attagtcctttttaagatcccagtg

SEQ ID NO: 227230 - DNA, 25 bp, Artificial
  Probe
ttcgacgtcatgaaaggattcacag

SEQ ID NO: 227231 - DNA, 25 bp, Artificial
  Probe
ggtccagctcccttaaaatacatga

SEQ ID NO: 227232 - DNA, 25 bp, Artificial
  Probe
gctgtgtctttacacatcatgtcta

SEQ ID NO: 227233 - DNA, 25 bp, Artificial
  Probe
catttgcaagcagtgtgggaaagct

SEQ ID NO: 227234 - DNA, 25 bp, Artificial
  Probe
gaaagcctttactaatcccagtgcc

SEQ ID NO: 227235 - DNA, 25 bp, Artificial
  Probe
acgccacgaaagaattcacagtgga

SEQ ID NO: 227236 - DNA, 25 bp, Artificial
  Probe
tgtatgtaagcagtgcggaaaagcc

SEQ ID NO: 227237 - DNA, 25 bp, Artificial
  Probe
agaaccagggccatgttgtctgtag

SEQ ID NO: 227238 - DNA, 25 bp, Artificial
  Probe
atgccacgaaaggattcacagtggg

SEQ ID NO: 227239 - DNA, 25 bp, Artificial
  Probe
ggtgaaaagccctgtatatgtgagc

SEQ ID NO: 227240 - DNA, 25 bp, Artificial
  Probe
ggtgagaaacctttcatttgcaagc

SEQ ID NO: 227241 - DNA, 25 bp, Artificial
  Probe
tgagtggctgtcagagacatgaaca

SEQ ID NO: 227242 - DNA, 25 bp, Artificial
  Probe
tgtggtaaagccttcacgggtcata

SEQ ID NO: 227243 - DNA, 25 bp, Artificial
  Probe
ggtagtcacaaacataatagctcat

SEQ ID NO: 227244 - DNA, 25 bp, Artificial
  Probe
ctcttcttgtgttggatacatagat

SEQ ID NO: 227245 - DNA, 25 bp, Artificial
  Probe
aaattttcaggtgacctaatctctg

SEQ ID NO: 227246 - DNA, 25 bp, Artificial
  Probe
ctttcgaaaacatgagtggactcat

SEQ ID NO: 227247 - DNA, 25 bp, Artificial
  Probe
gtggaaaagccttcactggtcacag

SEQ ID NO: 227248 - DNA, 25 bp, Artificial
  Probe
ttccagtaactttcgaaaacatgag

SEQ ID NO: 227249 - DNA, 25 bp, Artificial
  Probe
caccacagcgcagaagagggtgtac

SEQ ID NO: 227250 - DNA, 25 bp, Artificial
  Probe
tgcccaaaatatccaagaggctaca

SEQ ID NO: 227251 - DNA, 25 bp, Artificial
  Probe
acaccgacttcatcgagaaggaagc

SEQ ID NO: 227252 - DNA, 25 bp, Artificial
  Probe
aagcatttgatgaactgctggccag

SEQ ID NO: 227253 - DNA, 25 bp, Artificial
  Probe
accacagcgcagaagagggtgtaca

SEQ ID NO: 227254 - DNA, 25 bp, Artificial
  Probe
ctcccgagagcaaaggctgtaacct

SEQ ID NO: 227255 - DNA, 25 bp, Artificial
  Probe
tcccgagagcaaaggctgtaacctg

SEQ ID NO: 227256 - DNA, 25 bp, Artificial
  Probe
acagaaactgtcctcaaaagcaagg

SEQ ID NO: 227257 - DNA, 25 bp, Artificial
  Probe
cacagaaactgtcctcaaaagcaag

SEQ ID NO: 227258 - DNA, 25 bp, Artificial
  Probe
tcaccacagcgcagaagagggtgta

SEQ ID NO: 227259 - DNA, 25 bp, Artificial
  Probe
ctgtcctcaaaagcaaggaaaatat

SEQ ID NO: 227260 - DNA, 25 bp, Artificial
  Probe
tatacaccgacttcatcgagaagga

SEQ ID NO: 227261 - DNA, 25 bp, Artificial
  Probe
gcgtttttaaagtccgagttctgtg

SEQ ID NO: 227262 - DNA, 25 bp, Artificial
  Probe
tgtcctcaaaagcaaggaaaatata

SEQ ID NO: 227263 - DNA, 25 bp, Artificial
  Probe
gcccaaaatatccaagaggctacaa

SEQ ID NO: 227264 - DNA, 25 bp, Artificial
  Probe
ccaaaatatccaagaggctacaagt

SEQ ID NO: 227265 - DNA, 25 bp, Artificial
  Probe
tgattgcccaaaatatccaagaggc

SEQ ID NO: 227266 - DNA, 25 bp, Artificial
  Probe
tgtctcccgagagcaaaggctgtaa

SEQ ID NO: 227267 - DNA, 25 bp, Artificial
  Probe
tgctctgggcagaagcatttgatga

SEQ ID NO: 227268 - DNA, 25 bp, Artificial
  Probe
actgtcctcaaaagcaaggaaaata

SEQ ID NO: 227269 - DNA, 25 bp, Artificial
  Probe
tgtaaaaagccacagatcaccacgg

SEQ ID NO: 227270 - DNA, 25 bp, Artificial
  Probe
aatatacaccgacttcatcgagaag

SEQ ID NO: 227271 - DNA, 25 bp, Artificial
  Probe
gtctcccgagagcaaaggctgtaac

SEQ ID NO: 227272 - DNA, 25 bp, Artificial
  Probe
cccaaaatatccaagaggctacaag

SEQ ID NO: 227273 - DNA, 25 bp, Artificial
  Probe
gaaactgtcctcaaaagcaaggaaa

SEQ ID NO: 227274 - DNA, 25 bp, Artificial
  Probe
attgcccaaaatatccaagaggcta

SEQ ID NO: 227275 - DNA, 25 bp, Artificial
  Probe
ttgcccaaaatatccaagaggctac

SEQ ID NO: 227276 - DNA, 25 bp, Artificial
  Probe
ctctgggcagaagcatttgatgaac

SEQ ID NO: 227277 - DNA, 25 bp, Artificial
  Probe
gtgtaaaaagccacagatcaccacg

SEQ ID NO: 227278 - DNA, 25 bp, Artificial
  Probe
caccgacttcatcgagaaggaagct

SEQ ID NO: 227279 - DNA, 25 bp, Artificial
  Probe
gctctgggcagaagcatttgatgaa

SEQ ID NO: 227280 - DNA, 25 bp, Artificial
  Probe
accgacttcatcgagaaggaagctc

SEQ ID NO: 227281 - DNA, 25 bp, Artificial
  Probe
ttatcaggacttgtgtaaaaagcca

SEQ ID NO: 227282 - DNA, 25 bp, Artificial
  Probe
tttatcaggacttgtgtaaaaagcc

SEQ ID NO: 227283 - DNA, 25 bp, Artificial
  Probe
gaagcgctgctctgggcagaagcat

SEQ ID NO: 227284 - DNA, 25 bp, Artificial
  Probe
gctgctctgggcagaagcatttgat

SEQ ID NO: 227285 - DNA, 25 bp, Artificial
  Probe
gtcctcaaaagcaaggaaaatatac

SEQ ID NO: 227286 - DNA, 25 bp, Artificial
  Probe
aactgtcctcaaaagcaaggaaaat

SEQ ID NO: 227287 - DNA, 25 bp, Artificial
  Probe
cacagcgcagaagagggtgtacagc

SEQ ID NO: 227288 - DNA, 25 bp, Artificial
  Probe
cagaaactgtcctcaaaagcaagga

SEQ ID NO: 227289 - DNA, 25 bp, Artificial
  Probe
aggaaaatatacaccgacttcatcg

SEQ ID NO: 227290 - DNA, 25 bp, Artificial
  Probe
gtaaaaagccacagatcaccacgga

SEQ ID NO: 227291 - DNA, 25 bp, Artificial
  Probe
ctgctctgggcagaagcatttgatg

SEQ ID NO: 227292 - DNA, 25 bp, Artificial
  Probe
tacaccgacttcatcgagaaggaag

SEQ ID NO: 227293 - DNA, 25 bp, Artificial
  Probe
ccacagcgcagaagagggtgtacag

SEQ ID NO: 227294 - DNA, 25 bp, Artificial
  Probe
atacaccgacttcatcgagaaggaa

SEQ ID NO: 227295 - DNA, 25 bp, Artificial
  Probe
ggttaatggaccctgtccgttgctc

SEQ ID NO: 227296 - DNA, 25 bp, Artificial
  Probe
ggaccctgtccgttgctctgtgcaa

SEQ ID NO: 227297 - DNA, 25 bp, Artificial
  Probe
gtccgttgctctgtgcaactgctag

SEQ ID NO: 227298 - DNA, 25 bp, Artificial
  Probe
ggctcaaaccacttctcaggttaat

SEQ ID NO: 227299 - DNA, 25 bp, Artificial
  Probe
cttctcaggttaatggaccctgtcc

SEQ ID NO: 227300 - DNA, 25 bp, Artificial
  Probe
tgcaactgctagcagtattttaagg

SEQ ID NO: 227301 - DNA, 25 bp, Artificial
  Probe
gctcaaaccacttctcaggttaatg

SEQ ID NO: 227302 - DNA, 25 bp, Artificial
  Probe
atgtcaggctcaaaccacttctcag

SEQ ID NO: 227303 - DNA, 25 bp, Artificial
  Probe
accctgtccgttgctctgtgcaact

SEQ ID NO: 227304 - DNA, 25 bp, Artificial
  Probe
ttgctctgtgcaactgctagcagta

SEQ ID NO: 227305 - DNA, 25 bp, Artificial
  Probe
acttctcaggttaatggaccctgtc

SEQ ID NO: 227306 - DNA, 25 bp, Artificial
  Probe
gttaatggaccctgtccgttgctct

SEQ ID NO: 227307 - DNA, 25 bp, Artificial
  Probe
tctgtgcaactgctagcagtatttt

SEQ ID NO: 227308 - DNA, 25 bp, Artificial
  Probe
gttgctctgtgcaactgctagcagt

SEQ ID NO: 227309 - DNA, 25 bp, Artificial
  Probe
tccgttgctctgtgcaactgctagc

SEQ ID NO: 227310 - DNA, 25 bp, Artificial
  Probe
tcaggttaatggaccctgtccgttg

SEQ ID NO: 227311 - DNA, 25 bp, Artificial
  Probe
ctgtgcaactgctagcagtatttta

SEQ ID NO: 227312 - DNA, 25 bp, Artificial
  Probe
cgttgctctgtgcaactgctagcag

SEQ ID NO: 227313 - DNA, 25 bp, Artificial
  Probe
cctgtccgttgctctgtgcaactgc

SEQ ID NO: 227314 - DNA, 25 bp, Artificial
  Probe
cacttctcaggttaatggaccctgt

SEQ ID NO: 227315 - DNA, 25 bp, Artificial
  Probe
gtcaggctcaaaccacttctcaggt

SEQ ID NO: 227316 - DNA, 25 bp, Artificial
  Probe
gtgcaactgctagcagtattttaag

SEQ ID NO: 227317 - DNA, 25 bp, Artificial
  Probe
ttaatggaccctgtccgttgctctg

SEQ ID NO: 227318 - DNA, 25 bp, Artificial
  Probe
gcaactgctagcagtattttaaggg

SEQ ID NO: 227319 - DNA, 25 bp, Artificial
  Probe
gatgtcaggctcaaaccacttctca

SEQ ID NO: 227320 - DNA, 25 bp, Artificial
  Probe
taatggaccctgtccgttgctctgt

SEQ ID NO: 227321 - DNA, 25 bp, Artificial
  Probe
caaaccacttctcaggttaatggac

SEQ ID NO: 227322 - DNA, 25 bp, Artificial
  Probe
gctctgtgcaactgctagcagtatt

SEQ ID NO: 227323 - DNA, 25 bp, Artificial
  Probe
tctcaggttaatggaccctgtccgt

SEQ ID NO: 227324 - DNA, 25 bp, Artificial
  Probe
tgtccgttgctctgtgcaactgcta

SEQ ID NO: 227325 - DNA, 25 bp, Artificial
  Probe
ctgtccgttgctctgtgcaactgct

SEQ ID NO: 227326 - DNA, 25 bp, Artificial
  Probe
aggctcaaaccacttctcaggttaa

SEQ ID NO: 227327 - DNA, 25 bp, Artificial
  Probe
gaccctgtccgttgctctgtgcaac

SEQ ID NO: 227328 - DNA, 25 bp, Artificial
  Probe
tgtcaggctcaaaccacttctcagg

SEQ ID NO: 227329 - DNA, 25 bp, Artificial
  Probe
caggctcaaaccacttctcaggtta

SEQ ID NO: 227330 - DNA, 25 bp, Artificial
  Probe
accacttctcaggttaatggaccct

SEQ ID NO: 227331 - DNA, 25 bp, Artificial
  Probe
ttctcaggttaatggaccctgtccg

SEQ ID NO: 227332 - DNA, 25 bp, Artificial
  Probe
tgtgcaactgctagcagtattttaa

SEQ ID NO: 227333 - DNA, 25 bp, Artificial
  Probe
ccacttctcaggttaatggaccctg

SEQ ID NO: 227334 - DNA, 25 bp, Artificial
  Probe
ccctgtccgttgctctgtgcaactg

SEQ ID NO: 227335 - DNA, 25 bp, Artificial
  Probe
tgctctgtgcaactgctagcagtat

SEQ ID NO: 227336 - DNA, 25 bp, Artificial
  Probe
tcaaaccacttctcaggttaatgga

SEQ ID NO: 227337 - DNA, 25 bp, Artificial
  Probe
ctcaaaccacttctcaggttaatgg

SEQ ID NO: 227338 - DNA, 25 bp, Artificial
  Probe
tcaggctcaaaccacttctcaggtt

SEQ ID NO: 227339 - DNA, 25 bp, Artificial
  Probe
ctcaggttaatggaccctgtccgtt

SEQ ID NO: 227340 - DNA, 25 bp, Artificial
  Probe
ccgttgctctgtgcaactgctagca

SEQ ID NO: 227341 - DNA, 25 bp, Artificial
  Probe
atgggctgaaactctgagtctagcc

SEQ ID NO: 227342 - DNA, 25 bp, Artificial
  Probe
tcaagttctaggaccgactatattt

SEQ ID NO: 227343 - DNA, 25 bp, Artificial
  Probe
gagtttcatgacaatgggctgaaac

SEQ ID NO: 227344 - DNA, 25 bp, Artificial
  Probe
atcagcattgattcagtatttgaca

SEQ ID NO: 227345 - DNA, 25 bp, Artificial
  Probe
actggtcctccctagcatggagatg

SEQ ID NO: 227346 - DNA, 25 bp, Artificial
  Probe
tccctagcatggagatgtcaggagt

SEQ ID NO: 227347 - DNA, 25 bp, Artificial
  Probe
actggtgtgccaatgattactcttg

SEQ ID NO: 227348 - DNA, 25 bp, Artificial
  Probe
agatactggtcctccctagcatgga

SEQ ID NO: 227349 - DNA, 25 bp, Artificial
  Probe
ggcctcagttgaaatttcttcccta

SEQ ID NO: 227350 - DNA, 25 bp, Artificial
  Probe
catctgctttactgtgtttactgta

SEQ ID NO: 227351 - DNA, 25 bp, Artificial
  Probe
atagagcacttagatactggtcctc

SEQ ID NO: 227352 - DNA, 25 bp, Artificial
  Probe
aattgttgaccctgggattctgtga

SEQ ID NO: 227353 - DNA, 25 bp, Artificial
  Probe
gttttcaagttctaggaccgactat

SEQ ID NO: 227354 - DNA, 25 bp, Artificial
  Probe
gattcactggtgtgccaatgattac

SEQ ID NO: 227355 - DNA, 25 bp, Artificial
  Probe
aatgagttttcaagttctaggaccg

SEQ ID NO: 227356 - DNA, 25 bp, Artificial
  Probe
cacttagatactggtcctccctagc

SEQ ID NO: 227357 - DNA, 25 bp, Artificial
  Probe
acatccttggcctcagttgaaattt

SEQ ID NO: 227358 - DNA, 25 bp, Artificial
  Probe
atctgctttactgtgtttactgtaa

SEQ ID NO: 227359 - DNA, 25 bp, Artificial
  Probe
gtttcatgacaatgggctgaaactc

SEQ ID NO: 227360 - DNA, 25 bp, Artificial
  Probe
acactttacagtagatagagcactt

SEQ ID NO: 227361 - DNA, 25 bp, Artificial
  Probe
tgagttcgttttccttaatgtgtac

SEQ ID NO: 227362 - DNA, 25 bp, Artificial
  Probe
aaagcgtcatgttttcatgattcac

SEQ ID NO: 227363 - DNA, 25 bp, Artificial
  Probe
cttgaattgttgaccctgggattct

SEQ ID NO: 227364 - DNA, 25 bp, Artificial
  Probe
tccttaatgtgtacgatgtatctgt

SEQ ID NO: 227365 - DNA, 25 bp, Artificial
  Probe
tatcagcattgattcagtatttgac

SEQ ID NO: 227366 - DNA, 25 bp, Artificial
  Probe
ctgctttactgtgtttactgtaatg

SEQ ID NO: 227367 - DNA, 25 bp, Artificial
  Probe
cattagtatcagcattgattcagta

SEQ ID NO: 227368 - DNA, 25 bp, Artificial
  Probe
ggtgtgccaatgattactcttggtt

SEQ ID NO: 227369 - DNA, 25 bp, Artificial
  Probe
gaaactctgagtctagccatcctca

SEQ ID NO: 227370 - DNA, 25 bp, Artificial
  Probe
agaatttaacatccttggcctcagt

SEQ ID NO: 227371 - DNA, 25 bp, Artificial
  Probe
ggttctcttcttcctcccagagagt

SEQ ID NO: 227372 - DNA, 25 bp, Artificial
  Probe
gagttcgttttccttaatgtgtacg

SEQ ID NO: 227373 - DNA, 25 bp, Artificial
  Probe
cttcccacttgaattgttgaccctg

SEQ ID NO: 227374 - DNA, 25 bp, Artificial
  Probe
gttgaccctgggattctgtgaatga

SEQ ID NO: 227375 - DNA, 25 bp, Artificial
  Probe
cactggtgtgccaatgattactctt

SEQ ID NO: 227376 - DNA, 25 bp, Artificial
  Probe
ctggttctcttcttcctcccagaga

SEQ ID NO: 227377 - DNA, 25 bp, Artificial
  Probe
accattagtatcagcattgattcag

SEQ ID NO: 227378 - DNA, 25 bp, Artificial
  Probe
ccctgggattctgtgaatgacagaa

SEQ ID NO: 227379 - DNA, 25 bp, Artificial
  Probe
ccaatgattactcttggttttagga

SEQ ID NO: 227380 - DNA, 25 bp, Artificial
  Probe
gccaatgattactcttggttttagg

SEQ ID NO: 227381 - DNA, 25 bp, Artificial
  Probe
tttttcgccaaacaacaggattttg

SEQ ID NO: 227382 - DNA, 25 bp, Artificial
  Probe
cctccctagcatggagatgtcagga

SEQ ID NO: 227383 - DNA, 25 bp, Artificial
  Probe
gtaagaatttaacatccttggcctc

SEQ ID NO: 227384 - DNA, 25 bp, Artificial
  Probe
ctagcatggagatgtcaggagtttc

SEQ ID NO: 227385 - DNA, 25 bp, Artificial
  Probe
atttaacatccttggcctcagttga

SEQ ID NO: 227386 - DNA, 25 bp, Artificial
  Probe
cttagatactggtcctccctagcat

SEQ ID NO: 227387 - DNA, 25 bp, Artificial
  Probe
taagtcatcctggactggagggtag

SEQ ID NO: 227388 - DNA, 25 bp, Artificial
  Probe
gacaacgcatgcatcttccacagtc

SEQ ID NO: 227389 - DNA, 25 bp, Artificial
  Probe
agttgccaaaggaagaccaatggct

SEQ ID NO: 227390 - DNA, 25 bp, Artificial
  Probe
gtcatatttccaaagtgatttcagt

SEQ ID NO: 227391 - DNA, 25 bp, Artificial
  Probe
tgctaatgtactgttatcaatgaca

SEQ ID NO: 227392 - DNA, 25 bp, Artificial
  Probe
ccagggtttgatctcttttgtggaa

SEQ ID NO: 227393 - DNA, 25 bp, Artificial
  Probe
tgctgccctggctccctataaaagg

SEQ ID NO: 227394 - DNA, 25 bp, Artificial
  Probe
acgcatgcatcttccacagtctctg

SEQ ID NO: 227395 - DNA, 25 bp, Artificial
  Probe
atgacacaagtgtgttctatgttcc

SEQ ID NO: 227396 - DNA, 25 bp, Artificial
  Probe
ggtttgatctcttttgtggaaactc

SEQ ID NO: 227397 - DNA, 25 bp, Artificial
  Probe
ctataaaaggtctgcctgagcagtc

SEQ ID NO: 227398 - DNA, 25 bp, Artificial
  Probe
ctgagcagtcgagcacccctgcaga

SEQ ID NO: 227399 - DNA, 25 bp, Artificial
  Probe
gaagaccaaaatcaagtctgggcta

SEQ ID NO: 227400 - DNA, 25 bp, Artificial
  Probe
gatgattctgagacaacgcatgcat

SEQ ID NO: 227401 - DNA, 25 bp, Artificial
  Probe
gattctgagacaacgcatgcatctt

SEQ ID NO: 227402 - DNA, 25 bp, Artificial
  Probe
agtggataagtcatcctggactgga

SEQ ID NO: 227403 - DNA, 25 bp, Artificial
  Probe
ccctgcagatgattctgagacaacg

SEQ ID NO: 227404 - DNA, 25 bp, Artificial
  Probe
gccctggctccctataaaaggtctg

SEQ ID NO: 227405 - DNA, 25 bp, Artificial
  Probe
cccccattactatgtttggccaaag

SEQ ID NO: 227406 - DNA, 25 bp, Artificial
  Probe
gtgtgctcatgacaaatactcttcc

SEQ ID NO: 227407 - DNA, 25 bp, Artificial
  Probe
tcttccatggggaaaacaggaagac

SEQ ID NO: 227408 - DNA, 25 bp, Artificial
  Probe
taactgacccctacttgccttaagg

SEQ ID NO: 227409 - DNA, 25 bp, Artificial
  Probe
gttctatgttcctgatattgtgtgc

SEQ ID NO: 227410 - DNA, 25 bp, Artificial
  Probe
tctgggctagaacttgagaagttgc

SEQ ID NO: 227411 - DNA, 25 bp, Artificial
  Probe
taaggcaacagctccctgctacctg

SEQ ID NO: 227412 - DNA, 25 bp, Artificial
  Probe
gcagagtcatatttccaaagtgatt

SEQ ID NO: 227413 - DNA, 25 bp, Artificial
  Probe
ctgacagcagccagggtttgatctc

SEQ ID NO: 227414 - DNA, 25 bp, Artificial
  Probe
ccaaaatcaagtctgggctagaact

SEQ ID NO: 227415 - DNA, 25 bp, Artificial
  Probe
aagaccaatggcttgaccttaacct

SEQ ID NO: 227416 - DNA, 25 bp, Artificial
  Probe
aatactcttccatggggaaaacagg

SEQ ID NO: 227417 - DNA, 25 bp, Artificial
  Probe
aaggtctgcctgagcagtcgagcac

SEQ ID NO: 227418 - DNA, 25 bp, Artificial
  Probe
cagcagccagggtttgatctctttt

SEQ ID NO: 227419 - DNA, 25 bp, Artificial
  Probe
atgtactgttatcaatgacacaagt

SEQ ID NO: 227420 - DNA, 25 bp, Artificial
  Probe
ccctacttgccttaaggcaacagct

SEQ ID NO: 227421 - DNA, 25 bp, Artificial
  Probe
ctgacccctacttgccttaaggcaa

SEQ ID NO: 227422 - DNA, 25 bp, Artificial
  Probe
tggcttgaccttaacctaactgacc

SEQ ID NO: 227423 - DNA, 25 bp, Artificial
  Probe
gtcgagcacccctgcagatgattct

SEQ ID NO: 227424 - DNA, 25 bp, Artificial
  Probe
ttgatctcttttgtggaaactcccc

SEQ ID NO: 227425 - DNA, 25 bp, Artificial
  Probe
caagtgtgttctatgttcctgatat

SEQ ID NO: 227426 - DNA, 25 bp, Artificial
  Probe
catcctggactggagggtagttaga

SEQ ID NO: 227427 - DNA, 25 bp, Artificial
  Probe
gagcagtcgagcacccctgcagatg

SEQ ID NO: 227428 - DNA, 25 bp, Artificial
  Probe
aaaggtctgcctgagcagtcgagca

SEQ ID NO: 227429 - DNA, 25 bp, Artificial
  Probe
caagtctgggctagaacttgagaag

SEQ ID NO: 227430 - DNA, 25 bp, Artificial
  Probe
gtgtgtgttttcattttctgacagc

SEQ ID NO: 227431 - DNA, 25 bp, Artificial
  Probe
ttatcaatgacacaagtgtgttcta

SEQ ID NO: 227432 - DNA, 25 bp, Artificial
  Probe
cattactatgtttggccaaagaggg

SEQ ID NO: 227433 - DNA, 25 bp, Artificial
  Probe
ctgctctgctcacagtgtggaagct

SEQ ID NO: 227434 - DNA, 25 bp, Artificial
  Probe
agactgctctgctcacagtgtggaa

SEQ ID NO: 227435 - DNA, 25 bp, Artificial
  Probe
gtctcttagagctggggacttgaag

SEQ ID NO: 227436 - DNA, 25 bp, Artificial
  Probe
gggacttgaagcactcattttgctc

SEQ ID NO: 227437 - DNA, 25 bp, Artificial
  Probe
tttccaaggcaagaggaagaaacgg

SEQ ID NO: 227438 - DNA, 25 bp, Artificial
  Probe
ttagagctggggacttgaagcactc

SEQ ID NO: 227439 - DNA, 25 bp, Artificial
  Probe
tgctcacagtgtggaagctggaaag

SEQ ID NO: 227440 - DNA, 25 bp, Artificial
  Probe
aacattcttctgtgccctttggctt

SEQ ID NO: 227441 - DNA, 25 bp, Artificial
  Probe
gctttgcaggatgcacagatggtct

SEQ ID NO: 227442 - DNA, 25 bp, Artificial
  Probe
cacctcgacaagtagtaatcctttg

SEQ ID NO: 227443 - DNA, 25 bp, Artificial
  Probe
ttctgtgccctttggcttctaataa

SEQ ID NO: 227444 - DNA, 25 bp, Artificial
  Probe
tctgctcacagtgtggaagctggaa

SEQ ID NO: 227445 - DNA, 25 bp, Artificial
  Probe
atcccttcaagagtttgagcaccag

SEQ ID NO: 227446 - DNA, 25 bp, Artificial
  Probe
gagaaggagccatgccccaacattc

SEQ ID NO: 227447 - DNA, 25 bp, Artificial
  Probe
agagctggggacttgaagcactcat

SEQ ID NO: 227448 - DNA, 25 bp, Artificial
  Probe
tcccttcaagagtttgagcaccagc

SEQ ID NO: 227449 - DNA, 25 bp, Artificial
  Probe
gctcacagtgtggaagctggaaagc

SEQ ID NO: 227450 - DNA, 25 bp, Artificial
  Probe
agctggggacttgaagcactcattt

SEQ ID NO: 227451 - DNA, 25 bp, Artificial
  Probe
tgctcatcccttcaagagtttgagc

SEQ ID NO: 227452 - DNA, 25 bp, Artificial
  Probe
gaatagagactgctctgctcacagt

SEQ ID NO: 227453 - DNA, 25 bp, Artificial
  Probe
gatggtctcttagagctggggactt

SEQ ID NO: 227454 - DNA, 25 bp, Artificial
  Probe
tcacagtgtggaagctggaaagcgt

SEQ ID NO: 227455 - DNA, 25 bp, Artificial
  Probe
tggctgctttgcaggatgcacagat

SEQ ID NO: 227456 - DNA, 25 bp, Artificial
  Probe
catgggtctgtgctagctggcgcta

SEQ ID NO: 227457 - DNA, 25 bp, Artificial
  Probe
agctggaaagcgtccgctcctgatc

SEQ ID NO: 227458 - DNA, 25 bp, Artificial
  Probe
ttccaaacctgttcttagtagtacg

SEQ ID NO: 227459 - DNA, 25 bp, Artificial
  Probe
tagagctggggacttgaagcactca

SEQ ID NO: 227460 - DNA, 25 bp, Artificial
  Probe
tttgctcatcccttcaagagtttga

SEQ ID NO: 227461 - DNA, 25 bp, Artificial
  Probe
gcacagatggtctcttagagctggg

SEQ ID NO: 227462 - DNA, 25 bp, Artificial
  Probe
cttctgtgccctttggcttctaata

SEQ ID NO: 227463 - DNA, 25 bp, Artificial
  Probe
ccttcaagagtttgagcaccagcca

SEQ ID NO: 227464 - DNA, 25 bp, Artificial
  Probe
cccaacattcttctgtgccctttgg

SEQ ID NO: 227465 - DNA, 25 bp, Artificial
  Probe
cctggggtgttgtctaccgccgagt

SEQ ID NO: 227466 - DNA, 25 bp, Artificial
  Probe
aggatgcacagatggtctcttagag

SEQ ID NO: 227467 - DNA, 25 bp, Artificial
  Probe
tcttctgtgccctttggcttctaat

SEQ ID NO: 227468 - DNA, 25 bp, Artificial
  Probe
ttgcaggatgcacagatggtctctt

SEQ ID NO: 227469 - DNA, 25 bp, Artificial
  Probe
gacttgaagcactcattttgctcat

SEQ ID NO: 227470 - DNA, 25 bp, Artificial
  Probe
gtctgtgctagctggcgctagtaga

SEQ ID NO: 227471 - DNA, 25 bp, Artificial
  Probe
atgcacagatggtctcttagagctg

SEQ ID NO: 227472 - DNA, 25 bp, Artificial
  Probe
gtggctgctttgcaggatgcacaga

SEQ ID NO: 227473 - DNA, 25 bp, Artificial
  Probe
tgcacagatggtctcttagagctgg

SEQ ID NO: 227474 - DNA, 25 bp, Artificial
  Probe
ctctgctcacagtgtggaagctgga

SEQ ID NO: 227475 - DNA, 25 bp, Artificial
  Probe
gtttccaaggcaagaggaagaaacg

SEQ ID NO: 227476 - DNA, 25 bp, Artificial
  Probe
tagctggcgctagtagaaagccagg

SEQ ID NO: 227477 - DNA, 25 bp, Artificial
  Probe
gctagctggcgctagtagaaagcca

SEQ ID NO: 227478 - DNA, 25 bp, Artificial
  Probe
tgagaaggagccatgccccaacatt

SEQ ID NO: 227479 - DNA, 25 bp, Artificial
  Probe
cgacatggttaagcagcccagatac

SEQ ID NO: 227480 - DNA, 25 bp, Artificial
  Probe
aaaggacctgatgtctgctttgata

SEQ ID NO: 227481 - DNA, 25 bp, Artificial
  Probe
accatcgctggctgcatgtcagggt

SEQ ID NO: 227482 - DNA, 25 bp, Artificial
  Probe
tactcctttggctggtatctggcag

SEQ ID NO: 227483 - DNA, 25 bp, Artificial
  Probe
taccctgatgtaactgtgaggctta

SEQ ID NO: 227484 - DNA, 25 bp, Artificial
  Probe
atctgtgtccaacatcaaagcaaag

SEQ ID NO: 227485 - DNA, 25 bp, Artificial
  Probe
ctggtatctggcagcagacactatc

SEQ ID NO: 227486 - DNA, 25 bp, Artificial
  Probe
gagttcgctgttgcactgttggaga

SEQ ID NO: 227487 - DNA, 25 bp, Artificial
  Probe
taactgtgaggcttagattcctgac

SEQ ID NO: 227488 - DNA, 25 bp, Artificial
  Probe
ttgggagttcgctgttgcactgttg

SEQ ID NO: 227489 - DNA, 25 bp, Artificial
  Probe
tgccaaaacatgagccctcagttac

SEQ ID NO: 227490 - DNA, 25 bp, Artificial
  Probe
taacaatgtgctggaggattatacc

SEQ ID NO: 227491 - DNA, 25 bp, Artificial
  Probe
agaagcagtcttgactttgacctag

SEQ ID NO: 227492 - DNA, 25 bp, Artificial
  Probe
gacactatctatggtgaccctctaa

SEQ ID NO: 227493 - DNA, 25 bp, Artificial
  Probe
ggtccagatccttgcgacatggtta

SEQ ID NO: 227494 - DNA, 25 bp, Artificial
  Probe
attataccgactgtggtggtgtttc

SEQ ID NO: 227495 - DNA, 25 bp, Artificial
  Probe
aggtttgggagttcgctgttgcact

SEQ ID NO: 227496 - DNA, 25 bp, Artificial
  Probe
agcagcccagataccgaaaaggacc

SEQ ID NO: 227497 - DNA, 25 bp, Artificial
  Probe
gattcctgaccatcgctggctgcat

SEQ ID NO: 227498 - DNA, 25 bp, Artificial
  Probe
gcccagataccgaaaaggacctgat

SEQ ID NO: 227499 - DNA, 25 bp, Artificial
  Probe
atcgctggctgcatgtcagggtgtt

SEQ ID NO: 227500 - DNA, 25 bp, Artificial
  Probe
tctgctttgataacaatgtgctgga

SEQ ID NO: 227501 - DNA, 25 bp, Artificial
  Probe
gttaagcagcccagataccgaaaag

SEQ ID NO: 227502 - DNA, 25 bp, Artificial
  Probe
acccttccttatggtctatctttgg

SEQ ID NO: 227503 - DNA, 25 bp, Artificial
  Probe
cccacgcaggccttatgaaaagaag

SEQ ID NO: 227504 - DNA, 25 bp, Artificial
  Probe
gcatcatctgtgtccaacatcaaag

SEQ ID NO: 227505 - DNA, 25 bp, Artificial
  Probe
tggattaaacccttccttatggtct

SEQ ID NO: 227506 - DNA, 25 bp, Artificial
  Probe
tggaaactgaaactcgtgtgaacat

SEQ ID NO: 227507 - DNA, 25 bp, Artificial
  Probe
ggtctatctttggactccaatttat

SEQ ID NO: 227508 - DNA, 25 bp, Artificial
  Probe
ccgactgtggtggtgtttctggatt

SEQ ID NO: 227509 - DNA, 25 bp, Artificial
  Probe
acgcaggccttatgaaaagaagcag

SEQ ID NO: 227510 - DNA, 25 bp, Artificial
  Probe
cctgatgtaactgtgaggcttagat

SEQ ID NO: 227511 - DNA, 25 bp, Artificial
  Probe
cgaaaaggacctgatgtctgctttg

SEQ ID NO: 227512 - DNA, 25 bp, Artificial
  Probe
ctgtgtccaacatcaaagcaaagct

SEQ ID NO: 227513 - DNA, 25 bp, Artificial
  Probe
acatggttaagcagcccagataccg

SEQ ID NO: 227514 - DNA, 25 bp, Artificial
  Probe
ctgttgcactgttggagattacgtg

SEQ ID NO: 227515 - DNA, 25 bp, Artificial
  Probe
ctccaatttatactcctttggctgg

SEQ ID NO: 227516 - DNA, 25 bp, Artificial
  Probe
cctgccaaaacatgagccctcagtt

SEQ ID NO: 227517 - DNA, 25 bp, Artificial
  Probe
caatgtgctggaggattataccgac

SEQ ID NO: 227518 - DNA, 25 bp, Artificial
  Probe
ttggctggtatctggcagcagacac

SEQ ID NO: 227519 - DNA, 25 bp, Artificial
  Probe
cagatccttgcgacatggttaagca

SEQ ID NO: 227520 - DNA, 25 bp, Artificial
  Probe
tttatactcctttggctggtatctg

SEQ ID NO: 227521 - DNA, 25 bp, Artificial
  Probe
gtgaccctctaaacccatgatctgc

SEQ ID NO: 227522 - DNA, 25 bp, Artificial
  Probe
tggactccaatttatactcctttgg

SEQ ID NO: 227523 - DNA, 25 bp, Artificial
  Probe
gatgtaactgtgaggcttagattcc

SEQ ID NO: 227524 - DNA, 25 bp, Artificial
  Probe
ctatggtgaccctctaaacccatga

SEQ ID NO: 227525 - DNA, 25 bp, Artificial
  Probe
ttgccttctgtaaacgacatgatgg

SEQ ID NO: 227526 - DNA, 25 bp, Artificial
  Probe
actagagaaaccaaccatggcagtg

SEQ ID NO: 227527 - DNA, 25 bp, Artificial
  Probe
aaccatggcagtgattggccttgtc

SEQ ID NO: 227528 - DNA, 25 bp, Artificial
  Probe
cactcaggaaggagcctgtgttcaa

SEQ ID NO: 227529 - DNA, 25 bp, Artificial
  Probe
aggagttcacagagacctccgctgt

SEQ ID NO: 227530 - DNA, 25 bp, Artificial
  Probe
atgaacgcaagattcaagcatgaaa

SEQ ID NO: 227531 - DNA, 25 bp, Artificial
  Probe
aatggtttggcaacagcaccaccat

SEQ ID NO: 227532 - DNA, 25 bp, Artificial
  Probe
gacatggtggtgatcacacgatttc

SEQ ID NO: 227533 - DNA, 25 bp, Artificial
  Probe
acaaccgacctgcaggcacgctggg

SEQ ID NO: 227534 - DNA, 25 bp, Artificial
  Probe
gttgatgcctttaaatggaacactc

SEQ ID NO: 227535 - DNA, 25 bp, Artificial
  Probe
tgacagcatcatcaaaagcagaaac

SEQ ID NO: 227536 - DNA, 25 bp, Artificial
  Probe
agcatgaaaactacgggttgatgcc

SEQ ID NO: 227537 - DNA, 25 bp, Artificial
  Probe
gtcaccttgtacaaaggcatcttcc

SEQ ID NO: 227538 - DNA, 25 bp, Artificial
  Probe
agccgggtctggaatgatggctacc

SEQ ID NO: 227539 - DNA, 25 bp, Artificial
  Probe
aacgcaagattcaagcatgaaaact

SEQ ID NO: 227540 - DNA, 25 bp, Artificial
  Probe
tgtttctcaaggaccccaggttggc

SEQ ID NO: 227541 - DNA, 25 bp, Artificial
  Probe
ttgtccagtccctgggtgctgccat

SEQ ID NO: 227542 - DNA, 25 bp, Artificial
  Probe
ccacaggctatggttatgcctaccc

SEQ ID NO: 227543 - DNA, 25 bp, Artificial
  Probe
gaggaacttgcattttgccttctgt

SEQ ID NO: 227544 - DNA, 25 bp, Artificial
  Probe
ttacccacagccatttctgactggt

SEQ ID NO: 227545 - DNA, 25 bp, Artificial
  Probe
gaaacaatgaggtcaccttgtacaa

SEQ ID NO: 227546 - DNA, 25 bp, Artificial
  Probe
tggcaacagcaccaccattcagaca

SEQ ID NO: 227547 - DNA, 25 bp, Artificial
  Probe
cgctgggcagcacaagtaataagag

SEQ ID NO: 227548 - DNA, 25 bp, Artificial
  Probe
aactacgggttgatgcctttaaatg

SEQ ID NO: 227549 - DNA, 25 bp, Artificial
  Probe
ctccagaagtggttcttgggtgatg

SEQ ID NO: 227550 - DNA, 25 bp, Artificial
  Probe
cagtgattggccttgtccagtccct

SEQ ID NO: 227551 - DNA, 25 bp, Artificial
  Probe
gatgaattggcctccttcatcggag

SEQ ID NO: 227552 - DNA, 25 bp, Artificial
  Probe
tggaatgatggctacccttgggaca

SEQ ID NO: 227553 - DNA, 25 bp, Artificial
  Probe
gcccgcatcctgtgtggcactgtgt

SEQ ID NO: 227554 - DNA, 25 bp, Artificial
  Probe
gccatagaagtgttctttggccctt

SEQ ID NO: 227555 - DNA, 25 bp, Artificial
  Probe
ttggccttgtccagtccctgggtgc

SEQ ID NO: 227556 - DNA, 25 bp, Artificial
  Probe
ctttaaatggaacactcaggaagga

SEQ ID NO: 227557 - DNA, 25 bp, Artificial
  Probe
ctgcaggcacgctgggcagcacaag

SEQ ID NO: 227558 - DNA, 25 bp, Artificial
  Probe
caggttggccatagaagtgttcttt

SEQ ID NO: 227559 - DNA, 25 bp, Artificial
  Probe
tgatggctacccttgggacatggtg

SEQ ID NO: 227560 - DNA, 25 bp, Artificial
  Probe
cgacctgcaggcacgctgggcagca

SEQ ID NO: 227561 - DNA, 25 bp, Artificial
  Probe
cctcaactagagaaaccaaccatgg

SEQ ID NO: 227562 - DNA, 25 bp, Artificial
  Probe
cccttcctggatgacagcatcatca

SEQ ID NO: 227563 - DNA, 25 bp, Artificial
  Probe
caagcctaatgtgaaggagttcaca

SEQ ID NO: 227564 - DNA, 25 bp, Artificial
  Probe
ggtgatcacacgatttcaaacattt

SEQ ID NO: 227565 - DNA, 25 bp, Artificial
  Probe
accatggcagtgattggccttgtcc

SEQ ID NO: 227566 - DNA, 25 bp, Artificial
  Probe
gtttgagggcattgactgtgtcatc

SEQ ID NO: 227567 - DNA, 25 bp, Artificial
  Probe
ccatttctgactggtggtatatgaa

SEQ ID NO: 227568 - DNA, 25 bp, Artificial
  Probe
attcaagcatgaaaactacgggttg

SEQ ID NO: 227569 - DNA, 25 bp, Artificial
  Probe
ctccgctgtgtttgaggatgggact

SEQ ID NO: 227570 - DNA, 25 bp, Artificial
  Probe
tggtgatcacacgatttcaaacatt

SEQ ID NO: 227571 - DNA, 25 bp, Artificial
  Probe
cactggttacatggtcagtgggtag

SEQ ID NO: 227572 - DNA, 25 bp, Artificial
  Probe
gtctatccactgtctccaccttctc

SEQ ID NO: 227573 - DNA, 25 bp, Artificial
  Probe
tagcagggttcagatgtctatccac

SEQ ID NO: 227574 - DNA, 25 bp, Artificial
  Probe
ctcactggttacatggtcagtgggt

SEQ ID NO: 227575 - DNA, 25 bp, Artificial
  Probe
tcactggttacatggtcagtgggta

SEQ ID NO: 227576 - DNA, 25 bp, Artificial
  Probe
ctaccatcctgctgtctgtatttgg

SEQ ID NO: 227577 - DNA, 25 bp, Artificial
  Probe
cctcactggttacatggtcagtggg

SEQ ID NO: 227578 - DNA, 25 bp, Artificial
  Probe
acctcactggttacatggtcagtgg

SEQ ID NO: 227579 - DNA, 25 bp, Artificial
  Probe
atgtctatccactgtctccaccttc

SEQ ID NO: 227580 - DNA, 25 bp, Artificial
  Probe
gttcagatgtctatccactgtctcc

SEQ ID NO: 227581 - DNA, 25 bp, Artificial
  Probe
tattaaatacatggcaacttttttt

SEQ ID NO: 227582 - DNA, 25 bp, Artificial
  Probe
accatcctgctgtctgtatttggga

SEQ ID NO: 227583 - DNA, 25 bp, Artificial
  Probe
cctgctgtctgtatttgggagactt

SEQ ID NO: 227584 - DNA, 25 bp, Artificial
  Probe
tctgcttcactcctaccatcctgct

SEQ ID NO: 227585 - DNA, 25 bp, Artificial
  Probe
tcctaccatcctgctgtctgtattt

SEQ ID NO: 227586 - DNA, 25 bp, Artificial
  Probe
tcagatgtctatccactgtctccac

SEQ ID NO: 227587 - DNA, 25 bp, Artificial
  Probe
gggttcagatgtctatccactgtct

SEQ ID NO: 227588 - DNA, 25 bp, Artificial
  Probe
ttcagatgtctatccactgtctcca

SEQ ID NO: 227589 - DNA, 25 bp, Artificial
  Probe
ggttacatggtcagtgggtagcagg

SEQ ID NO: 227590 - DNA, 25 bp, Artificial
  Probe
ggttcagatgtctatccactgtctc

SEQ ID NO: 227591 - DNA, 25 bp, Artificial
  Probe
ggtcagtgggtagcagggttcagat

SEQ ID NO: 227592 - DNA, 25 bp, Artificial
  Probe
accttctctgcttcactcctaccat

SEQ ID NO: 227593 - DNA, 25 bp, Artificial
  Probe
tcctgctgtctgtatttgggagact

SEQ ID NO: 227594 - DNA, 25 bp, Artificial
  Probe
tacctcactggttacatggtcagtg

SEQ ID NO: 227595 - DNA, 25 bp, Artificial
  Probe
catcctgctgtctgtatttgggaga

SEQ ID NO: 227596 - DNA, 25 bp, Artificial
  Probe
tccaccttctctgcttcactcctac

SEQ ID NO: 227597 - DNA, 25 bp, Artificial
  Probe
ctcctaccatcctgctgtctgtatt

SEQ ID NO: 227598 - DNA, 25 bp, Artificial
  Probe
agatgtctatccactgtctccacct

SEQ ID NO: 227599 - DNA, 25 bp, Artificial
  Probe
tgctgtctgtatttgggagacttat

SEQ ID NO: 227600 - DNA, 25 bp, Artificial
  Probe
ctctgcttcactcctaccatcctgc

SEQ ID NO: 227601 - DNA, 25 bp, Artificial
  Probe
cctaccatcctgctgtctgtatttg

SEQ ID NO: 227602 - DNA, 25 bp, Artificial
  Probe
tggttacatggtcagtgggtagcag

SEQ ID NO: 227603 - DNA, 25 bp, Artificial
  Probe
actggttacatggtcagtgggtagc

SEQ ID NO: 227604 - DNA, 25 bp, Artificial
  Probe
ttctctgcttcactcctaccatcct

SEQ ID NO: 227605 - DNA, 25 bp, Artificial
  Probe
ctatccactgtctccaccttctctg

SEQ ID NO: 227606 - DNA, 25 bp, Artificial
  Probe
atcctgctgtctgtatttgggagac

SEQ ID NO: 227607 - DNA, 25 bp, Artificial
  Probe
gtctgtatttgggagacttatagat

SEQ ID NO: 227608 - DNA, 25 bp, Artificial
  Probe
taccatcctgctgtctgtatttggg

SEQ ID NO: 227609 - DNA, 25 bp, Artificial
  Probe
ccatcctgctgtctgtatttgggag

SEQ ID NO: 227610 - DNA, 25 bp, Artificial
  Probe
ctgctgtctgtatttgggagactta

SEQ ID NO: 227611 - DNA, 25 bp, Artificial
  Probe
tttttttttttaattcatcaggatg

SEQ ID NO: 227612 - DNA, 25 bp, Artificial
  Probe
atggtcagtgggtagcagggttcag

SEQ ID NO: 227613 - DNA, 25 bp, Artificial
  Probe
atattaaatacatggcaactttttt

SEQ ID NO: 227614 - DNA, 25 bp, Artificial
  Probe
agtgggtagcagggttcagatgtct

SEQ ID NO: 227615 - DNA, 25 bp, Artificial
  Probe
ccttctctgcttcactcctaccatc

SEQ ID NO: 227616 - DNA, 25 bp, Artificial
  Probe
tgggtagcagggttcagatgtctat

SEQ ID NO: 227617 - DNA, 25 bp, Artificial
  Probe
caaccgtgcctttgccgaccgctcc

SEQ ID NO: 227618 - DNA, 25 bp, Artificial
  Probe
gcggaaaggccttctccaggccctg

SEQ ID NO: 227619 - DNA, 25 bp, Artificial
  Probe
ggccctggctgctccagggccacgc

SEQ ID NO: 227620 - DNA, 25 bp, Artificial
  Probe
gtgagaagcctttctcctgctccca

SEQ ID NO: 227621 - DNA, 25 bp, Artificial
  Probe
gtgcctttgccgaccgctccaacct

SEQ ID NO: 227622 - DNA, 25 bp, Artificial
  Probe
gcaaccgtgcctttgccgaccgctc

SEQ ID NO: 227623 - DNA, 25 bp, Artificial
  Probe
ccactcggatgtgaagagataccag

SEQ ID NO: 227624 - DNA, 25 bp, Artificial
  Probe
ccactgcaaccgtgcctttgccgac

SEQ ID NO: 227625 - DNA, 25 bp, Artificial
  Probe
cctggctgctccagggccacgcccg

SEQ ID NO: 227626 - DNA, 25 bp, Artificial
  Probe
aggccctggctgctccagggccacg

SEQ ID NO: 227627 - DNA, 25 bp, Artificial
  Probe
ctgcaaccgtgcctttgccgaccgc

SEQ ID NO: 227628 - DNA, 25 bp, Artificial
  Probe
accgtgcctttgccgaccgctccaa

SEQ ID NO: 227629 - DNA, 25 bp, Artificial
  Probe
gctccaacctacgtgcccacctcca

SEQ ID NO: 227630 - DNA, 25 bp, Artificial
  Probe
gcctttgccgaccgctccaacctac

SEQ ID NO: 227631 - DNA, 25 bp, Artificial
  Probe
tgcggaaaggccttctccaggccct

SEQ ID NO: 227632 - DNA, 25 bp, Artificial
  Probe
actgcaaccgtgcctttgccgaccg

SEQ ID NO: 227633 - DNA, 25 bp, Artificial
  Probe
gccttctccaggccctggctgctcc

SEQ ID NO: 227634 - DNA, 25 bp, Artificial
  Probe
tttgccgaccgctccaacctacgtg

SEQ ID NO: 227635 - DNA, 25 bp, Artificial
  Probe
ctccagggccacgcccgcacccaca

SEQ ID NO: 227636 - DNA, 25 bp, Artificial
  Probe
ctggctgctccagggccacgcccgc

SEQ ID NO: 227637 - DNA, 25 bp, Artificial
  Probe
agaagcctttctcctgctcccactg

SEQ ID NO: 227638 - DNA, 25 bp, Artificial
  Probe
cccactcggatgtgaagagatacca

SEQ ID NO: 227639 - DNA, 25 bp, Artificial
  Probe
aaccgtgcctttgccgaccgctcca

SEQ ID NO: 227640 - DNA, 25 bp, Artificial
  Probe
tgctcccactgcaaccgtgcctttg

SEQ ID NO: 227641 - DNA, 25 bp, Artificial
  Probe
tctccaggccctggctgctccaggg

SEQ ID NO: 227642 - DNA, 25 bp, Artificial
  Probe
ccttctccaggccctggctgctcca

SEQ ID NO: 227643 - DNA, 25 bp, Artificial
  Probe
tccaggccctggctgctccagggcc

SEQ ID NO: 227644 - DNA, 25 bp, Artificial
  Probe
ccctggctgctccagggccacgccc

SEQ ID NO: 227645 - DNA, 25 bp, Artificial
  Probe
ccgtgcctttgccgaccgctccaac

SEQ ID NO: 227646 - DNA, 25 bp, Artificial
  Probe
cgctccaacctacgtgcccacctcc

SEQ ID NO: 227647 - DNA, 25 bp, Artificial
  Probe
ctcccactgcaaccgtgcctttgcc

SEQ ID NO: 227648 - DNA, 25 bp, Artificial
  Probe
ggctgctccagggccacgcccgcac

SEQ ID NO: 227649 - DNA, 25 bp, Artificial
  Probe
gaagcctttctcctgctcccactgc

SEQ ID NO: 227650 - DNA, 25 bp, Artificial
  Probe
cggaaaggccttctccaggccctgg

SEQ ID NO: 227651 - DNA, 25 bp, Artificial
  Probe
ctgcggaaaggccttctccaggccc

SEQ ID NO: 227652 - DNA, 25 bp, Artificial
  Probe
ccgctccaacctacgtgcccacctc

SEQ ID NO: 227653 - DNA, 25 bp, Artificial
  Probe
cccactgcaaccgtgcctttgccga

SEQ ID NO: 227654 - DNA, 25 bp, Artificial
  Probe
ccaggccctggctgctccagggcca

SEQ ID NO: 227655 - DNA, 25 bp, Artificial
  Probe
caggcctgcgcccgaaccttcctcc

SEQ ID NO: 227656 - DNA, 25 bp, Artificial
  Probe
ctggtgagaagcctttctcctgctc

SEQ ID NO: 227657 - DNA, 25 bp, Artificial
  Probe
ttctccaggccctggctgctccagg

SEQ ID NO: 227658 - DNA, 25 bp, Artificial
  Probe
tgagaagcctttctcctgctcccac

SEQ ID NO: 227659 - DNA, 25 bp, Artificial
  Probe
aggccttctccaggccctggctgct

SEQ ID NO: 227660 - DNA, 25 bp, Artificial
  Probe
tggtgagaagcctttctcctgctcc

SEQ ID NO: 227661 - DNA, 25 bp, Artificial
  Probe
tgctccagggccacgcccgcaccca

SEQ ID NO: 227662 - DNA, 25 bp, Artificial
  Probe
ggtgagaagcctttctcctgctccc

SEQ ID NO: 227663 - DNA, 25 bp, Artificial
  Probe
ggacacctatagcaagatgggtgag

SEQ ID NO: 227664 - DNA, 25 bp, Artificial
  Probe
tggacacctatagcaagatgggtga

SEQ ID NO: 227665 - DNA, 25 bp, Artificial
  Probe
gattccggctgaggtgataaaccgg

SEQ ID NO: 227666 - DNA, 25 bp, Artificial
  Probe
accttcatattctgccacgaagtgc

SEQ ID NO: 227667 - DNA, 25 bp, Artificial
  Probe
cggtccatggacacctatagcaaga

SEQ ID NO: 227668 - DNA, 25 bp, Artificial
  Probe
cgcactgttgctgtccgggattccg

SEQ ID NO: 227669 - DNA, 25 bp, Artificial
  Probe
ggtcttcacggacctctgcgtctac

SEQ ID NO: 227670 - DNA, 25 bp, Artificial
  Probe
atattctgccacgaagtgcttgagt

SEQ ID NO: 227671 - DNA, 25 bp, Artificial
  Probe
gtcttcacggacctctgcgtctact

SEQ ID NO: 227672 - DNA, 25 bp, Artificial
  Probe
ccatggacacctatagcaagatggg

SEQ ID NO: 227673 - DNA, 25 bp, Artificial
  Probe
tccatggacacctatagcaagatgg

SEQ ID NO: 227674 - DNA, 25 bp, Artificial
  Probe
ggtccatggacacctatagcaagat

SEQ ID NO: 227675 - DNA, 25 bp, Artificial
  Probe
ccgccgcactgttgctgtccgggat

SEQ ID NO: 227676 - DNA, 25 bp, Artificial
  Probe
accggtccatggacacctatagcaa

SEQ ID NO: 227677 - DNA, 25 bp, Artificial
  Probe
caccttcatattctgccacgaagtg

SEQ ID NO: 227678 - DNA, 25 bp, Artificial
  Probe
gggattccggctgaggtgataaacc

SEQ ID NO: 227679 - DNA, 25 bp, Artificial
  Probe
tcatattctgccacgaagtgcttga

SEQ ID NO: 227680 - DNA, 25 bp, Artificial
  Probe
cgggattccggctgaggtgataaac

SEQ ID NO: 227681 - DNA, 25 bp, Artificial
  Probe
attctgccacgaagtgcttgagtac

SEQ ID NO: 227682 - DNA, 25 bp, Artificial
  Probe
ttctgccacgaagtgcttgagtact

SEQ ID NO: 227683 - DNA, 25 bp, Artificial
  Probe
taaaccggtccatggacacctatag

SEQ ID NO: 227684 - DNA, 25 bp, Artificial
  Probe
tgataaaccggtccatggacaccta

SEQ ID NO: 227685 - DNA, 25 bp, Artificial
  Probe
gaccgccgcactgttgctgtccggg

SEQ ID NO: 227686 - DNA, 25 bp, Artificial
  Probe
aaccggtccatggacacctatagca

SEQ ID NO: 227687 - DNA, 25 bp, Artificial
  Probe
gccgcactgttgctgtccgggattc

SEQ ID NO: 227688 - DNA, 25 bp, Artificial
  Probe
ccggtccatggacacctatagcaag

SEQ ID NO: 227689 - DNA, 25 bp, Artificial
  Probe
atggacacctatagcaagatgggtg

SEQ ID NO: 227690 - DNA, 25 bp, Artificial
  Probe
gcactgttgctgtccgggattccgg

SEQ ID NO: 227691 - DNA, 25 bp, Artificial
  Probe
gataaaccggtccatggacacctat

SEQ ID NO: 227692 - DNA, 25 bp, Artificial
  Probe
attccggctgaggtgataaaccggt

SEQ ID NO: 227693 - DNA, 25 bp, Artificial
  Probe
tctgccacgaagtgcttgagtactg

SEQ ID NO: 227694 - DNA, 25 bp, Artificial
  Probe
tcttcacggacctctgcgtctactt

SEQ ID NO: 227695 - DNA, 25 bp, Artificial
  Probe
ggtgaggtcttcacggacctctgcg

SEQ ID NO: 227696 - DNA, 25 bp, Artificial
  Probe
accgccgcactgttgctgtccggga

SEQ ID NO: 227697 - DNA, 25 bp, Artificial
  Probe
ccgcactgttgctgtccgggattcc

SEQ ID NO: 227698 - DNA, 25 bp, Artificial
  Probe
ggattccggctgaggtgataaaccg

SEQ ID NO: 227699 - DNA, 25 bp, Artificial
  Probe
catggacacctatagcaagatgggt

SEQ ID NO: 227700 - DNA, 25 bp, Artificial
  Probe
catattctgccacgaagtgcttgag

SEQ ID NO: 227701 - DNA, 25 bp, Artificial
  Probe
cgccgcactgttgctgtccgggatt

SEQ ID NO: 227702 - DNA, 25 bp, Artificial
  Probe
ttccggctgaggtgataaaccggtc

SEQ ID NO: 227703 - DNA, 25 bp, Artificial
  Probe
gtgataaaccggtccatggacacct

SEQ ID NO: 227704 - DNA, 25 bp, Artificial
  Probe
ttcacggacctctgcgtctacttct

SEQ ID NO: 227705 - DNA, 25 bp, Artificial
  Probe
aaaccggtccatggacacctatagc

SEQ ID NO: 227706 - DNA, 25 bp, Artificial
  Probe
tgaccgccgcactgttgctgtccgg

SEQ ID NO: 227707 - DNA, 25 bp, Artificial
  Probe
aggtcttcacggacctctgcgtcta

SEQ ID NO: 227708 - DNA, 25 bp, Artificial
  Probe
tattctgccacgaagtgcttgagta

SEQ ID NO: 227709 - DNA, 25 bp, Artificial
  Probe
gaccaagattcgtatcatctcgacc

SEQ ID NO: 227710 - DNA, 25 bp, Artificial
  Probe
ctactttgcggctgttctgagcatg

SEQ ID NO: 227711 - DNA, 25 bp, Artificial
  Probe
caagttccagcgtgccacgtccgtg

SEQ ID NO: 227712 - DNA, 25 bp, Artificial
  Probe
cagcttggaaccatatttggaaaag

SEQ ID NO: 227713 - DNA, 25 bp, Artificial
  Probe
tccgtgaagcggaagctctctgcag

SEQ ID NO: 227714 - DNA, 25 bp, Artificial
  Probe
caggtgggtcggacattgaatatct

SEQ ID NO: 227715 - DNA, 25 bp, Artificial
  Probe
agcgcatgccgctgagtggacagcc

SEQ ID NO: 227716 - DNA, 25 bp, Artificial
  Probe
ggctgtgtcctcttcgtggctctcc

SEQ ID NO: 227717 - DNA, 25 bp, Artificial
  Probe
tctctgcagagctggcgggtaacca

SEQ ID NO: 227718 - DNA, 25 bp, Artificial
  Probe
aagctctctgcagagctggcgggta

SEQ ID NO: 227719 - DNA, 25 bp, Artificial
  Probe
tcctcgttgggctggcctactttgc

SEQ ID NO: 227720 - DNA, 25 bp, Artificial
  Probe
cccgccgtcatattcaagcacatag

SEQ ID NO: 227721 - DNA, 25 bp, Artificial
  Probe
tgagcatgattggagactggctacg

SEQ ID NO: 227722 - DNA, 25 bp, Artificial
  Probe
tggagactggctacgggtgatatct

SEQ ID NO: 227723 - DNA, 25 bp, Artificial
  Probe
gctggcctactttgcggctgttctg

SEQ ID NO: 227724 - DNA, 25 bp, Artificial
  Probe
agagctggcgggtaaccataaccag

SEQ ID NO: 227725 - DNA, 25 bp, Artificial
  Probe
caagcacatagaaggctggagtgcc

SEQ ID NO: 227726 - DNA, 25 bp, Artificial
  Probe
tggacttctacaagcccgttgtgtg

SEQ ID NO: 227727 - DNA, 25 bp, Artificial
  Probe
atgacaagttccagcgtgccacgtc

SEQ ID NO: 227728 - DNA, 25 bp, Artificial
  Probe
caccattggatttggcgattatgtg

SEQ ID NO: 227729 - DNA, 25 bp, Artificial
  Probe
ctggctacgggtgatatctaagaag

SEQ ID NO: 227730 - DNA, 25 bp, Artificial
  Probe
ggagtgccctggacgccatctactt

SEQ ID NO: 227731 - DNA, 25 bp, Artificial
  Probe
cattgaatatctggacttctacaag

SEQ ID NO: 227732 - DNA, 25 bp, Artificial
  Probe
gccctggacgccatctactttgtgg

SEQ ID NO: 227733 - DNA, 25 bp, Artificial
  Probe
cactctgaccaccattggatttggc

SEQ ID NO: 227734 - DNA, 25 bp, Artificial
  Probe
agccaatgtcacagccgagttcaag

SEQ ID NO: 227735 - DNA, 25 bp, Artificial
  Probe
atgtcacagccgagttcaaggaaac

SEQ ID NO: 227736 - DNA, 25 bp, Artificial
  Probe
aggaattgccaaagtggaggacaca

SEQ ID NO: 227737 - DNA, 25 bp, Artificial
  Probe
cgaccatcatcttcatcctgtttgg

SEQ ID NO: 227738 - DNA, 25 bp, Artificial
  Probe
ctggagtgccctggacgccatctac

SEQ ID NO: 227739 - DNA, 25 bp, Artificial
  Probe
ccacgtccgtgaagcggaagctctc

SEQ ID NO: 227740 - DNA, 25 bp, Artificial
  Probe
actggctacgggtgatatctaagaa

SEQ ID NO: 227741 - DNA, 25 bp, Artificial
  Probe
agatctatgacaagttccagcgtgc

SEQ ID NO: 227742 - DNA, 25 bp, Artificial
  Probe
gtgaagcggaagctctctgcagagc

SEQ ID NO: 227743 - DNA, 25 bp, Artificial
  Probe
ttgggctggcctactttgcggctgt

SEQ ID NO: 227744 - DNA, 25 bp, Artificial
  Probe
ttggagactggctacgggtgatatc

SEQ ID NO: 227745 - DNA, 25 bp, Artificial
  Probe
gagtggacagccaatgtcacagccg

SEQ ID NO: 227746 - DNA, 25 bp, Artificial
  Probe
tctacaagcccgttgtgtggttctg

SEQ ID NO: 227747 - DNA, 25 bp, Artificial
  Probe
attgccaaagtggaggacacattta

SEQ ID NO: 227748 - DNA, 25 bp, Artificial
  Probe
gtgccacgtccgtgaagcggaagct

SEQ ID NO: 227749 - DNA, 25 bp, Artificial
  Probe
gagctggcgggtaaccataaccagg

SEQ ID NO: 227750 - DNA, 25 bp, Artificial
  Probe
aatgttagtcagaccaagattcgta

SEQ ID NO: 227751 - DNA, 25 bp, Artificial
  Probe
agttcagagcgcatgccgctgagtg

SEQ ID NO: 227752 - DNA, 25 bp, Artificial
  Probe
atcatcttcatcctgtttggctgtg

SEQ ID NO: 227753 - DNA, 25 bp, Artificial
  Probe
acagccgagttcaaggaaacaagga

SEQ ID NO: 227754 - DNA, 25 bp, Artificial
  Probe
gtcatcactctgaccaccattggat

SEQ ID NO: 227755 - DNA, 25 bp, Artificial
  Probe
gctgtcttcctcaattctgtctttg

SEQ ID NO: 227756 - DNA, 25 bp, Artificial
  Probe
agactgcatgtattgtaccaccatg

SEQ ID NO: 227757 - DNA, 25 bp, Artificial
  Probe
taaatgtgagacttgcctgctgtca

SEQ ID NO: 227758 - DNA, 25 bp, Artificial
  Probe
ccaggatcaccaatacatggctgtc

SEQ ID NO: 227759 - DNA, 25 bp, Artificial
  Probe
tgttcatttgggagacctcagactt

SEQ ID NO: 227760 - DNA, 25 bp, Artificial
  Probe
tcactgttcatttgggagacctcag

SEQ ID NO: 227761 - DNA, 25 bp, Artificial
  Probe
ctctccacatcatagaattatgagg

SEQ ID NO: 227762 - DNA, 25 bp, Artificial
  Probe
agtgctaagactgcatgtattgtac

SEQ ID NO: 227763 - DNA, 25 bp, Artificial
  Probe
cacttgggtttaagcaaggtctctt

SEQ ID NO: 227764 - DNA, 25 bp, Artificial
  Probe
tagcctctttaatccctgtgtgtat

SEQ ID NO: 227765 - DNA, 25 bp, Artificial
  Probe
ccatgctgagcctgcttctatcact

SEQ ID NO: 227766 - DNA, 25 bp, Artificial
  Probe
cccttggtagcctctttaatccctg

SEQ ID NO: 227767 - DNA, 25 bp, Artificial
  Probe
ctttaatccctgtgtgtatatgagg

SEQ ID NO: 227768 - DNA, 25 bp, Artificial
  Probe
ggtttaagcaaggtctcttacagtc

SEQ ID NO: 227769 - DNA, 25 bp, Artificial
  Probe
ccaccatgcccagcttcatttggta

SEQ ID NO: 227770 - DNA, 25 bp, Artificial
  Probe
caagtgctaagactgcatgtattgt

SEQ ID NO: 227771 - DNA, 25 bp, Artificial
  Probe
actgcatgtattgtaccaccatgcc

SEQ ID NO: 227772 - DNA, 25 bp, Artificial
  Probe
actgcttacacttgggtttaagcaa

SEQ ID NO: 227773 - DNA, 25 bp, Artificial
  Probe
ccacatcatagaattatgagggcaa

SEQ ID NO: 227774 - DNA, 25 bp, Artificial
  Probe
tacatggctgtcttcctcaattctg

SEQ ID NO: 227775 - DNA, 25 bp, Artificial
  Probe
atgacagacagacagacaaattatc

SEQ ID NO: 227776 - DNA, 25 bp, Artificial
  Probe
aaatcaagctcaatggcatcttgaa

SEQ ID NO: 227777 - DNA, 25 bp, Artificial
  Probe
gtacagtctgcttcaacagtccata

SEQ ID NO: 227778 - DNA, 25 bp, Artificial
  Probe
gtctttgacctcacgttgccttata

SEQ ID NO: 227779 - DNA, 25 bp, Artificial
  Probe
atcctccaggatcaccaatacatgg

SEQ ID NO: 227780 - DNA, 25 bp, Artificial
  Probe
ctctttaatccctgtgtgtatatga

SEQ ID NO: 227781 - DNA, 25 bp, Artificial
  Probe
aatcaagctcaatggcatcttgaaa

SEQ ID NO: 227782 - DNA, 25 bp, Artificial
  Probe
gtattgtaccaccatgcccagcttc

SEQ ID NO: 227783 - DNA, 25 bp, Artificial
  Probe
cagacagacaaattatctaataggc

SEQ ID NO: 227784 - DNA, 25 bp, Artificial
  Probe
gttgccttatatccttttcccttgg

SEQ ID NO: 227785 - DNA, 25 bp, Artificial
  Probe
caattctgtctttgacctcacgttg

SEQ ID NO: 227786 - DNA, 25 bp, Artificial
  Probe
ctccacatcatagaattatgagggc

SEQ ID NO: 227787 - DNA, 25 bp, Artificial
  Probe
ggcaaaatcaagctcaatggcatct

SEQ ID NO: 227788 - DNA, 25 bp, Artificial
  Probe
ctcttacagtccaggctaaccttga

SEQ ID NO: 227789 - DNA, 25 bp, Artificial
  Probe
gcaaaatcaagctcaatggcatctt

SEQ ID NO: 227790 - DNA, 25 bp, Artificial
  Probe
ccttccaagtgctaagactgcatgt

SEQ ID NO: 227791 - DNA, 25 bp, Artificial
  Probe
ggtctcttacagtccaggctaacct

SEQ ID NO: 227792 - DNA, 25 bp, Artificial
  Probe
gcaaggtctcttacagtccaggcta

SEQ ID NO: 227793 - DNA, 25 bp, Artificial
  Probe
gcctgcttctatcactgttcatttg

SEQ ID NO: 227794 - DNA, 25 bp, Artificial
  Probe
ttacacttgggtttaagcaaggtct

SEQ ID NO: 227795 - DNA, 25 bp, Artificial
  Probe
gagcctgcttctatcactgttcatt

SEQ ID NO: 227796 - DNA, 25 bp, Artificial
  Probe
gatcaccaatacatggctgtcttcc

SEQ ID NO: 227797 - DNA, 25 bp, Artificial
  Probe
gccttatatccttttcccttggtag

SEQ ID NO: 227798 - DNA, 25 bp, Artificial
  Probe
gacctcagacttcagtttgccttat

SEQ ID NO: 227799 - DNA, 25 bp, Artificial
  Probe
gtaagctgctcaaaccagcttaaat

SEQ ID NO: 227800 - DNA, 25 bp, Artificial
  Probe
gcttcaacagtccatatgtcagtaa

SEQ ID NO: 227801 - DNA, 25 bp, Artificial
  Probe
tcagaaggcagcaggcatgaatcac

SEQ ID NO: 227802 - DNA, 25 bp, Artificial
  Probe
ttgcgagtcggcactgacccattat

SEQ ID NO: 227803 - DNA, 25 bp, Artificial
  Probe
gaagcatatcggtaccttcagaagg

SEQ ID NO: 227804 - DNA, 25 bp, Artificial
  Probe
tatcagagcgggatgaagatcctga

SEQ ID NO: 227805 - DNA, 25 bp, Artificial
  Probe
tccagagttgcgagtcggcactgac

SEQ ID NO: 227806 - DNA, 25 bp, Artificial
  Probe
tgaggaagggtctcccaaaggacaa

SEQ ID NO: 227807 - DNA, 25 bp, Artificial
  Probe
tactgggctggcatcggagtcctcc

SEQ ID NO: 227808 - DNA, 25 bp, Artificial
  Probe
gaatatccaggcagctaaagagatg

SEQ ID NO: 227809 - DNA, 25 bp, Artificial
  Probe
tctggacttggtgttaattcaagtc

SEQ ID NO: 227810 - DNA, 25 bp, Artificial
  Probe
gtgttaattcaagtcaggcgaaggc

SEQ ID NO: 227811 - DNA, 25 bp, Artificial
  Probe
gaagcagaagccatctatcagagcg

SEQ ID NO: 227812 - DNA, 25 bp, Artificial
  Probe
aaggcagcaggcatgaatcacacca

SEQ ID NO: 227813 - DNA, 25 bp, Artificial
  Probe
aagacgacagatgcaggaagcagaa

SEQ ID NO: 227814 - DNA, 25 bp, Artificial
  Probe
ctttctctacgcttctggacttggt

SEQ ID NO: 227815 - DNA, 25 bp, Artificial
  Probe
gacaaactggtcttggctttctcta

SEQ ID NO: 227816 - DNA, 25 bp, Artificial
  Probe
actggtcttggctttctctacgctt

SEQ ID NO: 227817 - DNA, 25 bp, Artificial
  Probe
acaccaaagccctggagagagtgtc

SEQ ID NO: 227818 - DNA, 25 bp, Artificial
  Probe
ccctggagagagtgtcctatgctct

SEQ ID NO: 227819 - DNA, 25 bp, Artificial
  Probe
agagagtgtcctatgctctcttgtt

SEQ ID NO: 227820 - DNA, 25 bp, Artificial
  Probe
agcaggcatgaatcacaccaaagcc

SEQ ID NO: 227821 - DNA, 25 bp, Artificial
  Probe
tgaagatcctgaacggcagcaccag

SEQ ID NO: 227822 - DNA, 25 bp, Artificial
  Probe
tccaggcagctaaagagatgtttga

SEQ ID NO: 227823 - DNA, 25 bp, Artificial
  Probe
tcaggcgaaggctcttgtgtattac

SEQ ID NO: 227824 - DNA, 25 bp, Artificial
  Probe
ggctggcatcggagtcctccagagt

SEQ ID NO: 227825 - DNA, 25 bp, Artificial
  Probe
ctgaggaagggtctcccaaaggaca

SEQ ID NO: 227826 - DNA, 25 bp, Artificial
  Probe
gcacatatggttttgggttaccgct

SEQ ID NO: 227827 - DNA, 25 bp, Artificial
  Probe
ccaaaagacgacagatgcaggaagc

SEQ ID NO: 227828 - DNA, 25 bp, Artificial
  Probe
gaagggtctcccaaaggacaaactg

SEQ ID NO: 227829 - DNA, 25 bp, Artificial
  Probe
tcccaaaggacaaactggtcttggc

SEQ ID NO: 227830 - DNA, 25 bp, Artificial
  Probe
cagagttgcgagtcggcactgaccc

SEQ ID NO: 227831 - DNA, 25 bp, Artificial
  Probe
aactgactgaggaagggtctcccaa

SEQ ID NO: 227832 - DNA, 25 bp, Artificial
  Probe
gaatcacaccaaagccctggagaga

SEQ ID NO: 227833 - DNA, 25 bp, Artificial
  Probe
ccgctactgggctggcatcggagtc

SEQ ID NO: 227834 - DNA, 25 bp, Artificial
  Probe
gatgaagatcctgaacggcagcacc

SEQ ID NO: 227835 - DNA, 25 bp, Artificial
  Probe
ttgggttaccgctactgggctggca

SEQ ID NO: 227836 - DNA, 25 bp, Artificial
  Probe
gcagcaccaggaagaaccaaaagag

SEQ ID NO: 227837 - DNA, 25 bp, Artificial
  Probe
ttaattcaagtcaggcgaaggctct

SEQ ID NO: 227838 - DNA, 25 bp, Artificial
  Probe
gccatctatcagagcgggatgaaga

SEQ ID NO: 227839 - DNA, 25 bp, Artificial
  Probe
gattacctcacacagaatatccagg

SEQ ID NO: 227840 - DNA, 25 bp, Artificial
  Probe
ggtctcccaaaggacaaactggtct

SEQ ID NO: 227841 - DNA, 25 bp, Artificial
  Probe
ggttaccgctactgggctggcatcg

SEQ ID NO: 227842 - DNA, 25 bp, Artificial
  Probe
atcctgaacggcagcaccaggaaga

SEQ ID NO: 227843 - DNA, 25 bp, Artificial
  Probe
cgacagatgcaggaagcagaagcca

SEQ ID NO: 227844 - DNA, 25 bp, Artificial
  Probe
aaggacaaactggtcttggctttct

SEQ ID NO: 227845 - DNA, 25 bp, Artificial
  Probe
gaaactgactgaggaagggtctccc

SEQ ID NO: 227846 - DNA, 25 bp, Artificial
  Probe
tatggttttgggttaccgctactgg

SEQ ID NO: 227847 - DNA, 25 bp, Artificial
  Probe
cgccatccagtctgcaggcctgatg

SEQ ID NO: 227848 - DNA, 25 bp, Artificial
  Probe
ctctgaattctgtgttcaaagatgg

SEQ ID NO: 227849 - DNA, 25 bp, Artificial
  Probe
cctccagaagagctgaacaaactct

SEQ ID NO: 227850 - DNA, 25 bp, Artificial
  Probe
cactgttttcgctcccacgaacgaa

SEQ ID NO: 227851 - DNA, 25 bp, Artificial
  Probe
acgaacgaagcgttccaagccatgc

SEQ ID NO: 227852 - DNA, 25 bp, Artificial
  Probe
gggggacaaccgttttagcatgctg

SEQ ID NO: 227853 - DNA, 25 bp, Artificial
  Probe
ggaacttaccaacatcctgaagtac

SEQ ID NO: 227854 - DNA, 25 bp, Artificial
  Probe
ctccaaggggacaaactggaagtca

SEQ ID NO: 227855 - DNA, 25 bp, Artificial
  Probe
tctgtgttcaaagatggtgtccccc

SEQ ID NO: 227856 - DNA, 25 bp, Artificial
  Probe
tctgcattgaaaacagctgcattgc

SEQ ID NO: 227857 - DNA, 25 bp, Artificial
  Probe
ccatccagtctgcaggcctgatgga

SEQ ID NO: 227858 - DNA, 25 bp, Artificial
  Probe
ccacatggtcaaagggcagttggcc

SEQ ID NO: 227859 - DNA, 25 bp, Artificial
  Probe
acagacagtggacacactgggtggc

SEQ ID NO: 227860 - DNA, 25 bp, Artificial
  Probe
aacgaagcgttccaagccatgcctc

SEQ ID NO: 227861 - DNA, 25 bp, Artificial
  Probe
gaccctgttcaccatggaccggatg

SEQ ID NO: 227862 - DNA, 25 bp, Artificial
  Probe
ttagcatgctggtggccgccatcca

SEQ ID NO: 227863 - DNA, 25 bp, Artificial
  Probe
ctctggtgcggctgaagtctctcca

SEQ ID NO: 227864 - DNA, 25 bp, Artificial
  Probe
acggccaaatgaagactttgcttct

SEQ ID NO: 227865 - DNA, 25 bp, Artificial
  Probe
ctatggggactgttatggatgtcct

SEQ ID NO: 227866 - DNA, 25 bp, Artificial
  Probe
ccaacatcctgaagtaccacattgg

SEQ ID NO: 227867 - DNA, 25 bp, Artificial
  Probe
accacattggggatgagatcctggt

SEQ ID NO: 227868 - DNA, 25 bp, Artificial
  Probe
gaagtaccacattggggatgagatc

SEQ ID NO: 227869 - DNA, 25 bp, Artificial
  Probe
aaatgaagactttgcttctgaacca

SEQ ID NO: 227870 - DNA, 25 bp, Artificial
  Probe
caaactggaagtcagctcgaaaaac

SEQ ID NO: 227871 - DNA, 25 bp, Artificial
  Probe
gctcccacgaacgaagcgttccaag

SEQ ID NO: 227872 - DNA, 25 bp, Artificial
  Probe
tgagatcctggttagcggaggcatt

SEQ ID NO: 227873 - DNA, 25 bp, Artificial
  Probe
tttgtactccggacagacagtggac

SEQ ID NO: 227874 - DNA, 25 bp, Artificial
  Probe
cccatgacaagaagggacggtatgg

SEQ ID NO: 227875 - DNA, 25 bp, Artificial
  Probe
gcgttccaagccatgcctccagaag

SEQ ID NO: 227876 - DNA, 25 bp, Artificial
  Probe
ggacggtatgggaccctgttcacca

SEQ ID NO: 227877 - DNA, 25 bp, Artificial
  Probe
ctccggacagacagtggacacactg

SEQ ID NO: 227878 - DNA, 25 bp, Artificial
  Probe
ctggtggccgccatccagtctgcag

SEQ ID NO: 227879 - DNA, 25 bp, Artificial
  Probe
cattggggatgagatcctggttagc

SEQ ID NO: 227880 - DNA, 25 bp, Artificial
  Probe
gaaggggtctacactgttttcgctc

SEQ ID NO: 227881 - DNA, 25 bp, Artificial
  Probe
caaatatttgtactccggacagaca

SEQ ID NO: 227882 - DNA, 25 bp, Artificial
  Probe
agtctgcaggcctgatggagaccct

SEQ ID NO: 227883 - DNA, 25 bp, Artificial
  Probe
aagagctgaacaaactcttggcaaa

SEQ ID NO: 227884 - DNA, 25 bp, Artificial
  Probe
ccccctatggggactgttatggatg

SEQ ID NO: 227885 - DNA, 25 bp, Artificial
  Probe
tgatggagaccctcaaccgggaagg

SEQ ID NO: 227886 - DNA, 25 bp, Artificial
  Probe
ggacacactgggtggcaaaaagctt

SEQ ID NO: 227887 - DNA, 25 bp, Artificial
  Probe
gcattgacggccaaatgaagacttt

SEQ ID NO: 227888 - DNA, 25 bp, Artificial
  Probe
tggtggccgccatccagtctgcagg

SEQ ID NO: 227889 - DNA, 25 bp, Artificial
  Probe
gcattgccgcccatgacaagaaggg

SEQ ID NO: 227890 - DNA, 25 bp, Artificial
  Probe
ttctgaaccacatggtcaaagggca

SEQ ID NO: 227891 - DNA, 25 bp, Artificial
  Probe
atgagatcctggttagcggaggcat

SEQ ID NO: 227892 - DNA, 25 bp, Artificial
  Probe
ttgtttatcgaaatagcctctgcat

SEQ ID NO: 227893 - DNA, 25 bp, Artificial
  Probe
atgcacagcaacagccgttgtcaaa

SEQ ID NO: 227894 - DNA, 25 bp, Artificial
  Probe
ggcaggatcaaatcctagtgggcct

SEQ ID NO: 227895 - DNA, 25 bp, Artificial
  Probe
aaagcagccatatgcacagcaacag

SEQ ID NO: 227896 - DNA, 25 bp, Artificial
  Probe
agttgtccaataagctttgagtatc

SEQ ID NO: 227897 - DNA, 25 bp, Artificial
  Probe
tcaccagaattgcattgttatgtgg

SEQ ID NO: 227898 - DNA, 25 bp, Artificial
  Probe
caaatgatgctccatcttgaccatg

SEQ ID NO: 227899 - DNA, 25 bp, Artificial
  Probe
ttgccgttggccttcatataagaaa

SEQ ID NO: 227900 - DNA, 25 bp, Artificial
  Probe
aagctttgagtatcttacagcttgc

SEQ ID NO: 227901 - DNA, 25 bp, Artificial
  Probe
tgtgcaagttgtccaataagctttg

SEQ ID NO: 227902 - DNA, 25 bp, Artificial
  Probe
ttatcttagcaagactttatgaggc

SEQ ID NO: 227903 - DNA, 25 bp, Artificial
  Probe
tgccgttggccttcatataagaaaa

SEQ ID NO: 227904 - DNA, 25 bp, Artificial
  Probe
agccgttgtcaaatgatgctccatc

SEQ ID NO: 227905 - DNA, 25 bp, Artificial
  Probe
ttacagcttgcctttttaatgttag

SEQ ID NO: 227906 - DNA, 25 bp, Artificial
  Probe
agcaagactttatgaggcaggatca

SEQ ID NO: 227907 - DNA, 25 bp, Artificial
  Probe
cacattatgctgatgttgatgacag

SEQ ID NO: 227908 - DNA, 25 bp, Artificial
  Probe
gtccaataagctttgagtatcttac

SEQ ID NO: 227909 - DNA, 25 bp, Artificial
  Probe
ccctgtttgccgttggccttcatat

SEQ ID NO: 227910 - DNA, 25 bp, Artificial
  Probe
gagtatcttacagcttgccttttta

SEQ ID NO: 227911 - DNA, 25 bp, Artificial
  Probe
gtttcaccagaattgcattgttatg

SEQ ID NO: 227912 - DNA, 25 bp, Artificial
  Probe
tcctagtgggcctgagctgatttct

SEQ ID NO: 227913 - DNA, 25 bp, Artificial
  Probe
gctccatcttgaccatgtgcaagtt

SEQ ID NO: 227914 - DNA, 25 bp, Artificial
  Probe
atcaaatcctagtgggcctgagctg

SEQ ID NO: 227915 - DNA, 25 bp, Artificial
  Probe
gcttgcctttttaatgttagtcaca

SEQ ID NO: 227916 - DNA, 25 bp, Artificial
  Probe
tgcctttttaatgttagtcacaatg

SEQ ID NO: 227917 - DNA, 25 bp, Artificial
  Probe
tgcaagttgtccaataagctttgag

SEQ ID NO: 227918 - DNA, 25 bp, Artificial
  Probe
gttgtcaaatgatgctccatcttga

SEQ ID NO: 227919 - DNA, 25 bp, Artificial
  Probe
gcaagttgtccaataagctttgagt

SEQ ID NO: 227920 - DNA, 25 bp, Artificial
  Probe
ctttatgaggcaggatcaaatccta

SEQ ID NO: 227921 - DNA, 25 bp, Artificial
  Probe
gatgccttgtgtgtcaattgaatgc

SEQ ID NO: 227922 - DNA, 25 bp, Artificial
  Probe
tacacattatgctgatgttgatgac

SEQ ID NO: 227923 - DNA, 25 bp, Artificial
  Probe
actttatgaggcaggatcaaatcct

SEQ ID NO: 227924 - DNA, 25 bp, Artificial
  Probe
cgttgtcaaatgatgctccatcttg

SEQ ID NO: 227925 - DNA, 25 bp, Artificial
  Probe
caagactttatgaggcaggatcaaa

SEQ ID NO: 227926 - DNA, 25 bp, Artificial
  Probe
ccttgtgtgtcaattgaatgcatac

SEQ ID NO: 227927 - DNA, 25 bp, Artificial
  Probe
gcctgagctgatttcttaccctaaa

SEQ ID NO: 227928 - DNA, 25 bp, Artificial
  Probe
cctgtttgccgttggccttcatata

SEQ ID NO: 227929 - DNA, 25 bp, Artificial
  Probe
cttagcaagactttatgaggcagga

SEQ ID NO: 227930 - DNA, 25 bp, Artificial
  Probe
ggggccgacactgttgccctgtttg

SEQ ID NO: 227931 - DNA, 25 bp, Artificial
  Probe
tgttgccctgtttgccgttggcctt

SEQ ID NO: 227932 - DNA, 25 bp, Artificial
  Probe
ctgagctgatttcttaccctaaatg

SEQ ID NO: 227933 - DNA, 25 bp, Artificial
  Probe
caagttgtccaataagctttgagta

SEQ ID NO: 227934 - DNA, 25 bp, Artificial
  Probe
cagccatatgcacagcaacagccgt

SEQ ID NO: 227935 - DNA, 25 bp, Artificial
  Probe
cagcaacagccgttgtcaaatgatg

SEQ ID NO: 227936 - DNA, 25 bp, Artificial
  Probe
ggccgacactgttgccctgtttgcc

SEQ ID NO: 227937 - DNA, 25 bp, Artificial
  Probe
acactgttgccctgtttgccgttgg

SEQ ID NO: 227938 - DNA, 25 bp, Artificial
  Probe
tgggcctgagctgatttcttaccct

SEQ ID NO: 227939 - DNA, 25 bp, Artificial
  Probe
gagcaatcactccactgtgacgctg

SEQ ID NO: 227940 - DNA, 25 bp, Artificial
  Probe
ccagatcgtcctttgcagttgaagt

SEQ ID NO: 227941 - DNA, 25 bp, Artificial
  Probe
cgtcctttgcagttgaagtgttttc

SEQ ID NO: 227942 - DNA, 25 bp, Artificial
  Probe
gagaccagatcgtcctttgcagttg

SEQ ID NO: 227943 - DNA, 25 bp, Artificial
  Probe
tcgtcctttgcagttgaagtgtttt

SEQ ID NO: 227944 - DNA, 25 bp, Artificial
  Probe
agagaccagatcgtcctttgcagtt

SEQ ID NO: 227945 - DNA, 25 bp, Artificial
  Probe
ctaggcgggcattgtgcactgtaga

SEQ ID NO: 227946 - DNA, 25 bp, Artificial
  Probe
agaccagatcgtcctttgcagttga

SEQ ID NO: 227947 - DNA, 25 bp, Artificial
  Probe
agatcgtcctttgcagttgaagtgt

SEQ ID NO: 227948 - DNA, 25 bp, Artificial
  Probe
caagagcaatcactccactgtgacg

SEQ ID NO: 227949 - DNA, 25 bp, Artificial
  Probe
gtcctttgcagttgaagtgttttcc

SEQ ID NO: 227950 - DNA, 25 bp, Artificial
  Probe
gcaatcactccactgtgacgctgcg

SEQ ID NO: 227951 - DNA, 25 bp, Artificial
  Probe
gagagaccagatcgtcctttgcagt

SEQ ID NO: 227952 - DNA, 25 bp, Artificial
  Probe
gaccagatcgtcctttgcagttgaa

SEQ ID NO: 227953 - DNA, 25 bp, Artificial
  Probe
ggcattgtgcactgtagatcagaga

SEQ ID NO: 227954 - DNA, 25 bp, Artificial
  Probe
tgtgcactgtagatcagagagacca

SEQ ID NO: 227955 - DNA, 25 bp, Artificial
  Probe
tgcactgtagatcagagagaccaga

SEQ ID NO: 227956 - DNA, 25 bp, Artificial
  Probe
ccactgtgacgctgcgcagttaggg

SEQ ID NO: 227957 - DNA, 25 bp, Artificial
  Probe
agatcagagagaccagatcgtcctt

SEQ ID NO: 227958 - DNA, 25 bp, Artificial
  Probe
atcagagagaccagatcgtcctttg

SEQ ID NO: 227959 - DNA, 25 bp, Artificial
  Probe
agagcaatcactccactgtgacgct

SEQ ID NO: 227960 - DNA, 25 bp, Artificial
  Probe
acatccgcggggaacctggtttgca

SEQ ID NO: 227961 - DNA, 25 bp, Artificial
  Probe
aagagcaatcactccactgtgacgc

SEQ ID NO: 227962 - DNA, 25 bp, Artificial
  Probe
gatcgtcctttgcagttgaagtgtt

SEQ ID NO: 227963 - DNA, 25 bp, Artificial
  Probe
gtgcactgtagatcagagagaccag

SEQ ID NO: 227964 - DNA, 25 bp, Artificial
  Probe
acaagagcaatcactccactgtgac

SEQ ID NO: 227965 - DNA, 25 bp, Artificial
  Probe
gggcattgtgcactgtagatcagag

SEQ ID NO: 227966 - DNA, 25 bp, Artificial
  Probe
gctaggcgggcattgtgcactgtag

SEQ ID NO: 227967 - DNA, 25 bp, Artificial
  Probe
cagagagaccagatcgtcctttgca

SEQ ID NO: 227968 - DNA, 25 bp, Artificial
  Probe
accagatcgtcctttgcagttgaag

SEQ ID NO: 227969 - DNA, 25 bp, Artificial
  Probe
cctttgcagttgaagtgttttccca

SEQ ID NO: 227970 - DNA, 25 bp, Artificial
  Probe
ctttgcagttgaagtgttttcccat

SEQ ID NO: 227971 - DNA, 25 bp, Artificial
  Probe
cagatcgtcctttgcagttgaagtg

SEQ ID NO: 227972 - DNA, 25 bp, Artificial
  Probe
cattgtgcactgtagatcagagaga

SEQ ID NO: 227973 - DNA, 25 bp, Artificial
  Probe
catccgcggggaacctggtttgcag

SEQ ID NO: 227974 - DNA, 25 bp, Artificial
  Probe
cgggcattgtgcactgtagatcaga

SEQ ID NO: 227975 - DNA, 25 bp, Artificial
  Probe
attgtgcactgtagatcagagagac

SEQ ID NO: 227976 - DNA, 25 bp, Artificial
  Probe
atcgtcctttgcagttgaagtgttt

SEQ ID NO: 227977 - DNA, 25 bp, Artificial
  Probe
agagagaccagatcgtcctttgcag

SEQ ID NO: 227978 - DNA, 25 bp, Artificial
  Probe
aggcgggcattgtgcactgtagatc

SEQ ID NO: 227979 - DNA, 25 bp, Artificial
  Probe
tcctttgcagttgaagtgttttccc

SEQ ID NO: 227980 - DNA, 25 bp, Artificial
  Probe
gcattgtgcactgtagatcagagag

SEQ ID NO: 227981 - DNA, 25 bp, Artificial
  Probe
ggcgggcattgtgcactgtagatca

SEQ ID NO: 227982 - DNA, 25 bp, Artificial
  Probe
taggcgggcattgtgcactgtagat

SEQ ID NO: 227983 - DNA, 25 bp, Artificial
  Probe
ttgtgcactgtagatcagagagacc

SEQ ID NO: 227984 - DNA, 25 bp, Artificial
  Probe
gcgggcattgtgcactgtagatcag

SEQ ID NO: 227985 - DNA, 25 bp, Artificial
  Probe
tgaatctccaaggaagattgaaatc

SEQ ID NO: 227986 - DNA, 25 bp, Artificial
  Probe
atttttctgtgagacttcatattgc

SEQ ID NO: 227987 - DNA, 25 bp, Artificial
  Probe
gaaagtagaccaactgacaacccaa

SEQ ID NO: 227988 - DNA, 25 bp, Artificial
  Probe
tggatctgtttagcatattgaacac

SEQ ID NO: 227989 - DNA, 25 bp, Artificial
  Probe
cttcttggatctgacagggttgtgg

SEQ ID NO: 227990 - DNA, 25 bp, Artificial
  Probe
caggaacctggctctgttccttata

SEQ ID NO: 227991 - DNA, 25 bp, Artificial
  Probe
tccgcgaagctatgcgggcgctgca

SEQ ID NO: 227992 - DNA, 25 bp, Artificial
  Probe
cttatagtttactgtggcgaggcag

SEQ ID NO: 227993 - DNA, 25 bp, Artificial
  Probe
cgaaaacagctactgacactggtgt

SEQ ID NO: 227994 - DNA, 25 bp, Artificial
  Probe
actggtgtcgtgacagtgacctgtg

SEQ ID NO: 227995 - DNA, 25 bp, Artificial
  Probe
tcagagctcaccttcgatttccaga

SEQ ID NO: 227996 - DNA, 25 bp, Artificial
  Probe
ttcagagctcaccttcgatttccag

SEQ ID NO: 227997 - DNA, 25 bp, Artificial
  Probe
acacaagtgcttcagccattgttat

SEQ ID NO: 227998 - DNA, 25 bp, Artificial
  Probe
gctgcaggaacctggctctgttcct

SEQ ID NO: 227999 - DNA, 25 bp, Artificial
  Probe
atctaacgaggtaacacaagaaatt

SEQ ID NO: 228000 - DNA, 25 bp, Artificial
  Probe
cctcgtgtgcttggattgttgtata

SEQ ID NO: 228001 - DNA, 25 bp, Artificial
  Probe
atccgcgaagctatgcgggcgctgc

SEQ ID NO: 228002 - DNA, 25 bp, Artificial
  Probe
gctcaccttcgatttccagatagaa

SEQ ID NO: 228003 - DNA, 25 bp, Artificial
  Probe
atccatagtttgtctacaagacagt

SEQ ID NO: 228004 - DNA, 25 bp, Artificial
  Probe
tcctggcgggccacgaaaacagcta

SEQ ID NO: 228005 - DNA, 25 bp, Artificial
  Probe
agacagggggccacagccgctgcaa

SEQ ID NO: 228006 - DNA, 25 bp, Artificial
  Probe
ctttctggaaacacgggatgcaagg

SEQ ID NO: 228007 - DNA, 25 bp, Artificial
  Probe
aacagctactgacactggtgtcgtg

SEQ ID NO: 228008 - DNA, 25 bp, Artificial
  Probe
tcgtgacagtgacctgtggagacag

SEQ ID NO: 228009 - DNA, 25 bp, Artificial
  Probe
aaccttagtggatccgcgaagctat

SEQ ID NO: 228010 - DNA, 25 bp, Artificial
  Probe
tcagccattgttatgtaatctttgt

SEQ ID NO: 228011 - DNA, 25 bp, Artificial
  Probe
acagctactgacactggtgtcgtga

SEQ ID NO: 228012 - DNA, 25 bp, Artificial
  Probe
ttagatctaacgaggtaacacaaga

SEQ ID NO: 228013 - DNA, 25 bp, Artificial
  Probe
ccacagccgctgcaaccttagtgga

SEQ ID NO: 228014 - DNA, 25 bp, Artificial
  Probe
atttatacatcctggcgggccacga

SEQ ID NO: 228015 - DNA, 25 bp, Artificial
  Probe
cagatagaatccatagtttgtctac

SEQ ID NO: 228016 - DNA, 25 bp, Artificial
  Probe
atctccaaggaagattgaaatccag

SEQ ID NO: 228017 - DNA, 25 bp, Artificial
  Probe
gcatattgaacacacaagtgcttca

SEQ ID NO: 228018 - DNA, 25 bp, Artificial
  Probe
cagtatttttctgtgagacttcata

SEQ ID NO: 228019 - DNA, 25 bp, Artificial
  Probe
agtgcttcagccattgttatgtaat

SEQ ID NO: 228020 - DNA, 25 bp, Artificial
  Probe
gattgaaatccagcagaaaattatc

SEQ ID NO: 228021 - DNA, 25 bp, Artificial
  Probe
ggcgctgcaggaacctggctctgtt

SEQ ID NO: 228022 - DNA, 25 bp, Artificial
  Probe
gatctgtttagcatattgaacacac

SEQ ID NO: 228023 - DNA, 25 bp, Artificial
  Probe
ttcgatttccagatagaatccatag

SEQ ID NO: 228024 - DNA, 25 bp, Artificial
  Probe
gaatcttcagacttcttggatctga

SEQ ID NO: 228025 - DNA, 25 bp, Artificial
  Probe
aagcagtatttttctgtgagacttc

SEQ ID NO: 228026 - DNA, 25 bp, Artificial
  Probe
tgtcgtgacagtgacctgtggagac

SEQ ID NO: 228027 - DNA, 25 bp, Artificial
  Probe
tactgacactggtgtcgtgacagtg

SEQ ID NO: 228028 - DNA, 25 bp, Artificial
  Probe
aatagcaatttatacatcctggcgg

SEQ ID NO: 228029 - DNA, 25 bp, Artificial
  Probe
gtagaccaactgacaacccaacagc

SEQ ID NO: 228030 - DNA, 25 bp, Artificial
  Probe
gttttagatctaacgaggtaacaca

SEQ ID NO: 228031 - DNA, 25 bp, Artificial
  Probe
gtcgcccactgtgtgaaaaccattt

SEQ ID NO: 228032 - DNA, 25 bp, Artificial
  Probe
cctccctgtgactggccgctgtgta

SEQ ID NO: 228033 - DNA, 25 bp, Artificial
  Probe
tgagcacgagggtcgcccactgtgt

SEQ ID NO: 228034 - DNA, 25 bp, Artificial
  Probe
aggcagcttctttgagcacgagggt

SEQ ID NO: 228035 - DNA, 25 bp, Artificial
  Probe
ttctccggaggcagcttctttgagc

SEQ ID NO: 228036 - DNA, 25 bp, Artificial
  Probe
tccggaggcagcttctttgagcacg

SEQ ID NO: 228037 - DNA, 25 bp, Artificial
  Probe
gtgactggccgctgtgtatctgctc

SEQ ID NO: 228038 - DNA, 25 bp, Artificial
  Probe
tctttgagcacgagggtcgcccact

SEQ ID NO: 228039 - DNA, 25 bp, Artificial
  Probe
gtgtggcctccctgtgactggccgc

SEQ ID NO: 228040 - DNA, 25 bp, Artificial
  Probe
actggccgctgtgtatctgctctgg

SEQ ID NO: 228041 - DNA, 25 bp, Artificial
  Probe
tgtgtgccacgtgtggcctccctgt

SEQ ID NO: 228042 - DNA, 25 bp, Artificial
  Probe
ccacgtgtggcctccctgtgactgg

SEQ ID NO: 228043 - DNA, 25 bp, Artificial
  Probe
ccatttccacgctcagcgtggttcg

SEQ ID NO: 228044 - DNA, 25 bp, Artificial
  Probe
gagggtcgcccactgtgtgaaaacc

SEQ ID NO: 228045 - DNA, 25 bp, Artificial
  Probe
tcgcccactgtgtgaaaaccatttc

SEQ ID NO: 228046 - DNA, 25 bp, Artificial
  Probe
gactggccgctgtgtatctgctctg

SEQ ID NO: 228047 - DNA, 25 bp, Artificial
  Probe
cgagggtcgcccactgtgtgaaaac

SEQ ID NO: 228048 - DNA, 25 bp, Artificial
  Probe
cgctgtgtatctgctctgggccgcc

SEQ ID NO: 228049 - DNA, 25 bp, Artificial
  Probe
gtgtgccacgtgtggcctccctgtg

SEQ ID NO: 228050 - DNA, 25 bp, Artificial
  Probe
ctccggaggcagcttctttgagcac

SEQ ID NO: 228051 - DNA, 25 bp, Artificial
  Probe
gcccactgtgtgaaaaccatttcca

SEQ ID NO: 228052 - DNA, 25 bp, Artificial
  Probe
cgcccactgtgtgaaaaccatttcc

SEQ ID NO: 228053 - DNA, 25 bp, Artificial
  Probe
tgtggcctccctgtgactggccgct

SEQ ID NO: 228054 - DNA, 25 bp, Artificial
  Probe
ggtcgcccactgtgtgaaaaccatt

SEQ ID NO: 228055 - DNA, 25 bp, Artificial
  Probe
tctccggaggcagcttctttgagca

SEQ ID NO: 228056 - DNA, 25 bp, Artificial
  Probe
tgtgaaaaccatttccacgctcagc

SEQ ID NO: 228057 - DNA, 25 bp, Artificial
  Probe
ctgtgtatctgctctgggccgccgc

SEQ ID NO: 228058 - DNA, 25 bp, Artificial
  Probe
ggccgctgtgtatctgctctgggcc

SEQ ID NO: 228059 - DNA, 25 bp, Artificial
  Probe
agcttctttgagcacgagggtcgcc

SEQ ID NO: 228060 - DNA, 25 bp, Artificial
  Probe
ttctttgagcacgagggtcgcccac

SEQ ID NO: 228061 - DNA, 25 bp, Artificial
  Probe
gcttctttgagcacgagggtcgccc

SEQ ID NO: 228062 - DNA, 25 bp, Artificial
  Probe
ctggccgctgtgtatctgctctggg

SEQ ID NO: 228063 - DNA, 25 bp, Artificial
  Probe
ccgctgtgtatctgctctgggccgc

SEQ ID NO: 228064 - DNA, 25 bp, Artificial
  Probe
tgaaaaccatttccacgctcagcgt

SEQ ID NO: 228065 - DNA, 25 bp, Artificial
  Probe
gggtcgcccactgtgtgaaaaccat

SEQ ID NO: 228066 - DNA, 25 bp, Artificial
  Probe
tggcctccctgtgactggccgctgt

SEQ ID NO: 228067 - DNA, 25 bp, Artificial
  Probe
cttctttgagcacgagggtcgccca

SEQ ID NO: 228068 - DNA, 25 bp, Artificial
  Probe
ggcctccctgtgactggccgctgtg

SEQ ID NO: 228069 - DNA, 25 bp, Artificial
  Probe
gccgctgtgtatctgctctgggccg

SEQ ID NO: 228070 - DNA, 25 bp, Artificial
  Probe
tgtgtgaaaaccatttccacgctca

SEQ ID NO: 228071 - DNA, 25 bp, Artificial
  Probe
gtgaaaaccatttccacgctcagcg

SEQ ID NO: 228072 - DNA, 25 bp, Artificial
  Probe
tgactggccgctgtgtatctgctct

SEQ ID NO: 228073 - DNA, 25 bp, Artificial
  Probe
gcccttctccggaggcagcttcttt

SEQ ID NO: 228074 - DNA, 25 bp, Artificial
  Probe
cggaggcagcttctttgagcacgag

SEQ ID NO: 228075 - DNA, 25 bp, Artificial
  Probe
gtgtatctgctctgggccgccgctt

SEQ ID NO: 228076 - DNA, 25 bp, Artificial
  Probe
ccggaggcagcttctttgagcacga

SEQ ID NO: 228077 - DNA, 25 bp, Artificial
  Probe
ccctggacacagagatccctaatga

SEQ ID NO: 228078 - DNA, 25 bp, Artificial
  Probe
agacggcattgatgatgagtcctat

SEQ ID NO: 228079 - DNA, 25 bp, Artificial
  Probe
tcctatgaagccatcttcaagccag

SEQ ID NO: 228080 - DNA, 25 bp, Artificial
  Probe
ggatcggctaggttgcttcaatctg

SEQ ID NO: 228081 - DNA, 25 bp, Artificial
  Probe
agagtttcaacttgccaatgctaat

SEQ ID NO: 228082 - DNA, 25 bp, Artificial
  Probe
atcttcaagccagtcatgtccaaag

SEQ ID NO: 228083 - DNA, 25 bp, Artificial
  Probe
acccactgcgagacggcattgatga

SEQ ID NO: 228084 - DNA, 25 bp, Artificial
  Probe
gatgtttcagcctagtgcagtggtc

SEQ ID NO: 228085 - DNA, 25 bp, Artificial
  Probe
atggagatgtttcagcctagtgcag

SEQ ID NO: 228086 - DNA, 25 bp, Artificial
  Probe
gcggctctttgagaacttgagaatg

SEQ ID NO: 228087 - DNA, 25 bp, Artificial
  Probe
acttgccaatgctaatgttgggagg

SEQ ID NO: 228088 - DNA, 25 bp, Artificial
  Probe
agaacactaatgaatacctggagaa

SEQ ID NO: 228089 - DNA, 25 bp, Artificial
  Probe
tgtggccctggacacagagatccct

SEQ ID NO: 228090 - DNA, 25 bp, Artificial
  Probe
ctggggatcggctaggttgcttcaa

SEQ ID NO: 228091 - DNA, 25 bp, Artificial
  Probe
acgagacagctgtggccctggacac

SEQ ID NO: 228092 - DNA, 25 bp, Artificial
  Probe
aaccagaacactaatgaatacctgg

SEQ ID NO: 228093 - DNA, 25 bp, Artificial
  Probe
agactccctgtctggggatcggcta

SEQ ID NO: 228094 - DNA, 25 bp, Artificial
  Probe
ctggacacagagatccctaatgagc

SEQ ID NO: 228095 - DNA, 25 bp, Artificial
  Probe
gcttcaatctgaccatcaaaggaca

SEQ ID NO: 228096 - DNA, 25 bp, Artificial
  Probe
cattgatgatgagtcctatgaagcc

SEQ ID NO: 228097 - DNA, 25 bp, Artificial
  Probe
catcaaaggacatgccaagtgtgtg

SEQ ID NO: 228098 - DNA, 25 bp, Artificial
  Probe
tttcaacttgccaatgctaatgttg

SEQ ID NO: 228099 - DNA, 25 bp, Artificial
  Probe
gctcagactccctgtctggggatcg

SEQ ID NO: 228100 - DNA, 25 bp, Artificial
  Probe
tggacacagagatccctaatgagct

SEQ ID NO: 228101 - DNA, 25 bp, Artificial
  Probe
acaatgactactttgaatactttgg

SEQ ID NO: 228102 - DNA, 25 bp, Artificial
  Probe
cccctggggtccaaatgcaggccat

SEQ ID NO: 228103 - DNA, 25 bp, Artificial
  Probe
cttgccaatgctaatgttgggagga

SEQ ID NO: 228104 - DNA, 25 bp, Artificial
  Probe
atcggctaggttgcttcaatctgac

SEQ ID NO: 228105 - DNA, 25 bp, Artificial
  Probe
tcaagcagcggctctttgagaactt

SEQ ID NO: 228106 - DNA, 25 bp, Artificial
  Probe
ctgcgagacggcattgatgatgagt

SEQ ID NO: 228107 - DNA, 25 bp, Artificial
  Probe
tctttgagaacttgagaatgctgcc

SEQ ID NO: 228108 - DNA, 25 bp, Artificial
  Probe
tcaacttgccaatgctaatgttggg

SEQ ID NO: 228109 - DNA, 25 bp, Artificial
  Probe
cagtcatgtccaaagtaatggagat

SEQ ID NO: 228110 - DNA, 25 bp, Artificial
  Probe
ctacagtgcggctcagactccctgt

SEQ ID NO: 228111 - DNA, 25 bp, Artificial
  Probe
ctggggtccaaatgcaggccatccc

SEQ ID NO: 228112 - DNA, 25 bp, Artificial
  Probe
aagccatcttcaagccagtcatgtc

SEQ ID NO: 228113 - DNA, 25 bp, Artificial
  Probe
tggagatgtttcagcctagtgcagt

SEQ ID NO: 228114 - DNA, 25 bp, Artificial
  Probe
gtggtcctacagtgcggctcagact

SEQ ID NO: 228115 - DNA, 25 bp, Artificial
  Probe
tgcggctcagactccctgtctgggg

SEQ ID NO: 228116 - DNA, 25 bp, Artificial
  Probe
cagctgtggccctggacacagagat

SEQ ID NO: 228117 - DNA, 25 bp, Artificial
  Probe
gtcgctcggtgctggacttacgaga

SEQ ID NO: 228118 - DNA, 25 bp, Artificial
  Probe
gaagagtttcaacttgccaatgcta

SEQ ID NO: 228119 - DNA, 25 bp, Artificial
  Probe
ggatgccatcccagaagagagcggt

SEQ ID NO: 228120 - DNA, 25 bp, Artificial
  Probe
ggggatcggctaggttgcttcaatc

SEQ ID NO: 228121 - DNA, 25 bp, Artificial
  Probe
tgagtcctatgaagccatcttcaag

SEQ ID NO: 228122 - DNA, 25 bp, Artificial
  Probe
cgagacggcattgatgatgagtcct

SEQ ID NO: 228123 - DNA, 25 bp, Artificial
  Probe
caccctcgggtgctgtacattgata

SEQ ID NO: 228124 - DNA, 25 bp, Artificial
  Probe
ggtttggaaaccacatctggttcta

SEQ ID NO: 228125 - DNA, 25 bp, Artificial
  Probe
catcgtgctgcagtgtggcgctgac

SEQ ID NO: 228126 - DNA, 25 bp, Artificial
  Probe
ccagccggtcatcagccaggtggtg

SEQ ID NO: 228127 - DNA, 25 bp, Artificial
  Probe
cagcattcgaggacatggggaatgt

SEQ ID NO: 228128 - DNA, 25 bp, Artificial
  Probe
acatagtaattggtatcctggagct

SEQ ID NO: 228129 - DNA, 25 bp, Artificial
  Probe
gtactttgccccagatttcacgctc

SEQ ID NO: 228130 - DNA, 25 bp, Artificial
  Probe
gacatatgaaacatctctgctggta

SEQ ID NO: 228131 - DNA, 25 bp, Artificial
  Probe
ccatctttgaaaacttgaagatgct

SEQ ID NO: 228132 - DNA, 25 bp, Artificial
  Probe
cagtgtggcgctgactccctgggct

SEQ ID NO: 228133 - DNA, 25 bp, Artificial
  Probe
tccaccatggtgacggggttcagga

SEQ ID NO: 228134 - DNA, 25 bp, Artificial
  Probe
aggagaactacagcaggccagaagc

SEQ ID NO: 228135 - DNA, 25 bp, Artificial
  Probe
ctttcctggaacaggtgatatgtat

SEQ ID NO: 228136 - DNA, 25 bp, Artificial
  Probe
cttgaagatgctgaaccatgcaccc

SEQ ID NO: 228137 - DNA, 25 bp, Artificial
  Probe
accatgacaatgacaaggaaagcga

SEQ ID NO: 228138 - DNA, 25 bp, Artificial
  Probe
agatttaagagcagcatggatgccg

SEQ ID NO: 228139 - DNA, 25 bp, Artificial
  Probe
atccagatgtcagcacccgcatcga

SEQ ID NO: 228140 - DNA, 25 bp, Artificial
  Probe
tctgctggtagaagaggccattagt

SEQ ID NO: 228141 - DNA, 25 bp, Artificial
  Probe
atcctggagctgctcaagtaccacc

SEQ ID NO: 228142 - DNA, 25 bp, Artificial
  Probe
tccccagggtgtttactaactctgg

SEQ ID NO: 228143 - DNA, 25 bp, Artificial
  Probe
ttggagcagagagtggccgctacta

SEQ ID NO: 228144 - DNA, 25 bp, Artificial
  Probe
cccggtgctggacatatgaaacatc

SEQ ID NO: 228145 - DNA, 25 bp, Artificial
  Probe
ttcacgctccatccagatgtcagca

SEQ ID NO: 228146 - DNA, 25 bp, Artificial
  Probe
gtggttacaccgtccgaaatgttgc

SEQ ID NO: 228147 - DNA, 25 bp, Artificial
  Probe
gagagtggccgctactattgtctca

SEQ ID NO: 228148 - DNA, 25 bp, Artificial
  Probe
tgctctcccaggtctgaactgggta

SEQ ID NO: 228149 - DNA, 25 bp, Artificial
  Probe
aagtttgaggcctctggcttctgct

SEQ ID NO: 228150 - DNA, 25 bp, Artificial
  Probe
atacttcgagtactttgccccagat

SEQ ID NO: 228151 - DNA, 25 bp, Artificial
  Probe
tatggaaattacttctttcctggaa

SEQ ID NO: 228152 - DNA, 25 bp, Artificial
  Probe
acattgatattgacatccaccatgg

SEQ ID NO: 228153 - DNA, 25 bp, Artificial
  Probe
tcgggtgctgtacattgatattgac

SEQ ID NO: 228154 - DNA, 25 bp, Artificial
  Probe
tgacggggttcaggaagccttctac

SEQ ID NO: 228155 - DNA, 25 bp, Artificial
  Probe
aggaaagtattgctctcccaggtct

SEQ ID NO: 228156 - DNA, 25 bp, Artificial
  Probe
gtgtccttccacaaatatggaaatt

SEQ ID NO: 228157 - DNA, 25 bp, Artificial
  Probe
gaagaggccattagtgaggaacttc

SEQ ID NO: 228158 - DNA, 25 bp, Artificial
  Probe
acaggactgacgaggccgatgctga

SEQ ID NO: 228159 - DNA, 25 bp, Artificial
  Probe
cagatttcacgctccatccagatgt

SEQ ID NO: 228160 - DNA, 25 bp, Artificial
  Probe
gcgctgactccctgggctgtgatcg

SEQ ID NO: 228161 - DNA, 25 bp, Artificial
  Probe
gagttccttgtcacctctgtggtgg

SEQ ID NO: 228162 - DNA, 25 bp, Artificial
  Probe
ttacgggatggcattgatgaccaga

SEQ ID NO: 228163 - DNA, 25 bp, Artificial
  Probe
attagtgaggaacttccctatagtg

SEQ ID NO: 228164 - DNA, 25 bp, Artificial
  Probe
ctgaactgggtatccccagggtgtt

SEQ ID NO: 228165 - DNA, 25 bp, Artificial
  Probe
cttctgctatgtcaatgacatagta

SEQ ID NO: 228166 - DNA, 25 bp, Artificial
  Probe
catgccaagaagtttgaggcctctg

SEQ ID NO: 228167 - DNA, 25 bp, Artificial
  Probe
tatccccagggtgtttactaactct

SEQ ID NO: 228168 - DNA, 25 bp, Artificial
  Probe
tgatggagaccatgacaatgacaag

SEQ ID NO: 228169 - DNA, 25 bp, Artificial
  Probe
gcaaatatcgggtgcgccgaaaatt

SEQ ID NO: 228170 - DNA, 25 bp, Artificial
  Probe
aattgcagcagttgtggctgaaagc

SEQ ID NO: 228171 - DNA, 25 bp, Artificial
  Probe
tcatgtccagctcagaagaggaatt

SEQ ID NO: 228172 - DNA, 25 bp, Artificial
  Probe
gcaatatgggccatgccaggagctc

SEQ ID NO: 228173 - DNA, 25 bp, Artificial
  Probe
ggggcaagccgctcatgtccagctc

SEQ ID NO: 228174 - DNA, 25 bp, Artificial
  Probe
tccagagcaatatgggccatgccag

SEQ ID NO: 228175 - DNA, 25 bp, Artificial
  Probe
gctgaaagcgcactacgtggaggcc

SEQ ID NO: 228176 - DNA, 25 bp, Artificial
  Probe
caggagctcaaactattctcttccg

SEQ ID NO: 228177 - DNA, 25 bp, Artificial
  Probe
aagtccagaccagaactcggtcctc

SEQ ID NO: 228178 - DNA, 25 bp, Artificial
  Probe
cgaagagactagctactgttttaag

SEQ ID NO: 228179 - DNA, 25 bp, Artificial
  Probe
tcggtcctcctgctccagagcaata

SEQ ID NO: 228180 - DNA, 25 bp, Artificial
  Probe
cagttgtggctgaaagcgcactacg

SEQ ID NO: 228181 - DNA, 25 bp, Artificial
  Probe
gccgctcatgtccagctcagaagag

SEQ ID NO: 228182 - DNA, 25 bp, Artificial
  Probe
gcaccatctgggatggcgaagagac

SEQ ID NO: 228183 - DNA, 25 bp, Artificial
  Probe
tggcctgcaggctcatcagcaccag

SEQ ID NO: 228184 - DNA, 25 bp, Artificial
  Probe
ctactgttttaaggagaagtctcgg

SEQ ID NO: 228185 - DNA, 25 bp, Artificial
  Probe
caaattgcagcagttgtggctgaaa

SEQ ID NO: 228186 - DNA, 25 bp, Artificial
  Probe
caatatgggccatgccaggagctca

SEQ ID NO: 228187 - DNA, 25 bp, Artificial
  Probe
cccaaagtccagaccagaactcggt

SEQ ID NO: 228188 - DNA, 25 bp, Artificial
  Probe
accacccaggtcagcaactggttta

SEQ ID NO: 228189 - DNA, 25 bp, Artificial
  Probe
ccctgggtgccgtgggcaaatatcg

SEQ ID NO: 228190 - DNA, 25 bp, Artificial
  Probe
gccaggagctcaaactattctcttc

SEQ ID NO: 228191 - DNA, 25 bp, Artificial
  Probe
gtcctcctgctccagagcaatatgg

SEQ ID NO: 228192 - DNA, 25 bp, Artificial
  Probe
agctactgttttaaggagaagtctc

SEQ ID NO: 228193 - DNA, 25 bp, Artificial
  Probe
agaactcggtcctcctgctccagag

SEQ ID NO: 228194 - DNA, 25 bp, Artificial
  Probe
ccgttgccgcgcaccatctgggatg

SEQ ID NO: 228195 - DNA, 25 bp, Artificial
  Probe
tgaaagcgcactacgtggaggccga

SEQ ID NO: 228196 - DNA, 25 bp, Artificial
  Probe
agcagttgtggctgaaagcgcacta

SEQ ID NO: 228197 - DNA, 25 bp, Artificial
  Probe
gaggccgagaaacttcgcggccgac

SEQ ID NO: 228198 - DNA, 25 bp, Artificial
  Probe
gaatcaactctctcctctggaaggg

SEQ ID NO: 228199 - DNA, 25 bp, Artificial
  Probe
tcgggtgcgccgaaaattcccgttg

SEQ ID NO: 228200 - DNA, 25 bp, Artificial
  Probe
caccatctgggatggcgaagagact

SEQ ID NO: 228201 - DNA, 25 bp, Artificial
  Probe
aagcagaatcaactctctcctctgg

SEQ ID NO: 228202 - DNA, 25 bp, Artificial
  Probe
tgcgccgaaaattcccgttgccgcg

SEQ ID NO: 228203 - DNA, 25 bp, Artificial
  Probe
ttgcagcagttgtggctgaaagcgc

SEQ ID NO: 228204 - DNA, 25 bp, Artificial
  Probe
aaagcgcactacgtggaggccgaga

SEQ ID NO: 228205 - DNA, 25 bp, Artificial
  Probe
tccagctcagaagaggaattctcac

SEQ ID NO: 228206 - DNA, 25 bp, Artificial
  Probe
atgggccatgccaggagctcaaact

SEQ ID NO: 228207 - DNA, 25 bp, Artificial
  Probe
gccgcgcaccatctgggatggcgaa

SEQ ID NO: 228208 - DNA, 25 bp, Artificial
  Probe
gctcaaactattctcttccgggcct

SEQ ID NO: 228209 - DNA, 25 bp, Artificial
  Probe
atgtccagctcagaagaggaattct

SEQ ID NO: 228210 - DNA, 25 bp, Artificial
  Probe
gtccagctcagaagaggaattctca

SEQ ID NO: 228211 - DNA, 25 bp, Artificial
  Probe
ttgccgcgcaccatctgggatggcg

SEQ ID NO: 228212 - DNA, 25 bp, Artificial
  Probe
gttgtggctgaaagcgcactacgtg

SEQ ID NO: 228213 - DNA, 25 bp, Artificial
  Probe
cgcactacgtggaggccgagaaact

SEQ ID NO: 228214 - DNA, 25 bp, Artificial
  Probe
ggtgcgccgaaaattcccgttgccg

SEQ ID NO: 228215 - DNA, 25 bp, Artificial
  Probe
caagtacaggcgagcccagctggct

SEQ ID NO: 228216 - DNA, 25 bp, Artificial
  Probe
caacgtccaccaatgactgggtggt

SEQ ID NO: 228217 - DNA, 25 bp, Artificial
  Probe
caccgcgagatcaccatcgtgagct

SEQ ID NO: 228218 - DNA, 25 bp, Artificial
  Probe
ccacctgccgcaaaatggacgaact

SEQ ID NO: 228219 - DNA, 25 bp, Artificial
  Probe
tggtggacatcctcatcctccctgg

SEQ ID NO: 228220 - DNA, 25 bp, Artificial
  Probe
aaatggacgaactgggctccaaggg

SEQ ID NO: 228221 - DNA, 25 bp, Artificial
  Probe
ggttggattggcatcatcgtcacaa

SEQ ID NO: 228222 - DNA, 25 bp, Artificial
  Probe
acgagcctggagtggccaagtacag

SEQ ID NO: 228223 - DNA, 25 bp, Artificial
  Probe
gcacagtcgtttggagaaaaccgtt

SEQ ID NO: 228224 - DNA, 25 bp, Artificial
  Probe
cctgtatccgaatgggccacgagcc

SEQ ID NO: 228225 - DNA, 25 bp, Artificial
  Probe
ccgcaaaatggacgaactgggctcc

SEQ ID NO: 228226 - DNA, 25 bp, Artificial
  Probe
tcgtcacaacgtccaccaatgactg

SEQ ID NO: 228227 - DNA, 25 bp, Artificial
  Probe
gcaggcttgtagagccctcatgatt

SEQ ID NO: 228228 - DNA, 25 bp, Artificial
  Probe
ccgactgcgtcatggccactggtct

SEQ ID NO: 228229 - DNA, 25 bp, Artificial
  Probe
tctggttccagctcgccaacgcatg

SEQ ID NO: 228230 - DNA, 25 bp, Artificial
  Probe
actgcaagcccctggtggacatcct

SEQ ID NO: 228231 - DNA, 25 bp, Artificial
  Probe
tcgtgggttggattggcatcatcgt

SEQ ID NO: 228232 - DNA, 25 bp, Artificial
  Probe
gctcgccaacgcatgccaagagtgc

SEQ ID NO: 228233 - DNA, 25 bp, Artificial
  Probe
atcgtctgctgctccggggatgcac

SEQ ID NO: 228234 - DNA, 25 bp, Artificial
  Probe
ttctggttccagctcgccaacgcat

SEQ ID NO: 228235 - DNA, 25 bp, Artificial
  Probe
gttctcccctgtatccgaatgggcc

SEQ ID NO: 228236 - DNA, 25 bp, Artificial
  Probe
gagtggccaagtacaggcgagccca

SEQ ID NO: 228237 - DNA, 25 bp, Artificial
  Probe
ttgctgcctcagttctgggcctgcc

SEQ ID NO: 228238 - DNA, 25 bp, Artificial
  Probe
ctactcgctgtatgcgggctggatc

SEQ ID NO: 228239 - DNA, 25 bp, Artificial
  Probe
gtttctattactcttctggttccag

SEQ ID NO: 228240 - DNA, 25 bp, Artificial
  Probe
cttgtagagccctcatgattgctgc

SEQ ID NO: 228241 - DNA, 25 bp, Artificial
  Probe
ccaacgcatgccaagagtgcccatg

SEQ ID NO: 228242 - DNA, 25 bp, Artificial
  Probe
ggtggctgtgtcatcgtctgctgct

SEQ ID NO: 228243 - DNA, 25 bp, Artificial
  Probe
ctgctggctctctgcgccattgtcg

SEQ ID NO: 228244 - DNA, 25 bp, Artificial
  Probe
ttggcatcatcgtcacaacgtccac

SEQ ID NO: 228245 - DNA, 25 bp, Artificial
  Probe
gtggacatcctcatcctccctggtt

SEQ ID NO: 228246 - DNA, 25 bp, Artificial
  Probe
ggatgcacagtcgtttggagaaaac

SEQ ID NO: 228247 - DNA, 25 bp, Artificial
  Probe
gccattgtcgccaccatctggtttc

SEQ ID NO: 228248 - DNA, 25 bp, Artificial
  Probe
catctggtttcctgtatgcgcccac

SEQ ID NO: 228249 - DNA, 25 bp, Artificial
  Probe
tgttaacagttctcccctgtatccg

SEQ ID NO: 228250 - DNA, 25 bp, Artificial
  Probe
tggagaaaaccgtttctattactct

SEQ ID NO: 228251 - DNA, 25 bp, Artificial
  Probe
tccgaatgggccacgagcctggagt

SEQ ID NO: 228252 - DNA, 25 bp, Artificial
  Probe
ctccggggatgcacagtcgtttgga

SEQ ID NO: 228253 - DNA, 25 bp, Artificial
  Probe
gtggccaagtacaggcgagcccagc

SEQ ID NO: 228254 - DNA, 25 bp, Artificial
  Probe
gcaagcccctggtggacatcctcat

SEQ ID NO: 228255 - DNA, 25 bp, Artificial
  Probe
gctggggtgctccttattctgctgg

SEQ ID NO: 228256 - DNA, 25 bp, Artificial
  Probe
ggccgactgcgtcatggccactggt

SEQ ID NO: 228257 - DNA, 25 bp, Artificial
  Probe
gctgctccggggatgcacagtcgtt

SEQ ID NO: 228258 - DNA, 25 bp, Artificial
  Probe
ctgtgggccgactgcgtcatggcca

SEQ ID NO: 228259 - DNA, 25 bp, Artificial
  Probe
ttggctactcgctgtatgcgggctg

SEQ ID NO: 228260 - DNA, 25 bp, Artificial
  Probe
catcttgctgctgttaacagttctc

SEQ ID NO: 228261 - DNA, 25 bp, Artificial
  Probe
ctcaggaacgggactcgaaggacca

SEQ ID NO: 228262 - DNA, 25 bp, Artificial
  Probe
tcaggaacgggactcgaaggaccat

SEQ ID NO: 228263 - DNA, 25 bp, Artificial
  Probe
tggcagccacttccttggtgctacc

SEQ ID NO: 228264 - DNA, 25 bp, Artificial
  Probe
tccgcgagactctagaaagccctgc

SEQ ID NO: 228265 - DNA, 25 bp, Artificial
  Probe
agcacagaacagtggggtctccagc

SEQ ID NO: 228266 - DNA, 25 bp, Artificial
  Probe
gaacctcctctttggtcctctaggg

SEQ ID NO: 228267 - DNA, 25 bp, Artificial
  Probe
ttccttggtgctaccgacttggtgt

SEQ ID NO: 228268 - DNA, 25 bp, Artificial
  Probe
aggaccatcctgctagatgccctgc

SEQ ID NO: 228269 - DNA, 25 bp, Artificial
  Probe
gcagccacttccttggtgctaccga

SEQ ID NO: 228270 - DNA, 25 bp, Artificial
  Probe
aacagtggggtctccagctggagcc

SEQ ID NO: 228271 - DNA, 25 bp, Artificial
  Probe
ggcaagcacagaacagtggggtctc

SEQ ID NO: 228272 - DNA, 25 bp, Artificial
  Probe
tcagggcctcctcagttgatttctg

SEQ ID NO: 228273 - DNA, 25 bp, Artificial
  Probe
tgctagatgccctgcttccctgtga

SEQ ID NO: 228274 - DNA, 25 bp, Artificial
  Probe
ggctgcctggagaacatccgcgaga

SEQ ID NO: 228275 - DNA, 25 bp, Artificial
  Probe
gacttggtgtacatagcttttccca

SEQ ID NO: 228276 - DNA, 25 bp, Artificial
  Probe
gaccatcctgctagatgccctgctt

SEQ ID NO: 228277 - DNA, 25 bp, Artificial
  Probe
agaacatccgcgagactctagaaag

SEQ ID NO: 228278 - DNA, 25 bp, Artificial
  Probe
ggaacgggactcgaaggaccatcct

SEQ ID NO: 228279 - DNA, 25 bp, Artificial
  Probe
caggaacgggactcgaaggaccatc

SEQ ID NO: 228280 - DNA, 25 bp, Artificial
  Probe
agccacttccttggtgctaccgact

SEQ ID NO: 228281 - DNA, 25 bp, Artificial
  Probe
ggtgctaccgacttggtgtacatag

SEQ ID NO: 228282 - DNA, 25 bp, Artificial
  Probe
ccgacttggtgtacatagcttttcc

SEQ ID NO: 228283 - DNA, 25 bp, Artificial
  Probe
gcctggagaacatccgcgagactct

SEQ ID NO: 228284 - DNA, 25 bp, Artificial
  Probe
gggactcgaaggaccatcctgctag

SEQ ID NO: 228285 - DNA, 25 bp, Artificial
  Probe
gaacatccgcgagactctagaaagc

SEQ ID NO: 228286 - DNA, 25 bp, Artificial
  Probe
ctgtgaacctcctctttggtcctct

SEQ ID NO: 228287 - DNA, 25 bp, Artificial
  Probe
gacagctgagggtgccaaaagccag

SEQ ID NO: 228288 - DNA, 25 bp, Artificial
  Probe
ctgcctggagaacatccgcgagact

SEQ ID NO: 228289 - DNA, 25 bp, Artificial
  Probe
gctcccagacagctgagggtgccaa

SEQ ID NO: 228290 - DNA, 25 bp, Artificial
  Probe
gcctcctcagttgatttctgggccc

SEQ ID NO: 228291 - DNA, 25 bp, Artificial
  Probe
catccgcgagactctagaaagccct

SEQ ID NO: 228292 - DNA, 25 bp, Artificial
  Probe
ttccctgtgaacctcctctttggtc

SEQ ID NO: 228293 - DNA, 25 bp, Artificial
  Probe
tgcgtggctgcctggagaacatccg

SEQ ID NO: 228294 - DNA, 25 bp, Artificial
  Probe
tgctcccagacagctgagggtgcca

SEQ ID NO: 228295 - DNA, 25 bp, Artificial
  Probe
cttccctgtgaacctcctctttggt

SEQ ID NO: 228296 - DNA, 25 bp, Artificial
  Probe
catgaacctgcgtggctgcctggag

SEQ ID NO: 228297 - DNA, 25 bp, Artificial
  Probe
actcgaaggaccatcctgctagatg

SEQ ID NO: 228298 - DNA, 25 bp, Artificial
  Probe
aacctgcgtggctgcctggagaaca

SEQ ID NO: 228299 - DNA, 25 bp, Artificial
  Probe
tgcttccctgtgaacctcctctttg

SEQ ID NO: 228300 - DNA, 25 bp, Artificial
  Probe
cagtggggtctccagctggagcccc

SEQ ID NO: 228301 - DNA, 25 bp, Artificial
  Probe
cccagacagctgagggtgccaaaag

SEQ ID NO: 228302 - DNA, 25 bp, Artificial
  Probe
agatgccctgcttccctgtgaacct

SEQ ID NO: 228303 - DNA, 25 bp, Artificial
  Probe
ttggtgctaccgacttggtgtacat

SEQ ID NO: 228304 - DNA, 25 bp, Artificial
  Probe
acgggactcgaaggaccatcctgct

SEQ ID NO: 228305 - DNA, 25 bp, Artificial
  Probe
ctcctctttggtcctctagggggca

SEQ ID NO: 228306 - DNA, 25 bp, Artificial
  Probe
tggtgctaccgacttggtgtacata

SEQ ID NO: 228307 - DNA, 25 bp, Artificial
  Probe
ccagtgcctgtgtgtggtttatggg

SEQ ID NO: 228308 - DNA, 25 bp, Artificial
  Probe
tgtggtttatgggcctccatgcagg

SEQ ID NO: 228309 - DNA, 25 bp, Artificial
  Probe
ataaaccaccctctggggatgggag

SEQ ID NO: 228310 - DNA, 25 bp, Artificial
  Probe
gcctccatgcagggactgacatgca

SEQ ID NO: 228311 - DNA, 25 bp, Artificial
  Probe
gtggtttatgggcctccatgcaggg

SEQ ID NO: 228312 - DNA, 25 bp, Artificial
  Probe
ccaccctctggggatgggagaataa

SEQ ID NO: 228313 - DNA, 25 bp, Artificial
  Probe
taaaccaccctctggggatgggaga

SEQ ID NO: 228314 - DNA, 25 bp, Artificial
  Probe
gtgtggtttatgggcctccatgcag

SEQ ID NO: 228315 - DNA, 25 bp, Artificial
  Probe
agtgcctgtgtgtggtttatgggcc

SEQ ID NO: 228316 - DNA, 25 bp, Artificial
  Probe
aaccaccctctggggatgggagaat

SEQ ID NO: 228317 - DNA, 25 bp, Artificial
  Probe
ggtttatgggcctccatgcagggac

SEQ ID NO: 228318 - DNA, 25 bp, Artificial
  Probe
tggtttatgggcctccatgcaggga

SEQ ID NO: 228319 - DNA, 25 bp, Artificial
  Probe
accaccctctggggatgggagaata

SEQ ID NO: 228320 - DNA, 25 bp, Artificial
  Probe
tttatgggcctccatgcagggactg

SEQ ID NO: 228321 - DNA, 25 bp, Artificial
  Probe
ctgtgtgtggtttatgggcctccat

SEQ ID NO: 228322 - DNA, 25 bp, Artificial
  Probe
gtttatgggcctccatgcagggact

SEQ ID NO: 228323 - DNA, 25 bp, Artificial
  Probe
ggcctccatgcagggactgacatgc

SEQ ID NO: 228324 - DNA, 25 bp, Artificial
  Probe
cctgtgtgtggtttatgggcctcca

SEQ ID NO: 228325 - DNA, 25 bp, Artificial
  Probe
gataaaccaccctctggggatggga

SEQ ID NO: 228326 - DNA, 25 bp, Artificial
  Probe
caccctctggggatgggagaataaa

SEQ ID NO: 228327 - DNA, 25 bp, Artificial
  Probe
gcctgtgtgtggtttatgggcctcc

SEQ ID NO: 228328 - DNA, 25 bp, Artificial
  Probe
tgtgtgtggtttatgggcctccatg

SEQ ID NO: 228329 - DNA, 25 bp, Artificial
  Probe
ggataaaccaccctctggggatggg

SEQ ID NO: 228330 - DNA, 25 bp, Artificial
  Probe
gtgcctgtgtgtggtttatgggcct

SEQ ID NO: 228331 - DNA, 25 bp, Artificial
  Probe
tggataaaccaccctctggggatgg

SEQ ID NO: 228332 - DNA, 25 bp, Artificial
  Probe
tgcctgtgtgtggtttatgggcctc

SEQ ID NO: 228333 - DNA, 25 bp, Artificial
  Probe
ccagggagcttgcagtgctcactgg

SEQ ID NO: 228334 - DNA, 25 bp, Artificial
  Probe
tgtgtggtttatgggcctccatgca

SEQ ID NO: 228335 - DNA, 25 bp, Artificial
  Probe
cagtgcctgtgtgtggtttatgggc

SEQ ID NO: 228336 - DNA, 25 bp, Artificial
  Probe
tttccctatgagaaagtggtacaga

SEQ ID NO: 228337 - DNA, 25 bp, Artificial
  Probe
attatgaccgtttcagccgcaatga

SEQ ID NO: 228338 - DNA, 25 bp, Artificial
  Probe
tacagaggatcctctacctccaggt

SEQ ID NO: 228339 - DNA, 25 bp, Artificial
  Probe
ccaggtcctggattatgaccgtttc

SEQ ID NO: 228340 - DNA, 25 bp, Artificial
  Probe
tggattatgaccgtttcagccgcaa

SEQ ID NO: 228341 - DNA, 25 bp, Artificial
  Probe
ctatttgaagggtttccctatgaga

SEQ ID NO: 228342 - DNA, 25 bp, Artificial
  Probe
caggtcctggattatgaccgtttca

SEQ ID NO: 228343 - DNA, 25 bp, Artificial
  Probe
gaccgtttcagccgcaatgacccca

SEQ ID NO: 228344 - DNA, 25 bp, Artificial
  Probe
ctacctccaggtcctggattatgac

SEQ ID NO: 228345 - DNA, 25 bp, Artificial
  Probe
acagaggatcctctacctccaggtc

SEQ ID NO: 228346 - DNA, 25 bp, Artificial
  Probe
accgtttcagccgcaatgaccccat

SEQ ID NO: 228347 - DNA, 25 bp, Artificial
  Probe
ggtcctggattatgaccgtttcagc

SEQ ID NO: 228348 - DNA, 25 bp, Artificial
  Probe
tacctccaggtcctggattatgacc

SEQ ID NO: 228349 - DNA, 25 bp, Artificial
  Probe
tatttgaagggtttccctatgagaa

SEQ ID NO: 228350 - DNA, 25 bp, Artificial
  Probe
ttatgaccgtttcagccgcaatgac

SEQ ID NO: 228351 - DNA, 25 bp, Artificial
  Probe
ctggattatgaccgtttcagccgca

SEQ ID NO: 228352 - DNA, 25 bp, Artificial
  Probe
ggtttccctatgagaaagtggtaca

SEQ ID NO: 228353 - DNA, 25 bp, Artificial
  Probe
ctccaggtcctggattatgaccgtt

SEQ ID NO: 228354 - DNA, 25 bp, Artificial
  Probe
ctctacctccaggtcctggattatg

SEQ ID NO: 228355 - DNA, 25 bp, Artificial
  Probe
atgaccgtttcagccgcaatgaccc

SEQ ID NO: 228356 - DNA, 25 bp, Artificial
  Probe
gtacagaggatcctctacctccagg

SEQ ID NO: 228357 - DNA, 25 bp, Artificial
  Probe
gaagggtttccctatgagaaagtgg

SEQ ID NO: 228358 - DNA, 25 bp, Artificial
  Probe
tcctggattatgaccgtttcagccg

SEQ ID NO: 228359 - DNA, 25 bp, Artificial
  Probe
aggtcctggattatgaccgtttcag

SEQ ID NO: 228360 - DNA, 25 bp, Artificial
  Probe
gattatgaccgtttcagccgcaatg

SEQ ID NO: 228361 - DNA, 25 bp, Artificial
  Probe
agaggatcctctacctccaggtcct

SEQ ID NO: 228362 - DNA, 25 bp, Artificial
  Probe
ggattatgaccgtttcagccgcaat

SEQ ID NO: 228363 - DNA, 25 bp, Artificial
  Probe
tccaggtcctggattatgaccgttt

SEQ ID NO: 228364 - DNA, 25 bp, Artificial
  Probe
gaggatcctctacctccaggtcctg

SEQ ID NO: 228365 - DNA, 25 bp, Artificial
  Probe
tttgaagggtttccctatgagaaag

SEQ ID NO: 228366 - DNA, 25 bp, Artificial
  Probe
ttgaagggtttccctatgagaaagt

SEQ ID NO: 228367 - DNA, 25 bp, Artificial
  Probe
cagaggatcctctacctccaggtcc

SEQ ID NO: 228368 - DNA, 25 bp, Artificial
  Probe
cctggattatgaccgtttcagccgc

SEQ ID NO: 228369 - DNA, 25 bp, Artificial
  Probe
cctctacctccaggtcctggattat

SEQ ID NO: 228370 - DNA, 25 bp, Artificial
  Probe
ggtacagaggatcctctacctccag

SEQ ID NO: 228371 - DNA, 25 bp, Artificial
  Probe
tggtacagaggatcctctacctcca

SEQ ID NO: 228372 - DNA, 25 bp, Artificial
  Probe
aggatcctctacctccaggtcctgg

SEQ ID NO: 228373 - DNA, 25 bp, Artificial
  Probe
tctacctccaggtcctggattatga

SEQ ID NO: 228374 - DNA, 25 bp, Artificial
  Probe
tgaccgtttcagccgcaatgacccc

SEQ ID NO: 228375 - DNA, 25 bp, Artificial
  Probe
ttccctatgagaaagtggtacagag

SEQ ID NO: 228376 - DNA, 25 bp, Artificial
  Probe
tgaagggtttccctatgagaaagtg

SEQ ID NO: 228377 - DNA, 25 bp, Artificial
  Probe
gtcctggattatgaccgtttcagcc

SEQ ID NO: 228378 - DNA, 25 bp, Artificial
  Probe
gtttccctatgagaaagtggtacag

SEQ ID NO: 228379 - DNA, 25 bp, Artificial
  Probe
tatgaccgtttcagccgcaatgacc

SEQ ID NO: 228380 - DNA, 25 bp, Artificial
  Probe
atctttggccgcatccaggacaaac

SEQ ID NO: 228381 - DNA, 25 bp, Artificial
  Probe
cccgggatgtgtcatctgttgaact

SEQ ID NO: 228382 - DNA, 25 bp, Artificial
  Probe
gaatgcacaccacctttgaacatga

SEQ ID NO: 228383 - DNA, 25 bp, Artificial
  Probe
tccctgctggatgcttgtgagggtc

SEQ ID NO: 228384 - DNA, 25 bp, Artificial
  Probe
tcatcaaggcatcaaagctgaaatc

SEQ ID NO: 228385 - DNA, 25 bp, Artificial
  Probe
caaggaaacactatgcttctgagga

SEQ ID NO: 228386 - DNA, 25 bp, Artificial
  Probe
caaggagatctttggccgcatccag

SEQ ID NO: 228387 - DNA, 25 bp, Artificial
  Probe
aaggaaacactatgcttctgaggag

SEQ ID NO: 228388 - DNA, 25 bp, Artificial
  Probe
ttgggaaagccctgctggcaaggaa

SEQ ID NO: 228389 - DNA, 25 bp, Artificial
  Probe
gacaaggctgacgacatccaaaagc

SEQ ID NO: 228390 - DNA, 25 bp, Artificial
  Probe
ctctgggcactcaggtgaggcagct

SEQ ID NO: 228391 - DNA, 25 bp, Artificial
  Probe
tccaaaagcgtgagaacgaggtcct

SEQ ID NO: 228392 - DNA, 25 bp, Artificial
  Probe
aggacaaacacaagaaactccctga

SEQ ID NO: 228393 - DNA, 25 bp, Artificial
  Probe
agaacgaggtcctggaagcctggaa

SEQ ID NO: 228394 - DNA, 25 bp, Artificial
  Probe
aaagctgaaatcgatgctcgtaatg

SEQ ID NO: 228395 - DNA, 25 bp, Artificial
  Probe
tccggcaaatcgaggcccaggagaa

SEQ ID NO: 228396 - DNA, 25 bp, Artificial
  Probe
caagaaactccctgaggagcttgga

SEQ ID NO: 228397 - DNA, 25 bp, Artificial
  Probe
aacactatgcttctgaggagatcaa

SEQ ID NO: 228398 - DNA, 25 bp, Artificial
  Probe
atcagaacaccgtggagactttaca

SEQ ID NO: 228399 - DNA, 25 bp, Artificial
  Probe
agctgcaggaggatgcagcccgcct

SEQ ID NO: 228400 - DNA, 25 bp, Artificial
  Probe
cgtgagaacgaggtcctggaagcct

SEQ ID NO: 228401 - DNA, 25 bp, Artificial
  Probe
ctccaagcagcctatgcaggggaca

SEQ ID NO: 228402 - DNA, 25 bp, Artificial
  Probe
atgctctggatggaagatgtcatcc

SEQ ID NO: 228403 - DNA, 25 bp, Artificial
  Probe
cctgctggcaaggaaacactatgct

SEQ ID NO: 228404 - DNA, 25 bp, Artificial
  Probe
attgaacttgggaaagccctgctgg

SEQ ID NO: 228405 - DNA, 25 bp, Artificial
  Probe
atggaagatgtcatccggcaaatcg

SEQ ID NO: 228406 - DNA, 25 bp, Artificial
  Probe
ttacagagaatgcacaccacctttg

SEQ ID NO: 228407 - DNA, 25 bp, Artificial
  Probe
tcaaggcatcaaagctgaaatcgat

SEQ ID NO: 228408 - DNA, 25 bp, Artificial
  Probe
ccgcttcttcagcatggtgcgtgac

SEQ ID NO: 228409 - DNA, 25 bp, Artificial
  Probe
caagctctgggcactcaggtgaggc

SEQ ID NO: 228410 - DNA, 25 bp, Artificial
  Probe
tcttcagcatggtgcgtgacctcat

SEQ ID NO: 228411 - DNA, 25 bp, Artificial
  Probe
tgaacttgggaaagccctgctggca

SEQ ID NO: 228412 - DNA, 25 bp, Artificial
  Probe
gcatggtgcgtgacctcatgctctg

SEQ ID NO: 228413 - DNA, 25 bp, Artificial
  Probe
cagctgcaggaggatgcagcccgcc

SEQ ID NO: 228414 - DNA, 25 bp, Artificial
  Probe
caagcagcctatgcaggggacaagg

SEQ ID NO: 228415 - DNA, 25 bp, Artificial
  Probe
cctgaggagcttggaagagatcaga

SEQ ID NO: 228416 - DNA, 25 bp, Artificial
  Probe
aacacaagaaactccctgaggagct

SEQ ID NO: 228417 - DNA, 25 bp, Artificial
  Probe
tggaagatgtcatccggcaaatcga

SEQ ID NO: 228418 - DNA, 25 bp, Artificial
  Probe
cgcatccaggacaaacacaagaaac

SEQ ID NO: 228419 - DNA, 25 bp, Artificial
  Probe
ctttgaacatgacatccaagctctg

SEQ ID NO: 228420 - DNA, 25 bp, Artificial
  Probe
atgtcatccggcaaatcgaggccca

SEQ ID NO: 228421 - DNA, 25 bp, Artificial
  Probe
gaagagatcagaacaccgtggagac

SEQ ID NO: 228422 - DNA, 25 bp, Artificial
  Probe
acatgacatccaagctctgggcact

SEQ ID NO: 228423 - DNA, 25 bp, Artificial
  Probe
gaaaccccgggatgtgtcatctgtt

SEQ ID NO: 228424 - DNA, 25 bp, Artificial
  Probe
accgtggagactttacagagaatgc

SEQ ID NO: 228425 - DNA, 25 bp, Artificial
  Probe
gaaatcgatgctcgtaatgacagtt

SEQ ID NO: 228426 - DNA, 25 bp, Artificial
  Probe
cctgcagaggccatgaccacagatt

SEQ ID NO: 228427 - DNA, 25 bp, Artificial
  Probe
tctagaaacagagctgtgttccatc

SEQ ID NO: 228428 - DNA, 25 bp, Artificial
  Probe
cattgctacccctgctgttgtttct

SEQ ID NO: 228429 - DNA, 25 bp, Artificial
  Probe
aatgccactgtgtgccagtcacttc

SEQ ID NO: 228430 - DNA, 25 bp, Artificial
  Probe
aagttgaggcccagagaatttacag

SEQ ID NO: 228431 - DNA, 25 bp, Artificial
  Probe
atgaagctaggtttgtctctcaaat

SEQ ID NO: 228432 - DNA, 25 bp, Artificial
  Probe
ttgaggcccagagaatttacagcac

SEQ ID NO: 228433 - DNA, 25 bp, Artificial
  Probe
caaatgaaacagtgctctgatgcat

SEQ ID NO: 228434 - DNA, 25 bp, Artificial
  Probe
gagaatttacagcacttgtctattt

SEQ ID NO: 228435 - DNA, 25 bp, Artificial
  Probe
taatgccatcaccactctttctggg

SEQ ID NO: 228436 - DNA, 25 bp, Artificial
  Probe
agggacctgcagaggccatgaccac

SEQ ID NO: 228437 - DNA, 25 bp, Artificial
  Probe
ttctacagtggcaaatgaaacagtg

SEQ ID NO: 228438 - DNA, 25 bp, Artificial
  Probe
cactgtgtgccagtcacttccctat

SEQ ID NO: 228439 - DNA, 25 bp, Artificial
  Probe
aagctgtgtaggttctcaaggctaa

SEQ ID NO: 228440 - DNA, 25 bp, Artificial
  Probe
cattgccaaagaatgtggaaaaccg

SEQ ID NO: 228441 - DNA, 25 bp, Artificial
  Probe
agggacttatctttagttgaatgcc

SEQ ID NO: 228442 - DNA, 25 bp, Artificial
  Probe
tacagcacttgtctatttctgttgt

SEQ ID NO: 228443 - DNA, 25 bp, Artificial
  Probe
catctctgttcagatggggaagttg

SEQ ID NO: 228444 - DNA, 25 bp, Artificial
  Probe
gtgtgccagtcacttccctatcttt

SEQ ID NO: 228445 - DNA, 25 bp, Artificial
  Probe
gctaggtttgtctctcaaatcccat

SEQ ID NO: 228446 - DNA, 25 bp, Artificial
  Probe
cacttgtctatttctgttgtcatgg

SEQ ID NO: 228447 - DNA, 25 bp, Artificial
  Probe
gctaaccttggtactcaattcagta

SEQ ID NO: 228448 - DNA, 25 bp, Artificial
  Probe
gaaacagagctgtgttccatcctct

SEQ ID NO: 228449 - DNA, 25 bp, Artificial
  Probe
ggtaacattgctacccctgctgttg

SEQ ID NO: 228450 - DNA, 25 bp, Artificial
  Probe
acagctaggggctaaccttggtact

SEQ ID NO: 228451 - DNA, 25 bp, Artificial
  Probe
caccactctttctgggcaaggtcat

SEQ ID NO: 228452 - DNA, 25 bp, Artificial
  Probe
ctgtaagctgtgtaggttctcaagg

SEQ ID NO: 228453 - DNA, 25 bp, Artificial
  Probe
gctctgatgcattgccaaagaatgt

SEQ ID NO: 228454 - DNA, 25 bp, Artificial
  Probe
cctctggaagatagtgcccaaatac

SEQ ID NO: 228455 - DNA, 25 bp, Artificial
  Probe
tgttgtacagctaggggctaacctt

SEQ ID NO: 228456 - DNA, 25 bp, Artificial
  Probe
gtactcaattcagtataactgctgc

SEQ ID NO: 228457 - DNA, 25 bp, Artificial
  Probe
gaagggacctgcagaggccatgacc

SEQ ID NO: 228458 - DNA, 25 bp, Artificial
  Probe
tctttagttgaatgccactgtgtgc

SEQ ID NO: 228459 - DNA, 25 bp, Artificial
  Probe
tgccatcaccactctttctgggcaa

SEQ ID NO: 228460 - DNA, 25 bp, Artificial
  Probe
tgcattgccaaagaatgtggaaaac

SEQ ID NO: 228461 - DNA, 25 bp, Artificial
  Probe
ctgttgtttctacagtggcaaatga

SEQ ID NO: 228462 - DNA, 25 bp, Artificial
  Probe
aaatctagaaacagagctgtgttcc

SEQ ID NO: 228463 - DNA, 25 bp, Artificial
  Probe
ggtttgtctctcaaatcccatactg

SEQ ID NO: 228464 - DNA, 25 bp, Artificial
  Probe
gctcagttctattagattctatcag

SEQ ID NO: 228465 - DNA, 25 bp, Artificial
  Probe
ttgtttctacagtggcaaatgaaac

SEQ ID NO: 228466 - DNA, 25 bp, Artificial
  Probe
ctctttctgggcaaggtcatcatct

SEQ ID NO: 228467 - DNA, 25 bp, Artificial
  Probe
tagttgaatgccactgtgtgccagt

SEQ ID NO: 228468 - DNA, 25 bp, Artificial
  Probe
cttggtactcaattcagtataactg

SEQ ID NO: 228469 - DNA, 25 bp, Artificial
  Probe
cttttgttcaaccttctgtaagctg

SEQ ID NO: 228470 - DNA, 25 bp, Artificial
  Probe
aggcccagagaatttacagcacttg

SEQ ID NO: 228471 - DNA, 25 bp, Artificial
  Probe
cagagaatttacagcacttgtctat

SEQ ID NO: 228472 - DNA, 25 bp, Artificial
  Probe
gcctgctgttgttaaagactcggct

SEQ ID NO: 228473 - DNA, 25 bp, Artificial
  Probe
gaactgagatcctgggtcctgggtc

SEQ ID NO: 228474 - DNA, 25 bp, Artificial
  Probe
aagactcggctgtaactcaggactg

SEQ ID NO: 228475 - DNA, 25 bp, Artificial
  Probe
cccagctagataaagtccttccagg

SEQ ID NO: 228476 - DNA, 25 bp, Artificial
  Probe
actgaaagccaccatcgacatcgtc

SEQ ID NO: 228477 - DNA, 25 bp, Artificial
  Probe
agtccttccaggagacctgggtgag

SEQ ID NO: 228478 - DNA, 25 bp, Artificial
  Probe
acccagctagataaagtccttccag

SEQ ID NO: 228479 - DNA, 25 bp, Artificial
  Probe
agggctgcacctgaccttggactgg

SEQ ID NO: 228480 - DNA, 25 bp, Artificial
  Probe
accctgaggagcagggaactgagat

SEQ ID NO: 228481 - DNA, 25 bp, Artificial
  Probe
tcggctgtaactcaggactgaaagc

SEQ ID NO: 228482 - DNA, 25 bp, Artificial
  Probe
agcagggaactgagatcctgggtcc

SEQ ID NO: 228483 - DNA, 25 bp, Artificial
  Probe
gctgtaactcaggactgaaagccac

SEQ ID NO: 228484 - DNA, 25 bp, Artificial
  Probe
gttgttaaagactcggctgtaactc

SEQ ID NO: 228485 - DNA, 25 bp, Artificial
  Probe
gaaagccaccatcgacatcgtcctt

SEQ ID NO: 228486 - DNA, 25 bp, Artificial
  Probe
catgccatcctaggagggctgcacc

SEQ ID NO: 228487 - DNA, 25 bp, Artificial
  Probe
gctcatgccatcctaggagggctgc

SEQ ID NO: 228488 - DNA, 25 bp, Artificial
  Probe
ttacgaagtctattcacagtgtctt

SEQ ID NO: 228489 - DNA, 25 bp, Artificial
  Probe
tcctaggagggctgcacctgacctt

SEQ ID NO: 228490 - DNA, 25 bp, Artificial
  Probe
tgaaagccaccatcgacatcgtcct

SEQ ID NO: 228491 - DNA, 25 bp, Artificial
  Probe
agggggatcacctatggcttattta

SEQ ID NO: 228492 - DNA, 25 bp, Artificial
  Probe
ctgagaccctgaggagcagggaact

SEQ ID NO: 228493 - DNA, 25 bp, Artificial
  Probe
tgccatcctaggagggctgcacctg

SEQ ID NO: 228494 - DNA, 25 bp, Artificial
  Probe
gactcggctgtaactcaggactgaa

SEQ ID NO: 228495 - DNA, 25 bp, Artificial
  Probe
gataaagtccttccaggagacctgg

SEQ ID NO: 228496 - DNA, 25 bp, Artificial
  Probe
catctgagaccctgaggagcaggga

SEQ ID NO: 228497 - DNA, 25 bp, Artificial
  Probe
taaagtccttccaggagacctgggt

SEQ ID NO: 228498 - DNA, 25 bp, Artificial
  Probe
gatcctgggtcctgggtctttacga

SEQ ID NO: 228499 - DNA, 25 bp, Artificial
  Probe
gacatcgtcctttaaagccagatct

SEQ ID NO: 228500 - DNA, 25 bp, Artificial
  Probe
ggtgcatctgagaccctgaggagca

SEQ ID NO: 228501 - DNA, 25 bp, Artificial
  Probe
tgctgttgttaaagactcggctgta

SEQ ID NO: 228502 - DNA, 25 bp, Artificial
  Probe
tctaagagtgagttcgtgagttcca

SEQ ID NO: 228503 - DNA, 25 bp, Artificial
  Probe
ctgtaactcaggactgaaagccacc

SEQ ID NO: 228504 - DNA, 25 bp, Artificial
  Probe
catcgacatcgtcctttaaagccag

SEQ ID NO: 228505 - DNA, 25 bp, Artificial
  Probe
taactcaggactgaaagccaccatc

SEQ ID NO: 228506 - DNA, 25 bp, Artificial
  Probe
actcaggactgaaagccaccatcga

SEQ ID NO: 228507 - DNA, 25 bp, Artificial
  Probe
cagggaactgagatcctgggtcctg

SEQ ID NO: 228508 - DNA, 25 bp, Artificial
  Probe
aggagggctgcacctgaccttggac

SEQ ID NO: 228509 - DNA, 25 bp, Artificial
  Probe
acctgaccttggactgggccgtgcg

SEQ ID NO: 228510 - DNA, 25 bp, Artificial
  Probe
tgagatcctgggtcctgggtcttta

SEQ ID NO: 228511 - DNA, 25 bp, Artificial
  Probe
ggactgaaagccaccatcgacatcg

SEQ ID NO: 228512 - DNA, 25 bp, Artificial
  Probe
ggtcctgggtctttacgaagtctat

SEQ ID NO: 228513 - DNA, 25 bp, Artificial
  Probe
taaagactcggctgtaactcaggac

SEQ ID NO: 228514 - DNA, 25 bp, Artificial
  Probe
agctagataaagtccttccaggaga

SEQ ID NO: 228515 - DNA, 25 bp, Artificial
  Probe
gggggatcacctatggcttatttat

SEQ ID NO: 228516 - DNA, 25 bp, Artificial
  Probe
tgcggggcctgctgttgttaaagac

SEQ ID NO: 228517 - DNA, 25 bp, Artificial
  Probe
tgggtcctgggtctttacgaagtct

SEQ ID NO: 228518 - DNA, 25 bp, Artificial
  Probe
ccaggccgggtcagcggtttgccca

SEQ ID NO: 228519 - DNA, 25 bp, Artificial
  Probe
agcccagaggcctggggtactccta

SEQ ID NO: 228520 - DNA, 25 bp, Artificial
  Probe
tgggaatcttctctttccttggcct

SEQ ID NO: 228521 - DNA, 25 bp, Artificial
  Probe
cacctggagtgcttggagcccagag

SEQ ID NO: 228522 - DNA, 25 bp, Artificial
  Probe
ccacttcctgctcaagttccggttg

SEQ ID NO: 228523 - DNA, 25 bp, Artificial
  Probe
cagcatccagcctggtccacggtgg

SEQ ID NO: 228524 - DNA, 25 bp, Artificial
  Probe
gagcgtgtatcgaagtctgtgtccc

SEQ ID NO: 228525 - DNA, 25 bp, Artificial
  Probe
gcagaggaccccagagaacttcagc

SEQ ID NO: 228526 - DNA, 25 bp, Artificial
  Probe
cccatgcggtacgagtcagcgccag

SEQ ID NO: 228527 - DNA, 25 bp, Artificial
  Probe
gcaggacagcggatccctatggatg

SEQ ID NO: 228528 - DNA, 25 bp, Artificial
  Probe
agttctggagtgaataccggatcaa

SEQ ID NO: 228529 - DNA, 25 bp, Artificial
  Probe
cgggtggaatcagtacctggctacc

SEQ ID NO: 228530 - DNA, 25 bp, Artificial
  Probe
accctgccaggagctgagagtcaga

SEQ ID NO: 228531 - DNA, 25 bp, Artificial
  Probe
agcagctcaggaggacagccccgct

SEQ ID NO: 228532 - DNA, 25 bp, Artificial
  Probe
ccattggcttggaggagttgataac

SEQ ID NO: 228533 - DNA, 25 bp, Artificial
  Probe
catctgcaaccctgtcagactgggg

SEQ ID NO: 228534 - DNA, 25 bp, Artificial
  Probe
gaggatcttacgtcctgatccaccc

SEQ ID NO: 228535 - DNA, 25 bp, Artificial
  Probe
ttcccgatgtgtggtccacggggca

SEQ ID NO: 228536 - DNA, 25 bp, Artificial
  Probe
ctatgaaaacttttcttgtacttgg

SEQ ID NO: 228537 - DNA, 25 bp, Artificial
  Probe
ttgcaataccgtccagcacagcatc

SEQ ID NO: 228538 - DNA, 25 bp, Artificial
  Probe
gcctggggtactcctagcaccggtc

SEQ ID NO: 228539 - DNA, 25 bp, Artificial
  Probe
agttgataacagatgccgtggctgg

SEQ ID NO: 228540 - DNA, 25 bp, Artificial
  Probe
cggatccctatggatggaggtctca

SEQ ID NO: 228541 - DNA, 25 bp, Artificial
  Probe
gagccggggacacgaacagaagcta

SEQ ID NO: 228542 - DNA, 25 bp, Artificial
  Probe
ccttggcctggctgttggagccctg

SEQ ID NO: 228543 - DNA, 25 bp, Artificial
  Probe
tggtgaccctgaagctgggctcccc

SEQ ID NO: 228544 - DNA, 25 bp, Artificial
  Probe
ctagaggcagcagctcaggaggaca

SEQ ID NO: 228545 - DNA, 25 bp, Artificial
  Probe
cctggctgttggagccctggctctg

SEQ ID NO: 228546 - DNA, 25 bp, Artificial
  Probe
ctgggctgccccatgcggtacgagt

SEQ ID NO: 228547 - DNA, 25 bp, Artificial
  Probe
aagaccccctggaggcttcccgatg

SEQ ID NO: 228548 - DNA, 25 bp, Artificial
  Probe
cccctgcgggatgaggtacctgatg

SEQ ID NO: 228549 - DNA, 25 bp, Artificial
  Probe
cagaggaccccagagaacttcagct

SEQ ID NO: 228550 - DNA, 25 bp, Artificial
  Probe
gacacctgaactccaaacttgctgc

SEQ ID NO: 228551 - DNA, 25 bp, Artificial
  Probe
tgacacctgaactccaaacttgctg

SEQ ID NO: 228552 - DNA, 25 bp, Artificial
  Probe
gtcccctgcgggatgaggtacctga

SEQ ID NO: 228553 - DNA, 25 bp, Artificial
  Probe
gagagtccgtctaccgggccttggc

SEQ ID NO: 228554 - DNA, 25 bp, Artificial
  Probe
gcagccagacccaaggccacttgat

SEQ ID NO: 228555 - DNA, 25 bp, Artificial
  Probe
ctgtcggacgctggatggtgtattt

SEQ ID NO: 228556 - DNA, 25 bp, Artificial
  Probe
ctggatgctggcacctggagtgctt

SEQ ID NO: 228557 - DNA, 25 bp, Artificial
  Probe
ccgagacgcctgcatgccagctgga

SEQ ID NO: 228558 - DNA, 25 bp, Artificial
  Probe
agctcggccggaggtctcctgccaa

SEQ ID NO: 228559 - DNA, 25 bp, Artificial
  Probe
tgcatgccagctggacataccctgc

SEQ ID NO: 228560 - DNA, 25 bp, Artificial
  Probe
tcagcgccagggactttctggatgc

SEQ ID NO: 228561 - DNA, 25 bp, Artificial
  Probe
ggaatcagtacctggctacccgaga

SEQ ID NO: 228562 - DNA, 25 bp, Artificial
  Probe
ccgctaccttacttcctacaggaag

SEQ ID NO: 228563 - DNA, 25 bp, Artificial
  Probe
tatttgggggcatggtgaccctgaa

SEQ ID NO: 228564 - DNA, 25 bp, Artificial
  Probe
cacgccaagtcaatcatccacagag

SEQ ID NO: 228565 - DNA, 25 bp, Artificial
  Probe
ttcaaacatcaacaacagggatcag

SEQ ID NO: 228566 - DNA, 25 bp, Artificial
  Probe
ttacaggccttcaaaaacgaagtcg

SEQ ID NO: 228567 - DNA, 25 bp, Artificial
  Probe
caggccttcaaaaacgaagtcggag

SEQ ID NO: 228568 - DNA, 25 bp, Artificial
  Probe
gactggtcagctaccttattcaaac

SEQ ID NO: 228569 - DNA, 25 bp, Artificial
  Probe
agtactcaggaaaactcgacatgtg

SEQ ID NO: 228570 - DNA, 25 bp, Artificial
  Probe
tctggatctattttgtggatggcac

SEQ ID NO: 228571 - DNA, 25 bp, Artificial
  Probe
tggtgtgaaggctccagcttatatc

SEQ ID NO: 228572 - DNA, 25 bp, Artificial
  Probe
tcatgggctattctacaaagccaca

SEQ ID NO: 228573 - DNA, 25 bp, Artificial
  Probe
aaacttatagatattgcacggcaga

SEQ ID NO: 228574 - DNA, 25 bp, Artificial
  Probe
cgccaagtcaatcatccacagagac

SEQ ID NO: 228575 - DNA, 25 bp, Artificial
  Probe
ctattttgtggatggcacccgaagt

SEQ ID NO: 228576 - DNA, 25 bp, Artificial
  Probe
aggaaaactcgacatgtgaacatcc

SEQ ID NO: 228577 - DNA, 25 bp, Artificial
  Probe
tggattacttacacgccaagtcaat

SEQ ID NO: 228578 - DNA, 25 bp, Artificial
  Probe
catcattgagaccaaatttgagatg

SEQ ID NO: 228579 - DNA, 25 bp, Artificial
  Probe
cattgagaccaaatttgagatgatc

SEQ ID NO: 228580 - DNA, 25 bp, Artificial
  Probe
ccatcagtttgaacagttgtctgga

SEQ ID NO: 228581 - DNA, 25 bp, Artificial
  Probe
cagttacaggccttcaaaaacgaag

SEQ ID NO: 228582 - DNA, 25 bp, Artificial
  Probe
cagtttgaacagttgtctggatcta

SEQ ID NO: 228583 - DNA, 25 bp, Artificial
  Probe
tgaactgatgactggtcagctacct

SEQ ID NO: 228584 - DNA, 25 bp, Artificial
  Probe
aggtgactttggtttagccacagtg

SEQ ID NO: 228585 - DNA, 25 bp, Artificial
  Probe
cagctggctattgttacacagtggt

SEQ ID NO: 228586 - DNA, 25 bp, Artificial
  Probe
ttctacaaagccacagctggctatt

SEQ ID NO: 228587 - DNA, 25 bp, Artificial
  Probe
tcagtttgaacagttgtctggatct

SEQ ID NO: 228588 - DNA, 25 bp, Artificial
  Probe
gaacatcctccttttcatgggctat

SEQ ID NO: 228589 - DNA, 25 bp, Artificial
  Probe
ccacatcattgagaccaaatttgag

SEQ ID NO: 228590 - DNA, 25 bp, Artificial
  Probe
ggtgtgaaggctccagcttatatca

SEQ ID NO: 228591 - DNA, 25 bp, Artificial
  Probe
agtcggagtactcaggaaaactcga

SEQ ID NO: 228592 - DNA, 25 bp, Artificial
  Probe
tgtgaacatcctccttttcatgggc

SEQ ID NO: 228593 - DNA, 25 bp, Artificial
  Probe
aataggtgactttggtttagccaca

SEQ ID NO: 228594 - DNA, 25 bp, Artificial
  Probe
aacccatatagctttcagtcagacg

SEQ ID NO: 228595 - DNA, 25 bp, Artificial
  Probe
agtgggtcccatcagtttgaacagt

SEQ ID NO: 228596 - DNA, 25 bp, Artificial
  Probe
ctcagcagttacaggccttcaaaaa

SEQ ID NO: 228597 - DNA, 25 bp, Artificial
  Probe
gcatggattacttacacgccaagtc

SEQ ID NO: 228598 - DNA, 25 bp, Artificial
  Probe
tctacaaagccacagctggctattg

SEQ ID NO: 228599 - DNA, 25 bp, Artificial
  Probe
cttttcatgggctattctacaaagc

SEQ ID NO: 228600 - DNA, 25 bp, Artificial
  Probe
tatagatattgcacggcagactgca

SEQ ID NO: 228601 - DNA, 25 bp, Artificial
  Probe
gaaggctccagcttatatcaccatc

SEQ ID NO: 228602 - DNA, 25 bp, Artificial
  Probe
caaagccacagctggctattgttac

SEQ ID NO: 228603 - DNA, 25 bp, Artificial
  Probe
gccacagctggctattgttacacag

SEQ ID NO: 228604 - DNA, 25 bp, Artificial
  Probe
gctattctacaaagccacagctggc

SEQ ID NO: 228605 - DNA, 25 bp, Artificial
  Probe
gacctcacggtaaaaataggtgact

SEQ ID NO: 228606 - DNA, 25 bp, Artificial
  Probe
tgtgaaggctccagcttatatcacc

SEQ ID NO: 228607 - DNA, 25 bp, Artificial
  Probe
cagtcagacgtgtatgcatttggga

SEQ ID NO: 228608 - DNA, 25 bp, Artificial
  Probe
cgaagtcggagtactcaggaaaact

SEQ ID NO: 228609 - DNA, 25 bp, Artificial
  Probe
ttcaaaaacgaagtcggagtactca

SEQ ID NO: 228610 - DNA, 25 bp, Artificial
  Probe
cgtccctctcggtggaatctggctc

SEQ ID NO: 228611 - DNA, 25 bp, Artificial
  Probe
tcacccctgaggtcagctcttcatg

SEQ ID NO: 228612 - DNA, 25 bp, Artificial
  Probe
tgaacgtccctctcggtggaatctg

SEQ ID NO: 228613 - DNA, 25 bp, Artificial
  Probe
gatgtgtgacaatgtgccaggtctg

SEQ ID NO: 228614 - DNA, 25 bp, Artificial
  Probe
ccaggtctggtgagccgccagcgtc

SEQ ID NO: 228615 - DNA, 25 bp, Artificial
  Probe
gctgagcgcttctgctccgggcacg

SEQ ID NO: 228616 - DNA, 25 bp, Artificial
  Probe
agtggacagcagagtgccagcatca

SEQ ID NO: 228617 - DNA, 25 bp, Artificial
  Probe
atgtgccaggtctggtgagccgcca

SEQ ID NO: 228618 - DNA, 25 bp, Artificial
  Probe
acaatgtgccaggtctggtgagccg

SEQ ID NO: 228619 - DNA, 25 bp, Artificial
  Probe
gtccctctcggtggaatctggctct

SEQ ID NO: 228620 - DNA, 25 bp, Artificial
  Probe
ctcggtggaatctggctctggctcc

SEQ ID NO: 228621 - DNA, 25 bp, Artificial
  Probe
ctccagggtgatgtgtgacaatgtg

SEQ ID NO: 228622 - DNA, 25 bp, Artificial
  Probe
acaggtggctcctccagggtgatgt

SEQ ID NO: 228623 - DNA, 25 bp, Artificial
  Probe
agacgtgatgcgtgccattggcctg

SEQ ID NO: 228624 - DNA, 25 bp, Artificial
  Probe
catggcgcccgcacacggagtctga

SEQ ID NO: 228625 - DNA, 25 bp, Artificial
  Probe
tgtgtgacaatgtgccaggtctggt

SEQ ID NO: 228626 - DNA, 25 bp, Artificial
  Probe
atgtgtgacaatgtgccaggtctgg

SEQ ID NO: 228627 - DNA, 25 bp, Artificial
  Probe
tgacaatgtgccaggtctggtgagc

SEQ ID NO: 228628 - DNA, 25 bp, Artificial
  Probe
acccagacgtgatgcgtgccattgg

SEQ ID NO: 228629 - DNA, 25 bp, Artificial
  Probe
cgcacacggagtctgacctgatgta

SEQ ID NO: 228630 - DNA, 25 bp, Artificial
  Probe
tacatgagagcgacaggtggctcct

SEQ ID NO: 228631 - DNA, 25 bp, Artificial
  Probe
cctgaggtcagctcttcatggtggt

SEQ ID NO: 228632 - DNA, 25 bp, Artificial
  Probe
atggcgcccgcacacggagtctgac

SEQ ID NO: 228633 - DNA, 25 bp, Artificial
  Probe
cgacacccagacgtgatgcgtgcca

SEQ ID NO: 228634 - DNA, 25 bp, Artificial
  Probe
accgacacccagacgtgatgcgtgc

SEQ ID NO: 228635 - DNA, 25 bp, Artificial
  Probe
acggagtctgacctgatgtagacgc

SEQ ID NO: 228636 - DNA, 25 bp, Artificial
  Probe
tctgacctgatgtagacgcaagggg

SEQ ID NO: 228637 - DNA, 25 bp, Artificial
  Probe
cacacggagtctgacctgatgtaga

SEQ ID NO: 228638 - DNA, 25 bp, Artificial
  Probe
catgagagcgacaggtggctcctcc

SEQ ID NO: 228639 - DNA, 25 bp, Artificial
  Probe
acccctgaggtcagctcttcatggt

SEQ ID NO: 228640 - DNA, 25 bp, Artificial
  Probe
tgagcgcttctgctccgggcacgca

SEQ ID NO: 228641 - DNA, 25 bp, Artificial
  Probe
gtggaatctggctctggctccctct

SEQ ID NO: 228642 - DNA, 25 bp, Artificial
  Probe
cttcatggtggtacatgagagcgac

SEQ ID NO: 228643 - DNA, 25 bp, Artificial
  Probe
gctcctccagggtgatgtgtgacaa

SEQ ID NO: 228644 - DNA, 25 bp, Artificial
  Probe
gcccgcacacggagtctgacctgat

SEQ ID NO: 228645 - DNA, 25 bp, Artificial
  Probe
ggttaatatgaacgtccctctcggt

SEQ ID NO: 228646 - DNA, 25 bp, Artificial
  Probe
cgacaggtggctcctccagggtgat

SEQ ID NO: 228647 - DNA, 25 bp, Artificial
  Probe
tatgaacgtccctctcggtggaatc

SEQ ID NO: 228648 - DNA, 25 bp, Artificial
  Probe
ggaatctggctctggctccctctgc

SEQ ID NO: 228649 - DNA, 25 bp, Artificial
  Probe
ctgaggtcagctcttcatggtggta

SEQ ID NO: 228650 - DNA, 25 bp, Artificial
  Probe
ccctctcggtggaatctggctctgg

SEQ ID NO: 228651 - DNA, 25 bp, Artificial
  Probe
ttcatggtggtacatgagagcgaca

SEQ ID NO: 228652 - DNA, 25 bp, Artificial
  Probe
cagctcttcatggtggtacatgaga

SEQ ID NO: 228653 - DNA, 25 bp, Artificial
  Probe
ctcctccagggtgatgtgtgacaat

SEQ ID NO: 228654 - DNA, 25 bp, Artificial
  Probe
ttaatatgaacgtccctctcggtgg

SEQ ID NO: 228655 - DNA, 25 bp, Artificial
  Probe
gagcgcttctgctccgggcacgcat

SEQ ID NO: 228656 - DNA, 25 bp, Artificial
  Probe
gcactccatccttttatccgttgtg

SEQ ID NO: 228657 - DNA, 25 bp, Artificial
  Probe
aaatggccccagtccaagagttgaa

SEQ ID NO: 228658 - DNA, 25 bp, Artificial
  Probe
tatccgttgtgctcacgtgtatata

SEQ ID NO: 228659 - DNA, 25 bp, Artificial
  Probe
ttgtgctcacgtgtatataagaacc

SEQ ID NO: 228660 - DNA, 25 bp, Artificial
  Probe
tgtgctcacgtgtatataagaaccg

SEQ ID NO: 228661 - DNA, 25 bp, Artificial
  Probe
ctgcatctgtatgtagtgaaatggc

SEQ ID NO: 228662 - DNA, 25 bp, Artificial
  Probe
cgttgtgctcacgtgtatataagaa

SEQ ID NO: 228663 - DNA, 25 bp, Artificial
  Probe
cggactgcatctgtatgtagtgaaa

SEQ ID NO: 228664 - DNA, 25 bp, Artificial
  Probe
tgctcacgtgtatataagaaccgac

SEQ ID NO: 228665 - DNA, 25 bp, Artificial
  Probe
ccttttatccgttgtgctcacgtgt

SEQ ID NO: 228666 - DNA, 25 bp, Artificial
  Probe
gtaaatccgaagcacaaatgtaata

SEQ ID NO: 228667 - DNA, 25 bp, Artificial
  Probe
gacacaggaacctacaaaatagggt

SEQ ID NO: 228668 - DNA, 25 bp, Artificial
  Probe
ggcggactgcatctgtatgtagtga

SEQ ID NO: 228669 - DNA, 25 bp, Artificial
  Probe
caggaacctacaaaatagggtagcg

SEQ ID NO: 228670 - DNA, 25 bp, Artificial
  Probe
ttttatccgttgtgctcacgtgtat

SEQ ID NO: 228671 - DNA, 25 bp, Artificial
  Probe
tttgtttctgtgtcacttggcatga

SEQ ID NO: 228672 - DNA, 25 bp, Artificial
  Probe
taagaaccgacacaggaacctacaa

SEQ ID NO: 228673 - DNA, 25 bp, Artificial
  Probe
ttgtaaatccgaagcacaaatgtaa

SEQ ID NO: 228674 - DNA, 25 bp, Artificial
  Probe
attgtaaatccgaagcacaaatgta

SEQ ID NO: 228675 - DNA, 25 bp, Artificial
  Probe
gttgtgctcacgtgtatataagaac

SEQ ID NO: 228676 - DNA, 25 bp, Artificial
  Probe
accgacacaggaacctacaaaatag

SEQ ID NO: 228677 - DNA, 25 bp, Artificial
  Probe
gccccagtccaagagttgaatgttc

SEQ ID NO: 228678 - DNA, 25 bp, Artificial
  Probe
tataagaaccgacacaggaacctac

SEQ ID NO: 228679 - DNA, 25 bp, Artificial
  Probe
ggaacctacaaaatagggtagcgat

SEQ ID NO: 228680 - DNA, 25 bp, Artificial
  Probe
atataagaaccgacacaggaaccta

SEQ ID NO: 228681 - DNA, 25 bp, Artificial
  Probe
atggccccagtccaagagttgaatg

SEQ ID NO: 228682 - DNA, 25 bp, Artificial
  Probe
cacaggaacctacaaaatagggtag

SEQ ID NO: 228683 - DNA, 25 bp, Artificial
  Probe
tttatccgttgtgctcacgtgtata

SEQ ID NO: 228684 - DNA, 25 bp, Artificial
  Probe
tccttttatccgttgtgctcacgtg

SEQ ID NO: 228685 - DNA, 25 bp, Artificial
  Probe
gaaccgacacaggaacctacaaaat

SEQ ID NO: 228686 - DNA, 25 bp, Artificial
  Probe
tgcatctgtatgtagtgaaatggcc

SEQ ID NO: 228687 - DNA, 25 bp, Artificial
  Probe
ataagaaccgacacaggaacctaca

SEQ ID NO: 228688 - DNA, 25 bp, Artificial
  Probe
cccagtccaagagttgaatgttcat

SEQ ID NO: 228689 - DNA, 25 bp, Artificial
  Probe
tgtttctgtgtcacttggcatgaga

SEQ ID NO: 228690 - DNA, 25 bp, Artificial
  Probe
gagaaggcggactgcatctgtatgt

SEQ ID NO: 228691 - DNA, 25 bp, Artificial
  Probe
tgaaatggccccagtccaagagttg

SEQ ID NO: 228692 - DNA, 25 bp, Artificial
  Probe
cgacacaggaacctacaaaataggg

SEQ ID NO: 228693 - DNA, 25 bp, Artificial
  Probe
gcggactgcatctgtatgtagtgaa

SEQ ID NO: 228694 - DNA, 25 bp, Artificial
  Probe
atccgaagcacaaatgtaatacagt

SEQ ID NO: 228695 - DNA, 25 bp, Artificial
  Probe
agaaggcggactgcatctgtatgta

SEQ ID NO: 228696 - DNA, 25 bp, Artificial
  Probe
ccagtccaagagttgaatgttcatt

SEQ ID NO: 228697 - DNA, 25 bp, Artificial
  Probe
catctgtatgtagtgaaatggcccc

SEQ ID NO: 228698 - DNA, 25 bp, Artificial
  Probe
ataacgtattgtaaatccgaagcac

SEQ ID NO: 228699 - DNA, 25 bp, Artificial
  Probe
atttgtttctgtgtcacttggcatg

SEQ ID NO: 228700 - DNA, 25 bp, Artificial
  Probe
aatccgaagcacaaatgtaatacag

SEQ ID NO: 228701 - DNA, 25 bp, Artificial
  Probe
gaacctacaaaatagggtagcgata

SEQ ID NO: 228702 - DNA, 25 bp, Artificial
  Probe
gctggagcagccacaggattcaggc

SEQ ID NO: 228703 - DNA, 25 bp, Artificial
  Probe
actctgggaaatcttcacactgggt

SEQ ID NO: 228704 - DNA, 25 bp, Artificial
  Probe
aggggctaccgcatggcccaacctg

SEQ ID NO: 228705 - DNA, 25 bp, Artificial
  Probe
gatcccctctggataccagctctgt

SEQ ID NO: 228706 - DNA, 25 bp, Artificial
  Probe
gagtttctgaggagtgaccatccag

SEQ ID NO: 228707 - DNA, 25 bp, Artificial
  Probe
ccagttctacaatgccatcaagagg

SEQ ID NO: 228708 - DNA, 25 bp, Artificial
  Probe
cagccacaggattcaggctgcccag

SEQ ID NO: 228709 - DNA, 25 bp, Artificial
  Probe
ttctacaatgccatcaagaggggct

SEQ ID NO: 228710 - DNA, 25 bp, Artificial
  Probe
cacagctggagcagccacaggattc

SEQ ID NO: 228711 - DNA, 25 bp, Artificial
  Probe
tggtgctgctcctggagaggcttct

SEQ ID NO: 228712 - DNA, 25 bp, Artificial
  Probe
accagcaggtggatgaggagtttct

SEQ ID NO: 228713 - DNA, 25 bp, Artificial
  Probe
agccgcaagcagagcctgaggcaca

SEQ ID NO: 228714 - DNA, 25 bp, Artificial
  Probe
gcctaatgagactgacaatgactac

SEQ ID NO: 228715 - DNA, 25 bp, Artificial
  Probe
ctggtgctgctcctggagaggcttc

SEQ ID NO: 228716 - DNA, 25 bp, Artificial
  Probe
cttgccagctccaccttgaatgaag

SEQ ID NO: 228717 - DNA, 25 bp, Artificial
  Probe
atgctgctgatgagggcctcctaga

SEQ ID NO: 228718 - DNA, 25 bp, Artificial
  Probe
atcaagaggggctaccgcatggccc

SEQ ID NO: 228719 - DNA, 25 bp, Artificial
  Probe
caggattcaggctgcccaggacctc

SEQ ID NO: 228720 - DNA, 25 bp, Artificial
  Probe
ccctggagctccaagaagagccgca

SEQ ID NO: 228721 - DNA, 25 bp, Artificial
  Probe
aggagtgaccatccagccatcctga

SEQ ID NO: 228722 - DNA, 25 bp, Artificial
  Probe
tcaagaggggctaccgcatggccca

SEQ ID NO: 228723 - DNA, 25 bp, Artificial
  Probe
tccgacgagatctatgagatcatgc

SEQ ID NO: 228724 - DNA, 25 bp, Artificial
  Probe
cttacccagagctgcccatgaacga

SEQ ID NO: 228725 - DNA, 25 bp, Artificial
  Probe
agccccctggagctccaagaagagc

SEQ ID NO: 228726 - DNA, 25 bp, Artificial
  Probe
tgctgtgcagcctaatgagactgac

SEQ ID NO: 228727 - DNA, 25 bp, Artificial
  Probe
acactgctgtgcagcctaatgagac

SEQ ID NO: 228728 - DNA, 25 bp, Artificial
  Probe
ctcatgcctccgacgagatctatga

SEQ ID NO: 228729 - DNA, 25 bp, Artificial
  Probe
gctccaccttgaatgaagtcaacac

SEQ ID NO: 228730 - DNA, 25 bp, Artificial
  Probe
gatgagggcctcctagagggttccc

SEQ ID NO: 228731 - DNA, 25 bp, Artificial
  Probe
cccaagcctgatgctgctgatgagg

SEQ ID NO: 228732 - DNA, 25 bp, Artificial
  Probe
ccagagctgcccatgaacgaccagt

SEQ ID NO: 228733 - DNA, 25 bp, Artificial
  Probe
ctgatgagggcctcctagagggttc

SEQ ID NO: 228734 - DNA, 25 bp, Artificial
  Probe
agctctgtcctctacactgctgtgc

SEQ ID NO: 228735 - DNA, 25 bp, Artificial
  Probe
ttcaggctgcccaggacctctggct

SEQ ID NO: 228736 - DNA, 25 bp, Artificial
  Probe
atctatgagatcatgcagaaatgct

SEQ ID NO: 228737 - DNA, 25 bp, Artificial
  Probe
gagtgaccatccagccatcctgagg

SEQ ID NO: 228738 - DNA, 25 bp, Artificial
  Probe
ctgaggcacagctggagcagccaca

SEQ ID NO: 228739 - DNA, 25 bp, Artificial
  Probe
aagagccgcaagcagagcctgaggc

SEQ ID NO: 228740 - DNA, 25 bp, Artificial
  Probe
ctctggataccagctctgtcctcta

SEQ ID NO: 228741 - DNA, 25 bp, Artificial
  Probe
gataccagctctgtcctctacactg

SEQ ID NO: 228742 - DNA, 25 bp, Artificial
  Probe
aatgccatcaagaggggctaccgca

SEQ ID NO: 228743 - DNA, 25 bp, Artificial
  Probe
gcaagcagagcctgaggcacagctg

SEQ ID NO: 228744 - DNA, 25 bp, Artificial
  Probe
taccagcaggtggatgaggagtttc

SEQ ID NO: 228745 - DNA, 25 bp, Artificial
  Probe
aagcagagcctgaggcacagctgga

SEQ ID NO: 228746 - DNA, 25 bp, Artificial
  Probe
agctccaagaagagccgcaagcaga

SEQ ID NO: 228747 - DNA, 25 bp, Artificial
  Probe
aggcacagctggagcagccacagga

SEQ ID NO: 228748 - DNA, 25 bp, Artificial
  Probe
gggcaacatgaatgccacgagcggc

SEQ ID NO: 228749 - DNA, 25 bp, Artificial
  Probe
cagcggctgctgcaagacctcggcg

SEQ ID NO: 228750 - DNA, 25 bp, Artificial
  Probe
tgagccggtcctggacccgacgagc

SEQ ID NO: 228751 - DNA, 25 bp, Artificial
  Probe
cgccttcggtgttccgagccgaaat

SEQ ID NO: 228752 - DNA, 25 bp, Artificial
  Probe
ggctgctgcaagacctcggcgccaa

SEQ ID NO: 228753 - DNA, 25 bp, Artificial
  Probe
tggcagaccatatgatggccatgaa

SEQ ID NO: 228754 - DNA, 25 bp, Artificial
  Probe
tgctccagcggctgctgcaagacct

SEQ ID NO: 228755 - DNA, 25 bp, Artificial
  Probe
cgggcaacatgaatgccacgagcgg

SEQ ID NO: 228756 - DNA, 25 bp, Artificial
  Probe
acgagcccgccttcggtgttccgag

SEQ ID NO: 228757 - DNA, 25 bp, Artificial
  Probe
cagaccatatgatggccatgaacca

SEQ ID NO: 228758 - DNA, 25 bp, Artificial
  Probe
tatgtgctgctgagccggtcctgga

SEQ ID NO: 228759 - DNA, 25 bp, Artificial
  Probe
atgaatgccacgagcggcatcaggc

SEQ ID NO: 228760 - DNA, 25 bp, Artificial
  Probe
tcggaatttgctccagcggctgctg

SEQ ID NO: 228761 - DNA, 25 bp, Artificial
  Probe
gctcggaatttgctccagcggctgc

SEQ ID NO: 228762 - DNA, 25 bp, Artificial
  Probe
cacgagcggcatcaggcacgccatg

SEQ ID NO: 228763 - DNA, 25 bp, Artificial
  Probe
cggctgcccctctatgtgctgctga

SEQ ID NO: 228764 - DNA, 25 bp, Artificial
  Probe
ctttggcctgtgcttggtccgtttt

SEQ ID NO: 228765 - DNA, 25 bp, Artificial
  Probe
ggaatttgctccagcggctgctgca

SEQ ID NO: 228766 - DNA, 25 bp, Artificial
  Probe
ttggcctgtgcttggtccgtttttg

SEQ ID NO: 228767 - DNA, 25 bp, Artificial
  Probe
agcggctgctgcaagacctcggcgc

SEQ ID NO: 228768 - DNA, 25 bp, Artificial
  Probe
tccgagccgaaatcgcaaagacgga

SEQ ID NO: 228769 - DNA, 25 bp, Artificial
  Probe
ggcgagcacatacactacggcgcgg

SEQ ID NO: 228770 - DNA, 25 bp, Artificial
  Probe
accgcatgggcatggggcagttccc

SEQ ID NO: 228771 - DNA, 25 bp, Artificial
  Probe
tccagcggctgctgcaagacctcgg

SEQ ID NO: 228772 - DNA, 25 bp, Artificial
  Probe
gccactttggcctgtgcttggtccg

SEQ ID NO: 228773 - DNA, 25 bp, Artificial
  Probe
tgcccctctatgtgctgctgagccg

SEQ ID NO: 228774 - DNA, 25 bp, Artificial
  Probe
aaatggcagaccatatgatggccat

SEQ ID NO: 228775 - DNA, 25 bp, Artificial
  Probe
gctgcccctctatgtgctgctgagc

SEQ ID NO: 228776 - DNA, 25 bp, Artificial
  Probe
agccgaaatcgcaaagacggaagga

SEQ ID NO: 228777 - DNA, 25 bp, Artificial
  Probe
acgagcggcatcaggcacgccatgg

SEQ ID NO: 228778 - DNA, 25 bp, Artificial
  Probe
tgctgagccggtcctggacccgacg

SEQ ID NO: 228779 - DNA, 25 bp, Artificial
  Probe
caccgcatgggcatggggcagttcc

SEQ ID NO: 228780 - DNA, 25 bp, Artificial
  Probe
gtgcttggtccgtttttgcagactt

SEQ ID NO: 228781 - DNA, 25 bp, Artificial
  Probe
ccctcatgggcgagcacatacacta

SEQ ID NO: 228782 - DNA, 25 bp, Artificial
  Probe
aacatgaatgccacgagcggcatca

SEQ ID NO: 228783 - DNA, 25 bp, Artificial
  Probe
gaaatcgcaaagacggaaggactgg

SEQ ID NO: 228784 - DNA, 25 bp, Artificial
  Probe
ttcggtgttccgagccgaaatcgca

SEQ ID NO: 228785 - DNA, 25 bp, Artificial
  Probe
ctgagccggtcctggacccgacgag

SEQ ID NO: 228786 - DNA, 25 bp, Artificial
  Probe
ttcaacgccctcatgggcgagcaca

SEQ ID NO: 228787 - DNA, 25 bp, Artificial
  Probe
gcctgtgcttggtccgtttttgcag

SEQ ID NO: 228788 - DNA, 25 bp, Artificial
  Probe
tgttccgagccgaaatcgcaaagac

SEQ ID NO: 228789 - DNA, 25 bp, Artificial
  Probe
ttcggctgcccctctatgtgctgct

SEQ ID NO: 228790 - DNA, 25 bp, Artificial
  Probe
gccaccagatgaacgggacaaacca

SEQ ID NO: 228791 - DNA, 25 bp, Artificial
  Probe
cgcaaagacggaaggactggaaatg

SEQ ID NO: 228792 - DNA, 25 bp, Artificial
  Probe
tcaacgccctcatgggcgagcacat

SEQ ID NO: 228793 - DNA, 25 bp, Artificial
  Probe
gccaggtttaacaactcccagttca

SEQ ID NO: 228794 - DNA, 25 bp, Artificial
  Probe
gacagtgctgccagtgacctgctgg

SEQ ID NO: 228795 - DNA, 25 bp, Artificial
  Probe
atctacagtgggtgaaggatacctt

SEQ ID NO: 228796 - DNA, 25 bp, Artificial
  Probe
tggaggctgtgcttatctccgaagg

SEQ ID NO: 228797 - DNA, 25 bp, Artificial
  Probe
gagtctattctctcccgctttgatg

SEQ ID NO: 228798 - DNA, 25 bp, Artificial
  Probe
acgaggagtctattctctcccgctt

SEQ ID NO: 228799 - DNA, 25 bp, Artificial
  Probe
cagatcccagtcaccgcaagagggg

SEQ ID NO: 228800 - DNA, 25 bp, Artificial
  Probe
tgcccaagacccacgatttgtggcc

SEQ ID NO: 228801 - DNA, 25 bp, Artificial
  Probe
gtgaaggataccttggcaagctcgg

SEQ ID NO: 228802 - DNA, 25 bp, Artificial
  Probe
ctaccatcgtggacggacctcagga

SEQ ID NO: 228803 - DNA, 25 bp, Artificial
  Probe
cactgcgtaccttcacttgtctgca

SEQ ID NO: 228804 - DNA, 25 bp, Artificial
  Probe
tacagtgacgaggagtctattctct

SEQ ID NO: 228805 - DNA, 25 bp, Artificial
  Probe
cttgtctgcaagtgcctggagctcc

SEQ ID NO: 228806 - DNA, 25 bp, Artificial
  Probe
tctgcaagtgcctggagctccttca

SEQ ID NO: 228807 - DNA, 25 bp, Artificial
  Probe
ggctcagggttcctgggcagcccct

SEQ ID NO: 228808 - DNA, 25 bp, Artificial
  Probe
cccagtcaccgcaagaggggcagtg

SEQ ID NO: 228809 - DNA, 25 bp, Artificial
  Probe
catcgtggacggacctcaggaccag

SEQ ID NO: 228810 - DNA, 25 bp, Artificial
  Probe
aggcctaggcctctttgcccaagac

SEQ ID NO: 228811 - DNA, 25 bp, Artificial
  Probe
gacctcaggaccaggcagggctcag

SEQ ID NO: 228812 - DNA, 25 bp, Artificial
  Probe
tggagctccttcagatcccagtcac

SEQ ID NO: 228813 - DNA, 25 bp, Artificial
  Probe
acggacctcaggaccaggcagggct

SEQ ID NO: 228814 - DNA, 25 bp, Artificial
  Probe
tctccgaaggcctaggcctctttgc

SEQ ID NO: 228815 - DNA, 25 bp, Artificial
  Probe
gaccctggatgagatggacagtgct

SEQ ID NO: 228816 - DNA, 25 bp, Artificial
  Probe
cagtcaccgcaagaggggcagtgct

SEQ ID NO: 228817 - DNA, 25 bp, Artificial
  Probe
ccaggcacctaccatcgtggacgga

SEQ ID NO: 228818 - DNA, 25 bp, Artificial
  Probe
cctggccaagcaagagattgcagat

SEQ ID NO: 228819 - DNA, 25 bp, Artificial
  Probe
tctacagtgggtgaaggataccttg

SEQ ID NO: 228820 - DNA, 25 bp, Artificial
  Probe
cgtggacggacctcaggaccaggca

SEQ ID NO: 228821 - DNA, 25 bp, Artificial
  Probe
gaagggtcgactgctctatgccccc

SEQ ID NO: 228822 - DNA, 25 bp, Artificial
  Probe
acccacgatttgtggccctggccaa

SEQ ID NO: 228823 - DNA, 25 bp, Artificial
  Probe
tgcttatctccgaaggcctaggcct

SEQ ID NO: 228824 - DNA, 25 bp, Artificial
  Probe
gcatgtcacctgaccctggatgaga

SEQ ID NO: 228825 - DNA, 25 bp, Artificial
  Probe
cttcagatcccagtcaccgcaagag

SEQ ID NO: 228826 - DNA, 25 bp, Artificial
  Probe
ctctttgcccaagacccacgatttg

SEQ ID NO: 228827 - DNA, 25 bp, Artificial
  Probe
gtcacctgaccctggatgagatgga

SEQ ID NO: 228828 - DNA, 25 bp, Artificial
  Probe
ccagtgacctgctggcacagagaac

SEQ ID NO: 228829 - DNA, 25 bp, Artificial
  Probe
gacctgctggcacagagaaccacct

SEQ ID NO: 228830 - DNA, 25 bp, Artificial
  Probe
tcctcagaagggtcgactgctctat

SEQ ID NO: 228831 - DNA, 25 bp, Artificial
  Probe
aacgccagggcagttgtgaggattt

SEQ ID NO: 228832 - DNA, 25 bp, Artificial
  Probe
gtggccctggccaagcaagagattg

SEQ ID NO: 228833 - DNA, 25 bp, Artificial
  Probe
gatggacagtgctgccagtgacctg

SEQ ID NO: 228834 - DNA, 25 bp, Artificial
  Probe
gcttatctccgaaggcctaggcctc

SEQ ID NO: 228835 - DNA, 25 bp, Artificial
  Probe
agattgcagatgcatgtcacctgac

SEQ ID NO: 228836 - DNA, 25 bp, Artificial
  Probe
gctgtgcttatctccgaaggcctag

SEQ ID NO: 228837 - DNA, 25 bp, Artificial
  Probe
aaggcctaggcctctttgcccaaga

SEQ ID NO: 228838 - DNA, 25 bp, Artificial
  Probe
gagatggacagtgctgccagtgacc

SEQ ID NO: 228839 - DNA, 25 bp, Artificial
  Probe
attctctcccgctttgatgaagagg

SEQ ID NO: 228840 - DNA, 25 bp, Artificial
  Probe
gaaccttagtattcagtcacttttg

SEQ ID NO: 228841 - DNA, 25 bp, Artificial
  Probe
ctaccaattgcctactttggatagt

SEQ ID NO: 228842 - DNA, 25 bp, Artificial
  Probe
cctaaagagactactgagagagata

SEQ ID NO: 228843 - DNA, 25 bp, Artificial
  Probe
ccctgatccttgtgctgctgccggt

SEQ ID NO: 228844 - DNA, 25 bp, Artificial
  Probe
gcatatgcctatggaaatttatcaa

SEQ ID NO: 228845 - DNA, 25 bp, Artificial
  Probe
atcaacagtactgattttgtaaagc

SEQ ID NO: 228846 - DNA, 25 bp, Artificial
  Probe
cacatcttaaagcagcagcagcagc

SEQ ID NO: 228847 - DNA, 25 bp, Artificial
  Probe
gtgaactgcacaagcaaggaagaaa

SEQ ID NO: 228848 - DNA, 25 bp, Artificial
  Probe
caaaggaagctgcttttctaaatcg

SEQ ID NO: 228849 - DNA, 25 bp, Artificial
  Probe
cgcagaccatgttccatgtttcttt

SEQ ID NO: 228850 - DNA, 25 bp, Artificial
  Probe
taaatgacctgtgttaacactgtca

SEQ ID NO: 228851 - DNA, 25 bp, Artificial
  Probe
ctgtcacattaaagacaaggacggt

SEQ ID NO: 228852 - DNA, 25 bp, Artificial
  Probe
gcaatgcttttaaagcctttccaag

SEQ ID NO: 228853 - DNA, 25 bp, Artificial
  Probe
catgcatcggtgaaccactggggga

SEQ ID NO: 228854 - DNA, 25 bp, Artificial
  Probe
gataatgctcttgaaaacgagagtc

SEQ ID NO: 228855 - DNA, 25 bp, Artificial
  Probe
agaatgatccatgtttcctaaagag

SEQ ID NO: 228856 - DNA, 25 bp, Artificial
  Probe
aactgatagtgattgcccaaataat

SEQ ID NO: 228857 - DNA, 25 bp, Artificial
  Probe
agggctcctggtgatggataatgct

SEQ ID NO: 228858 - DNA, 25 bp, Artificial
  Probe
acggtaaagcctttgggagtgtgct

SEQ ID NO: 228859 - DNA, 25 bp, Artificial
  Probe
gctcgcaagttgaggcaatttctta

SEQ ID NO: 228860 - DNA, 25 bp, Artificial
  Probe
gaaatgcacttagttcaaagatact

SEQ ID NO: 228861 - DNA, 25 bp, Artificial
  Probe
caactgggaaatctacagtgataga

SEQ ID NO: 228862 - DNA, 25 bp, Artificial
  Probe
aatgaccatttactaagagtttcag

SEQ ID NO: 228863 - DNA, 25 bp, Artificial
  Probe
tatccagtctacaaacaaggctctg

SEQ ID NO: 228864 - DNA, 25 bp, Artificial
  Probe
gtataacacatagcttcagtacaga

SEQ ID NO: 228865 - DNA, 25 bp, Artificial
  Probe
caacagtactgattttgtaaagcaa

SEQ ID NO: 228866 - DNA, 25 bp, Artificial
  Probe
gagtggaactgtcctgtggaagact

SEQ ID NO: 228867 - DNA, 25 bp, Artificial
  Probe
cctcccagaagtttctggatgcctc

SEQ ID NO: 228868 - DNA, 25 bp, Artificial
  Probe
catacttggagagtttggaaccctc

SEQ ID NO: 228869 - DNA, 25 bp, Artificial
  Probe
ctgcagatacaggagggctcctggt

SEQ ID NO: 228870 - DNA, 25 bp, Artificial
  Probe
gttcaaagatactgaaccttagtat

SEQ ID NO: 228871 - DNA, 25 bp, Artificial
  Probe
gaaactactgccttgcatacttgga

SEQ ID NO: 228872 - DNA, 25 bp, Artificial
  Probe
tcagtacagagcatagcagatattt

SEQ ID NO: 228873 - DNA, 25 bp, Artificial
  Probe
ctcctggtcaaataaagcaagcaac

SEQ ID NO: 228874 - DNA, 25 bp, Artificial
  Probe
tgaagattcagagtcgccactgttt

SEQ ID NO: 228875 - DNA, 25 bp, Artificial
  Probe
caaacaaggctctgaagattcagag

SEQ ID NO: 228876 - DNA, 25 bp, Artificial
  Probe
gaaatgcaactgactcctgcggtca

SEQ ID NO: 228877 - DNA, 25 bp, Artificial
  Probe
gattttgtaaagcaaccctgtcatc

SEQ ID NO: 228878 - DNA, 25 bp, Artificial
  Probe
gtgattgcccaaataatgaaccaaa

SEQ ID NO: 228879 - DNA, 25 bp, Artificial
  Probe
ctcctggtgatggataatgctcttg

SEQ ID NO: 228880 - DNA, 25 bp, Artificial
  Probe
taaagcaagcaactgggaaatctac

SEQ ID NO: 228881 - DNA, 25 bp, Artificial
  Probe
gcctactttggatagtatctctttt

SEQ ID NO: 228882 - DNA, 25 bp, Artificial
  Probe
tgtagtagcaacctccaagaaacta

SEQ ID NO: 228883 - DNA, 25 bp, Artificial
  Probe
gtagcaacctccaagaaactactgc

SEQ ID NO: 228884 - DNA, 25 bp, Artificial
  Probe
caatcaactggacaaaatgacagga

SEQ ID NO: 228885 - DNA, 25 bp, Artificial
  Probe
gatactgaaccttagtattcagtca

SEQ ID NO: 228886 - DNA, 25 bp, Artificial
  Probe
cagtcagtaaacagcctgccttcac

SEQ ID NO: 228887 - DNA, 25 bp, Artificial
  Probe
ttacccggagccagaaaaccactgg

SEQ ID NO: 228888 - DNA, 25 bp, Artificial
  Probe
tcactaacagtatgcgggccatcct

SEQ ID NO: 228889 - DNA, 25 bp, Artificial
  Probe
actggtacctcttgattatccaatg

SEQ ID NO: 228890 - DNA, 25 bp, Artificial
  Probe
gtacctgactatcatgaagatattc

SEQ ID NO: 228891 - DNA, 25 bp, Artificial
  Probe
tgtcaaccccgaaaaagtggcgcca

SEQ ID NO: 228892 - DNA, 25 bp, Artificial
  Probe
tgtctgcgttaagaggaaagcttca

SEQ ID NO: 228893 - DNA, 25 bp, Artificial
  Probe
ctgctagcttcaaagtttgaagaaa

SEQ ID NO: 228894 - DNA, 25 bp, Artificial
  Probe
gcttgtgggcacagctgctatgctg

SEQ ID NO: 228895 - DNA, 25 bp, Artificial
  Probe
agcagtcagtaaacagcctgccttc

SEQ ID NO: 228896 - DNA, 25 bp, Artificial
  Probe
tcaaccccgaaaaagtggcgccagc

SEQ ID NO: 228897 - DNA, 25 bp, Artificial
  Probe
agcctgccttcaccattcatgtgga

SEQ ID NO: 228898 - DNA, 25 bp, Artificial
  Probe
cgcagcagaggctcaagactcggcg

SEQ ID NO: 228899 - DNA, 25 bp, Artificial
  Probe
agagactcagaagaggccagctgag

SEQ ID NO: 228900 - DNA, 25 bp, Artificial
  Probe
tcacacgtaccttggggaaatggag

SEQ ID NO: 228901 - DNA, 25 bp, Artificial
  Probe
taaagaaactcagtgtgaagatgcc

SEQ ID NO: 228902 - DNA, 25 bp, Artificial
  Probe
agaggccagctgagcgtaaagaaac

SEQ ID NO: 228903 - DNA, 25 bp, Artificial
  Probe
gaatcaccccatgctatggatatat

SEQ ID NO: 228904 - DNA, 25 bp, Artificial
  Probe
cagaaaaccactggtacctcttgat

SEQ ID NO: 228905 - DNA, 25 bp, Artificial
  Probe
cccccagaagtagcagagtttgtgt

SEQ ID NO: 228906 - DNA, 25 bp, Artificial
  Probe
agtatgcgggccatccttgtggact

SEQ ID NO: 228907 - DNA, 25 bp, Artificial
  Probe
gactcggcgggttgcgcctcttaag

SEQ ID NO: 228908 - DNA, 25 bp, Artificial
  Probe
actcagtgtgaagatgccctggctt

SEQ ID NO: 228909 - DNA, 25 bp, Artificial
  Probe
catgaagatattcacacgtaccttg

SEQ ID NO: 228910 - DNA, 25 bp, Artificial
  Probe
ccagcaggaagaccaggagaatgtc

SEQ ID NO: 228911 - DNA, 25 bp, Artificial
  Probe
atataaactacagaatgagaccctg

SEQ ID NO: 228912 - DNA, 25 bp, Artificial
  Probe
gaggaaagcttcagcttgtgggcac

SEQ ID NO: 228913 - DNA, 25 bp, Artificial
  Probe
caggagaatgtcaaccccgaaaaag

SEQ ID NO: 228914 - DNA, 25 bp, Artificial
  Probe
cgctgtctctttacccggagccaga

SEQ ID NO: 228915 - DNA, 25 bp, Artificial
  Probe
ccattcatgtggatgaagctgaaga

SEQ ID NO: 228916 - DNA, 25 bp, Artificial
  Probe
ctcttgattatccaatggatggtag

SEQ ID NO: 228917 - DNA, 25 bp, Artificial
  Probe
atccttgtggactggctagttgaag

SEQ ID NO: 228918 - DNA, 25 bp, Artificial
  Probe
ggtagttttgaatcaccccatgcta

SEQ ID NO: 228919 - DNA, 25 bp, Artificial
  Probe
agcttcagcttgtgggcacagctgc

SEQ ID NO: 228920 - DNA, 25 bp, Artificial
  Probe
gtgaagatgccctggcttttagtgc

SEQ ID NO: 228921 - DNA, 25 bp, Artificial
  Probe
ttcatggaaagcagtcagtaaacag

SEQ ID NO: 228922 - DNA, 25 bp, Artificial
  Probe
gatagattcctcttctccatgtctg

SEQ ID NO: 228923 - DNA, 25 bp, Artificial
  Probe
aatgaagtacctgactatcatgaag

SEQ ID NO: 228924 - DNA, 25 bp, Artificial
  Probe
gcgggttgcgcctcttaaggacctt

SEQ ID NO: 228925 - DNA, 25 bp, Artificial
  Probe
gctgtgaactacattgatagattcc

SEQ ID NO: 228926 - DNA, 25 bp, Artificial
  Probe
gaccggcgccgcagcagaggctcaa

SEQ ID NO: 228927 - DNA, 25 bp, Artificial
  Probe
agactcggcgggttgcgcctcttaa

SEQ ID NO: 228928 - DNA, 25 bp, Artificial
  Probe
gaagaggcagccagacatcactaac

SEQ ID NO: 228929 - DNA, 25 bp, Artificial
  Probe
cccatgctatggatatatctattgt

SEQ ID NO: 228930 - DNA, 25 bp, Artificial
  Probe
ttttagtgccgctgtctctttaccc

SEQ ID NO: 228931 - DNA, 25 bp, Artificial
  Probe
cttaaggaccttcctataaacgatg

SEQ ID NO: 228932 - DNA, 25 bp, Artificial
  Probe
gggtgatcaccgaatcttttgaatg

SEQ ID NO: 228933 - DNA, 25 bp, Artificial
  Probe
accgtcaactccaccgtgggtgatc

SEQ ID NO: 228934 - DNA, 25 bp, Artificial
  Probe
atgcactgtggcttgcggctgtcat

SEQ ID NO: 228935 - DNA, 25 bp, Artificial
  Probe
cgaggcatacgaggagtcctcaagc

SEQ ID NO: 228936 - DNA, 25 bp, Artificial
  Probe
gaccgtcaactccaccgtgggtgat

SEQ ID NO: 228937 - DNA, 25 bp, Artificial
  Probe
taagttcaatcatgtctgtggtcca

SEQ ID NO: 228938 - DNA, 25 bp, Artificial
  Probe
gacaaggctgacttggcagtgttta

SEQ ID NO: 228939 - DNA, 25 bp, Artificial
  Probe
tcaatcatgtctgtggtccagagga

SEQ ID NO: 228940 - DNA, 25 bp, Artificial
  Probe
accgtgggtgatcaccgaatctttt

SEQ ID NO: 228941 - DNA, 25 bp, Artificial
  Probe
gtgatcaccgaatcttttgaatgaa

SEQ ID NO: 228942 - DNA, 25 bp, Artificial
  Probe
agagacaaggctgacttggcagtgt

SEQ ID NO: 228943 - DNA, 25 bp, Artificial
  Probe
gctgacttggcagtgtttatagggc

SEQ ID NO: 228944 - DNA, 25 bp, Artificial
  Probe
tgatcaccgaatcttttgaatgaac

SEQ ID NO: 228945 - DNA, 25 bp, Artificial
  Probe
gtaacaaggtgctacagtagttgac

SEQ ID NO: 228946 - DNA, 25 bp, Artificial
  Probe
ttaagttcaatcatgtctgtggtcc

SEQ ID NO: 228947 - DNA, 25 bp, Artificial
  Probe
tggcgaggcatacgaggagtcctca

SEQ ID NO: 228948 - DNA, 25 bp, Artificial
  Probe
aggcatacgaggagtcctcaagcct

SEQ ID NO: 228949 - DNA, 25 bp, Artificial
  Probe
gatcaccgaatcttttgaatgaact

SEQ ID NO: 228950 - DNA, 25 bp, Artificial
  Probe
taacaaggtgctacagtagttgacg

SEQ ID NO: 228951 - DNA, 25 bp, Artificial
  Probe
aagttcaatcatgtctgtggtccag

SEQ ID NO: 228952 - DNA, 25 bp, Artificial
  Probe
caccgtgggtgatcaccgaatcttt

SEQ ID NO: 228953 - DNA, 25 bp, Artificial
  Probe
tcatgtctgtggtccagaggaagtt

SEQ ID NO: 228954 - DNA, 25 bp, Artificial
  Probe
atcaccgaatcttttgaatgaactg

SEQ ID NO: 228955 - DNA, 25 bp, Artificial
  Probe
ggtgatcaccgaatcttttgaatga

SEQ ID NO: 228956 - DNA, 25 bp, Artificial
  Probe
aatggcgaggcatacgaggagtcct

SEQ ID NO: 228957 - DNA, 25 bp, Artificial
  Probe
cagagacaaggctgacttggcagtg

SEQ ID NO: 228958 - DNA, 25 bp, Artificial
  Probe
tcgtgttctttacaaaatgaatgca

SEQ ID NO: 228959 - DNA, 25 bp, Artificial
  Probe
tcaactccaccgtgggtgatcaccg

SEQ ID NO: 228960 - DNA, 25 bp, Artificial
  Probe
gagacaaggctgacttggcagtgtt

SEQ ID NO: 228961 - DNA, 25 bp, Artificial
  Probe
tgcactgtggcttgcggctgtcatg

SEQ ID NO: 228962 - DNA, 25 bp, Artificial
  Probe
caccgaatcttttgaatgaactgtc

SEQ ID NO: 228963 - DNA, 25 bp, Artificial
  Probe
cgaccgtcaactccaccgtgggtga

SEQ ID NO: 228964 - DNA, 25 bp, Artificial
  Probe
tccaccgtgggtgatcaccgaatct

SEQ ID NO: 228965 - DNA, 25 bp, Artificial
  Probe
atggcgaggcatacgaggagtcctc

SEQ ID NO: 228966 - DNA, 25 bp, Artificial
  Probe
ccaccgtgggtgatcaccgaatctt

SEQ ID NO: 228967 - DNA, 25 bp, Artificial
  Probe
agttcaatcatgtctgtggtccaga

SEQ ID NO: 228968 - DNA, 25 bp, Artificial
  Probe
acaaggctgacttggcagtgtttat

SEQ ID NO: 228969 - DNA, 25 bp, Artificial
  Probe
ctccaccgtgggtgatcaccgaatc

SEQ ID NO: 228970 - DNA, 25 bp, Artificial
  Probe
ttctttacaaaatgaatgcattggc

SEQ ID NO: 228971 - DNA, 25 bp, Artificial
  Probe
ttcaatcatgtctgtggtccagagg

SEQ ID NO: 228972 - DNA, 25 bp, Artificial
  Probe
ctgacttggcagtgtttatagggct

SEQ ID NO: 228973 - DNA, 25 bp, Artificial
  Probe
tttaagttcaatcatgtctgtggtc

SEQ ID NO: 228974 - DNA, 25 bp, Artificial
  Probe
tcaccgaatcttttgaatgaactgt

SEQ ID NO: 228975 - DNA, 25 bp, Artificial
  Probe
agacaaggctgacttggcagtgttt

SEQ ID NO: 228976 - DNA, 25 bp, Artificial
  Probe
catgtctgtggtccagaggaagtta

SEQ ID NO: 228977 - DNA, 25 bp, Artificial
  Probe
taatggcgaggcatacgaggagtcc

SEQ ID NO: 228978 - DNA, 25 bp, Artificial
  Probe
agacaacggactctgccccaaagtc

SEQ ID NO: 228979 - DNA, 25 bp, Artificial
  Probe
agcagacagagttcctttcctgtgc

SEQ ID NO: 228980 - DNA, 25 bp, Artificial
  Probe
caaccaggcaacagctcaggttccg

SEQ ID NO: 228981 - DNA, 25 bp, Artificial
  Probe
cactgctcatggtggctccttttca

SEQ ID NO: 228982 - DNA, 25 bp, Artificial
  Probe
actcccaaagactggcaggctgatt

SEQ ID NO: 228983 - DNA, 25 bp, Artificial
  Probe
agccagagactcagtgagagggaaa

SEQ ID NO: 228984 - DNA, 25 bp, Artificial
  Probe
cccaaagtcctgcatccctagtttg

SEQ ID NO: 228985 - DNA, 25 bp, Artificial
  Probe
gttcctttcctgtgccagcacgtca

SEQ ID NO: 228986 - DNA, 25 bp, Artificial
  Probe
ctgtgtaaggcagacaacggactct

SEQ ID NO: 228987 - DNA, 25 bp, Artificial
  Probe
atgactaagcagacctgtgtaaggc

SEQ ID NO: 228988 - DNA, 25 bp, Artificial
  Probe
ccagagactcagtgagagggaaaga

SEQ ID NO: 228989 - DNA, 25 bp, Artificial
  Probe
cagacctgtgtaaggcagacaacgg

SEQ ID NO: 228990 - DNA, 25 bp, Artificial
  Probe
acttgctgacgatggccagtgaata

SEQ ID NO: 228991 - DNA, 25 bp, Artificial
  Probe
agactggcaggctgattggaactga

SEQ ID NO: 228992 - DNA, 25 bp, Artificial
  Probe
agaatgcactgtaggtggaaggcca

SEQ ID NO: 228993 - DNA, 25 bp, Artificial
  Probe
ctggcaggctgattggaactgagca

SEQ ID NO: 228994 - DNA, 25 bp, Artificial
  Probe
gctcatggtggctccttttcatgaa

SEQ ID NO: 228995 - DNA, 25 bp, Artificial
  Probe
cggccctgctgcttgcagtgaccta

SEQ ID NO: 228996 - DNA, 25 bp, Artificial
  Probe
ccttttcatgaaagggaacatatga

SEQ ID NO: 228997 - DNA, 25 bp, Artificial
  Probe
atcaaatgaacacaacttgctgacg

SEQ ID NO: 228998 - DNA, 25 bp, Artificial
  Probe
gcatgccaaaaccaaccaggcaaca

SEQ ID NO: 228999 - DNA, 25 bp, Artificial
  Probe
ggaaggccaggaagctcagacacac

SEQ ID NO: 229000 - DNA, 25 bp, Artificial
  Probe
gcccggactcccaaagactggcagg

SEQ ID NO: 229001 - DNA, 25 bp, Artificial
  Probe
tagtttgcccggactcccaaagact

SEQ ID NO: 229002 - DNA, 25 bp, Artificial
  Probe
tggaaggccaggaagctcagacaca

SEQ ID NO: 229003 - DNA, 25 bp, Artificial
  Probe
cttccaagccagagactcagtgaga

SEQ ID NO: 229004 - DNA, 25 bp, Artificial
  Probe
cctagtccagaatgcactgtaggtg

SEQ ID NO: 229005 - DNA, 25 bp, Artificial
  Probe
aaccaaccaggcaacagctcaggtt

SEQ ID NO: 229006 - DNA, 25 bp, Artificial
  Probe
ggctccttttcatgaaagggaacat

SEQ ID NO: 229007 - DNA, 25 bp, Artificial
  Probe
atatatgactaagcagacctgtgta

SEQ ID NO: 229008 - DNA, 25 bp, Artificial
  Probe
gaagctcagacacacccattgaaac

SEQ ID NO: 229009 - DNA, 25 bp, Artificial
  Probe
accaaccaggcaacagctcaggttc

SEQ ID NO: 229010 - DNA, 25 bp, Artificial
  Probe
gcagtgacctagtccagaatgcact

SEQ ID NO: 229011 - DNA, 25 bp, Artificial
  Probe
ccaaagactggcaggctgattggaa

SEQ ID NO: 229012 - DNA, 25 bp, Artificial
  Probe
cctgtgtaaggcagacaacggactc

SEQ ID NO: 229013 - DNA, 25 bp, Artificial
  Probe
gcctgttgcggacactgctcatggt

SEQ ID NO: 229014 - DNA, 25 bp, Artificial
  Probe
ctggctgcctgttgcggacactgct

SEQ ID NO: 229015 - DNA, 25 bp, Artificial
  Probe
gtcctgcatccctagtttgcccgga

SEQ ID NO: 229016 - DNA, 25 bp, Artificial
  Probe
gtttgcccggactcccaaagactgg

SEQ ID NO: 229017 - DNA, 25 bp, Artificial
  Probe
ggtggctccttttcatgaaagggaa

SEQ ID NO: 229018 - DNA, 25 bp, Artificial
  Probe
gattggaactgagcagacagagttc

SEQ ID NO: 229019 - DNA, 25 bp, Artificial
  Probe
caaagtcctgcatccctagtttgcc

SEQ ID NO: 229020 - DNA, 25 bp, Artificial
  Probe
ggcagacaacggactctgccccaaa

SEQ ID NO: 229021 - DNA, 25 bp, Artificial
  Probe
ttggaactgagcagacagagttcct

SEQ ID NO: 229022 - DNA, 25 bp, Artificial
  Probe
tgccaaaaccaaccaggcaacagct

SEQ ID NO: 229023 - DNA, 25 bp, Artificial
  Probe
tgagcagacagagttcctttcctgt

SEQ ID NO: 229024 - DNA, 25 bp, Artificial
  Probe
aacccctacagcactgggcagacat

SEQ ID NO: 229025 - DNA, 25 bp, Artificial
  Probe
ttcaacgaggccttcgtcttcctgg

SEQ ID NO: 229026 - DNA, 25 bp, Artificial
  Probe
ctttattgccatccttgctgctgga

SEQ ID NO: 229027 - DNA, 25 bp, Artificial
  Probe
gtgtttccacccaggccgggagaag

SEQ ID NO: 229028 - DNA, 25 bp, Artificial
  Probe
cagctcctggctgagcctgtgggca

SEQ ID NO: 229029 - DNA, 25 bp, Artificial
  Probe
agaacaaaacatcctccaagaaggg

SEQ ID NO: 229030 - DNA, 25 bp, Artificial
  Probe
ctaaaaatctgaaggctgagggcac

SEQ ID NO: 229031 - DNA, 25 bp, Artificial
  Probe
agctcctggctgagcctgtgggcaa

SEQ ID NO: 229032 - DNA, 25 bp, Artificial
  Probe
tccctggagtatgattttggaagcc

SEQ ID NO: 229033 - DNA, 25 bp, Artificial
  Probe
catactggaggctcggggcctgaat

SEQ ID NO: 229034 - DNA, 25 bp, Artificial
  Probe
ccaggccgggagaagacatgagaca

SEQ ID NO: 229035 - DNA, 25 bp, Artificial
  Probe
gtggcctgcattccacacttaattc

SEQ ID NO: 229036 - DNA, 25 bp, Artificial
  Probe
gaggccttcgtcttcctggttcccg

SEQ ID NO: 229037 - DNA, 25 bp, Artificial
  Probe
gcagagctgcccaaagccactctga

SEQ ID NO: 229038 - DNA, 25 bp, Artificial
  Probe
tccaagaagggcacaactaacccct

SEQ ID NO: 229039 - DNA, 25 bp, Artificial
  Probe
acccctacagcactgggcagacatg

SEQ ID NO: 229040 - DNA, 25 bp, Artificial
  Probe
ctatgtgaaggtccagcttatatta

SEQ ID NO: 229041 - DNA, 25 bp, Artificial
  Probe
tgagacaaaagtgcaccgtgggaca

SEQ ID NO: 229042 - DNA, 25 bp, Artificial
  Probe
gctcaggccgcctgactgtggtcat

SEQ ID NO: 229043 - DNA, 25 bp, Artificial
  Probe
agtgttgctgggtccccgggcttca

SEQ ID NO: 229044 - DNA, 25 bp, Artificial
  Probe
gggagctgtgcttctcactacgcta

SEQ ID NO: 229045 - DNA, 25 bp, Artificial
  Probe
tgactgtggtcatactggaggctcg

SEQ ID NO: 229046 - DNA, 25 bp, Artificial
  Probe
tggatcgtgctctggccctgcagcc

SEQ ID NO: 229047 - DNA, 25 bp, Artificial
  Probe
tctgtgtcatctgttactgttgcca

SEQ ID NO: 229048 - DNA, 25 bp, Artificial
  Probe
tgggcctgaggcaggctaaaaatct

SEQ ID NO: 229049 - DNA, 25 bp, Artificial
  Probe
aaggctgagggcacagcagacccct

SEQ ID NO: 229050 - DNA, 25 bp, Artificial
  Probe
ggggagctccagctacccctgggca

SEQ ID NO: 229051 - DNA, 25 bp, Artificial
  Probe
tgaatccggggcttgcagaggccta

SEQ ID NO: 229052 - DNA, 25 bp, Artificial
  Probe
gggcagacatgctggcccatgctcg

SEQ ID NO: 229053 - DNA, 25 bp, Artificial
  Probe
gcccgtgtcagtgtttccacccagg

SEQ ID NO: 229054 - DNA, 25 bp, Artificial
  Probe
cctgcttaggcctcgctcctgaaag

SEQ ID NO: 229055 - DNA, 25 bp, Artificial
  Probe
ttccactgagtctgagcagatgggg

SEQ ID NO: 229056 - DNA, 25 bp, Artificial
  Probe
tgaaagaaccgtaggtctcagcttt

SEQ ID NO: 229057 - DNA, 25 bp, Artificial
  Probe
tggagtgcctagagccctgctctgg

SEQ ID NO: 229058 - DNA, 25 bp, Artificial
  Probe
gagacatgctgcttcctggtcccac

SEQ ID NO: 229059 - DNA, 25 bp, Artificial
  Probe
tctcctgtctgctctgtgtcatctg

SEQ ID NO: 229060 - DNA, 25 bp, Artificial
  Probe
ctcgctggatactctttattgccat

SEQ ID NO: 229061 - DNA, 25 bp, Artificial
  Probe
ctgcggtcacccagggaagtggatc

SEQ ID NO: 229062 - DNA, 25 bp, Artificial
  Probe
tatgtgcccagctcaggccgcctga

SEQ ID NO: 229063 - DNA, 25 bp, Artificial
  Probe
tgaagagacatgctgcttcctggtc

SEQ ID NO: 229064 - DNA, 25 bp, Artificial
  Probe
tcccatgtttgaagagacatgctgc

SEQ ID NO: 229065 - DNA, 25 bp, Artificial
  Probe
tgggcagacatgctggcccatgctc

SEQ ID NO: 229066 - DNA, 25 bp, Artificial
  Probe
tttcagaacatgagccactggggga

SEQ ID NO: 229067 - DNA, 25 bp, Artificial
  Probe
tgggggcaactgctgctctccctgg

SEQ ID NO: 229068 - DNA, 25 bp, Artificial
  Probe
tacccctgggcactgtggaccttca

SEQ ID NO: 229069 - DNA, 25 bp, Artificial
  Probe
actactcacctggttcaaccagatg

SEQ ID NO: 229070 - DNA, 25 bp, Artificial
  Probe
gagcgagagcgtcagccatgtcatc

SEQ ID NO: 229071 - DNA, 25 bp, Artificial
  Probe
tctttctacttcgcctcccctcact

SEQ ID NO: 229072 - DNA, 25 bp, Artificial
  Probe
aagatgcacgtgagcaatacacaca

SEQ ID NO: 229073 - DNA, 25 bp, Artificial
  Probe
gcctccacatatacatgtgcacaag

SEQ ID NO: 229074 - DNA, 25 bp, Artificial
  Probe
agagcgagagcgtcagccatgtcat

SEQ ID NO: 229075 - DNA, 25 bp, Artificial
  Probe
tatacatgtgcacaagttaaggccc

SEQ ID NO: 229076 - DNA, 25 bp, Artificial
  Probe
taaagatgcacgtgagcaatacaca

SEQ ID NO: 229077 - DNA, 25 bp, Artificial
  Probe
atgcacgtgagcaatacacacacat

SEQ ID NO: 229078 - DNA, 25 bp, Artificial
  Probe
acatatacatgtgcacaagttaagg

SEQ ID NO: 229079 - DNA, 25 bp, Artificial
  Probe
agagcgtcagccatgtcatctccta

SEQ ID NO: 229080 - DNA, 25 bp, Artificial
  Probe
agatgcacgtgagcaatacacacac

SEQ ID NO: 229081 - DNA, 25 bp, Artificial
  Probe
tgagacgctgtctcaaaaaaaaaaa

SEQ ID NO: 229082 - DNA, 25 bp, Artificial
  Probe
agcgagagcgtcagccatgtcatct

SEQ ID NO: 229083 - DNA, 25 bp, Artificial
  Probe
gcgagagcgtcagccatgtcatctc

SEQ ID NO: 229084 - DNA, 25 bp, Artificial
  Probe
agcgtcagccatgtcatctcctact

SEQ ID NO: 229085 - DNA, 25 bp, Artificial
  Probe
cacgtgagcaatacacacacataca

SEQ ID NO: 229086 - DNA, 25 bp, Artificial
  Probe
catgtgcacaagttaaggcccatat

SEQ ID NO: 229087 - DNA, 25 bp, Artificial
  Probe
atttacataaagatgcacgtgagca

SEQ ID NO: 229088 - DNA, 25 bp, Artificial
  Probe
gagcgtcagccatgtcatctcctac

SEQ ID NO: 229089 - DNA, 25 bp, Artificial
  Probe
tgatttacccttttcttttgtgtct

SEQ ID NO: 229090 - DNA, 25 bp, Artificial
  Probe
gcgtcagccatgtcatctcctactt

SEQ ID NO: 229091 - DNA, 25 bp, Artificial
  Probe
tttacataaagatgcacgtgagcaa

SEQ ID NO: 229092 - DNA, 25 bp, Artificial
  Probe
ctcctctattgccatcgttcgttta

SEQ ID NO: 229093 - DNA, 25 bp, Artificial
  Probe
tgcacgtgagcaatacacacacata

SEQ ID NO: 229094 - DNA, 25 bp, Artificial
  Probe
cgtcagccatgtcatctcctacttg

SEQ ID NO: 229095 - DNA, 25 bp, Artificial
  Probe
tcccttcgctcctcttttattttct

SEQ ID NO: 229096 - DNA, 25 bp, Artificial
  Probe
gtcagccatgtcatctcctacttgc

SEQ ID NO: 229097 - DNA, 25 bp, Artificial
  Probe
tgtgcacaagttaaggcccatattt

SEQ ID NO: 229098 - DNA, 25 bp, Artificial
  Probe
ctatttctctttcctcttagctctc

SEQ ID NO: 229099 - DNA, 25 bp, Artificial
  Probe
tatttacataaagatgcacgtgagc

SEQ ID NO: 229100 - DNA, 25 bp, Artificial
  Probe
cgttcgtttaccatctccctttgcg

SEQ ID NO: 229101 - DNA, 25 bp, Artificial
  Probe
catatacatgtgcacaagttaaggc

SEQ ID NO: 229102 - DNA, 25 bp, Artificial
  Probe
cacatatacatgtgcacaagttaag

SEQ ID NO: 229103 - DNA, 25 bp, Artificial
  Probe
cataaagatgcacgtgagcaataca

SEQ ID NO: 229104 - DNA, 25 bp, Artificial
  Probe
ctggcctccacatatacatgtgcac

SEQ ID NO: 229105 - DNA, 25 bp, Artificial
  Probe
ttcttttgtgtcttttacctcctct

SEQ ID NO: 229106 - DNA, 25 bp, Artificial
  Probe
ttacataaagatgcacgtgagcaat

SEQ ID NO: 229107 - DNA, 25 bp, Artificial
  Probe
cacccgaggttgacttctggcctcc

SEQ ID NO: 229108 - DNA, 25 bp, Artificial
  Probe
tacataaagatgcacgtgagcaata

SEQ ID NO: 229109 - DNA, 25 bp, Artificial
  Probe
gttcgtttaccatctccctttgcgt

SEQ ID NO: 229110 - DNA, 25 bp, Artificial
  Probe
ggcctccacatatacatgtgcacaa

SEQ ID NO: 229111 - DNA, 25 bp, Artificial
  Probe
tggcctccacatatacatgtgcaca

SEQ ID NO: 229112 - DNA, 25 bp, Artificial
  Probe
tacatgtgcacaagttaaggcccat

SEQ ID NO: 229113 - DNA, 25 bp, Artificial
  Probe
atacatgtgcacaagttaaggccca

SEQ ID NO: 229114 - DNA, 25 bp, Artificial
  Probe
atgtgcacaagttaaggcccatatt

SEQ ID NO: 229115 - DNA, 25 bp, Artificial
  Probe
cccatatttatatttacataaagat

SEQ ID NO: 229116 - DNA, 25 bp, Artificial
  Probe
tccacagagggtgaccctcggaagg

SEQ ID NO: 229117 - DNA, 25 bp, Artificial
  Probe
cacgtcagaaactcgggatgagaac

SEQ ID NO: 229118 - DNA, 25 bp, Artificial
  Probe
cacttctccaaaagggaagaaatgt

SEQ ID NO: 229119 - DNA, 25 bp, Artificial
  Probe
aaagctggccttttgtgtctgtgtt

SEQ ID NO: 229120 - DNA, 25 bp, Artificial
  Probe
ggacaaatgtgcttttctctatgag

SEQ ID NO: 229121 - DNA, 25 bp, Artificial
  Probe
agaagtgacagtgtcccgagtaacg

SEQ ID NO: 229122 - DNA, 25 bp, Artificial
  Probe
tgtatggcctcagttcatcacttct

SEQ ID NO: 229123 - DNA, 25 bp, Artificial
  Probe
ttctgttgaaatcatgggaacgtcc

SEQ ID NO: 229124 - DNA, 25 bp, Artificial
  Probe
ctaaaacacgacaacatttggaagg

SEQ ID NO: 229125 - DNA, 25 bp, Artificial
  Probe
agggggctctcactctaggcccctg

SEQ ID NO: 229126 - DNA, 25 bp, Artificial
  Probe
gacagtgtcccgagtaacgggcatg

SEQ ID NO: 229127 - DNA, 25 bp, Artificial
  Probe
ggcccctggcgtgacaaaggaaaag

SEQ ID NO: 229128 - DNA, 25 bp, Artificial
  Probe
tgctgaacgaattctgttgaaatca

SEQ ID NO: 229129 - DNA, 25 bp, Artificial
  Probe
cgagtaacgggcatggagcacacct

SEQ ID NO: 229130 - DNA, 25 bp, Artificial
  Probe
gctggccttttgtgtctgtgttcct

SEQ ID NO: 229131 - DNA, 25 bp, Artificial
  Probe
cctgtccaaatgagatatttttgct

SEQ ID NO: 229132 - DNA, 25 bp, Artificial
  Probe
ttgcaagtaggaacccctgtaaaag

SEQ ID NO: 229133 - DNA, 25 bp, Artificial
  Probe
acagtgttccccaagagaagtgaca

SEQ ID NO: 229134 - DNA, 25 bp, Artificial
  Probe
tcagttcatcacttctccaaaaggg

SEQ ID NO: 229135 - DNA, 25 bp, Artificial
  Probe
tgttgcaagtaggaacccctgtaaa

SEQ ID NO: 229136 - DNA, 25 bp, Artificial
  Probe
aatcatgggaacgtccagttttatt

SEQ ID NO: 229137 - DNA, 25 bp, Artificial
  Probe
actctaggcccctggcgtgacaaag

SEQ ID NO: 229138 - DNA, 25 bp, Artificial
  Probe
gagaactttgtatggcctcagttca

SEQ ID NO: 229139 - DNA, 25 bp, Artificial
  Probe
gaagtgacagtgtcccgagtaacgg

SEQ ID NO: 229140 - DNA, 25 bp, Artificial
  Probe
gaatcatttgatactcacgtcagaa

SEQ ID NO: 229141 - DNA, 25 bp, Artificial
  Probe
cagtgtcccgagtaacgggcatgga

SEQ ID NO: 229142 - DNA, 25 bp, Artificial
  Probe
tcaatgagtgttgcaagtaggaacc

SEQ ID NO: 229143 - DNA, 25 bp, Artificial
  Probe
tccccaagagaagtgacagtgtccc

SEQ ID NO: 229144 - DNA, 25 bp, Artificial
  Probe
tgagaactttgtatggcctcagttc

SEQ ID NO: 229145 - DNA, 25 bp, Artificial
  Probe
ccctggcgtgacaaaggaaaagagg

SEQ ID NO: 229146 - DNA, 25 bp, Artificial
  Probe
tgaaatcatgggaacgtccagtttt

SEQ ID NO: 229147 - DNA, 25 bp, Artificial
  Probe
acacctgtccacagagggtgaccct

SEQ ID NO: 229148 - DNA, 25 bp, Artificial
  Probe
ccctcggaagggacaaatgtgcttt

SEQ ID NO: 229149 - DNA, 25 bp, Artificial
  Probe
ggtgaccctcggaagggacaaatgt

SEQ ID NO: 229150 - DNA, 25 bp, Artificial
  Probe
agaggttcctggaatcatttgatac

SEQ ID NO: 229151 - DNA, 25 bp, Artificial
  Probe
cccctgtaaaagctggccttttgtg

SEQ ID NO: 229152 - DNA, 25 bp, Artificial
  Probe
cgaattctgttgaaatcatgggaac

SEQ ID NO: 229153 - DNA, 25 bp, Artificial
  Probe
taggaacccctgtaaaagctggcct

SEQ ID NO: 229154 - DNA, 25 bp, Artificial
  Probe
ttcctggaatcatttgatactcacg

SEQ ID NO: 229155 - DNA, 25 bp, Artificial
  Probe
ggaatcatttgatactcacgtcaga

SEQ ID NO: 229156 - DNA, 25 bp, Artificial
  Probe
tgtgtctgtgttcctgtttgcatga

SEQ ID NO: 229157 - DNA, 25 bp, Artificial
  Probe
ctttgtatggcctcagttcatcact

SEQ ID NO: 229158 - DNA, 25 bp, Artificial
  Probe
ccctgtaaaagctggccttttgtgt

SEQ ID NO: 229159 - DNA, 25 bp, Artificial
  Probe
taagactccaccagggggctctcac

SEQ ID NO: 229160 - DNA, 25 bp, Artificial
  Probe
caatgagtgttgcaagtaggaaccc

SEQ ID NO: 229161 - DNA, 25 bp, Artificial
  Probe
tactcacagtgttccccaagagaag

SEQ ID NO: 229162 - DNA, 25 bp, Artificial
  Probe
cctcaaactcagcgaggtgcaagta

SEQ ID NO: 229163 - DNA, 25 bp, Artificial
  Probe
gcaaaaagtacctctccctgaccga

SEQ ID NO: 229164 - DNA, 25 bp, Artificial
  Probe
tcaaactcagcgaggtgcaagtaaa

SEQ ID NO: 229165 - DNA, 25 bp, Artificial
  Probe
tgccctcaaactcagcgaggtgcaa

SEQ ID NO: 229166 - DNA, 25 bp, Artificial
  Probe
ccctgaccgagcgctcacagatcgc

SEQ ID NO: 229167 - DNA, 25 bp, Artificial
  Probe
ctcaaactcagcgaggtgcaagtaa

SEQ ID NO: 229168 - DNA, 25 bp, Artificial
  Probe
gcgctcacagatcgcccatgccctc

SEQ ID NO: 229169 - DNA, 25 bp, Artificial
  Probe
ctgcaaaaagtacctctccctgacc

SEQ ID NO: 229170 - DNA, 25 bp, Artificial
  Probe
tgaccgagcgctcacagatcgccca

SEQ ID NO: 229171 - DNA, 25 bp, Artificial
  Probe
atgccctcaaactcagcgaggtgca

SEQ ID NO: 229172 - DNA, 25 bp, Artificial
  Probe
aattccactgcaaaaagtacctctc

SEQ ID NO: 229173 - DNA, 25 bp, Artificial
  Probe
aactcagcgaggtgcaagtaaaaat

SEQ ID NO: 229174 - DNA, 25 bp, Artificial
  Probe
gagcgctcacagatcgcccatgccc

SEQ ID NO: 229175 - DNA, 25 bp, Artificial
  Probe
gccctcaaactcagcgaggtgcaag

SEQ ID NO: 229176 - DNA, 25 bp, Artificial
  Probe
cgagcgctcacagatcgcccatgcc

SEQ ID NO: 229177 - DNA, 25 bp, Artificial
  Probe
tgcaaaaagtacctctccctgaccg

SEQ ID NO: 229178 - DNA, 25 bp, Artificial
  Probe
ccctcaaactcagcgaggtgcaagt

SEQ ID NO: 229179 - DNA, 25 bp, Artificial
  Probe
actcagcgaggtgcaagtaaaaatc

SEQ ID NO: 229180 - DNA, 25 bp, Artificial
  Probe
agcgctcacagatcgcccatgccct

SEQ ID NO: 229181 - DNA, 25 bp, Artificial
  Probe
attccactgcaaaaagtacctctcc

SEQ ID NO: 229182 - DNA, 25 bp, Artificial
  Probe
cccatgccctcaaactcagcgaggt

SEQ ID NO: 229183 - DNA, 25 bp, Artificial
  Probe
cactgcaaaaagtacctctccctga

SEQ ID NO: 229184 - DNA, 25 bp, Artificial
  Probe
caaaaagtacctctccctgaccgag

SEQ ID NO: 229185 - DNA, 25 bp, Artificial
  Probe
ctccctgaccgagcgctcacagatc

SEQ ID NO: 229186 - DNA, 25 bp, Artificial
  Probe
gaccgagcgctcacagatcgcccat

SEQ ID NO: 229187 - DNA, 25 bp, Artificial
  Probe
catgccctcaaactcagcgaggtgc

SEQ ID NO: 229188 - DNA, 25 bp, Artificial
  Probe
tctccctgaccgagcgctcacagat

SEQ ID NO: 229189 - DNA, 25 bp, Artificial
  Probe
caaactcagcgaggtgcaagtaaaa

SEQ ID NO: 229190 - DNA, 25 bp, Artificial
  Probe
tccactgcaaaaagtacctctccct

SEQ ID NO: 229191 - DNA, 25 bp, Artificial
  Probe
ccgagcgctcacagatcgcccatgc

SEQ ID NO: 229192 - DNA, 25 bp, Artificial
  Probe
ttccactgcaaaaagtacctctccc

SEQ ID NO: 229193 - DNA, 25 bp, Artificial
  Probe
accgagcgctcacagatcgcccatg

SEQ ID NO: 229194 - DNA, 25 bp, Artificial
  Probe
aaactcagcgaggtgcaagtaaaaa

SEQ ID NO: 229195 - DNA, 25 bp, Artificial
  Probe
ccatgccctcaaactcagcgaggtg

SEQ ID NO: 229196 - DNA, 25 bp, Artificial
  Probe
ctgaccgagcgctcacagatcgccc

SEQ ID NO: 229197 - DNA, 25 bp, Artificial
  Probe
cctctccctgaccgagcgctcacag

SEQ ID NO: 229198 - DNA, 25 bp, Artificial
  Probe
ctcacagatcgcccatgccctcaaa

SEQ ID NO: 229199 - DNA, 25 bp, Artificial
  Probe
actgcaaaaagtacctctccctgac

SEQ ID NO: 229200 - DNA, 25 bp, Artificial
  Probe
tcacagatcgcccatgccctcaaac

SEQ ID NO: 229201 - DNA, 25 bp, Artificial
  Probe
cctgaccgagcgctcacagatcgcc

SEQ ID NO: 229202 - DNA, 25 bp, Artificial
  Probe
gctcacagatcgcccatgccctcaa

SEQ ID NO: 229203 - DNA, 25 bp, Artificial
  Probe
tccctgaccgagcgctcacagatcg

SEQ ID NO: 229204 - DNA, 25 bp, Artificial
  Probe
ctctccctgaccgagcgctcacaga

SEQ ID NO: 229205 - DNA, 25 bp, Artificial
  Probe
ccactgcaaaaagtacctctccctg

SEQ ID NO: 229206 - DNA, 25 bp, Artificial
  Probe
cgctcacagatcgcccatgccctca

SEQ ID NO: 229207 - DNA, 25 bp, Artificial
  Probe
tgaggtctcctccaagccctgtcgg

SEQ ID NO: 229208 - DNA, 25 bp, Artificial
  Probe
ttcgtttgaggtctcctccaagccc

SEQ ID NO: 229209 - DNA, 25 bp, Artificial
  Probe
cagcgaagagctttcaaggcttcgt

SEQ ID NO: 229210 - DNA, 25 bp, Artificial
  Probe
cgtttgaggtctcctccaagccctg

SEQ ID NO: 229211 - DNA, 25 bp, Artificial
  Probe
ctagccgcagagacaggcctcagtg

SEQ ID NO: 229212 - DNA, 25 bp, Artificial
  Probe
ttgaggtctcctccaagccctgtcg

SEQ ID NO: 229213 - DNA, 25 bp, Artificial
  Probe
tagccgcagagacaggcctcagtgt

SEQ ID NO: 229214 - DNA, 25 bp, Artificial
  Probe
acaggcctcagtgtgcgtgtggtcc

SEQ ID NO: 229215 - DNA, 25 bp, Artificial
  Probe
ccgagagacactagccgcagagaca

SEQ ID NO: 229216 - DNA, 25 bp, Artificial
  Probe
gctttcaaggcttcgtttgaggtct

SEQ ID NO: 229217 - DNA, 25 bp, Artificial
  Probe
cgaagagctttcaaggcttcgtttg

SEQ ID NO: 229218 - DNA, 25 bp, Artificial
  Probe
cacagcagcgaagagctttcaaggc

SEQ ID NO: 229219 - DNA, 25 bp, Artificial
  Probe
acacagcagcgaagagctttcaagg

SEQ ID NO: 229220 - DNA, 25 bp, Artificial
  Probe
caggcctcagtgtgcgtgtggtcca

SEQ ID NO: 229221 - DNA, 25 bp, Artificial
  Probe
agctttcaaggcttcgtttgaggtc

SEQ ID NO: 229222 - DNA, 25 bp, Artificial
  Probe
aggcttcgtttgaggtctcctccaa

SEQ ID NO: 229223 - DNA, 25 bp, Artificial
  Probe
tcaaggcttcgtttgaggtctcctc

SEQ ID NO: 229224 - DNA, 25 bp, Artificial
  Probe
ccctgtcggaaggtccgagagacac

SEQ ID NO: 229225 - DNA, 25 bp, Artificial
  Probe
aaggtccgagagacactagccgcag

SEQ ID NO: 229226 - DNA, 25 bp, Artificial
  Probe
cactagccgcagagacaggcctcag

SEQ ID NO: 229227 - DNA, 25 bp, Artificial
  Probe
tcgtttgaggtctcctccaagccct

SEQ ID NO: 229228 - DNA, 25 bp, Artificial
  Probe
agccctgtcggaaggtccgagagac

SEQ ID NO: 229229 - DNA, 25 bp, Artificial
  Probe
ctccaagccctgtcggaaggtccga

SEQ ID NO: 229230 - DNA, 25 bp, Artificial
  Probe
cttcgtttgaggtctcctccaagcc

SEQ ID NO: 229231 - DNA, 25 bp, Artificial
  Probe
gcagcgaagagctttcaaggcttcg

SEQ ID NO: 229232 - DNA, 25 bp, Artificial
  Probe
gaagagctttcaaggcttcgtttga

SEQ ID NO: 229233 - DNA, 25 bp, Artificial
  Probe
cctgtcggaaggtccgagagacact

SEQ ID NO: 229234 - DNA, 25 bp, Artificial
  Probe
gacactagccgcagagacaggcctc

SEQ ID NO: 229235 - DNA, 25 bp, Artificial
  Probe
aggtccgagagacactagccgcaga

SEQ ID NO: 229236 - DNA, 25 bp, Artificial
  Probe
cctcagtgtgcgtgtggtccaggtc

SEQ ID NO: 229237 - DNA, 25 bp, Artificial
  Probe
ggtccgagagacactagccgcagag

SEQ ID NO: 229238 - DNA, 25 bp, Artificial
  Probe
ggcttcgtttgaggtctcctccaag

SEQ ID NO: 229239 - DNA, 25 bp, Artificial
  Probe
gtttgaggtctcctccaagccctgt

SEQ ID NO: 229240 - DNA, 25 bp, Artificial
  Probe
gccctgtcggaaggtccgagagaca

SEQ ID NO: 229241 - DNA, 25 bp, Artificial
  Probe
aagccctgtcggaaggtccgagaga

SEQ ID NO: 229242 - DNA, 25 bp, Artificial
  Probe
gaaggtccgagagacactagccgca

SEQ ID NO: 229243 - DNA, 25 bp, Artificial
  Probe
ctttcaaggcttcgtttgaggtctc

SEQ ID NO: 229244 - DNA, 25 bp, Artificial
  Probe
acactagccgcagagacaggcctca

SEQ ID NO: 229245 - DNA, 25 bp, Artificial
  Probe
agcagcgaagagctttcaaggcttc

SEQ ID NO: 229246 - DNA, 25 bp, Artificial
  Probe
acagcagcgaagagctttcaaggct

SEQ ID NO: 229247 - DNA, 25 bp, Artificial
  Probe
cagagacaggcctcagtgtgcgtgt

SEQ ID NO: 229248 - DNA, 25 bp, Artificial
  Probe
tccgagagacactagccgcagagac

SEQ ID NO: 229249 - DNA, 25 bp, Artificial
  Probe
tttcaaggcttcgtttgaggtctcc

SEQ ID NO: 229250 - DNA, 25 bp, Artificial
  Probe
caaggcttcgtttgaggtctcctcc

SEQ ID NO: 229251 - DNA, 25 bp, Artificial
  Probe
aaggcttcgtttgaggtctcctcca

SEQ ID NO: 229252 - DNA, 25 bp, Artificial
  Probe
agccgcagagacaggcctcagtgtg

SEQ ID NO: 229253 - DNA, 25 bp, Artificial
  Probe
agggcgaagcttactgaggcccgag

SEQ ID NO: 229254 - DNA, 25 bp, Artificial
  Probe
gaacccactatccagacatttacac

SEQ ID NO: 229255 - DNA, 25 bp, Artificial
  Probe
gcccagagggcgaagcttactgagg

SEQ ID NO: 229256 - DNA, 25 bp, Artificial
  Probe
cgagagaacccactatccagacatt

SEQ ID NO: 229257 - DNA, 25 bp, Artificial
  Probe
atccagacatttacaccagggagga

SEQ ID NO: 229258 - DNA, 25 bp, Artificial
  Probe
ccactatccagacatttacaccagg

SEQ ID NO: 229259 - DNA, 25 bp, Artificial
  Probe
actggagcgcgctttcgagagaacc

SEQ ID NO: 229260 - DNA, 25 bp, Artificial
  Probe
gaagcttactgaggcccgagtgcag

SEQ ID NO: 229261 - DNA, 25 bp, Artificial
  Probe
agagggcgaagcttactgaggcccg

SEQ ID NO: 229262 - DNA, 25 bp, Artificial
  Probe
tatccagacatttacaccagggagg

SEQ ID NO: 229263 - DNA, 25 bp, Artificial
  Probe
gcgaagcttactgaggcccgagtgc

SEQ ID NO: 229264 - DNA, 25 bp, Artificial
  Probe
cgaagcttactgaggcccgagtgca

SEQ ID NO: 229265 - DNA, 25 bp, Artificial
  Probe
cagctggaggaactggagcgcgctt

SEQ ID NO: 229266 - DNA, 25 bp, Artificial
  Probe
gctttcgagagaacccactatccag

SEQ ID NO: 229267 - DNA, 25 bp, Artificial
  Probe
ttacaccagggaggagctggcccag

SEQ ID NO: 229268 - DNA, 25 bp, Artificial
  Probe
gaggagctggcccagagggcgaagc

SEQ ID NO: 229269 - DNA, 25 bp, Artificial
  Probe
agcgcgctttcgagagaacccacta

SEQ ID NO: 229270 - DNA, 25 bp, Artificial
  Probe
aggaactggagcgcgctttcgagag

SEQ ID NO: 229271 - DNA, 25 bp, Artificial
  Probe
atttacaccagggaggagctggccc

SEQ ID NO: 229272 - DNA, 25 bp, Artificial
  Probe
ctggagcgcgctttcgagagaaccc

SEQ ID NO: 229273 - DNA, 25 bp, Artificial
  Probe
ggagcgcgctttcgagagaacccac

SEQ ID NO: 229274 - DNA, 25 bp, Artificial
  Probe
cagagcagctggaggaactggagcg

SEQ ID NO: 229275 - DNA, 25 bp, Artificial
  Probe
ctatccagacatttacaccagggag

SEQ ID NO: 229276 - DNA, 25 bp, Artificial
  Probe
gctggcccagagggcgaagcttact

SEQ ID NO: 229277 - DNA, 25 bp, Artificial
  Probe
ggcccagagggcgaagcttactgag

SEQ ID NO: 229278 - DNA, 25 bp, Artificial
  Probe
ctttcgagagaacccactatccaga

SEQ ID NO: 229279 - DNA, 25 bp, Artificial
  Probe
actatccagacatttacaccaggga

SEQ ID NO: 229280 - DNA, 25 bp, Artificial
  Probe
gagcagctggaggaactggagcgcg

SEQ ID NO: 229281 - DNA, 25 bp, Artificial
  Probe
tggagcgcgctttcgagagaaccca

SEQ ID NO: 229282 - DNA, 25 bp, Artificial
  Probe
tccagacatttacaccagggaggag

SEQ ID NO: 229283 - DNA, 25 bp, Artificial
  Probe
cgcgctttcgagagaacccactatc

SEQ ID NO: 229284 - DNA, 25 bp, Artificial
  Probe
ttcgagagaacccactatccagaca

SEQ ID NO: 229285 - DNA, 25 bp, Artificial
  Probe
gcgctttcgagagaacccactatcc

SEQ ID NO: 229286 - DNA, 25 bp, Artificial
  Probe
aactggagcgcgctttcgagagaac

SEQ ID NO: 229287 - DNA, 25 bp, Artificial
  Probe
gagagaacccactatccagacattt

SEQ ID NO: 229288 - DNA, 25 bp, Artificial
  Probe
agggaggagctggcccagagggcga

SEQ ID NO: 229289 - DNA, 25 bp, Artificial
  Probe
gctggaggaactggagcgcgctttc

SEQ ID NO: 229290 - DNA, 25 bp, Artificial
  Probe
gcgcgctttcgagagaacccactat

SEQ ID NO: 229291 - DNA, 25 bp, Artificial
  Probe
cactatccagacatttacaccaggg

SEQ ID NO: 229292 - DNA, 25 bp, Artificial
  Probe
gagcgcgctttcgagagaacccact

SEQ ID NO: 229293 - DNA, 25 bp, Artificial
  Probe
ccagggaggagctggcccagagggc

SEQ ID NO: 229294 - DNA, 25 bp, Artificial
  Probe
ccagagggcgaagcttactgaggcc

SEQ ID NO: 229295 - DNA, 25 bp, Artificial
  Probe
tggaggaactggagcgcgctttcga

SEQ ID NO: 229296 - DNA, 25 bp, Artificial
  Probe
cgctttcgagagaacccactatcca

SEQ ID NO: 229297 - DNA, 25 bp, Artificial
  Probe
tcgagagaacccactatccagacat

SEQ ID NO: 229298 - DNA, 25 bp, Artificial
  Probe
agagaacccactatccagacattta

SEQ ID NO: 229299 - DNA, 25 bp, Artificial
  Probe
actggaagcctacttcgccatccag

SEQ ID NO: 229300 - DNA, 25 bp, Artificial
  Probe
agaaatcccaccgcgagaagctcac

SEQ ID NO: 229301 - DNA, 25 bp, Artificial
  Probe
accaagcccgagctcttcaatggcg

SEQ ID NO: 229302 - DNA, 25 bp, Artificial
  Probe
agcctacttcgccatccagccaagg

SEQ ID NO: 229303 - DNA, 25 bp, Artificial
  Probe
caccaagcccgagctcttcaatggc

SEQ ID NO: 229304 - DNA, 25 bp, Artificial
  Probe
gcccgagctcttcaatggcgcggag

SEQ ID NO: 229305 - DNA, 25 bp, Artificial
  Probe
acttcgccatccagccaaggccctc

SEQ ID NO: 229306 - DNA, 25 bp, Artificial
  Probe
cccgagctcttcaatggcgcggaga

SEQ ID NO: 229307 - DNA, 25 bp, Artificial
  Probe
ccgagctcttcaatggcgcggagaa

SEQ ID NO: 229308 - DNA, 25 bp, Artificial
  Probe
ggaagcctacttcgccatccagcca

SEQ ID NO: 229309 - DNA, 25 bp, Artificial
  Probe
agagaaatcccaccgcgagaagctc

SEQ ID NO: 229310 - DNA, 25 bp, Artificial
  Probe
ctgcaggcgtggctggaggaagcag

SEQ ID NO: 229311 - DNA, 25 bp, Artificial
  Probe
agctcttcaatggcgcggagaagaa

SEQ ID NO: 229312 - DNA, 25 bp, Artificial
  Probe
gaagcagagaaatcccaccgcgaga

SEQ ID NO: 229313 - DNA, 25 bp, Artificial
  Probe
gaagctcaccaagcccgagctcttc

SEQ ID NO: 229314 - DNA, 25 bp, Artificial
  Probe
gagaagctcaccaagcccgagctct

SEQ ID NO: 229315 - DNA, 25 bp, Artificial
  Probe
agcccgagctcttcaatggcgcgga

SEQ ID NO: 229316 - DNA, 25 bp, Artificial
  Probe
ggcgtggctggaggaagcagagaaa

SEQ ID NO: 229317 - DNA, 25 bp, Artificial
  Probe
gcgagaagctcaccaagcccgagct

SEQ ID NO: 229318 - DNA, 25 bp, Artificial
  Probe
cagagaaatcccaccgcgagaagct

SEQ ID NO: 229319 - DNA, 25 bp, Artificial
  Probe
aagctcaccaagcccgagctcttca

SEQ ID NO: 229320 - DNA, 25 bp, Artificial
  Probe
cgagaagctcaccaagcccgagctc

SEQ ID NO: 229321 - DNA, 25 bp, Artificial
  Probe
gctcactggaagcctacttcgccat

SEQ ID NO: 229322 - DNA, 25 bp, Artificial
  Probe
agcgctcactggaagcctacttcgc

SEQ ID NO: 229323 - DNA, 25 bp, Artificial
  Probe
gcgctcactggaagcctacttcgcc

SEQ ID NO: 229324 - DNA, 25 bp, Artificial
  Probe
gagctcttcaatggcgcggagaaga

SEQ ID NO: 229325 - DNA, 25 bp, Artificial
  Probe
ttcaatggcgcggagaagaagcgca

SEQ ID NO: 229326 - DNA, 25 bp, Artificial
  Probe
agcagagaaatcccaccgcgagaag

SEQ ID NO: 229327 - DNA, 25 bp, Artificial
  Probe
aatggcgcggagaagaagcgcaagc

SEQ ID NO: 229328 - DNA, 25 bp, Artificial
  Probe
tcaccaagcccgagctcttcaatgg

SEQ ID NO: 229329 - DNA, 25 bp, Artificial
  Probe
cgccatccagccaaggccctcctcg

SEQ ID NO: 229330 - DNA, 25 bp, Artificial
  Probe
ctcttcaatggcgcggagaagaagc

SEQ ID NO: 229331 - DNA, 25 bp, Artificial
  Probe
caccgcgagaagctcaccaagcccg

SEQ ID NO: 229332 - DNA, 25 bp, Artificial
  Probe
caagcccgagctcttcaatggcgcg

SEQ ID NO: 229333 - DNA, 25 bp, Artificial
  Probe
aaatcccaccgcgagaagctcacca

SEQ ID NO: 229334 - DNA, 25 bp, Artificial
  Probe
cgagctcttcaatggcgcggagaag

SEQ ID NO: 229335 - DNA, 25 bp, Artificial
  Probe
agaagctcaccaagcccgagctctt

SEQ ID NO: 229336 - DNA, 25 bp, Artificial
  Probe
catccagccaaggccctcctcggag

SEQ ID NO: 229337 - DNA, 25 bp, Artificial
  Probe
ccaagcccgagctcttcaatggcgc

SEQ ID NO: 229338 - DNA, 25 bp, Artificial
  Probe
gcgtggctggaggaagcagagaaat

SEQ ID NO: 229339 - DNA, 25 bp, Artificial
  Probe
cactggaagcctacttcgccatcca

SEQ ID NO: 229340 - DNA, 25 bp, Artificial
  Probe
aagcccgagctcttcaatggcgcgg

SEQ ID NO: 229341 - DNA, 25 bp, Artificial
  Probe
aagcgctcactggaagcctacttcg

SEQ ID NO: 229342 - DNA, 25 bp, Artificial
  Probe
tcaatggcgcggagaagaagcgcaa

SEQ ID NO: 229343 - DNA, 25 bp, Artificial
  Probe
gaagcgctcactggaagcctacttc

SEQ ID NO: 229344 - DNA, 25 bp, Artificial
  Probe
gcaggcgtggctggaggaagcagag

SEQ ID NO: 229345 - DNA, 25 bp, Artificial
  Probe
aaattcgcccgctcagatgaactga

SEQ ID NO: 229346 - DNA, 25 bp, Artificial
  Probe
gtgagtcgtggttctaaaggtacca

SEQ ID NO: 229347 - DNA, 25 bp, Artificial
  Probe
tttaaattccacatcgtggacatga

SEQ ID NO: 229348 - DNA, 25 bp, Artificial
  Probe
gagcccaagccaaagaggggaagaa

SEQ ID NO: 229349 - DNA, 25 bp, Artificial
  Probe
ctaaacgatggtgcttggtgagtcg

SEQ ID NO: 229350 - DNA, 25 bp, Artificial
  Probe
atacattaaatcagtgacctggggg

SEQ ID NO: 229351 - DNA, 25 bp, Artificial
  Probe
atcctgcctgccagaggagcccaag

SEQ ID NO: 229352 - DNA, 25 bp, Artificial
  Probe
taccactgtgactgggacggctgtg

SEQ ID NO: 229353 - DNA, 25 bp, Artificial
  Probe
gaccagatgcagtcgcaagtcccct

SEQ ID NO: 229354 - DNA, 25 bp, Artificial
  Probe
tgccttctaaaaagccattatgacg

SEQ ID NO: 229355 - DNA, 25 bp, Artificial
  Probe
aacagatggggtctgagactggatc

SEQ ID NO: 229356 - DNA, 25 bp, Artificial
  Probe
tatacgaagagttctcatctcaagg

SEQ ID NO: 229357 - DNA, 25 bp, Artificial
  Probe
aaatccgacttgaacaagactggac

SEQ ID NO: 229358 - DNA, 25 bp, Artificial
  Probe
gaccaccttgtatgctctttgcctt

SEQ ID NO: 229359 - DNA, 25 bp, Artificial
  Probe
ccagaggagcccaagccaaagaggg

SEQ ID NO: 229360 - DNA, 25 bp, Artificial
  Probe
accaaatccgacttgaacaagactg

SEQ ID NO: 229361 - DNA, 25 bp, Artificial
  Probe
tcacagaacagatggggtctgagac

SEQ ID NO: 229362 - DNA, 25 bp, Artificial
  Probe
gaggagcccagctggcaagcgctac

SEQ ID NO: 229363 - DNA, 25 bp, Artificial
  Probe
atacatggaaagaccaccttgtatg

SEQ ID NO: 229364 - DNA, 25 bp, Artificial
  Probe
cttacacatgaagaggcacttttaa

SEQ ID NO: 229365 - DNA, 25 bp, Artificial
  Probe
agcccaagccaaagaggggaagaag

SEQ ID NO: 229366 - DNA, 25 bp, Artificial
  Probe
agagctcatgccaccgggatcctgc

SEQ ID NO: 229367 - DNA, 25 bp, Artificial
  Probe
tgcttcaatgatgcaatatacatgg

SEQ ID NO: 229368 - DNA, 25 bp, Artificial
  Probe
ttcacactgtcttcccacgagggga

SEQ ID NO: 229369 - DNA, 25 bp, Artificial
  Probe
gagttctcatctcaaggcacacctg

SEQ ID NO: 229370 - DNA, 25 bp, Artificial
  Probe
cgagaaaccttaccactgtgactgg

SEQ ID NO: 229371 - DNA, 25 bp, Artificial
  Probe
gggcaccggccctttcagtgccaga

SEQ ID NO: 229372 - DNA, 25 bp, Artificial
  Probe
cgggatcctgcctgccagaggagcc

SEQ ID NO: 229373 - DNA, 25 bp, Artificial
  Probe
attgtgcttcaatgatgcaatatac

SEQ ID NO: 229374 - DNA, 25 bp, Artificial
  Probe
tcgcccgctcagatgaactgaccag

SEQ ID NO: 229375 - DNA, 25 bp, Artificial
  Probe
catgacccacactgccaggagagag

SEQ ID NO: 229376 - DNA, 25 bp, Artificial
  Probe
ttgtgactatgcaggctgtggcaaa

SEQ ID NO: 229377 - DNA, 25 bp, Artificial
  Probe
ctttcacactgtcttcccacgaggg

SEQ ID NO: 229378 - DNA, 25 bp, Artificial
  Probe
ttccaggtcggaccaccttgcctta

SEQ ID NO: 229379 - DNA, 25 bp, Artificial
  Probe
agcaattcaggtacagaacgtgttc

SEQ ID NO: 229380 - DNA, 25 bp, Artificial
  Probe
ccattatcaagagctcatgccaccg

SEQ ID NO: 229381 - DNA, 25 bp, Artificial
  Probe
cacccacacttgtgactatgcaggc

SEQ ID NO: 229382 - DNA, 25 bp, Artificial
  Probe
gagactggatcttctatcattccaa

SEQ ID NO: 229383 - DNA, 25 bp, Artificial
  Probe
ctttcagtgccagaagtgcgacagg

SEQ ID NO: 229384 - DNA, 25 bp, Artificial
  Probe
aaatcacagaacagatggggtctga

SEQ ID NO: 229385 - DNA, 25 bp, Artificial
  Probe
gggaagaccagagttcccttgaatt

SEQ ID NO: 229386 - DNA, 25 bp, Artificial
  Probe
ctgccaggagagagttcagtatttt

SEQ ID NO: 229387 - DNA, 25 bp, Artificial
  Probe
ttgccttacacatgaagaggcactt

SEQ ID NO: 229388 - DNA, 25 bp, Artificial
  Probe
ttcaggtacagaacgtgttctaata

SEQ ID NO: 229389 - DNA, 25 bp, Artificial
  Probe
caagtcagcttgtgaatggataatc

SEQ ID NO: 229390 - DNA, 25 bp, Artificial
  Probe
ccattatgacgtcagaggaagagga

SEQ ID NO: 229391 - DNA, 25 bp, Artificial
  Probe
tcctgggttcatttctttccgacct

SEQ ID NO: 229392 - DNA, 25 bp, Artificial
  Probe
agagctgtccaaagggcaaatagag

SEQ ID NO: 229393 - DNA, 25 bp, Artificial
  Probe
gctgctgctactcctggtcccagta

SEQ ID NO: 229394 - DNA, 25 bp, Artificial
  Probe
gaatgtccgggctacagtccactcg

SEQ ID NO: 229395 - DNA, 25 bp, Artificial
  Probe
tcgcacctgagcatgaagcatggat

SEQ ID NO: 229396 - DNA, 25 bp, Artificial
  Probe
gttactactcctgttcctcctgctg

SEQ ID NO: 229397 - DNA, 25 bp, Artificial
  Probe
ctctcctgggttcatttctttccga

SEQ ID NO: 229398 - DNA, 25 bp, Artificial
  Probe
tttctttccgacctttccagccagg

SEQ ID NO: 229399 - DNA, 25 bp, Artificial
  Probe
agaggcccatcctctctgaagctcg

SEQ ID NO: 229400 - DNA, 25 bp, Artificial
  Probe
gtaccaggaatgtccgggctacagt

SEQ ID NO: 229401 - DNA, 25 bp, Artificial
  Probe
tgaagagatccctccggacgtgctg

SEQ ID NO: 229402 - DNA, 25 bp, Artificial
  Probe
cgtgctgaggaacacctacttccgg

SEQ ID NO: 229403 - DNA, 25 bp, Artificial
  Probe
ggaatgcacacctgcggggaaaacc

SEQ ID NO: 229404 - DNA, 25 bp, Artificial
  Probe
ggggaaaaccacaggctgcacatcc

SEQ ID NO: 229405 - DNA, 25 bp, Artificial
  Probe
cgtcgcaagtccatctaagtgtggg

SEQ ID NO: 229406 - DNA, 25 bp, Artificial
  Probe
cctgcggggaaaaccacaggctgca

SEQ ID NO: 229407 - DNA, 25 bp, Artificial
  Probe
gcagagctgtccaaagggcaaatag

SEQ ID NO: 229408 - DNA, 25 bp, Artificial
  Probe
gctgaggaacacctacttccggtcc

SEQ ID NO: 229409 - DNA, 25 bp, Artificial
  Probe
tttccgacctttccagccaggcaga

SEQ ID NO: 229410 - DNA, 25 bp, Artificial
  Probe
ccgtcgagaatgtcgtagttactac

SEQ ID NO: 229411 - DNA, 25 bp, Artificial
  Probe
gctacagtccactcggtttcctgca

SEQ ID NO: 229412 - DNA, 25 bp, Artificial
  Probe
acacctgcggggaaaaccacaggct

SEQ ID NO: 229413 - DNA, 25 bp, Artificial
  Probe
gtagttactactcctgttcctcctg

SEQ ID NO: 229414 - DNA, 25 bp, Artificial
  Probe
cctctcctgggttcatttctttccg

SEQ ID NO: 229415 - DNA, 25 bp, Artificial
  Probe
cctcctggaatgcacacctgcgggg

SEQ ID NO: 229416 - DNA, 25 bp, Artificial
  Probe
gtcgtagttactactcctgttcctc

SEQ ID NO: 229417 - DNA, 25 bp, Artificial
  Probe
ttccgacctttccagccaggcagag

SEQ ID NO: 229418 - DNA, 25 bp, Artificial
  Probe
aatgtcgtagttactactcctgttc

SEQ ID NO: 229419 - DNA, 25 bp, Artificial
  Probe
acaggctgcacatccgtcgcaagtc

SEQ ID NO: 229420 - DNA, 25 bp, Artificial
  Probe
cacatccgtcgcaagtccatctaag

SEQ ID NO: 229421 - DNA, 25 bp, Artificial
  Probe
tggctttcctaggacaggtgtgaga

SEQ ID NO: 229422 - DNA, 25 bp, Artificial
  Probe
tcctggtcccagtaccaggaatgtc

SEQ ID NO: 229423 - DNA, 25 bp, Artificial
  Probe
catgaagcatggattccttcctttc

SEQ ID NO: 229424 - DNA, 25 bp, Artificial
  Probe
acctgagcatgaagcatggattcct

SEQ ID NO: 229425 - DNA, 25 bp, Artificial
  Probe
tttcctgcagggttgaagagatccc

SEQ ID NO: 229426 - DNA, 25 bp, Artificial
  Probe
cggacgtgctgaggaacacctactt

SEQ ID NO: 229427 - DNA, 25 bp, Artificial
  Probe
cagtccactcggtttcctgcagggt

SEQ ID NO: 229428 - DNA, 25 bp, Artificial
  Probe
tcctgcagggttgaagagatccctc

SEQ ID NO: 229429 - DNA, 25 bp, Artificial
  Probe
agatccctccggacgtgctgaggaa

SEQ ID NO: 229430 - DNA, 25 bp, Artificial
  Probe
tgctactcctggtcccagtaccagg

SEQ ID NO: 229431 - DNA, 25 bp, Artificial
  Probe
tgaagctcgcacctgagcatgaagc

SEQ ID NO: 229432 - DNA, 25 bp, Artificial
  Probe
cacaggctgcacatccgtcgcaagt

SEQ ID NO: 229433 - DNA, 25 bp, Artificial
  Probe
gaagcatggattccttcctttctcc

SEQ ID NO: 229434 - DNA, 25 bp, Artificial
  Probe
tcggtttcctgcagggttgaagaga

SEQ ID NO: 229435 - DNA, 25 bp, Artificial
  Probe
aatagaggcccatcctctctgaagc

SEQ ID NO: 229436 - DNA, 25 bp, Artificial
  Probe
tgtccaaagggcaaatagaggccca

SEQ ID NO: 229437 - DNA, 25 bp, Artificial
  Probe
ctttggacccccatgtgaagcttat

SEQ ID NO: 229438 - DNA, 25 bp, Artificial
  Probe
agtggcattgcttgcttaaaggttc

SEQ ID NO: 229439 - DNA, 25 bp, Artificial
  Probe
ctgtaaaatcacaatgttaacggca

SEQ ID NO: 229440 - DNA, 25 bp, Artificial
  Probe
ttggttcgtggaaccccagtaagag

SEQ ID NO: 229441 - DNA, 25 bp, Artificial
  Probe
cacatggcggttgaatcttaaggtt

SEQ ID NO: 229442 - DNA, 25 bp, Artificial
  Probe
gtcatagttgcagaatcccaaacta

SEQ ID NO: 229443 - DNA, 25 bp, Artificial
  Probe
attctgtgggttttgaaatctagcc

SEQ ID NO: 229444 - DNA, 25 bp, Artificial
  Probe
ccatcaccagaggtgccactgtgac

SEQ ID NO: 229445 - DNA, 25 bp, Artificial
  Probe
caacgttttcttagctttgatttga

SEQ ID NO: 229446 - DNA, 25 bp, Artificial
  Probe
ccagaggtgccactgtgactcgagg

SEQ ID NO: 229447 - DNA, 25 bp, Artificial
  Probe
cagtttctagaattgtcctacttga

SEQ ID NO: 229448 - DNA, 25 bp, Artificial
  Probe
gtgccaccatgtaaaagtgagctca

SEQ ID NO: 229449 - DNA, 25 bp, Artificial
  Probe
tgaggcaccccgtaaagtcatagtt

SEQ ID NO: 229450 - DNA, 25 bp, Artificial
  Probe
ccacctgttcccagaggacgtggtg

SEQ ID NO: 229451 - DNA, 25 bp, Artificial
  Probe
gtaccagacatgatggatgatatct

SEQ ID NO: 229452 - DNA, 25 bp, Artificial
  Probe
agcacatggcggttgaatcttaagg

SEQ ID NO: 229453 - DNA, 25 bp, Artificial
  Probe
cattctgtgggttttgaaatctagc

SEQ ID NO: 229454 - DNA, 25 bp, Artificial
  Probe
actaggctacatttcaaaattcagg

SEQ ID NO: 229455 - DNA, 25 bp, Artificial
  Probe
ttgatttgaggcaccccgtaaagtc

SEQ ID NO: 229456 - DNA, 25 bp, Artificial
  Probe
tgaagtctttggacccccatgtgaa

SEQ ID NO: 229457 - DNA, 25 bp, Artificial
  Probe
taaaggcttgtcaacgttttcttag

SEQ ID NO: 229458 - DNA, 25 bp, Artificial
  Probe
cttatgctcttatggcccatgctat

SEQ ID NO: 229459 - DNA, 25 bp, Artificial
  Probe
gcccatgctatggaagaagtcaaga

SEQ ID NO: 229460 - DNA, 25 bp, Artificial
  Probe
ggttttgaaatctagccccagacat

SEQ ID NO: 229461 - DNA, 25 bp, Artificial
  Probe
gcagaatcccaaactaggctacatt

SEQ ID NO: 229462 - DNA, 25 bp, Artificial
  Probe
aaattcagggctgcttaagctgtaa

SEQ ID NO: 229463 - DNA, 25 bp, Artificial
  Probe
cattgcttgcttaaaggttctgaag

SEQ ID NO: 229464 - DNA, 25 bp, Artificial
  Probe
gccaggagcagtttctagaattgtc

SEQ ID NO: 229465 - DNA, 25 bp, Artificial
  Probe
gagctcagatgtctctaaaaacatt

SEQ ID NO: 229466 - DNA, 25 bp, Artificial
  Probe
cctgttcccagaggacgtggtgttg

SEQ ID NO: 229467 - DNA, 25 bp, Artificial
  Probe
acatttcctttaaaagcacatggcg

SEQ ID NO: 229468 - DNA, 25 bp, Artificial
  Probe
gttttgaaatctagccccagacata

SEQ ID NO: 229469 - DNA, 25 bp, Artificial
  Probe
tttaaaagcacatggcggttgaatc

SEQ ID NO: 229470 - DNA, 25 bp, Artificial
  Probe
aaatctagccccagacatactgtgt

SEQ ID NO: 229471 - DNA, 25 bp, Artificial
  Probe
ccccgtaaagtcatagttgcagaat

SEQ ID NO: 229472 - DNA, 25 bp, Artificial
  Probe
agctgtaaaatcacaatgttaacgg

SEQ ID NO: 229473 - DNA, 25 bp, Artificial
  Probe
gtattcagagaatacctttgcctcc

SEQ ID NO: 229474 - DNA, 25 bp, Artificial
  Probe
ctgaaccctctcgtggtcgtggggt

SEQ ID NO: 229475 - DNA, 25 bp, Artificial
  Probe
gggctgcttaagctgtaaaatcaca

SEQ ID NO: 229476 - DNA, 25 bp, Artificial
  Probe
caagaaatttctagtaccagacatg

SEQ ID NO: 229477 - DNA, 25 bp, Artificial
  Probe
aggggtgctccaacaccgagagctc

SEQ ID NO: 229478 - DNA, 25 bp, Artificial
  Probe
aaagtgagctcagatgtctctaaaa

SEQ ID NO: 229479 - DNA, 25 bp, Artificial
  Probe
gatggatgatatctgccaggagcag

SEQ ID NO: 229480 - DNA, 25 bp, Artificial
  Probe
ctcttatggcccatgctatggaaga

SEQ ID NO: 229481 - DNA, 25 bp, Artificial
  Probe
ggacagctggtattcagagaatacc

SEQ ID NO: 229482 - DNA, 25 bp, Artificial
  Probe
atttcaaaattcagggctgcttaag

SEQ ID NO: 229483 - DNA, 25 bp, Artificial
  Probe
ggggcactgcagttcaacagccaca

SEQ ID NO: 229484 - DNA, 25 bp, Artificial
  Probe
ctgggtactgcgtggcaacctttat

SEQ ID NO: 229485 - DNA, 25 bp, Artificial
  Probe
agttcaacagccacacgctgcatca

SEQ ID NO: 229486 - DNA, 25 bp, Artificial
  Probe
ggtctcatcgaggtggtgagaaact

SEQ ID NO: 229487 - DNA, 25 bp, Artificial
  Probe
aagatgacggacagctgtttcatat

SEQ ID NO: 229488 - DNA, 25 bp, Artificial
  Probe
accatcatgcagattcagtgcaaag

SEQ ID NO: 229489 - DNA, 25 bp, Artificial
  Probe
tgaccttcgcatgctaccttatggc

SEQ ID NO: 229490 - DNA, 25 bp, Artificial
  Probe
caacagcaacatcatggtgaaagat

SEQ ID NO: 229491 - DNA, 25 bp, Artificial
  Probe
gtgagaaactctcacaccatcatgc

SEQ ID NO: 229492 - DNA, 25 bp, Artificial
  Probe
tatccattggggactgtgtgggtct

SEQ ID NO: 229493 - DNA, 25 bp, Artificial
  Probe
atctggcaaaaccaaggccttgacc

SEQ ID NO: 229494 - DNA, 25 bp, Artificial
  Probe
tggtgagaaactctcacaccatcat

SEQ ID NO: 229495 - DNA, 25 bp, Artificial
  Probe
agattcagtgcaaaggaggcctgaa

SEQ ID NO: 229496 - DNA, 25 bp, Artificial
  Probe
aaaccaaggccttgaccttcgcatg

SEQ ID NO: 229497 - DNA, 25 bp, Artificial
  Probe
ctcatcgaggtggtgagaaactctc

SEQ ID NO: 229498 - DNA, 25 bp, Artificial
  Probe
acccttcagatcatccgaatcatgg

SEQ ID NO: 229499 - DNA, 25 bp, Artificial
  Probe
agaacatctggcaaaaccaaggcct

SEQ ID NO: 229500 - DNA, 25 bp, Artificial
  Probe
tgttacaaggcgtacctagcaattc

SEQ ID NO: 229501 - DNA, 25 bp, Artificial
  Probe
ctcacaccatcatgcagattcagtg

SEQ ID NO: 229502 - DNA, 25 bp, Artificial
  Probe
ctgtctatccattggggactgtgtg

SEQ ID NO: 229503 - DNA, 25 bp, Artificial
  Probe
cactttttggatcacaagaagaaaa

SEQ ID NO: 229504 - DNA, 25 bp, Artificial
  Probe
cattggggactgtgtgggtctcatc

SEQ ID NO: 229505 - DNA, 25 bp, Artificial
  Probe
actgcagttcaacagccacacgctg

SEQ ID NO: 229506 - DNA, 25 bp, Artificial
  Probe
caacatcatggtgaaagatgacgga

SEQ ID NO: 229507 - DNA, 25 bp, Artificial
  Probe
agattttgggcactttttggatcac

SEQ ID NO: 229508 - DNA, 25 bp, Artificial
  Probe
tcctgcgctgggtactgcgtggcaa

SEQ ID NO: 229509 - DNA, 25 bp, Artificial
  Probe
cggacagctgtttcatatagatttt

SEQ ID NO: 229510 - DNA, 25 bp, Artificial
  Probe
ttggagaccggcacaacagcaacat

SEQ ID NO: 229511 - DNA, 25 bp, Artificial
  Probe
cacaaagaccagagagtttgagagg

SEQ ID NO: 229512 - DNA, 25 bp, Artificial
  Probe
cttacggcaagacatgttaaccctt

SEQ ID NO: 229513 - DNA, 25 bp, Artificial
  Probe
tcttgggaattggagaccggcacaa

SEQ ID NO: 229514 - DNA, 25 bp, Artificial
  Probe
gcaagacatgttaacccttcagatc

SEQ ID NO: 229515 - DNA, 25 bp, Artificial
  Probe
gtactgcgtggcaacctttatcttg

SEQ ID NO: 229516 - DNA, 25 bp, Artificial
  Probe
tcatggagaacatctggcaaaacca

SEQ ID NO: 229517 - DNA, 25 bp, Artificial
  Probe
tgttcactcggtcctgcgctgggta

SEQ ID NO: 229518 - DNA, 25 bp, Artificial
  Probe
gatatatgatgcagccattgacctg

SEQ ID NO: 229519 - DNA, 25 bp, Artificial
  Probe
cagtggctcaaggacaagaacaagg

SEQ ID NO: 229520 - DNA, 25 bp, Artificial
  Probe
caacctttatcttgggaattggaga

SEQ ID NO: 229521 - DNA, 25 bp, Artificial
  Probe
caagagtacacaaagaccagagagt

SEQ ID NO: 229522 - DNA, 25 bp, Artificial
  Probe
catgctaccttatggctgtctatcc

SEQ ID NO: 229523 - DNA, 25 bp, Artificial
  Probe
tggagaccggcacaacagcaacatc

SEQ ID NO: 229524 - DNA, 25 bp, Artificial
  Probe
gctataaacgggaacgtgtgccgtt

SEQ ID NO: 229525 - DNA, 25 bp, Artificial
  Probe
ctgtttcatatagattttgggcact

SEQ ID NO: 229526 - DNA, 25 bp, Artificial
  Probe
atccgaatcatggagaacatctggc

SEQ ID NO: 229527 - DNA, 25 bp, Artificial
  Probe
gaatcatggagaacatctggcaaaa

SEQ ID NO: 229528 - DNA, 25 bp, Artificial
  Probe
acagccacacgctgcatcagtggct

SEQ ID NO: 229529 - DNA, 25 bp, Artificial
  Probe
agctttgcttgcagccttccaatct

SEQ ID NO: 229530 - DNA, 25 bp, Artificial
  Probe
tatagtgtttcagttctgtgtctac

SEQ ID NO: 229531 - DNA, 25 bp, Artificial
  Probe
gattgcacctctgtaagctatttct

SEQ ID NO: 229532 - DNA, 25 bp, Artificial
  Probe
ttgcttgcagccttccaatctatgt

SEQ ID NO: 229533 - DNA, 25 bp, Artificial
  Probe
tattgtgcactgatttgaccattgt

SEQ ID NO: 229534 - DNA, 25 bp, Artificial
  Probe
gaccattgtgaaattctccttcagt

SEQ ID NO: 229535 - DNA, 25 bp, Artificial
  Probe
tatttctaatgctacaagaatgctg

SEQ ID NO: 229536 - DNA, 25 bp, Artificial
  Probe
cagaggccactagagaatgtattgt

SEQ ID NO: 229537 - DNA, 25 bp, Artificial
  Probe
ccttcagtgtaagtgcattcccaat

SEQ ID NO: 229538 - DNA, 25 bp, Artificial
  Probe
atctgttttgtacataaatgtgcca

SEQ ID NO: 229539 - DNA, 25 bp, Artificial
  Probe
tgttttaacctggactctcttttga

SEQ ID NO: 229540 - DNA, 25 bp, Artificial
  Probe
aatctgttttgtacataaatgtgcc

SEQ ID NO: 229541 - DNA, 25 bp, Artificial
  Probe
cagttctgtgtctacagtgtgtaat

SEQ ID NO: 229542 - DNA, 25 bp, Artificial
  Probe
taaagggtggtcagaggccactaga

SEQ ID NO: 229543 - DNA, 25 bp, Artificial
  Probe
tcagtgtaagtgcattcccaataaa

SEQ ID NO: 229544 - DNA, 25 bp, Artificial
  Probe
tttgtacataaatgtgccaacagct

SEQ ID NO: 229545 - DNA, 25 bp, Artificial
  Probe
tttcatggagtgctttgtagcaggc

SEQ ID NO: 229546 - DNA, 25 bp, Artificial
  Probe
ctgttttgtacataaatgtgccaac

SEQ ID NO: 229547 - DNA, 25 bp, Artificial
  Probe
ttgtagcaggcattacaagtaatct

SEQ ID NO: 229548 - DNA, 25 bp, Artificial
  Probe
caagaaattctgtcagtgtataaac

SEQ ID NO: 229549 - DNA, 25 bp, Artificial
  Probe
tctgtggcatgattatgcattctgt

SEQ ID NO: 229550 - DNA, 25 bp, Artificial
  Probe
gtaagtcattttaaccgaatgttca

SEQ ID NO: 229551 - DNA, 25 bp, Artificial
  Probe
taaatgtgccaacagcttgatggtg

SEQ ID NO: 229552 - DNA, 25 bp, Artificial
  Probe
tgctacaagaatgctgtgaagtgtc

SEQ ID NO: 229553 - DNA, 25 bp, Artificial
  Probe
atgtagcctgacaagaaattctgtc

SEQ ID NO: 229554 - DNA, 25 bp, Artificial
  Probe
tttgtagcaggcattacaagtaatc

SEQ ID NO: 229555 - DNA, 25 bp, Artificial
  Probe
gtagtattgtgcactgatttgacca

SEQ ID NO: 229556 - DNA, 25 bp, Artificial
  Probe
tggagtgctttgtagcaggcattac

SEQ ID NO: 229557 - DNA, 25 bp, Artificial
  Probe
caacagcttgatggtggcgtttttg

SEQ ID NO: 229558 - DNA, 25 bp, Artificial
  Probe
ctaatgctacaagaatgctgtgaag

SEQ ID NO: 229559 - DNA, 25 bp, Artificial
  Probe
ctacaagaatgctgtgaagtgtcat

SEQ ID NO: 229560 - DNA, 25 bp, Artificial
  Probe
ataatagctttgcttgcagccttcc

SEQ ID NO: 229561 - DNA, 25 bp, Artificial
  Probe
gccttccaatctatgttggtttacc

SEQ ID NO: 229562 - DNA, 25 bp, Artificial
  Probe
atataatagctttgcttgcagcctt

SEQ ID NO: 229563 - DNA, 25 bp, Artificial
  Probe
cataaatgtgccaacagcttgatgg

SEQ ID NO: 229564 - DNA, 25 bp, Artificial
  Probe
gcttgcagccttccaatctatgttg

SEQ ID NO: 229565 - DNA, 25 bp, Artificial
  Probe
catggagtgctttgtagcaggcatt

SEQ ID NO: 229566 - DNA, 25 bp, Artificial
  Probe
agtgtaagtgcattcccaataaaat

SEQ ID NO: 229567 - DNA, 25 bp, Artificial
  Probe
tggtcagaggccactagagaatgta

SEQ ID NO: 229568 - DNA, 25 bp, Artificial
  Probe
gttttaacctggactctcttttgat

SEQ ID NO: 229569 - DNA, 25 bp, Artificial
  Probe
ttgtgaaattctccttcagtgtaag

SEQ ID NO: 229570 - DNA, 25 bp, Artificial
  Probe
gtgctttgtagcaggcattacaagt

SEQ ID NO: 229571 - DNA, 25 bp, Artificial
  Probe
aatgatgtagcctgacaagaaattc

SEQ ID NO: 229572 - DNA, 25 bp, Artificial
  Probe
gatttgaccattgtgaaattctcct

SEQ ID NO: 229573 - DNA, 25 bp, Artificial
  Probe
tgtacataaatgtgccaacagcttg

SEQ ID NO: 229574 - DNA, 25 bp, Artificial
  Probe
ttatctgtggcatgattatgcattc

SEQ ID NO: 229575 - DNA, 25 bp, Artificial
  Probe
tctatccagatgacgttaatatctt

SEQ ID NO: 229576 - DNA, 25 bp, Artificial
  Probe
gttaatatctttccatcccgcctag

SEQ ID NO: 229577 - DNA, 25 bp, Artificial
  Probe
aaaatctatccagatgacgttaata

SEQ ID NO: 229578 - DNA, 25 bp, Artificial
  Probe
ctatccagatgacgttaatatcttt

SEQ ID NO: 229579 - DNA, 25 bp, Artificial
  Probe
aatgggagagagctgggggccctgg

SEQ ID NO: 229580 - DNA, 25 bp, Artificial
  Probe
tcccgcctagctaccactgatctgc

SEQ ID NO: 229581 - DNA, 25 bp, Artificial
  Probe
gagagctgggggccctggaggaatg

SEQ ID NO: 229582 - DNA, 25 bp, Artificial
  Probe
ggggccctggaggaatgaaaaatct

SEQ ID NO: 229583 - DNA, 25 bp, Artificial
  Probe
gctgggggccctggaggaatgaaaa

SEQ ID NO: 229584 - DNA, 25 bp, Artificial
  Probe
taatatctttccatcccgcctagct

SEQ ID NO: 229585 - DNA, 25 bp, Artificial
  Probe
ctaccactgatctgcacccaaacct

SEQ ID NO: 229586 - DNA, 25 bp, Artificial
  Probe
ctagctaccactgatctgcacccaa

SEQ ID NO: 229587 - DNA, 25 bp, Artificial
  Probe
gagagagctgggggccctggaggaa

SEQ ID NO: 229588 - DNA, 25 bp, Artificial
  Probe
cactgatctgcacccaaacctgagc

SEQ ID NO: 229589 - DNA, 25 bp, Artificial
  Probe
tatccagatgacgttaatatctttc

SEQ ID NO: 229590 - DNA, 25 bp, Artificial
  Probe
tgaactaaaaggtggctgtgaaatg

SEQ ID NO: 229591 - DNA, 25 bp, Artificial
  Probe
ggagagagctgggggccctggagga

SEQ ID NO: 229592 - DNA, 25 bp, Artificial
  Probe
ccactgatctgcacccaaacctgag

SEQ ID NO: 229593 - DNA, 25 bp, Artificial
  Probe
tgggggccctggaggaatgaaaaat

SEQ ID NO: 229594 - DNA, 25 bp, Artificial
  Probe
atctgcacccaaacctgagctccta

SEQ ID NO: 229595 - DNA, 25 bp, Artificial
  Probe
ctgatctgcacccaaacctgagctc

SEQ ID NO: 229596 - DNA, 25 bp, Artificial
  Probe
acgttaatatctttccatcccgcct

SEQ ID NO: 229597 - DNA, 25 bp, Artificial
  Probe
gcacccaaacctgagctcctagcag

SEQ ID NO: 229598 - DNA, 25 bp, Artificial
  Probe
agagctgggggccctggaggaatga

SEQ ID NO: 229599 - DNA, 25 bp, Artificial
  Probe
cctagctaccactgatctgcaccca

SEQ ID NO: 229600 - DNA, 25 bp, Artificial
  Probe
gacgttaatatctttccatcccgcc

SEQ ID NO: 229601 - DNA, 25 bp, Artificial
  Probe
agctgggggccctggaggaatgaaa

SEQ ID NO: 229602 - DNA, 25 bp, Artificial
  Probe
aaatgggagagagctgggggccctg

SEQ ID NO: 229603 - DNA, 25 bp, Artificial
  Probe
tgaaaaatctatccagatgacgtta

SEQ ID NO: 229604 - DNA, 25 bp, Artificial
  Probe
aatctatccagatgacgttaatatc

SEQ ID NO: 229605 - DNA, 25 bp, Artificial
  Probe
aaaaatctatccagatgacgttaat

SEQ ID NO: 229606 - DNA, 25 bp, Artificial
  Probe
acccaaacctgagctcctagcagcc

SEQ ID NO: 229607 - DNA, 25 bp, Artificial
  Probe
aaaggtggctgtgaaatgggagaga

SEQ ID NO: 229608 - DNA, 25 bp, Artificial
  Probe
tgcacccaaacctgagctcctagca

SEQ ID NO: 229609 - DNA, 25 bp, Artificial
  Probe
aatatctttccatcccgcctagcta

SEQ ID NO: 229610 - DNA, 25 bp, Artificial
  Probe
gcctagctaccactgatctgcaccc

SEQ ID NO: 229611 - DNA, 25 bp, Artificial
  Probe
atgaaaaatctatccagatgacgtt

SEQ ID NO: 229612 - DNA, 25 bp, Artificial
  Probe
ccaaacctgagctcctagcagccac

SEQ ID NO: 229613 - DNA, 25 bp, Artificial
  Probe
taaaaggtggctgtgaaatgggaga

SEQ ID NO: 229614 - DNA, 25 bp, Artificial
  Probe
aatgaaaaatctatccagatgacgt

SEQ ID NO: 229615 - DNA, 25 bp, Artificial
  Probe
atcccgcctagctaccactgatctg

SEQ ID NO: 229616 - DNA, 25 bp, Artificial
  Probe
agctaccactgatctgcacccaaac

SEQ ID NO: 229617 - DNA, 25 bp, Artificial
  Probe
gatctgcacccaaacctgagctcct

SEQ ID NO: 229618 - DNA, 25 bp, Artificial
  Probe
taccactgatctgcacccaaacctg

SEQ ID NO: 229619 - DNA, 25 bp, Artificial
  Probe
gaaaaatctatccagatgacgttaa

SEQ ID NO: 229620 - DNA, 25 bp, Artificial
  Probe
gaactaaaaggtggctgtgaaatgg

SEQ ID NO: 229621 - DNA, 25 bp, Artificial
  Probe
tctgccttgtagaggtactgttgat

SEQ ID NO: 229622 - DNA, 25 bp, Artificial
  Probe
cacgaggcccttaccagggtaggct

SEQ ID NO: 229623 - DNA, 25 bp, Artificial
  Probe
agatgtttcctctgcaggagggttc

SEQ ID NO: 229624 - DNA, 25 bp, Artificial
  Probe
ctgccttgtagaggtactgttgatt

SEQ ID NO: 229625 - DNA, 25 bp, Artificial
  Probe
gagatgtttcctctgcaggagggtt

SEQ ID NO: 229626 - DNA, 25 bp, Artificial
  Probe
tctgcaggagggttctgccttgtag

SEQ ID NO: 229627 - DNA, 25 bp, Artificial
  Probe
ccctgtagttttctggctagaaagt

SEQ ID NO: 229628 - DNA, 25 bp, Artificial
  Probe
cttttgttgtacagtcagtactata

SEQ ID NO: 229629 - DNA, 25 bp, Artificial
  Probe
tagaggtaccctgtagttttctggc

SEQ ID NO: 229630 - DNA, 25 bp, Artificial
  Probe
agttgagatgtttcctctgcaggag

SEQ ID NO: 229631 - DNA, 25 bp, Artificial
  Probe
gttgtacagtcagtactataaaatc

SEQ ID NO: 229632 - DNA, 25 bp, Artificial
  Probe
tgcccgtagaggtaccctgtagttt

SEQ ID NO: 229633 - DNA, 25 bp, Artificial
  Probe
aggtactgttgattcaggactgtgc

SEQ ID NO: 229634 - DNA, 25 bp, Artificial
  Probe
tactgttgattcaggactgtgcccg

SEQ ID NO: 229635 - DNA, 25 bp, Artificial
  Probe
gtagaggtaccctgtagttttctgg

SEQ ID NO: 229636 - DNA, 25 bp, Artificial
  Probe
gttgattcaggactgtgcccgtaga

SEQ ID NO: 229637 - DNA, 25 bp, Artificial
  Probe
aggtaccctgtagttttctggctag

SEQ ID NO: 229638 - DNA, 25 bp, Artificial
  Probe
actgtgcccgtagaggtaccctgta

SEQ ID NO: 229639 - DNA, 25 bp, Artificial
  Probe
gtgcccgtagaggtaccctgtagtt

SEQ ID NO: 229640 - DNA, 25 bp, Artificial
  Probe
gattcaggactgtgcccgtagaggt

SEQ ID NO: 229641 - DNA, 25 bp, Artificial
  Probe
ggactgtgcccgtagaggtaccctg

SEQ ID NO: 229642 - DNA, 25 bp, Artificial
  Probe
ccttgtagaggtactgttgattcag

SEQ ID NO: 229643 - DNA, 25 bp, Artificial
  Probe
ttcctctgcaggagggttctgcctt

SEQ ID NO: 229644 - DNA, 25 bp, Artificial
  Probe
gccttgtagaggtactgttgattca

SEQ ID NO: 229645 - DNA, 25 bp, Artificial
  Probe
ttgattcaggactgtgcccgtagag

SEQ ID NO: 229646 - DNA, 25 bp, Artificial
  Probe
gaggcccttaccagggtaggctttg

SEQ ID NO: 229647 - DNA, 25 bp, Artificial
  Probe
gttgagatgtttcctctgcaggagg

SEQ ID NO: 229648 - DNA, 25 bp, Artificial
  Probe
tgccttgtagaggtactgttgattc

SEQ ID NO: 229649 - DNA, 25 bp, Artificial
  Probe
tgtacagtcagtactataaaatctg

SEQ ID NO: 229650 - DNA, 25 bp, Artificial
  Probe
ttctgccttgtagaggtactgttga

SEQ ID NO: 229651 - DNA, 25 bp, Artificial
  Probe
taccctgtagttttctggctagaaa

SEQ ID NO: 229652 - DNA, 25 bp, Artificial
  Probe
ggttctgccttgtagaggtactgtt

SEQ ID NO: 229653 - DNA, 25 bp, Artificial
  Probe
agaggtaccctgtagttttctggct

SEQ ID NO: 229654 - DNA, 25 bp, Artificial
  Probe
gaggtaccctgtagttttctggcta

SEQ ID NO: 229655 - DNA, 25 bp, Artificial
  Probe
accagggtaggctttgaagacagca

SEQ ID NO: 229656 - DNA, 25 bp, Artificial
  Probe
ctgcaggagggttctgccttgtaga

SEQ ID NO: 229657 - DNA, 25 bp, Artificial
  Probe
actgttgattcaggactgtgcccgt

SEQ ID NO: 229658 - DNA, 25 bp, Artificial
  Probe
ggtactgttgattcaggactgtgcc

SEQ ID NO: 229659 - DNA, 25 bp, Artificial
  Probe
gtaccctgtagttttctggctagaa

SEQ ID NO: 229660 - DNA, 25 bp, Artificial
  Probe
gggttctgccttgtagaggtactgt

SEQ ID NO: 229661 - DNA, 25 bp, Artificial
  Probe
tgtgcccgtagaggtaccctgtagt

SEQ ID NO: 229662 - DNA, 25 bp, Artificial
  Probe
gactgtgcccgtagaggtaccctgt

SEQ ID NO: 229663 - DNA, 25 bp, Artificial
  Probe
gagggttctgccttgtagaggtact

SEQ ID NO: 229664 - DNA, 25 bp, Artificial
  Probe
cagttgagatgtttcctctgcagga

SEQ ID NO: 229665 - DNA, 25 bp, Artificial
  Probe
ctgttgattcaggactgtgcccgta

SEQ ID NO: 229666 - DNA, 25 bp, Artificial
  Probe
tgagatgtttcctctgcaggagggt

SEQ ID NO: 229667 - DNA, 25 bp, Artificial
  Probe
agggggcctacatgcacccaggtgt

SEQ ID NO: 229668 - DNA, 25 bp, Artificial
  Probe
gccctcggagaaggagagcaagctc

SEQ ID NO: 229669 - DNA, 25 bp, Artificial
  Probe
cctgttttccactgaagtctaaaag

SEQ ID NO: 229670 - DNA, 25 bp, Artificial
  Probe
gagtcagtcatctcattaaagaggc

SEQ ID NO: 229671 - DNA, 25 bp, Artificial
  Probe
atgcacccaggtgtggtccgcaagc

SEQ ID NO: 229672 - DNA, 25 bp, Artificial
  Probe
caagagacagagcatcctgttttcc

SEQ ID NO: 229673 - DNA, 25 bp, Artificial
  Probe
gacccttcttgtggtgtaacctagc

SEQ ID NO: 229674 - DNA, 25 bp, Artificial
  Probe
cggaaacctgtgacaagagaaccca

SEQ ID NO: 229675 - DNA, 25 bp, Artificial
  Probe
gcatcctgttttccactgaagtcta

SEQ ID NO: 229676 - DNA, 25 bp, Artificial
  Probe
tccctagaggtcatgtcccaggtcc

SEQ ID NO: 229677 - DNA, 25 bp, Artificial
  Probe
ggaatgagacccttcttgtggtgta

SEQ ID NO: 229678 - DNA, 25 bp, Artificial
  Probe
ctaaaagcctggagtcagtcatctc

SEQ ID NO: 229679 - DNA, 25 bp, Artificial
  Probe
tgccaagagacaagtacccaaagca

SEQ ID NO: 229680 - DNA, 25 bp, Artificial
  Probe
ctgaagtctaaaagcctggagtcag

SEQ ID NO: 229681 - DNA, 25 bp, Artificial
  Probe
agtctaaaagcctggagtcagtcat

SEQ ID NO: 229682 - DNA, 25 bp, Artificial
  Probe
gaatgacccggaaacctgtgacaag

SEQ ID NO: 229683 - DNA, 25 bp, Artificial
  Probe
cccttcttgtggtgtaacctagcca

SEQ ID NO: 229684 - DNA, 25 bp, Artificial
  Probe
aagcaaaagccaagggggcctacat

SEQ ID NO: 229685 - DNA, 25 bp, Artificial
  Probe
agcccatcaccatgactgacagctg

SEQ ID NO: 229686 - DNA, 25 bp, Artificial
  Probe
aaggagagcaagctccctgctaacc

SEQ ID NO: 229687 - DNA, 25 bp, Artificial
  Probe
ccaagggggcctacatgcacccagg

SEQ ID NO: 229688 - DNA, 25 bp, Artificial
  Probe
gccaagggggcctacatgcacccag

SEQ ID NO: 229689 - DNA, 25 bp, Artificial
  Probe
aggagagcaagctccctgctaaccc

SEQ ID NO: 229690 - DNA, 25 bp, Artificial
  Probe
tccactgaagtctaaaagcctggag

SEQ ID NO: 229691 - DNA, 25 bp, Artificial
  Probe
gacagagcatcctgttttccactga

SEQ ID NO: 229692 - DNA, 25 bp, Artificial
  Probe
agaatgacccggaaacctgtgacaa

SEQ ID NO: 229693 - DNA, 25 bp, Artificial
  Probe
caggctggccccagactgtaccttt

SEQ ID NO: 229694 - DNA, 25 bp, Artificial
  Probe
ttcggccctcggagaaggagagcaa

SEQ ID NO: 229695 - DNA, 25 bp, Artificial
  Probe
actgacagctggtccctagaggtca

SEQ ID NO: 229696 - DNA, 25 bp, Artificial
  Probe
caagtacccaaagcaaaagccaagg

SEQ ID NO: 229697 - DNA, 25 bp, Artificial
  Probe
gacccggaaacctgtgacaagagaa

SEQ ID NO: 229698 - DNA, 25 bp, Artificial
  Probe
aaagcctggagtcagtcatctcatt

SEQ ID NO: 229699 - DNA, 25 bp, Artificial
  Probe
cacccacggagttgggaatgagacc

SEQ ID NO: 229700 - DNA, 25 bp, Artificial
  Probe
gtggtgtaacctagccattccgaag

SEQ ID NO: 229701 - DNA, 25 bp, Artificial
  Probe
atcaccatgactgacagctggtccc

SEQ ID NO: 229702 - DNA, 25 bp, Artificial
  Probe
tctgccaagagacaagtacccaaag

SEQ ID NO: 229703 - DNA, 25 bp, Artificial
  Probe
gagacagagcatcctgttttccact

SEQ ID NO: 229704 - DNA, 25 bp, Artificial
  Probe
ctgtttcggccctcggagaaggaga

SEQ ID NO: 229705 - DNA, 25 bp, Artificial
  Probe
cactgaagtctaaaagcctggagtc

SEQ ID NO: 229706 - DNA, 25 bp, Artificial
  Probe
ctacatgcacccaggtgtggtccgc

SEQ ID NO: 229707 - DNA, 25 bp, Artificial
  Probe
acatgcacccaggtgtggtccgcaa

SEQ ID NO: 229708 - DNA, 25 bp, Artificial
  Probe
gggcctacatgcacccaggtgtggt

SEQ ID NO: 229709 - DNA, 25 bp, Artificial
  Probe
tgcacccaggtgtggtccgcaagcc

SEQ ID NO: 229710 - DNA, 25 bp, Artificial
  Probe
ccatgactgacagctggtccctaga

SEQ ID NO: 229711 - DNA, 25 bp, Artificial
  Probe
ccctagaggtcatgtcccaggtcca

SEQ ID NO: 229712 - DNA, 25 bp, Artificial
  Probe
gggccatctgccaagagacaagtac

SEQ ID NO: 229713 - DNA, 25 bp, Artificial
  Probe
cgagtgacacgtggtgctcttaact

SEQ ID NO: 229714 - DNA, 25 bp, Artificial
  Probe
taccattctctggaactggcattag

SEQ ID NO: 229715 - DNA, 25 bp, Artificial
  Probe
cccagaggtcagaggagggtaccat

SEQ ID NO: 229716 - DNA, 25 bp, Artificial
  Probe
ctccatgtgagtgctggaaactgag

SEQ ID NO: 229717 - DNA, 25 bp, Artificial
  Probe
ggagggtaccattctctggaactgg

SEQ ID NO: 229718 - DNA, 25 bp, Artificial
  Probe
tccatgtgagtgctggaaactgagc

SEQ ID NO: 229719 - DNA, 25 bp, Artificial
  Probe
tttgcacgagtgacacgtggtgctc

SEQ ID NO: 229720 - DNA, 25 bp, Artificial
  Probe
tgcccagaggtcagaggagggtacc

SEQ ID NO: 229721 - DNA, 25 bp, Artificial
  Probe
ccagaggtcagaggagggtaccatt

SEQ ID NO: 229722 - DNA, 25 bp, Artificial
  Probe
ttgcacgagtgacacgtggtgctct

SEQ ID NO: 229723 - DNA, 25 bp, Artificial
  Probe
ggtgcccagaggtcagaggagggta

SEQ ID NO: 229724 - DNA, 25 bp, Artificial
  Probe
tggtgcccagaggtcagaggagggt

SEQ ID NO: 229725 - DNA, 25 bp, Artificial
  Probe
agggtaccattctctggaactggca

SEQ ID NO: 229726 - DNA, 25 bp, Artificial
  Probe
gcccagaggtcagaggagggtacca

SEQ ID NO: 229727 - DNA, 25 bp, Artificial
  Probe
tgcacgagtgacacgtggtgctctt

SEQ ID NO: 229728 - DNA, 25 bp, Artificial
  Probe
gtaccattctctggaactggcatta

SEQ ID NO: 229729 - DNA, 25 bp, Artificial
  Probe
ggtaccattctctggaactggcatt

SEQ ID NO: 229730 - DNA, 25 bp, Artificial
  Probe
gcacgagtgacacgtggtgctctta

SEQ ID NO: 229731 - DNA, 25 bp, Artificial
  Probe
acgagtgacacgtggtgctcttaac

SEQ ID NO: 229732 - DNA, 25 bp, Artificial
  Probe
gagtgacacgtggtgctcttaactg

SEQ ID NO: 229733 - DNA, 25 bp, Artificial
  Probe
aggagggtaccattctctggaactg

SEQ ID NO: 229734 - DNA, 25 bp, Artificial
  Probe
gagggtaccattctctggaactggc

SEQ ID NO: 229735 - DNA, 25 bp, Artificial
  Probe
gggtaccattctctggaactggcat

SEQ ID NO: 229736 - DNA, 25 bp, Artificial
  Probe
cacgagtgacacgtggtgctcttaa

SEQ ID NO: 229737 - DNA, 25 bp, Artificial
  Probe
gtgcccagaggtcagaggagggtac

SEQ ID NO: 229738 - DNA, 25 bp, Artificial
  Probe
ctcctagcaaaaagtgtttcctggc

SEQ ID NO: 229739 - DNA, 25 bp, Artificial
  Probe
gctgtacagggcaacatccggctca

SEQ ID NO: 229740 - DNA, 25 bp, Artificial
  Probe
atgctatgacccagcctgcctaaag

SEQ ID NO: 229741 - DNA, 25 bp, Artificial
  Probe
ctagcaaaaagtgtttcctggcctg

SEQ ID NO: 229742 - DNA, 25 bp, Artificial
  Probe
accatgacggcttcaaggatgctat

SEQ ID NO: 229743 - DNA, 25 bp, Artificial
  Probe
ccttccgggagaaggatacggctgt

SEQ ID NO: 229744 - DNA, 25 bp, Artificial
  Probe
gtacagggcaacatccggctcagct

SEQ ID NO: 229745 - DNA, 25 bp, Artificial
  Probe
ccatgacggcttcaaggatgctatg

SEQ ID NO: 229746 - DNA, 25 bp, Artificial
  Probe
ccggctcagctttgaggactttgtc

SEQ ID NO: 229747 - DNA, 25 bp, Artificial
  Probe
ctttgaggactttgtcaccatgacg

SEQ ID NO: 229748 - DNA, 25 bp, Artificial
  Probe
tcaggtgttgactgaggccttccgg

SEQ ID NO: 229749 - DNA, 25 bp, Artificial
  Probe
aaggatgctatgacccagcctgcct

SEQ ID NO: 229750 - DNA, 25 bp, Artificial
  Probe
tacagggcaacatccggctcagctt

SEQ ID NO: 229751 - DNA, 25 bp, Artificial
  Probe
catgacggcttcaaggatgctatga

SEQ ID NO: 229752 - DNA, 25 bp, Artificial
  Probe
caacatccggctcagctttgaggac

SEQ ID NO: 229753 - DNA, 25 bp, Artificial
  Probe
cggcttcaaggatgctatgacccag

SEQ ID NO: 229754 - DNA, 25 bp, Artificial
  Probe
gcacaccaggggatgtgggcctctc

SEQ ID NO: 229755 - DNA, 25 bp, Artificial
  Probe
tttgaggactttgtcaccatgacgg

SEQ ID NO: 229756 - DNA, 25 bp, Artificial
  Probe
catccggctcagctttgaggacttt

SEQ ID NO: 229757 - DNA, 25 bp, Artificial
  Probe
tatgacccagcctgcctaaagggtg

SEQ ID NO: 229758 - DNA, 25 bp, Artificial
  Probe
cagctttgaggactttgtcaccatg

SEQ ID NO: 229759 - DNA, 25 bp, Artificial
  Probe
gggatgtgggcctctcctttcctcc

SEQ ID NO: 229760 - DNA, 25 bp, Artificial
  Probe
gctttgaggactttgtcaccatgac

SEQ ID NO: 229761 - DNA, 25 bp, Artificial
  Probe
ctctcctagcaaaaagtgtttcctg

SEQ ID NO: 229762 - DNA, 25 bp, Artificial
  Probe
atccggctcagctttgaggactttg

SEQ ID NO: 229763 - DNA, 25 bp, Artificial
  Probe
ggatacggctgtacagggcaacatc

SEQ ID NO: 229764 - DNA, 25 bp, Artificial
  Probe
tgacggcttcaaggatgctatgacc

SEQ ID NO: 229765 - DNA, 25 bp, Artificial
  Probe
atacggctgtacagggcaacatccg

SEQ ID NO: 229766 - DNA, 25 bp, Artificial
  Probe
caaggatgctatgacccagcctgcc

SEQ ID NO: 229767 - DNA, 25 bp, Artificial
  Probe
acatccggctcagctttgaggactt

SEQ ID NO: 229768 - DNA, 25 bp, Artificial
  Probe
tgaggactttgtcaccatgacggct

SEQ ID NO: 229769 - DNA, 25 bp, Artificial
  Probe
aaggatacggctgtacagggcaaca

SEQ ID NO: 229770 - DNA, 25 bp, Artificial
  Probe
cttcaggtgttgactgaggccttcc

SEQ ID NO: 229771 - DNA, 25 bp, Artificial
  Probe
gaaggatacggctgtacagggcaac

SEQ ID NO: 229772 - DNA, 25 bp, Artificial
  Probe
ttcaggtgttgactgaggccttccg

SEQ ID NO: 229773 - DNA, 25 bp, Artificial
  Probe
gcaacatccggctcagctttgagga

SEQ ID NO: 229774 - DNA, 25 bp, Artificial
  Probe
ctcagctttgaggactttgtcacca

SEQ ID NO: 229775 - DNA, 25 bp, Artificial
  Probe
ggatgtgggcctctcctttcctcct

SEQ ID NO: 229776 - DNA, 25 bp, Artificial
  Probe
cttccgggagaaggatacggctgta

SEQ ID NO: 229777 - DNA, 25 bp, Artificial
  Probe
actttgtcaccatgacggcttcaag

SEQ ID NO: 229778 - DNA, 25 bp, Artificial
  Probe
tagcaaaaagtgtttcctggcctga

SEQ ID NO: 229779 - DNA, 25 bp, Artificial
  Probe
cacaccaggggatgtgggcctctcc

SEQ ID NO: 229780 - DNA, 25 bp, Artificial
  Probe
ttcaaggatgctatgacccagcctg

SEQ ID NO: 229781 - DNA, 25 bp, Artificial
  Probe
cttcaaggatgctatgacccagcct

SEQ ID NO: 229782 - DNA, 25 bp, Artificial
  Probe
aggactttgtcaccatgacggcttc

SEQ ID NO: 229783 - DNA, 25 bp, Artificial
  Probe
caccatgacggcttcaaggatgcta

SEQ ID NO: 229784 - DNA, 25 bp, Artificial
  Probe
tgccagaactattatctacttaagg

SEQ ID NO: 229785 - DNA, 25 bp, Artificial
  Probe
tttattcccaatcaggggagaatat

SEQ ID NO: 229786 - DNA, 25 bp, Artificial
  Probe
atggagacatcacctccttgtcatt

SEQ ID NO: 229787 - DNA, 25 bp, Artificial
  Probe
ccagaactattatctacttaaggga

SEQ ID NO: 229788 - DNA, 25 bp, Artificial
  Probe
gatttattcccaatcaggggagaat

SEQ ID NO: 229789 - DNA, 25 bp, Artificial
  Probe
cacctattgtcaatggagacatcac

SEQ ID NO: 229790 - DNA, 25 bp, Artificial
  Probe
tcaatggagacatcacctccttgtc

SEQ ID NO: 229791 - DNA, 25 bp, Artificial
  Probe
ccaccaacctgcttacatgcatgtg

SEQ ID NO: 229792 - DNA, 25 bp, Artificial
  Probe
atttattcccaatcaggggagaata

SEQ ID NO: 229793 - DNA, 25 bp, Artificial
  Probe
tccacctattgtcaatggagacatc

SEQ ID NO: 229794 - DNA, 25 bp, Artificial
  Probe
cagaactattatctacttaagggaa

SEQ ID NO: 229795 - DNA, 25 bp, Artificial
  Probe
ttattcccaatcaggggagaatatt

SEQ ID NO: 229796 - DNA, 25 bp, Artificial
  Probe
ccacctattgtcaatggagacatca

SEQ ID NO: 229797 - DNA, 25 bp, Artificial
  Probe
atcatcagttgaatatcaatgccag

SEQ ID NO: 229798 - DNA, 25 bp, Artificial
  Probe
caatggagacatcacctccttgtca

SEQ ID NO: 229799 - DNA, 25 bp, Artificial
  Probe
ggagacatcacctccttgtcattac

SEQ ID NO: 229800 - DNA, 25 bp, Artificial
  Probe
gtcaatggagacatcacctccttgt

SEQ ID NO: 229801 - DNA, 25 bp, Artificial
  Probe
ctattgtcaatggagacatcacctc

SEQ ID NO: 229802 - DNA, 25 bp, Artificial
  Probe
tggagacatcacctccttgtcatta

SEQ ID NO: 229803 - DNA, 25 bp, Artificial
  Probe
acctattgtcaatggagacatcacc

SEQ ID NO: 229804 - DNA, 25 bp, Artificial
  Probe
caccaacctgcttacatgcatgtgt

SEQ ID NO: 229805 - DNA, 25 bp, Artificial
  Probe
cctattgtcaatggagacatcacct

SEQ ID NO: 229806 - DNA, 25 bp, Artificial
  Probe
gtatatgcaccattatcatcagttg

SEQ ID NO: 229807 - DNA, 25 bp, Artificial
  Probe
ctccacctattgtcaatggagacat

SEQ ID NO: 229808 - DNA, 25 bp, Artificial
  Probe
gattcaacagggaaatttgggcctc

SEQ ID NO: 229809 - DNA, 25 bp, Artificial
  Probe
tattgtcaatggagacatcacctcc

SEQ ID NO: 229810 - DNA, 25 bp, Artificial
  Probe
aatggagacatcacctccttgtcat

SEQ ID NO: 229811 - DNA, 25 bp, Artificial
  Probe
gccagaactattatctacttaaggg

SEQ ID NO: 229812 - DNA, 25 bp, Artificial
  Probe
ccttacagaaagcatctagtctttg

SEQ ID NO: 229813 - DNA, 25 bp, Artificial
  Probe
gatattttcttgagtagtccctgat

SEQ ID NO: 229814 - DNA, 25 bp, Artificial
  Probe
ccacaatacaggaaacaaactgagc

SEQ ID NO: 229815 - DNA, 25 bp, Artificial
  Probe
acttggactttcattcctctgtatg

SEQ ID NO: 229816 - DNA, 25 bp, Artificial
  Probe
ttcctctgtatgagctggatggagg

SEQ ID NO: 229817 - DNA, 25 bp, Artificial
  Probe
tccaaggatattttcttgagtagtc

SEQ ID NO: 229818 - DNA, 25 bp, Artificial
  Probe
ttgagtagtccctgatcaaagccaa

SEQ ID NO: 229819 - DNA, 25 bp, Artificial
  Probe
atccttggatttcctgatagtagcc

SEQ ID NO: 229820 - DNA, 25 bp, Artificial
  Probe
ttctggccgtcctccttacagaaag

SEQ ID NO: 229821 - DNA, 25 bp, Artificial
  Probe
tatggactcaacattttccacagtg

SEQ ID NO: 229822 - DNA, 25 bp, Artificial
  Probe
cattcctctgtatgagctggatgga

SEQ ID NO: 229823 - DNA, 25 bp, Artificial
  Probe
gactttaggacttgctggaaggtca

SEQ ID NO: 229824 - DNA, 25 bp, Artificial
  Probe
cttgatccttggatttcctgatagt

SEQ ID NO: 229825 - DNA, 25 bp, Artificial
  Probe
gcttctggccgtcctccttacagaa

SEQ ID NO: 229826 - DNA, 25 bp, Artificial
  Probe
caaactgagcatctttgctgttttt

SEQ ID NO: 229827 - DNA, 25 bp, Artificial
  Probe
ggaaacaaactgagcatctttgctg

SEQ ID NO: 229828 - DNA, 25 bp, Artificial
  Probe
tgttccccacggattggtcaagcat

SEQ ID NO: 229829 - DNA, 25 bp, Artificial
  Probe
gaacttggactttcattcctctgta

SEQ ID NO: 229830 - DNA, 25 bp, Artificial
  Probe
gctatggactcaacattttccacag

SEQ ID NO: 229831 - DNA, 25 bp, Artificial
  Probe
atggccacaagcttctggccgtcct

SEQ ID NO: 229832 - DNA, 25 bp, Artificial
  Probe
gaaacaaactgagcatctttgctgt

SEQ ID NO: 229833 - DNA, 25 bp, Artificial
  Probe
tggatttcctgatagtagcctcctg

SEQ ID NO: 229834 - DNA, 25 bp, Artificial
  Probe
aggatattttcttgagtagtccctg

SEQ ID NO: 229835 - DNA, 25 bp, Artificial
  Probe
gccgtcctccttacagaaagcatct

SEQ ID NO: 229836 - DNA, 25 bp, Artificial
  Probe
agaactgttctcacccatggccaca

SEQ ID NO: 229837 - DNA, 25 bp, Artificial
  Probe
tttcctgatagtagcctcctgaaat

SEQ ID NO: 229838 - DNA, 25 bp, Artificial
  Probe
taactaaggatccaaggatattttc

SEQ ID NO: 229839 - DNA, 25 bp, Artificial
  Probe
gactcaacattttccacagtgcgcc

SEQ ID NO: 229840 - DNA, 25 bp, Artificial
  Probe
agcttctggccgtcctccttacaga

SEQ ID NO: 229841 - DNA, 25 bp, Artificial
  Probe
atcagctgctgttccccacggattg

SEQ ID NO: 229842 - DNA, 25 bp, Artificial
  Probe
ctgatagtagcctcctgaaattgct

SEQ ID NO: 229843 - DNA, 25 bp, Artificial
  Probe
gtagtccctgatcaaagccaaaaaa

SEQ ID NO: 229844 - DNA, 25 bp, Artificial
  Probe
aggaacttggactttcattcctctg

SEQ ID NO: 229845 - DNA, 25 bp, Artificial
  Probe
tgaaattgctatggactcaacattt

SEQ ID NO: 229846 - DNA, 25 bp, Artificial
  Probe
ccacagtgcgccacaatacaggaaa

SEQ ID NO: 229847 - DNA, 25 bp, Artificial
  Probe
gtcctccttacagaaagcatctagt

SEQ ID NO: 229848 - DNA, 25 bp, Artificial
  Probe
ctgctgttccccacggattggtcaa

SEQ ID NO: 229849 - DNA, 25 bp, Artificial
  Probe
gaaagaactgttctcacccatggcc

SEQ ID NO: 229850 - DNA, 25 bp, Artificial
  Probe
cgtcctccttacagaaagcatctag

SEQ ID NO: 229851 - DNA, 25 bp, Artificial
  Probe
ggactttaggacttgctggaaggtc

SEQ ID NO: 229852 - DNA, 25 bp, Artificial
  Probe
gaaattgctatggactcaacatttt

SEQ ID NO: 229853 - DNA, 25 bp, Artificial
  Probe
tcctgaaattgctatggactcaaca

SEQ ID NO: 229854 - DNA, 25 bp, Artificial
  Probe
cttggactttcattcctctgtatga

SEQ ID NO: 229855 - DNA, 25 bp, Artificial
  Probe
ccacggattggtcaagcataaagaa

SEQ ID NO: 229856 - DNA, 25 bp, Artificial
  Probe
tttcttgagtagtccctgatcaaag

SEQ ID NO: 229857 - DNA, 25 bp, Artificial
  Probe
tttctttgggatcagctgctgttcc

SEQ ID NO: 229858 - DNA, 25 bp, Artificial
  Probe
gatttccgagcttgcctcatctcca

SEQ ID NO: 229859 - DNA, 25 bp, Artificial
  Probe
aggtggagtttgctcggatcatgac

SEQ ID NO: 229860 - DNA, 25 bp, Artificial
  Probe
ttcctgtggtggattccactgtccc

SEQ ID NO: 229861 - DNA, 25 bp, Artificial
  Probe
gagtttgctcggatcatgaccatgg

SEQ ID NO: 229862 - DNA, 25 bp, Artificial
  Probe
agagagtgacctctgacattcttag

SEQ ID NO: 229863 - DNA, 25 bp, Artificial
  Probe
aacctgatgatttccgagcttgcct

SEQ ID NO: 229864 - DNA, 25 bp, Artificial
  Probe
tgtggtggattccactgtccctcag

SEQ ID NO: 229865 - DNA, 25 bp, Artificial
  Probe
accccaatgcagctggggtcgtgac

SEQ ID NO: 229866 - DNA, 25 bp, Artificial
  Probe
gatcatgaccatggtggaccccaat

SEQ ID NO: 229867 - DNA, 25 bp, Artificial
  Probe
gacctctgacattcttagtggagaa

SEQ ID NO: 229868 - DNA, 25 bp, Artificial
  Probe
catgaccatggtggaccccaatgca

SEQ ID NO: 229869 - DNA, 25 bp, Artificial
  Probe
gaacctgatgatttccgagcttgcc

SEQ ID NO: 229870 - DNA, 25 bp, Artificial
  Probe
agcctccttcaaaatcctagcagga

SEQ ID NO: 229871 - DNA, 25 bp, Artificial
  Probe
ctccatgggctatgatctgggagag

SEQ ID NO: 229872 - DNA, 25 bp, Artificial
  Probe
gagagagtgacctctgacattctta

SEQ ID NO: 229873 - DNA, 25 bp, Artificial
  Probe
tggaccccaatgcagctggggtcgt

SEQ ID NO: 229874 - DNA, 25 bp, Artificial
  Probe
tcatgaccatggtggaccccaatgc

SEQ ID NO: 229875 - DNA, 25 bp, Artificial
  Probe
agtttgctcggatcatgaccatggt

SEQ ID NO: 229876 - DNA, 25 bp, Artificial
  Probe
ttgctcggatcatgaccatggtgga

SEQ ID NO: 229877 - DNA, 25 bp, Artificial
  Probe
acctctgacattcttagtggagaag

SEQ ID NO: 229878 - DNA, 25 bp, Artificial
  Probe
ggtggattccactgtccctcagagc

SEQ ID NO: 229879 - DNA, 25 bp, Artificial
  Probe
gtttgctcggatcatgaccatggtg

SEQ ID NO: 229880 - DNA, 25 bp, Artificial
  Probe
acccgagagactgcagagacagaca

SEQ ID NO: 229881 - DNA, 25 bp, Artificial
  Probe
agtgacctctgacattcttagtgga

SEQ ID NO: 229882 - DNA, 25 bp, Artificial
  Probe
tagcctccttcaaaatcctagcagg

SEQ ID NO: 229883 - DNA, 25 bp, Artificial
  Probe
agagtgacctctgacattcttagtg

SEQ ID NO: 229884 - DNA, 25 bp, Artificial
  Probe
ctgtggtggattccactgtccctca

SEQ ID NO: 229885 - DNA, 25 bp, Artificial
  Probe
gcagctggggtcgtgaccttccaag

SEQ ID NO: 229886 - DNA, 25 bp, Artificial
  Probe
gacccgagagactgcagagacagac

SEQ ID NO: 229887 - DNA, 25 bp, Artificial
  Probe
atgaccatggtggaccccaatgcag

SEQ ID NO: 229888 - DNA, 25 bp, Artificial
  Probe
tttgctcggatcatgaccatggtgg

SEQ ID NO: 229889 - DNA, 25 bp, Artificial
  Probe
tcggatcatgaccatggtggacccc

SEQ ID NO: 229890 - DNA, 25 bp, Artificial
  Probe
cctctgacattcttagtggagaaga

SEQ ID NO: 229891 - DNA, 25 bp, Artificial
  Probe
gctcggatcatgaccatggtggacc

SEQ ID NO: 229892 - DNA, 25 bp, Artificial
  Probe
tccgagcttgcctcatctccatggg

SEQ ID NO: 229893 - DNA, 25 bp, Artificial
  Probe
gagtgacctctgacattcttagtgg

SEQ ID NO: 229894 - DNA, 25 bp, Artificial
  Probe
gaccccaatgcagctggggtcgtga

SEQ ID NO: 229895 - DNA, 25 bp, Artificial
  Probe
tgatgatttccgagcttgcctcatc

SEQ ID NO: 229896 - DNA, 25 bp, Artificial
  Probe
tgaccatggtggaccccaatgcagc

SEQ ID NO: 229897 - DNA, 25 bp, Artificial
  Probe
gtggattccactgtccctcagagca

SEQ ID NO: 229898 - DNA, 25 bp, Artificial
  Probe
ctccttcaaaatcctagcaggagac

SEQ ID NO: 229899 - DNA, 25 bp, Artificial
  Probe
atgcagctggggtcgtgaccttcca

SEQ ID NO: 229900 - DNA, 25 bp, Artificial
  Probe
gtagcctccttcaaaatcctagcag

SEQ ID NO: 229901 - DNA, 25 bp, Artificial
  Probe
tggtggattccactgtccctcagag

SEQ ID NO: 229902 - DNA, 25 bp, Artificial
  Probe
ctcggatcatgaccatggtggaccc

SEQ ID NO: 229903 - DNA, 25 bp, Artificial
  Probe
ccccaatgcagctggggtcgtgacc

SEQ ID NO: 229904 - DNA, 25 bp, Artificial
  Probe
aactaaagtaacacttggaacagtg

SEQ ID NO: 229905 - DNA, 25 bp, Artificial
  Probe
ctttgagcaccttccctgggcttgt

SEQ ID NO: 229906 - DNA, 25 bp, Artificial
  Probe
cctcaatcacggaggctgagaatgt

SEQ ID NO: 229907 - DNA, 25 bp, Artificial
  Probe
acagtcaactttcgataaaagtttg

SEQ ID NO: 229908 - DNA, 25 bp, Artificial
  Probe
cagtgaaaccctaattgtagaatga

SEQ ID NO: 229909 - DNA, 25 bp, Artificial
  Probe
ctgggcttgtcacagaactcattca

SEQ ID NO: 229910 - DNA, 25 bp, Artificial
  Probe
ggcttgtcacagaactcattcaaac

SEQ ID NO: 229911 - DNA, 25 bp, Artificial
  Probe
tacgctctctgcttagtgctgtttt

SEQ ID NO: 229912 - DNA, 25 bp, Artificial
  Probe
actactttgagcaccttccctgggc

SEQ ID NO: 229913 - DNA, 25 bp, Artificial
  Probe
tctaactgtgcaaaacagtgaaacc

SEQ ID NO: 229914 - DNA, 25 bp, Artificial
  Probe
ccttccctgggcttgtcacagaact

SEQ ID NO: 229915 - DNA, 25 bp, Artificial
  Probe
gggcttgtcacagaactcattcaaa

SEQ ID NO: 229916 - DNA, 25 bp, Artificial
  Probe
agtgaaaccctaattgtagaatgac

SEQ ID NO: 229917 - DNA, 25 bp, Artificial
  Probe
atccagttttctgtacgctctctgc

SEQ ID NO: 229918 - DNA, 25 bp, Artificial
  Probe
tgaaaccctaattgtagaatgactt

SEQ ID NO: 229919 - DNA, 25 bp, Artificial
  Probe
catccagttttctgtacgctctctg

SEQ ID NO: 229920 - DNA, 25 bp, Artificial
  Probe
atgccctcaatcacggaggctgaga

SEQ ID NO: 229921 - DNA, 25 bp, Artificial
  Probe
gtttgactactttgagcaccttccc

SEQ ID NO: 229922 - DNA, 25 bp, Artificial
  Probe
tgactactttgagcaccttccctgg

SEQ ID NO: 229923 - DNA, 25 bp, Artificial
  Probe
agtttgactactttgagcaccttcc

SEQ ID NO: 229924 - DNA, 25 bp, Artificial
  Probe
aagacagcaagaaccgcaacttttc

SEQ ID NO: 229925 - DNA, 25 bp, Artificial
  Probe
cagtcaactttcgataaaagtttga

SEQ ID NO: 229926 - DNA, 25 bp, Artificial
  Probe
ttgactactttgagcaccttccctg

SEQ ID NO: 229927 - DNA, 25 bp, Artificial
  Probe
tccagttttctgtacgctctctgct

SEQ ID NO: 229928 - DNA, 25 bp, Artificial
  Probe
gagcaccttccctgggcttgtcaca

SEQ ID NO: 229929 - DNA, 25 bp, Artificial
  Probe
acagtgaaaccctaattgtagaatg

SEQ ID NO: 229930 - DNA, 25 bp, Artificial
  Probe
ctctaactgtgcaaaacagtgaaac

SEQ ID NO: 229931 - DNA, 25 bp, Artificial
  Probe
ttttctgtacgctctctgcttagtg

SEQ ID NO: 229932 - DNA, 25 bp, Artificial
  Probe
gactactttgagcaccttccctggg

SEQ ID NO: 229933 - DNA, 25 bp, Artificial
  Probe
gcaaaacagtgaaaccctaattgta

SEQ ID NO: 229934 - DNA, 25 bp, Artificial
  Probe
taactgtgcaaaacagtgaaaccct

SEQ ID NO: 229935 - DNA, 25 bp, Artificial
  Probe
cctgggcttgtcacagaactcattc

SEQ ID NO: 229936 - DNA, 25 bp, Artificial
  Probe
caatgccctcaatcacggaggctga

SEQ ID NO: 229937 - DNA, 25 bp, Artificial
  Probe
acctctaactgtgcaaaacagtgaa

SEQ ID NO: 229938 - DNA, 25 bp, Artificial
  Probe
ttctgtacgctctctgcttagtgct

SEQ ID NO: 229939 - DNA, 25 bp, Artificial
  Probe
gtgaaaccctaattgtagaatgact

SEQ ID NO: 229940 - DNA, 25 bp, Artificial
  Probe
actttgagcaccttccctgggcttg

SEQ ID NO: 229941 - DNA, 25 bp, Artificial
  Probe
aatgccctcaatcacggaggctgag

SEQ ID NO: 229942 - DNA, 25 bp, Artificial
  Probe
tctgtacgctctctgcttagtgctg

SEQ ID NO: 229943 - DNA, 25 bp, Artificial
  Probe
tactttgagcaccttccctgggctt

SEQ ID NO: 229944 - DNA, 25 bp, Artificial
  Probe
aaccctaattgtagaatgacttgct

SEQ ID NO: 229945 - DNA, 25 bp, Artificial
  Probe
gaagacagcaagaaccgcaactttt

SEQ ID NO: 229946 - DNA, 25 bp, Artificial
  Probe
cttccctgggcttgtcacagaactc

SEQ ID NO: 229947 - DNA, 25 bp, Artificial
  Probe
ccagttttctgtacgctctctgctt

SEQ ID NO: 229948 - DNA, 25 bp, Artificial
  Probe
tgcaaaacagtgaaaccctaattgt

SEQ ID NO: 229949 - DNA, 25 bp, Artificial
  Probe
aaagtttgactactttgagcacctt

SEQ ID NO: 229950 - DNA, 25 bp, Artificial
  Probe
tttaaggttacctatttacagaatg

SEQ ID NO: 229951 - DNA, 25 bp, Artificial
  Probe
ttaaggttacctatttacagaatgg

SEQ ID NO: 229952 - DNA, 25 bp, Artificial
  Probe
cacgcctgtatttaaggttacctat

SEQ ID NO: 229953 - DNA, 25 bp, Artificial
  Probe
tctgagatgccatagctggcgaaac

SEQ ID NO: 229954 - DNA, 25 bp, Artificial
  Probe
tccaggagggggaccccattcgtct

SEQ ID NO: 229955 - DNA, 25 bp, Artificial
  Probe
ccatagctggcgaaacacgcctgta

SEQ ID NO: 229956 - DNA, 25 bp, Artificial
  Probe
ccccattcgtctgagatgccatagc

SEQ ID NO: 229957 - DNA, 25 bp, Artificial
  Probe
tgagatgccatagctggcgaaacac

SEQ ID NO: 229958 - DNA, 25 bp, Artificial
  Probe
ttcgtctgagatgccatagctggcg

SEQ ID NO: 229959 - DNA, 25 bp, Artificial
  Probe
aggttacctatttacagaatggcaa

SEQ ID NO: 229960 - DNA, 25 bp, Artificial
  Probe
gagatgccatagctggcgaaacacg

SEQ ID NO: 229961 - DNA, 25 bp, Artificial
  Probe
acctatttacagaatggcaaaggca

SEQ ID NO: 229962 - DNA, 25 bp, Artificial
  Probe
gatgccatagctggcgaaacacgcc

SEQ ID NO: 229963 - DNA, 25 bp, Artificial
  Probe
cgtctgagatgccatagctggcgaa

SEQ ID NO: 229964 - DNA, 25 bp, Artificial
  Probe
ggttacctatttacagaatggcaaa

SEQ ID NO: 229965 - DNA, 25 bp, Artificial
  Probe
taaggttacctatttacagaatggc

SEQ ID NO: 229966 - DNA, 25 bp, Artificial
  Probe
aaggttacctatttacagaatggca

SEQ ID NO: 229967 - DNA, 25 bp, Artificial
  Probe
gggaccccattcgtctgagatgcca

SEQ ID NO: 229968 - DNA, 25 bp, Artificial
  Probe
gctggcgaaacacgcctgtatttaa

SEQ ID NO: 229969 - DNA, 25 bp, Artificial
  Probe
tatttacagaatggcaaaggcaaga

SEQ ID NO: 229970 - DNA, 25 bp, Artificial
  Probe
cctatttacagaatggcaaaggcaa

SEQ ID NO: 229971 - DNA, 25 bp, Artificial
  Probe
tagctggcgaaacacgcctgtattt

SEQ ID NO: 229972 - DNA, 25 bp, Artificial
  Probe
gtctgagatgccatagctggcgaaa

SEQ ID NO: 229973 - DNA, 25 bp, Artificial
  Probe
tgccatagctggcgaaacacgcctg

SEQ ID NO: 229974 - DNA, 25 bp, Artificial
  Probe
cccattcgtctgagatgccatagct

SEQ ID NO: 229975 - DNA, 25 bp, Artificial
  Probe
atagctggcgaaacacgcctgtatt

SEQ ID NO: 229976 - DNA, 25 bp, Artificial
  Probe
accccattcgtctgagatgccatag

SEQ ID NO: 229977 - DNA, 25 bp, Artificial
  Probe
catagctggcgaaacacgcctgtat

SEQ ID NO: 229978 - DNA, 25 bp, Artificial
  Probe
tacctatttacagaatggcaaaggc

SEQ ID NO: 229979 - DNA, 25 bp, Artificial
  Probe
gaccccattcgtctgagatgccata

SEQ ID NO: 229980 - DNA, 25 bp, Artificial
  Probe
ctgagatgccatagctggcgaaaca

SEQ ID NO: 229981 - DNA, 25 bp, Artificial
  Probe
gttacctatttacagaatggcaaag

SEQ ID NO: 229982 - DNA, 25 bp, Artificial
  Probe
ggggaccccattcgtctgagatgcc

SEQ ID NO: 229983 - DNA, 25 bp, Artificial
  Probe
agggggaccccattcgtctgagatg

SEQ ID NO: 229984 - DNA, 25 bp, Artificial
  Probe
agctggcgaaacacgcctgtattta

SEQ ID NO: 229985 - DNA, 25 bp, Artificial
  Probe
ggcgaaacacgcctgtatttaaggt

SEQ ID NO: 229986 - DNA, 25 bp, Artificial
  Probe
ctatttacagaatggcaaaggcaag

SEQ ID NO: 229987 - DNA, 25 bp, Artificial
  Probe
attcgtctgagatgccatagctggc

SEQ ID NO: 229988 - DNA, 25 bp, Artificial
  Probe
ggaccccattcgtctgagatgccat

SEQ ID NO: 229989 - DNA, 25 bp, Artificial
  Probe
gccatagctggcgaaacacgcctgt

SEQ ID NO: 229990 - DNA, 25 bp, Artificial
  Probe
gcgaaacacgcctgtatttaaggtt

SEQ ID NO: 229991 - DNA, 25 bp, Artificial
  Probe
ttacctatttacagaatggcaaagg

SEQ ID NO: 229992 - DNA, 25 bp, Artificial
  Probe
cattcgtctgagatgccatagctgg

SEQ ID NO: 229993 - DNA, 25 bp, Artificial
  Probe
ccattcgtctgagatgccatagctg

SEQ ID NO: 229994 - DNA, 25 bp, Artificial
  Probe
agatgccatagctggcgaaacacgc

SEQ ID NO: 229995 - DNA, 25 bp, Artificial
  Probe
gggggaccccattcgtctgagatgc

SEQ ID NO: 229996 - DNA, 25 bp, Artificial
  Probe
ttcctgccagggtgactctggtggc

SEQ ID NO: 229997 - DNA, 25 bp, Artificial
  Probe
ctctggctaccacttctgtggaggt

SEQ ID NO: 229998 - DNA, 25 bp, Artificial
  Probe
atgacatcatgctgatcaagctctc

SEQ ID NO: 229999 - DNA, 25 bp, Artificial
  Probe
gacatcatgctgatcaagctctctt

SEQ ID NO: 230000 - DNA, 25 bp, Artificial
  Probe
gaacaatgacatcatgctgatcaag

SEQ ID NO: 230001 - DNA, 25 bp, Artificial
  Probe
tggctaccacttctgtggaggttcc

SEQ ID NO: 230002 - DNA, 25 bp, Artificial
  Probe
ttctgtggaggttccctcatcaatg

SEQ ID NO: 230003 - DNA, 25 bp, Artificial
  Probe
tgaactctggctaccacttctgtgg

SEQ ID NO: 230004 - DNA, 25 bp, Artificial
  Probe
tctggctaccacttctgtggaggtt

SEQ ID NO: 230005 - DNA, 25 bp, Artificial
  Probe
gtgtccctgaactctggctaccact

SEQ ID NO: 230006 - DNA, 25 bp, Artificial
  Probe
tgacaagatcgttggaggatacacc

SEQ ID NO: 230007 - DNA, 25 bp, Artificial
  Probe
gacaagatcgttggaggatacacct

SEQ ID NO: 230008 - DNA, 25 bp, Artificial
  Probe
acttctgtggaggttccctcatcaa

SEQ ID NO: 230009 - DNA, 25 bp, Artificial
  Probe
aatgacatcatgctgatcaagctct

SEQ ID NO: 230010 - DNA, 25 bp, Artificial
  Probe
atgacaagatcgttggaggatacac

SEQ ID NO: 230011 - DNA, 25 bp, Artificial
  Probe
actctggctaccacttctgtggagg

SEQ ID NO: 230012 - DNA, 25 bp, Artificial
  Probe
accacttctgtggaggttccctcat

SEQ ID NO: 230013 - DNA, 25 bp, Artificial
  Probe
ctgatcaagctctcttcccctgtga

SEQ ID NO: 230014 - DNA, 25 bp, Artificial
  Probe
tcctgccagggtgactctggtggcc

SEQ ID NO: 230015 - DNA, 25 bp, Artificial
  Probe
gaactctggctaccacttctgtgga

SEQ ID NO: 230016 - DNA, 25 bp, Artificial
  Probe
tgacatcatgctgatcaagctctct

SEQ ID NO: 230017 - DNA, 25 bp, Artificial
  Probe
cacttctgtggaggttccctcatca

SEQ ID NO: 230018 - DNA, 25 bp, Artificial
  Probe
gtggaggttccctcatcaatgacca

SEQ ID NO: 230019 - DNA, 25 bp, Artificial
  Probe
tgctgatcaagctctcttcccctgt

SEQ ID NO: 230020 - DNA, 25 bp, Artificial
  Probe
gctaccacttctgtggaggttccct

SEQ ID NO: 230021 - DNA, 25 bp, Artificial
  Probe
atgctgatcaagctctcttcccctg

SEQ ID NO: 230022 - DNA, 25 bp, Artificial
  Probe
cctgccagggtgactctggtggccc

SEQ ID NO: 230023 - DNA, 25 bp, Artificial
  Probe
caatgacatcatgctgatcaagctc

SEQ ID NO: 230024 - DNA, 25 bp, Artificial
  Probe
ctggctaccacttctgtggaggttc

SEQ ID NO: 230025 - DNA, 25 bp, Artificial
  Probe
aactctggctaccacttctgtggag

SEQ ID NO: 230026 - DNA, 25 bp, Artificial
  Probe
ggctaccacttctgtggaggttccc

SEQ ID NO: 230027 - DNA, 25 bp, Artificial
  Probe
cttctgtggaggttccctcatcaat

SEQ ID NO: 230028 - DNA, 25 bp, Artificial
  Probe
tcaatgctgccaagatcatcaagca

SEQ ID NO: 230029 - DNA, 25 bp, Artificial
  Probe
acaatgacatcatgctgatcaagct

SEQ ID NO: 230030 - DNA, 25 bp, Artificial
  Probe
ccacttctgtggaggttccctcatc

SEQ ID NO: 230031 - DNA, 25 bp, Artificial
  Probe
gctgatcaagctctcttcccctgtg

SEQ ID NO: 230032 - DNA, 25 bp, Artificial
  Probe
tgtccctgaactctggctaccactt

SEQ ID NO: 230033 - DNA, 25 bp, Artificial
  Probe
ctaccacttctgtggaggttccctc

SEQ ID NO: 230034 - DNA, 25 bp, Artificial
  Probe
cctgaacaatgacatcatgctgatc

SEQ ID NO: 230035 - DNA, 25 bp, Artificial
  Probe
ctgaactctggctaccacttctgtg

SEQ ID NO: 230036 - DNA, 25 bp, Artificial
  Probe
taccacttctgtggaggttccctca

SEQ ID NO: 230037 - DNA, 25 bp, Artificial
  Probe
ttttgtattctctcgtgagaacaca

SEQ ID NO: 230038 - DNA, 25 bp, Artificial
  Probe
tgactaaaccactgggactgctccg

SEQ ID NO: 230039 - DNA, 25 bp, Artificial
  Probe
taaaccactgggactgctccgtgtt

SEQ ID NO: 230040 - DNA, 25 bp, Artificial
  Probe
gacctttgttaactgctctgtgggg

SEQ ID NO: 230041 - DNA, 25 bp, Artificial
  Probe
gggactgctccgtgttcaactgtga

SEQ ID NO: 230042 - DNA, 25 bp, Artificial
  Probe
aaccactgggactgctccgtgttca

SEQ ID NO: 230043 - DNA, 25 bp, Artificial
  Probe
ctgtttctgttttgtgccctataac

SEQ ID NO: 230044 - DNA, 25 bp, Artificial
  Probe
ataagctgcctgactaaaccactgg

SEQ ID NO: 230045 - DNA, 25 bp, Artificial
  Probe
acacagacctttgttaactgctctg

SEQ ID NO: 230046 - DNA, 25 bp, Artificial
  Probe
ttctctcgtgagaacacagaccttt

SEQ ID NO: 230047 - DNA, 25 bp, Artificial
  Probe
aggcttggtcatattctgtttctgt

SEQ ID NO: 230048 - DNA, 25 bp, Artificial
  Probe
tgctccgtgttcaactgtgaaaact

SEQ ID NO: 230049 - DNA, 25 bp, Artificial
  Probe
ccactgggactgctccgtgttcaac

SEQ ID NO: 230050 - DNA, 25 bp, Artificial
  Probe
cgtgttcaactgtgaaaactgtgct

SEQ ID NO: 230051 - DNA, 25 bp, Artificial
  Probe
gactgctccgtgttcaactgtgaaa

SEQ ID NO: 230052 - DNA, 25 bp, Artificial
  Probe
tgagaacacagacctttgttaactg

SEQ ID NO: 230053 - DNA, 25 bp, Artificial
  Probe
accactgggactgctccgtgttcaa

SEQ ID NO: 230054 - DNA, 25 bp, Artificial
  Probe
tgcaatataagctgcctgactaaac

SEQ ID NO: 230055 - DNA, 25 bp, Artificial
  Probe
agctgcctgactaaaccactgggac

SEQ ID NO: 230056 - DNA, 25 bp, Artificial
  Probe
tgaatctgcaatataagctgcctga

SEQ ID NO: 230057 - DNA, 25 bp, Artificial
  Probe
cgtgagaacacagacctttgttaac

SEQ ID NO: 230058 - DNA, 25 bp, Artificial
  Probe
attttgtattctctcgtgagaacac

SEQ ID NO: 230059 - DNA, 25 bp, Artificial
  Probe
tttgtattctctcgtgagaacacag

SEQ ID NO: 230060 - DNA, 25 bp, Artificial
  Probe
ccaactgttgctttgaccccattgt

SEQ ID NO: 230061 - DNA, 25 bp, Artificial
  Probe
acctcattttgtattctctcgtgag

SEQ ID NO: 230062 - DNA, 25 bp, Artificial
  Probe
tcagggcaccgagaattttatccaa

SEQ ID NO: 230063 - DNA, 25 bp, Artificial
  Probe
cagggcaccgagaattttatccaac

SEQ ID NO: 230064 - DNA, 25 bp, Artificial
  Probe
gaagttcagggcaccgagaatttta

SEQ ID NO: 230065 - DNA, 25 bp, Artificial
  Probe
gaacacagacctttgttaactgctc

SEQ ID NO: 230066 - DNA, 25 bp, Artificial
  Probe
gcctgactaaaccactgggactgct

SEQ ID NO: 230067 - DNA, 25 bp, Artificial
  Probe
ctggtctgttagaaggagtgactcc

SEQ ID NO: 230068 - DNA, 25 bp, Artificial
  Probe
tataagctgcctgactaaaccactg

SEQ ID NO: 230069 - DNA, 25 bp, Artificial
  Probe
aactgttgctttgaccccattgttt

SEQ ID NO: 230070 - DNA, 25 bp, Artificial
  Probe
tcattttgtattctctcgtgagaac

SEQ ID NO: 230071 - DNA, 25 bp, Artificial
  Probe
agaacacagacctttgttaactgct

SEQ ID NO: 230072 - DNA, 25 bp, Artificial
  Probe
tgtttctgttttgtgccctataaca

SEQ ID NO: 230073 - DNA, 25 bp, Artificial
  Probe
tggtctgttagaaggagtgactcca

SEQ ID NO: 230074 - DNA, 25 bp, Artificial
  Probe
ctgactaaaccactgggactgctcc

SEQ ID NO: 230075 - DNA, 25 bp, Artificial
  Probe
caactgttgctttgaccccattgtt

SEQ ID NO: 230076 - DNA, 25 bp, Artificial
  Probe
cctcattttgtattctctcgtgaga

SEQ ID NO: 230077 - DNA, 25 bp, Artificial
  Probe
tgtattctctcgtgagaacacagac

SEQ ID NO: 230078 - DNA, 25 bp, Artificial
  Probe
acagacctttgttaactgctctgtg

SEQ ID NO: 230079 - DNA, 25 bp, Artificial
  Probe
gaatctgcaatataagctgcctgac

SEQ ID NO: 230080 - DNA, 25 bp, Artificial
  Probe
ttcagggcaccgagaattttatcca

SEQ ID NO: 230081 - DNA, 25 bp, Artificial
  Probe
atctgcaatataagctgcctgacta

SEQ ID NO: 230082 - DNA, 25 bp, Artificial
  Probe
gtttctgttttgtgccctataacat

SEQ ID NO: 230083 - DNA, 25 bp, Artificial
  Probe
ctggacctcagaaataagactgctt

SEQ ID NO: 230084 - DNA, 25 bp, Artificial
  Probe
tgctggacctcagaaataagactgc

SEQ ID NO: 230085 - DNA, 25 bp, Artificial
  Probe
agaagcaaatatgtcccacatggtc

SEQ ID NO: 230086 - DNA, 25 bp, Artificial
  Probe
acattcgcaatgtgattcagagcaa

SEQ ID NO: 230087 - DNA, 25 bp, Artificial
  Probe
aaattaatgctggacctcagaaata

SEQ ID NO: 230088 - DNA, 25 bp, Artificial
  Probe
attcgcaatgtgattcagagcaaaa

SEQ ID NO: 230089 - DNA, 25 bp, Artificial
  Probe
ggcctaggcatggattctatcccca

SEQ ID NO: 230090 - DNA, 25 bp, Artificial
  Probe
ctcagaaataagactgcttgcccag

SEQ ID NO: 230091 - DNA, 25 bp, Artificial
  Probe
tagtgcctacattcgcaatgtgatt

SEQ ID NO: 230092 - DNA, 25 bp, Artificial
  Probe
cccagcacaacaaaatgaagtatga

SEQ ID NO: 230093 - DNA, 25 bp, Artificial
  Probe
aggcctaggcatggattctatcccc

SEQ ID NO: 230094 - DNA, 25 bp, Artificial
  Probe
tggtccatttacttcagaaatatga

SEQ ID NO: 230095 - DNA, 25 bp, Artificial
  Probe
gcccagtaggcctaggcatggattc

SEQ ID NO: 230096 - DNA, 25 bp, Artificial
  Probe
ggacctcagaaataagactgcttgc

SEQ ID NO: 230097 - DNA, 25 bp, Artificial
  Probe
ccagcacaacaaaatgaagtatgag

SEQ ID NO: 230098 - DNA, 25 bp, Artificial
  Probe
gactgcttgcccagtaggcctaggc

SEQ ID NO: 230099 - DNA, 25 bp, Artificial
  Probe
aatgctggacctcagaaataagact

SEQ ID NO: 230100 - DNA, 25 bp, Artificial
  Probe
gaagcaaatatgtcccacatggtcc

SEQ ID NO: 230101 - DNA, 25 bp, Artificial
  Probe
atagtgcctacattcgcaatgtgat

SEQ ID NO: 230102 - DNA, 25 bp, Artificial
  Probe
tgcttgcccagtaggcctaggcatg

SEQ ID NO: 230103 - DNA, 25 bp, Artificial
  Probe
ctacattcgcaatgtgattcagagc

SEQ ID NO: 230104 - DNA, 25 bp, Artificial
  Probe
gcctaggcatggattctatccccag

SEQ ID NO: 230105 - DNA, 25 bp, Artificial
  Probe
gcctacattcgcaatgtgattcaga

SEQ ID NO: 230106 - DNA, 25 bp, Artificial
  Probe
ctgcttgcccagtaggcctaggcat

SEQ ID NO: 230107 - DNA, 25 bp, Artificial
  Probe
cccagtaggcctaggcatggattct

SEQ ID NO: 230108 - DNA, 25 bp, Artificial
  Probe
cctaggcatggattctatccccagc

SEQ ID NO: 230109 - DNA, 25 bp, Artificial
  Probe
cattcgcaatgtgattcagagcaaa

SEQ ID NO: 230110 - DNA, 25 bp, Artificial
  Probe
agtaatagtgcctacattcgcaatg

SEQ ID NO: 230111 - DNA, 25 bp, Artificial
  Probe
gcatggattctatccccagcacaac

SEQ ID NO: 230112 - DNA, 25 bp, Artificial
  Probe
ttcgcaatgtgattcagagcaaaaa

SEQ ID NO: 230113 - DNA, 25 bp, Artificial
  Probe
taggcatggattctatccccagcac

SEQ ID NO: 230114 - DNA, 25 bp, Artificial
  Probe
gtaggcctaggcatggattctatcc

SEQ ID NO: 230115 - DNA, 25 bp, Artificial
  Probe
gtaatagtgcctacattcgcaatgt

SEQ ID NO: 230116 - DNA, 25 bp, Artificial
  Probe
aatagccatcagcagattaaagagg

SEQ ID NO: 230117 - DNA, 25 bp, Artificial
  Probe
ggcatggattctatccccagcacaa

SEQ ID NO: 230118 - DNA, 25 bp, Artificial
  Probe
ttaatgctggacctcagaaataaga

SEQ ID NO: 230119 - DNA, 25 bp, Artificial
  Probe
ccccagcacaacaaaatgaagtatg

SEQ ID NO: 230120 - DNA, 25 bp, Artificial
  Probe
cctacattcgcaatgtgattcagag

SEQ ID NO: 230121 - DNA, 25 bp, Artificial
  Probe
tttctaacgagtaatagtgcctaca

SEQ ID NO: 230122 - DNA, 25 bp, Artificial
  Probe
taatgctggacctcagaaataagac

SEQ ID NO: 230123 - DNA, 25 bp, Artificial
  Probe
acctcagaaataagactgcttgccc

SEQ ID NO: 230124 - DNA, 25 bp, Artificial
  Probe
atggtccatttacttcagaaatatg

SEQ ID NO: 230125 - DNA, 25 bp, Artificial
  Probe
aatagtgcctacattcgcaatgtga

SEQ ID NO: 230126 - DNA, 25 bp, Artificial
  Probe
gtcccacatggtccatttacttcag

SEQ ID NO: 230127 - DNA, 25 bp, Artificial
  Probe
gaaataagactgcttgcccagtagg

SEQ ID NO: 230128 - DNA, 25 bp, Artificial
  Probe
aattaatgctggacctcagaaataa

SEQ ID NO: 230129 - DNA, 25 bp, Artificial
  Probe
tggcagatgctgtgggtcacatctt

SEQ ID NO: 230130 - DNA, 25 bp, Artificial
  Probe
gtggcagatgctgtgggtcacatct

SEQ ID NO: 230131 - DNA, 25 bp, Artificial
  Probe
gtcacatcttgtgtgtgtcagaggg

SEQ ID NO: 230132 - DNA, 25 bp, Artificial
  Probe
tgggtcacatcttgtgtgtgtcaga

SEQ ID NO: 230133 - DNA, 25 bp, Artificial
  Probe
ctgcgtccccaacaagtctacaatg

SEQ ID NO: 230134 - DNA, 25 bp, Artificial
  Probe
tgtgggtcacatcttgtgtgtgtca

SEQ ID NO: 230135 - DNA, 25 bp, Artificial
  Probe
acatcttgtgtgtgtcagagggact

SEQ ID NO: 230136 - DNA, 25 bp, Artificial
  Probe
acactgaggtgtctgcaaaagggca

SEQ ID NO: 230137 - DNA, 25 bp, Artificial
  Probe
atgctgtgggtcacatcttgtgtgt

SEQ ID NO: 230138 - DNA, 25 bp, Artificial
  Probe
gattaccgtcaggttcgactgcccc

SEQ ID NO: 230139 - DNA, 25 bp, Artificial
  Probe
attaccgtcaggttcgactgccccg

SEQ ID NO: 230140 - DNA, 25 bp, Artificial
  Probe
agtgactattctttgcctgttatat

SEQ ID NO: 230141 - DNA, 25 bp, Artificial
  Probe
ttaccgtcaggttcgactgccccgg

SEQ ID NO: 230142 - DNA, 25 bp, Artificial
  Probe
gatgctgtgggtcacatcttgtgtg

SEQ ID NO: 230143 - DNA, 25 bp, Artificial
  Probe
tgcgtccccaacaagtctacaatga

SEQ ID NO: 230144 - DNA, 25 bp, Artificial
  Probe
aagtggcagatgctgtgggtcacat

SEQ ID NO: 230145 - DNA, 25 bp, Artificial
  Probe
tctacaatgattaccgtcaggttcg

SEQ ID NO: 230146 - DNA, 25 bp, Artificial
  Probe
caagtctacaatgattaccgtcagg

SEQ ID NO: 230147 - DNA, 25 bp, Artificial
  Probe
ggtcacatcttgtgtgtgtcagagg

SEQ ID NO: 230148 - DNA, 25 bp, Artificial
  Probe
actgaggtgtctgcaaaagggcacg

SEQ ID NO: 230149 - DNA, 25 bp, Artificial
  Probe
gtctacaatgattaccgtcaggttc

SEQ ID NO: 230150 - DNA, 25 bp, Artificial
  Probe
tctttgcctgttatatttgtgacaa

SEQ ID NO: 230151 - DNA, 25 bp, Artificial
  Probe
ggtgtctgcaaaagggcacggctta

SEQ ID NO: 230152 - DNA, 25 bp, Artificial
  Probe
ttaagtggcagatgctgtgggtcac

SEQ ID NO: 230153 - DNA, 25 bp, Artificial
  Probe
gggtcacatcttgtgtgtgtcagag

SEQ ID NO: 230154 - DNA, 25 bp, Artificial
  Probe
gctgcgtccccaacaagtctacaat

SEQ ID NO: 230155 - DNA, 25 bp, Artificial
  Probe
cacatcttgtgtgtgtcagagggac

SEQ ID NO: 230156 - DNA, 25 bp, Artificial
  Probe
agagtgactattctttgcctgttat

SEQ ID NO: 230157 - DNA, 25 bp, Artificial
  Probe
gcgtccccaacaagtctacaatgat

SEQ ID NO: 230158 - DNA, 25 bp, Artificial
  Probe
ctttgcctgttatatttgtgacaat

SEQ ID NO: 230159 - DNA, 25 bp, Artificial
  Probe
atcttgtgtgtgtcagagggactgc

SEQ ID NO: 230160 - DNA, 25 bp, Artificial
  Probe
tgaaaacactgaggtgtctgcaaaa

SEQ ID NO: 230161 - DNA, 25 bp, Artificial
  Probe
agatgctgtgggtcacatcttgtgt

SEQ ID NO: 230162 - DNA, 25 bp, Artificial
  Probe
aagtctacaatgattaccgtcaggt

SEQ ID NO: 230163 - DNA, 25 bp, Artificial
  Probe
cgtcaggttcgactgccccggcgag

SEQ ID NO: 230164 - DNA, 25 bp, Artificial
  Probe
taagtggcagatgctgtgggtcaca

SEQ ID NO: 230165 - DNA, 25 bp, Artificial
  Probe
cactgaggtgtctgcaaaagggcac

SEQ ID NO: 230166 - DNA, 25 bp, Artificial
  Probe
caatgattaccgtcaggttcgactg

SEQ ID NO: 230167 - DNA, 25 bp, Artificial
  Probe
agtctacaatgattaccgtcaggtt

SEQ ID NO: 230168 - DNA, 25 bp, Artificial
  Probe
aacactgaggtgtctgcaaaagggc

SEQ ID NO: 230169 - DNA, 25 bp, Artificial
  Probe
ctgtgggtcacatcttgtgtgtgtc

SEQ ID NO: 230170 - DNA, 25 bp, Artificial
  Probe
gagtgactattctttgcctgttata

SEQ ID NO: 230171 - DNA, 25 bp, Artificial
  Probe
atgattaccgtcaggttcgactgcc

SEQ ID NO: 230172 - DNA, 25 bp, Artificial
  Probe
tgctgtgggtcacatcttgtgtgtg

SEQ ID NO: 230173 - DNA, 25 bp, Artificial
  Probe
tgctgcgtccccaacaagtctacaa

SEQ ID NO: 230174 - DNA, 25 bp, Artificial
  Probe
gtgggtcacatcttgtgtgtgtcag

SEQ ID NO: 230175 - DNA, 25 bp, Artificial
  Probe
tatgatggggtacttcagcttctcc

SEQ ID NO: 230176 - DNA, 25 bp, Artificial
  Probe
cctggaagccgttacaagtttggcg

SEQ ID NO: 230177 - DNA, 25 bp, Artificial
  Probe
tgtatgatggggtacttcagcttct

SEQ ID NO: 230178 - DNA, 25 bp, Artificial
  Probe
gttcacagctcatcggaaaaagttt

SEQ ID NO: 230179 - DNA, 25 bp, Artificial
  Probe
cggcctgtacctgatgtctggcagt

SEQ ID NO: 230180 - DNA, 25 bp, Artificial
  Probe
cgacgccctggctaaggtctttgta

SEQ ID NO: 230181 - DNA, 25 bp, Artificial
  Probe
gcggttgatcccaacggcctgtacc

SEQ ID NO: 230182 - DNA, 25 bp, Artificial
  Probe
ccaggagttcacagctcatcggaaa

SEQ ID NO: 230183 - DNA, 25 bp, Artificial
  Probe
aagtaagacgtgtatccaggagttc

SEQ ID NO: 230184 - DNA, 25 bp, Artificial
  Probe
gagccgacgccctggctaaggtctt

SEQ ID NO: 230185 - DNA, 25 bp, Artificial
  Probe
ggggtacttcagcttctccaggtgc

SEQ ID NO: 230186 - DNA, 25 bp, Artificial
  Probe
agccgttacaagtttggcggttgat

SEQ ID NO: 230187 - DNA, 25 bp, Artificial
  Probe
tatccaggagttcacagctcatcgg

SEQ ID NO: 230188 - DNA, 25 bp, Artificial
  Probe
taaatgctatatagccagcgctgga

SEQ ID NO: 230189 - DNA, 25 bp, Artificial
  Probe
ggcccacctggaagccgttacaagt

SEQ ID NO: 230190 - DNA, 25 bp, Artificial
  Probe
cgtgtatccaggagttcacagctca

SEQ ID NO: 230191 - DNA, 25 bp, Artificial
  Probe
gaagagtcgatccatgatgtagcat

SEQ ID NO: 230192 - DNA, 25 bp, Artificial
  Probe
gtttggcggttgatcccaacggcct

SEQ ID NO: 230193 - DNA, 25 bp, Artificial
  Probe
atgatggggtacttcagcttctcca

SEQ ID NO: 230194 - DNA, 25 bp, Artificial
  Probe
tgactgttcaatacgcttgtggaat

SEQ ID NO: 230195 - DNA, 25 bp, Artificial
  Probe
ttgaagagtcgatccatgatgtagc

SEQ ID NO: 230196 - DNA, 25 bp, Artificial
  Probe
gagttcacagctcatcggaaaaagt

SEQ ID NO: 230197 - DNA, 25 bp, Artificial
  Probe
cctggctaaggtctttgtatgatgg

SEQ ID NO: 230198 - DNA, 25 bp, Artificial
  Probe
caacggcctgtacctgatgtctggc

SEQ ID NO: 230199 - DNA, 25 bp, Artificial
  Probe
gatccatgatgtagcattccaccct

SEQ ID NO: 230200 - DNA, 25 bp, Artificial
  Probe
gaagccgttacaagtttggcggttg

SEQ ID NO: 230201 - DNA, 25 bp, Artificial
  Probe
cggttgatcccaacggcctgtacct

SEQ ID NO: 230202 - DNA, 25 bp, Artificial
  Probe
cgatccatgatgtagcattccaccc

SEQ ID NO: 230203 - DNA, 25 bp, Artificial
  Probe
tttggcggttgatcccaacggcctg

SEQ ID NO: 230204 - DNA, 25 bp, Artificial
  Probe
cagctcatcggaaaaagtttgaaga

SEQ ID NO: 230205 - DNA, 25 bp, Artificial
  Probe
tgtacctgatgtctggcagtcatga

SEQ ID NO: 230206 - DNA, 25 bp, Artificial
  Probe
atggggtacttcagcttctccaggt

SEQ ID NO: 230207 - DNA, 25 bp, Artificial
  Probe
tgatgtctggcagtcatgactgttc

SEQ ID NO: 230208 - DNA, 25 bp, Artificial
  Probe
gcgctggagccgacgccctggctaa

SEQ ID NO: 230209 - DNA, 25 bp, Artificial
  Probe
tatagccagcgctggagccgacgcc

SEQ ID NO: 230210 - DNA, 25 bp, Artificial
  Probe
acagctcatcggaaaaagtttgaag

SEQ ID NO: 230211 - DNA, 25 bp, Artificial
  Probe
gtcatgactgttcaatacgcttgtg

SEQ ID NO: 230212 - DNA, 25 bp, Artificial
  Probe
caagtttggcggttgatcccaacgg

SEQ ID NO: 230213 - DNA, 25 bp, Artificial
  Probe
ctgatgtctggcagtcatgactgtt

SEQ ID NO: 230214 - DNA, 25 bp, Artificial
  Probe
tggtggcccacctggaagccgttac

SEQ ID NO: 230215 - DNA, 25 bp, Artificial
  Probe
tgctatatagccagcgctggagccg

SEQ ID NO: 230216 - DNA, 25 bp, Artificial
  Probe
atcccaacggcctgtacctgatgtc

SEQ ID NO: 230217 - DNA, 25 bp, Artificial
  Probe
ccttctaaatgctatatagccagcg

SEQ ID NO: 230218 - DNA, 25 bp, Artificial
  Probe
tggaagccgttacaagtttggcggt

SEQ ID NO: 230219 - DNA, 25 bp, Artificial
  Probe
gccgttacaagtttggcggttgatc

SEQ ID NO: 230220 - DNA, 25 bp, Artificial
  Probe
caggagttcacagctcatcggaaaa

SEQ ID NO: 230221 - DNA, 25 bp, Artificial
  Probe
acacaagtgtttctggtcagggctg

SEQ ID NO: 230222 - DNA, 25 bp, Artificial
  Probe
ggaaaactaacgtctcgctggacac

SEQ ID NO: 230223 - DNA, 25 bp, Artificial
  Probe
ctggacacaatttgctgtcgagcca

SEQ ID NO: 230224 - DNA, 25 bp, Artificial
  Probe
aagtgacacaagtgtttctggtcag

SEQ ID NO: 230225 - DNA, 25 bp, Artificial
  Probe
agggctgtgtcatcagaaagggcat

SEQ ID NO: 230226 - DNA, 25 bp, Artificial
  Probe
ggctgtgtcatcagaaagggcatga

SEQ ID NO: 230227 - DNA, 25 bp, Artificial
  Probe
tcagggctgtgtcatcagaaagggc

SEQ ID NO: 230228 - DNA, 25 bp, Artificial
  Probe
ttggaaaactaacgtctcgctggac

SEQ ID NO: 230229 - DNA, 25 bp, Artificial
  Probe
tggacacaatttgctgtcgagccac

SEQ ID NO: 230230 - DNA, 25 bp, Artificial
  Probe
cctcttcgtgtgttgtttccgttgc

SEQ ID NO: 230231 - DNA, 25 bp, Artificial
  Probe
tggtcagggctgtgtcatcagaaag

SEQ ID NO: 230232 - DNA, 25 bp, Artificial
  Probe
tgctgtcgagccacgtgcctgtcac

SEQ ID NO: 230233 - DNA, 25 bp, Artificial
  Probe
ccttttttgaaactggttcatggtg

SEQ ID NO: 230234 - DNA, 25 bp, Artificial
  Probe
tccgttgctgttgctatcgctgttt

SEQ ID NO: 230235 - DNA, 25 bp, Artificial
  Probe
tccgttcttgtgtatatgtgtgacg

SEQ ID NO: 230236 - DNA, 25 bp, Artificial
  Probe
ctactggtctgtactctttggattg

SEQ ID NO: 230237 - DNA, 25 bp, Artificial
  Probe
agccacgtgcctgtcactactggtc

SEQ ID NO: 230238 - DNA, 25 bp, Artificial
  Probe
tctggtcagggctgtgtcatcagaa

SEQ ID NO: 230239 - DNA, 25 bp, Artificial
  Probe
aatttgctgtcgagccacgtgcctg

SEQ ID NO: 230240 - DNA, 25 bp, Artificial
  Probe
gtgtttctggtcagggctgtgtcat

SEQ ID NO: 230241 - DNA, 25 bp, Artificial
  Probe
tcgctggacacaatttgctgtcgag

SEQ ID NO: 230242 - DNA, 25 bp, Artificial
  Probe
ttccttttttgaaactggttcatgg

SEQ ID NO: 230243 - DNA, 25 bp, Artificial
  Probe
ttcatggtgacagttaagtgacaca

SEQ ID NO: 230244 - DNA, 25 bp, Artificial
  Probe
gagccacgtgcctgtcactactggt

SEQ ID NO: 230245 - DNA, 25 bp, Artificial
  Probe
cgttgctgttgctatcgctgtttta

SEQ ID NO: 230246 - DNA, 25 bp, Artificial
  Probe
ccgttcttgtgtatatgtgtgacgt

SEQ ID NO: 230247 - DNA, 25 bp, Artificial
  Probe
ctgtgtcatcagaaagggcatgatg

SEQ ID NO: 230248 - DNA, 25 bp, Artificial
  Probe
gttcatggtgacagttaagtgacac

SEQ ID NO: 230249 - DNA, 25 bp, Artificial
  Probe
ttcttgtgtatatgtgtgacgttcc

SEQ ID NO: 230250 - DNA, 25 bp, Artificial
  Probe
gttgtttccgttgctgttgctatcg

SEQ ID NO: 230251 - DNA, 25 bp, Artificial
  Probe
cgtgcctgtcactactggtctgtac

SEQ ID NO: 230252 - DNA, 25 bp, Artificial
  Probe
aaagccgtagcctcttcgtgtgttg

SEQ ID NO: 230253 - DNA, 25 bp, Artificial
  Probe
tgacacaagtgtttctggtcagggc

SEQ ID NO: 230254 - DNA, 25 bp, Artificial
  Probe
cactgctttccttttttgaaactgg

SEQ ID NO: 230255 - DNA, 25 bp, Artificial
  Probe
cttgtgtatatgtgtgacgttccgg

SEQ ID NO: 230256 - DNA, 25 bp, Artificial
  Probe
actggtctgtactctttggattggc

SEQ ID NO: 230257 - DNA, 25 bp, Artificial
  Probe
ctgtctgtcgggttcagcatttttg

SEQ ID NO: 230258 - DNA, 25 bp, Artificial
  Probe
aagccgtagcctcttcgtgtgttgt

SEQ ID NO: 230259 - DNA, 25 bp, Artificial
  Probe
cgtctcgctggacacaatttgctgt

SEQ ID NO: 230260 - DNA, 25 bp, Artificial
  Probe
ttccgttcttgtgtatatgtgtgac

SEQ ID NO: 230261 - DNA, 25 bp, Artificial
  Probe
tgtctgtcgggttcagcatttttgt

SEQ ID NO: 230262 - DNA, 25 bp, Artificial
  Probe
tgtcgagccacgtgcctgtcactac

SEQ ID NO: 230263 - DNA, 25 bp, Artificial
  Probe
gtgtcatcagaaagggcatgatggc

SEQ ID NO: 230264 - DNA, 25 bp, Artificial
  Probe
ctaacgtctcgctggacacaatttg

SEQ ID NO: 230265 - DNA, 25 bp, Artificial
  Probe
caatttgctgtcgagccacgtgcct

SEQ ID NO: 230266 - DNA, 25 bp, Artificial
  Probe
tggaaaactaacgtctcgctggaca

SEQ ID NO: 230267 - DNA, 25 bp, Artificial
  Probe
tctttctgagcaatgagacctgcat

SEQ ID NO: 230268 - DNA, 25 bp, Artificial
  Probe
tcaggattgtggtcactcggagtga

SEQ ID NO: 230269 - DNA, 25 bp, Artificial
  Probe
agcaatgagacctgcatgcagccac

SEQ ID NO: 230270 - DNA, 25 bp, Artificial
  Probe
ccatcgttggccagtgacggggatt

SEQ ID NO: 230271 - DNA, 25 bp, Artificial
  Probe
gcaatgagacctgcatgcagccacg

SEQ ID NO: 230272 - DNA, 25 bp, Artificial
  Probe
tatctttctgagcaatgagacctgc

SEQ ID NO: 230273 - DNA, 25 bp, Artificial
  Probe
tctgagcaatgagacctgcatgcag

SEQ ID NO: 230274 - DNA, 25 bp, Artificial
  Probe
atcgttggccagtgacggggatttt

SEQ ID NO: 230275 - DNA, 25 bp, Artificial
  Probe
tgagacctgcatgcagccacgtcag

SEQ ID NO: 230276 - DNA, 25 bp, Artificial
  Probe
ctgagcaatgagacctgcatgcagc

SEQ ID NO: 230277 - DNA, 25 bp, Artificial
  Probe
tcgttggccagtgacggggattttt

SEQ ID NO: 230278 - DNA, 25 bp, Artificial
  Probe
catcgttggccagtgacggggattt

SEQ ID NO: 230279 - DNA, 25 bp, Artificial
  Probe
agacctgcatgcagccacgtcagac

SEQ ID NO: 230280 - DNA, 25 bp, Artificial
  Probe
tgagcaatgagacctgcatgcagcc

SEQ ID NO: 230281 - DNA, 25 bp, Artificial
  Probe
tctaagcacgatgattgcaagtgac

SEQ ID NO: 230282 - DNA, 25 bp, Artificial
  Probe
ctaagcacgatgattgcaagtgaca

SEQ ID NO: 230283 - DNA, 25 bp, Artificial
  Probe
ctttctgagcaatgagacctgcatg

SEQ ID NO: 230284 - DNA, 25 bp, Artificial
  Probe
ttctgagcaatgagacctgcatgca

SEQ ID NO: 230285 - DNA, 25 bp, Artificial
  Probe
atctttctgagcaatgagacctgca

SEQ ID NO: 230286 - DNA, 25 bp, Artificial
  Probe
atgagacctgcatgcagccacgtca

SEQ ID NO: 230287 - DNA, 25 bp, Artificial
  Probe
ttccctttaaggaatgaagctcttc

SEQ ID NO: 230288 - DNA, 25 bp, Artificial
  Probe
ttttccctttaaggaatgaagctct

SEQ ID NO: 230289 - DNA, 25 bp, Artificial
  Probe
tttccctttaaggaatgaagctctt

SEQ ID NO: 230290 - DNA, 25 bp, Artificial
  Probe
taagcacgatgattgcaagtgacac

SEQ ID NO: 230291 - DNA, 25 bp, Artificial
  Probe
tttctgagcaatgagacctgcatgc

SEQ ID NO: 230292 - DNA, 25 bp, Artificial
  Probe
aatgagacctgcatgcagccacgtc

SEQ ID NO: 230293 - DNA, 25 bp, Artificial
  Probe
gagacctgcatgcagccacgtcaga

SEQ ID NO: 230294 - DNA, 25 bp, Artificial
  Probe
caatgagacctgcatgcagccacgt

SEQ ID NO: 230295 - DNA, 25 bp, Artificial
  Probe
gctctggctgggtctcaacgacatg

SEQ ID NO: 230296 - DNA, 25 bp, Artificial
  Probe
aggcgctgttcgagtatgcgcgcca

SEQ ID NO: 230297 - DNA, 25 bp, Artificial
  Probe
atgaggcgagcgaggactgcatctc

SEQ ID NO: 230298 - DNA, 25 bp, Artificial
  Probe
agcgaggactgcatctcacaagggg

SEQ ID NO: 230299 - DNA, 25 bp, Artificial
  Probe
ctcaagaacaggttggatgtcctgg

SEQ ID NO: 230300 - DNA, 25 bp, Artificial
  Probe
gccctgctgaaggagaagcaggcct

SEQ ID NO: 230301 - DNA, 25 bp, Artificial
  Probe
ctctggctgggtctcaacgacatgg

SEQ ID NO: 230302 - DNA, 25 bp, Artificial
  Probe
gaagaccttccatgaggcgagcgag

SEQ ID NO: 230303 - DNA, 25 bp, Artificial
  Probe
agcaggccttacagactgtgtgcct

SEQ ID NO: 230304 - DNA, 25 bp, Artificial
  Probe
ttacagactgtgtgcctgaagggca

SEQ ID NO: 230305 - DNA, 25 bp, Artificial
  Probe
agactgtgtgcctgaagggcaccaa

SEQ ID NO: 230306 - DNA, 25 bp, Artificial
  Probe
tgaggcgagcgaggactgcatctca

SEQ ID NO: 230307 - DNA, 25 bp, Artificial
  Probe
ctggctgggtctcaacgacatggct

SEQ ID NO: 230308 - DNA, 25 bp, Artificial
  Probe
actgcatctcacaagggggcacgct

SEQ ID NO: 230309 - DNA, 25 bp, Artificial
  Probe
gcgctgttcgagtatgcgcgccaga

SEQ ID NO: 230310 - DNA, 25 bp, Artificial
  Probe
agaacaggttggatgtcctggccca

SEQ ID NO: 230311 - DNA, 25 bp, Artificial
  Probe
agaatgaggcgctgttcgagtatgc

SEQ ID NO: 230312 - DNA, 25 bp, Artificial
  Probe
aggcgagcgaggactgcatctcaca

SEQ ID NO: 230313 - DNA, 25 bp, Artificial
  Probe
agggcaccaaggtgaacttgaagtg

SEQ ID NO: 230314 - DNA, 25 bp, Artificial
  Probe
cgagcgaggactgcatctcacaagg

SEQ ID NO: 230315 - DNA, 25 bp, Artificial
  Probe
tgaagggcaccaaggtgaacttgaa

SEQ ID NO: 230316 - DNA, 25 bp, Artificial
  Probe
cggagctctggctgggtctcaacga

SEQ ID NO: 230317 - DNA, 25 bp, Artificial
  Probe
cgaggactgcatctcacaagggggc

SEQ ID NO: 230318 - DNA, 25 bp, Artificial
  Probe
gagaagcaggccttacagactgtgt

SEQ ID NO: 230319 - DNA, 25 bp, Artificial
  Probe
cagtctgagctagagaatgaggcgc

SEQ ID NO: 230320 - DNA, 25 bp, Artificial
  Probe
ggcacgccgcagtctgagctagaga

SEQ ID NO: 230321 - DNA, 25 bp, Artificial
  Probe
cgcagtctgagctagagaatgaggc

SEQ ID NO: 230322 - DNA, 25 bp, Artificial
  Probe
agctcaagaacaggttggatgtcct

SEQ ID NO: 230323 - DNA, 25 bp, Artificial
  Probe
acaggttggatgtcctggcccagga

SEQ ID NO: 230324 - DNA, 25 bp, Artificial
  Probe
ctgggtctcaacgacatggcttcgg

SEQ ID NO: 230325 - DNA, 25 bp, Artificial
  Probe
agaccttccatgaggcgagcgagga

SEQ ID NO: 230326 - DNA, 25 bp, Artificial
  Probe
aatgaggcgctgttcgagtatgcgc

SEQ ID NO: 230327 - DNA, 25 bp, Artificial
  Probe
agtctgagctagagaatgaggcgct

SEQ ID NO: 230328 - DNA, 25 bp, Artificial
  Probe
ctgtgtgcctgaagggcaccaaggt

SEQ ID NO: 230329 - DNA, 25 bp, Artificial
  Probe
gtctcaacgacatggcttcggaagg

SEQ ID NO: 230330 - DNA, 25 bp, Artificial
  Probe
ctgcatctcacaagggggcacgctg

SEQ ID NO: 230331 - DNA, 25 bp, Artificial
  Probe
tgcctgaagggcaccaaggtgaact

SEQ ID NO: 230332 - DNA, 25 bp, Artificial
  Probe
tgggcacgccgcagtctgagctaga

SEQ ID NO: 230333 - DNA, 25 bp, Artificial
  Probe
caacgacatggcttcggaaggcgcc

SEQ ID NO: 230334 - DNA, 25 bp, Artificial
  Probe
aagcaggccttacagactgtgtgcc

SEQ ID NO: 230335 - DNA, 25 bp, Artificial
  Probe
acccaaccgaagaccttccatgagg

SEQ ID NO: 230336 - DNA, 25 bp, Artificial
  Probe
ccaaccgaagaccttccatgaggcg

SEQ ID NO: 230337 - DNA, 25 bp, Artificial
  Probe
aggccttacagactgtgtgcctgaa

SEQ ID NO: 230338 - DNA, 25 bp, Artificial
  Probe
gctgttcgagtatgcgcgccagagc

SEQ ID NO: 230339 - DNA, 25 bp, Artificial
  Probe
cctgctgaaggagaagcaggcctta

SEQ ID NO: 230340 - DNA, 25 bp, Artificial
  Probe
ttccatgaggcgagcgaggactgca

SEQ ID NO: 230341 - DNA, 25 bp, Artificial
  Probe
caatcaccggacagtccagatctga

SEQ ID NO: 230342 - DNA, 25 bp, Artificial
  Probe
agatggttgactcttaacagccttg

SEQ ID NO: 230343 - DNA, 25 bp, Artificial
  Probe
gacgtccatctactcacttctgtgg

SEQ ID NO: 230344 - DNA, 25 bp, Artificial
  Probe
ctcttaacagccttgagggtctgca

SEQ ID NO: 230345 - DNA, 25 bp, Artificial
  Probe
atctactcacttctgtgggttcccc

SEQ ID NO: 230346 - DNA, 25 bp, Artificial
  Probe
acttctgtgggttcccctctttctg

SEQ ID NO: 230347 - DNA, 25 bp, Artificial
  Probe
tgacgtccatctactcacttctgtg

SEQ ID NO: 230348 - DNA, 25 bp, Artificial
  Probe
cagccttgagggtctgcaatcaccg

SEQ ID NO: 230349 - DNA, 25 bp, Artificial
  Probe
aatcaccggacagtccagatctgac

SEQ ID NO: 230350 - DNA, 25 bp, Artificial
  Probe
gggtctgcaatcaccggacagtcca

SEQ ID NO: 230351 - DNA, 25 bp, Artificial
  Probe
tgtgggttcccctctttctgttcct

SEQ ID NO: 230352 - DNA, 25 bp, Artificial
  Probe
tctgttcctagctcaggcaggtggg

SEQ ID NO: 230353 - DNA, 25 bp, Artificial
  Probe
gccttgagggtctgcaatcaccgga

SEQ ID NO: 230354 - DNA, 25 bp, Artificial
  Probe
tggttgactcttaacagccttgagg

SEQ ID NO: 230355 - DNA, 25 bp, Artificial
  Probe
accggacagtccagatctgactgac

SEQ ID NO: 230356 - DNA, 25 bp, Artificial
  Probe
ttctgttcctagctcaggcaggtgg

SEQ ID NO: 230357 - DNA, 25 bp, Artificial
  Probe
tttctgttcctagctcaggcaggtg

SEQ ID NO: 230358 - DNA, 25 bp, Artificial
  Probe
ccttgagggtctgcaatcaccggac

SEQ ID NO: 230359 - DNA, 25 bp, Artificial
  Probe
tccatctactcacttctgtgggttc

SEQ ID NO: 230360 - DNA, 25 bp, Artificial
  Probe
cgtccatctactcacttctgtgggt

SEQ ID NO: 230361 - DNA, 25 bp, Artificial
  Probe
tgggttcccctctttctgttcctag

SEQ ID NO: 230362 - DNA, 25 bp, Artificial
  Probe
gagggtctgcaatcaccggacagtc

SEQ ID NO: 230363 - DNA, 25 bp, Artificial
  Probe
tccagatctgactgacgtccatcta

SEQ ID NO: 230364 - DNA, 25 bp, Artificial
  Probe
cacttctgtgggttcccctctttct

SEQ ID NO: 230365 - DNA, 25 bp, Artificial
  Probe
gtccatctactcacttctgtgggtt

SEQ ID NO: 230366 - DNA, 25 bp, Artificial
  Probe
ggttcccctctttctgttcctagct

SEQ ID NO: 230367 - DNA, 25 bp, Artificial
  Probe
ggttgactcttaacagccttgaggg

SEQ ID NO: 230368 - DNA, 25 bp, Artificial
  Probe
gttgactcttaacagccttgagggt

SEQ ID NO: 230369 - DNA, 25 bp, Artificial
  Probe
cttgagggtctgcaatcaccggaca

SEQ ID NO: 230370 - DNA, 25 bp, Artificial
  Probe
caccggacagtccagatctgactga

SEQ ID NO: 230371 - DNA, 25 bp, Artificial
  Probe
tctactcacttctgtgggttcccct

SEQ ID NO: 230372 - DNA, 25 bp, Artificial
  Probe
cagatctgactgacgtccatctact

SEQ ID NO: 230373 - DNA, 25 bp, Artificial
  Probe
acagtccagatctgactgacgtcca

SEQ ID NO: 230374 - DNA, 25 bp, Artificial
  Probe
cctctttctgttcctagctcaggca

SEQ ID NO: 230375 - DNA, 25 bp, Artificial
  Probe
agggtctgcaatcaccggacagtcc

SEQ ID NO: 230376 - DNA, 25 bp, Artificial
  Probe
ttaacagccttgagggtctgcaatc

SEQ ID NO: 230377 - DNA, 25 bp, Artificial
  Probe
ctctttctgttcctagctcaggcag

SEQ ID NO: 230378 - DNA, 25 bp, Artificial
  Probe
cttaacagccttgagggtctgcaat

SEQ ID NO: 230379 - DNA, 25 bp, Artificial
  Probe
tctttctgttcctagctcaggcagg

SEQ ID NO: 230380 - DNA, 25 bp, Artificial
  Probe
gatggttgactcttaacagccttga

SEQ ID NO: 230381 - DNA, 25 bp, Artificial
  Probe
ttgagggtctgcaatcaccggacag

SEQ ID NO: 230382 - DNA, 25 bp, Artificial
  Probe
gatctgactgacgtccatctactca

SEQ ID NO: 230383 - DNA, 25 bp, Artificial
  Probe
ttgactcttaacagccttgagggtc

SEQ ID NO: 230384 - DNA, 25 bp, Artificial
  Probe
tgcaatcaccggacagtccagatct

SEQ ID NO: 230385 - DNA, 25 bp, Artificial
  Probe
catctactcacttctgtgggttccc

SEQ ID NO: 230386 - DNA, 25 bp, Artificial
  Probe
gcaatcaccggacagtccagatctg

SEQ ID NO: 230387 - DNA, 25 bp, Artificial
  Probe
ttccattccatcctcaaggtggact

SEQ ID NO: 230388 - DNA, 25 bp, Artificial
  Probe
acttccattccatcctcaaggtgga

SEQ ID NO: 230389 - DNA, 25 bp, Artificial
  Probe
agaagcgaagcgacagcctgttcca

SEQ ID NO: 230390 - DNA, 25 bp, Artificial
  Probe
ttccatcctcaaggtggactgcgtg

SEQ ID NO: 230391 - DNA, 25 bp, Artificial
  Probe
cgtggagcacacctccaagtacgtg

SEQ ID NO: 230392 - DNA, 25 bp, Artificial
  Probe
attccatcctcaaggtggactgcgt

SEQ ID NO: 230393 - DNA, 25 bp, Artificial
  Probe
agcacacctccaagtacgtgtactt

SEQ ID NO: 230394 - DNA, 25 bp, Artificial
  Probe
tgcgtggagcacacctccaagtacg

SEQ ID NO: 230395 - DNA, 25 bp, Artificial
  Probe
acagcctgttccaggtctggaagaa

SEQ ID NO: 230396 - DNA, 25 bp, Artificial
  Probe
atcggcccaaggagctgtacttcca

SEQ ID NO: 230397 - DNA, 25 bp, Artificial
  Probe
cgatcggcccaaggagctgtacttc

SEQ ID NO: 230398 - DNA, 25 bp, Artificial
  Probe
atcctcaaggtggactgcgtggagc

SEQ ID NO: 230399 - DNA, 25 bp, Artificial
  Probe
agcgatcggcccaaggagctgtact

SEQ ID NO: 230400 - DNA, 25 bp, Artificial
  Probe
cgacagcctgttccaggtctggaag

SEQ ID NO: 230401 - DNA, 25 bp, Artificial
  Probe
cggcaacagcgatcggcccaaggag

SEQ ID NO: 230402 - DNA, 25 bp, Artificial
  Probe
aaggagctgtacttccattccatcc

SEQ ID NO: 230403 - DNA, 25 bp, Artificial
  Probe
cggcccaaggagctgtacttccatt

SEQ ID NO: 230404 - DNA, 25 bp, Artificial
  Probe
cagcctgttccaggtctggaagaag

SEQ ID NO: 230405 - DNA, 25 bp, Artificial
  Probe
ggagcacacctccaagtacgtgtac

SEQ ID NO: 230406 - DNA, 25 bp, Artificial
  Probe
tgttccaggtctggaagaagaagcg

SEQ ID NO: 230407 - DNA, 25 bp, Artificial
  Probe
cctcaaggtggactgcgtggagcac

SEQ ID NO: 230408 - DNA, 25 bp, Artificial
  Probe
cttccattccatcctcaaggtggac

SEQ ID NO: 230409 - DNA, 25 bp, Artificial
  Probe
gcctgttccaggtctggaagaagaa

SEQ ID NO: 230410 - DNA, 25 bp, Artificial
  Probe
aagcgacagcctgttccaggtctgg

SEQ ID NO: 230411 - DNA, 25 bp, Artificial
  Probe
gcgtggagcacacctccaagtacgt

SEQ ID NO: 230412 - DNA, 25 bp, Artificial
  Probe
aagcgaagcgacagcctgttccagg

SEQ ID NO: 230413 - DNA, 25 bp, Artificial
  Probe
aagtacgtgtacttcaccatcgtca

SEQ ID NO: 230414 - DNA, 25 bp, Artificial
  Probe
agcgctgcgtgctcacggccgatcg

SEQ ID NO: 230415 - DNA, 25 bp, Artificial
  Probe
actgcgtggagcacacctccaagta

SEQ ID NO: 230416 - DNA, 25 bp, Artificial
  Probe
ggactgcgtggagcacacctccaag

SEQ ID NO: 230417 - DNA, 25 bp, Artificial
  Probe
tccaagtacgtgtacttcaccatcg

SEQ ID NO: 230418 - DNA, 25 bp, Artificial
  Probe
ggtggactgcgtggagcacacctcc

SEQ ID NO: 230419 - DNA, 25 bp, Artificial
  Probe
agaagcgctgcgtgctcacggccga

SEQ ID NO: 230420 - DNA, 25 bp, Artificial
  Probe
gcgatcggcccaaggagctgtactt

SEQ ID NO: 230421 - DNA, 25 bp, Artificial
  Probe
ctgttccaggtctggaagaagaagc

SEQ ID NO: 230422 - DNA, 25 bp, Artificial
  Probe
ttccaggtctggaagaagaagcgct

SEQ ID NO: 230423 - DNA, 25 bp, Artificial
  Probe
gcacacctccaagtacgtgtacttc

SEQ ID NO: 230424 - DNA, 25 bp, Artificial
  Probe
ctcaaggtggactgcgtggagcaca

SEQ ID NO: 230425 - DNA, 25 bp, Artificial
  Probe
gttccaggtctggaagaagaagcgc

SEQ ID NO: 230426 - DNA, 25 bp, Artificial
  Probe
ccatcctcaaggtggactgcgtgga

SEQ ID NO: 230427 - DNA, 25 bp, Artificial
  Probe
ccaagtacgtgtacttcaccatcgt

SEQ ID NO: 230428 - DNA, 25 bp, Artificial
  Probe
cccaaggagctgtacttccattcca

SEQ ID NO: 230429 - DNA, 25 bp, Artificial
  Probe
ggagctgtacttccattccatcctc

SEQ ID NO: 230430 - DNA, 25 bp, Artificial
  Probe
gtacttccattccatcctcaaggtg

SEQ ID NO: 230431 - DNA, 25 bp, Artificial
  Probe
gcccaaggagctgtacttccattcc

SEQ ID NO: 230432 - DNA, 25 bp, Artificial
  Probe
ccggcaacagcgatcggcccaagga

SEQ ID NO: 230433 - DNA, 25 bp, Artificial
  Probe
gaaacccctgctgagtaaagactgg

SEQ ID NO: 230434 - DNA, 25 bp, Artificial
  Probe
aatgttttctgcagccctgggtgtg

SEQ ID NO: 230435 - DNA, 25 bp, Artificial
  Probe
tccctcactgtgttgctgagtccac

SEQ ID NO: 230436 - DNA, 25 bp, Artificial
  Probe
atgtgaaacactgagcttgattctc

SEQ ID NO: 230437 - DNA, 25 bp, Artificial
  Probe
tgagcttgattctcttaagccaggc

SEQ ID NO: 230438 - DNA, 25 bp, Artificial
  Probe
cataggccagagagtgaagacacat

SEQ ID NO: 230439 - DNA, 25 bp, Artificial
  Probe
cattctgggagctgttggtgtctca

SEQ ID NO: 230440 - DNA, 25 bp, Artificial
  Probe
gaagacacattgctgggttccctca

SEQ ID NO: 230441 - DNA, 25 bp, Artificial
  Probe
aacactgagcttgattctcttaagc

SEQ ID NO: 230442 - DNA, 25 bp, Artificial
  Probe
tgggttccctcactgtgttgctgag

SEQ ID NO: 230443 - DNA, 25 bp, Artificial
  Probe
cactgtgttgctgagtccacgcagg

SEQ ID NO: 230444 - DNA, 25 bp, Artificial
  Probe
agaggaagcccctgaaacccctgct

SEQ ID NO: 230445 - DNA, 25 bp, Artificial
  Probe
tccccaatgttttctgcagccctgg

SEQ ID NO: 230446 - DNA, 25 bp, Artificial
  Probe
aagacacattgctgggttccctcac

SEQ ID NO: 230447 - DNA, 25 bp, Artificial
  Probe
tgctgggttccctcactgtgttgct

SEQ ID NO: 230448 - DNA, 25 bp, Artificial
  Probe
attctgggagctgttggtgtctcaa

SEQ ID NO: 230449 - DNA, 25 bp, Artificial
  Probe
ctgttggtgtctcaacatactttcc

SEQ ID NO: 230450 - DNA, 25 bp, Artificial
  Probe
ctgtgttgctgagtccacgcaggtg

SEQ ID NO: 230451 - DNA, 25 bp, Artificial
  Probe
gagtgaagacacattgctgggttcc

SEQ ID NO: 230452 - DNA, 25 bp, Artificial
  Probe
gctaagagttcattctgggagctgt

SEQ ID NO: 230453 - DNA, 25 bp, Artificial
  Probe
tgaagacacattgctgggttccctc

SEQ ID NO: 230454 - DNA, 25 bp, Artificial
  Probe
ctaagagttcattctgggagctgtt

SEQ ID NO: 230455 - DNA, 25 bp, Artificial
  Probe
gaaacactgagcttgattctcttaa

SEQ ID NO: 230456 - DNA, 25 bp, Artificial
  Probe
acactgagcttgattctcttaagcc

SEQ ID NO: 230457 - DNA, 25 bp, Artificial
  Probe
gttggtgtctcaacatactttcccc

SEQ ID NO: 230458 - DNA, 25 bp, Artificial
  Probe
ttctcaggtggagtaagaggaagcc

SEQ ID NO: 230459 - DNA, 25 bp, Artificial
  Probe
tgggagctgttggtgtctcaacata

SEQ ID NO: 230460 - DNA, 25 bp, Artificial
  Probe
ccctgctgagtaaagactggtttga

SEQ ID NO: 230461 - DNA, 25 bp, Artificial
  Probe
gggagctgttggtgtctcaacatac

SEQ ID NO: 230462 - DNA, 25 bp, Artificial
  Probe
agcttgattctcttaagccaggcat

SEQ ID NO: 230463 - DNA, 25 bp, Artificial
  Probe
tctcaggtggagtaagaggaagccc

SEQ ID NO: 230464 - DNA, 25 bp, Artificial
  Probe
cctcactgtgttgctgagtccacgc

SEQ ID NO: 230465 - DNA, 25 bp, Artificial
  Probe
tatgtgaaacactgagcttgattct

SEQ ID NO: 230466 - DNA, 25 bp, Artificial
  Probe
caatgttttctgcagccctgggtgt

SEQ ID NO: 230467 - DNA, 25 bp, Artificial
  Probe
gttccctcactgtgttgctgagtcc

SEQ ID NO: 230468 - DNA, 25 bp, Artificial
  Probe
gttcattctgggagctgttggtgtc

SEQ ID NO: 230469 - DNA, 25 bp, Artificial
  Probe
gtgaaacactgagcttgattctctt

SEQ ID NO: 230470 - DNA, 25 bp, Artificial
  Probe
ctgggagctgttggtgtctcaacat

SEQ ID NO: 230471 - DNA, 25 bp, Artificial
  Probe
tagctaagagttcattctgggagct

SEQ ID NO: 230472 - DNA, 25 bp, Artificial
  Probe
gctgggttccctcactgtgttgctg

SEQ ID NO: 230473 - DNA, 25 bp, Artificial
  Probe
ttaacataggccagagagtgaagac

SEQ ID NO: 230474 - DNA, 25 bp, Artificial
  Probe
aacccctgctgagtaaagactggtt

SEQ ID NO: 230475 - DNA, 25 bp, Artificial
  Probe
cactgagcttgattctcttaagcca

SEQ ID NO: 230476 - DNA, 25 bp, Artificial
  Probe
gcttgattctcttaagccaggcatc

SEQ ID NO: 230477 - DNA, 25 bp, Artificial
  Probe
gtagctaagagttcattctgggagc

SEQ ID NO: 230478 - DNA, 25 bp, Artificial
  Probe
acattgctgggttccctcactgtgt

SEQ ID NO: 230479 - DNA, 25 bp, Artificial
  Probe
ctcctagtcacatttatgtgtttgt

SEQ ID NO: 230480 - DNA, 25 bp, Artificial
  Probe
acgctctgtgccatcgacttgcagt

SEQ ID NO: 230481 - DNA, 25 bp, Artificial
  Probe
tctggtcctccttggctgttggggg

SEQ ID NO: 230482 - DNA, 25 bp, Artificial
  Probe
tccatctggtcctccttggctgttg

SEQ ID NO: 230483 - DNA, 25 bp, Artificial
  Probe
aaatccaggtattaacgaattagtg

SEQ ID NO: 230484 - DNA, 25 bp, Artificial
  Probe
atctggtcctccttggctgttgggg

SEQ ID NO: 230485 - DNA, 25 bp, Artificial
  Probe
aaccacacaaaaaattccacttgat

SEQ ID NO: 230486 - DNA, 25 bp, Artificial
  Probe
gcaaaaatagagccttctccactcc

SEQ ID NO: 230487 - DNA, 25 bp, Artificial
  Probe
tgtttaatccagtccttttcaattt

SEQ ID NO: 230488 - DNA, 25 bp, Artificial
  Probe
tggctgttgggggcaaaaatagagc

SEQ ID NO: 230489 - DNA, 25 bp, Artificial
  Probe
gaataattaaactctagtgggagag

SEQ ID NO: 230490 - DNA, 25 bp, Artificial
  Probe
tcttttccatctggtcctccttggc

SEQ ID NO: 230491 - DNA, 25 bp, Artificial
  Probe
ccatctggtcctccttggctgttgg

SEQ ID NO: 230492 - DNA, 25 bp, Artificial
  Probe
atcgacttgcagtttccctaactgt

SEQ ID NO: 230493 - DNA, 25 bp, Artificial
  Probe
tcgacttgcagtttccctaactgtt

SEQ ID NO: 230494 - DNA, 25 bp, Artificial
  Probe
tgttaaaatccaggtattaacgaat

SEQ ID NO: 230495 - DNA, 25 bp, Artificial
  Probe
gactttttcaccagcacgctctgtg

SEQ ID NO: 230496 - DNA, 25 bp, Artificial
  Probe
atagagccttctccactcctagtca

SEQ ID NO: 230497 - DNA, 25 bp, Artificial
  Probe
actttttcaccagcacgctctgtgc

SEQ ID NO: 230498 - DNA, 25 bp, Artificial
  Probe
cgacttgcagtttccctaactgttt

SEQ ID NO: 230499 - DNA, 25 bp, Artificial
  Probe
ttagtgtttaatccagtccttttca

SEQ ID NO: 230500 - DNA, 25 bp, Artificial
  Probe
caacgaaatctcaggaataattaaa

SEQ ID NO: 230501 - DNA, 25 bp, Artificial
  Probe
attccacttgataaaacttcttcca

SEQ ID NO: 230502 - DNA, 25 bp, Artificial
  Probe
cgaaatctcaggaataattaaactc

SEQ ID NO: 230503 - DNA, 25 bp, Artificial
  Probe
cgctctgtgccatcgacttgcagtt

SEQ ID NO: 230504 - DNA, 25 bp, Artificial
  Probe
cacatttatgtgtttgttaaaatcc

SEQ ID NO: 230505 - DNA, 25 bp, Artificial
  Probe
gttcttttccatctggtcctccttg

SEQ ID NO: 230506 - DNA, 25 bp, Artificial
  Probe
taaaacttcttccaacgaaatctca

SEQ ID NO: 230507 - DNA, 25 bp, Artificial
  Probe
ttcttttccatctggtcctccttgg

SEQ ID NO: 230508 - DNA, 25 bp, Artificial
  Probe
gccatcgacttgcagtttccctaac

SEQ ID NO: 230509 - DNA, 25 bp, Artificial
  Probe
cctagtcacatttatgtgtttgtta

SEQ ID NO: 230510 - DNA, 25 bp, Artificial
  Probe
cttttccatctggtcctccttggct

SEQ ID NO: 230511 - DNA, 25 bp, Artificial
  Probe
ccatcgacttgcagtttccctaact

SEQ ID NO: 230512 - DNA, 25 bp, Artificial
  Probe
tgtgccatcgacttgcagtttccct

SEQ ID NO: 230513 - DNA, 25 bp, Artificial
  Probe
atttattgtacattattttcataga

SEQ ID NO: 230514 - DNA, 25 bp, Artificial
  Probe
taattaaactctagtgggagagggt

SEQ ID NO: 230515 - DNA, 25 bp, Artificial
  Probe
catctggtcctccttggctgttggg

SEQ ID NO: 230516 - DNA, 25 bp, Artificial
  Probe
cagcacgctctgtgccatcgacttg

SEQ ID NO: 230517 - DNA, 25 bp, Artificial
  Probe
tgttcttttccatctggtcctcctt

SEQ ID NO: 230518 - DNA, 25 bp, Artificial
  Probe
ggactttttcaccagcacgctctgt

SEQ ID NO: 230519 - DNA, 25 bp, Artificial
  Probe
ttccatctggtcctccttggctgtt

SEQ ID NO: 230520 - DNA, 25 bp, Artificial
  Probe
catcgacttgcagtttccctaactg

SEQ ID NO: 230521 - DNA, 25 bp, Artificial
  Probe
actcctagtcacatttatgtgtttg

SEQ ID NO: 230522 - DNA, 25 bp, Artificial
  Probe
tgccatcgacttgcagtttccctaa

SEQ ID NO: 230523 - DNA, 25 bp, Artificial
  Probe
gtgccatcgacttgcagtttcccta

SEQ ID NO: 230524 - DNA, 25 bp, Artificial
  Probe
tttttcaccagcacgctctgtgcca

SEQ ID NO: 230525 - DNA, 25 bp, Artificial
  Probe
agtattgtatgtttcctctggattc

SEQ ID NO: 230526 - DNA, 25 bp, Artificial
  Probe
attgtatgtttcctctggattcggc

SEQ ID NO: 230527 - DNA, 25 bp, Artificial
  Probe
tgtatgtttcctctggattcggcca

SEQ ID NO: 230528 - DNA, 25 bp, Artificial
  Probe
gttaaaggcttgacttgagctcata

SEQ ID NO: 230529 - DNA, 25 bp, Artificial
  Probe
ctggattcggccatctattcttagg

SEQ ID NO: 230530 - DNA, 25 bp, Artificial
  Probe
attcggccatctattcttagggggc

SEQ ID NO: 230531 - DNA, 25 bp, Artificial
  Probe
gtatgtttcctctggattcggccat

SEQ ID NO: 230532 - DNA, 25 bp, Artificial
  Probe
tttcctctggattcggccatctatt

SEQ ID NO: 230533 - DNA, 25 bp, Artificial
  Probe
ttgtatgtttcctctggattcggcc

SEQ ID NO: 230534 - DNA, 25 bp, Artificial
  Probe
atgtttcctctggattcggccatct

SEQ ID NO: 230535 - DNA, 25 bp, Artificial
  Probe
tcttagggggcactcaggaaactga

SEQ ID NO: 230536 - DNA, 25 bp, Artificial
  Probe
tcttagggggcactcatgaaactga

SEQ ID NO: 230537 - DNA, 25 bp, Artificial
  Probe
ctccctggtttattagtattgtatg

SEQ ID NO: 230538 - DNA, 25 bp, Artificial
  Probe
gtttcctctggattcggccatctat

SEQ ID NO: 230539 - DNA, 25 bp, Artificial
  Probe
ccatctattcttagggggcactcag

SEQ ID NO: 230540 - DNA, 25 bp, Artificial
  Probe
ccatctattcttagggggcactcat

SEQ ID NO: 230541 - DNA, 25 bp, Artificial
  Probe
ttgttaaaggcttgacttgagctca

SEQ ID NO: 230542 - DNA, 25 bp, Artificial
  Probe
actccctggtttattagtattgtat

SEQ ID NO: 230543 - DNA, 25 bp, Artificial
  Probe
aggcttgacttgagctcatatagta

SEQ ID NO: 230544 - DNA, 25 bp, Artificial
  Probe
ggattcggccatctattcttagggg

SEQ ID NO: 230545 - DNA, 25 bp, Artificial
  Probe
aaaggcttgacttgagctcatatag

SEQ ID NO: 230546 - DNA, 25 bp, Artificial
  Probe
ttcttagggggcactcatgaaactg

SEQ ID NO: 230547 - DNA, 25 bp, Artificial
  Probe
cttgacttgagctcatatagtattg

SEQ ID NO: 230548 - DNA, 25 bp, Artificial
  Probe
aaggcttgacttgagctcatatagt

SEQ ID NO: 230549 - DNA, 25 bp, Artificial
  Probe
gtattgtatgtttcctctggattcg

SEQ ID NO: 230550 - DNA, 25 bp, Artificial
  Probe
ttaaaggcttgacttgagctcatat

SEQ ID NO: 230551 - DNA, 25 bp, Artificial
  Probe
gcttgacttgagctcatatagtatt

SEQ ID NO: 230552 - DNA, 25 bp, Artificial
  Probe
taaaggcttgacttgagctcatata

SEQ ID NO: 230553 - DNA, 25 bp, Artificial
  Probe
tgttaaaggcttgacttgagctcat

SEQ ID NO: 230554 - DNA, 25 bp, Artificial
  Probe
tccctggtttattagtattgtatgt

SEQ ID NO: 230555 - DNA, 25 bp, Artificial
  Probe
tgtttcctctggattcggccatcta

SEQ ID NO: 230556 - DNA, 25 bp, Artificial
  Probe
tttgttaaaggcttgacttgagctc

SEQ ID NO: 230557 - DNA, 25 bp, Artificial
  Probe
ttcggccatctattcttagggggca

SEQ ID NO: 230558 - DNA, 25 bp, Artificial
  Probe
gattcggccatctattcttaggggg

SEQ ID NO: 230559 - DNA, 25 bp, Artificial
  Probe
tattgtatgtttcctctggattcgg

SEQ ID NO: 230560 - DNA, 25 bp, Artificial
  Probe
agctcatatagtattgtatgtttcc

SEQ ID NO: 230561 - DNA, 25 bp, Artificial
  Probe
cttagggggcactcatgaaactgat

SEQ ID NO: 230562 - DNA, 25 bp, Artificial
  Probe
cttagggggcactcaggaaactgat

SEQ ID NO: 230563 - DNA, 25 bp, Artificial
  Probe
tggattcggccatctattcttaggg

SEQ ID NO: 230564 - DNA, 25 bp, Artificial
  Probe
taaactccctggtttattagtattg

SEQ ID NO: 230565 - DNA, 25 bp, Artificial
  Probe
cggccatctattcttagggggcact

SEQ ID NO: 230566 - DNA, 25 bp, Artificial
  Probe
ggccatctattcttagggggcactc

SEQ ID NO: 230567 - DNA, 25 bp, Artificial
  Probe
tcggccatctattcttagggggcac

SEQ ID NO: 230568 - DNA, 25 bp, Artificial
  Probe
gccatctattcttagggggcactca

SEQ ID NO: 230569 - DNA, 25 bp, Artificial
  Probe
tatgtttcctctggattcggccatc

SEQ ID NO: 230570 - DNA, 25 bp, Artificial
  Probe
ggcttgacttgagctcatatagtat

SEQ ID NO: 230571 - DNA, 25 bp, Artificial
  Probe
tctggctgaggcttcctgtggcatc

SEQ ID NO: 230572 - DNA, 25 bp, Artificial
  Probe
gtttcagaactgtctgtctgtctct

SEQ ID NO: 230573 - DNA, 25 bp, Artificial
  Probe
atccatcacctgtgggcttcttcga

SEQ ID NO: 230574 - DNA, 25 bp, Artificial
  Probe
gggcttcttcgaaaacctcttcagg

SEQ ID NO: 230575 - DNA, 25 bp, Artificial
  Probe
catccatcacctgtgggcttcttcg

SEQ ID NO: 230576 - DNA, 25 bp, Artificial
  Probe
ccggcctctggctgaggcttcctgt

SEQ ID NO: 230577 - DNA, 25 bp, Artificial
  Probe
gcttcctgtggcatccatcacctgt

SEQ ID NO: 230578 - DNA, 25 bp, Artificial
  Probe
gaccctgttctatatcttttgtagt

SEQ ID NO: 230579 - DNA, 25 bp, Artificial
  Probe
aaccatggtctctgggctgttgaag

SEQ ID NO: 230580 - DNA, 25 bp, Artificial
  Probe
caacaaagaagatcccaggctggca

SEQ ID NO: 230581 - DNA, 25 bp, Artificial
  Probe
aacagaatcaccttagcagagagcc

SEQ ID NO: 230582 - DNA, 25 bp, Artificial
  Probe
gccacatgacaacaaagaagatccc

SEQ ID NO: 230583 - DNA, 25 bp, Artificial
  Probe
gcttcttcgaaaacctcttcaggaa

SEQ ID NO: 230584 - DNA, 25 bp, Artificial
  Probe
atcttttgtagtttcagaactgtct

SEQ ID NO: 230585 - DNA, 25 bp, Artificial
  Probe
ttttgtagtttcagaactgtctgtc

SEQ ID NO: 230586 - DNA, 25 bp, Artificial
  Probe
gagagccccaggagcatcctcgaac

SEQ ID NO: 230587 - DNA, 25 bp, Artificial
  Probe
ggaacctgtgtgttcctctccaaaa

SEQ ID NO: 230588 - DNA, 25 bp, Artificial
  Probe
ttttacttttctggttgagaccctg

SEQ ID NO: 230589 - DNA, 25 bp, Artificial
  Probe
tcacctgtgggcttcttcgaaaacc

SEQ ID NO: 230590 - DNA, 25 bp, Artificial
  Probe
agtttcagaactgtctgtctgtctc

SEQ ID NO: 230591 - DNA, 25 bp, Artificial
  Probe
ctgtctgtctctctcttttgtaagg

SEQ ID NO: 230592 - DNA, 25 bp, Artificial
  Probe
ataaccatggtctctgggctgttga

SEQ ID NO: 230593 - DNA, 25 bp, Artificial
  Probe
tctctctcttttgtaaggaaatgga

SEQ ID NO: 230594 - DNA, 25 bp, Artificial
  Probe
tttgccggcctctggctgaggcttc

SEQ ID NO: 230595 - DNA, 25 bp, Artificial
  Probe
caggagcatcctcgaacctttgccg

SEQ ID NO: 230596 - DNA, 25 bp, Artificial
  Probe
ttcaggaatggaacctgtgtgttcc

SEQ ID NO: 230597 - DNA, 25 bp, Artificial
  Probe
cctttgccggcctctggctgaggct

SEQ ID NO: 230598 - DNA, 25 bp, Artificial
  Probe
tcgaaaacctcttcaggaatggaac

SEQ ID NO: 230599 - DNA, 25 bp, Artificial
  Probe
tggttgagaccctgttctatatctt

SEQ ID NO: 230600 - DNA, 25 bp, Artificial
  Probe
ttcttcgaaaacctcttcaggaatg

SEQ ID NO: 230601 - DNA, 25 bp, Artificial
  Probe
ggagcatcctcgaacctttgccggc

SEQ ID NO: 230602 - DNA, 25 bp, Artificial
  Probe
cctcttcaggaatggaacctgtgtg

SEQ ID NO: 230603 - DNA, 25 bp, Artificial
  Probe
aatggaacctgtgtgttcctctcca

SEQ ID NO: 230604 - DNA, 25 bp, Artificial
  Probe
gcagagagccccaggagcatcctcg

SEQ ID NO: 230605 - DNA, 25 bp, Artificial
  Probe
gacaacaaagaagatcccaggctgg

SEQ ID NO: 230606 - DNA, 25 bp, Artificial
  Probe
tttctggttgagaccctgttctata

SEQ ID NO: 230607 - DNA, 25 bp, Artificial
  Probe
tatcttttgtagtttcagaactgtc

SEQ ID NO: 230608 - DNA, 25 bp, Artificial
  Probe
cggcctctggctgaggcttcctgtg

SEQ ID NO: 230609 - DNA, 25 bp, Artificial
  Probe
aggtgggcaagctgaacagaatcac

SEQ ID NO: 230610 - DNA, 25 bp, Artificial
  Probe
gtagtttcagaactgtctgtctgtc

SEQ ID NO: 230611 - DNA, 25 bp, Artificial
  Probe
accttagcagagagccccaggagca

SEQ ID NO: 230612 - DNA, 25 bp, Artificial
  Probe
caagctgaacagaatcaccttagca

SEQ ID NO: 230613 - DNA, 25 bp, Artificial
  Probe
aaacctcttcaggaatggaacctgt

SEQ ID NO: 230614 - DNA, 25 bp, Artificial
  Probe
cacctgtgggcttcttcgaaaacct

SEQ ID NO: 230615 - DNA, 25 bp, Artificial
  Probe
tgaggcttcctgtggcatccatcac

SEQ ID NO: 230616 - DNA, 25 bp, Artificial
  Probe
cctgtgggcttcttcgaaaacctct

SEQ ID NO: 230617 - DNA, 25 bp, Artificial
  Probe
ggtgagcggctacctgaagttcccc

SEQ ID NO: 230618 - DNA, 25 bp, Artificial
  Probe
agcaccagacacagctgtacgaagt

SEQ ID NO: 230619 - DNA, 25 bp, Artificial
  Probe
gacgagatgaccacggagttcttcc

SEQ ID NO: 230620 - DNA, 25 bp, Artificial
  Probe
gtacgaagtctacaaactggacttt

SEQ ID NO: 230621 - DNA, 25 bp, Artificial
  Probe
tatgcaaagtccacccgaactaccg

SEQ ID NO: 230622 - DNA, 25 bp, Artificial
  Probe
ccgaactaccgacgagatgaccacg

SEQ ID NO: 230623 - DNA, 25 bp, Artificial
  Probe
gacacagctgtacgaagtctacaaa

SEQ ID NO: 230624 - DNA, 25 bp, Artificial
  Probe
ctactcagtgccaaactacctgaag

SEQ ID NO: 230625 - DNA, 25 bp, Artificial
  Probe
tactcagtgccaaactacctgaagt

SEQ ID NO: 230626 - DNA, 25 bp, Artificial
  Probe
ccagacacagctgtacgaagtctac

SEQ ID NO: 230627 - DNA, 25 bp, Artificial
  Probe
tgtacgaagtctacaaactggactt

SEQ ID NO: 230628 - DNA, 25 bp, Artificial
  Probe
caaactacctgaagttggattagag

SEQ ID NO: 230629 - DNA, 25 bp, Artificial
  Probe
gagcaccagacacagctgtacgaag

SEQ ID NO: 230630 - DNA, 25 bp, Artificial
  Probe
gtccacccgaactaccgacgagatg

SEQ ID NO: 230631 - DNA, 25 bp, Artificial
  Probe
cacagctgtacgaagtctacaaact

SEQ ID NO: 230632 - DNA, 25 bp, Artificial
  Probe
gcgccgagcaccagacacagctgta

SEQ ID NO: 230633 - DNA, 25 bp, Artificial
  Probe
acacagctgtacgaagtctacaaac

SEQ ID NO: 230634 - DNA, 25 bp, Artificial
  Probe
agatgaccacggagttcttccagaa

SEQ ID NO: 230635 - DNA, 25 bp, Artificial
  Probe
gtgccaaactacctgaagttggatt

SEQ ID NO: 230636 - DNA, 25 bp, Artificial
  Probe
tccacccgaactaccgacgagatga

SEQ ID NO: 230637 - DNA, 25 bp, Artificial
  Probe
gggtgagcggctacctgaagttccc

SEQ ID NO: 230638 - DNA, 25 bp, Artificial
  Probe
tgccaaactacctgaagttggatta

SEQ ID NO: 230639 - DNA, 25 bp, Artificial
  Probe
actacctgaagttggattagagggc

SEQ ID NO: 230640 - DNA, 25 bp, Artificial
  Probe
ggagttcttccagaacatcagcgcc

SEQ ID NO: 230641 - DNA, 25 bp, Artificial
  Probe
atgaccacggagttcttccagaaca

SEQ ID NO: 230642 - DNA, 25 bp, Artificial
  Probe
agcgccgagcaccagacacagctgt

SEQ ID NO: 230643 - DNA, 25 bp, Artificial
  Probe
acctgaagttggattagagggctgc

SEQ ID NO: 230644 - DNA, 25 bp, Artificial
  Probe
gatgaccacggagttcttccagaac

SEQ ID NO: 230645 - DNA, 25 bp, Artificial
  Probe
gcaccagacacagctgtacgaagtc

SEQ ID NO: 230646 - DNA, 25 bp, Artificial
  Probe
gccaaactacctgaagttggattag

SEQ ID NO: 230647 - DNA, 25 bp, Artificial
  Probe
actaccgacgagatgaccacggagt

SEQ ID NO: 230648 - DNA, 25 bp, Artificial
  Probe
ccacggagttcttccagaacatcag

SEQ ID NO: 230649 - DNA, 25 bp, Artificial
  Probe
cacggagttcttccagaacatcagc

SEQ ID NO: 230650 - DNA, 25 bp, Artificial
  Probe
ctacctgaagttggattagagggct

SEQ ID NO: 230651 - DNA, 25 bp, Artificial
  Probe
ccgacgagatgaccacggagttctt

SEQ ID NO: 230652 - DNA, 25 bp, Artificial
  Probe
tacgaagtctacaaactggactttt

SEQ ID NO: 230653 - DNA, 25 bp, Artificial
  Probe
agctgtacgaagtctacaaactgga

SEQ ID NO: 230654 - DNA, 25 bp, Artificial
  Probe
cagtgccaaactacctgaagttgga

SEQ ID NO: 230655 - DNA, 25 bp, Artificial
  Probe
accacggagttcttccagaacatca

SEQ ID NO: 230656 - DNA, 25 bp, Artificial
  Probe
tgagcggctacctgaagttccccac

SEQ ID NO: 230657 - DNA, 25 bp, Artificial
  Probe
taccgacgagatgaccacggagttc

SEQ ID NO: 230658 - DNA, 25 bp, Artificial
  Probe
gttcttccagaacatcagcgccgag

SEQ ID NO: 230659 - DNA, 25 bp, Artificial
  Probe
tcagtgccaaactacctgaagttgg

SEQ ID NO: 230660 - DNA, 25 bp, Artificial
  Probe
ctcagtgccaaactacctgaagttg

SEQ ID NO: 230661 - DNA, 25 bp, Artificial
  Probe
gccgagcaccagacacagctgtacg

SEQ ID NO: 230662 - DNA, 25 bp, Artificial
  Probe
ctgtacgaagtctacaaactggact

SEQ ID NO: 230663 - DNA, 25 bp, Artificial
  Probe
ccgattgagctgtgccttgcacatg

SEQ ID NO: 230664 - DNA, 25 bp, Artificial
  Probe
tatgagaacttcacccaagcgcagc

SEQ ID NO: 230665 - DNA, 25 bp, Artificial
  Probe
tgaactcaaccgagcaggtgggcac

SEQ ID NO: 230666 - DNA, 25 bp, Artificial
  Probe
aggtgggcaccgagaaccaaatcac

SEQ ID NO: 230667 - DNA, 25 bp, Artificial
  Probe
cccaagcgcagctggatgtggtgca

SEQ ID NO: 230668 - DNA, 25 bp, Artificial
  Probe
cttacaacatgtcctttggccattg

SEQ ID NO: 230669 - DNA, 25 bp, Artificial
  Probe
tacctgaactcaaccgagcaggtgg

SEQ ID NO: 230670 - DNA, 25 bp, Artificial
  Probe
tttctgtatccgattgagctgtgcc

SEQ ID NO: 230671 - DNA, 25 bp, Artificial
  Probe
tacagggctcccatctctggtgatc

SEQ ID NO: 230672 - DNA, 25 bp, Artificial
  Probe
tcacacagccccatgttggggctca

SEQ ID NO: 230673 - DNA, 25 bp, Artificial
  Probe
tgctattggcgctttgtatggatca

SEQ ID NO: 230674 - DNA, 25 bp, Artificial
  Probe
tgacagtcaccatcttctgctattg

SEQ ID NO: 230675 - DNA, 25 bp, Artificial
  Probe
aattctgggtacagggctcccatct

SEQ ID NO: 230676 - DNA, 25 bp, Artificial
  Probe
ggcctggctgtggtgacgcttctta

SEQ ID NO: 230677 - DNA, 25 bp, Artificial
  Probe
tcttaatttcctggtgtgctttgga

SEQ ID NO: 230678 - DNA, 25 bp, Artificial
  Probe
tgggtacagggctcccatctctggt

SEQ ID NO: 230679 - DNA, 25 bp, Artificial
  Probe
gatcatgctcacacagccccatgtt

SEQ ID NO: 230680 - DNA, 25 bp, Artificial
  Probe
agctgtgccttgcacatgtgctccg

SEQ ID NO: 230681 - DNA, 25 bp, Artificial
  Probe
tcatgctcacacagccccatgttgg

SEQ ID NO: 230682 - DNA, 25 bp, Artificial
  Probe
cgcagctggatgtggtgcagatcca

SEQ ID NO: 230683 - DNA, 25 bp, Artificial
  Probe
gagcaggtgggcaccgagaaccaaa

SEQ ID NO: 230684 - DNA, 25 bp, Artificial
  Probe
tgtgccttgcacatgtgctccgctg

SEQ ID NO: 230685 - DNA, 25 bp, Artificial
  Probe
caaccgagcaggtgggcaccgagaa

SEQ ID NO: 230686 - DNA, 25 bp, Artificial
  Probe
tgtcctttggccattgcaccatcgt

SEQ ID NO: 230687 - DNA, 25 bp, Artificial
  Probe
ctctggtgatcttggtctttctgta

SEQ ID NO: 230688 - DNA, 25 bp, Artificial
  Probe
agaacttcacccaagcgcagctgga

SEQ ID NO: 230689 - DNA, 25 bp, Artificial
  Probe
caacatgtcctttggccattgcacc

SEQ ID NO: 230690 - DNA, 25 bp, Artificial
  Probe
catctctggtgatcttggtctttct

SEQ ID NO: 230691 - DNA, 25 bp, Artificial
  Probe
acctgctatgagaacttcacccaag

SEQ ID NO: 230692 - DNA, 25 bp, Artificial
  Probe
ttgagctgtgccttgcacatgtgct

SEQ ID NO: 230693 - DNA, 25 bp, Artificial
  Probe
gaaccaaatcacctgctatgagaac

SEQ ID NO: 230694 - DNA, 25 bp, Artificial
  Probe
gcaccatcgtcatcatcgttcagta

SEQ ID NO: 230695 - DNA, 25 bp, Artificial
  Probe
gaccttacaacatgtcctttggcca

SEQ ID NO: 230696 - DNA, 25 bp, Artificial
  Probe
ggtctttctgtatccgattgagctg

SEQ ID NO: 230697 - DNA, 25 bp, Artificial
  Probe
catcgtcatcatcgttcagtacctg

SEQ ID NO: 230698 - DNA, 25 bp, Artificial
  Probe
tttggaccttacaacatgtcctttg

SEQ ID NO: 230699 - DNA, 25 bp, Artificial
  Probe
cgcttcttaatttcctggtgtgctt

SEQ ID NO: 230700 - DNA, 25 bp, Artificial
  Probe
atcgttcagtacctgaactcaaccg

SEQ ID NO: 230701 - DNA, 25 bp, Artificial
  Probe
gccattgcaccatcgtcatcatcgt

SEQ ID NO: 230702 - DNA, 25 bp, Artificial
  Probe
ctgtggtgacgcttcttaatttcct

SEQ ID NO: 230703 - DNA, 25 bp, Artificial
  Probe
gtcatcatcgttcagtacctgaact

SEQ ID NO: 230704 - DNA, 25 bp, Artificial
  Probe
acagccccatgttggggctcagagg

SEQ ID NO: 230705 - DNA, 25 bp, Artificial
  Probe
ctggctgtggtgacgcttcttaatt

SEQ ID NO: 230706 - DNA, 25 bp, Artificial
  Probe
tcacccaagcgcagctggatgtggt

SEQ ID NO: 230707 - DNA, 25 bp, Artificial
  Probe
ttgcaccatcgtcatcatcgttcag

SEQ ID NO: 230708 - DNA, 25 bp, Artificial
  Probe
atcttctgctattggcgctttgtat

SEQ ID NO: 230709 - DNA, 25 bp, Artificial
  Probe
tggaaaactcgctgttccccagcgc

SEQ ID NO: 230710 - DNA, 25 bp, Artificial
  Probe
ccactgttgtagaatgatcgctgcc

SEQ ID NO: 230711 - DNA, 25 bp, Artificial
  Probe
cattactttggaaaactcgctgttc

SEQ ID NO: 230712 - DNA, 25 bp, Artificial
  Probe
cacagccgcatgagctcagcttcag

SEQ ID NO: 230713 - DNA, 25 bp, Artificial
  Probe
tattagtgtgtctcgttctccagtg

SEQ ID NO: 230714 - DNA, 25 bp, Artificial
  Probe
ttttgtggacgcagtcaagctgcca

SEQ ID NO: 230715 - DNA, 25 bp, Artificial
  Probe
ctccagtgccggagacctcattact

SEQ ID NO: 230716 - DNA, 25 bp, Artificial
  Probe
agtctggtcatcgttgttgttgtgc

SEQ ID NO: 230717 - DNA, 25 bp, Artificial
  Probe
catgttttgtggacgcagtcaagct

SEQ ID NO: 230718 - DNA, 25 bp, Artificial
  Probe
ccgcatgagctcagcttcagactga

SEQ ID NO: 230719 - DNA, 25 bp, Artificial
  Probe
catgagctcagcttcagactgatgt

SEQ ID NO: 230720 - DNA, 25 bp, Artificial
  Probe
agtcaagctgccacagtctggtcat

SEQ ID NO: 230721 - DNA, 25 bp, Artificial
  Probe
cccactgttgtagaatgatcgctgc

SEQ ID NO: 230722 - DNA, 25 bp, Artificial
  Probe
atgatcgctgcctttaccctctgca

SEQ ID NO: 230723 - DNA, 25 bp, Artificial
  Probe
ttcagactgatgtccgccagccttc

SEQ ID NO: 230724 - DNA, 25 bp, Artificial
  Probe
gtgccggagacctcattactttgga

SEQ ID NO: 230725 - DNA, 25 bp, Artificial
  Probe
ttagtgtgtctcgttctccagtgcc

SEQ ID NO: 230726 - DNA, 25 bp, Artificial
  Probe
ttgacaccaagcatgttttgtggac

SEQ ID NO: 230727 - DNA, 25 bp, Artificial
  Probe
gacgcagtcaagctgccacagtctg

SEQ ID NO: 230728 - DNA, 25 bp, Artificial
  Probe
tcttggaacacattggtattcattg

SEQ ID NO: 230729 - DNA, 25 bp, Artificial
  Probe
agctcagcttcagactgatgtccgc

SEQ ID NO: 230730 - DNA, 25 bp, Artificial
  Probe
gttgtgctgacgtctggtcatttat

SEQ ID NO: 230731 - DNA, 25 bp, Artificial
  Probe
gtggacgcagtcaagctgccacagt

SEQ ID NO: 230732 - DNA, 25 bp, Artificial
  Probe
ctgatgtccgccagccttcttggaa

SEQ ID NO: 230733 - DNA, 25 bp, Artificial
  Probe
atcgctgcctttaccctctgcagta

SEQ ID NO: 230734 - DNA, 25 bp, Artificial
  Probe
acgcagtcaagctgccacagtctgg

SEQ ID NO: 230735 - DNA, 25 bp, Artificial
  Probe
tggtcatcgttgttgttgtgctgac

SEQ ID NO: 230736 - DNA, 25 bp, Artificial
  Probe
cagcacagccgcatgagctcagctt

SEQ ID NO: 230737 - DNA, 25 bp, Artificial
  Probe
cctcattactttggaaaactcgctg

SEQ ID NO: 230738 - DNA, 25 bp, Artificial
  Probe
cgcccactgttgtagaatgatcgct

SEQ ID NO: 230739 - DNA, 25 bp, Artificial
  Probe
ccagccttcttggaacacattggta

SEQ ID NO: 230740 - DNA, 25 bp, Artificial
  Probe
gacctcattactttggaaaactcgc

SEQ ID NO: 230741 - DNA, 25 bp, Artificial
  Probe
agcttcagactgatgtccgccagcc

SEQ ID NO: 230742 - DNA, 25 bp, Artificial
  Probe
gtgtgtctcgttctccagtgccgga

SEQ ID NO: 230743 - DNA, 25 bp, Artificial
  Probe
gccggagacctcattactttggaaa

SEQ ID NO: 230744 - DNA, 25 bp, Artificial
  Probe
atcgttgttgttgtgctgacgtctg

SEQ ID NO: 230745 - DNA, 25 bp, Artificial
  Probe
ggagacctcattactttggaaaact

SEQ ID NO: 230746 - DNA, 25 bp, Artificial
  Probe
tttgtggacgcagtcaagctgccac

SEQ ID NO: 230747 - DNA, 25 bp, Artificial
  Probe
gtcaaccgcagttgacaccaagcat

SEQ ID NO: 230748 - DNA, 25 bp, Artificial
  Probe
tagaatgatcgctgcctttaccctc

SEQ ID NO: 230749 - DNA, 25 bp, Artificial
  Probe
tgtccgccagccttcttggaacaca

SEQ ID NO: 230750 - DNA, 25 bp, Artificial
  Probe
tctcgttctccagtgccggagacct

SEQ ID NO: 230751 - DNA, 25 bp, Artificial
  Probe
tgtgctgacgtctggtcatttatta

SEQ ID NO: 230752 - DNA, 25 bp, Artificial
  Probe
ggaaaactcgctgttccccagcgca

SEQ ID NO: 230753 - DNA, 25 bp, Artificial
  Probe
cgccatttcagttctcccacagggg

SEQ ID NO: 230754 - DNA, 25 bp, Artificial
  Probe
gacaccaagcatgttttgtggacgc

SEQ ID NO: 230755 - DNA, 25 bp, Artificial
  Probe
cggatttgtaaccaggcgagttcgt

SEQ ID NO: 230756 - DNA, 25 bp, Artificial
  Probe
accaggcgagttcgttgttacccag

SEQ ID NO: 230757 - DNA, 25 bp, Artificial
  Probe
agtgcggatttgtaaccaggcgagt

SEQ ID NO: 230758 - DNA, 25 bp, Artificial
  Probe
tgtcttctgtgatctcagtgttgta

SEQ ID NO: 230759 - DNA, 25 bp, Artificial
  Probe
aaggtttcatcttgcccaactgtta

SEQ ID NO: 230760 - DNA, 25 bp, Artificial
  Probe
ttgtgtccactggataaggtttcat

SEQ ID NO: 230761 - DNA, 25 bp, Artificial
  Probe
tgcccaactgttactgccaaattga

SEQ ID NO: 230762 - DNA, 25 bp, Artificial
  Probe
caagaaacctgtgtgggtctattct

SEQ ID NO: 230763 - DNA, 25 bp, Artificial
  Probe
aaacgagtgcggatttgtaaccagg

SEQ ID NO: 230764 - DNA, 25 bp, Artificial
  Probe
cagtagacgccatctggagtattcc

SEQ ID NO: 230765 - DNA, 25 bp, Artificial
  Probe
tctgtgatctcagtgttgtatttac

SEQ ID NO: 230766 - DNA, 25 bp, Artificial
  Probe
gttactgccaaattgaattcaagaa

SEQ ID NO: 230767 - DNA, 25 bp, Artificial
  Probe
agttgtgtccactggataaggtttc

SEQ ID NO: 230768 - DNA, 25 bp, Artificial
  Probe
gcatggctttgtacagtagacgcca

SEQ ID NO: 230769 - DNA, 25 bp, Artificial
  Probe
gcccaactgttactgccaaattgaa

SEQ ID NO: 230770 - DNA, 25 bp, Artificial
  Probe
ttgcccaactgttactgccaaattg

SEQ ID NO: 230771 - DNA, 25 bp, Artificial
  Probe
gtcttctgtgatctcagtgttgtat

SEQ ID NO: 230772 - DNA, 25 bp, Artificial
  Probe
gcgcatggctttgtacagtagacgc

SEQ ID NO: 230773 - DNA, 25 bp, Artificial
  Probe
tcgttgttacccagagcctttaata

SEQ ID NO: 230774 - DNA, 25 bp, Artificial
  Probe
caacttcatctgtgtttgtcttctg

SEQ ID NO: 230775 - DNA, 25 bp, Artificial
  Probe
gaagcgcatggctttgtacagtaga

SEQ ID NO: 230776 - DNA, 25 bp, Artificial
  Probe
tgatctcagtgttgtatttacctta

SEQ ID NO: 230777 - DNA, 25 bp, Artificial
  Probe
tggctttgtacagtagacgccatct

SEQ ID NO: 230778 - DNA, 25 bp, Artificial
  Probe
ttcggaagcgcatggctttgtacag

SEQ ID NO: 230779 - DNA, 25 bp, Artificial
  Probe
gagttcgttgttacccagagccttt

SEQ ID NO: 230780 - DNA, 25 bp, Artificial
  Probe
cgttgttacccagagcctttaatat

SEQ ID NO: 230781 - DNA, 25 bp, Artificial
  Probe
ggagtattcctaaaacacacaaaga

SEQ ID NO: 230782 - DNA, 25 bp, Artificial
  Probe
gagtattcctaaaacacacaaagag

SEQ ID NO: 230783 - DNA, 25 bp, Artificial
  Probe
gtgtttgtcttctgtgatctcagtg

SEQ ID NO: 230784 - DNA, 25 bp, Artificial
  Probe
ctgttactgccaaattgaattcaag

SEQ ID NO: 230785 - DNA, 25 bp, Artificial
  Probe
tttgtacagtagacgccatctggag

SEQ ID NO: 230786 - DNA, 25 bp, Artificial
  Probe
ctgtgtttgtcttctgtgatctcag

SEQ ID NO: 230787 - DNA, 25 bp, Artificial
  Probe
tgcggatttgtaaccaggcgagttc

SEQ ID NO: 230788 - DNA, 25 bp, Artificial
  Probe
ccaggcgagttcgttgttacccaga

SEQ ID NO: 230789 - DNA, 25 bp, Artificial
  Probe
gccatctggagtattcctaaaacac

SEQ ID NO: 230790 - DNA, 25 bp, Artificial
  Probe
cgcatggctttgtacagtagacgcc

SEQ ID NO: 230791 - DNA, 25 bp, Artificial
  Probe
acagtagacgccatctggagtattc

SEQ ID NO: 230792 - DNA, 25 bp, Artificial
  Probe
aacctgtgtgggtctattctcccca

SEQ ID NO: 230793 - DNA, 25 bp, Artificial
  Probe
tttcggaagcgcatggctttgtaca

SEQ ID NO: 230794 - DNA, 25 bp, Artificial
  Probe
tgtgatctcagtgttgtatttacct

SEQ ID NO: 230795 - DNA, 25 bp, Artificial
  Probe
gataaggtttcatcttgcccaactg

SEQ ID NO: 230796 - DNA, 25 bp, Artificial
  Probe
tgtaaccaggcgagttcgttgttac

SEQ ID NO: 230797 - DNA, 25 bp, Artificial
  Probe
gtccactggataaggtttcatcttg

SEQ ID NO: 230798 - DNA, 25 bp, Artificial
  Probe
tgaattcaagaaacctgtgtgggtc

SEQ ID NO: 230799 - DNA, 25 bp, Artificial
  Probe
gtgtccactggataaggtttcatct

SEQ ID NO: 230800 - DNA, 25 bp, Artificial
  Probe
ggatttgtaaccaggcgagttcgtt

SEQ ID NO: 230801 - DNA, 25 bp, Artificial
  Probe
tgacctgttctagctgtgatcttac

SEQ ID NO: 230802 - DNA, 25 bp, Artificial
  Probe
gtgacctgttctagctgtgatctta

SEQ ID NO: 230803 - DNA, 25 bp, Artificial
  Probe
tgttacagggtgacctgttctagct

SEQ ID NO: 230804 - DNA, 25 bp, Artificial
  Probe
aatgtctttcctacggggtacatgc

SEQ ID NO: 230805 - DNA, 25 bp, Artificial
  Probe
tgtgatcttaccacttcaaatggat

SEQ ID NO: 230806 - DNA, 25 bp, Artificial
  Probe
cagggtgacctgttctagctgtgat

SEQ ID NO: 230807 - DNA, 25 bp, Artificial
  Probe
gacctgttctagctgtgatcttacc

SEQ ID NO: 230808 - DNA, 25 bp, Artificial
  Probe
tacagggtgacctgttctagctgtg

SEQ ID NO: 230809 - DNA, 25 bp, Artificial
  Probe
ttgttacagggtgacctgttctagc

SEQ ID NO: 230810 - DNA, 25 bp, Artificial
  Probe
agctgtgatcttaccacttcaaatg

SEQ ID NO: 230811 - DNA, 25 bp, Artificial
  Probe
ggaatgtctttcctacggggtacat

SEQ ID NO: 230812 - DNA, 25 bp, Artificial
  Probe
tgttctagctgtgatcttaccactt

SEQ ID NO: 230813 - DNA, 25 bp, Artificial
  Probe
agggtgacctgttctagctgtgatc

SEQ ID NO: 230814 - DNA, 25 bp, Artificial
  Probe
ttacagggtgacctgttctagctgt

SEQ ID NO: 230815 - DNA, 25 bp, Artificial
  Probe
tagttctgtctgtaaatagaatcac

SEQ ID NO: 230816 - DNA, 25 bp, Artificial
  Probe
tcctacggggtacatgctttttgta

SEQ ID NO: 230817 - DNA, 25 bp, Artificial
  Probe
gctgtgatcttaccacttcaaatgg

SEQ ID NO: 230818 - DNA, 25 bp, Artificial
  Probe
gtaagaatccaagtgtgcgcgtggc

SEQ ID NO: 230819 - DNA, 25 bp, Artificial
  Probe
cagtttagctttgtgctgtatgcta

SEQ ID NO: 230820 - DNA, 25 bp, Artificial
  Probe
tcagtttagctttgtgctgtatgct

SEQ ID NO: 230821 - DNA, 25 bp, Artificial
  Probe
tttgttacagggtgacctgttctag

SEQ ID NO: 230822 - DNA, 25 bp, Artificial
  Probe
tatttaaagctttcgctttcaggaa

SEQ ID NO: 230823 - DNA, 25 bp, Artificial
  Probe
gtgatcttaccacttcaaatggatg

SEQ ID NO: 230824 - DNA, 25 bp, Artificial
  Probe
atcagtttagctttgtgctgtatgc

SEQ ID NO: 230825 - DNA, 25 bp, Artificial
  Probe
agtatttaaagctttcgctttcagg

SEQ ID NO: 230826 - DNA, 25 bp, Artificial
  Probe
gtatttaaagctttcgctttcagga

SEQ ID NO: 230827 - DNA, 25 bp, Artificial
  Probe
tgtgggaatgtctttcctacggggt

SEQ ID NO: 230828 - DNA, 25 bp, Artificial
  Probe
ttcctacggggtacatgctttttgt

SEQ ID NO: 230829 - DNA, 25 bp, Artificial
  Probe
gttctagctgtgatcttaccacttc

SEQ ID NO: 230830 - DNA, 25 bp, Artificial
  Probe
agtaagaatccaagtgtgcgcgtgg

SEQ ID NO: 230831 - DNA, 25 bp, Artificial
  Probe
gatcttaccacttcaaatggatgta

SEQ ID NO: 230832 - DNA, 25 bp, Artificial
  Probe
gaatgtctttcctacggggtacatg

SEQ ID NO: 230833 - DNA, 25 bp, Artificial
  Probe
ctaatcagtttagctttgtgctgta

SEQ ID NO: 230834 - DNA, 25 bp, Artificial
  Probe
cagtatttaaagctttcgctttcag

SEQ ID NO: 230835 - DNA, 25 bp, Artificial
  Probe
acagggtgacctgttctagctgtga

SEQ ID NO: 230836 - DNA, 25 bp, Artificial
  Probe
acctgttctagctgtgatcttacca

SEQ ID NO: 230837 - DNA, 25 bp, Artificial
  Probe
cctgttctagctgtgatcttaccac

SEQ ID NO: 230838 - DNA, 25 bp, Artificial
  Probe
ctgtgatcttaccacttcaaatgga

SEQ ID NO: 230839 - DNA, 25 bp, Artificial
  Probe
gggtgacctgttctagctgtgatct

SEQ ID NO: 230840 - DNA, 25 bp, Artificial
  Probe
tttcctacggggtacatgctttttg

SEQ ID NO: 230841 - DNA, 25 bp, Artificial
  Probe
agttctgtctgtaaatagaatcaca

SEQ ID NO: 230842 - DNA, 25 bp, Artificial
  Probe
ggtgacctgttctagctgtgatctt

SEQ ID NO: 230843 - DNA, 25 bp, Artificial
  Probe
gttacagggtgacctgttctagctg

SEQ ID NO: 230844 - DNA, 25 bp, Artificial
  Probe
taagaatccaagtgtgcgcgtggca

SEQ ID NO: 230845 - DNA, 25 bp, Artificial
  Probe
tgatcttaccacttcaaatggatgt

SEQ ID NO: 230846 - DNA, 25 bp, Artificial
  Probe
ctgttctagctgtgatcttaccact

SEQ ID NO: 230847 - DNA, 25 bp, Artificial
  Probe
ggtcttcatttccttccaactccgg

SEQ ID NO: 230848 - DNA, 25 bp, Artificial
  Probe
ttaactcgtgggtcttcatttcctt

SEQ ID NO: 230849 - DNA, 25 bp, Artificial
  Probe
gaggcagacgcgacagttcaagagc

SEQ ID NO: 230850 - DNA, 25 bp, Artificial
  Probe
gaatttccttgcattcccatgagtt

SEQ ID NO: 230851 - DNA, 25 bp, Artificial
  Probe
gcttggctgctctcgggagcatctg

SEQ ID NO: 230852 - DNA, 25 bp, Artificial
  Probe
atgagtttccgtcgtgttctttcct

SEQ ID NO: 230853 - DNA, 25 bp, Artificial
  Probe
tgggaagcattcagccacctggaac

SEQ ID NO: 230854 - DNA, 25 bp, Artificial
  Probe
ctcggagtcttgaaatccagtattc

SEQ ID NO: 230855 - DNA, 25 bp, Artificial
  Probe
ttccgtcgtgttctttccttcgacg

SEQ ID NO: 230856 - DNA, 25 bp, Artificial
  Probe
caagagcaagcctcccaagaaaggg

SEQ ID NO: 230857 - DNA, 25 bp, Artificial
  Probe
gggggtccctcagcttcacacctaa

SEQ ID NO: 230858 - DNA, 25 bp, Artificial
  Probe
gagcgacagcccttgcctgagtcct

SEQ ID NO: 230859 - DNA, 25 bp, Artificial
  Probe
gagatgagcgacagcccttgcctga

SEQ ID NO: 230860 - DNA, 25 bp, Artificial
  Probe
tattcaggaggaatttccttgcatt

SEQ ID NO: 230861 - DNA, 25 bp, Artificial
  Probe
ttctttccttcgacggtgaataaag

SEQ ID NO: 230862 - DNA, 25 bp, Artificial
  Probe
atcacggtgatctgcccctgggaag

SEQ ID NO: 230863 - DNA, 25 bp, Artificial
  Probe
ccctgggaagcattcagccacctgg

SEQ ID NO: 230864 - DNA, 25 bp, Artificial
  Probe
ttgattttgcccagttggtctctcg

SEQ ID NO: 230865 - DNA, 25 bp, Artificial
  Probe
cagatatcacggtgatctgcccctg

SEQ ID NO: 230866 - DNA, 25 bp, Artificial
  Probe
tctgcccctgggaagcattcagcca

SEQ ID NO: 230867 - DNA, 25 bp, Artificial
  Probe
cccccaagttcaagcagaggcagac

SEQ ID NO: 230868 - DNA, 25 bp, Artificial
  Probe
tgagtcctccagcaccaagccaggg

SEQ ID NO: 230869 - DNA, 25 bp, Artificial
  Probe
atccagtattcaggaggaatttcct

SEQ ID NO: 230870 - DNA, 25 bp, Artificial
  Probe
ccaactccggcgatcctgaaagcaa

SEQ ID NO: 230871 - DNA, 25 bp, Artificial
  Probe
cttgagtgccttgattttgcccagt

SEQ ID NO: 230872 - DNA, 25 bp, Artificial
  Probe
tcctgaaagcaaagcgcgaaccatc

SEQ ID NO: 230873 - DNA, 25 bp, Artificial
  Probe
gcaagcctcccaagaaaggggtgaa

SEQ ID NO: 230874 - DNA, 25 bp, Artificial
  Probe
agctggctcagttcgggatcatctg

SEQ ID NO: 230875 - DNA, 25 bp, Artificial
  Probe
gctgctctcgggagcatctgctgct

SEQ ID NO: 230876 - DNA, 25 bp, Artificial
  Probe
aagcaaagcgcgaaccatccacgga

SEQ ID NO: 230877 - DNA, 25 bp, Artificial
  Probe
ttggagatgacatcccaggcatgga

SEQ ID NO: 230878 - DNA, 25 bp, Artificial
  Probe
aggaggaatttccttgcattcccat

SEQ ID NO: 230879 - DNA, 25 bp, Artificial
  Probe
aaagcgcgaaccatccacggaccga

SEQ ID NO: 230880 - DNA, 25 bp, Artificial
  Probe
gctgctcttgagtgccttgattttg

SEQ ID NO: 230881 - DNA, 25 bp, Artificial
  Probe
aggcttggctgctctcgggagcatc

SEQ ID NO: 230882 - DNA, 25 bp, Artificial
  Probe
gtgccttgattttgcccagttggtc

SEQ ID NO: 230883 - DNA, 25 bp, Artificial
  Probe
ctcagttcgggatcatctgaggact

SEQ ID NO: 230884 - DNA, 25 bp, Artificial
  Probe
aaatccagtattcaggaggaatttc

SEQ ID NO: 230885 - DNA, 25 bp, Artificial
  Probe
gacacattcggctccgtgaattttt

SEQ ID NO: 230886 - DNA, 25 bp, Artificial
  Probe
aagcagaggcagacgcgacagttca

SEQ ID NO: 230887 - DNA, 25 bp, Artificial
  Probe
ccttgcattcccatgagtttccgtc

SEQ ID NO: 230888 - DNA, 25 bp, Artificial
  Probe
aactgcacgagctggctcagttcgg

SEQ ID NO: 230889 - DNA, 25 bp, Artificial
  Probe
cttcgacggtgaataaagcggcact

SEQ ID NO: 230890 - DNA, 25 bp, Artificial
  Probe
aaccatccacggaccgacgagatga

SEQ ID NO: 230891 - DNA, 25 bp, Artificial
  Probe
gtttggagatgacatcccaggcatg

SEQ ID NO: 230892 - DNA, 25 bp, Artificial
  Probe
aggactcgaggcttggctgctctcg

SEQ ID NO: 230893 - DNA, 25 bp, Artificial
  Probe
gggaacttgctgttctaaatgagcg

SEQ ID NO: 230894 - DNA, 25 bp, Artificial
  Probe
taggtttctctgtagcttggggaac

SEQ ID NO: 230895 - DNA, 25 bp, Artificial
  Probe
ttgctgttctaaatgagcgagctca

SEQ ID NO: 230896 - DNA, 25 bp, Artificial
  Probe
acttgctgttctaaatgagcgagct

SEQ ID NO: 230897 - DNA, 25 bp, Artificial
  Probe
aggtttctctgtagcttggggaact

SEQ ID NO: 230898 - DNA, 25 bp, Artificial
  Probe
cattctgtgtgaagaagccaaataa

SEQ ID NO: 230899 - DNA, 25 bp, Artificial
  Probe
gctcatgcattctgtgtgaagaagc

SEQ ID NO: 230900 - DNA, 25 bp, Artificial
  Probe
aaatgagcgagctcatgcattctgt

SEQ ID NO: 230901 - DNA, 25 bp, Artificial
  Probe
ccatgataggtttctctgtagcttg

SEQ ID NO: 230902 - DNA, 25 bp, Artificial
  Probe
ttctctgtagcttggggaacttgct

SEQ ID NO: 230903 - DNA, 25 bp, Artificial
  Probe
agacttccatgataggtttctctgt

SEQ ID NO: 230904 - DNA, 25 bp, Artificial
  Probe
agctcatgcattctgtgtgaagaag

SEQ ID NO: 230905 - DNA, 25 bp, Artificial
  Probe
agcgagctcatgcattctgtgtgaa

SEQ ID NO: 230906 - DNA, 25 bp, Artificial
  Probe
catgcattctgtgtgaagaagccaa

SEQ ID NO: 230907 - DNA, 25 bp, Artificial
  Probe
gagctcatgcattctgtgtgaagaa

SEQ ID NO: 230908 - DNA, 25 bp, Artificial
  Probe
ggggaacttgctgttctaaatgagc

SEQ ID NO: 230909 - DNA, 25 bp, Artificial
  Probe
tctaaatgagcgagctcatgcattc

SEQ ID NO: 230910 - DNA, 25 bp, Artificial
  Probe
gacttccatgataggtttctctgta

SEQ ID NO: 230911 - DNA, 25 bp, Artificial
  Probe
cgagctcatgcattctgtgtgaaga

SEQ ID NO: 230912 - DNA, 25 bp, Artificial
  Probe
cttccatgataggtttctctgtagc

SEQ ID NO: 230913 - DNA, 25 bp, Artificial
  Probe
atgcattctgtgtgaagaagccaaa

SEQ ID NO: 230914 - DNA, 25 bp, Artificial
  Probe
cttggggaacttgctgttctaaatg

SEQ ID NO: 230915 - DNA, 25 bp, Artificial
  Probe
gtttctctgtagcttggggaacttg

SEQ ID NO: 230916 - DNA, 25 bp, Artificial
  Probe
tgcattctgtgtgaagaagccaaat

SEQ ID NO: 230917 - DNA, 25 bp, Artificial
  Probe
tgagcgagctcatgcattctgtgtg

SEQ ID NO: 230918 - DNA, 25 bp, Artificial
  Probe
tgctgttctaaatgagcgagctcat

SEQ ID NO: 230919 - DNA, 25 bp, Artificial
  Probe
gagcgagctcatgcattctgtgtga

SEQ ID NO: 230920 - DNA, 25 bp, Artificial
  Probe
aagacttccatgataggtttctctg

SEQ ID NO: 230921 - DNA, 25 bp, Artificial
  Probe
taaatgagcgagctcatgcattctg

SEQ ID NO: 230922 - DNA, 25 bp, Artificial
  Probe
aatgagcgagctcatgcattctgtg

SEQ ID NO: 230923 - DNA, 25 bp, Artificial
  Probe
tgtagcttggggaacttgctgttct

SEQ ID NO: 230924 - DNA, 25 bp, Artificial
  Probe
ctgttctaaatgagcgagctcatgc

SEQ ID NO: 230925 - DNA, 25 bp, Artificial
  Probe
gaacttgctgttctaaatgagcgag

SEQ ID NO: 230926 - DNA, 25 bp, Artificial
  Probe
agcttggggaacttgctgttctaaa

SEQ ID NO: 230927 - DNA, 25 bp, Artificial
  Probe
ttaaaagacttccatgataggtttc

SEQ ID NO: 230928 - DNA, 25 bp, Artificial
  Probe
aacttgctgttctaaatgagcgagc

SEQ ID NO: 230929 - DNA, 25 bp, Artificial
  Probe
catgataggtttctctgtagcttgg

SEQ ID NO: 230930 - DNA, 25 bp, Artificial
  Probe
atgagcgagctcatgcattctgtgt

SEQ ID NO: 230931 - DNA, 25 bp, Artificial
  Probe
gtagcttggggaacttgctgttcta

SEQ ID NO: 230932 - DNA, 25 bp, Artificial
  Probe
acttccatgataggtttctctgtag

SEQ ID NO: 230933 - DNA, 25 bp, Artificial
  Probe
gcttggggaacttgctgttctaaat

SEQ ID NO: 230934 - DNA, 25 bp, Artificial
  Probe
tccatgataggtttctctgtagctt

SEQ ID NO: 230935 - DNA, 25 bp, Artificial
  Probe
tagcttggggaacttgctgttctaa

SEQ ID NO: 230936 - DNA, 25 bp, Artificial
  Probe
ctcatgcattctgtgtgaagaagcc

SEQ ID NO: 230937 - DNA, 25 bp, Artificial
  Probe
ggtttctctgtagcttggggaactt

SEQ ID NO: 230938 - DNA, 25 bp, Artificial
  Probe
cttgctgttctaaatgagcgagctc

SEQ ID NO: 230939 - DNA, 25 bp, Artificial
  Probe
ccactggctgtgagaattctttgca

SEQ ID NO: 230940 - DNA, 25 bp, Artificial
  Probe
caacccactggctgtgagaattctt

SEQ ID NO: 230941 - DNA, 25 bp, Artificial
  Probe
cactggctgtgagaattctttgcag

SEQ ID NO: 230942 - DNA, 25 bp, Artificial
  Probe
attcctggcttgtttgtactcctcc

SEQ ID NO: 230943 - DNA, 25 bp, Artificial
  Probe
aattgccatgttcaggtggtttctt

SEQ ID NO: 230944 - DNA, 25 bp, Artificial
  Probe
cagattcctggcttgtttgtactcc

SEQ ID NO: 230945 - DNA, 25 bp, Artificial
  Probe
gtgtgctgatctttcaagtgtcccc

SEQ ID NO: 230946 - DNA, 25 bp, Artificial
  Probe
ccctgcagattcctggcttgtttgt

SEQ ID NO: 230947 - DNA, 25 bp, Artificial
  Probe
gtggtgtgctgatctttcaagtgtc

SEQ ID NO: 230948 - DNA, 25 bp, Artificial
  Probe
ttgccatgttcaggtggtttcttct

SEQ ID NO: 230949 - DNA, 25 bp, Artificial
  Probe
ctagtggtgtgctgatctttcaagt

SEQ ID NO: 230950 - DNA, 25 bp, Artificial
  Probe
ctgtgagaattctttgcagtctatg

SEQ ID NO: 230951 - DNA, 25 bp, Artificial
  Probe
agaattctttgcagtctatgggcta

SEQ ID NO: 230952 - DNA, 25 bp, Artificial
  Probe
aattctttgcagtctatgggctagt

SEQ ID NO: 230953 - DNA, 25 bp, Artificial
  Probe
tctttgcagtctatgggctagtggt

SEQ ID NO: 230954 - DNA, 25 bp, Artificial
  Probe
aacccactggctgtgagaattcttt

SEQ ID NO: 230955 - DNA, 25 bp, Artificial
  Probe
ccctgtagtgcaactgttttgatac

SEQ ID NO: 230956 - DNA, 25 bp, Artificial
  Probe
tgtttgtactcctccaaccggagaa

SEQ ID NO: 230957 - DNA, 25 bp, Artificial
  Probe
tgggcgccctgcagattcctggctt

SEQ ID NO: 230958 - DNA, 25 bp, Artificial
  Probe
gtggtttcttctcagcctgttaggt

SEQ ID NO: 230959 - DNA, 25 bp, Artificial
  Probe
ttaccttggccaacccactggctgt

SEQ ID NO: 230960 - DNA, 25 bp, Artificial
  Probe
cacccaattgccatgttcaggtggt

SEQ ID NO: 230961 - DNA, 25 bp, Artificial
  Probe
tcctggcttgtttgtactcctccaa

SEQ ID NO: 230962 - DNA, 25 bp, Artificial
  Probe
cccaattgccatgttcaggtggttt

SEQ ID NO: 230963 - DNA, 25 bp, Artificial
  Probe
cttgtttgtactcctccaaccggag

SEQ ID NO: 230964 - DNA, 25 bp, Artificial
  Probe
tggccaacccactggctgtgagaat

SEQ ID NO: 230965 - DNA, 25 bp, Artificial
  Probe
cgccctgcagattcctggcttgttt

SEQ ID NO: 230966 - DNA, 25 bp, Artificial
  Probe
tggcttgtttgtactcctccaaccg

SEQ ID NO: 230967 - DNA, 25 bp, Artificial
  Probe
cctgtagtgcaactgttttgatact

SEQ ID NO: 230968 - DNA, 25 bp, Artificial
  Probe
gttcaggtggtttcttctcagcctg

SEQ ID NO: 230969 - DNA, 25 bp, Artificial
  Probe
tggtttcttctcagcctgttaggtg

SEQ ID NO: 230970 - DNA, 25 bp, Artificial
  Probe
ggtggtttcttctcagcctgttagg

SEQ ID NO: 230971 - DNA, 25 bp, Artificial
  Probe
gtgctgatctttcaagtgtccccac

SEQ ID NO: 230972 - DNA, 25 bp, Artificial
  Probe
ctggcttgtttgtactcctccaacc

SEQ ID NO: 230973 - DNA, 25 bp, Artificial
  Probe
ttcaggtggtttcttctcagcctgt

SEQ ID NO: 230974 - DNA, 25 bp, Artificial
  Probe
tgggctagtggtgtgctgatctttc

SEQ ID NO: 230975 - DNA, 25 bp, Artificial
  Probe
atgttcaggtggtttcttctcagcc

SEQ ID NO: 230976 - DNA, 25 bp, Artificial
  Probe
ctatgggctagtggtgtgctgatct

SEQ ID NO: 230977 - DNA, 25 bp, Artificial
  Probe
cttggccaacccactggctgtgaga

SEQ ID NO: 230978 - DNA, 25 bp, Artificial
  Probe
cctgcagattcctggcttgtttgta

SEQ ID NO: 230979 - DNA, 25 bp, Artificial
  Probe
tgagaattctttgcagtctatgggc

SEQ ID NO: 230980 - DNA, 25 bp, Artificial
  Probe
tctatgggctagtggtgtgctgatc

SEQ ID NO: 230981 - DNA, 25 bp, Artificial
  Probe
tggtgtgctgatctttcaagtgtcc

SEQ ID NO: 230982 - DNA, 25 bp, Artificial
  Probe
ccatgttcaggtggtttcttctcag

SEQ ID NO: 230983 - DNA, 25 bp, Artificial
  Probe
gctagtggtgtgctgatctttcaag

SEQ ID NO: 230984 - DNA, 25 bp, Artificial
  Probe
ctttgcagtctatgggctagtggtg

SEQ ID NO: 230985 - DNA, 25 bp, Artificial
  Probe
agctaagcctaataggaatgatgac

SEQ ID NO: 230986 - DNA, 25 bp, Artificial
  Probe
cacatgtgtggctgttaagtgcatg

SEQ ID NO: 230987 - DNA, 25 bp, Artificial
  Probe
tgatgactttgtgcacatgtgtggc

SEQ ID NO: 230988 - DNA, 25 bp, Artificial
  Probe
atggctgaacacatacattggttcc

SEQ ID NO: 230989 - DNA, 25 bp, Artificial
  Probe
actggatttctcaccagaaatgtta

SEQ ID NO: 230990 - DNA, 25 bp, Artificial
  Probe
gctgaacacatacattggttccctc

SEQ ID NO: 230991 - DNA, 25 bp, Artificial
  Probe
atgaatgttctacacaagctgtcca

SEQ ID NO: 230992 - DNA, 25 bp, Artificial
  Probe
atgttttcctgtcactggatttctc

SEQ ID NO: 230993 - DNA, 25 bp, Artificial
  Probe
atgactatatggaatggctgaacac

SEQ ID NO: 230994 - DNA, 25 bp, Artificial
  Probe
aaccatgaatgttctacacaagctg

SEQ ID NO: 230995 - DNA, 25 bp, Artificial
  Probe
ttcctgtcactggatttctcaccag

SEQ ID NO: 230996 - DNA, 25 bp, Artificial
  Probe
taactcctggaaagtgccataaagg

SEQ ID NO: 230997 - DNA, 25 bp, Artificial
  Probe
tgactatatggaatggctgaacaca

SEQ ID NO: 230998 - DNA, 25 bp, Artificial
  Probe
gtggctgttaagtgcatgtggccac

SEQ ID NO: 230999 - DNA, 25 bp, Artificial
  Probe
gtcacattgcagaacaaggtggaaa

SEQ ID NO: 231000 - DNA, 25 bp, Artificial
  Probe
tcttgttgttagctaagcctaatag

SEQ ID NO: 231001 - DNA, 25 bp, Artificial
  Probe
atgactttgtgcacatgtgtggctg

SEQ ID NO: 231002 - DNA, 25 bp, Artificial
  Probe
gtcactggatttctcaccagaaatg

SEQ ID NO: 231003 - DNA, 25 bp, Artificial
  Probe
actcctggaaagtgccataaaggaa

SEQ ID NO: 231004 - DNA, 25 bp, Artificial
  Probe
cacattgcagaacaaggtggaaagg

SEQ ID NO: 231005 - DNA, 25 bp, Artificial
  Probe
taacgcttgtcacattgcagaacaa

SEQ ID NO: 231006 - DNA, 25 bp, Artificial
  Probe
accatgaatgttctacacaagctgt

SEQ ID NO: 231007 - DNA, 25 bp, Artificial
  Probe
gaatgttctacacaagctgtccaat

SEQ ID NO: 231008 - DNA, 25 bp, Artificial
  Probe
aattaactcctggaaagtgccataa

SEQ ID NO: 231009 - DNA, 25 bp, Artificial
  Probe
tgtggctgttaagtgcatgtggcca

SEQ ID NO: 231010 - DNA, 25 bp, Artificial
  Probe
cttcttaacgcttgtcacattgcag

SEQ ID NO: 231011 - DNA, 25 bp, Artificial
  Probe
ccaggcagtatcttgaatagtctag

SEQ ID NO: 231012 - DNA, 25 bp, Artificial
  Probe
ggttccctcttcttaacgcttgtca

SEQ ID NO: 231013 - DNA, 25 bp, Artificial
  Probe
attggttccctcttcttaacgcttg

SEQ ID NO: 231014 - DNA, 25 bp, Artificial
  Probe
cttgttgttagctaagcctaatagg

SEQ ID NO: 231015 - DNA, 25 bp, Artificial
  Probe
cttgtcacattgcagaacaaggtgg

SEQ ID NO: 231016 - DNA, 25 bp, Artificial
  Probe
ctggatttctcaccagaaatgttaa

SEQ ID NO: 231017 - DNA, 25 bp, Artificial
  Probe
ttcttaacgcttgtcacattgcaga

SEQ ID NO: 231018 - DNA, 25 bp, Artificial
  Probe
tctctttacagaatagaagcctttg

SEQ ID NO: 231019 - DNA, 25 bp, Artificial
  Probe
cactggatttctcaccagaaatgtt

SEQ ID NO: 231020 - DNA, 25 bp, Artificial
  Probe
ctgtcactggatttctcaccagaaa

SEQ ID NO: 231021 - DNA, 25 bp, Artificial
  Probe
gactttgtgcacatgtgtggctgtt

SEQ ID NO: 231022 - DNA, 25 bp, Artificial
  Probe
ttgtcacattgcagaacaaggtgga

SEQ ID NO: 231023 - DNA, 25 bp, Artificial
  Probe
gtaaccatgaatgttctacacaagc

SEQ ID NO: 231024 - DNA, 25 bp, Artificial
  Probe
gttttcctgtcactggatttctcac

SEQ ID NO: 231025 - DNA, 25 bp, Artificial
  Probe
aatggctgaacacatacattggttc

SEQ ID NO: 231026 - DNA, 25 bp, Artificial
  Probe
agtaaccatgaatgttctacacaag

SEQ ID NO: 231027 - DNA, 25 bp, Artificial
  Probe
gatttctcaccagaaatgttaatga

SEQ ID NO: 231028 - DNA, 25 bp, Artificial
  Probe
actttgtgcacatgtgtggctgtta

SEQ ID NO: 231029 - DNA, 25 bp, Artificial
  Probe
ctttgtgcacatgtgtggctgttaa

SEQ ID NO: 231030 - DNA, 25 bp, Artificial
  Probe
ttttcttgttgttagctaagcctaa

SEQ ID NO: 231031 - DNA, 25 bp, Artificial
  Probe
ggatacttcggcattcagcgctgca

SEQ ID NO: 231032 - DNA, 25 bp, Artificial
  Probe
gaacagcataaccacggttccctac

SEQ ID NO: 231033 - DNA, 25 bp, Artificial
  Probe
aacagatggacagttccagccacct

SEQ ID NO: 231034 - DNA, 25 bp, Artificial
  Probe
gctgccatgccgtggcctccgggaa

SEQ ID NO: 231035 - DNA, 25 bp, Artificial
  Probe
cacctgccttcctaatgcagagcaa

SEQ ID NO: 231036 - DNA, 25 bp, Artificial
  Probe
cagtgttatgaccagtgtgaaaaca

SEQ ID NO: 231037 - DNA, 25 bp, Artificial
  Probe
ctaccgcgttcgtcagcacctggaa

SEQ ID NO: 231038 - DNA, 25 bp, Artificial
  Probe
taggagacgtgacagccaagcgcat

SEQ ID NO: 231039 - DNA, 25 bp, Artificial
  Probe
gctgtgctggggaaccagattttta

SEQ ID NO: 231040 - DNA, 25 bp, Artificial
  Probe
agatggacagttccagccacctgtc

SEQ ID NO: 231041 - DNA, 25 bp, Artificial
  Probe
accagtggaccaaggtaggagacgt

SEQ ID NO: 231042 - DNA, 25 bp, Artificial
  Probe
ggatacagaattctcagcctgctct

SEQ ID NO: 231043 - DNA, 25 bp, Artificial
  Probe
cacgagtgagctcactctgacacac

SEQ ID NO: 231044 - DNA, 25 bp, Artificial
  Probe
gtcagcacctggaaacacctgcctt

SEQ ID NO: 231045 - DNA, 25 bp, Artificial
  Probe
tccgggaacaagctttacgtggttg

SEQ ID NO: 231046 - DNA, 25 bp, Artificial
  Probe
attctcagcctgctctgcttacaag

SEQ ID NO: 231047 - DNA, 25 bp, Artificial
  Probe
ttggaggatacttcggcattcagcg

SEQ ID NO: 231048 - DNA, 25 bp, Artificial
  Probe
gaattctcagcctgctctgcttaca

SEQ ID NO: 231049 - DNA, 25 bp, Artificial
  Probe
tgtgctggggaaccagatttttatc

SEQ ID NO: 231050 - DNA, 25 bp, Artificial
  Probe
cagcctgctctgcttacaagttcaa

SEQ ID NO: 231051 - DNA, 25 bp, Artificial
  Probe
ctaaggttcagtgttatgaccagtg

SEQ ID NO: 231052 - DNA, 25 bp, Artificial
  Probe
gtggcctccgggaacaagctttacg

SEQ ID NO: 231053 - DNA, 25 bp, Artificial
  Probe
acttcggcattcagcgctgcaagac

SEQ ID NO: 231054 - DNA, 25 bp, Artificial
  Probe
ctggcgttacacagccgcagctgtg

SEQ ID NO: 231055 - DNA, 25 bp, Artificial
  Probe
ggcattcagcgctgcaagacgttgg

SEQ ID NO: 231056 - DNA, 25 bp, Artificial
  Probe
acgtgacagccaagcgcatgagctg

SEQ ID NO: 231057 - DNA, 25 bp, Artificial
  Probe
gcatgagctgccatgccgtggcctc

SEQ ID NO: 231058 - DNA, 25 bp, Artificial
  Probe
ccgactttagatgtgtggaacagca

SEQ ID NO: 231059 - DNA, 25 bp, Artificial
  Probe
acagccaagcgcatgagctgccatg

SEQ ID NO: 231060 - DNA, 25 bp, Artificial
  Probe
cctggcgttacacagccgcagctgt

SEQ ID NO: 231061 - DNA, 25 bp, Artificial
  Probe
ttacacagccgcagctgtgctgggg

SEQ ID NO: 231062 - DNA, 25 bp, Artificial
  Probe
cctggaaacacctgccttcctaatg

SEQ ID NO: 231063 - DNA, 25 bp, Artificial
  Probe
caagttcaacagtgaaacttaccag

SEQ ID NO: 231064 - DNA, 25 bp, Artificial
  Probe
tcagtgttatgaccagtgtgaaaac

SEQ ID NO: 231065 - DNA, 25 bp, Artificial
  Probe
ggtaccagcgtaagccacgacaagc

SEQ ID NO: 231066 - DNA, 25 bp, Artificial
  Probe
cacgagggtaccagcgtaagccacg

SEQ ID NO: 231067 - DNA, 25 bp, Artificial
  Probe
caagctttacgtggttggaggatac

SEQ ID NO: 231068 - DNA, 25 bp, Artificial
  Probe
tgtggaacagcataaccacggttcc

SEQ ID NO: 231069 - DNA, 25 bp, Artificial
  Probe
ttacgtggttggaggatacttcggc

SEQ ID NO: 231070 - DNA, 25 bp, Artificial
  Probe
gacgtgacagccaagcgcatgagct

SEQ ID NO: 231071 - DNA, 25 bp, Artificial
  Probe
aagcgcatgagctgccatgccgtgg

SEQ ID NO: 231072 - DNA, 25 bp, Artificial
  Probe
cagcgtaagccacgacaagcttcct

SEQ ID NO: 231073 - DNA, 25 bp, Artificial
  Probe
accaaggagagcacgagtgagctca

SEQ ID NO: 231074 - DNA, 25 bp, Artificial
  Probe
gcttacaagttcaacagtgaaactt

SEQ ID NO: 231075 - DNA, 25 bp, Artificial
  Probe
catgccgtggcctccgggaacaagc

SEQ ID NO: 231076 - DNA, 25 bp, Artificial
  Probe
ccgcagctgtgctggggaaccagat

SEQ ID NO: 231077 - DNA, 25 bp, Artificial
  Probe
ctgtgtgttgcctgttttggcctgc

SEQ ID NO: 231078 - DNA, 25 bp, Artificial
  Probe
tgtggcacccacgaggcatggacag

SEQ ID NO: 231079 - DNA, 25 bp, Artificial
  Probe
tggcctgctccactgatatgcttat

SEQ ID NO: 231080 - DNA, 25 bp, Artificial
  Probe
ctgttttggcctgctccactgatat

SEQ ID NO: 231081 - DNA, 25 bp, Artificial
  Probe
gtgtgttgcctgttttggcctgctc

SEQ ID NO: 231082 - DNA, 25 bp, Artificial
  Probe
ccactgatatgcttatggagaatgc

SEQ ID NO: 231083 - DNA, 25 bp, Artificial
  Probe
taatcgctgtggaaaacctaaagga

SEQ ID NO: 231084 - DNA, 25 bp, Artificial
  Probe
ttggcaacaggttttggtaatcgct

SEQ ID NO: 231085 - DNA, 25 bp, Artificial
  Probe
caactggtgttctgttgcactggta

SEQ ID NO: 231086 - DNA, 25 bp, Artificial
  Probe
gttttggcctgctccactgatatgc

SEQ ID NO: 231087 - DNA, 25 bp, Artificial
  Probe
cctgttttggcctgctccactgata

SEQ ID NO: 231088 - DNA, 25 bp, Artificial
  Probe
ggcctgctccactgatatgcttatg

SEQ ID NO: 231089 - DNA, 25 bp, Artificial
  Probe
tctgtggcacccacgaggcatggac

SEQ ID NO: 231090 - DNA, 25 bp, Artificial
  Probe
acagctatgcatgtattcttagata

SEQ ID NO: 231091 - DNA, 25 bp, Artificial
  Probe
ttggcctgctccactgatatgctta

SEQ ID NO: 231092 - DNA, 25 bp, Artificial
  Probe
gctatgcatgtattcttagatacat

SEQ ID NO: 231093 - DNA, 25 bp, Artificial
  Probe
ttggtaatcgctgtggaaaacctaa

SEQ ID NO: 231094 - DNA, 25 bp, Artificial
  Probe
ctgcaactggtgttctgttgcactg

SEQ ID NO: 231095 - DNA, 25 bp, Artificial
  Probe
taaaggaccaagagatccctcgtgc

SEQ ID NO: 231096 - DNA, 25 bp, Artificial
  Probe
ggaacagctatgcatgtattcttag

SEQ ID NO: 231097 - DNA, 25 bp, Artificial
  Probe
gctccactgatatgcttatggagaa

SEQ ID NO: 231098 - DNA, 25 bp, Artificial
  Probe
tttggtaatcgctgtggaaaaccta

SEQ ID NO: 231099 - DNA, 25 bp, Artificial
  Probe
cactgatatgcttatggagaatgct

SEQ ID NO: 231100 - DNA, 25 bp, Artificial
  Probe
agctatgcatgtattcttagataca

SEQ ID NO: 231101 - DNA, 25 bp, Artificial
  Probe
gaacagctatgcatgtattcttaga

SEQ ID NO: 231102 - DNA, 25 bp, Artificial
  Probe
aggctgcaactggtgttctgttgca

SEQ ID NO: 231103 - DNA, 25 bp, Artificial
  Probe
gctgcaactggtgttctgttgcact

SEQ ID NO: 231104 - DNA, 25 bp, Artificial
  Probe
tgtgtgttgcctgttttggcctgct

SEQ ID NO: 231105 - DNA, 25 bp, Artificial
  Probe
aactggtgttctgttgcactggtag

SEQ ID NO: 231106 - DNA, 25 bp, Artificial
  Probe
ctccactgatatgcttatggagaat

SEQ ID NO: 231107 - DNA, 25 bp, Artificial
  Probe
atggctgtgtgttgcctgttttggc

SEQ ID NO: 231108 - DNA, 25 bp, Artificial
  Probe
tgttgcctgttttggcctgctccac

SEQ ID NO: 231109 - DNA, 25 bp, Artificial
  Probe
cagctatgcatgtattcttagatac

SEQ ID NO: 231110 - DNA, 25 bp, Artificial
  Probe
actggtgttctgttgcactggtagg

SEQ ID NO: 231111 - DNA, 25 bp, Artificial
  Probe
tgtgttgcctgttttggcctgctcc

SEQ ID NO: 231112 - DNA, 25 bp, Artificial
  Probe
ttttggcctgctccactgatatgct

SEQ ID NO: 231113 - DNA, 25 bp, Artificial
  Probe
gtaatcgctgtggaaaacctaaagg

SEQ ID NO: 231114 - DNA, 25 bp, Artificial
  Probe
gcctgctccactgatatgcttatgg

SEQ ID NO: 231115 - DNA, 25 bp, Artificial
  Probe
tgttttggcctgctccactgatatg

SEQ ID NO: 231116 - DNA, 25 bp, Artificial
  Probe
gaggctgcaactggtgttctgttgc

SEQ ID NO: 231117 - DNA, 25 bp, Artificial
  Probe
ctgtggcacccacgaggcatggaca

SEQ ID NO: 231118 - DNA, 25 bp, Artificial
  Probe
tgcaactggtgttctgttgcactgg

SEQ ID NO: 231119 - DNA, 25 bp, Artificial
  Probe
aaggaccaagagatccctcgtgccg

SEQ ID NO: 231120 - DNA, 25 bp, Artificial
  Probe
tttggcaacaggttttggtaatcgc

SEQ ID NO: 231121 - DNA, 25 bp, Artificial
  Probe
gtggtctgtggcacccacgaggcat

SEQ ID NO: 231122 - DNA, 25 bp, Artificial
  Probe
ctgctccactgatatgcttatggag

SEQ ID NO: 231123 - DNA, 25 bp, Artificial
  Probe
gccgatctgcacaaaagagcaagca

SEQ ID NO: 231124 - DNA, 25 bp, Artificial
  Probe
tggtctgtagaggaacctggcagtg

SEQ ID NO: 231125 - DNA, 25 bp, Artificial
  Probe
cagtgccgatctgcacaaaagagca

SEQ ID NO: 231126 - DNA, 25 bp, Artificial
  Probe
gtgcctgccctcattgcgaaaacca

SEQ ID NO: 231127 - DNA, 25 bp, Artificial
  Probe
tgtagaggaacctggcagtgccgat

SEQ ID NO: 231128 - DNA, 25 bp, Artificial
  Probe
ccctcattgcgaaaaccatgcccac

SEQ ID NO: 231129 - DNA, 25 bp, Artificial
  Probe
agaggaacctggcagtgccgatctg

SEQ ID NO: 231130 - DNA, 25 bp, Artificial
  Probe
cattgcgaaaaccatgcccacaatc

SEQ ID NO: 231131 - DNA, 25 bp, Artificial
  Probe
tctgtagaggaacctggcagtgccg

SEQ ID NO: 231132 - DNA, 25 bp, Artificial
  Probe
agcgagatggtctgtagaggaacct

SEQ ID NO: 231133 - DNA, 25 bp, Artificial
  Probe
gcagcgagatggtctgtagaggaac

SEQ ID NO: 231134 - DNA, 25 bp, Artificial
  Probe
tgtgcctgccctcattgcgaaaacc

SEQ ID NO: 231135 - DNA, 25 bp, Artificial
  Probe
gcagtgccgatctgcacaaaagagc

SEQ ID NO: 231136 - DNA, 25 bp, Artificial
  Probe
gagaaagccctgggatttgtttttg

SEQ ID NO: 231137 - DNA, 25 bp, Artificial
  Probe
ccgatctgcacaaaagagcaagcag

SEQ ID NO: 231138 - DNA, 25 bp, Artificial
  Probe
gtagaggaacctggcagtgccgatc

SEQ ID NO: 231139 - DNA, 25 bp, Artificial
  Probe
atgtgcctgccctcattgcgaaaac

SEQ ID NO: 231140 - DNA, 25 bp, Artificial
  Probe
ctgccctcattgcgaaaaccatgcc

SEQ ID NO: 231141 - DNA, 25 bp, Artificial
  Probe
ctgtagaggaacctggcagtgccga

SEQ ID NO: 231142 - DNA, 25 bp, Artificial
  Probe
cgatctgcacaaaagagcaagcagg

SEQ ID NO: 231143 - DNA, 25 bp, Artificial
  Probe
catcaactatgcgttgcgcagcgag

SEQ ID NO: 231144 - DNA, 25 bp, Artificial
  Probe
tgccgctgtcgcagatgtgcctgcc

SEQ ID NO: 231145 - DNA, 25 bp, Artificial
  Probe
tatgcgttgcgcagcgagatggtct

SEQ ID NO: 231146 - DNA, 25 bp, Artificial
  Probe
gcagatgtgcctgccctcattgcga

SEQ ID NO: 231147 - DNA, 25 bp, Artificial
  Probe
cagcgagatggtctgtagaggaacc

SEQ ID NO: 231148 - DNA, 25 bp, Artificial
  Probe
tcaactatgcgttgcgcagcgagat

SEQ ID NO: 231149 - DNA, 25 bp, Artificial
  Probe
cctggcagtgccgatctgcacaaaa

SEQ ID NO: 231150 - DNA, 25 bp, Artificial
  Probe
agtgccgatctgcacaaaagagcaa

SEQ ID NO: 231151 - DNA, 25 bp, Artificial
  Probe
aacctggcagtgccgatctgcacaa

SEQ ID NO: 231152 - DNA, 25 bp, Artificial
  Probe
atcaactatgcgttgcgcagcgaga

SEQ ID NO: 231153 - DNA, 25 bp, Artificial
  Probe
tatatgccgctgtcgcagatgtgcc

SEQ ID NO: 231154 - DNA, 25 bp, Artificial
  Probe
ctggcagtgccgatctgcacaaaag

SEQ ID NO: 231155 - DNA, 25 bp, Artificial
  Probe
gtgccgatctgcacaaaagagcaag

SEQ ID NO: 231156 - DNA, 25 bp, Artificial
  Probe
atggtctgtagaggaacctggcagt

SEQ ID NO: 231157 - DNA, 25 bp, Artificial
  Probe
gcctgccctcattgcgaaaaccatg

SEQ ID NO: 231158 - DNA, 25 bp, Artificial
  Probe
gtctgtagaggaacctggcagtgcc

SEQ ID NO: 231159 - DNA, 25 bp, Artificial
  Probe
tggcagtgccgatctgcacaaaaga

SEQ ID NO: 231160 - DNA, 25 bp, Artificial
  Probe
atgccgctgtcgcagatgtgcctgc

SEQ ID NO: 231161 - DNA, 25 bp, Artificial
  Probe
aaccatgcccacaatcaacgccatc

SEQ ID NO: 231162 - DNA, 25 bp, Artificial
  Probe
ggcagtgccgatctgcacaaaagag

SEQ ID NO: 231163 - DNA, 25 bp, Artificial
  Probe
gatgtgcctgccctcattgcgaaaa

SEQ ID NO: 231164 - DNA, 25 bp, Artificial
  Probe
gaggaacctggcagtgccgatctgc

SEQ ID NO: 231165 - DNA, 25 bp, Artificial
  Probe
tgccgatctgcacaaaagagcaagc

SEQ ID NO: 231166 - DNA, 25 bp, Artificial
  Probe
gatctgcacaaaagagcaagcagga

SEQ ID NO: 231167 - DNA, 25 bp, Artificial
  Probe
tcaacgccatcaactatgcgttgcg

SEQ ID NO: 231168 - DNA, 25 bp, Artificial
  Probe
ggaacctggcagtgccgatctgcac

SEQ ID NO: 231169 - DNA, 25 bp, Artificial
  Probe
cctctgacaacgacagaagagcatt

SEQ ID NO: 231170 - DNA, 25 bp, Artificial
  Probe
tgttatattctctttgtgtcctaat

SEQ ID NO: 231171 - DNA, 25 bp, Artificial
  Probe
aacttgttatattctctttgtgtcc

SEQ ID NO: 231172 - DNA, 25 bp, Artificial
  Probe
accctcattttctcagggagatgaa

SEQ ID NO: 231173 - DNA, 25 bp, Artificial
  Probe
ctttgtgtcctaatatcaaaccctc

SEQ ID NO: 231174 - DNA, 25 bp, Artificial
  Probe
tcaaaccctcattttctcagggaga

SEQ ID NO: 231175 - DNA, 25 bp, Artificial
  Probe
tatgcttccaacagggttcatttta

SEQ ID NO: 231176 - DNA, 25 bp, Artificial
  Probe
ctcattttctcagggagatgaataa

SEQ ID NO: 231177 - DNA, 25 bp, Artificial
  Probe
ctgcacctctgacaacgacagaaga

SEQ ID NO: 231178 - DNA, 25 bp, Artificial
  Probe
tatcaaaccctcattttctcaggga

SEQ ID NO: 231179 - DNA, 25 bp, Artificial
  Probe
aactatgcttccaacagggttcatt

SEQ ID NO: 231180 - DNA, 25 bp, Artificial
  Probe
aaactatgcttccaacagggttcat

SEQ ID NO: 231181 - DNA, 25 bp, Artificial
  Probe
ccctcattttctcagggagatgaat

SEQ ID NO: 231182 - DNA, 25 bp, Artificial
  Probe
aatatcaaaccctcattttctcagg

SEQ ID NO: 231183 - DNA, 25 bp, Artificial
  Probe
cacctctgacaacgacagaagagca

SEQ ID NO: 231184 - DNA, 25 bp, Artificial
  Probe
gaaacttgttatattctctttgtgt

SEQ ID NO: 231185 - DNA, 25 bp, Artificial
  Probe
atattctctttgtgtcctaatatca

SEQ ID NO: 231186 - DNA, 25 bp, Artificial
  Probe
tctgacaacgacagaagagcattta

SEQ ID NO: 231187 - DNA, 25 bp, Artificial
  Probe
acctctgacaacgacagaagagcat

SEQ ID NO: 231188 - DNA, 25 bp, Artificial
  Probe
ctctgacaacgacagaagagcattt

SEQ ID NO: 231189 - DNA, 25 bp, Artificial
  Probe
tgcacctctgacaacgacagaagag

SEQ ID NO: 231190 - DNA, 25 bp, Artificial
  Probe
cctaatatcaaaccctcattttctc

SEQ ID NO: 231191 - DNA, 25 bp, Artificial
  Probe
caaaccctcattttctcagggagat

SEQ ID NO: 231192 - DNA, 25 bp, Artificial
  Probe
ctgacaacgacagaagagcatttag

SEQ ID NO: 231193 - DNA, 25 bp, Artificial
  Probe
attctctttgtgtcctaatatcaaa

SEQ ID NO: 231194 - DNA, 25 bp, Artificial
  Probe
actatgcttccaacagggttcattt

SEQ ID NO: 231195 - DNA, 25 bp, Artificial
  Probe
gtcctaatatcaaaccctcattttc

SEQ ID NO: 231196 - DNA, 25 bp, Artificial
  Probe
cttgttatattctctttgtgtccta

SEQ ID NO: 231197 - DNA, 25 bp, Artificial
  Probe
ttatattctctttgtgtcctaatat

SEQ ID NO: 231198 - DNA, 25 bp, Artificial
  Probe
tctctttgtgtcctaatatcaaacc

SEQ ID NO: 231199 - DNA, 25 bp, Artificial
  Probe
atttcggaaacttgttatattctct

SEQ ID NO: 231200 - DNA, 25 bp, Artificial
  Probe
ctatgcttccaacagggttcatttt

SEQ ID NO: 231201 - DNA, 25 bp, Artificial
  Probe
gtgtcctaatatcaaaccctcattt

SEQ ID NO: 231202 - DNA, 25 bp, Artificial
  Probe
cattttctcagggagatgaataagc

SEQ ID NO: 231203 - DNA, 25 bp, Artificial
  Probe
gcacctctgacaacgacagaagagc

SEQ ID NO: 231204 - DNA, 25 bp, Artificial
  Probe
cctcattttctcagggagatgaata

SEQ ID NO: 231205 - DNA, 25 bp, Artificial
  Probe
atcaaaccctcattttctcagggag

SEQ ID NO: 231206 - DNA, 25 bp, Artificial
  Probe
aaaccctcattttctcagggagatg

SEQ ID NO: 231207 - DNA, 25 bp, Artificial
  Probe
tgcttccaacagggttcattttaaa

SEQ ID NO: 231208 - DNA, 25 bp, Artificial
  Probe
atatcaaaccctcattttctcaggg

SEQ ID NO: 231209 - DNA, 25 bp, Artificial
  Probe
aaccctcattttctcagggagatga

SEQ ID NO: 231210 - DNA, 25 bp, Artificial
  Probe
ttttctcagggagatgaataagcgt

SEQ ID NO: 231211 - DNA, 25 bp, Artificial
  Probe
ttgtgtcctaatatcaaaccctcat

SEQ ID NO: 231212 - DNA, 25 bp, Artificial
  Probe
tttcggaaacttgttatattctctt

SEQ ID NO: 231213 - DNA, 25 bp, Artificial
  Probe
ctctttgtgtcctaatatcaaaccc

SEQ ID NO: 231214 - DNA, 25 bp, Artificial
  Probe
atgcttccaacagggttcattttaa

SEQ ID NO: 231215 - DNA, 25 bp, Artificial
  Probe
cgagctgccttaacctctgctcgaa

SEQ ID NO: 231216 - DNA, 25 bp, Artificial
  Probe
ccaggctttggtgagcggaaagctt

SEQ ID NO: 231217 - DNA, 25 bp, Artificial
  Probe
aaagctcttttggttgaagtacagc

SEQ ID NO: 231218 - DNA, 25 bp, Artificial
  Probe
gagctgccttaacctctgctcgaac

SEQ ID NO: 231219 - DNA, 25 bp, Artificial
  Probe
cccctaaattgcaggccactctgga

SEQ ID NO: 231220 - DNA, 25 bp, Artificial
  Probe
ctggtgtctttgtattttgatacca

SEQ ID NO: 231221 - DNA, 25 bp, Artificial
  Probe
tctctcctggcgaagactggacaag

SEQ ID NO: 231222 - DNA, 25 bp, Artificial
  Probe
gaaagcccgagctgccttaacctct

SEQ ID NO: 231223 - DNA, 25 bp, Artificial
  Probe
aagcattacatttgggttctcagct

SEQ ID NO: 231224 - DNA, 25 bp, Artificial
  Probe
gtaccaggaagcattacatttgggt

SEQ ID NO: 231225 - DNA, 25 bp, Artificial
  Probe
tttggtgagcggaaagcttgcactt

SEQ ID NO: 231226 - DNA, 25 bp, Artificial
  Probe
tattcatgcagcagaggagaaggac

SEQ ID NO: 231227 - DNA, 25 bp, Artificial
  Probe
atgtccaggctttggtgagcggaaa

SEQ ID NO: 231228 - DNA, 25 bp, Artificial
  Probe
atgactccatcgatagccccaaggc

SEQ ID NO: 231229 - DNA, 25 bp, Artificial
  Probe
acctctgctcgaaccacagcaaatg

SEQ ID NO: 231230 - DNA, 25 bp, Artificial
  Probe
gtccaggtcaaagagcagagcatcc

SEQ ID NO: 231231 - DNA, 25 bp, Artificial
  Probe
tgtttagaatgcatcgaatgggcca

SEQ ID NO: 231232 - DNA, 25 bp, Artificial
  Probe
acgccaagcattggaggcaaggctg

SEQ ID NO: 231233 - DNA, 25 bp, Artificial
  Probe
ctcttttggttgaagtacagctttt

SEQ ID NO: 231234 - DNA, 25 bp, Artificial
  Probe
gaagactggacaagctgctggtcga

SEQ ID NO: 231235 - DNA, 25 bp, Artificial
  Probe
ctggggtctctcctggcgaagactg

SEQ ID NO: 231236 - DNA, 25 bp, Artificial
  Probe
atcgatagccccaaggccatcacat

SEQ ID NO: 231237 - DNA, 25 bp, Artificial
  Probe
gaaagcaaaacttaccatgctctga

SEQ ID NO: 231238 - DNA, 25 bp, Artificial
  Probe
cctggcgaagactggacaagctgct

SEQ ID NO: 231239 - DNA, 25 bp, Artificial
  Probe
ccttcttacgccaagcattggaggc

SEQ ID NO: 231240 - DNA, 25 bp, Artificial
  Probe
agaatgcatcgaatgggccaaatca

SEQ ID NO: 231241 - DNA, 25 bp, Artificial
  Probe
agcggaaagcttgcacttcggtatg

SEQ ID NO: 231242 - DNA, 25 bp, Artificial
  Probe
atcatgctcaacaccccagaagatg

SEQ ID NO: 231243 - DNA, 25 bp, Artificial
  Probe
atcgaatgggccaaatcagagaaaa

SEQ ID NO: 231244 - DNA, 25 bp, Artificial
  Probe
catgcagtcaggtattattcatgca

SEQ ID NO: 231245 - DNA, 25 bp, Artificial
  Probe
taatctgccgaaagcccgagctgcc

SEQ ID NO: 231246 - DNA, 25 bp, Artificial
  Probe
tgctgtgcaaaatcatgctcaacac

SEQ ID NO: 231247 - DNA, 25 bp, Artificial
  Probe
tcaaagagcagagcatccttgaact

SEQ ID NO: 231248 - DNA, 25 bp, Artificial
  Probe
gagaaaagaaccttcttacgccaag

SEQ ID NO: 231249 - DNA, 25 bp, Artificial
  Probe
ttgtattttgataccaagaggtacc

SEQ ID NO: 231250 - DNA, 25 bp, Artificial
  Probe
taccaggaagcattacatttgggtt

SEQ ID NO: 231251 - DNA, 25 bp, Artificial
  Probe
ttctcagctgcttcgggagttgaaa

SEQ ID NO: 231252 - DNA, 25 bp, Artificial
  Probe
ctggtcgagctatgtttagaatgca

SEQ ID NO: 231253 - DNA, 25 bp, Artificial
  Probe
gctggtgtctttgtattttgatacc

SEQ ID NO: 231254 - DNA, 25 bp, Artificial
  Probe
gaaccacagcaaatgctatctactg

SEQ ID NO: 231255 - DNA, 25 bp, Artificial
  Probe
ttcatgcagcagaggagaaggactg

SEQ ID NO: 231256 - DNA, 25 bp, Artificial
  Probe
actggaaaactgcatactcgtactt

SEQ ID NO: 231257 - DNA, 25 bp, Artificial
  Probe
cagaagatgtccaggctttggtgag

SEQ ID NO: 231258 - DNA, 25 bp, Artificial
  Probe
taccaagaggtaccaggaagcatta

SEQ ID NO: 231259 - DNA, 25 bp, Artificial
  Probe
cgaatgggccaaatcagagaaaaga

SEQ ID NO: 231260 - DNA, 25 bp, Artificial
  Probe
cccaaggccatcacatctctgaagt

SEQ ID NO: 231261 - DNA, 25 bp, Artificial
  Probe
ataacttgatgaagagcctggacaa

SEQ ID NO: 231262 - DNA, 25 bp, Artificial
  Probe
gcccttctctttcttccagatggat

SEQ ID NO: 231263 - DNA, 25 bp, Artificial
  Probe
cttccttgagtacacatcattatgg

SEQ ID NO: 231264 - DNA, 25 bp, Artificial
  Probe
gattcttccagcagagaaataaagc

SEQ ID NO: 231265 - DNA, 25 bp, Artificial
  Probe
cacatcattatggagactcctcttg

SEQ ID NO: 231266 - DNA, 25 bp, Artificial
  Probe
ttcttccagcagagaaataaagcct

SEQ ID NO: 231267 - DNA, 25 bp, Artificial
  Probe
aagacagaactgagtcttgcagaga

SEQ ID NO: 231268 - DNA, 25 bp, Artificial
  Probe
agacagaactgagtcttgcagagaa

SEQ ID NO: 231269 - DNA, 25 bp, Artificial
  Probe
ctgatcaagacagaactgagtcttg

SEQ ID NO: 231270 - DNA, 25 bp, Artificial
  Probe
caagttgaccctgagtaggaaagaa

SEQ ID NO: 231271 - DNA, 25 bp, Artificial
  Probe
ttgtcctgacctctgcagcctcttt

SEQ ID NO: 231272 - DNA, 25 bp, Artificial
  Probe
actctgtgttcctgaccacgctgtg

SEQ ID NO: 231273 - DNA, 25 bp, Artificial
  Probe
agctgatcaagacagaactgagtct

SEQ ID NO: 231274 - DNA, 25 bp, Artificial
  Probe
tgaccctgagtaggaaagaactgaa

SEQ ID NO: 231275 - DNA, 25 bp, Artificial
  Probe
gacaacaagtgaccagctaccctca

SEQ ID NO: 231276 - DNA, 25 bp, Artificial
  Probe
ctggacaaaaacagcgaccaggaga

SEQ ID NO: 231277 - DNA, 25 bp, Artificial
  Probe
agcgaccaggagattgacttcaagg

SEQ ID NO: 231278 - DNA, 25 bp, Artificial
  Probe
cagaactgagtcttgcagagaagat

SEQ ID NO: 231279 - DNA, 25 bp, Artificial
  Probe
gtcctgacctctgcagcctctttaa

SEQ ID NO: 231280 - DNA, 25 bp, Artificial
  Probe
tcctgaccacgctgtgcatggccta

SEQ ID NO: 231281 - DNA, 25 bp, Artificial
  Probe
gtactctgtgttcctgaccacgctg

SEQ ID NO: 231282 - DNA, 25 bp, Artificial
  Probe
agcctggacaaaaacagcgaccagg

SEQ ID NO: 231283 - DNA, 25 bp, Artificial
  Probe
tcttgagaaggcactgaccaccatg

SEQ ID NO: 231284 - DNA, 25 bp, Artificial
  Probe
ggtccacttcttccttgagtacaca

SEQ ID NO: 231285 - DNA, 25 bp, Artificial
  Probe
gcatggcctacaatgacttcttctt

SEQ ID NO: 231286 - DNA, 25 bp, Artificial
  Probe
ttgagaaggcactgaccaccatggt

SEQ ID NO: 231287 - DNA, 25 bp, Artificial
  Probe
aacttgatgaagagcctggacaaaa

SEQ ID NO: 231288 - DNA, 25 bp, Artificial
  Probe
tgtgcatggcctacaatgacttctt

SEQ ID NO: 231289 - DNA, 25 bp, Artificial
  Probe
ggtagcaagttgaccctgagtagga

SEQ ID NO: 231290 - DNA, 25 bp, Artificial
  Probe
aaggagtactctgtgttcctgacca

SEQ ID NO: 231291 - DNA, 25 bp, Artificial
  Probe
aggacaacaagtgaccagctaccct

SEQ ID NO: 231292 - DNA, 25 bp, Artificial
  Probe
ctgaccacgctgtgcatggcctaca

SEQ ID NO: 231293 - DNA, 25 bp, Artificial
  Probe
ctgcccttctctttcttccagatgg

SEQ ID NO: 231294 - DNA, 25 bp, Artificial
  Probe
gcaagttgaccctgagtaggaaaga

SEQ ID NO: 231295 - DNA, 25 bp, Artificial
  Probe
aacagcgaccaggagattgacttca

SEQ ID NO: 231296 - DNA, 25 bp, Artificial
  Probe
ctttcttccagatggattcttccag

SEQ ID NO: 231297 - DNA, 25 bp, Artificial
  Probe
tgtgttcctgaccacgctgtgcatg

SEQ ID NO: 231298 - DNA, 25 bp, Artificial
  Probe
tgatgaagagcctggacaaaaacag

SEQ ID NO: 231299 - DNA, 25 bp, Artificial
  Probe
gtacacatcattatggagactcctc

SEQ ID NO: 231300 - DNA, 25 bp, Artificial
  Probe
ccttgagtacacatcattatggaga

SEQ ID NO: 231301 - DNA, 25 bp, Artificial
  Probe
ttcttagaggacaacaagtgaccag

SEQ ID NO: 231302 - DNA, 25 bp, Artificial
  Probe
atggcctacaatgacttcttcttag

SEQ ID NO: 231303 - DNA, 25 bp, Artificial
  Probe
ctcctcttgagaaggcactgaccac

SEQ ID NO: 231304 - DNA, 25 bp, Artificial
  Probe
aaggcactgaccaccatggtcacca

SEQ ID NO: 231305 - DNA, 25 bp, Artificial
  Probe
agggtagcaagttgaccctgagtag

SEQ ID NO: 231306 - DNA, 25 bp, Artificial
  Probe
ccacgctgtgcatggcctacaatga

SEQ ID NO: 231307 - DNA, 25 bp, Artificial
  Probe
gaatctcagttcttacctagaggaa

SEQ ID NO: 231308 - DNA, 25 bp, Artificial
  Probe
ctgagatctctattgtttcctcttg

SEQ ID NO: 231309 - DNA, 25 bp, Artificial
  Probe
tgcagaagattctacacgttgctgg

SEQ ID NO: 231310 - DNA, 25 bp, Artificial
  Probe
gtgtccaactgagatctctattgtt

SEQ ID NO: 231311 - DNA, 25 bp, Artificial
  Probe
ctctgtgtccaactgagatctctat

SEQ ID NO: 231312 - DNA, 25 bp, Artificial
  Probe
tggtccattcgttactttgaattaa

SEQ ID NO: 231313 - DNA, 25 bp, Artificial
  Probe
agaagattctacacgttgctggagg

SEQ ID NO: 231314 - DNA, 25 bp, Artificial
  Probe
ttgtttcctcttgaatgtccatgaa

SEQ ID NO: 231315 - DNA, 25 bp, Artificial
  Probe
agcatcagacccttaaatgagtgtg

SEQ ID NO: 231316 - DNA, 25 bp, Artificial
  Probe
ctgtacagcatcagacccttaaatg

SEQ ID NO: 231317 - DNA, 25 bp, Artificial
  Probe
tctgcagaagattctacacgttgct

SEQ ID NO: 231318 - DNA, 25 bp, Artificial
  Probe
gtttcctcttgaatgtccatgaacc

SEQ ID NO: 231319 - DNA, 25 bp, Artificial
  Probe
gttaaaaactccaacatgagtgaat

SEQ ID NO: 231320 - DNA, 25 bp, Artificial
  Probe
cccttaaatgagtgtgcaattgttt

SEQ ID NO: 231321 - DNA, 25 bp, Artificial
  Probe
tgagatctctattgtttcctcttga

SEQ ID NO: 231322 - DNA, 25 bp, Artificial
  Probe
gtacagcatcagacccttaaatgag

SEQ ID NO: 231323 - DNA, 25 bp, Artificial
  Probe
gagatgcatatcacaccctgccaat

SEQ ID NO: 231324 - DNA, 25 bp, Artificial
  Probe
caccttcagctctgtgtccaactga

SEQ ID NO: 231325 - DNA, 25 bp, Artificial
  Probe
acctagaggaactgtctagaaaggc

SEQ ID NO: 231326 - DNA, 25 bp, Artificial
  Probe
gaaccactgtacagcatcagaccct

SEQ ID NO: 231327 - DNA, 25 bp, Artificial
  Probe
gagatctctattgtttcctcttgaa

SEQ ID NO: 231328 - DNA, 25 bp, Artificial
  Probe
aaactccaacatgagtgaattgggg

SEQ ID NO: 231329 - DNA, 25 bp, Artificial
  Probe
tgaaccactgtacagcatcagaccc

SEQ ID NO: 231330 - DNA, 25 bp, Artificial
  Probe
tattgtttcctcttgaatgtccatg

SEQ ID NO: 231331 - DNA, 25 bp, Artificial
  Probe
gtagtctgcagaagattctacacgt

SEQ ID NO: 231332 - DNA, 25 bp, Artificial
  Probe
tgaatgtccatgaaccactgtacag

SEQ ID NO: 231333 - DNA, 25 bp, Artificial
  Probe
gtgaaaaacactccactcctgtaga

SEQ ID NO: 231334 - DNA, 25 bp, Artificial
  Probe
atctcagttcttacctagaggaact

SEQ ID NO: 231335 - DNA, 25 bp, Artificial
  Probe
agctctgtgtccaactgagatctct

SEQ ID NO: 231336 - DNA, 25 bp, Artificial
  Probe
agagatgcatatcacaccctgccaa

SEQ ID NO: 231337 - DNA, 25 bp, Artificial
  Probe
agttcttacctagaggaactgtcta

SEQ ID NO: 231338 - DNA, 25 bp, Artificial
  Probe
tcagctctgtgtccaactgagatct

SEQ ID NO: 231339 - DNA, 25 bp, Artificial
  Probe
catcagacccttaaatgagtgtgca

SEQ ID NO: 231340 - DNA, 25 bp, Artificial
  Probe
aactccaacatgagtgaattggggg

SEQ ID NO: 231341 - DNA, 25 bp, Artificial
  Probe
cctcttgaatgtccatgaaccactg

SEQ ID NO: 231342 - DNA, 25 bp, Artificial
  Probe
ccatgaaccactgtacagcatcaga

SEQ ID NO: 231343 - DNA, 25 bp, Artificial
  Probe
acgttgctggaggacttttgccctc

SEQ ID NO: 231344 - DNA, 25 bp, Artificial
  Probe
gatgcatatcacaccctgccaatga

SEQ ID NO: 231345 - DNA, 25 bp, Artificial
  Probe
gatctctattgtttcctcttgaatg

SEQ ID NO: 231346 - DNA, 25 bp, Artificial
  Probe
tacctagaggaactgtctagaaagg

SEQ ID NO: 231347 - DNA, 25 bp, Artificial
  Probe
aatgaatctcagttcttacctagag

SEQ ID NO: 231348 - DNA, 25 bp, Artificial
  Probe
tgtgaaaaacactccactcctgtag

SEQ ID NO: 231349 - DNA, 25 bp, Artificial
  Probe
ctccaacatgagtgaattgggggta

SEQ ID NO: 231350 - DNA, 25 bp, Artificial
  Probe
ctacacgttgctggaggacttttgc

SEQ ID NO: 231351 - DNA, 25 bp, Artificial
  Probe
gattctacacgttgctggaggactt

SEQ ID NO: 231352 - DNA, 25 bp, Artificial
  Probe
gtccaactgagatctctattgtttc

SEQ ID NO: 231353 - DNA, 25 bp, Artificial
  Probe
aaacctggcgctgttaaatacacag

SEQ ID NO: 231354 - DNA, 25 bp, Artificial
  Probe
agaaaagcattttcagtcttgtaat

SEQ ID NO: 231355 - DNA, 25 bp, Artificial
  Probe
attccccacctttgtaatacatttg

SEQ ID NO: 231356 - DNA, 25 bp, Artificial
  Probe
acacagtacttcactgtacagactg

SEQ ID NO: 231357 - DNA, 25 bp, Artificial
  Probe
ttaggatctgcaaacatgatgaatt

SEQ ID NO: 231358 - DNA, 25 bp, Artificial
  Probe
acttcactgtacagactgttttact

SEQ ID NO: 231359 - DNA, 25 bp, Artificial
  Probe
tgtggatgctaacgtgtcagaatcc

SEQ ID NO: 231360 - DNA, 25 bp, Artificial
  Probe
cttcactgtacagactgttttactg

SEQ ID NO: 231361 - DNA, 25 bp, Artificial
  Probe
tcactgtacagactgttttactgtt

SEQ ID NO: 231362 - DNA, 25 bp, Artificial
  Probe
gtacttcactgtacagactgtttta

SEQ ID NO: 231363 - DNA, 25 bp, Artificial
  Probe
tctggcaatacatgtgagaattttg

SEQ ID NO: 231364 - DNA, 25 bp, Artificial
  Probe
tgcggatgtgttcattgaagctatt

SEQ ID NO: 231365 - DNA, 25 bp, Artificial
  Probe
cagtacttcactgtacagactgttt

SEQ ID NO: 231366 - DNA, 25 bp, Artificial
  Probe
atttgttttctggcaatacatgtga

SEQ ID NO: 231367 - DNA, 25 bp, Artificial
  Probe
ccaatctctgtttggcacttgtatt

SEQ ID NO: 231368 - DNA, 25 bp, Artificial
  Probe
tgtgtgcttttcttttctttctttt

SEQ ID NO: 231369 - DNA, 25 bp, Artificial
  Probe
acctggcgctgttaaatacacagta

SEQ ID NO: 231370 - DNA, 25 bp, Artificial
  Probe
ttgttgacagcaaaatgttgaagaa

SEQ ID NO: 231371 - DNA, 25 bp, Artificial
  Probe
cctggcgctgttaaatacacagtac

SEQ ID NO: 231372 - DNA, 25 bp, Artificial
  Probe
ctgtgtgcttttcttttctttcttt

SEQ ID NO: 231373 - DNA, 25 bp, Artificial
  Probe
atttgttgacagcaaaatgttgaag

SEQ ID NO: 231374 - DNA, 25 bp, Artificial
  Probe
taatacatttgtatattgcggatgt

SEQ ID NO: 231375 - DNA, 25 bp, Artificial
  Probe
gtggatgctaacgtgtcagaatcct

SEQ ID NO: 231376 - DNA, 25 bp, Artificial
  Probe
tggatgctaacgtgtcagaatcctt

SEQ ID NO: 231377 - DNA, 25 bp, Artificial
  Probe
gatgctaacgtgtcagaatccttaa

SEQ ID NO: 231378 - DNA, 25 bp, Artificial
  Probe
gcattttcagtcttgtaatgtgtgc

SEQ ID NO: 231379 - DNA, 25 bp, Artificial
  Probe
gttgtggatgctaacgtgtcagaat

SEQ ID NO: 231380 - DNA, 25 bp, Artificial
  Probe
tccttaatcctttacattgaacctt

SEQ ID NO: 231381 - DNA, 25 bp, Artificial
  Probe
ttgtggatgctaacgtgtcagaatc

SEQ ID NO: 231382 - DNA, 25 bp, Artificial
  Probe
atgctaacgtgtcagaatccttaat

SEQ ID NO: 231383 - DNA, 25 bp, Artificial
  Probe
tttggcacttgtatttaattcccca

SEQ ID NO: 231384 - DNA, 25 bp, Artificial
  Probe
tgctaacgtgtcagaatccttaatc

SEQ ID NO: 231385 - DNA, 25 bp, Artificial
  Probe
ttcactgtacagactgttttactgt

SEQ ID NO: 231386 - DNA, 25 bp, Artificial
  Probe
agaattttgaagcgttttgttgtgg

SEQ ID NO: 231387 - DNA, 25 bp, Artificial
  Probe
ctaacgtgtcagaatccttaatcct

SEQ ID NO: 231388 - DNA, 25 bp, Artificial
  Probe
ctgttaaatacacagtacttcactg

SEQ ID NO: 231389 - DNA, 25 bp, Artificial
  Probe
tttcagtcttgtaatgtgtgcttac

SEQ ID NO: 231390 - DNA, 25 bp, Artificial
  Probe
atctgcaaacatgatgaattatgta

SEQ ID NO: 231391 - DNA, 25 bp, Artificial
  Probe
cattttcagtcttgtaatgtgtgct

SEQ ID NO: 231392 - DNA, 25 bp, Artificial
  Probe
gctaacgtgtcagaatccttaatcc

SEQ ID NO: 231393 - DNA, 25 bp, Artificial
  Probe
ggatgctaacgtgtcagaatcctta

SEQ ID NO: 231394 - DNA, 25 bp, Artificial
  Probe
agtacttcactgtacagactgtttt

SEQ ID NO: 231395 - DNA, 25 bp, Artificial
  Probe
aacctggcgctgttaaatacacagt

SEQ ID NO: 231396 - DNA, 25 bp, Artificial
  Probe
tttttttttttgaatgaggctggca

SEQ ID NO: 231397 - DNA, 25 bp, Artificial
  Probe
ttttcagtcttgtaatgtgtgctta

SEQ ID NO: 231398 - DNA, 25 bp, Artificial
  Probe
aatgtaagcagaagctctgaaataa

SEQ ID NO: 231399 - DNA, 25 bp, Artificial
  Probe
tccatgtacattctgtctggggtga

SEQ ID NO: 231400 - DNA, 25 bp, Artificial
  Probe
ggttaggaccaactgcaagttaatg

SEQ ID NO: 231401 - DNA, 25 bp, Artificial
  Probe
aagatggctctcagcaaattctgtt

SEQ ID NO: 231402 - DNA, 25 bp, Artificial
  Probe
cagtctgtttcttctgaggaaaaaa

SEQ ID NO: 231403 - DNA, 25 bp, Artificial
  Probe
catgcagtcttcaagcatcgtccat

SEQ ID NO: 231404 - DNA, 25 bp, Artificial
  Probe
cagcaaattctgtttgtcttacacg

SEQ ID NO: 231405 - DNA, 25 bp, Artificial
  Probe
ccagtctgtttcttctgaggaaaaa

SEQ ID NO: 231406 - DNA, 25 bp, Artificial
  Probe
ggctctcagcaaattctgtttgtct

SEQ ID NO: 231407 - DNA, 25 bp, Artificial
  Probe
gaaagatggctctcagcaaattctg

SEQ ID NO: 231408 - DNA, 25 bp, Artificial
  Probe
tcgtccatgtacattctgtctgggg

SEQ ID NO: 231409 - DNA, 25 bp, Artificial
  Probe
ttaggaccaactgcaagttaatgtg

SEQ ID NO: 231410 - DNA, 25 bp, Artificial
  Probe
agcaaattctgtttgtcttacacgt

SEQ ID NO: 231411 - DNA, 25 bp, Artificial
  Probe
gaccaactgcaagttaatgtgggtt

SEQ ID NO: 231412 - DNA, 25 bp, Artificial
  Probe
atggctctcagcaaattctgtttgt

SEQ ID NO: 231413 - DNA, 25 bp, Artificial
  Probe
ttctgtctggggtgaacaccttcat

SEQ ID NO: 231414 - DNA, 25 bp, Artificial
  Probe
gggttaggaccaactgcaagttaat

SEQ ID NO: 231415 - DNA, 25 bp, Artificial
  Probe
gcagtcttcaagcatcgtccatgta

SEQ ID NO: 231416 - DNA, 25 bp, Artificial
  Probe
cagtcttcaagcatcgtccatgtac

SEQ ID NO: 231417 - DNA, 25 bp, Artificial
  Probe
aatgttccccagtctgtttcttctg

SEQ ID NO: 231418 - DNA, 25 bp, Artificial
  Probe
accaactgcaagttaatgtgggttg

SEQ ID NO: 231419 - DNA, 25 bp, Artificial
  Probe
gggttgtaaatgttccccagtctgt

SEQ ID NO: 231420 - DNA, 25 bp, Artificial
  Probe
atgtacattctgtctggggtgaaca

SEQ ID NO: 231421 - DNA, 25 bp, Artificial
  Probe
catcgtccatgtacattctgtctgg

SEQ ID NO: 231422 - DNA, 25 bp, Artificial
  Probe
ccaactgcaagttaatgtgggttgt

SEQ ID NO: 231423 - DNA, 25 bp, Artificial
  Probe
tcaagcatcgtccatgtacattctg

SEQ ID NO: 231424 - DNA, 25 bp, Artificial
  Probe
gtacattctgtctggggtgaacacc

SEQ ID NO: 231425 - DNA, 25 bp, Artificial
  Probe
cgtccatgtacattctgtctggggt

SEQ ID NO: 231426 - DNA, 25 bp, Artificial
  Probe
tccccagtctgtttcttctgaggaa

SEQ ID NO: 231427 - DNA, 25 bp, Artificial
  Probe
tctgtctggggtgaacaccttcatt

SEQ ID NO: 231428 - DNA, 25 bp, Artificial
  Probe
ggttgtaaatgttccccagtctgtt

SEQ ID NO: 231429 - DNA, 25 bp, Artificial
  Probe
gtcttcaagcatcgtccatgtacat

SEQ ID NO: 231430 - DNA, 25 bp, Artificial
  Probe
tgttccccagtctgtttcttctgag

SEQ ID NO: 231431 - DNA, 25 bp, Artificial
  Probe
gttaggaccaactgcaagttaatgt

SEQ ID NO: 231432 - DNA, 25 bp, Artificial
  Probe
tgtctggggtgaacaccttcattcc

SEQ ID NO: 231433 - DNA, 25 bp, Artificial
  Probe
gttccccagtctgtttcttctgagg

SEQ ID NO: 231434 - DNA, 25 bp, Artificial
  Probe
caagcatcgtccatgtacattctgt

SEQ ID NO: 231435 - DNA, 25 bp, Artificial
  Probe
gatggctctcagcaaattctgtttg

SEQ ID NO: 231436 - DNA, 25 bp, Artificial
  Probe
tgcagtcttcaagcatcgtccatgt

SEQ ID NO: 231437 - DNA, 25 bp, Artificial
  Probe
gctctcagcaaattctgtttgtctt

SEQ ID NO: 231438 - DNA, 25 bp, Artificial
  Probe
atcgtccatgtacattctgtctggg

SEQ ID NO: 231439 - DNA, 25 bp, Artificial
  Probe
tggaaagatggctctcagcaaattc

SEQ ID NO: 231440 - DNA, 25 bp, Artificial
  Probe
atgcagtcttcaagcatcgtccatg

SEQ ID NO: 231441 - DNA, 25 bp, Artificial
  Probe
aacatgcagtcttcaagcatcgtcc

SEQ ID NO: 231442 - DNA, 25 bp, Artificial
  Probe
ccccagtctgtttcttctgaggaaa

SEQ ID NO: 231443 - DNA, 25 bp, Artificial
  Probe
ccatgtacattctgtctggggtgaa

SEQ ID NO: 231444 - DNA, 25 bp, Artificial
  Probe
gcaaattctgtttgtcttacacgtc

SEQ ID NO: 231445 - DNA, 25 bp, Artificial
  Probe
ccagatgtcaggacccaccgtgttt

SEQ ID NO: 231446 - DNA, 25 bp, Artificial
  Probe
tttgagtttgtttgcagtcccctcg

SEQ ID NO: 231447 - DNA, 25 bp, Artificial
  Probe
actatgattcctaagacttccaggg

SEQ ID NO: 231448 - DNA, 25 bp, Artificial
  Probe
caaactcagactgtccccagatgtc

SEQ ID NO: 231449 - DNA, 25 bp, Artificial
  Probe
cccagatgtcaggacccaccgtgtt

SEQ ID NO: 231450 - DNA, 25 bp, Artificial
  Probe
tttgcagtcccctcggcttgctggt

SEQ ID NO: 231451 - DNA, 25 bp, Artificial
  Probe
taacgtctactgctgtttattccag

SEQ ID NO: 231452 - DNA, 25 bp, Artificial
  Probe
ttaagggctaactcctattagcacc

SEQ ID NO: 231453 - DNA, 25 bp, Artificial
  Probe
gttgtaaataacgtctactgctgtt

SEQ ID NO: 231454 - DNA, 25 bp, Artificial
  Probe
cctcggcttgctggtaattgtgctg

SEQ ID NO: 231455 - DNA, 25 bp, Artificial
  Probe
ctacctcaggtgtcctatagatttt

SEQ ID NO: 231456 - DNA, 25 bp, Artificial
  Probe
tcggcttgctggtaattgtgctgtt

SEQ ID NO: 231457 - DNA, 25 bp, Artificial
  Probe
caccgtgtttgagtttgtttgcagt

SEQ ID NO: 231458 - DNA, 25 bp, Artificial
  Probe
gcaccttactatgtaagcaaatgct

SEQ ID NO: 231459 - DNA, 25 bp, Artificial
  Probe
caggacccaccgtgtttgagtttgt

SEQ ID NO: 231460 - DNA, 25 bp, Artificial
  Probe
tgtgtgactatgattcctaagactt

SEQ ID NO: 231461 - DNA, 25 bp, Artificial
  Probe
acctcaggtgtcctatagatttttc

SEQ ID NO: 231462 - DNA, 25 bp, Artificial
  Probe
gtcccctcggcttgctggtaattgt

SEQ ID NO: 231463 - DNA, 25 bp, Artificial
  Probe
aaactcagactgtccccagatgtca

SEQ ID NO: 231464 - DNA, 25 bp, Artificial
  Probe
tgtaaataacgtctactgctgttta

SEQ ID NO: 231465 - DNA, 25 bp, Artificial
  Probe
atgtcaggacccaccgtgtttgagt

SEQ ID NO: 231466 - DNA, 25 bp, Artificial
  Probe
ccgtgtttgagtttgtttgcagtcc

SEQ ID NO: 231467 - DNA, 25 bp, Artificial
  Probe
acgtctactgctgtttattccagtt

SEQ ID NO: 231468 - DNA, 25 bp, Artificial
  Probe
cagactgtccccagatgtcaggacc

SEQ ID NO: 231469 - DNA, 25 bp, Artificial
  Probe
tgtttgagtttgtttgcagtcccct

SEQ ID NO: 231470 - DNA, 25 bp, Artificial
  Probe
cggcttgctggtaattgtgctgttt

SEQ ID NO: 231471 - DNA, 25 bp, Artificial
  Probe
gtttgtttgcagtcccctcggcttg

SEQ ID NO: 231472 - DNA, 25 bp, Artificial
  Probe
gtgactatgattcctaagacttcca

SEQ ID NO: 231473 - DNA, 25 bp, Artificial
  Probe
ccctcggcttgctggtaattgtgct

SEQ ID NO: 231474 - DNA, 25 bp, Artificial
  Probe
agtcccctcggcttgctggtaattg

SEQ ID NO: 231475 - DNA, 25 bp, Artificial
  Probe
gactgtccccagatgtcaggaccca

SEQ ID NO: 231476 - DNA, 25 bp, Artificial
  Probe
agcaccttactatgtaagcaaatgc

SEQ ID NO: 231477 - DNA, 25 bp, Artificial
  Probe
accgtgtttgagtttgtttgcagtc

SEQ ID NO: 231478 - DNA, 25 bp, Artificial
  Probe
ttcaaactcagactgtccccagatg

SEQ ID NO: 231479 - DNA, 25 bp, Artificial
  Probe
cgtctactgctgtttattccagttt

SEQ ID NO: 231480 - DNA, 25 bp, Artificial
  Probe
cccaccgtgtttgagtttgtttgca

SEQ ID NO: 231481 - DNA, 25 bp, Artificial
  Probe
tagcaccttactatgtaagcaaatg

SEQ ID NO: 231482 - DNA, 25 bp, Artificial
  Probe
tactacctcaggtgtcctatagatt

SEQ ID NO: 231483 - DNA, 25 bp, Artificial
  Probe
cctcaggtgtcctatagatttttct

SEQ ID NO: 231484 - DNA, 25 bp, Artificial
  Probe
cgtgtttgagtttgtttgcagtccc

SEQ ID NO: 231485 - DNA, 25 bp, Artificial
  Probe
gacccaccgtgtttgagtttgtttg

SEQ ID NO: 231486 - DNA, 25 bp, Artificial
  Probe
tgagtttgtttgcagtcccctcggc

SEQ ID NO: 231487 - DNA, 25 bp, Artificial
  Probe
gggctaactcctattagcaccttac

SEQ ID NO: 231488 - DNA, 25 bp, Artificial
  Probe
tcccctcggcttgctggtaattgtg

SEQ ID NO: 231489 - DNA, 25 bp, Artificial
  Probe
gagtttgtttgcagtcccctcggct

SEQ ID NO: 231490 - DNA, 25 bp, Artificial
  Probe
gtaaataacgtctactgctgtttat

SEQ ID NO: 231491 - DNA, 25 bp, Artificial
  Probe
cagagctgagcacattgctttccag

SEQ ID NO: 231492 - DNA, 25 bp, Artificial
  Probe
agggcaaagccacctctctatccaa

SEQ ID NO: 231493 - DNA, 25 bp, Artificial
  Probe
ctgagcacattgctttccagcctct

SEQ ID NO: 231494 - DNA, 25 bp, Artificial
  Probe
gctgagcacattgctttccagcctc

SEQ ID NO: 231495 - DNA, 25 bp, Artificial
  Probe
tcacgttacttcagaaggggagccc

SEQ ID NO: 231496 - DNA, 25 bp, Artificial
  Probe
tccaacttgtgcaagcctttgtccg

SEQ ID NO: 231497 - DNA, 25 bp, Artificial
  Probe
agcctctcacgttacttcagaaggg

SEQ ID NO: 231498 - DNA, 25 bp, Artificial
  Probe
ctctatccaaagctagcccagagtc

SEQ ID NO: 231499 - DNA, 25 bp, Artificial
  Probe
ctcacgttacttcagaaggggagcc

SEQ ID NO: 231500 - DNA, 25 bp, Artificial
  Probe
tgagcacattgctttccagcctctc

SEQ ID NO: 231501 - DNA, 25 bp, Artificial
  Probe
tgagctcagagctgagcacattgct

SEQ ID NO: 231502 - DNA, 25 bp, Artificial
  Probe
gagctcagagctgagcacattgctt

SEQ ID NO: 231503 - DNA, 25 bp, Artificial
  Probe
cctctcacgttacttcagaagggga

SEQ ID NO: 231504 - DNA, 25 bp, Artificial
  Probe
gctcagagctgagcacattgctttc

SEQ ID NO: 231505 - DNA, 25 bp, Artificial
  Probe
gggcaaagccacctctctatccaaa

SEQ ID NO: 231506 - DNA, 25 bp, Artificial
  Probe
agctcagagctgagcacattgcttt

SEQ ID NO: 231507 - DNA, 25 bp, Artificial
  Probe
agagctgagcacattgctttccagc

SEQ ID NO: 231508 - DNA, 25 bp, Artificial
  Probe
tctcacgttacttcagaaggggagc

SEQ ID NO: 231509 - DNA, 25 bp, Artificial
  Probe
aagcaggagctgagctcagagctga

SEQ ID NO: 231510 - DNA, 25 bp, Artificial
  Probe
ggagctgagctcagagctgagcaca

SEQ ID NO: 231511 - DNA, 25 bp, Artificial
  Probe
cagcctctcacgttacttcagaagg

SEQ ID NO: 231512 - DNA, 25 bp, Artificial
  Probe
tctctatccaaagctagcccagagt

SEQ ID NO: 231513 - DNA, 25 bp, Artificial
  Probe
tcagagctgagcacattgctttcca

SEQ ID NO: 231514 - DNA, 25 bp, Artificial
  Probe
caggagctgagctcagagctgagca

SEQ ID NO: 231515 - DNA, 25 bp, Artificial
  Probe
tctatccaaagctagcccagagtct

SEQ ID NO: 231516 - DNA, 25 bp, Artificial
  Probe
gagcacattgctttccagcctctca

SEQ ID NO: 231517 - DNA, 25 bp, Artificial
  Probe
gcctctcacgttacttcagaagggg

SEQ ID NO: 231518 - DNA, 25 bp, Artificial
  Probe
ctctctatccaaagctagcccagag

SEQ ID NO: 231519 - DNA, 25 bp, Artificial
  Probe
atccaacttgtgcaagcctttgtcc

SEQ ID NO: 231520 - DNA, 25 bp, Artificial
  Probe
ccagcctctcacgttacttcagaag

SEQ ID NO: 231521 - DNA, 25 bp, Artificial
  Probe
ctatccaaagctagcccagagtctc

SEQ ID NO: 231522 - DNA, 25 bp, Artificial
  Probe
aggagctgagctcagagctgagcac

SEQ ID NO: 231523 - DNA, 25 bp, Artificial
  Probe
ctcagagctgagcacattgctttcc

SEQ ID NO: 231524 - DNA, 25 bp, Artificial
  Probe
ttatatagctgaagaggtcaacagc

SEQ ID NO: 231525 - DNA, 25 bp, Artificial
  Probe
ctgttaagagttagcccagccataa

SEQ ID NO: 231526 - DNA, 25 bp, Artificial
  Probe
atgcaattggttctcgtgcattgag

SEQ ID NO: 231527 - DNA, 25 bp, Artificial
  Probe
tttatactcgcctcggactgtagaa

SEQ ID NO: 231528 - DNA, 25 bp, Artificial
  Probe
gttccttgttacaccatggtcattt

SEQ ID NO: 231529 - DNA, 25 bp, Artificial
  Probe
cactttgaaactcactgtgtgtgac

SEQ ID NO: 231530 - DNA, 25 bp, Artificial
  Probe
gttaacatttatactcgcctcggac

SEQ ID NO: 231531 - DNA, 25 bp, Artificial
  Probe
gctcttctgttaagagttagcccag

SEQ ID NO: 231532 - DNA, 25 bp, Artificial
  Probe
ttacactttgaaactcactgtgtgt

SEQ ID NO: 231533 - DNA, 25 bp, Artificial
  Probe
tcttctgttaagagttagcccagcc

SEQ ID NO: 231534 - DNA, 25 bp, Artificial
  Probe
gagatgcaattggttctcgtgcatt

SEQ ID NO: 231535 - DNA, 25 bp, Artificial
  Probe
tgccttctgtaaacagtgttgggaa

SEQ ID NO: 231536 - DNA, 25 bp, Artificial
  Probe
cttacactttgaaactcactgtgtg

SEQ ID NO: 231537 - DNA, 25 bp, Artificial
  Probe
tttgaaactcactgtgtgtgactca

SEQ ID NO: 231538 - DNA, 25 bp, Artificial
  Probe
cttctgtaaacagtgttgggaacaa

SEQ ID NO: 231539 - DNA, 25 bp, Artificial
  Probe
actttgaaactcactgtgtgtgact

SEQ ID NO: 231540 - DNA, 25 bp, Artificial
  Probe
tagaattgccttctgtaaacagtgt

SEQ ID NO: 231541 - DNA, 25 bp, Artificial
  Probe
agaattgccttctgtaaacagtgtt

SEQ ID NO: 231542 - DNA, 25 bp, Artificial
  Probe
actcactgtgtgtgactcatagcat

SEQ ID NO: 231543 - DNA, 25 bp, Artificial
  Probe
agagatgcaattggttctcgtgcat

SEQ ID NO: 231544 - DNA, 25 bp, Artificial
  Probe
cttctgttaagagttagcccagcca

SEQ ID NO: 231545 - DNA, 25 bp, Artificial
  Probe
ttctgttaagagttagcccagccat

SEQ ID NO: 231546 - DNA, 25 bp, Artificial
  Probe
ccttagcaagccaaattagaattgc

SEQ ID NO: 231547 - DNA, 25 bp, Artificial
  Probe
ctgttaacatttatactcgcctcgg

SEQ ID NO: 231548 - DNA, 25 bp, Artificial
  Probe
tgctcttctgttaagagttagccca

SEQ ID NO: 231549 - DNA, 25 bp, Artificial
  Probe
tgttaacatttatactcgcctcgga

SEQ ID NO: 231550 - DNA, 25 bp, Artificial
  Probe
agatgcaattggttctcgtgcattg

SEQ ID NO: 231551 - DNA, 25 bp, Artificial
  Probe
ctcactgtgtgtgactcatagcatg

SEQ ID NO: 231552 - DNA, 25 bp, Artificial
  Probe
taacatttatactcgcctcggactg

SEQ ID NO: 231553 - DNA, 25 bp, Artificial
  Probe
tgcaattggttctcgtgcattgaga

SEQ ID NO: 231554 - DNA, 25 bp, Artificial
  Probe
ttgaaactcactgtgtgtgactcat

SEQ ID NO: 231555 - DNA, 25 bp, Artificial
  Probe
ctcttctgttaagagttagcccagc

SEQ ID NO: 231556 - DNA, 25 bp, Artificial
  Probe
aactcactgtgtgtgactcatagca

SEQ ID NO: 231557 - DNA, 25 bp, Artificial
  Probe
ctttgaaactcactgtgtgtgactc

SEQ ID NO: 231558 - DNA, 25 bp, Artificial
  Probe
gcaattggttctcgtgcattgagat

SEQ ID NO: 231559 - DNA, 25 bp, Artificial
  Probe
gaaactcactgtgtgtgactcatag

SEQ ID NO: 231560 - DNA, 25 bp, Artificial
  Probe
ttagaattgccttctgtaaacagtg

SEQ ID NO: 231561 - DNA, 25 bp, Artificial
  Probe
attgccttctgtaaacagtgttggg

SEQ ID NO: 231562 - DNA, 25 bp, Artificial
  Probe
cttagcaagccaaattagaattgcc

SEQ ID NO: 231563 - DNA, 25 bp, Artificial
  Probe
caattggttctcgtgcattgagatt

SEQ ID NO: 231564 - DNA, 25 bp, Artificial
  Probe
gaattgccttctgtaaacagtgttg

SEQ ID NO: 231565 - DNA, 25 bp, Artificial
  Probe
gatgcaattggttctcgtgcattga

SEQ ID NO: 231566 - DNA, 25 bp, Artificial
  Probe
tctgttaagagttagcccagccata

SEQ ID NO: 231567 - DNA, 25 bp, Artificial
  Probe
attagaattgccttctgtaaacagt

SEQ ID NO: 231568 - DNA, 25 bp, Artificial
  Probe
aattgccttctgtaaacagtgttgg

SEQ ID NO: 231569 - DNA, 25 bp, Artificial
  Probe
ccttctgtaaacagtgttgggaaca

SEQ ID NO: 231570 - DNA, 25 bp, Artificial
  Probe
gccttctgtaaacagtgttgggaac

SEQ ID NO: 231571 - DNA, 25 bp, Artificial
  Probe
tatgcggttgaaactgattgcaaac

SEQ ID NO: 231572 - DNA, 25 bp, Artificial
  Probe
agtactttccagctctcctgtgggt

SEQ ID NO: 231573 - DNA, 25 bp, Artificial
  Probe
ctctcctgtgggttggtggaattac

SEQ ID NO: 231574 - DNA, 25 bp, Artificial
  Probe
gtactttccagctctcctgtgggtt

SEQ ID NO: 231575 - DNA, 25 bp, Artificial
  Probe
tctgtagctttaggacactcaggaa

SEQ ID NO: 231576 - DNA, 25 bp, Artificial
  Probe
tactgcctatgctttttaccttagg

SEQ ID NO: 231577 - DNA, 25 bp, Artificial
  Probe
ctttccagctctcctgtgggttggt

SEQ ID NO: 231578 - DNA, 25 bp, Artificial
  Probe
agagagctttctcagaaaactccgc

SEQ ID NO: 231579 - DNA, 25 bp, Artificial
  Probe
ctcctgtgggttggtggaattactc

SEQ ID NO: 231580 - DNA, 25 bp, Artificial
  Probe
tttttaaggctttaactggctctat

SEQ ID NO: 231581 - DNA, 25 bp, Artificial
  Probe
cgtctgtagctttaggacactcagg

SEQ ID NO: 231582 - DNA, 25 bp, Artificial
  Probe
tagagagctttctcagaaaactccg

SEQ ID NO: 231583 - DNA, 25 bp, Artificial
  Probe
taagtactttccagctctcctgtgg

SEQ ID NO: 231584 - DNA, 25 bp, Artificial
  Probe
aatagagagctttctcagaaaactc

SEQ ID NO: 231585 - DNA, 25 bp, Artificial
  Probe
gcctatgctttttaccttaggctta

SEQ ID NO: 231586 - DNA, 25 bp, Artificial
  Probe
gctttcagtaagtactttccagctc

SEQ ID NO: 231587 - DNA, 25 bp, Artificial
  Probe
agtaagtactttccagctctcctgt

SEQ ID NO: 231588 - DNA, 25 bp, Artificial
  Probe
taaggctttaactggctctataaat

SEQ ID NO: 231589 - DNA, 25 bp, Artificial
  Probe
ctgcctatgctttttaccttaggct

SEQ ID NO: 231590 - DNA, 25 bp, Artificial
  Probe
tcacgtctgtagctttaggacactc

SEQ ID NO: 231591 - DNA, 25 bp, Artificial
  Probe
tagctttaggacactcaggaaaaga

SEQ ID NO: 231592 - DNA, 25 bp, Artificial
  Probe
gtagctttaggacactcaggaaaag

SEQ ID NO: 231593 - DNA, 25 bp, Artificial
  Probe
gagagctttctcagaaaactccgcc

SEQ ID NO: 231594 - DNA, 25 bp, Artificial
  Probe
acgtctgtagctttaggacactcag

SEQ ID NO: 231595 - DNA, 25 bp, Artificial
  Probe
tttaaggctttaactggctctataa

SEQ ID NO: 231596 - DNA, 25 bp, Artificial
  Probe
ttaaggctttaactggctctataaa

SEQ ID NO: 231597 - DNA, 25 bp, Artificial
  Probe
ctgtagctttaggacactcaggaaa

SEQ ID NO: 231598 - DNA, 25 bp, Artificial
  Probe
actgcctatgctttttaccttaggc

SEQ ID NO: 231599 - DNA, 25 bp, Artificial
  Probe
cctgtgggttggtggaattactctt

SEQ ID NO: 231600 - DNA, 25 bp, Artificial
  Probe
tctcctgtgggttggtggaattact

SEQ ID NO: 231601 - DNA, 25 bp, Artificial
  Probe
agtaaaagttactgcctatgctttt

SEQ ID NO: 231602 - DNA, 25 bp, Artificial
  Probe
actttccagctctcctgtgggttgg

SEQ ID NO: 231603 - DNA, 25 bp, Artificial
  Probe
gtaagtactttccagctctcctgtg

SEQ ID NO: 231604 - DNA, 25 bp, Artificial
  Probe
tttgctttcagtaagtactttccag

SEQ ID NO: 231605 - DNA, 25 bp, Artificial
  Probe
ctcacgtctgtagctttaggacact

SEQ ID NO: 231606 - DNA, 25 bp, Artificial
  Probe
tgtagctttaggacactcaggaaaa

SEQ ID NO: 231607 - DNA, 25 bp, Artificial
  Probe
gtctgtagctttaggacactcagga

SEQ ID NO: 231608 - DNA, 25 bp, Artificial
  Probe
agctttaggacactcaggaaaagat

SEQ ID NO: 231609 - DNA, 25 bp, Artificial
  Probe
tccagctctcctgtgggttggtgga

SEQ ID NO: 231610 - DNA, 25 bp, Artificial
  Probe
tgcctatgctttttaccttaggctt

SEQ ID NO: 231611 - DNA, 25 bp, Artificial
  Probe
tactttccagctctcctgtgggttg

SEQ ID NO: 231612 - DNA, 25 bp, Artificial
  Probe
cagtaagtactttccagctctcctg

SEQ ID NO: 231613 - DNA, 25 bp, Artificial
  Probe
ccagctctcctgtgggttggtggaa

SEQ ID NO: 231614 - DNA, 25 bp, Artificial
  Probe
cctcacgtctgtagctttaggacac

SEQ ID NO: 231615 - DNA, 25 bp, Artificial
  Probe
tgctttcagtaagtactttccagct

SEQ ID NO: 231616 - DNA, 25 bp, Artificial
  Probe
ttccagctctcctgtgggttggtgg

SEQ ID NO: 231617 - DNA, 25 bp, Artificial
  Probe
gctaacgttagactagtggttaaca

SEQ ID NO: 231618 - DNA, 25 bp, Artificial
  Probe
catggtcaacttggtagtttccctt

SEQ ID NO: 231619 - DNA, 25 bp, Artificial
  Probe
tgactgaggccaacaggtgcctggc

SEQ ID NO: 231620 - DNA, 25 bp, Artificial
  Probe
tcagtctgtccctcttgtaatgtct

SEQ ID NO: 231621 - DNA, 25 bp, Artificial
  Probe
tgcatcagtctgtccctcttgtaat

SEQ ID NO: 231622 - DNA, 25 bp, Artificial
  Probe
tctgctcttctcaccatctagtggc

SEQ ID NO: 231623 - DNA, 25 bp, Artificial
  Probe
ctaaaccatggtcaacttggtagtt

SEQ ID NO: 231624 - DNA, 25 bp, Artificial
  Probe
gtccctcttgtaatgtctctgctct

SEQ ID NO: 231625 - DNA, 25 bp, Artificial
  Probe
ccatctagtggctcaggatatttag

SEQ ID NO: 231626 - DNA, 25 bp, Artificial
  Probe
ctaacgttagactagtggttaacag

SEQ ID NO: 231627 - DNA, 25 bp, Artificial
  Probe
aactctgaagctaacgttagactag

SEQ ID NO: 231628 - DNA, 25 bp, Artificial
  Probe
caattacttgaagtatccatagaag

SEQ ID NO: 231629 - DNA, 25 bp, Artificial
  Probe
caggtgcctggcaaatgttaactgt

SEQ ID NO: 231630 - DNA, 25 bp, Artificial
  Probe
gctaaccatttcagagagcgtgggc

SEQ ID NO: 231631 - DNA, 25 bp, Artificial
  Probe
tgcctggcaaatgttaactgttctt

SEQ ID NO: 231632 - DNA, 25 bp, Artificial
  Probe
agcatcagtgtgcatcagtctgtcc

SEQ ID NO: 231633 - DNA, 25 bp, Artificial
  Probe
aaactgaactctgaagctaacgtta

SEQ ID NO: 231634 - DNA, 25 bp, Artificial
  Probe
gaggccaacaggtgcctggcaaatg

SEQ ID NO: 231635 - DNA, 25 bp, Artificial
  Probe
agtggctcaggatatttaggccagc

SEQ ID NO: 231636 - DNA, 25 bp, Artificial
  Probe
ctctttagatgcaagtgactgaggc

SEQ ID NO: 231637 - DNA, 25 bp, Artificial
  Probe
ctttgctctttagatgcaagtgact

SEQ ID NO: 231638 - DNA, 25 bp, Artificial
  Probe
ccaacaggtgcctggcaaatgttaa

SEQ ID NO: 231639 - DNA, 25 bp, Artificial
  Probe
ttaaaactgaactctgaagctaacg

SEQ ID NO: 231640 - DNA, 25 bp, Artificial
  Probe
ataaggctaaccatttcagagagcg

SEQ ID NO: 231641 - DNA, 25 bp, Artificial
  Probe
tgctcttctcaccatctagtggctc

SEQ ID NO: 231642 - DNA, 25 bp, Artificial
  Probe
gattaaaactgaactctgaagctaa

SEQ ID NO: 231643 - DNA, 25 bp, Artificial
  Probe
tgtccctcttgtaatgtctctgctc

SEQ ID NO: 231644 - DNA, 25 bp, Artificial
  Probe
tggggccaattacttgaagtatcca

SEQ ID NO: 231645 - DNA, 25 bp, Artificial
  Probe
aggtgcctggcaaatgttaactgtt

SEQ ID NO: 231646 - DNA, 25 bp, Artificial
  Probe
ttagatgcaagtgactgaggccaac

SEQ ID NO: 231647 - DNA, 25 bp, Artificial
  Probe
tgctctttagatgcaagtgactgag

SEQ ID NO: 231648 - DNA, 25 bp, Artificial
  Probe
atgcaagtgactgaggccaacaggt

SEQ ID NO: 231649 - DNA, 25 bp, Artificial
  Probe
tggtcaacttggtagtttccctttg

SEQ ID NO: 231650 - DNA, 25 bp, Artificial
  Probe
ctcaccatctagtggctcaggatat

SEQ ID NO: 231651 - DNA, 25 bp, Artificial
  Probe
taaaccatggtcaacttggtagttt

SEQ ID NO: 231652 - DNA, 25 bp, Artificial
  Probe
tgattaaaactgaactctgaagcta

SEQ ID NO: 231653 - DNA, 25 bp, Artificial
  Probe
attagctttgctctttagatgcaag

SEQ ID NO: 231654 - DNA, 25 bp, Artificial
  Probe
ccagcatcagtgtgcatcagtctgt

SEQ ID NO: 231655 - DNA, 25 bp, Artificial
  Probe
ccatggtcaacttggtagtttccct

SEQ ID NO: 231656 - DNA, 25 bp, Artificial
  Probe
ctttggggccaattacttgaagtat

SEQ ID NO: 231657 - DNA, 25 bp, Artificial
  Probe
accatttcagagagcgtgggctgtg

SEQ ID NO: 231658 - DNA, 25 bp, Artificial
  Probe
taaattagctttgctctttagatgc

SEQ ID NO: 231659 - DNA, 25 bp, Artificial
  Probe
ctgaagctaacgttagactagtggt

SEQ ID NO: 231660 - DNA, 25 bp, Artificial
  Probe
ctgaactctgaagctaacgttagac

SEQ ID NO: 231661 - DNA, 25 bp, Artificial
  Probe
gctaaaccatggtcaacttggtagt

SEQ ID NO: 231662 - DNA, 25 bp, Artificial
  Probe
ctctgaagctaacgttagactagtg

SEQ ID NO: 231663 - DNA, 25 bp, Artificial
  Probe
tcaggacatcaatgcaagcctgaag

SEQ ID NO: 231664 - DNA, 25 bp, Artificial
  Probe
gcgggctccctacctggctctgcta

SEQ ID NO: 231665 - DNA, 25 bp, Artificial
  Probe
ggacatcaatgcaagcctgaagaaa

SEQ ID NO: 231666 - DNA, 25 bp, Artificial
  Probe
tccctacctggctctgctaccgccg

SEQ ID NO: 231667 - DNA, 25 bp, Artificial
  Probe
tcaatgcaagcctgaagaaaaagta

SEQ ID NO: 231668 - DNA, 25 bp, Artificial
  Probe
ctccctacctggctctgctaccgcc

SEQ ID NO: 231669 - DNA, 25 bp, Artificial
  Probe
agtaatcgcttccttttaagccatg

SEQ ID NO: 231670 - DNA, 25 bp, Artificial
  Probe
atcaatgcaagcctgaagaaaaagt

SEQ ID NO: 231671 - DNA, 25 bp, Artificial
  Probe
agcgggctccctacctggctctgct

SEQ ID NO: 231672 - DNA, 25 bp, Artificial
  Probe
gggctccctacctggctctgctacc

SEQ ID NO: 231673 - DNA, 25 bp, Artificial
  Probe
gtcgcagcgggctccctacctggct

SEQ ID NO: 231674 - DNA, 25 bp, Artificial
  Probe
aatgcaagcctgaagaaaaagtaat

SEQ ID NO: 231675 - DNA, 25 bp, Artificial
  Probe
gggtcgcagcgggctccctacctgg

SEQ ID NO: 231676 - DNA, 25 bp, Artificial
  Probe
gcagcgggctccctacctggctctg

SEQ ID NO: 231677 - DNA, 25 bp, Artificial
  Probe
caggacatcaatgcaagcctgaaga

SEQ ID NO: 231678 - DNA, 25 bp, Artificial
  Probe
ggctccctacctggctctgctaccg

SEQ ID NO: 231679 - DNA, 25 bp, Artificial
  Probe
atgcaagcctgaagaaaaagtaatc

SEQ ID NO: 231680 - DNA, 25 bp, Artificial
  Probe
gctccctacctggctctgctaccgc

SEQ ID NO: 231681 - DNA, 25 bp, Artificial
  Probe
tcgcagcgggctccctacctggctc

SEQ ID NO: 231682 - DNA, 25 bp, Artificial
  Probe
caatgcaagcctgaagaaaaagtaa

SEQ ID NO: 231683 - DNA, 25 bp, Artificial
  Probe
catcaatgcaagcctgaagaaaaag

SEQ ID NO: 231684 - DNA, 25 bp, Artificial
  Probe
aggacatcaatgcaagcctgaagaa

SEQ ID NO: 231685 - DNA, 25 bp, Artificial
  Probe
acatcaatgcaagcctgaagaaaaa

SEQ ID NO: 231686 - DNA, 25 bp, Artificial
  Probe
gacatcaatgcaagcctgaagaaaa

SEQ ID NO: 231687 - DNA, 25 bp, Artificial
  Probe
cgcagcgggctccctacctggctct

SEQ ID NO: 231688 - DNA, 25 bp, Artificial
  Probe
ggtcgcagcgggctccctacctggc

SEQ ID NO: 231689 - DNA, 25 bp, Artificial
  Probe
ctcgccagtctgatgccaggactga

SEQ ID NO: 231690 - DNA, 25 bp, Artificial
  Probe
tcactacctgtatctcaccggcgtg

SEQ ID NO: 231691 - DNA, 25 bp, Artificial
  Probe
accagctgcctcctttaagcttggt

SEQ ID NO: 231692 - DNA, 25 bp, Artificial
  Probe
tcgccagtctgatgccaggactgaa

SEQ ID NO: 231693 - DNA, 25 bp, Artificial
  Probe
actacctgtatctcaccggcgtgtg

SEQ ID NO: 231694 - DNA, 25 bp, Artificial
  Probe
tacctgtatctcaccggcgtgtgtt

SEQ ID NO: 231695 - DNA, 25 bp, Artificial
  Probe
ccagctgcctcctttaagcttggtg

SEQ ID NO: 231696 - DNA, 25 bp, Artificial
  Probe
accggcgtgtgttcaccctctgggt

SEQ ID NO: 231697 - DNA, 25 bp, Artificial
  Probe
gactcgccagtctgatgccaggact

SEQ ID NO: 231698 - DNA, 25 bp, Artificial
  Probe
gagatgtcactgtctgtggtctttg

SEQ ID NO: 231699 - DNA, 25 bp, Artificial
  Probe
atgtcactgtctgtggtctttggag

SEQ ID NO: 231700 - DNA, 25 bp, Artificial
  Probe
ctgcctcctttaagcttggtgctcc

SEQ ID NO: 231701 - DNA, 25 bp, Artificial
  Probe
cactacctgtatctcaccggcgtgt

SEQ ID NO: 231702 - DNA, 25 bp, Artificial
  Probe
tctttctctttctgttttcttcctt

SEQ ID NO: 231703 - DNA, 25 bp, Artificial
  Probe
gaagagatgtcactgtctgtggtct

SEQ ID NO: 231704 - DNA, 25 bp, Artificial
  Probe
aagagatgtcactgtctgtggtctt

SEQ ID NO: 231705 - DNA, 25 bp, Artificial
  Probe
caggactcgccagtctgatgccagg

SEQ ID NO: 231706 - DNA, 25 bp, Artificial
  Probe
ctgatgccaggactgaataaagtgt

SEQ ID NO: 231707 - DNA, 25 bp, Artificial
  Probe
gtctgatgccaggactgaataaagt

SEQ ID NO: 231708 - DNA, 25 bp, Artificial
  Probe
agctgcctcctttaagcttggtgct

SEQ ID NO: 231709 - DNA, 25 bp, Artificial
  Probe
cagtctgatgccaggactgaataaa

SEQ ID NO: 231710 - DNA, 25 bp, Artificial
  Probe
ctcctttaagcttggtgctccggct

SEQ ID NO: 231711 - DNA, 25 bp, Artificial
  Probe
gcaggactcgccagtctgatgccag

SEQ ID NO: 231712 - DNA, 25 bp, Artificial
  Probe
ctacctgtatctcaccggcgtgtgt

SEQ ID NO: 231713 - DNA, 25 bp, Artificial
  Probe
tcaccctctgggtggttcacacaca

SEQ ID NO: 231714 - DNA, 25 bp, Artificial
  Probe
tctgatgccaggactgaataaagtg

SEQ ID NO: 231715 - DNA, 25 bp, Artificial
  Probe
ggactcgccagtctgatgccaggac

SEQ ID NO: 231716 - DNA, 25 bp, Artificial
  Probe
tgcctcctttaagcttggtgctccg

SEQ ID NO: 231717 - DNA, 25 bp, Artificial
  Probe
aaaacggaaaacgtcatgtgagtga

SEQ ID NO: 231718 - DNA, 25 bp, Artificial
  Probe
cagctgcctcctttaagcttggtgc

SEQ ID NO: 231719 - DNA, 25 bp, Artificial
  Probe
gcctcctttaagcttggtgctccgg

SEQ ID NO: 231720 - DNA, 25 bp, Artificial
  Probe
gctgcctcctttaagcttggtgctc

SEQ ID NO: 231721 - DNA, 25 bp, Artificial
  Probe
caccagctgcctcctttaagcttgg

SEQ ID NO: 231722 - DNA, 25 bp, Artificial
  Probe
ccggcgtgtgttcaccctctgggtg

SEQ ID NO: 231723 - DNA, 25 bp, Artificial
  Probe
ccacagcaggactcgccagtctgat

SEQ ID NO: 231724 - DNA, 25 bp, Artificial
  Probe
gtgttcaccctctgggtggttcaca

SEQ ID NO: 231725 - DNA, 25 bp, Artificial
  Probe
aggactcgccagtctgatgccagga

SEQ ID NO: 231726 - DNA, 25 bp, Artificial
  Probe
agagatgtcactgtctgtggtcttt

SEQ ID NO: 231727 - DNA, 25 bp, Artificial
  Probe
tgtgttcaccctctgggtggttcac

SEQ ID NO: 231728 - DNA, 25 bp, Artificial
  Probe
tcaccggcgtgtgttcaccctctgg

SEQ ID NO: 231729 - DNA, 25 bp, Artificial
  Probe
gatgtcactgtctgtggtctttgga

SEQ ID NO: 231730 - DNA, 25 bp, Artificial
  Probe
gtgtgttcaccctctgggtggttca

SEQ ID NO: 231731 - DNA, 25 bp, Artificial
  Probe
caccggcgtgtgttcaccctctggg

SEQ ID NO: 231732 - DNA, 25 bp, Artificial
  Probe
tgaagagatgtcactgtctgtggtc

SEQ ID NO: 231733 - DNA, 25 bp, Artificial
  Probe
agtctgatgccaggactgaataaag

SEQ ID NO: 231734 - DNA, 25 bp, Artificial
  Probe
cctcctttaagcttggtgctccggc

SEQ ID NO: 231735 - DNA, 25 bp, Artificial
  Probe
gcataggtagccaaggagcagtgaa

SEQ ID NO: 231736 - DNA, 25 bp, Artificial
  Probe
gcggtggtgcttatggtagccaaat

SEQ ID NO: 231737 - DNA, 25 bp, Artificial
  Probe
ttctacagcaggagcaagcggtggt

SEQ ID NO: 231738 - DNA, 25 bp, Artificial
  Probe
ccagagcagcatgagcggatatgac

SEQ ID NO: 231739 - DNA, 25 bp, Artificial
  Probe
ggaaaactccagtgattttcaatca

SEQ ID NO: 231740 - DNA, 25 bp, Artificial
  Probe
agctactacagtagcggaagccgtg

SEQ ID NO: 231741 - DNA, 25 bp, Artificial
  Probe
cagagcagcatgagcggatatgacc

SEQ ID NO: 231742 - DNA, 25 bp, Artificial
  Probe
gtccagttacggtggcccagccagc

SEQ ID NO: 231743 - DNA, 25 bp, Artificial
  Probe
agccaaggagcagtgaacagcagct

SEQ ID NO: 231744 - DNA, 25 bp, Artificial
  Probe
ttgcagctatgtcaaaagataaagc

SEQ ID NO: 231745 - DNA, 25 bp, Artificial
  Probe
accagtccagttacggtggcccagc

SEQ ID NO: 231746 - DNA, 25 bp, Artificial
  Probe
ttacggtggcccagccagccagcag

SEQ ID NO: 231747 - DNA, 25 bp, Artificial
  Probe
gcccagccagccagcagctgagtgg

SEQ ID NO: 231748 - DNA, 25 bp, Artificial
  Probe
ctatggtggccagagcagcatgagc

SEQ ID NO: 231749 - DNA, 25 bp, Artificial
  Probe
caaatatgcaacacagatatgtaga

SEQ ID NO: 231750 - DNA, 25 bp, Artificial
  Probe
caaacattgcataggtagccaagga

SEQ ID NO: 231751 - DNA, 25 bp, Artificial
  Probe
acctgatggcagagtaactggtgaa

SEQ ID NO: 231752 - DNA, 25 bp, Artificial
  Probe
gagcaagcggtggtgcttacgaaca

SEQ ID NO: 231753 - DNA, 25 bp, Artificial
  Probe
cattgcataggtagccaaggagcag

SEQ ID NO: 231754 - DNA, 25 bp, Artificial
  Probe
gaagccgtgcatctatgggcgtgaa

SEQ ID NO: 231755 - DNA, 25 bp, Artificial
  Probe
tagcggaagccgtgcatctatgggc

SEQ ID NO: 231756 - DNA, 25 bp, Artificial
  Probe
ccagccagcagctgagtggtggtta

SEQ ID NO: 231757 - DNA, 25 bp, Artificial
  Probe
tatgaccaagttttacaggaaaact

SEQ ID NO: 231758 - DNA, 25 bp, Artificial
  Probe
ggaggcatgggcttgtcaaaccagt

SEQ ID NO: 231759 - DNA, 25 bp, Artificial
  Probe
agttttacaggaaaactccagtgat

SEQ ID NO: 231760 - DNA, 25 bp, Artificial
  Probe
ggtagccaaggagcagtgaacagca

SEQ ID NO: 231761 - DNA, 25 bp, Artificial
  Probe
ggtggcccagccagccagcagctga

SEQ ID NO: 231762 - DNA, 25 bp, Artificial
  Probe
ctgttgcagctatgtcaaaagataa

SEQ ID NO: 231763 - DNA, 25 bp, Artificial
  Probe
tcaaaccagtccagttacggtggcc

SEQ ID NO: 231764 - DNA, 25 bp, Artificial
  Probe
tttcaatcaaacattgcataggtag

SEQ ID NO: 231765 - DNA, 25 bp, Artificial
  Probe
agcggtggtgcttacgaacacagat

SEQ ID NO: 231766 - DNA, 25 bp, Artificial
  Probe
aacattgcataggtagccaaggagc

SEQ ID NO: 231767 - DNA, 25 bp, Artificial
  Probe
gattttcaatcaaacattgcatagg

SEQ ID NO: 231768 - DNA, 25 bp, Artificial
  Probe
ttgaattctacagcaggagcaagcg

SEQ ID NO: 231769 - DNA, 25 bp, Artificial
  Probe
gatgctgttgcagctatgtcaaaag

SEQ ID NO: 231770 - DNA, 25 bp, Artificial
  Probe
aggcatgggcttgtcaaaccagtcc

SEQ ID NO: 231771 - DNA, 25 bp, Artificial
  Probe
ctacagtagcggaagccgtgcatct

SEQ ID NO: 231772 - DNA, 25 bp, Artificial
  Probe
gcagtgaacagcagctactacagta

SEQ ID NO: 231773 - DNA, 25 bp, Artificial
  Probe
aagcaaatatgcaacacagatatgt

SEQ ID NO: 231774 - DNA, 25 bp, Artificial
  Probe
caagcggtggtgcttatggtagcca

SEQ ID NO: 231775 - DNA, 25 bp, Artificial
  Probe
aaccagtccagttacggtggcccag

SEQ ID NO: 231776 - DNA, 25 bp, Artificial
  Probe
tacgaacacagatatgtagaactct

SEQ ID NO: 231777 - DNA, 25 bp, Artificial
  Probe
tacagtagcggaagccgtgcatcta

SEQ ID NO: 231778 - DNA, 25 bp, Artificial
  Probe
tggccagagcagcatgagcggatat

SEQ ID NO: 231779 - DNA, 25 bp, Artificial
  Probe
cggtggtgcttacgaacacagatat

SEQ ID NO: 231780 - DNA, 25 bp, Artificial
  Probe
cccagccagccagcagctgagtggt

SEQ ID NO: 231781 - DNA, 25 bp, Artificial
  Probe
ctcgcacacgtggacctgattgaga

SEQ ID NO: 231782 - DNA, 25 bp, Artificial
  Probe
cgcacacgtggacctgattgagaaa

SEQ ID NO: 231783 - DNA, 25 bp, Artificial
  Probe
gtacaccgagggggatgccctggac

SEQ ID NO: 231784 - DNA, 25 bp, Artificial
  Probe
gtattgcctggctgtggccctgtgg

SEQ ID NO: 231785 - DNA, 25 bp, Artificial
  Probe
agcgttactgctgccgccgcatgct

SEQ ID NO: 231786 - DNA, 25 bp, Artificial
  Probe
tgctacaggcagagtacaccgaggg

SEQ ID NO: 231787 - DNA, 25 bp, Artificial
  Probe
gggcaatctgtcctgctgtattcaa

SEQ ID NO: 231788 - DNA, 25 bp, Artificial
  Probe
tgctgccgccgcatgctgctcgcac

SEQ ID NO: 231789 - DNA, 25 bp, Artificial
  Probe
aagtcctgtcatcctggaaggaact

SEQ ID NO: 231790 - DNA, 25 bp, Artificial
  Probe
cacacgtggacctgattgagaaact

SEQ ID NO: 231791 - DNA, 25 bp, Artificial
  Probe
tgaagcgttactgctgccgccgcat

SEQ ID NO: 231792 - DNA, 25 bp, Artificial
  Probe
tgctgctcgcacacgtggacctgat

SEQ ID NO: 231793 - DNA, 25 bp, Artificial
  Probe
gtcatcctggaaggaactgtttagt

SEQ ID NO: 231794 - DNA, 25 bp, Artificial
  Probe
ctgaagcgttactgctgccgccgca

SEQ ID NO: 231795 - DNA, 25 bp, Artificial
  Probe
agggcaatctgtcctgctgtattca

SEQ ID NO: 231796 - DNA, 25 bp, Artificial
  Probe
acacgtggacctgattgagaaactg

SEQ ID NO: 231797 - DNA, 25 bp, Artificial
  Probe
gccaagggcaatctgtcctgctgta

SEQ ID NO: 231798 - DNA, 25 bp, Artificial
  Probe
gccgcatgctgctcgcacacgtgga

SEQ ID NO: 231799 - DNA, 25 bp, Artificial
  Probe
actgctgccgccgcatgctgctcgc

SEQ ID NO: 231800 - DNA, 25 bp, Artificial
  Probe
tgtcatcctggaaggaactgtttag

SEQ ID NO: 231801 - DNA, 25 bp, Artificial
  Probe
ccaagggcaatctgtcctgctgtat

SEQ ID NO: 231802 - DNA, 25 bp, Artificial
  Probe
ctgtcatcctggaaggaactgttta

SEQ ID NO: 231803 - DNA, 25 bp, Artificial
  Probe
aagggcaatctgtcctgctgtattc

SEQ ID NO: 231804 - DNA, 25 bp, Artificial
  Probe
atgctgctcgcacacgtggacctga

SEQ ID NO: 231805 - DNA, 25 bp, Artificial
  Probe
cgccgcatgctgctcgcacacgtgg

SEQ ID NO: 231806 - DNA, 25 bp, Artificial
  Probe
tcctgtcatcctggaaggaactgtt

SEQ ID NO: 231807 - DNA, 25 bp, Artificial
  Probe
cctgtcatcctggaaggaactgttt

SEQ ID NO: 231808 - DNA, 25 bp, Artificial
  Probe
tcgcacacgtggacctgattgagaa

SEQ ID NO: 231809 - DNA, 25 bp, Artificial
  Probe
gctgctcgcacacgtggacctgatt

SEQ ID NO: 231810 - DNA, 25 bp, Artificial
  Probe
ccgcatgctgctcgcacacgtggac

SEQ ID NO: 231811 - DNA, 25 bp, Artificial
  Probe
ggccaagggcaatctgtcctgctgt

SEQ ID NO: 231812 - DNA, 25 bp, Artificial
  Probe
gcacacgtggacctgattgagaaac

SEQ ID NO: 231813 - DNA, 25 bp, Artificial
  Probe
agtgtattgcctggctgtggccctg

SEQ ID NO: 231814 - DNA, 25 bp, Artificial
  Probe
tgctcgcacacgtggacctgattga

SEQ ID NO: 231815 - DNA, 25 bp, Artificial
  Probe
tcatcctggaaggaactgtttagta

SEQ ID NO: 231816 - DNA, 25 bp, Artificial
  Probe
cgcatgctgctcgcacacgtggacc

SEQ ID NO: 231817 - DNA, 25 bp, Artificial
  Probe
gtcctgtcatcctggaaggaactgt

SEQ ID NO: 231818 - DNA, 25 bp, Artificial
  Probe
gctcgcacacgtggacctgattgag

SEQ ID NO: 231819 - DNA, 25 bp, Artificial
  Probe
cctgaagcgttactgctgccgccgc

SEQ ID NO: 231820 - DNA, 25 bp, Artificial
  Probe
tggccaagggcaatctgtcctgctg

SEQ ID NO: 231821 - DNA, 25 bp, Artificial
  Probe
taagtcctgtcatcctggaaggaac

SEQ ID NO: 231822 - DNA, 25 bp, Artificial
  Probe
catgctgctcgcacacgtggacctg

SEQ ID NO: 231823 - DNA, 25 bp, Artificial
  Probe
tactgctgccgccgcatgctgctcg

SEQ ID NO: 231824 - DNA, 25 bp, Artificial
  Probe
catcctggaaggaactgtttagtaa

SEQ ID NO: 231825 - DNA, 25 bp, Artificial
  Probe
ctgctcgcacacgtggacctgattg

SEQ ID NO: 231826 - DNA, 25 bp, Artificial
  Probe
ggcaatctgtcctgctgtattcaaa

SEQ ID NO: 231827 - DNA, 25 bp, Artificial
  Probe
acccttgggccttgggcgaccattg

SEQ ID NO: 231828 - DNA, 25 bp, Artificial
  Probe
cactggagacccttgggccttgggc

SEQ ID NO: 231829 - DNA, 25 bp, Artificial
  Probe
catttttcggccaaggtgagttgtt

SEQ ID NO: 231830 - DNA, 25 bp, Artificial
  Probe
ctcccttgtttgtgcccctgtagga

SEQ ID NO: 231831 - DNA, 25 bp, Artificial
  Probe
gagaatgattgcaccctgcctgttt

SEQ ID NO: 231832 - DNA, 25 bp, Artificial
  Probe
ctgaggctttgtagagtgctccttg

SEQ ID NO: 231833 - DNA, 25 bp, Artificial
  Probe
taggtccttttctcctccggcctag

SEQ ID NO: 231834 - DNA, 25 bp, Artificial
  Probe
tccctctaaaaagagaatgattgca

SEQ ID NO: 231835 - DNA, 25 bp, Artificial
  Probe
tcaagcactcactggagacccttgg

SEQ ID NO: 231836 - DNA, 25 bp, Artificial
  Probe
tgcccctgtaggaggtaggtccttt

SEQ ID NO: 231837 - DNA, 25 bp, Artificial
  Probe
tctcaagcactcactggagaccctt

SEQ ID NO: 231838 - DNA, 25 bp, Artificial
  Probe
gctcttcctataccttaggccagtc

SEQ ID NO: 231839 - DNA, 25 bp, Artificial
  Probe
ttgggcgaccattgagtcctagtct

SEQ ID NO: 231840 - DNA, 25 bp, Artificial
  Probe
ggccagtctcaagcactcactggag

SEQ ID NO: 231841 - DNA, 25 bp, Artificial
  Probe
ttgcaccctgcctgtttacctcagg

SEQ ID NO: 231842 - DNA, 25 bp, Artificial
  Probe
ttgagtcctagtctcccttgtttgt

SEQ ID NO: 231843 - DNA, 25 bp, Artificial
  Probe
tgtgcccctgtaggaggtaggtcct

SEQ ID NO: 231844 - DNA, 25 bp, Artificial
  Probe
gacccttgggccttgggcgaccatt

SEQ ID NO: 231845 - DNA, 25 bp, Artificial
  Probe
gttctccctctaaaaagagaatgat

SEQ ID NO: 231846 - DNA, 25 bp, Artificial
  Probe
tttgtgcccctgtaggaggtaggtc

SEQ ID NO: 231847 - DNA, 25 bp, Artificial
  Probe
agtgctccttgaccatgtttaataa

SEQ ID NO: 231848 - DNA, 25 bp, Artificial
  Probe
tctcctccggcctagtaggggacct

SEQ ID NO: 231849 - DNA, 25 bp, Artificial
  Probe
taccttaggccagtctcaagcactc

SEQ ID NO: 231850 - DNA, 25 bp, Artificial
  Probe
cttaggccagtctcaagcactcact

SEQ ID NO: 231851 - DNA, 25 bp, Artificial
  Probe
cctgtttacctcaggattgttgtga

SEQ ID NO: 231852 - DNA, 25 bp, Artificial
  Probe
cccttgaagaaatcctgaggctttg

SEQ ID NO: 231853 - DNA, 25 bp, Artificial
  Probe
tcacggctcttcctataccttaggc

SEQ ID NO: 231854 - DNA, 25 bp, Artificial
  Probe
aagagaatgattgcaccctgcctgt

SEQ ID NO: 231855 - DNA, 25 bp, Artificial
  Probe
accttaggccagtctcaagcactca

SEQ ID NO: 231856 - DNA, 25 bp, Artificial
  Probe
cctgaggctttgtagagtgctcctt

SEQ ID NO: 231857 - DNA, 25 bp, Artificial
  Probe
acggctcttcctataccttaggcca

SEQ ID NO: 231858 - DNA, 25 bp, Artificial
  Probe
ctagtctcccttgtttgtgcccctg

SEQ ID NO: 231859 - DNA, 25 bp, Artificial
  Probe
tcctccggcctagtaggggaccttg

SEQ ID NO: 231860 - DNA, 25 bp, Artificial
  Probe
tctccctctaaaaagagaatgattg

SEQ ID NO: 231861 - DNA, 25 bp, Artificial
  Probe
ttcacggctcttcctataccttagg

SEQ ID NO: 231862 - DNA, 25 bp, Artificial
  Probe
aggctttgtagagtgctccttgacc

SEQ ID NO: 231863 - DNA, 25 bp, Artificial
  Probe
ttgttctccctctaaaaagagaatg

SEQ ID NO: 231864 - DNA, 25 bp, Artificial
  Probe
tgtagagtgctccttgaccatgttt

SEQ ID NO: 231865 - DNA, 25 bp, Artificial
  Probe
atgattgcaccctgcctgtttacct

SEQ ID NO: 231866 - DNA, 25 bp, Artificial
  Probe
cactcactggagacccttgggcctt

SEQ ID NO: 231867 - DNA, 25 bp, Artificial
  Probe
tgagtcctagtctcccttgtttgtg

SEQ ID NO: 231868 - DNA, 25 bp, Artificial
  Probe
aaatcctgaggctttgtagagtgct

SEQ ID NO: 231869 - DNA, 25 bp, Artificial
  Probe
acatcccatttttcggccaaggtga

SEQ ID NO: 231870 - DNA, 25 bp, Artificial
  Probe
ccattgagtcctagtctcccttgtt

SEQ ID NO: 231871 - DNA, 25 bp, Artificial
  Probe
gggccttgggcgaccattgagtcct

SEQ ID NO: 231872 - DNA, 25 bp, Artificial
  Probe
ggtaacatcccatttttcggccaag

SEQ ID NO: 231873 - DNA, 25 bp, Artificial
  Probe
gatgtgaaaccaggaaccagatgtc

SEQ ID NO: 231874 - DNA, 25 bp, Artificial
  Probe
ggcgttttcacaataagtcacctcc

SEQ ID NO: 231875 - DNA, 25 bp, Artificial
  Probe
ccctctgatactctgagagaagtca

SEQ ID NO: 231876 - DNA, 25 bp, Artificial
  Probe
aaccagatgtcatgtagcagggtgg

SEQ ID NO: 231877 - DNA, 25 bp, Artificial
  Probe
tgatactctgagagaagtcaacatc

SEQ ID NO: 231878 - DNA, 25 bp, Artificial
  Probe
tccgaggcatcacagcttttggcct

SEQ ID NO: 231879 - DNA, 25 bp, Artificial
  Probe
ttaaagggtgactctcactccatcc

SEQ ID NO: 231880 - DNA, 25 bp, Artificial
  Probe
ctccctctgatactctgagagaagt

SEQ ID NO: 231881 - DNA, 25 bp, Artificial
  Probe
gatttgtgccggaaacctccgtggt

SEQ ID NO: 231882 - DNA, 25 bp, Artificial
  Probe
gtcaacatcactgtcatagacagaa

SEQ ID NO: 231883 - DNA, 25 bp, Artificial
  Probe
ttccgaggcatcacagcttttggcc

SEQ ID NO: 231884 - DNA, 25 bp, Artificial
  Probe
aggaaccagatgtcatgtagcaggg

SEQ ID NO: 231885 - DNA, 25 bp, Artificial
  Probe
tcgcttctgtatctgagcacaaata

SEQ ID NO: 231886 - DNA, 25 bp, Artificial
  Probe
gggaaggactcatgctacggagatt

SEQ ID NO: 231887 - DNA, 25 bp, Artificial
  Probe
tatccttcatctacctaaaaagggg

SEQ ID NO: 231888 - DNA, 25 bp, Artificial
  Probe
agggtgactctcactccatccgctg

SEQ ID NO: 231889 - DNA, 25 bp, Artificial
  Probe
tcagacaaacacctcgattggataa

SEQ ID NO: 231890 - DNA, 25 bp, Artificial
  Probe
actctcagacaaacacctcgattgg

SEQ ID NO: 231891 - DNA, 25 bp, Artificial
  Probe
ccgaggcatcacagcttttggcctt

SEQ ID NO: 231892 - DNA, 25 bp, Artificial
  Probe
ctgatactctgagagaagtcaacat

SEQ ID NO: 231893 - DNA, 25 bp, Artificial
  Probe
gaaaccaggaaccagatgtcatgta

SEQ ID NO: 231894 - DNA, 25 bp, Artificial
  Probe
cgctgtcgcttctgtatctgagcac

SEQ ID NO: 231895 - DNA, 25 bp, Artificial
  Probe
gaaggactcatgctacggagattct

SEQ ID NO: 231896 - DNA, 25 bp, Artificial
  Probe
agggcctggcatctatactttactc

SEQ ID NO: 231897 - DNA, 25 bp, Artificial
  Probe
cctctgatactctgagagaagtcaa

SEQ ID NO: 231898 - DNA, 25 bp, Artificial
  Probe
ttttccgaggcatcacagcttttgg

SEQ ID NO: 231899 - DNA, 25 bp, Artificial
  Probe
gggtgactctcactccatccgctgt

SEQ ID NO: 231900 - DNA, 25 bp, Artificial
  Probe
ccaggaaccagatgtcatgtagcag

SEQ ID NO: 231901 - DNA, 25 bp, Artificial
  Probe
gaggcatcacagcttttggccttga

SEQ ID NO: 231902 - DNA, 25 bp, Artificial
  Probe
aaagggcctggcatctatactttac

SEQ ID NO: 231903 - DNA, 25 bp, Artificial
  Probe
gcttctgtatctgagcacaaataaa

SEQ ID NO: 231904 - DNA, 25 bp, Artificial
  Probe
agaagtcaacatcactgtcatagac

SEQ ID NO: 231905 - DNA, 25 bp, Artificial
  Probe
aaagggtgactctcactccatccgc

SEQ ID NO: 231906 - DNA, 25 bp, Artificial
  Probe
ccccaaagggcctggcatctatact

SEQ ID NO: 231907 - DNA, 25 bp, Artificial
  Probe
ggcctggcatctatactttactctc

SEQ ID NO: 231908 - DNA, 25 bp, Artificial
  Probe
tcactgtcatagacagaaaaatctg

SEQ ID NO: 231909 - DNA, 25 bp, Artificial
  Probe
agagaagtcaacatcactgtcatag

SEQ ID NO: 231910 - DNA, 25 bp, Artificial
  Probe
aggactcatgctacggagattctgg

SEQ ID NO: 231911 - DNA, 25 bp, Artificial
  Probe
tgtgaaaccaggaaccagatgtcat

SEQ ID NO: 231912 - DNA, 25 bp, Artificial
  Probe
tttgtgccggaaacctccgtggtgg

SEQ ID NO: 231913 - DNA, 25 bp, Artificial
  Probe
tgtggagaccccaaagggcctggca

SEQ ID NO: 231914 - DNA, 25 bp, Artificial
  Probe
gtcgcttctgtatctgagcacaaat

SEQ ID NO: 231915 - DNA, 25 bp, Artificial
  Probe
atccgctgtcgcttctgtatctgag

SEQ ID NO: 231916 - DNA, 25 bp, Artificial
  Probe
caggaaccagatgtcatgtagcagg

SEQ ID NO: 231917 - DNA, 25 bp, Artificial
  Probe
ctgtcgcttctgtatctgagcacaa

SEQ ID NO: 231918 - DNA, 25 bp, Artificial
  Probe
tggagaccccaaagggcctggcatc

SEQ ID NO: 231919 - DNA, 25 bp, Artificial
  Probe
cactgttgtggactgcccctttgat

SEQ ID NO: 231920 - DNA, 25 bp, Artificial
  Probe
tggtagaggactggctgagcctgct

SEQ ID NO: 231921 - DNA, 25 bp, Artificial
  Probe
gaaggccaagttctacaatgacccg

SEQ ID NO: 231922 - DNA, 25 bp, Artificial
  Probe
gctgaaggccaagttctacaatgac

SEQ ID NO: 231923 - DNA, 25 bp, Artificial
  Probe
gactgcccctttgatgatggggcgc

SEQ ID NO: 231924 - DNA, 25 bp, Artificial
  Probe
ccctcctggcaaggtggtagaggac

SEQ ID NO: 231925 - DNA, 25 bp, Artificial
  Probe
tggctgagcctgctgaaggccaagt

SEQ ID NO: 231926 - DNA, 25 bp, Artificial
  Probe
ctgaaggccaagttctacaatgacc

SEQ ID NO: 231927 - DNA, 25 bp, Artificial
  Probe
aggccaagttctacaatgacccggg

SEQ ID NO: 231928 - DNA, 25 bp, Artificial
  Probe
ctgcccctttgatgatggggcgccc

SEQ ID NO: 231929 - DNA, 25 bp, Artificial
  Probe
gctgagcctgctgaaggccaagttc

SEQ ID NO: 231930 - DNA, 25 bp, Artificial
  Probe
tagaggactggctgagcctgctgaa

SEQ ID NO: 231931 - DNA, 25 bp, Artificial
  Probe
tgcccctttgatgatggggcgcccc

SEQ ID NO: 231932 - DNA, 25 bp, Artificial
  Probe
gactggctgagcctgctgaaggcca

SEQ ID NO: 231933 - DNA, 25 bp, Artificial
  Probe
ttgatgatggggcgccccctcctgg

SEQ ID NO: 231934 - DNA, 25 bp, Artificial
  Probe
agaggactggctgagcctgctgaag

SEQ ID NO: 231935 - DNA, 25 bp, Artificial
  Probe
gaggactggctgagcctgctgaagg

SEQ ID NO: 231936 - DNA, 25 bp, Artificial
  Probe
tgaaggccaagttctacaatgaccc

SEQ ID NO: 231937 - DNA, 25 bp, Artificial
  Probe
tggactgcccctttgatgatggggc

SEQ ID NO: 231938 - DNA, 25 bp, Artificial
  Probe
ggactgcccctttgatgatggggcg

SEQ ID NO: 231939 - DNA, 25 bp, Artificial
  Probe
tcactgttgtggactgcccctttga

SEQ ID NO: 231940 - DNA, 25 bp, Artificial
  Probe
tcctggcaaggtggtagaggactgg

SEQ ID NO: 231941 - DNA, 25 bp, Artificial
  Probe
gtagaggactggctgagcctgctga

SEQ ID NO: 231942 - DNA, 25 bp, Artificial
  Probe
cctggcaaggtggtagaggactggc

SEQ ID NO: 231943 - DNA, 25 bp, Artificial
  Probe
actggctgagcctgctgaaggccaa

SEQ ID NO: 231944 - DNA, 25 bp, Artificial
  Probe
ccctttgatgatggggcgccccctc

SEQ ID NO: 231945 - DNA, 25 bp, Artificial
  Probe
tgctgaaggccaagttctacaatga

SEQ ID NO: 231946 - DNA, 25 bp, Artificial
  Probe
ctgctgaaggccaagttctacaatg

SEQ ID NO: 231947 - DNA, 25 bp, Artificial
  Probe
tgttgtggactgcccctttgatgat

SEQ ID NO: 231948 - DNA, 25 bp, Artificial
  Probe
ctgagcctgctgaaggccaagttct

SEQ ID NO: 231949 - DNA, 25 bp, Artificial
  Probe
ctcctggcaaggtggtagaggactg

SEQ ID NO: 231950 - DNA, 25 bp, Artificial
  Probe
gatcactgttgtggactgccccttt

SEQ ID NO: 231951 - DNA, 25 bp, Artificial
  Probe
actgttgtggactgcccctttgatg

SEQ ID NO: 231952 - DNA, 25 bp, Artificial
  Probe
tgagcctgctgaaggccaagttcta

SEQ ID NO: 231953 - DNA, 25 bp, Artificial
  Probe
cccctcctggcaaggtggtagagga

SEQ ID NO: 231954 - DNA, 25 bp, Artificial
  Probe
gtggactgcccctttgatgatgggg

SEQ ID NO: 231955 - DNA, 25 bp, Artificial
  Probe
cgccccctcctggcaaggtggtaga

SEQ ID NO: 231956 - DNA, 25 bp, Artificial
  Probe
tgatggggcgccccctcctggcaag

SEQ ID NO: 231957 - DNA, 25 bp, Artificial
  Probe
cctcctggcaaggtggtagaggact

SEQ ID NO: 231958 - DNA, 25 bp, Artificial
  Probe
atcactgttgtggactgcccctttg

SEQ ID NO: 231959 - DNA, 25 bp, Artificial
  Probe
actgcccctttgatgatggggcgcc

SEQ ID NO: 231960 - DNA, 25 bp, Artificial
  Probe
ggctgagcctgctgaaggccaagtt

SEQ ID NO: 231961 - DNA, 25 bp, Artificial
  Probe
gagcctgctgaaggccaagttctac

SEQ ID NO: 231962 - DNA, 25 bp, Artificial
  Probe
ctggctgagcctgctgaaggccaag

SEQ ID NO: 231963 - DNA, 25 bp, Artificial
  Probe
gcccctttgatgatggggcgccccc

SEQ ID NO: 231964 - DNA, 25 bp, Artificial
  Probe
aaggccaagttctacaatgacccgg

SEQ ID NO: 231965 - DNA, 25 bp, Artificial
  Probe
aaaccaccatagaagccatccatgg

SEQ ID NO: 231966 - DNA, 25 bp, Artificial
  Probe
atactgggtgaacaccctgagttcc

SEQ ID NO: 231967 - DNA, 25 bp, Artificial
  Probe
catggactgatgtctcaggttatta

SEQ ID NO: 231968 - DNA, 25 bp, Artificial
  Probe
ctgtgtgacgtcctgagtattagca

SEQ ID NO: 231969 - DNA, 25 bp, Artificial
  Probe
ggcgcctttaggacatatccaaagg

SEQ ID NO: 231970 - DNA, 25 bp, Artificial
  Probe
cagaacaatatctgcagggaaggtg

SEQ ID NO: 231971 - DNA, 25 bp, Artificial
  Probe
gctgtaaaaccaccatagaagccat

SEQ ID NO: 231972 - DNA, 25 bp, Artificial
  Probe
ggtgaacaccctgagttcctctagc

SEQ ID NO: 231973 - DNA, 25 bp, Artificial
  Probe
aagttagagcagtcggaagcccagc

SEQ ID NO: 231974 - DNA, 25 bp, Artificial
  Probe
tagaaacacatgaccgcaagtcaga

SEQ ID NO: 231975 - DNA, 25 bp, Artificial
  Probe
tcttcctcagagctggcgtgcggaa

SEQ ID NO: 231976 - DNA, 25 bp, Artificial
  Probe
gaccttcagagtaccagactatccc

SEQ ID NO: 231977 - DNA, 25 bp, Artificial
  Probe
aatctcggcgcctttaggacatatc

SEQ ID NO: 231978 - DNA, 25 bp, Artificial
  Probe
atgttagtacacagatgcttaacca

SEQ ID NO: 231979 - DNA, 25 bp, Artificial
  Probe
gggctataagcctcctgatgaagga

SEQ ID NO: 231980 - DNA, 25 bp, Artificial
  Probe
ggtgattgacccaaccagaacaata

SEQ ID NO: 231981 - DNA, 25 bp, Artificial
  Probe
aaccaccatagaagccatccatgga

SEQ ID NO: 231982 - DNA, 25 bp, Artificial
  Probe
tctccggaattgatgttagtacaca

SEQ ID NO: 231983 - DNA, 25 bp, Artificial
  Probe
accatagaagccatccatggactga

SEQ ID NO: 231984 - DNA, 25 bp, Artificial
  Probe
ggctgctggctctccggaattgatg

SEQ ID NO: 231985 - DNA, 25 bp, Artificial
  Probe
tcaaattaacgttgcttagttactg

SEQ ID NO: 231986 - DNA, 25 bp, Artificial
  Probe
tttgtagcagtggtgattgacccaa

SEQ ID NO: 231987 - DNA, 25 bp, Artificial
  Probe
acacatgaccgcaagtcagaagaca

SEQ ID NO: 231988 - DNA, 25 bp, Artificial
  Probe
accagaacaatatctgcagggaagg

SEQ ID NO: 231989 - DNA, 25 bp, Artificial
  Probe
caaagggctataagcctcctgatga

SEQ ID NO: 231990 - DNA, 25 bp, Artificial
  Probe
tcctctttggatcgtaaactacttg

SEQ ID NO: 231991 - DNA, 25 bp, Artificial
  Probe
catgaccgcaagtcagaagacaaac

SEQ ID NO: 231992 - DNA, 25 bp, Artificial
  Probe
cctttaggacatatccaaagggcta

SEQ ID NO: 231993 - DNA, 25 bp, Artificial
  Probe
accatttgtagcagtggtgattgac

SEQ ID NO: 231994 - DNA, 25 bp, Artificial
  Probe
tatctgcagggaaggtgaatctcgg

SEQ ID NO: 231995 - DNA, 25 bp, Artificial
  Probe
tatccaaagggctataagcctcctg

SEQ ID NO: 231996 - DNA, 25 bp, Artificial
  Probe
agacagctgtaaaaccaccatagaa

SEQ ID NO: 231997 - DNA, 25 bp, Artificial
  Probe
gggtgaacaccctgagttcctctag

SEQ ID NO: 231998 - DNA, 25 bp, Artificial
  Probe
caggaaccatttgtagcagtggtga

SEQ ID NO: 231999 - DNA, 25 bp, Artificial
  Probe
ccaatgctgactataccacaggcca

SEQ ID NO: 232000 - DNA, 25 bp, Artificial
  Probe
atatctgcagggaaggtgaatctcg

SEQ ID NO: 232001 - DNA, 25 bp, Artificial
  Probe
gtgcactgcaaacaatattatgcct

SEQ ID NO: 232002 - DNA, 25 bp, Artificial
  Probe
cttgagctcttgtggaataaatact

SEQ ID NO: 232003 - DNA, 25 bp, Artificial
  Probe
ggacatatccaaagggctataagcc

SEQ ID NO: 232004 - DNA, 25 bp, Artificial
  Probe
ctggctctccggaattgatgttagt

SEQ ID NO: 232005 - DNA, 25 bp, Artificial
  Probe
aagattttggcgtgcactgcaaaca

SEQ ID NO: 232006 - DNA, 25 bp, Artificial
  Probe
acccaaccagaacaatatctgcagg

SEQ ID NO: 232007 - DNA, 25 bp, Artificial
  Probe
gtgattgacccaaccagaacaatat

SEQ ID NO: 232008 - DNA, 25 bp, Artificial
  Probe
gtttagaaacacatgaccgcaagtc

SEQ ID NO: 232009 - DNA, 25 bp, Artificial
  Probe
gcaaacaatattatgccttagaagt

SEQ ID NO: 232010 - DNA, 25 bp, Artificial
  Probe
tgcaaacaatattatgccttagaag

SEQ ID NO: 232011 - DNA, 25 bp, Artificial
  Probe
ataactgctgttcctggaaataaag

SEQ ID NO: 232012 - DNA, 25 bp, Artificial
  Probe
gaaccagggcagcagcagggaaatt

SEQ ID NO: 232013 - DNA, 25 bp, Artificial
  Probe
tgctgttcctggaaataaagtctgt

SEQ ID NO: 232014 - DNA, 25 bp, Artificial
  Probe
tggacaacgtctgcaaaatatgaga

SEQ ID NO: 232015 - DNA, 25 bp, Artificial
  Probe
accagggcagcagcagggaaattga

SEQ ID NO: 232016 - DNA, 25 bp, Artificial
  Probe
tccaaatacagtgtttacatggagt

SEQ ID NO: 232017 - DNA, 25 bp, Artificial
  Probe
tggtcactagcttggacaacgtctg

SEQ ID NO: 232018 - DNA, 25 bp, Artificial
  Probe
cttggacaacgtctgcaaaatatga

SEQ ID NO: 232019 - DNA, 25 bp, Artificial
  Probe
gactgaacacagtcggccgacaact

SEQ ID NO: 232020 - DNA, 25 bp, Artificial
  Probe
actagcttggacaacgtctgcaaaa

SEQ ID NO: 232021 - DNA, 25 bp, Artificial
  Probe
ttcggcacgaggtggactgaacaca

SEQ ID NO: 232022 - DNA, 25 bp, Artificial
  Probe
ggtggactgaacacagtcggccgac

SEQ ID NO: 232023 - DNA, 25 bp, Artificial
  Probe
tcactagcttggacaacgtctgcaa

SEQ ID NO: 232024 - DNA, 25 bp, Artificial
  Probe
agcttggacaacgtctgcaaaatat

SEQ ID NO: 232025 - DNA, 25 bp, Artificial
  Probe
ggactgaacacagtcggccgacaac

SEQ ID NO: 232026 - DNA, 25 bp, Artificial
  Probe
actgctgttcctggaaataaagtct

SEQ ID NO: 232027 - DNA, 25 bp, Artificial
  Probe
ctagcttggacaacgtctgcaaaat

SEQ ID NO: 232028 - DNA, 25 bp, Artificial
  Probe
cacagtcggccgacaactttagtaa

SEQ ID NO: 232029 - DNA, 25 bp, Artificial
  Probe
gtcactagcttggacaacgtctgca

SEQ ID NO: 232030 - DNA, 25 bp, Artificial
  Probe
ctgctgttcctggaaataaagtctg

SEQ ID NO: 232031 - DNA, 25 bp, Artificial
  Probe
ggtcactagcttggacaacgtctgc

SEQ ID NO: 232032 - DNA, 25 bp, Artificial
  Probe
cttccaaatacagtgtttacatgga

SEQ ID NO: 232033 - DNA, 25 bp, Artificial
  Probe
gtggactgaacacagtcggccgaca

SEQ ID NO: 232034 - DNA, 25 bp, Artificial
  Probe
acataactgctgttcctggaaataa

SEQ ID NO: 232035 - DNA, 25 bp, Artificial
  Probe
gcttggacaacgtctgcaaaatatg

SEQ ID NO: 232036 - DNA, 25 bp, Artificial
  Probe
tggactgaacacagtcggccgacaa

SEQ ID NO: 232037 - DNA, 25 bp, Artificial
  Probe
agacataactgctgttcctggaaat

SEQ ID NO: 232038 - DNA, 25 bp, Artificial
  Probe
atggtcactagcttggacaacgtct

SEQ ID NO: 232039 - DNA, 25 bp, Artificial
  Probe
cactagcttggacaacgtctgcaaa

SEQ ID NO: 232040 - DNA, 25 bp, Artificial
  Probe
aactgctgttcctggaaataaagtc

SEQ ID NO: 232041 - DNA, 25 bp, Artificial
  Probe
atggatggtcactagcttggacaac

SEQ ID NO: 232042 - DNA, 25 bp, Artificial
  Probe
cggcacgaggtggactgaacacagt

SEQ ID NO: 232043 - DNA, 25 bp, Artificial
  Probe
gctgttcctggaaataaagtctgtt

SEQ ID NO: 232044 - DNA, 25 bp, Artificial
  Probe
taactgctgttcctggaaataaagt

SEQ ID NO: 232045 - DNA, 25 bp, Artificial
  Probe
tcggcacgaggtggactgaacacag

SEQ ID NO: 232046 - DNA, 25 bp, Artificial
  Probe
ggatggtcactagcttggacaacgt

SEQ ID NO: 232047 - DNA, 25 bp, Artificial
  Probe
ttccaaatacagtgtttacatggag

SEQ ID NO: 232048 - DNA, 25 bp, Artificial
  Probe
gatggtcactagcttggacaacgtc

SEQ ID NO: 232049 - DNA, 25 bp, Artificial
  Probe
gatggatggtcactagcttggacaa

SEQ ID NO: 232050 - DNA, 25 bp, Artificial
  Probe
aaccagggcagcagcagggaaattg

SEQ ID NO: 232051 - DNA, 25 bp, Artificial
  Probe
gacataactgctgttcctggaaata

SEQ ID NO: 232052 - DNA, 25 bp, Artificial
  Probe
cataactgctgttcctggaaataaa

SEQ ID NO: 232053 - DNA, 25 bp, Artificial
  Probe
tagacataactgctgttcctggaaa

SEQ ID NO: 232054 - DNA, 25 bp, Artificial
  Probe
ccttccaaatacagtgtttacatgg

SEQ ID NO: 232055 - DNA, 25 bp, Artificial
  Probe
tggatggtcactagcttggacaacg

SEQ ID NO: 232056 - DNA, 25 bp, Artificial
  Probe
tagcttggacaacgtctgcaaaata

SEQ ID NO: 232057 - DNA, 25 bp, Artificial
  Probe
ccaaggtggagacgctgagtcccga

SEQ ID NO: 232058 - DNA, 25 bp, Artificial
  Probe
gcgctgccggtcatcaccaaggtgg

SEQ ID NO: 232059 - DNA, 25 bp, Artificial
  Probe
gccggtcatcaccaaggtggagacg

SEQ ID NO: 232060 - DNA, 25 bp, Artificial
  Probe
cgtgcccaaggataaggaggagcgg

SEQ ID NO: 232061 - DNA, 25 bp, Artificial
  Probe
gaccccggtagctgacgggcccaag

SEQ ID NO: 232062 - DNA, 25 bp, Artificial
  Probe
caccaaggtggagacgctgagtccc

SEQ ID NO: 232063 - DNA, 25 bp, Artificial
  Probe
tcggccaaaggcgccccgacaggga

SEQ ID NO: 232064 - DNA, 25 bp, Artificial
  Probe
aacgggctgcccggcttcagcgtgg

SEQ ID NO: 232065 - DNA, 25 bp, Artificial
  Probe
tcatgacgctgcgcacgtcgcctcc

SEQ ID NO: 232066 - DNA, 25 bp, Artificial
  Probe
tcatcaccaaggtggagacgctgag

SEQ ID NO: 232067 - DNA, 25 bp, Artificial
  Probe
ccgcgctgccggtcatcaccaaggt

SEQ ID NO: 232068 - DNA, 25 bp, Artificial
  Probe
ggctcgctgccggagcaccacgccg

SEQ ID NO: 232069 - DNA, 25 bp, Artificial
  Probe
aagagcgaggcggcgtcacccgcgc

SEQ ID NO: 232070 - DNA, 25 bp, Artificial
  Probe
gggcgcgctgcaagccagtccccgc

SEQ ID NO: 232071 - DNA, 25 bp, Artificial
  Probe
cggctccccagacggctcgctgccg

SEQ ID NO: 232072 - DNA, 25 bp, Artificial
  Probe
cgcgctgccggtcatcaccaaggtg

SEQ ID NO: 232073 - DNA, 25 bp, Artificial
  Probe
agaagaaggacgtgcccaaggataa

SEQ ID NO: 232074 - DNA, 25 bp, Artificial
  Probe
aggcggcgtcacccgcgctgccggt

SEQ ID NO: 232075 - DNA, 25 bp, Artificial
  Probe
ggtcatcaccaaggtggagacgctg

SEQ ID NO: 232076 - DNA, 25 bp, Artificial
  Probe
atcaccaaggtggagacgctgagtc

SEQ ID NO: 232077 - DNA, 25 bp, Artificial
  Probe
ctgccggagcaccacgccgccgcgc

SEQ ID NO: 232078 - DNA, 25 bp, Artificial
  Probe
ctgagtcccgagggcgcgctgcaag

SEQ ID NO: 232079 - DNA, 25 bp, Artificial
  Probe
accaaggtggagacgctgagtcccg

SEQ ID NO: 232080 - DNA, 25 bp, Artificial
  Probe
gtagctgacgggcccaaggaggccg

SEQ ID NO: 232081 - DNA, 25 bp, Artificial
  Probe
gacagggaccccggtagctgacggg

SEQ ID NO: 232082 - DNA, 25 bp, Artificial
  Probe
cgctgccggtcatcaccaaggtgga

SEQ ID NO: 232083 - DNA, 25 bp, Artificial
  Probe
tcacccgcgctgccggtcatcacca

SEQ ID NO: 232084 - DNA, 25 bp, Artificial
  Probe
gctgcaagccagtccccgcagctca

SEQ ID NO: 232085 - DNA, 25 bp, Artificial
  Probe
tcaccaaggtggagacgctgagtcc

SEQ ID NO: 232086 - DNA, 25 bp, Artificial
  Probe
tggtggtcaagagcgaggcggcgtc

SEQ ID NO: 232087 - DNA, 25 bp, Artificial
  Probe
aagtggtggtcaagagcgaggcggc

SEQ ID NO: 232088 - DNA, 25 bp, Artificial
  Probe
tcccgagggcgcgctgcaagccagt

SEQ ID NO: 232089 - DNA, 25 bp, Artificial
  Probe
tgccggtcatcaccaaggtggagac

SEQ ID NO: 232090 - DNA, 25 bp, Artificial
  Probe
tgccggagcaccacgccgccgcgcc

SEQ ID NO: 232091 - DNA, 25 bp, Artificial
  Probe
caagagcgaggcggcgtcacccgcg

SEQ ID NO: 232092 - DNA, 25 bp, Artificial
  Probe
ctgccggtcatcaccaaggtggaga

SEQ ID NO: 232093 - DNA, 25 bp, Artificial
  Probe
catcaccaaggtggagacgctgagt

SEQ ID NO: 232094 - DNA, 25 bp, Artificial
  Probe
cccggtagctgacgggcccaaggag

SEQ ID NO: 232095 - DNA, 25 bp, Artificial
  Probe
cccacctcaaggagccgccccctgc

SEQ ID NO: 232096 - DNA, 25 bp, Artificial
  Probe
cccaaggaggccgagaagaaagtgg

SEQ ID NO: 232097 - DNA, 25 bp, Artificial
  Probe
gggcccaaggaggccgagaagaaag

SEQ ID NO: 232098 - DNA, 25 bp, Artificial
  Probe
gccccgacagggaccccggtagctg

SEQ ID NO: 232099 - DNA, 25 bp, Artificial
  Probe
gtcatcaccaaggtggagacgctga

SEQ ID NO: 232100 - DNA, 25 bp, Artificial
  Probe
tgcaagccagtccccgcagctcagc

SEQ ID NO: 232101 - DNA, 25 bp, Artificial
  Probe
gctgccggtcatcaccaaggtggag

SEQ ID NO: 232102 - DNA, 25 bp, Artificial
  Probe
gacgctgagtcccgagggcgcgctg

SEQ ID NO: 232103 - DNA, 25 bp, Artificial
  Probe
tccattactcggtgcccatcaaagc

SEQ ID NO: 232104 - DNA, 25 bp, Artificial
  Probe
agcacaggtcaggaggcgccgcttt

SEQ ID NO: 232105 - DNA, 25 bp, Artificial
  Probe
ccaacattagaaaacctgacggcta

SEQ ID NO: 232106 - DNA, 25 bp, Artificial
  Probe
gcctcttatcaagacaaaggcttcc

SEQ ID NO: 232107 - DNA, 25 bp, Artificial
  Probe
gtctggtacaactgtccttaacctg

SEQ ID NO: 232108 - DNA, 25 bp, Artificial
  Probe
ccttaacctgactggcaaagaagaa

SEQ ID NO: 232109 - DNA, 25 bp, Artificial
  Probe
agatcaatactataacatcgatgtg

SEQ ID NO: 232110 - DNA, 25 bp, Artificial
  Probe
ttcctccacaatgaagacaaggtga

SEQ ID NO: 232111 - DNA, 25 bp, Artificial
  Probe
tataacatcgatgtgcctactagaa

SEQ ID NO: 232112 - DNA, 25 bp, Artificial
  Probe
catcgatgtgcctactagaacagca

SEQ ID NO: 232113 - DNA, 25 bp, Artificial
  Probe
cacaccttcaggatccattactcgg

SEQ ID NO: 232114 - DNA, 25 bp, Artificial
  Probe
ggctatgattactacgccttttcca

SEQ ID NO: 232115 - DNA, 25 bp, Artificial
  Probe
acggctatgattactacgccttttc

SEQ ID NO: 232116 - DNA, 25 bp, Artificial
  Probe
tccacaatgaagacaaggtgagcac

SEQ ID NO: 232117 - DNA, 25 bp, Artificial
  Probe
gatcaatactataacatcgatgtgc

SEQ ID NO: 232118 - DNA, 25 bp, Artificial
  Probe
gtgataccttttgacattgaaatac

SEQ ID NO: 232119 - DNA, 25 bp, Artificial
  Probe
tactagaacagcaagagcaatcacc

SEQ ID NO: 232120 - DNA, 25 bp, Artificial
  Probe
acagcaagagcaatcaccacgcgct

SEQ ID NO: 232121 - DNA, 25 bp, Artificial
  Probe
ataacatcgatgtgcctactagaac

SEQ ID NO: 232122 - DNA, 25 bp, Artificial
  Probe
tactcggtgcccatcaaagcctctt

SEQ ID NO: 232123 - DNA, 25 bp, Artificial
  Probe
ggtgcccatcaaagcctcttatcaa

SEQ ID NO: 232124 - DNA, 25 bp, Artificial
  Probe
ccgctttgagcgtgctgttggacct

SEQ ID NO: 232125 - DNA, 25 bp, Artificial
  Probe
acctgactggcaaagaagaatgaaa

SEQ ID NO: 232126 - DNA, 25 bp, Artificial
  Probe
aggatccattactcggtgcccatca

SEQ ID NO: 232127 - DNA, 25 bp, Artificial
  Probe
aacagtgataccttttgacattgaa

SEQ ID NO: 232128 - DNA, 25 bp, Artificial
  Probe
agacaaggtgagcacactgtggaga

SEQ ID NO: 232129 - DNA, 25 bp, Artificial
  Probe
ccgcgataacactgcccaacattag

SEQ ID NO: 232130 - DNA, 25 bp, Artificial
  Probe
cgtgctgttggacctttccagacac

SEQ ID NO: 232131 - DNA, 25 bp, Artificial
  Probe
aacctgactggcaaagaagaatgaa

SEQ ID NO: 232132 - DNA, 25 bp, Artificial
  Probe
gagagggttcccaaatgtcgttact

SEQ ID NO: 232133 - DNA, 25 bp, Artificial
  Probe
cctctccagagtctggtacaactgt

SEQ ID NO: 232134 - DNA, 25 bp, Artificial
  Probe
aacagcaagagcaatcaccacgcgc

SEQ ID NO: 232135 - DNA, 25 bp, Artificial
  Probe
ccagagtctggtacaactgtcctta

SEQ ID NO: 232136 - DNA, 25 bp, Artificial
  Probe
gttacttccgcgataacactgccca

SEQ ID NO: 232137 - DNA, 25 bp, Artificial
  Probe
gttggacctttccagacacacacct

SEQ ID NO: 232138 - DNA, 25 bp, Artificial
  Probe
agagtctggtacaactgtccttaac

SEQ ID NO: 232139 - DNA, 25 bp, Artificial
  Probe
tcaaagcctcttatcaagacaaagg

SEQ ID NO: 232140 - DNA, 25 bp, Artificial
  Probe
ttagaaaacctgacggctatgatta

SEQ ID NO: 232141 - DNA, 25 bp, Artificial
  Probe
ctgcccaacattagaaaacctgacg

SEQ ID NO: 232142 - DNA, 25 bp, Artificial
  Probe
aaacctgacggctatgattactacg

SEQ ID NO: 232143 - DNA, 25 bp, Artificial
  Probe
caaagcctcttatcaagacaaaggc

SEQ ID NO: 232144 - DNA, 25 bp, Artificial
  Probe
caagacaaaggcttcctccacaatg

SEQ ID NO: 232145 - DNA, 25 bp, Artificial
  Probe
aatgtcgttacttccgcgataacac

SEQ ID NO: 232146 - DNA, 25 bp, Artificial
  Probe
gctgttggacctttccagacacaca

SEQ ID NO: 232147 - DNA, 25 bp, Artificial
  Probe
agagcaatcaccacgcgctcagggc

SEQ ID NO: 232148 - DNA, 25 bp, Artificial
  Probe
gttcccaaatgtcgttacttccgcg

SEQ ID NO: 232149 - DNA, 25 bp, Artificial
  Probe
cattttttcctgaggaactccctgg

SEQ ID NO: 232150 - DNA, 25 bp, Artificial
  Probe
attctcttgagtaacattctagatg

SEQ ID NO: 232151 - DNA, 25 bp, Artificial
  Probe
gttcaagggctctagccttccacgc

SEQ ID NO: 232152 - DNA, 25 bp, Artificial
  Probe
acaggcctcatttggcatcagacag

SEQ ID NO: 232153 - DNA, 25 bp, Artificial
  Probe
tctctacaggcctcatttggcatca

SEQ ID NO: 232154 - DNA, 25 bp, Artificial
  Probe
aatagccccactagttgttcaacag

SEQ ID NO: 232155 - DNA, 25 bp, Artificial
  Probe
caagactcctaacagactgaatttg

SEQ ID NO: 232156 - DNA, 25 bp, Artificial
  Probe
cactagttgttcaacagcttgttgg

SEQ ID NO: 232157 - DNA, 25 bp, Artificial
  Probe
ggttcaagggctctagccttccacg

SEQ ID NO: 232158 - DNA, 25 bp, Artificial
  Probe
acagggtatataccatcatgtacag

SEQ ID NO: 232159 - DNA, 25 bp, Artificial
  Probe
ctcttgagtaacattctagatgtca

SEQ ID NO: 232160 - DNA, 25 bp, Artificial
  Probe
tgagacagcagaacacattgctcaa

SEQ ID NO: 232161 - DNA, 25 bp, Artificial
  Probe
ccaaggaatttctgggcctggtatt

SEQ ID NO: 232162 - DNA, 25 bp, Artificial
  Probe
gcctcatttggcatcagacagggta

SEQ ID NO: 232163 - DNA, 25 bp, Artificial
  Probe
gtcctagtttcaaaattctcttgag

SEQ ID NO: 232164 - DNA, 25 bp, Artificial
  Probe
actaacagtgagacagcagaacaca

SEQ ID NO: 232165 - DNA, 25 bp, Artificial
  Probe
tgaggaactccctggttcaagggct

SEQ ID NO: 232166 - DNA, 25 bp, Artificial
  Probe
gaacacattgctcaaggcttacgtc

SEQ ID NO: 232167 - DNA, 25 bp, Artificial
  Probe
caaaggccaaggaatttctgggcct

SEQ ID NO: 232168 - DNA, 25 bp, Artificial
  Probe
cctactgtacatctaggaatgcctt

SEQ ID NO: 232169 - DNA, 25 bp, Artificial
  Probe
gatgaacgtcctagtttcaaaattc

SEQ ID NO: 232170 - DNA, 25 bp, Artificial
  Probe
ctggctgataagcttcatggatcta

SEQ ID NO: 232171 - DNA, 25 bp, Artificial
  Probe
ctccctggttcaagggctctagcct

SEQ ID NO: 232172 - DNA, 25 bp, Artificial
  Probe
atcatgtacagctgctggcatgaga

SEQ ID NO: 232173 - DNA, 25 bp, Artificial
  Probe
gcttctgagcaaaggccaaggaatt

SEQ ID NO: 232174 - DNA, 25 bp, Artificial
  Probe
ggtattacttcaagactcctaacag

SEQ ID NO: 232175 - DNA, 25 bp, Artificial
  Probe
attgctcaaggcttacgtctctaca

SEQ ID NO: 232176 - DNA, 25 bp, Artificial
  Probe
cttgagtaacattctagatgtcatg

SEQ ID NO: 232177 - DNA, 25 bp, Artificial
  Probe
acacattgctcaaggcttacgtctc

SEQ ID NO: 232178 - DNA, 25 bp, Artificial
  Probe
cagaacacattgctcaaggcttacg

SEQ ID NO: 232179 - DNA, 25 bp, Artificial
  Probe
gtaaatagccccactagttgttcaa

SEQ ID NO: 232180 - DNA, 25 bp, Artificial
  Probe
ttttcctgaggaactccctggttca

SEQ ID NO: 232181 - DNA, 25 bp, Artificial
  Probe
tcctaacagactgaatttgggatgg

SEQ ID NO: 232182 - DNA, 25 bp, Artificial
  Probe
agcagatgaacgtcctagtttcaaa

SEQ ID NO: 232183 - DNA, 25 bp, Artificial
  Probe
ggctgataagcttcatggatctact

SEQ ID NO: 232184 - DNA, 25 bp, Artificial
  Probe
ttggcatcagacagggtatatacca

SEQ ID NO: 232185 - DNA, 25 bp, Artificial
  Probe
ccagcatagtgcttctgagcaaagg

SEQ ID NO: 232186 - DNA, 25 bp, Artificial
  Probe
agggtatataccatcatgtacagct

SEQ ID NO: 232187 - DNA, 25 bp, Artificial
  Probe
gccccaattccattttttcctgagg

SEQ ID NO: 232188 - DNA, 25 bp, Artificial
  Probe
gtacatctaggaatgcctttcttct

SEQ ID NO: 232189 - DNA, 25 bp, Artificial
  Probe
ttcctgaggaactccctggttcaag

SEQ ID NO: 232190 - DNA, 25 bp, Artificial
  Probe
gcctggtattacttcaagactccta

SEQ ID NO: 232191 - DNA, 25 bp, Artificial
  Probe
ccattttttcctgaggaactccctg

SEQ ID NO: 232192 - DNA, 25 bp, Artificial
  Probe
aaggccaaggaatttctgggcctgg

SEQ ID NO: 232193 - DNA, 25 bp, Artificial
  Probe
ttacgtctctacaggcctcatttgg

SEQ ID NO: 232194 - DNA, 25 bp, Artificial
  Probe
aatttctgggcctggtattacttca

SEQ ID NO: 232195 - DNA, 25 bp, Artificial
  Probe
tctttaatggcagaaggcaagtatg

SEQ ID NO: 232196 - DNA, 25 bp, Artificial
  Probe
tgctttctttaatggcagaaggcaa

SEQ ID NO: 232197 - DNA, 25 bp, Artificial
  Probe
ccagtttacagcagctacaggagca

SEQ ID NO: 232198 - DNA, 25 bp, Artificial
  Probe
ttttttacatgtatattttgatatg

SEQ ID NO: 232199 - DNA, 25 bp, Artificial
  Probe
gtttacagcagctacaggagcactt

SEQ ID NO: 232200 - DNA, 25 bp, Artificial
  Probe
ttctttaatggcagaaggcaagtat

SEQ ID NO: 232201 - DNA, 25 bp, Artificial
  Probe
cagtttacagcagctacaggagcac

SEQ ID NO: 232202 - DNA, 25 bp, Artificial
  Probe
tttttacatgtatattttgatatgt

SEQ ID NO: 232203 - DNA, 25 bp, Artificial
  Probe
cccagtttacagcagctacaggagc

SEQ ID NO: 232204 - DNA, 25 bp, Artificial
  Probe
ttatattttcaattagctactgcca

SEQ ID NO: 232205 - DNA, 25 bp, Artificial
  Probe
tttatattttcaattagctactgcc

SEQ ID NO: 232206 - DNA, 25 bp, Artificial
  Probe
caattagctactgccagtaaattaa

SEQ ID NO: 232207 - DNA, 25 bp, Artificial
  Probe
aattagctactgccagtaaattaaa

SEQ ID NO: 232208 - DNA, 25 bp, Artificial
  Probe
ttagctactgccagtaaattaaaat

SEQ ID NO: 232209 - DNA, 25 bp, Artificial
  Probe
aattttttacatgtatattttgata

SEQ ID NO: 232210 - DNA, 25 bp, Artificial
  Probe
attttgggtcaaaatcatggtgaca

SEQ ID NO: 232211 - DNA, 25 bp, Artificial
  Probe
tcaattagctactgccagtaaatta

SEQ ID NO: 232212 - DNA, 25 bp, Artificial
  Probe
ctttctttaatggcagaaggcaagt

SEQ ID NO: 232213 - DNA, 25 bp, Artificial
  Probe
agtttacagcagctacaggagcact

SEQ ID NO: 232214 - DNA, 25 bp, Artificial
  Probe
atattttcaattagctactgccagt

SEQ ID NO: 232215 - DNA, 25 bp, Artificial
  Probe
aaattttttacatgtatattttgat

SEQ ID NO: 232216 - DNA, 25 bp, Artificial
  Probe
tttcaattagctactgccagtaaat

SEQ ID NO: 232217 - DNA, 25 bp, Artificial
  Probe
aaaatcatggtgacaaaggtcccat

SEQ ID NO: 232218 - DNA, 25 bp, Artificial
  Probe
attttcaattagctactgccagtaa

SEQ ID NO: 232219 - DNA, 25 bp, Artificial
  Probe
cacccagtttacagcagctacagga

SEQ ID NO: 232220 - DNA, 25 bp, Artificial
  Probe
tttctttaatggcagaaggcaagta

SEQ ID NO: 232221 - DNA, 25 bp, Artificial
  Probe
tattttcaattagctactgccagta

SEQ ID NO: 232222 - DNA, 25 bp, Artificial
  Probe
tatattttcaattagctactgccag

SEQ ID NO: 232223 - DNA, 25 bp, Artificial
  Probe
tagctactgccagtaaattaaaatt

SEQ ID NO: 232224 - DNA, 25 bp, Artificial
  Probe
attttttacatgtatattttgatat

SEQ ID NO: 232225 - DNA, 25 bp, Artificial
  Probe
agctactgccagtaaattaaaattt

SEQ ID NO: 232226 - DNA, 25 bp, Artificial
  Probe
acccagtttacagcagctacaggag

SEQ ID NO: 232227 - DNA, 25 bp, Artificial
  Probe
gctttctttaatggcagaaggcaag

SEQ ID NO: 232228 - DNA, 25 bp, Artificial
  Probe
gctactgccagtaaattaaaatttt

SEQ ID NO: 232229 - DNA, 25 bp, Artificial
  Probe
attagctactgccagtaaattaaaa

SEQ ID NO: 232230 - DNA, 25 bp, Artificial
  Probe
ttttcaattagctactgccagtaaa

SEQ ID NO: 232231 - DNA, 25 bp, Artificial
  Probe
tacacccagtttacagcagctacag

SEQ ID NO: 232232 - DNA, 25 bp, Artificial
  Probe
caaaatcatggtgacaaaggtccca

SEQ ID NO: 232233 - DNA, 25 bp, Artificial
  Probe
atttatattttcaattagctactgc

SEQ ID NO: 232234 - DNA, 25 bp, Artificial
  Probe
ttcaattagctactgccagtaaatt

SEQ ID NO: 232235 - DNA, 25 bp, Artificial
  Probe
acacccagtttacagcagctacagg

SEQ ID NO: 232236 - DNA, 25 bp, Artificial
  Probe
tcaaaatcatggtgacaaaggtccc

SEQ ID NO: 232237 - DNA, 25 bp, Artificial
  Probe
agtgtggctacaagttcactcggca

SEQ ID NO: 232238 - DNA, 25 bp, Artificial
  Probe
atcatcacggctgctgtccctgagg

SEQ ID NO: 232239 - DNA, 25 bp, Artificial
  Probe
agtccctgacccagggtggccttgc

SEQ ID NO: 232240 - DNA, 25 bp, Artificial
  Probe
gcttctgaggcatgtggccagccgt

SEQ ID NO: 232241 - DNA, 25 bp, Artificial
  Probe
ggctgctgtccctgaggactgtgac

SEQ ID NO: 232242 - DNA, 25 bp, Artificial
  Probe
gtcattgtggagtccctgacccagg

SEQ ID NO: 232243 - DNA, 25 bp, Artificial
  Probe
gagtgcaccgagtgtggctacaagt

SEQ ID NO: 232244 - DNA, 25 bp, Artificial
  Probe
aacctcatcatcgacgatgagaaga

SEQ ID NO: 232245 - DNA, 25 bp, Artificial
  Probe
cgcagaggtcattgtggagtccctg

SEQ ID NO: 232246 - DNA, 25 bp, Artificial
  Probe
gcaagctccggaacctcatcatcga

SEQ ID NO: 232247 - DNA, 25 bp, Artificial
  Probe
catcaggagggcagacctcatttct

SEQ ID NO: 232248 - DNA, 25 bp, Artificial
  Probe
aacagttacgggtgcacgtcagacg

SEQ ID NO: 232249 - DNA, 25 bp, Artificial
  Probe
gagagctttgctagctccggggtcc

SEQ ID NO: 232250 - DNA, 25 bp, Artificial
  Probe
ctgcggaggcacatggagatccacg

SEQ ID NO: 232251 - DNA, 25 bp, Artificial
  Probe
accgagtgtggctacaagttcactc

SEQ ID NO: 232252 - DNA, 25 bp, Artificial
  Probe
tagctccggggtcctggagccgtct

SEQ ID NO: 232253 - DNA, 25 bp, Artificial
  Probe
ctacaagttcactcggcaggctcac

SEQ ID NO: 232254 - DNA, 25 bp, Artificial
  Probe
agtggagaactacaaccctcggcag

SEQ ID NO: 232255 - DNA, 25 bp, Artificial
  Probe
ctagctccggggtcctggagccgtc

SEQ ID NO: 232256 - DNA, 25 bp, Artificial
  Probe
ctccgcagaggtcattgtggagtcc

SEQ ID NO: 232257 - DNA, 25 bp, Artificial
  Probe
agtgtccccttgaccaataaacatg

SEQ ID NO: 232258 - DNA, 25 bp, Artificial
  Probe
acctgcggaggcacatggagatcca

SEQ ID NO: 232259 - DNA, 25 bp, Artificial
  Probe
tcaggagggcagacctcatttctgc

SEQ ID NO: 232260 - DNA, 25 bp, Artificial
  Probe
cagagactgtgttcagaggagagct

SEQ ID NO: 232261 - DNA, 25 bp, Artificial
  Probe
gctcacctgcggaggcacatggaga

SEQ ID NO: 232262 - DNA, 25 bp, Artificial
  Probe
ggcagcgcaagctccggaacctcat

SEQ ID NO: 232263 - DNA, 25 bp, Artificial
  Probe
tgacacgtagcctgtccagtgtccc

SEQ ID NO: 232264 - DNA, 25 bp, Artificial
  Probe
gccgtcatcaggagggcagacctca

SEQ ID NO: 232265 - DNA, 25 bp, Artificial
  Probe
ggcaggctcacctgcggaggcacat

SEQ ID NO: 232266 - DNA, 25 bp, Artificial
  Probe
gtagcctgtccagtgtccccttgac

SEQ ID NO: 232267 - DNA, 25 bp, Artificial
  Probe
tggagaactacaaccctcggcagcg

SEQ ID NO: 232268 - DNA, 25 bp, Artificial
  Probe
atccacgatagagtggagaactaca

SEQ ID NO: 232269 - DNA, 25 bp, Artificial
  Probe
agttcactcggcaggctcacctgcg

SEQ ID NO: 232270 - DNA, 25 bp, Artificial
  Probe
gccagccgtcatcaggagggcagac

SEQ ID NO: 232271 - DNA, 25 bp, Artificial
  Probe
tttctgccagatctgtggcaagacc

SEQ ID NO: 232272 - DNA, 25 bp, Artificial
  Probe
tcagaggagagctttgctagctccg

SEQ ID NO: 232273 - DNA, 25 bp, Artificial
  Probe
aggtcattgtggagtccctgaccca

SEQ ID NO: 232274 - DNA, 25 bp, Artificial
  Probe
gaggcacatggagatccacgataga

SEQ ID NO: 232275 - DNA, 25 bp, Artificial
  Probe
ggactgtgacacgtagcctgtccag

SEQ ID NO: 232276 - DNA, 25 bp, Artificial
  Probe
acgaggcttctgaggcatgtggcca

SEQ ID NO: 232277 - DNA, 25 bp, Artificial
  Probe
actcggcaggctcacctgcggaggc

SEQ ID NO: 232278 - DNA, 25 bp, Artificial
  Probe
tagccagagactgtgttcagaggag

SEQ ID NO: 232279 - DNA, 25 bp, Artificial
  Probe
agctttgctagctccggggtcctgg

SEQ ID NO: 232280 - DNA, 25 bp, Artificial
  Probe
cagacgacacaaaggcgtgagaaag

SEQ ID NO: 232281 - DNA, 25 bp, Artificial
  Probe
gtgttcagaggagagctttgctagc

SEQ ID NO: 232282 - DNA, 25 bp, Artificial
  Probe
ttctgaggcatgtggccagccgtca

SEQ ID NO: 232283 - DNA, 25 bp, Artificial
  Probe
aacccggtgcgctcgtggatgcaca

SEQ ID NO: 232284 - DNA, 25 bp, Artificial
  Probe
actgacaaatggatctcctgtattt

SEQ ID NO: 232285 - DNA, 25 bp, Artificial
  Probe
ctgcggccgagagagcagactgaca

SEQ ID NO: 232286 - DNA, 25 bp, Artificial
  Probe
gccagcagtgttcatgtttgggatt

SEQ ID NO: 232287 - DNA, 25 bp, Artificial
  Probe
caagatctgtatgtccgcctcatag

SEQ ID NO: 232288 - DNA, 25 bp, Artificial
  Probe
aagctgcagctactgtacagcaatg

SEQ ID NO: 232289 - DNA, 25 bp, Artificial
  Probe
tggcgtcaggacagagcaagatctg

SEQ ID NO: 232290 - DNA, 25 bp, Artificial
  Probe
cggccgagagagcagactgacaaat

SEQ ID NO: 232291 - DNA, 25 bp, Artificial
  Probe
acaacggcattcactacaagctgca

SEQ ID NO: 232292 - DNA, 25 bp, Artificial
  Probe
tgtattttcctttctgctgagctgg

SEQ ID NO: 232293 - DNA, 25 bp, Artificial
  Probe
agctactgtacagcaatggcgtcag

SEQ ID NO: 232294 - DNA, 25 bp, Artificial
  Probe
ccgctgccagcagtgttcatgtttg

SEQ ID NO: 232295 - DNA, 25 bp, Artificial
  Probe
acagcaatggcgtcaggacagagca

SEQ ID NO: 232296 - DNA, 25 bp, Artificial
  Probe
ttcaatgaccagacaggtgagaaag

SEQ ID NO: 232297 - DNA, 25 bp, Artificial
  Probe
aagatctgtatgtccgcctcataga

SEQ ID NO: 232298 - DNA, 25 bp, Artificial
  Probe
ccgcttttgtggactttgtggagaa

SEQ ID NO: 232299 - DNA, 25 bp, Artificial
  Probe
ccttgtattttcctttctgctgagc

SEQ ID NO: 232300 - DNA, 25 bp, Artificial
  Probe
ttcactacaagctgcagctactgta

SEQ ID NO: 232301 - DNA, 25 bp, Artificial
  Probe
cagcagtgttcatgtttgggattca

SEQ ID NO: 232302 - DNA, 25 bp, Artificial
  Probe
ctcatagattcaatgaccagacagg

SEQ ID NO: 232303 - DNA, 25 bp, Artificial
  Probe
acaagctgcagctactgtacagcaa

SEQ ID NO: 232304 - DNA, 25 bp, Artificial
  Probe
acgagaaaaccaacaacggcattca

SEQ ID NO: 232305 - DNA, 25 bp, Artificial
  Probe
tttctgctgagctggggttgtcctg

SEQ ID NO: 232306 - DNA, 25 bp, Artificial
  Probe
tagattcaatgaccagacaggtgag

SEQ ID NO: 232307 - DNA, 25 bp, Artificial
  Probe
ttcctttctgctgagctggggttgt

SEQ ID NO: 232308 - DNA, 25 bp, Artificial
  Probe
gattcaatgaccagacaggtgagaa

SEQ ID NO: 232309 - DNA, 25 bp, Artificial
  Probe
gagaaaaccaacaacggcattcact

SEQ ID NO: 232310 - DNA, 25 bp, Artificial
  Probe
aaggaccgcttttgtggactttgtg

SEQ ID NO: 232311 - DNA, 25 bp, Artificial
  Probe
atgaccagacaggtgagaaagtttc

SEQ ID NO: 232312 - DNA, 25 bp, Artificial
  Probe
cactacaagctgcagctactgtaca

SEQ ID NO: 232313 - DNA, 25 bp, Artificial
  Probe
cggcattcactacaagctgcagcta

SEQ ID NO: 232314 - DNA, 25 bp, Artificial
  Probe
tgaccagacaggtgagaaagtttcc

SEQ ID NO: 232315 - DNA, 25 bp, Artificial
  Probe
tcctgcggccgagagagcagactga

SEQ ID NO: 232316 - DNA, 25 bp, Artificial
  Probe
tgcagctactgtacagcaatggcgt

SEQ ID NO: 232317 - DNA, 25 bp, Artificial
  Probe
taacgagaaaaccaacaacggcatt

SEQ ID NO: 232318 - DNA, 25 bp, Artificial
  Probe
tgtatgtccgcctcatagattcaat

SEQ ID NO: 232319 - DNA, 25 bp, Artificial
  Probe
gagcaagatctgtatgtccgcctca

SEQ ID NO: 232320 - DNA, 25 bp, Artificial
  Probe
cccggtgcgctcgtggatgcacacg

SEQ ID NO: 232321 - DNA, 25 bp, Artificial
  Probe
cagcaatggcgtcaggacagagcaa

SEQ ID NO: 232322 - DNA, 25 bp, Artificial
  Probe
gcaatggcgtcaggacagagcaaga

SEQ ID NO: 232323 - DNA, 25 bp, Artificial
  Probe
caatgaccagacaggtgagaaagtt

SEQ ID NO: 232324 - DNA, 25 bp, Artificial
  Probe
actgtacagcaatggcgtcaggaca

SEQ ID NO: 232325 - DNA, 25 bp, Artificial
  Probe
gtatgtccgcctcatagattcaatg

SEQ ID NO: 232326 - DNA, 25 bp, Artificial
  Probe
ggcattcactacaagctgcagctac

SEQ ID NO: 232327 - DNA, 25 bp, Artificial
  Probe
caacaacggcattcactacaagctg

SEQ ID NO: 232328 - DNA, 25 bp, Artificial
  Probe
gaaaggaccgcttttgtggactttg

SEQ ID NO: 232329 - DNA, 25 bp, Artificial
  Probe
atttggactatgcatgtgttttttt

SEQ ID NO: 232330 - DNA, 25 bp, Artificial
  Probe
tccccattgtatataaagtatcgct

SEQ ID NO: 232331 - DNA, 25 bp, Artificial
  Probe
tgttttcaacattgtatttggacta

SEQ ID NO: 232332 - DNA, 25 bp, Artificial
  Probe
aaatgctgttttcaacattgtattt

SEQ ID NO: 232333 - DNA, 25 bp, Artificial
  Probe
gctgttttcaacattgtatttggac

SEQ ID NO: 232334 - DNA, 25 bp, Artificial
  Probe
aacattgtatttggactatgcatgt

SEQ ID NO: 232335 - DNA, 25 bp, Artificial
  Probe
tgtgtttttttccccattgtatata

SEQ ID NO: 232336 - DNA, 25 bp, Artificial
  Probe
tgaaaatgctgttttcaacattgta

SEQ ID NO: 232337 - DNA, 25 bp, Artificial
  Probe
tcaacattgtatttggactatgcat

SEQ ID NO: 232338 - DNA, 25 bp, Artificial
  Probe
catgtgtttttttccccattgtata

SEQ ID NO: 232339 - DNA, 25 bp, Artificial
  Probe
tttcaacattgtatttggactatgc

SEQ ID NO: 232340 - DNA, 25 bp, Artificial
  Probe
tgtatttggactatgcatgtgtttt

SEQ ID NO: 232341 - DNA, 25 bp, Artificial
  Probe
atgcatgtgtttttttccccattgt

SEQ ID NO: 232342 - DNA, 25 bp, Artificial
  Probe
attgtatttggactatgcatgtgtt

SEQ ID NO: 232343 - DNA, 25 bp, Artificial
  Probe
gttttcaacattgtatttggactat

SEQ ID NO: 232344 - DNA, 25 bp, Artificial
  Probe
ttttccccattgtatataaagtatc

SEQ ID NO: 232345 - DNA, 25 bp, Artificial
  Probe
tgctgttttcaacattgtatttgga

SEQ ID NO: 232346 - DNA, 25 bp, Artificial
  Probe
taaagtatcgcttaaaattgatata

SEQ ID NO: 232347 - DNA, 25 bp, Artificial
  Probe
tttttccccattgtatataaagtat

SEQ ID NO: 232348 - DNA, 25 bp, Artificial
  Probe
ttggactatgcatgtgtttttttcc

SEQ ID NO: 232349 - DNA, 25 bp, Artificial
  Probe
aaaatgctgttttcaacattgtatt

SEQ ID NO: 232350 - DNA, 25 bp, Artificial
  Probe
gactatgcatgtgtttttttcccca

SEQ ID NO: 232351 - DNA, 25 bp, Artificial
  Probe
tgcatgtgtttttttccccattgta

SEQ ID NO: 232352 - DNA, 25 bp, Artificial
  Probe
aatgctgttttcaacattgtatttg

SEQ ID NO: 232353 - DNA, 25 bp, Artificial
  Probe
catggtattaacacttagtgttcgg

SEQ ID NO: 232354 - DNA, 25 bp, Artificial
  Probe
gcatgtgtttttttccccattgtat

SEQ ID NO: 232355 - DNA, 25 bp, Artificial
  Probe
gaattcatgtacatggtattaacac

SEQ ID NO: 232356 - DNA, 25 bp, Artificial
  Probe
ataaagtatcgcttaaaattgatat

SEQ ID NO: 232357 - DNA, 25 bp, Artificial
  Probe
acattgtatttggactatgcatgtg

SEQ ID NO: 232358 - DNA, 25 bp, Artificial
  Probe
ggactatgcatgtgtttttttcccc

SEQ ID NO: 232359 - DNA, 25 bp, Artificial
  Probe
tgaattcatgtacatggtattaaca

SEQ ID NO: 232360 - DNA, 25 bp, Artificial
  Probe
actatgcatgtgtttttttccccat

SEQ ID NO: 232361 - DNA, 25 bp, Artificial
  Probe
attcatgtacatggtattaacactt

SEQ ID NO: 232362 - DNA, 25 bp, Artificial
  Probe
ttttcaacattgtatttggactatg

SEQ ID NO: 232363 - DNA, 25 bp, Artificial
  Probe
tttggactatgcatgtgtttttttc

SEQ ID NO: 232364 - DNA, 25 bp, Artificial
  Probe
ttccccattgtatataaagtatcgc

SEQ ID NO: 232365 - DNA, 25 bp, Artificial
  Probe
ttgtatttggactatgcatgtgttt

SEQ ID NO: 232366 - DNA, 25 bp, Artificial
  Probe
tatttggactatgcatgtgtttttt

SEQ ID NO: 232367 - DNA, 25 bp, Artificial
  Probe
atggtattaacacttagtgttcggg

SEQ ID NO: 232368 - DNA, 25 bp, Artificial
  Probe
tttccccattgtatataaagtatcg

SEQ ID NO: 232369 - DNA, 25 bp, Artificial
  Probe
ttgaattcatgtacatggtattaac

SEQ ID NO: 232370 - DNA, 25 bp, Artificial
  Probe
tggtattaacacttagtgttcgggg

SEQ ID NO: 232371 - DNA, 25 bp, Artificial
  Probe
ttcaacattgtatttggactatgca

SEQ ID NO: 232372 - DNA, 25 bp, Artificial
  Probe
aattcatgtacatggtattaacact

SEQ ID NO: 232373 - DNA, 25 bp, Artificial
  Probe
ctatgcatgtgtttttttccccatt

SEQ ID NO: 232374 - DNA, 25 bp, Artificial
  Probe
ctgttttcaacattgtatttggact

SEQ ID NO: 232375 - DNA, 25 bp, Artificial
  Probe
tcgcctgcagtgagcgtgagcaaat

SEQ ID NO: 232376 - DNA, 25 bp, Artificial
  Probe
gttcctctaaacgagcttcttcagc

SEQ ID NO: 232377 - DNA, 25 bp, Artificial
  Probe
tctctctgtggctcttgctgttcag

SEQ ID NO: 232378 - DNA, 25 bp, Artificial
  Probe
tagttgctcggcagggccagcatcg

SEQ ID NO: 232379 - DNA, 25 bp, Artificial
  Probe
ttgctgttcagctgccctcctgaac

SEQ ID NO: 232380 - DNA, 25 bp, Artificial
  Probe
cactcatgtatgagacttaggaagg

SEQ ID NO: 232381 - DNA, 25 bp, Artificial
  Probe
agaccttatgtctatgtgtgctagt

SEQ ID NO: 232382 - DNA, 25 bp, Artificial
  Probe
tgtggctcttgctgttcagctgccc

SEQ ID NO: 232383 - DNA, 25 bp, Artificial
  Probe
gtctatgtgtgctagttgctcggca

SEQ ID NO: 232384 - DNA, 25 bp, Artificial
  Probe
ctgtggctcttgctgttcagctgcc

SEQ ID NO: 232385 - DNA, 25 bp, Artificial
  Probe
tgttcctctaaacgagcttcttcag

SEQ ID NO: 232386 - DNA, 25 bp, Artificial
  Probe
tttctctgggtggacagaatgccag

SEQ ID NO: 232387 - DNA, 25 bp, Artificial
  Probe
tcttgctgttcagctgccctcctga

SEQ ID NO: 232388 - DNA, 25 bp, Artificial
  Probe
cagtgttcctacctcaggaataatc

SEQ ID NO: 232389 - DNA, 25 bp, Artificial
  Probe
gcccaggctggacctgcatacagtg

SEQ ID NO: 232390 - DNA, 25 bp, Artificial
  Probe
ctcaggaataatctctctctctgtg

SEQ ID NO: 232391 - DNA, 25 bp, Artificial
  Probe
tgttgggacagaagttgccgtcatt

SEQ ID NO: 232392 - DNA, 25 bp, Artificial
  Probe
gataccactgttcctctaaacgagc

SEQ ID NO: 232393 - DNA, 25 bp, Artificial
  Probe
ctttctctgggtggacagaatgcca

SEQ ID NO: 232394 - DNA, 25 bp, Artificial
  Probe
tctttctctgggtggacagaatgcc

SEQ ID NO: 232395 - DNA, 25 bp, Artificial
  Probe
ctatgtgtgctagttgctcggcagg

SEQ ID NO: 232396 - DNA, 25 bp, Artificial
  Probe
catcccactcatgtatgagacttag

SEQ ID NO: 232397 - DNA, 25 bp, Artificial
  Probe
gtgttcctacctcaggaataatctc

SEQ ID NO: 232398 - DNA, 25 bp, Artificial
  Probe
aatctgtctttctctgggtggacag

SEQ ID NO: 232399 - DNA, 25 bp, Artificial
  Probe
ctctctgtggctcttgctgttcagc

SEQ ID NO: 232400 - DNA, 25 bp, Artificial
  Probe
aagtttggagataccactgttcctc

SEQ ID NO: 232401 - DNA, 25 bp, Artificial
  Probe
cggcagggccagcatcgcctgcagt

SEQ ID NO: 232402 - DNA, 25 bp, Artificial
  Probe
tggccttggccagcttagaccttat

SEQ ID NO: 232403 - DNA, 25 bp, Artificial
  Probe
cctgcatacagtgttcctacctcag

SEQ ID NO: 232404 - DNA, 25 bp, Artificial
  Probe
cagaagttgccgtcatttccgggtt

SEQ ID NO: 232405 - DNA, 25 bp, Artificial
  Probe
cttagaccttatgtctatgtgtgct

SEQ ID NO: 232406 - DNA, 25 bp, Artificial
  Probe
atctctctctctgtggctcttgctg

SEQ ID NO: 232407 - DNA, 25 bp, Artificial
  Probe
tctctgggtggacagaatgccagga

SEQ ID NO: 232408 - DNA, 25 bp, Artificial
  Probe
tctgtctttctctgggtggacagaa

SEQ ID NO: 232409 - DNA, 25 bp, Artificial
  Probe
gccagcatcgcctgcagtgagcgtg

SEQ ID NO: 232410 - DNA, 25 bp, Artificial
  Probe
aaacgagcttcttcagcaacagccc

SEQ ID NO: 232411 - DNA, 25 bp, Artificial
  Probe
cgcccaggctggacctgcatacagt

SEQ ID NO: 232412 - DNA, 25 bp, Artificial
  Probe
ctgcagtgagcgtgagcaaatctgt

SEQ ID NO: 232413 - DNA, 25 bp, Artificial
  Probe
gaataatctctctctctgtggctct

SEQ ID NO: 232414 - DNA, 25 bp, Artificial
  Probe
ataatctctctctctgtggctcttg

SEQ ID NO: 232415 - DNA, 25 bp, Artificial
  Probe
gaagttgccgtcatttccgggttga

SEQ ID NO: 232416 - DNA, 25 bp, Artificial
  Probe
tctaaacgagcttcttcagcaacag

SEQ ID NO: 232417 - DNA, 25 bp, Artificial
  Probe
gacctgcatacagtgttcctacctc

SEQ ID NO: 232418 - DNA, 25 bp, Artificial
  Probe
tggacctgcatacagtgttcctacc

SEQ ID NO: 232419 - DNA, 25 bp, Artificial
  Probe
gttgccgtcatttccgggttgaaag

SEQ ID NO: 232420 - DNA, 25 bp, Artificial
  Probe
cgtgagcaaatctgtctttctctgg

SEQ ID NO: 232421 - DNA, 25 bp, Artificial
  Probe
tcgtacagtcttcataccgaacctg

SEQ ID NO: 232422 - DNA, 25 bp, Artificial
  Probe
tgccatatccgctctgcagagtcct

SEQ ID NO: 232423 - DNA, 25 bp, Artificial
  Probe
cgctctgcagagtcctgtgtcctgt

SEQ ID NO: 232424 - DNA, 25 bp, Artificial
  Probe
agtgactatgaaaccagtgaccacg

SEQ ID NO: 232425 - DNA, 25 bp, Artificial
  Probe
cagaatcctgtaaccacgaaaccag

SEQ ID NO: 232426 - DNA, 25 bp, Artificial
  Probe
gcttcctcgtacagtcttcataccg

SEQ ID NO: 232427 - DNA, 25 bp, Artificial
  Probe
gagaaggctgctatgactcttcgga

SEQ ID NO: 232428 - DNA, 25 bp, Artificial
  Probe
acagaagcggtggagactagcgctt

SEQ ID NO: 232429 - DNA, 25 bp, Artificial
  Probe
agtccagatcagaatgatgccatat

SEQ ID NO: 232430 - DNA, 25 bp, Artificial
  Probe
aagtgaccacagaatcaagtccaga

SEQ ID NO: 232431 - DNA, 25 bp, Artificial
  Probe
gtcttctgttatggatcctccttca

SEQ ID NO: 232432 - DNA, 25 bp, Artificial
  Probe
cctccttcaaggagggatgcatttt

SEQ ID NO: 232433 - DNA, 25 bp, Artificial
  Probe
agtcctgtgtcctgtcttctgttat

SEQ ID NO: 232434 - DNA, 25 bp, Artificial
  Probe
acgaaaccagtgactaccaaacaag

SEQ ID NO: 232435 - DNA, 25 bp, Artificial
  Probe
gactcttcggactagaattctttgg

SEQ ID NO: 232436 - DNA, 25 bp, Artificial
  Probe
cgaaaccagtgactatgaaaccagt

SEQ ID NO: 232437 - DNA, 25 bp, Artificial
  Probe
atcctccttcaaggagggatgcatt

SEQ ID NO: 232438 - DNA, 25 bp, Artificial
  Probe
caacagaagcggtggagactagcgc

SEQ ID NO: 232439 - DNA, 25 bp, Artificial
  Probe
tacagtcttcataccgaacctgtgg

SEQ ID NO: 232440 - DNA, 25 bp, Artificial
  Probe
acaagtgactacaaaacaagtgacc

SEQ ID NO: 232441 - DNA, 25 bp, Artificial
  Probe
atggatcctccttcaaggagggatg

SEQ ID NO: 232442 - DNA, 25 bp, Artificial
  Probe
cagtgaccacgaaaccagtgactac

SEQ ID NO: 232443 - DNA, 25 bp, Artificial
  Probe
agaatgatgccatatccgctctgca

SEQ ID NO: 232444 - DNA, 25 bp, Artificial
  Probe
aagcggtggagactagcgcttcctc

SEQ ID NO: 232445 - DNA, 25 bp, Artificial
  Probe
ggagactagcgcttcctcgtacagt

SEQ ID NO: 232446 - DNA, 25 bp, Artificial
  Probe
aaaccagtgaccacgaaaccagtga

SEQ ID NO: 232447 - DNA, 25 bp, Artificial
  Probe
cagagtcctgtgtcctgtcttctgt

SEQ ID NO: 232448 - DNA, 25 bp, Artificial
  Probe
aaaccagtgactatgaaaccagtga

SEQ ID NO: 232449 - DNA, 25 bp, Artificial
  Probe
gtcttcataccgaacctgtggacca

SEQ ID NO: 232450 - DNA, 25 bp, Artificial
  Probe
tgtgtcctgtcttctgttatggatc

SEQ ID NO: 232451 - DNA, 25 bp, Artificial
  Probe
ttcggactagaattctttggcaaga

SEQ ID NO: 232452 - DNA, 25 bp, Artificial
  Probe
aatgatgccatatccgctctgcaga

SEQ ID NO: 232453 - DNA, 25 bp, Artificial
  Probe
cttctgttatggatcctccttcaag

SEQ ID NO: 232454 - DNA, 25 bp, Artificial
  Probe
gaccatcagaatcctgtaaccacga

SEQ ID NO: 232455 - DNA, 25 bp, Artificial
  Probe
gactatgaaaccagtgaccacgaaa

SEQ ID NO: 232456 - DNA, 25 bp, Artificial
  Probe
gtgactaccaaacaagtgactacaa

SEQ ID NO: 232457 - DNA, 25 bp, Artificial
  Probe
agaagcggtggagactagcgcttcc

SEQ ID NO: 232458 - DNA, 25 bp, Artificial
  Probe
agtgactacaaaacaagtgaccaca

SEQ ID NO: 232459 - DNA, 25 bp, Artificial
  Probe
accagtgactatgaaaccagtgacc

SEQ ID NO: 232460 - DNA, 25 bp, Artificial
  Probe
tgctatgactcttcggactagaatt

SEQ ID NO: 232461 - DNA, 25 bp, Artificial
  Probe
taacaacaacagaagcggtggagac

SEQ ID NO: 232462 - DNA, 25 bp, Artificial
  Probe
gaccacgaaaccagtgactaccaaa

SEQ ID NO: 232463 - DNA, 25 bp, Artificial
  Probe
cctgtgtcctgtcttctgttatgga

SEQ ID NO: 232464 - DNA, 25 bp, Artificial
  Probe
aagtgactacaaaacaagtgaccac

SEQ ID NO: 232465 - DNA, 25 bp, Artificial
  Probe
tgaccacgaaaccagtgactaccaa

SEQ ID NO: 232466 - DNA, 25 bp, Artificial
  Probe
cggactagaattctttggcaagaat

SEQ ID NO: 232467 - DNA, 25 bp, Artificial
  Probe
gggcaaacgctggaagctgctcaag

SEQ ID NO: 232468 - DNA, 25 bp, Artificial
  Probe
gacgaccctagctggtgcaagacgc

SEQ ID NO: 232469 - DNA, 25 bp, Artificial
  Probe
caagatcatggagcagtcgcccgac

SEQ ID NO: 232470 - DNA, 25 bp, Artificial
  Probe
gccgagatctccaagcggctgggca

SEQ ID NO: 232471 - DNA, 25 bp, Artificial
  Probe
caacgccgagatctccaagcggctg

SEQ ID NO: 232472 - DNA, 25 bp, Artificial
  Probe
aacgctggaagctgctcaaggacag

SEQ ID NO: 232473 - DNA, 25 bp, Artificial
  Probe
acaacgccgagatctccaagcggct

SEQ ID NO: 232474 - DNA, 25 bp, Artificial
  Probe
acgctggaagctgctcaaggacagc

SEQ ID NO: 232475 - DNA, 25 bp, Artificial
  Probe
cggacgaccctagctggtgcaagac

SEQ ID NO: 232476 - DNA, 25 bp, Artificial
  Probe
ctgggcaaacgctggaagctgctca

SEQ ID NO: 232477 - DNA, 25 bp, Artificial
  Probe
gcaaacgctggaagctgctcaagga

SEQ ID NO: 232478 - DNA, 25 bp, Artificial
  Probe
tctccaagcggctgggcaaacgctg

SEQ ID NO: 232479 - DNA, 25 bp, Artificial
  Probe
ggcaaacgctggaagctgctcaagg

SEQ ID NO: 232480 - DNA, 25 bp, Artificial
  Probe
ccgagatctccaagcggctgggcaa

SEQ ID NO: 232481 - DNA, 25 bp, Artificial
  Probe
ctggaagctgctcaaggacagcgac

SEQ ID NO: 232482 - DNA, 25 bp, Artificial
  Probe
gatcatggagcagtcgcccgacatg

SEQ ID NO: 232483 - DNA, 25 bp, Artificial
  Probe
ctttatggtgtggtcgcagatcgag

SEQ ID NO: 232484 - DNA, 25 bp, Artificial
  Probe
atcgagcggcgcaagatcatggagc

SEQ ID NO: 232485 - DNA, 25 bp, Artificial
  Probe
ggacgaccctagctggtgcaagacg

SEQ ID NO: 232486 - DNA, 25 bp, Artificial
  Probe
tgtgagcgcgcgtgggcgcccggca

SEQ ID NO: 232487 - DNA, 25 bp, Artificial
  Probe
accctagctggtgcaagacgcccag

SEQ ID NO: 232488 - DNA, 25 bp, Artificial
  Probe
cgccgagatctccaagcggctgggc

SEQ ID NO: 232489 - DNA, 25 bp, Artificial
  Probe
tgggcaaacgctggaagctgctcaa

SEQ ID NO: 232490 - DNA, 25 bp, Artificial
  Probe
gcacaacgccgagatctccaagcgg

SEQ ID NO: 232491 - DNA, 25 bp, Artificial
  Probe
tcgagcggcgcaagatcatggagca

SEQ ID NO: 232492 - DNA, 25 bp, Artificial
  Probe
cacgggtggcaaggcggacgaccct

SEQ ID NO: 232493 - DNA, 25 bp, Artificial
  Probe
acgaccctagctggtgcaagacgcc

SEQ ID NO: 232494 - DNA, 25 bp, Artificial
  Probe
gaccctagctggtgcaagacgccca

SEQ ID NO: 232495 - DNA, 25 bp, Artificial
  Probe
caaacgctggaagctgctcaaggac

SEQ ID NO: 232496 - DNA, 25 bp, Artificial
  Probe
aagatcatggagcagtcgcccgaca

SEQ ID NO: 232497 - DNA, 25 bp, Artificial
  Probe
ctagctggtgcaagacgcccagtgg

SEQ ID NO: 232498 - DNA, 25 bp, Artificial
  Probe
agatcatggagcagtcgcccgacat

SEQ ID NO: 232499 - DNA, 25 bp, Artificial
  Probe
agcggcgcaagatcatggagcagtc

SEQ ID NO: 232500 - DNA, 25 bp, Artificial
  Probe
acgccgagatctccaagcggctggg

SEQ ID NO: 232501 - DNA, 25 bp, Artificial
  Probe
aacgccgagatctccaagcggctgg

SEQ ID NO: 232502 - DNA, 25 bp, Artificial
  Probe
atcatggagcagtcgcccgacatgc

SEQ ID NO: 232503 - DNA, 25 bp, Artificial
  Probe
cctagctggtgcaagacgcccagtg

SEQ ID NO: 232504 - DNA, 25 bp, Artificial
  Probe
cggcgcaagatcatggagcagtcgc

SEQ ID NO: 232505 - DNA, 25 bp, Artificial
  Probe
gcgcaagatcatggagcagtcgccc

SEQ ID NO: 232506 - DNA, 25 bp, Artificial
  Probe
ccctagctggtgcaagacgcccagt

SEQ ID NO: 232507 - DNA, 25 bp, Artificial
  Probe
gcggacgaccctagctggtgcaaga

SEQ ID NO: 232508 - DNA, 25 bp, Artificial
  Probe
tttatggtgtggtcgcagatcgagc

SEQ ID NO: 232509 - DNA, 25 bp, Artificial
  Probe
cgctggaagctgctcaaggacagcg

SEQ ID NO: 232510 - DNA, 25 bp, Artificial
  Probe
tgcacaacgccgagatctccaagcg

SEQ ID NO: 232511 - DNA, 25 bp, Artificial
  Probe
cctttatggtgtggtcgcagatcga

SEQ ID NO: 232512 - DNA, 25 bp, Artificial
  Probe
aaacgctggaagctgctcaaggaca

SEQ ID NO: 232513 - DNA, 25 bp, Artificial
  Probe
ggcagacagcggttctcagcaggtt

SEQ ID NO: 232514 - DNA, 25 bp, Artificial
  Probe
ccaggaccgtcttctagtctgacta

SEQ ID NO: 232515 - DNA, 25 bp, Artificial
  Probe
ttaatgccatttctaaacatgctgg

SEQ ID NO: 232516 - DNA, 25 bp, Artificial
  Probe
cctccaggaccgtcttctagtctga

SEQ ID NO: 232517 - DNA, 25 bp, Artificial
  Probe
tgccctgcctgcagggatgagaaga

SEQ ID NO: 232518 - DNA, 25 bp, Artificial
  Probe
ttctcctccaggaccgtcttctagt

SEQ ID NO: 232519 - DNA, 25 bp, Artificial
  Probe
atcatcagcaaagcaggaaataggt

SEQ ID NO: 232520 - DNA, 25 bp, Artificial
  Probe
tctactgcctgtgaggcattctttc

SEQ ID NO: 232521 - DNA, 25 bp, Artificial
  Probe
tcatcagcaaagcaggaaataggta

SEQ ID NO: 232522 - DNA, 25 bp, Artificial
  Probe
ggaactaggactcgtcctgtggacg

SEQ ID NO: 232523 - DNA, 25 bp, Artificial
  Probe
ggcctgtgctagtgccctgcctgca

SEQ ID NO: 232524 - DNA, 25 bp, Artificial
  Probe
gtatctactgcctgtgaggcattct

SEQ ID NO: 232525 - DNA, 25 bp, Artificial
  Probe
ggttctcctccaggaccgtcttcta

SEQ ID NO: 232526 - DNA, 25 bp, Artificial
  Probe
ttctagtctgactagatgtctgact

SEQ ID NO: 232527 - DNA, 25 bp, Artificial
  Probe
tcagcaggttctcctccaggaccgt

SEQ ID NO: 232528 - DNA, 25 bp, Artificial
  Probe
gaagacgggatgctgacgagccttt

SEQ ID NO: 232529 - DNA, 25 bp, Artificial
  Probe
acagcggttctcagcaggttctcct

SEQ ID NO: 232530 - DNA, 25 bp, Artificial
  Probe
gcggttctcagcaggttctcctcca

SEQ ID NO: 232531 - DNA, 25 bp, Artificial
  Probe
ggcattctttcctttctcttgtaag

SEQ ID NO: 232532 - DNA, 25 bp, Artificial
  Probe
taatgccatttctaaacatgctggg

SEQ ID NO: 232533 - DNA, 25 bp, Artificial
  Probe
tggaactaggactcgtcctgtggac

SEQ ID NO: 232534 - DNA, 25 bp, Artificial
  Probe
gcctgtgaggcattctttcctttct

SEQ ID NO: 232535 - DNA, 25 bp, Artificial
  Probe
tgccatttctaaacatgctgggttt

SEQ ID NO: 232536 - DNA, 25 bp, Artificial
  Probe
cattgtatctactgcctgtgaggca

SEQ ID NO: 232537 - DNA, 25 bp, Artificial
  Probe
aaactgatctggttctttccaccgt

SEQ ID NO: 232538 - DNA, 25 bp, Artificial
  Probe
catttctaaacatgctgggttttgg

SEQ ID NO: 232539 - DNA, 25 bp, Artificial
  Probe
agccattgtatctactgcctgtgag

SEQ ID NO: 232540 - DNA, 25 bp, Artificial
  Probe
taaatgatatcatcagcaaagcagg

SEQ ID NO: 232541 - DNA, 25 bp, Artificial
  Probe
ttctcagcaggttctcctccaggac

SEQ ID NO: 232542 - DNA, 25 bp, Artificial
  Probe
atggaactaggactcgtcctgtgga

SEQ ID NO: 232543 - DNA, 25 bp, Artificial
  Probe
gaggcattctttcctttctcttgta

SEQ ID NO: 232544 - DNA, 25 bp, Artificial
  Probe
gtgctagtgccctgcctgcagggat

SEQ ID NO: 232545 - DNA, 25 bp, Artificial
  Probe
ctactgcctgtgaggcattctttcc

SEQ ID NO: 232546 - DNA, 25 bp, Artificial
  Probe
gaggcctgtgctagtgccctgcctg

SEQ ID NO: 232547 - DNA, 25 bp, Artificial
  Probe
cggttctcagcaggttctcctccag

SEQ ID NO: 232548 - DNA, 25 bp, Artificial
  Probe
agaagacgggatgctgacgagcctt

SEQ ID NO: 232549 - DNA, 25 bp, Artificial
  Probe
ctgatctggttctttccaccgtctt

SEQ ID NO: 232550 - DNA, 25 bp, Artificial
  Probe
atatcatcagcaaagcaggaaatag

SEQ ID NO: 232551 - DNA, 25 bp, Artificial
  Probe
gtgaggcattctttcctttctcttg

SEQ ID NO: 232552 - DNA, 25 bp, Artificial
  Probe
agacagcggttctcagcaggttctc

SEQ ID NO: 232553 - DNA, 25 bp, Artificial
  Probe
caccagccattgtatctactgcctg

SEQ ID NO: 232554 - DNA, 25 bp, Artificial
  Probe
tcatggaactaggactcgtcctgtg

SEQ ID NO: 232555 - DNA, 25 bp, Artificial
  Probe
gcagacagcggttctcagcaggttc

SEQ ID NO: 232556 - DNA, 25 bp, Artificial
  Probe
agtgccctgcctgcagggatgagaa

SEQ ID NO: 232557 - DNA, 25 bp, Artificial
  Probe
actcgtcctgtggacgcctctgctt

SEQ ID NO: 232558 - DNA, 25 bp, Artificial
  Probe
ttcgggaggcctgtgctagtgccct

SEQ ID NO: 232559 - DNA, 25 bp, Artificial
  Probe
aggactgagaccactctggaaagaa

SEQ ID NO: 232560 - DNA, 25 bp, Artificial
  Probe
agagagcatggtcctgacccagagc

SEQ ID NO: 232561 - DNA, 25 bp, Artificial
  Probe
cactctggaaagaagcagggtgggg

SEQ ID NO: 232562 - DNA, 25 bp, Artificial
  Probe
acaggcctggtgtggccagcgtccc

SEQ ID NO: 232563 - DNA, 25 bp, Artificial
  Probe
accactctggaaagaagcagggtgg

SEQ ID NO: 232564 - DNA, 25 bp, Artificial
  Probe
cagagagcatggtcctgacccagag

SEQ ID NO: 232565 - DNA, 25 bp, Artificial
  Probe
accactgcagaggactgcctgcggc

SEQ ID NO: 232566 - DNA, 25 bp, Artificial
  Probe
agccaccactgcagaggactgcctg

SEQ ID NO: 232567 - DNA, 25 bp, Artificial
  Probe
ctgagaccactctggaaagaagcag

SEQ ID NO: 232568 - DNA, 25 bp, Artificial
  Probe
cagaggccggatggtgcctcagact

SEQ ID NO: 232569 - DNA, 25 bp, Artificial
  Probe
agacccaggcagagagcatggtcct

SEQ ID NO: 232570 - DNA, 25 bp, Artificial
  Probe
agagcatggtcctgacccagagccc

SEQ ID NO: 232571 - DNA, 25 bp, Artificial
  Probe
ccagacccaggcagagagcatggtc

SEQ ID NO: 232572 - DNA, 25 bp, Artificial
  Probe
cagagccccccggggaaggactgag

SEQ ID NO: 232573 - DNA, 25 bp, Artificial
  Probe
gacccaggcagagagcatggtcctg

SEQ ID NO: 232574 - DNA, 25 bp, Artificial
  Probe
ccagaggccggatggtgcctcagac

SEQ ID NO: 232575 - DNA, 25 bp, Artificial
  Probe
gcctggctccgatttttagataccc

SEQ ID NO: 232576 - DNA, 25 bp, Artificial
  Probe
cagacccaggcagagagcatggtcc

SEQ ID NO: 232577 - DNA, 25 bp, Artificial
  Probe
gagaccactctggaaagaagcaggg

SEQ ID NO: 232578 - DNA, 25 bp, Artificial
  Probe
tttctctccttttcttttcttcaat

SEQ ID NO: 232579 - DNA, 25 bp, Artificial
  Probe
actgagaccactctggaaagaagca

SEQ ID NO: 232580 - DNA, 25 bp, Artificial
  Probe
acccaggcagagagcatggtcctga

SEQ ID NO: 232581 - DNA, 25 bp, Artificial
  Probe
ggactgagaccactctggaaagaag

SEQ ID NO: 232582 - DNA, 25 bp, Artificial
  Probe
agaccactctggaaagaagcagggt

SEQ ID NO: 232583 - DNA, 25 bp, Artificial
  Probe
gaggccggatggtgcctcagactct

SEQ ID NO: 232584 - DNA, 25 bp, Artificial
  Probe
cacaggaatccagaggccggatggt

SEQ ID NO: 232585 - DNA, 25 bp, Artificial
  Probe
actgcagaggactgcctgcggccca

SEQ ID NO: 232586 - DNA, 25 bp, Artificial
  Probe
gactgagaccactctggaaagaagc

SEQ ID NO: 232587 - DNA, 25 bp, Artificial
  Probe
cctcccagacccaggcagagagcat

SEQ ID NO: 232588 - DNA, 25 bp, Artificial
  Probe
aggcagagagcatggtcctgaccca

SEQ ID NO: 232589 - DNA, 25 bp, Artificial
  Probe
cggatggtgcctcagactctgccct

SEQ ID NO: 232590 - DNA, 25 bp, Artificial
  Probe
ggcagagagcatggtcctgacccag

SEQ ID NO: 232591 - DNA, 25 bp, Artificial
  Probe
ttgggcaaccccgggcaggcaggca

SEQ ID NO: 232592 - DNA, 25 bp, Artificial
  Probe
tccagaggccggatggtgcctcaga

SEQ ID NO: 232593 - DNA, 25 bp, Artificial
  Probe
agaggccggatggtgcctcagactc

SEQ ID NO: 232594 - DNA, 25 bp, Artificial
  Probe
gtgtggccagcgtccccaggatgcc

SEQ ID NO: 232595 - DNA, 25 bp, Artificial
  Probe
caccagcctggctccgatttttaga

SEQ ID NO: 232596 - DNA, 25 bp, Artificial
  Probe
ggatggtgcctcagactctgccctc

SEQ ID NO: 232597 - DNA, 25 bp, Artificial
  Probe
cccaggcagagagcatggtcctgac

SEQ ID NO: 232598 - DNA, 25 bp, Artificial
  Probe
gaaggactgagaccactctggaaag

SEQ ID NO: 232599 - DNA, 25 bp, Artificial
  Probe
gaccactctggaaagaagcagggtg

SEQ ID NO: 232600 - DNA, 25 bp, Artificial
  Probe
gagagcatggtcctgacccagagcc

SEQ ID NO: 232601 - DNA, 25 bp, Artificial
  Probe
agcctggctccgatttttagatacc

SEQ ID NO: 232602 - DNA, 25 bp, Artificial
  Probe
tgagaccactctggaaagaagcagg

SEQ ID NO: 232603 - DNA, 25 bp, Artificial
  Probe
cagcctggctccgatttttagatac

SEQ ID NO: 232604 - DNA, 25 bp, Artificial
  Probe
aaggactgagaccactctggaaaga

SEQ ID NO: 232605 - DNA, 25 bp, Artificial
  Probe
ctaatcagaaaacaacagtttgatg

SEQ ID NO: 232606 - DNA, 25 bp, Artificial
  Probe
gttcccacactgtcttgattgactt

SEQ ID NO: 232607 - DNA, 25 bp, Artificial
  Probe
acagtttgatgatttccccctagag

SEQ ID NO: 232608 - DNA, 25 bp, Artificial
  Probe
taataatgatgaccacctcaactgg

SEQ ID NO: 232609 - DNA, 25 bp, Artificial
  Probe
taacgttcccacactgtcttgattg

SEQ ID NO: 232610 - DNA, 25 bp, Artificial
  Probe
actgaggtttcactttatatctaag

SEQ ID NO: 232611 - DNA, 25 bp, Artificial
  Probe
ctgtatagctgtgacactgtatatt

SEQ ID NO: 232612 - DNA, 25 bp, Artificial
  Probe
ctgtgatgcccgaggcttattcttc

SEQ ID NO: 232613 - DNA, 25 bp, Artificial
  Probe
aaactgtatagctgtgacactgtat

SEQ ID NO: 232614 - DNA, 25 bp, Artificial
  Probe
gccaatactagataagccactaagt

SEQ ID NO: 232615 - DNA, 25 bp, Artificial
  Probe
cttattcttctggagtagtttctca

SEQ ID NO: 232616 - DNA, 25 bp, Artificial
  Probe
aggcttattcttctggagtagtttc

SEQ ID NO: 232617 - DNA, 25 bp, Artificial
  Probe
aactgtatagctgtgacactgtata

SEQ ID NO: 232618 - DNA, 25 bp, Artificial
  Probe
gaggtttcactttatatctaagtca

SEQ ID NO: 232619 - DNA, 25 bp, Artificial
  Probe
ttctggagtagtttctcatctcctt

SEQ ID NO: 232620 - DNA, 25 bp, Artificial
  Probe
gtaaaccctgtctgcaaaactgtat

SEQ ID NO: 232621 - DNA, 25 bp, Artificial
  Probe
acactgtatattgtacatgtgtaca

SEQ ID NO: 232622 - DNA, 25 bp, Artificial
  Probe
aaaccctgtctgcaaaactgtatag

SEQ ID NO: 232623 - DNA, 25 bp, Artificial
  Probe
agagacagactgcaaacatgacctg

SEQ ID NO: 232624 - DNA, 25 bp, Artificial
  Probe
ttatatctaagtcatgctgtttctg

SEQ ID NO: 232625 - DNA, 25 bp, Artificial
  Probe
cgaggcttattcttctggagtagtt

SEQ ID NO: 232626 - DNA, 25 bp, Artificial
  Probe
tctgcaaaactgtatagctgtgaca

SEQ ID NO: 232627 - DNA, 25 bp, Artificial
  Probe
gacttcctgtgatgcccgaggctta

SEQ ID NO: 232628 - DNA, 25 bp, Artificial
  Probe
ctgtgacactgtatattgtacatgt

SEQ ID NO: 232629 - DNA, 25 bp, Artificial
  Probe
catctcctttggaggaagatgatga

SEQ ID NO: 232630 - DNA, 25 bp, Artificial
  Probe
gatgcccgaggcttattcttctgga

SEQ ID NO: 232631 - DNA, 25 bp, Artificial
  Probe
tattcttctggagtagtttctcatc

SEQ ID NO: 232632 - DNA, 25 bp, Artificial
  Probe
ctggtatttcacttacaacttttgg

SEQ ID NO: 232633 - DNA, 25 bp, Artificial
  Probe
gaccacctcaactggttagtaaaat

SEQ ID NO: 232634 - DNA, 25 bp, Artificial
  Probe
agccaatactagataagccactaag

SEQ ID NO: 232635 - DNA, 25 bp, Artificial
  Probe
cactgtatattgtacatgtgtacat

SEQ ID NO: 232636 - DNA, 25 bp, Artificial
  Probe
aacatgacctgcactttgactgtac

SEQ ID NO: 232637 - DNA, 25 bp, Artificial
  Probe
gtactgaggtttcactttatatcta

SEQ ID NO: 232638 - DNA, 25 bp, Artificial
  Probe
ggtttcactttatatctaagtcatg

SEQ ID NO: 232639 - DNA, 25 bp, Artificial
  Probe
tggagtagtttctcatctcctttgg

SEQ ID NO: 232640 - DNA, 25 bp, Artificial
  Probe
ctgaagcagcttcctagtttgtaaa

SEQ ID NO: 232641 - DNA, 25 bp, Artificial
  Probe
ccacactgtcttgattgacttcctg

SEQ ID NO: 232642 - DNA, 25 bp, Artificial
  Probe
ttctcatctcctttggaggaagatg

SEQ ID NO: 232643 - DNA, 25 bp, Artificial
  Probe
agtcatgctgtttctgaagcagctt

SEQ ID NO: 232644 - DNA, 25 bp, Artificial
  Probe
caaacatgacctgcactttgactgt

SEQ ID NO: 232645 - DNA, 25 bp, Artificial
  Probe
gtaagtaaaccctgtctgcaaaact

SEQ ID NO: 232646 - DNA, 25 bp, Artificial
  Probe
agtttgatgatttccccctagagtc

SEQ ID NO: 232647 - DNA, 25 bp, Artificial
  Probe
atagctgtgacactgtatattgtac

SEQ ID NO: 232648 - DNA, 25 bp, Artificial
  Probe
ccgaggcttattcttctggagtagt

SEQ ID NO: 232649 - DNA, 25 bp, Artificial
  Probe
tgtttctgaagcagcttcctagttt

SEQ ID NO: 232650 - DNA, 25 bp, Artificial
  Probe
ataatgatgaccacctcaactggtt

SEQ ID NO: 232651 - DNA, 25 bp, Artificial
  Probe
cccttgtgttctctctgaaaacgga

SEQ ID NO: 232652 - DNA, 25 bp, Artificial
  Probe
tcgcacataagcaggtacattttga

SEQ ID NO: 232653 - DNA, 25 bp, Artificial
  Probe
gaccccttgtgttctctctgaaaac

SEQ ID NO: 232654 - DNA, 25 bp, Artificial
  Probe
gcattcactggcagaattcttaaac

SEQ ID NO: 232655 - DNA, 25 bp, Artificial
  Probe
ttctctctgaaaacggaaatggtgg

SEQ ID NO: 232656 - DNA, 25 bp, Artificial
  Probe
aatcgcacataagcaggtacatttt

SEQ ID NO: 232657 - DNA, 25 bp, Artificial
  Probe
aagtctttatccagaagtcacgcct

SEQ ID NO: 232658 - DNA, 25 bp, Artificial
  Probe
ctctgaagcctatttggggtgatct

SEQ ID NO: 232659 - DNA, 25 bp, Artificial
  Probe
tgctcagctttaatcgcacataagc

SEQ ID NO: 232660 - DNA, 25 bp, Artificial
  Probe
agctttaatcgcacataagcaggta

SEQ ID NO: 232661 - DNA, 25 bp, Artificial
  Probe
gcctgactctgaagcctatttgggg

SEQ ID NO: 232662 - DNA, 25 bp, Artificial
  Probe
cttccagcctgactctgaagcctat

SEQ ID NO: 232663 - DNA, 25 bp, Artificial
  Probe
ggggtgatcttctgaccccttgtgt

SEQ ID NO: 232664 - DNA, 25 bp, Artificial
  Probe
gctcagctttaatcgcacataagca

SEQ ID NO: 232665 - DNA, 25 bp, Artificial
  Probe
cagcctgactctgaagcctatttgg

SEQ ID NO: 232666 - DNA, 25 bp, Artificial
  Probe
tcatgtatggccttttgtctagtaa

SEQ ID NO: 232667 - DNA, 25 bp, Artificial
  Probe
gaaagcattcactggcagaattctt

SEQ ID NO: 232668 - DNA, 25 bp, Artificial
  Probe
tatttggggtgatcttctgacccct

SEQ ID NO: 232669 - DNA, 25 bp, Artificial
  Probe
cgcacataagcaggtacattttgaa

SEQ ID NO: 232670 - DNA, 25 bp, Artificial
  Probe
tctgaccccttgtgttctctctgaa

SEQ ID NO: 232671 - DNA, 25 bp, Artificial
  Probe
cctatttggggtgatcttctgaccc

SEQ ID NO: 232672 - DNA, 25 bp, Artificial
  Probe
tggtggaaagcattcactggcagaa

SEQ ID NO: 232673 - DNA, 25 bp, Artificial
  Probe
actctgaagcctatttggggtgatc

SEQ ID NO: 232674 - DNA, 25 bp, Artificial
  Probe
tatggccttttgtctagtaaacttt

SEQ ID NO: 232675 - DNA, 25 bp, Artificial
  Probe
gtctttatccagaagtcacgcctca

SEQ ID NO: 232676 - DNA, 25 bp, Artificial
  Probe
tgtgttctctctgaaaacggaaatg

SEQ ID NO: 232677 - DNA, 25 bp, Artificial
  Probe
ttaatcgcacataagcaggtacatt

SEQ ID NO: 232678 - DNA, 25 bp, Artificial
  Probe
aagacctgtggacaaggctttaggc

SEQ ID NO: 232679 - DNA, 25 bp, Artificial
  Probe
cttctgaccccttgtgttctctctg

SEQ ID NO: 232680 - DNA, 25 bp, Artificial
  Probe
ctgaagcctatttggggtgatcttc

SEQ ID NO: 232681 - DNA, 25 bp, Artificial
  Probe
ttccagcctgactctgaagcctatt

SEQ ID NO: 232682 - DNA, 25 bp, Artificial
  Probe
ccaagtctttatccagaagtcacgc

SEQ ID NO: 232683 - DNA, 25 bp, Artificial
  Probe
cacataagcaggtacattttgaaga

SEQ ID NO: 232684 - DNA, 25 bp, Artificial
  Probe
tgtatggccttttgtctagtaaact

SEQ ID NO: 232685 - DNA, 25 bp, Artificial
  Probe
ctttaatcgcacataagcaggtaca

SEQ ID NO: 232686 - DNA, 25 bp, Artificial
  Probe
gactctgaagcctatttggggtgat

SEQ ID NO: 232687 - DNA, 25 bp, Artificial
  Probe
tggaaagcattcactggcagaattc

SEQ ID NO: 232688 - DNA, 25 bp, Artificial
  Probe
tggccttttgtctagtaaactttgc

SEQ ID NO: 232689 - DNA, 25 bp, Artificial
  Probe
gcctatttggggtgatcttctgacc

SEQ ID NO: 232690 - DNA, 25 bp, Artificial
  Probe
accccttgtgttctctctgaaaacg

SEQ ID NO: 232691 - DNA, 25 bp, Artificial
  Probe
cttgtgttctctctgaaaacggaaa

SEQ ID NO: 232692 - DNA, 25 bp, Artificial
  Probe
ggtgatcttctgaccccttgtgttc

SEQ ID NO: 232693 - DNA, 25 bp, Artificial
  Probe
gttctctctgaaaacggaaatggtg

SEQ ID NO: 232694 - DNA, 25 bp, Artificial
  Probe
gggtgatcttctgaccccttgtgtt

SEQ ID NO: 232695 - DNA, 25 bp, Artificial
  Probe
gccttttgtctagtaaactttgctt

SEQ ID NO: 232696 - DNA, 25 bp, Artificial
  Probe
tttggggtgatcttctgaccccttg

SEQ ID NO: 232697 - DNA, 25 bp, Artificial
  Probe
aaatgcttgtgtgctacttctgttc

SEQ ID NO: 232698 - DNA, 25 bp, Artificial
  Probe
taaatcatctgaaatgaagtctgca

SEQ ID NO: 232699 - DNA, 25 bp, Artificial
  Probe
ttctcctagcttaggtccttgactg

SEQ ID NO: 232700 - DNA, 25 bp, Artificial
  Probe
gcctctaattcctgctttgctgtgt

SEQ ID NO: 232701 - DNA, 25 bp, Artificial
  Probe
taggtccttgactgtcacagagtaa

SEQ ID NO: 232702 - DNA, 25 bp, Artificial
  Probe
agcaaaggcctctgagggcacagct

SEQ ID NO: 232703 - DNA, 25 bp, Artificial
  Probe
ttagcattctccacggacgcatggg

SEQ ID NO: 232704 - DNA, 25 bp, Artificial
  Probe
tgagggcacagctttagcattctcc

SEQ ID NO: 232705 - DNA, 25 bp, Artificial
  Probe
gcctctgagggcacagctttagcat

SEQ ID NO: 232706 - DNA, 25 bp, Artificial
  Probe
gcaagctgtcaccagcagaaaagac

SEQ ID NO: 232707 - DNA, 25 bp, Artificial
  Probe
tgagagcctctaattcctgctttgc

SEQ ID NO: 232708 - DNA, 25 bp, Artificial
  Probe
aggtccttgactgtcacagagtaaa

SEQ ID NO: 232709 - DNA, 25 bp, Artificial
  Probe
caaaggcctctgagggcacagcttt

SEQ ID NO: 232710 - DNA, 25 bp, Artificial
  Probe
aaagcaaaggcctctgagggcacag

SEQ ID NO: 232711 - DNA, 25 bp, Artificial
  Probe
gcttagatgtctctgggacttagga

SEQ ID NO: 232712 - DNA, 25 bp, Artificial
  Probe
ctaattcctgctttgctgtgtgcaa

SEQ ID NO: 232713 - DNA, 25 bp, Artificial
  Probe
caaatgcttgtgtgctacttctgtt

SEQ ID NO: 232714 - DNA, 25 bp, Artificial
  Probe
ctttagcattctccacggacgcatg

SEQ ID NO: 232715 - DNA, 25 bp, Artificial
  Probe
cttctgagagcctctaattcctgct

SEQ ID NO: 232716 - DNA, 25 bp, Artificial
  Probe
cttagatgtctctgggacttaggag

SEQ ID NO: 232717 - DNA, 25 bp, Artificial
  Probe
tagcttaggtccttgactgtcacag

SEQ ID NO: 232718 - DNA, 25 bp, Artificial
  Probe
acagcaagctgtcaccagcagaaaa

SEQ ID NO: 232719 - DNA, 25 bp, Artificial
  Probe
caagctgtcaccagcagaaaagact

SEQ ID NO: 232720 - DNA, 25 bp, Artificial
  Probe
gagcctctaattcctgctttgctgt

SEQ ID NO: 232721 - DNA, 25 bp, Artificial
  Probe
ctctgggacttaggaggactctctg

SEQ ID NO: 232722 - DNA, 25 bp, Artificial
  Probe
cttgactgtcacagagtaaatcatc

SEQ ID NO: 232723 - DNA, 25 bp, Artificial
  Probe
gcaaagtactctcaatgatattttg

SEQ ID NO: 232724 - DNA, 25 bp, Artificial
  Probe
gggagcttagatgtctctgggactt

SEQ ID NO: 232725 - DNA, 25 bp, Artificial
  Probe
gactgtcacagagtaaatcatctga

SEQ ID NO: 232726 - DNA, 25 bp, Artificial
  Probe
gaagtctgcaaagtactctcaatga

SEQ ID NO: 232727 - DNA, 25 bp, Artificial
  Probe
gctctgttacattctcctagcttag

SEQ ID NO: 232728 - DNA, 25 bp, Artificial
  Probe
gcttgtgtgctacttctgttcctcc

SEQ ID NO: 232729 - DNA, 25 bp, Artificial
  Probe
gctttgctgtgtgcaatctgtcagc

SEQ ID NO: 232730 - DNA, 25 bp, Artificial
  Probe
tacattctcctagcttaggtccttg

SEQ ID NO: 232731 - DNA, 25 bp, Artificial
  Probe
gctgtgtgcaatctgtcagctacga

SEQ ID NO: 232732 - DNA, 25 bp, Artificial
  Probe
cgcatgggccctctactggggctca

SEQ ID NO: 232733 - DNA, 25 bp, Artificial
  Probe
gttacattctcctagcttaggtcct

SEQ ID NO: 232734 - DNA, 25 bp, Artificial
  Probe
ctgagggcacagctttagcattctc

SEQ ID NO: 232735 - DNA, 25 bp, Artificial
  Probe
acgcatgggccctctactggggctc

SEQ ID NO: 232736 - DNA, 25 bp, Artificial
  Probe
gatgtctctgggacttaggaggact

SEQ ID NO: 232737 - DNA, 25 bp, Artificial
  Probe
atcatctgaaatgaagtctgcaaag

SEQ ID NO: 232738 - DNA, 25 bp, Artificial
  Probe
atctcgtcatgacaaatgcttgtgt

SEQ ID NO: 232739 - DNA, 25 bp, Artificial
  Probe
gacaaatgcttgtgtgctacttctg

SEQ ID NO: 232740 - DNA, 25 bp, Artificial
  Probe
atgacaaatgcttgtgtgctacttc

SEQ ID NO: 232741 - DNA, 25 bp, Artificial
  Probe
gtcatgacaaatgcttgtgtgctac

SEQ ID NO: 232742 - DNA, 25 bp, Artificial
  Probe
gtctgcaaagtactctcaatgatat

SEQ ID NO: 232743 - DNA, 25 bp, Artificial
  Probe
gtagaactgttcatttccacccagg

SEQ ID NO: 232744 - DNA, 25 bp, Artificial
  Probe
tgtgaagcaccaaatatcaatagtt

SEQ ID NO: 232745 - DNA, 25 bp, Artificial
  Probe
actgttcatttccacccagggtatc

SEQ ID NO: 232746 - DNA, 25 bp, Artificial
  Probe
cttctgcttgtgaagcaccaaatat

SEQ ID NO: 232747 - DNA, 25 bp, Artificial
  Probe
tcatttccacccagggtatctgctg

SEQ ID NO: 232748 - DNA, 25 bp, Artificial
  Probe
gtgcttctgcttgtgaagcaccaaa

SEQ ID NO: 232749 - DNA, 25 bp, Artificial
  Probe
ttctgcttgtgaagcaccaaatatc

SEQ ID NO: 232750 - DNA, 25 bp, Artificial
  Probe
ccatctagtggaagggatgtgcttc

SEQ ID NO: 232751 - DNA, 25 bp, Artificial
  Probe
gaactgttcatttccacccagggta

SEQ ID NO: 232752 - DNA, 25 bp, Artificial
  Probe
tcccacaaagcacttctgtgctgtt

SEQ ID NO: 232753 - DNA, 25 bp, Artificial
  Probe
agggatgtgcttctgcttgtgaagc

SEQ ID NO: 232754 - DNA, 25 bp, Artificial
  Probe
tttccatctagtggaagggatgtgc

SEQ ID NO: 232755 - DNA, 25 bp, Artificial
  Probe
ttctgtgctgtttccatctagtgga

SEQ ID NO: 232756 - DNA, 25 bp, Artificial
  Probe
tcctgaattttctatgtagaactgt

SEQ ID NO: 232757 - DNA, 25 bp, Artificial
  Probe
agaactgtcccacaaagcacttctg

SEQ ID NO: 232758 - DNA, 25 bp, Artificial
  Probe
gcttctgcttgtgaagcaccaaata

SEQ ID NO: 232759 - DNA, 25 bp, Artificial
  Probe
tgtgctgtttccatctagtggaagg

SEQ ID NO: 232760 - DNA, 25 bp, Artificial
  Probe
gtgaagcaccaaatatcaatagtta

SEQ ID NO: 232761 - DNA, 25 bp, Artificial
  Probe
gtaagattcacagaaacctgatcat

SEQ ID NO: 232762 - DNA, 25 bp, Artificial
  Probe
ggatgtgcttctgcttgtgaagcac

SEQ ID NO: 232763 - DNA, 25 bp, Artificial
  Probe
ttccatctagtggaagggatgtgct

SEQ ID NO: 232764 - DNA, 25 bp, Artificial
  Probe
ttgtgaagcaccaaatatcaatagt

SEQ ID NO: 232765 - DNA, 25 bp, Artificial
  Probe
ctgtttccatctagtggaagggatg

SEQ ID NO: 232766 - DNA, 25 bp, Artificial
  Probe
cacccagggtatctgctgcctctga

SEQ ID NO: 232767 - DNA, 25 bp, Artificial
  Probe
tgctgtttccatctagtggaaggga

SEQ ID NO: 232768 - DNA, 25 bp, Artificial
  Probe
ctgttcatttccacccagggtatct

SEQ ID NO: 232769 - DNA, 25 bp, Artificial
  Probe
ttcctgaattttctatgtagaactg

SEQ ID NO: 232770 - DNA, 25 bp, Artificial
  Probe
ctgtgctgtttccatctagtggaag

SEQ ID NO: 232771 - DNA, 25 bp, Artificial
  Probe
tgtcccacaaagcacttctgtgctg

SEQ ID NO: 232772 - DNA, 25 bp, Artificial
  Probe
gcaatcatagaactgtcccacaaag

SEQ ID NO: 232773 - DNA, 25 bp, Artificial
  Probe
caaagcacttctgtgctgtttccat

SEQ ID NO: 232774 - DNA, 25 bp, Artificial
  Probe
cacaaagcacttctgtgctgtttcc

SEQ ID NO: 232775 - DNA, 25 bp, Artificial
  Probe
gaactgtcccacaaagcacttctgt

SEQ ID NO: 232776 - DNA, 25 bp, Artificial
  Probe
cagggtatctgctgcctctgaaaat

SEQ ID NO: 232777 - DNA, 25 bp, Artificial
  Probe
acttctgtgctgtttccatctagtg

SEQ ID NO: 232778 - DNA, 25 bp, Artificial
  Probe
cccagggtatctgctgcctctgaaa

SEQ ID NO: 232779 - DNA, 25 bp, Artificial
  Probe
ccacaaagcacttctgtgctgtttc

SEQ ID NO: 232780 - DNA, 25 bp, Artificial
  Probe
gatgtgcttctgcttgtgaagcacc

SEQ ID NO: 232781 - DNA, 25 bp, Artificial
  Probe
tgtagaactgttcatttccacccag

SEQ ID NO: 232782 - DNA, 25 bp, Artificial
  Probe
ctgcttgtgaagcaccaaatatcaa

SEQ ID NO: 232783 - DNA, 25 bp, Artificial
  Probe
actgtcccacaaagcacttctgtgc

SEQ ID NO: 232784 - DNA, 25 bp, Artificial
  Probe
agcacttctgtgctgtttccatcta

SEQ ID NO: 232785 - DNA, 25 bp, Artificial
  Probe
agattcacagaaacctgatcattga

SEQ ID NO: 232786 - DNA, 25 bp, Artificial
  Probe
aagattcacagaaacctgatcattg

SEQ ID NO: 232787 - DNA, 25 bp, Artificial
  Probe
gcttgtgaagcaccaaatatcaata

SEQ ID NO: 232788 - DNA, 25 bp, Artificial
  Probe
aaagcacttctgtgctgtttccatc

SEQ ID NO: 232789 - DNA, 25 bp, Artificial
  Probe
tgttcaaatccaagcaggcccagaa

SEQ ID NO: 232790 - DNA, 25 bp, Artificial
  Probe
ctgctctgctaatgataattgtcaa

SEQ ID NO: 232791 - DNA, 25 bp, Artificial
  Probe
cctgctctgctaatgataattgtca

SEQ ID NO: 232792 - DNA, 25 bp, Artificial
  Probe
tggcctgctctgctaatgataattg

SEQ ID NO: 232793 - DNA, 25 bp, Artificial
  Probe
gaagactcacccatcacggatggca

SEQ ID NO: 232794 - DNA, 25 bp, Artificial
  Probe
tcacggatggcaccattccctgggt

SEQ ID NO: 232795 - DNA, 25 bp, Artificial
  Probe
ttcaaggtccccatattaagagttt

SEQ ID NO: 232796 - DNA, 25 bp, Artificial
  Probe
ggcctgctctgctaatgataattgt

SEQ ID NO: 232797 - DNA, 25 bp, Artificial
  Probe
catggcctgctctgctaatgataat

SEQ ID NO: 232798 - DNA, 25 bp, Artificial
  Probe
ttgttcaaatccaagcaggcccaga

SEQ ID NO: 232799 - DNA, 25 bp, Artificial
  Probe
atggcctgctctgctaatgataatt

SEQ ID NO: 232800 - DNA, 25 bp, Artificial
  Probe
gcctgctctgctaatgataattgtc

SEQ ID NO: 232801 - DNA, 25 bp, Artificial
  Probe
tcaaatccaagcaggcccagaaatg

SEQ ID NO: 232802 - DNA, 25 bp, Artificial
  Probe
gtgggaagactcacccatcacggat

SEQ ID NO: 232803 - DNA, 25 bp, Artificial
  Probe
ggatggcaccattccctgggtagag

SEQ ID NO: 232804 - DNA, 25 bp, Artificial
  Probe
tttgttcaaatccaagcaggcccag

SEQ ID NO: 232805 - DNA, 25 bp, Artificial
  Probe
gctctgctaatgataattgtcaact

SEQ ID NO: 232806 - DNA, 25 bp, Artificial
  Probe
tgctctgctaatgataattgtcaac

SEQ ID NO: 232807 - DNA, 25 bp, Artificial
  Probe
caagcaggcccagaaatgaatgaat

SEQ ID NO: 232808 - DNA, 25 bp, Artificial
  Probe
agtgggaagactcacccatcacgga

SEQ ID NO: 232809 - DNA, 25 bp, Artificial
  Probe
atcacggatggcaccattccctggg

SEQ ID NO: 232810 - DNA, 25 bp, Artificial
  Probe
gttcaaatccaagcaggcccagaaa

SEQ ID NO: 232811 - DNA, 25 bp, Artificial
  Probe
cacggatggcaccattccctgggta

SEQ ID NO: 232812 - DNA, 25 bp, Artificial
  Probe
tcaaggtccccatattaagagtttt

SEQ ID NO: 232813 - DNA, 25 bp, Artificial
  Probe
cggatggcaccattccctgggtaga

SEQ ID NO: 232814 - DNA, 25 bp, Artificial
  Probe
ccaagcaggcccagaaatgaatgaa

SEQ ID NO: 232815 - DNA, 25 bp, Artificial
  Probe
agcaggcccagaaatgaatgaattg

SEQ ID NO: 232816 - DNA, 25 bp, Artificial
  Probe
acatggcctgctctgctaatgataa

SEQ ID NO: 232817 - DNA, 25 bp, Artificial
  Probe
ttttgttcaaatccaagcaggccca

SEQ ID NO: 232818 - DNA, 25 bp, Artificial
  Probe
ggcaccattccctgggtagaggatc

SEQ ID NO: 232819 - DNA, 25 bp, Artificial
  Probe
aagcaggcccagaaatgaatgaatt

SEQ ID NO: 232820 - DNA, 25 bp, Artificial
  Probe
acggatggcaccattccctgggtag

SEQ ID NO: 232821 - DNA, 25 bp, Artificial
  Probe
ttcaaatccaagcaggcccagaaat

SEQ ID NO: 232822 - DNA, 25 bp, Artificial
  Probe
tacccacacttcaatgatatcgtgg

SEQ ID NO: 232823 - DNA, 25 bp, Artificial
  Probe
cgtagcgctgggaaaactttatcca

SEQ ID NO: 232824 - DNA, 25 bp, Artificial
  Probe
acccacacttcaatgatatcgtggg

SEQ ID NO: 232825 - DNA, 25 bp, Artificial
  Probe
atatcgtgggacagcattcaccgta

SEQ ID NO: 232826 - DNA, 25 bp, Artificial
  Probe
acttcaatgatatcgtgggacagca

SEQ ID NO: 232827 - DNA, 25 bp, Artificial
  Probe
tatcgtgggacagcattcaccgtag

SEQ ID NO: 232828 - DNA, 25 bp, Artificial
  Probe
aactttatccatagtgagaacagac

SEQ ID NO: 232829 - DNA, 25 bp, Artificial
  Probe
atcgtgggacagcattcaccgtagc

SEQ ID NO: 232830 - DNA, 25 bp, Artificial
  Probe
cacttcaatgatatcgtgggacagc

SEQ ID NO: 232831 - DNA, 25 bp, Artificial
  Probe
cagcattcaccgtagcgctgggaaa

SEQ ID NO: 232832 - DNA, 25 bp, Artificial
  Probe
tcaccgtagcgctgggaaaacttta

SEQ ID NO: 232833 - DNA, 25 bp, Artificial
  Probe
ccacacttcaatgatatcgtgggac

SEQ ID NO: 232834 - DNA, 25 bp, Artificial
  Probe
aagtatcacatatacctatacccac

SEQ ID NO: 232835 - DNA, 25 bp, Artificial
  Probe
tgggacagcattcaccgtagcgctg

SEQ ID NO: 232836 - DNA, 25 bp, Artificial
  Probe
cttcaatgatatcgtgggacagcat

SEQ ID NO: 232837 - DNA, 25 bp, Artificial
  Probe
tcaatgatatcgtgggacagcattc

SEQ ID NO: 232838 - DNA, 25 bp, Artificial
  Probe
ggacagcattcaccgtagcgctggg

SEQ ID NO: 232839 - DNA, 25 bp, Artificial
  Probe
ttcaccgtagcgctgggaaaacttt

SEQ ID NO: 232840 - DNA, 25 bp, Artificial
  Probe
cacacttcaatgatatcgtgggaca

SEQ ID NO: 232841 - DNA, 25 bp, Artificial
  Probe
acacttcaatgatatcgtgggacag

SEQ ID NO: 232842 - DNA, 25 bp, Artificial
  Probe
tgatatcgtgggacagcattcaccg

SEQ ID NO: 232843 - DNA, 25 bp, Artificial
  Probe
cccacacttcaatgatatcgtggga

SEQ ID NO: 232844 - DNA, 25 bp, Artificial
  Probe
tcgtgggacagcattcaccgtagcg

SEQ ID NO: 232845 - DNA, 25 bp, Artificial
  Probe
aaactttatccatagtgagaacaga

SEQ ID NO: 232846 - DNA, 25 bp, Artificial
  Probe
acagcattcaccgtagcgctgggaa

SEQ ID NO: 232847 - DNA, 25 bp, Artificial
  Probe
cgtgggacagcattcaccgtagcgc

SEQ ID NO: 232848 - DNA, 25 bp, Artificial
  Probe
ttcaatgatatcgtgggacagcatt

SEQ ID NO: 232849 - DNA, 25 bp, Artificial
  Probe
caccgtagcgctgggaaaactttat

SEQ ID NO: 232850 - DNA, 25 bp, Artificial
  Probe
atatacctatacccacacttcaatg

SEQ ID NO: 232851 - DNA, 25 bp, Artificial
  Probe
ctttatccatagtgagaacagacac

SEQ ID NO: 232852 - DNA, 25 bp, Artificial
  Probe
atgatatcgtgggacagcattcacc

SEQ ID NO: 232853 - DNA, 25 bp, Artificial
  Probe
gggacagcattcaccgtagcgctgg

SEQ ID NO: 232854 - DNA, 25 bp, Artificial
  Probe
ggaaaactttatccatagtgagaac

SEQ ID NO: 232855 - DNA, 25 bp, Artificial
  Probe
tttatccatagtgagaacagacacc

SEQ ID NO: 232856 - DNA, 25 bp, Artificial
  Probe
caatgatatcgtgggacagcattca

SEQ ID NO: 232857 - DNA, 25 bp, Artificial
  Probe
gaaaactttatccatagtgagaaca

SEQ ID NO: 232858 - DNA, 25 bp, Artificial
  Probe
ttatccatagtgagaacagacacct

SEQ ID NO: 232859 - DNA, 25 bp, Artificial
  Probe
gatatcgtgggacagcattcaccgt

SEQ ID NO: 232860 - DNA, 25 bp, Artificial
  Probe
ctatacccacacttcaatgatatcg

SEQ ID NO: 232861 - DNA, 25 bp, Artificial
  Probe
gtgggacagcattcaccgtagcgct

SEQ ID NO: 232862 - DNA, 25 bp, Artificial
  Probe
aaaactttatccatagtgagaacag

SEQ ID NO: 232863 - DNA, 25 bp, Artificial
  Probe
gggaaaactttatccatagtgagaa

SEQ ID NO: 232864 - DNA, 25 bp, Artificial
  Probe
agcattcaccgtagcgctgggaaaa

SEQ ID NO: 232865 - DNA, 25 bp, Artificial
  Probe
actttatccatagtgagaacagaca

SEQ ID NO: 232866 - DNA, 25 bp, Artificial
  Probe
gcattcaccgtagcgctgggaaaac

SEQ ID NO: 232867 - DNA, 25 bp, Artificial
  Probe
atacccacacttcaatgatatcgtg

SEQ ID NO: 232868 - DNA, 25 bp, Artificial
  Probe
gtgataattgtctgcttagcatttc

SEQ ID NO: 232869 - DNA, 25 bp, Artificial
  Probe
ttctgtgggacacctggccaccact

SEQ ID NO: 232870 - DNA, 25 bp, Artificial
  Probe
ggaaaacttgagtctctctgttctt

SEQ ID NO: 232871 - DNA, 25 bp, Artificial
  Probe
aggaaaacttgagtctctctgttct

SEQ ID NO: 232872 - DNA, 25 bp, Artificial
  Probe
tgcctctaacaggaaaacttgagtc

SEQ ID NO: 232873 - DNA, 25 bp, Artificial
  Probe
accagtgctgtggtatatgatacac

SEQ ID NO: 232874 - DNA, 25 bp, Artificial
  Probe
gcctctaacaggaaaacttgagtct

SEQ ID NO: 232875 - DNA, 25 bp, Artificial
  Probe
aatcctatatccatggctttaatgg

SEQ ID NO: 232876 - DNA, 25 bp, Artificial
  Probe
ggtatatgatacacagccttgcact

SEQ ID NO: 232877 - DNA, 25 bp, Artificial
  Probe
cctctaacaggaaaacttgagtctc

SEQ ID NO: 232878 - DNA, 25 bp, Artificial
  Probe
ctgtgataattgtctgcttagcatt

SEQ ID NO: 232879 - DNA, 25 bp, Artificial
  Probe
ctgtgggacacctggccaccactga

SEQ ID NO: 232880 - DNA, 25 bp, Artificial
  Probe
cctctgcctctaacaggaaaacttg

SEQ ID NO: 232881 - DNA, 25 bp, Artificial
  Probe
ccagtgctgtggtatatgatacaca

SEQ ID NO: 232882 - DNA, 25 bp, Artificial
  Probe
aaaccagtgctgtggtatatgatac

SEQ ID NO: 232883 - DNA, 25 bp, Artificial
  Probe
tgataattgtctgcttagcatttcc

SEQ ID NO: 232884 - DNA, 25 bp, Artificial
  Probe
tctgcctctaacaggaaaacttgag

SEQ ID NO: 232885 - DNA, 25 bp, Artificial
  Probe
tctgtgggacacctggccaccactg

SEQ ID NO: 232886 - DNA, 25 bp, Artificial
  Probe
ctgcctctaacaggaaaacttgagt

SEQ ID NO: 232887 - DNA, 25 bp, Artificial
  Probe
gtatatgatacacagccttgcactc

SEQ ID NO: 232888 - DNA, 25 bp, Artificial
  Probe
gataattgtctgcttagcatttcca

SEQ ID NO: 232889 - DNA, 25 bp, Artificial
  Probe
ctctgcctctaacaggaaaacttga

SEQ ID NO: 232890 - DNA, 25 bp, Artificial
  Probe
ctctaacaggaaaacttgagtctct

SEQ ID NO: 232891 - DNA, 25 bp, Artificial
  Probe
aaccagtgctgtggtatatgataca

SEQ ID NO: 232892 - DNA, 25 bp, Artificial
  Probe
aaacttgagtctctctgttctttgt

SEQ ID NO: 232893 - DNA, 25 bp, Artificial
  Probe
tctgttatagccagttagaggacat

SEQ ID NO: 232894 - DNA, 25 bp, Artificial
  Probe
cttctacagcatagttaagatgagg

SEQ ID NO: 232895 - DNA, 25 bp, Artificial
  Probe
acctcattaggcagctgcttcgaag

SEQ ID NO: 232896 - DNA, 25 bp, Artificial
  Probe
ctataaaaggtactttctgttgcaa

SEQ ID NO: 232897 - DNA, 25 bp, Artificial
  Probe
ctctataaaaggtactttctgttgc

SEQ ID NO: 232898 - DNA, 25 bp, Artificial
  Probe
aaggtactttctgttgcaatcctta

SEQ ID NO: 232899 - DNA, 25 bp, Artificial
  Probe
ggttttcatgacgataaccaccata

SEQ ID NO: 232900 - DNA, 25 bp, Artificial
  Probe
aaactgtgtagcatagagcttggct

SEQ ID NO: 232901 - DNA, 25 bp, Artificial
  Probe
ctgttatagccagttagaggacatg

SEQ ID NO: 232902 - DNA, 25 bp, Artificial
  Probe
gtgcacctcattaggcagctgcttc

SEQ ID NO: 232903 - DNA, 25 bp, Artificial
  Probe
gcaggtcccctatgatttacacatc

SEQ ID NO: 232904 - DNA, 25 bp, Artificial
  Probe
gttgtattctcaaatgtgtctccta

SEQ ID NO: 232905 - DNA, 25 bp, Artificial
  Probe
atgtgtttattgtcccttctacagc

SEQ ID NO: 232906 - DNA, 25 bp, Artificial
  Probe
tggcaggtcccctatgatttacaca

SEQ ID NO: 232907 - DNA, 25 bp, Artificial
  Probe
ttgtcccttctacagcatagttaag

SEQ ID NO: 232908 - DNA, 25 bp, Artificial
  Probe
atagttgtattctcaaatgtgtctc

SEQ ID NO: 232909 - DNA, 25 bp, Artificial
  Probe
tttcgtcttgtcattttgccaactg

SEQ ID NO: 232910 - DNA, 25 bp, Artificial
  Probe
caaagtttctccaatatatgtgagt

SEQ ID NO: 232911 - DNA, 25 bp, Artificial
  Probe
tgtcattttgccaactggttctgtg

SEQ ID NO: 232912 - DNA, 25 bp, Artificial
  Probe
tctcaaatgtgtctcctaaacgttg

SEQ ID NO: 232913 - DNA, 25 bp, Artificial
  Probe
gtccagactgtatacacgaaacaca

SEQ ID NO: 232914 - DNA, 25 bp, Artificial
  Probe
acagcaggcgccacactggagacgt

SEQ ID NO: 232915 - DNA, 25 bp, Artificial
  Probe
gtcttgtcattttgccaactggttc

SEQ ID NO: 232916 - DNA, 25 bp, Artificial
  Probe
gacgtctttggcaggtcccctatga

SEQ ID NO: 232917 - DNA, 25 bp, Artificial
  Probe
gtctttggcaggtcccctatgattt

SEQ ID NO: 232918 - DNA, 25 bp, Artificial
  Probe
gtttattgtcccttctacagcatag

SEQ ID NO: 232919 - DNA, 25 bp, Artificial
  Probe
aaaggtactttctgttgcaatcctt

SEQ ID NO: 232920 - DNA, 25 bp, Artificial
  Probe
ttgccaactggttctgtgttaatag

SEQ ID NO: 232921 - DNA, 25 bp, Artificial
  Probe
tgtatgcacagaagtgcacagcagg

SEQ ID NO: 232922 - DNA, 25 bp, Artificial
  Probe
ccctccagaaacatgtagaatgtgt

SEQ ID NO: 232923 - DNA, 25 bp, Artificial
  Probe
ctccagaaacatgtagaatgtgttt

SEQ ID NO: 232924 - DNA, 25 bp, Artificial
  Probe
tacacatctaaactgtgtagcatag

SEQ ID NO: 232925 - DNA, 25 bp, Artificial
  Probe
ccaactggttctgtgttaatagttg

SEQ ID NO: 232926 - DNA, 25 bp, Artificial
  Probe
gaagtgcacagcaggcgccacactg

SEQ ID NO: 232927 - DNA, 25 bp, Artificial
  Probe
tagcatagagcttggctgtcccctc

SEQ ID NO: 232928 - DNA, 25 bp, Artificial
  Probe
aacagaaactatagagcccagatag

SEQ ID NO: 232929 - DNA, 25 bp, Artificial
  Probe
gttcccaccttgctgaacaccagtg

SEQ ID NO: 232930 - DNA, 25 bp, Artificial
  Probe
gatttacacatctaaactgtgtagc

SEQ ID NO: 232931 - DNA, 25 bp, Artificial
  Probe
actgtgtagcatagagcttggctgt

SEQ ID NO: 232932 - DNA, 25 bp, Artificial
  Probe
gaatgtgtttattgtcccttctaca

SEQ ID NO: 232933 - DNA, 25 bp, Artificial
  Probe
cattttgccaactggttctgtgtta

SEQ ID NO: 232934 - DNA, 25 bp, Artificial
  Probe
gactgtatacacgaaacacacactg

SEQ ID NO: 232935 - DNA, 25 bp, Artificial
  Probe
cttgctgaacaccagtgcacctcat

SEQ ID NO: 232936 - DNA, 25 bp, Artificial
  Probe
tggagacgtctttggcaggtcccct

SEQ ID NO: 232937 - DNA, 25 bp, Artificial
  Probe
ctcattaggcagctgcttcgaagac

SEQ ID NO: 232938 - DNA, 25 bp, Artificial
  Probe
tgatttacacatctaaactgtgtag

SEQ ID NO: 232939 - DNA, 25 bp, Artificial
  Probe
tggtggactgagcaccagtgctgca

SEQ ID NO: 232940 - DNA, 25 bp, Artificial
  Probe
gagcaccagtgctgcattcggcggt

SEQ ID NO: 232941 - DNA, 25 bp, Artificial
  Probe
ggactgaacaccaatgctggattcg

SEQ ID NO: 232942 - DNA, 25 bp, Artificial
  Probe
tggactgaacaccaatgctggattc

SEQ ID NO: 232943 - DNA, 25 bp, Artificial
  Probe
aggaccaagcactgtagctggcttt

SEQ ID NO: 232944 - DNA, 25 bp, Artificial
  Probe
tagtggactgaacaccaatgctgga

SEQ ID NO: 232945 - DNA, 25 bp, Artificial
  Probe
agtggactgaacaccaatgctggat

SEQ ID NO: 232946 - DNA, 25 bp, Artificial
  Probe
ttggaggaccaagcactgtagctgg

SEQ ID NO: 232947 - DNA, 25 bp, Artificial
  Probe
tgagcaccagtgctgcattcggcgg

SEQ ID NO: 232948 - DNA, 25 bp, Artificial
  Probe
gtggaccaccaagcaccagcactgg

SEQ ID NO: 232949 - DNA, 25 bp, Artificial
  Probe
agctggctttggtagtggactgaac

SEQ ID NO: 232950 - DNA, 25 bp, Artificial
  Probe
actgcaggtggctttggaggaccaa

SEQ ID NO: 232951 - DNA, 25 bp, Artificial
  Probe
aggtggctttggaggaccaagcact

SEQ ID NO: 232952 - DNA, 25 bp, Artificial
  Probe
actgaacaccaatgctggattcggc

SEQ ID NO: 232953 - DNA, 25 bp, Artificial
  Probe
agcaccagtgctgcattcggcggtg

SEQ ID NO: 232954 - DNA, 25 bp, Artificial
  Probe
gctggcttctgcagtggaccaagca

SEQ ID NO: 232955 - DNA, 25 bp, Artificial
  Probe
agcaccaatgctggattcggcggtg

SEQ ID NO: 232956 - DNA, 25 bp, Artificial
  Probe
ggctttggtagtggactgaacacca

SEQ ID NO: 232957 - DNA, 25 bp, Artificial
  Probe
gctggctttggtagtggactgaaca

SEQ ID NO: 232958 - DNA, 25 bp, Artificial
  Probe
aagtacaggacctggctttggtgga

SEQ ID NO: 232959 - DNA, 25 bp, Artificial
  Probe
ggaccaagcactgcaggtggctttg

SEQ ID NO: 232960 - DNA, 25 bp, Artificial
  Probe
tggtggactgagcaccaatgctgga

SEQ ID NO: 232961 - DNA, 25 bp, Artificial
  Probe
tggactgagcaccaatgctggattc

SEQ ID NO: 232962 - DNA, 25 bp, Artificial
  Probe
tggactgagcaccagtgctgcattc

SEQ ID NO: 232963 - DNA, 25 bp, Artificial
  Probe
cggtggaccaccaagcaccggtact

SEQ ID NO: 232964 - DNA, 25 bp, Artificial
  Probe
gtggaccaagcactgcaggtggctt

SEQ ID NO: 232965 - DNA, 25 bp, Artificial
  Probe
ctgtagctggctttggtagtggact

SEQ ID NO: 232966 - DNA, 25 bp, Artificial
  Probe
tgctggcttctgcagtggaccaagc

SEQ ID NO: 232967 - DNA, 25 bp, Artificial
  Probe
tttggaggaccaagcactgtagctg

SEQ ID NO: 232968 - DNA, 25 bp, Artificial
  Probe
gtggactgagcaccagtgctgcatt

SEQ ID NO: 232969 - DNA, 25 bp, Artificial
  Probe
gtggactgagcaccaatgctggatt

SEQ ID NO: 232970 - DNA, 25 bp, Artificial
  Probe
caggacctggctttggtggaccaag

SEQ ID NO: 232971 - DNA, 25 bp, Artificial
  Probe
tgagcaccaatgctggattcggcgg

SEQ ID NO: 232972 - DNA, 25 bp, Artificial
  Probe
tggctttggtagtggactgaacacc

SEQ ID NO: 232973 - DNA, 25 bp, Artificial
  Probe
gtgctggcttctgcagtggaccaag

SEQ ID NO: 232974 - DNA, 25 bp, Artificial
  Probe
gactgagcaccagtgctgcattcgg

SEQ ID NO: 232975 - DNA, 25 bp, Artificial
  Probe
gactgagcaccaatgctggattcgg

SEQ ID NO: 232976 - DNA, 25 bp, Artificial
  Probe
ctggctttggtagtggactgaacac

SEQ ID NO: 232977 - DNA, 25 bp, Artificial
  Probe
ctgagcaccaatgctggattcggcg

SEQ ID NO: 232978 - DNA, 25 bp, Artificial
  Probe
actgtagctggctttggtagtggac

SEQ ID NO: 232979 - DNA, 25 bp, Artificial
  Probe
acaggacctggctttggtggaccaa

SEQ ID NO: 232980 - DNA, 25 bp, Artificial
  Probe
actgagcaccaatgctggattcggc

SEQ ID NO: 232981 - DNA, 25 bp, Artificial
  Probe
ggactgagcaccagtgctgcattcg

SEQ ID NO: 232982 - DNA, 25 bp, Artificial
  Probe
ctgagcaccagtgctgcattcggcg

SEQ ID NO: 232983 - DNA, 25 bp, Artificial
  Probe
caggtggctttggaggaccaagcac

SEQ ID NO: 232984 - DNA, 25 bp, Artificial
  Probe
gactgaacaccaatgctggattcgg

SEQ ID NO: 232985 - DNA, 25 bp, Artificial
  Probe
ggttctggcaagacccattaaaccg

SEQ ID NO: 232986 - DNA, 25 bp, Artificial
  Probe
ttgtacagccttttaccactaagag

SEQ ID NO: 232987 - DNA, 25 bp, Artificial
  Probe
ttacaatacgccccatctgaaaacc

SEQ ID NO: 232988 - DNA, 25 bp, Artificial
  Probe
gccttttaccactaagagagcgtta

SEQ ID NO: 232989 - DNA, 25 bp, Artificial
  Probe
tttcaaactttgtgcgctggaaaac

SEQ ID NO: 232990 - DNA, 25 bp, Artificial
  Probe
acagccttttaccactaagagagcg

SEQ ID NO: 232991 - DNA, 25 bp, Artificial
  Probe
gcgttggccaggggtttccacgtct

SEQ ID NO: 232992 - DNA, 25 bp, Artificial
  Probe
cttttcaaactttgtgcgctggaaa

SEQ ID NO: 232993 - DNA, 25 bp, Artificial
  Probe
cgcacgctttagcatttctctaggg

SEQ ID NO: 232994 - DNA, 25 bp, Artificial
  Probe
tacagccttttaccactaagagagc

SEQ ID NO: 232995 - DNA, 25 bp, Artificial
  Probe
gcgttaaaacactgccggtcccctg

SEQ ID NO: 232996 - DNA, 25 bp, Artificial
  Probe
ggcttttcaaactttgtgcgctgga

SEQ ID NO: 232997 - DNA, 25 bp, Artificial
  Probe
cacgctttagcatttctctagggtg

SEQ ID NO: 232998 - DNA, 25 bp, Artificial
  Probe
tcgcacgctttagcatttctctagg

SEQ ID NO: 232999 - DNA, 25 bp, Artificial
  Probe
aggcttttcaaactttgtgcgctgg

SEQ ID NO: 233000 - DNA, 25 bp, Artificial
  Probe
taaaaacggttctggcaagacccat

SEQ ID NO: 233001 - DNA, 25 bp, Artificial
  Probe
ttcgcacgctttagcatttctctag

SEQ ID NO: 233002 - DNA, 25 bp, Artificial
  Probe
aaggcttttcaaactttgtgcgctg

SEQ ID NO: 233003 - DNA, 25 bp, Artificial
  Probe
aaaggcttttcaaactttgtgcgct

SEQ ID NO: 233004 - DNA, 25 bp, Artificial
  Probe
ttgtgcgctggaaaacaaaggccat

SEQ ID NO: 233005 - DNA, 25 bp, Artificial
  Probe
acgctttagcatttctctagggtgg

SEQ ID NO: 233006 - DNA, 25 bp, Artificial
  Probe
cccatttttacaatacgccccatct

SEQ ID NO: 233007 - DNA, 25 bp, Artificial
  Probe
ccgatttcaccctataggggtcaag

SEQ ID NO: 233008 - DNA, 25 bp, Artificial
  Probe
gtacagccttttaccactaagagag

SEQ ID NO: 233009 - DNA, 25 bp, Artificial
  Probe
tggcaagacccattaaaccgtcgtt

SEQ ID NO: 233010 - DNA, 25 bp, Artificial
  Probe
tggccaggggtttccacgtcttaca

SEQ ID NO: 233011 - DNA, 25 bp, Artificial
  Probe
ttttcaaactttgtgcgctggaaaa

SEQ ID NO: 233012 - DNA, 25 bp, Artificial
  Probe
gaaaggcttttcaaactttgtgcgc

SEQ ID NO: 233013 - DNA, 25 bp, Artificial
  Probe
cagccttttaccactaagagagcgt

SEQ ID NO: 233014 - DNA, 25 bp, Artificial
  Probe
atttcaccctataggggtcaagtca

SEQ ID NO: 233015 - DNA, 25 bp, Artificial
  Probe
agccttttaccactaagagagcgtt

SEQ ID NO: 233016 - DNA, 25 bp, Artificial
  Probe
attgtacagccttttaccactaaga

SEQ ID NO: 233017 - DNA, 25 bp, Artificial
  Probe
cgatttcaccctataggggtcaagt

SEQ ID NO: 233018 - DNA, 25 bp, Artificial
  Probe
gcttttcaaactttgtgcgctggaa

SEQ ID NO: 233019 - DNA, 25 bp, Artificial
  Probe
gccgggcccgatttcaccctatagg

SEQ ID NO: 233020 - DNA, 25 bp, Artificial
  Probe
ataggggtcaagtcacccttaattg

SEQ ID NO: 233021 - DNA, 25 bp, Artificial
  Probe
tataggggtcaagtcacccttaatt

SEQ ID NO: 233022 - DNA, 25 bp, Artificial
  Probe
tattcagttcgaaaaacaaaaagag

SEQ ID NO: 233023 - DNA, 25 bp, Artificial
  Probe
taggggtcaagtcacccttaattgt

SEQ ID NO: 233024 - DNA, 25 bp, Artificial
  Probe
ttaccactaagagagcgttaaaaca

SEQ ID NO: 233025 - DNA, 25 bp, Artificial
  Probe
gcaccgaaaggcttttcaaactttg

SEQ ID NO: 233026 - DNA, 25 bp, Artificial
  Probe
gtcaagtcacccttaattgtacagc

SEQ ID NO: 233027 - DNA, 25 bp, Artificial
  Probe
gcacgctttagcatttctctagggt

SEQ ID NO: 233028 - DNA, 25 bp, Artificial
  Probe
taccactaagagagcgttaaaacac

SEQ ID NO: 233029 - DNA, 25 bp, Artificial
  Probe
tgtacagccttttaccactaagaga

SEQ ID NO: 233030 - DNA, 25 bp, Artificial
  Probe
ctggcaagacccattaaaccgtcgt

SEQ ID NO: 233031 - DNA, 25 bp, Artificial
  Probe
gcctccctgctgtagtactcatgga

SEQ ID NO: 233032 - DNA, 25 bp, Artificial
  Probe
agcctaggatgagctcatttgggga

SEQ ID NO: 233033 - DNA, 25 bp, Artificial
  Probe
cgcccattaaagtgctgacataggc

SEQ ID NO: 233034 - DNA, 25 bp, Artificial
  Probe
ctgtggcataccagcctaggatgag

SEQ ID NO: 233035 - DNA, 25 bp, Artificial
  Probe
gctctgtgatgtcgtgccctgtggc

SEQ ID NO: 233036 - DNA, 25 bp, Artificial
  Probe
gtactcatggatcagcaccgagtgc

SEQ ID NO: 233037 - DNA, 25 bp, Artificial
  Probe
ggcaaattccatgtcaacagccact

SEQ ID NO: 233038 - DNA, 25 bp, Artificial
  Probe
aagtgctgacataggccttgatgct

SEQ ID NO: 233039 - DNA, 25 bp, Artificial
  Probe
ctaggatgagctcatttggggagac

SEQ ID NO: 233040 - DNA, 25 bp, Artificial
  Probe
cataatacgcatacttcactgtgag

SEQ ID NO: 233041 - DNA, 25 bp, Artificial
  Probe
catgcgcccattctgaagacccgtg

SEQ ID NO: 233042 - DNA, 25 bp, Artificial
  Probe
ccttgatgctcatgcgcccattctg

SEQ ID NO: 233043 - DNA, 25 bp, Artificial
  Probe
ggccttgatgctcatgcgcccattc

SEQ ID NO: 233044 - DNA, 25 bp, Artificial
  Probe
aatgcgctcagtgtcataatacgca

SEQ ID NO: 233045 - DNA, 25 bp, Artificial
  Probe
tgctgtagtactcatggatcagcac

SEQ ID NO: 233046 - DNA, 25 bp, Artificial
  Probe
tgcgctcagtgtcataatacgcata

SEQ ID NO: 233047 - DNA, 25 bp, Artificial
  Probe
gctcagtgtcataatacgcatactt

SEQ ID NO: 233048 - DNA, 25 bp, Artificial
  Probe
cgctcagtgtcataatacgcatact

SEQ ID NO: 233049 - DNA, 25 bp, Artificial
  Probe
cgagtgctctgtgatgtcgtgccct

SEQ ID NO: 233050 - DNA, 25 bp, Artificial
  Probe
tcatgcgcccattctgaagacccgt

SEQ ID NO: 233051 - DNA, 25 bp, Artificial
  Probe
gccctgtggcataccagcctaggat

SEQ ID NO: 233052 - DNA, 25 bp, Artificial
  Probe
tctgtgatgtcgtgccctgtggcat

SEQ ID NO: 233053 - DNA, 25 bp, Artificial
  Probe
tcggggcctccctgctgtagtactc

SEQ ID NO: 233054 - DNA, 25 bp, Artificial
  Probe
tgtcgtgccctgtggcataccagcc

SEQ ID NO: 233055 - DNA, 25 bp, Artificial
  Probe
atacgcatacttcactgtgagaggg

SEQ ID NO: 233056 - DNA, 25 bp, Artificial
  Probe
caacagttcccagcagggttccgat

SEQ ID NO: 233057 - DNA, 25 bp, Artificial
  Probe
gggagactttcttatgcaattcata

SEQ ID NO: 233058 - DNA, 25 bp, Artificial
  Probe
ccagcctaggatgagctcatttggg

SEQ ID NO: 233059 - DNA, 25 bp, Artificial
  Probe
ggcataccagcctaggatgagctca

SEQ ID NO: 233060 - DNA, 25 bp, Artificial
  Probe
ggggcctccctgctgtagtactcat

SEQ ID NO: 233061 - DNA, 25 bp, Artificial
  Probe
cctaggatgagctcatttggggaga

SEQ ID NO: 233062 - DNA, 25 bp, Artificial
  Probe
ggggtgaacatcactcccatggtcc

SEQ ID NO: 233063 - DNA, 25 bp, Artificial
  Probe
tcagcaccgagtgctctgtgatgtc

SEQ ID NO: 233064 - DNA, 25 bp, Artificial
  Probe
tcatggatcagcaccgagtgctctg

SEQ ID NO: 233065 - DNA, 25 bp, Artificial
  Probe
gatgtcgtgccctgtggcataccag

SEQ ID NO: 233066 - DNA, 25 bp, Artificial
  Probe
tggcaaattccatgtcaacagccac

SEQ ID NO: 233067 - DNA, 25 bp, Artificial
  Probe
gtcataatacgcatacttcactgtg

SEQ ID NO: 233068 - DNA, 25 bp, Artificial
  Probe
aaagtgctgacataggccttgatgc

SEQ ID NO: 233069 - DNA, 25 bp, Artificial
  Probe
gatgagctcatttggggagactttc

SEQ ID NO: 233070 - DNA, 25 bp, Artificial
  Probe
gtgccctgtggcataccagcctagg

SEQ ID NO: 233071 - DNA, 25 bp, Artificial
  Probe
gctcatttggggagactttcttatg

SEQ ID NO: 233072 - DNA, 25 bp, Artificial
  Probe
tgacataggccttgatgctcatgcg

SEQ ID NO: 233073 - DNA, 25 bp, Artificial
  Probe
tgcgcccattctgaagacccgtgtc

SEQ ID NO: 233074 - DNA, 25 bp, Artificial
  Probe
gcaccgagtgctctgtgatgtcgtg

SEQ ID NO: 233075 - DNA, 25 bp, Artificial
  Probe
catttggggagactttcttatgcaa

SEQ ID NO: 233076 - DNA, 25 bp, Artificial
  Probe
ggagactttcttatgcaattcatac

SEQ ID NO: 233077 - DNA, 25 bp, Artificial
  Probe
aactgttcacgaaggccgccttcag

SEQ ID NO: 233078 - DNA, 25 bp, Artificial
  Probe
gcgttcctgcgcaaagggatcagtg

SEQ ID NO: 233079 - DNA, 25 bp, Artificial
  Probe
tgtggcgcagagtgagacttttgac

SEQ ID NO: 233080 - DNA, 25 bp, Artificial
  Probe
caggtccgcagaggacggcagccct

SEQ ID NO: 233081 - DNA, 25 bp, Artificial
  Probe
tcactgtggcgcagagtgagacttt

SEQ ID NO: 233082 - DNA, 25 bp, Artificial
  Probe
ttgaccacatcaagggctggatccg

SEQ ID NO: 233083 - DNA, 25 bp, Artificial
  Probe
ctgcgcaaagggatcagtggcgact

SEQ ID NO: 233084 - DNA, 25 bp, Artificial
  Probe
cctccctattgaactgttcacgaag

SEQ ID NO: 233085 - DNA, 25 bp, Artificial
  Probe
ccactgggtgaagaggccctgagct

SEQ ID NO: 233086 - DNA, 25 bp, Artificial
  Probe
cactgggtgaagaggccctgagctc

SEQ ID NO: 233087 - DNA, 25 bp, Artificial
  Probe
gaccaccataagtgccttcagcctt

SEQ ID NO: 233088 - DNA, 25 bp, Artificial
  Probe
atgattgagatcatctgcttaatcc

SEQ ID NO: 233089 - DNA, 25 bp, Artificial
  Probe
ttgctgccatgaaggccaataacat

SEQ ID NO: 233090 - DNA, 25 bp, Artificial
  Probe
agaagtgcagtttggctcctggttt

SEQ ID NO: 233091 - DNA, 25 bp, Artificial
  Probe
gacgtcgtggtctccctctattatt

SEQ ID NO: 233092 - DNA, 25 bp, Artificial
  Probe
acaggtccgcagaggacggcagccc

SEQ ID NO: 233093 - DNA, 25 bp, Artificial
  Probe
ggatcagtggcgactggaagaacca

SEQ ID NO: 233094 - DNA, 25 bp, Artificial
  Probe
atcaggcaccaactggatgattgag

SEQ ID NO: 233095 - DNA, 25 bp, Artificial
  Probe
gatcagtggcgactggaagaaccac

SEQ ID NO: 233096 - DNA, 25 bp, Artificial
  Probe
accgagagcaaatgcacgggctgcc

SEQ ID NO: 233097 - DNA, 25 bp, Artificial
  Probe
tgcagcaggacctgcgaggctccgt

SEQ ID NO: 233098 - DNA, 25 bp, Artificial
  Probe
aggccctgagctctgtggtggccca

SEQ ID NO: 233099 - DNA, 25 bp, Artificial
  Probe
ccatctggcaacgtgcaccctggtg

SEQ ID NO: 233100 - DNA, 25 bp, Artificial
  Probe
gaacttcctgtttatcacctacgag

SEQ ID NO: 233101 - DNA, 25 bp, Artificial
  Probe
agagcctcagtctggccgagaacac

SEQ ID NO: 233102 - DNA, 25 bp, Artificial
  Probe
taaaggaccctggtacacctgaaca

SEQ ID NO: 233103 - DNA, 25 bp, Artificial
  Probe
acgaaggccgccttcagctccaagg

SEQ ID NO: 233104 - DNA, 25 bp, Artificial
  Probe
tctgtgagttcctgggccggccact

SEQ ID NO: 233105 - DNA, 25 bp, Artificial
  Probe
gatggggacccctcgtggatccgtt

SEQ ID NO: 233106 - DNA, 25 bp, Artificial
  Probe
agttccttcagaatttcctcaaagg

SEQ ID NO: 233107 - DNA, 25 bp, Artificial
  Probe
gctgcagcaggacctgcgaggctcc

SEQ ID NO: 233108 - DNA, 25 bp, Artificial
  Probe
tgtgcgggacgacgacatcttcatc

SEQ ID NO: 233109 - DNA, 25 bp, Artificial
  Probe
gtacacctgaacagttccttcagaa

SEQ ID NO: 233110 - DNA, 25 bp, Artificial
  Probe
tgagctctgtggtggcccattcagc

SEQ ID NO: 233111 - DNA, 25 bp, Artificial
  Probe
ccgggacgtcgtggtctccctctat

SEQ ID NO: 233112 - DNA, 25 bp, Artificial
  Probe
atgcggggccgagagaacttcctgt

SEQ ID NO: 233113 - DNA, 25 bp, Artificial
  Probe
caccaactggatgattgagatcatc

SEQ ID NO: 233114 - DNA, 25 bp, Artificial
  Probe
tgtacaattaaaggaccctggtaca

SEQ ID NO: 233115 - DNA, 25 bp, Artificial
  Probe
ttcctcaaaggagaagtgcagtttg

SEQ ID NO: 233116 - DNA, 25 bp, Artificial
  Probe
aaatgcacgggctgccgagcttccc

SEQ ID NO: 233117 - DNA, 25 bp, Artificial
  Probe
tggtttgaccacatcaagggctgga

SEQ ID NO: 233118 - DNA, 25 bp, Artificial
  Probe
acggcagccctgatggcgagactga

SEQ ID NO: 233119 - DNA, 25 bp, Artificial
  Probe
gacctgcgaggctccgtgcaactca

SEQ ID NO: 233120 - DNA, 25 bp, Artificial
  Probe
gattgctgtacaattaaaggaccct

SEQ ID NO: 233121 - DNA, 25 bp, Artificial
  Probe
gacgacgacatcttcatcgtcacct

SEQ ID NO: 233122 - DNA, 25 bp, Artificial
  Probe
aatcctgaaagatggggacccctcg

SEQ ID NO: 233123 - DNA, 25 bp, Artificial
  Probe
tcttcatgagggagttaggctgctg

SEQ ID NO: 233124 - DNA, 25 bp, Artificial
  Probe
cctgcagaacctggagcaactgcta

SEQ ID NO: 233125 - DNA, 25 bp, Artificial
  Probe
cagatacccaaagaaacttccgagg

SEQ ID NO: 233126 - DNA, 25 bp, Artificial
  Probe
agtaccaaggtgaagaccctgctgt

SEQ ID NO: 233127 - DNA, 25 bp, Artificial
  Probe
ccctgctgttgaacgctgctcagaa

SEQ ID NO: 233128 - DNA, 25 bp, Artificial
  Probe
tacccaaagaaacttccgaggccat

SEQ ID NO: 233129 - DNA, 25 bp, Artificial
  Probe
aagacagtgcctacgggagccagtc

SEQ ID NO: 233130 - DNA, 25 bp, Artificial
  Probe
gctgttgaacgctgctcagaacacc

SEQ ID NO: 233131 - DNA, 25 bp, Artificial
  Probe
gggcctgagacagatacccaaagaa

SEQ ID NO: 233132 - DNA, 25 bp, Artificial
  Probe
cctgagacagatacccaaagaaact

SEQ ID NO: 233133 - DNA, 25 bp, Artificial
  Probe
tgaggggcctgagacagatacccaa

SEQ ID NO: 233134 - DNA, 25 bp, Artificial
  Probe
aggtgaagaccctgctgttgaacgc

SEQ ID NO: 233135 - DNA, 25 bp, Artificial
  Probe
tcttgacctcactcgcagtaccaag

SEQ ID NO: 233136 - DNA, 25 bp, Artificial
  Probe
accaaggtgaagaccctgctgttga

SEQ ID NO: 233137 - DNA, 25 bp, Artificial
  Probe
agacttggtgggtctattggaagcc

SEQ ID NO: 233138 - DNA, 25 bp, Artificial
  Probe
caagctgcccagcacagaggtgaaa

SEQ ID NO: 233139 - DNA, 25 bp, Artificial
  Probe
ccctgcagggccagggctgtcacta

SEQ ID NO: 233140 - DNA, 25 bp, Artificial
  Probe
tcgcagtaccaaggtgaagaccctg

SEQ ID NO: 233141 - DNA, 25 bp, Artificial
  Probe
ttacaagctggctggtggagacttg

SEQ ID NO: 233142 - DNA, 25 bp, Artificial
  Probe
actaggggatgcagccctgcagaac

SEQ ID NO: 233143 - DNA, 25 bp, Artificial
  Probe
tcaggtgcactgaatgctacccggt

SEQ ID NO: 233144 - DNA, 25 bp, Artificial
  Probe
ttggaagccttgtccgacatgggtc

SEQ ID NO: 233145 - DNA, 25 bp, Artificial
  Probe
gggatgcagccctgcagaacctgga

SEQ ID NO: 233146 - DNA, 25 bp, Artificial
  Probe
tgtcactaggggatgcagccctgca

SEQ ID NO: 233147 - DNA, 25 bp, Artificial
  Probe
ctattggaagccttgtccgacatgg

SEQ ID NO: 233148 - DNA, 25 bp, Artificial
  Probe
agacagatacccaaagaaacttccg

SEQ ID NO: 233149 - DNA, 25 bp, Artificial
  Probe
ccttgtccgacatgggtcttcatga

SEQ ID NO: 233150 - DNA, 25 bp, Artificial
  Probe
cttcatgagggagttaggctgctga

SEQ ID NO: 233151 - DNA, 25 bp, Artificial
  Probe
aacgctgctcagaacaccacggagc

SEQ ID NO: 233152 - DNA, 25 bp, Artificial
  Probe
ctacgggagccagtcagtggaacag

SEQ ID NO: 233153 - DNA, 25 bp, Artificial
  Probe
cttggtgggtctattggaagccttg

SEQ ID NO: 233154 - DNA, 25 bp, Artificial
  Probe
tcgtagttacaagctggctggtgga

SEQ ID NO: 233155 - DNA, 25 bp, Artificial
  Probe
atgcagccctgcagaacctggagca

SEQ ID NO: 233156 - DNA, 25 bp, Artificial
  Probe
agctgcccagcacagaggtgaaaga

SEQ ID NO: 233157 - DNA, 25 bp, Artificial
  Probe
agtctccttcgtagttacaagctgg

SEQ ID NO: 233158 - DNA, 25 bp, Artificial
  Probe
gacctcactcgcagtaccaaggtga

SEQ ID NO: 233159 - DNA, 25 bp, Artificial
  Probe
ccagcctcaggtgcactgaatgcta

SEQ ID NO: 233160 - DNA, 25 bp, Artificial
  Probe
gtccgacatgggtcttcatgaggga

SEQ ID NO: 233161 - DNA, 25 bp, Artificial
  Probe
ccccagtggcagtctccttcgtagt

SEQ ID NO: 233162 - DNA, 25 bp, Artificial
  Probe
cctacgggagccagtcagtggaaca

SEQ ID NO: 233163 - DNA, 25 bp, Artificial
  Probe
gaagacagtgcctacgggagccagt

SEQ ID NO: 233164 - DNA, 25 bp, Artificial
  Probe
gcagccctgcagaacctggagcaac

SEQ ID NO: 233165 - DNA, 25 bp, Artificial
  Probe
aagccttgtccgacatgggtcttca

SEQ ID NO: 233166 - DNA, 25 bp, Artificial
  Probe
gcagtctccttcgtagttacaagct

SEQ ID NO: 233167 - DNA, 25 bp, Artificial
  Probe
ccctgcagaacctggagcaactgct

SEQ ID NO: 233168 - DNA, 25 bp, Artificial
  Probe
cgacatgggtcttcatgagggagtt

SEQ ID NO: 233169 - DNA, 25 bp, Artificial
  Probe
acacacaacagatgcctggcttcta

SEQ ID NO: 233170 - DNA, 25 bp, Artificial
  Probe
acgcagccaacaaaatttcatcgag

SEQ ID NO: 233171 - DNA, 25 bp, Artificial
  Probe
gttcaaggcttattccacatttgcc

SEQ ID NO: 233172 - DNA, 25 bp, Artificial
  Probe
gcttgcatcaccaagctccaggctt

SEQ ID NO: 233173 - DNA, 25 bp, Artificial
  Probe
ggcagaatacttggtgtttgcacgg

SEQ ID NO: 233174 - DNA, 25 bp, Artificial
  Probe
tgcacaaagtgtgtctcagagatcc

SEQ ID NO: 233175 - DNA, 25 bp, Artificial
  Probe
tcatcgagcccttgagcacagccgt

SEQ ID NO: 233176 - DNA, 25 bp, Artificial
  Probe
gcacaaagtgtgtctcagagatccg

SEQ ID NO: 233177 - DNA, 25 bp, Artificial
  Probe
agccacacatgacaaagcctccgga

SEQ ID NO: 233178 - DNA, 25 bp, Artificial
  Probe
tgaggcttgcatcaccaagctccag

SEQ ID NO: 233179 - DNA, 25 bp, Artificial
  Probe
cacaaagtgtgtctcagagatccgt

SEQ ID NO: 233180 - DNA, 25 bp, Artificial
  Probe
aagtgtgtctcagagatccgtacaa

SEQ ID NO: 233181 - DNA, 25 bp, Artificial
  Probe
aaactcccctagacggttgtggatg

SEQ ID NO: 233182 - DNA, 25 bp, Artificial
  Probe
cagatgcctggcttctaaagccaca

SEQ ID NO: 233183 - DNA, 25 bp, Artificial
  Probe
cagaatacttggtgtttgcacggac

SEQ ID NO: 233184 - DNA, 25 bp, Artificial
  Probe
acaacagatgcctggcttctaaagc

SEQ ID NO: 233185 - DNA, 25 bp, Artificial
  Probe
cctagacggttgtggatgtagctta

SEQ ID NO: 233186 - DNA, 25 bp, Artificial
  Probe
tgcatcaccaagctccaggcttggt

SEQ ID NO: 233187 - DNA, 25 bp, Artificial
  Probe
agcccttgagcacagccgtgatatc

SEQ ID NO: 233188 - DNA, 25 bp, Artificial
  Probe
atcgagcccttgagcacagccgtga

SEQ ID NO: 233189 - DNA, 25 bp, Artificial
  Probe
tcccctagacggttgtggatgtagc

SEQ ID NO: 233190 - DNA, 25 bp, Artificial
  Probe
gcttctaaagccacacatgacaaag

SEQ ID NO: 233191 - DNA, 25 bp, Artificial
  Probe
gatcccatgttcaaggcttattcca

SEQ ID NO: 233192 - DNA, 25 bp, Artificial
  Probe
aaagccacacatgacaaagcctccg

SEQ ID NO: 233193 - DNA, 25 bp, Artificial
  Probe
cctggcttctaaagccacacatgac

SEQ ID NO: 233194 - DNA, 25 bp, Artificial
  Probe
aaagtgtgtctcagagatccgtaca

SEQ ID NO: 233195 - DNA, 25 bp, Artificial
  Probe
tgcctggcttctaaagccacacatg

SEQ ID NO: 233196 - DNA, 25 bp, Artificial
  Probe
gccacacatgacaaagcctccggag

SEQ ID NO: 233197 - DNA, 25 bp, Artificial
  Probe
atgttcaaggcttattccacatttg

SEQ ID NO: 233198 - DNA, 25 bp, Artificial
  Probe
ttcatcgagcccttgagcacagccg

SEQ ID NO: 233199 - DNA, 25 bp, Artificial
  Probe
ggcttgcatcaccaagctccaggct

SEQ ID NO: 233200 - DNA, 25 bp, Artificial
  Probe
cacacacaacagatgcctggcttct

SEQ ID NO: 233201 - DNA, 25 bp, Artificial
  Probe
caaagtgtgtctcagagatccgtac

SEQ ID NO: 233202 - DNA, 25 bp, Artificial
  Probe
gcagccaacaaaatttcatcgagcc

SEQ ID NO: 233203 - DNA, 25 bp, Artificial
  Probe
tgtgtctcagagatccgtacaaatg

SEQ ID NO: 233204 - DNA, 25 bp, Artificial
  Probe
cgagcccttgagcacagccgtgata

SEQ ID NO: 233205 - DNA, 25 bp, Artificial
  Probe
gtgtctcagagatccgtacaaatgg

SEQ ID NO: 233206 - DNA, 25 bp, Artificial
  Probe
cttgcatcaccaagctccaggcttg

SEQ ID NO: 233207 - DNA, 25 bp, Artificial
  Probe
aagccacacatgacaaagcctccgg

SEQ ID NO: 233208 - DNA, 25 bp, Artificial
  Probe
cacacatgacaaagcctccggagtc

SEQ ID NO: 233209 - DNA, 25 bp, Artificial
  Probe
gcccttgagcacagccgtgatatca

SEQ ID NO: 233210 - DNA, 25 bp, Artificial
  Probe
gcctggcttctaaagccacacatga

SEQ ID NO: 233211 - DNA, 25 bp, Artificial
  Probe
cccctagacggttgtggatgtagct

SEQ ID NO: 233212 - DNA, 25 bp, Artificial
  Probe
ccctagacggttgtggatgtagctt

SEQ ID NO: 233213 - DNA, 25 bp, Artificial
  Probe
gagcccttgagcacagccgtgatat

SEQ ID NO: 233214 - DNA, 25 bp, Artificial
  Probe
ttgcatcaccaagctccaggcttgg

SEQ ID NO: 233215 - DNA, 25 bp, Artificial
  Probe
ctttgtcaccaacaggaagggtaag

SEQ ID NO: 233216 - DNA, 25 bp, Artificial
  Probe
gatttctctgtcagcgtcggcattc

SEQ ID NO: 233217 - DNA, 25 bp, Artificial
  Probe
ctggtgattcggtgacaaataagtc

SEQ ID NO: 233218 - DNA, 25 bp, Artificial
  Probe
ccctgttgagttggagtactaatta

SEQ ID NO: 233219 - DNA, 25 bp, Artificial
  Probe
tctctgtcagcgtcggcattcgtca

SEQ ID NO: 233220 - DNA, 25 bp, Artificial
  Probe
ataagtccctctttaggcatcctgc

SEQ ID NO: 233221 - DNA, 25 bp, Artificial
  Probe
agtctcgcgtgctgtttgtatattt

SEQ ID NO: 233222 - DNA, 25 bp, Artificial
  Probe
ggcatcctgcaagacaaacgaccca

SEQ ID NO: 233223 - DNA, 25 bp, Artificial
  Probe
tcaccaacaggaagggtaaggatgt

SEQ ID NO: 233224 - DNA, 25 bp, Artificial
  Probe
ccctctttaggcatcctgcaagaca

SEQ ID NO: 233225 - DNA, 25 bp, Artificial
  Probe
aggtgcagagcctttgtcaccaaca

SEQ ID NO: 233226 - DNA, 25 bp, Artificial
  Probe
tcgtcctcccgttgcacaagaaatg

SEQ ID NO: 233227 - DNA, 25 bp, Artificial
  Probe
tagagtctcgcgtgctgtttgtata

SEQ ID NO: 233228 - DNA, 25 bp, Artificial
  Probe
ctgcaagacaaacgacccacgcatg

SEQ ID NO: 233229 - DNA, 25 bp, Artificial
  Probe
ttctcttccctcttgttctggctga

SEQ ID NO: 233230 - DNA, 25 bp, Artificial
  Probe
cacgcatgctatttccactagtcag

SEQ ID NO: 233231 - DNA, 25 bp, Artificial
  Probe
atgctatttccactagtcagccctg

SEQ ID NO: 233232 - DNA, 25 bp, Artificial
  Probe
ttcggatgtggtgcatctcattccc

SEQ ID NO: 233233 - DNA, 25 bp, Artificial
  Probe
tccctcttgttctggctgatttctc

SEQ ID NO: 233234 - DNA, 25 bp, Artificial
  Probe
tttccactagtcagccctgttgagt

SEQ ID NO: 233235 - DNA, 25 bp, Artificial
  Probe
ctcgcgtgctgtttgtatattttga

SEQ ID NO: 233236 - DNA, 25 bp, Artificial
  Probe
cttgttctggctgatttctctgtca

SEQ ID NO: 233237 - DNA, 25 bp, Artificial
  Probe
cctcccgttgcacaagaaatgaagt

SEQ ID NO: 233238 - DNA, 25 bp, Artificial
  Probe
caatcccatatcatgttgctcctgg

SEQ ID NO: 233239 - DNA, 25 bp, Artificial
  Probe
gatgacgtacgtggacgtgtaaaac

SEQ ID NO: 233240 - DNA, 25 bp, Artificial
  Probe
agcgtcggcattcgtcatcgtcctc

SEQ ID NO: 233241 - DNA, 25 bp, Artificial
  Probe
gacaaacgacccacgcatgctattt

SEQ ID NO: 233242 - DNA, 25 bp, Artificial
  Probe
gacccacgcatgctatttccactag

SEQ ID NO: 233243 - DNA, 25 bp, Artificial
  Probe
gcagtttactgctgccaatcaaacc

SEQ ID NO: 233244 - DNA, 25 bp, Artificial
  Probe
actagtcagccctgttgagttggag

SEQ ID NO: 233245 - DNA, 25 bp, Artificial
  Probe
ggcattcgtcatcgtcctcccgttg

SEQ ID NO: 233246 - DNA, 25 bp, Artificial
  Probe
ggatgtttcggatgtggtgcatctc

SEQ ID NO: 233247 - DNA, 25 bp, Artificial
  Probe
gtactaattagacacttagagtctc

SEQ ID NO: 233248 - DNA, 25 bp, Artificial
  Probe
ttacaaacccgttcgttctggccag

SEQ ID NO: 233249 - DNA, 25 bp, Artificial
  Probe
gcagggcagtttactgctgccaatc

SEQ ID NO: 233250 - DNA, 25 bp, Artificial
  Probe
cttccctcttgttctggctgatttc

SEQ ID NO: 233251 - DNA, 25 bp, Artificial
  Probe
acacttagagtctcgcgtgctgttt

SEQ ID NO: 233252 - DNA, 25 bp, Artificial
  Probe
tacaaacccgttcgttctggccagc

SEQ ID NO: 233253 - DNA, 25 bp, Artificial
  Probe
gtgacaaataagtccctctttaggc

SEQ ID NO: 233254 - DNA, 25 bp, Artificial
  Probe
gtcagcgtcggcattcgtcatcgtc

SEQ ID NO: 233255 - DNA, 25 bp, Artificial
  Probe
aagtccctctttaggcatcctgcaa

SEQ ID NO: 233256 - DNA, 25 bp, Artificial
  Probe
tgagatttacaaacccgttcgttct

SEQ ID NO: 233257 - DNA, 25 bp, Artificial
  Probe
gcaagacaaacgacccacgcatgct

SEQ ID NO: 233258 - DNA, 25 bp, Artificial
  Probe
aattcacaaggcagcggaaagtaag

SEQ ID NO: 233259 - DNA, 25 bp, Artificial
  Probe
cggatgtggtgcatctcattcccac

SEQ ID NO: 233260 - DNA, 25 bp, Artificial
  Probe
gctcctggtgattcggtgacaaata

SEQ ID NO: 233261 - DNA, 25 bp, Artificial
  Probe
cagtcctaacatcatctatgggaaa

SEQ ID NO: 233262 - DNA, 25 bp, Artificial
  Probe
accctgaggtgatcagtgtctttgg

SEQ ID NO: 233263 - DNA, 25 bp, Artificial
  Probe
acacaccctgaggtgatcagtgtct

SEQ ID NO: 233264 - DNA, 25 bp, Artificial
  Probe
atccagtcctaacatcatctatggg

SEQ ID NO: 233265 - DNA, 25 bp, Artificial
  Probe
taacatcatctatgggaaagcctta

SEQ ID NO: 233266 - DNA, 25 bp, Artificial
  Probe
agaacacaccctgaggtgatcagtg

SEQ ID NO: 233267 - DNA, 25 bp, Artificial
  Probe
acaggcagcttgttatatacgatct

SEQ ID NO: 233268 - DNA, 25 bp, Artificial
  Probe
aaagccttagggaaatgcagaacac

SEQ ID NO: 233269 - DNA, 25 bp, Artificial
  Probe
ccctgaggtgatcagtgtctttggc

SEQ ID NO: 233270 - DNA, 25 bp, Artificial
  Probe
ctttggcgagcctgtgaaaggctat

SEQ ID NO: 233271 - DNA, 25 bp, Artificial
  Probe
ggagacaacatgtcagctttactga

SEQ ID NO: 233272 - DNA, 25 bp, Artificial
  Probe
aggtgatcagtgtctttggcgagcc

SEQ ID NO: 233273 - DNA, 25 bp, Artificial
  Probe
ttacaggcagcttgttatatacgat

SEQ ID NO: 233274 - DNA, 25 bp, Artificial
  Probe
ggtgatcagtgtctttggcgagcct

SEQ ID NO: 233275 - DNA, 25 bp, Artificial
  Probe
tcatctatgggaaagccttagggaa

SEQ ID NO: 233276 - DNA, 25 bp, Artificial
  Probe
agtcctaacatcatctatgggaaag

SEQ ID NO: 233277 - DNA, 25 bp, Artificial
  Probe
ctaacatcatctatgggaaagcctt

SEQ ID NO: 233278 - DNA, 25 bp, Artificial
  Probe
cctaacatcatctatgggaaagcct

SEQ ID NO: 233279 - DNA, 25 bp, Artificial
  Probe
gaaatgcagaacacaccctgaggtg

SEQ ID NO: 233280 - DNA, 25 bp, Artificial
  Probe
tccagtcctaacatcatctatggga

SEQ ID NO: 233281 - DNA, 25 bp, Artificial
  Probe
gtcctaacatcatctatgggaaagc

SEQ ID NO: 233282 - DNA, 25 bp, Artificial
  Probe
gttatatacgatcttcaaagaactg

SEQ ID NO: 233283 - DNA, 25 bp, Artificial
  Probe
aacacaccctgaggtgatcagtgtc

SEQ ID NO: 233284 - DNA, 25 bp, Artificial
  Probe
caccctgaggtgatcagtgtctttg

SEQ ID NO: 233285 - DNA, 25 bp, Artificial
  Probe
tcctaacatcatctatgggaaagcc

SEQ ID NO: 233286 - DNA, 25 bp, Artificial
  Probe
gtgatcagtgtctttggcgagcctg

SEQ ID NO: 233287 - DNA, 25 bp, Artificial
  Probe
tttggcgagcctgtgaaaggctatg

SEQ ID NO: 233288 - DNA, 25 bp, Artificial
  Probe
aagccttagggaaatgcagaacaca

SEQ ID NO: 233289 - DNA, 25 bp, Artificial
  Probe
tgatcagtgtctttggcgagcctgt

SEQ ID NO: 233290 - DNA, 25 bp, Artificial
  Probe
acaccctgaggtgatcagtgtcttt

SEQ ID NO: 233291 - DNA, 25 bp, Artificial
  Probe
aatgcagaacacaccctgaggtgat

SEQ ID NO: 233292 - DNA, 25 bp, Artificial
  Probe
caggcagcttgttatatacgatctt

SEQ ID NO: 233293 - DNA, 25 bp, Artificial
  Probe
gaacacaccctgaggtgatcagtgt

SEQ ID NO: 233294 - DNA, 25 bp, Artificial
  Probe
ggaaatgcagaacacaccctgaggt

SEQ ID NO: 233295 - DNA, 25 bp, Artificial
  Probe
attacaggcagcttgttatatacga

SEQ ID NO: 233296 - DNA, 25 bp, Artificial
  Probe
cattacaggcagcttgttatatacg

SEQ ID NO: 233297 - DNA, 25 bp, Artificial
  Probe
aaatgcagaacacaccctgaggtga

SEQ ID NO: 233298 - DNA, 25 bp, Artificial
  Probe
gcattacaggcagcttgttatatac

SEQ ID NO: 233299 - DNA, 25 bp, Artificial
  Probe
atcatctatgggaaagccttaggga

SEQ ID NO: 233300 - DNA, 25 bp, Artificial
  Probe
gatcagtgtctttggcgagcctgtg

SEQ ID NO: 233301 - DNA, 25 bp, Artificial
  Probe
ccagtcctaacatcatctatgggaa

SEQ ID NO: 233302 - DNA, 25 bp, Artificial
  Probe
agcattacaggcagcttgttatata

SEQ ID NO: 233303 - DNA, 25 bp, Artificial
  Probe
tacaggcagcttgttatatacgatc

SEQ ID NO: 233304 - DNA, 25 bp, Artificial
  Probe
cagaacacaccctgaggtgatcagt

SEQ ID NO: 233305 - DNA, 25 bp, Artificial
  Probe
aggcagcttgttatatacgatcttc

SEQ ID NO: 233306 - DNA, 25 bp, Artificial
  Probe
catctatgggaaagccttagggaaa

SEQ ID NO: 233307 - DNA, 25 bp, Artificial
  Probe
ccaaaaggacctacagggagctgcg

SEQ ID NO: 233308 - DNA, 25 bp, Artificial
  Probe
gccaaaaggacctacagggagctgc

SEQ ID NO: 233309 - DNA, 25 bp, Artificial
  Probe
gtatttaggtcaaggtgtctccatt

SEQ ID NO: 233310 - DNA, 25 bp, Artificial
  Probe
ggtctcgtatttaggtcaaggtgtc

SEQ ID NO: 233311 - DNA, 25 bp, Artificial
  Probe
tgtaaagccaattccagtgttggac

SEQ ID NO: 233312 - DNA, 25 bp, Artificial
  Probe
cattcacgccaaaaggacctacagg

SEQ ID NO: 233313 - DNA, 25 bp, Artificial
  Probe
acgccaaaaggacctacagggagct

SEQ ID NO: 233314 - DNA, 25 bp, Artificial
  Probe
atccatggtgcgatgctgccgccac

SEQ ID NO: 233315 - DNA, 25 bp, Artificial
  Probe
atttaggtcaaggtgtctccattct

SEQ ID NO: 233316 - DNA, 25 bp, Artificial
  Probe
gtgtaaagccaattccagtgttgga

SEQ ID NO: 233317 - DNA, 25 bp, Artificial
  Probe
attcacgccaaaaggacctacaggg

SEQ ID NO: 233318 - DNA, 25 bp, Artificial
  Probe
tcgtatttaggtcaaggtgtctcca

SEQ ID NO: 233319 - DNA, 25 bp, Artificial
  Probe
aagtgtaaagccaattccagtgttg

SEQ ID NO: 233320 - DNA, 25 bp, Artificial
  Probe
ctcgtatttaggtcaaggtgtctcc

SEQ ID NO: 233321 - DNA, 25 bp, Artificial
  Probe
cacgccaaaaggacctacagggagc

SEQ ID NO: 233322 - DNA, 25 bp, Artificial
  Probe
acaggtctcgtatttaggtcaaggt

SEQ ID NO: 233323 - DNA, 25 bp, Artificial
  Probe
tctcgtatttaggtcaaggtgtctc

SEQ ID NO: 233324 - DNA, 25 bp, Artificial
  Probe
gtctcgtatttaggtcaaggtgtct

SEQ ID NO: 233325 - DNA, 25 bp, Artificial
  Probe
aacaggtctcgtatttaggtcaagg

SEQ ID NO: 233326 - DNA, 25 bp, Artificial
  Probe
agtgtaaagccaattccagtgttgg

SEQ ID NO: 233327 - DNA, 25 bp, Artificial
  Probe
caggtctcgtatttaggtcaaggtg

SEQ ID NO: 233328 - DNA, 25 bp, Artificial
  Probe
ttcacgccaaaaggacctacaggga

SEQ ID NO: 233329 - DNA, 25 bp, Artificial
  Probe
gtaaagccaattccagtgttggacg

SEQ ID NO: 233330 - DNA, 25 bp, Artificial
  Probe
tcattcacgccaaaaggacctacag

SEQ ID NO: 233331 - DNA, 25 bp, Artificial
  Probe
tatttaggtcaaggtgtctccattc

SEQ ID NO: 233332 - DNA, 25 bp, Artificial
  Probe
tcacgccaaaaggacctacagggag

SEQ ID NO: 233333 - DNA, 25 bp, Artificial
  Probe
cgccaaaaggacctacagggagctg

SEQ ID NO: 233334 - DNA, 25 bp, Artificial
  Probe
tggcatccatggtgcgatgctgccg

SEQ ID NO: 233335 - DNA, 25 bp, Artificial
  Probe
atggagaccacagtctcccagtggg

SEQ ID NO: 233336 - DNA, 25 bp, Artificial
  Probe
gcaataactccaagcaggctccagc

SEQ ID NO: 233337 - DNA, 25 bp, Artificial
  Probe
tctccagagcagaggggggcttgga

SEQ ID NO: 233338 - DNA, 25 bp, Artificial
  Probe
tccaagcaggctccagcccctggac

SEQ ID NO: 233339 - DNA, 25 bp, Artificial
  Probe
ccccccttgaagcaataactccaag

SEQ ID NO: 233340 - DNA, 25 bp, Artificial
  Probe
ggcattagtgcccccccttgaagca

SEQ ID NO: 233341 - DNA, 25 bp, Artificial
  Probe
accacagtctcccagtgggtgatgc

SEQ ID NO: 233342 - DNA, 25 bp, Artificial
  Probe
ctgatctcagggagggaaggggatg

SEQ ID NO: 233343 - DNA, 25 bp, Artificial
  Probe
tctcagggagggaaggggatggaga

SEQ ID NO: 233344 - DNA, 25 bp, Artificial
  Probe
agcaataactccaagcaggctccag

SEQ ID NO: 233345 - DNA, 25 bp, Artificial
  Probe
gagaccacagtctcccagtgggtga

SEQ ID NO: 233346 - DNA, 25 bp, Artificial
  Probe
acctcctctccagagcagagggggg

SEQ ID NO: 233347 - DNA, 25 bp, Artificial
  Probe
tgcccccccttgaagcaataactcc

SEQ ID NO: 233348 - DNA, 25 bp, Artificial
  Probe
tgaagcaataactccaagcaggctc

SEQ ID NO: 233349 - DNA, 25 bp, Artificial
  Probe
tgcattgggcattagtgccccccct

SEQ ID NO: 233350 - DNA, 25 bp, Artificial
  Probe
caataactccaagcaggctccagcc

SEQ ID NO: 233351 - DNA, 25 bp, Artificial
  Probe
cttgaagcaataactccaagcaggc

SEQ ID NO: 233352 - DNA, 25 bp, Artificial
  Probe
tgatctcagggagggaaggggatgg

SEQ ID NO: 233353 - DNA, 25 bp, Artificial
  Probe
gatggagaccacagtctcccagtgg

SEQ ID NO: 233354 - DNA, 25 bp, Artificial
  Probe
gaagcaataactccaagcaggctcc

SEQ ID NO: 233355 - DNA, 25 bp, Artificial
  Probe
aactgatctcagggagggaagggga

SEQ ID NO: 233356 - DNA, 25 bp, Artificial
  Probe
agaccacagtctcccagtgggtgat

SEQ ID NO: 233357 - DNA, 25 bp, Artificial
  Probe
tcctctccagagcagaggggggctt

SEQ ID NO: 233358 - DNA, 25 bp, Artificial
  Probe
gggcattagtgcccccccttgaagc

SEQ ID NO: 233359 - DNA, 25 bp, Artificial
  Probe
gcattgggcattagtgccccccctt

SEQ ID NO: 233360 - DNA, 25 bp, Artificial
  Probe
gcccccccttgaagcaataactcca

SEQ ID NO: 233361 - DNA, 25 bp, Artificial
  Probe
ccccttgaagcaataactccaagca

SEQ ID NO: 233362 - DNA, 25 bp, Artificial
  Probe
ctctccagagcagaggggggcttgg

SEQ ID NO: 233363 - DNA, 25 bp, Artificial
  Probe
agagcagaggggggcttggaaagca

SEQ ID NO: 233364 - DNA, 25 bp, Artificial
  Probe
aataactccaagcaggctccagccc

SEQ ID NO: 233365 - DNA, 25 bp, Artificial
  Probe
ctccagagcagaggggggcttggaa

SEQ ID NO: 233366 - DNA, 25 bp, Artificial
  Probe
caaaaactgatctcagggagggaag

SEQ ID NO: 233367 - DNA, 25 bp, Artificial
  Probe
tggagaccacagtctcccagtgggt

SEQ ID NO: 233368 - DNA, 25 bp, Artificial
  Probe
agcagaggggggcttggaaagcaaa

SEQ ID NO: 233369 - DNA, 25 bp, Artificial
  Probe
ggagaccacagtctcccagtgggtg

SEQ ID NO: 233370 - DNA, 25 bp, Artificial
  Probe
actccaagcaggctccagcccctgg

SEQ ID NO: 233371 - DNA, 25 bp, Artificial
  Probe
ccacagtctcccagtgggtgatgct

SEQ ID NO: 233372 - DNA, 25 bp, Artificial
  Probe
attgggcattagtgcccccccttga

SEQ ID NO: 233373 - DNA, 25 bp, Artificial
  Probe
aactccaagcaggctccagcccctg

SEQ ID NO: 233374 - DNA, 25 bp, Artificial
  Probe
ccttgaagcaataactccaagcagg

SEQ ID NO: 233375 - DNA, 25 bp, Artificial
  Probe
cacagtctcccagtgggtgatgctt

SEQ ID NO: 233376 - DNA, 25 bp, Artificial
  Probe
tgggcattagtgcccccccttgaag

SEQ ID NO: 233377 - DNA, 25 bp, Artificial
  Probe
ggcaaaaactgatctcagggaggga

SEQ ID NO: 233378 - DNA, 25 bp, Artificial
  Probe
ttgaagcaataactccaagcaggct

SEQ ID NO: 233379 - DNA, 25 bp, Artificial
  Probe
aagcaataactccaagcaggctcca

SEQ ID NO: 233380 - DNA, 25 bp, Artificial
  Probe
cccttgaagcaataactccaagcag

SEQ ID NO: 233381 - DNA, 25 bp, Artificial
  Probe
ttctcagactctccagagggttcgg

SEQ ID NO: 233382 - DNA, 25 bp, Artificial
  Probe
ggccaggatatcactatggacatcc

SEQ ID NO: 233383 - DNA, 25 bp, Artificial
  Probe
tggacatcccagaagagcagccgcg

SEQ ID NO: 233384 - DNA, 25 bp, Artificial
  Probe
tcaccaaagccatctgacgatattg

SEQ ID NO: 233385 - DNA, 25 bp, Artificial
  Probe
tattggcagcgagatctgcacggtt

SEQ ID NO: 233386 - DNA, 25 bp, Artificial
  Probe
catccacagactcatgaagctgcca

SEQ ID NO: 233387 - DNA, 25 bp, Artificial
  Probe
cagagggttcggactcatccacaga

SEQ ID NO: 233388 - DNA, 25 bp, Artificial
  Probe
agcgagatctgcacggttcagaata

SEQ ID NO: 233389 - DNA, 25 bp, Artificial
  Probe
gcggcatgatacaggccaggatgtc

SEQ ID NO: 233390 - DNA, 25 bp, Artificial
  Probe
cagactctccagagggttcggactc

SEQ ID NO: 233391 - DNA, 25 bp, Artificial
  Probe
tatagacaggagcttccttataaaa

SEQ ID NO: 233392 - DNA, 25 bp, Artificial
  Probe
agatctgcacggttcagaatattac

SEQ ID NO: 233393 - DNA, 25 bp, Artificial
  Probe
gatacaggccaggatgtcgttcacc

SEQ ID NO: 233394 - DNA, 25 bp, Artificial
  Probe
tcttgaatgaaatcccagaagagca

SEQ ID NO: 233395 - DNA, 25 bp, Artificial
  Probe
tctccagagggttcggactcatcca

SEQ ID NO: 233396 - DNA, 25 bp, Artificial
  Probe
tccttatagacaggagcttccttat

SEQ ID NO: 233397 - DNA, 25 bp, Artificial
  Probe
tatggacatcccagaagagcagccg

SEQ ID NO: 233398 - DNA, 25 bp, Artificial
  Probe
gatgtcgttcaccttccttatagac

SEQ ID NO: 233399 - DNA, 25 bp, Artificial
  Probe
tgatacaggccaggatgtcgttcac

SEQ ID NO: 233400 - DNA, 25 bp, Artificial
  Probe
tcactatggacatcccagaagagca

SEQ ID NO: 233401 - DNA, 25 bp, Artificial
  Probe
caggccaggatgtcgttcaccttcc

SEQ ID NO: 233402 - DNA, 25 bp, Artificial
  Probe
gacttctcagactctccagagggtt

SEQ ID NO: 233403 - DNA, 25 bp, Artificial
  Probe
tgacttctcagactctccagagggt

SEQ ID NO: 233404 - DNA, 25 bp, Artificial
  Probe
gttcggactcatccacagactcatg

SEQ ID NO: 233405 - DNA, 25 bp, Artificial
  Probe
agcagccgcggcatgatacaggcca

SEQ ID NO: 233406 - DNA, 25 bp, Artificial
  Probe
tgtcgttcaccttccttatagacag

SEQ ID NO: 233407 - DNA, 25 bp, Artificial
  Probe
atccacagactcatgaagctgccac

SEQ ID NO: 233408 - DNA, 25 bp, Artificial
  Probe
gttcaccttccttatagacaggagc

SEQ ID NO: 233409 - DNA, 25 bp, Artificial
  Probe
tctactcaggccaggatatcactat

SEQ ID NO: 233410 - DNA, 25 bp, Artificial
  Probe
ccttatagacaggagcttccttata

SEQ ID NO: 233411 - DNA, 25 bp, Artificial
  Probe
atatcactatggacatcccagaaga

SEQ ID NO: 233412 - DNA, 25 bp, Artificial
  Probe
gccaggatgtcgttcaccttcctta

SEQ ID NO: 233413 - DNA, 25 bp, Artificial
  Probe
tacaggccaggatgtcgttcacctt

SEQ ID NO: 233414 - DNA, 25 bp, Artificial
  Probe
atgatacaggccaggatgtcgttca

SEQ ID NO: 233415 - DNA, 25 bp, Artificial
  Probe
aggatgtcgttcaccttccttatag

SEQ ID NO: 233416 - DNA, 25 bp, Artificial
  Probe
aggccaggatgtcgttcaccttcct

SEQ ID NO: 233417 - DNA, 25 bp, Artificial
  Probe
gcagcgagatctgcacggttcagaa

SEQ ID NO: 233418 - DNA, 25 bp, Artificial
  Probe
ctctccagagggttcggactcatcc

SEQ ID NO: 233419 - DNA, 25 bp, Artificial
  Probe
aggatatcactatggacatcccaga

SEQ ID NO: 233420 - DNA, 25 bp, Artificial
  Probe
ccaaagccatctgacgatattgtga

SEQ ID NO: 233421 - DNA, 25 bp, Artificial
  Probe
atctgcacggttcagaatattacaa

SEQ ID NO: 233422 - DNA, 25 bp, Artificial
  Probe
ttggcagcgagatctgcacggttca

SEQ ID NO: 233423 - DNA, 25 bp, Artificial
  Probe
ccaggatatcactatggacatccca

SEQ ID NO: 233424 - DNA, 25 bp, Artificial
  Probe
tcccagaagagcagccgcggcatga

SEQ ID NO: 233425 - DNA, 25 bp, Artificial
  Probe
ttattggcagcgagatctgcacggt

SEQ ID NO: 233426 - DNA, 25 bp, Artificial
  Probe
ctcagactctccagagggttcggac

SEQ ID NO: 233427 - DNA, 25 bp, Artificial
  Probe
gggtagacagacctccttcggccag

SEQ ID NO: 233428 - DNA, 25 bp, Artificial
  Probe
tcaaaggccaagtggcaaacgggaa

SEQ ID NO: 233429 - DNA, 25 bp, Artificial
  Probe
tttcacgaccggaaaagaagttgct

SEQ ID NO: 233430 - DNA, 25 bp, Artificial
  Probe
gctggtatcctttcacgaccggaaa

SEQ ID NO: 233431 - DNA, 25 bp, Artificial
  Probe
actgctggtatcctttcacgaccgg

SEQ ID NO: 233432 - DNA, 25 bp, Artificial
  Probe
cagaacgatcaaaggccaagtggca

SEQ ID NO: 233433 - DNA, 25 bp, Artificial
  Probe
tggaaactgctggtatcctttcacg

SEQ ID NO: 233434 - DNA, 25 bp, Artificial
  Probe
tttggaaactgctggtatcctttca

SEQ ID NO: 233435 - DNA, 25 bp, Artificial
  Probe
ggcaaacgggaaccaatccgctgta

SEQ ID NO: 233436 - DNA, 25 bp, Artificial
  Probe
ttaatgcactgtatgatttgtcttc

SEQ ID NO: 233437 - DNA, 25 bp, Artificial
  Probe
gatcaaaggccaagtggcaaacggg

SEQ ID NO: 233438 - DNA, 25 bp, Artificial
  Probe
aatgcactgtatgatttgtcttcct

SEQ ID NO: 233439 - DNA, 25 bp, Artificial
  Probe
gcaaacgggaaccaatccgctgtac

SEQ ID NO: 233440 - DNA, 25 bp, Artificial
  Probe
gaatccagctacctaaagtctttgt

SEQ ID NO: 233441 - DNA, 25 bp, Artificial
  Probe
gcatttggaaactgctggtatcctt

SEQ ID NO: 233442 - DNA, 25 bp, Artificial
  Probe
tcttcagatgggtagacagacctcc

SEQ ID NO: 233443 - DNA, 25 bp, Artificial
  Probe
tggtatcctttcacgaccggaaaag

SEQ ID NO: 233444 - DNA, 25 bp, Artificial
  Probe
taaagcagaacgatcaaaggccaag

SEQ ID NO: 233445 - DNA, 25 bp, Artificial
  Probe
atttggaaactgctggtatcctttc

SEQ ID NO: 233446 - DNA, 25 bp, Artificial
  Probe
ttgtcttcctttgtttcgtcaaaag

SEQ ID NO: 233447 - DNA, 25 bp, Artificial
  Probe
ctgctggtatcctttcacgaccgga

SEQ ID NO: 233448 - DNA, 25 bp, Artificial
  Probe
tcattcagggcgtgaaggtgagaca

SEQ ID NO: 233449 - DNA, 25 bp, Artificial
  Probe
tcttcctttgtttcgtcaaaaggag

SEQ ID NO: 233450 - DNA, 25 bp, Artificial
  Probe
gcttcctgaatccagctacctaaag

SEQ ID NO: 233451 - DNA, 25 bp, Artificial
  Probe
gaaactgctggtatcctttcacgac

SEQ ID NO: 233452 - DNA, 25 bp, Artificial
  Probe
atgcactgtatgatttgtcttcctt

SEQ ID NO: 233453 - DNA, 25 bp, Artificial
  Probe
atgggtagacagacctccttcggcc

SEQ ID NO: 233454 - DNA, 25 bp, Artificial
  Probe
aactgctggtatcctttcacgaccg

SEQ ID NO: 233455 - DNA, 25 bp, Artificial
  Probe
agaatatcccaagcaaagaggtgaa

SEQ ID NO: 233456 - DNA, 25 bp, Artificial
  Probe
catttggaaactgctggtatccttt

SEQ ID NO: 233457 - DNA, 25 bp, Artificial
  Probe
cattcagggcgtgaaggtgagacat

SEQ ID NO: 233458 - DNA, 25 bp, Artificial
  Probe
tgggtagacagacctccttcggcca

SEQ ID NO: 233459 - DNA, 25 bp, Artificial
  Probe
tgctggtatcctttcacgaccggaa

SEQ ID NO: 233460 - DNA, 25 bp, Artificial
  Probe
gaatatcccaagcaaagaggtgaat

SEQ ID NO: 233461 - DNA, 25 bp, Artificial
  Probe
ttcacgaccggaaaagaagttgcta

SEQ ID NO: 233462 - DNA, 25 bp, Artificial
  Probe
tgaatccagctacctaaagtctttg

SEQ ID NO: 233463 - DNA, 25 bp, Artificial
  Probe
ggccaagtggcaaacgggaaccaat

SEQ ID NO: 233464 - DNA, 25 bp, Artificial
  Probe
atatcccaagcaaagaggtgaattc

SEQ ID NO: 233465 - DNA, 25 bp, Artificial
  Probe
gatcagtcattcagggcgtgaaggt

SEQ ID NO: 233466 - DNA, 25 bp, Artificial
  Probe
aatatcccaagcaaagaggtgaatt

SEQ ID NO: 233467 - DNA, 25 bp, Artificial
  Probe
aaactgctggtatcctttcacgacc

SEQ ID NO: 233468 - DNA, 25 bp, Artificial
  Probe
cgatcaaaggccaagtggcaaacgg

SEQ ID NO: 233469 - DNA, 25 bp, Artificial
  Probe
ggtagacagacctccttcggccaga

SEQ ID NO: 233470 - DNA, 25 bp, Artificial
  Probe
ggaaactgctggtatcctttcacga

SEQ ID NO: 233471 - DNA, 25 bp, Artificial
  Probe
gcactgtatgatttgtcttcctttg

SEQ ID NO: 233472 - DNA, 25 bp, Artificial
  Probe
taatgcactgtatgatttgtcttcc

SEQ ID NO: 233473 - DNA, 25 bp, Artificial
  Probe
gcgaccattgccagtttctgtccgc

SEQ ID NO: 233474 - DNA, 25 bp, Artificial
  Probe
cgtgcttgtttctttcctggatgtg

SEQ ID NO: 233475 - DNA, 25 bp, Artificial
  Probe
tagggaaatctcactatgtactgta

SEQ ID NO: 233476 - DNA, 25 bp, Artificial
  Probe
tcacggggttccagactcacacaac

SEQ ID NO: 233477 - DNA, 25 bp, Artificial
  Probe
tgaggagttgcgaccattgccagtt

SEQ ID NO: 233478 - DNA, 25 bp, Artificial
  Probe
cagtgaccggcagctcatgagtcaa

SEQ ID NO: 233479 - DNA, 25 bp, Artificial
  Probe
accgtgcttgtttctttcctggatg

SEQ ID NO: 233480 - DNA, 25 bp, Artificial
  Probe
tgaccggcagctcatgagtcaagtg

SEQ ID NO: 233481 - DNA, 25 bp, Artificial
  Probe
atctcactatgtactgtatgggctg

SEQ ID NO: 233482 - DNA, 25 bp, Artificial
  Probe
ctcactatgtactgtatgggctggt

SEQ ID NO: 233483 - DNA, 25 bp, Artificial
  Probe
gtggccgccatgcagcctcggatgc

SEQ ID NO: 233484 - DNA, 25 bp, Artificial
  Probe
ttctttcctggatgtgcgaaacatc

SEQ ID NO: 233485 - DNA, 25 bp, Artificial
  Probe
attctagggaaatctcactatgtac

SEQ ID NO: 233486 - DNA, 25 bp, Artificial
  Probe
gtgaccggcagctcatgagtcaagt

SEQ ID NO: 233487 - DNA, 25 bp, Artificial
  Probe
atgtgcgaaacatcattctagggaa

SEQ ID NO: 233488 - DNA, 25 bp, Artificial
  Probe
acggggttccagactcacacaactc

SEQ ID NO: 233489 - DNA, 25 bp, Artificial
  Probe
aggagttgcgaccattgccagtttc

SEQ ID NO: 233490 - DNA, 25 bp, Artificial
  Probe
cattgccagtttctgtccgcgtggg

SEQ ID NO: 233491 - DNA, 25 bp, Artificial
  Probe
tttctgtccgcgtgggtcaggcagt

SEQ ID NO: 233492 - DNA, 25 bp, Artificial
  Probe
tcattctagggaaatctcactatgt

SEQ ID NO: 233493 - DNA, 25 bp, Artificial
  Probe
agttgcgaccattgccagtttctgt

SEQ ID NO: 233494 - DNA, 25 bp, Artificial
  Probe
ggctgctcaccgtgcttgtttcttt

SEQ ID NO: 233495 - DNA, 25 bp, Artificial
  Probe
cgaaacatcattctagggaaatctc

SEQ ID NO: 233496 - DNA, 25 bp, Artificial
  Probe
tgccagtttctgtccgcgtgggtca

SEQ ID NO: 233497 - DNA, 25 bp, Artificial
  Probe
ctatgtactgtatgggctggtggcc

SEQ ID NO: 233498 - DNA, 25 bp, Artificial
  Probe
gaaacatcattctagggaaatctca

SEQ ID NO: 233499 - DNA, 25 bp, Artificial
  Probe
gaaatctcactatgtactgtatggg

SEQ ID NO: 233500 - DNA, 25 bp, Artificial
  Probe
cttgtttctttcctggatgtgcgaa

SEQ ID NO: 233501 - DNA, 25 bp, Artificial
  Probe
tgtttctttcctggatgtgcgaaac

SEQ ID NO: 233502 - DNA, 25 bp, Artificial
  Probe
tactgtatgggctggtggccgccat

SEQ ID NO: 233503 - DNA, 25 bp, Artificial
  Probe
ggttccagactcacacaactccagt

SEQ ID NO: 233504 - DNA, 25 bp, Artificial
  Probe
actatgtactgtatgggctggtggc

SEQ ID NO: 233505 - DNA, 25 bp, Artificial
  Probe
atcattctagggaaatctcactatg

SEQ ID NO: 233506 - DNA, 25 bp, Artificial
  Probe
cgaccattgccagtttctgtccgcg

SEQ ID NO: 233507 - DNA, 25 bp, Artificial
  Probe
gtttctttcctggatgtgcgaaaca

SEQ ID NO: 233508 - DNA, 25 bp, Artificial
  Probe
gctgctcaccgtgcttgtttctttc

SEQ ID NO: 233509 - DNA, 25 bp, Artificial
  Probe
cacggggttccagactcacacaact

SEQ ID NO: 233510 - DNA, 25 bp, Artificial
  Probe
tggccgccatgcagcctcggatgct

SEQ ID NO: 233511 - DNA, 25 bp, Artificial
  Probe
tgcttgtttctttcctggatgtgcg

SEQ ID NO: 233512 - DNA, 25 bp, Artificial
  Probe
ctttcctggatgtgcgaaacatcat

SEQ ID NO: 233513 - DNA, 25 bp, Artificial
  Probe
tgcgaaacatcattctagggaaatc

SEQ ID NO: 233514 - DNA, 25 bp, Artificial
  Probe
aaatctcactatgtactgtatgggc

SEQ ID NO: 233515 - DNA, 25 bp, Artificial
  Probe
ctcaccgtgcttgtttctttcctgg

SEQ ID NO: 233516 - DNA, 25 bp, Artificial
  Probe
tggtggccgccatgcagcctcggat

SEQ ID NO: 233517 - DNA, 25 bp, Artificial
  Probe
ggagttgcgaccattgccagtttct

SEQ ID NO: 233518 - DNA, 25 bp, Artificial
  Probe
ggggttccagactcacacaactcca

SEQ ID NO: 233519 - DNA, 25 bp, Artificial
  Probe
gacagtttttgattctccgccatcc

SEQ ID NO: 233520 - DNA, 25 bp, Artificial
  Probe
gaagccaaagcgagaccgggcgaca

SEQ ID NO: 233521 - DNA, 25 bp, Artificial
  Probe
gtgcaccatgtaaacaagacacaca

SEQ ID NO: 233522 - DNA, 25 bp, Artificial
  Probe
acacacactggcacaacagaacgcg

SEQ ID NO: 233523 - DNA, 25 bp, Artificial
  Probe
tggcacaacagaacgcgcagcaaga

SEQ ID NO: 233524 - DNA, 25 bp, Artificial
  Probe
ccacataacgcctgtaggaatcacc

SEQ ID NO: 233525 - DNA, 25 bp, Artificial
  Probe
tgcgtgaccacataacgcctgtagg

SEQ ID NO: 233526 - DNA, 25 bp, Artificial
  Probe
ctctggtggctagaagccaaagcga

SEQ ID NO: 233527 - DNA, 25 bp, Artificial
  Probe
cctgcgtgaccacataacgcctgta

SEQ ID NO: 233528 - DNA, 25 bp, Artificial
  Probe
acctctggtggctagaagccaaagc

SEQ ID NO: 233529 - DNA, 25 bp, Artificial
  Probe
caagacacacactggcacaacagaa

SEQ ID NO: 233530 - DNA, 25 bp, Artificial
  Probe
acaattcggtgcaccatgtaaacaa

SEQ ID NO: 233531 - DNA, 25 bp, Artificial
  Probe
aagccaaagcgagaccgggcgacat

SEQ ID NO: 233532 - DNA, 25 bp, Artificial
  Probe
aacagaacgcgcagcaagaaggcca

SEQ ID NO: 233533 - DNA, 25 bp, Artificial
  Probe
cacctttgccgctgggtacaccaaa

SEQ ID NO: 233534 - DNA, 25 bp, Artificial
  Probe
ctaaaatacctctggtggctagaag

SEQ ID NO: 233535 - DNA, 25 bp, Artificial
  Probe
gtaaacaagacacacactggcacaa

SEQ ID NO: 233536 - DNA, 25 bp, Artificial
  Probe
gctgggtacaccaaaaggcggacga

SEQ ID NO: 233537 - DNA, 25 bp, Artificial
  Probe
aaggcggacgaatgccttcaccagt

SEQ ID NO: 233538 - DNA, 25 bp, Artificial
  Probe
tctggtggctagaagccaaagcgag

SEQ ID NO: 233539 - DNA, 25 bp, Artificial
  Probe
gagaaccctgcgtgaccacataacg

SEQ ID NO: 233540 - DNA, 25 bp, Artificial
  Probe
cagtggcgcgaatgtgatgaatgtc

SEQ ID NO: 233541 - DNA, 25 bp, Artificial
  Probe
aacgacacaaagaacactcgcgggg

SEQ ID NO: 233542 - DNA, 25 bp, Artificial
  Probe
acaagacacacactggcacaacaga

SEQ ID NO: 233543 - DNA, 25 bp, Artificial
  Probe
gggtacaccaaaaggcggacgaatg

SEQ ID NO: 233544 - DNA, 25 bp, Artificial
  Probe
cgaacaattcggtgcaccatgtaaa

SEQ ID NO: 233545 - DNA, 25 bp, Artificial
  Probe
cggacgaatgccttcaccagtggcg

SEQ ID NO: 233546 - DNA, 25 bp, Artificial
  Probe
aggaatcacctttgccgctgggtac

SEQ ID NO: 233547 - DNA, 25 bp, Artificial
  Probe
actggagaaccctgcgtgaccacat

SEQ ID NO: 233548 - DNA, 25 bp, Artificial
  Probe
caagaatctaaaatacctctggtgg

SEQ ID NO: 233549 - DNA, 25 bp, Artificial
  Probe
aaaggcggacgaatgccttcaccag

SEQ ID NO: 233550 - DNA, 25 bp, Artificial
  Probe
accatgtaaacaagacacacactgg

SEQ ID NO: 233551 - DNA, 25 bp, Artificial
  Probe
accagtggcgcgaatgtgatgaatg

SEQ ID NO: 233552 - DNA, 25 bp, Artificial
  Probe
gcagttaccaacgtcgtgactggag

SEQ ID NO: 233553 - DNA, 25 bp, Artificial
  Probe
agtacgaacaattcggtgcaccatg

SEQ ID NO: 233554 - DNA, 25 bp, Artificial
  Probe
gccgctgggtacaccaaaaggcgga

SEQ ID NO: 233555 - DNA, 25 bp, Artificial
  Probe
gcctgtaggaatcacctttgccgct

SEQ ID NO: 233556 - DNA, 25 bp, Artificial
  Probe
tccgccatccactcgaagaggatga

SEQ ID NO: 233557 - DNA, 25 bp, Artificial
  Probe
tttgccgctgggtacaccaaaaggc

SEQ ID NO: 233558 - DNA, 25 bp, Artificial
  Probe
aatgtcgccaattggacatcgtact

SEQ ID NO: 233559 - DNA, 25 bp, Artificial
  Probe
ccactcgaagaggatgagtacgaac

SEQ ID NO: 233560 - DNA, 25 bp, Artificial
  Probe
tgccttcaccagtggcgcgaatgtg

SEQ ID NO: 233561 - DNA, 25 bp, Artificial
  Probe
gagcaccttaacaagcaagaatcta

SEQ ID NO: 233562 - DNA, 25 bp, Artificial
  Probe
tggctagaagccaaagcgagaccgg

SEQ ID NO: 233563 - DNA, 25 bp, Artificial
  Probe
agaaccctgcgtgaccacataacgc

SEQ ID NO: 233564 - DNA, 25 bp, Artificial
  Probe
ggacagtttttgattctccgccatc

SEQ ID NO: 233565 - DNA, 25 bp, Artificial
  Probe
ttcataccaagagaggaaaacctac

SEQ ID NO: 233566 - DNA, 25 bp, Artificial
  Probe
gtttcttaggcttgtgaagagcacg

SEQ ID NO: 233567 - DNA, 25 bp, Artificial
  Probe
tttgttcataccaagagaggaaaac

SEQ ID NO: 233568 - DNA, 25 bp, Artificial
  Probe
ctttgttcataccaagagaggaaaa

SEQ ID NO: 233569 - DNA, 25 bp, Artificial
  Probe
ccaagatggttttctatgtgtccac

SEQ ID NO: 233570 - DNA, 25 bp, Artificial
  Probe
ttgcatggggtctactcattatttc

SEQ ID NO: 233571 - DNA, 25 bp, Artificial
  Probe
aatgatgcttgcttaccatcctttg

SEQ ID NO: 233572 - DNA, 25 bp, Artificial
  Probe
ggtttcttaggcttgtgaagagcac

SEQ ID NO: 233573 - DNA, 25 bp, Artificial
  Probe
tgatgcttgcttaccatcctttgtt

SEQ ID NO: 233574 - DNA, 25 bp, Artificial
  Probe
ggggtctactcattatttctggtgg

SEQ ID NO: 233575 - DNA, 25 bp, Artificial
  Probe
atcctttgttcataccaagagagga

SEQ ID NO: 233576 - DNA, 25 bp, Artificial
  Probe
gatgcttgcttaccatcctttgttc

SEQ ID NO: 233577 - DNA, 25 bp, Artificial
  Probe
catggggtctactcattatttctgg

SEQ ID NO: 233578 - DNA, 25 bp, Artificial
  Probe
gggtctactcattatttctggtggt

SEQ ID NO: 233579 - DNA, 25 bp, Artificial
  Probe
tcccaagatggttttctatgtgtcc

SEQ ID NO: 233580 - DNA, 25 bp, Artificial
  Probe
ccatcctttgttcataccaagagag

SEQ ID NO: 233581 - DNA, 25 bp, Artificial
  Probe
ttgttcataccaagagaggaaaacc

SEQ ID NO: 233582 - DNA, 25 bp, Artificial
  Probe
catcctttgttcataccaagagagg

SEQ ID NO: 233583 - DNA, 25 bp, Artificial
  Probe
cattatttctggtggtttcttaggc

SEQ ID NO: 233584 - DNA, 25 bp, Artificial
  Probe
cccaagatggttttctatgtgtcca

SEQ ID NO: 233585 - DNA, 25 bp, Artificial
  Probe
ttcccaagatggttttctatgtgtc

SEQ ID NO: 233586 - DNA, 25 bp, Artificial
  Probe
atgatgcttgcttaccatcctttgt

SEQ ID NO: 233587 - DNA, 25 bp, Artificial
  Probe
cctttgttcataccaagagaggaaa

SEQ ID NO: 233588 - DNA, 25 bp, Artificial
  Probe
agatggttttctatgtgtccacact

SEQ ID NO: 233589 - DNA, 25 bp, Artificial
  Probe
ggtctactcattatttctggtggtt

SEQ ID NO: 233590 - DNA, 25 bp, Artificial
  Probe
tcctttgttcataccaagagaggaa

SEQ ID NO: 233591 - DNA, 25 bp, Artificial
  Probe
ttgctttattcatggcaaagtgtca

SEQ ID NO: 233592 - DNA, 25 bp, Artificial
  Probe
gcatggggtctactcattatttctg

SEQ ID NO: 233593 - DNA, 25 bp, Artificial
  Probe
gttgctttattcatggcaaagtgtc

SEQ ID NO: 233594 - DNA, 25 bp, Artificial
  Probe
tgttcataccaagagaggaaaacct

SEQ ID NO: 233595 - DNA, 25 bp, Artificial
  Probe
caagatggttttctatgtgtccaca

SEQ ID NO: 233596 - DNA, 25 bp, Artificial
  Probe
atggggtctactcattatttctggt

SEQ ID NO: 233597 - DNA, 25 bp, Artificial
  Probe
gttcataccaagagaggaaaaccta

SEQ ID NO: 233598 - DNA, 25 bp, Artificial
  Probe
tgcatggggtctactcattatttct

SEQ ID NO: 233599 - DNA, 25 bp, Artificial
  Probe
tggggtctactcattatttctggtg

SEQ ID NO: 233600 - DNA, 25 bp, Artificial
  Probe
tggagccaaccaatccactggggga

SEQ ID NO: 233601 - DNA, 25 bp, Artificial
  Probe
cagaagctgtacacatttcgggttc

SEQ ID NO: 233602 - DNA, 25 bp, Artificial
  Probe
gttcggagccgctttaacccgatct

SEQ ID NO: 233603 - DNA, 25 bp, Artificial
  Probe
atggagccaaccaatccactggggg

SEQ ID NO: 233604 - DNA, 25 bp, Artificial
  Probe
gcacccgagatcgaagctggacgga

SEQ ID NO: 233605 - DNA, 25 bp, Artificial
  Probe
ttctccctgcctagtgtggatgaac

SEQ ID NO: 233606 - DNA, 25 bp, Artificial
  Probe
gaagctgtacacatttcgggttcgg

SEQ ID NO: 233607 - DNA, 25 bp, Artificial
  Probe
cagtaccggagcacccgagatcgaa

SEQ ID NO: 233608 - DNA, 25 bp, Artificial
  Probe
tgcagtaccggagcacccgagatcg

SEQ ID NO: 233609 - DNA, 25 bp, Artificial
  Probe
tcggagccgctttaacccgatctgt

SEQ ID NO: 233610 - DNA, 25 bp, Artificial
  Probe
gtaaatggagccaaccaatccactg

SEQ ID NO: 233611 - DNA, 25 bp, Artificial
  Probe
actcaacagtggagtaaatggagcc

SEQ ID NO: 233612 - DNA, 25 bp, Artificial
  Probe
taacccgatctgtggaagtactcaa

SEQ ID NO: 233613 - DNA, 25 bp, Artificial
  Probe
ctccctgcctagtgtggatgaacag

SEQ ID NO: 233614 - DNA, 25 bp, Artificial
  Probe
gatcgaagctggacggaacaaatag

SEQ ID NO: 233615 - DNA, 25 bp, Artificial
  Probe
gtaaagtgacccaaatgcatcatcc

SEQ ID NO: 233616 - DNA, 25 bp, Artificial
  Probe
ggagccgctttaacccgatctgtgg

SEQ ID NO: 233617 - DNA, 25 bp, Artificial
  Probe
tactcaacagtggagtaaatggagc

SEQ ID NO: 233618 - DNA, 25 bp, Artificial
  Probe
ccggagcacccgagatcgaagctgg

SEQ ID NO: 233619 - DNA, 25 bp, Artificial
  Probe
ccctgcctagtgtggatgaacagaa

SEQ ID NO: 233620 - DNA, 25 bp, Artificial
  Probe
ggagccatactgcagagggtaaagt

SEQ ID NO: 233621 - DNA, 25 bp, Artificial
  Probe
ttggaacacattttgccaacctgga

SEQ ID NO: 233622 - DNA, 25 bp, Artificial
  Probe
gagatcgaagctggacggaacaaat

SEQ ID NO: 233623 - DNA, 25 bp, Artificial
  Probe
gagcacccgagatcgaagctggacg

SEQ ID NO: 233624 - DNA, 25 bp, Artificial
  Probe
gccatactgcagagggtaaagtgac

SEQ ID NO: 233625 - DNA, 25 bp, Artificial
  Probe
acccgagatcgaagctggacggaac

SEQ ID NO: 233626 - DNA, 25 bp, Artificial
  Probe
tgcctagtgtggatgaacagaagct

SEQ ID NO: 233627 - DNA, 25 bp, Artificial
  Probe
agccatactgcagagggtaaagtga

SEQ ID NO: 233628 - DNA, 25 bp, Artificial
  Probe
cacatttcgggttcggagccgcttt

SEQ ID NO: 233629 - DNA, 25 bp, Artificial
  Probe
ccgagatcgaagctggacggaacaa

SEQ ID NO: 233630 - DNA, 25 bp, Artificial
  Probe
acacatttcgggttcggagccgctt

SEQ ID NO: 233631 - DNA, 25 bp, Artificial
  Probe
gctgtacacatttcgggttcggagc

SEQ ID NO: 233632 - DNA, 25 bp, Artificial
  Probe
attctccctgcctagtgtggatgaa

SEQ ID NO: 233633 - DNA, 25 bp, Artificial
  Probe
aaatggagccaaccaatccactggg

SEQ ID NO: 233634 - DNA, 25 bp, Artificial
  Probe
ctcaacagtggagtaaatggagcca

SEQ ID NO: 233635 - DNA, 25 bp, Artificial
  Probe
ctgcctagtgtggatgaacagaagc

SEQ ID NO: 233636 - DNA, 25 bp, Artificial
  Probe
acccgatctgtggaagtactcaaca

SEQ ID NO: 233637 - DNA, 25 bp, Artificial
  Probe
cggagcacccgagatcgaagctgga

SEQ ID NO: 233638 - DNA, 25 bp, Artificial
  Probe
tttaacccgatctgtggaagtactc

SEQ ID NO: 233639 - DNA, 25 bp, Artificial
  Probe
cgctttaacccgatctgtggaagta

SEQ ID NO: 233640 - DNA, 25 bp, Artificial
  Probe
aacagaagctgtacacatttcgggt

SEQ ID NO: 233641 - DNA, 25 bp, Artificial
  Probe
ctttggaacacattttgccaacctg

SEQ ID NO: 233642 - DNA, 25 bp, Artificial
  Probe
agctgtacacatttcgggttcggag

SEQ ID NO: 233643 - DNA, 25 bp, Artificial
  Probe
ccgatctgtggaagtactcaacagt

SEQ ID NO: 233644 - DNA, 25 bp, Artificial
  Probe
tgaacagaagctgtacacatttcgg

SEQ ID NO: 233645 - DNA, 25 bp, Artificial
  Probe
gctttaacccgatctgtggaagtac

SEQ ID NO: 233646 - DNA, 25 bp, Artificial
  Probe
atgctggctctctacctgggccaag

SEQ ID NO: 233647 - DNA, 25 bp, Artificial
  Probe
caaagaccgtgacagaaagacggcg

SEQ ID NO: 233648 - DNA, 25 bp, Artificial
  Probe
tgggccaagtgttggcatcttgtgt

SEQ ID NO: 233649 - DNA, 25 bp, Artificial
  Probe
gagcaaagaccgtgacagaaagacg

SEQ ID NO: 233650 - DNA, 25 bp, Artificial
  Probe
aacagatctgcaccttctgcctcag

SEQ ID NO: 233651 - DNA, 25 bp, Artificial
  Probe
gccactgaagagtcatggagagccc

SEQ ID NO: 233652 - DNA, 25 bp, Artificial
  Probe
gctttcttccacagcggtcgtgcgg

SEQ ID NO: 233653 - DNA, 25 bp, Artificial
  Probe
actctaagtagctgaacacttgtac

SEQ ID NO: 233654 - DNA, 25 bp, Artificial
  Probe
atggcttgactctaagtagctgaac

SEQ ID NO: 233655 - DNA, 25 bp, Artificial
  Probe
acacttgtacccaggcccactggaa

SEQ ID NO: 233656 - DNA, 25 bp, Artificial
  Probe
gggacccgctttcttccacagcggt

SEQ ID NO: 233657 - DNA, 25 bp, Artificial
  Probe
tctgagcacaggtccccaagagcgc

SEQ ID NO: 233658 - DNA, 25 bp, Artificial
  Probe
cactggaactttccatgctggctct

SEQ ID NO: 233659 - DNA, 25 bp, Artificial
  Probe
cagcaaccagagaaagttgagcaaa

SEQ ID NO: 233660 - DNA, 25 bp, Artificial
  Probe
agggtccacagcagccaagaggtga

SEQ ID NO: 233661 - DNA, 25 bp, Artificial
  Probe
tcagcaaccagagaaagttgagcaa

SEQ ID NO: 233662 - DNA, 25 bp, Artificial
  Probe
accttctgcctcagcaaccagagaa

SEQ ID NO: 233663 - DNA, 25 bp, Artificial
  Probe
acaggcgggctatggcttgactcta

SEQ ID NO: 233664 - DNA, 25 bp, Artificial
  Probe
ttccacagcggtcgtgcgggcagcc

SEQ ID NO: 233665 - DNA, 25 bp, Artificial
  Probe
tggaagccactgaagagtcatggag

SEQ ID NO: 233666 - DNA, 25 bp, Artificial
  Probe
cgctttcttccacagcggtcgtgcg

SEQ ID NO: 233667 - DNA, 25 bp, Artificial
  Probe
cttccacagcggtcgtgcgggcagc

SEQ ID NO: 233668 - DNA, 25 bp, Artificial
  Probe
accgtgacagaaagacggcgattcg

SEQ ID NO: 233669 - DNA, 25 bp, Artificial
  Probe
ctgatctgagcacaggtccccaaga

SEQ ID NO: 233670 - DNA, 25 bp, Artificial
  Probe
tccacagcagccaagaggtgatgcc

SEQ ID NO: 233671 - DNA, 25 bp, Artificial
  Probe
ccaagtgttggcatcttgtgtcttt

SEQ ID NO: 233672 - DNA, 25 bp, Artificial
  Probe
gagacggcggcgagaacacccagcc

SEQ ID NO: 233673 - DNA, 25 bp, Artificial
  Probe
gacaggcgggctatggcttgactct

SEQ ID NO: 233674 - DNA, 25 bp, Artificial
  Probe
agcccaaacagatctgcaccttctg

SEQ ID NO: 233675 - DNA, 25 bp, Artificial
  Probe
gtagctgaacacttgtacccaggcc

SEQ ID NO: 233676 - DNA, 25 bp, Artificial
  Probe
ctggctctctacctgggccaagtgt

SEQ ID NO: 233677 - DNA, 25 bp, Artificial
  Probe
agatctgcaccttctgcctcagcaa

SEQ ID NO: 233678 - DNA, 25 bp, Artificial
  Probe
agaccgtgacagaaagacggcgatt

SEQ ID NO: 233679 - DNA, 25 bp, Artificial
  Probe
tgactctaagtagctgaacacttgt

SEQ ID NO: 233680 - DNA, 25 bp, Artificial
  Probe
acctgatctgagcacaggtccccaa

SEQ ID NO: 233681 - DNA, 25 bp, Artificial
  Probe
tctacctgggccaagtgttggcatc

SEQ ID NO: 233682 - DNA, 25 bp, Artificial
  Probe
gcgggctatggcttgactctaagta

SEQ ID NO: 233683 - DNA, 25 bp, Artificial
  Probe
taccactggccagagacggcggcga

SEQ ID NO: 233684 - DNA, 25 bp, Artificial
  Probe
aagaccgtgacagaaagacggcgat

SEQ ID NO: 233685 - DNA, 25 bp, Artificial
  Probe
aaagttgagcaaagaccgtgacaga

SEQ ID NO: 233686 - DNA, 25 bp, Artificial
  Probe
ccacagcagccaagaggtgatgcca

SEQ ID NO: 233687 - DNA, 25 bp, Artificial
  Probe
ccactgaagagtcatggagagcccc

SEQ ID NO: 233688 - DNA, 25 bp, Artificial
  Probe
ttccatgctggctctctacctgggc

SEQ ID NO: 233689 - DNA, 25 bp, Artificial
  Probe
agctgaacacttgtacccaggccca

SEQ ID NO: 233690 - DNA, 25 bp, Artificial
  Probe
catgctggctctctacctgggccaa

SEQ ID NO: 233691 - DNA, 25 bp, Artificial
  Probe
gaactttccatgctggctctctacc

SEQ ID NO: 233692 - DNA, 25 bp, Artificial
  Probe
gccacagttttcaaagataaaaggc

SEQ ID NO: 233693 - DNA, 25 bp, Artificial
  Probe
gagttacatcatatgctttgttcct

SEQ ID NO: 233694 - DNA, 25 bp, Artificial
  Probe
tgtcgaaagcatttcgactgaaggt

SEQ ID NO: 233695 - DNA, 25 bp, Artificial
  Probe
atatgctttgttccttaccacgctg

SEQ ID NO: 233696 - DNA, 25 bp, Artificial
  Probe
ggaccacaaagctggccacagtttt

SEQ ID NO: 233697 - DNA, 25 bp, Artificial
  Probe
aggactaaaggctgctgatagctgg

SEQ ID NO: 233698 - DNA, 25 bp, Artificial
  Probe
tgttaggatcccatacaccctcagc

SEQ ID NO: 233699 - DNA, 25 bp, Artificial
  Probe
gtgctttgacccaattctgtactat

SEQ ID NO: 233700 - DNA, 25 bp, Artificial
  Probe
cagccagacagaggtgatatctgac

SEQ ID NO: 233701 - DNA, 25 bp, Artificial
  Probe
gtccaacctgtgctttgacccaatt

SEQ ID NO: 233702 - DNA, 25 bp, Artificial
  Probe
tgacagcgagttacatcatatgctt

SEQ ID NO: 233703 - DNA, 25 bp, Artificial
  Probe
agtcttaggactaaaggctgctgat

SEQ ID NO: 233704 - DNA, 25 bp, Artificial
  Probe
aggacgtcaacacaagccagccctg

SEQ ID NO: 233705 - DNA, 25 bp, Artificial
  Probe
gaagaagtcggctctgctcaacatt

SEQ ID NO: 233706 - DNA, 25 bp, Artificial
  Probe
acgctgttaggatcccatacaccct

SEQ ID NO: 233707 - DNA, 25 bp, Artificial
  Probe
tcttaggactaaaggctgctgatag

SEQ ID NO: 233708 - DNA, 25 bp, Artificial
  Probe
gtgaacaggttcacgcaggacgtca

SEQ ID NO: 233709 - DNA, 25 bp, Artificial
  Probe
gctgtgtccaacctgtgctttgacc

SEQ ID NO: 233710 - DNA, 25 bp, Artificial
  Probe
aaaccgagacgtgagaatgacgtgc

SEQ ID NO: 233711 - DNA, 25 bp, Artificial
  Probe
acctttcaaagcagtcgtttacaag

SEQ ID NO: 233712 - DNA, 25 bp, Artificial
  Probe
ctcttcaaagccaaggaggccacac

SEQ ID NO: 233713 - DNA, 25 bp, Artificial
  Probe
acaggttcacgcaggacgtcaacac

SEQ ID NO: 233714 - DNA, 25 bp, Artificial
  Probe
tctcctggtgacagcgagttacatc

SEQ ID NO: 233715 - DNA, 25 bp, Artificial
  Probe
tacgattgctctcttcaaagccaag

SEQ ID NO: 233716 - DNA, 25 bp, Artificial
  Probe
tcaaagcagtcgtttacaagtaaaa

SEQ ID NO: 233717 - DNA, 25 bp, Artificial
  Probe
gccaaggaggccacactgctgctgg

SEQ ID NO: 233718 - DNA, 25 bp, Artificial
  Probe
aggtgatatctgactgctcaactac

SEQ ID NO: 233719 - DNA, 25 bp, Artificial
  Probe
tggtgaacaggttcacgcaggacgt

SEQ ID NO: 233720 - DNA, 25 bp, Artificial
  Probe
acagcgagttacatcatatgctttg

SEQ ID NO: 233721 - DNA, 25 bp, Artificial
  Probe
tgatagctggtgaacaggttcacgc

SEQ ID NO: 233722 - DNA, 25 bp, Artificial
  Probe
caaagctggccacagttttcaaaga

SEQ ID NO: 233723 - DNA, 25 bp, Artificial
  Probe
actgctgctggctgtgtccaacctg

SEQ ID NO: 233724 - DNA, 25 bp, Artificial
  Probe
gactgctcaactacgattgctctct

SEQ ID NO: 233725 - DNA, 25 bp, Artificial
  Probe
gagcatttattacctttcaaagcag

SEQ ID NO: 233726 - DNA, 25 bp, Artificial
  Probe
gactggaccacaaagctggccacag

SEQ ID NO: 233727 - DNA, 25 bp, Artificial
  Probe
attctgtactatcatctgtcgaaag

SEQ ID NO: 233728 - DNA, 25 bp, Artificial
  Probe
tccttaccacgctgttaggatccca

SEQ ID NO: 233729 - DNA, 25 bp, Artificial
  Probe
tcatctgtcgaaagcatttcgactg

SEQ ID NO: 233730 - DNA, 25 bp, Artificial
  Probe
acctgtgctttgacccaattctgta

SEQ ID NO: 233731 - DNA, 25 bp, Artificial
  Probe
ctggtgacagcgagttacatcatat

SEQ ID NO: 233732 - DNA, 25 bp, Artificial
  Probe
ttcatgaagaagtcggctctgctca

SEQ ID NO: 233733 - DNA, 25 bp, Artificial
  Probe
atattttcatgaagaagtcggctct

SEQ ID NO: 233734 - DNA, 25 bp, Artificial
  Probe
ccacactgctgctggctgtgtccaa

SEQ ID NO: 233735 - DNA, 25 bp, Artificial
  Probe
tcaaagccaaggaggccacactgct

SEQ ID NO: 233736 - DNA, 25 bp, Artificial
  Probe
aaggtcactgagactttcgcctcgc

SEQ ID NO: 233737 - DNA, 25 bp, Artificial
  Probe
acaccctcagccagacagaggtgat

SEQ ID NO: 233738 - DNA, 25 bp, Artificial
  Probe
cctgaagccaagaatagtggctagg

SEQ ID NO: 233739 - DNA, 25 bp, Artificial
  Probe
gccatcggaaactcttttgtcagat

SEQ ID NO: 233740 - DNA, 25 bp, Artificial
  Probe
tttgtcagatagtgtccaggaaaac

SEQ ID NO: 233741 - DNA, 25 bp, Artificial
  Probe
tgtcagatagtgtccaggaaaacaa

SEQ ID NO: 233742 - DNA, 25 bp, Artificial
  Probe
ttttgaagtctatcacctgaagcca

SEQ ID NO: 233743 - DNA, 25 bp, Artificial
  Probe
atttttgaagtctatcacctgaagc

SEQ ID NO: 233744 - DNA, 25 bp, Artificial
  Probe
gttggctcagctctcttgtgttagc

SEQ ID NO: 233745 - DNA, 25 bp, Artificial
  Probe
tctatcacctgaagccaagaatagt

SEQ ID NO: 233746 - DNA, 25 bp, Artificial
  Probe
ttaaaactcagtagaccagcaggag

SEQ ID NO: 233747 - DNA, 25 bp, Artificial
  Probe
cagccttcgtatgttggctcagctc

SEQ ID NO: 233748 - DNA, 25 bp, Artificial
  Probe
ctccacagccttcgtatgttggctc

SEQ ID NO: 233749 - DNA, 25 bp, Artificial
  Probe
tagaaatgcagtcttgtttaccact

SEQ ID NO: 233750 - DNA, 25 bp, Artificial
  Probe
ctcttgtgttagcaacttatgaaaa

SEQ ID NO: 233751 - DNA, 25 bp, Artificial
  Probe
tcgtatgttggctcagctctcttgt

SEQ ID NO: 233752 - DNA, 25 bp, Artificial
  Probe
ccagcaggagtttgattctgtttct

SEQ ID NO: 233753 - DNA, 25 bp, Artificial
  Probe
caaatctcagtacatgaaggctcca

SEQ ID NO: 233754 - DNA, 25 bp, Artificial
  Probe
gcaggccatcggaaactcttttgtc

SEQ ID NO: 233755 - DNA, 25 bp, Artificial
  Probe
gccttcgtatgttggctcagctctc

SEQ ID NO: 233756 - DNA, 25 bp, Artificial
  Probe
aagtctatcacctgaagccaagaat

SEQ ID NO: 233757 - DNA, 25 bp, Artificial
  Probe
tagaccagcaggagtttgattctgt

SEQ ID NO: 233758 - DNA, 25 bp, Artificial
  Probe
tttgcctggggcaaaatgatgtatc

SEQ ID NO: 233759 - DNA, 25 bp, Artificial
  Probe
aatgcagtcttgtttaccactgttt

SEQ ID NO: 233760 - DNA, 25 bp, Artificial
  Probe
agaccagcaggagtttgattctgtt

SEQ ID NO: 233761 - DNA, 25 bp, Artificial
  Probe
aactcagtagaccagcaggagtttg

SEQ ID NO: 233762 - DNA, 25 bp, Artificial
  Probe
tcttgctttcttagtggtagtcatg

SEQ ID NO: 233763 - DNA, 25 bp, Artificial
  Probe
tgaagtctatcacctgaagccaaga

SEQ ID NO: 233764 - DNA, 25 bp, Artificial
  Probe
tgcctggggcaaaatgatgtatctt

SEQ ID NO: 233765 - DNA, 25 bp, Artificial
  Probe
gaaatgcagtcttgtttaccactgt

SEQ ID NO: 233766 - DNA, 25 bp, Artificial
  Probe
ttagaaatgcagtcttgtttaccac

SEQ ID NO: 233767 - DNA, 25 bp, Artificial
  Probe
tatttttgaagtctatcacctgaag

SEQ ID NO: 233768 - DNA, 25 bp, Artificial
  Probe
acaagttttcttgctttcttagtgg

SEQ ID NO: 233769 - DNA, 25 bp, Artificial
  Probe
tcttttgtcagatagtgtccaggaa

SEQ ID NO: 233770 - DNA, 25 bp, Artificial
  Probe
agtagaccagcaggagtttgattct

SEQ ID NO: 233771 - DNA, 25 bp, Artificial
  Probe
aattaaaactcagtagaccagcagg

SEQ ID NO: 233772 - DNA, 25 bp, Artificial
  Probe
ctcagtacatgaaggctccatgttc

SEQ ID NO: 233773 - DNA, 25 bp, Artificial
  Probe
cggaaactcttttgtcagatagtgt

SEQ ID NO: 233774 - DNA, 25 bp, Artificial
  Probe
cttttgtcagatagtgtccaggaaa

SEQ ID NO: 233775 - DNA, 25 bp, Artificial
  Probe
atttagaaatgcagtcttgtttacc

SEQ ID NO: 233776 - DNA, 25 bp, Artificial
  Probe
gtacatgaaggctccatgttctttt

SEQ ID NO: 233777 - DNA, 25 bp, Artificial
  Probe
tcacctgaagccaagaatagtggct

SEQ ID NO: 233778 - DNA, 25 bp, Artificial
  Probe
catcggaaactcttttgtcagatag

SEQ ID NO: 233779 - DNA, 25 bp, Artificial
  Probe
cagctctcttgtgttagcaacttat

SEQ ID NO: 233780 - DNA, 25 bp, Artificial
  Probe
ctctcttgtgttagcaacttatgaa

SEQ ID NO: 233781 - DNA, 25 bp, Artificial
  Probe
caggccatcggaaactcttttgtca

SEQ ID NO: 233782 - DNA, 25 bp, Artificial
  Probe
ttctccacagccttcgtatgttggc

SEQ ID NO: 233783 - DNA, 25 bp, Artificial
  Probe
cttgctttcttagtggtagtcatga

SEQ ID NO: 233784 - DNA, 25 bp, Artificial
  Probe
tgtcatcttgtaatgaatggctcct

SEQ ID NO: 233785 - DNA, 25 bp, Artificial
  Probe
agttaatcacatggattctttgtac

SEQ ID NO: 233786 - DNA, 25 bp, Artificial
  Probe
taatcacatggattctttgtactag

SEQ ID NO: 233787 - DNA, 25 bp, Artificial
  Probe
taatgaatggctcctttgcttagta

SEQ ID NO: 233788 - DNA, 25 bp, Artificial
  Probe
catatttctgctggagcctaataca

SEQ ID NO: 233789 - DNA, 25 bp, Artificial
  Probe
gttaatcacatggattctttgtact

SEQ ID NO: 233790 - DNA, 25 bp, Artificial
  Probe
catggattctttgtactaggacttc

SEQ ID NO: 233791 - DNA, 25 bp, Artificial
  Probe
tggagcctaatacacatgtgtatta

SEQ ID NO: 233792 - DNA, 25 bp, Artificial
  Probe
tctgctggagcctaatacacatgtg

SEQ ID NO: 233793 - DNA, 25 bp, Artificial
  Probe
tacacatgtgtattaacataggcat

SEQ ID NO: 233794 - DNA, 25 bp, Artificial
  Probe
ttgacatatttctgctggagcctaa

SEQ ID NO: 233795 - DNA, 25 bp, Artificial
  Probe
aggacttccttgagtaaagctattg

SEQ ID NO: 233796 - DNA, 25 bp, Artificial
  Probe
cacatggattctttgtactaggact

SEQ ID NO: 233797 - DNA, 25 bp, Artificial
  Probe
gacttccttgagtaaagctattgac

SEQ ID NO: 233798 - DNA, 25 bp, Artificial
  Probe
tcatcttgtaatgaatggctccttt

SEQ ID NO: 233799 - DNA, 25 bp, Artificial
  Probe
ctggcttgctttatgatagtttctg

SEQ ID NO: 233800 - DNA, 25 bp, Artificial
  Probe
gctattgacatatttctgctggagc

SEQ ID NO: 233801 - DNA, 25 bp, Artificial
  Probe
atgatagtttctgatttctagctgc

SEQ ID NO: 233802 - DNA, 25 bp, Artificial
  Probe
aatggctcctttgcttagtaccatg

SEQ ID NO: 233803 - DNA, 25 bp, Artificial
  Probe
ctttgtactaggacttccttgagta

SEQ ID NO: 233804 - DNA, 25 bp, Artificial
  Probe
gctcctttgcttagtaccatgtagg

SEQ ID NO: 233805 - DNA, 25 bp, Artificial
  Probe
ttctgatttctagctgcttatgtgg

SEQ ID NO: 233806 - DNA, 25 bp, Artificial
  Probe
gacatatttctgctggagcctaata

SEQ ID NO: 233807 - DNA, 25 bp, Artificial
  Probe
gctggagcctaatacacatgtgtat

SEQ ID NO: 233808 - DNA, 25 bp, Artificial
  Probe
atagtttctgatttctagctgctta

SEQ ID NO: 233809 - DNA, 25 bp, Artificial
  Probe
tggctcctttgcttagtaccatgta

SEQ ID NO: 233810 - DNA, 25 bp, Artificial
  Probe
gtaatgaatggctcctttgcttagt

SEQ ID NO: 233811 - DNA, 25 bp, Artificial
  Probe
aatgaatggctcctttgcttagtac

SEQ ID NO: 233812 - DNA, 25 bp, Artificial
  Probe
ggagcctaatacacatgtgtattaa

SEQ ID NO: 233813 - DNA, 25 bp, Artificial
  Probe
gattctttgtactaggacttccttg

SEQ ID NO: 233814 - DNA, 25 bp, Artificial
  Probe
agctattgacatatttctgctggag

SEQ ID NO: 233815 - DNA, 25 bp, Artificial
  Probe
tattgacatatttctgctggagcct

SEQ ID NO: 233816 - DNA, 25 bp, Artificial
  Probe
tatttctgctggagcctaatacaca

SEQ ID NO: 233817 - DNA, 25 bp, Artificial
  Probe
ttccttgagtaaagctattgacata

SEQ ID NO: 233818 - DNA, 25 bp, Artificial
  Probe
agtttctgatttctagctgcttatg

SEQ ID NO: 233819 - DNA, 25 bp, Artificial
  Probe
gatagtttctgatttctagctgctt

SEQ ID NO: 233820 - DNA, 25 bp, Artificial
  Probe
tctttgtactaggacttccttgagt

SEQ ID NO: 233821 - DNA, 25 bp, Artificial
  Probe
tggattctttgtactaggacttcct

SEQ ID NO: 233822 - DNA, 25 bp, Artificial
  Probe
ctgctggagcctaatacacatgtgt

SEQ ID NO: 233823 - DNA, 25 bp, Artificial
  Probe
aagctattgacatatttctgctgga

SEQ ID NO: 233824 - DNA, 25 bp, Artificial
  Probe
tactaggacttccttgagtaaagct

SEQ ID NO: 233825 - DNA, 25 bp, Artificial
  Probe
atgtcatcttgtaatgaatggctcc

SEQ ID NO: 233826 - DNA, 25 bp, Artificial
  Probe
aatcacatggattctttgtactagg

SEQ ID NO: 233827 - DNA, 25 bp, Artificial
  Probe
atggctcctttgcttagtaccatgt

SEQ ID NO: 233828 - DNA, 25 bp, Artificial
  Probe
aatacacatgtgtattaacataggc

SEQ ID NO: 233829 - DNA, 25 bp, Artificial
  Probe
ctaggacttccttgagtaaagctat

SEQ ID NO: 233830 - DNA, 25 bp, Artificial
  Probe
atatggtgcaatgtgtgtatatgga

SEQ ID NO: 233831 - DNA, 25 bp, Artificial
  Probe
gaaacaagaaaaacgcactttggct

SEQ ID NO: 233832 - DNA, 25 bp, Artificial
  Probe
cgcactttggcttgtaattctttca

SEQ ID NO: 233833 - DNA, 25 bp, Artificial
  Probe
gtcccccaacctctgggggccagcg

SEQ ID NO: 233834 - DNA, 25 bp, Artificial
  Probe
atatcatctacctagatttaatata

SEQ ID NO: 233835 - DNA, 25 bp, Artificial
  Probe
ctgcctcggtggattgcatttttaa

SEQ ID NO: 233836 - DNA, 25 bp, Artificial
  Probe
taaggattcctagcatagcgcttgg

SEQ ID NO: 233837 - DNA, 25 bp, Artificial
  Probe
ttatacttgtaattatggagtcatt

SEQ ID NO: 233838 - DNA, 25 bp, Artificial
  Probe
ctctgcctcggtggattgcattttt

SEQ ID NO: 233839 - DNA, 25 bp, Artificial
  Probe
ttttaattaaggattcctagcatag

SEQ ID NO: 233840 - DNA, 25 bp, Artificial
  Probe
tctgcctcggtggattgcattttta

SEQ ID NO: 233841 - DNA, 25 bp, Artificial
  Probe
ggagtcatttttacaacgtaattat

SEQ ID NO: 233842 - DNA, 25 bp, Artificial
  Probe
agcgtggggcgggctgcgacctctg

SEQ ID NO: 233843 - DNA, 25 bp, Artificial
  Probe
acgcactttggcttgtaattctttc

SEQ ID NO: 233844 - DNA, 25 bp, Artificial
  Probe
atatattatacttgtaattatggag

SEQ ID NO: 233845 - DNA, 25 bp, Artificial
  Probe
gcgggctgcgacctctgcctcggtg

SEQ ID NO: 233846 - DNA, 25 bp, Artificial
  Probe
tctacctagatttaatataaagttt

SEQ ID NO: 233847 - DNA, 25 bp, Artificial
  Probe
ggattcctagcatagcgcttggctt

SEQ ID NO: 233848 - DNA, 25 bp, Artificial
  Probe
ttaattaaggattcctagcatagcg

SEQ ID NO: 233849 - DNA, 25 bp, Artificial
  Probe
catagcgcttggcttttgaaggcag

SEQ ID NO: 233850 - DNA, 25 bp, Artificial
  Probe
cctccccccagatatcatctaccta

SEQ ID NO: 233851 - DNA, 25 bp, Artificial
  Probe
ttaaggattcctagcatagcgcttg

SEQ ID NO: 233852 - DNA, 25 bp, Artificial
  Probe
cctctgcctcggtggattgcatttt

SEQ ID NO: 233853 - DNA, 25 bp, Artificial
  Probe
tagcatagcgcttggcttttgaagg

SEQ ID NO: 233854 - DNA, 25 bp, Artificial
  Probe
ggctgcgacctctgcctcggtggat

SEQ ID NO: 233855 - DNA, 25 bp, Artificial
  Probe
aattaaggattcctagcatagcgct

SEQ ID NO: 233856 - DNA, 25 bp, Artificial
  Probe
atagcgcttggcttttgaaggcaga

SEQ ID NO: 233857 - DNA, 25 bp, Artificial
  Probe
ggcttgtaattctttcaatacagat

SEQ ID NO: 233858 - DNA, 25 bp, Artificial
  Probe
cccaacctctgggggccagcgccca

SEQ ID NO: 233859 - DNA, 25 bp, Artificial
  Probe
tttcaatacagatatattttttctt

SEQ ID NO: 233860 - DNA, 25 bp, Artificial
  Probe
tttacaacgtaattatttatatatg

SEQ ID NO: 233861 - DNA, 25 bp, Artificial
  Probe
cctcggtggattgcatttttaatta

SEQ ID NO: 233862 - DNA, 25 bp, Artificial
  Probe
gattcctagcatagcgcttggcttt

SEQ ID NO: 233863 - DNA, 25 bp, Artificial
  Probe
gcttgtaattctttcaatacagata

SEQ ID NO: 233864 - DNA, 25 bp, Artificial
  Probe
aggattcctagcatagcgcttggct

SEQ ID NO: 233865 - DNA, 25 bp, Artificial
  Probe
ttggcttgtaattctttcaatacag

SEQ ID NO: 233866 - DNA, 25 bp, Artificial
  Probe
tggcttgtaattctttcaatacaga

SEQ ID NO: 233867 - DNA, 25 bp, Artificial
  Probe
gcgacctctgcctcggtggattgca

SEQ ID NO: 233868 - DNA, 25 bp, Artificial
  Probe
attaaggattcctagcatagcgctt

SEQ ID NO: 233869 - DNA, 25 bp, Artificial
  Probe
ttatttatatatggtgcaatgtgtg

SEQ ID NO: 233870 - DNA, 25 bp, Artificial
  Probe
aaggattcctagcatagcgcttggc

SEQ ID NO: 233871 - DNA, 25 bp, Artificial
  Probe
attcctagcatagcgcttggctttt

SEQ ID NO: 233872 - DNA, 25 bp, Artificial
  Probe
ctagcatagcgcttggcttttgaag

SEQ ID NO: 233873 - DNA, 25 bp, Artificial
  Probe
taattaaggattcctagcatagcgc

SEQ ID NO: 233874 - DNA, 25 bp, Artificial
  Probe
ctctgggggccagcgcccagagacg

SEQ ID NO: 233875 - DNA, 25 bp, Artificial
  Probe
gcactttggcttgtaattctttcaa

SEQ ID NO: 233876 - DNA, 25 bp, Artificial
  Probe
gtctgcgacctactgtaagccctac

SEQ ID NO: 233877 - DNA, 25 bp, Artificial
  Probe
gcaatgctactccaagcctcagcca

SEQ ID NO: 233878 - DNA, 25 bp, Artificial
  Probe
actgtaagtcccagcaatgctgctc

SEQ ID NO: 233879 - DNA, 25 bp, Artificial
  Probe
tgtctgcgacctactgtaagcccta

SEQ ID NO: 233880 - DNA, 25 bp, Artificial
  Probe
acctactgtaagccctacacatagc

SEQ ID NO: 233881 - DNA, 25 bp, Artificial
  Probe
agtcccagcaatgctgctctaagcc

SEQ ID NO: 233882 - DNA, 25 bp, Artificial
  Probe
agcaatgctgctctaagccccagca

SEQ ID NO: 233883 - DNA, 25 bp, Artificial
  Probe
gctctaagccccagcaatgctactc

SEQ ID NO: 233884 - DNA, 25 bp, Artificial
  Probe
tgtaagccctacacatagcactcca

SEQ ID NO: 233885 - DNA, 25 bp, Artificial
  Probe
aagccccagcaatgctactccaagc

SEQ ID NO: 233886 - DNA, 25 bp, Artificial
  Probe
cacatagcactccaagtcccaccca

SEQ ID NO: 233887 - DNA, 25 bp, Artificial
  Probe
tcccacccataccactgtaagtccc

SEQ ID NO: 233888 - DNA, 25 bp, Artificial
  Probe
cataccactgtaagtcccagcaatg

SEQ ID NO: 233889 - DNA, 25 bp, Artificial
  Probe
ccacccataccactgtaagtcccag

SEQ ID NO: 233890 - DNA, 25 bp, Artificial
  Probe
tgcgacctactgtaagccctacaca

SEQ ID NO: 233891 - DNA, 25 bp, Artificial
  Probe
gcgacctactgtaagccctacacat

SEQ ID NO: 233892 - DNA, 25 bp, Artificial
  Probe
tctgcgacctactgtaagccctaca

SEQ ID NO: 233893 - DNA, 25 bp, Artificial
  Probe
tgctgctctaagccccagcaatgct

SEQ ID NO: 233894 - DNA, 25 bp, Artificial
  Probe
ccagcaatgctgctctaagccccag

SEQ ID NO: 233895 - DNA, 25 bp, Artificial
  Probe
ctacacatagcactccaagtcccac

SEQ ID NO: 233896 - DNA, 25 bp, Artificial
  Probe
aagtcccagcaatgctgctctaagc

SEQ ID NO: 233897 - DNA, 25 bp, Artificial
  Probe
cccagcaatgctactccaagcctca

SEQ ID NO: 233898 - DNA, 25 bp, Artificial
  Probe
tgtaagtcccagcaatgctgctcta

SEQ ID NO: 233899 - DNA, 25 bp, Artificial
  Probe
acccataccactgtaagtcccagca

SEQ ID NO: 233900 - DNA, 25 bp, Artificial
  Probe
caatgctgctctaagccccagcaat

SEQ ID NO: 233901 - DNA, 25 bp, Artificial
  Probe
cactgtaagtcccagcaatgctgct

SEQ ID NO: 233902 - DNA, 25 bp, Artificial
  Probe
cgacctactgtaagccctacacata

SEQ ID NO: 233903 - DNA, 25 bp, Artificial
  Probe
ataccactgtaagtcccagcaatgc

SEQ ID NO: 233904 - DNA, 25 bp, Artificial
  Probe
cagcaatgctactccaagcctcagc

SEQ ID NO: 233905 - DNA, 25 bp, Artificial
  Probe
ctgtaagtcccagcaatgctgctct

SEQ ID NO: 233906 - DNA, 25 bp, Artificial
  Probe
atgctgctctaagccccagcaatgc

SEQ ID NO: 233907 - DNA, 25 bp, Artificial
  Probe
ctgcgacctactgtaagccctacac

SEQ ID NO: 233908 - DNA, 25 bp, Artificial
  Probe
tagcactccaagtcccacccatacc

SEQ ID NO: 233909 - DNA, 25 bp, Artificial
  Probe
gtcccagcaatgctgctctaagccc

SEQ ID NO: 233910 - DNA, 25 bp, Artificial
  Probe
taagtcccagcaatgctgctctaag

SEQ ID NO: 233911 - DNA, 25 bp, Artificial
  Probe
aagccctacacatagcactccaagt

SEQ ID NO: 233912 - DNA, 25 bp, Artificial
  Probe
ccataccactgtaagtcccagcaat

SEQ ID NO: 233913 - DNA, 25 bp, Artificial
  Probe
accactgtaagtcccagcaatgctg

SEQ ID NO: 233914 - DNA, 25 bp, Artificial
  Probe
cagcaatgctgctctaagccccagc

SEQ ID NO: 233915 - DNA, 25 bp, Artificial
  Probe
aatgctgctctaagccccagcaatg

SEQ ID NO: 233916 - DNA, 25 bp, Artificial
  Probe
taccactgtaagtcccagcaatgct

SEQ ID NO: 233917 - DNA, 25 bp, Artificial
  Probe
gcaatgctgctctaagccccagcaa

SEQ ID NO: 233918 - DNA, 25 bp, Artificial
  Probe
gccctacacatagcactccaagtcc

SEQ ID NO: 233919 - DNA, 25 bp, Artificial
  Probe
gccccagcaatgctactccaagcct

SEQ ID NO: 233920 - DNA, 25 bp, Artificial
  Probe
gtaagtcccagcaatgctgctctaa

SEQ ID NO: 233921 - DNA, 25 bp, Artificial
  Probe
taagccccagcaatgctactccaag

SEQ ID NO: 233922 - DNA, 25 bp, Artificial
  Probe
tagtgagccttggaggcacgcccta

SEQ ID NO: 233923 - DNA, 25 bp, Artificial
  Probe
acagggtctacactaccaagagtga

SEQ ID NO: 233924 - DNA, 25 bp, Artificial
  Probe
gcacgccctactgtggcatgacctg

SEQ ID NO: 233925 - DNA, 25 bp, Artificial
  Probe
cctcctctgggagatagtgagcctt

SEQ ID NO: 233926 - DNA, 25 bp, Artificial
  Probe
ggaggcacgccctactgtggcatga

SEQ ID NO: 233927 - DNA, 25 bp, Artificial
  Probe
cgatgggccgtcttcctgtacgttg

SEQ ID NO: 233928 - DNA, 25 bp, Artificial
  Probe
agtgagccttggaggcacgccctac

SEQ ID NO: 233929 - DNA, 25 bp, Artificial
  Probe
tgacctgtgctgagctctacgagaa

SEQ ID NO: 233930 - DNA, 25 bp, Artificial
  Probe
cacgccctactgtggcatgacctgt

SEQ ID NO: 233931 - DNA, 25 bp, Artificial
  Probe
gatgggccgtcttcctgtacgttgg

SEQ ID NO: 233932 - DNA, 25 bp, Artificial
  Probe
cattgagtccctcaactacagggtc

SEQ ID NO: 233933 - DNA, 25 bp, Artificial
  Probe
tgtggcatgacctgtgctgagctct

SEQ ID NO: 233934 - DNA, 25 bp, Artificial
  Probe
ctgtacgttggatggccattgagtc

SEQ ID NO: 233935 - DNA, 25 bp, Artificial
  Probe
gtgctgagctctacgagaaactgcc

SEQ ID NO: 233936 - DNA, 25 bp, Artificial
  Probe
atgacctgtgctgagctctacgaga

SEQ ID NO: 233937 - DNA, 25 bp, Artificial
  Probe
ctactgtggcatgacctgtgctgag

SEQ ID NO: 233938 - DNA, 25 bp, Artificial
  Probe
cctgtacgttggatggccattgagt

SEQ ID NO: 233939 - DNA, 25 bp, Artificial
  Probe
ctgtgctgagctctacgagaaactg

SEQ ID NO: 233940 - DNA, 25 bp, Artificial
  Probe
ccgtcttcctgtacgttggatggcc

SEQ ID NO: 233941 - DNA, 25 bp, Artificial
  Probe
tcctctgggagatagtgagccttgg

SEQ ID NO: 233942 - DNA, 25 bp, Artificial
  Probe
ggatggccattgagtccctcaacta

SEQ ID NO: 233943 - DNA, 25 bp, Artificial
  Probe
gatagtgagccttggaggcacgccc

SEQ ID NO: 233944 - DNA, 25 bp, Artificial
  Probe
aggcacgccctactgtggcatgacc

SEQ ID NO: 233945 - DNA, 25 bp, Artificial
  Probe
acctgtgctgagctctacgagaaac

SEQ ID NO: 233946 - DNA, 25 bp, Artificial
  Probe
ctgagctctacgagaaactgcctca

SEQ ID NO: 233947 - DNA, 25 bp, Artificial
  Probe
tcctcctctgggagatagtgagcct

SEQ ID NO: 233948 - DNA, 25 bp, Artificial
  Probe
gagctctacgagaaactgcctcaag

SEQ ID NO: 233949 - DNA, 25 bp, Artificial
  Probe
ttgagtccctcaactacagggtcta

SEQ ID NO: 233950 - DNA, 25 bp, Artificial
  Probe
cgtcttcctgtacgttggatggcca

SEQ ID NO: 233951 - DNA, 25 bp, Artificial
  Probe
agctctacgagaaactgcctcaagg

SEQ ID NO: 233952 - DNA, 25 bp, Artificial
  Probe
agccttggaggcacgccctactgtg

SEQ ID NO: 233953 - DNA, 25 bp, Artificial
  Probe
actacagggtctacactaccaagag

SEQ ID NO: 233954 - DNA, 25 bp, Artificial
  Probe
gtggcatgacctgtgctgagctcta

SEQ ID NO: 233955 - DNA, 25 bp, Artificial
  Probe
agatagtgagccttggaggcacgcc

SEQ ID NO: 233956 - DNA, 25 bp, Artificial
  Probe
atggccattgagtccctcaactaca

SEQ ID NO: 233957 - DNA, 25 bp, Artificial
  Probe
cgttggatggccattgagtccctca

SEQ ID NO: 233958 - DNA, 25 bp, Artificial
  Probe
ccattgagtccctcaactacagggt

SEQ ID NO: 233959 - DNA, 25 bp, Artificial
  Probe
caactacagggtctacactaccaag

SEQ ID NO: 233960 - DNA, 25 bp, Artificial
  Probe
gcatgacctgtgctgagctctacga

SEQ ID NO: 233961 - DNA, 25 bp, Artificial
  Probe
ctacagggtctacactaccaagagt

SEQ ID NO: 233962 - DNA, 25 bp, Artificial
  Probe
gggccgtcttcctgtacgttggatg

SEQ ID NO: 233963 - DNA, 25 bp, Artificial
  Probe
cttcctgtacgttggatggccattg

SEQ ID NO: 233964 - DNA, 25 bp, Artificial
  Probe
tcttcctgtacgttggatggccatt

SEQ ID NO: 233965 - DNA, 25 bp, Artificial
  Probe
ttggatggccattgagtccctcaac

SEQ ID NO: 233966 - DNA, 25 bp, Artificial
  Probe
taccaagagtgacgtctggtcattt

SEQ ID NO: 233967 - DNA, 25 bp, Artificial
  Probe
gtccctcaactacagggtctacact

SEQ ID NO: 233968 - DNA, 25 bp, Artificial
  Probe
atgggcatccaagcagaccatggat

SEQ ID NO: 233969 - DNA, 25 bp, Artificial
  Probe
tgggcatccaagcagaccatggatc

SEQ ID NO: 233970 - DNA, 25 bp, Artificial
  Probe
catttgatgggcatccaagcagacc

SEQ ID NO: 233971 - DNA, 25 bp, Artificial
  Probe
tcactgaggcactgacgtaggcccc

SEQ ID NO: 233972 - DNA, 25 bp, Artificial
  Probe
accatggatcactgaggcactgacg

SEQ ID NO: 233973 - DNA, 25 bp, Artificial
  Probe
atcactgaggcactgacgtaggccc

SEQ ID NO: 233974 - DNA, 25 bp, Artificial
  Probe
acaacagtctgcaactagtttctgc

SEQ ID NO: 233975 - DNA, 25 bp, Artificial
  Probe
agcagaccatggatcactgaggcac

SEQ ID NO: 233976 - DNA, 25 bp, Artificial
  Probe
atccaagcagaccatggatcactga

SEQ ID NO: 233977 - DNA, 25 bp, Artificial
  Probe
tgatgggcatccaagcagaccatgg

SEQ ID NO: 233978 - DNA, 25 bp, Artificial
  Probe
aagcagaccatggatcactgaggca

SEQ ID NO: 233979 - DNA, 25 bp, Artificial
  Probe
gatgggcatccaagcagaccatgga

SEQ ID NO: 233980 - DNA, 25 bp, Artificial
  Probe
caacagtctgcaactagtttctgct

SEQ ID NO: 233981 - DNA, 25 bp, Artificial
  Probe
tccaagcagaccatggatcactgag

SEQ ID NO: 233982 - DNA, 25 bp, Artificial
  Probe
ttgggcatttgatgggcatccaagc

SEQ ID NO: 233983 - DNA, 25 bp, Artificial
  Probe
tttgatgggcatccaagcagaccat

SEQ ID NO: 233984 - DNA, 25 bp, Artificial
  Probe
aacagtctgcaactagtttctgctt

SEQ ID NO: 233985 - DNA, 25 bp, Artificial
  Probe
gaccatggatcactgaggcactgac

SEQ ID NO: 233986 - DNA, 25 bp, Artificial
  Probe
ttgatgggcatccaagcagaccatg

SEQ ID NO: 233987 - DNA, 25 bp, Artificial
  Probe
gatcactgaggcactgacgtaggcc

SEQ ID NO: 233988 - DNA, 25 bp, Artificial
  Probe
gcaccaaagacaacagtctgcaact

SEQ ID NO: 233989 - DNA, 25 bp, Artificial
  Probe
gcagaccatggatcactgaggcact

SEQ ID NO: 233990 - DNA, 25 bp, Artificial
  Probe
catggatcactgaggcactgacgta

SEQ ID NO: 233991 - DNA, 25 bp, Artificial
  Probe
acagtctgcaactagtttctgcttt

SEQ ID NO: 233992 - DNA, 25 bp, Artificial
  Probe
ggatcactgaggcactgacgtaggc

SEQ ID NO: 233993 - DNA, 25 bp, Artificial
  Probe
cagtctgcaactagtttctgctttt

SEQ ID NO: 233994 - DNA, 25 bp, Artificial
  Probe
agaccatggatcactgaggcactga

SEQ ID NO: 233995 - DNA, 25 bp, Artificial
  Probe
caagcagaccatggatcactgaggc

SEQ ID NO: 233996 - DNA, 25 bp, Artificial
  Probe
catccaagcagaccatggatcactg

SEQ ID NO: 233997 - DNA, 25 bp, Artificial
  Probe
ccaaagacaacagtctgcaactagt

SEQ ID NO: 233998 - DNA, 25 bp, Artificial
  Probe
atggatcactgaggcactgacgtag

SEQ ID NO: 233999 - DNA, 25 bp, Artificial
  Probe
cctttgcaccaaagacaacagtctg

SEQ ID NO: 234000 - DNA, 25 bp, Artificial
  Probe
gcatttgatgggcatccaagcagac

SEQ ID NO: 234001 - DNA, 25 bp, Artificial
  Probe
gcatccaagcagaccatggatcact

SEQ ID NO: 234002 - DNA, 25 bp, Artificial
  Probe
tgcaattacttcctttgcaccaaag

SEQ ID NO: 234003 - DNA, 25 bp, Artificial
  Probe
ttgcaccaaagacaacagtctgcaa

SEQ ID NO: 234004 - DNA, 25 bp, Artificial
  Probe
aaagacaacagtctgcaactagttt

SEQ ID NO: 234005 - DNA, 25 bp, Artificial
  Probe
atttgatgggcatccaagcagacca

SEQ ID NO: 234006 - DNA, 25 bp, Artificial
  Probe
tcctttgcaccaaagacaacagtct

SEQ ID NO: 234007 - DNA, 25 bp, Artificial
  Probe
cactgaggcactgacgtaggcccct

SEQ ID NO: 234008 - DNA, 25 bp, Artificial
  Probe
ccatggatcactgaggcactgacgt

SEQ ID NO: 234009 - DNA, 25 bp, Artificial
  Probe
ccaagcagaccatggatcactgagg

SEQ ID NO: 234010 - DNA, 25 bp, Artificial
  Probe
tttgcaccaaagacaacagtctgca

SEQ ID NO: 234011 - DNA, 25 bp, Artificial
  Probe
ggcatccaagcagaccatggatcac

SEQ ID NO: 234012 - DNA, 25 bp, Artificial
  Probe
ctttgcaccaaagacaacagtctgc

SEQ ID NO: 234013 - DNA, 25 bp, Artificial
  Probe
gggcatccaagcagaccatggatca

SEQ ID NO: 234014 - DNA, 25 bp, Artificial
  Probe
cagaccacaaaccataggttgtgat

SEQ ID NO: 234015 - DNA, 25 bp, Artificial
  Probe
aaaccataggttgtgatttctcctt

SEQ ID NO: 234016 - DNA, 25 bp, Artificial
  Probe
tgctgacaagttaggtcgttacaga

SEQ ID NO: 234017 - DNA, 25 bp, Artificial
  Probe
gcaaacagctagtgaaatggagggc

SEQ ID NO: 234018 - DNA, 25 bp, Artificial
  Probe
ttaggtcgttacagaccacaaacca

SEQ ID NO: 234019 - DNA, 25 bp, Artificial
  Probe
tgtgcgcttcgtgtcatactgactt

SEQ ID NO: 234020 - DNA, 25 bp, Artificial
  Probe
gaactattgcaaataccgttttccg

SEQ ID NO: 234021 - DNA, 25 bp, Artificial
  Probe
tcagtgaagcattgagccctactct

SEQ ID NO: 234022 - DNA, 25 bp, Artificial
  Probe
ggtcgttacagaccacaaaccatag

SEQ ID NO: 234023 - DNA, 25 bp, Artificial
  Probe
cacttaactcaggttacgttgtgac

SEQ ID NO: 234024 - DNA, 25 bp, Artificial
  Probe
acgcccagagcttgtaaaggctggg

SEQ ID NO: 234025 - DNA, 25 bp, Artificial
  Probe
ccgcctactgtgtgcgcttcgtgtc

SEQ ID NO: 234026 - DNA, 25 bp, Artificial
  Probe
gcaaggagtcacttaactcaggtta

SEQ ID NO: 234027 - DNA, 25 bp, Artificial
  Probe
agaatttctggctattgcaaacagc

SEQ ID NO: 234028 - DNA, 25 bp, Artificial
  Probe
caaaccataggttgtgatttctcct

SEQ ID NO: 234029 - DNA, 25 bp, Artificial
  Probe
tcatcagtgaagcattgagccctac

SEQ ID NO: 234030 - DNA, 25 bp, Artificial
  Probe
gaccacaaaccataggttgtgattt

SEQ ID NO: 234031 - DNA, 25 bp, Artificial
  Probe
tgtgacagtattaaaccccaagggc

SEQ ID NO: 234032 - DNA, 25 bp, Artificial
  Probe
taggtcgttacagaccacaaaccat

SEQ ID NO: 234033 - DNA, 25 bp, Artificial
  Probe
acaagttaggtcgttacagaccaca

SEQ ID NO: 234034 - DNA, 25 bp, Artificial
  Probe
ctgtcagaactattgcaaataccgt

SEQ ID NO: 234035 - DNA, 25 bp, Artificial
  Probe
taaaggctgggcactcatgcccttc

SEQ ID NO: 234036 - DNA, 25 bp, Artificial
  Probe
tactgtgtgcgcttcgtgtcatact

SEQ ID NO: 234037 - DNA, 25 bp, Artificial
  Probe
catcagaatttctggctattgcaaa

SEQ ID NO: 234038 - DNA, 25 bp, Artificial
  Probe
ctattgcaaacagctagtgaaatgg

SEQ ID NO: 234039 - DNA, 25 bp, Artificial
  Probe
ctcaggttacgttgtgacagtatta

SEQ ID NO: 234040 - DNA, 25 bp, Artificial
  Probe
aaggctgggcactcatgcccttcac

SEQ ID NO: 234041 - DNA, 25 bp, Artificial
  Probe
aaatggagggccttacagctgtcag

SEQ ID NO: 234042 - DNA, 25 bp, Artificial
  Probe
gagatcctattaatgtccacatcag

SEQ ID NO: 234043 - DNA, 25 bp, Artificial
  Probe
agcattgagccctactctggccaaa

SEQ ID NO: 234044 - DNA, 25 bp, Artificial
  Probe
tgagccctactctggccaaagagcg

SEQ ID NO: 234045 - DNA, 25 bp, Artificial
  Probe
gacaagttaggtcgttacagaccac

SEQ ID NO: 234046 - DNA, 25 bp, Artificial
  Probe
tccgcaaggagtcacttaactcagg

SEQ ID NO: 234047 - DNA, 25 bp, Artificial
  Probe
agtgaagcattgagccctactctgg

SEQ ID NO: 234048 - DNA, 25 bp, Artificial
  Probe
gatgcagccgcctactgtgtgcgct

SEQ ID NO: 234049 - DNA, 25 bp, Artificial
  Probe
caacctgcatgaagagagatcctat

SEQ ID NO: 234050 - DNA, 25 bp, Artificial
  Probe
gcttgtaaaggctgggcactcatgc

SEQ ID NO: 234051 - DNA, 25 bp, Artificial
  Probe
caccctttgtctgcactcatcagtg

SEQ ID NO: 234052 - DNA, 25 bp, Artificial
  Probe
cccagagcttgtaaaggctgggcac

SEQ ID NO: 234053 - DNA, 25 bp, Artificial
  Probe
tgacagtattaaaccccaagggcat

SEQ ID NO: 234054 - DNA, 25 bp, Artificial
  Probe
gtgtgctttgctgacaagttaggtc

SEQ ID NO: 234055 - DNA, 25 bp, Artificial
  Probe
gtcacttaactcaggttacgttgtg

SEQ ID NO: 234056 - DNA, 25 bp, Artificial
  Probe
cagagcttgtaaaggctgggcactc

SEQ ID NO: 234057 - DNA, 25 bp, Artificial
  Probe
tactccctacaacctgcatgaagag

SEQ ID NO: 234058 - DNA, 25 bp, Artificial
  Probe
ttaatgtccacatcagaatttctgg

SEQ ID NO: 234059 - DNA, 25 bp, Artificial
  Probe
cacgcccagagcttgtaaaggctgg

SEQ ID NO: 234060 - DNA, 25 bp, Artificial
  Probe
cgaaccaatgctttcttgtgtctca

SEQ ID NO: 234061 - DNA, 25 bp, Artificial
  Probe
ccagtcctgatcttgtagattcgtt

SEQ ID NO: 234062 - DNA, 25 bp, Artificial
  Probe
tcctagattcagctgaagacgagat

SEQ ID NO: 234063 - DNA, 25 bp, Artificial
  Probe
agattcagctgaagacgagatacac

SEQ ID NO: 234064 - DNA, 25 bp, Artificial
  Probe
ccccagtcctgatcttgtagattcg

SEQ ID NO: 234065 - DNA, 25 bp, Artificial
  Probe
gtgttcctagattcagctgaagacg

SEQ ID NO: 234066 - DNA, 25 bp, Artificial
  Probe
ccgaaccaatgctttcttgtgtctc

SEQ ID NO: 234067 - DNA, 25 bp, Artificial
  Probe
tgtgtagtgttcctagattcagctg

SEQ ID NO: 234068 - DNA, 25 bp, Artificial
  Probe
ttccccagtcctgatcttgtagatt

SEQ ID NO: 234069 - DNA, 25 bp, Artificial
  Probe
agtgttcctagattcagctgaagac

SEQ ID NO: 234070 - DNA, 25 bp, Artificial
  Probe
cttccccagtcctgatcttgtagat

SEQ ID NO: 234071 - DNA, 25 bp, Artificial
  Probe
gtgtctcaactctttgtatatgaat

SEQ ID NO: 234072 - DNA, 25 bp, Artificial
  Probe
gttgggaaacacagccgcactggtg

SEQ ID NO: 234073 - DNA, 25 bp, Artificial
  Probe
gttcctagattcagctgaagacgag

SEQ ID NO: 234074 - DNA, 25 bp, Artificial
  Probe
caactcactgtgtagtgttcctaga

SEQ ID NO: 234075 - DNA, 25 bp, Artificial
  Probe
cttgtgtctcaactctttgtatatg

SEQ ID NO: 234076 - DNA, 25 bp, Artificial
  Probe
gattcagctgaagacgagatacaca

SEQ ID NO: 234077 - DNA, 25 bp, Artificial
  Probe
tgttgggaaacacagccgcactggt

SEQ ID NO: 234078 - DNA, 25 bp, Artificial
  Probe
gtcctgatcttgtagattcgttagt

SEQ ID NO: 234079 - DNA, 25 bp, Artificial
  Probe
gtagtgttcctagattcagctgaag

SEQ ID NO: 234080 - DNA, 25 bp, Artificial
  Probe
tcactgtgtagtgttcctagattca

SEQ ID NO: 234081 - DNA, 25 bp, Artificial
  Probe
ttcctagattcagctgaagacgaga

SEQ ID NO: 234082 - DNA, 25 bp, Artificial
  Probe
tccccagtcctgatcttgtagattc

SEQ ID NO: 234083 - DNA, 25 bp, Artificial
  Probe
actcactgtgtagtgttcctagatt

SEQ ID NO: 234084 - DNA, 25 bp, Artificial
  Probe
aactcactgtgtagtgttcctagat

SEQ ID NO: 234085 - DNA, 25 bp, Artificial
  Probe
attcagctgaagacgagatacacag

SEQ ID NO: 234086 - DNA, 25 bp, Artificial
  Probe
tgtagtgttcctagattcagctgaa

SEQ ID NO: 234087 - DNA, 25 bp, Artificial
  Probe
actgtgtagtgttcctagattcagc

SEQ ID NO: 234088 - DNA, 25 bp, Artificial
  Probe
agtcctgatcttgtagattcgttag

SEQ ID NO: 234089 - DNA, 25 bp, Artificial
  Probe
cccagtcctgatcttgtagattcgt

SEQ ID NO: 234090 - DNA, 25 bp, Artificial
  Probe
tagtgttcctagattcagctgaaga

SEQ ID NO: 234091 - DNA, 25 bp, Artificial
  Probe
cagtcctgatcttgtagattcgtta

SEQ ID NO: 234092 - DNA, 25 bp, Artificial
  Probe
ctcactgtgtagtgttcctagattc

SEQ ID NO: 234093 - DNA, 25 bp, Artificial
  Probe
tgtgtctcaactctttgtatatgaa

SEQ ID NO: 234094 - DNA, 25 bp, Artificial
  Probe
ttgtgtctcaactctttgtatatga

SEQ ID NO: 234095 - DNA, 25 bp, Artificial
  Probe
tgttcctagattcagctgaagacga

SEQ ID NO: 234096 - DNA, 25 bp, Artificial
  Probe
cctagattcagctgaagacgagata

SEQ ID NO: 234097 - DNA, 25 bp, Artificial
  Probe
cactgtgtagtgttcctagattcag

SEQ ID NO: 234098 - DNA, 25 bp, Artificial
  Probe
gtgtagtgttcctagattcagctga

SEQ ID NO: 234099 - DNA, 25 bp, Artificial
  Probe
tagattcagctgaagacgagataca

SEQ ID NO: 234100 - DNA, 25 bp, Artificial
  Probe
ctgtgtagtgttcctagattcagct

SEQ ID NO: 234101 - DNA, 25 bp, Artificial
  Probe
ctagattcagctgaagacgagatac

SEQ ID NO: 234102 - DNA, 25 bp, Artificial
  Probe
gaaccaatgctttcttgtgtctcaa

SEQ ID NO: 234103 - DNA, 25 bp, Artificial
  Probe
gtagggcatgtctggggcacgggcg

SEQ ID NO: 234104 - DNA, 25 bp, Artificial
  Probe
tcacagtagggcatgtctggggcac

SEQ ID NO: 234105 - DNA, 25 bp, Artificial
  Probe
gcatgtctggggcacgggcgtctga

SEQ ID NO: 234106 - DNA, 25 bp, Artificial
  Probe
tatgagggaagctggcagggtttgg

SEQ ID NO: 234107 - DNA, 25 bp, Artificial
  Probe
gggcatgtctggggcacgggcgtct

SEQ ID NO: 234108 - DNA, 25 bp, Artificial
  Probe
tgtctggggcacgggcgtctgagaa

SEQ ID NO: 234109 - DNA, 25 bp, Artificial
  Probe
aagaatgttccaagttggtatgagg

SEQ ID NO: 234110 - DNA, 25 bp, Artificial
  Probe
acgggcgtctgagaagaatgttcca

SEQ ID NO: 234111 - DNA, 25 bp, Artificial
  Probe
gttccctctcacagtagggcatgtc

SEQ ID NO: 234112 - DNA, 25 bp, Artificial
  Probe
tgttccctctcacagtagggcatgt

SEQ ID NO: 234113 - DNA, 25 bp, Artificial
  Probe
gaagctggcagggtttggggcaaag

SEQ ID NO: 234114 - DNA, 25 bp, Artificial
  Probe
gttccaagttggtatgagggaagct

SEQ ID NO: 234115 - DNA, 25 bp, Artificial
  Probe
tccctctcacagtagggcatgtctg

SEQ ID NO: 234116 - DNA, 25 bp, Artificial
  Probe
gaatgttccaagttggtatgaggga

SEQ ID NO: 234117 - DNA, 25 bp, Artificial
  Probe
ctctcacagtagggcatgtctgggg

SEQ ID NO: 234118 - DNA, 25 bp, Artificial
  Probe
tctggggcacgggcgtctgagaaga

SEQ ID NO: 234119 - DNA, 25 bp, Artificial
  Probe
agggaagctggcagggtttggggca

SEQ ID NO: 234120 - DNA, 25 bp, Artificial
  Probe
atgagggaagctggcagggtttggg

SEQ ID NO: 234121 - DNA, 25 bp, Artificial
  Probe
ttccaagttggtatgagggaagctg

SEQ ID NO: 234122 - DNA, 25 bp, Artificial
  Probe
agtagggcatgtctggggcacgggc

SEQ ID NO: 234123 - DNA, 25 bp, Artificial
  Probe
atgtctggggcacgggcgtctgaga

SEQ ID NO: 234124 - DNA, 25 bp, Artificial
  Probe
ttccctctcacagtagggcatgtct

SEQ ID NO: 234125 - DNA, 25 bp, Artificial
  Probe
ggaagctggcagggtttggggcaaa

SEQ ID NO: 234126 - DNA, 25 bp, Artificial
  Probe
gggaagctggcagggtttggggcaa

SEQ ID NO: 234127 - DNA, 25 bp, Artificial
  Probe
tgagggaagctggcagggtttgggg

SEQ ID NO: 234128 - DNA, 25 bp, Artificial
  Probe
ggcatgtctggggcacgggcgtctg

SEQ ID NO: 234129 - DNA, 25 bp, Artificial
  Probe
agggcatgtctggggcacgggcgtc

SEQ ID NO: 234130 - DNA, 25 bp, Artificial
  Probe
ggggcacgggcgtctgagaagaatg

SEQ ID NO: 234131 - DNA, 25 bp, Artificial
  Probe
agaatgttccaagttggtatgaggg

SEQ ID NO: 234132 - DNA, 25 bp, Artificial
  Probe
ttgttccctctcacagtagggcatg

SEQ ID NO: 234133 - DNA, 25 bp, Artificial
  Probe
aatgttccaagttggtatgagggaa

SEQ ID NO: 234134 - DNA, 25 bp, Artificial
  Probe
cacagtagggcatgtctggggcacg

SEQ ID NO: 234135 - DNA, 25 bp, Artificial
  Probe
atgttccaagttggtatgagggaag

SEQ ID NO: 234136 - DNA, 25 bp, Artificial
  Probe
cacgggcgtctgagaagaatgttcc

SEQ ID NO: 234137 - DNA, 25 bp, Artificial
  Probe
ggcacgggcgtctgagaagaatgtt

SEQ ID NO: 234138 - DNA, 25 bp, Artificial
  Probe
aagctggcagggtttggggcaaagg

SEQ ID NO: 234139 - DNA, 25 bp, Artificial
  Probe
gtatgagggaagctggcagggtttg

SEQ ID NO: 234140 - DNA, 25 bp, Artificial
  Probe
ctcacagtagggcatgtctggggca

SEQ ID NO: 234141 - DNA, 25 bp, Artificial
  Probe
tctcacagtagggcatgtctggggc

SEQ ID NO: 234142 - DNA, 25 bp, Artificial
  Probe
cagtagggcatgtctggggcacggg

SEQ ID NO: 234143 - DNA, 25 bp, Artificial
  Probe
gcacgggcgtctgagaagaatgttc

SEQ ID NO: 234144 - DNA, 25 bp, Artificial
  Probe
acagtagggcatgtctggggcacgg

SEQ ID NO: 234145 - DNA, 25 bp, Artificial
  Probe
gtctggggcacgggcgtctgagaag

SEQ ID NO: 234146 - DNA, 25 bp, Artificial
  Probe
ctggggcacgggcgtctgagaagaa

SEQ ID NO: 234147 - DNA, 25 bp, Artificial
  Probe
cctctcacagtagggcatgtctggg

SEQ ID NO: 234148 - DNA, 25 bp, Artificial
  Probe
ccctctcacagtagggcatgtctgg

SEQ ID NO: 234149 - DNA, 25 bp, Artificial
  Probe
ctattggatgattccttgagtttac

SEQ ID NO: 234150 - DNA, 25 bp, Artificial
  Probe
tggttctccagatgtatacaactat

SEQ ID NO: 234151 - DNA, 25 bp, Artificial
  Probe
tgattccttgagtttacagctgtac

SEQ ID NO: 234152 - DNA, 25 bp, Artificial
  Probe
tgcttattaatggttctccagatgt

SEQ ID NO: 234153 - DNA, 25 bp, Artificial
  Probe
cctgcttacattggactgggaacct

SEQ ID NO: 234154 - DNA, 25 bp, Artificial
  Probe
tgcaacctcataaagtagcctcgaa

SEQ ID NO: 234155 - DNA, 25 bp, Artificial
  Probe
cttgagtttacagctgtacaaatgt

SEQ ID NO: 234156 - DNA, 25 bp, Artificial
  Probe
taagctgtggaaaccactgaaggtg

SEQ ID NO: 234157 - DNA, 25 bp, Artificial
  Probe
ggaaaccactgaaggtgcttattaa

SEQ ID NO: 234158 - DNA, 25 bp, Artificial
  Probe
tatacaactattggatgattccttg

SEQ ID NO: 234159 - DNA, 25 bp, Artificial
  Probe
cattggactgggaacctaaattgga

SEQ ID NO: 234160 - DNA, 25 bp, Artificial
  Probe
ggaacatgtgactctttcatgcaac

SEQ ID NO: 234161 - DNA, 25 bp, Artificial
  Probe
ctcaccctgcttacattggactggg

SEQ ID NO: 234162 - DNA, 25 bp, Artificial
  Probe
tgagtttacagctgtacaaatgtgc

SEQ ID NO: 234163 - DNA, 25 bp, Artificial
  Probe
cttacattggactgggaacctaaat

SEQ ID NO: 234164 - DNA, 25 bp, Artificial
  Probe
agctgtggaaaccactgaaggtgct

SEQ ID NO: 234165 - DNA, 25 bp, Artificial
  Probe
agtttacagctgtacaaatgtgcag

SEQ ID NO: 234166 - DNA, 25 bp, Artificial
  Probe
ctgtggaaaccactgaaggtgctta

SEQ ID NO: 234167 - DNA, 25 bp, Artificial
  Probe
gcttattaatggttctccagatgta

SEQ ID NO: 234168 - DNA, 25 bp, Artificial
  Probe
tgtatacaactattggatgattcct

SEQ ID NO: 234169 - DNA, 25 bp, Artificial
  Probe
atgtatacaactattggatgattcc

SEQ ID NO: 234170 - DNA, 25 bp, Artificial
  Probe
gtaaatcttaagctgtggaaaccac

SEQ ID NO: 234171 - DNA, 25 bp, Artificial
  Probe
taatggttctccagatgtatacaac

SEQ ID NO: 234172 - DNA, 25 bp, Artificial
  Probe
tattaatggttctccagatgtatac

SEQ ID NO: 234173 - DNA, 25 bp, Artificial
  Probe
ccctgcttacattggactgggaacc

SEQ ID NO: 234174 - DNA, 25 bp, Artificial
  Probe
accactgaaggtgcttattaatggt

SEQ ID NO: 234175 - DNA, 25 bp, Artificial
  Probe
ttccttgagtttacagctgtacaaa

SEQ ID NO: 234176 - DNA, 25 bp, Artificial
  Probe
acaactattggatgattccttgagt

SEQ ID NO: 234177 - DNA, 25 bp, Artificial
  Probe
ccactgaaggtgcttattaatggtt

SEQ ID NO: 234178 - DNA, 25 bp, Artificial
  Probe
ttggatgattccttgagtttacagc

SEQ ID NO: 234179 - DNA, 25 bp, Artificial
  Probe
taaatcttaagctgtggaaaccact

SEQ ID NO: 234180 - DNA, 25 bp, Artificial
  Probe
attccttgagtttacagctgtacaa

SEQ ID NO: 234181 - DNA, 25 bp, Artificial
  Probe
aatcttaagctgtggaaaccactga

SEQ ID NO: 234182 - DNA, 25 bp, Artificial
  Probe
tcttaagctgtggaaaccactgaag

SEQ ID NO: 234183 - DNA, 25 bp, Artificial
  Probe
atgattccttgagtttacagctgta

SEQ ID NO: 234184 - DNA, 25 bp, Artificial
  Probe
cttattaatggttctccagatgtat

SEQ ID NO: 234185 - DNA, 25 bp, Artificial
  Probe
ccttgagtttacagctgtacaaatg

SEQ ID NO: 234186 - DNA, 25 bp, Artificial
  Probe
gcaacctcataaagtagcctcgaat

SEQ ID NO: 234187 - DNA, 25 bp, Artificial
  Probe
ttctccagatgtatacaactattgg

SEQ ID NO: 234188 - DNA, 25 bp, Artificial
  Probe
atggttctccagatgtatacaacta

SEQ ID NO: 234189 - DNA, 25 bp, Artificial
  Probe
ggatgattccttgagtttacagctg

SEQ ID NO: 234190 - DNA, 25 bp, Artificial
  Probe
caactattggatgattccttgagtt

SEQ ID NO: 234191 - DNA, 25 bp, Artificial
  Probe
gaacatgtgactctttcatgcaacc

SEQ ID NO: 234192 - DNA, 25 bp, Artificial
  Probe
tggtaaatcttaagctgtggaaacc

SEQ ID NO: 234193 - DNA, 25 bp, Artificial
  Probe
ttaatggttctccagatgtatacaa

SEQ ID NO: 234194 - DNA, 25 bp, Artificial
  Probe
catgcaacctcataaagtagcctcg

SEQ ID NO: 234195 - DNA, 25 bp, Artificial
  Probe
tgtctgggtcggtgacaaccaagtc

SEQ ID NO: 234196 - DNA, 25 bp, Artificial
  Probe
gtctgggtcggtgacaaccaagtct

SEQ ID NO: 234197 - DNA, 25 bp, Artificial
  Probe
gcctgaatacctgtggaccaaggag

SEQ ID NO: 234198 - DNA, 25 bp, Artificial
  Probe
cctgtggaccaaggagaacgacatg

SEQ ID NO: 234199 - DNA, 25 bp, Artificial
  Probe
tacctgtggaccaaggagaacgaca

SEQ ID NO: 234200 - DNA, 25 bp, Artificial
  Probe
gatgcgacacattaatgactatgta

SEQ ID NO: 234201 - DNA, 25 bp, Artificial
  Probe
cctgaatacctgtggaccaaggaga

SEQ ID NO: 234202 - DNA, 25 bp, Artificial
  Probe
ggtcggtgacaaccaagtctcccgt

SEQ ID NO: 234203 - DNA, 25 bp, Artificial
  Probe
tgcctgaatacctgtggaccaagga

SEQ ID NO: 234204 - DNA, 25 bp, Artificial
  Probe
agcccagatgggagtgaatgaatcc

SEQ ID NO: 234205 - DNA, 25 bp, Artificial
  Probe
atgaactggccctttaatacaggtt

SEQ ID NO: 234206 - DNA, 25 bp, Artificial
  Probe
tccctgacacggaggagcagtttct

SEQ ID NO: 234207 - DNA, 25 bp, Artificial
  Probe
atacctgtggaccaaggagaacgac

SEQ ID NO: 234208 - DNA, 25 bp, Artificial
  Probe
ctgggtcggtgacaaccaagtctcc

SEQ ID NO: 234209 - DNA, 25 bp, Artificial
  Probe
tgcgacacattaatgactatgtatc

SEQ ID NO: 234210 - DNA, 25 bp, Artificial
  Probe
aatacctgtggaccaaggagaacga

SEQ ID NO: 234211 - DNA, 25 bp, Artificial
  Probe
ggggataagtcaacccttcaagatc

SEQ ID NO: 234212 - DNA, 25 bp, Artificial
  Probe
caaaccaggtgtatatcaacatcag

SEQ ID NO: 234213 - DNA, 25 bp, Artificial
  Probe
tagtccagatgaactggccctttaa

SEQ ID NO: 234214 - DNA, 25 bp, Artificial
  Probe
acctgtggaccaaggagaacgacat

SEQ ID NO: 234215 - DNA, 25 bp, Artificial
  Probe
tctgggtcggtgacaaccaagtctc

SEQ ID NO: 234216 - DNA, 25 bp, Artificial
  Probe
agtccagatgaactggccctttaat

SEQ ID NO: 234217 - DNA, 25 bp, Artificial
  Probe
gtccagatgaactggccctttaata

SEQ ID NO: 234218 - DNA, 25 bp, Artificial
  Probe
gaatacctgtggaccaaggagaacg

SEQ ID NO: 234219 - DNA, 25 bp, Artificial
  Probe
ctgtggaccaaggagaacgacatgc

SEQ ID NO: 234220 - DNA, 25 bp, Artificial
  Probe
atgcgacacattaatgactatgtat

SEQ ID NO: 234221 - DNA, 25 bp, Artificial
  Probe
tgaatacctgtggaccaaggagaac

SEQ ID NO: 234222 - DNA, 25 bp, Artificial
  Probe
tgggtcggtgacaaccaagtctccc

SEQ ID NO: 234223 - DNA, 25 bp, Artificial
  Probe
ctgaatacctgtggaccaaggagaa

SEQ ID NO: 234224 - DNA, 25 bp, Artificial
  Probe
ccctgacacggaggagcagtttctt

SEQ ID NO: 234225 - DNA, 25 bp, Artificial
  Probe
tgaactggccctttaatacaggttt

SEQ ID NO: 234226 - DNA, 25 bp, Artificial
  Probe
gagtaatacattcagctggtgctgg

SEQ ID NO: 234227 - DNA, 25 bp, Artificial
  Probe
ggtctcttactgatgggcctcttaa

SEQ ID NO: 234228 - DNA, 25 bp, Artificial
  Probe
tgagtaatacattcagctggtgctg

SEQ ID NO: 234229 - DNA, 25 bp, Artificial
  Probe
cccgttggtcttccacaatcctgtt

SEQ ID NO: 234230 - DNA, 25 bp, Artificial
  Probe
gtcttccacaatcctgttgaggtgg

SEQ ID NO: 234231 - DNA, 25 bp, Artificial
  Probe
atctctgagtaatacattcagctgg

SEQ ID NO: 234232 - DNA, 25 bp, Artificial
  Probe
catctttggtctcttactgatgggc

SEQ ID NO: 234233 - DNA, 25 bp, Artificial
  Probe
atacattcagctggtgctgggtgat

SEQ ID NO: 234234 - DNA, 25 bp, Artificial
  Probe
ccgttggtcttccacaatcctgttg

SEQ ID NO: 234235 - DNA, 25 bp, Artificial
  Probe
tccattgttaaggagaccagagata

SEQ ID NO: 234236 - DNA, 25 bp, Artificial
  Probe
ttagcttggcactggccgtcgtttt

SEQ ID NO: 234237 - DNA, 25 bp, Artificial
  Probe
tgcggccgcaagcttattcccttta

SEQ ID NO: 234238 - DNA, 25 bp, Artificial
  Probe
ctgtatctctgagtaatacattcag

SEQ ID NO: 234239 - DNA, 25 bp, Artificial
  Probe
gcatcaagctcttgatagcagatac

SEQ ID NO: 234240 - DNA, 25 bp, Artificial
  Probe
tctctgagtaatacattcagctggt

SEQ ID NO: 234241 - DNA, 25 bp, Artificial
  Probe
tctttggtctcttactgatgggcct

SEQ ID NO: 234242 - DNA, 25 bp, Artificial
  Probe
gccgcaagcttattccctttagtga

SEQ ID NO: 234243 - DNA, 25 bp, Artificial
  Probe
ctgatgggcctcttaagaattattg

SEQ ID NO: 234244 - DNA, 25 bp, Artificial
  Probe
gtaatacattcagctggtgctgggt

SEQ ID NO: 234245 - DNA, 25 bp, Artificial
  Probe
gccatctttggtctcttactgatgg

SEQ ID NO: 234246 - DNA, 25 bp, Artificial
  Probe
ccattgttaaggagaccagagataa

SEQ ID NO: 234247 - DNA, 25 bp, Artificial
  Probe
taatacattcagctggtgctgggtg

SEQ ID NO: 234248 - DNA, 25 bp, Artificial
  Probe
cggccgcaagcttattccctttagt

SEQ ID NO: 234249 - DNA, 25 bp, Artificial
  Probe
atctttggtctcttactgatgggcc

SEQ ID NO: 234250 - DNA, 25 bp, Artificial
  Probe
gtctcttactgatgggcctcttaag

SEQ ID NO: 234251 - DNA, 25 bp, Artificial
  Probe
gggcctcttaagaattattgtattc

SEQ ID NO: 234252 - DNA, 25 bp, Artificial
  Probe
ggccgcaagcttattccctttagtg

SEQ ID NO: 234253 - DNA, 25 bp, Artificial
  Probe
ggcgattgcatcaagctcttgatag

SEQ ID NO: 234254 - DNA, 25 bp, Artificial
  Probe
ggtcttccacaatcctgttgaggtg

SEQ ID NO: 234255 - DNA, 25 bp, Artificial
  Probe
ctttggtctcttactgatgggcctc

SEQ ID NO: 234256 - DNA, 25 bp, Artificial
  Probe
ctttgcggccgcaagcttattccct

SEQ ID NO: 234257 - DNA, 25 bp, Artificial
  Probe
tggtctcttactgatgggcctctta

SEQ ID NO: 234258 - DNA, 25 bp, Artificial
  Probe
tacattcagctggtgctgggtgatg

SEQ ID NO: 234259 - DNA, 25 bp, Artificial
  Probe
gcgattgcatcaagctcttgatagc

SEQ ID NO: 234260 - DNA, 25 bp, Artificial
  Probe
tttgcggccgcaagcttattccctt

SEQ ID NO: 234261 - DNA, 25 bp, Artificial
  Probe
ttttagcttggcactggccgtcgtt

SEQ ID NO: 234262 - DNA, 25 bp, Artificial
  Probe
ggtaaatatacatctgcacagtctt

SEQ ID NO: 234263 - DNA, 25 bp, Artificial
  Probe
tactgatgggcctcttaagaattat

SEQ ID NO: 234264 - DNA, 25 bp, Artificial
  Probe
gcggccgcaagcttattccctttag

SEQ ID NO: 234265 - DNA, 25 bp, Artificial
  Probe
actgatgggcctcttaagaattatt

SEQ ID NO: 234266 - DNA, 25 bp, Artificial
  Probe
ttggtctcttactgatgggcctctt

SEQ ID NO: 234267 - DNA, 25 bp, Artificial
  Probe
ctgagtaatacattcagctggtgct

SEQ ID NO: 234268 - DNA, 25 bp, Artificial
  Probe
ccgcaagcttattccctttagtgag

SEQ ID NO: 234269 - DNA, 25 bp, Artificial
  Probe
gttggtcttccacaatcctgttgag

SEQ ID NO: 234270 - DNA, 25 bp, Artificial
  Probe
tatctctgagtaatacattcagctg

SEQ ID NO: 234271 - DNA, 25 bp, Artificial
  Probe
tggcactggccgtcgttttaaaacg

SEQ ID NO: 234272 - DNA, 25 bp, Artificial
  Probe
acagaagacactggattgcttgact

SEQ ID NO: 234273 - DNA, 25 bp, Artificial
  Probe
gtacagaagacactggattgcttga

SEQ ID NO: 234274 - DNA, 25 bp, Artificial
  Probe
gtgcagggtcccatgatgttctgtg

SEQ ID NO: 234275 - DNA, 25 bp, Artificial
  Probe
cagggtcccatgatgttctgtggac

SEQ ID NO: 234276 - DNA, 25 bp, Artificial
  Probe
acactggattgcttgactgctggac

SEQ ID NO: 234277 - DNA, 25 bp, Artificial
  Probe
tttgtactgcaatttaccttgatgt

SEQ ID NO: 234278 - DNA, 25 bp, Artificial
  Probe
ttttgtactgcaatttaccttgatg

SEQ ID NO: 234279 - DNA, 25 bp, Artificial
  Probe
aagacactggattgcttgactgctg

SEQ ID NO: 234280 - DNA, 25 bp, Artificial
  Probe
tgcagggtcccatgatgttctgtgg

SEQ ID NO: 234281 - DNA, 25 bp, Artificial
  Probe
tgtactgcaatttaccttgatgtgt

SEQ ID NO: 234282 - DNA, 25 bp, Artificial
  Probe
atttaccttgatgtgtatacagaca

SEQ ID NO: 234283 - DNA, 25 bp, Artificial
  Probe
agaagacactggattgcttgactgc

SEQ ID NO: 234284 - DNA, 25 bp, Artificial
  Probe
ttaccttgatgtgtatacagacatg

SEQ ID NO: 234285 - DNA, 25 bp, Artificial
  Probe
atacagacatgtgcataagtcacag

SEQ ID NO: 234286 - DNA, 25 bp, Artificial
  Probe
agggtcccatgatgttctgtggaca

SEQ ID NO: 234287 - DNA, 25 bp, Artificial
  Probe
actgcaatttaccttgatgtgtata

SEQ ID NO: 234288 - DNA, 25 bp, Artificial
  Probe
tttaccttgatgtgtatacagacat

SEQ ID NO: 234289 - DNA, 25 bp, Artificial
  Probe
tactgcaatttaccttgatgtgtat

SEQ ID NO: 234290 - DNA, 25 bp, Artificial
  Probe
gttgttactcagactgcctcaaact

SEQ ID NO: 234291 - DNA, 25 bp, Artificial
  Probe
gcagggtcccatgatgttctgtgga

SEQ ID NO: 234292 - DNA, 25 bp, Artificial
  Probe
gtactgcaatttaccttgatgtgta

SEQ ID NO: 234293 - DNA, 25 bp, Artificial
  Probe
gcaatttaccttgatgtgtatacag

SEQ ID NO: 234294 - DNA, 25 bp, Artificial
  Probe
ttgttggttgttactcagactgcct

SEQ ID NO: 234295 - DNA, 25 bp, Artificial
  Probe
tatacagacatgtgcataagtcaca

SEQ ID NO: 234296 - DNA, 25 bp, Artificial
  Probe
gaagacactggattgcttgactgct

SEQ ID NO: 234297 - DNA, 25 bp, Artificial
  Probe
gacactggattgcttgactgctgga

SEQ ID NO: 234298 - DNA, 25 bp, Artificial
  Probe
acatgtgcataagtcacagggacct

SEQ ID NO: 234299 - DNA, 25 bp, Artificial
  Probe
tggttgttactcagactgcctcaaa

SEQ ID NO: 234300 - DNA, 25 bp, Artificial
  Probe
agctgtgcagggtcccatgatgttc

SEQ ID NO: 234301 - DNA, 25 bp, Artificial
  Probe
aatttaccttgatgtgtatacagac

SEQ ID NO: 234302 - DNA, 25 bp, Artificial
  Probe
gtatacagacatgtgcataagtcac

SEQ ID NO: 234303 - DNA, 25 bp, Artificial
  Probe
tgtatacagacatgtgcataagtca

SEQ ID NO: 234304 - DNA, 25 bp, Artificial
  Probe
gttggttgttactcagactgcctca

SEQ ID NO: 234305 - DNA, 25 bp, Artificial
  Probe
ggttgttactcagactgcctcaaac

SEQ ID NO: 234306 - DNA, 25 bp, Artificial
  Probe
ggtcccatgatgttctgtggacatg

SEQ ID NO: 234307 - DNA, 25 bp, Artificial
  Probe
tgtgcataagtcacagggacctgtg

SEQ ID NO: 234308 - DNA, 25 bp, Artificial
  Probe
ctgcaatttaccttgatgtgtatac

SEQ ID NO: 234309 - DNA, 25 bp, Artificial
  Probe
tgcataagtcacagggacctgtgtt

SEQ ID NO: 234310 - DNA, 25 bp, Artificial
  Probe
gggtcccatgatgttctgtggacat

SEQ ID NO: 234311 - DNA, 25 bp, Artificial
  Probe
gacatgtgcataagtcacagggacc

SEQ ID NO: 234312 - DNA, 25 bp, Artificial
  Probe
ttggttgttactcagactgcctcaa

SEQ ID NO: 234313 - DNA, 25 bp, Artificial
  Probe
ttgtactgcaatttaccttgatgtg

SEQ ID NO: 234314 - DNA, 25 bp, Artificial
  Probe
tgttggttgttactcagactgcctc

SEQ ID NO: 234315 - DNA, 25 bp, Artificial
  Probe
taccttgatgtgtatacagacatgt

SEQ ID NO: 234316 - DNA, 25 bp, Artificial
  Probe
gtcccatgatgttctgtggacatga

SEQ ID NO: 234317 - DNA, 25 bp, Artificial
  Probe
atgtgcataagtcacagggacctgt

SEQ ID NO: 234318 - DNA, 25 bp, Artificial
  Probe
acattaacgctagatcatgttgctc

SEQ ID NO: 234319 - DNA, 25 bp, Artificial
  Probe
ctcaacttacctgttgccacatgga

SEQ ID NO: 234320 - DNA, 25 bp, Artificial
  Probe
tacctgttgccacatggaatatata

SEQ ID NO: 234321 - DNA, 25 bp, Artificial
  Probe
acacactgcacaatcgaggaaccag

SEQ ID NO: 234322 - DNA, 25 bp, Artificial
  Probe
gataccagagttggttggccacacc

SEQ ID NO: 234323 - DNA, 25 bp, Artificial
  Probe
atccaacagaaatacacaaccgggg

SEQ ID NO: 234324 - DNA, 25 bp, Artificial
  Probe
ttggttggccacacctttgtcactg

SEQ ID NO: 234325 - DNA, 25 bp, Artificial
  Probe
gatccaacagaaatacacaaccggg

SEQ ID NO: 234326 - DNA, 25 bp, Artificial
  Probe
gtgattacattaacgctagatcatg

SEQ ID NO: 234327 - DNA, 25 bp, Artificial
  Probe
cacactgcacaatcgaggaaccaga

SEQ ID NO: 234328 - DNA, 25 bp, Artificial
  Probe
tggttggccacacctttgtcactgt

SEQ ID NO: 234329 - DNA, 25 bp, Artificial
  Probe
taccagagttggttggccacacctt

SEQ ID NO: 234330 - DNA, 25 bp, Artificial
  Probe
cacacatgaaagaagccatgatcaa

SEQ ID NO: 234331 - DNA, 25 bp, Artificial
  Probe
attaacgctagatcatgttgctcaa

SEQ ID NO: 234332 - DNA, 25 bp, Artificial
  Probe
gttaaagtcacacatgaaagaagcc

SEQ ID NO: 234333 - DNA, 25 bp, Artificial
  Probe
aacagaaatacacaaccggggacag

SEQ ID NO: 234334 - DNA, 25 bp, Artificial
  Probe
caacagaaatacacaaccggggaca

SEQ ID NO: 234335 - DNA, 25 bp, Artificial
  Probe
ggttggccacacctttgtcactgtg

SEQ ID NO: 234336 - DNA, 25 bp, Artificial
  Probe
cagttaaagtcacacatgaaagaag

SEQ ID NO: 234337 - DNA, 25 bp, Artificial
  Probe
aacgctagatcatgttgctcaaaat

SEQ ID NO: 234338 - DNA, 25 bp, Artificial
  Probe
cacaatcgaggaaccagagactaaa

SEQ ID NO: 234339 - DNA, 25 bp, Artificial
  Probe
gacagttaaagtcacacatgaaaga

SEQ ID NO: 234340 - DNA, 25 bp, Artificial
  Probe
cgctagatcatgttgctcaaaatta

SEQ ID NO: 234341 - DNA, 25 bp, Artificial
  Probe
taacgctagatcatgttgctcaaaa

SEQ ID NO: 234342 - DNA, 25 bp, Artificial
  Probe
tgtgattacattaacgctagatcat

SEQ ID NO: 234343 - DNA, 25 bp, Artificial
  Probe
agttggttggccacacctttgtcac

SEQ ID NO: 234344 - DNA, 25 bp, Artificial
  Probe
cactgcacaatcgaggaaccagaga

SEQ ID NO: 234345 - DNA, 25 bp, Artificial
  Probe
ttacattaacgctagatcatgttgc

SEQ ID NO: 234346 - DNA, 25 bp, Artificial
  Probe
tctcaacttacctgttgccacatgg

SEQ ID NO: 234347 - DNA, 25 bp, Artificial
  Probe
ggtgataccagagttggttggccac

SEQ ID NO: 234348 - DNA, 25 bp, Artificial
  Probe
tacacactgcacaatcgaggaacca

SEQ ID NO: 234349 - DNA, 25 bp, Artificial
  Probe
tgataccagagttggttggccacac

SEQ ID NO: 234350 - DNA, 25 bp, Artificial
  Probe
tccaacagaaatacacaaccgggga

SEQ ID NO: 234351 - DNA, 25 bp, Artificial
  Probe
aaagtcacacatgaaagaagccatg

SEQ ID NO: 234352 - DNA, 25 bp, Artificial
  Probe
ctgcacaatcgaggaaccagagact

SEQ ID NO: 234353 - DNA, 25 bp, Artificial
  Probe
gctagatcatgttgctcaaaattaa

SEQ ID NO: 234354 - DNA, 25 bp, Artificial
  Probe
cagaaatacacaaccggggacagtt

SEQ ID NO: 234355 - DNA, 25 bp, Artificial
  Probe
tacattaacgctagatcatgttgct

SEQ ID NO: 234356 - DNA, 25 bp, Artificial
  Probe
cattacactgtctgatttagaatgt

SEQ ID NO: 234357 - DNA, 25 bp, Artificial
  Probe
gtgataccagagttggttggccaca

SEQ ID NO: 234358 - DNA, 25 bp, Artificial
  Probe
agttaaagtcacacatgaaagaagc

SEQ ID NO: 234359 - DNA, 25 bp, Artificial
  Probe
accagagttggttggccacaccttt

SEQ ID NO: 234360 - DNA, 25 bp, Artificial
  Probe
atcgaggaaccagagactaaaacca

SEQ ID NO: 234361 - DNA, 25 bp, Artificial
  Probe
aagtcacacatgaaagaagccatga

SEQ ID NO: 234362 - DNA, 25 bp, Artificial
  Probe
tgatccaacagaaatacacaaccgg

SEQ ID NO: 234363 - DNA, 25 bp, Artificial
  Probe
gtcacacatgaaagaagccatgatc

SEQ ID NO: 234364 - DNA, 25 bp, Artificial
  Probe
tgcctggccttgtgggaaccaaggc

SEQ ID NO: 234365 - DNA, 25 bp, Artificial
  Probe
ctgtttacagattcctacagtgaac

SEQ ID NO: 234366 - DNA, 25 bp, Artificial
  Probe
acacaagtcattcagaggattgtca

SEQ ID NO: 234367 - DNA, 25 bp, Artificial
  Probe
gcactgtaccgcagtcctgtttaca

SEQ ID NO: 234368 - DNA, 25 bp, Artificial
  Probe
aggcttcaccaaagaggtacttgtt

SEQ ID NO: 234369 - DNA, 25 bp, Artificial
  Probe
gaaccgagtgggtaccgaggcttca

SEQ ID NO: 234370 - DNA, 25 bp, Artificial
  Probe
caccaaagaggtacttgttgttatt

SEQ ID NO: 234371 - DNA, 25 bp, Artificial
  Probe
tcattcagaggattgtcagaaagac

SEQ ID NO: 234372 - DNA, 25 bp, Artificial
  Probe
taccgcagtcctgtttacagattcc

SEQ ID NO: 234373 - DNA, 25 bp, Artificial
  Probe
ccgcagtcctgtttacagattccta

SEQ ID NO: 234374 - DNA, 25 bp, Artificial
  Probe
gattcctacagtgaaccgagtgggt

SEQ ID NO: 234375 - DNA, 25 bp, Artificial
  Probe
accgcagtcctgtttacagattcct

SEQ ID NO: 234376 - DNA, 25 bp, Artificial
  Probe
tgtaccgcagtcctgtttacagatt

SEQ ID NO: 234377 - DNA, 25 bp, Artificial
  Probe
accgaggcttcaccaaagaggtact

SEQ ID NO: 234378 - DNA, 25 bp, Artificial
  Probe
gagtgggtaccgaggcttcaccaaa

SEQ ID NO: 234379 - DNA, 25 bp, Artificial
  Probe
gtaccgaggcttcaccaaagaggta

SEQ ID NO: 234380 - DNA, 25 bp, Artificial
  Probe
caagtcattcagaggattgtcagaa

SEQ ID NO: 234381 - DNA, 25 bp, Artificial
  Probe
attgtcagaaagactgcggtgcctg

SEQ ID NO: 234382 - DNA, 25 bp, Artificial
  Probe
agtcctgtttacagattcctacagt

SEQ ID NO: 234383 - DNA, 25 bp, Artificial
  Probe
gtcctgtttacagattcctacagtg

SEQ ID NO: 234384 - DNA, 25 bp, Artificial
  Probe
gtttacagattcctacagtgaaccg

SEQ ID NO: 234385 - DNA, 25 bp, Artificial
  Probe
acagattcctacagtgaaccgagtg

SEQ ID NO: 234386 - DNA, 25 bp, Artificial
  Probe
cctgtttacagattcctacagtgaa

SEQ ID NO: 234387 - DNA, 25 bp, Artificial
  Probe
attcctacagtgaaccgagtgggta

SEQ ID NO: 234388 - DNA, 25 bp, Artificial
  Probe
tttacagattcctacagtgaaccga

SEQ ID NO: 234389 - DNA, 25 bp, Artificial
  Probe
ggccttgtgggaaccaaggcccagc

SEQ ID NO: 234390 - DNA, 25 bp, Artificial
  Probe
ttcctacagtgaaccgagtgggtac

SEQ ID NO: 234391 - DNA, 25 bp, Artificial
  Probe
cttcaccaaagaggtacttgttgtt

SEQ ID NO: 234392 - DNA, 25 bp, Artificial
  Probe
agattcctacagtgaaccgagtggg

SEQ ID NO: 234393 - DNA, 25 bp, Artificial
  Probe
ccttgtgggaaccaaggcccagcac

SEQ ID NO: 234394 - DNA, 25 bp, Artificial
  Probe
gcagtcctgtttacagattcctaca

SEQ ID NO: 234395 - DNA, 25 bp, Artificial
  Probe
tacagtgaaccgagtgggtaccgag

SEQ ID NO: 234396 - DNA, 25 bp, Artificial
  Probe
gaaagactgcggtgcctggccttgt

SEQ ID NO: 234397 - DNA, 25 bp, Artificial
  Probe
actgtaccgcagtcctgtttacaga

SEQ ID NO: 234398 - DNA, 25 bp, Artificial
  Probe
gggtaccgaggcttcaccaaagagg

SEQ ID NO: 234399 - DNA, 25 bp, Artificial
  Probe
tacagattcctacagtgaaccgagt

SEQ ID NO: 234400 - DNA, 25 bp, Artificial
  Probe
gccttgtgggaaccaaggcccagca

SEQ ID NO: 234401 - DNA, 25 bp, Artificial
  Probe
ttcaccaaagaggtacttgttgtta

SEQ ID NO: 234402 - DNA, 25 bp, Artificial
  Probe
ggcttcaccaaagaggtacttgttg

SEQ ID NO: 234403 - DNA, 25 bp, Artificial
  Probe
cggtgcctggccttgtgggaaccaa

SEQ ID NO: 234404 - DNA, 25 bp, Artificial
  Probe
cgaggcttcaccaaagaggtacttg

SEQ ID NO: 234405 - DNA, 25 bp, Artificial
  Probe
ttgtgggaaccaaggcccagcactg

SEQ ID NO: 234406 - DNA, 25 bp, Artificial
  Probe
cactgtaccgcagtcctgtttacag

SEQ ID NO: 234407 - DNA, 25 bp, Artificial
  Probe
ccgaggcttcaccaaagaggtactt

SEQ ID NO: 234408 - DNA, 25 bp, Artificial
  Probe
cttgtgggaaccaaggcccagcact

SEQ ID NO: 234409 - DNA, 25 bp, Artificial
  Probe
cgcagtcctgtttacagattcctac

SEQ ID NO: 234410 - DNA, 25 bp, Artificial
  Probe
gtattttgactaagccatgtttcta

SEQ ID NO: 234411 - DNA, 25 bp, Artificial
  Probe
tgaagactttgagaccattgatgca

SEQ ID NO: 234412 - DNA, 25 bp, Artificial
  Probe
actgattcacagaggactgggacac

SEQ ID NO: 234413 - DNA, 25 bp, Artificial
  Probe
tgcctgtgggtcagacagacatcca

SEQ ID NO: 234414 - DNA, 25 bp, Artificial
  Probe
tgggtcagacagacatccaaattca

SEQ ID NO: 234415 - DNA, 25 bp, Artificial
  Probe
atgtattttgactaagccatgtttc

SEQ ID NO: 234416 - DNA, 25 bp, Artificial
  Probe
caagaatctcgcagagtgtcattac

SEQ ID NO: 234417 - DNA, 25 bp, Artificial
  Probe
caggtggatctttcctggacagaag

SEQ ID NO: 234418 - DNA, 25 bp, Artificial
  Probe
gctaccactgttgagttctcgtgat

SEQ ID NO: 234419 - DNA, 25 bp, Artificial
  Probe
tttgagaccattgatgcaggctatt

SEQ ID NO: 234420 - DNA, 25 bp, Artificial
  Probe
caaccgctgcctgtgggtcagacag

SEQ ID NO: 234421 - DNA, 25 bp, Artificial
  Probe
aaccgctgcctgtgggtcagacaga

SEQ ID NO: 234422 - DNA, 25 bp, Artificial
  Probe
gctgcctgtgggtcagacagacatc

SEQ ID NO: 234423 - DNA, 25 bp, Artificial
  Probe
attaccgttgaagactttgagacca

SEQ ID NO: 234424 - DNA, 25 bp, Artificial
  Probe
cagtcatttctattaaatgagcaag

SEQ ID NO: 234425 - DNA, 25 bp, Artificial
  Probe
aattcaggtggatctttcctggaca

SEQ ID NO: 234426 - DNA, 25 bp, Artificial
  Probe
gtgctttacaggaggcccagggcca

SEQ ID NO: 234427 - DNA, 25 bp, Artificial
  Probe
ccacagtagctaccactgttgagtt

SEQ ID NO: 234428 - DNA, 25 bp, Artificial
  Probe
ccaaccgctgcctgtgggtcagaca

SEQ ID NO: 234429 - DNA, 25 bp, Artificial
  Probe
gaccattgatgcaggctattacata

SEQ ID NO: 234430 - DNA, 25 bp, Artificial
  Probe
ggatgcccatctgcacacacagctt

SEQ ID NO: 234431 - DNA, 25 bp, Artificial
  Probe
tctcgcagagtgtcattaccgttga

SEQ ID NO: 234432 - DNA, 25 bp, Artificial
  Probe
attgatgcaggctattacatatgca

SEQ ID NO: 234433 - DNA, 25 bp, Artificial
  Probe
atgggatgcccatctgcacacacag

SEQ ID NO: 234434 - DNA, 25 bp, Artificial
  Probe
agaccacagtagctaccactgttga

SEQ ID NO: 234435 - DNA, 25 bp, Artificial
  Probe
agaatctcgcagagtgtcattaccg

SEQ ID NO: 234436 - DNA, 25 bp, Artificial
  Probe
cagagtgtcattaccgttgaagact

SEQ ID NO: 234437 - DNA, 25 bp, Artificial
  Probe
aaaggcctgtgaccattcgggacac

SEQ ID NO: 234438 - DNA, 25 bp, Artificial
  Probe
tacaggaggcccagggccaaccgct

SEQ ID NO: 234439 - DNA, 25 bp, Artificial
  Probe
aaggcctgtgaccattcgggacacc

SEQ ID NO: 234440 - DNA, 25 bp, Artificial
  Probe
taccgttgaagactttgagaccatt

SEQ ID NO: 234441 - DNA, 25 bp, Artificial
  Probe
gactgattcacagaggactgggaca

SEQ ID NO: 234442 - DNA, 25 bp, Artificial
  Probe
ggcctgtgaccattcgggacacctg

SEQ ID NO: 234443 - DNA, 25 bp, Artificial
  Probe
cagacagacatccaaattcaaagga

SEQ ID NO: 234444 - DNA, 25 bp, Artificial
  Probe
cctgtgggtcagacagacatccaaa

SEQ ID NO: 234445 - DNA, 25 bp, Artificial
  Probe
atgcaggctattacatatgcacagc

SEQ ID NO: 234446 - DNA, 25 bp, Artificial
  Probe
gacatccaaattcaaaggaagtcat

SEQ ID NO: 234447 - DNA, 25 bp, Artificial
  Probe
gtggatctttcctggacagaaggac

SEQ ID NO: 234448 - DNA, 25 bp, Artificial
  Probe
aatgggatgcccatctgcacacaca

SEQ ID NO: 234449 - DNA, 25 bp, Artificial
  Probe
ggacagaccacagtagctaccactg

SEQ ID NO: 234450 - DNA, 25 bp, Artificial
  Probe
gatgcaggctattacatatgcacag

SEQ ID NO: 234451 - DNA, 25 bp, Artificial
  Probe
ctgtcctaggggagcctgatgttga

SEQ ID NO: 234452 - DNA, 25 bp, Artificial
  Probe
gacagacatccaaattcaaaggaag

SEQ ID NO: 234453 - DNA, 25 bp, Artificial
  Probe
gaccacagtagctaccactgttgag

SEQ ID NO: 234454 - DNA, 25 bp, Artificial
  Probe
ttgatgcaggctattacatatgcac

SEQ ID NO: 234455 - DNA, 25 bp, Artificial
  Probe
gtgtcattaccgttgaagactttga

SEQ ID NO: 234456 - DNA, 25 bp, Artificial
  Probe
agcagtgttcgcttaggcaataatt

SEQ ID NO: 234457 - DNA, 25 bp, Artificial
  Probe
ggggcaccttaaactgtgtgagaaa

SEQ ID NO: 234458 - DNA, 25 bp, Artificial
  Probe
aattctgtaatcagagagtgccaca

SEQ ID NO: 234459 - DNA, 25 bp, Artificial
  Probe
tgtgctctgctgtaggacactaata

SEQ ID NO: 234460 - DNA, 25 bp, Artificial
  Probe
attctgtaatcagagagtgccacat

SEQ ID NO: 234461 - DNA, 25 bp, Artificial
  Probe
gagaggttgcctttagccctactgt

SEQ ID NO: 234462 - DNA, 25 bp, Artificial
  Probe
gttactaatgtgctctgctgtagga

SEQ ID NO: 234463 - DNA, 25 bp, Artificial
  Probe
ctaagttactaatgtgctctgctgt

SEQ ID NO: 234464 - DNA, 25 bp, Artificial
  Probe
tttagccctactgtggggcagtatg

SEQ ID NO: 234465 - DNA, 25 bp, Artificial
  Probe
actaatgtgctctgctgtaggacac

SEQ ID NO: 234466 - DNA, 25 bp, Artificial
  Probe
gtgccacattaacttcttggtccat

SEQ ID NO: 234467 - DNA, 25 bp, Artificial
  Probe
gcagtgttcgcttaggcaataattt

SEQ ID NO: 234468 - DNA, 25 bp, Artificial
  Probe
tctgctgtaggacactaatagagtt

SEQ ID NO: 234469 - DNA, 25 bp, Artificial
  Probe
caagggtgacccagggtaaaccatg

SEQ ID NO: 234470 - DNA, 25 bp, Artificial
  Probe
gctctgctgtaggacactaatagag

SEQ ID NO: 234471 - DNA, 25 bp, Artificial
  Probe
cccctgttattccagctggaaatgc

SEQ ID NO: 234472 - DNA, 25 bp, Artificial
  Probe
agagagtgccacattaacttcttgg

SEQ ID NO: 234473 - DNA, 25 bp, Artificial
  Probe
aatgtgctctgctgtaggacactaa

SEQ ID NO: 234474 - DNA, 25 bp, Artificial
  Probe
aaatgcaaattcatcgtcgggctct

SEQ ID NO: 234475 - DNA, 25 bp, Artificial
  Probe
cctttagccctactgtggggcagta

SEQ ID NO: 234476 - DNA, 25 bp, Artificial
  Probe
ttgacagcagtgttcgcttaggcaa

SEQ ID NO: 234477 - DNA, 25 bp, Artificial
  Probe
atggggcaccttaaactgtgtgaga

SEQ ID NO: 234478 - DNA, 25 bp, Artificial
  Probe
aatcaaatggccaagggtgacccag

SEQ ID NO: 234479 - DNA, 25 bp, Artificial
  Probe
ttagccctactgtggggcagtatgg

SEQ ID NO: 234480 - DNA, 25 bp, Artificial
  Probe
agtgccacattaacttcttggtcca

SEQ ID NO: 234481 - DNA, 25 bp, Artificial
  Probe
atcaaatggccaagggtgacccagg

SEQ ID NO: 234482 - DNA, 25 bp, Artificial
  Probe
tgcctttagccctactgtggggcag

SEQ ID NO: 234483 - DNA, 25 bp, Artificial
  Probe
caccttaaactgtgtgagaaagaag

SEQ ID NO: 234484 - DNA, 25 bp, Artificial
  Probe
catggggcaccttaaactgtgtgag

SEQ ID NO: 234485 - DNA, 25 bp, Artificial
  Probe
ctactgtggggcagtatggaatcaa

SEQ ID NO: 234486 - DNA, 25 bp, Artificial
  Probe
tattccagctggaaatgcaaattca

SEQ ID NO: 234487 - DNA, 25 bp, Artificial
  Probe
ttctgtaatcagagagtgccacatt

SEQ ID NO: 234488 - DNA, 25 bp, Artificial
  Probe
ctgctgtaggacactaatagagttg

SEQ ID NO: 234489 - DNA, 25 bp, Artificial
  Probe
ggcaccttaaactgtgtgagaaaga

SEQ ID NO: 234490 - DNA, 25 bp, Artificial
  Probe
tgcttcccctgttattccagctgga

SEQ ID NO: 234491 - DNA, 25 bp, Artificial
  Probe
ttattccagctggaaatgcaaattc

SEQ ID NO: 234492 - DNA, 25 bp, Artificial
  Probe
ttcccctgttattccagctggaaat

SEQ ID NO: 234493 - DNA, 25 bp, Artificial
  Probe
tgacagcagtgttcgcttaggcaat

SEQ ID NO: 234494 - DNA, 25 bp, Artificial
  Probe
ttactaatgtgctctgctgtaggac

SEQ ID NO: 234495 - DNA, 25 bp, Artificial
  Probe
tcagagagtgccacattaacttctt

SEQ ID NO: 234496 - DNA, 25 bp, Artificial
  Probe
tgtaatcagagagtgccacattaac

SEQ ID NO: 234497 - DNA, 25 bp, Artificial
  Probe
gaggttgcctttagccctactgtgg

SEQ ID NO: 234498 - DNA, 25 bp, Artificial
  Probe
aaccatggggcaccttaaactgtgt

SEQ ID NO: 234499 - DNA, 25 bp, Artificial
  Probe
ccttgacagcagtgttcgcttaggc

SEQ ID NO: 234500 - DNA, 25 bp, Artificial
  Probe
gaaatgcaaattcatcgtcgggctc

SEQ ID NO: 234501 - DNA, 25 bp, Artificial
  Probe
catgcttcccctgttattccagctg

SEQ ID NO: 234502 - DNA, 25 bp, Artificial
  Probe
caaacttggggatccttgtgctacc

SEQ ID NO: 234503 - DNA, 25 bp, Artificial
  Probe
actgctgtgtcttctggggtcacca

SEQ ID NO: 234504 - DNA, 25 bp, Artificial
  Probe
gcacctggctttatgtaaatattcc

SEQ ID NO: 234505 - DNA, 25 bp, Artificial
  Probe
tcaggacccagcttcgtctgggttc

SEQ ID NO: 234506 - DNA, 25 bp, Artificial
  Probe
gcagtttttgacacatgccactttc

SEQ ID NO: 234507 - DNA, 25 bp, Artificial
  Probe
gatccttgtgctacctgtctcctca

SEQ ID NO: 234508 - DNA, 25 bp, Artificial
  Probe
aatattcccaagcagctgttagata

SEQ ID NO: 234509 - DNA, 25 bp, Artificial
  Probe
gcaggtgcccgctgcagtttttgac

SEQ ID NO: 234510 - DNA, 25 bp, Artificial
  Probe
ctgaaccccatcagagccagaagca

SEQ ID NO: 234511 - DNA, 25 bp, Artificial
  Probe
ttcctcactcaggttcaggacccag

SEQ ID NO: 234512 - DNA, 25 bp, Artificial
  Probe
ctcactcaggttcaggacccagctt

SEQ ID NO: 234513 - DNA, 25 bp, Artificial
  Probe
ggttcaggacccagcttcgtctggg

SEQ ID NO: 234514 - DNA, 25 bp, Artificial
  Probe
cccagcttcgtctgggttctatgct

SEQ ID NO: 234515 - DNA, 25 bp, Artificial
  Probe
cccatcagagccagaagcaggtgcc

SEQ ID NO: 234516 - DNA, 25 bp, Artificial
  Probe
tgtcttctggggtcaccactgtgcc

SEQ ID NO: 234517 - DNA, 25 bp, Artificial
  Probe
ggacccagcttcgtctgggttctat

SEQ ID NO: 234518 - DNA, 25 bp, Artificial
  Probe
tttctccaaagacaaacttggggat

SEQ ID NO: 234519 - DNA, 25 bp, Artificial
  Probe
actgaaccccatcagagccagaagc

SEQ ID NO: 234520 - DNA, 25 bp, Artificial
  Probe
tgccactttccctacagctggaggc

SEQ ID NO: 234521 - DNA, 25 bp, Artificial
  Probe
gtaaatattcccaagcagctgttag

SEQ ID NO: 234522 - DNA, 25 bp, Artificial
  Probe
gcttcgtctgggttctatgctcact

SEQ ID NO: 234523 - DNA, 25 bp, Artificial
  Probe
acactgaaccccatcagagccagaa

SEQ ID NO: 234524 - DNA, 25 bp, Artificial
  Probe
tgctgtgtcttctggggtcaccact

SEQ ID NO: 234525 - DNA, 25 bp, Artificial
  Probe
acagcacctggctttatgtaaatat

SEQ ID NO: 234526 - DNA, 25 bp, Artificial
  Probe
ctggggtcaccactgtgccaaccgt

SEQ ID NO: 234527 - DNA, 25 bp, Artificial
  Probe
ggagacagcacctggctttatgtaa

SEQ ID NO: 234528 - DNA, 25 bp, Artificial
  Probe
ctcaggttcaggacccagcttcgtc

SEQ ID NO: 234529 - DNA, 25 bp, Artificial
  Probe
tgctacctgtctcctcagtgctcgg

SEQ ID NO: 234530 - DNA, 25 bp, Artificial
  Probe
tgggttctatgctcactgctgtgtc

SEQ ID NO: 234531 - DNA, 25 bp, Artificial
  Probe
tgctcactgctgtgtcttctggggt

SEQ ID NO: 234532 - DNA, 25 bp, Artificial
  Probe
caagcagctgttagatactagtggg

SEQ ID NO: 234533 - DNA, 25 bp, Artificial
  Probe
agaaggacagaacttgcccggagac

SEQ ID NO: 234534 - DNA, 25 bp, Artificial
  Probe
tgcactgaatgtacggagacttggt

SEQ ID NO: 234535 - DNA, 25 bp, Artificial
  Probe
cttgtgctacctgtctcctcagtgc

SEQ ID NO: 234536 - DNA, 25 bp, Artificial
  Probe
ttcaggacccagcttcgtctgggtt

SEQ ID NO: 234537 - DNA, 25 bp, Artificial
  Probe
gtgctacctgtctcctcagtgctcg

SEQ ID NO: 234538 - DNA, 25 bp, Artificial
  Probe
tccaaagacaaacttggggatcctt

SEQ ID NO: 234539 - DNA, 25 bp, Artificial
  Probe
aaggacagaacttgcccggagacag

SEQ ID NO: 234540 - DNA, 25 bp, Artificial
  Probe
cttgcccggagacagcacctggctt

SEQ ID NO: 234541 - DNA, 25 bp, Artificial
  Probe
cactttccctacagctggaggcctt

SEQ ID NO: 234542 - DNA, 25 bp, Artificial
  Probe
gaaccccatcagagccagaagcagg

SEQ ID NO: 234543 - DNA, 25 bp, Artificial
  Probe
taaatattcccaagcagctgttaga

SEQ ID NO: 234544 - DNA, 25 bp, Artificial
  Probe
ccctacagctggaggccttgggagc

SEQ ID NO: 234545 - DNA, 25 bp, Artificial
  Probe
gccagaagcaggtgcccgctgcagt

SEQ ID NO: 234546 - DNA, 25 bp, Artificial
  Probe
ttatgtaaatattcccaagcagctg

SEQ ID NO: 234547 - DNA, 25 bp, Artificial
  Probe
gaacttgcccggagacagcacctgg

SEQ ID NO: 234548 - DNA, 25 bp, Artificial
  Probe
gccatattcaacagcacagctctga

SEQ ID NO: 234549 - DNA, 25 bp, Artificial
  Probe
gtgtcaatacttctgttcttattcg

SEQ ID NO: 234550 - DNA, 25 bp, Artificial
  Probe
cagtcgacagccatgactacttgtt

SEQ ID NO: 234551 - DNA, 25 bp, Artificial
  Probe
ctgggagttcccagaactcaacatg

SEQ ID NO: 234552 - DNA, 25 bp, Artificial
  Probe
gtggtgtcaatacttctgttcttat

SEQ ID NO: 234553 - DNA, 25 bp, Artificial
  Probe
gacatccgtcctgctttgctttatc

SEQ ID NO: 234554 - DNA, 25 bp, Artificial
  Probe
tcattgtagtggtgtcaatacttct

SEQ ID NO: 234555 - DNA, 25 bp, Artificial
  Probe
ataacagtcgacagccatgactact

SEQ ID NO: 234556 - DNA, 25 bp, Artificial
  Probe
ggataacagtcgacagccatgacta

SEQ ID NO: 234557 - DNA, 25 bp, Artificial
  Probe
aaggactgtggcagcagcagaagat

SEQ ID NO: 234558 - DNA, 25 bp, Artificial
  Probe
cagcagcagaagatttgggggacat

SEQ ID NO: 234559 - DNA, 25 bp, Artificial
  Probe
tgggagttcccagaactcaacatgg

SEQ ID NO: 234560 - DNA, 25 bp, Artificial
  Probe
tagtggtgtcaatacttctgttctt

SEQ ID NO: 234561 - DNA, 25 bp, Artificial
  Probe
ttattcgtgacatccgtcctgcttt

SEQ ID NO: 234562 - DNA, 25 bp, Artificial
  Probe
tgctcctgggataacagtcgacagc

SEQ ID NO: 234563 - DNA, 25 bp, Artificial
  Probe
gcacagctctgaaaaaggatggtct

SEQ ID NO: 234564 - DNA, 25 bp, Artificial
  Probe
cagaactcaacatggcgccttcaag

SEQ ID NO: 234565 - DNA, 25 bp, Artificial
  Probe
ccagaactcaacatggcgccttcaa

SEQ ID NO: 234566 - DNA, 25 bp, Artificial
  Probe
caggcgcctgggagttcccagaact

SEQ ID NO: 234567 - DNA, 25 bp, Artificial
  Probe
tcgtgacatccgtcctgctttgctt

SEQ ID NO: 234568 - DNA, 25 bp, Artificial
  Probe
caacatggcgccttcaaggtgtggt

SEQ ID NO: 234569 - DNA, 25 bp, Artificial
  Probe
agccatattcaacagcacagctctg

SEQ ID NO: 234570 - DNA, 25 bp, Artificial
  Probe
gcgcctgggagttcccagaactcaa

SEQ ID NO: 234571 - DNA, 25 bp, Artificial
  Probe
attcaacagcacagctctgaaaaag

SEQ ID NO: 234572 - DNA, 25 bp, Artificial
  Probe
tggtcatcatcattgtagtggtgtc

SEQ ID NO: 234573 - DNA, 25 bp, Artificial
  Probe
tccgtcctgctttgctttatcctcg

SEQ ID NO: 234574 - DNA, 25 bp, Artificial
  Probe
gtacctacggggtgctagctgcctg

SEQ ID NO: 234575 - DNA, 25 bp, Artificial
  Probe
ggtgtcaatacttctgttcttattc

SEQ ID NO: 234576 - DNA, 25 bp, Artificial
  Probe
ttcccagaactcaacatggcgcctt

SEQ ID NO: 234577 - DNA, 25 bp, Artificial
  Probe
ctgacaggcgcctgggagttcccag

SEQ ID NO: 234578 - DNA, 25 bp, Artificial
  Probe
ccagatggtcatcatcattgtagtg

SEQ ID NO: 234579 - DNA, 25 bp, Artificial
  Probe
actgctcctgggataacagtcgaca

SEQ ID NO: 234580 - DNA, 25 bp, Artificial
  Probe
cagatggtcatcatcattgtagtgg

SEQ ID NO: 234581 - DNA, 25 bp, Artificial
  Probe
aggactgtggcagcagcagaagatt

SEQ ID NO: 234582 - DNA, 25 bp, Artificial
  Probe
ctcctgggataacagtcgacagcca

SEQ ID NO: 234583 - DNA, 25 bp, Artificial
  Probe
gtcatagccatattcaacagcacag

SEQ ID NO: 234584 - DNA, 25 bp, Artificial
  Probe
atggcgccttcaaggtgtggttcag

SEQ ID NO: 234585 - DNA, 25 bp, Artificial
  Probe
tttgctttatcctcggccagcactg

SEQ ID NO: 234586 - DNA, 25 bp, Artificial
  Probe
gtcaatacttctgttcttattcgtg

SEQ ID NO: 234587 - DNA, 25 bp, Artificial
  Probe
atctacgaccccacggtgggtctct

SEQ ID NO: 234588 - DNA, 25 bp, Artificial
  Probe
ttatcctcggccagcactggcacag

SEQ ID NO: 234589 - DNA, 25 bp, Artificial
  Probe
acctacggggtgctagctgcctgga

SEQ ID NO: 234590 - DNA, 25 bp, Artificial
  Probe
gaggtcatagccatattcaacagca

SEQ ID NO: 234591 - DNA, 25 bp, Artificial
  Probe
gtcccagaagaggtcatagccatat

SEQ ID NO: 234592 - DNA, 25 bp, Artificial
  Probe
tcctgctttgctttatcctcggcca

SEQ ID NO: 234593 - DNA, 25 bp, Artificial
  Probe
cttctgttcttattcgtgacatccg

SEQ ID NO: 234594 - DNA, 25 bp, Artificial
  Probe
gatcttcactactgtgatcttggca

SEQ ID NO: 234595 - DNA, 25 bp, Artificial
  Probe
tgtttcccagtgtgcgttgtggctc

SEQ ID NO: 234596 - DNA, 25 bp, Artificial
  Probe
atgtttcccagtgtgcgttgtggct

SEQ ID NO: 234597 - DNA, 25 bp, Artificial
  Probe
gtgtgcgttgtggctcctgtggaac

SEQ ID NO: 234598 - DNA, 25 bp, Artificial
  Probe
ggctcctgtggaactgagtgctggc

SEQ ID NO: 234599 - DNA, 25 bp, Artificial
  Probe
cgttgtggctcctgtggaactgagt

SEQ ID NO: 234600 - DNA, 25 bp, Artificial
  Probe
acccatgtttcccagtgtgcgttgt

SEQ ID NO: 234601 - DNA, 25 bp, Artificial
  Probe
cagtgtgcgttgtggctcctgtgga

SEQ ID NO: 234602 - DNA, 25 bp, Artificial
  Probe
agtgtgcgttgtggctcctgtggaa

SEQ ID NO: 234603 - DNA, 25 bp, Artificial
  Probe
cccatgtttcccagtgtgcgttgtg

SEQ ID NO: 234604 - DNA, 25 bp, Artificial
  Probe
gcgttgtggctcctgtggaactgag

SEQ ID NO: 234605 - DNA, 25 bp, Artificial
  Probe
ctggatcttcactactgtgatcttg

SEQ ID NO: 234606 - DNA, 25 bp, Artificial
  Probe
ccatgtttcccagtgtgcgttgtgg

SEQ ID NO: 234607 - DNA, 25 bp, Artificial
  Probe
catgtttcccagtgtgcgttgtggc

SEQ ID NO: 234608 - DNA, 25 bp, Artificial
  Probe
aactggatcttcactactgtgatct

SEQ ID NO: 234609 - DNA, 25 bp, Artificial
  Probe
actggatcttcactactgtgatctt

SEQ ID NO: 234610 - DNA, 25 bp, Artificial
  Probe
gtttcccagtgtgcgttgtggctcc

SEQ ID NO: 234611 - DNA, 25 bp, Artificial
  Probe
tgtgcgttgtggctcctgtggaact

SEQ ID NO: 234612 - DNA, 25 bp, Artificial
  Probe
gtgcgttgtggctcctgtggaactg

SEQ ID NO: 234613 - DNA, 25 bp, Artificial
  Probe
ttgtggctcctgtggaactgagtgc

SEQ ID NO: 234614 - DNA, 25 bp, Artificial
  Probe
tgtggctcctgtggaactgagtgct

SEQ ID NO: 234615 - DNA, 25 bp, Artificial
  Probe
tggctcctgtggaactgagtgctgg

SEQ ID NO: 234616 - DNA, 25 bp, Artificial
  Probe
gctcctgtggaactgagtgctggct

SEQ ID NO: 234617 - DNA, 25 bp, Artificial
  Probe
gttgtggctcctgtggaactgagtg

SEQ ID NO: 234618 - DNA, 25 bp, Artificial
  Probe
tggatcttcactactgtgatcttgg

SEQ ID NO: 234619 - DNA, 25 bp, Artificial
  Probe
tttcccagtgtgcgttgtggctcct

SEQ ID NO: 234620 - DNA, 25 bp, Artificial
  Probe
tgcgttgtggctcctgtggaactga

SEQ ID NO: 234621 - DNA, 25 bp, Artificial
  Probe
gtggctcctgtggaactgagtgctg

SEQ ID NO: 234622 - DNA, 25 bp, Artificial
  Probe
atcttcactactgtgatcttggcag

SEQ ID NO: 234623 - DNA, 25 bp, Artificial
  Probe
cctcttcatgaaagcgtgacttggg

SEQ ID NO: 234624 - DNA, 25 bp, Artificial
  Probe
gtcttctgtcaagtgccgagggaga

SEQ ID NO: 234625 - DNA, 25 bp, Artificial
  Probe
tgagtcctcagttaggacctggcct

SEQ ID NO: 234626 - DNA, 25 bp, Artificial
  Probe
gaatgttccataattgcaactaagt

SEQ ID NO: 234627 - DNA, 25 bp, Artificial
  Probe
aagcccagaacagctggcacagctc

SEQ ID NO: 234628 - DNA, 25 bp, Artificial
  Probe
agtctccttccttcgtctctggatt

SEQ ID NO: 234629 - DNA, 25 bp, Artificial
  Probe
tcatgaaagcgtgacttgggtgatc

SEQ ID NO: 234630 - DNA, 25 bp, Artificial
  Probe
tgggtgatctgcaaggagagcatca

SEQ ID NO: 234631 - DNA, 25 bp, Artificial
  Probe
tctctggattactggacctactttg

SEQ ID NO: 234632 - DNA, 25 bp, Artificial
  Probe
acttgggtgatctgcaaggagagca

SEQ ID NO: 234633 - DNA, 25 bp, Artificial
  Probe
agagcctcattttgagtcctagcaa

SEQ ID NO: 234634 - DNA, 25 bp, Artificial
  Probe
tttgagtcctagcaaagagtgagtc

SEQ ID NO: 234635 - DNA, 25 bp, Artificial
  Probe
agcatcagtctaagcccagaacagc

SEQ ID NO: 234636 - DNA, 25 bp, Artificial
  Probe
ggcacagctccgtggtcttctgtca

SEQ ID NO: 234637 - DNA, 25 bp, Artificial
  Probe
tctgcaaggagagcatcagtctaag

SEQ ID NO: 234638 - DNA, 25 bp, Artificial
  Probe
agagcctgcggttccagttctgagc

SEQ ID NO: 234639 - DNA, 25 bp, Artificial
  Probe
aacagctggcacagctccgtggtct

SEQ ID NO: 234640 - DNA, 25 bp, Artificial
  Probe
tggtcttctgtcaagtgccgaggga

SEQ ID NO: 234641 - DNA, 25 bp, Artificial
  Probe
tgaaagcgtgacttgggtgatctgc

SEQ ID NO: 234642 - DNA, 25 bp, Artificial
  Probe
agctggcacagctccgtggtcttct

SEQ ID NO: 234643 - DNA, 25 bp, Artificial
  Probe
ggcagaacagtcagagcctcatttt

SEQ ID NO: 234644 - DNA, 25 bp, Artificial
  Probe
taagcatgtgtttgtgcttaaagcc

SEQ ID NO: 234645 - DNA, 25 bp, Artificial
  Probe
cgtggtcttctgtcaagtgccgagg

SEQ ID NO: 234646 - DNA, 25 bp, Artificial
  Probe
tcttctgtcaagtgccgagggagag

SEQ ID NO: 234647 - DNA, 25 bp, Artificial
  Probe
aagagtgagtcctcagttaggacct

SEQ ID NO: 234648 - DNA, 25 bp, Artificial
  Probe
cagtctaagcccagaacagctggca

SEQ ID NO: 234649 - DNA, 25 bp, Artificial
  Probe
agaacagctggcacagctccgtggt

SEQ ID NO: 234650 - DNA, 25 bp, Artificial
  Probe
gatctgcaaggagagcatcagtcta

SEQ ID NO: 234651 - DNA, 25 bp, Artificial
  Probe
acagtcagagcctcattttgagtcc

SEQ ID NO: 234652 - DNA, 25 bp, Artificial
  Probe
tccttccttcgtctctggattactg

SEQ ID NO: 234653 - DNA, 25 bp, Artificial
  Probe
gttccagttctgagcaaccaccgtc

SEQ ID NO: 234654 - DNA, 25 bp, Artificial
  Probe
cagaacagtcagagcctcattttga

SEQ ID NO: 234655 - DNA, 25 bp, Artificial
  Probe
catgaaagcgtgacttgggtgatct

SEQ ID NO: 234656 - DNA, 25 bp, Artificial
  Probe
gtcctagcaaagagtgagtcctcag

SEQ ID NO: 234657 - DNA, 25 bp, Artificial
  Probe
gaaagcgtgacttgggtgatctgca

SEQ ID NO: 234658 - DNA, 25 bp, Artificial
  Probe
ggttccagttctgagcaaccaccgt

SEQ ID NO: 234659 - DNA, 25 bp, Artificial
  Probe
agtcctcagttaggacctggcctcc

SEQ ID NO: 234660 - DNA, 25 bp, Artificial
  Probe
gagagcctgcggttccagttctgag

SEQ ID NO: 234661 - DNA, 25 bp, Artificial
  Probe
cctcctcttcatgaaagcgtgactt

SEQ ID NO: 234662 - DNA, 25 bp, Artificial
  Probe
agtgagtcctcagttaggacctggc

SEQ ID NO: 234663 - DNA, 25 bp, Artificial
  Probe
cctgcggttccagttctgagcaacc

SEQ ID NO: 234664 - DNA, 25 bp, Artificial
  Probe
tcagagcctcattttgagtcctagc

SEQ ID NO: 234665 - DNA, 25 bp, Artificial
  Probe
gagagcatcagtctaagcccagaac

SEQ ID NO: 234666 - DNA, 25 bp, Artificial
  Probe
caaagagtgagtcctcagttaggac

SEQ ID NO: 234667 - DNA, 25 bp, Artificial
  Probe
tcagttaggacctggcctccctgca

SEQ ID NO: 234668 - DNA, 25 bp, Artificial
  Probe
ctcattttgagtcctagcaaagagt

SEQ ID NO: 234669 - DNA, 25 bp, Artificial
  Probe
ccagtccatggctgcaaatccctgt

SEQ ID NO: 234670 - DNA, 25 bp, Artificial
  Probe
ctaaaccaacagtgtacatctctgg

SEQ ID NO: 234671 - DNA, 25 bp, Artificial
  Probe
agatccccatgtttaaaactagaag

SEQ ID NO: 234672 - DNA, 25 bp, Artificial
  Probe
gtttctccaagaacgcagcatatcc

SEQ ID NO: 234673 - DNA, 25 bp, Artificial
  Probe
gtccgaacagctgtgctcccttctg

SEQ ID NO: 234674 - DNA, 25 bp, Artificial
  Probe
aaagctagagaccaaagctggacat

SEQ ID NO: 234675 - DNA, 25 bp, Artificial
  Probe
aatgggaaagcaccagccctcctaa

SEQ ID NO: 234676 - DNA, 25 bp, Artificial
  Probe
aagtcgctgggattcggattgtgca

SEQ ID NO: 234677 - DNA, 25 bp, Artificial
  Probe
agtccttacgtcgtggtcctaagag

SEQ ID NO: 234678 - DNA, 25 bp, Artificial
  Probe
gcagaaacacccacacactggagat

SEQ ID NO: 234679 - DNA, 25 bp, Artificial
  Probe
gattgtgcagaaacacccacacact

SEQ ID NO: 234680 - DNA, 25 bp, Artificial
  Probe
gcctccagaaggaaagctagagacc

SEQ ID NO: 234681 - DNA, 25 bp, Artificial
  Probe
ggacaaacatgtttctccaagaacg

SEQ ID NO: 234682 - DNA, 25 bp, Artificial
  Probe
accagaagccacatgcctccatgga

SEQ ID NO: 234683 - DNA, 25 bp, Artificial
  Probe
tccaagaacgcagcatatccaacag

SEQ ID NO: 234684 - DNA, 25 bp, Artificial
  Probe
cattgaaccccctagaagtgccaat

SEQ ID NO: 234685 - DNA, 25 bp, Artificial
  Probe
tacgtcgtggtcctaagaggaagag

SEQ ID NO: 234686 - DNA, 25 bp, Artificial
  Probe
gcctccatggacaaacatgtttctc

SEQ ID NO: 234687 - DNA, 25 bp, Artificial
  Probe
ttgtgcagaaacacccacacactgg

SEQ ID NO: 234688 - DNA, 25 bp, Artificial
  Probe
cctagaagtgccaattagcagaaca

SEQ ID NO: 234689 - DNA, 25 bp, Artificial
  Probe
attagcagaacatggcaagtcctga

SEQ ID NO: 234690 - DNA, 25 bp, Artificial
  Probe
cgtgaaagtcgctgggattcggatt

SEQ ID NO: 234691 - DNA, 25 bp, Artificial
  Probe
aagccacatgcctccatggacaaac

SEQ ID NO: 234692 - DNA, 25 bp, Artificial
  Probe
agaggctcaaacaccaaattttgtt

SEQ ID NO: 234693 - DNA, 25 bp, Artificial
  Probe
gctgggattcggattgtgcagaaac

SEQ ID NO: 234694 - DNA, 25 bp, Artificial
  Probe
tcgtggtcctaagaggaagaggcca

SEQ ID NO: 234695 - DNA, 25 bp, Artificial
  Probe
tggtatggtccgaacagctgtgctc

SEQ ID NO: 234696 - DNA, 25 bp, Artificial
  Probe
gcccgccgtgaaagtcgctgggatt

SEQ ID NO: 234697 - DNA, 25 bp, Artificial
  Probe
agaagaggctcaaacaccaaatttt

SEQ ID NO: 234698 - DNA, 25 bp, Artificial
  Probe
ctccaggatgcttccccgacaaaat

SEQ ID NO: 234699 - DNA, 25 bp, Artificial
  Probe
aacactatggtatggtccgaacagc

SEQ ID NO: 234700 - DNA, 25 bp, Artificial
  Probe
tccccatgtttaaaactagaagagg

SEQ ID NO: 234701 - DNA, 25 bp, Artificial
  Probe
agcatatccaacagcctcgcaagtg

SEQ ID NO: 234702 - DNA, 25 bp, Artificial
  Probe
attcggattgtgcagaaacacccac

SEQ ID NO: 234703 - DNA, 25 bp, Artificial
  Probe
tatccaacagcctcgcaagtgacca

SEQ ID NO: 234704 - DNA, 25 bp, Artificial
  Probe
aaagtcgctgggattcggattgtgc

SEQ ID NO: 234705 - DNA, 25 bp, Artificial
  Probe
cacccacacactggagatgggaagg

SEQ ID NO: 234706 - DNA, 25 bp, Artificial
  Probe
gaagtccttcgcactatagcagtag

SEQ ID NO: 234707 - DNA, 25 bp, Artificial
  Probe
gagaccaaagctggacatccgcccg

SEQ ID NO: 234708 - DNA, 25 bp, Artificial
  Probe
cgcactatagcagtagtttaaagtc

SEQ ID NO: 234709 - DNA, 25 bp, Artificial
  Probe
gtggtcctaagaggaagaggccact

SEQ ID NO: 234710 - DNA, 25 bp, Artificial
  Probe
tggacaaacatgtttctccaagaac

SEQ ID NO: 234711 - DNA, 25 bp, Artificial
  Probe
tgggaaagcaccagccctcctaaac

SEQ ID NO: 234712 - DNA, 25 bp, Artificial
  Probe
gcagcatatccaacagcctcgcaag

SEQ ID NO: 234713 - DNA, 25 bp, Artificial
  Probe
acatgtttctccaagaacgcagcat

SEQ ID NO: 234714 - DNA, 25 bp, Artificial
  Probe
acacccacacactggagatgggaag

SEQ ID NO: 234715 - DNA, 25 bp, Artificial
  Probe
tagcactggctcccgaggagttgga

SEQ ID NO: 234716 - DNA, 25 bp, Artificial
  Probe
ttcagtgacatggtggcggagcatg

SEQ ID NO: 234717 - DNA, 25 bp, Artificial
  Probe
gcggagcatgctgccaaacagaagc

SEQ ID NO: 234718 - DNA, 25 bp, Artificial
  Probe
agtgacatggtggcggagcatgctg

SEQ ID NO: 234719 - DNA, 25 bp, Artificial
  Probe
gagcagcaggcccaagtcgagaaag

SEQ ID NO: 234720 - DNA, 25 bp, Artificial
  Probe
gtgacatggtggcggagcatgctgc

SEQ ID NO: 234721 - DNA, 25 bp, Artificial
  Probe
gcatgtccgggagcagcaggcccaa

SEQ ID NO: 234722 - DNA, 25 bp, Artificial
  Probe
acttcagtgacatggtggcggagca

SEQ ID NO: 234723 - DNA, 25 bp, Artificial
  Probe
agcatgtccgggagcagcaggccca

SEQ ID NO: 234724 - DNA, 25 bp, Artificial
  Probe
catggtggcggagcatgctgccaaa

SEQ ID NO: 234725 - DNA, 25 bp, Artificial
  Probe
catgtccgggagcagcaggcccaag

SEQ ID NO: 234726 - DNA, 25 bp, Artificial
  Probe
gagcatgtccgggagcagcaggccc

SEQ ID NO: 234727 - DNA, 25 bp, Artificial
  Probe
atgtccgggagcagcaggcccaagt

SEQ ID NO: 234728 - DNA, 25 bp, Artificial
  Probe
gaagtagcactggctcccgaggagt

SEQ ID NO: 234729 - DNA, 25 bp, Artificial
  Probe
tggcggagcatgctgccaaacagaa

SEQ ID NO: 234730 - DNA, 25 bp, Artificial
  Probe
gtccgggagcagcaggcccaagtcg

SEQ ID NO: 234731 - DNA, 25 bp, Artificial
  Probe
cttcagtgacatggtggcggagcat

SEQ ID NO: 234732 - DNA, 25 bp, Artificial
  Probe
gcactggctcccgaggagttggagt

SEQ ID NO: 234733 - DNA, 25 bp, Artificial
  Probe
ggagcagcaggcccaagtcgagaaa

SEQ ID NO: 234734 - DNA, 25 bp, Artificial
  Probe
agcactggctcccgaggagttggag

SEQ ID NO: 234735 - DNA, 25 bp, Artificial
  Probe
tgtccgggagcagcaggcccaagtc

SEQ ID NO: 234736 - DNA, 25 bp, Artificial
  Probe
agtagcactggctcccgaggagttg

SEQ ID NO: 234737 - DNA, 25 bp, Artificial
  Probe
agcagcaggcccaagtcgagaaaga

SEQ ID NO: 234738 - DNA, 25 bp, Artificial
  Probe
tcagtgacatggtggcggagcatgc

SEQ ID NO: 234739 - DNA, 25 bp, Artificial
  Probe
gacttcagtgacatggtggcggagc

SEQ ID NO: 234740 - DNA, 25 bp, Artificial
  Probe
acatggtggcggagcatgctgccaa

SEQ ID NO: 234741 - DNA, 25 bp, Artificial
  Probe
gggagcagcaggcccaagtcgagaa

SEQ ID NO: 234742 - DNA, 25 bp, Artificial
  Probe
cagtgacatggtggcggagcatgct

SEQ ID NO: 234743 - DNA, 25 bp, Artificial
  Probe
gacatggtggcggagcatgctgcca

SEQ ID NO: 234744 - DNA, 25 bp, Artificial
  Probe
tccgggagcagcaggcccaagtcga

SEQ ID NO: 234745 - DNA, 25 bp, Artificial
  Probe
tggtggcggagcatgctgccaaaca

SEQ ID NO: 234746 - DNA, 25 bp, Artificial
  Probe
cgggagcagcaggcccaagtcgaga

SEQ ID NO: 234747 - DNA, 25 bp, Artificial
  Probe
tgacatggtggcggagcatgctgcc

SEQ ID NO: 234748 - DNA, 25 bp, Artificial
  Probe
ggagcatgtccgggagcagcaggcc

SEQ ID NO: 234749 - DNA, 25 bp, Artificial
  Probe
ggaagtagcactggctcccgaggag

SEQ ID NO: 234750 - DNA, 25 bp, Artificial
  Probe
gtagcactggctcccgaggagttgg

SEQ ID NO: 234751 - DNA, 25 bp, Artificial
  Probe
cactggctcccgaggagttggagtt

SEQ ID NO: 234752 - DNA, 25 bp, Artificial
  Probe
aagtagcactggctcccgaggagtt

SEQ ID NO: 234753 - DNA, 25 bp, Artificial
  Probe
ccgggagcagcaggcccaagtcgag

SEQ ID NO: 234754 - DNA, 25 bp, Artificial
  Probe
gtggcggagcatgctgccaaacaga

SEQ ID NO: 234755 - DNA, 25 bp, Artificial
  Probe
atggtggcggagcatgctgccaaac

SEQ ID NO: 234756 - DNA, 25 bp, Artificial
  Probe
atctatgaccggaaattcctgatgg

SEQ ID NO: 234757 - DNA, 25 bp, Artificial
  Probe
acacagaggagtctgtcggaatgat

SEQ ID NO: 234758 - DNA, 25 bp, Artificial
  Probe
accggaaattcctgatggagtgtcg

SEQ ID NO: 234759 - DNA, 25 bp, Artificial
  Probe
gtcactagccctaccagcgatgagc

SEQ ID NO: 234760 - DNA, 25 bp, Artificial
  Probe
attcctgatggagtgtcggaactcg

SEQ ID NO: 234761 - DNA, 25 bp, Artificial
  Probe
tcctgatggagtgtcggaactcgcc

SEQ ID NO: 234762 - DNA, 25 bp, Artificial
  Probe
gaggaaccagaatcatctatgaccg

SEQ ID NO: 234763 - DNA, 25 bp, Artificial
  Probe
ctatgaccggaaattcctgatggag

SEQ ID NO: 234764 - DNA, 25 bp, Artificial
  Probe
ggaactcgcctgtggccaaaacacc

SEQ ID NO: 234765 - DNA, 25 bp, Artificial
  Probe
acagaggagtctgtcggaatgatct

SEQ ID NO: 234766 - DNA, 25 bp, Artificial
  Probe
accccgggaggaaccagaatcatct

SEQ ID NO: 234767 - DNA, 25 bp, Artificial
  Probe
cggaaattcctgatggagtgtcgga

SEQ ID NO: 234768 - DNA, 25 bp, Artificial
  Probe
ttcctgatggagtgtcggaactcgc

SEQ ID NO: 234769 - DNA, 25 bp, Artificial
  Probe
tatgaccggaaattcctgatggagt

SEQ ID NO: 234770 - DNA, 25 bp, Artificial
  Probe
gccaaccattccaggggtcactagc

SEQ ID NO: 234771 - DNA, 25 bp, Artificial
  Probe
tagccctcggcgacggcgtgcagct

SEQ ID NO: 234772 - DNA, 25 bp, Artificial
  Probe
ggaaccagaatcatctatgaccgga

SEQ ID NO: 234773 - DNA, 25 bp, Artificial
  Probe
ggagtctgtcggaatgatctggcaa

SEQ ID NO: 234774 - DNA, 25 bp, Artificial
  Probe
cagaggagtctgtcggaatgatctg

SEQ ID NO: 234775 - DNA, 25 bp, Artificial
  Probe
aggaaccagaatcatctatgaccgg

SEQ ID NO: 234776 - DNA, 25 bp, Artificial
  Probe
agtctgtcggaatgatctggcaatt

SEQ ID NO: 234777 - DNA, 25 bp, Artificial
  Probe
ccagaatcatctatgaccggaaatt

SEQ ID NO: 234778 - DNA, 25 bp, Artificial
  Probe
gcgggcagcagttgcagccagactc

SEQ ID NO: 234779 - DNA, 25 bp, Artificial
  Probe
attccaggggtcactagccctacca

SEQ ID NO: 234780 - DNA, 25 bp, Artificial
  Probe
gaaattcctgatggagtgtcggaac

SEQ ID NO: 234781 - DNA, 25 bp, Artificial
  Probe
accagaatcatctatgaccggaaat

SEQ ID NO: 234782 - DNA, 25 bp, Artificial
  Probe
cacagaggagtctgtcggaatgatc

SEQ ID NO: 234783 - DNA, 25 bp, Artificial
  Probe
tgaccggaaattcctgatggagtgt

SEQ ID NO: 234784 - DNA, 25 bp, Artificial
  Probe
atgaccggaaattcctgatggagtg

SEQ ID NO: 234785 - DNA, 25 bp, Artificial
  Probe
agttgcagccagactcccagccggg

SEQ ID NO: 234786 - DNA, 25 bp, Artificial
  Probe
tgccaaccattccaggggtcactag

SEQ ID NO: 234787 - DNA, 25 bp, Artificial
  Probe
gagtgtcggaactcgcctgtggcca

SEQ ID NO: 234788 - DNA, 25 bp, Artificial
  Probe
caccccgggaggaaccagaatcatc

SEQ ID NO: 234789 - DNA, 25 bp, Artificial
  Probe
aattcctgatggagtgtcggaactc

SEQ ID NO: 234790 - DNA, 25 bp, Artificial
  Probe
aaattcctgatggagtgtcggaact

SEQ ID NO: 234791 - DNA, 25 bp, Artificial
  Probe
aaccagaatcatctatgaccggaaa

SEQ ID NO: 234792 - DNA, 25 bp, Artificial
  Probe
ttccaggggtcactagccctaccag

SEQ ID NO: 234793 - DNA, 25 bp, Artificial
  Probe
ggcagcagttgcagccagactccca

SEQ ID NO: 234794 - DNA, 25 bp, Artificial
  Probe
gacacagaggagtctgtcggaatga

SEQ ID NO: 234795 - DNA, 25 bp, Artificial
  Probe
ccggaaattcctgatggagtgtcgg

SEQ ID NO: 234796 - DNA, 25 bp, Artificial
  Probe
agaatcatctatgaccggaaattcc

SEQ ID NO: 234797 - DNA, 25 bp, Artificial
  Probe
gggcagcagttgcagccagactccc

SEQ ID NO: 234798 - DNA, 25 bp, Artificial
  Probe
cggaactcgcctgtggccaaaacac

SEQ ID NO: 234799 - DNA, 25 bp, Artificial
  Probe
tcggaactcgcctgtggccaaaaca

SEQ ID NO: 234800 - DNA, 25 bp, Artificial
  Probe
gaatcatctatgaccggaaattcct

SEQ ID NO: 234801 - DNA, 25 bp, Artificial
  Probe
cagaatcatctatgaccggaaattc

SEQ ID NO: 234802 - DNA, 25 bp, Artificial
  Probe
ctgctaataaggaccatttggttac

SEQ ID NO: 234803 - DNA, 25 bp, Artificial
  Probe
ctaataaggaccatttggttactgc

SEQ ID NO: 234804 - DNA, 25 bp, Artificial
  Probe
actgctaataaggaccatttggtta

SEQ ID NO: 234805 - DNA, 25 bp, Artificial
  Probe
gtttctgcaggatcacggttcagat

SEQ ID NO: 234806 - DNA, 25 bp, Artificial
  Probe
ggacattatcaagtttctgcaggat

SEQ ID NO: 234807 - DNA, 25 bp, Artificial
  Probe
aaactgctaataaggaccatttggt

SEQ ID NO: 234808 - DNA, 25 bp, Artificial
  Probe
gctaaaactgctaataaggaccatt

SEQ ID NO: 234809 - DNA, 25 bp, Artificial
  Probe
gcgcagcgagcagctgcccaagaag

SEQ ID NO: 234810 - DNA, 25 bp, Artificial
  Probe
atcaagtttctgcaggatcacggtt

SEQ ID NO: 234811 - DNA, 25 bp, Artificial
  Probe
gtttcttgcagaacataaattactg

SEQ ID NO: 234812 - DNA, 25 bp, Artificial
  Probe
acagaaagattccaagtctgaagag

SEQ ID NO: 234813 - DNA, 25 bp, Artificial
  Probe
aaaactgctaataaggaccatttgg

SEQ ID NO: 234814 - DNA, 25 bp, Artificial
  Probe
agtttctgcaggatcacggttcaga

SEQ ID NO: 234815 - DNA, 25 bp, Artificial
  Probe
agaaagattccaagtctgaagagac

SEQ ID NO: 234816 - DNA, 25 bp, Artificial
  Probe
tttctgcaggatcacggttcagatt

SEQ ID NO: 234817 - DNA, 25 bp, Artificial
  Probe
gcagctgcccaagaaggacattatc

SEQ ID NO: 234818 - DNA, 25 bp, Artificial
  Probe
caagtttctgcaggatcacggttca

SEQ ID NO: 234819 - DNA, 25 bp, Artificial
  Probe
agcagctgcgcagcgagcagctgcc

SEQ ID NO: 234820 - DNA, 25 bp, Artificial
  Probe
acattatcaagtttctgcaggatca

SEQ ID NO: 234821 - DNA, 25 bp, Artificial
  Probe
attatcaagtttctgcaggatcacg

SEQ ID NO: 234822 - DNA, 25 bp, Artificial
  Probe
gacattatcaagtttctgcaggatc

SEQ ID NO: 234823 - DNA, 25 bp, Artificial
  Probe
cgtagctaaaactgctaataaggac

SEQ ID NO: 234824 - DNA, 25 bp, Artificial
  Probe
aagtttctgcaggatcacggttcag

SEQ ID NO: 234825 - DNA, 25 bp, Artificial
  Probe
tagctaaaactgctaataaggacca

SEQ ID NO: 234826 - DNA, 25 bp, Artificial
  Probe
agctaaaactgctaataaggaccat

SEQ ID NO: 234827 - DNA, 25 bp, Artificial
  Probe
ctgcgcagcgagcagctgcccaaga

SEQ ID NO: 234828 - DNA, 25 bp, Artificial
  Probe
tgcgcagcgagcagctgcccaagaa

SEQ ID NO: 234829 - DNA, 25 bp, Artificial
  Probe
agctgcgcagcgagcagctgcccaa

SEQ ID NO: 234830 - DNA, 25 bp, Artificial
  Probe
cagcgagcagctgcccaagaaggac

SEQ ID NO: 234831 - DNA, 25 bp, Artificial
  Probe
cagaaagattccaagtctgaagaga

SEQ ID NO: 234832 - DNA, 25 bp, Artificial
  Probe
acaaccatctttttgaaagtaagcg

SEQ ID NO: 234833 - DNA, 25 bp, Artificial
  Probe
aggacattatcaagtttctgcagga

SEQ ID NO: 234834 - DNA, 25 bp, Artificial
  Probe
ttcttgcagaacataaattactggg

SEQ ID NO: 234835 - DNA, 25 bp, Artificial
  Probe
gtagctaaaactgctaataaggacc

SEQ ID NO: 234836 - DNA, 25 bp, Artificial
  Probe
cattatcaagtttctgcaggatcac

SEQ ID NO: 234837 - DNA, 25 bp, Artificial
  Probe
tcaagtttctgcaggatcacggttc

SEQ ID NO: 234838 - DNA, 25 bp, Artificial
  Probe
taaagtatctgaacaggtgaaaaac

SEQ ID NO: 234839 - DNA, 25 bp, Artificial
  Probe
tacaaccatctttttgaaagtaagc

SEQ ID NO: 234840 - DNA, 25 bp, Artificial
  Probe
tttcttgcagaacataaattactgg

SEQ ID NO: 234841 - DNA, 25 bp, Artificial
  Probe
gaaagattccaagtctgaagagacc

SEQ ID NO: 234842 - DNA, 25 bp, Artificial
  Probe
tgctaataaggaccatttggttact

SEQ ID NO: 234843 - DNA, 25 bp, Artificial
  Probe
cgcagcgagcagctgcccaagaagg

SEQ ID NO: 234844 - DNA, 25 bp, Artificial
  Probe
aacgtagctaaaactgctaataagg

SEQ ID NO: 234845 - DNA, 25 bp, Artificial
  Probe
cgagcagctgcccaagaaggacatt

SEQ ID NO: 234846 - DNA, 25 bp, Artificial
  Probe
aactgctaataaggaccatttggtt

SEQ ID NO: 234847 - DNA, 25 bp, Artificial
  Probe
gagcagctgcccaagaaggacatta

SEQ ID NO: 234848 - DNA, 25 bp, Artificial
  Probe
tgctcctgcctcactgtcaggaatg

SEQ ID NO: 234849 - DNA, 25 bp, Artificial
  Probe
caggctgtgtctcaagcgcccggaa

SEQ ID NO: 234850 - DNA, 25 bp, Artificial
  Probe
ctcactgtcaggaatgaagaaagag

SEQ ID NO: 234851 - DNA, 25 bp, Artificial
  Probe
tggagagcatccaggtcctagagga

SEQ ID NO: 234852 - DNA, 25 bp, Artificial
  Probe
aggcacgcaggctgtgtctcaagcg

SEQ ID NO: 234853 - DNA, 25 bp, Artificial
  Probe
cgcaggctgtgtctcaagcgcccgg

SEQ ID NO: 234854 - DNA, 25 bp, Artificial
  Probe
gagcacactcggactcggacccggg

SEQ ID NO: 234855 - DNA, 25 bp, Artificial
  Probe
ctccgctagaggacggaacagccca

SEQ ID NO: 234856 - DNA, 25 bp, Artificial
  Probe
attctgaagcagctgacatgagaaa

SEQ ID NO: 234857 - DNA, 25 bp, Artificial
  Probe
cagccttgagcacactcggactcgg

SEQ ID NO: 234858 - DNA, 25 bp, Artificial
  Probe
cggcaacagtcacaaaatgaaggca

SEQ ID NO: 234859 - DNA, 25 bp, Artificial
  Probe
cactgcagatgaagtcttgtcctgg

SEQ ID NO: 234860 - DNA, 25 bp, Artificial
  Probe
acaacacctgttgcttctgctggtg

SEQ ID NO: 234861 - DNA, 25 bp, Artificial
  Probe
aaaccccactgcagatgaagtcttg

SEQ ID NO: 234862 - DNA, 25 bp, Artificial
  Probe
aggaatgccaaaaccccactgcaga

SEQ ID NO: 234863 - DNA, 25 bp, Artificial
  Probe
ggcccaacaacacctgttgcttctg

SEQ ID NO: 234864 - DNA, 25 bp, Artificial
  Probe
gcagatgaagtcttgtcctggtctc

SEQ ID NO: 234865 - DNA, 25 bp, Artificial
  Probe
aaatggagagcatccaggtcctaga

SEQ ID NO: 234866 - DNA, 25 bp, Artificial
  Probe
tgaagcagctgacatgagaaaacgg

SEQ ID NO: 234867 - DNA, 25 bp, Artificial
  Probe
agagcatccaggtcctagaggaatg

SEQ ID NO: 234868 - DNA, 25 bp, Artificial
  Probe
ggattctgaagcagctgacatgaga

SEQ ID NO: 234869 - DNA, 25 bp, Artificial
  Probe
ggctgtgtctcaagcgcccggaaac

SEQ ID NO: 234870 - DNA, 25 bp, Artificial
  Probe
accaccaaaatggagagcatccagg

SEQ ID NO: 234871 - DNA, 25 bp, Artificial
  Probe
acggaacagcccagccttgagcaca

SEQ ID NO: 234872 - DNA, 25 bp, Artificial
  Probe
cctgccagtcggattctgaagcagc

SEQ ID NO: 234873 - DNA, 25 bp, Artificial
  Probe
agaggaatgccaaaaccccactgca

SEQ ID NO: 234874 - DNA, 25 bp, Artificial
  Probe
caacacctgttgcttctgctggtgc

SEQ ID NO: 234875 - DNA, 25 bp, Artificial
  Probe
gcaacagtcacaaaatgaaggcacg

SEQ ID NO: 234876 - DNA, 25 bp, Artificial
  Probe
tcctgcctcactgtcaggaatgaag

SEQ ID NO: 234877 - DNA, 25 bp, Artificial
  Probe
gccagtcggattctgaagcagctga

SEQ ID NO: 234878 - DNA, 25 bp, Artificial
  Probe
accaaaggcccaacaacacctgttg

SEQ ID NO: 234879 - DNA, 25 bp, Artificial
  Probe
caacaacacctgttgcttctgctgg

SEQ ID NO: 234880 - DNA, 25 bp, Artificial
  Probe
gcacactcggactcggacccgggga

SEQ ID NO: 234881 - DNA, 25 bp, Artificial
  Probe
tagaggacggaacagcccagccttg

SEQ ID NO: 234882 - DNA, 25 bp, Artificial
  Probe
caggtcctagaggaatgccaaaacc

SEQ ID NO: 234883 - DNA, 25 bp, Artificial
  Probe
caacagtcacaaaatgaaggcacgc

SEQ ID NO: 234884 - DNA, 25 bp, Artificial
  Probe
ctggtctcagaattttgacaagatg

SEQ ID NO: 234885 - DNA, 25 bp, Artificial
  Probe
gccacctgccagtcggattctgaag

SEQ ID NO: 234886 - DNA, 25 bp, Artificial
  Probe
ccacacaccaccaaaatggagagca

SEQ ID NO: 234887 - DNA, 25 bp, Artificial
  Probe
caaaggcccaacaacacctgttgct

SEQ ID NO: 234888 - DNA, 25 bp, Artificial
  Probe
gtcttgtcctggtctcagaattttg

SEQ ID NO: 234889 - DNA, 25 bp, Artificial
  Probe
aaccccactgcagatgaagtcttgt

SEQ ID NO: 234890 - DNA, 25 bp, Artificial
  Probe
acgcaggctgtgtctcaagcgcccg

SEQ ID NO: 234891 - DNA, 25 bp, Artificial
  Probe
aggccacctgccagtcggattctga

SEQ ID NO: 234892 - DNA, 25 bp, Artificial
  Probe
gccttgagcacactcggactcggac

SEQ ID NO: 234893 - DNA, 25 bp, Artificial
  Probe
gcacgcaggctgtgtctcaagcgcc

SEQ ID NO: 234894 - DNA, 25 bp, Artificial
  Probe
acttaatgtcccagtgcgctacaga

SEQ ID NO: 234895 - DNA, 25 bp, Artificial
  Probe
gactatccaagctgtgctgactgtc

SEQ ID NO: 234896 - DNA, 25 bp, Artificial
  Probe
acgaggacaggactgtgagagtccc

SEQ ID NO: 234897 - DNA, 25 bp, Artificial
  Probe
ctctgatctcaactgcaagattgcc

SEQ ID NO: 234898 - DNA, 25 bp, Artificial
  Probe
tagcttcaatgtagcctctgcaata

SEQ ID NO: 234899 - DNA, 25 bp, Artificial
  Probe
caactgcaagattgcccagctgcct

SEQ ID NO: 234900 - DNA, 25 bp, Artificial
  Probe
gtgagagtccccatgatgtcagacc

SEQ ID NO: 234901 - DNA, 25 bp, Artificial
  Probe
ccttggcgtggcttacttcaagggg

SEQ ID NO: 234902 - DNA, 25 bp, Artificial
  Probe
ccagtgcgctacagaaaaccccaga

SEQ ID NO: 234903 - DNA, 25 bp, Artificial
  Probe
gcaagattgcccagctgcctttgac

SEQ ID NO: 234904 - DNA, 25 bp, Artificial
  Probe
tggaccccagcagcacttaatgtcc

SEQ ID NO: 234905 - DNA, 25 bp, Artificial
  Probe
cagcacttaatgtcccagtgcgcta

SEQ ID NO: 234906 - DNA, 25 bp, Artificial
  Probe
cacttggacgaggacaggactgtga

SEQ ID NO: 234907 - DNA, 25 bp, Artificial
  Probe
gtttgactcgagaaagacgaccctc

SEQ ID NO: 234908 - DNA, 25 bp, Artificial
  Probe
cccctgacggtgacccagaacttga

SEQ ID NO: 234909 - DNA, 25 bp, Artificial
  Probe
ttgaccatgatagaggagagcctca

SEQ ID NO: 234910 - DNA, 25 bp, Artificial
  Probe
tgacggtgacccagaacttgaccat

SEQ ID NO: 234911 - DNA, 25 bp, Artificial
  Probe
gcgctacagaaaaccccagagggag

SEQ ID NO: 234912 - DNA, 25 bp, Artificial
  Probe
agaggagagcctcacctctgagttc

SEQ ID NO: 234913 - DNA, 25 bp, Artificial
  Probe
gatgtcagaccctaaggccatctta

SEQ ID NO: 234914 - DNA, 25 bp, Artificial
  Probe
tgcccagctgcctttgacaggaagc

SEQ ID NO: 234915 - DNA, 25 bp, Artificial
  Probe
agattgcccagctgcctttgacagg

SEQ ID NO: 234916 - DNA, 25 bp, Artificial
  Probe
ttacgatatggcttggactctgatc

SEQ ID NO: 234917 - DNA, 25 bp, Artificial
  Probe
gaaagacgaccctccaggattttca

SEQ ID NO: 234918 - DNA, 25 bp, Artificial
  Probe
gaccctaaggccatcttacgatatg

SEQ ID NO: 234919 - DNA, 25 bp, Artificial
  Probe
ggactgtgagagtccccatgatgtc

SEQ ID NO: 234920 - DNA, 25 bp, Artificial
  Probe
ccatgatgtcagaccctaaggccat

SEQ ID NO: 234921 - DNA, 25 bp, Artificial
  Probe
ggaaggtggccgatagcttcaatgt

SEQ ID NO: 234922 - DNA, 25 bp, Artificial
  Probe
tgcccctgacggtgacccagaactt

SEQ ID NO: 234923 - DNA, 25 bp, Artificial
  Probe
ctgattacacattccaggaaggtgg

SEQ ID NO: 234924 - DNA, 25 bp, Artificial
  Probe
aggactgattacacattccaggaag

SEQ ID NO: 234925 - DNA, 25 bp, Artificial
  Probe
aaccaagtttgactcgagaaagacg

SEQ ID NO: 234926 - DNA, 25 bp, Artificial
  Probe
agaactgaagactatccaagctgtg

SEQ ID NO: 234927 - DNA, 25 bp, Artificial
  Probe
ccaactctttgcaggacatgaagct

SEQ ID NO: 234928 - DNA, 25 bp, Artificial
  Probe
cccagcagcacttaatgtcccagtg

SEQ ID NO: 234929 - DNA, 25 bp, Artificial
  Probe
tgtcagaccctaaggccatcttacg

SEQ ID NO: 234930 - DNA, 25 bp, Artificial
  Probe
catcttacgatatggcttggactct

SEQ ID NO: 234931 - DNA, 25 bp, Artificial
  Probe
caggactgtgagagtccccatgatg

SEQ ID NO: 234932 - DNA, 25 bp, Artificial
  Probe
actcgagaaagacgaccctccagga

SEQ ID NO: 234933 - DNA, 25 bp, Artificial
  Probe
ctttgcaggacatgaagctacagtc

SEQ ID NO: 234934 - DNA, 25 bp, Artificial
  Probe
ttaatgtcccagtgcgctacagaaa

SEQ ID NO: 234935 - DNA, 25 bp, Artificial
  Probe
cgaggacaggactgtgagagtcccc

SEQ ID NO: 234936 - DNA, 25 bp, Artificial
  Probe
tcgagaaagacgaccctccaggatt

SEQ ID NO: 234937 - DNA, 25 bp, Artificial
  Probe
tagaggagagcctcacctctgagtt

SEQ ID NO: 234938 - DNA, 25 bp, Artificial
  Probe
attccaggaaggtggccgatagctt

SEQ ID NO: 234939 - DNA, 25 bp, Artificial
  Probe
ctgcctttgacaggaagcatgagta

SEQ ID NO: 234940 - DNA, 25 bp, Artificial
  Probe
tgccctgccaagcacaagtgagtct

SEQ ID NO: 234941 - DNA, 25 bp, Artificial
  Probe
gagtacggtggctcttgcagaagca

SEQ ID NO: 234942 - DNA, 25 bp, Artificial
  Probe
acaaccaggtattaccaacagaggt

SEQ ID NO: 234943 - DNA, 25 bp, Artificial
  Probe
aagcttcagaactaagacacgttgt

SEQ ID NO: 234944 - DNA, 25 bp, Artificial
  Probe
acatggctcctgtgaaggaaaaacc

SEQ ID NO: 234945 - DNA, 25 bp, Artificial
  Probe
gggaatgaggctcctggattgtcta

SEQ ID NO: 234946 - DNA, 25 bp, Artificial
  Probe
caggtattaccaacagaggtgaatg

SEQ ID NO: 234947 - DNA, 25 bp, Artificial
  Probe
tggctcctgtgaaggaaaaacctag

SEQ ID NO: 234948 - DNA, 25 bp, Artificial
  Probe
gctgccctgccaagcacaagtgagt

SEQ ID NO: 234949 - DNA, 25 bp, Artificial
  Probe
accctccgaagtcgacctgtagtgg

SEQ ID NO: 234950 - DNA, 25 bp, Artificial
  Probe
ggtggctcttgcagaagcaaggcaa

SEQ ID NO: 234951 - DNA, 25 bp, Artificial
  Probe
gcaaggtacaaacaaccaggtatta

SEQ ID NO: 234952 - DNA, 25 bp, Artificial
  Probe
tcagacttgagtacggtggctcttg

SEQ ID NO: 234953 - DNA, 25 bp, Artificial
  Probe
actccttttgagaagcaaggtacaa

SEQ ID NO: 234954 - DNA, 25 bp, Artificial
  Probe
atcctaggtttagacatggctcctg

SEQ ID NO: 234955 - DNA, 25 bp, Artificial
  Probe
aaagcttcagaactaagacacgttg

SEQ ID NO: 234956 - DNA, 25 bp, Artificial
  Probe
tcttgcagaagcaaggcaacaaaag

SEQ ID NO: 234957 - DNA, 25 bp, Artificial
  Probe
gctcctggattgtctatcctaggtt

SEQ ID NO: 234958 - DNA, 25 bp, Artificial
  Probe
agcaaggtacaaacaaccaggtatt

SEQ ID NO: 234959 - DNA, 25 bp, Artificial
  Probe
ttgaagatttcagcactcatgaaat

SEQ ID NO: 234960 - DNA, 25 bp, Artificial
  Probe
aaacctagacccaagagtgaaattg

SEQ ID NO: 234961 - DNA, 25 bp, Artificial
  Probe
tcagcactcatgaaataagtgttct

SEQ ID NO: 234962 - DNA, 25 bp, Artificial
  Probe
gaggctcctggattgtctatcctag

SEQ ID NO: 234963 - DNA, 25 bp, Artificial
  Probe
ttaccaacagaggtgaatgaaaatc

SEQ ID NO: 234964 - DNA, 25 bp, Artificial
  Probe
tagacatggctcctgtgaaggaaaa

SEQ ID NO: 234965 - DNA, 25 bp, Artificial
  Probe
tccgaagtcgacctgtagtggcggc

SEQ ID NO: 234966 - DNA, 25 bp, Artificial
  Probe
agatttcagcactcatgaaataagt

SEQ ID NO: 234967 - DNA, 25 bp, Artificial
  Probe
caagcacaagtgagtctttaacaga

SEQ ID NO: 234968 - DNA, 25 bp, Artificial
  Probe
aattttcagacttgagtacggtggc

SEQ ID NO: 234969 - DNA, 25 bp, Artificial
  Probe
tccttttgagaagcaaggtacaaac

SEQ ID NO: 234970 - DNA, 25 bp, Artificial
  Probe
ccaggtattaccaacagaggtgaat

SEQ ID NO: 234971 - DNA, 25 bp, Artificial
  Probe
tcctaggtttagacatggctcctgt

SEQ ID NO: 234972 - DNA, 25 bp, Artificial
  Probe
aaccaggtattaccaacagaggtga

SEQ ID NO: 234973 - DNA, 25 bp, Artificial
  Probe
agcactcatgaaataagtgttctgg

SEQ ID NO: 234974 - DNA, 25 bp, Artificial
  Probe
tctttgactccttttgagaagcaag

SEQ ID NO: 234975 - DNA, 25 bp, Artificial
  Probe
tgaagatttcagcactcatgaaata

SEQ ID NO: 234976 - DNA, 25 bp, Artificial
  Probe
tacggtggctcttgcagaagcaagg

SEQ ID NO: 234977 - DNA, 25 bp, Artificial
  Probe
cctccgaagtcgacctgtagtggcg

SEQ ID NO: 234978 - DNA, 25 bp, Artificial
  Probe
ttagacatggctcctgtgaaggaaa

SEQ ID NO: 234979 - DNA, 25 bp, Artificial
  Probe
gcttcagaactaagacacgttgtcc

SEQ ID NO: 234980 - DNA, 25 bp, Artificial
  Probe
cttcagaactaagacacgttgtcct

SEQ ID NO: 234981 - DNA, 25 bp, Artificial
  Probe
cagaactaagacacgttgtcctgct

SEQ ID NO: 234982 - DNA, 25 bp, Artificial
  Probe
acttgagtacggtggctcttgcaga

SEQ ID NO: 234983 - DNA, 25 bp, Artificial
  Probe
tagacccaagagtgaaattgttgca

SEQ ID NO: 234984 - DNA, 25 bp, Artificial
  Probe
cggtggctcttgcagaagcaaggca

SEQ ID NO: 234985 - DNA, 25 bp, Artificial
  Probe
ggctcttgcagaagcaaggcaacaa

SEQ ID NO: 234986 - DNA, 25 bp, Artificial
  Probe
ttcttcggaccttctcaggaacata

SEQ ID NO: 234987 - DNA, 25 bp, Artificial
  Probe
ctggacctacaatggggtatcctcc

SEQ ID NO: 234988 - DNA, 25 bp, Artificial
  Probe
tctactcaagcgttgccgttgggga

SEQ ID NO: 234989 - DNA, 25 bp, Artificial
  Probe
ctactcaagcgttgccgttggggac

SEQ ID NO: 234990 - DNA, 25 bp, Artificial
  Probe
atgtgccctcggaggtcccagctga

SEQ ID NO: 234991 - DNA, 25 bp, Artificial
  Probe
tcagtgccggcatggccatcttcag

SEQ ID NO: 234992 - DNA, 25 bp, Artificial
  Probe
tctaccacatgcaccgggagcgagg

SEQ ID NO: 234993 - DNA, 25 bp, Artificial
  Probe
gcatggccatcttcagcttgctgct

SEQ ID NO: 234994 - DNA, 25 bp, Artificial
  Probe
gacactggccgcttcagtgccggca

SEQ ID NO: 234995 - DNA, 25 bp, Artificial
  Probe
atcttctactcaagcgttgccgttg

SEQ ID NO: 234996 - DNA, 25 bp, Artificial
  Probe
agaggtggcctgagtcatgtgccct

SEQ ID NO: 234997 - DNA, 25 bp, Artificial
  Probe
gcctgagtcatgtgccctcggaggt

SEQ ID NO: 234998 - DNA, 25 bp, Artificial
  Probe
cctacaatggggtatcctccattcc

SEQ ID NO: 234999 - DNA, 25 bp, Artificial
  Probe
atggggtatcctccattccctgcca

SEQ ID NO: 235000 - DNA, 25 bp, Artificial
  Probe
cattccctgccacagaggtggcctg

SEQ ID NO: 235001 - DNA, 25 bp, Artificial
  Probe
ttgccgttggggacactggccgctt

SEQ ID NO: 235002 - DNA, 25 bp, Artificial
  Probe
ctgccacagaggtggcctgagtcat

SEQ ID NO: 235003 - DNA, 25 bp, Artificial
  Probe
ctcggaggtcccagctgagaagagc

SEQ ID NO: 235004 - DNA, 25 bp, Artificial
  Probe
ttcagtgccggcatggccatcttca

SEQ ID NO: 235005 - DNA, 25 bp, Artificial
  Probe
tgccctcggaggtcccagctgagaa

SEQ ID NO: 235006 - DNA, 25 bp, Artificial
  Probe
gcttgctgctgaagcccttctcctg

SEQ ID NO: 235007 - DNA, 25 bp, Artificial
  Probe
tggcccagcgggactctgttgatgc

SEQ ID NO: 235008 - DNA, 25 bp, Artificial
  Probe
ccgttggggacactggccgcttcag

SEQ ID NO: 235009 - DNA, 25 bp, Artificial
  Probe
ctcaggaacatagtgcctaccagac

SEQ ID NO: 235010 - DNA, 25 bp, Artificial
  Probe
acttcactatcctggccctgggtgt

SEQ ID NO: 235011 - DNA, 25 bp, Artificial
  Probe
accttctttactggacctacaatgg

SEQ ID NO: 235012 - DNA, 25 bp, Artificial
  Probe
tggccgcttcagtgccggcatggcc

SEQ ID NO: 235013 - DNA, 25 bp, Artificial
  Probe
ccagctgagaagagcccagtcctaa

SEQ ID NO: 235014 - DNA, 25 bp, Artificial
  Probe
tgccgttggggacactggccgcttc

SEQ ID NO: 235015 - DNA, 25 bp, Artificial
  Probe
attagcatcttctactcaagcgttg

SEQ ID NO: 235016 - DNA, 25 bp, Artificial
  Probe
tggggcccagcaggatgcttgtcac

SEQ ID NO: 235017 - DNA, 25 bp, Artificial
  Probe
acagaggtggcctgagtcatgtgcc

SEQ ID NO: 235018 - DNA, 25 bp, Artificial
  Probe
atggccatcttcagcttgctgctga

SEQ ID NO: 235019 - DNA, 25 bp, Artificial
  Probe
aggtggcctgagtcatgtgccctcg

SEQ ID NO: 235020 - DNA, 25 bp, Artificial
  Probe
gatttcttcggaccttctcaggaac

SEQ ID NO: 235021 - DNA, 25 bp, Artificial
  Probe
catagtgcctaccagacaattgact

SEQ ID NO: 235022 - DNA, 25 bp, Artificial
  Probe
tcgtctaccacatgcaccgggagcg

SEQ ID NO: 235023 - DNA, 25 bp, Artificial
  Probe
gccggcatggccatcttcagcttgc

SEQ ID NO: 235024 - DNA, 25 bp, Artificial
  Probe
ggatttcttcggaccttctcaggaa

SEQ ID NO: 235025 - DNA, 25 bp, Artificial
  Probe
agtcatgtgccctcggaggtcccag

SEQ ID NO: 235026 - DNA, 25 bp, Artificial
  Probe
gcttgtcaccttctttactggacct

SEQ ID NO: 235027 - DNA, 25 bp, Artificial
  Probe
gaacatagtgcctaccagacaattg

SEQ ID NO: 235028 - DNA, 25 bp, Artificial
  Probe
gtggcctgagtcatgtgccctcgga

SEQ ID NO: 235029 - DNA, 25 bp, Artificial
  Probe
ggactctgttgatgccattggcatg

SEQ ID NO: 235030 - DNA, 25 bp, Artificial
  Probe
tgagaagagcccagtcctaattctc

SEQ ID NO: 235031 - DNA, 25 bp, Artificial
  Probe
gaccttctcaggaacatagtgccta

SEQ ID NO: 235032 - DNA, 25 bp, Artificial
  Probe
cccttccgttgacagacacaggtga

SEQ ID NO: 235033 - DNA, 25 bp, Artificial
  Probe
tggctcaaagttcctttctgtacca

SEQ ID NO: 235034 - DNA, 25 bp, Artificial
  Probe
cccgtctaaaacctgtgaagctgag

SEQ ID NO: 235035 - DNA, 25 bp, Artificial
  Probe
taagtgtccttgacaagatttccct

SEQ ID NO: 235036 - DNA, 25 bp, Artificial
  Probe
caaagttcctttctgtaccaatgga

SEQ ID NO: 235037 - DNA, 25 bp, Artificial
  Probe
cccacaactgccagtaagtgtcctt

SEQ ID NO: 235038 - DNA, 25 bp, Artificial
  Probe
attctttgaagtctagaaaagcctg

SEQ ID NO: 235039 - DNA, 25 bp, Artificial
  Probe
gccagtaagtgtccttgacaagatt

SEQ ID NO: 235040 - DNA, 25 bp, Artificial
  Probe
ttccgttgacagacacaggtgaccc

SEQ ID NO: 235041 - DNA, 25 bp, Artificial
  Probe
gtctaaaacctgtgaagctgagaag

SEQ ID NO: 235042 - DNA, 25 bp, Artificial
  Probe
ccttgacaagatttccctccaagtg

SEQ ID NO: 235043 - DNA, 25 bp, Artificial
  Probe
agttcctttctgtaccaatggacct

SEQ ID NO: 235044 - DNA, 25 bp, Artificial
  Probe
tcaaagttcctttctgtaccaatgg

SEQ ID NO: 235045 - DNA, 25 bp, Artificial
  Probe
tgacagacacaggtgacccacaact

SEQ ID NO: 235046 - DNA, 25 bp, Artificial
  Probe
gtccttgacaagatttccctccaag

SEQ ID NO: 235047 - DNA, 25 bp, Artificial
  Probe
acaggtgacccacaactgccagtaa

SEQ ID NO: 235048 - DNA, 25 bp, Artificial
  Probe
ctaaaacctgtgaagctgagaagtg

SEQ ID NO: 235049 - DNA, 25 bp, Artificial
  Probe
ccgttgacagacacaggtgacccac

SEQ ID NO: 235050 - DNA, 25 bp, Artificial
  Probe
agatttccctccaagtgactttcgt

SEQ ID NO: 235051 - DNA, 25 bp, Artificial
  Probe
gtgtccttgacaagatttccctcca

SEQ ID NO: 235052 - DNA, 25 bp, Artificial
  Probe
ctcagggacggtatcccttccgttg

SEQ ID NO: 235053 - DNA, 25 bp, Artificial
  Probe
tttccctccaagtgactttcgtggg

SEQ ID NO: 235054 - DNA, 25 bp, Artificial
  Probe
cccgagactttattctttgaagtct

SEQ ID NO: 235055 - DNA, 25 bp, Artificial
  Probe
tgccagtaagtgtccttgacaagat

SEQ ID NO: 235056 - DNA, 25 bp, Artificial
  Probe
gttgacagacacaggtgacccacaa

SEQ ID NO: 235057 - DNA, 25 bp, Artificial
  Probe
atcccttccgttgacagacacaggt

SEQ ID NO: 235058 - DNA, 25 bp, Artificial
  Probe
ttccctccaagtgactttcgtgggg

SEQ ID NO: 235059 - DNA, 25 bp, Artificial
  Probe
ttattctttgaagtctagaaaagcc

SEQ ID NO: 235060 - DNA, 25 bp, Artificial
  Probe
ctgccagtaagtgtccttgacaaga

SEQ ID NO: 235061 - DNA, 25 bp, Artificial
  Probe
ggtggctcaaagttcctttctgtac

SEQ ID NO: 235062 - DNA, 25 bp, Artificial
  Probe
gtatcccttccgttgacagacacag

SEQ ID NO: 235063 - DNA, 25 bp, Artificial
  Probe
acaactgccagtaagtgtccttgac

SEQ ID NO: 235064 - DNA, 25 bp, Artificial
  Probe
ggacggtatcccttccgttgacaga

SEQ ID NO: 235065 - DNA, 25 bp, Artificial
  Probe
tcacccgagactttattctttgaag

SEQ ID NO: 235066 - DNA, 25 bp, Artificial
  Probe
gggtggctcaaagttcctttctgta

SEQ ID NO: 235067 - DNA, 25 bp, Artificial
  Probe
acagacacaggtgacccacaactgc

SEQ ID NO: 235068 - DNA, 25 bp, Artificial
  Probe
cgagactttattctttgaagtctag

SEQ ID NO: 235069 - DNA, 25 bp, Artificial
  Probe
cacaggtgacccacaactgccagta

SEQ ID NO: 235070 - DNA, 25 bp, Artificial
  Probe
gttcctttctgtaccaatggacctc

SEQ ID NO: 235071 - DNA, 25 bp, Artificial
  Probe
cacccgagactttattctttgaagt

SEQ ID NO: 235072 - DNA, 25 bp, Artificial
  Probe
caggtgacccacaactgccagtaag

SEQ ID NO: 235073 - DNA, 25 bp, Artificial
  Probe
gacggtatcccttccgttgacagac

SEQ ID NO: 235074 - DNA, 25 bp, Artificial
  Probe
gtgacccacaactgccagtaagtgt

SEQ ID NO: 235075 - DNA, 25 bp, Artificial
  Probe
tcagggacggtatcccttccgttga

SEQ ID NO: 235076 - DNA, 25 bp, Artificial
  Probe
cttgacaagatttccctccaagtga

SEQ ID NO: 235077 - DNA, 25 bp, Artificial
  Probe
ggctcaaagttcctttctgtaccaa

SEQ ID NO: 235078 - DNA, 25 bp, Artificial
  Probe
gcaaatacagtcacaaggacatggt

SEQ ID NO: 235079 - DNA, 25 bp, Artificial
  Probe
ataccgtcaggacctgactgtacca

SEQ ID NO: 235080 - DNA, 25 bp, Artificial
  Probe
acaggaccaggctaactctaattcc

SEQ ID NO: 235081 - DNA, 25 bp, Artificial
  Probe
gcacagacttcctactctgtgtggg

SEQ ID NO: 235082 - DNA, 25 bp, Artificial
  Probe
gtcaggacctgactgtaccacccgg

SEQ ID NO: 235083 - DNA, 25 bp, Artificial
  Probe
caggaccaggctaactctaattcca

SEQ ID NO: 235084 - DNA, 25 bp, Artificial
  Probe
acctatgaggacacaggaccccttc

SEQ ID NO: 235085 - DNA, 25 bp, Artificial
  Probe
gaaaaataccgtcaggacctgactg

SEQ ID NO: 235086 - DNA, 25 bp, Artificial
  Probe
accgtcaggacctgactgtaccacc

SEQ ID NO: 235087 - DNA, 25 bp, Artificial
  Probe
ctacctatgaggacacaggacccct

SEQ ID NO: 235088 - DNA, 25 bp, Artificial
  Probe
ggaccaggctaactctaattccaca

SEQ ID NO: 235089 - DNA, 25 bp, Artificial
  Probe
gctacctatgaggacacaggacccc

SEQ ID NO: 235090 - DNA, 25 bp, Artificial
  Probe
ccaacaggaccaggctaactctaat

SEQ ID NO: 235091 - DNA, 25 bp, Artificial
  Probe
cagtcacaaggacatggtagctgag

SEQ ID NO: 235092 - DNA, 25 bp, Artificial
  Probe
actgcacagacttcctactctgtgt

SEQ ID NO: 235093 - DNA, 25 bp, Artificial
  Probe
ggccctgccaacaggaccaggctaa

SEQ ID NO: 235094 - DNA, 25 bp, Artificial
  Probe
gtgctacctatgaggacacaggacc

SEQ ID NO: 235095 - DNA, 25 bp, Artificial
  Probe
tgcacagacttcctactctgtgtgg

SEQ ID NO: 235096 - DNA, 25 bp, Artificial
  Probe
acagacttcctactctgtgtgggag

SEQ ID NO: 235097 - DNA, 25 bp, Artificial
  Probe
tacctatgaggacacaggacccctt

SEQ ID NO: 235098 - DNA, 25 bp, Artificial
  Probe
cacagacttcctactctgtgtggga

SEQ ID NO: 235099 - DNA, 25 bp, Artificial
  Probe
tactgcacagacttcctactctgtg

SEQ ID NO: 235100 - DNA, 25 bp, Artificial
  Probe
acggccctgccaacaggaccaggct

SEQ ID NO: 235101 - DNA, 25 bp, Artificial
  Probe
cagacttcctactctgtgtgggagg

SEQ ID NO: 235102 - DNA, 25 bp, Artificial
  Probe
cctactctgtgtgggaggttctggt

SEQ ID NO: 235103 - DNA, 25 bp, Artificial
  Probe
cctgccaacaggaccaggctaactc

SEQ ID NO: 235104 - DNA, 25 bp, Artificial
  Probe
gccaacaggaccaggctaactctaa

SEQ ID NO: 235105 - DNA, 25 bp, Artificial
  Probe
ctgccaacaggaccaggctaactct

SEQ ID NO: 235106 - DNA, 25 bp, Artificial
  Probe
tcacaaggacatggtagctgagggg

SEQ ID NO: 235107 - DNA, 25 bp, Artificial
  Probe
tgccaacaggaccaggctaactcta

SEQ ID NO: 235108 - DNA, 25 bp, Artificial
  Probe
agtcacaaggacatggtagctgagg

SEQ ID NO: 235109 - DNA, 25 bp, Artificial
  Probe
aatacagtcacaaggacatggtagc

SEQ ID NO: 235110 - DNA, 25 bp, Artificial
  Probe
aggaccaggctaactctaattccac

SEQ ID NO: 235111 - DNA, 25 bp, Artificial
  Probe
tacagtcacaaggacatggtagctg

SEQ ID NO: 235112 - DNA, 25 bp, Artificial
  Probe
taccgtcaggacctgactgtaccac

SEQ ID NO: 235113 - DNA, 25 bp, Artificial
  Probe
aataccgtcaggacctgactgtacc

SEQ ID NO: 235114 - DNA, 25 bp, Artificial
  Probe
tgtgctacctatgaggacacaggac

SEQ ID NO: 235115 - DNA, 25 bp, Artificial
  Probe
cgtcaggacctgactgtaccacccg

SEQ ID NO: 235116 - DNA, 25 bp, Artificial
  Probe
atacagtcacaaggacatggtagct

SEQ ID NO: 235117 - DNA, 25 bp, Artificial
  Probe
ctgcacagacttcctactctgtgtg

SEQ ID NO: 235118 - DNA, 25 bp, Artificial
  Probe
tgctacctatgaggacacaggaccc

SEQ ID NO: 235119 - DNA, 25 bp, Artificial
  Probe
tgcaaatacagtcacaaggacatgg

SEQ ID NO: 235120 - DNA, 25 bp, Artificial
  Probe
acagtcacaaggacatggtagctga

SEQ ID NO: 235121 - DNA, 25 bp, Artificial
  Probe
caaatacagtcacaaggacatggta

SEQ ID NO: 235122 - DNA, 25 bp, Artificial
  Probe
ctgtgctacctatgaggacacagga

SEQ ID NO: 235123 - DNA, 25 bp, Artificial
  Probe
acatggtagctgaggggctgcgcca

SEQ ID NO: 235124 - DNA, 25 bp, Artificial
  Probe
actgggtaccaaggtgcgcgccgcc

SEQ ID NO: 235125 - DNA, 25 bp, Artificial
  Probe
gatgcttgtcaatgccccgtgttct

SEQ ID NO: 235126 - DNA, 25 bp, Artificial
  Probe
cgctcccttactaagagaagtaaat

SEQ ID NO: 235127 - DNA, 25 bp, Artificial
  Probe
cgccaaggaggttcttcgggactct

SEQ ID NO: 235128 - DNA, 25 bp, Artificial
  Probe
aggaagagactttgccttgtcatta

SEQ ID NO: 235129 - DNA, 25 bp, Artificial
  Probe
cggacgaaagactcaccttcgtggt

SEQ ID NO: 235130 - DNA, 25 bp, Artificial
  Probe
gctcccttactaagagaagtaaatt

SEQ ID NO: 235131 - DNA, 25 bp, Artificial
  Probe
ttcctacgtgttcctagctacactg

SEQ ID NO: 235132 - DNA, 25 bp, Artificial
  Probe
atcgtgaaatctaaggctgcttggt

SEQ ID NO: 235133 - DNA, 25 bp, Artificial
  Probe
ccaggtggacgctggctgtattccg

SEQ ID NO: 235134 - DNA, 25 bp, Artificial
  Probe
tcccccaagccagttgcagtaatcg

SEQ ID NO: 235135 - DNA, 25 bp, Artificial
  Probe
ttattagcggacgaaagactcacct

SEQ ID NO: 235136 - DNA, 25 bp, Artificial
  Probe
cctaacaattaacgaagtaatgtga

SEQ ID NO: 235137 - DNA, 25 bp, Artificial
  Probe
aacaccgcgccagttaagctggaga

SEQ ID NO: 235138 - DNA, 25 bp, Artificial
  Probe
atctaaggctgcttggtgtttgttc

SEQ ID NO: 235139 - DNA, 25 bp, Artificial
  Probe
ctgccacttactgaaacttagtatg

SEQ ID NO: 235140 - DNA, 25 bp, Artificial
  Probe
gccagttaagctggagagaattcat

SEQ ID NO: 235141 - DNA, 25 bp, Artificial
  Probe
gaggaagcggcgacaccggaaactt

SEQ ID NO: 235142 - DNA, 25 bp, Artificial
  Probe
agtaaatttcgcttagctctgcaca

SEQ ID NO: 235143 - DNA, 25 bp, Artificial
  Probe
gaaacttcctacgtgttcctagcta

SEQ ID NO: 235144 - DNA, 25 bp, Artificial
  Probe
ggttcttcgggactcttcttcctct

SEQ ID NO: 235145 - DNA, 25 bp, Artificial
  Probe
ggaaacttcctacgtgttcctagct

SEQ ID NO: 235146 - DNA, 25 bp, Artificial
  Probe
cttcttcctctgtaacatacgtgtg

SEQ ID NO: 235147 - DNA, 25 bp, Artificial
  Probe
acatacgtgtgaatagccaaatttt

SEQ ID NO: 235148 - DNA, 25 bp, Artificial
  Probe
gggactcttcttcctctgtaacata

SEQ ID NO: 235149 - DNA, 25 bp, Artificial
  Probe
aatgccccgtgttctgtggctccac

SEQ ID NO: 235150 - DNA, 25 bp, Artificial
  Probe
agctacactgggtaccaaggtgcgc

SEQ ID NO: 235151 - DNA, 25 bp, Artificial
  Probe
ccagttgcagtaatcgaggaagaga

SEQ ID NO: 235152 - DNA, 25 bp, Artificial
  Probe
gtgttctgtggctccaccaaacgcc

SEQ ID NO: 235153 - DNA, 25 bp, Artificial
  Probe
gcgacaccggaaacttcctacgtgt

SEQ ID NO: 235154 - DNA, 25 bp, Artificial
  Probe
ggcgacaccggaaacttcctacgtg

SEQ ID NO: 235155 - DNA, 25 bp, Artificial
  Probe
ttatggttccttacccacgtccatg

SEQ ID NO: 235156 - DNA, 25 bp, Artificial
  Probe
gctttaatccaataaagtcaaagtg

SEQ ID NO: 235157 - DNA, 25 bp, Artificial
  Probe
ggtgtttgttctctgatgcttgtca

SEQ ID NO: 235158 - DNA, 25 bp, Artificial
  Probe
gtaaatttcgcttagctctgcacac

SEQ ID NO: 235159 - DNA, 25 bp, Artificial
  Probe
ctgttcggagtgatcgtgaaatcta

SEQ ID NO: 235160 - DNA, 25 bp, Artificial
  Probe
caccaaacgccaaggaggttcttcg

SEQ ID NO: 235161 - DNA, 25 bp, Artificial
  Probe
ctgcttggtgtttgttctctgatgc

SEQ ID NO: 235162 - DNA, 25 bp, Artificial
  Probe
gtcaatgccccgtgttctgtggctc

SEQ ID NO: 235163 - DNA, 25 bp, Artificial
  Probe
tcgtggtgactggtttaactataca

SEQ ID NO: 235164 - DNA, 25 bp, Artificial
  Probe
gtggctccaccaaacgccaaggagg

SEQ ID NO: 235165 - DNA, 25 bp, Artificial
  Probe
gtccctaacaattaacgaagtaatg

SEQ ID NO: 235166 - DNA, 25 bp, Artificial
  Probe
tgctcttcaaacaccgcgccagtta

SEQ ID NO: 235167 - DNA, 25 bp, Artificial
  Probe
aatacgtatcatttgtacacgaaga

SEQ ID NO: 235168 - DNA, 25 bp, Artificial
  Probe
gcttattagcggacgaaagactcac

SEQ ID NO: 235169 - DNA, 25 bp, Artificial
  Probe
agaggccgaaaattaccagggcgag

SEQ ID NO: 235170 - DNA, 25 bp, Artificial
  Probe
agagccaggcagctgagatcatgtg

SEQ ID NO: 235171 - DNA, 25 bp, Artificial
  Probe
atgtgctggagtcctctgggccagc

SEQ ID NO: 235172 - DNA, 25 bp, Artificial
  Probe
ccaaggagctggtccgagggctact

SEQ ID NO: 235173 - DNA, 25 bp, Artificial
  Probe
tccgcacgccggatgtgctggagtc

SEQ ID NO: 235174 - DNA, 25 bp, Artificial
  Probe
tcatggcgtttaaccgaggaaagcg

SEQ ID NO: 235175 - DNA, 25 bp, Artificial
  Probe
acgacgagtcctgtgatctttggag

SEQ ID NO: 235176 - DNA, 25 bp, Artificial
  Probe
gctccgggctcaatgccactttcat

SEQ ID NO: 235177 - DNA, 25 bp, Artificial
  Probe
tgcgctccgggctcaatgccacttt

SEQ ID NO: 235178 - DNA, 25 bp, Artificial
  Probe
ttgcttcaccctgcagtacgctgca

SEQ ID NO: 235179 - DNA, 25 bp, Artificial
  Probe
ttaaccgaggaaagcgcgagggctt

SEQ ID NO: 235180 - DNA, 25 bp, Artificial
  Probe
ccaaaaggcgcaagcagaagctccg

SEQ ID NO: 235181 - DNA, 25 bp, Artificial
  Probe
agcctgggtgtcattctgtacatga

SEQ ID NO: 235182 - DNA, 25 bp, Artificial
  Probe
acgccggatgtgctggagtcctctg

SEQ ID NO: 235183 - DNA, 25 bp, Artificial
  Probe
agctgagatcatgtgcaagatccgt

SEQ ID NO: 235184 - DNA, 25 bp, Artificial
  Probe
ctccgggctcaatgccactttcatg

SEQ ID NO: 235185 - DNA, 25 bp, Artificial
  Probe
tttaaccgaggaaagcgcgagggct

SEQ ID NO: 235186 - DNA, 25 bp, Artificial
  Probe
gctcaatgccactttcatggcgttt

SEQ ID NO: 235187 - DNA, 25 bp, Artificial
  Probe
gggtacgacgagtcctgtgatcttt

SEQ ID NO: 235188 - DNA, 25 bp, Artificial
  Probe
agaacgcgccgctggccaaaaggcg

SEQ ID NO: 235189 - DNA, 25 bp, Artificial
  Probe
aaaggcgcaagcagaagctccggag

SEQ ID NO: 235190 - DNA, 25 bp, Artificial
  Probe
ccagcagtgcgctccgggctcaatg

SEQ ID NO: 235191 - DNA, 25 bp, Artificial
  Probe
ctgtgatctttggagcctgggtgtc

SEQ ID NO: 235192 - DNA, 25 bp, Artificial
  Probe
ccgcacgccggatgtgctggagtcc

SEQ ID NO: 235193 - DNA, 25 bp, Artificial
  Probe
agacgccttgcttcaccctgcagta

SEQ ID NO: 235194 - DNA, 25 bp, Artificial
  Probe
atgccactttcatggcgtttaaccg

SEQ ID NO: 235195 - DNA, 25 bp, Artificial
  Probe
tgctggagtcctctgggccagcagt

SEQ ID NO: 235196 - DNA, 25 bp, Artificial
  Probe
cagctgagatcatgtgcaagatccg

SEQ ID NO: 235197 - DNA, 25 bp, Artificial
  Probe
gggcccatgcagacgccttgcttca

SEQ ID NO: 235198 - DNA, 25 bp, Artificial
  Probe
tttcatggcgtttaaccgaggaaag

SEQ ID NO: 235199 - DNA, 25 bp, Artificial
  Probe
gcagtacgctgcacccgagctgctg

SEQ ID NO: 235200 - DNA, 25 bp, Artificial
  Probe
ccgctggccaaaaggcgcaagcaga

SEQ ID NO: 235201 - DNA, 25 bp, Artificial
  Probe
gggctcaatgccactttcatggcgt

SEQ ID NO: 235202 - DNA, 25 bp, Artificial
  Probe
gggtgtcattctgtacatgatgctg

SEQ ID NO: 235203 - DNA, 25 bp, Artificial
  Probe
gcgccgctggccaaaaggcgcaagc

SEQ ID NO: 235204 - DNA, 25 bp, Artificial
  Probe
atcatgtgcaagatccgtgaagggc

SEQ ID NO: 235205 - DNA, 25 bp, Artificial
  Probe
tgcagtacgctgcacccgagctgct

SEQ ID NO: 235206 - DNA, 25 bp, Artificial
  Probe
ttggagcctgggtgtcattctgtac

SEQ ID NO: 235207 - DNA, 25 bp, Artificial
  Probe
gccaaaaggcgcaagcagaagctcc

SEQ ID NO: 235208 - DNA, 25 bp, Artificial
  Probe
acagagccaggcagctgagatcatg

SEQ ID NO: 235209 - DNA, 25 bp, Artificial
  Probe
cctgtgatctttggagcctgggtgt

SEQ ID NO: 235210 - DNA, 25 bp, Artificial
  Probe
agatcatgtgcaagatccgtgaagg

SEQ ID NO: 235211 - DNA, 25 bp, Artificial
  Probe
ggggcccatgcagacgccttgcttc

SEQ ID NO: 235212 - DNA, 25 bp, Artificial
  Probe
tcatgtgcaagatccgtgaagggcg

SEQ ID NO: 235213 - DNA, 25 bp, Artificial
  Probe
tgtgctggagtcctctgggccagca

SEQ ID NO: 235214 - DNA, 25 bp, Artificial
  Probe
cctgggtgtcattctgtacatgatg

SEQ ID NO: 235215 - DNA, 25 bp, Artificial
  Probe
aggcagctgagatcatgtgcaagat

SEQ ID NO: 235216 - DNA, 25 bp, Artificial
  Probe
ggtcggacgcccatcttctggcctg

SEQ ID NO: 235217 - DNA, 25 bp, Artificial
  Probe
gtgagtggacctttgacacctccag

SEQ ID NO: 235218 - DNA, 25 bp, Artificial
  Probe
gccctggagaagactttcgaacaaa

SEQ ID NO: 235219 - DNA, 25 bp, Artificial
  Probe
gactttcgaacaaacgaagtacttg

SEQ ID NO: 235220 - DNA, 25 bp, Artificial
  Probe
tggcaggaccagagagagcacgctt

SEQ ID NO: 235221 - DNA, 25 bp, Artificial
  Probe
accagagagagcacgcttggcctat

SEQ ID NO: 235222 - DNA, 25 bp, Artificial
  Probe
agagagcacgcttggcctattctct

SEQ ID NO: 235223 - DNA, 25 bp, Artificial
  Probe
cgaacaaacgaagtacttggcagga

SEQ ID NO: 235224 - DNA, 25 bp, Artificial
  Probe
attctctggggatgacggagagtca

SEQ ID NO: 235225 - DNA, 25 bp, Artificial
  Probe
aggaccagagagagcacgcttggcc

SEQ ID NO: 235226 - DNA, 25 bp, Artificial
  Probe
cctttgacacctccagggatggctt

SEQ ID NO: 235227 - DNA, 25 bp, Artificial
  Probe
tcaaggtgagtggacctttgacacc

SEQ ID NO: 235228 - DNA, 25 bp, Artificial
  Probe
ccccatcaaggatccattttgttgg

SEQ ID NO: 235229 - DNA, 25 bp, Artificial
  Probe
aggtgagtggacctttgacacctcc

SEQ ID NO: 235230 - DNA, 25 bp, Artificial
  Probe
cacgcttggcctattctctggggat

SEQ ID NO: 235231 - DNA, 25 bp, Artificial
  Probe
gtcaggtcaaggtgagtggaccttt

SEQ ID NO: 235232 - DNA, 25 bp, Artificial
  Probe
cttggcctattctctggggatgacg

SEQ ID NO: 235233 - DNA, 25 bp, Artificial
  Probe
gccagcagatcttcgccctggagaa

SEQ ID NO: 235234 - DNA, 25 bp, Artificial
  Probe
acacctccagggatggcttccttcg

SEQ ID NO: 235235 - DNA, 25 bp, Artificial
  Probe
cagggatggcttccttcgcacgtgt

SEQ ID NO: 235236 - DNA, 25 bp, Artificial
  Probe
atgcgcacgcgtctgagcccctatt

SEQ ID NO: 235237 - DNA, 25 bp, Artificial
  Probe
gaccagagagagcacgcttggccta

SEQ ID NO: 235238 - DNA, 25 bp, Artificial
  Probe
caaggatccattttgttggacaaag

SEQ ID NO: 235239 - DNA, 25 bp, Artificial
  Probe
tggacctttgacacctccagggatg

SEQ ID NO: 235240 - DNA, 25 bp, Artificial
  Probe
caaacgaagtacttggcaggaccag

SEQ ID NO: 235241 - DNA, 25 bp, Artificial
  Probe
tcaccaaactaacaaactgggcgga

SEQ ID NO: 235242 - DNA, 25 bp, Artificial
  Probe
gagagagcacgcttggcctattctc

SEQ ID NO: 235243 - DNA, 25 bp, Artificial
  Probe
ttcgccctggagaagactttcgaac

SEQ ID NO: 235244 - DNA, 25 bp, Artificial
  Probe
cttggcaggaccagagagagcacgc

SEQ ID NO: 235245 - DNA, 25 bp, Artificial
  Probe
cggccagcagatcttcgccctggag

SEQ ID NO: 235246 - DNA, 25 bp, Artificial
  Probe
ctttgacacctccagggatggcttc

SEQ ID NO: 235247 - DNA, 25 bp, Artificial
  Probe
ggcttccttcgcacgtgtgcgcgcg

SEQ ID NO: 235248 - DNA, 25 bp, Artificial
  Probe
gaagtacttggcaggaccagagaga

SEQ ID NO: 235249 - DNA, 25 bp, Artificial
  Probe
aaacgaagtacttggcaggaccaga

SEQ ID NO: 235250 - DNA, 25 bp, Artificial
  Probe
cctcaccaaactaacaaactgggcg

SEQ ID NO: 235251 - DNA, 25 bp, Artificial
  Probe
cccatcaaggatccattttgttgga

SEQ ID NO: 235252 - DNA, 25 bp, Artificial
  Probe
agtcaggtcaaggtgagtggacctt

SEQ ID NO: 235253 - DNA, 25 bp, Artificial
  Probe
tattctctggggatgacggagagtc

SEQ ID NO: 235254 - DNA, 25 bp, Artificial
  Probe
tcgaacaaacgaagtacttggcagg

SEQ ID NO: 235255 - DNA, 25 bp, Artificial
  Probe
tggcctattctctggggatgacgga

SEQ ID NO: 235256 - DNA, 25 bp, Artificial
  Probe
tccagggatggcttccttcgcacgt

SEQ ID NO: 235257 - DNA, 25 bp, Artificial
  Probe
gcacgcttggcctattctctgggga

SEQ ID NO: 235258 - DNA, 25 bp, Artificial
  Probe
tagcacaagccctggggtcttttgg

SEQ ID NO: 235259 - DNA, 25 bp, Artificial
  Probe
ttcgaacaaacgaagtacttggcag

SEQ ID NO: 235260 - DNA, 25 bp, Artificial
  Probe
atcttcgccctggagaagactttcg

SEQ ID NO: 235261 - DNA, 25 bp, Artificial
  Probe
ggatggcttccttcgcacgtgtgcg

SEQ ID NO: 235262 - DNA, 25 bp, Artificial
  Probe
gcttcgtggggatcaagcttcgtgg

SEQ ID NO: 235263 - DNA, 25 bp, Artificial
  Probe
tggctgttcccacatccctttgagt

SEQ ID NO: 235264 - DNA, 25 bp, Artificial
  Probe
tggtccaacgctttgacccccacct

SEQ ID NO: 235265 - DNA, 25 bp, Artificial
  Probe
aggggctttccctcaccacacctgt

SEQ ID NO: 235266 - DNA, 25 bp, Artificial
  Probe
atcaagcttcgtggctttttatgaa

SEQ ID NO: 235267 - DNA, 25 bp, Artificial
  Probe
ccatgggcaccatctctgtcattat

SEQ ID NO: 235268 - DNA, 25 bp, Artificial
  Probe
atgggcaccatctctgtcattattt

SEQ ID NO: 235269 - DNA, 25 bp, Artificial
  Probe
cacatccctttgagtatcccaggaa

SEQ ID NO: 235270 - DNA, 25 bp, Artificial
  Probe
gggatcaagcttcgtggctttttat

SEQ ID NO: 235271 - DNA, 25 bp, Artificial
  Probe
ccatcttcctggtccaacgctttga

SEQ ID NO: 235272 - DNA, 25 bp, Artificial
  Probe
gggtcccccatttgggctctgcgtc

SEQ ID NO: 235273 - DNA, 25 bp, Artificial
  Probe
cacctgtggctgttcccacatccct

SEQ ID NO: 235274 - DNA, 25 bp, Artificial
  Probe
cgggtcccccatttgggctctgcgt

SEQ ID NO: 235275 - DNA, 25 bp, Artificial
  Probe
ggatcaagcttcgtggctttttatg

SEQ ID NO: 235276 - DNA, 25 bp, Artificial
  Probe
tgggcaccatctctgtcattatttt

SEQ ID NO: 235277 - DNA, 25 bp, Artificial
  Probe
cgtggggatcaagcttcgtggcttt

SEQ ID NO: 235278 - DNA, 25 bp, Artificial
  Probe
ccgggtcccccatttgggctctgcg

SEQ ID NO: 235279 - DNA, 25 bp, Artificial
  Probe
gtggggatcaagcttcgtggctttt

SEQ ID NO: 235280 - DNA, 25 bp, Artificial
  Probe
gatcaagcttcgtggctttttatga

SEQ ID NO: 235281 - DNA, 25 bp, Artificial
  Probe
ccacagggcccagggaccacagtgg

SEQ ID NO: 235282 - DNA, 25 bp, Artificial
  Probe
catccctttgagtatcccaggaaaa

SEQ ID NO: 235283 - DNA, 25 bp, Artificial
  Probe
acatccctttgagtatcccaggaaa

SEQ ID NO: 235284 - DNA, 25 bp, Artificial
  Probe
ttcgtggctttttatgaagaatccc

SEQ ID NO: 235285 - DNA, 25 bp, Artificial
  Probe
cctcaccacacctgtggctgttccc

SEQ ID NO: 235286 - DNA, 25 bp, Artificial
  Probe
ccacatccctttgagtatcccagga

SEQ ID NO: 235287 - DNA, 25 bp, Artificial
  Probe
tgtcattattttacccctccacggg

SEQ ID NO: 235288 - DNA, 25 bp, Artificial
  Probe
tgcccacagggcccagggaccacag

SEQ ID NO: 235289 - DNA, 25 bp, Artificial
  Probe
tgggcttcgtggggatcaagcttcg

SEQ ID NO: 235290 - DNA, 25 bp, Artificial
  Probe
agcttcgtggctttttatgaagaat

SEQ ID NO: 235291 - DNA, 25 bp, Artificial
  Probe
gagacaggggctttccctcaccaca

SEQ ID NO: 235292 - DNA, 25 bp, Artificial
  Probe
tgtggctgttcccacatccctttga

SEQ ID NO: 235293 - DNA, 25 bp, Artificial
  Probe
ttggaactcccatcttcctggtcca

SEQ ID NO: 235294 - DNA, 25 bp, Artificial
  Probe
atcttcctggtccaacgctttgacc

SEQ ID NO: 235295 - DNA, 25 bp, Artificial
  Probe
ttcgtggggatcaagcttcgtggct

SEQ ID NO: 235296 - DNA, 25 bp, Artificial
  Probe
tggaactcccatcttcctggtccaa

SEQ ID NO: 235297 - DNA, 25 bp, Artificial
  Probe
cccatgggcaccatctctgtcatta

SEQ ID NO: 235298 - DNA, 25 bp, Artificial
  Probe
cttcgtggggatcaagcttcgtggc

SEQ ID NO: 235299 - DNA, 25 bp, Artificial
  Probe
ttccccccatgggcaccatctctgt

SEQ ID NO: 235300 - DNA, 25 bp, Artificial
  Probe
gtggctgttcccacatccctttgag

SEQ ID NO: 235301 - DNA, 25 bp, Artificial
  Probe
ggggatcaagcttcgtggcttttta

SEQ ID NO: 235302 - DNA, 25 bp, Artificial
  Probe
gcttcgtggctttttatgaagaatc

SEQ ID NO: 235303 - DNA, 25 bp, Artificial
  Probe
ttgggctctgcgtcccccccacacc

SEQ ID NO: 235304 - DNA, 25 bp, Artificial
  Probe
catgggcaccatctctgtcattatt

SEQ ID NO: 235305 - DNA, 25 bp, Artificial
  Probe
cttcgtggctttttatgaagaatcc

SEQ ID NO: 235306 - DNA, 25 bp, Artificial
  Probe
tggggatcaagcttcgtggcttttt

SEQ ID NO: 235307 - DNA, 25 bp, Artificial
  Probe
catcttcctggtccaacgctttgac

SEQ ID NO: 235308 - DNA, 25 bp, Artificial
  Probe
tctatacatacttgcagtccagctg

SEQ ID NO: 235309 - DNA, 25 bp, Artificial
  Probe
ctgtttcccttacaaagatgtggaa

SEQ ID NO: 235310 - DNA, 25 bp, Artificial
  Probe
ccagttctggccacactctaaagac

SEQ ID NO: 235311 - DNA, 25 bp, Artificial
  Probe
gtgaacacagatgtgcatgtgactc

SEQ ID NO: 235312 - DNA, 25 bp, Artificial
  Probe
agccatccctaatgggagatgaata

SEQ ID NO: 235313 - DNA, 25 bp, Artificial
  Probe
tttctgtttcccttacaaagatgtg

SEQ ID NO: 235314 - DNA, 25 bp, Artificial
  Probe
tttaactctaagtcccatcgaaggt

SEQ ID NO: 235315 - DNA, 25 bp, Artificial
  Probe
cttaactatattggttgtcttgaca

SEQ ID NO: 235316 - DNA, 25 bp, Artificial
  Probe
actctaagtcccatcgaaggttctt

SEQ ID NO: 235317 - DNA, 25 bp, Artificial
  Probe
gctctgacacattttcttgtataag

SEQ ID NO: 235318 - DNA, 25 bp, Artificial
  Probe
agttctatacatacttgcagtccag

SEQ ID NO: 235319 - DNA, 25 bp, Artificial
  Probe
ggcagttctatacatacttgcagtc

SEQ ID NO: 235320 - DNA, 25 bp, Artificial
  Probe
ggcccaccatgcaataacaaaagac

SEQ ID NO: 235321 - DNA, 25 bp, Artificial
  Probe
agaggtggtgctgtctagtgaacac

SEQ ID NO: 235322 - DNA, 25 bp, Artificial
  Probe
gttctatacatacttgcagtccagc

SEQ ID NO: 235323 - DNA, 25 bp, Artificial
  Probe
gcaagccatccctaatgggagatga

SEQ ID NO: 235324 - DNA, 25 bp, Artificial
  Probe
tctgacacattttcttgtataagag

SEQ ID NO: 235325 - DNA, 25 bp, Artificial
  Probe
ttttaactctaagtcccatcgaagg

SEQ ID NO: 235326 - DNA, 25 bp, Artificial
  Probe
agggagagtccagttctggccacac

SEQ ID NO: 235327 - DNA, 25 bp, Artificial
  Probe
cagctgtttgttagcctttctgtct

SEQ ID NO: 235328 - DNA, 25 bp, Artificial
  Probe
acagatgtgcatgtgactcctgtgc

SEQ ID NO: 235329 - DNA, 25 bp, Artificial
  Probe
acacagatgtgcatgtgactcctgt

SEQ ID NO: 235330 - DNA, 25 bp, Artificial
  Probe
gcatgtgactcctgtgcagctggca

SEQ ID NO: 235331 - DNA, 25 bp, Artificial
  Probe
ctagtgaacacagatgtgcatgtga

SEQ ID NO: 235332 - DNA, 25 bp, Artificial
  Probe
accagacagcagacagggagaaggt

SEQ ID NO: 235333 - DNA, 25 bp, Artificial
  Probe
gaacgttgcatctgcacttcatcca

SEQ ID NO: 235334 - DNA, 25 bp, Artificial
  Probe
gtgcatgtgactcctgtgcagctgg

SEQ ID NO: 235335 - DNA, 25 bp, Artificial
  Probe
gttgcatctgcacttcatccaccag

SEQ ID NO: 235336 - DNA, 25 bp, Artificial
  Probe
agcatggggcagttctatacatact

SEQ ID NO: 235337 - DNA, 25 bp, Artificial
  Probe
tcttaactatattggttgtcttgac

SEQ ID NO: 235338 - DNA, 25 bp, Artificial
  Probe
ataagcaagccatccctaatgggag

SEQ ID NO: 235339 - DNA, 25 bp, Artificial
  Probe
gcagttctatacatacttgcagtcc

SEQ ID NO: 235340 - DNA, 25 bp, Artificial
  Probe
cttcatccaccagacagcagacagg

SEQ ID NO: 235341 - DNA, 25 bp, Artificial
  Probe
ggttcttctgatagttctaccattt

SEQ ID NO: 235342 - DNA, 25 bp, Artificial
  Probe
gtctagtgaacacagatgtgcatgt

SEQ ID NO: 235343 - DNA, 25 bp, Artificial
  Probe
ctcctgtgcagctggcaatctctga

SEQ ID NO: 235344 - DNA, 25 bp, Artificial
  Probe
ctgacacattttcttgtataagagg

SEQ ID NO: 235345 - DNA, 25 bp, Artificial
  Probe
gccggcccaccatgcaataacaaaa

SEQ ID NO: 235346 - DNA, 25 bp, Artificial
  Probe
cattacagatgtcacaagagtttaa

SEQ ID NO: 235347 - DNA, 25 bp, Artificial
  Probe
agaccctcattacagatgtcacaag

SEQ ID NO: 235348 - DNA, 25 bp, Artificial
  Probe
tgcacttcatccaccagacagcaga

SEQ ID NO: 235349 - DNA, 25 bp, Artificial
  Probe
gttctggccacactctaaagaccct

SEQ ID NO: 235350 - DNA, 25 bp, Artificial
  Probe
cataagcaagccatccctaatggga

SEQ ID NO: 235351 - DNA, 25 bp, Artificial
  Probe
actcaggctctgacacattttcttg

SEQ ID NO: 235352 - DNA, 25 bp, Artificial
  Probe
gctgtctagtgaacacagatgtgca

SEQ ID NO: 235353 - DNA, 25 bp, Artificial
  Probe
tgtgcagctggcaatctctgagtgc

SEQ ID NO: 235354 - DNA, 25 bp, Artificial
  Probe
ccaccagccagagttacaggtaagg

SEQ ID NO: 235355 - DNA, 25 bp, Artificial
  Probe
ttttgagaacactgccattggaatg

SEQ ID NO: 235356 - DNA, 25 bp, Artificial
  Probe
gtaaggtctcgagagtgaccaggct

SEQ ID NO: 235357 - DNA, 25 bp, Artificial
  Probe
caggtaaggtctcgagagtgaccag

SEQ ID NO: 235358 - DNA, 25 bp, Artificial
  Probe
cgtaccagattgagaactttgcaca

SEQ ID NO: 235359 - DNA, 25 bp, Artificial
  Probe
aagcattcggttctcagtttaagtc

SEQ ID NO: 235360 - DNA, 25 bp, Artificial
  Probe
gaccaggctgggagtctaatgtaat

SEQ ID NO: 235361 - DNA, 25 bp, Artificial
  Probe
tgtacagattgtcagggaatagccc

SEQ ID NO: 235362 - DNA, 25 bp, Artificial
  Probe
gaacaacgtaccagattgagaactt

SEQ ID NO: 235363 - DNA, 25 bp, Artificial
  Probe
agacatagagcctagaacaacgtac

SEQ ID NO: 235364 - DNA, 25 bp, Artificial
  Probe
gcagggtgccaatgacctttatcac

SEQ ID NO: 235365 - DNA, 25 bp, Artificial
  Probe
gagaacactgccattggaatgtttc

SEQ ID NO: 235366 - DNA, 25 bp, Artificial
  Probe
acccaccagccagagttacaggtaa

SEQ ID NO: 235367 - DNA, 25 bp, Artificial
  Probe
catgtacagattgtcagggaatagc

SEQ ID NO: 235368 - DNA, 25 bp, Artificial
  Probe
ccaggctgggagtctaatgtaattt

SEQ ID NO: 235369 - DNA, 25 bp, Artificial
  Probe
gtaccagattgagaactttgcacaa

SEQ ID NO: 235370 - DNA, 25 bp, Artificial
  Probe
tccccagaaagacatagagcctaga

SEQ ID NO: 235371 - DNA, 25 bp, Artificial
  Probe
agagcctagaacaacgtaccagatt

SEQ ID NO: 235372 - DNA, 25 bp, Artificial
  Probe
ctgccattggaatgtttctacacga

SEQ ID NO: 235373 - DNA, 25 bp, Artificial
  Probe
agtaaggacttcagtgtcagatttc

SEQ ID NO: 235374 - DNA, 25 bp, Artificial
  Probe
agccagagttacaggtaaggtctcg

SEQ ID NO: 235375 - DNA, 25 bp, Artificial
  Probe
acattcaaagtgacaatgtttagca

SEQ ID NO: 235376 - DNA, 25 bp, Artificial
  Probe
acaagcattcggttctcagtttaag

SEQ ID NO: 235377 - DNA, 25 bp, Artificial
  Probe
ttattttgagaacactgccattgga

SEQ ID NO: 235378 - DNA, 25 bp, Artificial
  Probe
ggaatgtttctacacgatcctatta

SEQ ID NO: 235379 - DNA, 25 bp, Artificial
  Probe
gtcagatttctcagggtatacaaat

SEQ ID NO: 235380 - DNA, 25 bp, Artificial
  Probe
aaggacttcagtgtcagatttctca

SEQ ID NO: 235381 - DNA, 25 bp, Artificial
  Probe
taaggtctcgagagtgaccaggctg

SEQ ID NO: 235382 - DNA, 25 bp, Artificial
  Probe
ttacaggtaaggtctcgagagtgac

SEQ ID NO: 235383 - DNA, 25 bp, Artificial
  Probe
ggtgccaatgacctttatcactaac

SEQ ID NO: 235384 - DNA, 25 bp, Artificial
  Probe
gattgagaactttgcacaagcattc

SEQ ID NO: 235385 - DNA, 25 bp, Artificial
  Probe
aactctaatggagaagtggaccata

SEQ ID NO: 235386 - DNA, 25 bp, Artificial
  Probe
aacactgccattggaatgtttctac

SEQ ID NO: 235387 - DNA, 25 bp, Artificial
  Probe
tagccagattgatccccagaaagac

SEQ ID NO: 235388 - DNA, 25 bp, Artificial
  Probe
ccagccagagttacaggtaaggtct

SEQ ID NO: 235389 - DNA, 25 bp, Artificial
  Probe
ttgcacaagcattcggttctcagtt

SEQ ID NO: 235390 - DNA, 25 bp, Artificial
  Probe
attgtcagggaatagcccaaaagtt

SEQ ID NO: 235391 - DNA, 25 bp, Artificial
  Probe
gaatagcccaaaagttttaaatgca

SEQ ID NO: 235392 - DNA, 25 bp, Artificial
  Probe
cattggaatgtttctacacgatcct

SEQ ID NO: 235393 - DNA, 25 bp, Artificial
  Probe
gagaactttgcacaagcattcggtt

SEQ ID NO: 235394 - DNA, 25 bp, Artificial
  Probe
ctagccagattgatccccagaaaga

SEQ ID NO: 235395 - DNA, 25 bp, Artificial
  Probe
tttatcactaactctaatggagaag

SEQ ID NO: 235396 - DNA, 25 bp, Artificial
  Probe
acaacgtaccagattgagaactttg

SEQ ID NO: 235397 - DNA, 25 bp, Artificial
  Probe
agattgatccccagaaagacataga

SEQ ID NO: 235398 - DNA, 25 bp, Artificial
  Probe
ttatcactaactctaatggagaagt

SEQ ID NO: 235399 - DNA, 25 bp, Artificial
  Probe
aacgtaccagattgagaactttgca

SEQ ID NO: 235400 - DNA, 25 bp, Artificial
  Probe
tctccaggttttcaattaaacggat

SEQ ID NO: 235401 - DNA, 25 bp, Artificial
  Probe
tgtctcttatcatgctcgtgaaggt

SEQ ID NO: 235402 - DNA, 25 bp, Artificial
  Probe
ccggtggccattgctggctatgtgt

SEQ ID NO: 235403 - DNA, 25 bp, Artificial
  Probe
tgtggagcctctaactacacagact

SEQ ID NO: 235404 - DNA, 25 bp, Artificial
  Probe
ttacagaccaggtgaagtcagagtt

SEQ ID NO: 235405 - DNA, 25 bp, Artificial
  Probe
ttgctggctatgtgtttacagacca

SEQ ID NO: 235406 - DNA, 25 bp, Artificial
  Probe
tgctggctatgtgtttacagaccag

SEQ ID NO: 235407 - DNA, 25 bp, Artificial
  Probe
gtggagcctctaactacacagactg

SEQ ID NO: 235408 - DNA, 25 bp, Artificial
  Probe
cttatcatgctcgtgaaggtgccgg

SEQ ID NO: 235409 - DNA, 25 bp, Artificial
  Probe
ctcttatcatgctcgtgaaggtgcc

SEQ ID NO: 235410 - DNA, 25 bp, Artificial
  Probe
gtaagagcttccagaagcaaattgc

SEQ ID NO: 235411 - DNA, 25 bp, Artificial
  Probe
gctatgtgtttacagaccaggtgaa

SEQ ID NO: 235412 - DNA, 25 bp, Artificial
  Probe
cagaccaggtgaagtcagagtttag

SEQ ID NO: 235413 - DNA, 25 bp, Artificial
  Probe
taaatgctgtggagcctctaactac

SEQ ID NO: 235414 - DNA, 25 bp, Artificial
  Probe
ctatgtgtttacagaccaggtgaag

SEQ ID NO: 235415 - DNA, 25 bp, Artificial
  Probe
tgccggtggccattgctggctatgt

SEQ ID NO: 235416 - DNA, 25 bp, Artificial
  Probe
gctggctatgtgtttacagaccagg

SEQ ID NO: 235417 - DNA, 25 bp, Artificial
  Probe
tgtgtttacagaccaggtgaagtca

SEQ ID NO: 235418 - DNA, 25 bp, Artificial
  Probe
tttagtaagagcttccagaagcaaa

SEQ ID NO: 235419 - DNA, 25 bp, Artificial
  Probe
agtttagtaagagcttccagaagca

SEQ ID NO: 235420 - DNA, 25 bp, Artificial
  Probe
atgtgtttacagaccaggtgaagtc

SEQ ID NO: 235421 - DNA, 25 bp, Artificial
  Probe
gccattgctggctatgtgtttacag

SEQ ID NO: 235422 - DNA, 25 bp, Artificial
  Probe
gagcttccagaagcaaattgcagaa

SEQ ID NO: 235423 - DNA, 25 bp, Artificial
  Probe
tggagcctctaactacacagactgg

SEQ ID NO: 235424 - DNA, 25 bp, Artificial
  Probe
cggtggccattgctggctatgtgtt

SEQ ID NO: 235425 - DNA, 25 bp, Artificial
  Probe
tcctgtctcttatcatgctcgtgaa

SEQ ID NO: 235426 - DNA, 25 bp, Artificial
  Probe
ttatcatgctcgtgaaggtgccggt

SEQ ID NO: 235427 - DNA, 25 bp, Artificial
  Probe
tcttatcatgctcgtgaaggtgccg

SEQ ID NO: 235428 - DNA, 25 bp, Artificial
  Probe
agagcttccagaagcaaattgcaga

SEQ ID NO: 235429 - DNA, 25 bp, Artificial
  Probe
tacagaccaggtgaagtcagagttt

SEQ ID NO: 235430 - DNA, 25 bp, Artificial
  Probe
ttcctgtctcttatcatgctcgtga

SEQ ID NO: 235431 - DNA, 25 bp, Artificial
  Probe
agcttccagaagcaaattgcagaag

SEQ ID NO: 235432 - DNA, 25 bp, Artificial
  Probe
gcatccccggtatggccaaggacag

SEQ ID NO: 235433 - DNA, 25 bp, Artificial
  Probe
tatcatgctcgtgaaggtgccggtg

SEQ ID NO: 235434 - DNA, 25 bp, Artificial
  Probe
gtttacagaccaggtgaagtcagag

SEQ ID NO: 235435 - DNA, 25 bp, Artificial
  Probe
ccattgctggctatgtgtttacaga

SEQ ID NO: 235436 - DNA, 25 bp, Artificial
  Probe
taagagcttccagaagcaaattgca

SEQ ID NO: 235437 - DNA, 25 bp, Artificial
  Probe
ctgtctcttatcatgctcgtgaagg

SEQ ID NO: 235438 - DNA, 25 bp, Artificial
  Probe
ggtggccattgctggctatgtgttt

SEQ ID NO: 235439 - DNA, 25 bp, Artificial
  Probe
tgtttacagaccaggtgaagtcaga

SEQ ID NO: 235440 - DNA, 25 bp, Artificial
  Probe
gtttagtaagagcttccagaagcaa

SEQ ID NO: 235441 - DNA, 25 bp, Artificial
  Probe
gctgtggagcctctaactacacaga

SEQ ID NO: 235442 - DNA, 25 bp, Artificial
  Probe
tgctgtggagcctctaactacacag

SEQ ID NO: 235443 - DNA, 25 bp, Artificial
  Probe
tagtaagagcttccagaagcaaatt

SEQ ID NO: 235444 - DNA, 25 bp, Artificial
  Probe
cttccagaagcaaattgcagaagga

SEQ ID NO: 235445 - DNA, 25 bp, Artificial
  Probe
cattgctggctatgtgtttacagac

SEQ ID NO: 235446 - DNA, 25 bp, Artificial
  Probe
gcctcacattgtaatcccgtctgtc

SEQ ID NO: 235447 - DNA, 25 bp, Artificial
  Probe
tggcatcatggctgtgcctagctgc

SEQ ID NO: 235448 - DNA, 25 bp, Artificial
  Probe
aagataaccaagactaacatcgcgg

SEQ ID NO: 235449 - DNA, 25 bp, Artificial
  Probe
ggataaaactccacactgagcattt

SEQ ID NO: 235450 - DNA, 25 bp, Artificial
  Probe
atcttccgaggcttggataaaactc

SEQ ID NO: 235451 - DNA, 25 bp, Artificial
  Probe
ccaaggcgccctcttaataagcaca

SEQ ID NO: 235452 - DNA, 25 bp, Artificial
  Probe
aaattggaattgctgcctgcctgag

SEQ ID NO: 235453 - DNA, 25 bp, Artificial
  Probe
tgcctagctgccatgtcagtggaag

SEQ ID NO: 235454 - DNA, 25 bp, Artificial
  Probe
gcaccatcggcagtttccccaagtg

SEQ ID NO: 235455 - DNA, 25 bp, Artificial
  Probe
ttccgaggcttggataaaactccac

SEQ ID NO: 235456 - DNA, 25 bp, Artificial
  Probe
tcaaaggcaccatcggcagtttccc

SEQ ID NO: 235457 - DNA, 25 bp, Artificial
  Probe
atcctgtgtggaagggcctcacatt

SEQ ID NO: 235458 - DNA, 25 bp, Artificial
  Probe
cttggataaaactccacactgagca

SEQ ID NO: 235459 - DNA, 25 bp, Artificial
  Probe
tgtccacaatgctgcccggactctg

SEQ ID NO: 235460 - DNA, 25 bp, Artificial
  Probe
taataagcacactgcgcatatgctg

SEQ ID NO: 235461 - DNA, 25 bp, Artificial
  Probe
tagctgccatgtcagtggaaggaga

SEQ ID NO: 235462 - DNA, 25 bp, Artificial
  Probe
acacatcttccgaggcttggataaa

SEQ ID NO: 235463 - DNA, 25 bp, Artificial
  Probe
ctaacatcgcggattgcccaaggcg

SEQ ID NO: 235464 - DNA, 25 bp, Artificial
  Probe
cctacccgaggagatggtttcaaag

SEQ ID NO: 235465 - DNA, 25 bp, Artificial
  Probe
ccaagactaacatcgcggattgccc

SEQ ID NO: 235466 - DNA, 25 bp, Artificial
  Probe
gctgtgcctagctgccatgtcagtg

SEQ ID NO: 235467 - DNA, 25 bp, Artificial
  Probe
tgcctccactcacgttcttttgagg

SEQ ID NO: 235468 - DNA, 25 bp, Artificial
  Probe
ttccaacaaaattggaattgctgcc

SEQ ID NO: 235469 - DNA, 25 bp, Artificial
  Probe
gcggattgcccaaggcgccctctta

SEQ ID NO: 235470 - DNA, 25 bp, Artificial
  Probe
ggcagtttccccaagtgcccaaagg

SEQ ID NO: 235471 - DNA, 25 bp, Artificial
  Probe
gcatcatggctgtgcctagctgcca

SEQ ID NO: 235472 - DNA, 25 bp, Artificial
  Probe
gcagtttccccaagtgcccaaaggt

SEQ ID NO: 235473 - DNA, 25 bp, Artificial
  Probe
ggtttcaaaggcaccatcggcagtt

SEQ ID NO: 235474 - DNA, 25 bp, Artificial
  Probe
tcttaataagcacactgcgcatatg

SEQ ID NO: 235475 - DNA, 25 bp, Artificial
  Probe
atgtaaatattccagttctctttgg

SEQ ID NO: 235476 - DNA, 25 bp, Artificial
  Probe
catggctgtgcctagctgccatgtc

SEQ ID NO: 235477 - DNA, 25 bp, Artificial
  Probe
tgtggaagggcctcacattgtaatc

SEQ ID NO: 235478 - DNA, 25 bp, Artificial
  Probe
ggaattgctgcctgcctgagccctc

SEQ ID NO: 235479 - DNA, 25 bp, Artificial
  Probe
aacatcgcggattgcccaaggcgcc

SEQ ID NO: 235480 - DNA, 25 bp, Artificial
  Probe
ggagacaagtgtccacaatgctgcc

SEQ ID NO: 235481 - DNA, 25 bp, Artificial
  Probe
aattggaattgctgcctgcctgagc

SEQ ID NO: 235482 - DNA, 25 bp, Artificial
  Probe
agcacactgcgcatatgctgtggaa

SEQ ID NO: 235483 - DNA, 25 bp, Artificial
  Probe
tacccgaggagatggtttcaaaggc

SEQ ID NO: 235484 - DNA, 25 bp, Artificial
  Probe
actgcgcatatgctgtggaaggcaa

SEQ ID NO: 235485 - DNA, 25 bp, Artificial
  Probe
cacatttcgaaagaacagagacata

SEQ ID NO: 235486 - DNA, 25 bp, Artificial
  Probe
gccatgtcagtggaaggagacaagt

SEQ ID NO: 235487 - DNA, 25 bp, Artificial
  Probe
ggcaccatcggcagtttccccaagt

SEQ ID NO: 235488 - DNA, 25 bp, Artificial
  Probe
tgcccaaaggtatttcttaaagttg

SEQ ID NO: 235489 - DNA, 25 bp, Artificial
  Probe
ttgtaatcccgtctgtcacatttcg

SEQ ID NO: 235490 - DNA, 25 bp, Artificial
  Probe
aattccaacaaaattggaattgctg

SEQ ID NO: 235491 - DNA, 25 bp, Artificial
  Probe
gccctcttaataagcacactgcgca

SEQ ID NO: 235492 - DNA, 25 bp, Artificial
  Probe
taggactacctagataggatgcgtg

SEQ ID NO: 235493 - DNA, 25 bp, Artificial
  Probe
ggagctcagacacgttcttaccact

SEQ ID NO: 235494 - DNA, 25 bp, Artificial
  Probe
agccgccagcgctggacaactttct

SEQ ID NO: 235495 - DNA, 25 bp, Artificial
  Probe
gtgcggccagtagtgcgttcctgcc

SEQ ID NO: 235496 - DNA, 25 bp, Artificial
  Probe
gaacctgcgggatcggaaacttgcc

SEQ ID NO: 235497 - DNA, 25 bp, Artificial
  Probe
cctgtgcggccagtagtgcgttcct

SEQ ID NO: 235498 - DNA, 25 bp, Artificial
  Probe
ccaaggcacatattaggactaccta

SEQ ID NO: 235499 - DNA, 25 bp, Artificial
  Probe
accccacgtagaacctgcgggatcg

SEQ ID NO: 235500 - DNA, 25 bp, Artificial
  Probe
cggagctcagacacgttcttaccac

SEQ ID NO: 235501 - DNA, 25 bp, Artificial
  Probe
actacctagataggatgcgtgtgtt

SEQ ID NO: 235502 - DNA, 25 bp, Artificial
  Probe
gatgcgtgtgtttgacaaagagggc

SEQ ID NO: 235503 - DNA, 25 bp, Artificial
  Probe
ctacctagataggatgcgtgtgttt

SEQ ID NO: 235504 - DNA, 25 bp, Artificial
  Probe
ccccacgtagaacctgcgggatcgg

SEQ ID NO: 235505 - DNA, 25 bp, Artificial
  Probe
ccgccagcgctggacaactttcttt

SEQ ID NO: 235506 - DNA, 25 bp, Artificial
  Probe
attaggactacctagataggatgcg

SEQ ID NO: 235507 - DNA, 25 bp, Artificial
  Probe
aggactacctagataggatgcgtgt

SEQ ID NO: 235508 - DNA, 25 bp, Artificial
  Probe
cagtagtgcgttcctgccactaggg

SEQ ID NO: 235509 - DNA, 25 bp, Artificial
  Probe
agaacctgcgggatcggaaacttgc

SEQ ID NO: 235510 - DNA, 25 bp, Artificial
  Probe
gccgccagcgctggacaactttctt

SEQ ID NO: 235511 - DNA, 25 bp, Artificial
  Probe
catattaggactacctagataggat

SEQ ID NO: 235512 - DNA, 25 bp, Artificial
  Probe
cgttcctgccactagggggcactta

SEQ ID NO: 235513 - DNA, 25 bp, Artificial
  Probe
ctgcgggatcggaaacttgccccac

SEQ ID NO: 235514 - DNA, 25 bp, Artificial
  Probe
ggcacatattaggactacctagata

SEQ ID NO: 235515 - DNA, 25 bp, Artificial
  Probe
gactacctagataggatgcgtgtgt

SEQ ID NO: 235516 - DNA, 25 bp, Artificial
  Probe
ttaggactacctagataggatgcgt

SEQ ID NO: 235517 - DNA, 25 bp, Artificial
  Probe
atattaggactacctagataggatg

SEQ ID NO: 235518 - DNA, 25 bp, Artificial
  Probe
tgcgttcctgccactagggggcact

SEQ ID NO: 235519 - DNA, 25 bp, Artificial
  Probe
cagccgccagcgctggacaactttc

SEQ ID NO: 235520 - DNA, 25 bp, Artificial
  Probe
gttcctgccactagggggcacttac

SEQ ID NO: 235521 - DNA, 25 bp, Artificial
  Probe
gcacatattaggactacctagatag

SEQ ID NO: 235522 - DNA, 25 bp, Artificial
  Probe
acatattaggactacctagatagga

SEQ ID NO: 235523 - DNA, 25 bp, Artificial
  Probe
gcgttcctgccactagggggcactt

SEQ ID NO: 235524 - DNA, 25 bp, Artificial
  Probe
agtagtgcgttcctgccactagggg

SEQ ID NO: 235525 - DNA, 25 bp, Artificial
  Probe
gcaggcagtgcgtttccccatccga

SEQ ID NO: 235526 - DNA, 25 bp, Artificial
  Probe
ccacgtagaacctgcgggatcggaa

SEQ ID NO: 235527 - DNA, 25 bp, Artificial
  Probe
tattaggactacctagataggatgc

SEQ ID NO: 235528 - DNA, 25 bp, Artificial
  Probe
tgcggccagtagtgcgttcctgcca

SEQ ID NO: 235529 - DNA, 25 bp, Artificial
  Probe
ccaccccacgtagaacctgcgggat

SEQ ID NO: 235530 - DNA, 25 bp, Artificial
  Probe
ctgtgcggccagtagtgcgttcctg

SEQ ID NO: 235531 - DNA, 25 bp, Artificial
  Probe
tgtgcggccagtagtgcgttcctgc

SEQ ID NO: 235532 - DNA, 25 bp, Artificial
  Probe
ggactacctagataggatgcgtgtg

SEQ ID NO: 235533 - DNA, 25 bp, Artificial
  Probe
gccagtagtgcgttcctgccactag

SEQ ID NO: 235534 - DNA, 25 bp, Artificial
  Probe
cccacgtagaacctgcgggatcgga

SEQ ID NO: 235535 - DNA, 25 bp, Artificial
  Probe
cccacctcctgtgcggccagtagtg

SEQ ID NO: 235536 - DNA, 25 bp, Artificial
  Probe
tcggaaacttgccccacctcctgtg

SEQ ID NO: 235537 - DNA, 25 bp, Artificial
  Probe
tcctgtgcggccagtagtgcgttcc

SEQ ID NO: 235538 - DNA, 25 bp, Artificial
  Probe
ttctacatcagagtcacctgatgtc

SEQ ID NO: 235539 - DNA, 25 bp, Artificial
  Probe
caagaaccctgagacccacagcttg

SEQ ID NO: 235540 - DNA, 25 bp, Artificial
  Probe
taacaggatgggaggctctactcct

SEQ ID NO: 235541 - DNA, 25 bp, Artificial
  Probe
cgttcagccttaagcagccgcctga

SEQ ID NO: 235542 - DNA, 25 bp, Artificial
  Probe
aggttcatctcagacccaccgttca

SEQ ID NO: 235543 - DNA, 25 bp, Artificial
  Probe
tgcaggttcatctcagacccaccgt

SEQ ID NO: 235544 - DNA, 25 bp, Artificial
  Probe
tgagacccacagcttgtgccttgct

SEQ ID NO: 235545 - DNA, 25 bp, Artificial
  Probe
gagtcacctgatgtcaacctggtga

SEQ ID NO: 235546 - DNA, 25 bp, Artificial
  Probe
gggaggctctactccttcctgcgca

SEQ ID NO: 235547 - DNA, 25 bp, Artificial
  Probe
gcagtcttctccagtgttgtatttt

SEQ ID NO: 235548 - DNA, 25 bp, Artificial
  Probe
ttcagccttaagcagccgcctgagc

SEQ ID NO: 235549 - DNA, 25 bp, Artificial
  Probe
gccataacaggatgggaggctctac

SEQ ID NO: 235550 - DNA, 25 bp, Artificial
  Probe
cagccttctacatcagagtcacctg

SEQ ID NO: 235551 - DNA, 25 bp, Artificial
  Probe
caccaccgagccataacaggatggg

SEQ ID NO: 235552 - DNA, 25 bp, Artificial
  Probe
cccagcttcaaggtccaggggtgca

SEQ ID NO: 235553 - DNA, 25 bp, Artificial
  Probe
tcacctgatgtcaacctggtgaccc

SEQ ID NO: 235554 - DNA, 25 bp, Artificial
  Probe
ccagagggctgcagccttgagcctg

SEQ ID NO: 235555 - DNA, 25 bp, Artificial
  Probe
gtgttctcaggcactccaaagggca

SEQ ID NO: 235556 - DNA, 25 bp, Artificial
  Probe
gttactctgcaggttcatctcagac

SEQ ID NO: 235557 - DNA, 25 bp, Artificial
  Probe
ggttcatctcagacccaccgttcag

SEQ ID NO: 235558 - DNA, 25 bp, Artificial
  Probe
ttgttttgccatcgaaatgaggcct

SEQ ID NO: 235559 - DNA, 25 bp, Artificial
  Probe
acagcttgtgccttgctgccaggac

SEQ ID NO: 235560 - DNA, 25 bp, Artificial
  Probe
cgagccataacaggatgggaggctc

SEQ ID NO: 235561 - DNA, 25 bp, Artificial
  Probe
ggtgaggctcagcttgagttactct

SEQ ID NO: 235562 - DNA, 25 bp, Artificial
  Probe
ctgagacccacagcttgtgccttgc

SEQ ID NO: 235563 - DNA, 25 bp, Artificial
  Probe
cttgagttactctgcaggttcatct

SEQ ID NO: 235564 - DNA, 25 bp, Artificial
  Probe
tgcctgacctccaagaaccctgaga

SEQ ID NO: 235565 - DNA, 25 bp, Artificial
  Probe
gcaactgtccaagtctcaggtggag

SEQ ID NO: 235566 - DNA, 25 bp, Artificial
  Probe
gctggctacggtgttggctttgacc

SEQ ID NO: 235567 - DNA, 25 bp, Artificial
  Probe
tgccatcgaaatgaggcctgtgaaa

SEQ ID NO: 235568 - DNA, 25 bp, Artificial
  Probe
atgggaggctctactccttcctgcg

SEQ ID NO: 235569 - DNA, 25 bp, Artificial
  Probe
ctcaggcactccaaagggcagtggg

SEQ ID NO: 235570 - DNA, 25 bp, Artificial
  Probe
gcaggttcatctcagacccaccgtt

SEQ ID NO: 235571 - DNA, 25 bp, Artificial
  Probe
gcttcaaggtccaggggtgcagtcc

SEQ ID NO: 235572 - DNA, 25 bp, Artificial
  Probe
gtcaacctggtgacccagcaactgt

SEQ ID NO: 235573 - DNA, 25 bp, Artificial
  Probe
tccagagggctgcagccttgagcct

SEQ ID NO: 235574 - DNA, 25 bp, Artificial
  Probe
cttcctgcgcagtcttctccagtgt

SEQ ID NO: 235575 - DNA, 25 bp, Artificial
  Probe
acctgatgtcaacctggtgacccag

SEQ ID NO: 235576 - DNA, 25 bp, Artificial
  Probe
gaggctctactccttcctgcgcagt

SEQ ID NO: 235577 - DNA, 25 bp, Artificial
  Probe
ctggctacggtgttggctttgacct

SEQ ID NO: 235578 - DNA, 25 bp, Artificial
  Probe
cctgagacccacagcttgtgccttg

SEQ ID NO: 235579 - DNA, 25 bp, Artificial
  Probe
gagttactctgcaggttcatctcag

SEQ ID NO: 235580 - DNA, 25 bp, Artificial
  Probe
tcccgtgttctcaggcactccaaag

SEQ ID NO: 235581 - DNA, 25 bp, Artificial
  Probe
acctggtgacccagcaactgtccaa

SEQ ID NO: 235582 - DNA, 25 bp, Artificial
  Probe
acatcagagtcacctgatgtcaacc

SEQ ID NO: 235583 - DNA, 25 bp, Artificial
  Probe
gcaggtgaggctcagcttgagttac

SEQ ID NO: 235584 - DNA, 25 bp, Artificial
  Probe
ctaaatgatccctactttgctgaag

SEQ ID NO: 235585 - DNA, 25 bp, Artificial
  Probe
aatgatccctactttgctgaagaag

SEQ ID NO: 235586 - DNA, 25 bp, Artificial
  Probe
cttctgatgttgatctaaatgatcc

SEQ ID NO: 235587 - DNA, 25 bp, Artificial
  Probe
ttcttccagcgaggatgaggaagag

SEQ ID NO: 235588 - DNA, 25 bp, Artificial
  Probe
ggttccaggacttaaggagagtgca

SEQ ID NO: 235589 - DNA, 25 bp, Artificial
  Probe
caacggtggagatcacttgggatga

SEQ ID NO: 235590 - DNA, 25 bp, Artificial
  Probe
gatccctactttgctgaagaagtta

SEQ ID NO: 235591 - DNA, 25 bp, Artificial
  Probe
aatcaagtgggttccaggacttaag

SEQ ID NO: 235592 - DNA, 25 bp, Artificial
  Probe
agattccttctgatgttgatctaaa

SEQ ID NO: 235593 - DNA, 25 bp, Artificial
  Probe
catctgctgcaatgggaacatcaac

SEQ ID NO: 235594 - DNA, 25 bp, Artificial
  Probe
gagattccttctgatgttgatctaa

SEQ ID NO: 235595 - DNA, 25 bp, Artificial
  Probe
atcaacggtggagatcacttgggat

SEQ ID NO: 235596 - DNA, 25 bp, Artificial
  Probe
caatgggaacatcaacggtggagat

SEQ ID NO: 235597 - DNA, 25 bp, Artificial
  Probe
tccctactttgctgaagaagttaaa

SEQ ID NO: 235598 - DNA, 25 bp, Artificial
  Probe
taaatgatccctactttgctgaaga

SEQ ID NO: 235599 - DNA, 25 bp, Artificial
  Probe
cttcttccagcgaggatgaggaaga

SEQ ID NO: 235600 - DNA, 25 bp, Artificial
  Probe
tcaacggtggagatcacttgggatg

SEQ ID NO: 235601 - DNA, 25 bp, Artificial
  Probe
tgatccctactttgctgaagaagtt

SEQ ID NO: 235602 - DNA, 25 bp, Artificial
  Probe
gctcttgctgaagaagccagtgaag

SEQ ID NO: 235603 - DNA, 25 bp, Artificial
  Probe
tccttctgatgttgatctaaatgat

SEQ ID NO: 235604 - DNA, 25 bp, Artificial
  Probe
ttccaggacttaaggagagtgcaga

SEQ ID NO: 235605 - DNA, 25 bp, Artificial
  Probe
atgagactgatcacgaaagaatcac

SEQ ID NO: 235606 - DNA, 25 bp, Artificial
  Probe
agactgatcacgaaagaatcacgac

SEQ ID NO: 235607 - DNA, 25 bp, Artificial
  Probe
agatcacttgggatgagactgatca

SEQ ID NO: 235608 - DNA, 25 bp, Artificial
  Probe
ctcttgctgaagaagccagtgaaga

SEQ ID NO: 235609 - DNA, 25 bp, Artificial
  Probe
gaacatcaacggtggagatcacttg

SEQ ID NO: 235610 - DNA, 25 bp, Artificial
  Probe
aacatcaacggtggagatcacttgg

SEQ ID NO: 235611 - DNA, 25 bp, Artificial
  Probe
gttgatctaaatgatccctactttg

SEQ ID NO: 235612 - DNA, 25 bp, Artificial
  Probe
tgaccccttgggaacaattcttaga

SEQ ID NO: 235613 - DNA, 25 bp, Artificial
  Probe
tcttgctgaagaagccagtgaagat

SEQ ID NO: 235614 - DNA, 25 bp, Artificial
  Probe
catcaacggtggagatcacttggga

SEQ ID NO: 235615 - DNA, 25 bp, Artificial
  Probe
tacttggcttcttccagcgaggatg

SEQ ID NO: 235616 - DNA, 25 bp, Artificial
  Probe
gatgagattccttctgatgttgatc

SEQ ID NO: 235617 - DNA, 25 bp, Artificial
  Probe
tcacttgggatgagactgatcacga

SEQ ID NO: 235618 - DNA, 25 bp, Artificial
  Probe
tccaggacttaaggagagtgcagaa

SEQ ID NO: 235619 - DNA, 25 bp, Artificial
  Probe
gattccttctgatgttgatctaaat

SEQ ID NO: 235620 - DNA, 25 bp, Artificial
  Probe
atgggaacatcaacggtggagatca

SEQ ID NO: 235621 - DNA, 25 bp, Artificial
  Probe
caagtgggttccaggacttaaggag

SEQ ID NO: 235622 - DNA, 25 bp, Artificial
  Probe
atcaagtgggttccaggacttaagg

SEQ ID NO: 235623 - DNA, 25 bp, Artificial
  Probe
gaccccttgggaacaattcttagag

SEQ ID NO: 235624 - DNA, 25 bp, Artificial
  Probe
ttggcttcttccagcgaggatgagg

SEQ ID NO: 235625 - DNA, 25 bp, Artificial
  Probe
atcacttgggatgagactgatcacg

SEQ ID NO: 235626 - DNA, 25 bp, Artificial
  Probe
cttggcttcttccagcgaggatgag

SEQ ID NO: 235627 - DNA, 25 bp, Artificial
  Probe
cccttgggaacaattcttagagaag

SEQ ID NO: 235628 - DNA, 25 bp, Artificial
  Probe
atgagattccttctgatgttgatct

SEQ ID NO: 235629 - DNA, 25 bp, Artificial
  Probe
ttctgatgttgatctaaatgatccc

SEQ ID NO: 235630 - DNA, 25 bp, Artificial
  Probe
gcgcgaattggcatcaccgcaatca

SEQ ID NO: 235631 - DNA, 25 bp, Artificial
  Probe
ctgtactaattgtggctgattcaca

SEQ ID NO: 235632 - DNA, 25 bp, Artificial
  Probe
gaacagactcaaaactctcgaatag

SEQ ID NO: 235633 - DNA, 25 bp, Artificial
  Probe
agcgtccaggcgatgcgaacccaga

SEQ ID NO: 235634 - DNA, 25 bp, Artificial
  Probe
ccaggcgatgcgaacccagatgcag

SEQ ID NO: 235635 - DNA, 25 bp, Artificial
  Probe
actaattgtggctgattcacatgtg

SEQ ID NO: 235636 - DNA, 25 bp, Artificial
  Probe
ccagatgcagcagatgcatggcagg

SEQ ID NO: 235637 - DNA, 25 bp, Artificial
  Probe
tgacctggcgcgaattggcatcacc

SEQ ID NO: 235638 - DNA, 25 bp, Artificial
  Probe
gagccagtaccgaacagactcaaaa

SEQ ID NO: 235639 - DNA, 25 bp, Artificial
  Probe
tggggacccacattaacattaaaat

SEQ ID NO: 235640 - DNA, 25 bp, Artificial
  Probe
cctgtctgagccagtaccgaacaga

SEQ ID NO: 235641 - DNA, 25 bp, Artificial
  Probe
gtaccgaacagactcaaaactctcg

SEQ ID NO: 235642 - DNA, 25 bp, Artificial
  Probe
cctggcgcgaattggcatcaccgca

SEQ ID NO: 235643 - DNA, 25 bp, Artificial
  Probe
cgaattggcatcaccgcaatcacgc

SEQ ID NO: 235644 - DNA, 25 bp, Artificial
  Probe
cctgcattgttgtattggatgactt

SEQ ID NO: 235645 - DNA, 25 bp, Artificial
  Probe
cccgcagtgacctggcgcgaattgg

SEQ ID NO: 235646 - DNA, 25 bp, Artificial
  Probe
tgaagttatgtggaccctcaaatat

SEQ ID NO: 235647 - DNA, 25 bp, Artificial
  Probe
tacctgcattgttgtattggatgac

SEQ ID NO: 235648 - DNA, 25 bp, Artificial
  Probe
cttgtactgtactaattgtggctga

SEQ ID NO: 235649 - DNA, 25 bp, Artificial
  Probe
gtgtctgcatgaagcctttaggagg

SEQ ID NO: 235650 - DNA, 25 bp, Artificial
  Probe
cacccgcagtgacctggcgcgaatt

SEQ ID NO: 235651 - DNA, 25 bp, Artificial
  Probe
ccgcaatcacgcaccagaataagat

SEQ ID NO: 235652 - DNA, 25 bp, Artificial
  Probe
tgagcagcgtccaggcgatgcgaac

SEQ ID NO: 235653 - DNA, 25 bp, Artificial
  Probe
caggcgatgcgaacccagatgcagc

SEQ ID NO: 235654 - DNA, 25 bp, Artificial
  Probe
ctttatatagtacctgcattgttgt

SEQ ID NO: 235655 - DNA, 25 bp, Artificial
  Probe
gaggttctccgtaccctccatgact

SEQ ID NO: 235656 - DNA, 25 bp, Artificial
  Probe
tccatgcactttaattgaagaactg

SEQ ID NO: 235657 - DNA, 25 bp, Artificial
  Probe
agacctttatatagtacctgcattg

SEQ ID NO: 235658 - DNA, 25 bp, Artificial
  Probe
ggaggttctccgtaccctccatgac

SEQ ID NO: 235659 - DNA, 25 bp, Artificial
  Probe
gtcctgtgaagttatgtggaccctc

SEQ ID NO: 235660 - DNA, 25 bp, Artificial
  Probe
cgcaccagaataagattttgagcag

SEQ ID NO: 235661 - DNA, 25 bp, Artificial
  Probe
aagattttgagcagcgtccaggcga

SEQ ID NO: 235662 - DNA, 25 bp, Artificial
  Probe
cagatgcatggcaggatggttcctg

SEQ ID NO: 235663 - DNA, 25 bp, Artificial
  Probe
gcgaacccagatgcagcagatgcat

SEQ ID NO: 235664 - DNA, 25 bp, Artificial
  Probe
gaagttatgtggaccctcaaatata

SEQ ID NO: 235665 - DNA, 25 bp, Artificial
  Probe
ggttcctgtctgagccagtaccgaa

SEQ ID NO: 235666 - DNA, 25 bp, Artificial
  Probe
ttttgagcagcgtccaggcgatgcg

SEQ ID NO: 235667 - DNA, 25 bp, Artificial
  Probe
acattaggccaaacccactacatgg

SEQ ID NO: 235668 - DNA, 25 bp, Artificial
  Probe
gcgtccaggcgatgcgaacccagat

SEQ ID NO: 235669 - DNA, 25 bp, Artificial
  Probe
cacctgccttgtactgtactaattg

SEQ ID NO: 235670 - DNA, 25 bp, Artificial
  Probe
gccaaacccactacatggaatgcct

SEQ ID NO: 235671 - DNA, 25 bp, Artificial
  Probe
gccagtaccgaacagactcaaaact

SEQ ID NO: 235672 - DNA, 25 bp, Artificial
  Probe
gtctgagccagtaccgaacagactc

SEQ ID NO: 235673 - DNA, 25 bp, Artificial
  Probe
agatgcagcagatgcatggcaggat

SEQ ID NO: 235674 - DNA, 25 bp, Artificial
  Probe
ctaattgtggctgattcacatgtgt

SEQ ID NO: 235675 - DNA, 25 bp, Artificial
  Probe
taggccaaacccactacatggaatg

SEQ ID NO: 235676 - DNA, 25 bp, Artificial
  Probe
gggactcccgacattggcagctgct

SEQ ID NO: 235677 - DNA, 25 bp, Artificial
  Probe
catcatcatccgatcccagatggag

SEQ ID NO: 235678 - DNA, 25 bp, Artificial
  Probe
actaaagagctctgggatccaagac

SEQ ID NO: 235679 - DNA, 25 bp, Artificial
  Probe
gacctctaccaacaatatggaattg

SEQ ID NO: 235680 - DNA, 25 bp, Artificial
  Probe
aggaactaaagagctctgggatcca

SEQ ID NO: 235681 - DNA, 25 bp, Artificial
  Probe
ggacctctaccaacaatatggaatt

SEQ ID NO: 235682 - DNA, 25 bp, Artificial
  Probe
gagggactcccgacattggcagctg

SEQ ID NO: 235683 - DNA, 25 bp, Artificial
  Probe
ttctggacctctaccaacaatatgg

SEQ ID NO: 235684 - DNA, 25 bp, Artificial
  Probe
gacattggcagctgctgggaaatca

SEQ ID NO: 235685 - DNA, 25 bp, Artificial
  Probe
tttctgcaccagaggggaactgtca

SEQ ID NO: 235686 - DNA, 25 bp, Artificial
  Probe
attggcagctgctgggaaatcatgg

SEQ ID NO: 235687 - DNA, 25 bp, Artificial
  Probe
gaactaaagagctctgggatccaag

SEQ ID NO: 235688 - DNA, 25 bp, Artificial
  Probe
tataactatcttcatgaattccggg

SEQ ID NO: 235689 - DNA, 25 bp, Artificial
  Probe
gctctgggatccaagacgtatttgt

SEQ ID NO: 235690 - DNA, 25 bp, Artificial
  Probe
cccgacattggcagctgctgggaaa

SEQ ID NO: 235691 - DNA, 25 bp, Artificial
  Probe
catccgatcccagatggagggactc

SEQ ID NO: 235692 - DNA, 25 bp, Artificial
  Probe
gagctctgggatccaagacgtattt

SEQ ID NO: 235693 - DNA, 25 bp, Artificial
  Probe
ctatcttcatgaattccgggacaag

SEQ ID NO: 235694 - DNA, 25 bp, Artificial
  Probe
tcatccgatcccagatggagggact

SEQ ID NO: 235695 - DNA, 25 bp, Artificial
  Probe
ggactcccgacattggcagctgctg

SEQ ID NO: 235696 - DNA, 25 bp, Artificial
  Probe
actatcttcatgaattccgggacaa

SEQ ID NO: 235697 - DNA, 25 bp, Artificial
  Probe
cgacattggcagctgctgggaaatc

SEQ ID NO: 235698 - DNA, 25 bp, Artificial
  Probe
ttttctgcaccagaggggaactgtc

SEQ ID NO: 235699 - DNA, 25 bp, Artificial
  Probe
gactcccgacattggcagctgctgg

SEQ ID NO: 235700 - DNA, 25 bp, Artificial
  Probe
aactatcttcatgaattccgggaca

SEQ ID NO: 235701 - DNA, 25 bp, Artificial
  Probe
agagctctgggatccaagacgtatt

SEQ ID NO: 235702 - DNA, 25 bp, Artificial
  Probe
ttcaccacagcaagccatagacagc

SEQ ID NO: 235703 - DNA, 25 bp, Artificial
  Probe
ttgttttctgcaccagaggggaact

SEQ ID NO: 235704 - DNA, 25 bp, Artificial
  Probe
atccgatcccagatggagggactcc

SEQ ID NO: 235705 - DNA, 25 bp, Artificial
  Probe
tccgatcccagatggagggactccc

SEQ ID NO: 235706 - DNA, 25 bp, Artificial
  Probe
tggacctctaccaacaatatggaat

SEQ ID NO: 235707 - DNA, 25 bp, Artificial
  Probe
gggcgatacagaccatcaagcaata

SEQ ID NO: 235708 - DNA, 25 bp, Artificial
  Probe
aagagctctgggatccaagacgtat

SEQ ID NO: 235709 - DNA, 25 bp, Artificial
  Probe
atcatcatccgatcccagatggagg

SEQ ID NO: 235710 - DNA, 25 bp, Artificial
  Probe
cagatggagggactcccgacattgg

SEQ ID NO: 235711 - DNA, 25 bp, Artificial
  Probe
aactaaagagctctgggatccaaga

SEQ ID NO: 235712 - DNA, 25 bp, Artificial
  Probe
cattggcagctgctgggaaatcatg

SEQ ID NO: 235713 - DNA, 25 bp, Artificial
  Probe
cgatcccagatggagggactcccga

SEQ ID NO: 235714 - DNA, 25 bp, Artificial
  Probe
gttttctgcaccagaggggaactgt

SEQ ID NO: 235715 - DNA, 25 bp, Artificial
  Probe
ggcgatacagaccatcaagcaatat

SEQ ID NO: 235716 - DNA, 25 bp, Artificial
  Probe
tgttttctgcaccagaggggaactg

SEQ ID NO: 235717 - DNA, 25 bp, Artificial
  Probe
tttcaccacagcaagccatagacag

SEQ ID NO: 235718 - DNA, 25 bp, Artificial
  Probe
gcgatacagaccatcaagcaatata

SEQ ID NO: 235719 - DNA, 25 bp, Artificial
  Probe
tctgggatccaagacgtatttgttt

SEQ ID NO: 235720 - DNA, 25 bp, Artificial
  Probe
tatcttcatgaattccgggacaagt

SEQ ID NO: 235721 - DNA, 25 bp, Artificial
  Probe
ctggacctctaccaacaatatggaa

SEQ ID NO: 235722 - DNA, 25 bp, Artificial
  Probe
cacttgaatggctctctctttagaa

SEQ ID NO: 235723 - DNA, 25 bp, Artificial
  Probe
gaatggactgtctagaggtctcccg

SEQ ID NO: 235724 - DNA, 25 bp, Artificial
  Probe
gtgactctgacttcaacactgatcc

SEQ ID NO: 235725 - DNA, 25 bp, Artificial
  Probe
agactgtgagcctttcaaatgggag

SEQ ID NO: 235726 - DNA, 25 bp, Artificial
  Probe
atgctgagccctcagaatggactgt

SEQ ID NO: 235727 - DNA, 25 bp, Artificial
  Probe
tcctgaggactctgaagctcgccag

SEQ ID NO: 235728 - DNA, 25 bp, Artificial
  Probe
cactcctgctcctgaggactctgaa

SEQ ID NO: 235729 - DNA, 25 bp, Artificial
  Probe
tgagccctcagaatggactgtctag

SEQ ID NO: 235730 - DNA, 25 bp, Artificial
  Probe
gctcctgaggactctgaagctcgcc

SEQ ID NO: 235731 - DNA, 25 bp, Artificial
  Probe
actcctgctcctgaggactctgaag

SEQ ID NO: 235732 - DNA, 25 bp, Artificial
  Probe
tgaatggctctctctttagaaagag

SEQ ID NO: 235733 - DNA, 25 bp, Artificial
  Probe
ctcctgaggactctgaagctcgcca

SEQ ID NO: 235734 - DNA, 25 bp, Artificial
  Probe
ctcagaatggactgtctagaggtct

SEQ ID NO: 235735 - DNA, 25 bp, Artificial
  Probe
cctgctcctgaggactctgaagctc

SEQ ID NO: 235736 - DNA, 25 bp, Artificial
  Probe
tgctcctgaggactctgaagctcgc

SEQ ID NO: 235737 - DNA, 25 bp, Artificial
  Probe
ggatgtgactctgacttcaacactg

SEQ ID NO: 235738 - DNA, 25 bp, Artificial
  Probe
ttgaatggctctctctttagaaaga

SEQ ID NO: 235739 - DNA, 25 bp, Artificial
  Probe
actgtgagcctttcaaatgggagga

SEQ ID NO: 235740 - DNA, 25 bp, Artificial
  Probe
ggctctctctttagaaagagacctc

SEQ ID NO: 235741 - DNA, 25 bp, Artificial
  Probe
tgctgagccctcagaatggactgtc

SEQ ID NO: 235742 - DNA, 25 bp, Artificial
  Probe
aatggctctctctttagaaagagac

SEQ ID NO: 235743 - DNA, 25 bp, Artificial
  Probe
tcctgctcctgaggactctgaagct

SEQ ID NO: 235744 - DNA, 25 bp, Artificial
  Probe
tggctctctctttagaaagagacct

SEQ ID NO: 235745 - DNA, 25 bp, Artificial
  Probe
atggctctctctttagaaagagacc

SEQ ID NO: 235746 - DNA, 25 bp, Artificial
  Probe
gagccctcagaatggactgtctaga

SEQ ID NO: 235747 - DNA, 25 bp, Artificial
  Probe
ctgtgagcctttcaaatgggaggat

SEQ ID NO: 235748 - DNA, 25 bp, Artificial
  Probe
acttgaatggctctctctttagaaa

SEQ ID NO: 235749 - DNA, 25 bp, Artificial
  Probe
cttgaatggctctctctttagaaag

SEQ ID NO: 235750 - DNA, 25 bp, Artificial
  Probe
ctgctcctgaggactctgaagctcg

SEQ ID NO: 235751 - DNA, 25 bp, Artificial
  Probe
agccctcagaatggactgtctagag

SEQ ID NO: 235752 - DNA, 25 bp, Artificial
  Probe
aggatgtgactctgacttcaacact

SEQ ID NO: 235753 - DNA, 25 bp, Artificial
  Probe
gactgtgagcctttcaaatgggagg

SEQ ID NO: 235754 - DNA, 25 bp, Artificial
  Probe
gaatggctctctctttagaaagaga

SEQ ID NO: 235755 - DNA, 25 bp, Artificial
  Probe
cagaatggactgtctagaggtctcc

SEQ ID NO: 235756 - DNA, 25 bp, Artificial
  Probe
ctttcaaatgggaggatgtgactct

SEQ ID NO: 235757 - DNA, 25 bp, Artificial
  Probe
gctgagccctcagaatggactgtct

SEQ ID NO: 235758 - DNA, 25 bp, Artificial
  Probe
aatggactgtctagaggtctcccgc

SEQ ID NO: 235759 - DNA, 25 bp, Artificial
  Probe
tcactcctgctcctgaggactctga

SEQ ID NO: 235760 - DNA, 25 bp, Artificial
  Probe
tcagaatggactgtctagaggtctc

SEQ ID NO: 235761 - DNA, 25 bp, Artificial
  Probe
tgtgactctgacttcaacactgatc

SEQ ID NO: 235762 - DNA, 25 bp, Artificial
  Probe
agaatggactgtctagaggtctccc

SEQ ID NO: 235763 - DNA, 25 bp, Artificial
  Probe
ctgagccctcagaatggactgtcta

SEQ ID NO: 235764 - DNA, 25 bp, Artificial
  Probe
ctcctgctcctgaggactctgaagc

SEQ ID NO: 235765 - DNA, 25 bp, Artificial
  Probe
gatgtgactctgacttcaacactga

SEQ ID NO: 235766 - DNA, 25 bp, Artificial
  Probe
catcattggctttggcggtgattcc

SEQ ID NO: 235767 - DNA, 25 bp, Artificial
  Probe
gcacccagcaccagtctctgttttg

SEQ ID NO: 235768 - DNA, 25 bp, Artificial
  Probe
gtaagccttagcactggcaatggct

SEQ ID NO: 235769 - DNA, 25 bp, Artificial
  Probe
ccagttctattgttggctttagtgg

SEQ ID NO: 235770 - DNA, 25 bp, Artificial
  Probe
accggctccagctttagtaatggac

SEQ ID NO: 235771 - DNA, 25 bp, Artificial
  Probe
tgaataccatcattggctttggcgg

SEQ ID NO: 235772 - DNA, 25 bp, Artificial
  Probe
ctttagtaatggacccagttctatt

SEQ ID NO: 235773 - DNA, 25 bp, Artificial
  Probe
gccagcttcgacagaggactgaata

SEQ ID NO: 235774 - DNA, 25 bp, Artificial
  Probe
gcaccaactcctgctttagtggtgc

SEQ ID NO: 235775 - DNA, 25 bp, Artificial
  Probe
caggctttagtgtaagccttagcac

SEQ ID NO: 235776 - DNA, 25 bp, Artificial
  Probe
tggcagtgggcctaatgccagcttc

SEQ ID NO: 235777 - DNA, 25 bp, Artificial
  Probe
accatcattggctttggcggtgatt

SEQ ID NO: 235778 - DNA, 25 bp, Artificial
  Probe
caacaccggctccagctttagtaat

SEQ ID NO: 235779 - DNA, 25 bp, Artificial
  Probe
tttggcagtgcatctaacaccaacc

SEQ ID NO: 235780 - DNA, 25 bp, Artificial
  Probe
ctcctgctttagtggtgcaggcttt

SEQ ID NO: 235781 - DNA, 25 bp, Artificial
  Probe
ctgttttggcagtgcatctaacacc

SEQ ID NO: 235782 - DNA, 25 bp, Artificial
  Probe
ggagcacccagcaccagtctctgtt

SEQ ID NO: 235783 - DNA, 25 bp, Artificial
  Probe
caacaccagtagtggctttactggt

SEQ ID NO: 235784 - DNA, 25 bp, Artificial
  Probe
acccagcaccagtctctgttttggc

SEQ ID NO: 235785 - DNA, 25 bp, Artificial
  Probe
ggctttagtgtaagccttagcactg

SEQ ID NO: 235786 - DNA, 25 bp, Artificial
  Probe
gaataccatcattggctttggcggt

SEQ ID NO: 235787 - DNA, 25 bp, Artificial
  Probe
gggcctaatgccagcttcgacagag

SEQ ID NO: 235788 - DNA, 25 bp, Artificial
  Probe
ttttggtggagcacccagcaccagt

SEQ ID NO: 235789 - DNA, 25 bp, Artificial
  Probe
gtgcaggctttagtgtaagccttag

SEQ ID NO: 235790 - DNA, 25 bp, Artificial
  Probe
gcaccagtctctgttttggcagtgc

SEQ ID NO: 235791 - DNA, 25 bp, Artificial
  Probe
tagcactggcaatggctttggcagt

SEQ ID NO: 235792 - DNA, 25 bp, Artificial
  Probe
aggactgaataccatcattggcttt

SEQ ID NO: 235793 - DNA, 25 bp, Artificial
  Probe
agtaatggacccagttctattgttg

SEQ ID NO: 235794 - DNA, 25 bp, Artificial
  Probe
tccagctttagtaatggacccagtt

SEQ ID NO: 235795 - DNA, 25 bp, Artificial
  Probe
tccagcaccaactcctgctttagtg

SEQ ID NO: 235796 - DNA, 25 bp, Artificial
  Probe
agcaccagtctctgttttggcagtg

SEQ ID NO: 235797 - DNA, 25 bp, Artificial
  Probe
tggcagtgcatctaacaccaaccta

SEQ ID NO: 235798 - DNA, 25 bp, Artificial
  Probe
agctttagtaatggacccagttcta

SEQ ID NO: 235799 - DNA, 25 bp, Artificial
  Probe
ttggaggctcttccagcaccaactc

SEQ ID NO: 235800 - DNA, 25 bp, Artificial
  Probe
tagtggtggaccaagcaccggtact

SEQ ID NO: 235801 - DNA, 25 bp, Artificial
  Probe
tggctttggcggtgattccaacacc

SEQ ID NO: 235802 - DNA, 25 bp, Artificial
  Probe
aatggctttggcagtgggcctaatg

SEQ ID NO: 235803 - DNA, 25 bp, Artificial
  Probe
gctttggaggctcttccagcaccaa

SEQ ID NO: 235804 - DNA, 25 bp, Artificial
  Probe
tagtgtaagccttagcactggcaat

SEQ ID NO: 235805 - DNA, 25 bp, Artificial
  Probe
gctttactggtgaacccaacaccgg

SEQ ID NO: 235806 - DNA, 25 bp, Artificial
  Probe
agtggtgcaggctttagtgtaagcc

SEQ ID NO: 235807 - DNA, 25 bp, Artificial
  Probe
cttagcactggcaatggctttggca

SEQ ID NO: 235808 - DNA, 25 bp, Artificial
  Probe
tggagcacccagcaccagtctctgt

SEQ ID NO: 235809 - DNA, 25 bp, Artificial
  Probe
cagtgggcctaatgccagcttcgac

SEQ ID NO: 235810 - DNA, 25 bp, Artificial
  Probe
accagtagtggctttactggtgaac

SEQ ID NO: 235811 - DNA, 25 bp, Artificial
  Probe
cttcgacagaggactgaataccatc

SEQ ID NO: 235812 - DNA, 25 bp, Artificial
  Probe
gggcccaggatgtccaggataagtt

SEQ ID NO: 235813 - DNA, 25 bp, Artificial
  Probe
gatggtccagatggccgttctgtgt

SEQ ID NO: 235814 - DNA, 25 bp, Artificial
  Probe
ttttcttccattctctgccgaggcc

SEQ ID NO: 235815 - DNA, 25 bp, Artificial
  Probe
tgtggggcccaggatgtccaggata

SEQ ID NO: 235816 - DNA, 25 bp, Artificial
  Probe
tcaacagcagctgtggctgtgatgg

SEQ ID NO: 235817 - DNA, 25 bp, Artificial
  Probe
gatggccgttctgtgtggggcccag

SEQ ID NO: 235818 - DNA, 25 bp, Artificial
  Probe
gtgatggtccagatggccgttctgt

SEQ ID NO: 235819 - DNA, 25 bp, Artificial
  Probe
acagcagctgtggctgtgatggtcc

SEQ ID NO: 235820 - DNA, 25 bp, Artificial
  Probe
ccaggatgtccaggataagttttct

SEQ ID NO: 235821 - DNA, 25 bp, Artificial
  Probe
ggcccaggatgtccaggataagttt

SEQ ID NO: 235822 - DNA, 25 bp, Artificial
  Probe
aagttttcttccattctctgccgag

SEQ ID NO: 235823 - DNA, 25 bp, Artificial
  Probe
agctgtggctgtgatggtccagatg

SEQ ID NO: 235824 - DNA, 25 bp, Artificial
  Probe
cccttcaacagcagctgtggctgtg

SEQ ID NO: 235825 - DNA, 25 bp, Artificial
  Probe
ttctgtgtggggcccaggatgtcca

SEQ ID NO: 235826 - DNA, 25 bp, Artificial
  Probe
ctgtgatggtccagatggccgttct

SEQ ID NO: 235827 - DNA, 25 bp, Artificial
  Probe
ggataagttttcttccattctctgc

SEQ ID NO: 235828 - DNA, 25 bp, Artificial
  Probe
ggggcccaggatgtccaggataagt

SEQ ID NO: 235829 - DNA, 25 bp, Artificial
  Probe
tgccgaggccagagcgatcccactg

SEQ ID NO: 235830 - DNA, 25 bp, Artificial
  Probe
tggccgttctgtgtggggcccagga

SEQ ID NO: 235831 - DNA, 25 bp, Artificial
  Probe
ttcaacagcagctgtggctgtgatg

SEQ ID NO: 235832 - DNA, 25 bp, Artificial
  Probe
taagttttcttccattctctgccga

SEQ ID NO: 235833 - DNA, 25 bp, Artificial
  Probe
gttttcttccattctctgccgaggc

SEQ ID NO: 235834 - DNA, 25 bp, Artificial
  Probe
gcccaggatgtccaggataagtttt

SEQ ID NO: 235835 - DNA, 25 bp, Artificial
  Probe
tgatggtccagatggccgttctgtg

SEQ ID NO: 235836 - DNA, 25 bp, Artificial
  Probe
gataagttttcttccattctctgcc

SEQ ID NO: 235837 - DNA, 25 bp, Artificial
  Probe
gcagctgtggctgtgatggtccaga

SEQ ID NO: 235838 - DNA, 25 bp, Artificial
  Probe
ttccattctctgccgaggccagagc

SEQ ID NO: 235839 - DNA, 25 bp, Artificial
  Probe
gtggctgtgatggtccagatggccg

SEQ ID NO: 235840 - DNA, 25 bp, Artificial
  Probe
cttcaacagcagctgtggctgtgat

SEQ ID NO: 235841 - DNA, 25 bp, Artificial
  Probe
ggcccttcaacagcagctgtggctg

SEQ ID NO: 235842 - DNA, 25 bp, Artificial
  Probe
cccaggatgtccaggataagttttc

SEQ ID NO: 235843 - DNA, 25 bp, Artificial
  Probe
ctgtgtggggcccaggatgtccagg

SEQ ID NO: 235844 - DNA, 25 bp, Artificial
  Probe
ccttcaacagcagctgtggctgtga

SEQ ID NO: 235845 - DNA, 25 bp, Artificial
  Probe
tggtccagatggccgttctgtgtgg

SEQ ID NO: 235846 - DNA, 25 bp, Artificial
  Probe
ccgttctgtgtggggcccaggatgt

SEQ ID NO: 235847 - DNA, 25 bp, Artificial
  Probe
agttttcttccattctctgccgagg

SEQ ID NO: 235848 - DNA, 25 bp, Artificial
  Probe
cagctgtggctgtgatggtccagat

SEQ ID NO: 235849 - DNA, 25 bp, Artificial
  Probe
aggataagttttcttccattctctg

SEQ ID NO: 235850 - DNA, 25 bp, Artificial
  Probe
cgttctgtgtggggcccaggatgtc

SEQ ID NO: 235851 - DNA, 25 bp, Artificial
  Probe
gcccttcaacagcagctgtggctgt

SEQ ID NO: 235852 - DNA, 25 bp, Artificial
  Probe
tggcccttcaacagcagctgtggct

SEQ ID NO: 235853 - DNA, 25 bp, Artificial
  Probe
caacagcagctgtggctgtgatggt

SEQ ID NO: 235854 - DNA, 25 bp, Artificial
  Probe
gctgtgatggtccagatggccgttc

SEQ ID NO: 235855 - DNA, 25 bp, Artificial
  Probe
ggctgtgatggtccagatggccgtt

SEQ ID NO: 235856 - DNA, 25 bp, Artificial
  Probe
tgtgatggtccagatggccgttctg

SEQ ID NO: 235857 - DNA, 25 bp, Artificial
  Probe
ttctctgccgaggccagagcgatcc

SEQ ID NO: 235858 - DNA, 25 bp, Artificial
  Probe
tagcacctgggcttttctctcagct

SEQ ID NO: 235859 - DNA, 25 bp, Artificial
  Probe
ttccttagagcagctgagtactcca

SEQ ID NO: 235860 - DNA, 25 bp, Artificial
  Probe
gtttgaagtcattcccacagagagg

SEQ ID NO: 235861 - DNA, 25 bp, Artificial
  Probe
aggtctttcctcattgctgagggac

SEQ ID NO: 235862 - DNA, 25 bp, Artificial
  Probe
ttcatactcaaaaggggaagctaag

SEQ ID NO: 235863 - DNA, 25 bp, Artificial
  Probe
tcttaaaacaactggttatccagtg

SEQ ID NO: 235864 - DNA, 25 bp, Artificial
  Probe
agtccaatcagaagccgacagaagg

SEQ ID NO: 235865 - DNA, 25 bp, Artificial
  Probe
tcagcttatccctcacagcagggag

SEQ ID NO: 235866 - DNA, 25 bp, Artificial
  Probe
aagccgacagaaggtgattttctct

SEQ ID NO: 235867 - DNA, 25 bp, Artificial
  Probe
cagtgtccccaggaacatgtccctt

SEQ ID NO: 235868 - DNA, 25 bp, Artificial
  Probe
atccctcacagcagggagttgggga

SEQ ID NO: 235869 - DNA, 25 bp, Artificial
  Probe
agactcctcaaatgacaacaccagg

SEQ ID NO: 235870 - DNA, 25 bp, Artificial
  Probe
cagtgtgaaagttccttctgtttat

SEQ ID NO: 235871 - DNA, 25 bp, Artificial
  Probe
ctcaaatgacaacaccaggatcatg

SEQ ID NO: 235872 - DNA, 25 bp, Artificial
  Probe
gactcctcaaatgacaacaccagga

SEQ ID NO: 235873 - DNA, 25 bp, Artificial
  Probe
aatcagaagccgacagaaggtgatt

SEQ ID NO: 235874 - DNA, 25 bp, Artificial
  Probe
cctgtgccagttgaaaatgtccaat

SEQ ID NO: 235875 - DNA, 25 bp, Artificial
  Probe
aactcagaagcctttgtaaagcttc

SEQ ID NO: 235876 - DNA, 25 bp, Artificial
  Probe
agcctacaaggaagtactgagaatc

SEQ ID NO: 235877 - DNA, 25 bp, Artificial
  Probe
tgtttggcagtttgaagtcattccc

SEQ ID NO: 235878 - DNA, 25 bp, Artificial
  Probe
gaaatatgccacagcccagtggagt

SEQ ID NO: 235879 - DNA, 25 bp, Artificial
  Probe
cctttagaaatatgccacagcccag

SEQ ID NO: 235880 - DNA, 25 bp, Artificial
  Probe
agaagcctttgtaaagcttcacaga

SEQ ID NO: 235881 - DNA, 25 bp, Artificial
  Probe
tttttgaaagctaaagcctacaagg

SEQ ID NO: 235882 - DNA, 25 bp, Artificial
  Probe
tgaaccacagtgtgaaagttccttc

SEQ ID NO: 235883 - DNA, 25 bp, Artificial
  Probe
tcctcattgctgagggacctgtttt

SEQ ID NO: 235884 - DNA, 25 bp, Artificial
  Probe
agacatagcacctgggcttttctct

SEQ ID NO: 235885 - DNA, 25 bp, Artificial
  Probe
gtgtttggcagtttgaagtcattcc

SEQ ID NO: 235886 - DNA, 25 bp, Artificial
  Probe
gggcttttctctcagcttatccctc

SEQ ID NO: 235887 - DNA, 25 bp, Artificial
  Probe
cagtttgaagtcattcccacagaga

SEQ ID NO: 235888 - DNA, 25 bp, Artificial
  Probe
ggtgattttctcttaaaacaactgg

SEQ ID NO: 235889 - DNA, 25 bp, Artificial
  Probe
aaatgtccaattgtatctgtgaacc

SEQ ID NO: 235890 - DNA, 25 bp, Artificial
  Probe
caggatcatgggtttgctacatgaa

SEQ ID NO: 235891 - DNA, 25 bp, Artificial
  Probe
ggtgttgtctcatcctctttcatac

SEQ ID NO: 235892 - DNA, 25 bp, Artificial
  Probe
tggttatccagtgtccccaggaaca

SEQ ID NO: 235893 - DNA, 25 bp, Artificial
  Probe
gtgattttctcttaaaacaactggt

SEQ ID NO: 235894 - DNA, 25 bp, Artificial
  Probe
agcctttgtaaagcttcacagactc

SEQ ID NO: 235895 - DNA, 25 bp, Artificial
  Probe
aagctaaagcctacaaggaagtact

SEQ ID NO: 235896 - DNA, 25 bp, Artificial
  Probe
agaatcaggtgttgtctcatcctct

SEQ ID NO: 235897 - DNA, 25 bp, Artificial
  Probe
gtactgagaatcaggtgttgtctca

SEQ ID NO: 235898 - DNA, 25 bp, Artificial
  Probe
acaccaggatcatgggtttgctaca

SEQ ID NO: 235899 - DNA, 25 bp, Artificial
  Probe
ttcctcattgctgagggacctgttt

SEQ ID NO: 235900 - DNA, 25 bp, Artificial
  Probe
catcctctttcatactcaaaagggg

SEQ ID NO: 235901 - DNA, 25 bp, Artificial
  Probe
ttaaaacaactggttatccagtgtc

SEQ ID NO: 235902 - DNA, 25 bp, Artificial
  Probe
acaactggttatccagtgtccccag

SEQ ID NO: 235903 - DNA, 25 bp, Artificial
  Probe
tagaaatatgccacagcccagtgga

SEQ ID NO: 235904 - DNA, 25 bp, Artificial
  Probe
aagtctattgcatctgcagacatgg

SEQ ID NO: 235905 - DNA, 25 bp, Artificial
  Probe
agtgctcacagactttctccactga

SEQ ID NO: 235906 - DNA, 25 bp, Artificial
  Probe
tgaccgctcaaaccaagaagcaagg

SEQ ID NO: 235907 - DNA, 25 bp, Artificial
  Probe
ctattgcatctgcagacatggattt

SEQ ID NO: 235908 - DNA, 25 bp, Artificial
  Probe
tttaaagtcctgcttgcccattggt

SEQ ID NO: 235909 - DNA, 25 bp, Artificial
  Probe
gtgctcacagactttctccactgac

SEQ ID NO: 235910 - DNA, 25 bp, Artificial
  Probe
aagcaaggcggcatcaccagtgaac

SEQ ID NO: 235911 - DNA, 25 bp, Artificial
  Probe
taaagtcctgcttgcccattggtgt

SEQ ID NO: 235912 - DNA, 25 bp, Artificial
  Probe
tctcaagtctattgcatctgcagac

SEQ ID NO: 235913 - DNA, 25 bp, Artificial
  Probe
tattgcatctgcagacatggatttc

SEQ ID NO: 235914 - DNA, 25 bp, Artificial
  Probe
ctcaaaccaagaagcaaggcggcat

SEQ ID NO: 235915 - DNA, 25 bp, Artificial
  Probe
agtctattgcatctgcagacatgga

SEQ ID NO: 235916 - DNA, 25 bp, Artificial
  Probe
ttcctgaccgctcaaaccaagaagc

SEQ ID NO: 235917 - DNA, 25 bp, Artificial
  Probe
ctgacctttttaaagtcctgcttgc

SEQ ID NO: 235918 - DNA, 25 bp, Artificial
  Probe
tcaagtctattgcatctgcagacat

SEQ ID NO: 235919 - DNA, 25 bp, Artificial
  Probe
tctattgcatctgcagacatggatt

SEQ ID NO: 235920 - DNA, 25 bp, Artificial
  Probe
aagtgctcacagactttctccactg

SEQ ID NO: 235921 - DNA, 25 bp, Artificial
  Probe
actgacctttttaaagtcctgcttg

SEQ ID NO: 235922 - DNA, 25 bp, Artificial
  Probe
ttctcaagtctattgcatctgcaga

SEQ ID NO: 235923 - DNA, 25 bp, Artificial
  Probe
ttaaagtcctgcttgcccattggtg

SEQ ID NO: 235924 - DNA, 25 bp, Artificial
  Probe
caaaccaagaagcaaggcggcatca

SEQ ID NO: 235925 - DNA, 25 bp, Artificial
  Probe
tcctgaccgctcaaaccaagaagca

SEQ ID NO: 235926 - DNA, 25 bp, Artificial
  Probe
tttttaaagtcctgcttgcccattg

SEQ ID NO: 235927 - DNA, 25 bp, Artificial
  Probe
accgctcaaaccaagaagcaaggcg

SEQ ID NO: 235928 - DNA, 25 bp, Artificial
  Probe
ccgctcaaaccaagaagcaaggcgg

SEQ ID NO: 235929 - DNA, 25 bp, Artificial
  Probe
cctgaccgctcaaaccaagaagcaa

SEQ ID NO: 235930 - DNA, 25 bp, Artificial
  Probe
tcctgcttgcccattggtgttacaa

SEQ ID NO: 235931 - DNA, 25 bp, Artificial
  Probe
ctcaagtctattgcatctgcagaca

SEQ ID NO: 235932 - DNA, 25 bp, Artificial
  Probe
gaccgctcaaaccaagaagcaaggc

SEQ ID NO: 235933 - DNA, 25 bp, Artificial
  Probe
ctgaccgctcaaaccaagaagcaag

SEQ ID NO: 235934 - DNA, 25 bp, Artificial
  Probe
tcaaaccaagaagcaaggcggcatc

SEQ ID NO: 235935 - DNA, 25 bp, Artificial
  Probe
gtctattgcatctgcagacatggat

SEQ ID NO: 235936 - DNA, 25 bp, Artificial
  Probe
gcaaggcggcatcaccagtgaacaa

SEQ ID NO: 235937 - DNA, 25 bp, Artificial
  Probe
tgcttgcccattggtgttacaaaaa

SEQ ID NO: 235938 - DNA, 25 bp, Artificial
  Probe
aaaccaagaagcaaggcggcatcac

SEQ ID NO: 235939 - DNA, 25 bp, Artificial
  Probe
attcctgaccgctcaaaccaagaag

SEQ ID NO: 235940 - DNA, 25 bp, Artificial
  Probe
ctgcttgcccattggtgttacaaaa

SEQ ID NO: 235941 - DNA, 25 bp, Artificial
  Probe
tgacctttttaaagtcctgcttgcc

SEQ ID NO: 235942 - DNA, 25 bp, Artificial
  Probe
caaggcggcatcaccagtgaacaag

SEQ ID NO: 235943 - DNA, 25 bp, Artificial
  Probe
agcaaggcggcatcaccagtgaaca

SEQ ID NO: 235944 - DNA, 25 bp, Artificial
  Probe
cctgcttgcccattggtgttacaaa

SEQ ID NO: 235945 - DNA, 25 bp, Artificial
  Probe
cgctcaaaccaagaagcaaggcggc

SEQ ID NO: 235946 - DNA, 25 bp, Artificial
  Probe
gaaagtgctcacagactttctccac

SEQ ID NO: 235947 - DNA, 25 bp, Artificial
  Probe
gctcaaaccaagaagcaaggcggca

SEQ ID NO: 235948 - DNA, 25 bp, Artificial
  Probe
aaccaagaagcaaggcggcatcacc

SEQ ID NO: 235949 - DNA, 25 bp, Artificial
  Probe
ttttaaagtcctgcttgcccattgg

SEQ ID NO: 235950 - DNA, 25 bp, Artificial
  Probe
gccactggagcctcatcttttgctt

SEQ ID NO: 235951 - DNA, 25 bp, Artificial
  Probe
ctggagcctcatcttttgctttgta

SEQ ID NO: 235952 - DNA, 25 bp, Artificial
  Probe
gcggcagccactggagcctcatctt

SEQ ID NO: 235953 - DNA, 25 bp, Artificial
  Probe
gcacaaactcgattttgatgccagt

SEQ ID NO: 235954 - DNA, 25 bp, Artificial
  Probe
gcgaccagatgattactcgctgctc

SEQ ID NO: 235955 - DNA, 25 bp, Artificial
  Probe
ccagatgattactcgctgctccttt

SEQ ID NO: 235956 - DNA, 25 bp, Artificial
  Probe
tataagcgcggcagccactggagcc

SEQ ID NO: 235957 - DNA, 25 bp, Artificial
  Probe
agcttttaaccatcaaccaggaatg

SEQ ID NO: 235958 - DNA, 25 bp, Artificial
  Probe
cagagagtccggagagcgaccagat

SEQ ID NO: 235959 - DNA, 25 bp, Artificial
  Probe
catttttagggtttgcctgcattct

SEQ ID NO: 235960 - DNA, 25 bp, Artificial
  Probe
ctaaagtcatcatgggcattttcca

SEQ ID NO: 235961 - DNA, 25 bp, Artificial
  Probe
gtcatcatgggcattttccagagat

SEQ ID NO: 235962 - DNA, 25 bp, Artificial
  Probe
gcttctgctacatttttagggtttg

SEQ ID NO: 235963 - DNA, 25 bp, Artificial
  Probe
caaccaggaatggaagcctgttgag

SEQ ID NO: 235964 - DNA, 25 bp, Artificial
  Probe
gtggatcctactcaaccccaaaagc

SEQ ID NO: 235965 - DNA, 25 bp, Artificial
  Probe
agcctcatcttttgctttgtatgct

SEQ ID NO: 235966 - DNA, 25 bp, Artificial
  Probe
tctttttatgggaacaagcacattt

SEQ ID NO: 235967 - DNA, 25 bp, Artificial
  Probe
tcatgggcattttccagagattgat

SEQ ID NO: 235968 - DNA, 25 bp, Artificial
  Probe
ttttaaccatcaaccaggaatggaa

SEQ ID NO: 235969 - DNA, 25 bp, Artificial
  Probe
ggtggatcctactcaaccccaaaag

SEQ ID NO: 235970 - DNA, 25 bp, Artificial
  Probe
gaccagatgattactcgctgctcct

SEQ ID NO: 235971 - DNA, 25 bp, Artificial
  Probe
ggggcatctttttatgggaacaagc

SEQ ID NO: 235972 - DNA, 25 bp, Artificial
  Probe
taaggaactcattcctttggcgttt

SEQ ID NO: 235973 - DNA, 25 bp, Artificial
  Probe
catgggcattttccagagattgatg

SEQ ID NO: 235974 - DNA, 25 bp, Artificial
  Probe
catcaaccaggaatggaagcctgtt

SEQ ID NO: 235975 - DNA, 25 bp, Artificial
  Probe
aatggaagcctgttgaggagctgca

SEQ ID NO: 235976 - DNA, 25 bp, Artificial
  Probe
caaactcgattttgatgccagtgtg

SEQ ID NO: 235977 - DNA, 25 bp, Artificial
  Probe
agcgcggcagccactggagcctcat

SEQ ID NO: 235978 - DNA, 25 bp, Artificial
  Probe
tctgctacatttttagggtttgcct

SEQ ID NO: 235979 - DNA, 25 bp, Artificial
  Probe
ttagggtttgcctgcattctttgga

SEQ ID NO: 235980 - DNA, 25 bp, Artificial
  Probe
gtccggagagcgaccagatgattac

SEQ ID NO: 235981 - DNA, 25 bp, Artificial
  Probe
ggcatctttttatgggaacaagcac

SEQ ID NO: 235982 - DNA, 25 bp, Artificial
  Probe
agagcgaccagatgattactcgctg

SEQ ID NO: 235983 - DNA, 25 bp, Artificial
  Probe
tagggtttgcctgcattctttggat

SEQ ID NO: 235984 - DNA, 25 bp, Artificial
  Probe
tccggagagcgaccagatgattact

SEQ ID NO: 235985 - DNA, 25 bp, Artificial
  Probe
gagcctcatcttttgctttgtatgc

SEQ ID NO: 235986 - DNA, 25 bp, Artificial
  Probe
tgctacatttttagggtttgcctgc

SEQ ID NO: 235987 - DNA, 25 bp, Artificial
  Probe
actcgattttgatgccagtgtgcgg

SEQ ID NO: 235988 - DNA, 25 bp, Artificial
  Probe
ataaggaactcattcctttggcgtt

SEQ ID NO: 235989 - DNA, 25 bp, Artificial
  Probe
cctgttgaggagctgcagagagtcc

SEQ ID NO: 235990 - DNA, 25 bp, Artificial
  Probe
ggcagccactggagcctcatctttt

SEQ ID NO: 235991 - DNA, 25 bp, Artificial
  Probe
aaccaggaatggaagcctgttgagg

SEQ ID NO: 235992 - DNA, 25 bp, Artificial
  Probe
caaagaacactctatgaatctagtg

SEQ ID NO: 235993 - DNA, 25 bp, Artificial
  Probe
cacaaactcgattttgatgccagtg

SEQ ID NO: 235994 - DNA, 25 bp, Artificial
  Probe
actaaagtcatcatgggcattttcc

SEQ ID NO: 235995 - DNA, 25 bp, Artificial
  Probe
acatttttagggtttgcctgcattc

SEQ ID NO: 235996 - DNA, 25 bp, Artificial
  Probe
agtatctctggtgcatgctaacctc

SEQ ID NO: 235997 - DNA, 25 bp, Artificial
  Probe
ggtgcatgctaacctccagacttcc

SEQ ID NO: 235998 - DNA, 25 bp, Artificial
  Probe
gctgcctgttaacaagtatctctgg

SEQ ID NO: 235999 - DNA, 25 bp, Artificial
  Probe
tggaacagatttctgtctgtctgac

SEQ ID NO: 236000 - DNA, 25 bp, Artificial
  Probe
ctgcctgttaacaagtatctctggt

SEQ ID NO: 236001 - DNA, 25 bp, Artificial
  Probe
tggtgcatgctaacctccagacttc

SEQ ID NO: 236002 - DNA, 25 bp, Artificial
  Probe
gttaacaagtatctctggtgcatgc

SEQ ID NO: 236003 - DNA, 25 bp, Artificial
  Probe
tgcctgttaacaagtatctctggtg

SEQ ID NO: 236004 - DNA, 25 bp, Artificial
  Probe
tctctggtgcatgctaacctccaga

SEQ ID NO: 236005 - DNA, 25 bp, Artificial
  Probe
tatctctggtgcatgctaacctcca

SEQ ID NO: 236006 - DNA, 25 bp, Artificial
  Probe
agacttccccagttcattccaggct

SEQ ID NO: 236007 - DNA, 25 bp, Artificial
  Probe
agatgaggcatcaggctgcctgtta

SEQ ID NO: 236008 - DNA, 25 bp, Artificial
  Probe
gtctatatttgatcttcagcagggg

SEQ ID NO: 236009 - DNA, 25 bp, Artificial
  Probe
ggaacagatttctgtctgtctgaca

SEQ ID NO: 236010 - DNA, 25 bp, Artificial
  Probe
gaggcatcaggctgcctgttaacaa

SEQ ID NO: 236011 - DNA, 25 bp, Artificial
  Probe
caggctgcctgttaacaagtatctc

SEQ ID NO: 236012 - DNA, 25 bp, Artificial
  Probe
acaagtatctctggtgcatgctaac

SEQ ID NO: 236013 - DNA, 25 bp, Artificial
  Probe
tctggtgcatgctaacctccagact

SEQ ID NO: 236014 - DNA, 25 bp, Artificial
  Probe
atctctggtgcatgctaacctccag

SEQ ID NO: 236015 - DNA, 25 bp, Artificial
  Probe
ggctgcctgttaacaagtatctctg

SEQ ID NO: 236016 - DNA, 25 bp, Artificial
  Probe
ctggtgcatgctaacctccagactt

SEQ ID NO: 236017 - DNA, 25 bp, Artificial
  Probe
gtagatgaggcatcaggctgcctgt

SEQ ID NO: 236018 - DNA, 25 bp, Artificial
  Probe
gcctgttaacaagtatctctggtgc

SEQ ID NO: 236019 - DNA, 25 bp, Artificial
  Probe
gtatctctggtgcatgctaacctcc

SEQ ID NO: 236020 - DNA, 25 bp, Artificial
  Probe
catcaggctgcctgttaacaagtat

SEQ ID NO: 236021 - DNA, 25 bp, Artificial
  Probe
gacttccccagttcattccaggctg

SEQ ID NO: 236022 - DNA, 25 bp, Artificial
  Probe
tgtctatatttgatcttcagcaggg

SEQ ID NO: 236023 - DNA, 25 bp, Artificial
  Probe
ctgtctatatttgatcttcagcagg

SEQ ID NO: 236024 - DNA, 25 bp, Artificial
  Probe
cctgttaacaagtatctctggtgca

SEQ ID NO: 236025 - DNA, 25 bp, Artificial
  Probe
atcaggctgcctgttaacaagtatc

SEQ ID NO: 236026 - DNA, 25 bp, Artificial
  Probe
tatatttgatcttcagcaggggctg

SEQ ID NO: 236027 - DNA, 25 bp, Artificial
  Probe
tagatgaggcatcaggctgcctgtt

SEQ ID NO: 236028 - DNA, 25 bp, Artificial
  Probe
caagtatctctggtgcatgctaacc

SEQ ID NO: 236029 - DNA, 25 bp, Artificial
  Probe
tctatatttgatcttcagcaggggc

SEQ ID NO: 236030 - DNA, 25 bp, Artificial
  Probe
gatgaggcatcaggctgcctgttaa

SEQ ID NO: 236031 - DNA, 25 bp, Artificial
  Probe
tgttaacaagtatctctggtgcatg

SEQ ID NO: 236032 - DNA, 25 bp, Artificial
  Probe
gctgtctatatttgatcttcagcag

SEQ ID NO: 236033 - DNA, 25 bp, Artificial
  Probe
aggctgcctgttaacaagtatctct

SEQ ID NO: 236034 - DNA, 25 bp, Artificial
  Probe
atcttcagcaggggctggattctgg

SEQ ID NO: 236035 - DNA, 25 bp, Artificial
  Probe
aagtatctctggtgcatgctaacct

SEQ ID NO: 236036 - DNA, 25 bp, Artificial
  Probe
ttaacaagtatctctggtgcatgct

SEQ ID NO: 236037 - DNA, 25 bp, Artificial
  Probe
ctatatttgatcttcagcaggggct

SEQ ID NO: 236038 - DNA, 25 bp, Artificial
  Probe
tcaggctgcctgttaacaagtatct

SEQ ID NO: 236039 - DNA, 25 bp, Artificial
  Probe
taacaagtatctctggtgcatgcta

SEQ ID NO: 236040 - DNA, 25 bp, Artificial
  Probe
ctgttaacaagtatctctggtgcat

SEQ ID NO: 236041 - DNA, 25 bp, Artificial
  Probe
ctctggtgcatgctaacctccagac

SEQ ID NO: 236042 - DNA, 25 bp, Artificial
  Probe
atacacacgtggtcagctgctctga

SEQ ID NO: 236043 - DNA, 25 bp, Artificial
  Probe
ccaggctctgtggatgcccgtgtaa

SEQ ID NO: 236044 - DNA, 25 bp, Artificial
  Probe
cgtgtaaggcgctatgacctaagga

SEQ ID NO: 236045 - DNA, 25 bp, Artificial
  Probe
cttgccaggctctgtggatgcccgt

SEQ ID NO: 236046 - DNA, 25 bp, Artificial
  Probe
gctgctctgaggacggcaaagtgtt

SEQ ID NO: 236047 - DNA, 25 bp, Artificial
  Probe
ttgccaggctctgtggatgcccgtg

SEQ ID NO: 236048 - DNA, 25 bp, Artificial
  Probe
ctgtgggttctaatgtggtacagtc

SEQ ID NO: 236049 - DNA, 25 bp, Artificial
  Probe
gtgtaaggcgctatgacctaaggat

SEQ ID NO: 236050 - DNA, 25 bp, Artificial
  Probe
caggctctgtggatgcccgtgtaag

SEQ ID NO: 236051 - DNA, 25 bp, Artificial
  Probe
gctatgacctaaggatggtacaagt

SEQ ID NO: 236052 - DNA, 25 bp, Artificial
  Probe
tggtcagctgctctgaggacggcaa

SEQ ID NO: 236053 - DNA, 25 bp, Artificial
  Probe
tctgaggacggcaaagtgttcttct

SEQ ID NO: 236054 - DNA, 25 bp, Artificial
  Probe
tgacctaaggatggtacaagtcacc

SEQ ID NO: 236055 - DNA, 25 bp, Artificial
  Probe
cagctgctctgaggacggcaaagtg

SEQ ID NO: 236056 - DNA, 25 bp, Artificial
  Probe
tgtggatgcccgtgtaaggcgctat

SEQ ID NO: 236057 - DNA, 25 bp, Artificial
  Probe
tgctgcctgagtgagcgcgatacac

SEQ ID NO: 236058 - DNA, 25 bp, Artificial
  Probe
caaggacccagaccaattcagaaac

SEQ ID NO: 236059 - DNA, 25 bp, Artificial
  Probe
tacctgtgggttctaatgtggtaca

SEQ ID NO: 236060 - DNA, 25 bp, Artificial
  Probe
aggcgctatgacctaaggatggtac

SEQ ID NO: 236061 - DNA, 25 bp, Artificial
  Probe
gtgagcgcgatacacacgtggtcag

SEQ ID NO: 236062 - DNA, 25 bp, Artificial
  Probe
ccatttattctcaagatgctgctga

SEQ ID NO: 236063 - DNA, 25 bp, Artificial
  Probe
ccaaggacccagaccaattcagaaa

SEQ ID NO: 236064 - DNA, 25 bp, Artificial
  Probe
acctgtgggttctaatgtggtacag

SEQ ID NO: 236065 - DNA, 25 bp, Artificial
  Probe
caagatgctgctgaccaaggagagg

SEQ ID NO: 236066 - DNA, 25 bp, Artificial
  Probe
tggatgcccgtgtaaggcgctatga

SEQ ID NO: 236067 - DNA, 25 bp, Artificial
  Probe
acacacgtggtcagctgctctgagg

SEQ ID NO: 236068 - DNA, 25 bp, Artificial
  Probe
ttattctcaagatgctgctgaccaa

SEQ ID NO: 236069 - DNA, 25 bp, Artificial
  Probe
gatacacacgtggtcagctgctctg

SEQ ID NO: 236070 - DNA, 25 bp, Artificial
  Probe
cctgtgggttctaatgtggtacagt

SEQ ID NO: 236071 - DNA, 25 bp, Artificial
  Probe
cacgtggtcagctgctctgaggacg

SEQ ID NO: 236072 - DNA, 25 bp, Artificial
  Probe
atttattctcaagatgctgctgacc

SEQ ID NO: 236073 - DNA, 25 bp, Artificial
  Probe
ggacccagaccaattcagaaaccca

SEQ ID NO: 236074 - DNA, 25 bp, Artificial
  Probe
ctatgacctaaggatggtacaagtc

SEQ ID NO: 236075 - DNA, 25 bp, Artificial
  Probe
tgtaaggcgctatgacctaaggatg

SEQ ID NO: 236076 - DNA, 25 bp, Artificial
  Probe
tgagtgagcgcgatacacacgtggt

SEQ ID NO: 236077 - DNA, 25 bp, Artificial
  Probe
gtcagctgctctgaggacggcaaag

SEQ ID NO: 236078 - DNA, 25 bp, Artificial
  Probe
caaagtgttcttctgggacctggta

SEQ ID NO: 236079 - DNA, 25 bp, Artificial
  Probe
caccaaggacccagaccaattcaga

SEQ ID NO: 236080 - DNA, 25 bp, Artificial
  Probe
acggcaaagtgttcttctgggacct

SEQ ID NO: 236081 - DNA, 25 bp, Artificial
  Probe
agcgcgatacacacgtggtcagctg

SEQ ID NO: 236082 - DNA, 25 bp, Artificial
  Probe
tatgacctaaggatggtacaagtca

SEQ ID NO: 236083 - DNA, 25 bp, Artificial
  Probe
tattctcaagatgctgctgaccaag

SEQ ID NO: 236084 - DNA, 25 bp, Artificial
  Probe
gacggcaaagtgttcttctgggacc

SEQ ID NO: 236085 - DNA, 25 bp, Artificial
  Probe
gctgcctgagtgagcgcgatacaca

SEQ ID NO: 236086 - DNA, 25 bp, Artificial
  Probe
gatgcccgtgtaaggcgctatgacc

SEQ ID NO: 236087 - DNA, 25 bp, Artificial
  Probe
gagcgcgatacacacgtggtcagct

SEQ ID NO: 236088 - DNA, 25 bp, Artificial
  Probe
tggacttatcttcatggaaacttct

SEQ ID NO: 236089 - DNA, 25 bp, Artificial
  Probe
ggtttcagccggtgcatgacctcac

SEQ ID NO: 236090 - DNA, 25 bp, Artificial
  Probe
aggagagacacgttcaaccacttga

SEQ ID NO: 236091 - DNA, 25 bp, Artificial
  Probe
agactgcttctaatgtagaggaggc

SEQ ID NO: 236092 - DNA, 25 bp, Artificial
  Probe
agacaagaggtttcagccggtgcat

SEQ ID NO: 236093 - DNA, 25 bp, Artificial
  Probe
ttcagccggtgcatgacctcacaat

SEQ ID NO: 236094 - DNA, 25 bp, Artificial
  Probe
tttacagacaagaggtttcagccgg

SEQ ID NO: 236095 - DNA, 25 bp, Artificial
  Probe
gcgacacaggtgttggtaaatcgtg

SEQ ID NO: 236096 - DNA, 25 bp, Artificial
  Probe
acagataaaactccagatctgggat

SEQ ID NO: 236097 - DNA, 25 bp, Artificial
  Probe
tttcagccggtgcatgacctcacaa

SEQ ID NO: 236098 - DNA, 25 bp, Artificial
  Probe
cagggcaggagtcctttcgttctat

SEQ ID NO: 236099 - DNA, 25 bp, Artificial
  Probe
gaaacagataaaactccagatctgg

SEQ ID NO: 236100 - DNA, 25 bp, Artificial
  Probe
ttcaagtacatcatcatcggcgaca

SEQ ID NO: 236101 - DNA, 25 bp, Artificial
  Probe
gggcaggagtcctttcgttctatca

SEQ ID NO: 236102 - DNA, 25 bp, Artificial
  Probe
tggcgtacgcctatctcttcaagta

SEQ ID NO: 236103 - DNA, 25 bp, Artificial
  Probe
cagacaagaggtttcagccggtgca

SEQ ID NO: 236104 - DNA, 25 bp, Artificial
  Probe
gagacacgttcaaccacttgacaac

SEQ ID NO: 236105 - DNA, 25 bp, Artificial
  Probe
acaagaggtttcagccggtgcatga

SEQ ID NO: 236106 - DNA, 25 bp, Artificial
  Probe
ccaagactgcttctaatgtagagga

SEQ ID NO: 236107 - DNA, 25 bp, Artificial
  Probe
gactgcttctaatgtagaggaggca

SEQ ID NO: 236108 - DNA, 25 bp, Artificial
  Probe
catggacttatcttcatggaaactt

SEQ ID NO: 236109 - DNA, 25 bp, Artificial
  Probe
agtttacagacaagaggtttcagcc

SEQ ID NO: 236110 - DNA, 25 bp, Artificial
  Probe
tctatcacaaggtcatattacagag

SEQ ID NO: 236111 - DNA, 25 bp, Artificial
  Probe
gtcctttcgttctatcacaaggtca

SEQ ID NO: 236112 - DNA, 25 bp, Artificial
  Probe
acgttcaaccacttgacaacctggt

SEQ ID NO: 236113 - DNA, 25 bp, Artificial
  Probe
cacaaggtcatattacagaggtgca

SEQ ID NO: 236114 - DNA, 25 bp, Artificial
  Probe
catcggcgacacaggtgttggtaaa

SEQ ID NO: 236115 - DNA, 25 bp, Artificial
  Probe
gttctatcacaaggtcatattacag

SEQ ID NO: 236116 - DNA, 25 bp, Artificial
  Probe
ctcttcaagtacatcatcatcggcg

SEQ ID NO: 236117 - DNA, 25 bp, Artificial
  Probe
agcagggcaggagtcctttcgttct

SEQ ID NO: 236118 - DNA, 25 bp, Artificial
  Probe
gttcaaccacttgacaacctggtta

SEQ ID NO: 236119 - DNA, 25 bp, Artificial
  Probe
acacaggtgttggtaaatcgtgctt

SEQ ID NO: 236120 - DNA, 25 bp, Artificial
  Probe
gagagacacgttcaaccacttgaca

SEQ ID NO: 236121 - DNA, 25 bp, Artificial
  Probe
ctatcacaaggtcatattacagagg

SEQ ID NO: 236122 - DNA, 25 bp, Artificial
  Probe
gcgtacgcctatctcttcaagtaca

SEQ ID NO: 236123 - DNA, 25 bp, Artificial
  Probe
ctgcttctaatgtagaggaggcatt

SEQ ID NO: 236124 - DNA, 25 bp, Artificial
  Probe
aacagataaaactccagatctggga

SEQ ID NO: 236125 - DNA, 25 bp, Artificial
  Probe
cacgttcaaccacttgacaacctgg

SEQ ID NO: 236126 - DNA, 25 bp, Artificial
  Probe
atggacttatcttcatggaaacttc

SEQ ID NO: 236127 - DNA, 25 bp, Artificial
  Probe
caagtacatcatcatcggcgacaca

SEQ ID NO: 236128 - DNA, 25 bp, Artificial
  Probe
cagataaaactccagatctgggata

SEQ ID NO: 236129 - DNA, 25 bp, Artificial
  Probe
ttacagacaagaggtttcagccggt

SEQ ID NO: 236130 - DNA, 25 bp, Artificial
  Probe
caagactgcttctaatgtagaggag

SEQ ID NO: 236131 - DNA, 25 bp, Artificial
  Probe
atattacaaggagagacacgttcaa

SEQ ID NO: 236132 - DNA, 25 bp, Artificial
  Probe
tacagcagggcaggagtcctttcgt

SEQ ID NO: 236133 - DNA, 25 bp, Artificial
  Probe
agtacatcatcatcggcgacacagg

SEQ ID NO: 236134 - DNA, 25 bp, Artificial
  Probe
agactggattattctgtgcacatca

SEQ ID NO: 236135 - DNA, 25 bp, Artificial
  Probe
gaatagtgcccctggagcctgcgct

SEQ ID NO: 236136 - DNA, 25 bp, Artificial
  Probe
cccagagaatagtgcccctggagcc

SEQ ID NO: 236137 - DNA, 25 bp, Artificial
  Probe
tagtgcccctggagcctgcgctaat

SEQ ID NO: 236138 - DNA, 25 bp, Artificial
  Probe
tgtttctcatcttcagtgagattcc

SEQ ID NO: 236139 - DNA, 25 bp, Artificial
  Probe
cctgcgctaatatggggctcacaga

SEQ ID NO: 236140 - DNA, 25 bp, Artificial
  Probe
agcagcatctgcatagggtgtcatg

SEQ ID NO: 236141 - DNA, 25 bp, Artificial
  Probe
attgtgttccgtggagacgagagca

SEQ ID NO: 236142 - DNA, 25 bp, Artificial
  Probe
aagtccaaaggcaggaatgggcttt

SEQ ID NO: 236143 - DNA, 25 bp, Artificial
  Probe
tctgtgcacatcacacttgctgcaa

SEQ ID NO: 236144 - DNA, 25 bp, Artificial
  Probe
actccattgtgttccgtggagacga

SEQ ID NO: 236145 - DNA, 25 bp, Artificial
  Probe
ctgcaaagctctgttcactcagaca

SEQ ID NO: 236146 - DNA, 25 bp, Artificial
  Probe
tcagtgagattccaggggatattac

SEQ ID NO: 236147 - DNA, 25 bp, Artificial
  Probe
tggagcctgcgctaatatggggctc

SEQ ID NO: 236148 - DNA, 25 bp, Artificial
  Probe
cacttgctgcaaagctctgttcact

SEQ ID NO: 236149 - DNA, 25 bp, Artificial
  Probe
ttctgtttctcatcttcagtgagat

SEQ ID NO: 236150 - DNA, 25 bp, Artificial
  Probe
actggattattctgtgcacatcaca

SEQ ID NO: 236151 - DNA, 25 bp, Artificial
  Probe
gtaaattgagaactccattgtgttc

SEQ ID NO: 236152 - DNA, 25 bp, Artificial
  Probe
aatccacttgctataaaggtctcag

SEQ ID NO: 236153 - DNA, 25 bp, Artificial
  Probe
ccatgaggcctcaagtggctcagca

SEQ ID NO: 236154 - DNA, 25 bp, Artificial
  Probe
tcaagtggctcagcagcatctgcat

SEQ ID NO: 236155 - DNA, 25 bp, Artificial
  Probe
ttgctataaaggtctcagcgcccct

SEQ ID NO: 236156 - DNA, 25 bp, Artificial
  Probe
agattccaggggatattacagtgac

SEQ ID NO: 236157 - DNA, 25 bp, Artificial
  Probe
gcccctggagcctgcgctaatatgg

SEQ ID NO: 236158 - DNA, 25 bp, Artificial
  Probe
gattattctgtgcacatcacacttg

SEQ ID NO: 236159 - DNA, 25 bp, Artificial
  Probe
ggaccccagagaatagtgcccctgg

SEQ ID NO: 236160 - DNA, 25 bp, Artificial
  Probe
tcccatgaggcctcaagtggctcag

SEQ ID NO: 236161 - DNA, 25 bp, Artificial
  Probe
cattgtgttccgtggagacgagagc

SEQ ID NO: 236162 - DNA, 25 bp, Artificial
  Probe
tttaaacagcagagctgaaactcag

SEQ ID NO: 236163 - DNA, 25 bp, Artificial
  Probe
tccaaaggcaggaatgggctttaaa

SEQ ID NO: 236164 - DNA, 25 bp, Artificial
  Probe
ggctcacagaaacaggataagtcca

SEQ ID NO: 236165 - DNA, 25 bp, Artificial
  Probe
accccagagaatagtgcccctggag

SEQ ID NO: 236166 - DNA, 25 bp, Artificial
  Probe
tctcatcttcagtgagattccaggg

SEQ ID NO: 236167 - DNA, 25 bp, Artificial
  Probe
ttccaggggatattacagtgacaga

SEQ ID NO: 236168 - DNA, 25 bp, Artificial
  Probe
taagaaaatccacttgctataaagg

SEQ ID NO: 236169 - DNA, 25 bp, Artificial
  Probe
ctttctgtttctcatcttcagtgag

SEQ ID NO: 236170 - DNA, 25 bp, Artificial
  Probe
attctgtgcacatcacacttgctgc

SEQ ID NO: 236171 - DNA, 25 bp, Artificial
  Probe
cagtgagattccaggggatattaca

SEQ ID NO: 236172 - DNA, 25 bp, Artificial
  Probe
cactcagacagaaaatcggtaaatt

SEQ ID NO: 236173 - DNA, 25 bp, Artificial
  Probe
aagtggctcagcagcatctgcatag

SEQ ID NO: 236174 - DNA, 25 bp, Artificial
  Probe
cttcagtgagattccaggggatatt

SEQ ID NO: 236175 - DNA, 25 bp, Artificial
  Probe
gcacatcacacttgctgcaaagctc

SEQ ID NO: 236176 - DNA, 25 bp, Artificial
  Probe
aaagtaatcgcaagcttaatagctc

SEQ ID NO: 236177 - DNA, 25 bp, Artificial
  Probe
tttctcatcttcagtgagattccag

SEQ ID NO: 236178 - DNA, 25 bp, Artificial
  Probe
tattctgtgcacatcacacttgctg

SEQ ID NO: 236179 - DNA, 25 bp, Artificial
  Probe
ctaatatggggctcacagaaacagg

SEQ ID NO: 236180 - DNA, 25 bp, Artificial
  Probe
tgctcacatcatcaagcgcttactg

SEQ ID NO: 236181 - DNA, 25 bp, Artificial
  Probe
tgttagctaagttccgacatgtggc

SEQ ID NO: 236182 - DNA, 25 bp, Artificial
  Probe
catgtgcctattcctggaatcccca

SEQ ID NO: 236183 - DNA, 25 bp, Artificial
  Probe
gcctcgtgattaatacagtgagggt

SEQ ID NO: 236184 - DNA, 25 bp, Artificial
  Probe
tggcctcgtgattaatacagtgagg

SEQ ID NO: 236185 - DNA, 25 bp, Artificial
  Probe
ctgagggctggaagtccaagatcaa

SEQ ID NO: 236186 - DNA, 25 bp, Artificial
  Probe
cctcgttggatgacaacacctcttg

SEQ ID NO: 236187 - DNA, 25 bp, Artificial
  Probe
tgaaaagactgctcacatcatcaag

SEQ ID NO: 236188 - DNA, 25 bp, Artificial
  Probe
ccggtagtttccaggccgtgagctc

SEQ ID NO: 236189 - DNA, 25 bp, Artificial
  Probe
gacaacacctcttgaaaagactgct

SEQ ID NO: 236190 - DNA, 25 bp, Artificial
  Probe
agcagagcccatgtgcctattcctg

SEQ ID NO: 236191 - DNA, 25 bp, Artificial
  Probe
atcaagggtgcagacagtgaggaac

SEQ ID NO: 236192 - DNA, 25 bp, Artificial
  Probe
tggaatccccacagagggacagttc

SEQ ID NO: 236193 - DNA, 25 bp, Artificial
  Probe
aagactgctcacatcatcaagcgct

SEQ ID NO: 236194 - DNA, 25 bp, Artificial
  Probe
gtttctaatattgcacagctagacc

SEQ ID NO: 236195 - DNA, 25 bp, Artificial
  Probe
aagggtgcagacagtgaggaacttc

SEQ ID NO: 236196 - DNA, 25 bp, Artificial
  Probe
agttccgacatgtggcacatgctaa

SEQ ID NO: 236197 - DNA, 25 bp, Artificial
  Probe
atattgcacagctagacctcgttgg

SEQ ID NO: 236198 - DNA, 25 bp, Artificial
  Probe
gtgaggaacttctggcctcgtgatt

SEQ ID NO: 236199 - DNA, 25 bp, Artificial
  Probe
agtccaagatcaagggtgcagacag

SEQ ID NO: 236200 - DNA, 25 bp, Artificial
  Probe
ctattcctggaatccccacagaggg

SEQ ID NO: 236201 - DNA, 25 bp, Artificial
  Probe
cgttggatgacaacacctcttgaaa

SEQ ID NO: 236202 - DNA, 25 bp, Artificial
  Probe
agacagtgaggaacttctggcctcg

SEQ ID NO: 236203 - DNA, 25 bp, Artificial
  Probe
aatacattgttagctaagttccgac

SEQ ID NO: 236204 - DNA, 25 bp, Artificial
  Probe
agctaagttccgacatgtggcacat

SEQ ID NO: 236205 - DNA, 25 bp, Artificial
  Probe
tgctgagggctggaagtccaagatc

SEQ ID NO: 236206 - DNA, 25 bp, Artificial
  Probe
taagcagagcccatgtgcctattcc

SEQ ID NO: 236207 - DNA, 25 bp, Artificial
  Probe
ctcacatcatcaagcgcttactggc

SEQ ID NO: 236208 - DNA, 25 bp, Artificial
  Probe
ttctcccggtagtttccaggccgtg

SEQ ID NO: 236209 - DNA, 25 bp, Artificial
  Probe
tctggcctcgtgattaatacagtga

SEQ ID NO: 236210 - DNA, 25 bp, Artificial
  Probe
ccgacatgtggcacatgctaaataa

SEQ ID NO: 236211 - DNA, 25 bp, Artificial
  Probe
atcatatgggcaagacagaaaatac

SEQ ID NO: 236212 - DNA, 25 bp, Artificial
  Probe
agaagaacatctggtgctgagggct

SEQ ID NO: 236213 - DNA, 25 bp, Artificial
  Probe
ccacagagggacagttcagaaagaa

SEQ ID NO: 236214 - DNA, 25 bp, Artificial
  Probe
gaatccccacagagggacagttcag

SEQ ID NO: 236215 - DNA, 25 bp, Artificial
  Probe
gagcctctaatttctcccggtagtt

SEQ ID NO: 236216 - DNA, 25 bp, Artificial
  Probe
ctggaagtccaagatcaagggtgca

SEQ ID NO: 236217 - DNA, 25 bp, Artificial
  Probe
gctaagttccgacatgtggcacatg

SEQ ID NO: 236218 - DNA, 25 bp, Artificial
  Probe
gactgctcacatcatcaagcgctta

SEQ ID NO: 236219 - DNA, 25 bp, Artificial
  Probe
cagtgaggaacttctggcctcgtga

SEQ ID NO: 236220 - DNA, 25 bp, Artificial
  Probe
agctagacctcgttggatgacaaca

SEQ ID NO: 236221 - DNA, 25 bp, Artificial
  Probe
gaacttctggcctcgtgattaatac

SEQ ID NO: 236222 - DNA, 25 bp, Artificial
  Probe
tctaatattgcacagctagacctcg

SEQ ID NO: 236223 - DNA, 25 bp, Artificial
  Probe
cctggaatccccacagagggacagt

SEQ ID NO: 236224 - DNA, 25 bp, Artificial
  Probe
gtttccaggccgtgagctcagacct

SEQ ID NO: 236225 - DNA, 25 bp, Artificial
  Probe
ccccacagagggacagttcagaaag

SEQ ID NO: 236226 - DNA, 25 bp, Artificial
  Probe
gcttcgggaatgtcaaccttggcta

SEQ ID NO: 236227 - DNA, 25 bp, Artificial
  Probe
agcacagacaattactgtatcacgt

SEQ ID NO: 236228 - DNA, 25 bp, Artificial
  Probe
gaacaatatcaattgcctatggccg

SEQ ID NO: 236229 - DNA, 25 bp, Artificial
  Probe
agtcttcttgcctgtgctgctggca

SEQ ID NO: 236230 - DNA, 25 bp, Artificial
  Probe
aagtccattccctgatgtgcttctc

SEQ ID NO: 236231 - DNA, 25 bp, Artificial
  Probe
agctccttctgcaatttcagcacgg

SEQ ID NO: 236232 - DNA, 25 bp, Artificial
  Probe
tacaccctgaataagggttgctccc

SEQ ID NO: 236233 - DNA, 25 bp, Artificial
  Probe
gctccagcacagacaattactgtat

SEQ ID NO: 236234 - DNA, 25 bp, Artificial
  Probe
ctgccgcgggcttcgggaatgtcaa

SEQ ID NO: 236235 - DNA, 25 bp, Artificial
  Probe
cactgctgggccttggactcctgct

SEQ ID NO: 236236 - DNA, 25 bp, Artificial
  Probe
gcctatggccggtatcatgctccag

SEQ ID NO: 236237 - DNA, 25 bp, Artificial
  Probe
catgctccagcacagacaattactg

SEQ ID NO: 236238 - DNA, 25 bp, Artificial
  Probe
gtatcatgctccagcacagacaatt

SEQ ID NO: 236239 - DNA, 25 bp, Artificial
  Probe
ttcgtgctagtatcccactgctggg

SEQ ID NO: 236240 - DNA, 25 bp, Artificial
  Probe
gaacaagtccattccctgatgtgct

SEQ ID NO: 236241 - DNA, 25 bp, Artificial
  Probe
gtatcccactgctgggccttggact

SEQ ID NO: 236242 - DNA, 25 bp, Artificial
  Probe
tcagcagatgtctgccgcttccagc

SEQ ID NO: 236243 - DNA, 25 bp, Artificial
  Probe
tggccttggacttcgtgctagtatc

SEQ ID NO: 236244 - DNA, 25 bp, Artificial
  Probe
agaacaatatcaattgcctatggcc

SEQ ID NO: 236245 - DNA, 25 bp, Artificial
  Probe
aattactgtatcacgttatctgctg

SEQ ID NO: 236246 - DNA, 25 bp, Artificial
  Probe
ttggctacaccctgaataagggttg

SEQ ID NO: 236247 - DNA, 25 bp, Artificial
  Probe
ctcggtgtggcgtccgtgaatagct

SEQ ID NO: 236248 - DNA, 25 bp, Artificial
  Probe
cagcacagacaattactgtatcacg

SEQ ID NO: 236249 - DNA, 25 bp, Artificial
  Probe
cttcagcagatgtctgccgcttcca

SEQ ID NO: 236250 - DNA, 25 bp, Artificial
  Probe
tctcctgcaccgatcagaagaacaa

SEQ ID NO: 236251 - DNA, 25 bp, Artificial
  Probe
aaccttggctacaccctgaataagg

SEQ ID NO: 236252 - DNA, 25 bp, Artificial
  Probe
tgctcagcttgttggctgtgctgcg

SEQ ID NO: 236253 - DNA, 25 bp, Artificial
  Probe
ggaatgtcaaccttggctacaccct

SEQ ID NO: 236254 - DNA, 25 bp, Artificial
  Probe
gatgtctgccgcttccagcatgaga

SEQ ID NO: 236255 - DNA, 25 bp, Artificial
  Probe
tgctagtatcccactgctgggcctt

SEQ ID NO: 236256 - DNA, 25 bp, Artificial
  Probe
tgtgctgctggcagcccttctgggt

SEQ ID NO: 236257 - DNA, 25 bp, Artificial
  Probe
tggactcctgctcagcttgttggct

SEQ ID NO: 236258 - DNA, 25 bp, Artificial
  Probe
gcaccgatcagaagaacaatatcaa

SEQ ID NO: 236259 - DNA, 25 bp, Artificial
  Probe
tgagagtcttcttgcctgtgctgct

SEQ ID NO: 236260 - DNA, 25 bp, Artificial
  Probe
tgtgctgcggctgagcccctgaccg

SEQ ID NO: 236261 - DNA, 25 bp, Artificial
  Probe
tgtggaacaagtccattccctgatg

SEQ ID NO: 236262 - DNA, 25 bp, Artificial
  Probe
gacaattactgtatcacgttatctg

SEQ ID NO: 236263 - DNA, 25 bp, Artificial
  Probe
cctgatgtgcttctcctgcaccgat

SEQ ID NO: 236264 - DNA, 25 bp, Artificial
  Probe
ctgctgccagagctccttctgcaat

SEQ ID NO: 236265 - DNA, 25 bp, Artificial
  Probe
tgtgcttctcctgcaccgatcagaa

SEQ ID NO: 236266 - DNA, 25 bp, Artificial
  Probe
attccctgatgtgcttctcctgcac

SEQ ID NO: 236267 - DNA, 25 bp, Artificial
  Probe
agtaggcttctttggcttgtgacct

SEQ ID NO: 236268 - DNA, 25 bp, Artificial
  Probe
gcgggcttcgggaatgtcaaccttg

SEQ ID NO: 236269 - DNA, 25 bp, Artificial
  Probe
tgcctgtgctgctggcagcccttct

SEQ ID NO: 236270 - DNA, 25 bp, Artificial
  Probe
cacgttatctgctgccgcgggcttc

SEQ ID NO: 236271 - DNA, 25 bp, Artificial
  Probe
ggcttctttggcttgtgaccttcag

SEQ ID NO: 236272 - DNA, 25 bp, Artificial
  Probe
cgaaaccaggacgaggggatcctgc

SEQ ID NO: 236273 - DNA, 25 bp, Artificial
  Probe
cacaagacccgaaaccaggacgagg

SEQ ID NO: 236274 - DNA, 25 bp, Artificial
  Probe
cctcggctggctcaagaagcacgcg

SEQ ID NO: 236275 - DNA, 25 bp, Artificial
  Probe
tgcagaagtcacacaagacccgaaa

SEQ ID NO: 236276 - DNA, 25 bp, Artificial
  Probe
gcggcgcgagctcaagcagttcctc

SEQ ID NO: 236277 - DNA, 25 bp, Artificial
  Probe
ctgtacgaccagtggcgtgcttgga

SEQ ID NO: 236278 - DNA, 25 bp, Artificial
  Probe
tggcgtgcttggatgcagaagtcac

SEQ ID NO: 236279 - DNA, 25 bp, Artificial
  Probe
cttccgcctgtacgaccagtggcgt

SEQ ID NO: 236280 - DNA, 25 bp, Artificial
  Probe
acccattcgggatctatgggtcgaa

SEQ ID NO: 236281 - DNA, 25 bp, Artificial
  Probe
aacccattcgggatctatgggtcga

SEQ ID NO: 236282 - DNA, 25 bp, Artificial
  Probe
cagttcctcggctggctcaagaagc

SEQ ID NO: 236283 - DNA, 25 bp, Artificial
  Probe
gaatctggagcgagtggagccaccc

SEQ ID NO: 236284 - DNA, 25 bp, Artificial
  Probe
gtgcggcgcgagctcaagcagttcc

SEQ ID NO: 236285 - DNA, 25 bp, Artificial
  Probe
ccgcctgtacgaccagtggcgtgct

SEQ ID NO: 236286 - DNA, 25 bp, Artificial
  Probe
tagcttccgcctgtacgaccagtgg

SEQ ID NO: 236287 - DNA, 25 bp, Artificial
  Probe
tccgcctgtacgaccagtggcgtgc

SEQ ID NO: 236288 - DNA, 25 bp, Artificial
  Probe
ttagcttccgcctgtacgaccagtg

SEQ ID NO: 236289 - DNA, 25 bp, Artificial
  Probe
tcgttgtaacccattcgggatctat

SEQ ID NO: 236290 - DNA, 25 bp, Artificial
  Probe
ccattcgggatctatgggtcgaaaa

SEQ ID NO: 236291 - DNA, 25 bp, Artificial
  Probe
acacaagacccgaaaccaggacgag

SEQ ID NO: 236292 - DNA, 25 bp, Artificial
  Probe
gatgcagaagtcacacaagacccga

SEQ ID NO: 236293 - DNA, 25 bp, Artificial
  Probe
gctggctcaagaagcacgcgtactg

SEQ ID NO: 236294 - DNA, 25 bp, Artificial
  Probe
gctcaagcagttcctcggctggctc

SEQ ID NO: 236295 - DNA, 25 bp, Artificial
  Probe
ccgaaaccaggacgaggggatcctg

SEQ ID NO: 236296 - DNA, 25 bp, Artificial
  Probe
cgagctcaagcagttcctcggctgg

SEQ ID NO: 236297 - DNA, 25 bp, Artificial
  Probe
tcctcggctggctcaagaagcacgc

SEQ ID NO: 236298 - DNA, 25 bp, Artificial
  Probe
agaagtcacacaagacccgaaacca

SEQ ID NO: 236299 - DNA, 25 bp, Artificial
  Probe
agcttccgcctgtacgaccagtggc

SEQ ID NO: 236300 - DNA, 25 bp, Artificial
  Probe
gttgtaacccattcgggatctatgg

SEQ ID NO: 236301 - DNA, 25 bp, Artificial
  Probe
gaagtcacacaagacccgaaaccag

SEQ ID NO: 236302 - DNA, 25 bp, Artificial
  Probe
accagtggcgtgcttggatgcagaa

SEQ ID NO: 236303 - DNA, 25 bp, Artificial
  Probe
ctcggctggctcaagaagcacgcgt

SEQ ID NO: 236304 - DNA, 25 bp, Artificial
  Probe
cgttgtaacccattcgggatctatg

SEQ ID NO: 236305 - DNA, 25 bp, Artificial
  Probe
tggctcaagaagcacgcgtactgct

SEQ ID NO: 236306 - DNA, 25 bp, Artificial
  Probe
ggcgcgagctcaagcagttcctcgg

SEQ ID NO: 236307 - DNA, 25 bp, Artificial
  Probe
ttccgcctgtacgaccagtggcgtg

SEQ ID NO: 236308 - DNA, 25 bp, Artificial
  Probe
ggctggctcaagaagcacgcgtact

SEQ ID NO: 236309 - DNA, 25 bp, Artificial
  Probe
tgcggcgcgagctcaagcagttcct

SEQ ID NO: 236310 - DNA, 25 bp, Artificial
  Probe
cggctggctcaagaagcacgcgtac

SEQ ID NO: 236311 - DNA, 25 bp, Artificial
  Probe
gcagaagtcacacaagacccgaaac

SEQ ID NO: 236312 - DNA, 25 bp, Artificial
  Probe
gcgtgcttggatgcagaagtcacac

SEQ ID NO: 236313 - DNA, 25 bp, Artificial
  Probe
gcctgtacgaccagtggcgtgcttg

SEQ ID NO: 236314 - DNA, 25 bp, Artificial
  Probe
cattcgggatctatgggtcgaaaaa

SEQ ID NO: 236315 - DNA, 25 bp, Artificial
  Probe
cggcgcgagctcaagcagttcctcg

SEQ ID NO: 236316 - DNA, 25 bp, Artificial
  Probe
gaaaccaggacgaggggatcctgcc

SEQ ID NO: 236317 - DNA, 25 bp, Artificial
  Probe
gagctcaagcagttcctcggctggc

SEQ ID NO: 236318 - DNA, 25 bp, Artificial
  Probe
ttacaggaccccaagattaaagaga

SEQ ID NO: 236319 - DNA, 25 bp, Artificial
  Probe
ggccactatcctgagcttcaacaga

SEQ ID NO: 236320 - DNA, 25 bp, Artificial
  Probe
agatggccactatcctgagcttcaa

SEQ ID NO: 236321 - DNA, 25 bp, Artificial
  Probe
agtactgaagctgaaccagccggcg

SEQ ID NO: 236322 - DNA, 25 bp, Artificial
  Probe
gagtttccctatgacgcagagtact

SEQ ID NO: 236323 - DNA, 25 bp, Artificial
  Probe
gttaaatccccatgctgaatcagga

SEQ ID NO: 236324 - DNA, 25 bp, Artificial
  Probe
agttgagcgaccaggagatggccac

SEQ ID NO: 236325 - DNA, 25 bp, Artificial
  Probe
aggaccccaagattaaagagattgc

SEQ ID NO: 236326 - DNA, 25 bp, Artificial
  Probe
tgacgcagagtactgaagctgaacc

SEQ ID NO: 236327 - DNA, 25 bp, Artificial
  Probe
gagtactgaagctgaaccagccggc

SEQ ID NO: 236328 - DNA, 25 bp, Artificial
  Probe
catggaagagtttccctatgacgca

SEQ ID NO: 236329 - DNA, 25 bp, Artificial
  Probe
tatcctgagcttcaacagaaactgg

SEQ ID NO: 236330 - DNA, 25 bp, Artificial
  Probe
gagcgaccaggagatggccactatc

SEQ ID NO: 236331 - DNA, 25 bp, Artificial
  Probe
actgaagctgaaccagccggcgaga

SEQ ID NO: 236332 - DNA, 25 bp, Artificial
  Probe
gcagatgcatacctcactcctgcag

SEQ ID NO: 236333 - DNA, 25 bp, Artificial
  Probe
tacaggaccccaagattaaagagat

SEQ ID NO: 236334 - DNA, 25 bp, Artificial
  Probe
atgacgcagagtactgaagctgaac

SEQ ID NO: 236335 - DNA, 25 bp, Artificial
  Probe
ggaccccaagattaaagagattgcc

SEQ ID NO: 236336 - DNA, 25 bp, Artificial
  Probe
gaagagtttccctatgacgcagagt

SEQ ID NO: 236337 - DNA, 25 bp, Artificial
  Probe
gttgagcgaccaggagatggccact

SEQ ID NO: 236338 - DNA, 25 bp, Artificial
  Probe
agatgcatacctcactcctgcagtc

SEQ ID NO: 236339 - DNA, 25 bp, Artificial
  Probe
acatggaagagtttccctatgacgc

SEQ ID NO: 236340 - DNA, 25 bp, Artificial
  Probe
tgtgggcaaggctgtggttaaatcc

SEQ ID NO: 236341 - DNA, 25 bp, Artificial
  Probe
acgcagagtactgaagctgaaccag

SEQ ID NO: 236342 - DNA, 25 bp, Artificial
  Probe
agtttccctatgacgcagagtactg

SEQ ID NO: 236343 - DNA, 25 bp, Artificial
  Probe
ccagcacgtatacaggagaacattc

SEQ ID NO: 236344 - DNA, 25 bp, Artificial
  Probe
aggagatggccactatcctgagctt

SEQ ID NO: 236345 - DNA, 25 bp, Artificial
  Probe
tactgaagctgaaccagccggcgag

SEQ ID NO: 236346 - DNA, 25 bp, Artificial
  Probe
tccctatgacgcagagtactgaagc

SEQ ID NO: 236347 - DNA, 25 bp, Artificial
  Probe
agacagtcaacatggaagagtttcc

SEQ ID NO: 236348 - DNA, 25 bp, Artificial
  Probe
gagatggccactatcctgagcttca

SEQ ID NO: 236349 - DNA, 25 bp, Artificial
  Probe
ccgttgcgagcagatgtgacttgga

SEQ ID NO: 236350 - DNA, 25 bp, Artificial
  Probe
gtactgaagctgaaccagccggcga

SEQ ID NO: 236351 - DNA, 25 bp, Artificial
  Probe
gattgccgccaagcacaagaaaacc

SEQ ID NO: 236352 - DNA, 25 bp, Artificial
  Probe
cctatgacgcagagtactgaagctg

SEQ ID NO: 236353 - DNA, 25 bp, Artificial
  Probe
gtgggcaaggctgtggttaaatccc

SEQ ID NO: 236354 - DNA, 25 bp, Artificial
  Probe
gctgtggttaaatccccatgctgaa

SEQ ID NO: 236355 - DNA, 25 bp, Artificial
  Probe
gccactatcctgagcttcaacagaa

SEQ ID NO: 236356 - DNA, 25 bp, Artificial
  Probe
aacatggaagagtttccctatgacg

SEQ ID NO: 236357 - DNA, 25 bp, Artificial
  Probe
gatggccactatcctgagcttcaac

SEQ ID NO: 236358 - DNA, 25 bp, Artificial
  Probe
ggttaaatccccatgctgaatcagg

SEQ ID NO: 236359 - DNA, 25 bp, Artificial
  Probe
agcgaccaggagatggccactatcc

SEQ ID NO: 236360 - DNA, 25 bp, Artificial
  Probe
cagttgagcgaccaggagatggcca

SEQ ID NO: 236361 - DNA, 25 bp, Artificial
  Probe
gcgaccaggagatggccactatcct

SEQ ID NO: 236362 - DNA, 25 bp, Artificial
  Probe
ctatcctgagcttcaacagaaactg

SEQ ID NO: 236363 - DNA, 25 bp, Artificial
  Probe
acagtcaacatggaagagtttccct

SEQ ID NO: 236364 - DNA, 25 bp, Artificial
  Probe
gaggccgggctgggggcggaggcag

SEQ ID NO: 236365 - DNA, 25 bp, Artificial
  Probe
aggctgggcccctgtctggagaggc

SEQ ID NO: 236366 - DNA, 25 bp, Artificial
  Probe
gggcggaggcagcaggggacagggt

SEQ ID NO: 236367 - DNA, 25 bp, Artificial
  Probe
gggctgggggcggaggcagcagggg

SEQ ID NO: 236368 - DNA, 25 bp, Artificial
  Probe
ggagaggccgggctgggggcggagg

SEQ ID NO: 236369 - DNA, 25 bp, Artificial
  Probe
atttccaagttgctggctaggctgg

SEQ ID NO: 236370 - DNA, 25 bp, Artificial
  Probe
cttcatttccaagttgctggctagg

SEQ ID NO: 236371 - DNA, 25 bp, Artificial
  Probe
ctcttcatttccaagttgctggcta

SEQ ID NO: 236372 - DNA, 25 bp, Artificial
  Probe
catttccaagttgctggctaggctg

SEQ ID NO: 236373 - DNA, 25 bp, Artificial
  Probe
cccctgtctggagaggccgggctgg

SEQ ID NO: 236374 - DNA, 25 bp, Artificial
  Probe
ttccaagttgctggctaggctgggc

SEQ ID NO: 236375 - DNA, 25 bp, Artificial
  Probe
cgggctgggggcggaggcagcaggg

SEQ ID NO: 236376 - DNA, 25 bp, Artificial
  Probe
ttttctctcttcatttccaagttgc

SEQ ID NO: 236377 - DNA, 25 bp, Artificial
  Probe
gctaggctgggcccctgtctggaga

SEQ ID NO: 236378 - DNA, 25 bp, Artificial
  Probe
agcaggggacagggtggagtctaga

SEQ ID NO: 236379 - DNA, 25 bp, Artificial
  Probe
gtctggagaggccgggctgggggcg

SEQ ID NO: 236380 - DNA, 25 bp, Artificial
  Probe
ctctcttcatttccaagttgctggc

SEQ ID NO: 236381 - DNA, 25 bp, Artificial
  Probe
aagttgctggctaggctgggcccct

SEQ ID NO: 236382 - DNA, 25 bp, Artificial
  Probe
tttccaagttgctggctaggctggg

SEQ ID NO: 236383 - DNA, 25 bp, Artificial
  Probe
ttctctcttcatttccaagttgctg

SEQ ID NO: 236384 - DNA, 25 bp, Artificial
  Probe
gaggcagcaggggacagggtggagt

SEQ ID NO: 236385 - DNA, 25 bp, Artificial
  Probe
gctggctaggctgggcccctgtctg

SEQ ID NO: 236386 - DNA, 25 bp, Artificial
  Probe
tgggggcggaggcagcaggggacag

SEQ ID NO: 236387 - DNA, 25 bp, Artificial
  Probe
tctggagaggccgggctgggggcgg

SEQ ID NO: 236388 - DNA, 25 bp, Artificial
  Probe
tcttcatttccaagttgctggctag

SEQ ID NO: 236389 - DNA, 25 bp, Artificial
  Probe
tcatttccaagttgctggctaggct

SEQ ID NO: 236390 - DNA, 25 bp, Artificial
  Probe
caagttgctggctaggctgggcccc

SEQ ID NO: 236391 - DNA, 25 bp, Artificial
  Probe
tggctaggctgggcccctgtctgga

SEQ ID NO: 236392 - DNA, 25 bp, Artificial
  Probe
gcggaggcagcaggggacagggtgg

SEQ ID NO: 236393 - DNA, 25 bp, Artificial
  Probe
cggaggcagcaggggacagggtgga

SEQ ID NO: 236394 - DNA, 25 bp, Artificial
  Probe
ttcatttccaagttgctggctaggc

SEQ ID NO: 236395 - DNA, 25 bp, Artificial
  Probe
agttgctggctaggctgggcccctg

SEQ ID NO: 236396 - DNA, 25 bp, Artificial
  Probe
tctctcttcatttccaagttgctgg

SEQ ID NO: 236397 - DNA, 25 bp, Artificial
  Probe
ctgggcccctgtctggagaggccgg

SEQ ID NO: 236398 - DNA, 25 bp, Artificial
  Probe
ggacagggtggagtctagagtaaag

SEQ ID NO: 236399 - DNA, 25 bp, Artificial
  Probe
gcagcaggggacagggtggagtcta

SEQ ID NO: 236400 - DNA, 25 bp, Artificial
  Probe
ctgtctggagaggccgggctggggg

SEQ ID NO: 236401 - DNA, 25 bp, Artificial
  Probe
ggcccctgtctggagaggccgggct

SEQ ID NO: 236402 - DNA, 25 bp, Artificial
  Probe
tctcttcatttccaagttgctggct

SEQ ID NO: 236403 - DNA, 25 bp, Artificial
  Probe
tgctggctaggctgggcccctgtct

SEQ ID NO: 236404 - DNA, 25 bp, Artificial
  Probe
ggggcggaggcagcaggggacaggg

SEQ ID NO: 236405 - DNA, 25 bp, Artificial
  Probe
gggcccctgtctggagaggccgggc

SEQ ID NO: 236406 - DNA, 25 bp, Artificial
  Probe
tggagaggccgggctgggggcggag

SEQ ID NO: 236407 - DNA, 25 bp, Artificial
  Probe
agaggccgggctgggggcggaggca

SEQ ID NO: 236408 - DNA, 25 bp, Artificial
  Probe
ggccgggctgggggcggaggcagca

SEQ ID NO: 236409 - DNA, 25 bp, Artificial
  Probe
ccaagttgctggctaggctgggccc

SEQ ID NO: 236410 - DNA, 25 bp, Artificial
  Probe
aacatggctgcagtagacttcttta

SEQ ID NO: 236411 - DNA, 25 bp, Artificial
  Probe
tagacttctttagtggtatccagca

SEQ ID NO: 236412 - DNA, 25 bp, Artificial
  Probe
tccagcaccacttgcagagggctgc

SEQ ID NO: 236413 - DNA, 25 bp, Artificial
  Probe
ctgatgcttgtctggtaatatcact

SEQ ID NO: 236414 - DNA, 25 bp, Artificial
  Probe
ttcttgggtgtattgcatgggctgc

SEQ ID NO: 236415 - DNA, 25 bp, Artificial
  Probe
cttgtctggtaatatcacttctgtg

SEQ ID NO: 236416 - DNA, 25 bp, Artificial
  Probe
actctagtgttcttgggtgtattgc

SEQ ID NO: 236417 - DNA, 25 bp, Artificial
  Probe
gtatacttcactgatgcttgtctgg

SEQ ID NO: 236418 - DNA, 25 bp, Artificial
  Probe
caccacttgcagagggctgctttat

SEQ ID NO: 236419 - DNA, 25 bp, Artificial
  Probe
tcataaccaacatggctgcagtaga

SEQ ID NO: 236420 - DNA, 25 bp, Artificial
  Probe
ctttagtggtatccagcaccacttg

SEQ ID NO: 236421 - DNA, 25 bp, Artificial
  Probe
ttcactgatgcttgtctggtaatat

SEQ ID NO: 236422 - DNA, 25 bp, Artificial
  Probe
atgcttgtctggtaatatcacttct

SEQ ID NO: 236423 - DNA, 25 bp, Artificial
  Probe
cactgatgcttgtctggtaatatca

SEQ ID NO: 236424 - DNA, 25 bp, Artificial
  Probe
acttctttagtggtatccagcacca

SEQ ID NO: 236425 - DNA, 25 bp, Artificial
  Probe
atacttcactgatgcttgtctggta

SEQ ID NO: 236426 - DNA, 25 bp, Artificial
  Probe
tggtaatgcctgttttcatctgtaa

SEQ ID NO: 236427 - DNA, 25 bp, Artificial
  Probe
gcaccacttgcagagggctgcttta

SEQ ID NO: 236428 - DNA, 25 bp, Artificial
  Probe
cttgggtgtattgcatgggctgcat

SEQ ID NO: 236429 - DNA, 25 bp, Artificial
  Probe
aaatcataaccaacatggctgcagt

SEQ ID NO: 236430 - DNA, 25 bp, Artificial
  Probe
gctgcagtagacttctttagtggta

SEQ ID NO: 236431 - DNA, 25 bp, Artificial
  Probe
aatcataaccaacatggctgcagta

SEQ ID NO: 236432 - DNA, 25 bp, Artificial
  Probe
cagtatacttcactgatgcttgtct

SEQ ID NO: 236433 - DNA, 25 bp, Artificial
  Probe
ctggtaatatcacttctgtgttata

SEQ ID NO: 236434 - DNA, 25 bp, Artificial
  Probe
tgtggtaatgcctgttttcatctgt

SEQ ID NO: 236435 - DNA, 25 bp, Artificial
  Probe
ttgtctggtaatatcacttctgtgt

SEQ ID NO: 236436 - DNA, 25 bp, Artificial
  Probe
gtatccagcaccacttgcagagggc

SEQ ID NO: 236437 - DNA, 25 bp, Artificial
  Probe
tgcttgtctggtaatatcacttctg

SEQ ID NO: 236438 - DNA, 25 bp, Artificial
  Probe
aatgcctgttttcatctgtaaatag

SEQ ID NO: 236439 - DNA, 25 bp, Artificial
  Probe
ggaaaatcataaccaacatggctgc

SEQ ID NO: 236440 - DNA, 25 bp, Artificial
  Probe
acttcactgatgcttgtctggtaat

SEQ ID NO: 236441 - DNA, 25 bp, Artificial
  Probe
tagtggtatccagcaccacttgcag

SEQ ID NO: 236442 - DNA, 25 bp, Artificial
  Probe
atggctgcagtagacttctttagtg

SEQ ID NO: 236443 - DNA, 25 bp, Artificial
  Probe
acatggctgcagtagacttctttag

SEQ ID NO: 236444 - DNA, 25 bp, Artificial
  Probe
cttctttagtggtatccagcaccac

SEQ ID NO: 236445 - DNA, 25 bp, Artificial
  Probe
tgcagtagacttctttagtggtatc

SEQ ID NO: 236446 - DNA, 25 bp, Artificial
  Probe
ctctagtgttcttgggtgtattgca

SEQ ID NO: 236447 - DNA, 25 bp, Artificial
  Probe
agtatacttcactgatgcttgtctg

SEQ ID NO: 236448 - DNA, 25 bp, Artificial
  Probe
gtctggtaatatcacttctgtgtta

SEQ ID NO: 236449 - DNA, 25 bp, Artificial
  Probe
gtagacttctttagtggtatccagc

SEQ ID NO: 236450 - DNA, 25 bp, Artificial
  Probe
aaccaacatggctgcagtagacttc

SEQ ID NO: 236451 - DNA, 25 bp, Artificial
  Probe
tgcctgttttcatctgtaaatagtt

SEQ ID NO: 236452 - DNA, 25 bp, Artificial
  Probe
gtggtatccagcaccacttgcagag

SEQ ID NO: 236453 - DNA, 25 bp, Artificial
  Probe
cagtagacttctttagtggtatcca

SEQ ID NO: 236454 - DNA, 25 bp, Artificial
  Probe
gtaatgcctgttttcatctgtaaat

SEQ ID NO: 236455 - DNA, 25 bp, Artificial
  Probe
gtggtaatgcctgttttcatctgta

SEQ ID NO: 236456 - DNA, 25 bp, Artificial
  Probe
ccacagatgccgttctggtgccgtt

SEQ ID NO: 236457 - DNA, 25 bp, Artificial
  Probe
ccagcagtttaaacgtgaggaggtg

SEQ ID NO: 236458 - DNA, 25 bp, Artificial
  Probe
gctcagattgcaggagatcatgaat

SEQ ID NO: 236459 - DNA, 25 bp, Artificial
  Probe
cagtttaaacgtgaggaggtgtctc

SEQ ID NO: 236460 - DNA, 25 bp, Artificial
  Probe
tgctttctgtccaagaagcagctgc

SEQ ID NO: 236461 - DNA, 25 bp, Artificial
  Probe
aaacgcctacagcaagccaaagctc

SEQ ID NO: 236462 - DNA, 25 bp, Artificial
  Probe
caaacataaccgatgtgcagttttt

SEQ ID NO: 236463 - DNA, 25 bp, Artificial
  Probe
tggacctgaggaagacctgacaaac

SEQ ID NO: 236464 - DNA, 25 bp, Artificial
  Probe
tgaaaaacgcctacagcaagccaaa

SEQ ID NO: 236465 - DNA, 25 bp, Artificial
  Probe
atttttcctaatattgggactgact

SEQ ID NO: 236466 - DNA, 25 bp, Artificial
  Probe
tctgcgagcccgaagaggaacttct

SEQ ID NO: 236467 - DNA, 25 bp, Artificial
  Probe
aggatgctttctgtccaagaagcag

SEQ ID NO: 236468 - DNA, 25 bp, Artificial
  Probe
caggagtacccgaggacggaagact

SEQ ID NO: 236469 - DNA, 25 bp, Artificial
  Probe
cttacctaggaatgagagggacagg

SEQ ID NO: 236470 - DNA, 25 bp, Artificial
  Probe
gatgtatttaacacttcactgctgt

SEQ ID NO: 236471 - DNA, 25 bp, Artificial
  Probe
ttatacaaacttcatgatcgattgg

SEQ ID NO: 236472 - DNA, 25 bp, Artificial
  Probe
agtccaccagaccacagatgccgtt

SEQ ID NO: 236473 - DNA, 25 bp, Artificial
  Probe
acacttcactgctgtggatttttaa

SEQ ID NO: 236474 - DNA, 25 bp, Artificial
  Probe
tgctcactacctgtcgatgttcctc

SEQ ID NO: 236475 - DNA, 25 bp, Artificial
  Probe
gtttttacagtccaccagaccacag

SEQ ID NO: 236476 - DNA, 25 bp, Artificial
  Probe
atgttcctcctaactgcagcctgct

SEQ ID NO: 236477 - DNA, 25 bp, Artificial
  Probe
ttcatgatcgattggctcagattgc

SEQ ID NO: 236478 - DNA, 25 bp, Artificial
  Probe
ctgaaaaacgcctacagcaagccaa

SEQ ID NO: 236479 - DNA, 25 bp, Artificial
  Probe
ggttatggacctgaggaagacctga

SEQ ID NO: 236480 - DNA, 25 bp, Artificial
  Probe
agatcatgaatgtggccgttccagc

SEQ ID NO: 236481 - DNA, 25 bp, Artificial
  Probe
caaagctctgcgagcccgaagagga

SEQ ID NO: 236482 - DNA, 25 bp, Artificial
  Probe
tctccgacggggagtttcagtgctc

SEQ ID NO: 236483 - DNA, 25 bp, Artificial
  Probe
acgcctacagcaagccaaagctctg

SEQ ID NO: 236484 - DNA, 25 bp, Artificial
  Probe
tacctgtcgatgttcctcctaactg

SEQ ID NO: 236485 - DNA, 25 bp, Artificial
  Probe
aagccaaagctctgcgagcccgaag

SEQ ID NO: 236486 - DNA, 25 bp, Artificial
  Probe
gagatcatgaatgtggccgttccag

SEQ ID NO: 236487 - DNA, 25 bp, Artificial
  Probe
cctaatattgggactgacttaccta

SEQ ID NO: 236488 - DNA, 25 bp, Artificial
  Probe
gagtacccgaggacggaagactctt

SEQ ID NO: 236489 - DNA, 25 bp, Artificial
  Probe
ttttcctaatattgggactgactta

SEQ ID NO: 236490 - DNA, 25 bp, Artificial
  Probe
aggaagacctgacaaacataaccga

SEQ ID NO: 236491 - DNA, 25 bp, Artificial
  Probe
cgatgtgcagtttttacagtccacc

SEQ ID NO: 236492 - DNA, 25 bp, Artificial
  Probe
cgacggggagtttcagtgctcacta

SEQ ID NO: 236493 - DNA, 25 bp, Artificial
  Probe
ctacagcaagccaaagctctgcgag

SEQ ID NO: 236494 - DNA, 25 bp, Artificial
  Probe
gtccaagaagcagctgcatatttaa

SEQ ID NO: 236495 - DNA, 25 bp, Artificial
  Probe
ccgaagaggaacttctccagcagtt

SEQ ID NO: 236496 - DNA, 25 bp, Artificial
  Probe
ttaaacgtgaggaggtgtctccgac

SEQ ID NO: 236497 - DNA, 25 bp, Artificial
  Probe
gggagtttcagtgctcactacctgt

SEQ ID NO: 236498 - DNA, 25 bp, Artificial
  Probe
gccgttccagccaaaggatgctttc

SEQ ID NO: 236499 - DNA, 25 bp, Artificial
  Probe
tgaatgtggccgttccagccaaagg

SEQ ID NO: 236500 - DNA, 25 bp, Artificial
  Probe
gggctccaatcatacctacctgaaa

SEQ ID NO: 236501 - DNA, 25 bp, Artificial
  Probe
cgagcccgaagaggaacttctccag

SEQ ID NO: 236502 - DNA, 25 bp, Artificial
  Probe
cagtgtactgggatacctagggata

SEQ ID NO: 236503 - DNA, 25 bp, Artificial
  Probe
gctgggatcaggacttacgaccctg

SEQ ID NO: 236504 - DNA, 25 bp, Artificial
  Probe
atctcagtgagaaggagctgctgag

SEQ ID NO: 236505 - DNA, 25 bp, Artificial
  Probe
aagctgatggcctaccctcaagacc

SEQ ID NO: 236506 - DNA, 25 bp, Artificial
  Probe
agaggcccaatcagggaccgaccct

SEQ ID NO: 236507 - DNA, 25 bp, Artificial
  Probe
atgaagctctaggaagttcaaacac

SEQ ID NO: 236508 - DNA, 25 bp, Artificial
  Probe
atacctagggataccaagtgtatta

SEQ ID NO: 236509 - DNA, 25 bp, Artificial
  Probe
aatcccttcaaggagaaaggcactt

SEQ ID NO: 236510 - DNA, 25 bp, Artificial
  Probe
gaacccacgtgatccgatttccaag

SEQ ID NO: 236511 - DNA, 25 bp, Artificial
  Probe
ggatcaatgtttacttcctcttaga

SEQ ID NO: 236512 - DNA, 25 bp, Artificial
  Probe
ccctcttctgaaaggcatcccagaa

SEQ ID NO: 236513 - DNA, 25 bp, Artificial
  Probe
gcaggatggcccaggatctcagtga

SEQ ID NO: 236514 - DNA, 25 bp, Artificial
  Probe
tcagctgggatcaggacttacgacc

SEQ ID NO: 236515 - DNA, 25 bp, Artificial
  Probe
cttgtgtgataagctgatggcctac

SEQ ID NO: 236516 - DNA, 25 bp, Artificial
  Probe
ccgatgaagctctaggaagttcaaa

SEQ ID NO: 236517 - DNA, 25 bp, Artificial
  Probe
aggatctcagtgagaaggagctgct

SEQ ID NO: 236518 - DNA, 25 bp, Artificial
  Probe
tcccttcaaggagaaaggcacttgt

SEQ ID NO: 236519 - DNA, 25 bp, Artificial
  Probe
tgtgataagctgatggcctaccctc

SEQ ID NO: 236520 - DNA, 25 bp, Artificial
  Probe
gcccaggatctcagtgagaaggagc

SEQ ID NO: 236521 - DNA, 25 bp, Artificial
  Probe
gtagaggcccaatcagggaccgacc

SEQ ID NO: 236522 - DNA, 25 bp, Artificial
  Probe
gtgtactgggatacctagggatacc

SEQ ID NO: 236523 - DNA, 25 bp, Artificial
  Probe
tacctagggataccaagtgtattag

SEQ ID NO: 236524 - DNA, 25 bp, Artificial
  Probe
gcacttgtgtgataagctgatggcc

SEQ ID NO: 236525 - DNA, 25 bp, Artificial
  Probe
tggcccaggatctcagtgagaagga

SEQ ID NO: 236526 - DNA, 25 bp, Artificial
  Probe
gaccgaccctcttctgaaaggcatc

SEQ ID NO: 236527 - DNA, 25 bp, Artificial
  Probe
cgatttccaagacaggaaaggaaat

SEQ ID NO: 236528 - DNA, 25 bp, Artificial
  Probe
tcctcagtctcaccagtgtactggg

SEQ ID NO: 236529 - DNA, 25 bp, Artificial
  Probe
aatcagggaccgaccctcttctgaa

SEQ ID NO: 236530 - DNA, 25 bp, Artificial
  Probe
gtactgggatacctagggataccaa

SEQ ID NO: 236531 - DNA, 25 bp, Artificial
  Probe
ggcacttgtgtgataagctgatggc

SEQ ID NO: 236532 - DNA, 25 bp, Artificial
  Probe
gaccctcttctgaaaggcatcccag

SEQ ID NO: 236533 - DNA, 25 bp, Artificial
  Probe
actggtgacttggagagagctctaa

SEQ ID NO: 236534 - DNA, 25 bp, Artificial
  Probe
tcaccagtgtactgggatacctagg

SEQ ID NO: 236535 - DNA, 25 bp, Artificial
  Probe
tcagtctcaccagtgtactgggata

SEQ ID NO: 236536 - DNA, 25 bp, Artificial
  Probe
ccacgtgatccgatttccaagacag

SEQ ID NO: 236537 - DNA, 25 bp, Artificial
  Probe
ctcctcagtctcaccagtgtactgg

SEQ ID NO: 236538 - DNA, 25 bp, Artificial
  Probe
tactgggatacctagggataccaag

SEQ ID NO: 236539 - DNA, 25 bp, Artificial
  Probe
ttctgaaaggcatcccagaagacaa

SEQ ID NO: 236540 - DNA, 25 bp, Artificial
  Probe
tgatccgatttccaagacaggaaag

SEQ ID NO: 236541 - DNA, 25 bp, Artificial
  Probe
tctcaccagtgtactgggataccta

SEQ ID NO: 236542 - DNA, 25 bp, Artificial
  Probe
atttccaagacaggaaaggaaatca

SEQ ID NO: 236543 - DNA, 25 bp, Artificial
  Probe
ggatggcccaggatctcagtgagaa

SEQ ID NO: 236544 - DNA, 25 bp, Artificial
  Probe
agaacccacgtgatccgatttccaa

SEQ ID NO: 236545 - DNA, 25 bp, Artificial
  Probe
ggatacctagggataccaagtgtat

SEQ ID NO: 236546 - DNA, 25 bp, Artificial
  Probe
tccgatttccaagacaggaaaggaa

SEQ ID NO: 236547 - DNA, 25 bp, Artificial
  Probe
cttctgaaaggcatcccagaagaca

SEQ ID NO: 236548 - DNA, 25 bp, Artificial
  Probe
cacctaaccagtgacaagctagtga

SEQ ID NO: 236549 - DNA, 25 bp, Artificial
  Probe
ccatcgtatccaagctctttttggt

SEQ ID NO: 236550 - DNA, 25 bp, Artificial
  Probe
ctccaacatgtcacaaagtaagaga

SEQ ID NO: 236551 - DNA, 25 bp, Artificial
  Probe
gtgaagctgtgcacctaaccagtga

SEQ ID NO: 236552 - DNA, 25 bp, Artificial
  Probe
gtatccaagctctttttggtgaagc

SEQ ID NO: 236553 - DNA, 25 bp, Artificial
  Probe
ttttggtgaagctgtgcacctaacc

SEQ ID NO: 236554 - DNA, 25 bp, Artificial
  Probe
tttttggtgaagctgtgcacctaac

SEQ ID NO: 236555 - DNA, 25 bp, Artificial
  Probe
agctctttttggtgaagctgtgcac

SEQ ID NO: 236556 - DNA, 25 bp, Artificial
  Probe
agctgtgcacctaaccagtgacaag

SEQ ID NO: 236557 - DNA, 25 bp, Artificial
  Probe
ccaacatgtcacaaagtaagagaca

SEQ ID NO: 236558 - DNA, 25 bp, Artificial
  Probe
tccaagctctttttggtgaagctgt

SEQ ID NO: 236559 - DNA, 25 bp, Artificial
  Probe
aaccagtgacaagctagtgactcag

SEQ ID NO: 236560 - DNA, 25 bp, Artificial
  Probe
atcgtatccaagctctttttggtga

SEQ ID NO: 236561 - DNA, 25 bp, Artificial
  Probe
tgacaagctagtgactcagtctctc

SEQ ID NO: 236562 - DNA, 25 bp, Artificial
  Probe
aacatgtcacaaagtaagagacatt

SEQ ID NO: 236563 - DNA, 25 bp, Artificial
  Probe
gacaagctagtgactcagtctctcc

SEQ ID NO: 236564 - DNA, 25 bp, Artificial
  Probe
aagctgtgcacctaaccagtgacaa

SEQ ID NO: 236565 - DNA, 25 bp, Artificial
  Probe
ctttttggtgaagctgtgcacctaa

SEQ ID NO: 236566 - DNA, 25 bp, Artificial
  Probe
agtgacaagctagtgactcagtctc

SEQ ID NO: 236567 - DNA, 25 bp, Artificial
  Probe
ctgtgcacctaaccagtgacaagct

SEQ ID NO: 236568 - DNA, 25 bp, Artificial
  Probe
ccaagctctttttggtgaagctgtg

SEQ ID NO: 236569 - DNA, 25 bp, Artificial
  Probe
ctaaccagtgacaagctagtgactc

SEQ ID NO: 236570 - DNA, 25 bp, Artificial
  Probe
aagctagtgactcagtctctccaac

SEQ ID NO: 236571 - DNA, 25 bp, Artificial
  Probe
ttggtgaagctgtgcacctaaccag

SEQ ID NO: 236572 - DNA, 25 bp, Artificial
  Probe
caagctagtgactcagtctctccaa

SEQ ID NO: 236573 - DNA, 25 bp, Artificial
  Probe
tgaagctgtgcacctaaccagtgac

SEQ ID NO: 236574 - DNA, 25 bp, Artificial
  Probe
tgcacctaaccagtgacaagctagt

SEQ ID NO: 236575 - DNA, 25 bp, Artificial
  Probe
accagtgacaagctagtgactcagt

SEQ ID NO: 236576 - DNA, 25 bp, Artificial
  Probe
tccaacatgtcacaaagtaagagac

SEQ ID NO: 236577 - DNA, 25 bp, Artificial
  Probe
tctttttggtgaagctgtgcaccta

SEQ ID NO: 236578 - DNA, 25 bp, Artificial
  Probe
catcgtatccaagctctttttggtg

SEQ ID NO: 236579 - DNA, 25 bp, Artificial
  Probe
gctctttttggtgaagctgtgcacc

SEQ ID NO: 236580 - DNA, 25 bp, Artificial
  Probe
gtgactcagtctctccaacatgtca

SEQ ID NO: 236581 - DNA, 25 bp, Artificial
  Probe
tctccaacatgtcacaaagtaagag

SEQ ID NO: 236582 - DNA, 25 bp, Artificial
  Probe
cgtatccaagctctttttggtgaag

SEQ ID NO: 236583 - DNA, 25 bp, Artificial
  Probe
tggtgaagctgtgcacctaaccagt

SEQ ID NO: 236584 - DNA, 25 bp, Artificial
  Probe
agtgactcagtctctccaacatgtc

SEQ ID NO: 236585 - DNA, 25 bp, Artificial
  Probe
caacatgtcacaaagtaagagacat

SEQ ID NO: 236586 - DNA, 25 bp, Artificial
  Probe
tagtgactcagtctctccaacatgt

SEQ ID NO: 236587 - DNA, 25 bp, Artificial
  Probe
gcacctaaccagtgacaagctagtg

SEQ ID NO: 236588 - DNA, 25 bp, Artificial
  Probe
acctaaccagtgacaagctagtgac

SEQ ID NO: 236589 - DNA, 25 bp, Artificial
  Probe
caagctctttttggtgaagctgtgc

SEQ ID NO: 236590 - DNA, 25 bp, Artificial
  Probe
cctaaccagtgacaagctagtgact

SEQ ID NO: 236591 - DNA, 25 bp, Artificial
  Probe
tatccaagctctttttggtgaagct

SEQ ID NO: 236592 - DNA, 25 bp, Artificial
  Probe
gctagtgactcagtctctccaacat

SEQ ID NO: 236593 - DNA, 25 bp, Artificial
  Probe
gtgcacctaaccagtgacaagctag

SEQ ID NO: 236594 - DNA, 25 bp, Artificial
  Probe
aaccatcctagatggcatttgagca

SEQ ID NO: 236595 - DNA, 25 bp, Artificial
  Probe
aaaccatcctagatggcatttgagc

SEQ ID NO: 236596 - DNA, 25 bp, Artificial
  Probe
attagcgctgctcctgttcctgatc

SEQ ID NO: 236597 - DNA, 25 bp, Artificial
  Probe
cccgtccaagtctcttctgatgcta

SEQ ID NO: 236598 - DNA, 25 bp, Artificial
  Probe
gtctgtgcttaagaatgggaccaag

SEQ ID NO: 236599 - DNA, 25 bp, Artificial
  Probe
gcaggttcttaccttgttcctggcg

SEQ ID NO: 236600 - DNA, 25 bp, Artificial
  Probe
gagagcgccccttgcaggttcttac

SEQ ID NO: 236601 - DNA, 25 bp, Artificial
  Probe
atcctagatggcatttgagcacgca

SEQ ID NO: 236602 - DNA, 25 bp, Artificial
  Probe
ccttgcaggttcttaccttgttcct

SEQ ID NO: 236603 - DNA, 25 bp, Artificial
  Probe
tgtggggaccctcaggaaaccgaga

SEQ ID NO: 236604 - DNA, 25 bp, Artificial
  Probe
actccagagagagaatcaggagagc

SEQ ID NO: 236605 - DNA, 25 bp, Artificial
  Probe
aagctacgagctgtaatgtgccatc

SEQ ID NO: 236606 - DNA, 25 bp, Artificial
  Probe
tggggaccctcaggaaaccgagaag

SEQ ID NO: 236607 - DNA, 25 bp, Artificial
  Probe
tcctagatggcatttgagcacgcac

SEQ ID NO: 236608 - DNA, 25 bp, Artificial
  Probe
cactcctagtgctgtgactactcca

SEQ ID NO: 236609 - DNA, 25 bp, Artificial
  Probe
tactccagagagagaatcaggagag

SEQ ID NO: 236610 - DNA, 25 bp, Artificial
  Probe
ggcgctgacattagcgctgctcctg

SEQ ID NO: 236611 - DNA, 25 bp, Artificial
  Probe
ctgttcttaaaaccatcctagatgg

SEQ ID NO: 236612 - DNA, 25 bp, Artificial
  Probe
ttagcgctgctcctgttcctgatct

SEQ ID NO: 236613 - DNA, 25 bp, Artificial
  Probe
agatgcttgtagctgccggtttcca

SEQ ID NO: 236614 - DNA, 25 bp, Artificial
  Probe
cttcatcattctctggttctctgtg

SEQ ID NO: 236615 - DNA, 25 bp, Artificial
  Probe
atgtggggaccctcaggaaaccgag

SEQ ID NO: 236616 - DNA, 25 bp, Artificial
  Probe
ctctctagacggaaggtctgtgctt

SEQ ID NO: 236617 - DNA, 25 bp, Artificial
  Probe
ttaccttgttcctggcgctgacatt

SEQ ID NO: 236618 - DNA, 25 bp, Artificial
  Probe
ttaaaaccatcctagatggcatttg

SEQ ID NO: 236619 - DNA, 25 bp, Artificial
  Probe
tctagacggaaggtctgtgcttaag

SEQ ID NO: 236620 - DNA, 25 bp, Artificial
  Probe
tcctagtgctgtgactactccagag

SEQ ID NO: 236621 - DNA, 25 bp, Artificial
  Probe
tgttcctggcgctgacattagcgct

SEQ ID NO: 236622 - DNA, 25 bp, Artificial
  Probe
gctgctcctgttcctgatcttcatc

SEQ ID NO: 236623 - DNA, 25 bp, Artificial
  Probe
ctagatggcatttgagcacgcaccc

SEQ ID NO: 236624 - DNA, 25 bp, Artificial
  Probe
actgctctctagacggaaggtctgt

SEQ ID NO: 236625 - DNA, 25 bp, Artificial
  Probe
gggaccctcaggaaaccgagaagca

SEQ ID NO: 236626 - DNA, 25 bp, Artificial
  Probe
accactcctagtgctgtgactactc

SEQ ID NO: 236627 - DNA, 25 bp, Artificial
  Probe
ttcatcattctctggttctctgtgc

SEQ ID NO: 236628 - DNA, 25 bp, Artificial
  Probe
gagaaagacgtggtctgtggacccc

SEQ ID NO: 236629 - DNA, 25 bp, Artificial
  Probe
ctagacggaaggtctgtgcttaaga

SEQ ID NO: 236630 - DNA, 25 bp, Artificial
  Probe
aaggtctgtgcttaagaatgggacc

SEQ ID NO: 236631 - DNA, 25 bp, Artificial
  Probe
tgacattagcgctgctcctgttcct

SEQ ID NO: 236632 - DNA, 25 bp, Artificial
  Probe
gttcctggcgctgacattagcgctg

SEQ ID NO: 236633 - DNA, 25 bp, Artificial
  Probe
gtaccactcctagtgctgtgactac

SEQ ID NO: 236634 - DNA, 25 bp, Artificial
  Probe
gttcctgatcttcatcattctctgg

SEQ ID NO: 236635 - DNA, 25 bp, Artificial
  Probe
gttcttaaaaccatcctagatggca

SEQ ID NO: 236636 - DNA, 25 bp, Artificial
  Probe
gccccttgcaggttcttaccttgtt

SEQ ID NO: 236637 - DNA, 25 bp, Artificial
  Probe
gaagatgcttgtagctgccggtttc

SEQ ID NO: 236638 - DNA, 25 bp, Artificial
  Probe
gcgctgctcctgttcctgatcttca

SEQ ID NO: 236639 - DNA, 25 bp, Artificial
  Probe
tgactactccagagagagaatcagg

SEQ ID NO: 236640 - DNA, 25 bp, Artificial
  Probe
cactcagagaaaagacccaggggaa

SEQ ID NO: 236641 - DNA, 25 bp, Artificial
  Probe
tgcagacaaaaacctgattgcgaag

SEQ ID NO: 236642 - DNA, 25 bp, Artificial
  Probe
agcaagctggaagtgggtcgcatca

SEQ ID NO: 236643 - DNA, 25 bp, Artificial
  Probe
aagacccaggggaagcatgagctct

SEQ ID NO: 236644 - DNA, 25 bp, Artificial
  Probe
agctgaaactgaaccccatgagggg

SEQ ID NO: 236645 - DNA, 25 bp, Artificial
  Probe
actgaaccccatgaggggaagagga

SEQ ID NO: 236646 - DNA, 25 bp, Artificial
  Probe
ctgaaccccatgaggggaagaggaa

SEQ ID NO: 236647 - DNA, 25 bp, Artificial
  Probe
gctatgcagacaaaaacctgattgc

SEQ ID NO: 236648 - DNA, 25 bp, Artificial
  Probe
ttcccaagagcaagctggaagtggg

SEQ ID NO: 236649 - DNA, 25 bp, Artificial
  Probe
cagacaaaaacctgattgcgaagtg

SEQ ID NO: 236650 - DNA, 25 bp, Artificial
  Probe
atcttcgacctcttttacaagagga

SEQ ID NO: 236651 - DNA, 25 bp, Artificial
  Probe
agacccaggggaagcatgagctcta

SEQ ID NO: 236652 - DNA, 25 bp, Artificial
  Probe
acctcttttacaagaggaaagccat

SEQ ID NO: 236653 - DNA, 25 bp, Artificial
  Probe
gagaaaagacccaggggaagcatga

SEQ ID NO: 236654 - DNA, 25 bp, Artificial
  Probe
tcgacctcttttacaagaggaaagc

SEQ ID NO: 236655 - DNA, 25 bp, Artificial
  Probe
tcccaagagcaagctggaagtgggt

SEQ ID NO: 236656 - DNA, 25 bp, Artificial
  Probe
acccaggggaagcatgagctctaca

SEQ ID NO: 236657 - DNA, 25 bp, Artificial
  Probe
gacctcttttacaagaggaaagcca

SEQ ID NO: 236658 - DNA, 25 bp, Artificial
  Probe
gaactctatgaatactgcattaaag

SEQ ID NO: 236659 - DNA, 25 bp, Artificial
  Probe
tatgcagacaaaaacctgattgcga

SEQ ID NO: 236660 - DNA, 25 bp, Artificial
  Probe
agccataagcagagaactctatgaa

SEQ ID NO: 236661 - DNA, 25 bp, Artificial
  Probe
ttcgacctcttttacaagaggaaag

SEQ ID NO: 236662 - DNA, 25 bp, Artificial
  Probe
ctcttttacaagaggaaagccataa

SEQ ID NO: 236663 - DNA, 25 bp, Artificial
  Probe
ctctatgaatactgcattaaagaag

SEQ ID NO: 236664 - DNA, 25 bp, Artificial
  Probe
cccaagagcaagctggaagtgggtc

SEQ ID NO: 236665 - DNA, 25 bp, Artificial
  Probe
cctcttttacaagaggaaagccata

SEQ ID NO: 236666 - DNA, 25 bp, Artificial
  Probe
tctggttgactgacgcccctgactc

SEQ ID NO: 236667 - DNA, 25 bp, Artificial
  Probe
ctatgcagacaaaaacctgattgcg

SEQ ID NO: 236668 - DNA, 25 bp, Artificial
  Probe
aagctgaaactgaaccccatgaggg

SEQ ID NO: 236669 - DNA, 25 bp, Artificial
  Probe
aactgaaccccatgaggggaagagg

SEQ ID NO: 236670 - DNA, 25 bp, Artificial
  Probe
cataagcagagaactctatgaatac

SEQ ID NO: 236671 - DNA, 25 bp, Artificial
  Probe
tcttcgacctcttttacaagaggaa

SEQ ID NO: 236672 - DNA, 25 bp, Artificial
  Probe
ctcagagaaaagacccaggggaagc

SEQ ID NO: 236673 - DNA, 25 bp, Artificial
  Probe
aaagccataagcagagaactctatg

SEQ ID NO: 236674 - DNA, 25 bp, Artificial
  Probe
ctatgaatactgcattaaagaaggc

SEQ ID NO: 236675 - DNA, 25 bp, Artificial
  Probe
aaactgaaccccatgaggggaagag

SEQ ID NO: 236676 - DNA, 25 bp, Artificial
  Probe
gccataagcagagaactctatgaat

SEQ ID NO: 236677 - DNA, 25 bp, Artificial
  Probe
gacccaggggaagcatgagctctac

SEQ ID NO: 236678 - DNA, 25 bp, Artificial
  Probe
gaagctgaaactgaaccccatgagg

SEQ ID NO: 236679 - DNA, 25 bp, Artificial
  Probe
catcttcgacctcttttacaagagg

SEQ ID NO: 236680 - DNA, 25 bp, Artificial
  Probe
atgcagacaaaaacctgattgcgaa

SEQ ID NO: 236681 - DNA, 25 bp, Artificial
  Probe
ccataagcagagaactctatgaata

SEQ ID NO: 236682 - DNA, 25 bp, Artificial
  Probe
ggctgaaactattcccacacaagcc

SEQ ID NO: 236683 - DNA, 25 bp, Artificial
  Probe
gctgccagttcaaaaaatcaagacc

SEQ ID NO: 236684 - DNA, 25 bp, Artificial
  Probe
acagccatcaaaaccgtagatggca

SEQ ID NO: 236685 - DNA, 25 bp, Artificial
  Probe
tcctgactttcctgggagtctgctg

SEQ ID NO: 236686 - DNA, 25 bp, Artificial
  Probe
ccacaagccaaatgggtgaaaacag

SEQ ID NO: 236687 - DNA, 25 bp, Artificial
  Probe
cttctcctcctgactttcctgggag

SEQ ID NO: 236688 - DNA, 25 bp, Artificial
  Probe
agtgttaccctcaatcaccaagcag

SEQ ID NO: 236689 - DNA, 25 bp, Artificial
  Probe
gagctcagcgagacctcagccatga

SEQ ID NO: 236690 - DNA, 25 bp, Artificial
  Probe
caggacagtgttaccctcaatcacc

SEQ ID NO: 236691 - DNA, 25 bp, Artificial
  Probe
cacgaggagctcagcgagacctcag

SEQ ID NO: 236692 - DNA, 25 bp, Artificial
  Probe
ttacgctatacttacttttagtgag

SEQ ID NO: 236693 - DNA, 25 bp, Artificial
  Probe
gaacccagcggctgccagttcaaaa

SEQ ID NO: 236694 - DNA, 25 bp, Artificial
  Probe
gagtatctgtgtgagcttaagaacc

SEQ ID NO: 236695 - DNA, 25 bp, Artificial
  Probe
aaggctgaaactattcccacacaag

SEQ ID NO: 236696 - DNA, 25 bp, Artificial
  Probe
aggagctcagcgagacctcagccat

SEQ ID NO: 236697 - DNA, 25 bp, Artificial
  Probe
agacctcagccatgagacttctcct

SEQ ID NO: 236698 - DNA, 25 bp, Artificial
  Probe
gtgaaaacagccatcaaaaccgtag

SEQ ID NO: 236699 - DNA, 25 bp, Artificial
  Probe
tcagcgagacctcagccatgagact

SEQ ID NO: 236700 - DNA, 25 bp, Artificial
  Probe
tgaaaacagccatcaaaaccgtaga

SEQ ID NO: 236701 - DNA, 25 bp, Artificial
  Probe
ctgcttcgccgcatgggttgtggaa

SEQ ID NO: 236702 - DNA, 25 bp, Artificial
  Probe
gtgagcttaagaacccagcggctgc

SEQ ID NO: 236703 - DNA, 25 bp, Artificial
  Probe
cctacaagagagtatctgtgtgagc

SEQ ID NO: 236704 - DNA, 25 bp, Artificial
  Probe
atctgtgtgagcttaagaacccagc

SEQ ID NO: 236705 - DNA, 25 bp, Artificial
  Probe
gagtctgctgcttcgccgcatgggt

SEQ ID NO: 236706 - DNA, 25 bp, Artificial
  Probe
agccatgagacttctcctcctgact

SEQ ID NO: 236707 - DNA, 25 bp, Artificial
  Probe
gctcatggactatttacgctatact

SEQ ID NO: 236708 - DNA, 25 bp, Artificial
  Probe
ttgtgctgatccacaagccaaatgg

SEQ ID NO: 236709 - DNA, 25 bp, Artificial
  Probe
caagacctacaccatcaaggaggga

SEQ ID NO: 236710 - DNA, 25 bp, Artificial
  Probe
atctcagttcccaagctcatggact

SEQ ID NO: 236711 - DNA, 25 bp, Artificial
  Probe
caccaaacgaggactaagaatttgt

SEQ ID NO: 236712 - DNA, 25 bp, Artificial
  Probe
gctcatctcagttcccaagctcatg

SEQ ID NO: 236713 - DNA, 25 bp, Artificial
  Probe
agaatttgtgctgatccacaagcca

SEQ ID NO: 236714 - DNA, 25 bp, Artificial
  Probe
gactttcctgggagtctgctgcttc

SEQ ID NO: 236715 - DNA, 25 bp, Artificial
  Probe
tgtgggcactgaagtcctacaagag

SEQ ID NO: 236716 - DNA, 25 bp, Artificial
  Probe
gcttaagaacccagcggctgccagt

SEQ ID NO: 236717 - DNA, 25 bp, Artificial
  Probe
aatcaagacctacaccatcaaggag

SEQ ID NO: 236718 - DNA, 25 bp, Artificial
  Probe
gtgttaccctcaatcaccaagcagc

SEQ ID NO: 236719 - DNA, 25 bp, Artificial
  Probe
tgctgatccacaagccaaatgggtg

SEQ ID NO: 236720 - DNA, 25 bp, Artificial
  Probe
aacagccatcaaaaccgtagatggc

SEQ ID NO: 236721 - DNA, 25 bp, Artificial
  Probe
taatttttgtcaccaaacgaggact

SEQ ID NO: 236722 - DNA, 25 bp, Artificial
  Probe
gagacctcagccatgagacttctcc

SEQ ID NO: 236723 - DNA, 25 bp, Artificial
  Probe
tgggtaacagcctcaggacagtgtt

SEQ ID NO: 236724 - DNA, 25 bp, Artificial
  Probe
ccagcggctgccagttcaaaaaatc

SEQ ID NO: 236725 - DNA, 25 bp, Artificial
  Probe
gccatgagacttctcctcctgactt

SEQ ID NO: 236726 - DNA, 25 bp, Artificial
  Probe
ccagtgccagcaagagcaaggctga

SEQ ID NO: 236727 - DNA, 25 bp, Artificial
  Probe
ccagcaagagcaaggctgaaactat

SEQ ID NO: 236728 - DNA, 25 bp, Artificial
  Probe
acagtgttcctgcagctgaaacgca

SEQ ID NO: 236729 - DNA, 25 bp, Artificial
  Probe
cctgcagctgaaacgcaagcgtggg

SEQ ID NO: 236730 - DNA, 25 bp, Artificial
  Probe
tattaccctctggtggaagacaagg

SEQ ID NO: 236731 - DNA, 25 bp, Artificial
  Probe
agttcacgtattaccctctggtgga

SEQ ID NO: 236732 - DNA, 25 bp, Artificial
  Probe
cggatccctggatccctctgtacag

SEQ ID NO: 236733 - DNA, 25 bp, Artificial
  Probe
gaggcctgtaacagtgttcctgcag

SEQ ID NO: 236734 - DNA, 25 bp, Artificial
  Probe
acgtattaccctctggtggaagaca

SEQ ID NO: 236735 - DNA, 25 bp, Artificial
  Probe
gtatgccattgtgttccggacaccg

SEQ ID NO: 236736 - DNA, 25 bp, Artificial
  Probe
ttaccctctggtggaagacaaggag

SEQ ID NO: 236737 - DNA, 25 bp, Artificial
  Probe
agtgttcctgcagctgaaacgcaag

SEQ ID NO: 236738 - DNA, 25 bp, Artificial
  Probe
gccctatcacaagatgaagattgag

SEQ ID NO: 236739 - DNA, 25 bp, Artificial
  Probe
taacagtgttcctgcagctgaaacg

SEQ ID NO: 236740 - DNA, 25 bp, Artificial
  Probe
ttgagaggcctgtaacagtgttcct

SEQ ID NO: 236741 - DNA, 25 bp, Artificial
  Probe
attaccctctggtggaagacaagga

SEQ ID NO: 236742 - DNA, 25 bp, Artificial
  Probe
accgccctatcacaagatgaagatt

SEQ ID NO: 236743 - DNA, 25 bp, Artificial
  Probe
gcctgtaacagtgttcctgcagctg

SEQ ID NO: 236744 - DNA, 25 bp, Artificial
  Probe
cggagaaaggccttgcctaccttct

SEQ ID NO: 236745 - DNA, 25 bp, Artificial
  Probe
atgccattgtgttccggacaccgcc

SEQ ID NO: 236746 - DNA, 25 bp, Artificial
  Probe
gattgagaggcctgtaacagtgttc

SEQ ID NO: 236747 - DNA, 25 bp, Artificial
  Probe
attgagaggcctgtaacagtgttcc

SEQ ID NO: 236748 - DNA, 25 bp, Artificial
  Probe
caagtatgccattgtgttccggaca

SEQ ID NO: 236749 - DNA, 25 bp, Artificial
  Probe
gtctccgactccaaacagttcacgt

SEQ ID NO: 236750 - DNA, 25 bp, Artificial
  Probe
ctgtaacagtgttcctgcagctgaa

SEQ ID NO: 236751 - DNA, 25 bp, Artificial
  Probe
cgtattaccctctggtggaagacaa

SEQ ID NO: 236752 - DNA, 25 bp, Artificial
  Probe
cgccctatcacaagatgaagattga

SEQ ID NO: 236753 - DNA, 25 bp, Artificial
  Probe
tgagaggcctgtaacagtgttcctg

SEQ ID NO: 236754 - DNA, 25 bp, Artificial
  Probe
cacgtattaccctctggtggaagac

SEQ ID NO: 236755 - DNA, 25 bp, Artificial
  Probe
aagtatgccattgtgttccggacac

SEQ ID NO: 236756 - DNA, 25 bp, Artificial
  Probe
tcctgcagctgaaacgcaagcgtgg

SEQ ID NO: 236757 - DNA, 25 bp, Artificial
  Probe
taccctctggtggaagacaaggagg

SEQ ID NO: 236758 - DNA, 25 bp, Artificial
  Probe
ccctatcacaagatgaagattgaga

SEQ ID NO: 236759 - DNA, 25 bp, Artificial
  Probe
aacagttcacgtattaccctctggt

SEQ ID NO: 236760 - DNA, 25 bp, Artificial
  Probe
gatgtctccgactccaaacagttca

SEQ ID NO: 236761 - DNA, 25 bp, Artificial
  Probe
aacagtgttcctgcagctgaaacgc

SEQ ID NO: 236762 - DNA, 25 bp, Artificial
  Probe
gagaggcctgtaacagtgttcctgc

SEQ ID NO: 236763 - DNA, 25 bp, Artificial
  Probe
tgtaacagtgttcctgcagctgaaa

SEQ ID NO: 236764 - DNA, 25 bp, Artificial
  Probe
cctatcacaagatgaagattgagag

SEQ ID NO: 236765 - DNA, 25 bp, Artificial
  Probe
gggcggatccctggatccctctgta

SEQ ID NO: 236766 - DNA, 25 bp, Artificial
  Probe
acagttcacgtattaccctctggtg

SEQ ID NO: 236767 - DNA, 25 bp, Artificial
  Probe
gttcctgcagctgaaacgcaagcgt

SEQ ID NO: 236768 - DNA, 25 bp, Artificial
  Probe
tgttcctgcagctgaaacgcaagcg

SEQ ID NO: 236769 - DNA, 25 bp, Artificial
  Probe
gcggatccctggatccctctgtaca

SEQ ID NO: 236770 - DNA, 25 bp, Artificial
  Probe
tgtctccgactccaaacagttcacg

SEQ ID NO: 236771 - DNA, 25 bp, Artificial
  Probe
ggcctgtaacagtgttcctgcagct

SEQ ID NO: 236772 - DNA, 25 bp, Artificial
  Probe
gcgatgtctccgactccaaacagtt

SEQ ID NO: 236773 - DNA, 25 bp, Artificial
  Probe
cagtgttcctgcagctgaaacgcaa

SEQ ID NO: 236774 - DNA, 25 bp, Artificial
  Probe
tgtgtgtttgtgtggcgtgcccacc

SEQ ID NO: 236775 - DNA, 25 bp, Artificial
  Probe
atttgtgtgtttgtgtggcgtgccc

SEQ ID NO: 236776 - DNA, 25 bp, Artificial
  Probe
gacgtccttcctttgaataaaggtg

SEQ ID NO: 236777 - DNA, 25 bp, Artificial
  Probe
agctaggcaagctaacaatgataag

SEQ ID NO: 236778 - DNA, 25 bp, Artificial
  Probe
ataagggaaaagctctcagggaact

SEQ ID NO: 236779 - DNA, 25 bp, Artificial
  Probe
atgttgcagactgctgggcagtcgt

SEQ ID NO: 236780 - DNA, 25 bp, Artificial
  Probe
gcacagtttcttatgttggggtgct

SEQ ID NO: 236781 - DNA, 25 bp, Artificial
  Probe
agactgctgggcagtcgtgttcttc

SEQ ID NO: 236782 - DNA, 25 bp, Artificial
  Probe
ggaggctgacccttccaggttccgc

SEQ ID NO: 236783 - DNA, 25 bp, Artificial
  Probe
cttgtagcacagtttcttatgttgg

SEQ ID NO: 236784 - DNA, 25 bp, Artificial
  Probe
ttggggtgctagtgcctactggaac

SEQ ID NO: 236785 - DNA, 25 bp, Artificial
  Probe
cccagggacccctgttgtatgtcct

SEQ ID NO: 236786 - DNA, 25 bp, Artificial
  Probe
accatggttgagaccctgtccctgg

SEQ ID NO: 236787 - DNA, 25 bp, Artificial
  Probe
ggctctgtgtatgtgcgtatgtcta

SEQ ID NO: 236788 - DNA, 25 bp, Artificial
  Probe
tctttttgcaaagaccttagctagg

SEQ ID NO: 236789 - DNA, 25 bp, Artificial
  Probe
ctcagtggaggctgacccttccagg

SEQ ID NO: 236790 - DNA, 25 bp, Artificial
  Probe
cttatgttggggtgctagtgcctac

SEQ ID NO: 236791 - DNA, 25 bp, Artificial
  Probe
tatgttggggtgctagtgcctactg

SEQ ID NO: 236792 - DNA, 25 bp, Artificial
  Probe
ctcagggaactgatgtgttgttgcc

SEQ ID NO: 236793 - DNA, 25 bp, Artificial
  Probe
tactccaagggcagttctgtgggat

SEQ ID NO: 236794 - DNA, 25 bp, Artificial
  Probe
ctactggaaccttccctgtcaattg

SEQ ID NO: 236795 - DNA, 25 bp, Artificial
  Probe
caattgagctgtattctgtgttctt

SEQ ID NO: 236796 - DNA, 25 bp, Artificial
  Probe
ccaagggcagttctgtgggatctgt

SEQ ID NO: 236797 - DNA, 25 bp, Artificial
  Probe
tccttcctttgaataaaggtgttct

SEQ ID NO: 236798 - DNA, 25 bp, Artificial
  Probe
cccttctcagtggaggctgaccctt

SEQ ID NO: 236799 - DNA, 25 bp, Artificial
  Probe
ctctatactccaagggcagttctgt

SEQ ID NO: 236800 - DNA, 25 bp, Artificial
  Probe
gttgttgccatggtgacgtccttcc

SEQ ID NO: 236801 - DNA, 25 bp, Artificial
  Probe
gcccctggtatccaaagggcccagg

SEQ ID NO: 236802 - DNA, 25 bp, Artificial
  Probe
cacagtttcttatgttggggtgcta

SEQ ID NO: 236803 - DNA, 25 bp, Artificial
  Probe
gaggctgacccttccaggttccgct

SEQ ID NO: 236804 - DNA, 25 bp, Artificial
  Probe
tctgtacccggacacaccctggtgt

SEQ ID NO: 236805 - DNA, 25 bp, Artificial
  Probe
taactactctatactccaagggcag

SEQ ID NO: 236806 - DNA, 25 bp, Artificial
  Probe
ggactgtcttgtagcacagtttctt

SEQ ID NO: 236807 - DNA, 25 bp, Artificial
  Probe
ttcagggctctgtgtatgtgcgtat

SEQ ID NO: 236808 - DNA, 25 bp, Artificial
  Probe
aagctctcagggaactgatgtgttg

SEQ ID NO: 236809 - DNA, 25 bp, Artificial
  Probe
atctgtacccggacacaccctggtg

SEQ ID NO: 236810 - DNA, 25 bp, Artificial
  Probe
aagaccttagctaggcaagctaaca

SEQ ID NO: 236811 - DNA, 25 bp, Artificial
  Probe
ccacccatgttgcagactgctgggc

SEQ ID NO: 236812 - DNA, 25 bp, Artificial
  Probe
ctgctgggcagtcgtgttcttcagg

SEQ ID NO: 236813 - DNA, 25 bp, Artificial
  Probe
ggaaaagctctcagggaactgatgt

SEQ ID NO: 236814 - DNA, 25 bp, Artificial
  Probe
tgttgtatgtcctggccttggtgta

SEQ ID NO: 236815 - DNA, 25 bp, Artificial
  Probe
tagcaaccatggttgagaccctgtc

SEQ ID NO: 236816 - DNA, 25 bp, Artificial
  Probe
cctgggtgcccctggtatccaaagg

SEQ ID NO: 236817 - DNA, 25 bp, Artificial
  Probe
gtgtccatggggactgtcttgtagc

SEQ ID NO: 236818 - DNA, 25 bp, Artificial
  Probe
gttgagaccctgtccctgggtgccc

SEQ ID NO: 236819 - DNA, 25 bp, Artificial
  Probe
tggaaccttccctgtcaattgagct

SEQ ID NO: 236820 - DNA, 25 bp, Artificial
  Probe
gcctttacaacttatgtgaagaaat

SEQ ID NO: 236821 - DNA, 25 bp, Artificial
  Probe
aacacttacagtactcctgatggaa

SEQ ID NO: 236822 - DNA, 25 bp, Artificial
  Probe
tggaatccctaaagtttgagccttt

SEQ ID NO: 236823 - DNA, 25 bp, Artificial
  Probe
ccaagctgaatgtttctgggtaggc

SEQ ID NO: 236824 - DNA, 25 bp, Artificial
  Probe
ccatttgacacttcggatcagtgac

SEQ ID NO: 236825 - DNA, 25 bp, Artificial
  Probe
gtttcagtctctgctagttcatacc

SEQ ID NO: 236826 - DNA, 25 bp, Artificial
  Probe
gatatactggaatccctaaagtttg

SEQ ID NO: 236827 - DNA, 25 bp, Artificial
  Probe
aacagatctccgtcattgtttaaga

SEQ ID NO: 236828 - DNA, 25 bp, Artificial
  Probe
tctgggtaggccatttgacacttcg

SEQ ID NO: 236829 - DNA, 25 bp, Artificial
  Probe
ttcggatcagtgacgtactcctgtg

SEQ ID NO: 236830 - DNA, 25 bp, Artificial
  Probe
cggatcagtgacgtactcctgtgag

SEQ ID NO: 236831 - DNA, 25 bp, Artificial
  Probe
gcactacttcttaggctgtggtttc

SEQ ID NO: 236832 - DNA, 25 bp, Artificial
  Probe
gatctccgtcattgtttaagaaaac

SEQ ID NO: 236833 - DNA, 25 bp, Artificial
  Probe
acaactggcactacttcttaggctg

SEQ ID NO: 236834 - DNA, 25 bp, Artificial
  Probe
gattttgatggtccaatgtaatctc

SEQ ID NO: 236835 - DNA, 25 bp, Artificial
  Probe
ccaacaactggcactacttcttagg

SEQ ID NO: 236836 - DNA, 25 bp, Artificial
  Probe
actcctgatggaaacagtttcttgc

SEQ ID NO: 236837 - DNA, 25 bp, Artificial
  Probe
ggttaaacacttacagtactcctga

SEQ ID NO: 236838 - DNA, 25 bp, Artificial
  Probe
aggttaaacacttacagtactcctg

SEQ ID NO: 236839 - DNA, 25 bp, Artificial
  Probe
acttgagatcaccaacatgccagga

SEQ ID NO: 236840 - DNA, 25 bp, Artificial
  Probe
gaaatgttgcacacatttctggatg

SEQ ID NO: 236841 - DNA, 25 bp, Artificial
  Probe
gggtaggccatttgacacttcggat

SEQ ID NO: 236842 - DNA, 25 bp, Artificial
  Probe
ccacttgagatcaccaacatgccag

SEQ ID NO: 236843 - DNA, 25 bp, Artificial
  Probe
atctcattcaggaggctgggaacat

SEQ ID NO: 236844 - DNA, 25 bp, Artificial
  Probe
agatcaccaacatgccaggacaagt

SEQ ID NO: 236845 - DNA, 25 bp, Artificial
  Probe
taaacacttacagtactcctgatgg

SEQ ID NO: 236846 - DNA, 25 bp, Artificial
  Probe
tccactgattttgatggtccaatgt

SEQ ID NO: 236847 - DNA, 25 bp, Artificial
  Probe
tactggaatccctaaagtttgagcc

SEQ ID NO: 236848 - DNA, 25 bp, Artificial
  Probe
tacttcttaggctgtggtttcagtc

SEQ ID NO: 236849 - DNA, 25 bp, Artificial
  Probe
gctgaatgtttctgggtaggccatt

SEQ ID NO: 236850 - DNA, 25 bp, Artificial
  Probe
caacaactggcactacttcttaggc

SEQ ID NO: 236851 - DNA, 25 bp, Artificial
  Probe
ctgctagttcataccgcatgtttat

SEQ ID NO: 236852 - DNA, 25 bp, Artificial
  Probe
accaacatgccaggacaagtccact

SEQ ID NO: 236853 - DNA, 25 bp, Artificial
  Probe
gaattttaacagatctccgtcattg

SEQ ID NO: 236854 - DNA, 25 bp, Artificial
  Probe
ttgacacttcggatcagtgacgtac

SEQ ID NO: 236855 - DNA, 25 bp, Artificial
  Probe
atgtttctgggtaggccatttgaca

SEQ ID NO: 236856 - DNA, 25 bp, Artificial
  Probe
ctgattttgatggtccaatgtaatc

SEQ ID NO: 236857 - DNA, 25 bp, Artificial
  Probe
aatgtttctgggtaggccatttgac

SEQ ID NO: 236858 - DNA, 25 bp, Artificial
  Probe
atctcctaggcctctcttgctgatg

SEQ ID NO: 236859 - DNA, 25 bp, Artificial
  Probe
ctcctgtgaggttaaacacttacag

SEQ ID NO: 236860 - DNA, 25 bp, Artificial
  Probe
cactgattttgatggtccaatgtaa

SEQ ID NO: 236861 - DNA, 25 bp, Artificial
  Probe
ttgcacacatttctggatgaatctt

SEQ ID NO: 236862 - DNA, 25 bp, Artificial
  Probe
cttttggtaagcatggtgcttgtac

SEQ ID NO: 236863 - DNA, 25 bp, Artificial
  Probe
ctcctaggcctctcttgctgatggt

SEQ ID NO: 236864 - DNA, 25 bp, Artificial
  Probe
cctttacaacttatgtgaagaaatg

SEQ ID NO: 236865 - DNA, 25 bp, Artificial
  Probe
aaagtttgagcctttacaacttatg

SEQ ID NO: 236866 - DNA, 25 bp, Artificial
  Probe
gtgagaagccttatcattgcaactg

SEQ ID NO: 236867 - DNA, 25 bp, Artificial
  Probe
cacacaggtgagaagccttatcatt

SEQ ID NO: 236868 - DNA, 25 bp, Artificial
  Probe
gaaatgcctttgagtttactatccc

SEQ ID NO: 236869 - DNA, 25 bp, Artificial
  Probe
taattgacttctttctctcgggttc

SEQ ID NO: 236870 - DNA, 25 bp, Artificial
  Probe
agccttgtgagaaatgcctttgagt

SEQ ID NO: 236871 - DNA, 25 bp, Artificial
  Probe
accgtggcaatctgtatgactataa

SEQ ID NO: 236872 - DNA, 25 bp, Artificial
  Probe
actaccgcaagcacacgggtcacag

SEQ ID NO: 236873 - DNA, 25 bp, Artificial
  Probe
ccttatcattgcaactgggacggct

SEQ ID NO: 236874 - DNA, 25 bp, Artificial
  Probe
agcgacacatgtagcctgggtcgac

SEQ ID NO: 236875 - DNA, 25 bp, Artificial
  Probe
aggctagccttgtgagaaatgcctt

SEQ ID NO: 236876 - DNA, 25 bp, Artificial
  Probe
ctctgcacatgaagcgacacatgta

SEQ ID NO: 236877 - DNA, 25 bp, Artificial
  Probe
ggaaaatgactttgccaccagttcc

SEQ ID NO: 236878 - DNA, 25 bp, Artificial
  Probe
ggctctgcacatgaagcgacacatg

SEQ ID NO: 236879 - DNA, 25 bp, Artificial
  Probe
ccttgtgagaaatgcctttgagttt

SEQ ID NO: 236880 - DNA, 25 bp, Artificial
  Probe
taccgcaagcacacgggtcacaggc

SEQ ID NO: 236881 - DNA, 25 bp, Artificial
  Probe
atgactttgccaccagttccggctc

SEQ ID NO: 236882 - DNA, 25 bp, Artificial
  Probe
cagtgccacttgtgcgaccgggcct

SEQ ID NO: 236883 - DNA, 25 bp, Artificial
  Probe
aatgactttgccaccagttccggct

SEQ ID NO: 236884 - DNA, 25 bp, Artificial
  Probe
agttcgcgcgctctgacgagcttac

SEQ ID NO: 236885 - DNA, 25 bp, Artificial
  Probe
cttccagtgccacttgtgcgaccgg

SEQ ID NO: 236886 - DNA, 25 bp, Artificial
  Probe
ctgcggctggaagttcgcgcgctct

SEQ ID NO: 236887 - DNA, 25 bp, Artificial
  Probe
gtagcctgggtcgactcggccagcc

SEQ ID NO: 236888 - DNA, 25 bp, Artificial
  Probe
gcacatgaagcgacacatgtagcct

SEQ ID NO: 236889 - DNA, 25 bp, Artificial
  Probe
gagacgatggcatctctgtcgcctg

SEQ ID NO: 236890 - DNA, 25 bp, Artificial
  Probe
gcaataattgacttctttctctcgg

SEQ ID NO: 236891 - DNA, 25 bp, Artificial
  Probe
cgcacacaggtgagaagccttatca

SEQ ID NO: 236892 - DNA, 25 bp, Artificial
  Probe
ggagacgatggcatctctgtcgcct

SEQ ID NO: 236893 - DNA, 25 bp, Artificial
  Probe
gagaagccttatcattgcaactggg

SEQ ID NO: 236894 - DNA, 25 bp, Artificial
  Probe
acaggcccttccagtgccacttgtg

SEQ ID NO: 236895 - DNA, 25 bp, Artificial
  Probe
tcccaccgtgactgaaggctccagg

SEQ ID NO: 236896 - DNA, 25 bp, Artificial
  Probe
tccagtgccacttgtgcgaccgggc

SEQ ID NO: 236897 - DNA, 25 bp, Artificial
  Probe
ctttctctcgggttcccactagagg

SEQ ID NO: 236898 - DNA, 25 bp, Artificial
  Probe
tttctctcgggttcccactagagga

SEQ ID NO: 236899 - DNA, 25 bp, Artificial
  Probe
gacttctttctctcgggttcccact

SEQ ID NO: 236900 - DNA, 25 bp, Artificial
  Probe
gaccacctggctctgcacatgaagc

SEQ ID NO: 236901 - DNA, 25 bp, Artificial
  Probe
ataattgacttctttctctcgggtt

SEQ ID NO: 236902 - DNA, 25 bp, Artificial
  Probe
aagttcgcgcgctctgacgagctta

SEQ ID NO: 236903 - DNA, 25 bp, Artificial
  Probe
caataattgacttctttctctcggg

SEQ ID NO: 236904 - DNA, 25 bp, Artificial
  Probe
ttgacttctttctctcgggttccca

SEQ ID NO: 236905 - DNA, 25 bp, Artificial
  Probe
acacatgtagcctgggtcgactcgg

SEQ ID NO: 236906 - DNA, 25 bp, Artificial
  Probe
atgaagcgacacatgtagcctgggt

SEQ ID NO: 236907 - DNA, 25 bp, Artificial
  Probe
aggcccttccagtgccacttgtgcg

SEQ ID NO: 236908 - DNA, 25 bp, Artificial
  Probe
caccgtgactgaaggctccaggaaa

SEQ ID NO: 236909 - DNA, 25 bp, Artificial
  Probe
atgtagcctgggtcgactcggccag

SEQ ID NO: 236910 - DNA, 25 bp, Artificial
  Probe
cttatcattgcaactgggacggctg

SEQ ID NO: 236911 - DNA, 25 bp, Artificial
  Probe
ctagccttgtgagaaatgcctttga

SEQ ID NO: 236912 - DNA, 25 bp, Artificial
  Probe
tgttaaaggctcgattttgtatctg

SEQ ID NO: 236913 - DNA, 25 bp, Artificial
  Probe
atataaacctaaaaagatatattga

SEQ ID NO: 236914 - DNA, 25 bp, Artificial
  Probe
ggcagacacggatttgagaatcttt

SEQ ID NO: 236915 - DNA, 25 bp, Artificial
  Probe
aggcagacacggatttgagaatctt

SEQ ID NO: 236916 - DNA, 25 bp, Artificial
  Probe
aaactgtgttaaaggctcgattttg

SEQ ID NO: 236917 - DNA, 25 bp, Artificial
  Probe
aggctcgattttgtatctgcaggca

SEQ ID NO: 236918 - DNA, 25 bp, Artificial
  Probe
tctgcaggcagacacggatttgaga

SEQ ID NO: 236919 - DNA, 25 bp, Artificial
  Probe
gtatctgcaggcagacacggatttg

SEQ ID NO: 236920 - DNA, 25 bp, Artificial
  Probe
tatataaacctaaaaagatatattg

SEQ ID NO: 236921 - DNA, 25 bp, Artificial
  Probe
actgtgttaaaggctcgattttgta

SEQ ID NO: 236922 - DNA, 25 bp, Artificial
  Probe
ctgtgttaaaggctcgattttgtat

SEQ ID NO: 236923 - DNA, 25 bp, Artificial
  Probe
atttgagaatctttattgagaaaga

SEQ ID NO: 236924 - DNA, 25 bp, Artificial
  Probe
gttaaaggctcgattttgtatctgc

SEQ ID NO: 236925 - DNA, 25 bp, Artificial
  Probe
atataaaactgtgttaaaggctcga

SEQ ID NO: 236926 - DNA, 25 bp, Artificial
  Probe
tatctgcaggcagacacggatttga

SEQ ID NO: 236927 - DNA, 25 bp, Artificial
  Probe
aactgtgttaaaggctcgattttgt

SEQ ID NO: 236928 - DNA, 25 bp, Artificial
  Probe
aaaggctcgattttgtatctgcagg

SEQ ID NO: 236929 - DNA, 25 bp, Artificial
  Probe
aaggctcgattttgtatctgcaggc

SEQ ID NO: 236930 - DNA, 25 bp, Artificial
  Probe
atctgcaggcagacacggatttgag

SEQ ID NO: 236931 - DNA, 25 bp, Artificial
  Probe
tcgattttgtatctgcaggcagaca

SEQ ID NO: 236932 - DNA, 25 bp, Artificial
  Probe
taaaggctcgattttgtatctgcag

SEQ ID NO: 236933 - DNA, 25 bp, Artificial
  Probe
atatataaacctaaaaagatatatt

SEQ ID NO: 236934 - DNA, 25 bp, Artificial
  Probe
ttaaaggctcgattttgtatctgca

SEQ ID NO: 236935 - DNA, 25 bp, Artificial
  Probe
gcaggcagacacggatttgagaatc

SEQ ID NO: 236936 - DNA, 25 bp, Artificial
  Probe
ggctcgattttgtatctgcaggcag

SEQ ID NO: 236937 - DNA, 25 bp, Artificial
  Probe
ctcgattttgtatctgcaggcagac

SEQ ID NO: 236938 - DNA, 25 bp, Artificial
  Probe
ctgcaggcagacacggatttgagaa

SEQ ID NO: 236939 - DNA, 25 bp, Artificial
  Probe
cgattttgtatctgcaggcagacac

SEQ ID NO: 236940 - DNA, 25 bp, Artificial
  Probe
tgtgttaaaggctcgattttgtatc

SEQ ID NO: 236941 - DNA, 25 bp, Artificial
  Probe
gtgttaaaggctcgattttgtatct

SEQ ID NO: 236942 - DNA, 25 bp, Artificial
  Probe
ttgtatctgcaggcagacacggatt

SEQ ID NO: 236943 - DNA, 25 bp, Artificial
  Probe
tgtatctgcaggcagacacggattt

SEQ ID NO: 236944 - DNA, 25 bp, Artificial
  Probe
gattttgtatctgcaggcagacacg

SEQ ID NO: 236945 - DNA, 25 bp, Artificial
  Probe
caggcagacacggatttgagaatct

SEQ ID NO: 236946 - DNA, 25 bp, Artificial
  Probe
ttttgtatctgcaggcagacacgga

SEQ ID NO: 236947 - DNA, 25 bp, Artificial
  Probe
tgcaggcagacacggatttgagaat

SEQ ID NO: 236948 - DNA, 25 bp, Artificial
  Probe
tttgtatctgcaggcagacacggat

SEQ ID NO: 236949 - DNA, 25 bp, Artificial
  Probe
attttgtatctgcaggcagacacgg

SEQ ID NO: 236950 - DNA, 25 bp, Artificial
  Probe
aatatataaacctaaaaagatatat

SEQ ID NO: 236951 - DNA, 25 bp, Artificial
  Probe
ccatgactggaatcgccgactactg

SEQ ID NO: 236952 - DNA, 25 bp, Artificial
  Probe
agaattcatgtctatacagaagaac

SEQ ID NO: 236953 - DNA, 25 bp, Artificial
  Probe
cgccgactactgaatctctggattg

SEQ ID NO: 236954 - DNA, 25 bp, Artificial
  Probe
caagtgtgttcgttcaccctaggtt

SEQ ID NO: 236955 - DNA, 25 bp, Artificial
  Probe
aattctgctctgtgaataccatgtt

SEQ ID NO: 236956 - DNA, 25 bp, Artificial
  Probe
tggtctccatttcatttcagaggag

SEQ ID NO: 236957 - DNA, 25 bp, Artificial
  Probe
taaagaattctgctctgtgaatacc

SEQ ID NO: 236958 - DNA, 25 bp, Artificial
  Probe
agaacaagtgtgttcgttcacccta

SEQ ID NO: 236959 - DNA, 25 bp, Artificial
  Probe
ttcatttcagaggagagaatcaggc

SEQ ID NO: 236960 - DNA, 25 bp, Artificial
  Probe
catttcatttcagaggagagaatca

SEQ ID NO: 236961 - DNA, 25 bp, Artificial
  Probe
caatggtctccatttcatttcagag

SEQ ID NO: 236962 - DNA, 25 bp, Artificial
  Probe
agaattctgctctgtgaataccatg

SEQ ID NO: 236963 - DNA, 25 bp, Artificial
  Probe
aattttagacccttctgagaaatga

SEQ ID NO: 236964 - DNA, 25 bp, Artificial
  Probe
actctgggattttgattgtcctaaa

SEQ ID NO: 236965 - DNA, 25 bp, Artificial
  Probe
gtgtgttcgttcaccctaggttaca

SEQ ID NO: 236966 - DNA, 25 bp, Artificial
  Probe
gtgggtgactttctcaggattccta

SEQ ID NO: 236967 - DNA, 25 bp, Artificial
  Probe
tcagaattttagacccttctgagaa

SEQ ID NO: 236968 - DNA, 25 bp, Artificial
  Probe
tcgttcaccctaggttacaatggtc

SEQ ID NO: 236969 - DNA, 25 bp, Artificial
  Probe
ggaatcgccgactactgaatctctg

SEQ ID NO: 236970 - DNA, 25 bp, Artificial
  Probe
ccctaggttacaatggtctccattt

SEQ ID NO: 236971 - DNA, 25 bp, Artificial
  Probe
ctgagaaatgaccttctagtaagtg

SEQ ID NO: 236972 - DNA, 25 bp, Artificial
  Probe
gactttctcaggattcctaacttga

SEQ ID NO: 236973 - DNA, 25 bp, Artificial
  Probe
gaattcatgtctatacagaagaaca

SEQ ID NO: 236974 - DNA, 25 bp, Artificial
  Probe
tctgctctgtgaataccatgttaat

SEQ ID NO: 236975 - DNA, 25 bp, Artificial
  Probe
aagtactctgggattttgattgtcc

SEQ ID NO: 236976 - DNA, 25 bp, Artificial
  Probe
gaatcaggctatctgaatataaaca

SEQ ID NO: 236977 - DNA, 25 bp, Artificial
  Probe
agaatcaggctatctgaatataaac

SEQ ID NO: 236978 - DNA, 25 bp, Artificial
  Probe
ttcatgtctatacagaagaacaagt

SEQ ID NO: 236979 - DNA, 25 bp, Artificial
  Probe
tctgagaaatgaccttctagtaagt

SEQ ID NO: 236980 - DNA, 25 bp, Artificial
  Probe
ctaggttacaatggtctccatttca

SEQ ID NO: 236981 - DNA, 25 bp, Artificial
  Probe
ggttacaatggtctccatttcattt

SEQ ID NO: 236982 - DNA, 25 bp, Artificial
  Probe
tttgattgtcctaaagaattctgct

SEQ ID NO: 236983 - DNA, 25 bp, Artificial
  Probe
attcatgtctatacagaagaacaag

SEQ ID NO: 236984 - DNA, 25 bp, Artificial
  Probe
ggactccatgactggaatcgccgac

SEQ ID NO: 236985 - DNA, 25 bp, Artificial
  Probe
ctggaatcgccgactactgaatctc

SEQ ID NO: 236986 - DNA, 25 bp, Artificial
  Probe
gttcgttcaccctaggttacaatgg

SEQ ID NO: 236987 - DNA, 25 bp, Artificial
  Probe
tttagacccttctgagaaatgacct

SEQ ID NO: 236988 - DNA, 25 bp, Artificial
  Probe
ttttgattgtcctaaagaattctgc

SEQ ID NO: 236989 - DNA, 25 bp, Artificial
  Probe
gatgatagcatccaaatattcagaa

SEQ ID NO: 236990 - DNA, 25 bp, Artificial
  Probe
acaagtgtgttcgttcaccctaggt

SEQ ID NO: 236991 - DNA, 25 bp, Artificial
  Probe
gacccttctgagaaatgaccttcta

SEQ ID NO: 236992 - DNA, 25 bp, Artificial
  Probe
gtactctgggattttgattgtccta

SEQ ID NO: 236993 - DNA, 25 bp, Artificial
  Probe
tctccatttcatttcagaggagaga

SEQ ID NO: 236994 - DNA, 25 bp, Artificial
  Probe
tgattgtcctaaagaattctgctct

SEQ ID NO: 236995 - DNA, 25 bp, Artificial
  Probe
attcagaattttagacccttctgag

SEQ ID NO: 236996 - DNA, 25 bp, Artificial
  Probe
ccttctgagaaatgaccttctagta

SEQ ID NO: 236997 - DNA, 25 bp, Artificial
  Probe
gaacgatgattccactcaccggcca

SEQ ID NO: 236998 - DNA, 25 bp, Artificial
  Probe
ctgaacgatgattccactcaccggc

SEQ ID NO: 236999 - DNA, 25 bp, Artificial
  Probe
tctgtttctgtaaagtcattgtagc

SEQ ID NO: 237000 - DNA, 25 bp, Artificial
  Probe
tgcctttaaatagacactgatgggt

SEQ ID NO: 237001 - DNA, 25 bp, Artificial
  Probe
tcctaactgctacctgaacgatgat

SEQ ID NO: 237002 - DNA, 25 bp, Artificial
  Probe
ccccctgaggcatcgacatgctgga

SEQ ID NO: 237003 - DNA, 25 bp, Artificial
  Probe
gactctttgctgcttcatcgaatgc

SEQ ID NO: 237004 - DNA, 25 bp, Artificial
  Probe
tgtatacctaatgttcaactgtggt

SEQ ID NO: 237005 - DNA, 25 bp, Artificial
  Probe
ttatactcagaatgtattaaccagg

SEQ ID NO: 237006 - DNA, 25 bp, Artificial
  Probe
gtttctgtaaagtcattgtagcaac

SEQ ID NO: 237007 - DNA, 25 bp, Artificial
  Probe
attagactctttgctgcttcatcga

SEQ ID NO: 237008 - DNA, 25 bp, Artificial
  Probe
tccccctgaggcatcgacatgctgg

SEQ ID NO: 237009 - DNA, 25 bp, Artificial
  Probe
aggtcattagactctttgctgcttc

SEQ ID NO: 237010 - DNA, 25 bp, Artificial
  Probe
tagactctttgctgcttcatcgaat

SEQ ID NO: 237011 - DNA, 25 bp, Artificial
  Probe
cattagactctttgctgcttcatcg

SEQ ID NO: 237012 - DNA, 25 bp, Artificial
  Probe
actctttgctgcttcatcgaatgcc

SEQ ID NO: 237013 - DNA, 25 bp, Artificial
  Probe
taactgctacctgaacgatgattcc

SEQ ID NO: 237014 - DNA, 25 bp, Artificial
  Probe
atgcctttaaatagacactgatggg

SEQ ID NO: 237015 - DNA, 25 bp, Artificial
  Probe
gcctttaaatagacactgatgggtt

SEQ ID NO: 237016 - DNA, 25 bp, Artificial
  Probe
cctttaaatagacactgatgggtta

SEQ ID NO: 237017 - DNA, 25 bp, Artificial
  Probe
aactgctacctgaacgatgattcca

SEQ ID NO: 237018 - DNA, 25 bp, Artificial
  Probe
aagttgtatacctaatgttcaactg

SEQ ID NO: 237019 - DNA, 25 bp, Artificial
  Probe
ctcctaactgctacctgaacgatga

SEQ ID NO: 237020 - DNA, 25 bp, Artificial
  Probe
agttgtatacctaatgttcaactgt

SEQ ID NO: 237021 - DNA, 25 bp, Artificial
  Probe
gtcattagactctttgctgcttcat

SEQ ID NO: 237022 - DNA, 25 bp, Artificial
  Probe
ctatgcctttaaatagacactgatg

SEQ ID NO: 237023 - DNA, 25 bp, Artificial
  Probe
acctgaacgatgattccactcaccg

SEQ ID NO: 237024 - DNA, 25 bp, Artificial
  Probe
acctaatgttcaactgtggttgatt

SEQ ID NO: 237025 - DNA, 25 bp, Artificial
  Probe
ccaggtcattagactctttgctgct

SEQ ID NO: 237026 - DNA, 25 bp, Artificial
  Probe
ttctgtaaagtcattgtagcaacac

SEQ ID NO: 237027 - DNA, 25 bp, Artificial
  Probe
agtctgactccaagtactaatacag

SEQ ID NO: 237028 - DNA, 25 bp, Artificial
  Probe
cctaatgttcaactgtggttgattt

SEQ ID NO: 237029 - DNA, 25 bp, Artificial
  Probe
gaacggaaactctcaacataatttg

SEQ ID NO: 237030 - DNA, 25 bp, Artificial
  Probe
gtcattgtagcaacactcctaactg

SEQ ID NO: 237031 - DNA, 25 bp, Artificial
  Probe
gtctgactccaagtactaatacagt

SEQ ID NO: 237032 - DNA, 25 bp, Artificial
  Probe
tgctacctgaacgatgattccactc

SEQ ID NO: 237033 - DNA, 25 bp, Artificial
  Probe
ctgtttctgtaaagtcattgtagca

SEQ ID NO: 237034 - DNA, 25 bp, Artificial
  Probe
gctacctgaacgatgattccactca

SEQ ID NO: 237035 - DNA, 25 bp, Artificial
  Probe
actgctacctgaacgatgattccac

SEQ ID NO: 237036 - DNA, 25 bp, Artificial
  Probe
atacctaatgttcaactgtggttga

SEQ ID NO: 237037 - DNA, 25 bp, Artificial
  Probe
actcctaactgctacctgaacgatg

SEQ ID NO: 237038 - DNA, 25 bp, Artificial
  Probe
cccaggtcattagactctttgctgc

SEQ ID NO: 237039 - DNA, 25 bp, Artificial
  Probe
ttattccccctgaggcatcgacatg

SEQ ID NO: 237040 - DNA, 25 bp, Artificial
  Probe
tacctaatgttcaactgtggttgat

SEQ ID NO: 237041 - DNA, 25 bp, Artificial
  Probe
gttatactcagaatgtattaaccag

SEQ ID NO: 237042 - DNA, 25 bp, Artificial
  Probe
cctgaacgatgattccactcaccgg

SEQ ID NO: 237043 - DNA, 25 bp, Artificial
  Probe
gtctctatccacaacctggagccat

SEQ ID NO: 237044 - DNA, 25 bp, Artificial
  Probe
gtctgacggagctccccaaactgag

SEQ ID NO: 237045 - DNA, 25 bp, Artificial
  Probe
ggcactgtggacaggcttaggcctc

SEQ ID NO: 237046 - DNA, 25 bp, Artificial
  Probe
actgtcatcttgctccagtcctgca

SEQ ID NO: 237047 - DNA, 25 bp, Artificial
  Probe
gtcagaagaccctcactaagttcaa

SEQ ID NO: 237048 - DNA, 25 bp, Artificial
  Probe
atcttgctccagtcctgcactgcgg

SEQ ID NO: 237049 - DNA, 25 bp, Artificial
  Probe
acctggccatcctcttggacagcaa

SEQ ID NO: 237050 - DNA, 25 bp, Artificial
  Probe
aagagtccccgtgctgagacccctg

SEQ ID NO: 237051 - DNA, 25 bp, Artificial
  Probe
caacctggagccatatgtgtttgca

SEQ ID NO: 237052 - DNA, 25 bp, Artificial
  Probe
agacccctgaagtgcgctgtcgtga

SEQ ID NO: 237053 - DNA, 25 bp, Artificial
  Probe
aggctgtctgggatgaccaaactgt

SEQ ID NO: 237054 - DNA, 25 bp, Artificial
  Probe
ccttgtcagaagaccctcactaagt

SEQ ID NO: 237055 - DNA, 25 bp, Artificial
  Probe
gcccacgatcaacaggaaaggggga

SEQ ID NO: 237056 - DNA, 25 bp, Artificial
  Probe
gatgtcatcggcaccccttgtcaga

SEQ ID NO: 237057 - DNA, 25 bp, Artificial
  Probe
gacactcagaaggacatcaaacctc

SEQ ID NO: 237058 - DNA, 25 bp, Artificial
  Probe
ctgtggacaggcttaggcctctgtg

SEQ ID NO: 237059 - DNA, 25 bp, Artificial
  Probe
tcacctgcccacgatcaacaggaaa

SEQ ID NO: 237060 - DNA, 25 bp, Artificial
  Probe
gagtccccgtgctgagacccctgaa

SEQ ID NO: 237061 - DNA, 25 bp, Artificial
  Probe
ccagtcctgcactgcggtcggtgtt

SEQ ID NO: 237062 - DNA, 25 bp, Artificial
  Probe
aacacagcccctgaggcaagaggag

SEQ ID NO: 237063 - DNA, 25 bp, Artificial
  Probe
gaccaaactgtcatcttgctccagt

SEQ ID NO: 237064 - DNA, 25 bp, Artificial
  Probe
aagttcaaacacagcccctgaggca

SEQ ID NO: 237065 - DNA, 25 bp, Artificial
  Probe
tttgcaactccaatgcagctgtact

SEQ ID NO: 237066 - DNA, 25 bp, Artificial
  Probe
actaagttcaaacacagcccctgag

SEQ ID NO: 237067 - DNA, 25 bp, Artificial
  Probe
ctggcactgtggacaggcttaggcc

SEQ ID NO: 237068 - DNA, 25 bp, Artificial
  Probe
gggatgaccaaactgtcatcttgct

SEQ ID NO: 237069 - DNA, 25 bp, Artificial
  Probe
aaactgtcatcttgctccagtcctg

SEQ ID NO: 237070 - DNA, 25 bp, Artificial
  Probe
tgctgagacccctgaagtgcgctgt

SEQ ID NO: 237071 - DNA, 25 bp, Artificial
  Probe
caaatggaagagtccccgtgctgag

SEQ ID NO: 237072 - DNA, 25 bp, Artificial
  Probe
tggcccaggacatgctgccctgcag

SEQ ID NO: 237073 - DNA, 25 bp, Artificial
  Probe
tcaaaaatccacgatgtcatcggca

SEQ ID NO: 237074 - DNA, 25 bp, Artificial
  Probe
acggagctccccaaactgaggctgt

SEQ ID NO: 237075 - DNA, 25 bp, Artificial
  Probe
tgaaacactgtcacctgcccacgat

SEQ ID NO: 237076 - DNA, 25 bp, Artificial
  Probe
tgctggtggcccaggacatgctgcc

SEQ ID NO: 237077 - DNA, 25 bp, Artificial
  Probe
atgggccagaggacgctcatgtgct

SEQ ID NO: 237078 - DNA, 25 bp, Artificial
  Probe
acacagcccctgaggcaagaggagg

SEQ ID NO: 237079 - DNA, 25 bp, Artificial
  Probe
tcacaatgctggtggcccaggacat

SEQ ID NO: 237080 - DNA, 25 bp, Artificial
  Probe
tcttggacagcaagggctggcactg

SEQ ID NO: 237081 - DNA, 25 bp, Artificial
  Probe
ctccccaaactgaggctgtctggga

SEQ ID NO: 237082 - DNA, 25 bp, Artificial
  Probe
ctagtctgacggagctccccaaact

SEQ ID NO: 237083 - DNA, 25 bp, Artificial
  Probe
gggccgactagtctgacggagctcc

SEQ ID NO: 237084 - DNA, 25 bp, Artificial
  Probe
ggccgactagtctgacggagctccc

SEQ ID NO: 237085 - DNA, 25 bp, Artificial
  Probe
caactccaatgcagctgtactgaat

SEQ ID NO: 237086 - DNA, 25 bp, Artificial
  Probe
gaagacagacactcagaaggacatc

SEQ ID NO: 237087 - DNA, 25 bp, Artificial
  Probe
cccttgtcagaagaccctcactaag

SEQ ID NO: 237088 - DNA, 25 bp, Artificial
  Probe
gccagaggacgctcatgtgctgctg

SEQ ID NO: 237089 - DNA, 25 bp, Artificial
  Probe
tcaacgttgggcaacaagcacagat

SEQ ID NO: 237090 - DNA, 25 bp, Artificial
  Probe
cattagctcgctcatacactgactg

SEQ ID NO: 237091 - DNA, 25 bp, Artificial
  Probe
atgaggaccccgacgtcgactatgg

SEQ ID NO: 237092 - DNA, 25 bp, Artificial
  Probe
tgccctcagagcactcgagcgtgtc

SEQ ID NO: 237093 - DNA, 25 bp, Artificial
  Probe
cagagcccgggatgcccgtgattca

SEQ ID NO: 237094 - DNA, 25 bp, Artificial
  Probe
ttgaagaagccctagctggttcatc

SEQ ID NO: 237095 - DNA, 25 bp, Artificial
  Probe
gaccgcggtgagctgatgacttgaa

SEQ ID NO: 237096 - DNA, 25 bp, Artificial
  Probe
tcagagcactcgagcgtgtccagca

SEQ ID NO: 237097 - DNA, 25 bp, Artificial
  Probe
agtgacagcgaaaaccatattgcag

SEQ ID NO: 237098 - DNA, 25 bp, Artificial
  Probe
gccggtgtcgtgtaccccggtgcca

SEQ ID NO: 237099 - DNA, 25 bp, Artificial
  Probe
catccttagtaatggccaagcacat

SEQ ID NO: 237100 - DNA, 25 bp, Artificial
  Probe
ggtgccatcgccatggcaggaatgc

SEQ ID NO: 237101 - DNA, 25 bp, Artificial
  Probe
gtacttcaacgttgggcaacaagca

SEQ ID NO: 237102 - DNA, 25 bp, Artificial
  Probe
ggatatcagctgacaaatagaccct

SEQ ID NO: 237103 - DNA, 25 bp, Artificial
  Probe
tattgcaggacaagccaactgatca

SEQ ID NO: 237104 - DNA, 25 bp, Artificial
  Probe
gcaggacaagccaactgatcagggc

SEQ ID NO: 237105 - DNA, 25 bp, Artificial
  Probe
ccgggatgcccgtgattcagagcac

SEQ ID NO: 237106 - DNA, 25 bp, Artificial
  Probe
gctcatacactgactgttatttgaa

SEQ ID NO: 237107 - DNA, 25 bp, Artificial
  Probe
cctcacatcaaggaagaaatccagg

SEQ ID NO: 237108 - DNA, 25 bp, Artificial
  Probe
ctgccctcagagcactcgagcgtgt

SEQ ID NO: 237109 - DNA, 25 bp, Artificial
  Probe
gtaatggccaagcacattagctcgc

SEQ ID NO: 237110 - DNA, 25 bp, Artificial
  Probe
ccggtgtcgtgtaccccggtgccat

SEQ ID NO: 237111 - DNA, 25 bp, Artificial
  Probe
cgacgtcgactatgggagtgacagc

SEQ ID NO: 237112 - DNA, 25 bp, Artificial
  Probe
aaaccatattgcaggacaagccaac

SEQ ID NO: 237113 - DNA, 25 bp, Artificial
  Probe
catcgccatggcaggaatgccgtcc

SEQ ID NO: 237114 - DNA, 25 bp, Artificial
  Probe
ctgactgttatttgaactgttagtc

SEQ ID NO: 237115 - DNA, 25 bp, Artificial
  Probe
actcgagcgtgtccagcagcccaga

SEQ ID NO: 237116 - DNA, 25 bp, Artificial
  Probe
gggcaacaagcacagatccccatcg

SEQ ID NO: 237117 - DNA, 25 bp, Artificial
  Probe
ctgaggacatcaacggagagattta

SEQ ID NO: 237118 - DNA, 25 bp, Artificial
  Probe
actatgggagtgacagcgaaaacca

SEQ ID NO: 237119 - DNA, 25 bp, Artificial
  Probe
acggaccgcggtgagctgatgactt

SEQ ID NO: 237120 - DNA, 25 bp, Artificial
  Probe
gagaggagcctcacatcaaggaaga

SEQ ID NO: 237121 - DNA, 25 bp, Artificial
  Probe
cgcggtgagctgatgacttgaagaa

SEQ ID NO: 237122 - DNA, 25 bp, Artificial
  Probe
agccaactgatcagggccaacggac

SEQ ID NO: 237123 - DNA, 25 bp, Artificial
  Probe
gtccagcagcccagagcccgggatg

SEQ ID NO: 237124 - DNA, 25 bp, Artificial
  Probe
gtcgactatgggagtgacagcgaaa

SEQ ID NO: 237125 - DNA, 25 bp, Artificial
  Probe
tcgagcgtgtccagcagcccagagc

SEQ ID NO: 237126 - DNA, 25 bp, Artificial
  Probe
gccaagcacattagctcgctcatac

SEQ ID NO: 237127 - DNA, 25 bp, Artificial
  Probe
ctgatcagggccaacggaccgcggt

SEQ ID NO: 237128 - DNA, 25 bp, Artificial
  Probe
atcgccatggcaggaatgccgtccc

SEQ ID NO: 237129 - DNA, 25 bp, Artificial
  Probe
atgacttgaagaagccctagctggt

SEQ ID NO: 237130 - DNA, 25 bp, Artificial
  Probe
gaaatccaggctgaggacatcaacg

SEQ ID NO: 237131 - DNA, 25 bp, Artificial
  Probe
ccagagcccgggatgcccgtgattc

SEQ ID NO: 237132 - DNA, 25 bp, Artificial
  Probe
aacggaccgcggtgagctgatgact

SEQ ID NO: 237133 - DNA, 25 bp, Artificial
  Probe
ttcagagcacttacggcgtgaaggg

SEQ ID NO: 237134 - DNA, 25 bp, Artificial
  Probe
gctacggccggtgtcgtgtaccccg

SEQ ID NO: 237135 - DNA, 25 bp, Artificial
  Probe
ttccctgctttttagtccaacaact

SEQ ID NO: 237136 - DNA, 25 bp, Artificial
  Probe
gttttttgctcacgttgtatatgcc

SEQ ID NO: 237137 - DNA, 25 bp, Artificial
  Probe
ccctgctttttagtccaacaactgt

SEQ ID NO: 237138 - DNA, 25 bp, Artificial
  Probe
tggcccaatttccctgctttttagt

SEQ ID NO: 237139 - DNA, 25 bp, Artificial
  Probe
ccctttgctggcccaatttccctgc

SEQ ID NO: 237140 - DNA, 25 bp, Artificial
  Probe
tccaacaactgttgggttttttgct

SEQ ID NO: 237141 - DNA, 25 bp, Artificial
  Probe
ttgggttttttgctcacgttgtata

SEQ ID NO: 237142 - DNA, 25 bp, Artificial
  Probe
cctgctttttagtccaacaactgtt

SEQ ID NO: 237143 - DNA, 25 bp, Artificial
  Probe
tccctttgctggcccaatttccctg

SEQ ID NO: 237144 - DNA, 25 bp, Artificial
  Probe
tgggttttttgctcacgttgtatat

SEQ ID NO: 237145 - DNA, 25 bp, Artificial
  Probe
tgctggcccaatttccctgcttttt

SEQ ID NO: 237146 - DNA, 25 bp, Artificial
  Probe
ctgttgggttttttgctcacgttgt

SEQ ID NO: 237147 - DNA, 25 bp, Artificial
  Probe
gctttttagtccaacaactgttggg

SEQ ID NO: 237148 - DNA, 25 bp, Artificial
  Probe
gctggcccaatttccctgcttttta

SEQ ID NO: 237149 - DNA, 25 bp, Artificial
  Probe
tgttctttctcagtaggcaaaccct

SEQ ID NO: 237150 - DNA, 25 bp, Artificial
  Probe
ttaaaattccctttgctggcccaat

SEQ ID NO: 237151 - DNA, 25 bp, Artificial
  Probe
ggttttttgctcacgttgtatatgc

SEQ ID NO: 237152 - DNA, 25 bp, Artificial
  Probe
caactgttgggttttttgctcacgt

SEQ ID NO: 237153 - DNA, 25 bp, Artificial
  Probe
acaactgttgggttttttgctcacg

SEQ ID NO: 237154 - DNA, 25 bp, Artificial
  Probe
taaaattccctttgctggcccaatt

SEQ ID NO: 237155 - DNA, 25 bp, Artificial
  Probe
cctttgctggcccaatttccctgct

SEQ ID NO: 237156 - DNA, 25 bp, Artificial
  Probe
ctttgctggcccaatttccctgctt

SEQ ID NO: 237157 - DNA, 25 bp, Artificial
  Probe
gttgggttttttgctcacgttgtat

SEQ ID NO: 237158 - DNA, 25 bp, Artificial
  Probe
tttgctggcccaatttccctgcttt

SEQ ID NO: 237159 - DNA, 25 bp, Artificial
  Probe
ttgctggcccaatttccctgctttt

SEQ ID NO: 237160 - DNA, 25 bp, Artificial
  Probe
actgttgggttttttgctcacgttg

SEQ ID NO: 237161 - DNA, 25 bp, Artificial
  Probe
ctgctttttagtccaacaactgttg

SEQ ID NO: 237162 - DNA, 25 bp, Artificial
  Probe
ctggcccaatttccctgctttttag

SEQ ID NO: 237163 - DNA, 25 bp, Artificial
  Probe
gggttttttgctcacgttgtatatg

SEQ ID NO: 237164 - DNA, 25 bp, Artificial
  Probe
tccctgctttttagtccaacaactg

SEQ ID NO: 237165 - DNA, 25 bp, Artificial
  Probe
tgttgggttttttgctcacgttgta

SEQ ID NO: 237166 - DNA, 25 bp, Artificial
  Probe
ttccctttgctggcccaatttccct

SEQ ID NO: 237167 - DNA, 25 bp, Artificial
  Probe
tgctttttagtccaacaactgttgg

SEQ ID NO: 237168 - DNA, 25 bp, Artificial
  Probe
ccataacgtacagtaatttcttagg

SEQ ID NO: 237169 - DNA, 25 bp, Artificial
  Probe
gatttaactagttggctctcatcct

SEQ ID NO: 237170 - DNA, 25 bp, Artificial
  Probe
gccagaaccataacgtacagtaatt

SEQ ID NO: 237171 - DNA, 25 bp, Artificial
  Probe
tttttctcctcctatgtgggaactt

SEQ ID NO: 237172 - DNA, 25 bp, Artificial
  Probe
gtagcgggagcatttgcatccacag

SEQ ID NO: 237173 - DNA, 25 bp, Artificial
  Probe
tccgagaccctaagaaaacgaacag

SEQ ID NO: 237174 - DNA, 25 bp, Artificial
  Probe
tctcctcctatgtgggaactttctt

SEQ ID NO: 237175 - DNA, 25 bp, Artificial
  Probe
gagactgtccacagtaggttcagaa

SEQ ID NO: 237176 - DNA, 25 bp, Artificial
  Probe
catccacagtgtttgagagggtaat

SEQ ID NO: 237177 - DNA, 25 bp, Artificial
  Probe
agatttaactagttggctctcatcc

SEQ ID NO: 237178 - DNA, 25 bp, Artificial
  Probe
tcagccagaaccataacgtacagta

SEQ ID NO: 237179 - DNA, 25 bp, Artificial
  Probe
gaaagacttaccagatttaactagt

SEQ ID NO: 237180 - DNA, 25 bp, Artificial
  Probe
cgagaccctaagaaaacgaacagag

SEQ ID NO: 237181 - DNA, 25 bp, Artificial
  Probe
gagcaacatctccacatcattagag

SEQ ID NO: 237182 - DNA, 25 bp, Artificial
  Probe
attagagactgtccacagtaggttc

SEQ ID NO: 237183 - DNA, 25 bp, Artificial
  Probe
gaaaggcactgactgacctagtttt

SEQ ID NO: 237184 - DNA, 25 bp, Artificial
  Probe
tgcatccacagtgtttgagagggta

SEQ ID NO: 237185 - DNA, 25 bp, Artificial
  Probe
gcatttgcatccacagtgtttgaga

SEQ ID NO: 237186 - DNA, 25 bp, Artificial
  Probe
taccagatttaactagttggctctc

SEQ ID NO: 237187 - DNA, 25 bp, Artificial
  Probe
ggaaaggcactgactgacctagttt

SEQ ID NO: 237188 - DNA, 25 bp, Artificial
  Probe
agagactgtccacagtaggttcaga

SEQ ID NO: 237189 - DNA, 25 bp, Artificial
  Probe
gtgggaactttcttcgttgtctgtt

SEQ ID NO: 237190 - DNA, 25 bp, Artificial
  Probe
ctcctatgtgggaactttcttcgtt

SEQ ID NO: 237191 - DNA, 25 bp, Artificial
  Probe
agcccataatagaaagacttaccag

SEQ ID NO: 237192 - DNA, 25 bp, Artificial
  Probe
gcatccacagtgtttgagagggtaa

SEQ ID NO: 237193 - DNA, 25 bp, Artificial
  Probe
tcattagagactgtccacagtaggt

SEQ ID NO: 237194 - DNA, 25 bp, Artificial
  Probe
ggagcatttgcatccacagtgtttg

SEQ ID NO: 237195 - DNA, 25 bp, Artificial
  Probe
catttgcatccacagtgtttgagag

SEQ ID NO: 237196 - DNA, 25 bp, Artificial
  Probe
cctatgtgggaactttcttcgttgt

SEQ ID NO: 237197 - DNA, 25 bp, Artificial
  Probe
agccagaaccataacgtacagtaat

SEQ ID NO: 237198 - DNA, 25 bp, Artificial
  Probe
aacagtagcgggagcatttgcatcc

SEQ ID NO: 237199 - DNA, 25 bp, Artificial
  Probe
ccagatttaactagttggctctcat

SEQ ID NO: 237200 - DNA, 25 bp, Artificial
  Probe
atgtgggaactttcttcgttgtctg

SEQ ID NO: 237201 - DNA, 25 bp, Artificial
  Probe
gatgattctcccagcctttgaattc

SEQ ID NO: 237202 - DNA, 25 bp, Artificial
  Probe
tgctccaaggaaaggcactgactga

SEQ ID NO: 237203 - DNA, 25 bp, Artificial
  Probe
tatcagccagaaccataacgtacag

SEQ ID NO: 237204 - DNA, 25 bp, Artificial
  Probe
cgggagcatttgcatccacagtgtt

SEQ ID NO: 237205 - DNA, 25 bp, Artificial
  Probe
gcctttgaattcattgttcttaaag

SEQ ID NO: 237206 - DNA, 25 bp, Artificial
  Probe
atcattagagactgtccacagtagg

SEQ ID NO: 237207 - DNA, 25 bp, Artificial
  Probe
gacttaccagatttaactagttggc

SEQ ID NO: 237208 - DNA, 25 bp, Artificial
  Probe
ccacatcattagagactgtccacag

SEQ ID NO: 237209 - DNA, 25 bp, Artificial
  Probe
aagacttaccagatttaactagttg

SEQ ID NO: 237210 - DNA, 25 bp, Artificial
  Probe
atttgcatccacagtgtttgagagg

SEQ ID NO: 237211 - DNA, 25 bp, Artificial
  Probe
aaaggcactgactgacctagtttta

SEQ ID NO: 237212 - DNA, 25 bp, Artificial
  Probe
ttaccagatttaactagttggctct

SEQ ID NO: 237213 - DNA, 25 bp, Artificial
  Probe
ctgtccacagtaggttcagaaggga

SEQ ID NO: 237214 - DNA, 25 bp, Artificial
  Probe
cgctccactgtaagtcatgaggggt

SEQ ID NO: 237215 - DNA, 25 bp, Artificial
  Probe
agtgcactgtgctgggtactgtaat

SEQ ID NO: 237216 - DNA, 25 bp, Artificial
  Probe
ttcgctccactgtaagtcatgaggg

SEQ ID NO: 237217 - DNA, 25 bp, Artificial
  Probe
tgctgggtactgtaatcctacctaa

SEQ ID NO: 237218 - DNA, 25 bp, Artificial
  Probe
tattcgctccactgtaagtcatgag

SEQ ID NO: 237219 - DNA, 25 bp, Artificial
  Probe
gggttgaacaccaggctaaaacagc

SEQ ID NO: 237220 - DNA, 25 bp, Artificial
  Probe
tttctactgacagtgcactgtgctg

SEQ ID NO: 237221 - DNA, 25 bp, Artificial
  Probe
ggtattcgctccactgtaagtcatg

SEQ ID NO: 237222 - DNA, 25 bp, Artificial
  Probe
acagtgcactgtgctgggtactgta

SEQ ID NO: 237223 - DNA, 25 bp, Artificial
  Probe
agggttgaacaccaggctaaaacag

SEQ ID NO: 237224 - DNA, 25 bp, Artificial
  Probe
cactgtaagtcatgaggggtttccc

SEQ ID NO: 237225 - DNA, 25 bp, Artificial
  Probe
aacgtttctactgacagtgcactgt

SEQ ID NO: 237226 - DNA, 25 bp, Artificial
  Probe
cagtgcactgtgctgggtactgtaa

SEQ ID NO: 237227 - DNA, 25 bp, Artificial
  Probe
agtcatgaggggtttccccatcacc

SEQ ID NO: 237228 - DNA, 25 bp, Artificial
  Probe
ctccactgtaagtcatgaggggttt

SEQ ID NO: 237229 - DNA, 25 bp, Artificial
  Probe
tcctacctaagcaggtaggtattcg

SEQ ID NO: 237230 - DNA, 25 bp, Artificial
  Probe
ctgtaatcctacctaagcaggtagg

SEQ ID NO: 237231 - DNA, 25 bp, Artificial
  Probe
tcgctccactgtaagtcatgagggg

SEQ ID NO: 237232 - DNA, 25 bp, Artificial
  Probe
tacctaagcaggtaggtattcgctc

SEQ ID NO: 237233 - DNA, 25 bp, Artificial
  Probe
cactgtgctgggtactgtaatccta

SEQ ID NO: 237234 - DNA, 25 bp, Artificial
  Probe
ctgtgctgggtactgtaatcctacc

SEQ ID NO: 237235 - DNA, 25 bp, Artificial
  Probe
tattaaacgtttctactgacagtgc

SEQ ID NO: 237236 - DNA, 25 bp, Artificial
  Probe
acgtttctactgacagtgcactgtg

SEQ ID NO: 237237 - DNA, 25 bp, Artificial
  Probe
actgacagtgcactgtgctgggtac

SEQ ID NO: 237238 - DNA, 25 bp, Artificial
  Probe
gctccactgtaagtcatgaggggtt

SEQ ID NO: 237239 - DNA, 25 bp, Artificial
  Probe
gggtactgtaatcctacctaagcag

SEQ ID NO: 237240 - DNA, 25 bp, Artificial
  Probe
gtgctgggtactgtaatcctaccta

SEQ ID NO: 237241 - DNA, 25 bp, Artificial
  Probe
tcatgaggggtttccccatcaccat

SEQ ID NO: 237242 - DNA, 25 bp, Artificial
  Probe
ttattaaacgtttctactgacagtg

SEQ ID NO: 237243 - DNA, 25 bp, Artificial
  Probe
ctactgacagtgcactgtgctgggt

SEQ ID NO: 237244 - DNA, 25 bp, Artificial
  Probe
ctgacagtgcactgtgctgggtact

SEQ ID NO: 237245 - DNA, 25 bp, Artificial
  Probe
ctgtaagtcatgaggggtttcccca

SEQ ID NO: 237246 - DNA, 25 bp, Artificial
  Probe
tgaacaccaggctaaaacagccata

SEQ ID NO: 237247 - DNA, 25 bp, Artificial
  Probe
ttaaacgtttctactgacagtgcac

SEQ ID NO: 237248 - DNA, 25 bp, Artificial
  Probe
tgtaatcctacctaagcaggtaggt

SEQ ID NO: 237249 - DNA, 25 bp, Artificial
  Probe
tactgtaatcctacctaagcaggta

SEQ ID NO: 237250 - DNA, 25 bp, Artificial
  Probe
tctactgacagtgcactgtgctggg

SEQ ID NO: 237251 - DNA, 25 bp, Artificial
  Probe
gtactgtaatcctacctaagcaggt

SEQ ID NO: 237252 - DNA, 25 bp, Artificial
  Probe
gaacaccaggctaaaacagccatac

SEQ ID NO: 237253 - DNA, 25 bp, Artificial
  Probe
gtttctactgacagtgcactgtgct

SEQ ID NO: 237254 - DNA, 25 bp, Artificial
  Probe
taggtattcgctccactgtaagtca

SEQ ID NO: 237255 - DNA, 25 bp, Artificial
  Probe
taaacgtttctactgacagtgcact

SEQ ID NO: 237256 - DNA, 25 bp, Artificial
  Probe
tgggtactgtaatcctacctaagca

SEQ ID NO: 237257 - DNA, 25 bp, Artificial
  Probe
gtattcgctccactgtaagtcatga

SEQ ID NO: 237258 - DNA, 25 bp, Artificial
  Probe
ctacctaagcaggtaggtattcgct

SEQ ID NO: 237259 - DNA, 25 bp, Artificial
  Probe
cctaagcaggtaggtattcgctcca

SEQ ID NO: 237260 - DNA, 25 bp, Artificial
  Probe
gtgttcacttttccaaagcatcaga

SEQ ID NO: 237261 - DNA, 25 bp, Artificial
  Probe
agtatgagtgttcacttttccaaag

SEQ ID NO: 237262 - DNA, 25 bp, Artificial
  Probe
ggactctgtaggacaaaagacaact

SEQ ID NO: 237263 - DNA, 25 bp, Artificial
  Probe
tatgagtgttcacttttccaaagca

SEQ ID NO: 237264 - DNA, 25 bp, Artificial
  Probe
acaggaacagccatttgcaaaatgg

SEQ ID NO: 237265 - DNA, 25 bp, Artificial
  Probe
tgactgttgtacagtggttgtgcac

SEQ ID NO: 237266 - DNA, 25 bp, Artificial
  Probe
gggaattgccttccacatgtgagag

SEQ ID NO: 237267 - DNA, 25 bp, Artificial
  Probe
gcattgtgtacattatcgctgcacc

SEQ ID NO: 237268 - DNA, 25 bp, Artificial
  Probe
tcaaaatcagcgagggaattgcctt

SEQ ID NO: 237269 - DNA, 25 bp, Artificial
  Probe
gagtgttcacttttccaaagcatca

SEQ ID NO: 237270 - DNA, 25 bp, Artificial
  Probe
cttaccactcagactttgaagtatg

SEQ ID NO: 237271 - DNA, 25 bp, Artificial
  Probe
tctatttgcattgtgtacattatcg

SEQ ID NO: 237272 - DNA, 25 bp, Artificial
  Probe
atgcttcaaaatcagcgagggaatt

SEQ ID NO: 237273 - DNA, 25 bp, Artificial
  Probe
tgtgcacatgcttcaaaatcagcga

SEQ ID NO: 237274 - DNA, 25 bp, Artificial
  Probe
ctcagactttgaagtatgagtgttc

SEQ ID NO: 237275 - DNA, 25 bp, Artificial
  Probe
attgtgtacattatcgctgcaccag

SEQ ID NO: 237276 - DNA, 25 bp, Artificial
  Probe
ttgcattgtgtacattatcgctgca

SEQ ID NO: 237277 - DNA, 25 bp, Artificial
  Probe
tgcttcaaaatcagcgagggaattg

SEQ ID NO: 237278 - DNA, 25 bp, Artificial
  Probe
acagccatttgcaaaatgggttttc

SEQ ID NO: 237279 - DNA, 25 bp, Artificial
  Probe
ctatttgcattgtgtacattatcgc

SEQ ID NO: 237280 - DNA, 25 bp, Artificial
  Probe
tacagtggttgtgcacatgcttcaa

SEQ ID NO: 237281 - DNA, 25 bp, Artificial
  Probe
gcacatgcttcaaaatcagcgaggg

SEQ ID NO: 237282 - DNA, 25 bp, Artificial
  Probe
tttggactctgtaggacaaaagaca

SEQ ID NO: 237283 - DNA, 25 bp, Artificial
  Probe
cattgtgtacattatcgctgcacca

SEQ ID NO: 237284 - DNA, 25 bp, Artificial
  Probe
taccactcagactttgaagtatgag

SEQ ID NO: 237285 - DNA, 25 bp, Artificial
  Probe
acagtggttgtgcacatgcttcaaa

SEQ ID NO: 237286 - DNA, 25 bp, Artificial
  Probe
aatcagcgagggaattgccttccac

SEQ ID NO: 237287 - DNA, 25 bp, Artificial
  Probe
aattgccttccacatgtgagaggga

SEQ ID NO: 237288 - DNA, 25 bp, Artificial
  Probe
gtatttggtaatttcccattagcat

SEQ ID NO: 237289 - DNA, 25 bp, Artificial
  Probe
acatgcttcaaaatcagcgagggaa

SEQ ID NO: 237290 - DNA, 25 bp, Artificial
  Probe
tgtacagtggttgtgcacatgcttc

SEQ ID NO: 237291 - DNA, 25 bp, Artificial
  Probe
tggttgtgcacatgcttcaaaatca

SEQ ID NO: 237292 - DNA, 25 bp, Artificial
  Probe
ctgttgtacagtggttgtgcacatg

SEQ ID NO: 237293 - DNA, 25 bp, Artificial
  Probe
gtgcacatgcttcaaaatcagcgag

SEQ ID NO: 237294 - DNA, 25 bp, Artificial
  Probe
ggaattgccttccacatgtgagagg

SEQ ID NO: 237295 - DNA, 25 bp, Artificial
  Probe
gactgttgtacagtggttgtgcaca

SEQ ID NO: 237296 - DNA, 25 bp, Artificial
  Probe
ttgtgtacattatcgctgcaccagt

SEQ ID NO: 237297 - DNA, 25 bp, Artificial
  Probe
agccatttgcaaaatgggttttcat

SEQ ID NO: 237298 - DNA, 25 bp, Artificial
  Probe
atcagcgagggaattgccttccaca

SEQ ID NO: 237299 - DNA, 25 bp, Artificial
  Probe
actgttgtacagtggttgtgcacat

SEQ ID NO: 237300 - DNA, 25 bp, Artificial
  Probe
gagggaattgccttccacatgtgag

SEQ ID NO: 237301 - DNA, 25 bp, Artificial
  Probe
atgagtgttcacttttccaaagcat

SEQ ID NO: 237302 - DNA, 25 bp, Artificial
  Probe
gttgtgcacatgcttcaaaatcagc

SEQ ID NO: 237303 - DNA, 25 bp, Artificial
  Probe
ccatttgcaaaatgggttttcatag

SEQ ID NO: 237304 - DNA, 25 bp, Artificial
  Probe
aggaacagccatttgcaaaatgggt

SEQ ID NO: 237305 - DNA, 25 bp, Artificial
  Probe
gttcacttttccaaagcatcagagt

SEQ ID NO: 237306 - DNA, 25 bp, Artificial
  Probe
tcggctgtctctgctacctgtcaat

SEQ ID NO: 237307 - DNA, 25 bp, Artificial
  Probe
gctgtctctgctacctgtcaatagc

SEQ ID NO: 237308 - DNA, 25 bp, Artificial
  Probe
tgagttctgcttgaaccatattccc

SEQ ID NO: 237309 - DNA, 25 bp, Artificial
  Probe
gagctacatccctgttaaagtgcct

SEQ ID NO: 237310 - DNA, 25 bp, Artificial
  Probe
tccatcagaaacttcctcctgtcag

SEQ ID NO: 237311 - DNA, 25 bp, Artificial
  Probe
tgcagtaccagcagccagacatgag

SEQ ID NO: 237312 - DNA, 25 bp, Artificial
  Probe
gtctctgctacctgtcaatagctcc

SEQ ID NO: 237313 - DNA, 25 bp, Artificial
  Probe
cagcagccagacatgagttctgctt

SEQ ID NO: 237314 - DNA, 25 bp, Artificial
  Probe
cagccagacatgagttctgcttgaa

SEQ ID NO: 237315 - DNA, 25 bp, Artificial
  Probe
gaggtcctgtctccaaaacaatacc

SEQ ID NO: 237316 - DNA, 25 bp, Artificial
  Probe
tttcggctgtctctgctacctgtca

SEQ ID NO: 237317 - DNA, 25 bp, Artificial
  Probe
gctacatccctgttaaagtgccttt

SEQ ID NO: 237318 - DNA, 25 bp, Artificial
  Probe
gagttctgcttgaaccatattcccc

SEQ ID NO: 237319 - DNA, 25 bp, Artificial
  Probe
gtaccagcagccagacatgagttct

SEQ ID NO: 237320 - DNA, 25 bp, Artificial
  Probe
tgaccccacagatggcccatgatcg

SEQ ID NO: 237321 - DNA, 25 bp, Artificial
  Probe
cggctgtctctgctacctgtcaata

SEQ ID NO: 237322 - DNA, 25 bp, Artificial
  Probe
catgagttctgcttgaaccatattc

SEQ ID NO: 237323 - DNA, 25 bp, Artificial
  Probe
agcagccagacatgagttctgcttg

SEQ ID NO: 237324 - DNA, 25 bp, Artificial
  Probe
actgaccccacagatggcccatgat

SEQ ID NO: 237325 - DNA, 25 bp, Artificial
  Probe
agccagacatgagttctgcttgaac

SEQ ID NO: 237326 - DNA, 25 bp, Artificial
  Probe
gccagacatgagttctgcttgaacc

SEQ ID NO: 237327 - DNA, 25 bp, Artificial
  Probe
ctgtctctgctacctgtcaatagct

SEQ ID NO: 237328 - DNA, 25 bp, Artificial
  Probe
acatgagttctgcttgaaccatatt

SEQ ID NO: 237329 - DNA, 25 bp, Artificial
  Probe
ccagacatgagttctgcttgaacca

SEQ ID NO: 237330 - DNA, 25 bp, Artificial
  Probe
ccatcagaaacttcctcctgtcagg

SEQ ID NO: 237331 - DNA, 25 bp, Artificial
  Probe
cagacatgagttctgcttgaaccat

SEQ ID NO: 237332 - DNA, 25 bp, Artificial
  Probe
tgagctacatccctgttaaagtgcc

SEQ ID NO: 237333 - DNA, 25 bp, Artificial
  Probe
agacatgagttctgcttgaaccata

SEQ ID NO: 237334 - DNA, 25 bp, Artificial
  Probe
atgagttctgcttgaaccatattcc

SEQ ID NO: 237335 - DNA, 25 bp, Artificial
  Probe
aggtcctgtctccaaaacaatacct

SEQ ID NO: 237336 - DNA, 25 bp, Artificial
  Probe
agctgtgtgcctcctgggcaagcac

SEQ ID NO: 237337 - DNA, 25 bp, Artificial
  Probe
ccagcagccagacatgagttctgct

SEQ ID NO: 237338 - DNA, 25 bp, Artificial
  Probe
ttcggctgtctctgctacctgtcaa

SEQ ID NO: 237339 - DNA, 25 bp, Artificial
  Probe
caaataagaacctttctctgtgtgg

SEQ ID NO: 237340 - DNA, 25 bp, Artificial
  Probe
gacatgagttctgcttgaaccatat

SEQ ID NO: 237341 - DNA, 25 bp, Artificial
  Probe
gcagccagacatgagttctgcttga

SEQ ID NO: 237342 - DNA, 25 bp, Artificial
  Probe
agctacatccctgttaaagtgcctt

SEQ ID NO: 237343 - DNA, 25 bp, Artificial
  Probe
tgtctctgctacctgtcaatagctc

SEQ ID NO: 237344 - DNA, 25 bp, Artificial
  Probe
agccattctctgaccccatggaaac

SEQ ID NO: 237345 - DNA, 25 bp, Artificial
  Probe
gcagtaccagcagccagacatgagt

SEQ ID NO: 237346 - DNA, 25 bp, Artificial
  Probe
atcagaaacttcctcctgtcaggcg

SEQ ID NO: 237347 - DNA, 25 bp, Artificial
  Probe
taccagcagccagacatgagttctg

SEQ ID NO: 237348 - DNA, 25 bp, Artificial
  Probe
ggctgtctctgctacctgtcaatag

SEQ ID NO: 237349 - DNA, 25 bp, Artificial
  Probe
catcagaaacttcctcctgtcaggc

SEQ ID NO: 237350 - DNA, 25 bp, Artificial
  Probe
aaaaaaaaaacacatgcggccgcag

SEQ ID NO: 237351 - DNA, 25 bp, Artificial
  Probe
cagccattctctgaccccatggaaa

SEQ ID NO: 237352 - DNA, 25 bp, Artificial
  Probe
taaacactgaagaagctggagctgt

SEQ ID NO: 237353 - DNA, 25 bp, Artificial
  Probe
aagctgtctccatgggttggtcaca

SEQ ID NO: 237354 - DNA, 25 bp, Artificial
  Probe
aatagtttctgtttccactgaggca

SEQ ID NO: 237355 - DNA, 25 bp, Artificial
  Probe
tgttttcagttttcatttcgacaag

SEQ ID NO: 237356 - DNA, 25 bp, Artificial
  Probe
ctcagaactggtttatttggtgtcg

SEQ ID NO: 237357 - DNA, 25 bp, Artificial
  Probe
gtacatgtgcagacgcagcctgcag

SEQ ID NO: 237358 - DNA, 25 bp, Artificial
  Probe
tgcaagggtccgatttgccatcgaa

SEQ ID NO: 237359 - DNA, 25 bp, Artificial
  Probe
ttccactgaggcagtttctggtact

SEQ ID NO: 237360 - DNA, 25 bp, Artificial
  Probe
aacactgaagaagctggagctgtta

SEQ ID NO: 237361 - DNA, 25 bp, Artificial
  Probe
ctgtttccactgaggcagtttctgg

SEQ ID NO: 237362 - DNA, 25 bp, Artificial
  Probe
gaggcagtttctggtactcctatgc

SEQ ID NO: 237363 - DNA, 25 bp, Artificial
  Probe
cgacaagcctgtaattatagctatt

SEQ ID NO: 237364 - DNA, 25 bp, Artificial
  Probe
ttcgacaagcctgtaattatagcta

SEQ ID NO: 237365 - DNA, 25 bp, Artificial
  Probe
acgtgcgactctgtggtcctgagtg

SEQ ID NO: 237366 - DNA, 25 bp, Artificial
  Probe
cactgaagaagctggagctgttaaa

SEQ ID NO: 237367 - DNA, 25 bp, Artificial
  Probe
tgcatcgcaccgtgctgtacatgtg

SEQ ID NO: 237368 - DNA, 25 bp, Artificial
  Probe
taaatagtttctgtttccactgagg

SEQ ID NO: 237369 - DNA, 25 bp, Artificial
  Probe
gtttatttggtgtcgtggaacctct

SEQ ID NO: 237370 - DNA, 25 bp, Artificial
  Probe
tcacagtgtgcatcgcaccgtgctg

SEQ ID NO: 237371 - DNA, 25 bp, Artificial
  Probe
gtcctgagtgccagaagctgtctcc

SEQ ID NO: 237372 - DNA, 25 bp, Artificial
  Probe
gacgcagcctgcagccaggttttta

SEQ ID NO: 237373 - DNA, 25 bp, Artificial
  Probe
gttttcagttttcatttcgacaagc

SEQ ID NO: 237374 - DNA, 25 bp, Artificial
  Probe
tgtggtcctgagtgccagaagctgt

SEQ ID NO: 237375 - DNA, 25 bp, Artificial
  Probe
tccctcagcctgcaagggtccgatt

SEQ ID NO: 237376 - DNA, 25 bp, Artificial
  Probe
gataaacactgaagaagctggagct

SEQ ID NO: 237377 - DNA, 25 bp, Artificial
  Probe
ttcagttttcatttcgacaagcctg

SEQ ID NO: 237378 - DNA, 25 bp, Artificial
  Probe
tttatcttggggaaatctcagaact

SEQ ID NO: 237379 - DNA, 25 bp, Artificial
  Probe
acaagcctgtaattatagctattag

SEQ ID NO: 237380 - DNA, 25 bp, Artificial
  Probe
atgtgcagacgcagcctgcagccag

SEQ ID NO: 237381 - DNA, 25 bp, Artificial
  Probe
ggtactcctatgcaatattacttag

SEQ ID NO: 237382 - DNA, 25 bp, Artificial
  Probe
tctcagaactggtttatttggtgtc

SEQ ID NO: 237383 - DNA, 25 bp, Artificial
  Probe
gccatcgaaagacgacctctacttt

SEQ ID NO: 237384 - DNA, 25 bp, Artificial
  Probe
atgggttggtcacagtgtgcatcgc

SEQ ID NO: 237385 - DNA, 25 bp, Artificial
  Probe
gtggaacctcttactgctttcaata

SEQ ID NO: 237386 - DNA, 25 bp, Artificial
  Probe
agcctgcaagggtccgatttgccat

SEQ ID NO: 237387 - DNA, 25 bp, Artificial
  Probe
cctcagcctgcaagggtccgatttg

SEQ ID NO: 237388 - DNA, 25 bp, Artificial
  Probe
tatcttggggaaatctcagaactgg

SEQ ID NO: 237389 - DNA, 25 bp, Artificial
  Probe
aagggtccgatttgccatcgaaaga

SEQ ID NO: 237390 - DNA, 25 bp, Artificial
  Probe
gttttcatttcgacaagcctgtaat

SEQ ID NO: 237391 - DNA, 25 bp, Artificial
  Probe
gtccgatttgccatcgaaagacgac

SEQ ID NO: 237392 - DNA, 25 bp, Artificial
  Probe
gtttctggtactcctatgcaatatt

SEQ ID NO: 237393 - DNA, 25 bp, Artificial
  Probe
agtgtgcatcgcaccgtgctgtaca

SEQ ID NO: 237394 - DNA, 25 bp, Artificial
  Probe
gtaaatagtttctgtttccactgag

SEQ ID NO: 237395 - DNA, 25 bp, Artificial
  Probe
gcagacgcagcctgcagccaggttt

SEQ ID NO: 237396 - DNA, 25 bp, Artificial
  Probe
tttcgacaagcctgtaattatagct

SEQ ID NO: 237397 - DNA, 25 bp, Artificial
  Probe
tgtctccatgggttggtcacagtgt

SEQ ID NO: 237398 - DNA, 25 bp, Artificial
  Probe
gaaacacactgtaagcctcttttgc

SEQ ID NO: 237399 - DNA, 25 bp, Artificial
  Probe
cttctgatgcatactactattgatg

SEQ ID NO: 237400 - DNA, 25 bp, Artificial
  Probe
gtaaatgctgccatgttccaaaccc

SEQ ID NO: 237401 - DNA, 25 bp, Artificial
  Probe
gtgcctaagacattggacccctttg

SEQ ID NO: 237402 - DNA, 25 bp, Artificial
  Probe
ggtgcctaagacattggaccccttt

SEQ ID NO: 237403 - DNA, 25 bp, Artificial
  Probe
tgggatgctcaagcacctgtaaacc

SEQ ID NO: 237404 - DNA, 25 bp, Artificial
  Probe
gtcccatgagcaggtgcctaagaca

SEQ ID NO: 237405 - DNA, 25 bp, Artificial
  Probe
aatccagtgggatgctcaagcacct

SEQ ID NO: 237406 - DNA, 25 bp, Artificial
  Probe
atggattactacactcttctgatgc

SEQ ID NO: 237407 - DNA, 25 bp, Artificial
  Probe
gagcaggtgcctaagacattggacc

SEQ ID NO: 237408 - DNA, 25 bp, Artificial
  Probe
gcaggtgcctaagacattggacccc

SEQ ID NO: 237409 - DNA, 25 bp, Artificial
  Probe
gtatggagctgtgcaccctggaaat

SEQ ID NO: 237410 - DNA, 25 bp, Artificial
  Probe
caggtgcctaagacattggacccct

SEQ ID NO: 237411 - DNA, 25 bp, Artificial
  Probe
agtcccatgagcaggtgcctaagac

SEQ ID NO: 237412 - DNA, 25 bp, Artificial
  Probe
tgcctaagacattggacccctttgt

SEQ ID NO: 237413 - DNA, 25 bp, Artificial
  Probe
tagagaatccagtgggatgctcaag

SEQ ID NO: 237414 - DNA, 25 bp, Artificial
  Probe
agcaggtgcctaagacattggaccc

SEQ ID NO: 237415 - DNA, 25 bp, Artificial
  Probe
tccagtgggatgctcaagcacctgt

SEQ ID NO: 237416 - DNA, 25 bp, Artificial
  Probe
ttctgatgcatactactattgatgt

SEQ ID NO: 237417 - DNA, 25 bp, Artificial
  Probe
tgatggattactacactcttctgat

SEQ ID NO: 237418 - DNA, 25 bp, Artificial
  Probe
tatggagctgtgcaccctggaaata

SEQ ID NO: 237419 - DNA, 25 bp, Artificial
  Probe
gatgctcaagcacctgtaaaccatc

SEQ ID NO: 237420 - DNA, 25 bp, Artificial
  Probe
cagtcccatgagcaggtgcctaaga

SEQ ID NO: 237421 - DNA, 25 bp, Artificial
  Probe
gtagagaatccagtgggatgctcaa

SEQ ID NO: 237422 - DNA, 25 bp, Artificial
  Probe
atccagtgggatgctcaagcacctg

SEQ ID NO: 237423 - DNA, 25 bp, Artificial
  Probe
agctgtgcaccctggaaataaacat

SEQ ID NO: 237424 - DNA, 25 bp, Artificial
  Probe
atggagctgtgcaccctggaaataa

SEQ ID NO: 237425 - DNA, 25 bp, Artificial
  Probe
tgaaacacactgtaagcctcttttg

SEQ ID NO: 237426 - DNA, 25 bp, Artificial
  Probe
aggtgcctaagacattggacccctt

SEQ ID NO: 237427 - DNA, 25 bp, Artificial
  Probe
cccatgagcaggtgcctaagacatt

SEQ ID NO: 237428 - DNA, 25 bp, Artificial
  Probe
gatggattactacactcttctgatg

SEQ ID NO: 237429 - DNA, 25 bp, Artificial
  Probe
tgtatggagctgtgcaccctggaaa

SEQ ID NO: 237430 - DNA, 25 bp, Artificial
  Probe
tgagcaggtgcctaagacattggac

SEQ ID NO: 237431 - DNA, 25 bp, Artificial
  Probe
cagtgggatgctcaagcacctgtaa

SEQ ID NO: 237432 - DNA, 25 bp, Artificial
  Probe
gaatccagtgggatgctcaagcacc

SEQ ID NO: 237433 - DNA, 25 bp, Artificial
  Probe
ttgtttaatgaaacacactgtaagc

SEQ ID NO: 237434 - DNA, 25 bp, Artificial
  Probe
gtttaatgaaacacactgtaagcct

SEQ ID NO: 237435 - DNA, 25 bp, Artificial
  Probe
gggatgctcaagcacctgtaaacca

SEQ ID NO: 237436 - DNA, 25 bp, Artificial
  Probe
tggattactacactcttctgatgca

SEQ ID NO: 237437 - DNA, 25 bp, Artificial
  Probe
tcccatgagcaggtgcctaagacat

SEQ ID NO: 237438 - DNA, 25 bp, Artificial
  Probe
atatgtaaatgctgccatgttccaa

SEQ ID NO: 237439 - DNA, 25 bp, Artificial
  Probe
gtgggatgctcaagcacctgtaaac

SEQ ID NO: 237440 - DNA, 25 bp, Artificial
  Probe
ggatgctcaagcacctgtaaaccat

SEQ ID NO: 237441 - DNA, 25 bp, Artificial
  Probe
ggattactacactcttctgatgcat

SEQ ID NO: 237442 - DNA, 25 bp, Artificial
  Probe
gaacggaccccatcttcattgatgc

SEQ ID NO: 237443 - DNA, 25 bp, Artificial
  Probe
cttgtggttccgaaaatttgtgcgt

SEQ ID NO: 237444 - DNA, 25 bp, Artificial
  Probe
tcattacctggtatggactttgtgc

SEQ ID NO: 237445 - DNA, 25 bp, Artificial
  Probe
tcttcattgatgcagacttcaatag

SEQ ID NO: 237446 - DNA, 25 bp, Artificial
  Probe
cgtgatgctggcagattatcctcaa

SEQ ID NO: 237447 - DNA, 25 bp, Artificial
  Probe
tggttccgaaaatttgtgcgtcgga

SEQ ID NO: 237448 - DNA, 25 bp, Artificial
  Probe
atcatacttgtggttccgaaaattt

SEQ ID NO: 237449 - DNA, 25 bp, Artificial
  Probe
ttccgaaaatttgtgcgtcggacac

SEQ ID NO: 237450 - DNA, 25 bp, Artificial
  Probe
cacaacacccggagggcccattgga

SEQ ID NO: 237451 - DNA, 25 bp, Artificial
  Probe
ggaacggaccccatcttcattgatg

SEQ ID NO: 237452 - DNA, 25 bp, Artificial
  Probe
tcaatagcacaacacccggagggcc

SEQ ID NO: 237453 - DNA, 25 bp, Artificial
  Probe
gagggcccattggaggtcaaaccag

SEQ ID NO: 237454 - DNA, 25 bp, Artificial
  Probe
cattgatgcagacttcaatagcaca

SEQ ID NO: 237455 - DNA, 25 bp, Artificial
  Probe
ttcattgatgcagacttcaatagca

SEQ ID NO: 237456 - DNA, 25 bp, Artificial
  Probe
agaggcacgtgatgctggcagatta

SEQ ID NO: 237457 - DNA, 25 bp, Artificial
  Probe
gcagtacatcattacctggtatgga

SEQ ID NO: 237458 - DNA, 25 bp, Artificial
  Probe
ccatcctggtcaatagagggtttgt

SEQ ID NO: 237459 - DNA, 25 bp, Artificial
  Probe
tccgaaaatttgtgcgtcggacacc

SEQ ID NO: 237460 - DNA, 25 bp, Artificial
  Probe
catacttgtggttccgaaaatttgt

SEQ ID NO: 237461 - DNA, 25 bp, Artificial
  Probe
tcaaaccagagtaacccttcggaat

SEQ ID NO: 237462 - DNA, 25 bp, Artificial
  Probe
actcctttccattgctctgacttgg

SEQ ID NO: 237463 - DNA, 25 bp, Artificial
  Probe
cggaccccatcttcattgatgcaga

SEQ ID NO: 237464 - DNA, 25 bp, Artificial
  Probe
gcagacttcaatagcacaacacccg

SEQ ID NO: 237465 - DNA, 25 bp, Artificial
  Probe
gatgcagacttcaatagcacaacac

SEQ ID NO: 237466 - DNA, 25 bp, Artificial
  Probe
atcctggtcaatagagggtttgttc

SEQ ID NO: 237467 - DNA, 25 bp, Artificial
  Probe
cagtacatcattacctggtatggac

SEQ ID NO: 237468 - DNA, 25 bp, Artificial
  Probe
gtacatcattacctggtatggactt

SEQ ID NO: 237469 - DNA, 25 bp, Artificial
  Probe
tgtggttccgaaaatttgtgcgtcg

SEQ ID NO: 237470 - DNA, 25 bp, Artificial
  Probe
gaacaggaacggaccccatcttcat

SEQ ID NO: 237471 - DNA, 25 bp, Artificial
  Probe
gaggcacgtgatgctggcagattat

SEQ ID NO: 237472 - DNA, 25 bp, Artificial
  Probe
tttgtgcgtcggacaccaggtgtgt

SEQ ID NO: 237473 - DNA, 25 bp, Artificial
  Probe
cggacaccaggtgtgtgaaaataat

SEQ ID NO: 237474 - DNA, 25 bp, Artificial
  Probe
ggagggcccattggaggtcaaacca

SEQ ID NO: 237475 - DNA, 25 bp, Artificial
  Probe
ggcacgtgatgctggcagattatcc

SEQ ID NO: 237476 - DNA, 25 bp, Artificial
  Probe
cacatgcagtacatcattacctggt

SEQ ID NO: 237477 - DNA, 25 bp, Artificial
  Probe
tgatgctggcagattatcctcaact

SEQ ID NO: 237478 - DNA, 25 bp, Artificial
  Probe
agcacatgcagtacatcattacctg

SEQ ID NO: 237479 - DNA, 25 bp, Artificial
  Probe
attacctggtatggactttgtgcag

SEQ ID NO: 237480 - DNA, 25 bp, Artificial
  Probe
ccattggaggtcaaaccagagtaac

SEQ ID NO: 237481 - DNA, 25 bp, Artificial
  Probe
tgcgtcggacaccaggtgtgtgaaa

SEQ ID NO: 237482 - DNA, 25 bp, Artificial
  Probe
tacatcatacttgtggttccgaaaa

SEQ ID NO: 237483 - DNA, 25 bp, Artificial
  Probe
gttccgaaaatttgtgcgtcggaca

SEQ ID NO: 237484 - DNA, 25 bp, Artificial
  Probe
tcctggtcaatagagggtttgttcc

SEQ ID NO: 237485 - DNA, 25 bp, Artificial
  Probe
gcctcggaccatggtggaccctgtc

SEQ ID NO: 237486 - DNA, 25 bp, Artificial
  Probe
tgatgcagacttcaatagcacaaca

SEQ ID NO: 237487 - DNA, 25 bp, Artificial
  Probe
gcccattggaggtcaaaccagagta

SEQ ID NO: 237488 - DNA, 25 bp, Artificial
  Probe
tctcttgcagagttggatctgtagc

SEQ ID NO: 237489 - DNA, 25 bp, Artificial
  Probe
ctgctctgtcttctcttgcagagtt

SEQ ID NO: 237490 - DNA, 25 bp, Artificial
  Probe
aagctgacataggtgagtgctggcc

SEQ ID NO: 237491 - DNA, 25 bp, Artificial
  Probe
tcttctgcctgtcgacactggacac

SEQ ID NO: 237492 - DNA, 25 bp, Artificial
  Probe
cactgctctgtcttctcttgcagag

SEQ ID NO: 237493 - DNA, 25 bp, Artificial
  Probe
ttctgcctgtcgacactggacaccg

SEQ ID NO: 237494 - DNA, 25 bp, Artificial
  Probe
ctcttgcagagttggatctgtagcg

SEQ ID NO: 237495 - DNA, 25 bp, Artificial
  Probe
tctgtcttctcttgcagagttggat

SEQ ID NO: 237496 - DNA, 25 bp, Artificial
  Probe
tgtcttctgcctgtcgacactggac

SEQ ID NO: 237497 - DNA, 25 bp, Artificial
  Probe
ctgtcttctgcctgtcgacactgga

SEQ ID NO: 237498 - DNA, 25 bp, Artificial
  Probe
tggacaccgtctggtcctcacggct

SEQ ID NO: 237499 - DNA, 25 bp, Artificial
  Probe
ctgtcttctcttgcagagttggatc

SEQ ID NO: 237500 - DNA, 25 bp, Artificial
  Probe
gtcttctcttgcagagttggatctg

SEQ ID NO: 237501 - DNA, 25 bp, Artificial
  Probe
gtcttctgcctgtcgacactggaca

SEQ ID NO: 237502 - DNA, 25 bp, Artificial
  Probe
gcctgtcgacactggacaccgtctg

SEQ ID NO: 237503 - DNA, 25 bp, Artificial
  Probe
cttctcttgcagagttggatctgta

SEQ ID NO: 237504 - DNA, 25 bp, Artificial
  Probe
cagcgctgtcttctgcctgtcgaca

SEQ ID NO: 237505 - DNA, 25 bp, Artificial
  Probe
acactgctctgtcttctcttgcaga

SEQ ID NO: 237506 - DNA, 25 bp, Artificial
  Probe
gcagcgctgtcttctgcctgtcgac

SEQ ID NO: 237507 - DNA, 25 bp, Artificial
  Probe
agcgctgtcttctgcctgtcgacac

SEQ ID NO: 237508 - DNA, 25 bp, Artificial
  Probe
actggacaccgtctggtcctcacgg

SEQ ID NO: 237509 - DNA, 25 bp, Artificial
  Probe
tgtcttctcttgcagagttggatct

SEQ ID NO: 237510 - DNA, 25 bp, Artificial
  Probe
ggcagcgctgtcttctgcctgtcga

SEQ ID NO: 237511 - DNA, 25 bp, Artificial
  Probe
tccccgattgacactgctctgtctt

SEQ ID NO: 237512 - DNA, 25 bp, Artificial
  Probe
ttccccgattgacactgctctgtct

SEQ ID NO: 237513 - DNA, 25 bp, Artificial
  Probe
ctgacataggtgagtgctggccccg

SEQ ID NO: 237514 - DNA, 25 bp, Artificial
  Probe
actgctctgtcttctcttgcagagt

SEQ ID NO: 237515 - DNA, 25 bp, Artificial
  Probe
ggacaccgtctggtcctcacggctt

SEQ ID NO: 237516 - DNA, 25 bp, Artificial
  Probe
tgctctgtcttctcttgcagagttg

SEQ ID NO: 237517 - DNA, 25 bp, Artificial
  Probe
ccaagaagctgacataggtgagtgc

SEQ ID NO: 237518 - DNA, 25 bp, Artificial
  Probe
agctgacataggtgagtgctggccc

SEQ ID NO: 237519 - DNA, 25 bp, Artificial
  Probe
ggcttccccgattgacactgctctg

SEQ ID NO: 237520 - DNA, 25 bp, Artificial
  Probe
tctgcctgtcgacactggacaccgt

SEQ ID NO: 237521 - DNA, 25 bp, Artificial
  Probe
tgcctgtcgacactggacaccgtct

SEQ ID NO: 237522 - DNA, 25 bp, Artificial
  Probe
tgtcgacactggacaccgtctggtc

SEQ ID NO: 237523 - DNA, 25 bp, Artificial
  Probe
ttctcttgcagagttggatctgtag

SEQ ID NO: 237524 - DNA, 25 bp, Artificial
  Probe
tcgacactggacaccgtctggtcct

SEQ ID NO: 237525 - DNA, 25 bp, Artificial
  Probe
ctgtcgacactggacaccgtctggt

SEQ ID NO: 237526 - DNA, 25 bp, Artificial
  Probe
tcttctcttgcagagttggatctgt

SEQ ID NO: 237527 - DNA, 25 bp, Artificial
  Probe
gctctgtcttctcttgcagagttgg

SEQ ID NO: 237528 - DNA, 25 bp, Artificial
  Probe
gccgggcagcgctgtcttctgcctg

SEQ ID NO: 237529 - DNA, 25 bp, Artificial
  Probe
gcttccccgattgacactgctctgt

SEQ ID NO: 237530 - DNA, 25 bp, Artificial
  Probe
cctgtcgacactggacaccgtctgg

SEQ ID NO: 237531 - DNA, 25 bp, Artificial
  Probe
gggcagcgctgtcttctgcctgtcg

SEQ ID NO: 237532 - DNA, 25 bp, Artificial
  Probe
gctgacataggtgagtgctggcccc

SEQ ID NO: 237533 - DNA, 25 bp, Artificial
  Probe
ctctgtcttctcttgcagagttgga

SEQ ID NO: 237534 - DNA, 25 bp, Artificial
  Probe
ccctcctgcaaccaaggtgattgac

SEQ ID NO: 237535 - DNA, 25 bp, Artificial
  Probe
ctcctgcaaccaaggtgattgactg

SEQ ID NO: 237536 - DNA, 25 bp, Artificial
  Probe
ctgactcttcacagtaatgaggttt

SEQ ID NO: 237537 - DNA, 25 bp, Artificial
  Probe
ctgcaaccaaggtgattgactggaa

SEQ ID NO: 237538 - DNA, 25 bp, Artificial
  Probe
ttggaactgtcttacctcatcaaag

SEQ ID NO: 237539 - DNA, 25 bp, Artificial
  Probe
gaaatgtatttcactgactactagc

SEQ ID NO: 237540 - DNA, 25 bp, Artificial
  Probe
cctgcaaccaaggtgattgactgga

SEQ ID NO: 237541 - DNA, 25 bp, Artificial
  Probe
gcaaccaaggtgattgactggaatc

SEQ ID NO: 237542 - DNA, 25 bp, Artificial
  Probe
tggaaacctgactcttcacagtaat

SEQ ID NO: 237543 - DNA, 25 bp, Artificial
  Probe
gaaacctgactcttcacagtaatga

SEQ ID NO: 237544 - DNA, 25 bp, Artificial
  Probe
ggaaacctgactcttcacagtaatg

SEQ ID NO: 237545 - DNA, 25 bp, Artificial
  Probe
gactcttcacagtaatgaggtttag

SEQ ID NO: 237546 - DNA, 25 bp, Artificial
  Probe
tgcaaccaaggtgattgactggaat

SEQ ID NO: 237547 - DNA, 25 bp, Artificial
  Probe
aatggaaacctgactcttcacagta

SEQ ID NO: 237548 - DNA, 25 bp, Artificial
  Probe
tcctgcaaccaaggtgattgactgg

SEQ ID NO: 237549 - DNA, 25 bp, Artificial
  Probe
ctccctcctgcaaccaaggtgattg

SEQ ID NO: 237550 - DNA, 25 bp, Artificial
  Probe
tgtcttacctcatcaaagcagatga

SEQ ID NO: 237551 - DNA, 25 bp, Artificial
  Probe
catcaaagcagatgaactgttgtac

SEQ ID NO: 237552 - DNA, 25 bp, Artificial
  Probe
ccgtcctatccctgtgctattgtgt

SEQ ID NO: 237553 - DNA, 25 bp, Artificial
  Probe
tggaactgtcttacctcatcaaagc

SEQ ID NO: 237554 - DNA, 25 bp, Artificial
  Probe
ggaactgtcttacctcatcaaagca

SEQ ID NO: 237555 - DNA, 25 bp, Artificial
  Probe
ataatggaaacctgactcttcacag

SEQ ID NO: 237556 - DNA, 25 bp, Artificial
  Probe
gtcctatccctgtgctattgtgtgc

SEQ ID NO: 237557 - DNA, 25 bp, Artificial
  Probe
gaactgtcttacctcatcaaagcag

SEQ ID NO: 237558 - DNA, 25 bp, Artificial
  Probe
cgtcctatccctgtgctattgtgtg

SEQ ID NO: 237559 - DNA, 25 bp, Artificial
  Probe
ctcttcacagtaatgaggtttagtt

SEQ ID NO: 237560 - DNA, 25 bp, Artificial
  Probe
cctcctgcaaccaaggtgattgact

SEQ ID NO: 237561 - DNA, 25 bp, Artificial
  Probe
gtatttcactgactactagcctatg

SEQ ID NO: 237562 - DNA, 25 bp, Artificial
  Probe
acattcgctgaaatgtatttcactg

SEQ ID NO: 237563 - DNA, 25 bp, Artificial
  Probe
gtcttacctcatcaaagcagatgaa

SEQ ID NO: 237564 - DNA, 25 bp, Artificial
  Probe
acctgactcttcacagtaatgaggt

SEQ ID NO: 237565 - DNA, 25 bp, Artificial
  Probe
tccctcctgcaaccaaggtgattga

SEQ ID NO: 237566 - DNA, 25 bp, Artificial
  Probe
atggaaacctgactcttcacagtaa

SEQ ID NO: 237567 - DNA, 25 bp, Artificial
  Probe
tcctatccctgtgctattgtgtgcc

SEQ ID NO: 237568 - DNA, 25 bp, Artificial
  Probe
tcatcaaagcagatgaactgttgta

SEQ ID NO: 237569 - DNA, 25 bp, Artificial
  Probe
aaacctgactcttcacagtaatgag

SEQ ID NO: 237570 - DNA, 25 bp, Artificial
  Probe
ctgtcttacctcatcaaagcagatg

SEQ ID NO: 237571 - DNA, 25 bp, Artificial
  Probe
tcttcacagtaatgaggtttagttg

SEQ ID NO: 237572 - DNA, 25 bp, Artificial
  Probe
cctgactcttcacagtaatgaggtt

SEQ ID NO: 237573 - DNA, 25 bp, Artificial
  Probe
cccttcaggtggataatggaaacct

SEQ ID NO: 237574 - DNA, 25 bp, Artificial
  Probe
aacctgactcttcacagtaatgagg

SEQ ID NO: 237575 - DNA, 25 bp, Artificial
  Probe
taatggaaacctgactcttcacagt

SEQ ID NO: 237576 - DNA, 25 bp, Artificial
  Probe
actcttcacagtaatgaggtttagt

SEQ ID NO: 237577 - DNA, 25 bp, Artificial
  Probe
tccctgtgctattgtgtgcccctca

SEQ ID NO: 237578 - DNA, 25 bp, Artificial
  Probe
cctatccctgtgctattgtgtgccc

SEQ ID NO: 237579 - DNA, 25 bp, Artificial
  Probe
tgactcttcacagtaatgaggttta

SEQ ID NO: 237580 - DNA, 25 bp, Artificial
  Probe
ttggtcatggtcaagccaggatcca

SEQ ID NO: 237581 - DNA, 25 bp, Artificial
  Probe
ggcgtggtttggtcatggtcaagcc

SEQ ID NO: 237582 - DNA, 25 bp, Artificial
  Probe
catggtcaagccaggatccatccaa

SEQ ID NO: 237583 - DNA, 25 bp, Artificial
  Probe
caagccaggatccatccaaccccac

SEQ ID NO: 237584 - DNA, 25 bp, Artificial
  Probe
tttgaggcgtggtttggtcatggtc

SEQ ID NO: 237585 - DNA, 25 bp, Artificial
  Probe
atttgaggcgtggtttggtcatggt

SEQ ID NO: 237586 - DNA, 25 bp, Artificial
  Probe
aggcgtggtttggtcatggtcaagc

SEQ ID NO: 237587 - DNA, 25 bp, Artificial
  Probe
ggtcaagccaggatccatccaaccc

SEQ ID NO: 237588 - DNA, 25 bp, Artificial
  Probe
tggtttggtcatggtcaagccagga

SEQ ID NO: 237589 - DNA, 25 bp, Artificial
  Probe
ggtcatggtcaagccaggatccatc

SEQ ID NO: 237590 - DNA, 25 bp, Artificial
  Probe
gtcaagccaggatccatccaacccc

SEQ ID NO: 237591 - DNA, 25 bp, Artificial
  Probe
aagccaggatccatccaaccccacc

SEQ ID NO: 237592 - DNA, 25 bp, Artificial
  Probe
tcaagccaggatccatccaacccca

SEQ ID NO: 237593 - DNA, 25 bp, Artificial
  Probe
tgaggcgtggtttggtcatggtcaa

SEQ ID NO: 237594 - DNA, 25 bp, Artificial
  Probe
gaggcgtggtttggtcatggtcaag

SEQ ID NO: 237595 - DNA, 25 bp, Artificial
  Probe
tcatggtcaagccaggatccatcca

SEQ ID NO: 237596 - DNA, 25 bp, Artificial
  Probe
tggtcatggtcaagccaggatccat

SEQ ID NO: 237597 - DNA, 25 bp, Artificial
  Probe
gtcatggtcaagccaggatccatcc

SEQ ID NO: 237598 - DNA, 25 bp, Artificial
  Probe
gcgtggtttggtcatggtcaagcca

SEQ ID NO: 237599 - DNA, 25 bp, Artificial
  Probe
agccaggatccatccaaccccacca

SEQ ID NO: 237600 - DNA, 25 bp, Artificial
  Probe
gatttgaggcgtggtttggtcatgg

SEQ ID NO: 237601 - DNA, 25 bp, Artificial
  Probe
gtttggtcatggtcaagccaggatc

SEQ ID NO: 237602 - DNA, 25 bp, Artificial
  Probe
gtggtttggtcatggtcaagccagg

SEQ ID NO: 237603 - DNA, 25 bp, Artificial
  Probe
ttgaggcgtggtttggtcatggtca

SEQ ID NO: 237604 - DNA, 25 bp, Artificial
  Probe
tttggtcatggtcaagccaggatcc

SEQ ID NO: 237605 - DNA, 25 bp, Artificial
  Probe
atggtcaagccaggatccatccaac

SEQ ID NO: 237606 - DNA, 25 bp, Artificial
  Probe
ggatttgaggcgtggtttggtcatg

SEQ ID NO: 237607 - DNA, 25 bp, Artificial
  Probe
aggatttgaggcgtggtttggtcat

SEQ ID NO: 237608 - DNA, 25 bp, Artificial
  Probe
tggtcaagccaggatccatccaacc

SEQ ID NO: 237609 - DNA, 25 bp, Artificial
  Probe
ggtttggtcatggtcaagccaggat

SEQ ID NO: 237610 - DNA, 25 bp, Artificial
  Probe
cgtggtttggtcatggtcaagccag

SEQ ID NO: 237611 - DNA, 25 bp, Artificial
  Probe
acacagaatcaagtttgtgtagacc

SEQ ID NO: 237612 - DNA, 25 bp, Artificial
  Probe
taggctcttgggtcccgtttcatat

SEQ ID NO: 237613 - DNA, 25 bp, Artificial
  Probe
gaaagttgcattagctcttctctaa

SEQ ID NO: 237614 - DNA, 25 bp, Artificial
  Probe
tgttatgaactggtatttgtcacct

SEQ ID NO: 237615 - DNA, 25 bp, Artificial
  Probe
gaactggtatttgtcacctttgttt

SEQ ID NO: 237616 - DNA, 25 bp, Artificial
  Probe
tcaccagaagtgtgtacaggacttc

SEQ ID NO: 237617 - DNA, 25 bp, Artificial
  Probe
agtagatcggtttgaccagtaacca

SEQ ID NO: 237618 - DNA, 25 bp, Artificial
  Probe
ttgctgattgtagatcgcaattagc

SEQ ID NO: 237619 - DNA, 25 bp, Artificial
  Probe
cgcaattagcgcaaagtagatcggt

SEQ ID NO: 237620 - DNA, 25 bp, Artificial
  Probe
gtgaattcagatttacctcataaga

SEQ ID NO: 237621 - DNA, 25 bp, Artificial
  Probe
cactccaatagaaagttgcattagc

SEQ ID NO: 237622 - DNA, 25 bp, Artificial
  Probe
ttctcatacagtaagtcatagcatg

SEQ ID NO: 237623 - DNA, 25 bp, Artificial
  Probe
taaagcaaatgtccatacgtcatgc

SEQ ID NO: 237624 - DNA, 25 bp, Artificial
  Probe
tgtcagtagccttgaaaagatgtac

SEQ ID NO: 237625 - DNA, 25 bp, Artificial
  Probe
ctaaagcaaccctttgctcttgctg

SEQ ID NO: 237626 - DNA, 25 bp, Artificial
  Probe
ggggcaatcattttaccagcttttg

SEQ ID NO: 237627 - DNA, 25 bp, Artificial
  Probe
cactactgagtatttctgagtgaga

SEQ ID NO: 237628 - DNA, 25 bp, Artificial
  Probe
agaccctgaagtgttatgaactggt

SEQ ID NO: 237629 - DNA, 25 bp, Artificial
  Probe
cgtttcatattgcacatgcaggaac

SEQ ID NO: 237630 - DNA, 25 bp, Artificial
  Probe
agaagatgcatctagcatagcaaca

SEQ ID NO: 237631 - DNA, 25 bp, Artificial
  Probe
gaccagtaaccattgcttgattctt

SEQ ID NO: 237632 - DNA, 25 bp, Artificial
  Probe
gcccaaaagtgcttcccttagtcat

SEQ ID NO: 237633 - DNA, 25 bp, Artificial
  Probe
gctccaaagagagtacagtgagttt

SEQ ID NO: 237634 - DNA, 25 bp, Artificial
  Probe
gagtgccttttattctcatacagta

SEQ ID NO: 237635 - DNA, 25 bp, Artificial
  Probe
gtccatacgtcatgcactccaatag

SEQ ID NO: 237636 - DNA, 25 bp, Artificial
  Probe
aatacactactgagtatttctgagt

SEQ ID NO: 237637 - DNA, 25 bp, Artificial
  Probe
ctggctggtgtgaatgcatgcttat

SEQ ID NO: 237638 - DNA, 25 bp, Artificial
  Probe
agtgtaaaacactggactgtgctgt

SEQ ID NO: 237639 - DNA, 25 bp, Artificial
  Probe
tcagcatgtacaattgctgattgta

SEQ ID NO: 237640 - DNA, 25 bp, Artificial
  Probe
tacttgtcttagtcgtttgaactta

SEQ ID NO: 237641 - DNA, 25 bp, Artificial
  Probe
tgaaatcggagacttcctcactaaa

SEQ ID NO: 237642 - DNA, 25 bp, Artificial
  Probe
tgccttacacacagaatcaagtttg

SEQ ID NO: 237643 - DNA, 25 bp, Artificial
  Probe
ttcatggagttgtcagtagccttga

SEQ ID NO: 237644 - DNA, 25 bp, Artificial
  Probe
caaagcagtgttccatgccagagtg

SEQ ID NO: 237645 - DNA, 25 bp, Artificial
  Probe
ccatgccagagtgaagagcttattg

SEQ ID NO: 237646 - DNA, 25 bp, Artificial
  Probe
ttctctaattttcaccagaagtgtg

SEQ ID NO: 237647 - DNA, 25 bp, Artificial
  Probe
ggcaatcattttaccagcttttgtt

SEQ ID NO: 237648 - DNA, 25 bp, Artificial
  Probe
tacggtttgctttgagttcattcta

SEQ ID NO: 237649 - DNA, 25 bp, Artificial
  Probe
tcagtagccttgaaaagatgtacat

SEQ ID NO: 237650 - DNA, 25 bp, Artificial
  Probe
gtttgaacttaaatacactactgag

SEQ ID NO: 237651 - DNA, 25 bp, Artificial
  Probe
ccattgcaggcctgttaacttcatg

SEQ ID NO: 237652 - DNA, 25 bp, Artificial
  Probe
catagcaacattcagagggtgaaga

SEQ ID NO: 237653 - DNA, 25 bp, Artificial
  Probe
ttagcgcaaagtagatcggtttgac

SEQ ID NO: 237654 - DNA, 25 bp, Artificial
  Probe
cctcactaaagcagggtgtatcatg

SEQ ID NO: 237655 - DNA, 25 bp, Artificial
  Probe
gtgccttttattctcatacagtaag

SEQ ID NO: 237656 - DNA, 25 bp, Artificial
  Probe
gtgaatgcatgcttatttcttgcct

SEQ ID NO: 237657 - DNA, 25 bp, Artificial
  Probe
agctgctttgcctgttccacttgca

SEQ ID NO: 237658 - DNA, 25 bp, Artificial
  Probe
cgcggcggcaagctaggtcccttta

SEQ ID NO: 237659 - DNA, 25 bp, Artificial
  Probe
gaaaccagtctgtaagaagtgctac

SEQ ID NO: 237660 - DNA, 25 bp, Artificial
  Probe
tggtgtgtgagctgctttgcctgtt

SEQ ID NO: 237661 - DNA, 25 bp, Artificial
  Probe
gacatgaaaccagtctgtaagaagt

SEQ ID NO: 237662 - DNA, 25 bp, Artificial
  Probe
tgtgagctgctttgcctgttccact

SEQ ID NO: 237663 - DNA, 25 bp, Artificial
  Probe
aaccagtctgtaagaagtgctacga

SEQ ID NO: 237664 - DNA, 25 bp, Artificial
  Probe
ctgctttgcctgttccacttgcaat

SEQ ID NO: 237665 - DNA, 25 bp, Artificial
  Probe
tctgagaccttaggaaggaaataac

SEQ ID NO: 237666 - DNA, 25 bp, Artificial
  Probe
ttcctttggagctgaagaaaagact

SEQ ID NO: 237667 - DNA, 25 bp, Artificial
  Probe
tgaaaccagtctgtaagaagtgcta

SEQ ID NO: 237668 - DNA, 25 bp, Artificial
  Probe
ttgacatgaaaccagtctgtaagaa

SEQ ID NO: 237669 - DNA, 25 bp, Artificial
  Probe
atgaaaccagtctgtaagaagtgct

SEQ ID NO: 237670 - DNA, 25 bp, Artificial
  Probe
aactatctgagaccttaggaaggaa

SEQ ID NO: 237671 - DNA, 25 bp, Artificial
  Probe
ctcgcggcggcaagctaggtccctt

SEQ ID NO: 237672 - DNA, 25 bp, Artificial
  Probe
gtgtgagctgctttgcctgttccac

SEQ ID NO: 237673 - DNA, 25 bp, Artificial
  Probe
tcctttggagctgaagaaaagactt

SEQ ID NO: 237674 - DNA, 25 bp, Artificial
  Probe
gctgctttgcctgttccacttgcaa

SEQ ID NO: 237675 - DNA, 25 bp, Artificial
  Probe
tctcgcggcggcaagctaggtccct

SEQ ID NO: 237676 - DNA, 25 bp, Artificial
  Probe
gtgtgtgagctgctttgcctgttcc

SEQ ID NO: 237677 - DNA, 25 bp, Artificial
  Probe
tgtgtgagctgctttgcctgttcca

SEQ ID NO: 237678 - DNA, 25 bp, Artificial
  Probe
actatctgagaccttaggaaggaaa

SEQ ID NO: 237679 - DNA, 25 bp, Artificial
  Probe
tttcctttggagctgaagaaaagac

SEQ ID NO: 237680 - DNA, 25 bp, Artificial
  Probe
ggtgtgtgagctgctttgcctgttc

SEQ ID NO: 237681 - DNA, 25 bp, Artificial
  Probe
tgacatgaaaccagtctgtaagaag

SEQ ID NO: 237682 - DNA, 25 bp, Artificial
  Probe
aaaccagtctgtaagaagtgctacg

SEQ ID NO: 237683 - DNA, 25 bp, Artificial
  Probe
gctttgcctgttccacttgcaatac

SEQ ID NO: 237684 - DNA, 25 bp, Artificial
  Probe
tcgcggcggcaagctaggtcccttt

SEQ ID NO: 237685 - DNA, 25 bp, Artificial
  Probe
ctatctgagaccttaggaaggaaat

SEQ ID NO: 237686 - DNA, 25 bp, Artificial
  Probe
tgctttgcctgttccacttgcaata

SEQ ID NO: 237687 - DNA, 25 bp, Artificial
  Probe
aaactatctgagaccttaggaagga

SEQ ID NO: 237688 - DNA, 25 bp, Artificial
  Probe
agcctgcggcttaatttgactcaac

SEQ ID NO: 237689 - DNA, 25 bp, Artificial
  Probe
cggaagggcaccacaaggagtggag

SEQ ID NO: 237690 - DNA, 25 bp, Artificial
  Probe
aattgacggaagggcaccacaagga

SEQ ID NO: 237691 - DNA, 25 bp, Artificial
  Probe
gggcaccacaaggagtggagcctgc

SEQ ID NO: 237692 - DNA, 25 bp, Artificial
  Probe
gtggagcctgcggcttaatttgact

SEQ ID NO: 237693 - DNA, 25 bp, Artificial
  Probe
attgacggaagggcaccacaaggag

SEQ ID NO: 237694 - DNA, 25 bp, Artificial
  Probe
ggaagggcaccacaaggagtggagc

SEQ ID NO: 237695 - DNA, 25 bp, Artificial
  Probe
tgcggcttaatttgactcaacacag

SEQ ID NO: 237696 - DNA, 25 bp, Artificial
  Probe
gacggaagggcaccacaaggagtgg

SEQ ID NO: 237697 - DNA, 25 bp, Artificial
  Probe
ggagtggagcctgcggcttaatttg

SEQ ID NO: 237698 - DNA, 25 bp, Artificial
  Probe
caaggagtggagcctgcggcttaat

SEQ ID NO: 237699 - DNA, 25 bp, Artificial
  Probe
gcctgcggcttaatttgactcaaca

SEQ ID NO: 237700 - DNA, 25 bp, Artificial
  Probe
cggcttaatttgactcaacacagga

SEQ ID NO: 237701 - DNA, 25 bp, Artificial
  Probe
cctgcggcttaatttgactcaacac

SEQ ID NO: 237702 - DNA, 25 bp, Artificial
  Probe
ggcaccacaaggagtggagcctgcg

SEQ ID NO: 237703 - DNA, 25 bp, Artificial
  Probe
gagtggagcctgcggcttaatttga

SEQ ID NO: 237704 - DNA, 25 bp, Artificial
  Probe
aggagtggagcctgcggcttaattt

SEQ ID NO: 237705 - DNA, 25 bp, Artificial
  Probe
ccacaaggagtggagcctgcggctt

SEQ ID NO: 237706 - DNA, 25 bp, Artificial
  Probe
accacaaggagtggagcctgcggct

SEQ ID NO: 237707 - DNA, 25 bp, Artificial
  Probe
agtggagcctgcggcttaatttgac

SEQ ID NO: 237708 - DNA, 25 bp, Artificial
  Probe
gagcctgcggcttaatttgactcaa

SEQ ID NO: 237709 - DNA, 25 bp, Artificial
  Probe
cttaatttgactcaacacaggaata

SEQ ID NO: 237710 - DNA, 25 bp, Artificial
  Probe
acggaagggcaccacaaggagtgga

SEQ ID NO: 237711 - DNA, 25 bp, Artificial
  Probe
aatttgactcaacacaggaatatta

SEQ ID NO: 237712 - DNA, 25 bp, Artificial
  Probe
gaagggcaccacaaggagtggagcc

SEQ ID NO: 237713 - DNA, 25 bp, Artificial
  Probe
agggcaccacaaggagtggagcctg

SEQ ID NO: 237714 - DNA, 25 bp, Artificial
  Probe
aaggagtggagcctgcggcttaatt

SEQ ID NO: 237715 - DNA, 25 bp, Artificial
  Probe
tttgactcaacacaggaatattaat

SEQ ID NO: 237716 - DNA, 25 bp, Artificial
  Probe
taatttgactcaacacaggaatatt

SEQ ID NO: 237717 - DNA, 25 bp, Artificial
  Probe
gcaccacaaggagtggagcctgcgg

SEQ ID NO: 237718 - DNA, 25 bp, Artificial
  Probe
tggagcctgcggcttaatttgactc

SEQ ID NO: 237719 - DNA, 25 bp, Artificial
  Probe
caccacaaggagtggagcctgcggc

SEQ ID NO: 237720 - DNA, 25 bp, Artificial
  Probe
atttgactcaacacaggaatattaa

SEQ ID NO: 237721 - DNA, 25 bp, Artificial
  Probe
tgacggaagggcaccacaaggagtg

SEQ ID NO: 237722 - DNA, 25 bp, Artificial
  Probe
acaaggagtggagcctgcggcttaa

SEQ ID NO: 237723 - DNA, 25 bp, Artificial
  Probe
ggagcctgcggcttaatttgactca

SEQ ID NO: 237724 - DNA, 25 bp, Artificial
  Probe
ttgacggaagggcaccacaaggagt

SEQ ID NO: 237725 - DNA, 25 bp, Artificial
  Probe
ctgcggcttaatttgactcaacaca

SEQ ID NO: 237726 - DNA, 25 bp, Artificial
  Probe
aagggcaccacaaggagtggagcct

SEQ ID NO: 237727 - DNA, 25 bp, Artificial
  Probe
gcttaatttgactcaacacaggaat

SEQ ID NO: 237728 - DNA, 25 bp, Artificial
  Probe
ggcttaatttgactcaacacaggaa

SEQ ID NO: 237729 - DNA, 25 bp, Artificial
  Probe
ttaatttgactcaacacaggaatat

SEQ ID NO: 237730 - DNA, 25 bp, Artificial
  Probe
cacaaggagtggagcctgcggctta

SEQ ID NO: 237731 - DNA, 25 bp, Artificial
  Probe
cagaacacaggtgctgcctagggct

SEQ ID NO: 237732 - DNA, 25 bp, Artificial
  Probe
aggggtccaccgtcagaacacaggt

SEQ ID NO: 237733 - DNA, 25 bp, Artificial
  Probe
ttgacccaaggctgtgataccatgg

SEQ ID NO: 237734 - DNA, 25 bp, Artificial
  Probe
ccctgtggacaaatccccattgtgg

SEQ ID NO: 237735 - DNA, 25 bp, Artificial
  Probe
caaggctgtgataccatggtgctga

SEQ ID NO: 237736 - DNA, 25 bp, Artificial
  Probe
tcagaacacaggtgctgcctagggc

SEQ ID NO: 237737 - DNA, 25 bp, Artificial
  Probe
atggatgtgactggtgtccaacctg

SEQ ID NO: 237738 - DNA, 25 bp, Artificial
  Probe
gatgagggttcctgtactgcctata

SEQ ID NO: 237739 - DNA, 25 bp, Artificial
  Probe
ctatttcagtgacttggtcctgtgg

SEQ ID NO: 237740 - DNA, 25 bp, Artificial
  Probe
taccatcgagctgtacctggtggca

SEQ ID NO: 237741 - DNA, 25 bp, Artificial
  Probe
tgaatggatgtgactggtgtccaac

SEQ ID NO: 237742 - DNA, 25 bp, Artificial
  Probe
gccccttgacccaaggctgtgatac

SEQ ID NO: 237743 - DNA, 25 bp, Artificial
  Probe
aggctgtgataccatggtgctgatg

SEQ ID NO: 237744 - DNA, 25 bp, Artificial
  Probe
agctgtacctggtggcacagcgtgt

SEQ ID NO: 237745 - DNA, 25 bp, Artificial
  Probe
tcctgctatcctccatttggtgcta

SEQ ID NO: 237746 - DNA, 25 bp, Artificial
  Probe
actggatgagggttcctgtactgcc

SEQ ID NO: 237747 - DNA, 25 bp, Artificial
  Probe
accctgcgctggtaccatcgagctg

SEQ ID NO: 237748 - DNA, 25 bp, Artificial
  Probe
gcgtgtcatccctttgtctacggtg

SEQ ID NO: 237749 - DNA, 25 bp, Artificial
  Probe
gtaccatcgagctgtacctggtggc

SEQ ID NO: 237750 - DNA, 25 bp, Artificial
  Probe
ggggtccaccgtcagaacacaggtg

SEQ ID NO: 237751 - DNA, 25 bp, Artificial
  Probe
cgagctgtacctggtggcacagcgt

SEQ ID NO: 237752 - DNA, 25 bp, Artificial
  Probe
gatgtgactggtgtccaacctgccc

SEQ ID NO: 237753 - DNA, 25 bp, Artificial
  Probe
ccatcgagctgtacctggtggcaca

SEQ ID NO: 237754 - DNA, 25 bp, Artificial
  Probe
cacagcgtgtcatccctttgtctac

SEQ ID NO: 237755 - DNA, 25 bp, Artificial
  Probe
tccaccgtcagaacacaggtgctgc

SEQ ID NO: 237756 - DNA, 25 bp, Artificial
  Probe
ctgtactgcctataccctgcgctgg

SEQ ID NO: 237757 - DNA, 25 bp, Artificial
  Probe
gtcctgctatcctccatttggtgct

SEQ ID NO: 237758 - DNA, 25 bp, Artificial
  Probe
tgccactggatgagggttcctgtac

SEQ ID NO: 237759 - DNA, 25 bp, Artificial
  Probe
gacttggtcctgtgggtctagcctt

SEQ ID NO: 237760 - DNA, 25 bp, Artificial
  Probe
gtacctggtggcacagcgtgtcatc

SEQ ID NO: 237761 - DNA, 25 bp, Artificial
  Probe
ccgtcagaacacaggtgctgcctag

SEQ ID NO: 237762 - DNA, 25 bp, Artificial
  Probe
atccctttgtctacggtggctgcaa

SEQ ID NO: 237763 - DNA, 25 bp, Artificial
  Probe
tggatgagggttcctgtactgccta

SEQ ID NO: 237764 - DNA, 25 bp, Artificial
  Probe
gctaatcgttttggaacccgtgagg

SEQ ID NO: 237765 - DNA, 25 bp, Artificial
  Probe
acctggtggcacagcgtgtcatccc

SEQ ID NO: 237766 - DNA, 25 bp, Artificial
  Probe
ctgtgataccatggtgctgatggga

SEQ ID NO: 237767 - DNA, 25 bp, Artificial
  Probe
cccctgtggacaaatccccattgtg

SEQ ID NO: 237768 - DNA, 25 bp, Artificial
  Probe
gctggtaccatcgagctgtacctgg

SEQ ID NO: 237769 - DNA, 25 bp, Artificial
  Probe
agccgggtcctgctatcctccattt

SEQ ID NO: 237770 - DNA, 25 bp, Artificial
  Probe
ggtggcacagcgtgtcatccctttg

SEQ ID NO: 237771 - DNA, 25 bp, Artificial
  Probe
ccatagaggctcagatctctgctcc

SEQ ID NO: 237772 - DNA, 25 bp, Artificial
  Probe
ggaatgctaatcgttttggaacccg

SEQ ID NO: 237773 - DNA, 25 bp, Artificial
  Probe
caccgtcagaacacaggtgctgcct

SEQ ID NO: 237774 - DNA, 25 bp, Artificial
  Probe
tgtactgcctataccctgcgctggt

SEQ ID NO: 237775 - DNA, 25 bp, Artificial
  Probe
taatcgttttggaacccgtgaggcg

SEQ ID NO: 237776 - DNA, 25 bp, Artificial
  Probe
tataccctgcgctggtaccatcgag

SEQ ID NO: 237777 - DNA, 25 bp, Artificial
  Probe
tcattaacaattagcagggcaccgg

SEQ ID NO: 237778 - DNA, 25 bp, Artificial
  Probe
cacagccgctactatgtagaaatcc

SEQ ID NO: 237779 - DNA, 25 bp, Artificial
  Probe
caccggccggagtgtgagccctgtt

SEQ ID NO: 237780 - DNA, 25 bp, Artificial
  Probe
ccggccggagtgtgagccctgtttt

SEQ ID NO: 237781 - DNA, 25 bp, Artificial
  Probe
tttcagagacatttgctctagtatg

SEQ ID NO: 237782 - DNA, 25 bp, Artificial
  Probe
tcagagacatttgctctagtatggt

SEQ ID NO: 237783 - DNA, 25 bp, Artificial
  Probe
agccgctactatgtagaaatccccc

SEQ ID NO: 237784 - DNA, 25 bp, Artificial
  Probe
agtgtgagccctgttttactcttaa

SEQ ID NO: 237785 - DNA, 25 bp, Artificial
  Probe
cggccggagtgtgagccctgtttta

SEQ ID NO: 237786 - DNA, 25 bp, Artificial
  Probe
cagccgctactatgtagaaatcccc

SEQ ID NO: 237787 - DNA, 25 bp, Artificial
  Probe
gatattttcagagacatttgctcta

SEQ ID NO: 237788 - DNA, 25 bp, Artificial
  Probe
ggccggagtgtgagccctgttttac

SEQ ID NO: 237789 - DNA, 25 bp, Artificial
  Probe
acagccgctactatgtagaaatccc

SEQ ID NO: 237790 - DNA, 25 bp, Artificial
  Probe
aaatgaggctcacagccgctactat

SEQ ID NO: 237791 - DNA, 25 bp, Artificial
  Probe
gtgtgagccctgttttactcttaac

SEQ ID NO: 237792 - DNA, 25 bp, Artificial
  Probe
cagagacatttgctctagtatggtg

SEQ ID NO: 237793 - DNA, 25 bp, Artificial
  Probe
cattaacaattagcagggcaccggc

SEQ ID NO: 237794 - DNA, 25 bp, Artificial
  Probe
gtgagccctgttttactcttaacta

SEQ ID NO: 237795 - DNA, 25 bp, Artificial
  Probe
gctcacagccgctactatgtagaaa

SEQ ID NO: 237796 - DNA, 25 bp, Artificial
  Probe
tgatattttcagagacatttgctct

SEQ ID NO: 237797 - DNA, 25 bp, Artificial
  Probe
tgtgagccctgttttactcttaact

SEQ ID NO: 237798 - DNA, 25 bp, Artificial
  Probe
accggccggagtgtgagccctgttt

SEQ ID NO: 237799 - DNA, 25 bp, Artificial
  Probe
cctacttctaatttgctgaatgaag

SEQ ID NO: 237800 - DNA, 25 bp, Artificial
  Probe
tgtttcaatcaaacctgaacatgag

SEQ ID NO: 237801 - DNA, 25 bp, Artificial
  Probe
ttttcagagacatttgctctagtat

SEQ ID NO: 237802 - DNA, 25 bp, Artificial
  Probe
atattttcagagacatttgctctag

SEQ ID NO: 237803 - DNA, 25 bp, Artificial
  Probe
tattttcagagacatttgctctagt

SEQ ID NO: 237804 - DNA, 25 bp, Artificial
  Probe
attttcagagacatttgctctagta

SEQ ID NO: 237805 - DNA, 25 bp, Artificial
  Probe
aatgaggctcacagccgctactatg

SEQ ID NO: 237806 - DNA, 25 bp, Artificial
  Probe
attaacaattagcagggcaccggcc

SEQ ID NO: 237807 - DNA, 25 bp, Artificial
  Probe
gtttcaatcaaacctgaacatgagt

SEQ ID NO: 237808 - DNA, 25 bp, Artificial
  Probe
tgtgtttcaatcaaacctgaacatg

SEQ ID NO: 237809 - DNA, 25 bp, Artificial
  Probe
tcacagccgctactatgtagaaatc

SEQ ID NO: 237810 - DNA, 25 bp, Artificial
  Probe
ttcagagacatttgctctagtatgg

SEQ ID NO: 237811 - DNA, 25 bp, Artificial
  Probe
gtgtttcaatcaaacctgaacatga

SEQ ID NO: 237812 - DNA, 25 bp, Artificial
  Probe
ctcacagccgctactatgtagaaat

SEQ ID NO: 237813 - DNA, 25 bp, Artificial
  Probe
gagtgtgagccctgttttactctta

SEQ ID NO: 237814 - DNA, 25 bp, Artificial
  Probe
ttaacaattagcagggcaccggccg

SEQ ID NO: 237815 - DNA, 25 bp, Artificial
  Probe
ccaggctcttggtgtctcgttcaag

SEQ ID NO: 237816 - DNA, 25 bp, Artificial
  Probe
taattaatctcctcgaccttccctg

SEQ ID NO: 237817 - DNA, 25 bp, Artificial
  Probe
ttaattaatctcctcgaccttccct

SEQ ID NO: 237818 - DNA, 25 bp, Artificial
  Probe
gctcttggtgtctcgttcaagaaat

SEQ ID NO: 237819 - DNA, 25 bp, Artificial
  Probe
caatcctaacaaggcccctttgcga

SEQ ID NO: 237820 - DNA, 25 bp, Artificial
  Probe
caggctcttggtgtctcgttcaaga

SEQ ID NO: 237821 - DNA, 25 bp, Artificial
  Probe
aggctcttggtgtctcgttcaagaa

SEQ ID NO: 237822 - DNA, 25 bp, Artificial
  Probe
gaagccttaattaatctcctcgacc

SEQ ID NO: 237823 - DNA, 25 bp, Artificial
  Probe
cctcaatcctaacaaggcccctttg

SEQ ID NO: 237824 - DNA, 25 bp, Artificial
  Probe
ctcttggtgtctcgttcaagaaata

SEQ ID NO: 237825 - DNA, 25 bp, Artificial
  Probe
ccaggcggctgtgcccaagagtttc

SEQ ID NO: 237826 - DNA, 25 bp, Artificial
  Probe
ggctcttggtgtctcgttcaagaaa

SEQ ID NO: 237827 - DNA, 25 bp, Artificial
  Probe
tcctaacaaggcccctttgcgacta

SEQ ID NO: 237828 - DNA, 25 bp, Artificial
  Probe
agccttaattaatctcctcgacctt

SEQ ID NO: 237829 - DNA, 25 bp, Artificial
  Probe
ctcaatcctaacaaggcccctttgc

SEQ ID NO: 237830 - DNA, 25 bp, Artificial
  Probe
tccaggctcttggtgtctcgttcaa

SEQ ID NO: 237831 - DNA, 25 bp, Artificial
  Probe
tcagaggaggctgttacccacttcg

SEQ ID NO: 237832 - DNA, 25 bp, Artificial
  Probe
tcaatcctaacaaggcccctttgcg

SEQ ID NO: 237833 - DNA, 25 bp, Artificial
  Probe
ctccaggctcttggtgtctcgttca

SEQ ID NO: 237834 - DNA, 25 bp, Artificial
  Probe
ggcggctgtgcccaagagtttccag

SEQ ID NO: 237835 - DNA, 25 bp, Artificial
  Probe
aagccttaattaatctcctcgacct

SEQ ID NO: 237836 - DNA, 25 bp, Artificial
  Probe
gccaggcggctgtgcccaagagttt

SEQ ID NO: 237837 - DNA, 25 bp, Artificial
  Probe
caggcggctgtgcccaagagtttcc

SEQ ID NO: 237838 - DNA, 25 bp, Artificial
  Probe
ttggtgtctcgttcaagaaatagaa

SEQ ID NO: 237839 - DNA, 25 bp, Artificial
  Probe
aattaatctcctcgaccttccctgt

SEQ ID NO: 237840 - DNA, 25 bp, Artificial
  Probe
atcctaacaaggcccctttgcgact

SEQ ID NO: 237841 - DNA, 25 bp, Artificial
  Probe
tcttggtgtctcgttcaagaaatag

SEQ ID NO: 237842 - DNA, 25 bp, Artificial
  Probe
aggcggctgtgcccaagagtttcca

SEQ ID NO: 237843 - DNA, 25 bp, Artificial
  Probe
tcctcaatcctaacaaggccccttt

SEQ ID NO: 237844 - DNA, 25 bp, Artificial
  Probe
cttggtgtctcgttcaagaaataga

SEQ ID NO: 237845 - DNA, 25 bp, Artificial
  Probe
gccttaattaatctcctcgaccttc

SEQ ID NO: 237846 - DNA, 25 bp, Artificial
  Probe
gaacgcagcttgtctaggaaaggga

SEQ ID NO: 237847 - DNA, 25 bp, Artificial
  Probe
cagatttctagatactttttgctgc

SEQ ID NO: 237848 - DNA, 25 bp, Artificial
  Probe
cttgtgtgcgtgtccttaaacttcc

SEQ ID NO: 237849 - DNA, 25 bp, Artificial
  Probe
caattagtctaggtttaggcccttg

SEQ ID NO: 237850 - DNA, 25 bp, Artificial
  Probe
aggcccttgtacattttgcccataa

SEQ ID NO: 237851 - DNA, 25 bp, Artificial
  Probe
tatatgtcttgtgtgcgtgtcctta

SEQ ID NO: 237852 - DNA, 25 bp, Artificial
  Probe
tgtctcttggagattgttgaacgca

SEQ ID NO: 237853 - DNA, 25 bp, Artificial
  Probe
gtctcttggagattgttgaacgcag

SEQ ID NO: 237854 - DNA, 25 bp, Artificial
  Probe
acgcagcttgtctaggaaagggatg

SEQ ID NO: 237855 - DNA, 25 bp, Artificial
  Probe
caatcttattttgtctcttggagat

SEQ ID NO: 237856 - DNA, 25 bp, Artificial
  Probe
tttaggcccttgtacattttgccca

SEQ ID NO: 237857 - DNA, 25 bp, Artificial
  Probe
ttaggcccttgtacattttgcccat

SEQ ID NO: 237858 - DNA, 25 bp, Artificial
  Probe
taggcccttgtacattttgcccata

SEQ ID NO: 237859 - DNA, 25 bp, Artificial
  Probe
atatgtcttgtgtgcgtgtccttaa

SEQ ID NO: 237860 - DNA, 25 bp, Artificial
  Probe
tgcacacgacagatttctagatact

SEQ ID NO: 237861 - DNA, 25 bp, Artificial
  Probe
ttgttgaacgcagcttgtctaggaa

SEQ ID NO: 237862 - DNA, 25 bp, Artificial
  Probe
gcacacgacagatttctagatactt

SEQ ID NO: 237863 - DNA, 25 bp, Artificial
  Probe
atatatatgtcttgtgtgcgtgtcc

SEQ ID NO: 237864 - DNA, 25 bp, Artificial
  Probe
tgttgaacgcagcttgtctaggaaa

SEQ ID NO: 237865 - DNA, 25 bp, Artificial
  Probe
atatatgtcttgtgtgcgtgtcctt

SEQ ID NO: 237866 - DNA, 25 bp, Artificial
  Probe
ctcttggagattgttgaacgcagct

SEQ ID NO: 237867 - DNA, 25 bp, Artificial
  Probe
attgttgaacgcagcttgtctagga

SEQ ID NO: 237868 - DNA, 25 bp, Artificial
  Probe
ttgtgtgcgtgtccttaaacttcca

SEQ ID NO: 237869 - DNA, 25 bp, Artificial
  Probe
tgtgcgtgtccttaaacttccaatc

SEQ ID NO: 237870 - DNA, 25 bp, Artificial
  Probe
gaagaaaactttgcacacgacagat

SEQ ID NO: 237871 - DNA, 25 bp, Artificial
  Probe
ttgtctcttggagattgttgaacgc

SEQ ID NO: 237872 - DNA, 25 bp, Artificial
  Probe
gtgcgtgtccttaaacttccaatct

SEQ ID NO: 237873 - DNA, 25 bp, Artificial
  Probe
gttgaacgcagcttgtctaggaaag

SEQ ID NO: 237874 - DNA, 25 bp, Artificial
  Probe
tccaatcttattttgtctcttggag

SEQ ID NO: 237875 - DNA, 25 bp, Artificial
  Probe
ctttgcacacgacagatttctagat

SEQ ID NO: 237876 - DNA, 25 bp, Artificial
  Probe
acagatttctagatactttttgctg

SEQ ID NO: 237877 - DNA, 25 bp, Artificial
  Probe
tctcttggagattgttgaacgcagc

SEQ ID NO: 237878 - DNA, 25 bp, Artificial
  Probe
gtgtgcgtgtccttaaacttccaat

SEQ ID NO: 237879 - DNA, 25 bp, Artificial
  Probe
ttgcacacgacagatttctagatac

SEQ ID NO: 237880 - DNA, 25 bp, Artificial
  Probe
gtcttgtgtgcgtgtccttaaactt

SEQ ID NO: 237881 - DNA, 25 bp, Artificial
  Probe
tcaattagtctaggtttaggccctt

SEQ ID NO: 237882 - DNA, 25 bp, Artificial
  Probe
ggcccttgtacattttgcccataac

SEQ ID NO: 237883 - DNA, 25 bp, Artificial
  Probe
aacgcagcttgtctaggaaagggat

SEQ ID NO: 237884 - DNA, 25 bp, Artificial
  Probe
tgaacgcagcttgtctaggaaaggg

SEQ ID NO: 237885 - DNA, 25 bp, Artificial
  Probe
tcttgtgtgcgtgtccttaaacttc

SEQ ID NO: 237886 - DNA, 25 bp, Artificial
  Probe
ttcaattagtctaggtttaggccct

SEQ ID NO: 237887 - DNA, 25 bp, Artificial
  Probe
ttgaacgcagcttgtctaggaaagg

SEQ ID NO: 237888 - DNA, 25 bp, Artificial
  Probe
tgtgtgcgtgtccttaaacttccaa

SEQ ID NO: 237889 - DNA, 25 bp, Artificial
  Probe
tagtctaggtttaggcccttgtaca

SEQ ID NO: 237890 - DNA, 25 bp, Artificial
  Probe
aactttgcacacgacagatttctag

SEQ ID NO: 237891 - DNA, 25 bp, Artificial
  Probe
ccaatcttattttgtctcttggaga

SEQ ID NO: 237892 - DNA, 25 bp, Artificial
  Probe
ggaggcattactcttccctgcctca

SEQ ID NO: 237893 - DNA, 25 bp, Artificial
  Probe
tggctcctagctacttaaagttaaa

SEQ ID NO: 237894 - DNA, 25 bp, Artificial
  Probe
gtccgggaggcattactcttccctg

SEQ ID NO: 237895 - DNA, 25 bp, Artificial
  Probe
ctttttcagccaggatgtggagctg

SEQ ID NO: 237896 - DNA, 25 bp, Artificial
  Probe
tactcaaccaggaagccgtggtttc

SEQ ID NO: 237897 - DNA, 25 bp, Artificial
  Probe
gtgtttactttctccagtcctagct

SEQ ID NO: 237898 - DNA, 25 bp, Artificial
  Probe
gtgactccaagctctctctgtctca

SEQ ID NO: 237899 - DNA, 25 bp, Artificial
  Probe
gggaggcattactcttccctgcctc

SEQ ID NO: 237900 - DNA, 25 bp, Artificial
  Probe
gaccctagtgtttactttctccagt

SEQ ID NO: 237901 - DNA, 25 bp, Artificial
  Probe
tgtgactccaagctctctctgtctc

SEQ ID NO: 237902 - DNA, 25 bp, Artificial
  Probe
agccctctttttcagccaggatgtg

SEQ ID NO: 237903 - DNA, 25 bp, Artificial
  Probe
caggtatttggctcctagctactta

SEQ ID NO: 237904 - DNA, 25 bp, Artificial
  Probe
taaccaaggaattcctctacgcagg

SEQ ID NO: 237905 - DNA, 25 bp, Artificial
  Probe
agtcacagaaacataatcaaatggg

SEQ ID NO: 237906 - DNA, 25 bp, Artificial
  Probe
caactgtgactccaagctctctctg

SEQ ID NO: 237907 - DNA, 25 bp, Artificial
  Probe
tagccctctttttcagccaggatgt

SEQ ID NO: 237908 - DNA, 25 bp, Artificial
  Probe
actcaaccaggaagccgtggtttct

SEQ ID NO: 237909 - DNA, 25 bp, Artificial
  Probe
tagtgtttactttctccagtcctag

SEQ ID NO: 237910 - DNA, 25 bp, Artificial
  Probe
tttggctcctagctacttaaagtta

SEQ ID NO: 237911 - DNA, 25 bp, Artificial
  Probe
aaggtgccattcaggtatttggctc

SEQ ID NO: 237912 - DNA, 25 bp, Artificial
  Probe
accaggaagccgtggtttctgcaat

SEQ ID NO: 237913 - DNA, 25 bp, Artificial
  Probe
catcaaggtgccattcaggtatttg

SEQ ID NO: 237914 - DNA, 25 bp, Artificial
  Probe
tctttttcagccaggatgtggagct

SEQ ID NO: 237915 - DNA, 25 bp, Artificial
  Probe
aggaagccgtggtttctgcaatcca

SEQ ID NO: 237916 - DNA, 25 bp, Artificial
  Probe
cattcaggtatttggctcctagcta

SEQ ID NO: 237917 - DNA, 25 bp, Artificial
  Probe
gagaccctagtgtttactttctcca

SEQ ID NO: 237918 - DNA, 25 bp, Artificial
  Probe
gccctctttttcagccaggatgtgg

SEQ ID NO: 237919 - DNA, 25 bp, Artificial
  Probe
atttggctcctagctacttaaagtt

SEQ ID NO: 237920 - DNA, 25 bp, Artificial
  Probe
agtccgggaggcattactcttccct

SEQ ID NO: 237921 - DNA, 25 bp, Artificial
  Probe
tgaaggagaccctagtgtttacttt

SEQ ID NO: 237922 - DNA, 25 bp, Artificial
  Probe
caaggtgccattcaggtatttggct

SEQ ID NO: 237923 - DNA, 25 bp, Artificial
  Probe
agaccctagtgtttactttctccag

SEQ ID NO: 237924 - DNA, 25 bp, Artificial
  Probe
ctcctactcaaccaggaagccgtgg

SEQ ID NO: 237925 - DNA, 25 bp, Artificial
  Probe
catggcaactgtgactccaagctct

SEQ ID NO: 237926 - DNA, 25 bp, Artificial
  Probe
aggaattcctctacgcaggctcttg

SEQ ID NO: 237927 - DNA, 25 bp, Artificial
  Probe
ctcacatcaaggtgccattcaggta

SEQ ID NO: 237928 - DNA, 25 bp, Artificial
  Probe
tttcagccaggatgtggagctgaag

SEQ ID NO: 237929 - DNA, 25 bp, Artificial
  Probe
gccatggcaactgtgactccaagct

SEQ ID NO: 237930 - DNA, 25 bp, Artificial
  Probe
ctaaccaaggaattcctctacgcag

SEQ ID NO: 237931 - DNA, 25 bp, Artificial
  Probe
attcctctacgcaggctcttgttgc

SEQ ID NO: 237932 - DNA, 25 bp, Artificial
  Probe
gcctcacatcaaggtgccattcagg

SEQ ID NO: 237933 - DNA, 25 bp, Artificial
  Probe
ggccatggcaactgtgactccaagc

SEQ ID NO: 237934 - DNA, 25 bp, Artificial
  Probe
tgcttcttaaatgataaaggacaca

SEQ ID NO: 237935 - DNA, 25 bp, Artificial
  Probe
ctgtgcttcttaaatgataaaggac

SEQ ID NO: 237936 - DNA, 25 bp, Artificial
  Probe
gccattcaggtatttggctcctagc

SEQ ID NO: 237937 - DNA, 25 bp, Artificial
  Probe
ctgcctcacatcaaggtgccattca

SEQ ID NO: 237938 - DNA, 25 bp, Artificial
  Probe
tcgggttttctaaccattgtcttgt

SEQ ID NO: 237939 - DNA, 25 bp, Artificial
  Probe
gaggagtaccaattcctccagccta

SEQ ID NO: 237940 - DNA, 25 bp, Artificial
  Probe
caagaacaacctgaaggactgtggc

SEQ ID NO: 237941 - DNA, 25 bp, Artificial
  Probe
acgaggcagccagctacatccagag

SEQ ID NO: 237942 - DNA, 25 bp, Artificial
  Probe
cttgagcgcgtacgacttggtgctg

SEQ ID NO: 237943 - DNA, 25 bp, Artificial
  Probe
caacaagtatgacgaggcagccagc

SEQ ID NO: 237944 - DNA, 25 bp, Artificial
  Probe
agaagaccatgctccctgcctgttc

SEQ ID NO: 237945 - DNA, 25 bp, Artificial
  Probe
gtacctccttactgggcatccattc

SEQ ID NO: 237946 - DNA, 25 bp, Artificial
  Probe
catggtacctccttactgggcatcc

SEQ ID NO: 237947 - DNA, 25 bp, Artificial
  Probe
atctgtttccctgagtacacagggg

SEQ ID NO: 237948 - DNA, 25 bp, Artificial
  Probe
caagaagaccatgctccctgcctgt

SEQ ID NO: 237949 - DNA, 25 bp, Artificial
  Probe
actgggcatccattcgggttttcta

SEQ ID NO: 237950 - DNA, 25 bp, Artificial
  Probe
ctgggcatccattcgggttttctaa

SEQ ID NO: 237951 - DNA, 25 bp, Artificial
  Probe
atccattcgggttttctaaccattg

SEQ ID NO: 237952 - DNA, 25 bp, Artificial
  Probe
cagccctgacccaagtccaaatgtt

SEQ ID NO: 237953 - DNA, 25 bp, Artificial
  Probe
ttactgggcatccattcgggttttc

SEQ ID NO: 237954 - DNA, 25 bp, Artificial
  Probe
tccccactacctgtgaggaagatgg

SEQ ID NO: 237955 - DNA, 25 bp, Artificial
  Probe
cgtcactgacgtcatcatcaagaac

SEQ ID NO: 237956 - DNA, 25 bp, Artificial
  Probe
actgtggcctcttctgaggggcagt

SEQ ID NO: 237957 - DNA, 25 bp, Artificial
  Probe
ggcagccagctacatccagagcaag

SEQ ID NO: 237958 - DNA, 25 bp, Artificial
  Probe
tccttactgggcatccattcgggtt

SEQ ID NO: 237959 - DNA, 25 bp, Artificial
  Probe
ccctgaccatctgtttccctgagta

SEQ ID NO: 237960 - DNA, 25 bp, Artificial
  Probe
tactgggcatccattcgggttttct

SEQ ID NO: 237961 - DNA, 25 bp, Artificial
  Probe
ctccctcggctctagacttggggga

SEQ ID NO: 237962 - DNA, 25 bp, Artificial
  Probe
ttcgggttttctaaccattgtcttg

SEQ ID NO: 237963 - DNA, 25 bp, Artificial
  Probe
tgacccaagtccaaatgtttacagg

SEQ ID NO: 237964 - DNA, 25 bp, Artificial
  Probe
gcaagaagaccatgctccctgcctg

SEQ ID NO: 237965 - DNA, 25 bp, Artificial
  Probe
gaggcagccagctacatccagagca

SEQ ID NO: 237966 - DNA, 25 bp, Artificial
  Probe
ccatggtacctccttactgggcatc

SEQ ID NO: 237967 - DNA, 25 bp, Artificial
  Probe
tccattcgggttttctaaccattgt

SEQ ID NO: 237968 - DNA, 25 bp, Artificial
  Probe
cattcgggttttctaaccattgtct

SEQ ID NO: 237969 - DNA, 25 bp, Artificial
  Probe
ctgacccaagtccaaatgtttacag

SEQ ID NO: 237970 - DNA, 25 bp, Artificial
  Probe
atggtacctccttactgggcatcca

SEQ ID NO: 237971 - DNA, 25 bp, Artificial
  Probe
agctacatccagagcaagtttgagg

SEQ ID NO: 237972 - DNA, 25 bp, Artificial
  Probe
gccagctacatccagagcaagtttg

SEQ ID NO: 237973 - DNA, 25 bp, Artificial
  Probe
cgaggcagccagctacatccagagc

SEQ ID NO: 237974 - DNA, 25 bp, Artificial
  Probe
gccctgacccaagtccaaatgttta

SEQ ID NO: 237975 - DNA, 25 bp, Artificial
  Probe
tggtacctccttactgggcatccat

SEQ ID NO: 237976 - DNA, 25 bp, Artificial
  Probe
agccctgacccaagtccaaatgttt

SEQ ID NO: 237977 - DNA, 25 bp, Artificial
  Probe
gacgaggcagccagctacatccaga

SEQ ID NO: 237978 - DNA, 25 bp, Artificial
  Probe
cccaagtccaaatgtttacagggag

SEQ ID NO: 237979 - DNA, 25 bp, Artificial
  Probe
gcagccagctacatccagagcaagt

SEQ ID NO: 237980 - DNA, 25 bp, Artificial
  Probe
ggcaagaagaccatgctccctgcct

SEQ ID NO: 237981 - DNA, 25 bp, Artificial
  Probe
taaacgcaaagacaccaaggagatc

SEQ ID NO: 237982 - DNA, 25 bp, Artificial
  Probe
agccagctacatccagagcaagttt

SEQ ID NO: 237983 - DNA, 25 bp, Artificial
  Probe
gtatgacgaggcagccagctacatc

SEQ ID NO: 237984 - DNA, 25 bp, Artificial
  Probe
agtattgtttcctggcagctaaaga

SEQ ID NO: 237985 - DNA, 25 bp, Artificial
  Probe
ctaaagattgctcaacaattaaaag

SEQ ID NO: 237986 - DNA, 25 bp, Artificial
  Probe
attgtttcctggcagctaaagattg

SEQ ID NO: 237987 - DNA, 25 bp, Artificial
  Probe
taaagtattgtttcctggcagctaa

SEQ ID NO: 237988 - DNA, 25 bp, Artificial
  Probe
gtttcctggcagctaaagattgctc

SEQ ID NO: 237989 - DNA, 25 bp, Artificial
  Probe
tttcctggcagctaaagattgctca

SEQ ID NO: 237990 - DNA, 25 bp, Artificial
  Probe
tgtttcctggcagctaaagattgct

SEQ ID NO: 237991 - DNA, 25 bp, Artificial
  Probe
tattgtttcctggcagctaaagatt

SEQ ID NO: 237992 - DNA, 25 bp, Artificial
  Probe
tcaacaattaaaagtacttggtgtt

SEQ ID NO: 237993 - DNA, 25 bp, Artificial
  Probe
tcctggcagctaaagattgctcaac

SEQ ID NO: 237994 - DNA, 25 bp, Artificial
  Probe
attgctcaacaattaaaagtacttg

SEQ ID NO: 237995 - DNA, 25 bp, Artificial
  Probe
taaagattgctcaacaattaaaagt

SEQ ID NO: 237996 - DNA, 25 bp, Artificial
  Probe
ctcaacaattaaaagtacttggtgt

SEQ ID NO: 237997 - DNA, 25 bp, Artificial
  Probe
aagattgctcaacaattaaaagtac

SEQ ID NO: 237998 - DNA, 25 bp, Artificial
  Probe
aaagtattgtttcctggcagctaaa

SEQ ID NO: 237999 - DNA, 25 bp, Artificial
  Probe
gctaaagattgctcaacaattaaaa

SEQ ID NO: 238000 - DNA, 25 bp, Artificial
  Probe
agctaaagattgctcaacaattaaa

SEQ ID NO: 238001 - DNA, 25 bp, Artificial
  Probe
aagtattgtttcctggcagctaaag

SEQ ID NO: 238002 - DNA, 25 bp, Artificial
  Probe
gtaaagtattgtttcctggcagcta

SEQ ID NO: 238003 - DNA, 25 bp, Artificial
  Probe
gcttcttcggtgggtaaagtattgt

SEQ ID NO: 238004 - DNA, 25 bp, Artificial
  Probe
aaagattgctcaacaattaaaagta

SEQ ID NO: 238005 - DNA, 25 bp, Artificial
  Probe
ggcttcttcggtgggtaaagtattg

SEQ ID NO: 238006 - DNA, 25 bp, Artificial
  Probe
ttgtttcctggcagctaaagattgc

SEQ ID NO: 238007 - DNA, 25 bp, Artificial
  Probe
agattgctcaacaattaaaagtact

SEQ ID NO: 238008 - DNA, 25 bp, Artificial
  Probe
ttgctcaacaattaaaagtacttgg

SEQ ID NO: 238009 - DNA, 25 bp, Artificial
  Probe
gattgctcaacaattaaaagtactt

SEQ ID NO: 238010 - DNA, 25 bp, Artificial
  Probe
gtattgtttcctggcagctaaagat

SEQ ID NO: 238011 - DNA, 25 bp, Artificial
  Probe
ttcctggcagctaaagattgctcaa

SEQ ID NO: 238012 - DNA, 25 bp, Artificial
  Probe
ttttgcgccctcttgtcaagatcac

SEQ ID NO: 238013 - DNA, 25 bp, Artificial
  Probe
atgtcaggttcgaattacaacacat

SEQ ID NO: 238014 - DNA, 25 bp, Artificial
  Probe
aattacaacacatgggaactgtttg

SEQ ID NO: 238015 - DNA, 25 bp, Artificial
  Probe
gtgccttctgggattgagaagcaat

SEQ ID NO: 238016 - DNA, 25 bp, Artificial
  Probe
taacaagcgagaagacctgatgtct

SEQ ID NO: 238017 - DNA, 25 bp, Artificial
  Probe
cttacagctccatttttgtaactgg

SEQ ID NO: 238018 - DNA, 25 bp, Artificial
  Probe
cattgcatgttacttggacataatt

SEQ ID NO: 238019 - DNA, 25 bp, Artificial
  Probe
cttgtctgtctcaatatttcctgtg

SEQ ID NO: 238020 - DNA, 25 bp, Artificial
  Probe
gtctgtctcaatatttcctgtgccc

SEQ ID NO: 238021 - DNA, 25 bp, Artificial
  Probe
cgccctcttgtcaagatcacttcag

SEQ ID NO: 238022 - DNA, 25 bp, Artificial
  Probe
acacatgggaactgtttgtgggctg

SEQ ID NO: 238023 - DNA, 25 bp, Artificial
  Probe
cctcttgtcaagatcacttcagatg

SEQ ID NO: 238024 - DNA, 25 bp, Artificial
  Probe
acactctgttctttaattaggtaga

SEQ ID NO: 238025 - DNA, 25 bp, Artificial
  Probe
gccctcttgtcaagatcacttcaga

SEQ ID NO: 238026 - DNA, 25 bp, Artificial
  Probe
gattttgcgccctcttgtcaagatc

SEQ ID NO: 238027 - DNA, 25 bp, Artificial
  Probe
atagcctggcccttgtctgtctcaa

SEQ ID NO: 238028 - DNA, 25 bp, Artificial
  Probe
ggcccttgtctgtctcaatatttcc

SEQ ID NO: 238029 - DNA, 25 bp, Artificial
  Probe
tcagatgcttgtacagtaacaagcg

SEQ ID NO: 238030 - DNA, 25 bp, Artificial
  Probe
ttacagctccatttttgtaactggg

SEQ ID NO: 238031 - DNA, 25 bp, Artificial
  Probe
ctaatgattctcctatagatgtcag

SEQ ID NO: 238032 - DNA, 25 bp, Artificial
  Probe
tgtacagtaacaagcgagaagacct

SEQ ID NO: 238033 - DNA, 25 bp, Artificial
  Probe
caagatcacttcagatgcttgtaca

SEQ ID NO: 238034 - DNA, 25 bp, Artificial
  Probe
cctggcccttgtctgtctcaatatt

SEQ ID NO: 238035 - DNA, 25 bp, Artificial
  Probe
ggttcgaattacaacacatgggaac

SEQ ID NO: 238036 - DNA, 25 bp, Artificial
  Probe
tacagacatgtcaggttcgaattac

SEQ ID NO: 238037 - DNA, 25 bp, Artificial
  Probe
tgtcaagatcacttcagatgcttgt

SEQ ID NO: 238038 - DNA, 25 bp, Artificial
  Probe
gcctggcccttgtctgtctcaatat

SEQ ID NO: 238039 - DNA, 25 bp, Artificial
  Probe
agatcacttcagatgcttgtacagt

SEQ ID NO: 238040 - DNA, 25 bp, Artificial
  Probe
cacttcagatgcttgtacagtaaca

SEQ ID NO: 238041 - DNA, 25 bp, Artificial
  Probe
gtaacaagcgagaagacctgatgtc

SEQ ID NO: 238042 - DNA, 25 bp, Artificial
  Probe
gaatctaatgattctcctatagatg

SEQ ID NO: 238043 - DNA, 25 bp, Artificial
  Probe
aatgattctcctatagatgtcagga

SEQ ID NO: 238044 - DNA, 25 bp, Artificial
  Probe
atgcttgtacagtaacaagcgagaa

SEQ ID NO: 238045 - DNA, 25 bp, Artificial
  Probe
ttaggtagattttgcgccctcttgt

SEQ ID NO: 238046 - DNA, 25 bp, Artificial
  Probe
acaacacatgggaactgtttgtggg

SEQ ID NO: 238047 - DNA, 25 bp, Artificial
  Probe
ccttctgggattgagaagcaatagc

SEQ ID NO: 238048 - DNA, 25 bp, Artificial
  Probe
caacacatgggaactgtttgtgggc

SEQ ID NO: 238049 - DNA, 25 bp, Artificial
  Probe
gattctcctatagatgtcaggaatg

SEQ ID NO: 238050 - DNA, 25 bp, Artificial
  Probe
cactctgttctttaattaggtagat

SEQ ID NO: 238051 - DNA, 25 bp, Artificial
  Probe
gttcgaattacaacacatgggaact

SEQ ID NO: 238052 - DNA, 25 bp, Artificial
  Probe
gatgcttgtacagtaacaagcgaga

SEQ ID NO: 238053 - DNA, 25 bp, Artificial
  Probe
ctcctatagatgtcaggaatgactg

SEQ ID NO: 238054 - DNA, 25 bp, Artificial
  Probe
gaagcaatagcctggcccttgtctg

SEQ ID NO: 238055 - DNA, 25 bp, Artificial
  Probe
tcctatagatgtcaggaatgactga

SEQ ID NO: 238056 - DNA, 25 bp, Artificial
  Probe
tttcattgcatgttacttggacata

SEQ ID NO: 238057 - DNA, 25 bp, Artificial
  Probe
acaagcgagaagacctgatgtcttt

SEQ ID NO: 238058 - DNA, 25 bp, Artificial
  Probe
ctgccacaccagatactggaaagct

SEQ ID NO: 238059 - DNA, 25 bp, Artificial
  Probe
attttcacggtacttcattgtaatt

SEQ ID NO: 238060 - DNA, 25 bp, Artificial
  Probe
catacattttcacggtacttcattg

SEQ ID NO: 238061 - DNA, 25 bp, Artificial
  Probe
ttcacggtacttcattgtaattttt

SEQ ID NO: 238062 - DNA, 25 bp, Artificial
  Probe
aggaggctgccacaccagatactgg

SEQ ID NO: 238063 - DNA, 25 bp, Artificial
  Probe
acaccagatactggaaagcttgttc

SEQ ID NO: 238064 - DNA, 25 bp, Artificial
  Probe
tttcacggtacttcattgtaatttt

SEQ ID NO: 238065 - DNA, 25 bp, Artificial
  Probe
agccaggaggctgccacaccagata

SEQ ID NO: 238066 - DNA, 25 bp, Artificial
  Probe
gaggctgccacaccagatactggaa

SEQ ID NO: 238067 - DNA, 25 bp, Artificial
  Probe
accagcagcagccaggaggctgcca

SEQ ID NO: 238068 - DNA, 25 bp, Artificial
  Probe
acatacattttcacggtacttcatt

SEQ ID NO: 238069 - DNA, 25 bp, Artificial
  Probe
cagccaggaggctgccacaccagat

SEQ ID NO: 238070 - DNA, 25 bp, Artificial
  Probe
aggctgccacaccagatactggaaa

SEQ ID NO: 238071 - DNA, 25 bp, Artificial
  Probe
ccaccagcagcagccaggaggctgc

SEQ ID NO: 238072 - DNA, 25 bp, Artificial
  Probe
gctgccacaccagatactggaaagc

SEQ ID NO: 238073 - DNA, 25 bp, Artificial
  Probe
gcagccaggaggctgccacaccaga

SEQ ID NO: 238074 - DNA, 25 bp, Artificial
  Probe
tacattttcacggtacttcattgta

SEQ ID NO: 238075 - DNA, 25 bp, Artificial
  Probe
cccaccagcagcagccaggaggctg

SEQ ID NO: 238076 - DNA, 25 bp, Artificial
  Probe
ccagcagcagccaggaggctgccac

SEQ ID NO: 238077 - DNA, 25 bp, Artificial
  Probe
tgccacaccagatactggaaagctt

SEQ ID NO: 238078 - DNA, 25 bp, Artificial
  Probe
gccaggaggctgccacaccagatac

SEQ ID NO: 238079 - DNA, 25 bp, Artificial
  Probe
attgacatacattttcacggtactt

SEQ ID NO: 238080 - DNA, 25 bp, Artificial
  Probe
acccaccagcagcagccaggaggct

SEQ ID NO: 238081 - DNA, 25 bp, Artificial
  Probe
ggctgccacaccagatactggaaag

SEQ ID NO: 238082 - DNA, 25 bp, Artificial
  Probe
accagatactggaaagcttgttcag

SEQ ID NO: 238083 - DNA, 25 bp, Artificial
  Probe
cacaccagatactggaaagcttgtt

SEQ ID NO: 238084 - DNA, 25 bp, Artificial
  Probe
cagcagccaggaggctgccacacca

SEQ ID NO: 238085 - DNA, 25 bp, Artificial
  Probe
agcagcagccaggaggctgccacac

SEQ ID NO: 238086 - DNA, 25 bp, Artificial
  Probe
ccaggaggctgccacaccagatact

SEQ ID NO: 238087 - DNA, 25 bp, Artificial
  Probe
tgacatacattttcacggtacttca

SEQ ID NO: 238088 - DNA, 25 bp, Artificial
  Probe
agcagccaggaggctgccacaccag

SEQ ID NO: 238089 - DNA, 25 bp, Artificial
  Probe
cagcagcagccaggaggctgccaca

SEQ ID NO: 238090 - DNA, 25 bp, Artificial
  Probe
ttgacatacattttcacggtacttc

SEQ ID NO: 238091 - DNA, 25 bp, Artificial
  Probe
ttagaactcagccacccaccagcag

SEQ ID NO: 238092 - DNA, 25 bp, Artificial
  Probe
acattttcacggtacttcattgtaa

SEQ ID NO: 238093 - DNA, 25 bp, Artificial
  Probe
ttttcacggtacttcattgtaattt

SEQ ID NO: 238094 - DNA, 25 bp, Artificial
  Probe
tcacggtacttcattgtaatttttt

SEQ ID NO: 238095 - DNA, 25 bp, Artificial
  Probe
ggaggctgccacaccagatactgga

SEQ ID NO: 238096 - DNA, 25 bp, Artificial
  Probe
gccacaccagatactggaaagcttg

SEQ ID NO: 238097 - DNA, 25 bp, Artificial
  Probe
caccagatactggaaagcttgttca

SEQ ID NO: 238098 - DNA, 25 bp, Artificial
  Probe
caggaggctgccacaccagatactg

SEQ ID NO: 238099 - DNA, 25 bp, Artificial
  Probe
gcagcagccaggaggctgccacacc

SEQ ID NO: 238100 - DNA, 25 bp, Artificial
  Probe
cattttcacggtacttcattgtaat

SEQ ID NO: 238101 - DNA, 25 bp, Artificial
  Probe
caccagcagcagccaggaggctgcc

SEQ ID NO: 238102 - DNA, 25 bp, Artificial
  Probe
tattgacatacattttcacggtact

SEQ ID NO: 238103 - DNA, 25 bp, Artificial
  Probe
ggggacactgggcttggggatcttt

SEQ ID NO: 238104 - DNA, 25 bp, Artificial
  Probe
catcagcatgtccctgtcacagtag

SEQ ID NO: 238105 - DNA, 25 bp, Artificial
  Probe
agtagcagtattctctctcatgtag

SEQ ID NO: 238106 - DNA, 25 bp, Artificial
  Probe
tcacagtagcagtattctctctcat

SEQ ID NO: 238107 - DNA, 25 bp, Artificial
  Probe
tattctctctcatgtagaatgactc

SEQ ID NO: 238108 - DNA, 25 bp, Artificial
  Probe
atcagcatgtccctgtcacagtagc

SEQ ID NO: 238109 - DNA, 25 bp, Artificial
  Probe
gaatttaacttcccttcatcagccc

SEQ ID NO: 238110 - DNA, 25 bp, Artificial
  Probe
agcatgtccctgtcacagtagcagt

SEQ ID NO: 238111 - DNA, 25 bp, Artificial
  Probe
gttcatcagcatgtccctgtcacag

SEQ ID NO: 238112 - DNA, 25 bp, Artificial
  Probe
gtcacagtagcagtattctctctca

SEQ ID NO: 238113 - DNA, 25 bp, Artificial
  Probe
tcagcatgtccctgtcacagtagca

SEQ ID NO: 238114 - DNA, 25 bp, Artificial
  Probe
agcagtattctctctcatgtagaat

SEQ ID NO: 238115 - DNA, 25 bp, Artificial
  Probe
ctctcatgtagaatgactctctttc

SEQ ID NO: 238116 - DNA, 25 bp, Artificial
  Probe
tagcagtattctctctcatgtagaa

SEQ ID NO: 238117 - DNA, 25 bp, Artificial
  Probe
tctctctcatgtagaatgactctct

SEQ ID NO: 238118 - DNA, 25 bp, Artificial
  Probe
ccctgtcacagtagcagtattctct

SEQ ID NO: 238119 - DNA, 25 bp, Artificial
  Probe
tggttcatcagcatgtccctgtcac

SEQ ID NO: 238120 - DNA, 25 bp, Artificial
  Probe
catgtccctgtcacagtagcagtat

SEQ ID NO: 238121 - DNA, 25 bp, Artificial
  Probe
ggttcatcagcatgtccctgtcaca

SEQ ID NO: 238122 - DNA, 25 bp, Artificial
  Probe
cagcatgtccctgtcacagtagcag

SEQ ID NO: 238123 - DNA, 25 bp, Artificial
  Probe
ctctctcatgtagaatgactctctt

SEQ ID NO: 238124 - DNA, 25 bp, Artificial
  Probe
attctctctcatgtagaatgactct

SEQ ID NO: 238125 - DNA, 25 bp, Artificial
  Probe
ctgtcacagtagcagtattctctct

SEQ ID NO: 238126 - DNA, 25 bp, Artificial
  Probe
atgtccctgtcacagtagcagtatt

SEQ ID NO: 238127 - DNA, 25 bp, Artificial
  Probe
cacagtagcagtattctctctcatg

SEQ ID NO: 238128 - DNA, 25 bp, Artificial
  Probe
cagtattctctctcatgtagaatga

SEQ ID NO: 238129 - DNA, 25 bp, Artificial
  Probe
acagtagcagtattctctctcatgt

SEQ ID NO: 238130 - DNA, 25 bp, Artificial
  Probe
cagtagcagtattctctctcatgta

SEQ ID NO: 238131 - DNA, 25 bp, Artificial
  Probe
tctctcatgtagaatgactctcttt

SEQ ID NO: 238132 - DNA, 25 bp, Artificial
  Probe
cctgtcacagtagcagtattctctc

SEQ ID NO: 238133 - DNA, 25 bp, Artificial
  Probe
tccctgtcacagtagcagtattctc

SEQ ID NO: 238134 - DNA, 25 bp, Artificial
  Probe
tgtcacagtagcagtattctctctc

SEQ ID NO: 238135 - DNA, 25 bp, Artificial
  Probe
gcatgtccctgtcacagtagcagta

SEQ ID NO: 238136 - DNA, 25 bp, Artificial
  Probe
tgaatttaacttcccttcatcagcc

SEQ ID NO: 238137 - DNA, 25 bp, Artificial
  Probe
tcatcagcatgtccctgtcacagta

SEQ ID NO: 238138 - DNA, 25 bp, Artificial
  Probe
agtattctctctcatgtagaatgac

SEQ ID NO: 238139 - DNA, 25 bp, Artificial
  Probe
gtccctgtcacagtagcagtattct

SEQ ID NO: 238140 - DNA, 25 bp, Artificial
  Probe
ttctctctcatgtagaatgactctc

SEQ ID NO: 238141 - DNA, 25 bp, Artificial
  Probe
gcagtattctctctcatgtagaatg

SEQ ID NO: 238142 - DNA, 25 bp, Artificial
  Probe
tgtccctgtcacagtagcagtattc

SEQ ID NO: 238143 - DNA, 25 bp, Artificial
  Probe
gtattctctctcatgtagaatgact

SEQ ID NO: 238144 - DNA, 25 bp, Artificial
  Probe
ttcatcagcatgtccctgtcacagt

SEQ ID NO: 238145 - DNA, 25 bp, Artificial
  Probe
gtagcagtattctctctcatgtaga

SEQ ID NO: 238146 - DNA, 25 bp, Artificial
  Probe
gatgtaccacgcataaactgtgaac

SEQ ID NO: 238147 - DNA, 25 bp, Artificial
  Probe
acagtcggtatggattcattctgat

SEQ ID NO: 238148 - DNA, 25 bp, Artificial
  Probe
gacctcagacagtcggtatggattc

SEQ ID NO: 238149 - DNA, 25 bp, Artificial
  Probe
tgtggggctctcttacagagaaagc

SEQ ID NO: 238150 - DNA, 25 bp, Artificial
  Probe
tcgcttgcagagagtacttttataa

SEQ ID NO: 238151 - DNA, 25 bp, Artificial
  Probe
acgtggcattcagatgaaagtctta

SEQ ID NO: 238152 - DNA, 25 bp, Artificial
  Probe
gtgcgttgactcacacgctgctcac

SEQ ID NO: 238153 - DNA, 25 bp, Artificial
  Probe
gctctcttacagagaaagctatacc

SEQ ID NO: 238154 - DNA, 25 bp, Artificial
  Probe
cacttttcctaagtggttcttgcca

SEQ ID NO: 238155 - DNA, 25 bp, Artificial
  Probe
gaaagcacagagaccacatgtgtgt

SEQ ID NO: 238156 - DNA, 25 bp, Artificial
  Probe
aggctgctggcctacatcatctcta

SEQ ID NO: 238157 - DNA, 25 bp, Artificial
  Probe
cctctgtggtcatgactgggtgtga

SEQ ID NO: 238158 - DNA, 25 bp, Artificial
  Probe
cataaactgtgaactggatggacaa

SEQ ID NO: 238159 - DNA, 25 bp, Artificial
  Probe
tgcacacggaaagatacaggctgct

SEQ ID NO: 238160 - DNA, 25 bp, Artificial
  Probe
gctgaacactgtctgtgtaattttt

SEQ ID NO: 238161 - DNA, 25 bp, Artificial
  Probe
accacatgtgtgtgcgttgactcac

SEQ ID NO: 238162 - DNA, 25 bp, Artificial
  Probe
ttcctaagtggttcttgccaaactg

SEQ ID NO: 238163 - DNA, 25 bp, Artificial
  Probe
agcacagaggctggacttgggatca

SEQ ID NO: 238164 - DNA, 25 bp, Artificial
  Probe
agagaccacatgtgtgtgcgttgac

SEQ ID NO: 238165 - DNA, 25 bp, Artificial
  Probe
tgctgaacactgtctgtgtaatttt

SEQ ID NO: 238166 - DNA, 25 bp, Artificial
  Probe
gcccagggtccctctgtggtcatga

SEQ ID NO: 238167 - DNA, 25 bp, Artificial
  Probe
agagaaagctatacccatctcctga

SEQ ID NO: 238168 - DNA, 25 bp, Artificial
  Probe
tttcctaagtggttcttgccaaact

SEQ ID NO: 238169 - DNA, 25 bp, Artificial
  Probe
cagagaaagctatacccatctcctg

SEQ ID NO: 238170 - DNA, 25 bp, Artificial
  Probe
tgtgtgtgcgttgactcacacgctg

SEQ ID NO: 238171 - DNA, 25 bp, Artificial
  Probe
aatatatccagttcgcttgcagaga

SEQ ID NO: 238172 - DNA, 25 bp, Artificial
  Probe
tcagacagtcggtatggattcattc

SEQ ID NO: 238173 - DNA, 25 bp, Artificial
  Probe
ggtatagcaggcttgcacacttttc

SEQ ID NO: 238174 - DNA, 25 bp, Artificial
  Probe
ctgtgagttttgcacacggaaagat

SEQ ID NO: 238175 - DNA, 25 bp, Artificial
  Probe
cacagagaccacatgtgtgtgcgtt

SEQ ID NO: 238176 - DNA, 25 bp, Artificial
  Probe
catgtgtgtgcgttgactcacacgc

SEQ ID NO: 238177 - DNA, 25 bp, Artificial
  Probe
tatccagttcgcttgcagagagtac

SEQ ID NO: 238178 - DNA, 25 bp, Artificial
  Probe
agggtccctctgtggtcatgactgg

SEQ ID NO: 238179 - DNA, 25 bp, Artificial
  Probe
gacttgggatcactgtgagttttgc

SEQ ID NO: 238180 - DNA, 25 bp, Artificial
  Probe
gatacaggctgctggcctacatcat

SEQ ID NO: 238181 - DNA, 25 bp, Artificial
  Probe
cagaggctggacttgggatcactgt

SEQ ID NO: 238182 - DNA, 25 bp, Artificial
  Probe
cgctgctcaccgtcggcttggacta

SEQ ID NO: 238183 - DNA, 25 bp, Artificial
  Probe
gctgctggcctacatcatctctaac

SEQ ID NO: 238184 - DNA, 25 bp, Artificial
  Probe
aagatacaggctgctggcctacatc

SEQ ID NO: 238185 - DNA, 25 bp, Artificial
  Probe
cagacagtcggtatggattcattct

SEQ ID NO: 238186 - DNA, 25 bp, Artificial
  Probe
cgcataaactgtgaactggatggac

SEQ ID NO: 238187 - DNA, 25 bp, Artificial
  Probe
cacacttttcctaagtggttcttgc

SEQ ID NO: 238188 - DNA, 25 bp, Artificial
  Probe
tcttaagaagtaaacccaggatgtt

SEQ ID NO: 238189 - DNA, 25 bp, Artificial
  Probe
ggtccctctgtggtcatgactgggt

SEQ ID NO: 238190 - DNA, 25 bp, Artificial
  Probe
ttttgcacacggaaagatacaggct

SEQ ID NO: 238191 - DNA, 25 bp, Artificial
  Probe
tgagcacgtggcattcagatgaaag

SEQ ID NO: 238192 - DNA, 25 bp, Artificial
  Probe
cgaatccagaaactctgttatggac

SEQ ID NO: 238193 - DNA, 25 bp, Artificial
  Probe
tggatcctgctcagatcaccatgaa

SEQ ID NO: 238194 - DNA, 25 bp, Artificial
  Probe
ctctgttatggactcaatatggact

SEQ ID NO: 238195 - DNA, 25 bp, Artificial
  Probe
gaaagtaatccaaggcctatacagt

SEQ ID NO: 238196 - DNA, 25 bp, Artificial
  Probe
ggggtcaccacagtggtgtgctctt

SEQ ID NO: 238197 - DNA, 25 bp, Artificial
  Probe
tccaaggcctatacagtggggtcac

SEQ ID NO: 238198 - DNA, 25 bp, Artificial
  Probe
cctgctcagatcaccatgaaagtaa

SEQ ID NO: 238199 - DNA, 25 bp, Artificial
  Probe
tatacagtggggtcaccacagtggt

SEQ ID NO: 238200 - DNA, 25 bp, Artificial
  Probe
tggggtcaccacagtggtgtgctct

SEQ ID NO: 238201 - DNA, 25 bp, Artificial
  Probe
taatccaaggcctatacagtggggt

SEQ ID NO: 238202 - DNA, 25 bp, Artificial
  Probe
tgctcagatcaccatgaaagtaatc

SEQ ID NO: 238203 - DNA, 25 bp, Artificial
  Probe
gtggatcctgctcagatcaccatga

SEQ ID NO: 238204 - DNA, 25 bp, Artificial
  Probe
cagaaactctgttatggactcaata

SEQ ID NO: 238205 - DNA, 25 bp, Artificial
  Probe
tccagaaactctgttatggactcaa

SEQ ID NO: 238206 - DNA, 25 bp, Artificial
  Probe
agatcaccatgaaagtaatccaagg

SEQ ID NO: 238207 - DNA, 25 bp, Artificial
  Probe
atatggactttgtggatcctgctca

SEQ ID NO: 238208 - DNA, 25 bp, Artificial
  Probe
ctcaatatggactttgtggatcctg

SEQ ID NO: 238209 - DNA, 25 bp, Artificial
  Probe
tcaatatggactttgtggatcctgc

SEQ ID NO: 238210 - DNA, 25 bp, Artificial
  Probe
cccgaatccagaaactctgttatgg

SEQ ID NO: 238211 - DNA, 25 bp, Artificial
  Probe
aatccaaggcctatacagtggggtc

SEQ ID NO: 238212 - DNA, 25 bp, Artificial
  Probe
gggtcaccacagtggtgtgctcttt

SEQ ID NO: 238213 - DNA, 25 bp, Artificial
  Probe
tctgttatggactcaatatggactt

SEQ ID NO: 238214 - DNA, 25 bp, Artificial
  Probe
ggatcctgctcagatcaccatgaaa

SEQ ID NO: 238215 - DNA, 25 bp, Artificial
  Probe
tacagtggggtcaccacagtggtgt

SEQ ID NO: 238216 - DNA, 25 bp, Artificial
  Probe
gctcagatcaccatgaaagtaatcc

SEQ ID NO: 238217 - DNA, 25 bp, Artificial
  Probe
aactctgttatggactcaatatgga

SEQ ID NO: 238218 - DNA, 25 bp, Artificial
  Probe
gactcaatatggactttgtggatcc

SEQ ID NO: 238219 - DNA, 25 bp, Artificial
  Probe
ctgctcagatcaccatgaaagtaat

SEQ ID NO: 238220 - DNA, 25 bp, Artificial
  Probe
caatatggactttgtggatcctgct

SEQ ID NO: 238221 - DNA, 25 bp, Artificial
  Probe
tcccgaatccagaaactctgttatg

SEQ ID NO: 238222 - DNA, 25 bp, Artificial
  Probe
tggactttgtggatcctgctcagat

SEQ ID NO: 238223 - DNA, 25 bp, Artificial
  Probe
aatatggactttgtggatcctgctc

SEQ ID NO: 238224 - DNA, 25 bp, Artificial
  Probe
gaaactctgttatggactcaatatg

SEQ ID NO: 238225 - DNA, 25 bp, Artificial
  Probe
actctgttatggactcaatatggac

SEQ ID NO: 238226 - DNA, 25 bp, Artificial
  Probe
atcctgctcagatcaccatgaaagt

SEQ ID NO: 238227 - DNA, 25 bp, Artificial
  Probe
ctgttatggactcaatatggacttt

SEQ ID NO: 238228 - DNA, 25 bp, Artificial
  Probe
ctttgtggatcctgctcagatcacc

SEQ ID NO: 238229 - DNA, 25 bp, Artificial
  Probe
ggactcaatatggactttgtggatc

SEQ ID NO: 238230 - DNA, 25 bp, Artificial
  Probe
tcctgctcagatcaccatgaaagta

SEQ ID NO: 238231 - DNA, 25 bp, Artificial
  Probe
atcaccatgaaagtaatccaaggcc

SEQ ID NO: 238232 - DNA, 25 bp, Artificial
  Probe
atacagtggggtcaccacagtggtg

SEQ ID NO: 238233 - DNA, 25 bp, Artificial
  Probe
caccatgaaagtaatccaaggccta

SEQ ID NO: 238234 - DNA, 25 bp, Artificial
  Probe
aaactctgttatggactcaatatgg

SEQ ID NO: 238235 - DNA, 25 bp, Artificial
  Probe
cagatcaccatgaaagtaatccaag

SEQ ID NO: 238236 - DNA, 25 bp, Artificial
  Probe
tgaaagtaatccaaggcctatacag

SEQ ID NO: 238237 - DNA, 25 bp, Artificial
  Probe
gaatccagaaactctgttatggact

SEQ ID NO: 238238 - DNA, 25 bp, Artificial
  Probe
gtaccgggagctcgctctaccgctt

SEQ ID NO: 238239 - DNA, 25 bp, Artificial
  Probe
gagctcgctctaccgcttgtccccc

SEQ ID NO: 238240 - DNA, 25 bp, Artificial
  Probe
tctaccgcttgtcccccagcgggtc

SEQ ID NO: 238241 - DNA, 25 bp, Artificial
  Probe
caaagcgtatcgcgggcgggtaccg

SEQ ID NO: 238242 - DNA, 25 bp, Artificial
  Probe
tcgcgggcgggtaccgggagctcgc

SEQ ID NO: 238243 - DNA, 25 bp, Artificial
  Probe
gtatcgcgggcgggtaccgggagct

SEQ ID NO: 238244 - DNA, 25 bp, Artificial
  Probe
tcgctctaccgcttgtcccccagcg

SEQ ID NO: 238245 - DNA, 25 bp, Artificial
  Probe
tatcgcgggcgggtaccgggagctc

SEQ ID NO: 238246 - DNA, 25 bp, Artificial
  Probe
gcgtatcgcgggcgggtaccgggag

SEQ ID NO: 238247 - DNA, 25 bp, Artificial
  Probe
ctcgctctaccgcttgtcccccagc

SEQ ID NO: 238248 - DNA, 25 bp, Artificial
  Probe
accgggagctcgctctaccgcttgt

SEQ ID NO: 238249 - DNA, 25 bp, Artificial
  Probe
gggtaccgggagctcgctctaccgc

SEQ ID NO: 238250 - DNA, 25 bp, Artificial
  Probe
cgggcgggtaccgggagctcgctct

SEQ ID NO: 238251 - DNA, 25 bp, Artificial
  Probe
tgtcccccagcgggtcctcgggcgc

SEQ ID NO: 238252 - DNA, 25 bp, Artificial
  Probe
agcaaagcgtatcgcgggcgggtac

SEQ ID NO: 238253 - DNA, 25 bp, Artificial
  Probe
gcaaagcgtatcgcgggcgggtacc

SEQ ID NO: 238254 - DNA, 25 bp, Artificial
  Probe
agctcgctctaccgcttgtccccca

SEQ ID NO: 238255 - DNA, 25 bp, Artificial
  Probe
gggagcaaagcgtatcgcgggcggg

SEQ ID NO: 238256 - DNA, 25 bp, Artificial
  Probe
gctcgctctaccgcttgtcccccag

SEQ ID NO: 238257 - DNA, 25 bp, Artificial
  Probe
taccgggagctcgctctaccgcttg

SEQ ID NO: 238258 - DNA, 25 bp, Artificial
  Probe
ttgtcccccagcgggtcctcgggcg

SEQ ID NO: 238259 - DNA, 25 bp, Artificial
  Probe
gtcccccagcgggtcctcgggcgca

SEQ ID NO: 238260 - DNA, 25 bp, Artificial
  Probe
tcccccagcgggtcctcgggcgcag

SEQ ID NO: 238261 - DNA, 25 bp, Artificial
  Probe
cgggtaccgggagctcgctctaccg

SEQ ID NO: 238262 - DNA, 25 bp, Artificial
  Probe
gggcgggtaccgggagctcgctcta

SEQ ID NO: 238263 - DNA, 25 bp, Artificial
  Probe
ggagctcgctctaccgcttgtcccc

SEQ ID NO: 238264 - DNA, 25 bp, Artificial
  Probe
atcgcgggcgggtaccgggagctcg

SEQ ID NO: 238265 - DNA, 25 bp, Artificial
  Probe
gcgggtaccgggagctcgctctacc

SEQ ID NO: 238266 - DNA, 25 bp, Artificial
  Probe
gggagctcgctctaccgcttgtccc

SEQ ID NO: 238267 - DNA, 25 bp, Artificial
  Probe
ggtaccgggagctcgctctaccgct

SEQ ID NO: 238268 - DNA, 25 bp, Artificial
  Probe
cgggagctcgctctaccgcttgtcc

SEQ ID NO: 238269 - DNA, 25 bp, Artificial
  Probe
gagcaaagcgtatcgcgggcgggta

SEQ ID NO: 238270 - DNA, 25 bp, Artificial
  Probe
ggagcaaagcgtatcgcgggcgggt

SEQ ID NO: 238271 - DNA, 25 bp, Artificial
  Probe
agcctgcaataaacagtatttgctg

SEQ ID NO: 238272 - DNA, 25 bp, Artificial
  Probe
ctagccccacggaagagtctacatg

SEQ ID NO: 238273 - DNA, 25 bp, Artificial
  Probe
aagagtctacatggagagaaagcac

SEQ ID NO: 238274 - DNA, 25 bp, Artificial
  Probe
ctgtacagtaggacactatactctg

SEQ ID NO: 238275 - DNA, 25 bp, Artificial
  Probe
acagtatttcgcttagcgaaggccc

SEQ ID NO: 238276 - DNA, 25 bp, Artificial
  Probe
atgaactgtacagtaggacactata

SEQ ID NO: 238277 - DNA, 25 bp, Artificial
  Probe
tcttcccctcagctctgttgattgc

SEQ ID NO: 238278 - DNA, 25 bp, Artificial
  Probe
agagagcctgcaataaacagtattt

SEQ ID NO: 238279 - DNA, 25 bp, Artificial
  Probe
acagtaggacactatactctgtccc

SEQ ID NO: 238280 - DNA, 25 bp, Artificial
  Probe
agctctgttgattgcgaaatcctgc

SEQ ID NO: 238281 - DNA, 25 bp, Artificial
  Probe
tgtgttttacctgtgtatcagggac

SEQ ID NO: 238282 - DNA, 25 bp, Artificial
  Probe
tcagagtagcccaccttggtgttta

SEQ ID NO: 238283 - DNA, 25 bp, Artificial
  Probe
atagtgcctttttcacatgagtcag

SEQ ID NO: 238284 - DNA, 25 bp, Artificial
  Probe
ttcgcttagcgaaggccccagttat

SEQ ID NO: 238285 - DNA, 25 bp, Artificial
  Probe
gacacttaatttacgtgtactctag

SEQ ID NO: 238286 - DNA, 25 bp, Artificial
  Probe
tacgtgtactctagccccacggaag

SEQ ID NO: 238287 - DNA, 25 bp, Artificial
  Probe
caccttggtgtttattacagtattt

SEQ ID NO: 238288 - DNA, 25 bp, Artificial
  Probe
cctgcaataaacagtatttgctgtg

SEQ ID NO: 238289 - DNA, 25 bp, Artificial
  Probe
gtttctgcttattacgtcaactgta

SEQ ID NO: 238290 - DNA, 25 bp, Artificial
  Probe
gacactatactctgtccccgagaaa

SEQ ID NO: 238291 - DNA, 25 bp, Artificial
  Probe
cacaatcagagtagcccaccttggt

SEQ ID NO: 238292 - DNA, 25 bp, Artificial
  Probe
tactctagccccacggaagagtcta

SEQ ID NO: 238293 - DNA, 25 bp, Artificial
  Probe
tttcatagtgcctttttcacatgag

SEQ ID NO: 238294 - DNA, 25 bp, Artificial
  Probe
tgtttattacagtatttcgcttagc

SEQ ID NO: 238295 - DNA, 25 bp, Artificial
  Probe
tgggccattgtatgtgttttacctg

SEQ ID NO: 238296 - DNA, 25 bp, Artificial
  Probe
aatttacgtgtactctagccccacg

SEQ ID NO: 238297 - DNA, 25 bp, Artificial
  Probe
tgaatgaactgtacagtaggacact

SEQ ID NO: 238298 - DNA, 25 bp, Artificial
  Probe
tacctgtgtatcagggacacttaat

SEQ ID NO: 238299 - DNA, 25 bp, Artificial
  Probe
agagaaagcacatcgctaaccttca

SEQ ID NO: 238300 - DNA, 25 bp, Artificial
  Probe
ttcacaatcagagtagcccaccttg

SEQ ID NO: 238301 - DNA, 25 bp, Artificial
  Probe
attgggccattgtatgtgttttacc

SEQ ID NO: 238302 - DNA, 25 bp, Artificial
  Probe
cctgcatagattatgctttgatgta

SEQ ID NO: 238303 - DNA, 25 bp, Artificial
  Probe
tgatgtagtttctgcttattacgtc

SEQ ID NO: 238304 - DNA, 25 bp, Artificial
  Probe
ccagaaagcacaagttcaaagtaag

SEQ ID NO: 238305 - DNA, 25 bp, Artificial
  Probe
gcattcacaatcagagtagcccacc

SEQ ID NO: 238306 - DNA, 25 bp, Artificial
  Probe
taaggcatatgcattcacaatcaga

SEQ ID NO: 238307 - DNA, 25 bp, Artificial
  Probe
tgtgtatcagggacacttaatttac

SEQ ID NO: 238308 - DNA, 25 bp, Artificial
  Probe
ccacggaagagtctacatggagaga

SEQ ID NO: 238309 - DNA, 25 bp, Artificial
  Probe
acaccagaaagcacaagttcaaagt

SEQ ID NO: 238310 - DNA, 25 bp, Artificial
  Probe
tattacagtatttcgcttagcgaag

SEQ ID NO: 238311 - DNA, 25 bp, Artificial
  Probe
ctgttgattgcgaaatcctgcatag

SEQ ID NO: 238312 - DNA, 25 bp, Artificial
  Probe
ggacacttaatttacgtgtactcta

SEQ ID NO: 238313 - DNA, 25 bp, Artificial
  Probe
atcacatttgaatgaactgtacagt

SEQ ID NO: 238314 - DNA, 25 bp, Artificial
  Probe
tatcagggacacttaatttacgtgt

SEQ ID NO: 238315 - DNA, 25 bp, Artificial
  Probe
agtatttcgcttagcgaaggcccca

SEQ ID NO: 238316 - DNA, 25 bp, Artificial
  Probe
tttcgcttagcgaaggccccagtta

SEQ ID NO: 238317 - DNA, 25 bp, Artificial
  Probe
gtcctggggctaagccaaggaccca

SEQ ID NO: 238318 - DNA, 25 bp, Artificial
  Probe
actgtgtgcagtctcacagcagcag

SEQ ID NO: 238319 - DNA, 25 bp, Artificial
  Probe
gctactgttcccagtagacccacaa

SEQ ID NO: 238320 - DNA, 25 bp, Artificial
  Probe
ggggctaagccaaggacccactaca

SEQ ID NO: 238321 - DNA, 25 bp, Artificial
  Probe
cccagtagacccacaaattgggaat

SEQ ID NO: 238322 - DNA, 25 bp, Artificial
  Probe
gcaggctccatgtactgtgtgcagt

SEQ ID NO: 238323 - DNA, 25 bp, Artificial
  Probe
agcagcatcaagtaggactggtgaa

SEQ ID NO: 238324 - DNA, 25 bp, Artificial
  Probe
tagagcagcatcaagtaggactggt

SEQ ID NO: 238325 - DNA, 25 bp, Artificial
  Probe
acagcagcaggtccaacacgggtgg

SEQ ID NO: 238326 - DNA, 25 bp, Artificial
  Probe
gcaaccacattgagctactgttccc

SEQ ID NO: 238327 - DNA, 25 bp, Artificial
  Probe
agtctcacagcagcaggtccaacac

SEQ ID NO: 238328 - DNA, 25 bp, Artificial
  Probe
agctcaagcaggaagatgcaggctc

SEQ ID NO: 238329 - DNA, 25 bp, Artificial
  Probe
ccagtagacccacaaattgggaatg

SEQ ID NO: 238330 - DNA, 25 bp, Artificial
  Probe
tgttcccagtagacccacaaattgg

SEQ ID NO: 238331 - DNA, 25 bp, Artificial
  Probe
tggtcccacaagctcaagcaggaag

SEQ ID NO: 238332 - DNA, 25 bp, Artificial
  Probe
gtagacccacaaattgggaatggct

SEQ ID NO: 238333 - DNA, 25 bp, Artificial
  Probe
ggctaagccaaggacccactacaca

SEQ ID NO: 238334 - DNA, 25 bp, Artificial
  Probe
tgtgcagtctcacagcagcaggtcc

SEQ ID NO: 238335 - DNA, 25 bp, Artificial
  Probe
ctgttcccagtagacccacaaattg

SEQ ID NO: 238336 - DNA, 25 bp, Artificial
  Probe
gtctcacagcagcaggtccaacacg

SEQ ID NO: 238337 - DNA, 25 bp, Artificial
  Probe
agacccacaaattgggaatggctag

SEQ ID NO: 238338 - DNA, 25 bp, Artificial
  Probe
gtctggctctgcagacttctccctg

SEQ ID NO: 238339 - DNA, 25 bp, Artificial
  Probe
gctccatgtactgtgtgcagtctca

SEQ ID NO: 238340 - DNA, 25 bp, Artificial
  Probe
tccctgccgtgcaggtcctggggct

SEQ ID NO: 238341 - DNA, 25 bp, Artificial
  Probe
ggtggtcccacaagctcaagcagga

SEQ ID NO: 238342 - DNA, 25 bp, Artificial
  Probe
gaagatgcaggctccatgtactgtg

SEQ ID NO: 238343 - DNA, 25 bp, Artificial
  Probe
cacaagctcaagcaggaagatgcag

SEQ ID NO: 238344 - DNA, 25 bp, Artificial
  Probe
ttctccctgccgtgcaggtcctggg

SEQ ID NO: 238345 - DNA, 25 bp, Artificial
  Probe
ctcaagcaggaagatgcaggctcca

SEQ ID NO: 238346 - DNA, 25 bp, Artificial
  Probe
gccaaggacccactacacaatgcaa

SEQ ID NO: 238347 - DNA, 25 bp, Artificial
  Probe
gtgggtctggctctgcagacttctc

SEQ ID NO: 238348 - DNA, 25 bp, Artificial
  Probe
cattgagctactgttcccagtagac

SEQ ID NO: 238349 - DNA, 25 bp, Artificial
  Probe
tctccctgccgtgcaggtcctgggg

SEQ ID NO: 238350 - DNA, 25 bp, Artificial
  Probe
agccaaggacccactacacaatgca

SEQ ID NO: 238351 - DNA, 25 bp, Artificial
  Probe
ggactggtgaactctccatccacct

SEQ ID NO: 238352 - DNA, 25 bp, Artificial
  Probe
catcaagtaggactggtgaactctc

SEQ ID NO: 238353 - DNA, 25 bp, Artificial
  Probe
ctcacagcagcaggtccaacacggg

SEQ ID NO: 238354 - DNA, 25 bp, Artificial
  Probe
acaatgcaaccacattgagctactg

SEQ ID NO: 238355 - DNA, 25 bp, Artificial
  Probe
atgcaggctccatgtactgtgtgca

SEQ ID NO: 238356 - DNA, 25 bp, Artificial
  Probe
atgcaaccacattgagctactgttc

SEQ ID NO: 238357 - DNA, 25 bp, Artificial
  Probe
tgcagtctcacagcagcaggtccaa

SEQ ID NO: 238358 - DNA, 25 bp, Artificial
  Probe
ttgagctactgttcccagtagaccc

SEQ ID NO: 238359 - DNA, 25 bp, Artificial
  Probe
cctgccgtgcaggtcctggggctaa

SEQ ID NO: 238360 - DNA, 25 bp, Artificial
  Probe
gcagtctcacagcagcaggtccaac

SEQ ID NO: 238361 - DNA, 25 bp, Artificial
  Probe
gtactgtgtgcagtctcacagcagc

SEQ ID NO: 238362 - DNA, 25 bp, Artificial
  Probe
aaccacattgagctactgttcccag

SEQ ID NO: 238363 - DNA, 25 bp, Artificial
  Probe
gagtatggactgtgccgcggggcca

SEQ ID NO: 238364 - DNA, 25 bp, Artificial
  Probe
gggactgaccggtagagaagcggag

SEQ ID NO: 238365 - DNA, 25 bp, Artificial
  Probe
ccactgtgggcaggagacccacggg

SEQ ID NO: 238366 - DNA, 25 bp, Artificial
  Probe
ttccactgtgggcaggagacccacg

SEQ ID NO: 238367 - DNA, 25 bp, Artificial
  Probe
ggccggcctctgttggatgccccag

SEQ ID NO: 238368 - DNA, 25 bp, Artificial
  Probe
caggagacccacgggggatcgcatc

SEQ ID NO: 238369 - DNA, 25 bp, Artificial
  Probe
ggcttccactgtgggcaggagaccc

SEQ ID NO: 238370 - DNA, 25 bp, Artificial
  Probe
tgaccggtagagaagcggagaacac

SEQ ID NO: 238371 - DNA, 25 bp, Artificial
  Probe
cctctgttggatgccccagccgctc

SEQ ID NO: 238372 - DNA, 25 bp, Artificial
  Probe
gccggcctctgttggatgccccagc

SEQ ID NO: 238373 - DNA, 25 bp, Artificial
  Probe
tgtgggcaggagacccacgggggat

SEQ ID NO: 238374 - DNA, 25 bp, Artificial
  Probe
cactgtgggcaggagacccacgggg

SEQ ID NO: 238375 - DNA, 25 bp, Artificial
  Probe
aggccggcctctgttggatgcccca

SEQ ID NO: 238376 - DNA, 25 bp, Artificial
  Probe
gagggactgaccggtagagaagcgg

SEQ ID NO: 238377 - DNA, 25 bp, Artificial
  Probe
gcctctgttggatgccccagccgct

SEQ ID NO: 238378 - DNA, 25 bp, Artificial
  Probe
agacccacgggggatcgcatccttc

SEQ ID NO: 238379 - DNA, 25 bp, Artificial
  Probe
tgccgcggggccaggccctgcaggc

SEQ ID NO: 238380 - DNA, 25 bp, Artificial
  Probe
tatggactgtgccgcggggccaggc

SEQ ID NO: 238381 - DNA, 25 bp, Artificial
  Probe
tctgttggatgccccagccgctccc

SEQ ID NO: 238382 - DNA, 25 bp, Artificial
  Probe
tgaggcaggccggcctctgttggat

SEQ ID NO: 238383 - DNA, 25 bp, Artificial
  Probe
tagagtatggactgtgccgcggggc

SEQ ID NO: 238384 - DNA, 25 bp, Artificial
  Probe
ggactgaccggtagagaagcggaga

SEQ ID NO: 238385 - DNA, 25 bp, Artificial
  Probe
atggactgtgccgcggggccaggcc

SEQ ID NO: 238386 - DNA, 25 bp, Artificial
  Probe
ctgaccggtagagaagcggagaaca

SEQ ID NO: 238387 - DNA, 25 bp, Artificial
  Probe
aagagggactgaccggtagagaagc

SEQ ID NO: 238388 - DNA, 25 bp, Artificial
  Probe
gtatggactgtgccgcggggccagg

SEQ ID NO: 238389 - DNA, 25 bp, Artificial
  Probe
tgttggatgccccagccgctcccag

SEQ ID NO: 238390 - DNA, 25 bp, Artificial
  Probe
ggcctctgttggatgccccagccgc

SEQ ID NO: 238391 - DNA, 25 bp, Artificial
  Probe
tccactgtgggcaggagacccacgg

SEQ ID NO: 238392 - DNA, 25 bp, Artificial
  Probe
aggcaggccggcctctgttggatgc

SEQ ID NO: 238393 - DNA, 25 bp, Artificial
  Probe
gactgaccggtagagaagcggagaa

SEQ ID NO: 238394 - DNA, 25 bp, Artificial
  Probe
actgaccggtagagaagcggagaac

SEQ ID NO: 238395 - DNA, 25 bp, Artificial
  Probe
ctctgttggatgccccagccgctcc

SEQ ID NO: 238396 - DNA, 25 bp, Artificial
  Probe
actgtgccgcggggccaggccctgc

SEQ ID NO: 238397 - DNA, 25 bp, Artificial
  Probe
cttccactgtgggcaggagacccac

SEQ ID NO: 238398 - DNA, 25 bp, Artificial
  Probe
gactgtgccgcggggccaggccctg

SEQ ID NO: 238399 - DNA, 25 bp, Artificial
  Probe
gcaggccggcctctgttggatgccc

SEQ ID NO: 238400 - DNA, 25 bp, Artificial
  Probe
caggccggcctctgttggatgcccc

SEQ ID NO: 238401 - DNA, 25 bp, Artificial
  Probe
cggcctctgttggatgccccagccg

SEQ ID NO: 238402 - DNA, 25 bp, Artificial
  Probe
aggagacccacgggggatcgcatcc

SEQ ID NO: 238403 - DNA, 25 bp, Artificial
  Probe
gaagagggactgaccggtagagaag

SEQ ID NO: 238404 - DNA, 25 bp, Artificial
  Probe
tgggcaggagacccacgggggatcg

SEQ ID NO: 238405 - DNA, 25 bp, Artificial
  Probe
gaggggcttccactgtgggcaggag

SEQ ID NO: 238406 - DNA, 25 bp, Artificial
  Probe
tggactgtgccgcggggccaggccc

SEQ ID NO: 238407 - DNA, 25 bp, Artificial
  Probe
gagacccacgggggatcgcatcctt

SEQ ID NO: 238408 - DNA, 25 bp, Artificial
  Probe
gacccacgggggatcgcatccttcc

SEQ ID NO: 238409 - DNA, 25 bp, Artificial
  Probe
ttcttcgatgtcaaaggccatgcag

SEQ ID NO: 238410 - DNA, 25 bp, Artificial
  Probe
tgctgctctaaagaatatatacatg

SEQ ID NO: 238411 - DNA, 25 bp, Artificial
  Probe
gcaatagccacagttttaccccaag

SEQ ID NO: 238412 - DNA, 25 bp, Artificial
  Probe
cggcaggcagctaagaatggagcaa

SEQ ID NO: 238413 - DNA, 25 bp, Artificial
  Probe
aggaaggctccacacttgcccttaa

SEQ ID NO: 238414 - DNA, 25 bp, Artificial
  Probe
ttcttcagcttcgagccggtgccgt

SEQ ID NO: 238415 - DNA, 25 bp, Artificial
  Probe
ggaatttccccagctgtacaacaac

SEQ ID NO: 238416 - DNA, 25 bp, Artificial
  Probe
tctacctcctgctgcggttcttcag

SEQ ID NO: 238417 - DNA, 25 bp, Artificial
  Probe
tctgctcattcttgccggaagtcat

SEQ ID NO: 238418 - DNA, 25 bp, Artificial
  Probe
acagagtgcctctgccataacctca

SEQ ID NO: 238419 - DNA, 25 bp, Artificial
  Probe
tctgttagcacaagccctgggaatc

SEQ ID NO: 238420 - DNA, 25 bp, Artificial
  Probe
tcgctacagcgtcttttggaagcag

SEQ ID NO: 238421 - DNA, 25 bp, Artificial
  Probe
ggaaacttaatcctgcagcaaatca

SEQ ID NO: 238422 - DNA, 25 bp, Artificial
  Probe
agcaacaggtgtggagctggacatc

SEQ ID NO: 238423 - DNA, 25 bp, Artificial
  Probe
aaattctggatctgcgaaaaggcag

SEQ ID NO: 238424 - DNA, 25 bp, Artificial
  Probe
actcacaggccttggagcctgagcc

SEQ ID NO: 238425 - DNA, 25 bp, Artificial
  Probe
cgataacacagtagataggacaaca

SEQ ID NO: 238426 - DNA, 25 bp, Artificial
  Probe
cgattatgtgatctgacatttgaac

SEQ ID NO: 238427 - DNA, 25 bp, Artificial
  Probe
gggaagcctcgctacagcgtctttt

SEQ ID NO: 238428 - DNA, 25 bp, Artificial
  Probe
ctgtgtgctcactggcagcctctac

SEQ ID NO: 238429 - DNA, 25 bp, Artificial
  Probe
gaaggctccacacttgcccttaaaa

SEQ ID NO: 238430 - DNA, 25 bp, Artificial
  Probe
caccctgagggaagcagttacagag

SEQ ID NO: 238431 - DNA, 25 bp, Artificial
  Probe
cggccatccggcaggcagctaagaa

SEQ ID NO: 238432 - DNA, 25 bp, Artificial
  Probe
ccccaagcagaaaccaggcatggcg

SEQ ID NO: 238433 - DNA, 25 bp, Artificial
  Probe
tggtctgctcattcttgccggaagt

SEQ ID NO: 238434 - DNA, 25 bp, Artificial
  Probe
tgcagatatggcttctgctgctcta

SEQ ID NO: 238435 - DNA, 25 bp, Artificial
  Probe
atgctccaaggaaggctccacactt

SEQ ID NO: 238436 - DNA, 25 bp, Artificial
  Probe
actggagacgggaagcctcgctaca

SEQ ID NO: 238437 - DNA, 25 bp, Artificial
  Probe
ctctgttagcacaagccctgggaat

SEQ ID NO: 238438 - DNA, 25 bp, Artificial
  Probe
agataggacaacagacgggtctggc

SEQ ID NO: 238439 - DNA, 25 bp, Artificial
  Probe
ccttggagcctgagccacactggag

SEQ ID NO: 238440 - DNA, 25 bp, Artificial
  Probe
agccctgactcacaggccttggagc

SEQ ID NO: 238441 - DNA, 25 bp, Artificial
  Probe
tgcaggtgctcaagccccgtgaccg

SEQ ID NO: 238442 - DNA, 25 bp, Artificial
  Probe
acagccctgactcacaggccttgga

SEQ ID NO: 238443 - DNA, 25 bp, Artificial
  Probe
gtggtgacgcgcagccccttcaacg

SEQ ID NO: 238444 - DNA, 25 bp, Artificial
  Probe
caacaggtgtggagctggacatcga

SEQ ID NO: 238445 - DNA, 25 bp, Artificial
  Probe
tatatacatggaatttccccagctg

SEQ ID NO: 238446 - DNA, 25 bp, Artificial
  Probe
ccttcaacgcctgtgtgctcactgg

SEQ ID NO: 238447 - DNA, 25 bp, Artificial
  Probe
acttgcccttaaaattctggatctg

SEQ ID NO: 238448 - DNA, 25 bp, Artificial
  Probe
aagcagttacagagtgcctctgcca

SEQ ID NO: 238449 - DNA, 25 bp, Artificial
  Probe
ccaccctgagggaagcagttacaga

SEQ ID NO: 238450 - DNA, 25 bp, Artificial
  Probe
taccccaagcagaaaccaggcatgg

SEQ ID NO: 238451 - DNA, 25 bp, Artificial
  Probe
ttaggaaacttaatcctgcagcaaa

SEQ ID NO: 238452 - DNA, 25 bp, Artificial
  Probe
caccttgggtccagctacatcactg

SEQ ID NO: 238453 - DNA, 25 bp, Artificial
  Probe
gcctgagccacactggagacgggaa

SEQ ID NO: 238454 - DNA, 25 bp, Artificial
  Probe
catgctccaaggaaggctccacact

SEQ ID NO: 238455 - DNA, 25 bp, Artificial
  Probe
gggaaggcttaccatcctggttgct

SEQ ID NO: 238456 - DNA, 25 bp, Artificial
  Probe
gtcaaggctgctacccgctggatgg

SEQ ID NO: 238457 - DNA, 25 bp, Artificial
  Probe
agtgcctggcgcattcaagagctct

SEQ ID NO: 238458 - DNA, 25 bp, Artificial
  Probe
caaggcttgtagtgcctggcgcatt

SEQ ID NO: 238459 - DNA, 25 bp, Artificial
  Probe
gcattcaagagctctcagccaccgt

SEQ ID NO: 238460 - DNA, 25 bp, Artificial
  Probe
gcttgtagtgcctggcgcattcaag

SEQ ID NO: 238461 - DNA, 25 bp, Artificial
  Probe
gctgctacccgctggatgggcatat

SEQ ID NO: 238462 - DNA, 25 bp, Artificial
  Probe
catcctggaccgaatcctaagggct

SEQ ID NO: 238463 - DNA, 25 bp, Artificial
  Probe
gaaatttgccccacggtgctcagtg

SEQ ID NO: 238464 - DNA, 25 bp, Artificial
  Probe
cattgaagatttccacaggaaattt

SEQ ID NO: 238465 - DNA, 25 bp, Artificial
  Probe
ctacccttagtgtttgcaccaaatg

SEQ ID NO: 238466 - DNA, 25 bp, Artificial
  Probe
tggatgggcatatcttgtgcaaggc

SEQ ID NO: 238467 - DNA, 25 bp, Artificial
  Probe
gtggatgccaccagccagatccact

SEQ ID NO: 238468 - DNA, 25 bp, Artificial
  Probe
tgccccacggtgctcagtgtgtggt

SEQ ID NO: 238469 - DNA, 25 bp, Artificial
  Probe
ccatcatgccagagccaggtcagga

SEQ ID NO: 238470 - DNA, 25 bp, Artificial
  Probe
tttgccccacggtgctcagtgtgtg

SEQ ID NO: 238471 - DNA, 25 bp, Artificial
  Probe
ttccacattggctgctacaagtgtg

SEQ ID NO: 238472 - DNA, 25 bp, Artificial
  Probe
attcaagagctctcagccaccgtca

SEQ ID NO: 238473 - DNA, 25 bp, Artificial
  Probe
gttgctctggatagaagtttccaca

SEQ ID NO: 238474 - DNA, 25 bp, Artificial
  Probe
gacatctacccttagtgtttgcacc

SEQ ID NO: 238475 - DNA, 25 bp, Artificial
  Probe
ctacccgctggatgggcatatcttg

SEQ ID NO: 238476 - DNA, 25 bp, Artificial
  Probe
attgttgctctggatagaagtttcc

SEQ ID NO: 238477 - DNA, 25 bp, Artificial
  Probe
tgctgtcctctgagggagagtgtca

SEQ ID NO: 238478 - DNA, 25 bp, Artificial
  Probe
cattggctgctacaagtgtgaggag

SEQ ID NO: 238479 - DNA, 25 bp, Artificial
  Probe
accgtggcctcgatggcatcccttt

SEQ ID NO: 238480 - DNA, 25 bp, Artificial
  Probe
gaccgaatcctaagggctatgggga

SEQ ID NO: 238481 - DNA, 25 bp, Artificial
  Probe
agaaggacctgctgggatctcagtc

SEQ ID NO: 238482 - DNA, 25 bp, Artificial
  Probe
atccctttcacagtggatgccacca

SEQ ID NO: 238483 - DNA, 25 bp, Artificial
  Probe
tgacatctacccttagtgtttgcac

SEQ ID NO: 238484 - DNA, 25 bp, Artificial
  Probe
caccagccagatccactgcattgaa

SEQ ID NO: 238485 - DNA, 25 bp, Artificial
  Probe
gatagaagtttccacattggctgct

SEQ ID NO: 238486 - DNA, 25 bp, Artificial
  Probe
cacctgtgtggtgtgccaccgtggc

SEQ ID NO: 238487 - DNA, 25 bp, Artificial
  Probe
ggcctcgatggcatccctttcacag

SEQ ID NO: 238488 - DNA, 25 bp, Artificial
  Probe
gagtgtcaaggctgctacccgctgg

SEQ ID NO: 238489 - DNA, 25 bp, Artificial
  Probe
gatggcatccctttcacagtggatg

SEQ ID NO: 238490 - DNA, 25 bp, Artificial
  Probe
agtgtgggctgctgctgtcctctga

SEQ ID NO: 238491 - DNA, 25 bp, Artificial
  Probe
ggccatcatgccagagccaggtcag

SEQ ID NO: 238492 - DNA, 25 bp, Artificial
  Probe
gtcaccaccgactgttgactgctct

SEQ ID NO: 238493 - DNA, 25 bp, Artificial
  Probe
ccacaggaaatttgccccacggtgc

SEQ ID NO: 238494 - DNA, 25 bp, Artificial
  Probe
atcctggttgcttcacctgtgtggt

SEQ ID NO: 238495 - DNA, 25 bp, Artificial
  Probe
acctgtgtggtgtgccaccgtggcc

SEQ ID NO: 238496 - DNA, 25 bp, Artificial
  Probe
agatttccacaggaaatttgcccca

SEQ ID NO: 238497 - DNA, 25 bp, Artificial
  Probe
cgatggcatccctttcacagtggat

SEQ ID NO: 238498 - DNA, 25 bp, Artificial
  Probe
tgaacccatcctggaccgaatccta

SEQ ID NO: 238499 - DNA, 25 bp, Artificial
  Probe
ctgctgctgtcctctgagggagagt

SEQ ID NO: 238500 - DNA, 25 bp, Artificial
  Probe
tttcacagtggatgccaccagccag

SEQ ID NO: 238501 - DNA, 25 bp, Artificial
  Probe
cagctaagatgactgccacctgttg

SEQ ID NO: 238502 - DNA, 25 bp, Artificial
  Probe
gccacctgttgtggcaggcccgatt

SEQ ID NO: 238503 - DNA, 25 bp, Artificial
  Probe
cccttactgtaccccgatataatct

SEQ ID NO: 238504 - DNA, 25 bp, Artificial
  Probe
cacctgttgtggcaggcccgatttg

SEQ ID NO: 238505 - DNA, 25 bp, Artificial
  Probe
atttgtcttgttctccccttactgt

SEQ ID NO: 238506 - DNA, 25 bp, Artificial
  Probe
agctaagatgactgccacctgttgt

SEQ ID NO: 238507 - DNA, 25 bp, Artificial
  Probe
taagatgactgccacctgttgtggc

SEQ ID NO: 238508 - DNA, 25 bp, Artificial
  Probe
ctgtaccccgatataatctctgttg

SEQ ID NO: 238509 - DNA, 25 bp, Artificial
  Probe
cgatttgtcttgttctccccttact

SEQ ID NO: 238510 - DNA, 25 bp, Artificial
  Probe
tggcaggcccgatttgtcttgttct

SEQ ID NO: 238511 - DNA, 25 bp, Artificial
  Probe
aagatgactgccacctgttgtggca

SEQ ID NO: 238512 - DNA, 25 bp, Artificial
  Probe
gactgccacctgttgtggcaggccc

SEQ ID NO: 238513 - DNA, 25 bp, Artificial
  Probe
ttgtggcaggcccgatttgtcttgt

SEQ ID NO: 238514 - DNA, 25 bp, Artificial
  Probe
gttgtggcaggcccgatttgtcttg

SEQ ID NO: 238515 - DNA, 25 bp, Artificial
  Probe
gtaccccgatataatctctgttgat

SEQ ID NO: 238516 - DNA, 25 bp, Artificial
  Probe
ggcccgatttgtcttgttctcccct

SEQ ID NO: 238517 - DNA, 25 bp, Artificial
  Probe
actgtaccccgatataatctctgtt

SEQ ID NO: 238518 - DNA, 25 bp, Artificial
  Probe
tgtggcaggcccgatttgtcttgtt

SEQ ID NO: 238519 - DNA, 25 bp, Artificial
  Probe
ggcaggcccgatttgtcttgttctc

SEQ ID NO: 238520 - DNA, 25 bp, Artificial
  Probe
tgccacctgttgtggcaggcccgat

SEQ ID NO: 238521 - DNA, 25 bp, Artificial
  Probe
ttactgtaccccgatataatctctg

SEQ ID NO: 238522 - DNA, 25 bp, Artificial
  Probe
acctgttgtggcaggcccgatttgt

SEQ ID NO: 238523 - DNA, 25 bp, Artificial
  Probe
ctaagatgactgccacctgttgtgg

SEQ ID NO: 238524 - DNA, 25 bp, Artificial
  Probe
tactgtaccccgatataatctctgt

SEQ ID NO: 238525 - DNA, 25 bp, Artificial
  Probe
ccttactgtaccccgatataatctc

SEQ ID NO: 238526 - DNA, 25 bp, Artificial
  Probe
ccacctgttgtggcaggcccgattt

SEQ ID NO: 238527 - DNA, 25 bp, Artificial
  Probe
ttctccccttactgtaccccgatat

SEQ ID NO: 238528 - DNA, 25 bp, Artificial
  Probe
caggcccgatttgtcttgttctccc

SEQ ID NO: 238529 - DNA, 25 bp, Artificial
  Probe
agatgactgccacctgttgtggcag

SEQ ID NO: 238530 - DNA, 25 bp, Artificial
  Probe
actgccacctgttgtggcaggcccg

SEQ ID NO: 238531 - DNA, 25 bp, Artificial
  Probe
acagctaagatgactgccacctgtt

SEQ ID NO: 238532 - DNA, 25 bp, Artificial
  Probe
tctccccttactgtaccccgatata

SEQ ID NO: 238533 - DNA, 25 bp, Artificial
  Probe
tgttgtggcaggcccgatttgtctt

SEQ ID NO: 238534 - DNA, 25 bp, Artificial
  Probe
gatgactgccacctgttgtggcagg

SEQ ID NO: 238535 - DNA, 25 bp, Artificial
  Probe
cctgttgtggcaggcccgatttgtc

SEQ ID NO: 238536 - DNA, 25 bp, Artificial
  Probe
atgactgccacctgttgtggcaggc

SEQ ID NO: 238537 - DNA, 25 bp, Artificial
  Probe
ctgttgtggcaggcccgatttgtct

SEQ ID NO: 238538 - DNA, 25 bp, Artificial
  Probe
gatttgtcttgttctccccttactg

SEQ ID NO: 238539 - DNA, 25 bp, Artificial
  Probe
gcaggcccgatttgtcttgttctcc

SEQ ID NO: 238540 - DNA, 25 bp, Artificial
  Probe
gtggcaggcccgatttgtcttgttc

SEQ ID NO: 238541 - DNA, 25 bp, Artificial
  Probe
tgtcttgttctccccttactgtacc

SEQ ID NO: 238542 - DNA, 25 bp, Artificial
  Probe
tgactgccacctgttgtggcaggcc

SEQ ID NO: 238543 - DNA, 25 bp, Artificial
  Probe
gcccgatttgtcttgttctcccctt

SEQ ID NO: 238544 - DNA, 25 bp, Artificial
  Probe
ctgccacctgttgtggcaggcccga

SEQ ID NO: 238545 - DNA, 25 bp, Artificial
  Probe
tccccttactgtaccccgatataat

SEQ ID NO: 238546 - DNA, 25 bp, Artificial
  Probe
tgtaccccgatataatctctgttga

SEQ ID NO: 238547 - DNA, 25 bp, Artificial
  Probe
ttgctttgattccatttgcataatg

SEQ ID NO: 238548 - DNA, 25 bp, Artificial
  Probe
aattgcctttttatgtggtcaccca

SEQ ID NO: 238549 - DNA, 25 bp, Artificial
  Probe
tcctggacagtcagaattgctttga

SEQ ID NO: 238550 - DNA, 25 bp, Artificial
  Probe
acaggaagctgacagcacagaacag

SEQ ID NO: 238551 - DNA, 25 bp, Artificial
  Probe
gacatcccataatgtccccttatgg

SEQ ID NO: 238552 - DNA, 25 bp, Artificial
  Probe
ataatgtccccttatggaatacaga

SEQ ID NO: 238553 - DNA, 25 bp, Artificial
  Probe
ggtgcagcttcaggaagacatccca

SEQ ID NO: 238554 - DNA, 25 bp, Artificial
  Probe
ttgcctttttatgtggtcacccaca

SEQ ID NO: 238555 - DNA, 25 bp, Artificial
  Probe
tggtgcagcttcaggaagacatccc

SEQ ID NO: 238556 - DNA, 25 bp, Artificial
  Probe
tgttactgagctacattttttacag

SEQ ID NO: 238557 - DNA, 25 bp, Artificial
  Probe
gaattgctttgattccatttgcata

SEQ ID NO: 238558 - DNA, 25 bp, Artificial
  Probe
agctcctggacagtcagaattgctt

SEQ ID NO: 238559 - DNA, 25 bp, Artificial
  Probe
agcttcaggaagacatcccataatg

SEQ ID NO: 238560 - DNA, 25 bp, Artificial
  Probe
aggaagctgacagcacagaacagat

SEQ ID NO: 238561 - DNA, 25 bp, Artificial
  Probe
attgcctttttatgtggtcacccac

SEQ ID NO: 238562 - DNA, 25 bp, Artificial
  Probe
agtcagaattgctttgattccattt

SEQ ID NO: 238563 - DNA, 25 bp, Artificial
  Probe
ctaaaattgcctttttatgtggtca

SEQ ID NO: 238564 - DNA, 25 bp, Artificial
  Probe
gcctttttatgtggtcacccacaca

SEQ ID NO: 238565 - DNA, 25 bp, Artificial
  Probe
acagtcagaattgctttgattccat

SEQ ID NO: 238566 - DNA, 25 bp, Artificial
  Probe
tggcttggtgcagcttcaggaagac

SEQ ID NO: 238567 - DNA, 25 bp, Artificial
  Probe
cagtcagaattgctttgattccatt

SEQ ID NO: 238568 - DNA, 25 bp, Artificial
  Probe
caacagaggacagtggcttggtgca

SEQ ID NO: 238569 - DNA, 25 bp, Artificial
  Probe
tttttatgtggtcacccacacagca

SEQ ID NO: 238570 - DNA, 25 bp, Artificial
  Probe
acagtggcttggtgcagcttcagga

SEQ ID NO: 238571 - DNA, 25 bp, Artificial
  Probe
gcagcttcaggaagacatcccataa

SEQ ID NO: 238572 - DNA, 25 bp, Artificial
  Probe
tttgattccatttgcataatggcgg

SEQ ID NO: 238573 - DNA, 25 bp, Artificial
  Probe
ttggtgcagcttcaggaagacatcc

SEQ ID NO: 238574 - DNA, 25 bp, Artificial
  Probe
gttactgagctacattttttacaga

SEQ ID NO: 238575 - DNA, 25 bp, Artificial
  Probe
gatagctcctggacagtcagaattg

SEQ ID NO: 238576 - DNA, 25 bp, Artificial
  Probe
gctcctggacagtcagaattgcttt

SEQ ID NO: 238577 - DNA, 25 bp, Artificial
  Probe
taatgtccccttatggaatacagag

SEQ ID NO: 238578 - DNA, 25 bp, Artificial
  Probe
gaagctgacagcacagaacagatgc

SEQ ID NO: 238579 - DNA, 25 bp, Artificial
  Probe
ggaagacatcccataatgtcccctt

SEQ ID NO: 238580 - DNA, 25 bp, Artificial
  Probe
gagatagctcctggacagtcagaat

SEQ ID NO: 238581 - DNA, 25 bp, Artificial
  Probe
ttgattccatttgcataatggcgga

SEQ ID NO: 238582 - DNA, 25 bp, Artificial
  Probe
ttcaggaagacatcccataatgtcc

SEQ ID NO: 238583 - DNA, 25 bp, Artificial
  Probe
gcttggtgcagcttcaggaagacat

SEQ ID NO: 238584 - DNA, 25 bp, Artificial
  Probe
caggaagctgacagcacagaacaga

SEQ ID NO: 238585 - DNA, 25 bp, Artificial
  Probe
cataatgtccccttatggaatacag

SEQ ID NO: 238586 - DNA, 25 bp, Artificial
  Probe
aggacagtggcttggtgcagcttca

SEQ ID NO: 238587 - DNA, 25 bp, Artificial
  Probe
aaagtgagatagctcctggacagtc

SEQ ID NO: 238588 - DNA, 25 bp, Artificial
  Probe
gtccccttatggaatacagagaatc

SEQ ID NO: 238589 - DNA, 25 bp, Artificial
  Probe
cagtggcttggtgcagcttcaggaa

SEQ ID NO: 238590 - DNA, 25 bp, Artificial
  Probe
cctttttatgtggtcacccacacag

SEQ ID NO: 238591 - DNA, 25 bp, Artificial
  Probe
cttcaggaagacatcccataatgtc

SEQ ID NO: 238592 - DNA, 25 bp, Artificial
  Probe
aagtgagatagctcctggacagtca

SEQ ID NO: 238593 - DNA, 25 bp, Artificial
  Probe
caaggctgtttgtgtgaatggcaca

SEQ ID NO: 238594 - DNA, 25 bp, Artificial
  Probe
tggacagagccacagcctgcccaag

SEQ ID NO: 238595 - DNA, 25 bp, Artificial
  Probe
acccaggacttcacagtgcctggac

SEQ ID NO: 238596 - DNA, 25 bp, Artificial
  Probe
cctgcacgcaaggtgtgctccagca

SEQ ID NO: 238597 - DNA, 25 bp, Artificial
  Probe
tgtgctccagcaacaagatccgcct

SEQ ID NO: 238598 - DNA, 25 bp, Artificial
  Probe
atacccaggacttcacagtgcctgg

SEQ ID NO: 238599 - DNA, 25 bp, Artificial
  Probe
ccccagctcagcagcaaggtgaagc

SEQ ID NO: 238600 - DNA, 25 bp, Artificial
  Probe
ctcagcagcaaggtgaagccagaag

SEQ ID NO: 238601 - DNA, 25 bp, Artificial
  Probe
agaaggccggcctggcgctgccaac

SEQ ID NO: 238602 - DNA, 25 bp, Artificial
  Probe
ccaaggctgtttgtgtgaatggcac

SEQ ID NO: 238603 - DNA, 25 bp, Artificial
  Probe
gatctatacccaggacttcacagtg

SEQ ID NO: 238604 - DNA, 25 bp, Artificial
  Probe
cccaggacttcacagtgcctggaca

SEQ ID NO: 238605 - DNA, 25 bp, Artificial
  Probe
gccccagctcagcagcaaggtgaag

SEQ ID NO: 238606 - DNA, 25 bp, Artificial
  Probe
tgcacgcaaggtgtgctccagcaac

SEQ ID NO: 238607 - DNA, 25 bp, Artificial
  Probe
agccccagctcagcagcaaggtgaa

SEQ ID NO: 238608 - DNA, 25 bp, Artificial
  Probe
atggacagagccacagcctgcccaa

SEQ ID NO: 238609 - DNA, 25 bp, Artificial
  Probe
acgaggatctatacccaggacttca

SEQ ID NO: 238610 - DNA, 25 bp, Artificial
  Probe
cccagctcagcagcaaggtgaagcc

SEQ ID NO: 238611 - DNA, 25 bp, Artificial
  Probe
cctgcccaaggctgtttgtgtgaat

SEQ ID NO: 238612 - DNA, 25 bp, Artificial
  Probe
ggatctatacccaggacttcacagt

SEQ ID NO: 238613 - DNA, 25 bp, Artificial
  Probe
ctgtttgtgtgaatggcacagagcc

SEQ ID NO: 238614 - DNA, 25 bp, Artificial
  Probe
aggacttcacagtgcctggacaggt

SEQ ID NO: 238615 - DNA, 25 bp, Artificial
  Probe
cagcagcaaggtgaagccagaaggc

SEQ ID NO: 238616 - DNA, 25 bp, Artificial
  Probe
cagctcagcagcaaggtgaagccag

SEQ ID NO: 238617 - DNA, 25 bp, Artificial
  Probe
tctatacccaggacttcacagtgcc

SEQ ID NO: 238618 - DNA, 25 bp, Artificial
  Probe
gcacgcaaggtgtgctccagcaaca

SEQ ID NO: 238619 - DNA, 25 bp, Artificial
  Probe
tgcccaaggctgtttgtgtgaatgg

SEQ ID NO: 238620 - DNA, 25 bp, Artificial
  Probe
ggtgtgctccagcaacaagatccgc

SEQ ID NO: 238621 - DNA, 25 bp, Artificial
  Probe
acgcaaggtgtgctccagcaacaag

SEQ ID NO: 238622 - DNA, 25 bp, Artificial
  Probe
caaggtgtgctccagcaacaagatc

SEQ ID NO: 238623 - DNA, 25 bp, Artificial
  Probe
tgaatggcacagagccccagctcag

SEQ ID NO: 238624 - DNA, 25 bp, Artificial
  Probe
caggacttcacagtgcctggacagg

SEQ ID NO: 238625 - DNA, 25 bp, Artificial
  Probe
tatacccaggacttcacagtgcctg

SEQ ID NO: 238626 - DNA, 25 bp, Artificial
  Probe
gtgctccagcaacaagatccgcctg

SEQ ID NO: 238627 - DNA, 25 bp, Artificial
  Probe
acagcctgcccaaggctgtttgtgt

SEQ ID NO: 238628 - DNA, 25 bp, Artificial
  Probe
ctgcacgcaaggtgtgctccagcaa

SEQ ID NO: 238629 - DNA, 25 bp, Artificial
  Probe
aaccctgcacgcaaggtgtgctcca

SEQ ID NO: 238630 - DNA, 25 bp, Artificial
  Probe
aggtgtgctccagcaacaagatccg

SEQ ID NO: 238631 - DNA, 25 bp, Artificial
  Probe
acagagccccagctcagcagcaagg

SEQ ID NO: 238632 - DNA, 25 bp, Artificial
  Probe
ggacagagccacagcctgcccaagg

SEQ ID NO: 238633 - DNA, 25 bp, Artificial
  Probe
accctgcacgcaaggtgtgctccag

SEQ ID NO: 238634 - DNA, 25 bp, Artificial
  Probe
agagccacagcctgcccaaggctgt

SEQ ID NO: 238635 - DNA, 25 bp, Artificial
  Probe
gtgaatggcacagagccccagctca

SEQ ID NO: 238636 - DNA, 25 bp, Artificial
  Probe
cgcaaggtgtgctccagcaacaaga

SEQ ID NO: 238637 - DNA, 25 bp, Artificial
  Probe
tgtttgtgtgaatggcacagagccc

SEQ ID NO: 238638 - DNA, 25 bp, Artificial
  Probe
gctcagcagcaaggtgaagccagaa

SEQ ID NO: 238639 - DNA, 25 bp, Artificial
  Probe
agctgcgtgacttttaccggccctt

SEQ ID NO: 238640 - DNA, 25 bp, Artificial
  Probe
cgccgcgtgcaggatttcctgggcc

SEQ ID NO: 238641 - DNA, 25 bp, Artificial
  Probe
cggcagctgcgtgacttttaccggc

SEQ ID NO: 238642 - DNA, 25 bp, Artificial
  Probe
gctcttcgtgagcggggagcgcctg

SEQ ID NO: 238643 - DNA, 25 bp, Artificial
  Probe
cactgcctgggcaagactaagggcc

SEQ ID NO: 238644 - DNA, 25 bp, Artificial
  Probe
ttcctgggcctcaagcgcatcatca

SEQ ID NO: 238645 - DNA, 25 bp, Artificial
  Probe
tcaaccagaccaagggcttcccgtg

SEQ ID NO: 238646 - DNA, 25 bp, Artificial
  Probe
cgtgcaggatttcctgggcctcaag

SEQ ID NO: 238647 - DNA, 25 bp, Artificial
  Probe
cccgtgcctcaagaaggcggagggc

SEQ ID NO: 238648 - DNA, 25 bp, Artificial
  Probe
actgcctgggcaagactaagggccg

SEQ ID NO: 238649 - DNA, 25 bp, Artificial
  Probe
gcagctgcgtgacttttaccggccc

SEQ ID NO: 238650 - DNA, 25 bp, Artificial
  Probe
tgcaggatttcctgggcctcaagcg

SEQ ID NO: 238651 - DNA, 25 bp, Artificial
  Probe
agccgcactgcctgggcaagactaa

SEQ ID NO: 238652 - DNA, 25 bp, Artificial
  Probe
gtgctgcggcagctgcgtgactttt

SEQ ID NO: 238653 - DNA, 25 bp, Artificial
  Probe
ttcaaccagaccaagggcttcccgt

SEQ ID NO: 238654 - DNA, 25 bp, Artificial
  Probe
gctgcgtgacttttaccggcccttc

SEQ ID NO: 238655 - DNA, 25 bp, Artificial
  Probe
ctgcgccgcgtgcaggatttcctgg

SEQ ID NO: 238656 - DNA, 25 bp, Artificial
  Probe
gactaagggccgcgcgcaccccacc

SEQ ID NO: 238657 - DNA, 25 bp, Artificial
  Probe
gcgtgcaggatttcctgggcctcaa

SEQ ID NO: 238658 - DNA, 25 bp, Artificial
  Probe
gctgcgccgcgtgcaggatttcctg

SEQ ID NO: 238659 - DNA, 25 bp, Artificial
  Probe
ctgcctgggcaagactaagggccgc

SEQ ID NO: 238660 - DNA, 25 bp, Artificial
  Probe
ccccaccatcgcgcgcgaggtgctg

SEQ ID NO: 238661 - DNA, 25 bp, Artificial
  Probe
gcgcctggtcagcgacccggccggg

SEQ ID NO: 238662 - DNA, 25 bp, Artificial
  Probe
attttaccagatgaccggccgcgac

SEQ ID NO: 238663 - DNA, 25 bp, Artificial
  Probe
cagctgcgtgacttttaccggccct

SEQ ID NO: 238664 - DNA, 25 bp, Artificial
  Probe
acttcggctgggatggatagcagaa

SEQ ID NO: 238665 - DNA, 25 bp, Artificial
  Probe
tgctgcggcagctgcgtgactttta

SEQ ID NO: 238666 - DNA, 25 bp, Artificial
  Probe
tcaagcgcatcatcaccgacaagca

SEQ ID NO: 238667 - DNA, 25 bp, Artificial
  Probe
agctgcgccgcgtgcaggatttcct

SEQ ID NO: 238668 - DNA, 25 bp, Artificial
  Probe
aattttaccagatgaccggccgcga

SEQ ID NO: 238669 - DNA, 25 bp, Artificial
  Probe
ttaccagatgaccggccgcgacttc

SEQ ID NO: 238670 - DNA, 25 bp, Artificial
  Probe
tgcggcagctgcgtgacttttaccg

SEQ ID NO: 238671 - DNA, 25 bp, Artificial
  Probe
cttcggctgggatggatagcagaaa

SEQ ID NO: 238672 - DNA, 25 bp, Artificial
  Probe
aagcgcatcatcaccgacaagcact

SEQ ID NO: 238673 - DNA, 25 bp, Artificial
  Probe
ggcaagccgcactgcctgggcaaga

SEQ ID NO: 238674 - DNA, 25 bp, Artificial
  Probe
ggtgctgcggcagctgcgtgacttt

SEQ ID NO: 238675 - DNA, 25 bp, Artificial
  Probe
gcggcagctgcgtgacttttaccgg

SEQ ID NO: 238676 - DNA, 25 bp, Artificial
  Probe
gcggcaagccgcactgcctgggcaa

SEQ ID NO: 238677 - DNA, 25 bp, Artificial
  Probe
tttcctgggcctcaagcgcatcatc

SEQ ID NO: 238678 - DNA, 25 bp, Artificial
  Probe
atttcctgggcctcaagcgcatcat

SEQ ID NO: 238679 - DNA, 25 bp, Artificial
  Probe
cggcaagccgcactgcctgggcaag

SEQ ID NO: 238680 - DNA, 25 bp, Artificial
  Probe
aaattttaccagatgaccggccgcg

SEQ ID NO: 238681 - DNA, 25 bp, Artificial
  Probe
caaattttaccagatgaccggccgc

SEQ ID NO: 238682 - DNA, 25 bp, Artificial
  Probe
ccgcgtgcaggatttcctgggcctc

SEQ ID NO: 238683 - DNA, 25 bp, Artificial
  Probe
ggcagctgcgtgacttttaccggcc

SEQ ID NO: 238684 - DNA, 25 bp, Artificial
  Probe
cgcgtgcaggatttcctgggcctca

SEQ ID NO: 238685 - DNA, 25 bp, Artificial
  Probe
gactagccacactcactctgaagaa

SEQ ID NO: 238686 - DNA, 25 bp, Artificial
  Probe
ctctggggggttgaacaggtctgtc

SEQ ID NO: 238687 - DNA, 25 bp, Artificial
  Probe
ggttgaacaggtctgtcttcacgaa

SEQ ID NO: 238688 - DNA, 25 bp, Artificial
  Probe
gccctcagaaaggaccttgtgggac

SEQ ID NO: 238689 - DNA, 25 bp, Artificial
  Probe
cggatctgcctgacccctgacaaga

SEQ ID NO: 238690 - DNA, 25 bp, Artificial
  Probe
cgccctcagaaaggaccttgtggga

SEQ ID NO: 238691 - DNA, 25 bp, Artificial
  Probe
gtctgtcttcacgaaggtcctcgcc

SEQ ID NO: 238692 - DNA, 25 bp, Artificial
  Probe
catagtggatacctcggatctgcct

SEQ ID NO: 238693 - DNA, 25 bp, Artificial
  Probe
agtcatagtggatacctcggatctg

SEQ ID NO: 238694 - DNA, 25 bp, Artificial
  Probe
ttgctgtcagagaaggttttcattt

SEQ ID NO: 238695 - DNA, 25 bp, Artificial
  Probe
tggatacctcggatctgcctgaccc

SEQ ID NO: 238696 - DNA, 25 bp, Artificial
  Probe
tcatagtggatacctcggatctgcc

SEQ ID NO: 238697 - DNA, 25 bp, Artificial
  Probe
agccggaggaggaggaggaggaggt

SEQ ID NO: 238698 - DNA, 25 bp, Artificial
  Probe
aggaggaggtcgagtggctggcagg

SEQ ID NO: 238699 - DNA, 25 bp, Artificial
  Probe
tcggatctgcctgacccctgacaag

SEQ ID NO: 238700 - DNA, 25 bp, Artificial
  Probe
gttgaacaggtctgtcttcacgaag

SEQ ID NO: 238701 - DNA, 25 bp, Artificial
  Probe
cagaccccaacggattttataatag

SEQ ID NO: 238702 - DNA, 25 bp, Artificial
  Probe
ggtctgtcttcacgaaggtcctcgc

SEQ ID NO: 238703 - DNA, 25 bp, Artificial
  Probe
atagtggatacctcggatctgcctg

SEQ ID NO: 238704 - DNA, 25 bp, Artificial
  Probe
tagactagccacactcactctgaag

SEQ ID NO: 238705 - DNA, 25 bp, Artificial
  Probe
tctgtcttcacgaaggtcctcgccc

SEQ ID NO: 238706 - DNA, 25 bp, Artificial
  Probe
caggtctgtcttcacgaaggtcctc

SEQ ID NO: 238707 - DNA, 25 bp, Artificial
  Probe
aggtctgtcttcacgaaggtcctcg

SEQ ID NO: 238708 - DNA, 25 bp, Artificial
  Probe
atgtgaaaacagaccccaacggatt

SEQ ID NO: 238709 - DNA, 25 bp, Artificial
  Probe
gaaacatgatttttcttcccctcgt

SEQ ID NO: 238710 - DNA, 25 bp, Artificial
  Probe
tcgccctcagaaaggaccttgtggg

SEQ ID NO: 238711 - DNA, 25 bp, Artificial
  Probe
gtcatagtggatacctcggatctgc

SEQ ID NO: 238712 - DNA, 25 bp, Artificial
  Probe
accttgtgggacagaggaagcagcc

SEQ ID NO: 238713 - DNA, 25 bp, Artificial
  Probe
acatgtgaaaacagaccccaacgga

SEQ ID NO: 238714 - DNA, 25 bp, Artificial
  Probe
ctcgccctcagaaaggaccttgtgg

SEQ ID NO: 238715 - DNA, 25 bp, Artificial
  Probe
gacccctgacaagaaaccagggagg

SEQ ID NO: 238716 - DNA, 25 bp, Artificial
  Probe
aagtcatagtggatacctcggatct

SEQ ID NO: 238717 - DNA, 25 bp, Artificial
  Probe
cctcagaaaggaccttgtgggacag

SEQ ID NO: 238718 - DNA, 25 bp, Artificial
  Probe
tgacccctgacaagaaaccagggag

SEQ ID NO: 238719 - DNA, 25 bp, Artificial
  Probe
ccatcaacaagataaatattgctgt

SEQ ID NO: 238720 - DNA, 25 bp, Artificial
  Probe
ttgaacaggtctgtcttcacgaagg

SEQ ID NO: 238721 - DNA, 25 bp, Artificial
  Probe
aacaggtctgtcttcacgaaggtcc

SEQ ID NO: 238722 - DNA, 25 bp, Artificial
  Probe
ttttttaaagtcatagtggatacct

SEQ ID NO: 238723 - DNA, 25 bp, Artificial
  Probe
ccctcagaaaggaccttgtgggaca

SEQ ID NO: 238724 - DNA, 25 bp, Artificial
  Probe
catgtgaaaacagaccccaacggat

SEQ ID NO: 238725 - DNA, 25 bp, Artificial
  Probe
tgtgaaaacagaccccaacggattt

SEQ ID NO: 238726 - DNA, 25 bp, Artificial
  Probe
tgaacaggtctgtcttcacgaaggt

SEQ ID NO: 238727 - DNA, 25 bp, Artificial
  Probe
gaacaggtctgtcttcacgaaggtc

SEQ ID NO: 238728 - DNA, 25 bp, Artificial
  Probe
acaggtctgtcttcacgaaggtcct

SEQ ID NO: 238729 - DNA, 25 bp, Artificial
  Probe
tttcattttaaaagatctagttaat

SEQ ID NO: 238730 - DNA, 25 bp, Artificial
  Probe
gggttgaacaggtctgtcttcacga

SEQ ID NO: 238731 - DNA, 25 bp, Artificial
  Probe
cttacccagcattctgtacttcggg

SEQ ID NO: 238732 - DNA, 25 bp, Artificial
  Probe
tcttacccagcattctgtacttcgg

SEQ ID NO: 238733 - DNA, 25 bp, Artificial
  Probe
ctagcacctgagccaggtcctcgtg

SEQ ID NO: 238734 - DNA, 25 bp, Artificial
  Probe
tttgcattctgtcagaatacttgtg

SEQ ID NO: 238735 - DNA, 25 bp, Artificial
  Probe
gcattctgtcagaatacttgtgttc

SEQ ID NO: 238736 - DNA, 25 bp, Artificial
  Probe
ggctagcacctgagccaggtcctcg

SEQ ID NO: 238737 - DNA, 25 bp, Artificial
  Probe
ttctgtcagaatacttgtgttcaat

SEQ ID NO: 238738 - DNA, 25 bp, Artificial
  Probe
tccgtctggatggtggtgatctcac

SEQ ID NO: 238739 - DNA, 25 bp, Artificial
  Probe
ttacccagcattctgtacttcgggg

SEQ ID NO: 238740 - DNA, 25 bp, Artificial
  Probe
gtggtgatctcacctccattaacat

SEQ ID NO: 238741 - DNA, 25 bp, Artificial
  Probe
ctttgcattctgtcagaatacttgt

SEQ ID NO: 238742 - DNA, 25 bp, Artificial
  Probe
taaatactgagtactaactgagaat

SEQ ID NO: 238743 - DNA, 25 bp, Artificial
  Probe
gaattttgactttgcattctgtcag

SEQ ID NO: 238744 - DNA, 25 bp, Artificial
  Probe
gtggctagcacctgagccaggtcct

SEQ ID NO: 238745 - DNA, 25 bp, Artificial
  Probe
tttgactttgcattctgtcagaata

SEQ ID NO: 238746 - DNA, 25 bp, Artificial
  Probe
tgtccgtctggatggtggtgatctc

SEQ ID NO: 238747 - DNA, 25 bp, Artificial
  Probe
aagggccaaggtgtatccaacagga

SEQ ID NO: 238748 - DNA, 25 bp, Artificial
  Probe
caccacctttgtttccattcccact

SEQ ID NO: 238749 - DNA, 25 bp, Artificial
  Probe
gactttgcattctgtcagaatactt

SEQ ID NO: 238750 - DNA, 25 bp, Artificial
  Probe
cggtggctagcacctgagccaggtc

SEQ ID NO: 238751 - DNA, 25 bp, Artificial
  Probe
ctcagctgtccgtctggatggtggt

SEQ ID NO: 238752 - DNA, 25 bp, Artificial
  Probe
tggtggtgatctcacctccattaac

SEQ ID NO: 238753 - DNA, 25 bp, Artificial
  Probe
tgttataaaactttttactgagtga

SEQ ID NO: 238754 - DNA, 25 bp, Artificial
  Probe
actttgcattctgtcagaatacttg

SEQ ID NO: 238755 - DNA, 25 bp, Artificial
  Probe
cattctgtcagaatacttgtgttca

SEQ ID NO: 238756 - DNA, 25 bp, Artificial
  Probe
tggctagcacctgagccaggtcctc

SEQ ID NO: 238757 - DNA, 25 bp, Artificial
  Probe
tcccacatcccagggtctcaccctc

SEQ ID NO: 238758 - DNA, 25 bp, Artificial
  Probe
tctgtcagaatacttgtgttcaata

SEQ ID NO: 238759 - DNA, 25 bp, Artificial
  Probe
ccgtctggatggtggtgatctcacc

SEQ ID NO: 238760 - DNA, 25 bp, Artificial
  Probe
agtactaactgagaattttgacttt

SEQ ID NO: 238761 - DNA, 25 bp, Artificial
  Probe
attttgactttgcattctgtcagaa

SEQ ID NO: 238762 - DNA, 25 bp, Artificial
  Probe
agaattttgactttgcattctgtca

SEQ ID NO: 238763 - DNA, 25 bp, Artificial
  Probe
gagtgaaacatcaacaccacctttg

SEQ ID NO: 238764 - DNA, 25 bp, Artificial
  Probe
ttcttacccagcattctgtacttcg

SEQ ID NO: 238765 - DNA, 25 bp, Artificial
  Probe
tgtcagaatacttgtgttcaataaa

SEQ ID NO: 238766 - DNA, 25 bp, Artificial
  Probe
ttgcattctgtcagaatacttgtgt

SEQ ID NO: 238767 - DNA, 25 bp, Artificial
  Probe
tgcattctgtcagaatacttgtgtt

SEQ ID NO: 238768 - DNA, 25 bp, Artificial
  Probe
tgactttgcattctgtcagaatact

SEQ ID NO: 238769 - DNA, 25 bp, Artificial
  Probe
ggtggtgatctcacctccattaaca

SEQ ID NO: 238770 - DNA, 25 bp, Artificial
  Probe
aattttgactttgcattctgtcaga

SEQ ID NO: 238771 - DNA, 25 bp, Artificial
  Probe
ctgtccgtctggatggtggtgatct

SEQ ID NO: 238772 - DNA, 25 bp, Artificial
  Probe
cgtctggatggtggtgatctcacct

SEQ ID NO: 238773 - DNA, 25 bp, Artificial
  Probe
ttgactttgcattctgtcagaatac

SEQ ID NO: 238774 - DNA, 25 bp, Artificial
  Probe
gtccgtctggatggtggtgatctca

SEQ ID NO: 238775 - DNA, 25 bp, Artificial
  Probe
ttttgactttgcattctgtcagaat

SEQ ID NO: 238776 - DNA, 25 bp, Artificial
  Probe
attctgtcagaatacttgtgttcaa

SEQ ID NO: 238777 - DNA, 25 bp, Artificial
  Probe
ccagagactcctgtgggctgagaga

SEQ ID NO: 238778 - DNA, 25 bp, Artificial
  Probe
ccacatttagacaccggaagtgcta

SEQ ID NO: 238779 - DNA, 25 bp, Artificial
  Probe
tgctcacaacggtaccaaagatgta

SEQ ID NO: 238780 - DNA, 25 bp, Artificial
  Probe
tttctccaagaatgggtctgtgggg

SEQ ID NO: 238781 - DNA, 25 bp, Artificial
  Probe
ttgacagctccctgcctggagcagc

SEQ ID NO: 238782 - DNA, 25 bp, Artificial
  Probe
agtggttctcgacagcctcccaggc

SEQ ID NO: 238783 - DNA, 25 bp, Artificial
  Probe
atattaaacttggtgcttctcactg

SEQ ID NO: 238784 - DNA, 25 bp, Artificial
  Probe
ggagtggttctcgacagcctcccag

SEQ ID NO: 238785 - DNA, 25 bp, Artificial
  Probe
tggagtgtctgatccctttctccaa

SEQ ID NO: 238786 - DNA, 25 bp, Artificial
  Probe
atactgctcacaacggtaccaaaga

SEQ ID NO: 238787 - DNA, 25 bp, Artificial
  Probe
cagccaacccagagactcctgtggg

SEQ ID NO: 238788 - DNA, 25 bp, Artificial
  Probe
gtctacagtaccaggaccagctcac

SEQ ID NO: 238789 - DNA, 25 bp, Artificial
  Probe
tttagacaccggaagtgctattttg

SEQ ID NO: 238790 - DNA, 25 bp, Artificial
  Probe
tcgataacccacatttagacaccgg

SEQ ID NO: 238791 - DNA, 25 bp, Artificial
  Probe
ctcccaggcctcctggagtgtctga

SEQ ID NO: 238792 - DNA, 25 bp, Artificial
  Probe
atgctgttaagttttcctatctgta

SEQ ID NO: 238793 - DNA, 25 bp, Artificial
  Probe
ctccctgcctggagcagcagaggct

SEQ ID NO: 238794 - DNA, 25 bp, Artificial
  Probe
acagaaattgacagctccctgcctg

SEQ ID NO: 238795 - DNA, 25 bp, Artificial
  Probe
cctgtgggctgagagaggcaaccaa

SEQ ID NO: 238796 - DNA, 25 bp, Artificial
  Probe
ggcaaccaaggcagcaagaaagcag

SEQ ID NO: 238797 - DNA, 25 bp, Artificial
  Probe
cctcacagaaattgacagctccctg

SEQ ID NO: 238798 - DNA, 25 bp, Artificial
  Probe
gagaggcaaccaaggcagcaagaaa

SEQ ID NO: 238799 - DNA, 25 bp, Artificial
  Probe
ctgatccctttctccaagaatgggt

SEQ ID NO: 238800 - DNA, 25 bp, Artificial
  Probe
caccggaagtgctattttgtatgct

SEQ ID NO: 238801 - DNA, 25 bp, Artificial
  Probe
caccaaggccctcacagaaattgac

SEQ ID NO: 238802 - DNA, 25 bp, Artificial
  Probe
accaaagatgtattcacctaggttt

SEQ ID NO: 238803 - DNA, 25 bp, Artificial
  Probe
cacctaggtttacaagtacttgtag

SEQ ID NO: 238804 - DNA, 25 bp, Artificial
  Probe
gaaattgacagctccctgcctggag

SEQ ID NO: 238805 - DNA, 25 bp, Artificial
  Probe
cagctccctgcctggagcagcagag

SEQ ID NO: 238806 - DNA, 25 bp, Artificial
  Probe
caacggtaccaaagatgtattcacc

SEQ ID NO: 238807 - DNA, 25 bp, Artificial
  Probe
ggccctcacagaaattgacagctcc

SEQ ID NO: 238808 - DNA, 25 bp, Artificial
  Probe
tacagtaccaggaccagctcaccgg

SEQ ID NO: 238809 - DNA, 25 bp, Artificial
  Probe
cattgaagtctacagtaccaggacc

SEQ ID NO: 238810 - DNA, 25 bp, Artificial
  Probe
agatgtattcacctaggtttacaag

SEQ ID NO: 238811 - DNA, 25 bp, Artificial
  Probe
caggaccagctcaccggagcaggag

SEQ ID NO: 238812 - DNA, 25 bp, Artificial
  Probe
gtgtctgatccctttctccaagaat

SEQ ID NO: 238813 - DNA, 25 bp, Artificial
  Probe
ggactctcgataacccacatttaga

SEQ ID NO: 238814 - DNA, 25 bp, Artificial
  Probe
ggggaatactgctcacaacggtacc

SEQ ID NO: 238815 - DNA, 25 bp, Artificial
  Probe
gaaagcagacaccaaggccctcaca

SEQ ID NO: 238816 - DNA, 25 bp, Artificial
  Probe
gtttacaagtacttgtaggactctc

SEQ ID NO: 238817 - DNA, 25 bp, Artificial
  Probe
caaccaaggcagcaagaaagcagac

SEQ ID NO: 238818 - DNA, 25 bp, Artificial
  Probe
aagcagacaccaaggccctcacaga

SEQ ID NO: 238819 - DNA, 25 bp, Artificial
  Probe
agagaggcaaccaaggcagcaagaa

SEQ ID NO: 238820 - DNA, 25 bp, Artificial
  Probe
gctgttaagttttcctatctgtact

SEQ ID NO: 238821 - DNA, 25 bp, Artificial
  Probe
ttccccctgggattcctgcttgctt

SEQ ID NO: 238822 - DNA, 25 bp, Artificial
  Probe
actcctgtgggctgagagaggcaac

SEQ ID NO: 238823 - DNA, 25 bp, Artificial
  Probe
aagatctttggcaccttcagctcca

SEQ ID NO: 238824 - DNA, 25 bp, Artificial
  Probe
tttggcaccttcagctccaccaagg

SEQ ID NO: 238825 - DNA, 25 bp, Artificial
  Probe
acctccagtggcatcttccagggct

SEQ ID NO: 238826 - DNA, 25 bp, Artificial
  Probe
gcatgaacgacgtgcgccgagcctt

SEQ ID NO: 238827 - DNA, 25 bp, Artificial
  Probe
cctacacatcagtgggtgtcctacc

SEQ ID NO: 238828 - DNA, 25 bp, Artificial
  Probe
gacacccactttgaccaacttcagg

SEQ ID NO: 238829 - DNA, 25 bp, Artificial
  Probe
ggtgacacccactttgaccaacttc

SEQ ID NO: 238830 - DNA, 25 bp, Artificial
  Probe
ttgctcacaaagaggggcctacaca

SEQ ID NO: 238831 - DNA, 25 bp, Artificial
  Probe
agatctttggcaccttcagctccac

SEQ ID NO: 238832 - DNA, 25 bp, Artificial
  Probe
atgtgccccagcaagatctttggca

SEQ ID NO: 238833 - DNA, 25 bp, Artificial
  Probe
ggcatgtgccccagcaagatctttg

SEQ ID NO: 238834 - DNA, 25 bp, Artificial
  Probe
ggctctgctgtgtgcgtgtacagca

SEQ ID NO: 238835 - DNA, 25 bp, Artificial
  Probe
ctgtgtgcgtgtacagcatgaacga

SEQ ID NO: 238836 - DNA, 25 bp, Artificial
  Probe
aggggcctacacatcagtgggtgtc

SEQ ID NO: 238837 - DNA, 25 bp, Artificial
  Probe
caagacctggcatgtgccccagcaa

SEQ ID NO: 238838 - DNA, 25 bp, Artificial
  Probe
ctccagtggcatcttccagggctct

SEQ ID NO: 238839 - DNA, 25 bp, Artificial
  Probe
atgatgttatccagtttgctcggaa

SEQ ID NO: 238840 - DNA, 25 bp, Artificial
  Probe
tgccccagcaagatctttggcacct

SEQ ID NO: 238841 - DNA, 25 bp, Artificial
  Probe
cttcttgggaccttttgctcacaaa

SEQ ID NO: 238842 - DNA, 25 bp, Artificial
  Probe
ccaccaaggacttcccagatgatgt

SEQ ID NO: 238843 - DNA, 25 bp, Artificial
  Probe
gtggcatcttccagggctctgctgt

SEQ ID NO: 238844 - DNA, 25 bp, Artificial
  Probe
cccagcaagatctttggcaccttca

SEQ ID NO: 238845 - DNA, 25 bp, Artificial
  Probe
caacttcaggatgttttccttttgt

SEQ ID NO: 238846 - DNA, 25 bp, Artificial
  Probe
cagcaagatctttggcaccttcagc

SEQ ID NO: 238847 - DNA, 25 bp, Artificial
  Probe
tcaggatgttttccttttgtcctcc

SEQ ID NO: 238848 - DNA, 25 bp, Artificial
  Probe
gtgcgccgagccttcttgggacctt

SEQ ID NO: 238849 - DNA, 25 bp, Artificial
  Probe
agatgatgttatccagtttgctcgg

SEQ ID NO: 238850 - DNA, 25 bp, Artificial
  Probe
gatgttttccttttgtcctcccgag

SEQ ID NO: 238851 - DNA, 25 bp, Artificial
  Probe
cacatcagtgggtgtcctaccaggg

SEQ ID NO: 238852 - DNA, 25 bp, Artificial
  Probe
acccactttgaccaacttcaggatg

SEQ ID NO: 238853 - DNA, 25 bp, Artificial
  Probe
ccagtggcatcttccagggctctgc

SEQ ID NO: 238854 - DNA, 25 bp, Artificial
  Probe
caaggacttcccagatgatgttatc

SEQ ID NO: 238855 - DNA, 25 bp, Artificial
  Probe
cccagatgatgttatccagtttgct

SEQ ID NO: 238856 - DNA, 25 bp, Artificial
  Probe
aagaggggcctacacatcagtgggt

SEQ ID NO: 238857 - DNA, 25 bp, Artificial
  Probe
atcagtgggtgtcctaccagggtcg

SEQ ID NO: 238858 - DNA, 25 bp, Artificial
  Probe
tgaccaacttcaggatgttttcctt

SEQ ID NO: 238859 - DNA, 25 bp, Artificial
  Probe
cagggctctgctgtgtgcgtgtaca

SEQ ID NO: 238860 - DNA, 25 bp, Artificial
  Probe
gccgagccttcttgggaccttttgc

SEQ ID NO: 238861 - DNA, 25 bp, Artificial
  Probe
cgacgtgcgccgagccttcttggga

SEQ ID NO: 238862 - DNA, 25 bp, Artificial
  Probe
caaagaggggcctacacatcagtgg

SEQ ID NO: 238863 - DNA, 25 bp, Artificial
  Probe
atcttccagggctctgctgtgtgcg

SEQ ID NO: 238864 - DNA, 25 bp, Artificial
  Probe
cgtgtacagcatgaacgacgtgcgc

SEQ ID NO: 238865 - DNA, 25 bp, Artificial
  Probe
agacctggcatgtgccccagcaaga

SEQ ID NO: 238866 - DNA, 25 bp, Artificial
  Probe
agctccaccaaggacttcccagatg

SEQ ID NO: 238867 - DNA, 25 bp, Artificial
  Probe
ttggcaccttcagctccaccaagga

SEQ ID NO: 238868 - DNA, 25 bp, Artificial
  Probe
gccagacacctcttctctatgctgt

SEQ ID NO: 238869 - DNA, 25 bp, Artificial
  Probe
ttggttttgcagacacccagactat

SEQ ID NO: 238870 - DNA, 25 bp, Artificial
  Probe
actatccgcattgtgtatgacatcc

SEQ ID NO: 238871 - DNA, 25 bp, Artificial
  Probe
gactatccgcattgtgtatgacatc

SEQ ID NO: 238872 - DNA, 25 bp, Artificial
  Probe
tgtgtatgacatccccacgggcatc

SEQ ID NO: 238873 - DNA, 25 bp, Artificial
  Probe
gcagacacccagactatccgcattg

SEQ ID NO: 238874 - DNA, 25 bp, Artificial
  Probe
ggttttgcagacacccagactatcc

SEQ ID NO: 238875 - DNA, 25 bp, Artificial
  Probe
ttgtgtatgacatccccacgggcat

SEQ ID NO: 238876 - DNA, 25 bp, Artificial
  Probe
ccccacgggcatccagggccctgaa

SEQ ID NO: 238877 - DNA, 25 bp, Artificial
  Probe
actcgctccttggttttgcagacac

SEQ ID NO: 238878 - DNA, 25 bp, Artificial
  Probe
cgctccttggttttgcagacaccca

SEQ ID NO: 238879 - DNA, 25 bp, Artificial
  Probe
acacccagactatccgcattgtgta

SEQ ID NO: 238880 - DNA, 25 bp, Artificial
  Probe
tccgcattgtgtatgacatccccac

SEQ ID NO: 238881 - DNA, 25 bp, Artificial
  Probe
tatccgcattgtgtatgacatcccc

SEQ ID NO: 238882 - DNA, 25 bp, Artificial
  Probe
ccagactatccgcattgtgtatgac

SEQ ID NO: 238883 - DNA, 25 bp, Artificial
  Probe
cagacacccagactatccgcattgt

SEQ ID NO: 238884 - DNA, 25 bp, Artificial
  Probe
cattgtgtatgacatccccacgggc

SEQ ID NO: 238885 - DNA, 25 bp, Artificial
  Probe
gacacccagactatccgcattgtgt

SEQ ID NO: 238886 - DNA, 25 bp, Artificial
  Probe
attgtgtatgacatccccacgggca

SEQ ID NO: 238887 - DNA, 25 bp, Artificial
  Probe
cacccagactatccgcattgtgtat

SEQ ID NO: 238888 - DNA, 25 bp, Artificial
  Probe
gtatgacatccccacgggcatccag

SEQ ID NO: 238889 - DNA, 25 bp, Artificial
  Probe
ctatccgcattgtgtatgacatccc

SEQ ID NO: 238890 - DNA, 25 bp, Artificial
  Probe
tatgacatccccacgggcatccagg

SEQ ID NO: 238891 - DNA, 25 bp, Artificial
  Probe
cgggcatccagggccctgaacatcc

SEQ ID NO: 238892 - DNA, 25 bp, Artificial
  Probe
ctcgctccttggttttgcagacacc

SEQ ID NO: 238893 - DNA, 25 bp, Artificial
  Probe
tttgcagacacccagactatccgca

SEQ ID NO: 238894 - DNA, 25 bp, Artificial
  Probe
acatccccacgggcatccagggccc

SEQ ID NO: 238895 - DNA, 25 bp, Artificial
  Probe
cacgggcatccagggccctgaacat

SEQ ID NO: 238896 - DNA, 25 bp, Artificial
  Probe
agacacccagactatccgcattgtg

SEQ ID NO: 238897 - DNA, 25 bp, Artificial
  Probe
tcgctccttggttttgcagacaccc

SEQ ID NO: 238898 - DNA, 25 bp, Artificial
  Probe
gttttgcagacacccagactatccg

SEQ ID NO: 238899 - DNA, 25 bp, Artificial
  Probe
ttttgcagacacccagactatccgc

SEQ ID NO: 238900 - DNA, 25 bp, Artificial
  Probe
ttgcagacacccagactatccgcat

SEQ ID NO: 238901 - DNA, 25 bp, Artificial
  Probe
cttggttttgcagacacccagacta

SEQ ID NO: 238902 - DNA, 25 bp, Artificial
  Probe
atccgcattgtgtatgacatcccca

SEQ ID NO: 238903 - DNA, 25 bp, Artificial
  Probe
gctccttggttttgcagacacccag

SEQ ID NO: 238904 - DNA, 25 bp, Artificial
  Probe
agactatccgcattgtgtatgacat

SEQ ID NO: 238905 - DNA, 25 bp, Artificial
  Probe
tggttttgcagacacccagactatc

SEQ ID NO: 238906 - DNA, 25 bp, Artificial
  Probe
ccttggttttgcagacacccagact

SEQ ID NO: 238907 - DNA, 25 bp, Artificial
  Probe
cactcgctccttggttttgcagaca

SEQ ID NO: 238908 - DNA, 25 bp, Artificial
  Probe
tgcagacacccagactatccgcatt

SEQ ID NO: 238909 - DNA, 25 bp, Artificial
  Probe
tccttggttttgcagacacccagac

SEQ ID NO: 238910 - DNA, 25 bp, Artificial
  Probe
ccactcgctccttggttttgcagac

SEQ ID NO: 238911 - DNA, 25 bp, Artificial
  Probe
cccactcgctccttggttttgcaga

SEQ ID NO: 238912 - DNA, 25 bp, Artificial
  Probe
cagactatccgcattgtgtatgaca

SEQ ID NO: 238913 - DNA, 25 bp, Artificial
  Probe
ctccttggttttgcagacacccaga

SEQ ID NO: 238914 - DNA, 25 bp, Artificial
  Probe
ccccactcgctccttggttttgcag

SEQ ID NO: 238915 - DNA, 25 bp, Artificial
  Probe
ttgagctaagcgaccacttctcggt

SEQ ID NO: 238916 - DNA, 25 bp, Artificial
  Probe
acttctcggtgaaggtggagcagtc

SEQ ID NO: 238917 - DNA, 25 bp, Artificial
  Probe
gtggagcagtccaagtacgtcagcc

SEQ ID NO: 238918 - DNA, 25 bp, Artificial
  Probe
gcagggcacatctcgggaaaccctt

SEQ ID NO: 238919 - DNA, 25 bp, Artificial
  Probe
taagcgaccacttctcggtgaaggt

SEQ ID NO: 238920 - DNA, 25 bp, Artificial
  Probe
gctcagatggtcttcgcatgtggta

SEQ ID NO: 238921 - DNA, 25 bp, Artificial
  Probe
ttctcggtgaaggtggagcagtcca

SEQ ID NO: 238922 - DNA, 25 bp, Artificial
  Probe
ggcctgcagggcacatctcgggaaa

SEQ ID NO: 238923 - DNA, 25 bp, Artificial
  Probe
agtacgtcagcctgaccattaaggg

SEQ ID NO: 238924 - DNA, 25 bp, Artificial
  Probe
ggctcagatggtcttcgcatgtggt

SEQ ID NO: 238925 - DNA, 25 bp, Artificial
  Probe
aacccttgtggcacctttgagcatg

SEQ ID NO: 238926 - DNA, 25 bp, Artificial
  Probe
tctcggtgaaggtggagcagtccaa

SEQ ID NO: 238927 - DNA, 25 bp, Artificial
  Probe
cctgcagggcacatctcgggaaacc

SEQ ID NO: 238928 - DNA, 25 bp, Artificial
  Probe
ctttgagcatgctacttgcttatct

SEQ ID NO: 238929 - DNA, 25 bp, Artificial
  Probe
tgaaggtggagcagtccaagtacgt

SEQ ID NO: 238930 - DNA, 25 bp, Artificial
  Probe
gggaaacccttgtggcacctttgag

SEQ ID NO: 238931 - DNA, 25 bp, Artificial
  Probe
agatagttattaccaacctgaggtg

SEQ ID NO: 238932 - DNA, 25 bp, Artificial
  Probe
tacgtcagcctgaccattaaggggg

SEQ ID NO: 238933 - DNA, 25 bp, Artificial
  Probe
acgtcagcctgaccattaagggggt

SEQ ID NO: 238934 - DNA, 25 bp, Artificial
  Probe
gacattgagctaagcgaccacttct

SEQ ID NO: 238935 - DNA, 25 bp, Artificial
  Probe
gctgaggctcagatggtcttcgcat

SEQ ID NO: 238936 - DNA, 25 bp, Artificial
  Probe
cacctttgagcatgctacttgctta

SEQ ID NO: 238937 - DNA, 25 bp, Artificial
  Probe
ccttgtggcacctttgagcatgcta

SEQ ID NO: 238938 - DNA, 25 bp, Artificial
  Probe
ttgtggcacctttgagcatgctact

SEQ ID NO: 238939 - DNA, 25 bp, Artificial
  Probe
cttctcggtgaaggtggagcagtcc

SEQ ID NO: 238940 - DNA, 25 bp, Artificial
  Probe
gtcttcgcatgtggtaatctagata

SEQ ID NO: 238941 - DNA, 25 bp, Artificial
  Probe
tgaggctcagatggtcttcgcatgt

SEQ ID NO: 238942 - DNA, 25 bp, Artificial
  Probe
acatctcgggaaacccttgtggcac

SEQ ID NO: 238943 - DNA, 25 bp, Artificial
  Probe
tgagctaagcgaccacttctcggtg

SEQ ID NO: 238944 - DNA, 25 bp, Artificial
  Probe
ctcagatggtcttcgcatgtggtaa

SEQ ID NO: 238945 - DNA, 25 bp, Artificial
  Probe
tccaagtacgtcagcctgaccatta

SEQ ID NO: 238946 - DNA, 25 bp, Artificial
  Probe
gcacatctcgggaaacccttgtggc

SEQ ID NO: 238947 - DNA, 25 bp, Artificial
  Probe
tggcacctttgagcatgctacttgc

SEQ ID NO: 238948 - DNA, 25 bp, Artificial
  Probe
tcgggaaacccttgtggcacctttg

SEQ ID NO: 238949 - DNA, 25 bp, Artificial
  Probe
gctaagcgaccacttctcggtgaag

SEQ ID NO: 238950 - DNA, 25 bp, Artificial
  Probe
agcatgctacttgcttatctttttg

SEQ ID NO: 238951 - DNA, 25 bp, Artificial
  Probe
tgcagggcacatctcgggaaaccct

SEQ ID NO: 238952 - DNA, 25 bp, Artificial
  Probe
agcagtccaagtacgtcagcctgac

SEQ ID NO: 238953 - DNA, 25 bp, Artificial
  Probe
accacttctcggtgaaggtggagca

SEQ ID NO: 238954 - DNA, 25 bp, Artificial
  Probe
agcgaccacttctcggtgaaggtgg

SEQ ID NO: 238955 - DNA, 25 bp, Artificial
  Probe
ggagcagtccaagtacgtcagcctg

SEQ ID NO: 238956 - DNA, 25 bp, Artificial
  Probe
cttcgcatgtggtaatctagatagt

SEQ ID NO: 238957 - DNA, 25 bp, Artificial
  Probe
ggctgaggctcagatggtcttcgca

SEQ ID NO: 238958 - DNA, 25 bp, Artificial
  Probe
gatagttattaccaacctgaggtgg

SEQ ID NO: 238959 - DNA, 25 bp, Artificial
  Probe
cccttgtggcacctttgagcatgct

SEQ ID NO: 238960 - DNA, 25 bp, Artificial
  Probe
gatggtcttcgcatgtggtaatcta

SEQ ID NO: 238961 - DNA, 25 bp, Artificial
  Probe
ctgtctctggggtcctggagtcctg

SEQ ID NO: 238962 - DNA, 25 bp, Artificial
  Probe
catattgtcatagcaacaggaaaag

SEQ ID NO: 238963 - DNA, 25 bp, Artificial
  Probe
ggaggctctcacttagtccttccac

SEQ ID NO: 238964 - DNA, 25 bp, Artificial
  Probe
actgtctgtctctggggtcctggag

SEQ ID NO: 238965 - DNA, 25 bp, Artificial
  Probe
acaggtgaagcctatcagtgaggag

SEQ ID NO: 238966 - DNA, 25 bp, Artificial
  Probe
ttggcaggcctaccagccttaattt

SEQ ID NO: 238967 - DNA, 25 bp, Artificial
  Probe
tgtcatagcaacaggaaaaggaaca

SEQ ID NO: 238968 - DNA, 25 bp, Artificial
  Probe
ttgcttccatttgtgactcacccag

SEQ ID NO: 238969 - DNA, 25 bp, Artificial
  Probe
tggagtcctggttggcaggcctacc

SEQ ID NO: 238970 - DNA, 25 bp, Artificial
  Probe
tcacccagggccatcttgatacact

SEQ ID NO: 238971 - DNA, 25 bp, Artificial
  Probe
tgaagcctatcagtgaggaggctct

SEQ ID NO: 238972 - DNA, 25 bp, Artificial
  Probe
gcctatcagtgaggaggctctcact

SEQ ID NO: 238973 - DNA, 25 bp, Artificial
  Probe
gtcatagcaacaggaaaaggaacag

SEQ ID NO: 238974 - DNA, 25 bp, Artificial
  Probe
catttgtgactcacccagggccatc

SEQ ID NO: 238975 - DNA, 25 bp, Artificial
  Probe
gcccactcactgtctgtctctgggg

SEQ ID NO: 238976 - DNA, 25 bp, Artificial
  Probe
acccagggccatcttgatacactgc

SEQ ID NO: 238977 - DNA, 25 bp, Artificial
  Probe
gtgaagcctatcagtgaggaggctc

SEQ ID NO: 238978 - DNA, 25 bp, Artificial
  Probe
cttagtccttccacgtgggcttttg

SEQ ID NO: 238979 - DNA, 25 bp, Artificial
  Probe
cactcactgtctgtctctggggtcc

SEQ ID NO: 238980 - DNA, 25 bp, Artificial
  Probe
tttttgtcagcatattgtcatagca

SEQ ID NO: 238981 - DNA, 25 bp, Artificial
  Probe
ccacgtgggcttttgcttccatttg

SEQ ID NO: 238982 - DNA, 25 bp, Artificial
  Probe
gatacactgccatggcgtcttccgc

SEQ ID NO: 238983 - DNA, 25 bp, Artificial
  Probe
agtgaggaggctctcacttagtcct

SEQ ID NO: 238984 - DNA, 25 bp, Artificial
  Probe
ttccacgtgggcttttgcttccatt

SEQ ID NO: 238985 - DNA, 25 bp, Artificial
  Probe
cagcatattgtcatagcaacaggaa

SEQ ID NO: 238986 - DNA, 25 bp, Artificial
  Probe
tgtgactcacccagggccatcttga

SEQ ID NO: 238987 - DNA, 25 bp, Artificial
  Probe
gcatattgtcatagcaacaggaaaa

SEQ ID NO: 238988 - DNA, 25 bp, Artificial
  Probe
tgatacactgccatggcgtcttccg

SEQ ID NO: 238989 - DNA, 25 bp, Artificial
  Probe
tttgtcagcatattgtcatagcaac

SEQ ID NO: 238990 - DNA, 25 bp, Artificial
  Probe
gtcctggttggcaggcctaccagcc

SEQ ID NO: 238991 - DNA, 25 bp, Artificial
  Probe
ccatttgtgactcacccagggccat

SEQ ID NO: 238992 - DNA, 25 bp, Artificial
  Probe
cacgtgggcttttgcttccatttgt

SEQ ID NO: 238993 - DNA, 25 bp, Artificial
  Probe
atcttgatacactgccatggcgtct

SEQ ID NO: 238994 - DNA, 25 bp, Artificial
  Probe
tgaggaggctctcacttagtccttc

SEQ ID NO: 238995 - DNA, 25 bp, Artificial
  Probe
cagtgaggaggctctcacttagtcc

SEQ ID NO: 238996 - DNA, 25 bp, Artificial
  Probe
tgcttccatttgtgactcacccagg

SEQ ID NO: 238997 - DNA, 25 bp, Artificial
  Probe
aagcctatcagtgaggaggctctca

SEQ ID NO: 238998 - DNA, 25 bp, Artificial
  Probe
gttggcaggcctaccagccttaatt

SEQ ID NO: 238999 - DNA, 25 bp, Artificial
  Probe
gcttttgcttccatttgtgactcac

SEQ ID NO: 239000 - DNA, 25 bp, Artificial
  Probe
agtccttccacgtgggcttttgctt

SEQ ID NO: 239001 - DNA, 25 bp, Artificial
  Probe
ctctcacttagtccttccacgtggg

SEQ ID NO: 239002 - DNA, 25 bp, Artificial
  Probe
cctggagtcctggttggcaggccta

SEQ ID NO: 239003 - DNA, 25 bp, Artificial
  Probe
cacttagtccttccacgtgggcttt

SEQ ID NO: 239004 - DNA, 25 bp, Artificial
  Probe
ccagggccatcttgatacactgcca

SEQ ID NO: 239005 - DNA, 25 bp, Artificial
  Probe
cctatcagtgaggaggctctcactt

SEQ ID NO: 239006 - DNA, 25 bp, Artificial
  Probe
agggccatcttgatacactgccatg

SEQ ID NO: 239007 - DNA, 25 bp, Artificial
  Probe
cgctgaagtgtgtggcccacaaatt

SEQ ID NO: 239008 - DNA, 25 bp, Artificial
  Probe
tctgttctttcttcctggtagtgcc

SEQ ID NO: 239009 - DNA, 25 bp, Artificial
  Probe
aggagaaactaactcatcccgtctc

SEQ ID NO: 239010 - DNA, 25 bp, Artificial
  Probe
ggagctcaactgtccttccttttat

SEQ ID NO: 239011 - DNA, 25 bp, Artificial
  Probe
ctgggagtgctggtatctaatatac

SEQ ID NO: 239012 - DNA, 25 bp, Artificial
  Probe
atacgctgaagtgtgtggcccacaa

SEQ ID NO: 239013 - DNA, 25 bp, Artificial
  Probe
tagccaatacgctgaagtgtgtggc

SEQ ID NO: 239014 - DNA, 25 bp, Artificial
  Probe
tactgcttctgtttcggtgcaaaaa

SEQ ID NO: 239015 - DNA, 25 bp, Artificial
  Probe
ttctttcttcctggtagtgccatta

SEQ ID NO: 239016 - DNA, 25 bp, Artificial
  Probe
cctctctgctgaagacaggaaacat

SEQ ID NO: 239017 - DNA, 25 bp, Artificial
  Probe
gtactagccaatacgctgaagtgtg

SEQ ID NO: 239018 - DNA, 25 bp, Artificial
  Probe
agaggcaaacgcataggtgtgtagc

SEQ ID NO: 239019 - DNA, 25 bp, Artificial
  Probe
caaacgcataggtgtgtagctggga

SEQ ID NO: 239020 - DNA, 25 bp, Artificial
  Probe
gattcttaactgaggagaaactaac

SEQ ID NO: 239021 - DNA, 25 bp, Artificial
  Probe
actgcttctgtttcggtgcaaaaat

SEQ ID NO: 239022 - DNA, 25 bp, Artificial
  Probe
ccccgatgatacaaagtggagctca

SEQ ID NO: 239023 - DNA, 25 bp, Artificial
  Probe
atcctctctgctgaagacaggaaac

SEQ ID NO: 239024 - DNA, 25 bp, Artificial
  Probe
gaggcaaacgcataggtgtgtagct

SEQ ID NO: 239025 - DNA, 25 bp, Artificial
  Probe
tacgctgaagtgtgtggcccacaaa

SEQ ID NO: 239026 - DNA, 25 bp, Artificial
  Probe
ttttatcctctctgctgaagacagg

SEQ ID NO: 239027 - DNA, 25 bp, Artificial
  Probe
agacacttggatccttctgcggacc

SEQ ID NO: 239028 - DNA, 25 bp, Artificial
  Probe
attcttaactgaggagaaactaact

SEQ ID NO: 239029 - DNA, 25 bp, Artificial
  Probe
gaccccgatgatacaaagtggagct

SEQ ID NO: 239030 - DNA, 25 bp, Artificial
  Probe
aggcaaacgcataggtgtgtagctg

SEQ ID NO: 239031 - DNA, 25 bp, Artificial
  Probe
tacaaagtggagctcaactgtcctt

SEQ ID NO: 239032 - DNA, 25 bp, Artificial
  Probe
ttatcctctctgctgaagacaggaa

SEQ ID NO: 239033 - DNA, 25 bp, Artificial
  Probe
atccttctgcggaccccgatgatac

SEQ ID NO: 239034 - DNA, 25 bp, Artificial
  Probe
acttggatccttctgcggaccccga

SEQ ID NO: 239035 - DNA, 25 bp, Artificial
  Probe
gtgtgtggcccacaaattgaacaat

SEQ ID NO: 239036 - DNA, 25 bp, Artificial
  Probe
cttggatccttctgcggaccccgat

SEQ ID NO: 239037 - DNA, 25 bp, Artificial
  Probe
aaacctgtactgcttctgtttcggt

SEQ ID NO: 239038 - DNA, 25 bp, Artificial
  Probe
agtgtgtggcccacaaattgaacaa

SEQ ID NO: 239039 - DNA, 25 bp, Artificial
  Probe
ggagaaactaactcatcccgtctca

SEQ ID NO: 239040 - DNA, 25 bp, Artificial
  Probe
aatgtactagccaatacgctgaagt

SEQ ID NO: 239041 - DNA, 25 bp, Artificial
  Probe
attttatcctctctgctgaagacag

SEQ ID NO: 239042 - DNA, 25 bp, Artificial
  Probe
gacacttggatccttctgcggaccc

SEQ ID NO: 239043 - DNA, 25 bp, Artificial
  Probe
cttctgtttcggtgcaaaaatgtac

SEQ ID NO: 239044 - DNA, 25 bp, Artificial
  Probe
cggattcttaactgaggagaaacta

SEQ ID NO: 239045 - DNA, 25 bp, Artificial
  Probe
tgtgtggcccacaaattgaacaatt

SEQ ID NO: 239046 - DNA, 25 bp, Artificial
  Probe
ctgcggaccccgatgatacaaagtg

SEQ ID NO: 239047 - DNA, 25 bp, Artificial
  Probe
aacctgtactgcttctgtttcggtg

SEQ ID NO: 239048 - DNA, 25 bp, Artificial
  Probe
gcataaaacctgtactgcttctgtt

SEQ ID NO: 239049 - DNA, 25 bp, Artificial
  Probe
tgtttcggtgcaaaaatgtactagc

SEQ ID NO: 239050 - DNA, 25 bp, Artificial
  Probe
gtggagctcaactgtccttcctttt

SEQ ID NO: 239051 - DNA, 25 bp, Artificial
  Probe
tctctgctgaagacaggaaacattc

SEQ ID NO: 239052 - DNA, 25 bp, Artificial
  Probe
caaagtggagctcaactgtccttcc

SEQ ID NO: 239053 - DNA, 25 bp, Artificial
  Probe
gacagttttcctttagaaatgtcca

SEQ ID NO: 239054 - DNA, 25 bp, Artificial
  Probe
tcctcatggcctcttgagtagtgaa

SEQ ID NO: 239055 - DNA, 25 bp, Artificial
  Probe
actgcaataaaagctgcttgttttt

SEQ ID NO: 239056 - DNA, 25 bp, Artificial
  Probe
ttcccaacccttaaagctaaatgcg

SEQ ID NO: 239057 - DNA, 25 bp, Artificial
  Probe
gaccgaagtggtggctacggaggag

SEQ ID NO: 239058 - DNA, 25 bp, Artificial
  Probe
tgctttcctcatggcctcttgagta

SEQ ID NO: 239059 - DNA, 25 bp, Artificial
  Probe
caacccttaaagctaaatgcgttgt

SEQ ID NO: 239060 - DNA, 25 bp, Artificial
  Probe
ttcctcatggcctcttgagtagtga

SEQ ID NO: 239061 - DNA, 25 bp, Artificial
  Probe
tacggaggagaccgcagccgggggg

SEQ ID NO: 239062 - DNA, 25 bp, Artificial
  Probe
aggcgacagaggtggctatggagga

SEQ ID NO: 239063 - DNA, 25 bp, Artificial
  Probe
cctgctgctttcctcatggcctctt

SEQ ID NO: 239064 - DNA, 25 bp, Artificial
  Probe
cttaaagctaaatgcgttgtaaaat

SEQ ID NO: 239065 - DNA, 25 bp, Artificial
  Probe
tggggacagttttcctttagaaatg

SEQ ID NO: 239066 - DNA, 25 bp, Artificial
  Probe
gcagccggggggcctatggaggaga

SEQ ID NO: 239067 - DNA, 25 bp, Artificial
  Probe
gaccgaggtggctatggaggcaaaa

SEQ ID NO: 239068 - DNA, 25 bp, Artificial
  Probe
agtggaggctatggtggagaccgaa

SEQ ID NO: 239069 - DNA, 25 bp, Artificial
  Probe
taatactgcaataaaagctgcttgt

SEQ ID NO: 239070 - DNA, 25 bp, Artificial
  Probe
tactgcaataaaagctgcttgtttt

SEQ ID NO: 239071 - DNA, 25 bp, Artificial
  Probe
ccaacccttaaagctaaatgcgttg

SEQ ID NO: 239072 - DNA, 25 bp, Artificial
  Probe
aggctatggtggagaccgaagtggt

SEQ ID NO: 239073 - DNA, 25 bp, Artificial
  Probe
ttgtaatactgcaataaaagctgct

SEQ ID NO: 239074 - DNA, 25 bp, Artificial
  Probe
agaggtggctatggaggagaccgag

SEQ ID NO: 239075 - DNA, 25 bp, Artificial
  Probe
aatactgcaataaaagctgcttgtt

SEQ ID NO: 239076 - DNA, 25 bp, Artificial
  Probe
ccgaagtggtggctacggaggagac

SEQ ID NO: 239077 - DNA, 25 bp, Artificial
  Probe
ggttatggaggcgacagaggtggct

SEQ ID NO: 239078 - DNA, 25 bp, Artificial
  Probe
tttcctcatggcctcttgagtagtg

SEQ ID NO: 239079 - DNA, 25 bp, Artificial
  Probe
ccgaggtggctatggaggcaaaatg

SEQ ID NO: 239080 - DNA, 25 bp, Artificial
  Probe
tcctttagaaatgtccattaaaatt

SEQ ID NO: 239081 - DNA, 25 bp, Artificial
  Probe
cctcatggcctcttgagtagtgaaa

SEQ ID NO: 239082 - DNA, 25 bp, Artificial
  Probe
taaaatattgccaaaatggaaagtg

SEQ ID NO: 239083 - DNA, 25 bp, Artificial
  Probe
gctgctttcctcatggcctcttgag

SEQ ID NO: 239084 - DNA, 25 bp, Artificial
  Probe
ggaggcgacagaggtggctatggag

SEQ ID NO: 239085 - DNA, 25 bp, Artificial
  Probe
atggtggagaccgaagtggtggcta

SEQ ID NO: 239086 - DNA, 25 bp, Artificial
  Probe
ggggcctatggaggagaccgtggtg

SEQ ID NO: 239087 - DNA, 25 bp, Artificial
  Probe
gagaccgcagccggggggcctatgg

SEQ ID NO: 239088 - DNA, 25 bp, Artificial
  Probe
ttaaagctaaatgcgttgtaaaata

SEQ ID NO: 239089 - DNA, 25 bp, Artificial
  Probe
cagttttcctttagaaatgtccatt

SEQ ID NO: 239090 - DNA, 25 bp, Artificial
  Probe
tattgccaaaatggaaagtgttttg

SEQ ID NO: 239091 - DNA, 25 bp, Artificial
  Probe
ttgggtgggagggctggggacagtt

SEQ ID NO: 239092 - DNA, 25 bp, Artificial
  Probe
ctgctgctttcctcatggcctcttg

SEQ ID NO: 239093 - DNA, 25 bp, Artificial
  Probe
accgaggtggctatggaggcaaaat

SEQ ID NO: 239094 - DNA, 25 bp, Artificial
  Probe
tgggagggctggggacagttttcct

SEQ ID NO: 239095 - DNA, 25 bp, Artificial
  Probe
tcccaacccttaaagctaaatgcgt

SEQ ID NO: 239096 - DNA, 25 bp, Artificial
  Probe
tggaggagaccgaggtggctatgga

SEQ ID NO: 239097 - DNA, 25 bp, Artificial
  Probe
ctgctttcctcatggcctcttgagt

SEQ ID NO: 239098 - DNA, 25 bp, Artificial
  Probe
ttttgtaatactgcaataaaagctg

SEQ ID NO: 239099 - DNA, 25 bp, Artificial
  Probe
cacatccttttcccgggtgcagatc

SEQ ID NO: 239100 - DNA, 25 bp, Artificial
  Probe
gacagttccaaggtccccgctgtca

SEQ ID NO: 239101 - DNA, 25 bp, Artificial
  Probe
gagccggctcatgctgcagctgcaa

SEQ ID NO: 239102 - DNA, 25 bp, Artificial
  Probe
cgggtgcagatctgtgagctggaaa

SEQ ID NO: 239103 - DNA, 25 bp, Artificial
  Probe
cgcacatccttttcccgggtgcaga

SEQ ID NO: 239104 - DNA, 25 bp, Artificial
  Probe
tttcccgggtgcagatctgtgagct

SEQ ID NO: 239105 - DNA, 25 bp, Artificial
  Probe
tccagaagagcctcaacgactccat

SEQ ID NO: 239106 - DNA, 25 bp, Artificial
  Probe
cctcaacgactccatccagcccgac

SEQ ID NO: 239107 - DNA, 25 bp, Artificial
  Probe
tccttttcccgggtgcagatctgtg

SEQ ID NO: 239108 - DNA, 25 bp, Artificial
  Probe
gctggaaaagcgcttccatcgccaa

SEQ ID NO: 239109 - DNA, 25 bp, Artificial
  Probe
acagttccaaggtccccgctgtcac

SEQ ID NO: 239110 - DNA, 25 bp, Artificial
  Probe
ccccgctgtcacctctctggtgtga

SEQ ID NO: 239111 - DNA, 25 bp, Artificial
  Probe
ttcccgggtgcagatctgtgagctg

SEQ ID NO: 239112 - DNA, 25 bp, Artificial
  Probe
ccttttcccgggtgcagatctgtga

SEQ ID NO: 239113 - DNA, 25 bp, Artificial
  Probe
agaagagcctcaacgactccatcca

SEQ ID NO: 239114 - DNA, 25 bp, Artificial
  Probe
gcgagccggctcatgctgcagctgc

SEQ ID NO: 239115 - DNA, 25 bp, Artificial
  Probe
ccagaagagcctcaacgactccatc

SEQ ID NO: 239116 - DNA, 25 bp, Artificial
  Probe
aagagcctcaacgactccatccagc

SEQ ID NO: 239117 - DNA, 25 bp, Artificial
  Probe
atctgtgagctggaaaagcgcttcc

SEQ ID NO: 239118 - DNA, 25 bp, Artificial
  Probe
gccttccagaagagcctcaacgact

SEQ ID NO: 239119 - DNA, 25 bp, Artificial
  Probe
ccttccagaagagcctcaacgactc

SEQ ID NO: 239120 - DNA, 25 bp, Artificial
  Probe
gcgcacatccttttcccgggtgcag

SEQ ID NO: 239121 - DNA, 25 bp, Artificial
  Probe
cgagccggctcatgctgcagctgca

SEQ ID NO: 239122 - DNA, 25 bp, Artificial
  Probe
cgcgcacatccttttcccgggtgca

SEQ ID NO: 239123 - DNA, 25 bp, Artificial
  Probe
gaggacagttccaaggtccccgctg

SEQ ID NO: 239124 - DNA, 25 bp, Artificial
  Probe
cccagccgggctggggagggaagct

SEQ ID NO: 239125 - DNA, 25 bp, Artificial
  Probe
agatctgtgagctggaaaagcgctt

SEQ ID NO: 239126 - DNA, 25 bp, Artificial
  Probe
gaagagcctcaacgactccatccag

SEQ ID NO: 239127 - DNA, 25 bp, Artificial
  Probe
cagatctgtgagctggaaaagcgct

SEQ ID NO: 239128 - DNA, 25 bp, Artificial
  Probe
aggacagttccaaggtccccgctgt

SEQ ID NO: 239129 - DNA, 25 bp, Artificial
  Probe
cttttcccgggtgcagatctgtgag

SEQ ID NO: 239130 - DNA, 25 bp, Artificial
  Probe
tgcagatctgtgagctggaaaagcg

SEQ ID NO: 239131 - DNA, 25 bp, Artificial
  Probe
agttccaaggtccccgctgtcacct

SEQ ID NO: 239132 - DNA, 25 bp, Artificial
  Probe
gcacatccttttcccgggtgcagat

SEQ ID NO: 239133 - DNA, 25 bp, Artificial
  Probe
ttccagaagagcctcaacgactcca

SEQ ID NO: 239134 - DNA, 25 bp, Artificial
  Probe
gggtgcagatctgtgagctggaaaa

SEQ ID NO: 239135 - DNA, 25 bp, Artificial
  Probe
tggaaaagcgcttccatcgccaaaa

SEQ ID NO: 239136 - DNA, 25 bp, Artificial
  Probe
ctggaaaagcgcttccatcgccaaa

SEQ ID NO: 239137 - DNA, 25 bp, Artificial
  Probe
ggacagttccaaggtccccgctgtc

SEQ ID NO: 239138 - DNA, 25 bp, Artificial
  Probe
tccaaggtccccgctgtcacctctc

SEQ ID NO: 239139 - DNA, 25 bp, Artificial
  Probe
cagaagagcctcaacgactccatcc

SEQ ID NO: 239140 - DNA, 25 bp, Artificial
  Probe
ttttcccgggtgcagatctgtgagc

SEQ ID NO: 239141 - DNA, 25 bp, Artificial
  Probe
gatctgtgagctggaaaagcgcttc

SEQ ID NO: 239142 - DNA, 25 bp, Artificial
  Probe
agctggaaaagcgcttccatcgcca

SEQ ID NO: 239143 - DNA, 25 bp, Artificial
  Probe
gagcctcaacgactccatccagccc

SEQ ID NO: 239144 - DNA, 25 bp, Artificial
  Probe
gcagatctgtgagctggaaaagcgc

SEQ ID NO: 239145 - DNA, 25 bp, Artificial
  Probe
ctccccagagatggttaggtaaatg

SEQ ID NO: 239146 - DNA, 25 bp, Artificial
  Probe
catgttctgcaagcagggagtattg

SEQ ID NO: 239147 - DNA, 25 bp, Artificial
  Probe
ccccagagatggttaggtaaatgga

SEQ ID NO: 239148 - DNA, 25 bp, Artificial
  Probe
ctccatcattgcaggctacaatgcc

SEQ ID NO: 239149 - DNA, 25 bp, Artificial
  Probe
ctgctgcatgtgtatgtgtgtgcaa

SEQ ID NO: 239150 - DNA, 25 bp, Artificial
  Probe
atcattgcaggctacaatgccatcc

SEQ ID NO: 239151 - DNA, 25 bp, Artificial
  Probe
agtgtgcgtgcctcagaaatggtga

SEQ ID NO: 239152 - DNA, 25 bp, Artificial
  Probe
cagaaactgatgtcacagctcccaa

SEQ ID NO: 239153 - DNA, 25 bp, Artificial
  Probe
ctgcaagcagggagtattgaccctg

SEQ ID NO: 239154 - DNA, 25 bp, Artificial
  Probe
tgacaaaccgctccatcattgcagg

SEQ ID NO: 239155 - DNA, 25 bp, Artificial
  Probe
acaatgccatcctctgctgtgctgt

SEQ ID NO: 239156 - DNA, 25 bp, Artificial
  Probe
tgcaggctacaatgccatcctctgc

SEQ ID NO: 239157 - DNA, 25 bp, Artificial
  Probe
ctcagtgaccaggatggctccccag

SEQ ID NO: 239158 - DNA, 25 bp, Artificial
  Probe
agcccaagatttcctggttcaagaa

SEQ ID NO: 239159 - DNA, 25 bp, Artificial
  Probe
agatttcctggttcaagaatggctt

SEQ ID NO: 239160 - DNA, 25 bp, Artificial
  Probe
tgtccggggtagtcctaagcccaag

SEQ ID NO: 239161 - DNA, 25 bp, Artificial
  Probe
catcctctgctgtgctgtccggggt

SEQ ID NO: 239162 - DNA, 25 bp, Artificial
  Probe
tgctgtccggggtagtcctaagccc

SEQ ID NO: 239163 - DNA, 25 bp, Artificial
  Probe
cctcatggtggctcattgtgtaaga

SEQ ID NO: 239164 - DNA, 25 bp, Artificial
  Probe
ccagtgtaccagaagcccaggaggg

SEQ ID NO: 239165 - DNA, 25 bp, Artificial
  Probe
gattctgcagaaactgatgtcacag

SEQ ID NO: 239166 - DNA, 25 bp, Artificial
  Probe
gatggctccccagagatggttaggt

SEQ ID NO: 239167 - DNA, 25 bp, Artificial
  Probe
tgttctgcaagcagggagtattgac

SEQ ID NO: 239168 - DNA, 25 bp, Artificial
  Probe
cagtgtaccagaagcccaggaggga

SEQ ID NO: 239169 - DNA, 25 bp, Artificial
  Probe
gagtattgaccctggagatcaggaa

SEQ ID NO: 239170 - DNA, 25 bp, Artificial
  Probe
ttctgcagaaactgatgtcacagct

SEQ ID NO: 239171 - DNA, 25 bp, Artificial
  Probe
gctgtccggggtagtcctaagccca

SEQ ID NO: 239172 - DNA, 25 bp, Artificial
  Probe
cccaagatttcctggttcaagaatg

SEQ ID NO: 239173 - DNA, 25 bp, Artificial
  Probe
agtcctaagcccaagatttcctggt

SEQ ID NO: 239174 - DNA, 25 bp, Artificial
  Probe
tgcgtgcctcagaaatggtgactgg

SEQ ID NO: 239175 - DNA, 25 bp, Artificial
  Probe
ctctgctgtgctgtccggggtagtc

SEQ ID NO: 239176 - DNA, 25 bp, Artificial
  Probe
ttcctcagtgaccaggatggctccc

SEQ ID NO: 239177 - DNA, 25 bp, Artificial
  Probe
agtattgaccctggagatcaggaag

SEQ ID NO: 239178 - DNA, 25 bp, Artificial
  Probe
caaaccgctccatcattgcaggcta

SEQ ID NO: 239179 - DNA, 25 bp, Artificial
  Probe
cagtgaccaggatggctccccagag

SEQ ID NO: 239180 - DNA, 25 bp, Artificial
  Probe
atcctctgctgtgctgtccggggta

SEQ ID NO: 239181 - DNA, 25 bp, Artificial
  Probe
ggctacaatgccatcctctgctgtg

SEQ ID NO: 239182 - DNA, 25 bp, Artificial
  Probe
tcaggaagccctgtccctatgatgg

SEQ ID NO: 239183 - DNA, 25 bp, Artificial
  Probe
gctcgttttcgcatgttctgcaagc

SEQ ID NO: 239184 - DNA, 25 bp, Artificial
  Probe
ggagaggccctcatggtggctcatt

SEQ ID NO: 239185 - DNA, 25 bp, Artificial
  Probe
tgcagaaactgatgtcacagctccc

SEQ ID NO: 239186 - DNA, 25 bp, Artificial
  Probe
aggccctcatggtggctcattgtgt

SEQ ID NO: 239187 - DNA, 25 bp, Artificial
  Probe
ctgatgtcacagctcccaaggagtg

SEQ ID NO: 239188 - DNA, 25 bp, Artificial
  Probe
gaccaggatggctccccagagatgg

SEQ ID NO: 239189 - DNA, 25 bp, Artificial
  Probe
caggaagccctgtccctatgatggg

SEQ ID NO: 239190 - DNA, 25 bp, Artificial
  Probe
gagttcctcagtgaccaggatggct

SEQ ID NO: 239191 - DNA, 25 bp, Artificial
  Probe
accttctagtctccttagagaccag

SEQ ID NO: 239192 - DNA, 25 bp, Artificial
  Probe
ctagtctccttagagaccagtgctt

SEQ ID NO: 239193 - DNA, 25 bp, Artificial
  Probe
acccccaaaggaattgcgactcata

SEQ ID NO: 239194 - DNA, 25 bp, Artificial
  Probe
tccttagagaccagtgcttctcaac

SEQ ID NO: 239195 - DNA, 25 bp, Artificial
  Probe
aattgcgactcataggtagagaact

SEQ ID NO: 239196 - DNA, 25 bp, Artificial
  Probe
gaccttctagtctccttagagacca

SEQ ID NO: 239197 - DNA, 25 bp, Artificial
  Probe
cgagctccacgtccaatgagagacc

SEQ ID NO: 239198 - DNA, 25 bp, Artificial
  Probe
tagtctccttagagaccagtgcttc

SEQ ID NO: 239199 - DNA, 25 bp, Artificial
  Probe
actgaccttctagtctccttagaga

SEQ ID NO: 239200 - DNA, 25 bp, Artificial
  Probe
ccacgtccaatgagagaccctgttc

SEQ ID NO: 239201 - DNA, 25 bp, Artificial
  Probe
gtctccttagagaccagtgcttctc

SEQ ID NO: 239202 - DNA, 25 bp, Artificial
  Probe
cgtccaatgagagaccctgttcaaa

SEQ ID NO: 239203 - DNA, 25 bp, Artificial
  Probe
ttgcgactcataggtagagaactat

SEQ ID NO: 239204 - DNA, 25 bp, Artificial
  Probe
cccccaaaggaattgcgactcatag

SEQ ID NO: 239205 - DNA, 25 bp, Artificial
  Probe
gaagaagacacctaacactgacctt

SEQ ID NO: 239206 - DNA, 25 bp, Artificial
  Probe
gagctccacgtccaatgagagaccc

SEQ ID NO: 239207 - DNA, 25 bp, Artificial
  Probe
actgtggagagctactgaagaagac

SEQ ID NO: 239208 - DNA, 25 bp, Artificial
  Probe
acgtccaatgagagaccctgttcaa

SEQ ID NO: 239209 - DNA, 25 bp, Artificial
  Probe
tctagtctccttagagaccagtgct

SEQ ID NO: 239210 - DNA, 25 bp, Artificial
  Probe
tgaagaagacacctaacactgacct

SEQ ID NO: 239211 - DNA, 25 bp, Artificial
  Probe
aacgagctccacgtccaatgagaga

SEQ ID NO: 239212 - DNA, 25 bp, Artificial
  Probe
acgagctccacgtccaatgagagac

SEQ ID NO: 239213 - DNA, 25 bp, Artificial
  Probe
ccttagagaccagtgcttctcaacc

SEQ ID NO: 239214 - DNA, 25 bp, Artificial
  Probe
caatcaacgagctccacgtccaatg

SEQ ID NO: 239215 - DNA, 25 bp, Artificial
  Probe
ccttctagtctccttagagaccagt

SEQ ID NO: 239216 - DNA, 25 bp, Artificial
  Probe
cttagagaccagtgcttctcaacct

SEQ ID NO: 239217 - DNA, 25 bp, Artificial
  Probe
ctccttagagaccagtgcttctcaa

SEQ ID NO: 239218 - DNA, 25 bp, Artificial
  Probe
ctactgaagaagacacctaacactg

SEQ ID NO: 239219 - DNA, 25 bp, Artificial
  Probe
attgcgactcataggtagagaacta

SEQ ID NO: 239220 - DNA, 25 bp, Artificial
  Probe
ctgtggagagctactgaagaagaca

SEQ ID NO: 239221 - DNA, 25 bp, Artificial
  Probe
tctccttagagaccagtgcttctca

SEQ ID NO: 239222 - DNA, 25 bp, Artificial
  Probe
tcaacgagctccacgtccaatgaga

SEQ ID NO: 239223 - DNA, 25 bp, Artificial
  Probe
ttctagtctccttagagaccagtgc

SEQ ID NO: 239224 - DNA, 25 bp, Artificial
  Probe
tgcgactcataggtagagaactata

SEQ ID NO: 239225 - DNA, 25 bp, Artificial
  Probe
atcaacgagctccacgtccaatgag

SEQ ID NO: 239226 - DNA, 25 bp, Artificial
  Probe
caacgagctccacgtccaatgagag

SEQ ID NO: 239227 - DNA, 25 bp, Artificial
  Probe
tgaccttctagtctccttagagacc

SEQ ID NO: 239228 - DNA, 25 bp, Artificial
  Probe
ttagagaccagtgcttctcaacctt

SEQ ID NO: 239229 - DNA, 25 bp, Artificial
  Probe
tccacgtccaatgagagaccctgtt

SEQ ID NO: 239230 - DNA, 25 bp, Artificial
  Probe
agtctccttagagaccagtgcttct

SEQ ID NO: 239231 - DNA, 25 bp, Artificial
  Probe
gaattgcgactcataggtagagaac

SEQ ID NO: 239232 - DNA, 25 bp, Artificial
  Probe
aatcaacgagctccacgtccaatga

SEQ ID NO: 239233 - DNA, 25 bp, Artificial
  Probe
ctgaagaagacacctaacactgacc

SEQ ID NO: 239234 - DNA, 25 bp, Artificial
  Probe
ctgaccttctagtctccttagagac

SEQ ID NO: 239235 - DNA, 25 bp, Artificial
  Probe
cacgtccaatgagagaccctgttca

SEQ ID NO: 239236 - DNA, 25 bp, Artificial
  Probe
cactgaccttctagtctccttagag

SEQ ID NO: 239237 - DNA, 25 bp, Artificial
  Probe
gttcgcctacttcaaggccaatgac

SEQ ID NO: 239238 - DNA, 25 bp, Artificial
  Probe
gagccctacaaattcctgcagttcg

SEQ ID NO: 239239 - DNA, 25 bp, Artificial
  Probe
ggctgcaccgtctgctgcgcgacag

SEQ ID NO: 239240 - DNA, 25 bp, Artificial
  Probe
ccttctgaaacatcctgaggacgag

SEQ ID NO: 239241 - DNA, 25 bp, Artificial
  Probe
ttcagcagcgcgagccctacaaatt

SEQ ID NO: 239242 - DNA, 25 bp, Artificial
  Probe
aggccaatgacctcccgaaggccat

SEQ ID NO: 239243 - DNA, 25 bp, Artificial
  Probe
cgcgagccctacaaattcctgcagt

SEQ ID NO: 239244 - DNA, 25 bp, Artificial
  Probe
agccctacaaattcctgcagttcgc

SEQ ID NO: 239245 - DNA, 25 bp, Artificial
  Probe
ttctgaaacatcctgaggacgagat

SEQ ID NO: 239246 - DNA, 25 bp, Artificial
  Probe
aatgacctcccgaaggccatcgctg

SEQ ID NO: 239247 - DNA, 25 bp, Artificial
  Probe
agttcgcctacttcaaggccaatga

SEQ ID NO: 239248 - DNA, 25 bp, Artificial
  Probe
catcctgaggacgagatgatgaaga

SEQ ID NO: 239249 - DNA, 25 bp, Artificial
  Probe
agcgcgagccctacaaattcctgca

SEQ ID NO: 239250 - DNA, 25 bp, Artificial
  Probe
tctgctgcgcgacagcgaggccttc

SEQ ID NO: 239251 - DNA, 25 bp, Artificial
  Probe
tctgaaacatcctgaggacgagatg

SEQ ID NO: 239252 - DNA, 25 bp, Artificial
  Probe
ttcgcctacttcaaggccaatgacc

SEQ ID NO: 239253 - DNA, 25 bp, Artificial
  Probe
tgcgcgacagcgaggccttctgcca

SEQ ID NO: 239254 - DNA, 25 bp, Artificial
  Probe
tcaaggccaatgacctcccgaaggc

SEQ ID NO: 239255 - DNA, 25 bp, Artificial
  Probe
tcgcctacttcaaggccaatgacct

SEQ ID NO: 239256 - DNA, 25 bp, Artificial
  Probe
gctgactttcagcagcgcgagccct

SEQ ID NO: 239257 - DNA, 25 bp, Artificial
  Probe
cttctgaaacatcctgaggacgaga

SEQ ID NO: 239258 - DNA, 25 bp, Artificial
  Probe
acctaccttctgaaacatcctgagg

SEQ ID NO: 239259 - DNA, 25 bp, Artificial
  Probe
tgaaacatcctgaggacgagatgat

SEQ ID NO: 239260 - DNA, 25 bp, Artificial
  Probe
gcagttcgcctacttcaaggccaat

SEQ ID NO: 239261 - DNA, 25 bp, Artificial
  Probe
gtctgctgcgcgacagcgaggcctt

SEQ ID NO: 239262 - DNA, 25 bp, Artificial
  Probe
ctgcagttcgcctacttcaaggcca

SEQ ID NO: 239263 - DNA, 25 bp, Artificial
  Probe
ttcaaggccaatgacctcccgaagg

SEQ ID NO: 239264 - DNA, 25 bp, Artificial
  Probe
cttcaaggccaatgacctcccgaag

SEQ ID NO: 239265 - DNA, 25 bp, Artificial
  Probe
tgagcctgcggctgcaccgtctgct

SEQ ID NO: 239266 - DNA, 25 bp, Artificial
  Probe
cctaccttctgaaacatcctgagga

SEQ ID NO: 239267 - DNA, 25 bp, Artificial
  Probe
ctgactttcagcagcgcgagcccta

SEQ ID NO: 239268 - DNA, 25 bp, Artificial
  Probe
ctgctgcgcgacagcgaggccttct

SEQ ID NO: 239269 - DNA, 25 bp, Artificial
  Probe
accttctgaaacatcctgaggacga

SEQ ID NO: 239270 - DNA, 25 bp, Artificial
  Probe
cccgggacgagctgatgccgctcga

SEQ ID NO: 239271 - DNA, 25 bp, Artificial
  Probe
cggtgctggctgactttcagcagcg

SEQ ID NO: 239272 - DNA, 25 bp, Artificial
  Probe
tacttcaaggccaatgacctcccga

SEQ ID NO: 239273 - DNA, 25 bp, Artificial
  Probe
tggctgactttcagcagcgcgagcc

SEQ ID NO: 239274 - DNA, 25 bp, Artificial
  Probe
tgcagttcgcctacttcaaggccaa

SEQ ID NO: 239275 - DNA, 25 bp, Artificial
  Probe
aacatcctgaggacgagatgatgaa

SEQ ID NO: 239276 - DNA, 25 bp, Artificial
  Probe
gcgagccctacaaattcctgcagtt

SEQ ID NO: 239277 - DNA, 25 bp, Artificial
  Probe
taccttctgaaacatcctgaggacg

SEQ ID NO: 239278 - DNA, 25 bp, Artificial
  Probe
aaggccaatgacctcccgaaggcca

SEQ ID NO: 239279 - DNA, 25 bp, Artificial
  Probe
tgcaccgtctgctgcgcgacagcga

SEQ ID NO: 239280 - DNA, 25 bp, Artificial
  Probe
gcgcgagccctacaaattcctgcag

SEQ ID NO: 239281 - DNA, 25 bp, Artificial
  Probe
gagcctgcggctgcaccgtctgctg

SEQ ID NO: 239282 - DNA, 25 bp, Artificial
  Probe
gaaacatcctgaggacgagatgatg

SEQ ID NO: 239283 - DNA, 25 bp, Artificial
  Probe
tttccctagagaccttaagacccag

SEQ ID NO: 239284 - DNA, 25 bp, Artificial
  Probe
tcattgcctcccagaactgaaagac

SEQ ID NO: 239285 - DNA, 25 bp, Artificial
  Probe
ccagcagggagctggctggattcat

SEQ ID NO: 239286 - DNA, 25 bp, Artificial
  Probe
tgaccctaccacctgggactgggga

SEQ ID NO: 239287 - DNA, 25 bp, Artificial
  Probe
gtctgccttcggactgcttactcta

SEQ ID NO: 239288 - DNA, 25 bp, Artificial
  Probe
agagaccttaagacccagctagctc

SEQ ID NO: 239289 - DNA, 25 bp, Artificial
  Probe
gtgactttactgttggcaactgacc

SEQ ID NO: 239290 - DNA, 25 bp, Artificial
  Probe
gagtctttgcggtcaatgggcagat

SEQ ID NO: 239291 - DNA, 25 bp, Artificial
  Probe
aggctgcccgcaggtgggctcacac

SEQ ID NO: 239292 - DNA, 25 bp, Artificial
  Probe
tcctgaaacatgaccttccctgcag

SEQ ID NO: 239293 - DNA, 25 bp, Artificial
  Probe
gaaggagcctggatgtccttgccac

SEQ ID NO: 239294 - DNA, 25 bp, Artificial
  Probe
tttctcgggacctgggtttgtgact

SEQ ID NO: 239295 - DNA, 25 bp, Artificial
  Probe
agattccctaggagccagcagggag

SEQ ID NO: 239296 - DNA, 25 bp, Artificial
  Probe
tttactgttggcaactgaccacagt

SEQ ID NO: 239297 - DNA, 25 bp, Artificial
  Probe
atgctgctagattccctaggagcca

SEQ ID NO: 239298 - DNA, 25 bp, Artificial
  Probe
actcctccagactcctgagtctttg

SEQ ID NO: 239299 - DNA, 25 bp, Artificial
  Probe
acacctcagttgatgctgctagatt

SEQ ID NO: 239300 - DNA, 25 bp, Artificial
  Probe
caggaaggacccattccgtctgcct

SEQ ID NO: 239301 - DNA, 25 bp, Artificial
  Probe
atccaggaaatgtgaccctaccacc

SEQ ID NO: 239302 - DNA, 25 bp, Artificial
  Probe
acctacctgcacaggaaggacccat

SEQ ID NO: 239303 - DNA, 25 bp, Artificial
  Probe
gggacctgggtttgtgactttactg

SEQ ID NO: 239304 - DNA, 25 bp, Artificial
  Probe
tgaaagaccgtcagcctggacatcc

SEQ ID NO: 239305 - DNA, 25 bp, Artificial
  Probe
gctagctctgactgcgattcacaca

SEQ ID NO: 239306 - DNA, 25 bp, Artificial
  Probe
gaaacatgaccttccctgcaggcca

SEQ ID NO: 239307 - DNA, 25 bp, Artificial
  Probe
tgactttactgttggcaactgacca

SEQ ID NO: 239308 - DNA, 25 bp, Artificial
  Probe
gctcacacctcagttgatgctgcta

SEQ ID NO: 239309 - DNA, 25 bp, Artificial
  Probe
gaaatgtgaccctaccacctgggac

SEQ ID NO: 239310 - DNA, 25 bp, Artificial
  Probe
accttaagacccagctagctctgac

SEQ ID NO: 239311 - DNA, 25 bp, Artificial
  Probe
ggacatcctgaaacatgaccttccc

SEQ ID NO: 239312 - DNA, 25 bp, Artificial
  Probe
gtcaatgggcagattctttgatcca

SEQ ID NO: 239313 - DNA, 25 bp, Artificial
  Probe
tgtttctcgggacctgggtttgtga

SEQ ID NO: 239314 - DNA, 25 bp, Artificial
  Probe
ctctagtgtttctcgggacctgggt

SEQ ID NO: 239315 - DNA, 25 bp, Artificial
  Probe
gctctctttccctagagaccttaag

SEQ ID NO: 239316 - DNA, 25 bp, Artificial
  Probe
ggaaggacccattccgtctgccttc

SEQ ID NO: 239317 - DNA, 25 bp, Artificial
  Probe
ggattcattgcctcccagaactgaa

SEQ ID NO: 239318 - DNA, 25 bp, Artificial
  Probe
cagaactgaaagaccgtcagcctgg

SEQ ID NO: 239319 - DNA, 25 bp, Artificial
  Probe
ccgcaggtgggctcacacctcagtt

SEQ ID NO: 239320 - DNA, 25 bp, Artificial
  Probe
tgaccacagtatgaagagaggctgc

SEQ ID NO: 239321 - DNA, 25 bp, Artificial
  Probe
gtaggctctctttccctagagacct

SEQ ID NO: 239322 - DNA, 25 bp, Artificial
  Probe
cagggagctggctggattcattgcc

SEQ ID NO: 239323 - DNA, 25 bp, Artificial
  Probe
ctcctgagtctttgcggtcaatggg

SEQ ID NO: 239324 - DNA, 25 bp, Artificial
  Probe
ctgggtttgtgactttactgttggc

SEQ ID NO: 239325 - DNA, 25 bp, Artificial
  Probe
actgaaagaccgtcagcctggacat

SEQ ID NO: 239326 - DNA, 25 bp, Artificial
  Probe
tttgatccaggaaatgtgaccctac

SEQ ID NO: 239327 - DNA, 25 bp, Artificial
  Probe
ctttgcggtcaatgggcagattctt

SEQ ID NO: 239328 - DNA, 25 bp, Artificial
  Probe
attccgtctgccttcggactgctta

SEQ ID NO: 239329 - DNA, 25 bp, Artificial
  Probe
tgtctgaatctcatctcactagaga

SEQ ID NO: 239330 - DNA, 25 bp, Artificial
  Probe
tgtgccgctttgagggtgatttcac

SEQ ID NO: 239331 - DNA, 25 bp, Artificial
  Probe
ctaccatgattgcttttgagggcct

SEQ ID NO: 239332 - DNA, 25 bp, Artificial
  Probe
agcgtaccaagtctggggtttatcg

SEQ ID NO: 239333 - DNA, 25 bp, Artificial
  Probe
gccacaacctctttacggaaacaga

SEQ ID NO: 239334 - DNA, 25 bp, Artificial
  Probe
atgtgccgctttgagggtgatttca

SEQ ID NO: 239335 - DNA, 25 bp, Artificial
  Probe
tgccacaacctctttacggaaacag

SEQ ID NO: 239336 - DNA, 25 bp, Artificial
  Probe
tttacggaaacagaacgggccagag

SEQ ID NO: 239337 - DNA, 25 bp, Artificial
  Probe
catgattgcttttgagggcctggaa

SEQ ID NO: 239338 - DNA, 25 bp, Artificial
  Probe
ccgctttgagggtgatttcacagag

SEQ ID NO: 239339 - DNA, 25 bp, Artificial
  Probe
ctttgagggtgatttcacagagctc

SEQ ID NO: 239340 - DNA, 25 bp, Artificial
  Probe
gggaaaacagaacctaccatgtgtc

SEQ ID NO: 239341 - DNA, 25 bp, Artificial
  Probe
tcctgctgtgagaaggaatgtgccg

SEQ ID NO: 239342 - DNA, 25 bp, Artificial
  Probe
acgccagcctgcttcctgctgtgag

SEQ ID NO: 239343 - DNA, 25 bp, Artificial
  Probe
cgcatggccttttactttctatggg

SEQ ID NO: 239344 - DNA, 25 bp, Artificial
  Probe
ccagcctgcttcctgctgtgagaag

SEQ ID NO: 239345 - DNA, 25 bp, Artificial
  Probe
tgccagagggacacgccagcctgct

SEQ ID NO: 239346 - DNA, 25 bp, Artificial
  Probe
gaatctcatctcactagagatgttt

SEQ ID NO: 239347 - DNA, 25 bp, Artificial
  Probe
agaacgggccagagcgtaccaagtc

SEQ ID NO: 239348 - DNA, 25 bp, Artificial
  Probe
agtgtctgaatctcatctcactaga

SEQ ID NO: 239349 - DNA, 25 bp, Artificial
  Probe
cagtgtctgaatctcatctcactag

SEQ ID NO: 239350 - DNA, 25 bp, Artificial
  Probe
tttgagggtgatttcacagagctct

SEQ ID NO: 239351 - DNA, 25 bp, Artificial
  Probe
ccaagtctggggtttatcgcatggc

SEQ ID NO: 239352 - DNA, 25 bp, Artificial
  Probe
acagaacgggccagagcgtaccaag

SEQ ID NO: 239353 - DNA, 25 bp, Artificial
  Probe
tctttacggaaacagaacgggccag

SEQ ID NO: 239354 - DNA, 25 bp, Artificial
  Probe
atcgcatggccttttactttctatg

SEQ ID NO: 239355 - DNA, 25 bp, Artificial
  Probe
agcctgcttcctgctgtgagaagga

SEQ ID NO: 239356 - DNA, 25 bp, Artificial
  Probe
tcacagagctctgtggggttctcat

SEQ ID NO: 239357 - DNA, 25 bp, Artificial
  Probe
gtgatttcacagagctctgtggggt

SEQ ID NO: 239358 - DNA, 25 bp, Artificial
  Probe
gtctggggtttatcgcatggccttt

SEQ ID NO: 239359 - DNA, 25 bp, Artificial
  Probe
gcgtaccaagtctggggtttatcgc

SEQ ID NO: 239360 - DNA, 25 bp, Artificial
  Probe
catggccttttactttctatgggga

SEQ ID NO: 239361 - DNA, 25 bp, Artificial
  Probe
ggaaaacagaacctaccatgtgtca

SEQ ID NO: 239362 - DNA, 25 bp, Artificial
  Probe
cgccagcctgcttcctgctgtgaga

SEQ ID NO: 239363 - DNA, 25 bp, Artificial
  Probe
ggggtttatcgcatggccttttact

SEQ ID NO: 239364 - DNA, 25 bp, Artificial
  Probe
gccagagcgtaccaagtctggggtt

SEQ ID NO: 239365 - DNA, 25 bp, Artificial
  Probe
gggtttatcgcatggccttttactt

SEQ ID NO: 239366 - DNA, 25 bp, Artificial
  Probe
ccatgtgtcaaactttttgatgtga

SEQ ID NO: 239367 - DNA, 25 bp, Artificial
  Probe
ccatgattgcttttgagggcctgga

SEQ ID NO: 239368 - DNA, 25 bp, Artificial
  Probe
gcttcctgctgtgagaaggaatgtg

SEQ ID NO: 239369 - DNA, 25 bp, Artificial
  Probe
ctaccatgtgtcaaactttttgatg

SEQ ID NO: 239370 - DNA, 25 bp, Artificial
  Probe
cctgcttcctgctgtgagaaggaat

SEQ ID NO: 239371 - DNA, 25 bp, Artificial
  Probe
gagggacacgccagcctgcttcctg

SEQ ID NO: 239372 - DNA, 25 bp, Artificial
  Probe
aatgtgccgctttgagggtgatttc

SEQ ID NO: 239373 - DNA, 25 bp, Artificial
  Probe
cttaactaccatgattgcttttgag

SEQ ID NO: 239374 - DNA, 25 bp, Artificial
  Probe
ccagagcgtaccaagtctggggttt

SEQ ID NO: 239375 - DNA, 25 bp, Artificial
  Probe
cgggtgccagtcacgcggtcactca

SEQ ID NO: 239376 - DNA, 25 bp, Artificial
  Probe
gcagaagctgccaccgttccgcgag

SEQ ID NO: 239377 - DNA, 25 bp, Artificial
  Probe
tgcaattaccgctgcgggtgccagt

SEQ ID NO: 239378 - DNA, 25 bp, Artificial
  Probe
agtgccatgggctttcgggttcctg

SEQ ID NO: 239379 - DNA, 25 bp, Artificial
  Probe
aactggctctccagatgccagcgca

SEQ ID NO: 239380 - DNA, 25 bp, Artificial
  Probe
cacggctgctggagcgcttccacgg

SEQ ID NO: 239381 - DNA, 25 bp, Artificial
  Probe
gcgcacggctgctggagcgcttcca

SEQ ID NO: 239382 - DNA, 25 bp, Artificial
  Probe
tctgcgcacctgctggcagaagctg

SEQ ID NO: 239383 - DNA, 25 bp, Artificial
  Probe
ctgttccatgggagagctcctacag

SEQ ID NO: 239384 - DNA, 25 bp, Artificial
  Probe
ggagagctcctacagtgtggttgtc

SEQ ID NO: 239385 - DNA, 25 bp, Artificial
  Probe
cgcaccgagtgtaagtgccatgggc

SEQ ID NO: 239386 - DNA, 25 bp, Artificial
  Probe
ggttcctgtgctctgcgcacctgct

SEQ ID NO: 239387 - DNA, 25 bp, Artificial
  Probe
tctccagatgccagcgcagcctggg

SEQ ID NO: 239388 - DNA, 25 bp, Artificial
  Probe
gcacggctgctggagcgcttccacg

SEQ ID NO: 239389 - DNA, 25 bp, Artificial
  Probe
ggaccaactggctctccagatgcca

SEQ ID NO: 239390 - DNA, 25 bp, Artificial
  Probe
tgggcaccaacgacggcaaagctct

SEQ ID NO: 239391 - DNA, 25 bp, Artificial
  Probe
tcctacagtgtggttgtcaggcacc

SEQ ID NO: 239392 - DNA, 25 bp, Artificial
  Probe
ctgcgcacctgctggcagaagctgc

SEQ ID NO: 239393 - DNA, 25 bp, Artificial
  Probe
tggacctccgggaccaactggctct

SEQ ID NO: 239394 - DNA, 25 bp, Artificial
  Probe
tgggctttcgggttcctgtgctctg

SEQ ID NO: 239395 - DNA, 25 bp, Artificial
  Probe
taccgctgcgggtgccagtcacgcg

SEQ ID NO: 239396 - DNA, 25 bp, Artificial
  Probe
ttctgggcactcctggacctccggg

SEQ ID NO: 239397 - DNA, 25 bp, Artificial
  Probe
cctgctggcagaagctgccaccgtt

SEQ ID NO: 239398 - DNA, 25 bp, Artificial
  Probe
gtgcggagccacacgcgcaccgagt

SEQ ID NO: 239399 - DNA, 25 bp, Artificial
  Probe
agaagtcaagactctttatggatgc

SEQ ID NO: 239400 - DNA, 25 bp, Artificial
  Probe
agccacacgcgcaccgagtgtaagt

SEQ ID NO: 239401 - DNA, 25 bp, Artificial
  Probe
aggctgcggagatgatgtcgacttt

SEQ ID NO: 239402 - DNA, 25 bp, Artificial
  Probe
ctgcgggtgccagtcacgcggtcac

SEQ ID NO: 239403 - DNA, 25 bp, Artificial
  Probe
tctgggcactcctggacctccggga

SEQ ID NO: 239404 - DNA, 25 bp, Artificial
  Probe
cgcgtcatgggcaccaacgacggca

SEQ ID NO: 239405 - DNA, 25 bp, Artificial
  Probe
tacagtgtggttgtcaggcaccccg

SEQ ID NO: 239406 - DNA, 25 bp, Artificial
  Probe
agctcctacagtgtggttgtcaggc

SEQ ID NO: 239407 - DNA, 25 bp, Artificial
  Probe
atgggagagctcctacagtgtggtt

SEQ ID NO: 239408 - DNA, 25 bp, Artificial
  Probe
gaccaactggctctccagatgccag

SEQ ID NO: 239409 - DNA, 25 bp, Artificial
  Probe
gctggcagaagctgccaccgttccg

SEQ ID NO: 239410 - DNA, 25 bp, Artificial
  Probe
catgggagagctcctacagtgtggt

SEQ ID NO: 239411 - DNA, 25 bp, Artificial
  Probe
accaacgacggcaaagctctgttgc

SEQ ID NO: 239412 - DNA, 25 bp, Artificial
  Probe
ctacagtgtggttgtcaggcacccc

SEQ ID NO: 239413 - DNA, 25 bp, Artificial
  Probe
ttatggatgcacagcacaagcgggg

SEQ ID NO: 239414 - DNA, 25 bp, Artificial
  Probe
ctcctacagtgtggttgtcaggcac

SEQ ID NO: 239415 - DNA, 25 bp, Artificial
  Probe
cacaagcggggacgtggagatatcc

SEQ ID NO: 239416 - DNA, 25 bp, Artificial
  Probe
accgagtgtaagtgccatgggcttt

SEQ ID NO: 239417 - DNA, 25 bp, Artificial
  Probe
ttccatgggagagctcctacagtgt

SEQ ID NO: 239418 - DNA, 25 bp, Artificial
  Probe
tgtgctctgcgcacctgctggcaga

SEQ ID NO: 239419 - DNA, 25 bp, Artificial
  Probe
acacgcgcaccgagtgtaagtgcca

SEQ ID NO: 239420 - DNA, 25 bp, Artificial
  Probe
aagctgccaccgttccgcgaggtgg

SEQ ID NO: 239421 - DNA, 25 bp, Artificial
  Probe
cagataatttggtctccttccaaag

SEQ ID NO: 239422 - DNA, 25 bp, Artificial
  Probe
ctgttttccggcagttttgattcgt

SEQ ID NO: 239423 - DNA, 25 bp, Artificial
  Probe
ccggcagttttgattcgtataaaat

SEQ ID NO: 239424 - DNA, 25 bp, Artificial
  Probe
tcagagactccctgtttatgccact

SEQ ID NO: 239425 - DNA, 25 bp, Artificial
  Probe
catacccgtggctacgagctttctg

SEQ ID NO: 239426 - DNA, 25 bp, Artificial
  Probe
tcctaccaatttcaatgcagaagag

SEQ ID NO: 239427 - DNA, 25 bp, Artificial
  Probe
ccaaacaacagaagagtgaattcag

SEQ ID NO: 239428 - DNA, 25 bp, Artificial
  Probe
agagtgtagcctttctagatttggc

SEQ ID NO: 239429 - DNA, 25 bp, Artificial
  Probe
gaagagacccattttttgacaaatc

SEQ ID NO: 239430 - DNA, 25 bp, Artificial
  Probe
gaattcagagactccctgtttatgc

SEQ ID NO: 239431 - DNA, 25 bp, Artificial
  Probe
aatttcaatgcagaagagacccatt

SEQ ID NO: 239432 - DNA, 25 bp, Artificial
  Probe
gaggaaactacctccttcgtgtcta

SEQ ID NO: 239433 - DNA, 25 bp, Artificial
  Probe
gtctccttccaaagaaggatacact

SEQ ID NO: 239434 - DNA, 25 bp, Artificial
  Probe
tactcagtaactggtttcacgggta

SEQ ID NO: 239435 - DNA, 25 bp, Artificial
  Probe
atacccgtggctacgagctttctgg

SEQ ID NO: 239436 - DNA, 25 bp, Artificial
  Probe
ttgacaaatcatttgtccagaagtg

SEQ ID NO: 239437 - DNA, 25 bp, Artificial
  Probe
gcacaccagataatttggtctcctt

SEQ ID NO: 239438 - DNA, 25 bp, Artificial
  Probe
gaaggatacactgaaccctggagct

SEQ ID NO: 239439 - DNA, 25 bp, Artificial
  Probe
aatcatttgtccagaagtgtgtttc

SEQ ID NO: 239440 - DNA, 25 bp, Artificial
  Probe
tcagggcttgcctctccttgactac

SEQ ID NO: 239441 - DNA, 25 bp, Artificial
  Probe
gtgtttcagggcttgcctctccttg

SEQ ID NO: 239442 - DNA, 25 bp, Artificial
  Probe
tttcacgggtattcggaataagagc

SEQ ID NO: 239443 - DNA, 25 bp, Artificial
  Probe
ctgttacatcatttcaagttgtaag

SEQ ID NO: 239444 - DNA, 25 bp, Artificial
  Probe
ccttccaaagaaggatacactgaac

SEQ ID NO: 239445 - DNA, 25 bp, Artificial
  Probe
gacaaatcatttgtccagaagtgtg

SEQ ID NO: 239446 - DNA, 25 bp, Artificial
  Probe
tagaatctgttttccggcagttttg

SEQ ID NO: 239447 - DNA, 25 bp, Artificial
  Probe
cagtaactggtttcacgggtattcg

SEQ ID NO: 239448 - DNA, 25 bp, Artificial
  Probe
tgtttcagggcttgcctctccttga

SEQ ID NO: 239449 - DNA, 25 bp, Artificial
  Probe
tacactgaaccctggagcttctctg

SEQ ID NO: 239450 - DNA, 25 bp, Artificial
  Probe
aactatagaatctgttttccggcag

SEQ ID NO: 239451 - DNA, 25 bp, Artificial
  Probe
gcctttctagatttggcaattaaaa

SEQ ID NO: 239452 - DNA, 25 bp, Artificial
  Probe
actacagggattgctttgtaaatgc

SEQ ID NO: 239453 - DNA, 25 bp, Artificial
  Probe
gaagtgtgtttcagggcttgcctct

SEQ ID NO: 239454 - DNA, 25 bp, Artificial
  Probe
atatcagagagaattgggggcccaa

SEQ ID NO: 239455 - DNA, 25 bp, Artificial
  Probe
cagaagagacccattttttgacaaa

SEQ ID NO: 239456 - DNA, 25 bp, Artificial
  Probe
ctccttgactacagggattgctttg

SEQ ID NO: 239457 - DNA, 25 bp, Artificial
  Probe
ttggtctccttccaaagaaggatac

SEQ ID NO: 239458 - DNA, 25 bp, Artificial
  Probe
taagtaacaccgtcactgaggaaac

SEQ ID NO: 239459 - DNA, 25 bp, Artificial
  Probe
ttatatcagagagaattgggggccc

SEQ ID NO: 239460 - DNA, 25 bp, Artificial
  Probe
agaagtgtgtttcagggcttgcctc

SEQ ID NO: 239461 - DNA, 25 bp, Artificial
  Probe
agactccctgtttatgccactgacc

SEQ ID NO: 239462 - DNA, 25 bp, Artificial
  Probe
aggatacactgaaccctggagcttc

SEQ ID NO: 239463 - DNA, 25 bp, Artificial
  Probe
aatgcagaagagacccattttttga

SEQ ID NO: 239464 - DNA, 25 bp, Artificial
  Probe
agtgaattcagagactccctgttta

SEQ ID NO: 239465 - DNA, 25 bp, Artificial
  Probe
attgggggcccaaacaacagaagag

SEQ ID NO: 239466 - DNA, 25 bp, Artificial
  Probe
ggagcttctctgttacatcatttca

SEQ ID NO: 239467 - DNA, 25 bp, Artificial
  Probe
catgttctgtctttttttttctctt

SEQ ID NO: 239468 - DNA, 25 bp, Artificial
  Probe
taccttcctgttccaagcttccact

SEQ ID NO: 239469 - DNA, 25 bp, Artificial
  Probe
gcgccttcgagcctggaagtccgat

SEQ ID NO: 239470 - DNA, 25 bp, Artificial
  Probe
gatggcgccttcgagcctggaagtc

SEQ ID NO: 239471 - DNA, 25 bp, Artificial
  Probe
gccttcgagcctggaagtccgatgt

SEQ ID NO: 239472 - DNA, 25 bp, Artificial
  Probe
aagtccgatgttttaatgtatttat

SEQ ID NO: 239473 - DNA, 25 bp, Artificial
  Probe
ccaagcttccactgactgttgtccc

SEQ ID NO: 239474 - DNA, 25 bp, Artificial
  Probe
gagcctggaagtccgatgttttaat

SEQ ID NO: 239475 - DNA, 25 bp, Artificial
  Probe
gttccaagcttccactgactgttgt

SEQ ID NO: 239476 - DNA, 25 bp, Artificial
  Probe
caaggcttgcttggggtgttggggc

SEQ ID NO: 239477 - DNA, 25 bp, Artificial
  Probe
gttaccttcctgttccaagcttcca

SEQ ID NO: 239478 - DNA, 25 bp, Artificial
  Probe
atggcgccttcgagcctggaagtcc

SEQ ID NO: 239479 - DNA, 25 bp, Artificial
  Probe
ccttcgagcctggaagtccgatgtt

SEQ ID NO: 239480 - DNA, 25 bp, Artificial
  Probe
cctgttccaagcttccactgactgt

SEQ ID NO: 239481 - DNA, 25 bp, Artificial
  Probe
tcctgttccaagcttccactgactg

SEQ ID NO: 239482 - DNA, 25 bp, Artificial
  Probe
gggtgttggggctccggtgggacag

SEQ ID NO: 239483 - DNA, 25 bp, Artificial
  Probe
cgagcctggaagtccgatgttttaa

SEQ ID NO: 239484 - DNA, 25 bp, Artificial
  Probe
ctccggtgggacagctgctatagct

SEQ ID NO: 239485 - DNA, 25 bp, Artificial
  Probe
tgttccaagcttccactgactgttg

SEQ ID NO: 239486 - DNA, 25 bp, Artificial
  Probe
tggttaccttcctgttccaagcttc

SEQ ID NO: 239487 - DNA, 25 bp, Artificial
  Probe
cgccttcgagcctggaagtccgatg

SEQ ID NO: 239488 - DNA, 25 bp, Artificial
  Probe
tccaagcttccactgactgttgtcc

SEQ ID NO: 239489 - DNA, 25 bp, Artificial
  Probe
ttccaagcttccactgactgttgtc

SEQ ID NO: 239490 - DNA, 25 bp, Artificial
  Probe
tatttggttaccttcctgttccaag

SEQ ID NO: 239491 - DNA, 25 bp, Artificial
  Probe
ttggggagggctgcaaggcttgctt

SEQ ID NO: 239492 - DNA, 25 bp, Artificial
  Probe
ggttttattatcatgttctgtcttt

SEQ ID NO: 239493 - DNA, 25 bp, Artificial
  Probe
tcgagcctggaagtccgatgtttta

SEQ ID NO: 239494 - DNA, 25 bp, Artificial
  Probe
gcttgcttggggtgttggggctccg

SEQ ID NO: 239495 - DNA, 25 bp, Artificial
  Probe
ttattatcatgttctgtcttttttt

SEQ ID NO: 239496 - DNA, 25 bp, Artificial
  Probe
aaagatggcgccttcgagcctggaa

SEQ ID NO: 239497 - DNA, 25 bp, Artificial
  Probe
ttcgagcctggaagtccgatgtttt

SEQ ID NO: 239498 - DNA, 25 bp, Artificial
  Probe
tcctcctgacttggggacctttttg

SEQ ID NO: 239499 - DNA, 25 bp, Artificial
  Probe
cactgactgttgtccccccccccag

SEQ ID NO: 239500 - DNA, 25 bp, Artificial
  Probe
agatggcgccttcgagcctggaagt

SEQ ID NO: 239501 - DNA, 25 bp, Artificial
  Probe
cttcgagcctggaagtccgatgttt

SEQ ID NO: 239502 - DNA, 25 bp, Artificial
  Probe
ggacctttttggggagggctgcaag

SEQ ID NO: 239503 - DNA, 25 bp, Artificial
  Probe
tttggttaccttcctgttccaagct

SEQ ID NO: 239504 - DNA, 25 bp, Artificial
  Probe
gcttccactgactgttgtccccccc

SEQ ID NO: 239505 - DNA, 25 bp, Artificial
  Probe
ttggttaccttcctgttccaagctt

SEQ ID NO: 239506 - DNA, 25 bp, Artificial
  Probe
aagatggcgccttcgagcctggaag

SEQ ID NO: 239507 - DNA, 25 bp, Artificial
  Probe
gctccggtgggacagctgctatagc

SEQ ID NO: 239508 - DNA, 25 bp, Artificial
  Probe
ctgttccaagcttccactgactgtt

SEQ ID NO: 239509 - DNA, 25 bp, Artificial
  Probe
ttcctgttccaagcttccactgact

SEQ ID NO: 239510 - DNA, 25 bp, Artificial
  Probe
gcttggggtgttggggctccggtgg

SEQ ID NO: 239511 - DNA, 25 bp, Artificial
  Probe
tccctcctcctgacttggggacctt

SEQ ID NO: 239512 - DNA, 25 bp, Artificial
  Probe
cctggaagtccgatgttttaatgta

SEQ ID NO: 239513 - DNA, 25 bp, Artificial
  Probe
gggcccattcagatttttcattctt

SEQ ID NO: 239514 - DNA, 25 bp, Artificial
  Probe
ctgttcccatgctgggtgtcctggg

SEQ ID NO: 239515 - DNA, 25 bp, Artificial
  Probe
gacctgactgcctctaagtgctgag

SEQ ID NO: 239516 - DNA, 25 bp, Artificial
  Probe
actgcctctaagtgctgagatgaat

SEQ ID NO: 239517 - DNA, 25 bp, Artificial
  Probe
ttgggtgatctgaccagtagagcag

SEQ ID NO: 239518 - DNA, 25 bp, Artificial
  Probe
ccatctggcccttgggtgatctgac

SEQ ID NO: 239519 - DNA, 25 bp, Artificial
  Probe
agtaggattactgacacagatgtac

SEQ ID NO: 239520 - DNA, 25 bp, Artificial
  Probe
tgtggccttgcatgggatcactgcc

SEQ ID NO: 239521 - DNA, 25 bp, Artificial
  Probe
caatcaaatagttgggcccattcag

SEQ ID NO: 239522 - DNA, 25 bp, Artificial
  Probe
tgtgaggctcgaagtgactcacagc

SEQ ID NO: 239523 - DNA, 25 bp, Artificial
  Probe
tggagacctgactgcctctaagtgc

SEQ ID NO: 239524 - DNA, 25 bp, Artificial
  Probe
tgccaatcaaatagttgggcccatt

SEQ ID NO: 239525 - DNA, 25 bp, Artificial
  Probe
tgacctatcctgtggccttgcatgg

SEQ ID NO: 239526 - DNA, 25 bp, Artificial
  Probe
gctggctgctattggccactggctt

SEQ ID NO: 239527 - DNA, 25 bp, Artificial
  Probe
ctggcccttgggtgatctgaccagt

SEQ ID NO: 239528 - DNA, 25 bp, Artificial
  Probe
ctctaagtgctgagatgaatggctg

SEQ ID NO: 239529 - DNA, 25 bp, Artificial
  Probe
ggaaatgtttttccagcactttctc

SEQ ID NO: 239530 - DNA, 25 bp, Artificial
  Probe
tctgaccagtagagcaggctaggtg

SEQ ID NO: 239531 - DNA, 25 bp, Artificial
  Probe
gccttgcatgggatcactgccaatc

SEQ ID NO: 239532 - DNA, 25 bp, Artificial
  Probe
acagatgtacccaagcaggttgtga

SEQ ID NO: 239533 - DNA, 25 bp, Artificial
  Probe
aatgtctctcataaagcctgcctgc

SEQ ID NO: 239534 - DNA, 25 bp, Artificial
  Probe
gctggctttggattcatggagacct

SEQ ID NO: 239535 - DNA, 25 bp, Artificial
  Probe
gctattggccactggcttgtgaggc

SEQ ID NO: 239536 - DNA, 25 bp, Artificial
  Probe
atagttgggcccattcagatttttc

SEQ ID NO: 239537 - DNA, 25 bp, Artificial
  Probe
ggtgatctgaccagtagagcaggct

SEQ ID NO: 239538 - DNA, 25 bp, Artificial
  Probe
ccaccaactgtgaaaaaattgtgaa

SEQ ID NO: 239539 - DNA, 25 bp, Artificial
  Probe
aaagctgttcccatgctgggtgtcc

SEQ ID NO: 239540 - DNA, 25 bp, Artificial
  Probe
tgacacagatgtacccaagcaggtt

SEQ ID NO: 239541 - DNA, 25 bp, Artificial
  Probe
gcatgggatcactgccaatcaaata

SEQ ID NO: 239542 - DNA, 25 bp, Artificial
  Probe
ggcttgtgaggctcgaagtgactca

SEQ ID NO: 239543 - DNA, 25 bp, Artificial
  Probe
tagaaatgtctctcataaagcctgc

SEQ ID NO: 239544 - DNA, 25 bp, Artificial
  Probe
tatcctgtggccttgcatgggatca

SEQ ID NO: 239545 - DNA, 25 bp, Artificial
  Probe
tgtttttccagcactttctctcagg

SEQ ID NO: 239546 - DNA, 25 bp, Artificial
  Probe
agatgaatggctgagccaccaactg

SEQ ID NO: 239547 - DNA, 25 bp, Artificial
  Probe
agagaacccatctggcccttgggtg

SEQ ID NO: 239548 - DNA, 25 bp, Artificial
  Probe
acaagagaacccatctggcccttgg

SEQ ID NO: 239549 - DNA, 25 bp, Artificial
  Probe
ttggccactggcttgtgaggctcga

SEQ ID NO: 239550 - DNA, 25 bp, Artificial
  Probe
tgtaacattggctggtctagaactg

SEQ ID NO: 239551 - DNA, 25 bp, Artificial
  Probe
ctgactgcctctaagtgctgagatg

SEQ ID NO: 239552 - DNA, 25 bp, Artificial
  Probe
agcaggttgtgacctatcctgtggc

SEQ ID NO: 239553 - DNA, 25 bp, Artificial
  Probe
ctgctattggccactggcttgtgag

SEQ ID NO: 239554 - DNA, 25 bp, Artificial
  Probe
cccatctggcccttgggtgatctga

SEQ ID NO: 239555 - DNA, 25 bp, Artificial
  Probe
cactggcttgtgaggctcgaagtga

SEQ ID NO: 239556 - DNA, 25 bp, Artificial
  Probe
gggatcactgccaatcaaatagttg

SEQ ID NO: 239557 - DNA, 25 bp, Artificial
  Probe
aatggctgagccaccaactgtgaaa

SEQ ID NO: 239558 - DNA, 25 bp, Artificial
  Probe
ccaagcaggttgtgacctatcctgt

SEQ ID NO: 239559 - DNA, 25 bp, Artificial
  Probe
tgatgccctgtgtgtcatccggaac

SEQ ID NO: 239560 - DNA, 25 bp, Artificial
  Probe
agctgaaatatcctgcgccctggca

SEQ ID NO: 239561 - DNA, 25 bp, Artificial
  Probe
atcctgcgccctggcagtcagccaa

SEQ ID NO: 239562 - DNA, 25 bp, Artificial
  Probe
gtcatccggaacctcatccgtgata

SEQ ID NO: 239563 - DNA, 25 bp, Artificial
  Probe
acctcatccgtgataaccgtgttgt

SEQ ID NO: 239564 - DNA, 25 bp, Artificial
  Probe
atgatgccctgtgtgtcatccggaa

SEQ ID NO: 239565 - DNA, 25 bp, Artificial
  Probe
ggcagctgaaatatcctgcgccctg

SEQ ID NO: 239566 - DNA, 25 bp, Artificial
  Probe
cagctgaaatatcctgcgccctggc

SEQ ID NO: 239567 - DNA, 25 bp, Artificial
  Probe
tccatgatgccctgtgtgtcatccg

SEQ ID NO: 239568 - DNA, 25 bp, Artificial
  Probe
tgtgtcatccggaacctcatccgtg

SEQ ID NO: 239569 - DNA, 25 bp, Artificial
  Probe
tcatccggaacctcatccgtgataa

SEQ ID NO: 239570 - DNA, 25 bp, Artificial
  Probe
ccctgtgtgtcatccggaacctcat

SEQ ID NO: 239571 - DNA, 25 bp, Artificial
  Probe
tcatccgtgataaccgtgttgtgta

SEQ ID NO: 239572 - DNA, 25 bp, Artificial
  Probe
gtgtgtcatccggaacctcatccgt

SEQ ID NO: 239573 - DNA, 25 bp, Artificial
  Probe
ctcatccgtgataaccgtgttgtgt

SEQ ID NO: 239574 - DNA, 25 bp, Artificial
  Probe
gtgtcatccggaacctcatccgtga

SEQ ID NO: 239575 - DNA, 25 bp, Artificial
  Probe
tgtcatccggaacctcatccgtgat

SEQ ID NO: 239576 - DNA, 25 bp, Artificial
  Probe
cctcatccgtgataaccgtgttgtg

SEQ ID NO: 239577 - DNA, 25 bp, Artificial
  Probe
tggcagtcagccaagaggcagacaa

SEQ ID NO: 239578 - DNA, 25 bp, Artificial
  Probe
tccggaacctcatccgtgataaccg

SEQ ID NO: 239579 - DNA, 25 bp, Artificial
  Probe
catccgtgataaccgtgttgtgtat

SEQ ID NO: 239580 - DNA, 25 bp, Artificial
  Probe
gatgccctgtgtgtcatccggaacc

SEQ ID NO: 239581 - DNA, 25 bp, Artificial
  Probe
atccggaacctcatccgtgataacc

SEQ ID NO: 239582 - DNA, 25 bp, Artificial
  Probe
gcagtcagccaagaggcagacaagt

SEQ ID NO: 239583 - DNA, 25 bp, Artificial
  Probe
ctccatgatgccctgtgtgtcatcc

SEQ ID NO: 239584 - DNA, 25 bp, Artificial
  Probe
catgatgccctgtgtgtcatccgga

SEQ ID NO: 239585 - DNA, 25 bp, Artificial
  Probe
ccgtgataaccgtgttgtgtatgga

SEQ ID NO: 239586 - DNA, 25 bp, Artificial
  Probe
gccctgtgtgtcatccggaacctca

SEQ ID NO: 239587 - DNA, 25 bp, Artificial
  Probe
ggcagtcagccaagaggcagacaag

SEQ ID NO: 239588 - DNA, 25 bp, Artificial
  Probe
gcgccctggcagtcagccaagaggc

SEQ ID NO: 239589 - DNA, 25 bp, Artificial
  Probe
ccatgatgccctgtgtgtcatccgg

SEQ ID NO: 239590 - DNA, 25 bp, Artificial
  Probe
ccggaacctcatccgtgataaccgt

SEQ ID NO: 239591 - DNA, 25 bp, Artificial
  Probe
aacctcatccgtgataaccgtgttg

SEQ ID NO: 239592 - DNA, 25 bp, Artificial
  Probe
ctgaaatatcctgcgccctggcagt

SEQ ID NO: 239593 - DNA, 25 bp, Artificial
  Probe
atgccctgtgtgtcatccggaacct

SEQ ID NO: 239594 - DNA, 25 bp, Artificial
  Probe
tgccctgtgtgtcatccggaacctc

SEQ ID NO: 239595 - DNA, 25 bp, Artificial
  Probe
ccctggcagtcagccaagaggcaga

SEQ ID NO: 239596 - DNA, 25 bp, Artificial
  Probe
cctgcgccctggcagtcagccaaga

SEQ ID NO: 239597 - DNA, 25 bp, Artificial
  Probe
cctgtgtgtcatccggaacctcatc

SEQ ID NO: 239598 - DNA, 25 bp, Artificial
  Probe
tgcgccctggcagtcagccaagagg

SEQ ID NO: 239599 - DNA, 25 bp, Artificial
  Probe
gcagctgaaatatcctgcgccctgg

SEQ ID NO: 239600 - DNA, 25 bp, Artificial
  Probe
ggaacctcatccgtgataaccgtgt

SEQ ID NO: 239601 - DNA, 25 bp, Artificial
  Probe
gaacctcatccgtgataaccgtgtt

SEQ ID NO: 239602 - DNA, 25 bp, Artificial
  Probe
catccggaacctcatccgtgataac

SEQ ID NO: 239603 - DNA, 25 bp, Artificial
  Probe
tatggaggaggggcagctgaaatat

SEQ ID NO: 239604 - DNA, 25 bp, Artificial
  Probe
gctgaaatatcctgcgccctggcag

SEQ ID NO: 239605 - DNA, 25 bp, Artificial
  Probe
cttccccacaaggaaactggtacag

SEQ ID NO: 239606 - DNA, 25 bp, Artificial
  Probe
ctctagtcacggttatgtctgagaa

SEQ ID NO: 239607 - DNA, 25 bp, Artificial
  Probe
ccagaacgcggatcccctcaagttt

SEQ ID NO: 239608 - DNA, 25 bp, Artificial
  Probe
tcagaactaggcaacttcgtggaag

SEQ ID NO: 239609 - DNA, 25 bp, Artificial
  Probe
ttcctggaaaatagggcagctccaa

SEQ ID NO: 239610 - DNA, 25 bp, Artificial
  Probe
aaactggtacaggaatgaagccctg

SEQ ID NO: 239611 - DNA, 25 bp, Artificial
  Probe
tcacaggatgactggcctcgggact

SEQ ID NO: 239612 - DNA, 25 bp, Artificial
  Probe
ggttatgtctgagaaccccgaactt

SEQ ID NO: 239613 - DNA, 25 bp, Artificial
  Probe
agtccagctgatgactccttgccct

SEQ ID NO: 239614 - DNA, 25 bp, Artificial
  Probe
aagtgacacgaacgagtctggaagg

SEQ ID NO: 239615 - DNA, 25 bp, Artificial
  Probe
aatagggcagctccaagaggacaga

SEQ ID NO: 239616 - DNA, 25 bp, Artificial
  Probe
atgcccacttgtcttccccatagag

SEQ ID NO: 239617 - DNA, 25 bp, Artificial
  Probe
taataaagctatttcgaagtgctac

SEQ ID NO: 239618 - DNA, 25 bp, Artificial
  Probe
gctttccgcggactcccgtggacga

SEQ ID NO: 239619 - DNA, 25 bp, Artificial
  Probe
ttatgtctgagaaccccgaacttat

SEQ ID NO: 239620 - DNA, 25 bp, Artificial
  Probe
ggaatgaagccctgctctctagtca

SEQ ID NO: 239621 - DNA, 25 bp, Artificial
  Probe
ctgaaaccaaaaactgtgggcaaat

SEQ ID NO: 239622 - DNA, 25 bp, Artificial
  Probe
acgacgcggggctagagtatcacag

SEQ ID NO: 239623 - DNA, 25 bp, Artificial
  Probe
tggggtcttccagtccaccaagagg

SEQ ID NO: 239624 - DNA, 25 bp, Artificial
  Probe
tccccatagagtatgaacagcaatg

SEQ ID NO: 239625 - DNA, 25 bp, Artificial
  Probe
acgcggatcccctcaagtttcctgg

SEQ ID NO: 239626 - DNA, 25 bp, Artificial
  Probe
cctcaagtttcctggggtcttccag

SEQ ID NO: 239627 - DNA, 25 bp, Artificial
  Probe
gagaaccccgaacttatgaataata

SEQ ID NO: 239628 - DNA, 25 bp, Artificial
  Probe
aaagctaaccagtggccagtccagc

SEQ ID NO: 239629 - DNA, 25 bp, Artificial
  Probe
cttgtcttccccatagagtatgaac

SEQ ID NO: 239630 - DNA, 25 bp, Artificial
  Probe
ggtcttccagtccaccaagaggtcc

SEQ ID NO: 239631 - DNA, 25 bp, Artificial
  Probe
gaaggagcctctgctatctactccc

SEQ ID NO: 239632 - DNA, 25 bp, Artificial
  Probe
ttttccagaaggagcctctgctatc

SEQ ID NO: 239633 - DNA, 25 bp, Artificial
  Probe
agagtatcacaggatgactggcctc

SEQ ID NO: 239634 - DNA, 25 bp, Artificial
  Probe
ctgagaaccccgaacttatgaataa

SEQ ID NO: 239635 - DNA, 25 bp, Artificial
  Probe
tgctctctagtcacggttatgtctg

SEQ ID NO: 239636 - DNA, 25 bp, Artificial
  Probe
ttttaaggccaagctaaacgttatg

SEQ ID NO: 239637 - DNA, 25 bp, Artificial
  Probe
gcccacttgtcttccccatagagta

SEQ ID NO: 239638 - DNA, 25 bp, Artificial
  Probe
ctaggcaacttcgtggaaggaagga

SEQ ID NO: 239639 - DNA, 25 bp, Artificial
  Probe
taaccagtggccagtccagctgatg

SEQ ID NO: 239640 - DNA, 25 bp, Artificial
  Probe
ccccaaaagtagctggcaaatattt

SEQ ID NO: 239641 - DNA, 25 bp, Artificial
  Probe
tatgtatggttttccagaaggagcc

SEQ ID NO: 239642 - DNA, 25 bp, Artificial
  Probe
agctaaacgttatgcccacttgtct

SEQ ID NO: 239643 - DNA, 25 bp, Artificial
  Probe
atgatgaaagctaaccagtggccag

SEQ ID NO: 239644 - DNA, 25 bp, Artificial
  Probe
ttttcctggaaaatagggcagctcc

SEQ ID NO: 239645 - DNA, 25 bp, Artificial
  Probe
gaaaccaaaaactgtgggcaaattg

SEQ ID NO: 239646 - DNA, 25 bp, Artificial
  Probe
tatctactccccaaaagtagctggc

SEQ ID NO: 239647 - DNA, 25 bp, Artificial
  Probe
gaacgagtctggaaggccccggact

SEQ ID NO: 239648 - DNA, 25 bp, Artificial
  Probe
gatcccctcaagtttcctggggtct

SEQ ID NO: 239649 - DNA, 25 bp, Artificial
  Probe
cacaaggaaactggtacaggaatga

SEQ ID NO: 239650 - DNA, 25 bp, Artificial
  Probe
cttaaactcgggtggaaggaatcag

SEQ ID NO: 239651 - DNA, 25 bp, Artificial
  Probe
accataactcagtctgaacgatgcc

SEQ ID NO: 239652 - DNA, 25 bp, Artificial
  Probe
ggaccataactcagtctgaacgatg

SEQ ID NO: 239653 - DNA, 25 bp, Artificial
  Probe
cagtctgaacgatgccctggttttg

SEQ ID NO: 239654 - DNA, 25 bp, Artificial
  Probe
gtgtggggaggttttgtaggaacag

SEQ ID NO: 239655 - DNA, 25 bp, Artificial
  Probe
ataactcagtctgaacgatgccctg

SEQ ID NO: 239656 - DNA, 25 bp, Artificial
  Probe
agtctgaacgatgccctggttttga

SEQ ID NO: 239657 - DNA, 25 bp, Artificial
  Probe
tgaacgatgccctggttttgatagg

SEQ ID NO: 239658 - DNA, 25 bp, Artificial
  Probe
actgcagcagaacactcttgacttg

SEQ ID NO: 239659 - DNA, 25 bp, Artificial
  Probe
acagggaccataactcagtctgaac

SEQ ID NO: 239660 - DNA, 25 bp, Artificial
  Probe
ctgcagcagaacactcttgacttgt

SEQ ID NO: 239661 - DNA, 25 bp, Artificial
  Probe
gcagaacactcttgacttgtgtggg

SEQ ID NO: 239662 - DNA, 25 bp, Artificial
  Probe
aactcagtctgaacgatgccctggt

SEQ ID NO: 239663 - DNA, 25 bp, Artificial
  Probe
gaacgatgccctggttttgataggg

SEQ ID NO: 239664 - DNA, 25 bp, Artificial
  Probe
taactcagtctgaacgatgccctgg

SEQ ID NO: 239665 - DNA, 25 bp, Artificial
  Probe
ctcagtctgaacgatgccctggttt

SEQ ID NO: 239666 - DNA, 25 bp, Artificial
  Probe
ggaacagggaccataactcagtctg

SEQ ID NO: 239667 - DNA, 25 bp, Artificial
  Probe
tcagtctgaacgatgccctggtttt

SEQ ID NO: 239668 - DNA, 25 bp, Artificial
  Probe
tatgacagactgcagcagaacactc

SEQ ID NO: 239669 - DNA, 25 bp, Artificial
  Probe
actcagtctgaacgatgccctggtt

SEQ ID NO: 239670 - DNA, 25 bp, Artificial
  Probe
aacgatgccctggttttgataggga

SEQ ID NO: 239671 - DNA, 25 bp, Artificial
  Probe
tgcagcagaacactcttgacttgtg

SEQ ID NO: 239672 - DNA, 25 bp, Artificial
  Probe
cgatgccctggttttgatagggatg

SEQ ID NO: 239673 - DNA, 25 bp, Artificial
  Probe
atgacagactgcagcagaacactct

SEQ ID NO: 239674 - DNA, 25 bp, Artificial
  Probe
gaacagggaccataactcagtctga

SEQ ID NO: 239675 - DNA, 25 bp, Artificial
  Probe
agcagaacactcttgacttgtgtgg

SEQ ID NO: 239676 - DNA, 25 bp, Artificial
  Probe
ctgaacgatgccctggttttgatag

SEQ ID NO: 239677 - DNA, 25 bp, Artificial
  Probe
gcctatgacagactgcagcagaaca

SEQ ID NO: 239678 - DNA, 25 bp, Artificial
  Probe
gaccataactcagtctgaacgatgc

SEQ ID NO: 239679 - DNA, 25 bp, Artificial
  Probe
gggaccataactcagtctgaacgat

SEQ ID NO: 239680 - DNA, 25 bp, Artificial
  Probe
tgacagactgcagcagaacactctt

SEQ ID NO: 239681 - DNA, 25 bp, Artificial
  Probe
agcctatgacagactgcagcagaac

SEQ ID NO: 239682 - DNA, 25 bp, Artificial
  Probe
gacagactgcagcagaacactcttg

SEQ ID NO: 239683 - DNA, 25 bp, Artificial
  Probe
ccataactcagtctgaacgatgccc

SEQ ID NO: 239684 - DNA, 25 bp, Artificial
  Probe
cagcagaacactcttgacttgtgtg

SEQ ID NO: 239685 - DNA, 25 bp, Artificial
  Probe
cctatgacagactgcagcagaacac

SEQ ID NO: 239686 - DNA, 25 bp, Artificial
  Probe
cagggaccataactcagtctgaacg

SEQ ID NO: 239687 - DNA, 25 bp, Artificial
  Probe
aacagggaccataactcagtctgaa

SEQ ID NO: 239688 - DNA, 25 bp, Artificial
  Probe
agggaccataactcagtctgaacga

SEQ ID NO: 239689 - DNA, 25 bp, Artificial
  Probe
cataactcagtctgaacgatgccct

SEQ ID NO: 239690 - DNA, 25 bp, Artificial
  Probe
gcagcagaacactcttgacttgtgt

SEQ ID NO: 239691 - DNA, 25 bp, Artificial
  Probe
cagactgcagcagaacactcttgac

SEQ ID NO: 239692 - DNA, 25 bp, Artificial
  Probe
acgatgccctggttttgatagggat

SEQ ID NO: 239693 - DNA, 25 bp, Artificial
  Probe
agactgcagcagaacactcttgact

SEQ ID NO: 239694 - DNA, 25 bp, Artificial
  Probe
gactgcagcagaacactcttgactt

SEQ ID NO: 239695 - DNA, 25 bp, Artificial
  Probe
ctatgacagactgcagcagaacact

SEQ ID NO: 239696 - DNA, 25 bp, Artificial
  Probe
acagactgcagcagaacactcttga

SEQ ID NO: 239697 - DNA, 25 bp, Artificial
  Probe
actcagtgtgctctgtgactgtgag

SEQ ID NO: 239698 - DNA, 25 bp, Artificial
  Probe
accgacaggtgacttttacaaagcg

SEQ ID NO: 239699 - DNA, 25 bp, Artificial
  Probe
gaacacagaggctgcgacagcccag

SEQ ID NO: 239700 - DNA, 25 bp, Artificial
  Probe
gtacaacgagcctcatgaaagcagg

SEQ ID NO: 239701 - DNA, 25 bp, Artificial
  Probe
tgaaagcaggacgaactcggatatt

SEQ ID NO: 239702 - DNA, 25 bp, Artificial
  Probe
gaggaaccgacaggtgacttttaca

SEQ ID NO: 239703 - DNA, 25 bp, Artificial
  Probe
cccagaccctgatacttcatatgtg

SEQ ID NO: 239704 - DNA, 25 bp, Artificial
  Probe
tggacaaagtccttctcaagtacac

SEQ ID NO: 239705 - DNA, 25 bp, Artificial
  Probe
ctctaacaagttgtttcagtacgcc

SEQ ID NO: 239706 - DNA, 25 bp, Artificial
  Probe
taacaagttgtttcagtacgccagc

SEQ ID NO: 239707 - DNA, 25 bp, Artificial
  Probe
gacaaagtccttctcaagtacaccg

SEQ ID NO: 239708 - DNA, 25 bp, Artificial
  Probe
cagtgtgctctgtgactgtgagata

SEQ ID NO: 239709 - DNA, 25 bp, Artificial
  Probe
tttcagtacgccagcactgacatgg

SEQ ID NO: 239710 - DNA, 25 bp, Artificial
  Probe
gacgaactcggatattgtggaggct

SEQ ID NO: 239711 - DNA, 25 bp, Artificial
  Probe
caacagctctaacaagttgtttcag

SEQ ID NO: 239712 - DNA, 25 bp, Artificial
  Probe
cgacaggtgacttttacaaagcgaa

SEQ ID NO: 239713 - DNA, 25 bp, Artificial
  Probe
caaattacacgcataatggatgaga

SEQ ID NO: 239714 - DNA, 25 bp, Artificial
  Probe
tgacttttacaaagcgaaagttcgg

SEQ ID NO: 239715 - DNA, 25 bp, Artificial
  Probe
cttctcaagtacaccgagtacaacg

SEQ ID NO: 239716 - DNA, 25 bp, Artificial
  Probe
agcaggacgaactcggatattgtgg

SEQ ID NO: 239717 - DNA, 25 bp, Artificial
  Probe
tctgtgactgtgagatagcactcat

SEQ ID NO: 239718 - DNA, 25 bp, Artificial
  Probe
gcactgacatggacaaagtccttct

SEQ ID NO: 239719 - DNA, 25 bp, Artificial
  Probe
ctgacatggacaaagtccttctcaa

SEQ ID NO: 239720 - DNA, 25 bp, Artificial
  Probe
gtgagatagcactcatcatcttcaa

SEQ ID NO: 239721 - DNA, 25 bp, Artificial
  Probe
gaaagcctatgaactcagtgtgctc

SEQ ID NO: 239722 - DNA, 25 bp, Artificial
  Probe
aagcaggacgaactcggatattgtg

SEQ ID NO: 239723 - DNA, 25 bp, Artificial
  Probe
caaagtccttctcaagtacaccgag

SEQ ID NO: 239724 - DNA, 25 bp, Artificial
  Probe
agcctatgaactcagtgtgctctgt

SEQ ID NO: 239725 - DNA, 25 bp, Artificial
  Probe
actcggatattgtggaggctctgaa

SEQ ID NO: 239726 - DNA, 25 bp, Artificial
  Probe
gtgtgctctgtgactgtgagatagc

SEQ ID NO: 239727 - DNA, 25 bp, Artificial
  Probe
gtccttctcaagtacaccgagtaca

SEQ ID NO: 239728 - DNA, 25 bp, Artificial
  Probe
gaaccgacaggtgacttttacaaag

SEQ ID NO: 239729 - DNA, 25 bp, Artificial
  Probe
agctctaacaagttgtttcagtacg

SEQ ID NO: 239730 - DNA, 25 bp, Artificial
  Probe
tgcgacagcccagaccctgatactt

SEQ ID NO: 239731 - DNA, 25 bp, Artificial
  Probe
ctgtgagatagcactcatcatcttc

SEQ ID NO: 239732 - DNA, 25 bp, Artificial
  Probe
agttgtttcagtacgccagcactga

SEQ ID NO: 239733 - DNA, 25 bp, Artificial
  Probe
tcaagtacaccgagtacaacgagcc

SEQ ID NO: 239734 - DNA, 25 bp, Artificial
  Probe
tgagaggaaccgacaggtgactttt

SEQ ID NO: 239735 - DNA, 25 bp, Artificial
  Probe
acacgcataatggatgagaggaacc

SEQ ID NO: 239736 - DNA, 25 bp, Artificial
  Probe
gacatggacaaagtccttctcaagt

SEQ ID NO: 239737 - DNA, 25 bp, Artificial
  Probe
tacacgcataatggatgagaggaac

SEQ ID NO: 239738 - DNA, 25 bp, Artificial
  Probe
agaccctgatacttcatatgtgcta

SEQ ID NO: 239739 - DNA, 25 bp, Artificial
  Probe
ccgagtacaacgagcctcatgaaag

SEQ ID NO: 239740 - DNA, 25 bp, Artificial
  Probe
agcccagaccctgatacttcatatg

SEQ ID NO: 239741 - DNA, 25 bp, Artificial
  Probe
acaagttgtttcagtacgccagcac

SEQ ID NO: 239742 - DNA, 25 bp, Artificial
  Probe
cctcatgaaagcaggacgaactcgg

SEQ ID NO: 239743 - DNA, 25 bp, Artificial
  Probe
tagcctccttaccactgggctggcg

SEQ ID NO: 239744 - DNA, 25 bp, Artificial
  Probe
tagcactagcctccttaccactggg

SEQ ID NO: 239745 - DNA, 25 bp, Artificial
  Probe
gacgtgtacagcacagaatgggtat

SEQ ID NO: 239746 - DNA, 25 bp, Artificial
  Probe
tctgcctcggctgtttgggacgtgt

SEQ ID NO: 239747 - DNA, 25 bp, Artificial
  Probe
tctctatcacggagcccatttctgg

SEQ ID NO: 239748 - DNA, 25 bp, Artificial
  Probe
tcacggagcccatttctgggcagtg

SEQ ID NO: 239749 - DNA, 25 bp, Artificial
  Probe
gcggccagtgaactgcagagcatcc

SEQ ID NO: 239750 - DNA, 25 bp, Artificial
  Probe
gcctcggctgtttgggacgtgtaca

SEQ ID NO: 239751 - DNA, 25 bp, Artificial
  Probe
cggctcagccaaagaggcggccagt

SEQ ID NO: 239752 - DNA, 25 bp, Artificial
  Probe
gctgtttgggacgtgtacagcacag

SEQ ID NO: 239753 - DNA, 25 bp, Artificial
  Probe
cggctgtttgggacgtgtacagcac

SEQ ID NO: 239754 - DNA, 25 bp, Artificial
  Probe
ggagcccatttctgggcagtgcccg

SEQ ID NO: 239755 - DNA, 25 bp, Artificial
  Probe
cgtgtacagcacagaatgggtattt

SEQ ID NO: 239756 - DNA, 25 bp, Artificial
  Probe
ttgggacgtgtacagcacagaatgg

SEQ ID NO: 239757 - DNA, 25 bp, Artificial
  Probe
tgaactgcagagcatccagagactg

SEQ ID NO: 239758 - DNA, 25 bp, Artificial
  Probe
ggaaatagccgtgagcccagtccac

SEQ ID NO: 239759 - DNA, 25 bp, Artificial
  Probe
agtgaactgcagagcatccagagac

SEQ ID NO: 239760 - DNA, 25 bp, Artificial
  Probe
gtttgggacgtgtacagcacagaat

SEQ ID NO: 239761 - DNA, 25 bp, Artificial
  Probe
ctgtttgggacgtgtacagcacaga

SEQ ID NO: 239762 - DNA, 25 bp, Artificial
  Probe
tgcctcggctgtttgggacgtgtac

SEQ ID NO: 239763 - DNA, 25 bp, Artificial
  Probe
tggaaatagccgtgagcccagtcca

SEQ ID NO: 239764 - DNA, 25 bp, Artificial
  Probe
cagagcatccagagactggtgagtg

SEQ ID NO: 239765 - DNA, 25 bp, Artificial
  Probe
gaactgcagagcatccagagactgg

SEQ ID NO: 239766 - DNA, 25 bp, Artificial
  Probe
acggagcccatttctgggcagtgcc

SEQ ID NO: 239767 - DNA, 25 bp, Artificial
  Probe
cacggagcccatttctgggcagtgc

SEQ ID NO: 239768 - DNA, 25 bp, Artificial
  Probe
ctggttctctatcacggagcccatt

SEQ ID NO: 239769 - DNA, 25 bp, Artificial
  Probe
cgctggttctctatcacggagccca

SEQ ID NO: 239770 - DNA, 25 bp, Artificial
  Probe
ctgcagagcatccagagactggtga

SEQ ID NO: 239771 - DNA, 25 bp, Artificial
  Probe
gctggttctctatcacggagcccat

SEQ ID NO: 239772 - DNA, 25 bp, Artificial
  Probe
gctcagccaaagaggcggccagtga

SEQ ID NO: 239773 - DNA, 25 bp, Artificial
  Probe
gagctccaagggtggaaatagccgt

SEQ ID NO: 239774 - DNA, 25 bp, Artificial
  Probe
gccagtgaactgcagagcatccaga

SEQ ID NO: 239775 - DNA, 25 bp, Artificial
  Probe
agcggctcagccaaagaggcggcca

SEQ ID NO: 239776 - DNA, 25 bp, Artificial
  Probe
tggttctctatcacggagcccattt

SEQ ID NO: 239777 - DNA, 25 bp, Artificial
  Probe
agctccaagggtggaaatagccgtg

SEQ ID NO: 239778 - DNA, 25 bp, Artificial
  Probe
ccagtgaactgcagagcatccagag

SEQ ID NO: 239779 - DNA, 25 bp, Artificial
  Probe
agcctccttaccactgggctggcgg

SEQ ID NO: 239780 - DNA, 25 bp, Artificial
  Probe
tttgggacgtgtacagcacagaatg

SEQ ID NO: 239781 - DNA, 25 bp, Artificial
  Probe
tgcagagcatccagagactggtgag

SEQ ID NO: 239782 - DNA, 25 bp, Artificial
  Probe
gaaatagccgtgagcccagtccact

SEQ ID NO: 239783 - DNA, 25 bp, Artificial
  Probe
aactgcagagcatccagagactggt

SEQ ID NO: 239784 - DNA, 25 bp, Artificial
  Probe
gccgctggttctctatcacggagcc

SEQ ID NO: 239785 - DNA, 25 bp, Artificial
  Probe
gccgccgctggttctctatcacgga

SEQ ID NO: 239786 - DNA, 25 bp, Artificial
  Probe
cggccagtgaactgcagagcatcca

SEQ ID NO: 239787 - DNA, 25 bp, Artificial
  Probe
aggcggccagtgaactgcagagcat

SEQ ID NO: 239788 - DNA, 25 bp, Artificial
  Probe
atcacggagcccatttctgggcagt

SEQ ID NO: 239789 - DNA, 25 bp, Artificial
  Probe
tggtcagtcacagatccaaagcttt

SEQ ID NO: 239790 - DNA, 25 bp, Artificial
  Probe
cgaaatgtaacctggtcagtcacag

SEQ ID NO: 239791 - DNA, 25 bp, Artificial
  Probe
atgtaacctggtcagtcacagatcc

SEQ ID NO: 239792 - DNA, 25 bp, Artificial
  Probe
gatgttacctttttgtgaattctca

SEQ ID NO: 239793 - DNA, 25 bp, Artificial
  Probe
ggtcagtcacagatccaaagctttt

SEQ ID NO: 239794 - DNA, 25 bp, Artificial
  Probe
tgtaacctggtcagtcacagatcca

SEQ ID NO: 239795 - DNA, 25 bp, Artificial
  Probe
agcccaagaaatggctgattgtatg

SEQ ID NO: 239796 - DNA, 25 bp, Artificial
  Probe
actcagcccaagaaatggctgattg

SEQ ID NO: 239797 - DNA, 25 bp, Artificial
  Probe
tactcagcccaagaaatggctgatt

SEQ ID NO: 239798 - DNA, 25 bp, Artificial
  Probe
agctttcaaagactaacagataaag

SEQ ID NO: 239799 - DNA, 25 bp, Artificial
  Probe
catccgaaatgtaacctggtcagtc

SEQ ID NO: 239800 - DNA, 25 bp, Artificial
  Probe
gaaatgtaacctggtcagtcacaga

SEQ ID NO: 239801 - DNA, 25 bp, Artificial
  Probe
aaatatttttgatttcatcaaatta

SEQ ID NO: 239802 - DNA, 25 bp, Artificial
  Probe
aacagagacacattgtatgagttgt

SEQ ID NO: 239803 - DNA, 25 bp, Artificial
  Probe
gtcagtcacagatccaaagcttttc

SEQ ID NO: 239804 - DNA, 25 bp, Artificial
  Probe
taacctggtcagtcacagatccaaa

SEQ ID NO: 239805 - DNA, 25 bp, Artificial
  Probe
aatgtaacctggtcagtcacagatc

SEQ ID NO: 239806 - DNA, 25 bp, Artificial
  Probe
tccatccgaaatgtaacctggtcag

SEQ ID NO: 239807 - DNA, 25 bp, Artificial
  Probe
ctccatccgaaatgtaacctggtca

SEQ ID NO: 239808 - DNA, 25 bp, Artificial
  Probe
gctttcaaagactaacagataaaga

SEQ ID NO: 239809 - DNA, 25 bp, Artificial
  Probe
tcaaattatttattcattaaaagaa

SEQ ID NO: 239810 - DNA, 25 bp, Artificial
  Probe
ccatccgaaatgtaacctggtcagt

SEQ ID NO: 239811 - DNA, 25 bp, Artificial
  Probe
ctcagcccaagaaatggctgattgt

SEQ ID NO: 239812 - DNA, 25 bp, Artificial
  Probe
cagcccaagaaatggctgattgtat

SEQ ID NO: 239813 - DNA, 25 bp, Artificial
  Probe
cctggtcagtcacagatccaaagct

SEQ ID NO: 239814 - DNA, 25 bp, Artificial
  Probe
gggaggcctccatccgaaatgtaac

SEQ ID NO: 239815 - DNA, 25 bp, Artificial
  Probe
tcagtcacagatccaaagcttttcc

SEQ ID NO: 239816 - DNA, 25 bp, Artificial
  Probe
ccgaaatgtaacctggtcagtcaca

SEQ ID NO: 239817 - DNA, 25 bp, Artificial
  Probe
ttccatttgtttatattgtaaatat

SEQ ID NO: 239818 - DNA, 25 bp, Artificial
  Probe
agaaaagctggggaggcctccatcc

SEQ ID NO: 239819 - DNA, 25 bp, Artificial
  Probe
gcctccatccgaaatgtaacctggt

SEQ ID NO: 239820 - DNA, 25 bp, Artificial
  Probe
cctccatccgaaatgtaacctggtc

SEQ ID NO: 239821 - DNA, 25 bp, Artificial
  Probe
tttcaaagactaacagataaagatg

SEQ ID NO: 239822 - DNA, 25 bp, Artificial
  Probe
gtaacctggtcagtcacagatccaa

SEQ ID NO: 239823 - DNA, 25 bp, Artificial
  Probe
aaatgtaacctggtcagtcacagat

SEQ ID NO: 239824 - DNA, 25 bp, Artificial
  Probe
ttactcagcccaagaaatggctgat

SEQ ID NO: 239825 - DNA, 25 bp, Artificial
  Probe
ggcctccatccgaaatgtaacctgg

SEQ ID NO: 239826 - DNA, 25 bp, Artificial
  Probe
ctggtcagtcacagatccaaagctt

SEQ ID NO: 239827 - DNA, 25 bp, Artificial
  Probe
aggcctccatccgaaatgtaacctg

SEQ ID NO: 239828 - DNA, 25 bp, Artificial
  Probe
aacctggtcagtcacagatccaaag

SEQ ID NO: 239829 - DNA, 25 bp, Artificial
  Probe
agattatatagctttcaaagactaa

SEQ ID NO: 239830 - DNA, 25 bp, Artificial
  Probe
ttaacatgttgcataatataagatt

SEQ ID NO: 239831 - DNA, 25 bp, Artificial
  Probe
tcagcccaagaaatggctgattgta

SEQ ID NO: 239832 - DNA, 25 bp, Artificial
  Probe
acctggtcagtcacagatccaaagc

SEQ ID NO: 239833 - DNA, 25 bp, Artificial
  Probe
tccgaaatgtaacctggtcagtcac

SEQ ID NO: 239834 - DNA, 25 bp, Artificial
  Probe
atccgaaatgtaacctggtcagtca

SEQ ID NO: 239835 - DNA, 25 bp, Artificial
  Probe
caagaacataccacactgcgatgcc

SEQ ID NO: 239836 - DNA, 25 bp, Artificial
  Probe
tggggctttgctcacaccacctggg

SEQ ID NO: 239837 - DNA, 25 bp, Artificial
  Probe
ggggatattgctctccacctctacc

SEQ ID NO: 239838 - DNA, 25 bp, Artificial
  Probe
acctggggatattgctctccacctc

SEQ ID NO: 239839 - DNA, 25 bp, Artificial
  Probe
accacctggggatattgctctccac

SEQ ID NO: 239840 - DNA, 25 bp, Artificial
  Probe
aatggtttcagctcccgcaggtgtg

SEQ ID NO: 239841 - DNA, 25 bp, Artificial
  Probe
gcttctttgtctttgtgcaaacaga

SEQ ID NO: 239842 - DNA, 25 bp, Artificial
  Probe
actttgggattcttcgttgctttga

SEQ ID NO: 239843 - DNA, 25 bp, Artificial
  Probe
ctcccgcaggtgtgaagtgaaaagg

SEQ ID NO: 239844 - DNA, 25 bp, Artificial
  Probe
agaacataccacactgcgatgcctt

SEQ ID NO: 239845 - DNA, 25 bp, Artificial
  Probe
gtcactgacatgtctaaatgatgtg

SEQ ID NO: 239846 - DNA, 25 bp, Artificial
  Probe
ggcaatggtttcagctcccgcaggt

SEQ ID NO: 239847 - DNA, 25 bp, Artificial
  Probe
gtttacaagaacataccacactgcg

SEQ ID NO: 239848 - DNA, 25 bp, Artificial
  Probe
ctttgtgcaaacagaggaagcttgg

SEQ ID NO: 239849 - DNA, 25 bp, Artificial
  Probe
acaggaaatgcttctttgtctttgt

SEQ ID NO: 239850 - DNA, 25 bp, Artificial
  Probe
ctgcttcctggcagtcactgacatg

SEQ ID NO: 239851 - DNA, 25 bp, Artificial
  Probe
ctttgtctttgtgcaaacagaggaa

SEQ ID NO: 239852 - DNA, 25 bp, Artificial
  Probe
tctttgtgcaaacagaggaagcttg

SEQ ID NO: 239853 - DNA, 25 bp, Artificial
  Probe
ttcagctcccgcaggtgtgaagtga

SEQ ID NO: 239854 - DNA, 25 bp, Artificial
  Probe
gaagcttggggctttgctcacacca

SEQ ID NO: 239855 - DNA, 25 bp, Artificial
  Probe
gctcacaccacctggggatattgct

SEQ ID NO: 239856 - DNA, 25 bp, Artificial
  Probe
cagcattcagacctgcttcctggca

SEQ ID NO: 239857 - DNA, 25 bp, Artificial
  Probe
gcagtcactgacatgtctaaatgat

SEQ ID NO: 239858 - DNA, 25 bp, Artificial
  Probe
ccagggcaatggtttcagctcccgc

SEQ ID NO: 239859 - DNA, 25 bp, Artificial
  Probe
gggatattgctctccacctctacca

SEQ ID NO: 239860 - DNA, 25 bp, Artificial
  Probe
gtgactttgggattcttcgttgctt

SEQ ID NO: 239861 - DNA, 25 bp, Artificial
  Probe
tgccactgagcaataaaatcattag

SEQ ID NO: 239862 - DNA, 25 bp, Artificial
  Probe
ttctttgtctttgtgcaaacagagg

SEQ ID NO: 239863 - DNA, 25 bp, Artificial
  Probe
ctttgctcacaccacctggggatat

SEQ ID NO: 239864 - DNA, 25 bp, Artificial
  Probe
agacctgcttcctggcagtcactga

SEQ ID NO: 239865 - DNA, 25 bp, Artificial
  Probe
tcccgcaggtgtgaagtgaaaagga

SEQ ID NO: 239866 - DNA, 25 bp, Artificial
  Probe
gtctttgtgcaaacagaggaagctt

SEQ ID NO: 239867 - DNA, 25 bp, Artificial
  Probe
aacagaggaagcttggggctttgct

SEQ ID NO: 239868 - DNA, 25 bp, Artificial
  Probe
tgcttcctggcagtcactgacatgt

SEQ ID NO: 239869 - DNA, 25 bp, Artificial
  Probe
tgtgactttgggattcttcgttgct

SEQ ID NO: 239870 - DNA, 25 bp, Artificial
  Probe
tcagacctgcttcctggcagtcact

SEQ ID NO: 239871 - DNA, 25 bp, Artificial
  Probe
gcttggggctttgctcacaccacct

SEQ ID NO: 239872 - DNA, 25 bp, Artificial
  Probe
tacaagaacataccacactgcgatg

SEQ ID NO: 239873 - DNA, 25 bp, Artificial
  Probe
caccacctggggatattgctctcca

SEQ ID NO: 239874 - DNA, 25 bp, Artificial
  Probe
caaacagaggaagcttggggctttg

SEQ ID NO: 239875 - DNA, 25 bp, Artificial
  Probe
cacctggggatattgctctccacct

SEQ ID NO: 239876 - DNA, 25 bp, Artificial
  Probe
gactttgggattcttcgttgctttg

SEQ ID NO: 239877 - DNA, 25 bp, Artificial
  Probe
ttgtctttgtgcaaacagaggaagc

SEQ ID NO: 239878 - DNA, 25 bp, Artificial
  Probe
actgacatgtctaaatgatgtgact

SEQ ID NO: 239879 - DNA, 25 bp, Artificial
  Probe
agtcactgacatgtctaaatgatgt

SEQ ID NO: 239880 - DNA, 25 bp, Artificial
  Probe
acagaggaagcttggggctttgctc

SEQ ID NO: 239881 - DNA, 25 bp, Artificial
  Probe
aagtttttgctatatcttctggttt

SEQ ID NO: 239882 - DNA, 25 bp, Artificial
  Probe
tgtttttaggtctatgaatggaacg

SEQ ID NO: 239883 - DNA, 25 bp, Artificial
  Probe
tttttaggtctatgaatggaacgtt

SEQ ID NO: 239884 - DNA, 25 bp, Artificial
  Probe
tcctcggcttgcttctcctgctctc

SEQ ID NO: 239885 - DNA, 25 bp, Artificial
  Probe
ccctcctcggcttgcttctcctgct

SEQ ID NO: 239886 - DNA, 25 bp, Artificial
  Probe
tgagcttgatcttttgaaagtttta

SEQ ID NO: 239887 - DNA, 25 bp, Artificial
  Probe
gctatatcttctggttttcttaaga

SEQ ID NO: 239888 - DNA, 25 bp, Artificial
  Probe
ttgctatatcttctggttttcttaa

SEQ ID NO: 239889 - DNA, 25 bp, Artificial
  Probe
tttgctatatcttctggttttctta

SEQ ID NO: 239890 - DNA, 25 bp, Artificial
  Probe
cagggctttgagcttgatcttttga

SEQ ID NO: 239891 - DNA, 25 bp, Artificial
  Probe
gaggcgtcgatagtcacgttttctg

SEQ ID NO: 239892 - DNA, 25 bp, Artificial
  Probe
tgttcatatcatctcggggtcgatt

SEQ ID NO: 239893 - DNA, 25 bp, Artificial
  Probe
aggcagaggcgtcgatagtcacgtt

SEQ ID NO: 239894 - DNA, 25 bp, Artificial
  Probe
gtttttaggtctatgaatggaacgt

SEQ ID NO: 239895 - DNA, 25 bp, Artificial
  Probe
atatcttctggttttcttaagaagc

SEQ ID NO: 239896 - DNA, 25 bp, Artificial
  Probe
gtttttgctatatcttctggttttc

SEQ ID NO: 239897 - DNA, 25 bp, Artificial
  Probe
tgctatatcttctggttttcttaag

SEQ ID NO: 239898 - DNA, 25 bp, Artificial
  Probe
agaggcgtcgatagtcacgttttct

SEQ ID NO: 239899 - DNA, 25 bp, Artificial
  Probe
ttttgctatatcttctggttttctt

SEQ ID NO: 239900 - DNA, 25 bp, Artificial
  Probe
gcgtcgatagtcacgttttctggtc

SEQ ID NO: 239901 - DNA, 25 bp, Artificial
  Probe
gggctttgagcttgatcttttgaaa

SEQ ID NO: 239902 - DNA, 25 bp, Artificial
  Probe
ctgttcatatcatctcggggtcgat

SEQ ID NO: 239903 - DNA, 25 bp, Artificial
  Probe
ctcggcttgcttctcctgctctccc

SEQ ID NO: 239904 - DNA, 25 bp, Artificial
  Probe
cagaggcgtcgatagtcacgttttc

SEQ ID NO: 239905 - DNA, 25 bp, Artificial
  Probe
gaagtttttgctatatcttctggtt

SEQ ID NO: 239906 - DNA, 25 bp, Artificial
  Probe
ggcttgcttctcctgctctcccgac

SEQ ID NO: 239907 - DNA, 25 bp, Artificial
  Probe
tcggcttgcttctcctgctctcccg

SEQ ID NO: 239908 - DNA, 25 bp, Artificial
  Probe
tttttgctatatcttctggttttct

SEQ ID NO: 239909 - DNA, 25 bp, Artificial
  Probe
aggcgtcgatagtcacgttttctgg

SEQ ID NO: 239910 - DNA, 25 bp, Artificial
  Probe
ttgagcttgatcttttgaaagtttt

SEQ ID NO: 239911 - DNA, 25 bp, Artificial
  Probe
cctcggcttgcttctcctgctctcc

SEQ ID NO: 239912 - DNA, 25 bp, Artificial
  Probe
tttgagcttgatcttttgaaagttt

SEQ ID NO: 239913 - DNA, 25 bp, Artificial
  Probe
cccctcctcggcttgcttctcctgc

SEQ ID NO: 239914 - DNA, 25 bp, Artificial
  Probe
tctattgaagtttttgctatatctt

SEQ ID NO: 239915 - DNA, 25 bp, Artificial
  Probe
agggctttgagcttgatcttttgaa

SEQ ID NO: 239916 - DNA, 25 bp, Artificial
  Probe
cggcttgcttctcctgctctcccga

SEQ ID NO: 239917 - DNA, 25 bp, Artificial
  Probe
cctcctcggcttgcttctcctgctc

SEQ ID NO: 239918 - DNA, 25 bp, Artificial
  Probe
tatatcttctggttttcttaagaag

SEQ ID NO: 239919 - DNA, 25 bp, Artificial
  Probe
ggcgtcgatagtcacgttttctggt

SEQ ID NO: 239920 - DNA, 25 bp, Artificial
  Probe
tatcttctggttttcttaagaagct

SEQ ID NO: 239921 - DNA, 25 bp, Artificial
  Probe
ggcagaggcgtcgatagtcacgttt

SEQ ID NO: 239922 - DNA, 25 bp, Artificial
  Probe
ctcctcggcttgcttctcctgctct

SEQ ID NO: 239923 - DNA, 25 bp, Artificial
  Probe
ggctttgagcttgatcttttgaaag

SEQ ID NO: 239924 - DNA, 25 bp, Artificial
  Probe
ctttgagcttgatcttttgaaagtt

SEQ ID NO: 239925 - DNA, 25 bp, Artificial
  Probe
ttttaggtctatgaatggaacgttg

SEQ ID NO: 239926 - DNA, 25 bp, Artificial
  Probe
ctatatcttctggttttcttaagaa

SEQ ID NO: 239927 - DNA, 25 bp, Artificial
  Probe
aatggcacgggtctttacagttctt

SEQ ID NO: 239928 - DNA, 25 bp, Artificial
  Probe
ggaataaaatccgagccattgggaa

SEQ ID NO: 239929 - DNA, 25 bp, Artificial
  Probe
tggcacgggtctttacagttcttcg

SEQ ID NO: 239930 - DNA, 25 bp, Artificial
  Probe
ataaaatccgagccattgggaaaat

SEQ ID NO: 239931 - DNA, 25 bp, Artificial
  Probe
tcttcgggaagagagtgagaatgtg

SEQ ID NO: 239932 - DNA, 25 bp, Artificial
  Probe
ttacagttcttcgggaagagagtga

SEQ ID NO: 239933 - DNA, 25 bp, Artificial
  Probe
gtctttacagttcttcgggaagaga

SEQ ID NO: 239934 - DNA, 25 bp, Artificial
  Probe
tcccacaggcacactcccactcggg

SEQ ID NO: 239935 - DNA, 25 bp, Artificial
  Probe
agttcttcgggaagagagtgagaat

SEQ ID NO: 239936 - DNA, 25 bp, Artificial
  Probe
ggaaaatggcacgggtctttacagt

SEQ ID NO: 239937 - DNA, 25 bp, Artificial
  Probe
cacttcagttcgaaaagaagtcatc

SEQ ID NO: 239938 - DNA, 25 bp, Artificial
  Probe
taaaatccgagccattgggaaaatg

SEQ ID NO: 239939 - DNA, 25 bp, Artificial
  Probe
acttcagttcgaaaagaagtcatca

SEQ ID NO: 239940 - DNA, 25 bp, Artificial
  Probe
tcactcccacaggcacactcccact

SEQ ID NO: 239941 - DNA, 25 bp, Artificial
  Probe
gaaaatggcacgggtctttacagtt

SEQ ID NO: 239942 - DNA, 25 bp, Artificial
  Probe
ggtctttacagttcttcgggaagag

SEQ ID NO: 239943 - DNA, 25 bp, Artificial
  Probe
ccacttcagttcgaaaagaagtcat

SEQ ID NO: 239944 - DNA, 25 bp, Artificial
  Probe
aaatggcacgggtctttacagttct

SEQ ID NO: 239945 - DNA, 25 bp, Artificial
  Probe
ctttacagttcttcgggaagagagt

SEQ ID NO: 239946 - DNA, 25 bp, Artificial
  Probe
tttacagttcttcgggaagagagtg

SEQ ID NO: 239947 - DNA, 25 bp, Artificial
  Probe
cattgggaaaatggcacgggtcttt

SEQ ID NO: 239948 - DNA, 25 bp, Artificial
  Probe
gttcttcgggaagagagtgagaatg

SEQ ID NO: 239949 - DNA, 25 bp, Artificial
  Probe
agaatgtgctgattctcaagggcct

SEQ ID NO: 239950 - DNA, 25 bp, Artificial
  Probe
actcccacaggcacactcccactcg

SEQ ID NO: 239951 - DNA, 25 bp, Artificial
  Probe
aatgtgctgattctcaagggcctca

SEQ ID NO: 239952 - DNA, 25 bp, Artificial
  Probe
gaataaaatccgagccattgggaaa

SEQ ID NO: 239953 - DNA, 25 bp, Artificial
  Probe
gaatgtgctgattctcaagggcctc

SEQ ID NO: 239954 - DNA, 25 bp, Artificial
  Probe
atggcacgggtctttacagttcttc

SEQ ID NO: 239955 - DNA, 25 bp, Artificial
  Probe
atgtgctgattctcaagggcctcac

SEQ ID NO: 239956 - DNA, 25 bp, Artificial
  Probe
gcacgggtctttacagttcttcggg

SEQ ID NO: 239957 - DNA, 25 bp, Artificial
  Probe
ccgagccattgggaaaatggcacgg

SEQ ID NO: 239958 - DNA, 25 bp, Artificial
  Probe
tctttacagttcttcgggaagagag

SEQ ID NO: 239959 - DNA, 25 bp, Artificial
  Probe
ttcttcgggaagagagtgagaatgt

SEQ ID NO: 239960 - DNA, 25 bp, Artificial
  Probe
ggcacgggtctttacagttcttcgg

SEQ ID NO: 239961 - DNA, 25 bp, Artificial
  Probe
atgtacactttagtttccagaactg

SEQ ID NO: 239962 - DNA, 25 bp, Artificial
  Probe
gtctccacgtcgacctaacagaata

SEQ ID NO: 239963 - DNA, 25 bp, Artificial
  Probe
tcctgtcaagaattcgtatagtacg

SEQ ID NO: 239964 - DNA, 25 bp, Artificial
  Probe
cgaaagccaactgtttgtactgaat

SEQ ID NO: 239965 - DNA, 25 bp, Artificial
  Probe
ctcgtatgtacactttagtttccag

SEQ ID NO: 239966 - DNA, 25 bp, Artificial
  Probe
gaactactttgtacgattacagtct

SEQ ID NO: 239967 - DNA, 25 bp, Artificial
  Probe
aaactatagctgtccattgcttttg

SEQ ID NO: 239968 - DNA, 25 bp, Artificial
  Probe
aaagtgcaaacatttcgtcccaaag

SEQ ID NO: 239969 - DNA, 25 bp, Artificial
  Probe
gtcccaaagtctgagtactttagtg

SEQ ID NO: 239970 - DNA, 25 bp, Artificial
  Probe
tttgtacgattacagtctccacgtc

SEQ ID NO: 239971 - DNA, 25 bp, Artificial
  Probe
tacgattacagtctccacgtcgacc

SEQ ID NO: 239972 - DNA, 25 bp, Artificial
  Probe
gtacactttagtttccagaactgtt

SEQ ID NO: 239973 - DNA, 25 bp, Artificial
  Probe
ggatctacgtgtcaaactgttccat

SEQ ID NO: 239974 - DNA, 25 bp, Artificial
  Probe
atgttgtttcatgtcctgtcaagaa

SEQ ID NO: 239975 - DNA, 25 bp, Artificial
  Probe
ggtttatccatgttacagctattca

SEQ ID NO: 239976 - DNA, 25 bp, Artificial
  Probe
ttcatgtcctgtcaagaattcgtat

SEQ ID NO: 239977 - DNA, 25 bp, Artificial
  Probe
gggtctggtttatccatgttacagc

SEQ ID NO: 239978 - DNA, 25 bp, Artificial
  Probe
gatctacgtgtcaaactgttccatt

SEQ ID NO: 239979 - DNA, 25 bp, Artificial
  Probe
cgattacagtctccacgtcgaccta

SEQ ID NO: 239980 - DNA, 25 bp, Artificial
  Probe
tggtttatccatgttacagctattc

SEQ ID NO: 239981 - DNA, 25 bp, Artificial
  Probe
gattacagtctccacgtcgacctaa

SEQ ID NO: 239982 - DNA, 25 bp, Artificial
  Probe
acgtgtcaaactgttccatttgttt

SEQ ID NO: 239983 - DNA, 25 bp, Artificial
  Probe
gcctggatctacgtgtcaaactgtt

SEQ ID NO: 239984 - DNA, 25 bp, Artificial
  Probe
caactgtttgtactgaatggcgaga

SEQ ID NO: 239985 - DNA, 25 bp, Artificial
  Probe
tatagctgtccattgcttttggcaa

SEQ ID NO: 239986 - DNA, 25 bp, Artificial
  Probe
tagctgtccattgcttttggcaaaa

SEQ ID NO: 239987 - DNA, 25 bp, Artificial
  Probe
aagtgcaaacatttcgtcccaaagt

SEQ ID NO: 239988 - DNA, 25 bp, Artificial
  Probe
actatagctgtccattgcttttggc

SEQ ID NO: 239989 - DNA, 25 bp, Artificial
  Probe
gtcctgtcaagaattcgtatagtac

SEQ ID NO: 239990 - DNA, 25 bp, Artificial
  Probe
acactttagtttccagaactgtttg

SEQ ID NO: 239991 - DNA, 25 bp, Artificial
  Probe
gtatgtacactttagtttccagaac

SEQ ID NO: 239992 - DNA, 25 bp, Artificial
  Probe
gcaaacatttcgtcccaaagtctga

SEQ ID NO: 239993 - DNA, 25 bp, Artificial
  Probe
aaatgttgtttcatgtcctgtcaag

SEQ ID NO: 239994 - DNA, 25 bp, Artificial
  Probe
ttgtacgattacagtctccacgtcg

SEQ ID NO: 239995 - DNA, 25 bp, Artificial
  Probe
tacagtctccacgtcgacctaacag

SEQ ID NO: 239996 - DNA, 25 bp, Artificial
  Probe
aagggtctggtttatccatgttaca

SEQ ID NO: 239997 - DNA, 25 bp, Artificial
  Probe
gtcaaactgttccatttgtttatgt

SEQ ID NO: 239998 - DNA, 25 bp, Artificial
  Probe
caaagtctgagtactttagtgcagt

SEQ ID NO: 239999 - DNA, 25 bp, Artificial
  Probe
cccaaagtctgagtactttagtgca

SEQ ID NO: 240000 - DNA, 25 bp, Artificial
  Probe
actttgtacgattacagtctccacg

SEQ ID NO: 240001 - DNA, 25 bp, Artificial
  Probe
gtgcaaacatttcgtcccaaagtct

SEQ ID NO: 240002 - DNA, 25 bp, Artificial
  Probe
tctacgtgtcaaactgttccatttg

SEQ ID NO: 240003 - DNA, 25 bp, Artificial
  Probe
ctggatctacgtgtcaaactgttcc

SEQ ID NO: 240004 - DNA, 25 bp, Artificial
  Probe
tgaactactttgtacgattacagtc

SEQ ID NO: 240005 - DNA, 25 bp, Artificial
  Probe
ccgaaagccaactgtttgtactgaa

SEQ ID NO: 240006 - DNA, 25 bp, Artificial
  Probe
acatttcgtcccaaagtctgagtac

SEQ ID NO: 240007 - DNA, 25 bp, Artificial
  Probe
tcattcctaaaacgtggaaccaaag

SEQ ID NO: 240008 - DNA, 25 bp, Artificial
  Probe
ctgtcctctgagatgtatgtgaaga

SEQ ID NO: 240009 - DNA, 25 bp, Artificial
  Probe
tctctgtcctctgagatgtatgtga

SEQ ID NO: 240010 - DNA, 25 bp, Artificial
  Probe
cgtaactcagggttgcaagtctctg

SEQ ID NO: 240011 - DNA, 25 bp, Artificial
  Probe
gccaaggcaaacaacaacaagcagt

SEQ ID NO: 240012 - DNA, 25 bp, Artificial
  Probe
aatagcaataccaaagggcatatga

SEQ ID NO: 240013 - DNA, 25 bp, Artificial
  Probe
cgagtgaatgcctggcaagccaagg

SEQ ID NO: 240014 - DNA, 25 bp, Artificial
  Probe
gtgtctcctggaaaccctaccggca

SEQ ID NO: 240015 - DNA, 25 bp, Artificial
  Probe
cctctgagatgtatgtgaagagcta

SEQ ID NO: 240016 - DNA, 25 bp, Artificial
  Probe
acttcgcctggaactcttcggctgt

SEQ ID NO: 240017 - DNA, 25 bp, Artificial
  Probe
tcgcctggaactcttcggctgtgac

SEQ ID NO: 240018 - DNA, 25 bp, Artificial
  Probe
acaacaagcagtggttacaaattga

SEQ ID NO: 240019 - DNA, 25 bp, Artificial
  Probe
ttgcacttcgcctggaactcttcgg

SEQ ID NO: 240020 - DNA, 25 bp, Artificial
  Probe
gaccagggtgtctcctggaaaccct

SEQ ID NO: 240021 - DNA, 25 bp, Artificial
  Probe
aaggtaacggccatcgtaactcagg

SEQ ID NO: 240022 - DNA, 25 bp, Artificial
  Probe
gaactcttcggctgtgacatttatt

SEQ ID NO: 240023 - DNA, 25 bp, Artificial
  Probe
caaacaacaacaagcagtggttaca

SEQ ID NO: 240024 - DNA, 25 bp, Artificial
  Probe
tcctggaaaccctaccggcagaaat

SEQ ID NO: 240025 - DNA, 25 bp, Artificial
  Probe
aattgatctgctcaaaatcaagaag

SEQ ID NO: 240026 - DNA, 25 bp, Artificial
  Probe
tatccgaatcattcctaaaacgtgg

SEQ ID NO: 240027 - DNA, 25 bp, Artificial
  Probe
tagcaataccaaagggcatatgaag

SEQ ID NO: 240028 - DNA, 25 bp, Artificial
  Probe
gaaatcctccatggtggacaagatt

SEQ ID NO: 240029 - DNA, 25 bp, Artificial
  Probe
tgctcaaaatcaagaaggtaacggc

SEQ ID NO: 240030 - DNA, 25 bp, Artificial
  Probe
ccatcgtaactcagggttgcaagtc

SEQ ID NO: 240031 - DNA, 25 bp, Artificial
  Probe
gcctgaatgcccagggccgagtgaa

SEQ ID NO: 240032 - DNA, 25 bp, Artificial
  Probe
ttgatctgctcaaaatcaagaaggt

SEQ ID NO: 240033 - DNA, 25 bp, Artificial
  Probe
cctggcaagccaaggcaaacaacaa

SEQ ID NO: 240034 - DNA, 25 bp, Artificial
  Probe
cagtgaccagggtgtctcctggaaa

SEQ ID NO: 240035 - DNA, 25 bp, Artificial
  Probe
cctaccggcagaaatcctccatggt

SEQ ID NO: 240036 - DNA, 25 bp, Artificial
  Probe
gaatcattcctaaaacgtggaacca

SEQ ID NO: 240037 - DNA, 25 bp, Artificial
  Probe
tgtctcctggaaaccctaccggcag

SEQ ID NO: 240038 - DNA, 25 bp, Artificial
  Probe
taccggcagaaatcctccatggtgg

SEQ ID NO: 240039 - DNA, 25 bp, Artificial
  Probe
ctccatggtggacaagatttttgaa

SEQ ID NO: 240040 - DNA, 25 bp, Artificial
  Probe
acaacaacaagcagtggttacaaat

SEQ ID NO: 240041 - DNA, 25 bp, Artificial
  Probe
ttcgcctggaactcttcggctgtga

SEQ ID NO: 240042 - DNA, 25 bp, Artificial
  Probe
aagtattgcacttcgcctggaactc

SEQ ID NO: 240043 - DNA, 25 bp, Artificial
  Probe
ccagggccgagtgaatgcctggcaa

SEQ ID NO: 240044 - DNA, 25 bp, Artificial
  Probe
ataccaaagggcatatgaagaactt

SEQ ID NO: 240045 - DNA, 25 bp, Artificial
  Probe
tccgaatcattcctaaaacgtggaa

SEQ ID NO: 240046 - DNA, 25 bp, Artificial
  Probe
gaagctactgggagccttcccttgc

SEQ ID NO: 240047 - DNA, 25 bp, Artificial
  Probe
tctgtcctctgagatgtatgtgaag

SEQ ID NO: 240048 - DNA, 25 bp, Artificial
  Probe
cccagggccgagtgaatgcctggca

SEQ ID NO: 240049 - DNA, 25 bp, Artificial
  Probe
gaaccaaagtattgcacttcgcctg

SEQ ID NO: 240050 - DNA, 25 bp, Artificial
  Probe
caacaacaagcagtggttacaaatt

SEQ ID NO: 240051 - DNA, 25 bp, Artificial
  Probe
aatcctccatggtggacaagatttt

SEQ ID NO: 240052 - DNA, 25 bp, Artificial
  Probe
caacaagcagtggttacaaattgat

SEQ ID NO: 240053 - DNA, 25 bp, Artificial
  Probe
gctgaaaggcgcaaacctctgaaca

SEQ ID NO: 240054 - DNA, 25 bp, Artificial
  Probe
ctgaacattgaccatcttagtgatg

SEQ ID NO: 240055 - DNA, 25 bp, Artificial
  Probe
ttgaccatcttagtgatgataagct

SEQ ID NO: 240056 - DNA, 25 bp, Artificial
  Probe
ttgtaccaactggagactgacaaat

SEQ ID NO: 240057 - DNA, 25 bp, Artificial
  Probe
gcgcaaacctctgaacattgaccat

SEQ ID NO: 240058 - DNA, 25 bp, Artificial
  Probe
agattcttgctgaaaggcgcaaacc

SEQ ID NO: 240059 - DNA, 25 bp, Artificial
  Probe
tgaccatcttagtgatgataagctg

SEQ ID NO: 240060 - DNA, 25 bp, Artificial
  Probe
accaactggagactgacaaatttga

SEQ ID NO: 240061 - DNA, 25 bp, Artificial
  Probe
gggataccttgtaccaactggagac

SEQ ID NO: 240062 - DNA, 25 bp, Artificial
  Probe
agaagattcttgctgaaaggcgcaa

SEQ ID NO: 240063 - DNA, 25 bp, Artificial
  Probe
aaaggcgcaaacctctgaacattga

SEQ ID NO: 240064 - DNA, 25 bp, Artificial
  Probe
taccaactggagactgacaaatttg

SEQ ID NO: 240065 - DNA, 25 bp, Artificial
  Probe
cttgtaccaactggagactgacaaa

SEQ ID NO: 240066 - DNA, 25 bp, Artificial
  Probe
gaccatcttagtgatgataagctga

SEQ ID NO: 240067 - DNA, 25 bp, Artificial
  Probe
aactctgggataccttgtaccaact

SEQ ID NO: 240068 - DNA, 25 bp, Artificial
  Probe
gattcttgctgaaaggcgcaaacct

SEQ ID NO: 240069 - DNA, 25 bp, Artificial
  Probe
tgggataccttgtaccaactggaga

SEQ ID NO: 240070 - DNA, 25 bp, Artificial
  Probe
attgaccatcttagtgatgataagc

SEQ ID NO: 240071 - DNA, 25 bp, Artificial
  Probe
aggaactctgggataccttgtacca

SEQ ID NO: 240072 - DNA, 25 bp, Artificial
  Probe
cctctgaacattgaccatcttagtg

SEQ ID NO: 240073 - DNA, 25 bp, Artificial
  Probe
ctctgggataccttgtaccaactgg

SEQ ID NO: 240074 - DNA, 25 bp, Artificial
  Probe
ccttgtaccaactggagactgacaa

SEQ ID NO: 240075 - DNA, 25 bp, Artificial
  Probe
cattgaccatcttagtgatgataag

SEQ ID NO: 240076 - DNA, 25 bp, Artificial
  Probe
ggaactctgggataccttgtaccaa

SEQ ID NO: 240077 - DNA, 25 bp, Artificial
  Probe
aacattgaccatcttagtgatgata

SEQ ID NO: 240078 - DNA, 25 bp, Artificial
  Probe
ggcgcaaacctctgaacattgacca

SEQ ID NO: 240079 - DNA, 25 bp, Artificial
  Probe
ggataccttgtaccaactggagact

SEQ ID NO: 240080 - DNA, 25 bp, Artificial
  Probe
tgaaaggcgcaaacctctgaacatt

SEQ ID NO: 240081 - DNA, 25 bp, Artificial
  Probe
gaacattgaccatcttagtgatgat

SEQ ID NO: 240082 - DNA, 25 bp, Artificial
  Probe
tgtaccaactggagactgacaaatt

SEQ ID NO: 240083 - DNA, 25 bp, Artificial
  Probe
gaactctgggataccttgtaccaac

SEQ ID NO: 240084 - DNA, 25 bp, Artificial
  Probe
ccaactggagactgacaaatttgag

SEQ ID NO: 240085 - DNA, 25 bp, Artificial
  Probe
accttgtaccaactggagactgaca

SEQ ID NO: 240086 - DNA, 25 bp, Artificial
  Probe
ctgggataccttgtaccaactggag

SEQ ID NO: 240087 - DNA, 25 bp, Artificial
  Probe
aagattcttgctgaaaggcgcaaac

SEQ ID NO: 240088 - DNA, 25 bp, Artificial
  Probe
tctgaacattgaccatcttagtgat

SEQ ID NO: 240089 - DNA, 25 bp, Artificial
  Probe
attcttgctgaaaggcgcaaacctc

SEQ ID NO: 240090 - DNA, 25 bp, Artificial
  Probe
aggcgcaaacctctgaacattgacc

SEQ ID NO: 240091 - DNA, 25 bp, Artificial
  Probe
accatcttagtgatgataagctgag

SEQ ID NO: 240092 - DNA, 25 bp, Artificial
  Probe
tgaacattgaccatcttagtgatga

SEQ ID NO: 240093 - DNA, 25 bp, Artificial
  Probe
gaaaggcgcaaacctctgaacattg

SEQ ID NO: 240094 - DNA, 25 bp, Artificial
  Probe
acattgaccatcttagtgatgataa

SEQ ID NO: 240095 - DNA, 25 bp, Artificial
  Probe
gtaccaactggagactgacaaattt

SEQ ID NO: 240096 - DNA, 25 bp, Artificial
  Probe
ataccttgtaccaactggagactga

SEQ ID NO: 240097 - DNA, 25 bp, Artificial
  Probe
gataccttgtaccaactggagactg

SEQ ID NO: 240098 - DNA, 25 bp, Artificial
  Probe
aaggcgcaaacctctgaacattgac

SEQ ID NO: 240099 - DNA, 25 bp, Artificial
  Probe
tctcaaaaatgtgtacggggcaaag

SEQ ID NO: 240100 - DNA, 25 bp, Artificial
  Probe
agccaataaactcttcagttagcag

SEQ ID NO: 240101 - DNA, 25 bp, Artificial
  Probe
ctaaggagacgtgcaggccgagctt

SEQ ID NO: 240102 - DNA, 25 bp, Artificial
  Probe
tacggtaggtcctcggatttgaact

SEQ ID NO: 240103 - DNA, 25 bp, Artificial
  Probe
ccatgtgtgttttgagtgatttctc

SEQ ID NO: 240104 - DNA, 25 bp, Artificial
  Probe
tctctggctcctggacctgcattag

SEQ ID NO: 240105 - DNA, 25 bp, Artificial
  Probe
actctgctgaaatctgaatgctcca

SEQ ID NO: 240106 - DNA, 25 bp, Artificial
  Probe
ctggacctgcattaggtggtgttcc

SEQ ID NO: 240107 - DNA, 25 bp, Artificial
  Probe
tctcggtggcagaatagccactctg

SEQ ID NO: 240108 - DNA, 25 bp, Artificial
  Probe
tttgcatgtctctggctcctggacc

SEQ ID NO: 240109 - DNA, 25 bp, Artificial
  Probe
ttgcatcctgtctgtgaccgtgacc

SEQ ID NO: 240110 - DNA, 25 bp, Artificial
  Probe
accgtgacccggtctttgcatgtct

SEQ ID NO: 240111 - DNA, 25 bp, Artificial
  Probe
gtatcaagaacaacagacacgccta

SEQ ID NO: 240112 - DNA, 25 bp, Artificial
  Probe
tctgtgaccgtgacccggtctttgc

SEQ ID NO: 240113 - DNA, 25 bp, Artificial
  Probe
aggtcctcggatttgaactaggtag

SEQ ID NO: 240114 - DNA, 25 bp, Artificial
  Probe
agccactctgctgaaatctgaatgc

SEQ ID NO: 240115 - DNA, 25 bp, Artificial
  Probe
atttctcaaaaatgtgtacggggca

SEQ ID NO: 240116 - DNA, 25 bp, Artificial
  Probe
tactctgtaaatgatagtgtctcgg

SEQ ID NO: 240117 - DNA, 25 bp, Artificial
  Probe
atgtctctggctcctggacctgcat

SEQ ID NO: 240118 - DNA, 25 bp, Artificial
  Probe
cgtgacccggtctttgcatgtctct

SEQ ID NO: 240119 - DNA, 25 bp, Artificial
  Probe
catgtctctggctcctggacctgca

SEQ ID NO: 240120 - DNA, 25 bp, Artificial
  Probe
tctttgtttgcatcctgtctgtgac

SEQ ID NO: 240121 - DNA, 25 bp, Artificial
  Probe
aaggagacgtgcaggccgagctttt

SEQ ID NO: 240122 - DNA, 25 bp, Artificial
  Probe
tcctcggatttgaactaggtagggt

SEQ ID NO: 240123 - DNA, 25 bp, Artificial
  Probe
cctgcattaggtggtgttccttttt

SEQ ID NO: 240124 - DNA, 25 bp, Artificial
  Probe
gttgacttttgtatcaagaacaaca

SEQ ID NO: 240125 - DNA, 25 bp, Artificial
  Probe
atcctgtctgtgaccgtgacccggt

SEQ ID NO: 240126 - DNA, 25 bp, Artificial
  Probe
tgtgtacggggcaaaggacaacagt

SEQ ID NO: 240127 - DNA, 25 bp, Artificial
  Probe
atagtgtctcggtggcagaatagcc

SEQ ID NO: 240128 - DNA, 25 bp, Artificial
  Probe
tgtctgtgaccgtgacccggtcttt

SEQ ID NO: 240129 - DNA, 25 bp, Artificial
  Probe
gtgacccggtctttgcatgtctctg

SEQ ID NO: 240130 - DNA, 25 bp, Artificial
  Probe
tttgctaaggagacgtgcaggccga

SEQ ID NO: 240131 - DNA, 25 bp, Artificial
  Probe
gtaggtcctcggatttgaactaggt

SEQ ID NO: 240132 - DNA, 25 bp, Artificial
  Probe
tttgtatcaagaacaacagacacgc

SEQ ID NO: 240133 - DNA, 25 bp, Artificial
  Probe
gtcctcggatttgaactaggtaggg

SEQ ID NO: 240134 - DNA, 25 bp, Artificial
  Probe
tgtctcggtggcagaatagccactc

SEQ ID NO: 240135 - DNA, 25 bp, Artificial
  Probe
cttggtttgctaaggagacgtgcag

SEQ ID NO: 240136 - DNA, 25 bp, Artificial
  Probe
tgttgacttttgtatcaagaacaac

SEQ ID NO: 240137 - DNA, 25 bp, Artificial
  Probe
ttctcaaaaatgtgtacggggcaaa

SEQ ID NO: 240138 - DNA, 25 bp, Artificial
  Probe
ggctcctggacctgcattaggtggt

SEQ ID NO: 240139 - DNA, 25 bp, Artificial
  Probe
gcagaatagccactctgctgaaatc

SEQ ID NO: 240140 - DNA, 25 bp, Artificial
  Probe
gtactctgtaaatgatagtgtctcg

SEQ ID NO: 240141 - DNA, 25 bp, Artificial
  Probe
tttgtttgcatcctgtctgtgaccg

SEQ ID NO: 240142 - DNA, 25 bp, Artificial
  Probe
gcattaggtggtgttcctttttacg

SEQ ID NO: 240143 - DNA, 25 bp, Artificial
  Probe
ttttgtatcaagaacaacagacacg

SEQ ID NO: 240144 - DNA, 25 bp, Artificial
  Probe
ctttgtttgcatcctgtctgtgacc

SEQ ID NO: 240145 - DNA, 25 bp, Artificial
  Probe
cttaatagatgtcacaccgacactg

SEQ ID NO: 240146 - DNA, 25 bp, Artificial
  Probe
cgaggctcaaccttgtaactgctca

SEQ ID NO: 240147 - DNA, 25 bp, Artificial
  Probe
tcctgttcagtgaagaagtactttt

SEQ ID NO: 240148 - DNA, 25 bp, Artificial
  Probe
gacactgttaaatcccgtagtggat

SEQ ID NO: 240149 - DNA, 25 bp, Artificial
  Probe
gtcacaccgacactgttaaatcccg

SEQ ID NO: 240150 - DNA, 25 bp, Artificial
  Probe
ggctactatcccttaatagatgtca

SEQ ID NO: 240151 - DNA, 25 bp, Artificial
  Probe
cttacacaagccttgaatggggaga

SEQ ID NO: 240152 - DNA, 25 bp, Artificial
  Probe
ccaggcttgatctaagcttctcatt

SEQ ID NO: 240153 - DNA, 25 bp, Artificial
  Probe
ggctcaaccttgtaactgctcaaaa

SEQ ID NO: 240154 - DNA, 25 bp, Artificial
  Probe
aagcttctcatttgcaggctactat

SEQ ID NO: 240155 - DNA, 25 bp, Artificial
  Probe
gagacatcaagtaggtccaggcttg

SEQ ID NO: 240156 - DNA, 25 bp, Artificial
  Probe
gtcttctagttcctgttcagtgaag

SEQ ID NO: 240157 - DNA, 25 bp, Artificial
  Probe
agtgtcatgattaccctgcgtcttc

SEQ ID NO: 240158 - DNA, 25 bp, Artificial
  Probe
gattaccctgcgtcttctagttcct

SEQ ID NO: 240159 - DNA, 25 bp, Artificial
  Probe
ggacctcccaattaacagctctgaa

SEQ ID NO: 240160 - DNA, 25 bp, Artificial
  Probe
gatgtcacaccgacactgttaaatc

SEQ ID NO: 240161 - DNA, 25 bp, Artificial
  Probe
cgtcttctagttcctgttcagtgaa

SEQ ID NO: 240162 - DNA, 25 bp, Artificial
  Probe
tgcaggctactatcccttaatagat

SEQ ID NO: 240163 - DNA, 25 bp, Artificial
  Probe
acaagccttgaatggggagacatca

SEQ ID NO: 240164 - DNA, 25 bp, Artificial
  Probe
tcccgtagtggatgtaaagcgaggc

SEQ ID NO: 240165 - DNA, 25 bp, Artificial
  Probe
taggtccaggcttgatctaagcttc

SEQ ID NO: 240166 - DNA, 25 bp, Artificial
  Probe
acaccgacactgttaaatcccgtag

SEQ ID NO: 240167 - DNA, 25 bp, Artificial
  Probe
gtaaagcgaggctcaaccttgtaac

SEQ ID NO: 240168 - DNA, 25 bp, Artificial
  Probe
accgacactgttaaatcccgtagtg

SEQ ID NO: 240169 - DNA, 25 bp, Artificial
  Probe
gtaggtccaggcttgatctaagctt

SEQ ID NO: 240170 - DNA, 25 bp, Artificial
  Probe
tcatgattaccctgcgtcttctagt

SEQ ID NO: 240171 - DNA, 25 bp, Artificial
  Probe
agcttctcatttgcaggctactatc

SEQ ID NO: 240172 - DNA, 25 bp, Artificial
  Probe
gaatcttacacaagccttgaatggg

SEQ ID NO: 240173 - DNA, 25 bp, Artificial
  Probe
accctgcgtcttctagttcctgttc

SEQ ID NO: 240174 - DNA, 25 bp, Artificial
  Probe
agctctgaatcttacacaagccttg

SEQ ID NO: 240175 - DNA, 25 bp, Artificial
  Probe
aaatgactgccctttctttgtgagg

SEQ ID NO: 240176 - DNA, 25 bp, Artificial
  Probe
aatagatgtcacaccgacactgtta

SEQ ID NO: 240177 - DNA, 25 bp, Artificial
  Probe
acacaagccttgaatggggagacat

SEQ ID NO: 240178 - DNA, 25 bp, Artificial
  Probe
tcaagtaggtccaggcttgatctaa

SEQ ID NO: 240179 - DNA, 25 bp, Artificial
  Probe
cttctagttcctgttcagtgaagaa

SEQ ID NO: 240180 - DNA, 25 bp, Artificial
  Probe
gctctgaatcttacacaagccttga

SEQ ID NO: 240181 - DNA, 25 bp, Artificial
  Probe
ttcctgttcagtgaagaagtacttt

SEQ ID NO: 240182 - DNA, 25 bp, Artificial
  Probe
gcttctcatttgcaggctactatcc

SEQ ID NO: 240183 - DNA, 25 bp, Artificial
  Probe
tttgcaggctactatcccttaatag

SEQ ID NO: 240184 - DNA, 25 bp, Artificial
  Probe
ttaaatcccgtagtggatgtaaagc

SEQ ID NO: 240185 - DNA, 25 bp, Artificial
  Probe
tggggacctcccaattaacagctct

SEQ ID NO: 240186 - DNA, 25 bp, Artificial
  Probe
taaagcgaggctcaaccttgtaact

SEQ ID NO: 240187 - DNA, 25 bp, Artificial
  Probe
ctgaatcttacacaagccttgaatg

SEQ ID NO: 240188 - DNA, 25 bp, Artificial
  Probe
taagcttctcatttgcaggctacta

SEQ ID NO: 240189 - DNA, 25 bp, Artificial
  Probe
gacatcaagtaggtccaggcttgat

SEQ ID NO: 240190 - DNA, 25 bp, Artificial
  Probe
ttgatctaagcttctcatttgcagg

SEQ ID NO: 240191 - DNA, 25 bp, Artificial
  Probe
atcctgtgctctggaatagactgtt

SEQ ID NO: 240192 - DNA, 25 bp, Artificial
  Probe
tctatctttccgtgtgctgtatgct

SEQ ID NO: 240193 - DNA, 25 bp, Artificial
  Probe
atctttccgtgtgctgtatgctgag

SEQ ID NO: 240194 - DNA, 25 bp, Artificial
  Probe
gggttatcctgtgctctggaataga

SEQ ID NO: 240195 - DNA, 25 bp, Artificial
  Probe
tttccgtgtgctgtatgctgagtta

SEQ ID NO: 240196 - DNA, 25 bp, Artificial
  Probe
ctgtgctctggaatagactgttgtt

SEQ ID NO: 240197 - DNA, 25 bp, Artificial
  Probe
agttttctgcataagtgtcaaactc

SEQ ID NO: 240198 - DNA, 25 bp, Artificial
  Probe
tccgtgtgctgtatgctgagttaca

SEQ ID NO: 240199 - DNA, 25 bp, Artificial
  Probe
accgggttatcctgtgctctggaat

SEQ ID NO: 240200 - DNA, 25 bp, Artificial
  Probe
gttatcctgtgctctggaatagact

SEQ ID NO: 240201 - DNA, 25 bp, Artificial
  Probe
gttttctgcataagtgtcaaactct

SEQ ID NO: 240202 - DNA, 25 bp, Artificial
  Probe
tcaaactctatctttccgtgtgctg

SEQ ID NO: 240203 - DNA, 25 bp, Artificial
  Probe
gcgaccgaagcgaaatgtgtaaacg

SEQ ID NO: 240204 - DNA, 25 bp, Artificial
  Probe
tgtaccgggttatcctgtgctctgg

SEQ ID NO: 240205 - DNA, 25 bp, Artificial
  Probe
cgggttatcctgtgctctggaatag

SEQ ID NO: 240206 - DNA, 25 bp, Artificial
  Probe
aaactctatctttccgtgtgctgta

SEQ ID NO: 240207 - DNA, 25 bp, Artificial
  Probe
aagtgtcaaactctatctttccgtg

SEQ ID NO: 240208 - DNA, 25 bp, Artificial
  Probe
cggcacggggtttaagcagaaatat

SEQ ID NO: 240209 - DNA, 25 bp, Artificial
  Probe
ggttatcctgtgctctggaatagac

SEQ ID NO: 240210 - DNA, 25 bp, Artificial
  Probe
aaaggcgaccgaagcgaaatgtgta

SEQ ID NO: 240211 - DNA, 25 bp, Artificial
  Probe
tcggcacggggtttaagcagaaata

SEQ ID NO: 240212 - DNA, 25 bp, Artificial
  Probe
caaactctatctttccgtgtgctgt

SEQ ID NO: 240213 - DNA, 25 bp, Artificial
  Probe
tgtcaaactctatctttccgtgtgc

SEQ ID NO: 240214 - DNA, 25 bp, Artificial
  Probe
cgaccgaagcgaaatgtgtaaacgt

SEQ ID NO: 240215 - DNA, 25 bp, Artificial
  Probe
ttcctggtaatgaaggcatgtaagt

SEQ ID NO: 240216 - DNA, 25 bp, Artificial
  Probe
tatcctgtgctctggaatagactgt

SEQ ID NO: 240217 - DNA, 25 bp, Artificial
  Probe
tgctctggaatagactgttgttgaa

SEQ ID NO: 240218 - DNA, 25 bp, Artificial
  Probe
cctgtgctctggaatagactgttgt

SEQ ID NO: 240219 - DNA, 25 bp, Artificial
  Probe
gtagttttctgcataagtgtcaaac

SEQ ID NO: 240220 - DNA, 25 bp, Artificial
  Probe
tcctgtgctctggaatagactgttg

SEQ ID NO: 240221 - DNA, 25 bp, Artificial
  Probe
agtgtcaaactctatctttccgtgt

SEQ ID NO: 240222 - DNA, 25 bp, Artificial
  Probe
taccgggttatcctgtgctctggaa

SEQ ID NO: 240223 - DNA, 25 bp, Artificial
  Probe
gtaccgggttatcctgtgctctgga

SEQ ID NO: 240224 - DNA, 25 bp, Artificial
  Probe
ttccgtgtgctgtatgctgagttac

SEQ ID NO: 240225 - DNA, 25 bp, Artificial
  Probe
ttcggcacggggtttaagcagaaat

SEQ ID NO: 240226 - DNA, 25 bp, Artificial
  Probe
cgtgtaccgggttatcctgtgctct

SEQ ID NO: 240227 - DNA, 25 bp, Artificial
  Probe
gtgtcaaactctatctttccgtgtg

SEQ ID NO: 240228 - DNA, 25 bp, Artificial
  Probe
acgtgtaccgggttatcctgtgctc

SEQ ID NO: 240229 - DNA, 25 bp, Artificial
  Probe
cgtgtgctgtatgctgagttacaag

SEQ ID NO: 240230 - DNA, 25 bp, Artificial
  Probe
ccgtgtgctgtatgctgagttacaa

SEQ ID NO: 240231 - DNA, 25 bp, Artificial
  Probe
tagttttctgcataagtgtcaaact

SEQ ID NO: 240232 - DNA, 25 bp, Artificial
  Probe
gtcaaactctatctttccgtgtgct

SEQ ID NO: 240233 - DNA, 25 bp, Artificial
  Probe
ttatcctgtgctctggaatagactg

SEQ ID NO: 240234 - DNA, 25 bp, Artificial
  Probe
gtgtaccgggttatcctgtgctctg

SEQ ID NO: 240235 - DNA, 25 bp, Artificial
  Probe
ccgggttatcctgtgctctggaata

SEQ ID NO: 240236 - DNA, 25 bp, Artificial
  Probe
atatattaaggtgttcctggtaatg

SEQ ID NO: 240237 - DNA, 25 bp, Artificial
  Probe
caacacaggggaacaggtagctgtc

SEQ ID NO: 240238 - DNA, 25 bp, Artificial
  Probe
ataacagaggtggatcccactcatt

SEQ ID NO: 240239 - DNA, 25 bp, Artificial
  Probe
catgaactatgatcccaaccagaga

SEQ ID NO: 240240 - DNA, 25 bp, Artificial
  Probe
tggaggtaaccacatagctgatctg

SEQ ID NO: 240241 - DNA, 25 bp, Artificial
  Probe
catgactcgctgcatgaactatgat

SEQ ID NO: 240242 - DNA, 25 bp, Artificial
  Probe
gagtttctgccttcgggaagcctaa

SEQ ID NO: 240243 - DNA, 25 bp, Artificial
  Probe
ggaatatctgccaaagaataagaac

SEQ ID NO: 240244 - DNA, 25 bp, Artificial
  Probe
tatgaaagccgctgcaggccagtga

SEQ ID NO: 240245 - DNA, 25 bp, Artificial
  Probe
gaaagccgctgcaggccagtgacac

SEQ ID NO: 240246 - DNA, 25 bp, Artificial
  Probe
cgagccatcatgagggacattaaca

SEQ ID NO: 240247 - DNA, 25 bp, Artificial
  Probe
taacaagctggaggagcagaatcca

SEQ ID NO: 240248 - DNA, 25 bp, Artificial
  Probe
acctttcttccgagccatcatgagg

SEQ ID NO: 240249 - DNA, 25 bp, Artificial
  Probe
tgacctcatgactcgctgcatgaac

SEQ ID NO: 240250 - DNA, 25 bp, Artificial
  Probe
gaacaggtagctgtcaagtccctga

SEQ ID NO: 240251 - DNA, 25 bp, Artificial
  Probe
aatatgccatccagatttgtaaggg

SEQ ID NO: 240252 - DNA, 25 bp, Artificial
  Probe
gaggtggatcccactcattttgaaa

SEQ ID NO: 240253 - DNA, 25 bp, Artificial
  Probe
aaggttgagctctgcagatatgatc

SEQ ID NO: 240254 - DNA, 25 bp, Artificial
  Probe
accacgagaacattgtgaagtataa

SEQ ID NO: 240255 - DNA, 25 bp, Artificial
  Probe
cttcgggaagcctaaaggaatatct

SEQ ID NO: 240256 - DNA, 25 bp, Artificial
  Probe
atcttgcaaggagctagctgacctc

SEQ ID NO: 240257 - DNA, 25 bp, Artificial
  Probe
cttccgagccatcatgagggacatt

SEQ ID NO: 240258 - DNA, 25 bp, Artificial
  Probe
gacattaacaagctggaggagcaga

SEQ ID NO: 240259 - DNA, 25 bp, Artificial
  Probe
acccaataacagaggtggatcccac

SEQ ID NO: 240260 - DNA, 25 bp, Artificial
  Probe
aagcgtttcctaaagaggattcgtg

SEQ ID NO: 240261 - DNA, 25 bp, Artificial
  Probe
ccacatagctgatctgaagaaggag

SEQ ID NO: 240262 - DNA, 25 bp, Artificial
  Probe
ccagacattgtttcagaaaagcacc

SEQ ID NO: 240263 - DNA, 25 bp, Artificial
  Probe
gagatcttacggaacctctaccacg

SEQ ID NO: 240264 - DNA, 25 bp, Artificial
  Probe
cgctgcaggccagtgacaccatctt

SEQ ID NO: 240265 - DNA, 25 bp, Artificial
  Probe
tgatcctgagggagacaacacaggg

SEQ ID NO: 240266 - DNA, 25 bp, Artificial
  Probe
ctttgggaaggttgagctctgcaga

SEQ ID NO: 240267 - DNA, 25 bp, Artificial
  Probe
ctgaagcctgagagtggaggtaacc

SEQ ID NO: 240268 - DNA, 25 bp, Artificial
  Probe
tcaagtccctgaagcctgagagtgg

SEQ ID NO: 240269 - DNA, 25 bp, Artificial
  Probe
aaagcacccaataacagaggtggat

SEQ ID NO: 240270 - DNA, 25 bp, Artificial
  Probe
ccctcattgagaaagagaggtttta

SEQ ID NO: 240271 - DNA, 25 bp, Artificial
  Probe
tccctgaagcctgagagtggaggta

SEQ ID NO: 240272 - DNA, 25 bp, Artificial
  Probe
ggtcactttgggaaggttgagctct

SEQ ID NO: 240273 - DNA, 25 bp, Artificial
  Probe
ttcctaaagaggattcgtgacttgg

SEQ ID NO: 240274 - DNA, 25 bp, Artificial
  Probe
ctgtcaagtccctgaagcctgagag

SEQ ID NO: 240275 - DNA, 25 bp, Artificial
  Probe
ggagcagaatccagacattgtttca

SEQ ID NO: 240276 - DNA, 25 bp, Artificial
  Probe
gacaccatcttgcaaggagctagct

SEQ ID NO: 240277 - DNA, 25 bp, Artificial
  Probe
aatggtatcaagctcatcatggagt

SEQ ID NO: 240278 - DNA, 25 bp, Artificial
  Probe
gatcccactcattttgaaaagcgtt

SEQ ID NO: 240279 - DNA, 25 bp, Artificial
  Probe
acaacacaggggaacaggtagctgt

SEQ ID NO: 240280 - DNA, 25 bp, Artificial
  Probe
atcctgagggagacaacacagggga

SEQ ID NO: 240281 - DNA, 25 bp, Artificial
  Probe
gtttcagaaaagcacccaataacag

SEQ ID NO: 240282 - DNA, 25 bp, Artificial
  Probe
aggttttatgaaagccgctgcaggc

SEQ ID NO: 240283 - DNA, 25 bp, Artificial
  Probe
aatgtctccacatctcatctttggg

SEQ ID NO: 240284 - DNA, 25 bp, Artificial
  Probe
gacggtttcatctggccgaaagaaa

SEQ ID NO: 240285 - DNA, 25 bp, Artificial
  Probe
gctgctgtatttgatttgagattcc

SEQ ID NO: 240286 - DNA, 25 bp, Artificial
  Probe
ttctggcaaaagtggcctctttgaa

SEQ ID NO: 240287 - DNA, 25 bp, Artificial
  Probe
cctctttgaagtttgctagggatgg

SEQ ID NO: 240288 - DNA, 25 bp, Artificial
  Probe
ctgagacctgggtgattttggccaa

SEQ ID NO: 240289 - DNA, 25 bp, Artificial
  Probe
agaagacaggcctcagttcatcagc

SEQ ID NO: 240290 - DNA, 25 bp, Artificial
  Probe
tgcctcagcttgtgaggcccaggga

SEQ ID NO: 240291 - DNA, 25 bp, Artificial
  Probe
cctcagaaaaccaaagagaccccag

SEQ ID NO: 240292 - DNA, 25 bp, Artificial
  Probe
aaactgtggactcagactgcagctc

SEQ ID NO: 240293 - DNA, 25 bp, Artificial
  Probe
ggactcagactgcagctccacacag

SEQ ID NO: 240294 - DNA, 25 bp, Artificial
  Probe
ccttggctgctgtatttgatttgag

SEQ ID NO: 240295 - DNA, 25 bp, Artificial
  Probe
ctaccactgtttggaaataatgagt

SEQ ID NO: 240296 - DNA, 25 bp, Artificial
  Probe
tggactcagactgcagctccacaca

SEQ ID NO: 240297 - DNA, 25 bp, Artificial
  Probe
tcatcagcagaggaaccttcaaccc

SEQ ID NO: 240298 - DNA, 25 bp, Artificial
  Probe
cactagaaagcgatttcagatttat

SEQ ID NO: 240299 - DNA, 25 bp, Artificial
  Probe
ggacagaaatgtctccacatctcat

SEQ ID NO: 240300 - DNA, 25 bp, Artificial
  Probe
acctgggtgattttggccaacagta

SEQ ID NO: 240301 - DNA, 25 bp, Artificial
  Probe
tccaagtctccattttaccgagctg

SEQ ID NO: 240302 - DNA, 25 bp, Artificial
  Probe
gtgattttggccaacagtagttgct

SEQ ID NO: 240303 - DNA, 25 bp, Artificial
  Probe
ctaggccaagccaaatccctagaag

SEQ ID NO: 240304 - DNA, 25 bp, Artificial
  Probe
ccacacagcaactaccactgtttgg

SEQ ID NO: 240305 - DNA, 25 bp, Artificial
  Probe
attttaccgagctgcctcagcttgt

SEQ ID NO: 240306 - DNA, 25 bp, Artificial
  Probe
ctgctgtatttgatttgagattcca

SEQ ID NO: 240307 - DNA, 25 bp, Artificial
  Probe
atgggccagctgtgccttggctgct

SEQ ID NO: 240308 - DNA, 25 bp, Artificial
  Probe
cgagctgcctcagcttgtgaggccc

SEQ ID NO: 240309 - DNA, 25 bp, Artificial
  Probe
atctttggggcctcttctggtcacc

SEQ ID NO: 240310 - DNA, 25 bp, Artificial
  Probe
cctcagcttgtgaggcccagggaat

SEQ ID NO: 240311 - DNA, 25 bp, Artificial
  Probe
aggcccagggaatggaaggaccact

SEQ ID NO: 240312 - DNA, 25 bp, Artificial
  Probe
cagaaaaccaaagagaccccagagg

SEQ ID NO: 240313 - DNA, 25 bp, Artificial
  Probe
ggaaggaccactaggccaagccaaa

SEQ ID NO: 240314 - DNA, 25 bp, Artificial
  Probe
agcagaggaaccttcaaccctgaaa

SEQ ID NO: 240315 - DNA, 25 bp, Artificial
  Probe
gcaaaagtggcctctttgaagtttg

SEQ ID NO: 240316 - DNA, 25 bp, Artificial
  Probe
cagaggaaccttcaaccctgaaaag

SEQ ID NO: 240317 - DNA, 25 bp, Artificial
  Probe
gggacggtttcatctggccgaaaga

SEQ ID NO: 240318 - DNA, 25 bp, Artificial
  Probe
ctaaacaaagccacctgagacctgg

SEQ ID NO: 240319 - DNA, 25 bp, Artificial
  Probe
tggacagaaatgtctccacatctca

SEQ ID NO: 240320 - DNA, 25 bp, Artificial
  Probe
tccctagaagacaggcctcagttca

SEQ ID NO: 240321 - DNA, 25 bp, Artificial
  Probe
tcatggcactagaaagcgatttcag

SEQ ID NO: 240322 - DNA, 25 bp, Artificial
  Probe
aactgtggactcagactgcagctcc

SEQ ID NO: 240323 - DNA, 25 bp, Artificial
  Probe
atggaaggaccactaggccaagcca

SEQ ID NO: 240324 - DNA, 25 bp, Artificial
  Probe
agactgcagctccacacagcaacta

SEQ ID NO: 240325 - DNA, 25 bp, Artificial
  Probe
tgatttgagattccactaaacaaag

SEQ ID NO: 240326 - DNA, 25 bp, Artificial
  Probe
acatctcatctttggggcctcttct

SEQ ID NO: 240327 - DNA, 25 bp, Artificial
  Probe
gatttgagattccactaaacaaagc

SEQ ID NO: 240328 - DNA, 25 bp, Artificial
  Probe
ccagctgtgccttggctgctgtatt

SEQ ID NO: 240329 - DNA, 25 bp, Artificial
  Probe
ggggctctttggtttgaggaccact

SEQ ID NO: 240330 - DNA, 25 bp, Artificial
  Probe
atttctagctctttctagagctgtt

SEQ ID NO: 240331 - DNA, 25 bp, Artificial
  Probe
tctaaccagaaacagctggaaaaca

SEQ ID NO: 240332 - DNA, 25 bp, Artificial
  Probe
tatgcagggcatgcatctcattctt

SEQ ID NO: 240333 - DNA, 25 bp, Artificial
  Probe
taccgggcctctgtttaccggagct

SEQ ID NO: 240334 - DNA, 25 bp, Artificial
  Probe
ttctagagctgtttctaaccagaaa

SEQ ID NO: 240335 - DNA, 25 bp, Artificial
  Probe
ctgtttctaaccagaaacagctgga

SEQ ID NO: 240336 - DNA, 25 bp, Artificial
  Probe
ctttctctctgacacacaaaggtgg

SEQ ID NO: 240337 - DNA, 25 bp, Artificial
  Probe
agggcatgcatctcattcttagtga

SEQ ID NO: 240338 - DNA, 25 bp, Artificial
  Probe
tagagctgtttctaaccagaaacag

SEQ ID NO: 240339 - DNA, 25 bp, Artificial
  Probe
gggcctctgtttaccggagctttgc

SEQ ID NO: 240340 - DNA, 25 bp, Artificial
  Probe
cgggcctctgtttaccggagctttg

SEQ ID NO: 240341 - DNA, 25 bp, Artificial
  Probe
ctaaaacctcatgctgctgatttga

SEQ ID NO: 240342 - DNA, 25 bp, Artificial
  Probe
tttggtttgaggaccactgctcacc

SEQ ID NO: 240343 - DNA, 25 bp, Artificial
  Probe
ggctggtttctaaaacctcatgctg

SEQ ID NO: 240344 - DNA, 25 bp, Artificial
  Probe
ttctagctctttctagagctgtttc

SEQ ID NO: 240345 - DNA, 25 bp, Artificial
  Probe
gtttctaaaacctcatgctgctgat

SEQ ID NO: 240346 - DNA, 25 bp, Artificial
  Probe
tagctctttctagagctgtttctaa

SEQ ID NO: 240347 - DNA, 25 bp, Artificial
  Probe
aaagcttggttgcagtgttcttatc

SEQ ID NO: 240348 - DNA, 25 bp, Artificial
  Probe
cttagtgaaatcactacaaggaccc

SEQ ID NO: 240349 - DNA, 25 bp, Artificial
  Probe
tctaaaacctcatgctgctgatttg

SEQ ID NO: 240350 - DNA, 25 bp, Artificial
  Probe
tctttctagagctgtttctaaccag

SEQ ID NO: 240351 - DNA, 25 bp, Artificial
  Probe
tgccctttaacaggaaaaatggtca

SEQ ID NO: 240352 - DNA, 25 bp, Artificial
  Probe
agtgaaatcactacaaggacccatc

SEQ ID NO: 240353 - DNA, 25 bp, Artificial
  Probe
catgctgctgatttgaccagggcat

SEQ ID NO: 240354 - DNA, 25 bp, Artificial
  Probe
tctgtttaccggagctttgcctcaa

SEQ ID NO: 240355 - DNA, 25 bp, Artificial
  Probe
ctggtttctaaaacctcatgctgct

SEQ ID NO: 240356 - DNA, 25 bp, Artificial
  Probe
caaagtgtatgcagggcatgcatct

SEQ ID NO: 240357 - DNA, 25 bp, Artificial
  Probe
tgctgctgatttgaccagggcatcc

SEQ ID NO: 240358 - DNA, 25 bp, Artificial
  Probe
gcttggttgcagtgttcttatcttg

SEQ ID NO: 240359 - DNA, 25 bp, Artificial
  Probe
cttacgttgaaagcatttgaacctc

SEQ ID NO: 240360 - DNA, 25 bp, Artificial
  Probe
gctctttggtttgaggaccactgct

SEQ ID NO: 240361 - DNA, 25 bp, Artificial
  Probe
tgtatgcagggcatgcatctcattc

SEQ ID NO: 240362 - DNA, 25 bp, Artificial
  Probe
ttaccggagctttgcctcaaggata

SEQ ID NO: 240363 - DNA, 25 bp, Artificial
  Probe
gtttgaggaccactgctcacccttc

SEQ ID NO: 240364 - DNA, 25 bp, Artificial
  Probe
gtgaaatcactacaaggacccatcc

SEQ ID NO: 240365 - DNA, 25 bp, Artificial
  Probe
cctttctctctgacacacaaaggtg

SEQ ID NO: 240366 - DNA, 25 bp, Artificial
  Probe
gctctttctagagctgtttctaacc

SEQ ID NO: 240367 - DNA, 25 bp, Artificial
  Probe
aacctcatgctgctgatttgaccag

SEQ ID NO: 240368 - DNA, 25 bp, Artificial
  Probe
gtttaccggagctttgcctcaagga

SEQ ID NO: 240369 - DNA, 25 bp, Artificial
  Probe
ttctaaccagaaacagctggaaaac

SEQ ID NO: 240370 - DNA, 25 bp, Artificial
  Probe
gcatgcatctcattcttagtgaaat

SEQ ID NO: 240371 - DNA, 25 bp, Artificial
  Probe
gggcatgcatctcattcttagtgaa

SEQ ID NO: 240372 - DNA, 25 bp, Artificial
  Probe
aaacctcatgctgctgatttgacca

SEQ ID NO: 240373 - DNA, 25 bp, Artificial
  Probe
atgcagggcatgcatctcattctta

SEQ ID NO: 240374 - DNA, 25 bp, Artificial
  Probe
tctaccgggcctctgtttaccggag

SEQ ID NO: 240375 - DNA, 25 bp, Artificial
  Probe
acaccacgaattccagtgctgacca

SEQ ID NO: 240376 - DNA, 25 bp, Artificial
  Probe
caaagagtctgtcaggaatgacagg

SEQ ID NO: 240377 - DNA, 25 bp, Artificial
  Probe
catgactttctctgatggccttacc

SEQ ID NO: 240378 - DNA, 25 bp, Artificial
  Probe
gtaaatacaccacgaattccagtgc

SEQ ID NO: 240379 - DNA, 25 bp, Artificial
  Probe
cacgaattccagtgctgaccaccgg

SEQ ID NO: 240380 - DNA, 25 bp, Artificial
  Probe
agtgagctggccaccaagtgcatta

SEQ ID NO: 240381 - DNA, 25 bp, Artificial
  Probe
gagctggatgacctcaccgagaaga

SEQ ID NO: 240382 - DNA, 25 bp, Artificial
  Probe
atacaccacgaattccagtgctgac

SEQ ID NO: 240383 - DNA, 25 bp, Artificial
  Probe
gtctgtcaggaatgacaggaacaag

SEQ ID NO: 240384 - DNA, 25 bp, Artificial
  Probe
gaactgcgttattaacaaggtcact

SEQ ID NO: 240385 - DNA, 25 bp, Artificial
  Probe
tcctgattctcagaatttgtaccag

SEQ ID NO: 240386 - DNA, 25 bp, Artificial
  Probe
ctgaccaccgggtccgattggacct

SEQ ID NO: 240387 - DNA, 25 bp, Artificial
  Probe
ctgggtaaatacaccacgaattcca

SEQ ID NO: 240388 - DNA, 25 bp, Artificial
  Probe
cgggtccgattggacctgggcctct

SEQ ID NO: 240389 - DNA, 25 bp, Artificial
  Probe
tgtaccaggtataccccagagcaag

SEQ ID NO: 240390 - DNA, 25 bp, Artificial
  Probe
agcggagctggatgacctcaccgag

SEQ ID NO: 240391 - DNA, 25 bp, Artificial
  Probe
caccatgactttctctgatggcctt

SEQ ID NO: 240392 - DNA, 25 bp, Artificial
  Probe
tctacacttgccaccgggataagaa

SEQ ID NO: 240393 - DNA, 25 bp, Artificial
  Probe
gccaccaagtgcattattaagatcg

SEQ ID NO: 240394 - DNA, 25 bp, Artificial
  Probe
agtgcacagagagctatgagatgac

SEQ ID NO: 240395 - DNA, 25 bp, Artificial
  Probe
gtctgccgggcttcacgggcctgac

SEQ ID NO: 240396 - DNA, 25 bp, Artificial
  Probe
cgttattaacaaggtcactaggaat

SEQ ID NO: 240397 - DNA, 25 bp, Artificial
  Probe
tctgatggccttaccctaaatcgaa

SEQ ID NO: 240398 - DNA, 25 bp, Artificial
  Probe
agatgacagcggagctggatgacct

SEQ ID NO: 240399 - DNA, 25 bp, Artificial
  Probe
cgggcctgaccatcgcagaccagat

SEQ ID NO: 240400 - DNA, 25 bp, Artificial
  Probe
tcaccgagaagatccggaaagccca

SEQ ID NO: 240401 - DNA, 25 bp, Artificial
  Probe
atgacctcaccgagaagatccggaa

SEQ ID NO: 240402 - DNA, 25 bp, Artificial
  Probe
ccagtgctgaccaccgggtccgatt

SEQ ID NO: 240403 - DNA, 25 bp, Artificial
  Probe
tctctgatggccttaccctaaatcg

SEQ ID NO: 240404 - DNA, 25 bp, Artificial
  Probe
gactttctctgatggccttacccta

SEQ ID NO: 240405 - DNA, 25 bp, Artificial
  Probe
acgggcctgaccatcgcagaccaga

SEQ ID NO: 240406 - DNA, 25 bp, Artificial
  Probe
gcttcacgggcctgaccatcgcaga

SEQ ID NO: 240407 - DNA, 25 bp, Artificial
  Probe
ccaccgggataagaactgcgttatt

SEQ ID NO: 240408 - DNA, 25 bp, Artificial
  Probe
tcactaggaatcgatgccagtactg

SEQ ID NO: 240409 - DNA, 25 bp, Artificial
  Probe
ctggatgacctcaccgagaagatcc

SEQ ID NO: 240410 - DNA, 25 bp, Artificial
  Probe
tggccttaccctaaatcgaactcag

SEQ ID NO: 240411 - DNA, 25 bp, Artificial
  Probe
gaagatccggaaagcccaccaggaa

SEQ ID NO: 240412 - DNA, 25 bp, Artificial
  Probe
aactgcgttattaacaaggtcacta

SEQ ID NO: 240413 - DNA, 25 bp, Artificial
  Probe
cgtctgccgggcttcacgggcctga

SEQ ID NO: 240414 - DNA, 25 bp, Artificial
  Probe
gtgcacagagagctatgagatgaca

SEQ ID NO: 240415 - DNA, 25 bp, Artificial
  Probe
ttgccaccgggataagaactgcgtt

SEQ ID NO: 240416 - DNA, 25 bp, Artificial
  Probe
cctcactctgccagctgggtaaata

SEQ ID NO: 240417 - DNA, 25 bp, Artificial
  Probe
gggcatgtccaaagagtctgtcagg

SEQ ID NO: 240418 - DNA, 25 bp, Artificial
  Probe
taccccagagcaagacaccatgact

SEQ ID NO: 240419 - DNA, 25 bp, Artificial
  Probe
ctatgagatgacagcggagctggat

SEQ ID NO: 240420 - DNA, 25 bp, Artificial
  Probe
atgatctacacttgccaccgggata

SEQ ID NO: 240421 - DNA, 25 bp, Artificial
  Probe
tggtgttcacgtattgaggggcaca

SEQ ID NO: 240422 - DNA, 25 bp, Artificial
  Probe
cgtggctctttgaagtctgaaagac

SEQ ID NO: 240423 - DNA, 25 bp, Artificial
  Probe
aagacgtcggcagaggaccctttag

SEQ ID NO: 240424 - DNA, 25 bp, Artificial
  Probe
acctggtgttcacgtattgaggggc

SEQ ID NO: 240425 - DNA, 25 bp, Artificial
  Probe
ctctttgaagtctgaaagacgtcgg

SEQ ID NO: 240426 - DNA, 25 bp, Artificial
  Probe
ctcatggtcagagatgtggcgcaga

SEQ ID NO: 240427 - DNA, 25 bp, Artificial
  Probe
cgacctggtgttcacgtattgaggg

SEQ ID NO: 240428 - DNA, 25 bp, Artificial
  Probe
cctgaaattcgtgattgcaacaaag

SEQ ID NO: 240429 - DNA, 25 bp, Artificial
  Probe
tggctctttgaagtctgaaagacgt

SEQ ID NO: 240430 - DNA, 25 bp, Artificial
  Probe
tctcaaggtagttgcacacctagtc

SEQ ID NO: 240431 - DNA, 25 bp, Artificial
  Probe
atgctcatggtcagagatgtggcgc

SEQ ID NO: 240432 - DNA, 25 bp, Artificial
  Probe
gaagctcgtggctctttgaagtctg

SEQ ID NO: 240433 - DNA, 25 bp, Artificial
  Probe
tctttttcctgaaattcgtgattgc

SEQ ID NO: 240434 - DNA, 25 bp, Artificial
  Probe
ttatcgtgtctcaaggtagttgcac

SEQ ID NO: 240435 - DNA, 25 bp, Artificial
  Probe
ggcagaggaccctttagacggcaca

SEQ ID NO: 240436 - DNA, 25 bp, Artificial
  Probe
acacctagtctggattgtgatttcc

SEQ ID NO: 240437 - DNA, 25 bp, Artificial
  Probe
aaattcgtgattgcaacaaaggcgg

SEQ ID NO: 240438 - DNA, 25 bp, Artificial
  Probe
tccggaaggcgctgtttgaagctcg

SEQ ID NO: 240439 - DNA, 25 bp, Artificial
  Probe
tgctcatggtcagagatgtggcgca

SEQ ID NO: 240440 - DNA, 25 bp, Artificial
  Probe
agatgctcatggtcagagatgtggc

SEQ ID NO: 240441 - DNA, 25 bp, Artificial
  Probe
aaggcgctgtttgaagctcgtggct

SEQ ID NO: 240442 - DNA, 25 bp, Artificial
  Probe
aggaccctttagacggcacaactgt

SEQ ID NO: 240443 - DNA, 25 bp, Artificial
  Probe
tgtctcaaggtagttgcacacctag

SEQ ID NO: 240444 - DNA, 25 bp, Artificial
  Probe
tggaggcgaacttctccgacctggt

SEQ ID NO: 240445 - DNA, 25 bp, Artificial
  Probe
agctcgtggctctttgaagtctgaa

SEQ ID NO: 240446 - DNA, 25 bp, Artificial
  Probe
cgtgtctcaaggtagttgcacacct

SEQ ID NO: 240447 - DNA, 25 bp, Artificial
  Probe
tctttgaagtctgaaagacgtcggc

SEQ ID NO: 240448 - DNA, 25 bp, Artificial
  Probe
cgaacttctccgacctggtgttcac

SEQ ID NO: 240449 - DNA, 25 bp, Artificial
  Probe
tcctttatcgtgtctcaaggtagtt

SEQ ID NO: 240450 - DNA, 25 bp, Artificial
  Probe
ccttcctttatcgtgtctcaaggta

SEQ ID NO: 240451 - DNA, 25 bp, Artificial
  Probe
tggctggaggcgaacttctccgacc

SEQ ID NO: 240452 - DNA, 25 bp, Artificial
  Probe
attcgtgattgcaacaaaggcggag

SEQ ID NO: 240453 - DNA, 25 bp, Artificial
  Probe
ctggaggcgaacttctccgacctgg

SEQ ID NO: 240454 - DNA, 25 bp, Artificial
  Probe
gtctgaaagacgtcggcagaggacc

SEQ ID NO: 240455 - DNA, 25 bp, Artificial
  Probe
cacaactgttactctagggagttga

SEQ ID NO: 240456 - DNA, 25 bp, Artificial
  Probe
gaggcgaacttctccgacctggtgt

SEQ ID NO: 240457 - DNA, 25 bp, Artificial
  Probe
cgctgtttgaagctcgtggctcttt

SEQ ID NO: 240458 - DNA, 25 bp, Artificial
  Probe
gtttgaagctcgtggctctttgaag

SEQ ID NO: 240459 - DNA, 25 bp, Artificial
  Probe
gacggcacaactgttactctaggga

SEQ ID NO: 240460 - DNA, 25 bp, Artificial
  Probe
cgtcggcagaggaccctttagacgg

SEQ ID NO: 240461 - DNA, 25 bp, Artificial
  Probe
cctttagacggcacaactgttactc

SEQ ID NO: 240462 - DNA, 25 bp, Artificial
  Probe
ttctccgacctggtgttcacgtatt

SEQ ID NO: 240463 - DNA, 25 bp, Artificial
  Probe
ctagtctggattgtgatttccccca

SEQ ID NO: 240464 - DNA, 25 bp, Artificial
  Probe
tagttgcacacctagtctggattgt

SEQ ID NO: 240465 - DNA, 25 bp, Artificial
  Probe
ccggaaggcgctgtttgaagctcgt

SEQ ID NO: 240466 - DNA, 25 bp, Artificial
  Probe
aagtctgaaagacgtcggcagagga

SEQ ID NO: 240467 - DNA, 25 bp, Artificial
  Probe
gataccagataccactggaacattt

SEQ ID NO: 240468 - DNA, 25 bp, Artificial
  Probe
ttgccttcagtgtgcttcagtaatg

SEQ ID NO: 240469 - DNA, 25 bp, Artificial
  Probe
tgtcattgacgaatttcacagtggt

SEQ ID NO: 240470 - DNA, 25 bp, Artificial
  Probe
ttaacataccttggagtagcaataa

SEQ ID NO: 240471 - DNA, 25 bp, Artificial
  Probe
tgcttcagtaatgcaaactgatatt

SEQ ID NO: 240472 - DNA, 25 bp, Artificial
  Probe
attgataccagataccactggaaca

SEQ ID NO: 240473 - DNA, 25 bp, Artificial
  Probe
ccctgttctgctaagagtaactttt

SEQ ID NO: 240474 - DNA, 25 bp, Artificial
  Probe
atctgatacaagtggcatagtccaa

SEQ ID NO: 240475 - DNA, 25 bp, Artificial
  Probe
ttctgaaaccaagtttgtaaatgtc

SEQ ID NO: 240476 - DNA, 25 bp, Artificial
  Probe
tttgatgtcattgacgaatttcaca

SEQ ID NO: 240477 - DNA, 25 bp, Artificial
  Probe
agtgtgcttcagtaatgcaaactga

SEQ ID NO: 240478 - DNA, 25 bp, Artificial
  Probe
gatacaagtggcatagtccaaaata

SEQ ID NO: 240479 - DNA, 25 bp, Artificial
  Probe
tcacagtggtcaaacccagacacgc

SEQ ID NO: 240480 - DNA, 25 bp, Artificial
  Probe
tcagtgtgcttcagtaatgcaaact

SEQ ID NO: 240481 - DNA, 25 bp, Artificial
  Probe
ctaatctttcattgccttcagtgtg

SEQ ID NO: 240482 - DNA, 25 bp, Artificial
  Probe
gccttcagtgtgcttcagtaatgca

SEQ ID NO: 240483 - DNA, 25 bp, Artificial
  Probe
tgacgaatttcacagtggtcaaacc

SEQ ID NO: 240484 - DNA, 25 bp, Artificial
  Probe
gcccatcatccctgttctgctaaga

SEQ ID NO: 240485 - DNA, 25 bp, Artificial
  Probe
ttcattgccttcagtgtgcttcagt

SEQ ID NO: 240486 - DNA, 25 bp, Artificial
  Probe
ctgttctgctaagagtaactttttg

SEQ ID NO: 240487 - DNA, 25 bp, Artificial
  Probe
tttcagcaagaaatgtcacgcattt

SEQ ID NO: 240488 - DNA, 25 bp, Artificial
  Probe
ccaacctagtagctaaatacatagg

SEQ ID NO: 240489 - DNA, 25 bp, Artificial
  Probe
atccctgttctgctaagagtaactt

SEQ ID NO: 240490 - DNA, 25 bp, Artificial
  Probe
catccacccaggaattaagtttttg

SEQ ID NO: 240491 - DNA, 25 bp, Artificial
  Probe
tctgaaaccaagtttgtaaatgtcc

SEQ ID NO: 240492 - DNA, 25 bp, Artificial
  Probe
agtttcagcaagaaatgtcacgcat

SEQ ID NO: 240493 - DNA, 25 bp, Artificial
  Probe
ttgataccagataccactggaacat

SEQ ID NO: 240494 - DNA, 25 bp, Artificial
  Probe
tacaagtggcatagtccaaaatatt

SEQ ID NO: 240495 - DNA, 25 bp, Artificial
  Probe
tctttcattgccttcagtgtgcttc

SEQ ID NO: 240496 - DNA, 25 bp, Artificial
  Probe
cgaatttcacagtggtcaaacccag

SEQ ID NO: 240497 - DNA, 25 bp, Artificial
  Probe
ttaattgataccagataccactgga

SEQ ID NO: 240498 - DNA, 25 bp, Artificial
  Probe
gaatttcacagtggtcaaacccaga

SEQ ID NO: 240499 - DNA, 25 bp, Artificial
  Probe
atcatccctgttctgctaagagtaa

SEQ ID NO: 240500 - DNA, 25 bp, Artificial
  Probe
atttgatgtcattgacgaatttcac

SEQ ID NO: 240501 - DNA, 25 bp, Artificial
  Probe
tccctgttctgctaagagtaacttt

SEQ ID NO: 240502 - DNA, 25 bp, Artificial
  Probe
acataccttggagtagcaataaaat

SEQ ID NO: 240503 - DNA, 25 bp, Artificial
  Probe
tctttaacataccttggagtagcaa

SEQ ID NO: 240504 - DNA, 25 bp, Artificial
  Probe
cattgccttcagtgtgcttcagtaa

SEQ ID NO: 240505 - DNA, 25 bp, Artificial
  Probe
aatctgatacaagtggcatagtcca

SEQ ID NO: 240506 - DNA, 25 bp, Artificial
  Probe
gcttcagtaatgcaaactgatatta

SEQ ID NO: 240507 - DNA, 25 bp, Artificial
  Probe
ttcacagtggtcaaacccagacacg

SEQ ID NO: 240508 - DNA, 25 bp, Artificial
  Probe
cttcagtgtgcttcagtaatgcaaa

SEQ ID NO: 240509 - DNA, 25 bp, Artificial
  Probe
tttctttaacataccttggagtagc

SEQ ID NO: 240510 - DNA, 25 bp, Artificial
  Probe
tgtgcttcagtaatgcaaactgata

SEQ ID NO: 240511 - DNA, 25 bp, Artificial
  Probe
atgtcattgacgaatttcacagtgg

SEQ ID NO: 240512 - DNA, 25 bp, Artificial
  Probe
aaatctgatacaagtggcatagtcc

SEQ ID NO: 240513 - DNA, 25 bp, Artificial
  Probe
actcaagacagctccggaaacacct

SEQ ID NO: 240514 - DNA, 25 bp, Artificial
  Probe
tggggcactgtcaccagccctcaag

SEQ ID NO: 240515 - DNA, 25 bp, Artificial
  Probe
tctgtttctgctaatgggagcgtgg

SEQ ID NO: 240516 - DNA, 25 bp, Artificial
  Probe
agacagatgggtcctaactgcagcc

SEQ ID NO: 240517 - DNA, 25 bp, Artificial
  Probe
gatcaccgagggtatggtctgtgct

SEQ ID NO: 240518 - DNA, 25 bp, Artificial
  Probe
cactaactggatcaagaagaccatg

SEQ ID NO: 240519 - DNA, 25 bp, Artificial
  Probe
aaatctgtcgctacactaactggat

SEQ ID NO: 240520 - DNA, 25 bp, Artificial
  Probe
cctacccagggaagatcaccgaggg

SEQ ID NO: 240521 - DNA, 25 bp, Artificial
  Probe
accatgggcaagagggactgatcct

SEQ ID NO: 240522 - DNA, 25 bp, Artificial
  Probe
cgtgggcaggactcaccagagctca

SEQ ID NO: 240523 - DNA, 25 bp, Artificial
  Probe
tcctggaaggtcaggagtgtaaacc

SEQ ID NO: 240524 - DNA, 25 bp, Artificial
  Probe
tcttcagggtccaccatgggacgcc

SEQ ID NO: 240525 - DNA, 25 bp, Artificial
  Probe
agttccccagacaacaagatctcag

SEQ ID NO: 240526 - DNA, 25 bp, Artificial
  Probe
tggccaatctgtgtcccaaagttgg

SEQ ID NO: 240527 - DNA, 25 bp, Artificial
  Probe
agacaacaagatctcaggctcctcc

SEQ ID NO: 240528 - DNA, 25 bp, Artificial
  Probe
ctctggtgtgcaacggggtgctcca

SEQ ID NO: 240529 - DNA, 25 bp, Artificial
  Probe
tgagaaacccggagtctacaccaaa

SEQ ID NO: 240530 - DNA, 25 bp, Artificial
  Probe
aacaccctcaactgtgcggaagtga

SEQ ID NO: 240531 - DNA, 25 bp, Artificial
  Probe
gagtctacaccaaaatctgtcgcta

SEQ ID NO: 240532 - DNA, 25 bp, Artificial
  Probe
gaagtgaaaatctactcccagaaca

SEQ ID NO: 240533 - DNA, 25 bp, Artificial
  Probe
gatccaggtggctcggtctatccag

SEQ ID NO: 240534 - DNA, 25 bp, Artificial
  Probe
gtgtcccaaagttggccagaagtgc

SEQ ID NO: 240535 - DNA, 25 bp, Artificial
  Probe
acaagtactccgtgcgtctgggtga

SEQ ID NO: 240536 - DNA, 25 bp, Artificial
  Probe
tcccagaacaagtgtgagagagcct

SEQ ID NO: 240537 - DNA, 25 bp, Artificial
  Probe
aaagtgaagcccatcgagctggcca

SEQ ID NO: 240538 - DNA, 25 bp, Artificial
  Probe
tcttcttcagggtccaccatgggac

SEQ ID NO: 240539 - DNA, 25 bp, Artificial
  Probe
acctcggggacaaagtgaagcccat

SEQ ID NO: 240540 - DNA, 25 bp, Artificial
  Probe
caactgtgcggaagtgaaaatctac

SEQ ID NO: 240541 - DNA, 25 bp, Artificial
  Probe
ctcagacccctgtgggaaacctgag

SEQ ID NO: 240542 - DNA, 25 bp, Artificial
  Probe
agccttcagaaaagagatgagcccg

SEQ ID NO: 240543 - DNA, 25 bp, Artificial
  Probe
cagccttgttccagggcgagagact

SEQ ID NO: 240544 - DNA, 25 bp, Artificial
  Probe
tcctggtcggagacagatgggtcct

SEQ ID NO: 240545 - DNA, 25 bp, Artificial
  Probe
gagatgagcccgagcaagagatcca

SEQ ID NO: 240546 - DNA, 25 bp, Artificial
  Probe
tatggtctgtgctggcagcagcaac

SEQ ID NO: 240547 - DNA, 25 bp, Artificial
  Probe
cccaaccttggcagacagccttgtt

SEQ ID NO: 240548 - DNA, 25 bp, Artificial
  Probe
aactcagcaaacctcggggacaaag

SEQ ID NO: 240549 - DNA, 25 bp, Artificial
  Probe
tcctctggtgtgcaacggggtgctc

SEQ ID NO: 240550 - DNA, 25 bp, Artificial
  Probe
ctggcagcagcaacggggccgacac

SEQ ID NO: 240551 - DNA, 25 bp, Artificial
  Probe
cccagggaagatcaccgagggtatg

SEQ ID NO: 240552 - DNA, 25 bp, Artificial
  Probe
atcaagaagaccatgggcaagaggg

SEQ ID NO: 240553 - DNA, 25 bp, Artificial
  Probe
ctccaagatcctggaaggtcaggag

SEQ ID NO: 240554 - DNA, 25 bp, Artificial
  Probe
gtcaccagccctcaagagaactttc

SEQ ID NO: 240555 - DNA, 25 bp, Artificial
  Probe
atcaccgagggtatggtctgtgctg

SEQ ID NO: 240556 - DNA, 25 bp, Artificial
  Probe
ccaccctgtgcaatccagacgtgga

SEQ ID NO: 240557 - DNA, 25 bp, Artificial
  Probe
ggctcagacccctgtgggaaacctg

SEQ ID NO: 240558 - DNA, 25 bp, Artificial
  Probe
cggtcaataaagaccactgctggct

SEQ ID NO: 240559 - DNA, 25 bp, Artificial
  Probe
gcttccccacggaagcagaagagaa

SEQ ID NO: 240560 - DNA, 25 bp, Artificial
  Probe
taacatacatgcaggggctctcact

SEQ ID NO: 240561 - DNA, 25 bp, Artificial
  Probe
cctgagaggccctgtgaggcctctg

SEQ ID NO: 240562 - DNA, 25 bp, Artificial
  Probe
ccccacggaagcagaagagaagcct

SEQ ID NO: 240563 - DNA, 25 bp, Artificial
  Probe
ccgacattttagcaaggatatccac

SEQ ID NO: 240564 - DNA, 25 bp, Artificial
  Probe
cattggggcaagagccccatggaac

SEQ ID NO: 240565 - DNA, 25 bp, Artificial
  Probe
ggcaagagccccatggaacccgagt

SEQ ID NO: 240566 - DNA, 25 bp, Artificial
  Probe
aaaggaccttattactctggggctg

SEQ ID NO: 240567 - DNA, 25 bp, Artificial
  Probe
tccacgcctttctcctcgggagaaa

SEQ ID NO: 240568 - DNA, 25 bp, Artificial
  Probe
cagatccaggcaatggaaaagcagt

SEQ ID NO: 240569 - DNA, 25 bp, Artificial
  Probe
gcaaggatatccacgcctttctcct

SEQ ID NO: 240570 - DNA, 25 bp, Artificial
  Probe
tgggtcctggtctccctctgccttt

SEQ ID NO: 240571 - DNA, 25 bp, Artificial
  Probe
agccacttgtgaacaagacagacac

SEQ ID NO: 240572 - DNA, 25 bp, Artificial
  Probe
gggcttgcttcaaggcctgcttccc

SEQ ID NO: 240573 - DNA, 25 bp, Artificial
  Probe
agtatgaggccaagatgaagggcct

SEQ ID NO: 240574 - DNA, 25 bp, Artificial
  Probe
tctcacttggagctccgttcctttc

SEQ ID NO: 240575 - DNA, 25 bp, Artificial
  Probe
tgaatgccagcatctcactccgaca

SEQ ID NO: 240576 - DNA, 25 bp, Artificial
  Probe
acatgcaggggctctcacttggagc

SEQ ID NO: 240577 - DNA, 25 bp, Artificial
  Probe
gtcttttctaagctggcttcttctg

SEQ ID NO: 240578 - DNA, 25 bp, Artificial
  Probe
atctcactccgacattttagcaagg

SEQ ID NO: 240579 - DNA, 25 bp, Artificial
  Probe
ctgagaggccctgtgaggcctctga

SEQ ID NO: 240580 - DNA, 25 bp, Artificial
  Probe
ccacataaggcagaaatgggagacc

SEQ ID NO: 240581 - DNA, 25 bp, Artificial
  Probe
aggagagccgcctctgaatgccagc

SEQ ID NO: 240582 - DNA, 25 bp, Artificial
  Probe
ccatggaacccgagtcttttctaag

SEQ ID NO: 240583 - DNA, 25 bp, Artificial
  Probe
gagccccatggaacccgagtctttt

SEQ ID NO: 240584 - DNA, 25 bp, Artificial
  Probe
gacactcaggagagccgcctctgaa

SEQ ID NO: 240585 - DNA, 25 bp, Artificial
  Probe
aaagcagttccaggagaaggcgctg

SEQ ID NO: 240586 - DNA, 25 bp, Artificial
  Probe
ttcaaggcctgcttccccacggaag

SEQ ID NO: 240587 - DNA, 25 bp, Artificial
  Probe
cacgcctttctcctcgggagaaaag

SEQ ID NO: 240588 - DNA, 25 bp, Artificial
  Probe
acctgtagtgccatatacttattga

SEQ ID NO: 240589 - DNA, 25 bp, Artificial
  Probe
tctcctcgggagaaaaggaccttat

SEQ ID NO: 240590 - DNA, 25 bp, Artificial
  Probe
accttattactctggggctgtggga

SEQ ID NO: 240591 - DNA, 25 bp, Artificial
  Probe
ccctgtgaggcctctgaggagtcgt

SEQ ID NO: 240592 - DNA, 25 bp, Artificial
  Probe
ccatatacttattgaaggcaaagga

SEQ ID NO: 240593 - DNA, 25 bp, Artificial
  Probe
tggaaaagcagttccaggagaaggc

SEQ ID NO: 240594 - DNA, 25 bp, Artificial
  Probe
cgcttctcagccacataaggcagaa

SEQ ID NO: 240595 - DNA, 25 bp, Artificial
  Probe
gtgaacaagacagacactcaggaga

SEQ ID NO: 240596 - DNA, 25 bp, Artificial
  Probe
attttagcaaggatatccacgcctt

SEQ ID NO: 240597 - DNA, 25 bp, Artificial
  Probe
gagccgcctctgaatgccagcatct

SEQ ID NO: 240598 - DNA, 25 bp, Artificial
  Probe
gtcaatgcgggcttgcttcaaggcc

SEQ ID NO: 240599 - DNA, 25 bp, Artificial
  Probe
ttctaagctggcttcttctgtcgtc

SEQ ID NO: 240600 - DNA, 25 bp, Artificial
  Probe
aagcagacagcctgcctggagcaga

SEQ ID NO: 240601 - DNA, 25 bp, Artificial
  Probe
ggaaattgggtcctggtctccctct

SEQ ID NO: 240602 - DNA, 25 bp, Artificial
  Probe
gaatgccagcatctcactccgacat

SEQ ID NO: 240603 - DNA, 25 bp, Artificial
  Probe
ctgcctttcctaacatacatgcagg

SEQ ID NO: 240604 - DNA, 25 bp, Artificial
  Probe
cttggagctccgttcctttcctgga

SEQ ID NO: 240605 - DNA, 25 bp, Artificial
  Probe
gacgaggtactggacgcccagcagc

SEQ ID NO: 240606 - DNA, 25 bp, Artificial
  Probe
atctctaccgggacgaggtactgga

SEQ ID NO: 240607 - DNA, 25 bp, Artificial
  Probe
tgcccccatgactttggtgtttggc

SEQ ID NO: 240608 - DNA, 25 bp, Artificial
  Probe
attgcgcacccaggaggtgacgagc

SEQ ID NO: 240609 - DNA, 25 bp, Artificial
  Probe
ttggtgtttggctgccgatgctccc

SEQ ID NO: 240610 - DNA, 25 bp, Artificial
  Probe
cacatgtttgtctgcggtgatgtca

SEQ ID NO: 240611 - DNA, 25 bp, Artificial
  Probe
tgcgggatcagcaacgctaccacga

SEQ ID NO: 240612 - DNA, 25 bp, Artificial
  Probe
agggatcctggcagccctaagacct

SEQ ID NO: 240613 - DNA, 25 bp, Artificial
  Probe
tcatcggcgtgctgcgggatcagca

SEQ ID NO: 240614 - DNA, 25 bp, Artificial
  Probe
accgccttttccagggatcctggca

SEQ ID NO: 240615 - DNA, 25 bp, Artificial
  Probe
tggctgccgatgctcccaactggac

SEQ ID NO: 240616 - DNA, 25 bp, Artificial
  Probe
tgtgcctcgagcaaggacacatgtt

SEQ ID NO: 240617 - DNA, 25 bp, Artificial
  Probe
atgactttggtgtttggctgccgat

SEQ ID NO: 240618 - DNA, 25 bp, Artificial
  Probe
tgccacctgatcctaacttgccttg

SEQ ID NO: 240619 - DNA, 25 bp, Artificial
  Probe
aaccagcgtcctgcaaaccgtgcag

SEQ ID NO: 240620 - DNA, 25 bp, Artificial
  Probe
tactggacgcccagcagcgtggagt

SEQ ID NO: 240621 - DNA, 25 bp, Artificial
  Probe
caactggaccatctctaccgggacg

SEQ ID NO: 240622 - DNA, 25 bp, Artificial
  Probe
ccttccggggattctggcaagaccg

SEQ ID NO: 240623 - DNA, 25 bp, Artificial
  Probe
gatgctcccaactggaccatctcta

SEQ ID NO: 240624 - DNA, 25 bp, Artificial
  Probe
acgtcatcggcgtgctgcgggatca

SEQ ID NO: 240625 - DNA, 25 bp, Artificial
  Probe
taacttgccttgcatcctggtgggc

SEQ ID NO: 240626 - DNA, 25 bp, Artificial
  Probe
tcctaacttgccttgcatcctggtg

SEQ ID NO: 240627 - DNA, 25 bp, Artificial
  Probe
ctggcaagaccgattacacgacatt

SEQ ID NO: 240628 - DNA, 25 bp, Artificial
  Probe
gtttgtctgcggtgatgtcactatg

SEQ ID NO: 240629 - DNA, 25 bp, Artificial
  Probe
ttctggcaacagagggcagcatgga

SEQ ID NO: 240630 - DNA, 25 bp, Artificial
  Probe
gcaacgctaccacgaggacattttc

SEQ ID NO: 240631 - DNA, 25 bp, Artificial
  Probe
cacgaggacattttcggactcacat

SEQ ID NO: 240632 - DNA, 25 bp, Artificial
  Probe
ctcacattgcgcacccaggaggtga

SEQ ID NO: 240633 - DNA, 25 bp, Artificial
  Probe
tcagcaacgctaccacgaggacatt

SEQ ID NO: 240634 - DNA, 25 bp, Artificial
  Probe
cacgacattgagatcaaaggactgc

SEQ ID NO: 240635 - DNA, 25 bp, Artificial
  Probe
cttttccagggatcctggcagccct

SEQ ID NO: 240636 - DNA, 25 bp, Artificial
  Probe
gaattctggcaacagagggcagcat

SEQ ID NO: 240637 - DNA, 25 bp, Artificial
  Probe
tcctggcagccctaagacctatgtg

SEQ ID NO: 240638 - DNA, 25 bp, Artificial
  Probe
tcggactcacattgcgcacccagga

SEQ ID NO: 240639 - DNA, 25 bp, Artificial
  Probe
tcaccgccttttccagggatcctgg

SEQ ID NO: 240640 - DNA, 25 bp, Artificial
  Probe
cgtgctgcgggatcagcaacgctac

SEQ ID NO: 240641 - DNA, 25 bp, Artificial
  Probe
cccaggaggtgacgagccgcatccg

SEQ ID NO: 240642 - DNA, 25 bp, Artificial
  Probe
tggaccatctctaccgggacgaggt

SEQ ID NO: 240643 - DNA, 25 bp, Artificial
  Probe
tttctttgcaggagcgacagttgcg

SEQ ID NO: 240644 - DNA, 25 bp, Artificial
  Probe
cagcgtggagtgtttggacaagtcc

SEQ ID NO: 240645 - DNA, 25 bp, Artificial
  Probe
tctaccgggacgaggtactggacgc

SEQ ID NO: 240646 - DNA, 25 bp, Artificial
  Probe
agtgtttggacaagtcctcaccgcc

SEQ ID NO: 240647 - DNA, 25 bp, Artificial
  Probe
acgaggtactggacgcccagcagcg

SEQ ID NO: 240648 - DNA, 25 bp, Artificial
  Probe
gccctaagacctatgtgcaagacct

SEQ ID NO: 240649 - DNA, 25 bp, Artificial
  Probe
atgaagccggtgacgtcatcggcgt

SEQ ID NO: 240650 - DNA, 25 bp, Artificial
  Probe
ttggacaagtcctcaccgccttttc

SEQ ID NO: 240651 - DNA, 25 bp, Artificial
  Probe
accctctgtaactgagtgcttccag

SEQ ID NO: 240652 - DNA, 25 bp, Artificial
  Probe
gaaagactacaggtcttagcgtccg

SEQ ID NO: 240653 - DNA, 25 bp, Artificial
  Probe
gcacttgcctgtttgtctcctttcc

SEQ ID NO: 240654 - DNA, 25 bp, Artificial
  Probe
ggcatcccacagaagctcgtctgaa

SEQ ID NO: 240655 - DNA, 25 bp, Artificial
  Probe
aatcctgaagctcagcgtgaagttc

SEQ ID NO: 240656 - DNA, 25 bp, Artificial
  Probe
atgaaatcctgaagctcagcgtgaa

SEQ ID NO: 240657 - DNA, 25 bp, Artificial
  Probe
caccctctgtaactgagtgcttcca

SEQ ID NO: 240658 - DNA, 25 bp, Artificial
  Probe
tcagaacacggcatcccacagaagc

SEQ ID NO: 240659 - DNA, 25 bp, Artificial
  Probe
accctgcgggaaatgccaagggaat

SEQ ID NO: 240660 - DNA, 25 bp, Artificial
  Probe
cagaacacggcatcccacagaagct

SEQ ID NO: 240661 - DNA, 25 bp, Artificial
  Probe
ttttgcacttgcactattgaacatg

SEQ ID NO: 240662 - DNA, 25 bp, Artificial
  Probe
actattgaacatgaccctgcgggaa

SEQ ID NO: 240663 - DNA, 25 bp, Artificial
  Probe
acggcatcccacagaagctcgtctg

SEQ ID NO: 240664 - DNA, 25 bp, Artificial
  Probe
gactacaggtcttagcgtccgctct

SEQ ID NO: 240665 - DNA, 25 bp, Artificial
  Probe
tttgcacttgcactattgaacatga

SEQ ID NO: 240666 - DNA, 25 bp, Artificial
  Probe
acttgcactattgaacatgaccctg

SEQ ID NO: 240667 - DNA, 25 bp, Artificial
  Probe
ctctgctctgctgcacttgcctgtt

SEQ ID NO: 240668 - DNA, 25 bp, Artificial
  Probe
gaatgaaatcctgaagctcagcgtg

SEQ ID NO: 240669 - DNA, 25 bp, Artificial
  Probe
ttgcactattgaacatgaccctgcg

SEQ ID NO: 240670 - DNA, 25 bp, Artificial
  Probe
caggtcttagcgtccgctctgctct

SEQ ID NO: 240671 - DNA, 25 bp, Artificial
  Probe
ttagcgtccgctctgctctgctgca

SEQ ID NO: 240672 - DNA, 25 bp, Artificial
  Probe
ttgcacttgcactattgaacatgac

SEQ ID NO: 240673 - DNA, 25 bp, Artificial
  Probe
cactattgaacatgaccctgcggga

SEQ ID NO: 240674 - DNA, 25 bp, Artificial
  Probe
gctgcacttgcctgtttgtctcctt

SEQ ID NO: 240675 - DNA, 25 bp, Artificial
  Probe
aagactacaggtcttagcgtccgct

SEQ ID NO: 240676 - DNA, 25 bp, Artificial
  Probe
gcacttgcactattgaacatgaccc

SEQ ID NO: 240677 - DNA, 25 bp, Artificial
  Probe
gctctgctgcacttgcctgtttgtc

SEQ ID NO: 240678 - DNA, 25 bp, Artificial
  Probe
gctctgctctgctgcacttgcctgt

SEQ ID NO: 240679 - DNA, 25 bp, Artificial
  Probe
actacaggtcttagcgtccgctctg

SEQ ID NO: 240680 - DNA, 25 bp, Artificial
  Probe
tgaccctgcgggaaatgccaaggga

SEQ ID NO: 240681 - DNA, 25 bp, Artificial
  Probe
cggcatcccacagaagctcgtctga

SEQ ID NO: 240682 - DNA, 25 bp, Artificial
  Probe
gaccctgcgggaaatgccaagggaa

SEQ ID NO: 240683 - DNA, 25 bp, Artificial
  Probe
agactacaggtcttagcgtccgctc

SEQ ID NO: 240684 - DNA, 25 bp, Artificial
  Probe
tgcacttgcactattgaacatgacc

SEQ ID NO: 240685 - DNA, 25 bp, Artificial
  Probe
gcatcccacagaagctcgtctgaac

SEQ ID NO: 240686 - DNA, 25 bp, Artificial
  Probe
atcccacagaagctcgtctgaacca

SEQ ID NO: 240687 - DNA, 25 bp, Artificial
  Probe
tgaacatgaccctgcgggaaatgcc

SEQ ID NO: 240688 - DNA, 25 bp, Artificial
  Probe
ctgcacttgcctgtttgtctccttt

SEQ ID NO: 240689 - DNA, 25 bp, Artificial
  Probe
tgaaatcctgaagctcagcgtgaag

SEQ ID NO: 240690 - DNA, 25 bp, Artificial
  Probe
ccctgcgggaaatgccaagggaatg

SEQ ID NO: 240691 - DNA, 25 bp, Artificial
  Probe
ctattgaacatgaccctgcgggaaa

SEQ ID NO: 240692 - DNA, 25 bp, Artificial
  Probe
aaatcctgaagctcagcgtgaagtt

SEQ ID NO: 240693 - DNA, 25 bp, Artificial
  Probe
aatgaaatcctgaagctcagcgtga

SEQ ID NO: 240694 - DNA, 25 bp, Artificial
  Probe
atcctgaagctcagcgtgaagttca

SEQ ID NO: 240695 - DNA, 25 bp, Artificial
  Probe
cctctgtaactgagtgcttccagga

SEQ ID NO: 240696 - DNA, 25 bp, Artificial
  Probe
cttgcactattgaacatgaccctgc

SEQ ID NO: 240697 - DNA, 25 bp, Artificial
  Probe
gccagctgaagttcccttctggcaa

SEQ ID NO: 240698 - DNA, 25 bp, Artificial
  Probe
ctacccttcatgtttggatgacacc

SEQ ID NO: 240699 - DNA, 25 bp, Artificial
  Probe
ctgttagtccccacaaaggccaagt

SEQ ID NO: 240700 - DNA, 25 bp, Artificial
  Probe
tgtctgccagctgaagttcccttct

SEQ ID NO: 240701 - DNA, 25 bp, Artificial
  Probe
atgacaccagagacctgcttgtcca

SEQ ID NO: 240702 - DNA, 25 bp, Artificial
  Probe
gaagttcccttctggcaactaccct

SEQ ID NO: 240703 - DNA, 25 bp, Artificial
  Probe
agagacctgcttgtccactggtgcc

SEQ ID NO: 240704 - DNA, 25 bp, Artificial
  Probe
caactacccttcatgtttggatgac

SEQ ID NO: 240705 - DNA, 25 bp, Artificial
  Probe
gtacgggctactgaagaagggctat

SEQ ID NO: 240706 - DNA, 25 bp, Artificial
  Probe
acgggtgcaggacaccggacacgcc

SEQ ID NO: 240707 - DNA, 25 bp, Artificial
  Probe
catgtttggatgacaccagagacct

SEQ ID NO: 240708 - DNA, 25 bp, Artificial
  Probe
atgtttggatgacaccagagacctg

SEQ ID NO: 240709 - DNA, 25 bp, Artificial
  Probe
ctgcttgtccactggtgccatggcg

SEQ ID NO: 240710 - DNA, 25 bp, Artificial
  Probe
tggcaactacccttcatgtttggat

SEQ ID NO: 240711 - DNA, 25 bp, Artificial
  Probe
actttgtctgccagctgaagttccc

SEQ ID NO: 240712 - DNA, 25 bp, Artificial
  Probe
ggctgacctgttagtccccacaaag

SEQ ID NO: 240713 - DNA, 25 bp, Artificial
  Probe
tgaagttcccttctggcaactaccc

SEQ ID NO: 240714 - DNA, 25 bp, Artificial
  Probe
tatgctcatccaagcatacaaggtg

SEQ ID NO: 240715 - DNA, 25 bp, Artificial
  Probe
tgctcatccaagcatacaaggtgtt

SEQ ID NO: 240716 - DNA, 25 bp, Artificial
  Probe
cacgggtgcaggacaccggacacgc

SEQ ID NO: 240717 - DNA, 25 bp, Artificial
  Probe
actacccttcatgtttggatgacac

SEQ ID NO: 240718 - DNA, 25 bp, Artificial
  Probe
gtgaaacccagtgtagactttgtct

SEQ ID NO: 240719 - DNA, 25 bp, Artificial
  Probe
ctgccagctgaagttcccttctggc

SEQ ID NO: 240720 - DNA, 25 bp, Artificial
  Probe
cacaaaggccaagttccctgcattt

SEQ ID NO: 240721 - DNA, 25 bp, Artificial
  Probe
caagcatacaaggtgttcaaagagg

SEQ ID NO: 240722 - DNA, 25 bp, Artificial
  Probe
tatatgctcatccaagcatacaagg

SEQ ID NO: 240723 - DNA, 25 bp, Artificial
  Probe
catccaagcatacaaggtgttcaaa

SEQ ID NO: 240724 - DNA, 25 bp, Artificial
  Probe
agacctgcttgtccactggtgccat

SEQ ID NO: 240725 - DNA, 25 bp, Artificial
  Probe
agcacgggtgcaggacaccggacac

SEQ ID NO: 240726 - DNA, 25 bp, Artificial
  Probe
ttggatgacaccagagacctgcttg

SEQ ID NO: 240727 - DNA, 25 bp, Artificial
  Probe
tcatgtttggatgacaccagagacc

SEQ ID NO: 240728 - DNA, 25 bp, Artificial
  Probe
aacccagtgtagactttgtctgcca

SEQ ID NO: 240729 - DNA, 25 bp, Artificial
  Probe
tgtagactttgtctgccagctgaag

SEQ ID NO: 240730 - DNA, 25 bp, Artificial
  Probe
ccagtgtagactttgtctgccagct

SEQ ID NO: 240731 - DNA, 25 bp, Artificial
  Probe
agtgtagactttgtctgccagctga

SEQ ID NO: 240732 - DNA, 25 bp, Artificial
  Probe
caccagagacctgcttgtccactgg

SEQ ID NO: 240733 - DNA, 25 bp, Artificial
  Probe
gctgaagttcccttctggcaactac

SEQ ID NO: 240734 - DNA, 25 bp, Artificial
  Probe
cccttcatgtttggatgacaccaga

SEQ ID NO: 240735 - DNA, 25 bp, Artificial
  Probe
caaaggccaagttccctgcatttga

SEQ ID NO: 240736 - DNA, 25 bp, Artificial
  Probe
ctcatccaagcatacaaggtgttca

SEQ ID NO: 240737 - DNA, 25 bp, Artificial
  Probe
tgttagtccccacaaaggccaagtt

SEQ ID NO: 240738 - DNA, 25 bp, Artificial
  Probe
ccacaaaggccaagttccctgcatt

SEQ ID NO: 240739 - DNA, 25 bp, Artificial
  Probe
tacgggctactgaagaagggctatg

SEQ ID NO: 240740 - DNA, 25 bp, Artificial
  Probe
ctgacctgttagtccccacaaaggc

SEQ ID NO: 240741 - DNA, 25 bp, Artificial
  Probe
tggctgacctgttagtccccacaaa

SEQ ID NO: 240742 - DNA, 25 bp, Artificial
  Probe
gtagactttgtctgccagctgaagt

SEQ ID NO: 240743 - DNA, 25 bp, Artificial
  Probe
cctgggaaggcttccccgtcagtga

SEQ ID NO: 240744 - DNA, 25 bp, Artificial
  Probe
gcagtgcatgcctgttagtggtaga

SEQ ID NO: 240745 - DNA, 25 bp, Artificial
  Probe
tcaatcctgggctttgctgggtagg

SEQ ID NO: 240746 - DNA, 25 bp, Artificial
  Probe
tcctgggaaggcttccccgtcagtg

SEQ ID NO: 240747 - DNA, 25 bp, Artificial
  Probe
aaacccgcttcttgcggtcagttgc

SEQ ID NO: 240748 - DNA, 25 bp, Artificial
  Probe
cttgcctggcgctggaattcggtgc

SEQ ID NO: 240749 - DNA, 25 bp, Artificial
  Probe
cctgccctgacacagcgtcattgga

SEQ ID NO: 240750 - DNA, 25 bp, Artificial
  Probe
cagtatttagactgcccagccagct

SEQ ID NO: 240751 - DNA, 25 bp, Artificial
  Probe
ggtgtcatttcaagactctctcacc

SEQ ID NO: 240752 - DNA, 25 bp, Artificial
  Probe
tgtgtaccggggatcagacacagat

SEQ ID NO: 240753 - DNA, 25 bp, Artificial
  Probe
tccaaggtccagaaagcaaaaaggg

SEQ ID NO: 240754 - DNA, 25 bp, Artificial
  Probe
agccaaaagccagttcacctaactg

SEQ ID NO: 240755 - DNA, 25 bp, Artificial
  Probe
ggttattagccaaaagccagttcac

SEQ ID NO: 240756 - DNA, 25 bp, Artificial
  Probe
caccttggtctgctttacgtttggt

SEQ ID NO: 240757 - DNA, 25 bp, Artificial
  Probe
ctggcgctggaattcggtgcacatg

SEQ ID NO: 240758 - DNA, 25 bp, Artificial
  Probe
actgagccaggagttagttatctgc

SEQ ID NO: 240759 - DNA, 25 bp, Artificial
  Probe
gctggaattcggtgcacatggcttt

SEQ ID NO: 240760 - DNA, 25 bp, Artificial
  Probe
tgtcccagttatttgggtcttaagg

SEQ ID NO: 240761 - DNA, 25 bp, Artificial
  Probe
tagggtcaggtgtgtccaaggtcca

SEQ ID NO: 240762 - DNA, 25 bp, Artificial
  Probe
tttgctcaatcctgggctttgctgg

SEQ ID NO: 240763 - DNA, 25 bp, Artificial
  Probe
tgagtgcagtgcatgcctgttagtg

SEQ ID NO: 240764 - DNA, 25 bp, Artificial
  Probe
taccggggatcagacacagatgttt

SEQ ID NO: 240765 - DNA, 25 bp, Artificial
  Probe
gatcagacacagatgtttcatgagt

SEQ ID NO: 240766 - DNA, 25 bp, Artificial
  Probe
taagcagtggccagacagcaccctt

SEQ ID NO: 240767 - DNA, 25 bp, Artificial
  Probe
tgcccagccagctagcctcagagaa

SEQ ID NO: 240768 - DNA, 25 bp, Artificial
  Probe
gacagtagactccactctaaacccg

SEQ ID NO: 240769 - DNA, 25 bp, Artificial
  Probe
gtgatttctgtaaccggaccctgcc

SEQ ID NO: 240770 - DNA, 25 bp, Artificial
  Probe
attcggtgcacatggctttgatgtg

SEQ ID NO: 240771 - DNA, 25 bp, Artificial
  Probe
gtgcacatggctttgatgtgtaccg

SEQ ID NO: 240772 - DNA, 25 bp, Artificial
  Probe
gagttagttatctgctttgctcaat

SEQ ID NO: 240773 - DNA, 25 bp, Artificial
  Probe
gttattagccaaaagccagttcacc

SEQ ID NO: 240774 - DNA, 25 bp, Artificial
  Probe
cgtatgcttgcctggcgctggaatt

SEQ ID NO: 240775 - DNA, 25 bp, Artificial
  Probe
gtgccccgtttctcctgggaaggct

SEQ ID NO: 240776 - DNA, 25 bp, Artificial
  Probe
gctttgatgtgtaccggggatcaga

SEQ ID NO: 240777 - DNA, 25 bp, Artificial
  Probe
gtttttgagacgaggcctttcactg

SEQ ID NO: 240778 - DNA, 25 bp, Artificial
  Probe
tttagactgcccagccagctagcct

SEQ ID NO: 240779 - DNA, 25 bp, Artificial
  Probe
agcacccttgggtgtcatttcaaga

SEQ ID NO: 240780 - DNA, 25 bp, Artificial
  Probe
gtgtgtaagcagtggccagacagca

SEQ ID NO: 240781 - DNA, 25 bp, Artificial
  Probe
tgccccgtttctcctgggaaggctt

SEQ ID NO: 240782 - DNA, 25 bp, Artificial
  Probe
ttgttctggtttttgagacgaggcc

SEQ ID NO: 240783 - DNA, 25 bp, Artificial
  Probe
tgagacgaggcctttcactggaacc

SEQ ID NO: 240784 - DNA, 25 bp, Artificial
  Probe
cagacagcacccttgggtgtcattt

SEQ ID NO: 240785 - DNA, 25 bp, Artificial
  Probe
aaggcttccccgtcagtgatttctg

SEQ ID NO: 240786 - DNA, 25 bp, Artificial
  Probe
ccttgggtgtcatttcaagactctc

SEQ ID NO: 240787 - DNA, 25 bp, Artificial
  Probe
ttcaagactctctcaccttggtctg

SEQ ID NO: 240788 - DNA, 25 bp, Artificial
  Probe
ctctaaacccgcttcttgcggtcag

SEQ ID NO: 240789 - DNA, 25 bp, Artificial
  Probe
cctgcaaaatcataagtcagtgaat

SEQ ID NO: 240790 - DNA, 25 bp, Artificial
  Probe
ctgcattctgatagaagtctgaaca

SEQ ID NO: 240791 - DNA, 25 bp, Artificial
  Probe
aaacgctgggatcaaactggcctgc

SEQ ID NO: 240792 - DNA, 25 bp, Artificial
  Probe
gcagagaccaaatttcacaagaatc

SEQ ID NO: 240793 - DNA, 25 bp, Artificial
  Probe
agaccaaatttcacaagaatcaggg

SEQ ID NO: 240794 - DNA, 25 bp, Artificial
  Probe
atgacccatggtaaaatgcaaatag

SEQ ID NO: 240795 - DNA, 25 bp, Artificial
  Probe
aatgcaaatagatccggtgtctaaa

SEQ ID NO: 240796 - DNA, 25 bp, Artificial
  Probe
gatgacccatggtaaaatgcaaata

SEQ ID NO: 240797 - DNA, 25 bp, Artificial
  Probe
tgcatgcattctcaagaggtcttgc

SEQ ID NO: 240798 - DNA, 25 bp, Artificial
  Probe
agagattcccagaggcaacggcatc

SEQ ID NO: 240799 - DNA, 25 bp, Artificial
  Probe
aagacatccttgtggactttctcca

SEQ ID NO: 240800 - DNA, 25 bp, Artificial
  Probe
ataggaaagacatccttgtggactt

SEQ ID NO: 240801 - DNA, 25 bp, Artificial
  Probe
gacatccttgtggactttctccatt

SEQ ID NO: 240802 - DNA, 25 bp, Artificial
  Probe
tattgatgacccatggtaaaatgca

SEQ ID NO: 240803 - DNA, 25 bp, Artificial
  Probe
tcatgcatgcattctcaagaggtct

SEQ ID NO: 240804 - DNA, 25 bp, Artificial
  Probe
atgcatgcattctcaagaggtcttg

SEQ ID NO: 240805 - DNA, 25 bp, Artificial
  Probe
agagaccaaatttcacaagaatcag

SEQ ID NO: 240806 - DNA, 25 bp, Artificial
  Probe
ctcaagaggtcttgccaatcagtca

SEQ ID NO: 240807 - DNA, 25 bp, Artificial
  Probe
tgcattctgatagaagtctgaacac

SEQ ID NO: 240808 - DNA, 25 bp, Artificial
  Probe
gcctgcaaaatcataagtcagtgaa

SEQ ID NO: 240809 - DNA, 25 bp, Artificial
  Probe
tggcctgcaaaatcataagtcagtg

SEQ ID NO: 240810 - DNA, 25 bp, Artificial
  Probe
gctgggatcaaactggcctgcaaaa

SEQ ID NO: 240811 - DNA, 25 bp, Artificial
  Probe
gaaagacatccttgtggactttctc

SEQ ID NO: 240812 - DNA, 25 bp, Artificial
  Probe
ctctgcattctgatagaagtctgaa

SEQ ID NO: 240813 - DNA, 25 bp, Artificial
  Probe
cattctcaagaggtcttgccaatca

SEQ ID NO: 240814 - DNA, 25 bp, Artificial
  Probe
tcacacctctgcattctgatagaag

SEQ ID NO: 240815 - DNA, 25 bp, Artificial
  Probe
aatagatccggtgtctaaatgcatt

SEQ ID NO: 240816 - DNA, 25 bp, Artificial
  Probe
tgatgacccatggtaaaatgcaaat

SEQ ID NO: 240817 - DNA, 25 bp, Artificial
  Probe
aaatgcaaatagatccggtgtctaa

SEQ ID NO: 240818 - DNA, 25 bp, Artificial
  Probe
taggaaagacatccttgtggacttt

SEQ ID NO: 240819 - DNA, 25 bp, Artificial
  Probe
tgacccatggtaaaatgcaaataga

SEQ ID NO: 240820 - DNA, 25 bp, Artificial
  Probe
tagatccggtgtctaaatgcattca

SEQ ID NO: 240821 - DNA, 25 bp, Artificial
  Probe
ctgggatcaaactggcctgcaaaat

SEQ ID NO: 240822 - DNA, 25 bp, Artificial
  Probe
ttctcaagaggtcttgccaatcagt

SEQ ID NO: 240823 - DNA, 25 bp, Artificial
  Probe
acagagattcccagaggcaacggca

SEQ ID NO: 240824 - DNA, 25 bp, Artificial
  Probe
tcaaactggcctgcaaaatcataag

SEQ ID NO: 240825 - DNA, 25 bp, Artificial
  Probe
ccaaatttcacaagaatcagggcgt

SEQ ID NO: 240826 - DNA, 25 bp, Artificial
  Probe
accaaatttcacaagaatcagggcg

SEQ ID NO: 240827 - DNA, 25 bp, Artificial
  Probe
gtggacagagattcccagaggcaac

SEQ ID NO: 240828 - DNA, 25 bp, Artificial
  Probe
acacctctgcattctgatagaagtc

SEQ ID NO: 240829 - DNA, 25 bp, Artificial
  Probe
ttgatgacccatggtaaaatgcaaa

SEQ ID NO: 240830 - DNA, 25 bp, Artificial
  Probe
tgcaaaatcataagtcagtgaattc

SEQ ID NO: 240831 - DNA, 25 bp, Artificial
  Probe
ggaaagacatccttgtggactttct

SEQ ID NO: 240832 - DNA, 25 bp, Artificial
  Probe
cattctgatagaagtctgaacactc

SEQ ID NO: 240833 - DNA, 25 bp, Artificial
  Probe
tgcattctcaagaggtcttgccaat

SEQ ID NO: 240834 - DNA, 25 bp, Artificial
  Probe
agacatccttgtggactttctccat

SEQ ID NO: 240835 - DNA, 25 bp, Artificial
  Probe
cgaacactcggcagttctaaggccc

SEQ ID NO: 240836 - DNA, 25 bp, Artificial
  Probe
aggctctagcgcatcatgaatctcg

SEQ ID NO: 240837 - DNA, 25 bp, Artificial
  Probe
ctaagaaactaaaacactgtagtga

SEQ ID NO: 240838 - DNA, 25 bp, Artificial
  Probe
tctaaagtgcactccgggaccaggt

SEQ ID NO: 240839 - DNA, 25 bp, Artificial
  Probe
ccccttacatcgagataaagtcaga

SEQ ID NO: 240840 - DNA, 25 bp, Artificial
  Probe
tcaattacaaggtgctttaccacag

SEQ ID NO: 240841 - DNA, 25 bp, Artificial
  Probe
ctgtactgtatttttaccgttactg

SEQ ID NO: 240842 - DNA, 25 bp, Artificial
  Probe
agaatatctcggaaacatgcaggag

SEQ ID NO: 240843 - DNA, 25 bp, Artificial
  Probe
tgaataagctttctaaagtgcactc

SEQ ID NO: 240844 - DNA, 25 bp, Artificial
  Probe
acttagaaaaagtccacatacctgg

SEQ ID NO: 240845 - DNA, 25 bp, Artificial
  Probe
gtgtctgacttactcttatgtcagc

SEQ ID NO: 240846 - DNA, 25 bp, Artificial
  Probe
gtgcatcactccatggttcacacaa

SEQ ID NO: 240847 - DNA, 25 bp, Artificial
  Probe
ttctgcaacggcaggaagtccacgt

SEQ ID NO: 240848 - DNA, 25 bp, Artificial
  Probe
gtatgtgaggatcctcccgaacact

SEQ ID NO: 240849 - DNA, 25 bp, Artificial
  Probe
ttttttgaagtgctcctaagaaact

SEQ ID NO: 240850 - DNA, 25 bp, Artificial
  Probe
tctcggaaacatgcaggagatatca

SEQ ID NO: 240851 - DNA, 25 bp, Artificial
  Probe
gtgctttaccacagccatttcgagc

SEQ ID NO: 240852 - DNA, 25 bp, Artificial
  Probe
ccgccctggtgatgcatatggaggt

SEQ ID NO: 240853 - DNA, 25 bp, Artificial
  Probe
acatacctggtgcaacttagaaaca

SEQ ID NO: 240854 - DNA, 25 bp, Artificial
  Probe
tatgctctgtactgtatttttaccg

SEQ ID NO: 240855 - DNA, 25 bp, Artificial
  Probe
gggaccaggtttcctcctgtaagag

SEQ ID NO: 240856 - DNA, 25 bp, Artificial
  Probe
attttaatgggcttatacgacatca

SEQ ID NO: 240857 - DNA, 25 bp, Artificial
  Probe
aagcttttcaaagtcagactgaaaa

SEQ ID NO: 240858 - DNA, 25 bp, Artificial
  Probe
gcatcatgaatctcgttttaagaac

SEQ ID NO: 240859 - DNA, 25 bp, Artificial
  Probe
attcctagtggctcccatatgaaca

SEQ ID NO: 240860 - DNA, 25 bp, Artificial
  Probe
cgccctggtgatgcatatggaggta

SEQ ID NO: 240861 - DNA, 25 bp, Artificial
  Probe
ttcaaatgacactgtccaccttagg

SEQ ID NO: 240862 - DNA, 25 bp, Artificial
  Probe
attaagcttttcaaagtcagactga

SEQ ID NO: 240863 - DNA, 25 bp, Artificial
  Probe
actctgtgtgccttctattccactg

SEQ ID NO: 240864 - DNA, 25 bp, Artificial
  Probe
atgtgaggatcctcccgaacactcg

SEQ ID NO: 240865 - DNA, 25 bp, Artificial
  Probe
accacagccatttcgagcttttctg

SEQ ID NO: 240866 - DNA, 25 bp, Artificial
  Probe
aaagtccacatacctggtgcaactt

SEQ ID NO: 240867 - DNA, 25 bp, Artificial
  Probe
tcggcagttctaaggccctgggtgc

SEQ ID NO: 240868 - DNA, 25 bp, Artificial
  Probe
ctcctgtaagagtgagcagcaatag

SEQ ID NO: 240869 - DNA, 25 bp, Artificial
  Probe
gtgctcctaagaaactaaaacactg

SEQ ID NO: 240870 - DNA, 25 bp, Artificial
  Probe
gaaataaggctctagcgcatcatga

SEQ ID NO: 240871 - DNA, 25 bp, Artificial
  Probe
ctgaaataaggctctagcgcatcat

SEQ ID NO: 240872 - DNA, 25 bp, Artificial
  Probe
cctaagaaactaaaacactgtagtg

SEQ ID NO: 240873 - DNA, 25 bp, Artificial
  Probe
gaagtccacgtacctggggcaactt

SEQ ID NO: 240874 - DNA, 25 bp, Artificial
  Probe
gcaggaagtccacgtacctggggca

SEQ ID NO: 240875 - DNA, 25 bp, Artificial
  Probe
agtccacgtacctggggcaacttag

SEQ ID NO: 240876 - DNA, 25 bp, Artificial
  Probe
accccttacatcgagataaagtcag

SEQ ID NO: 240877 - DNA, 25 bp, Artificial
  Probe
aacatgcaggagatatcatgtcact

SEQ ID NO: 240878 - DNA, 25 bp, Artificial
  Probe
tttaaaactgggaagctgtacctca

SEQ ID NO: 240879 - DNA, 25 bp, Artificial
  Probe
gtgcactccgggaccaggtttcctc

SEQ ID NO: 240880 - DNA, 25 bp, Artificial
  Probe
caacgcagtattactatggtataat

SEQ ID NO: 240881 - DNA, 25 bp, Artificial
  Probe
catgtcacattatctttgttgctgt

SEQ ID NO: 240882 - DNA, 25 bp, Artificial
  Probe
tctcaagctgtaaattgtgtatacc

SEQ ID NO: 240883 - DNA, 25 bp, Artificial
  Probe
catgcctagatttctgtaatattgt

SEQ ID NO: 240884 - DNA, 25 bp, Artificial
  Probe
gtaaattgtgtatacccgccaggat

SEQ ID NO: 240885 - DNA, 25 bp, Artificial
  Probe
tctctcaagctgtaaattgtgtata

SEQ ID NO: 240886 - DNA, 25 bp, Artificial
  Probe
tacccgccaggatccccattttggg

SEQ ID NO: 240887 - DNA, 25 bp, Artificial
  Probe
ccattttggggcatccatgcgcatt

SEQ ID NO: 240888 - DNA, 25 bp, Artificial
  Probe
tacccagctgacctggcaatgactt

SEQ ID NO: 240889 - DNA, 25 bp, Artificial
  Probe
gagaaagttcctgtactttgcactt

SEQ ID NO: 240890 - DNA, 25 bp, Artificial
  Probe
acactatagtttgtgtgtaacaaca

SEQ ID NO: 240891 - DNA, 25 bp, Artificial
  Probe
acatgtcacattatctttgttgctg

SEQ ID NO: 240892 - DNA, 25 bp, Artificial
  Probe
aaatctctcaagctgtaaattgtgt

SEQ ID NO: 240893 - DNA, 25 bp, Artificial
  Probe
ctcaatgtgactgctgacgtgctga

SEQ ID NO: 240894 - DNA, 25 bp, Artificial
  Probe
cgtgctgaaactttacataagaatt

SEQ ID NO: 240895 - DNA, 25 bp, Artificial
  Probe
atgtgactgctgacgtgctgaaact

SEQ ID NO: 240896 - DNA, 25 bp, Artificial
  Probe
acgtgctgaaactttacataagaat

SEQ ID NO: 240897 - DNA, 25 bp, Artificial
  Probe
gtcacattatctttgttgctgttaa

SEQ ID NO: 240898 - DNA, 25 bp, Artificial
  Probe
taacatggttcacactatagtttgt

SEQ ID NO: 240899 - DNA, 25 bp, Artificial
  Probe
ttttcctcccattagcaattttggg

SEQ ID NO: 240900 - DNA, 25 bp, Artificial
  Probe
tcctcccattagcaattttgggttt

SEQ ID NO: 240901 - DNA, 25 bp, Artificial
  Probe
taaattgtgtatacccgccaggatc

SEQ ID NO: 240902 - DNA, 25 bp, Artificial
  Probe
tgtatacccgccaggatccccattt

SEQ ID NO: 240903 - DNA, 25 bp, Artificial
  Probe
tcacactatagtttgtgtgtaacaa

SEQ ID NO: 240904 - DNA, 25 bp, Artificial
  Probe
ttttttcctgagttattgaacaagc

SEQ ID NO: 240905 - DNA, 25 bp, Artificial
  Probe
ttcctgagttattgaacaagcaaac

SEQ ID NO: 240906 - DNA, 25 bp, Artificial
  Probe
gtgtgtaacaacacatgtcacatta

SEQ ID NO: 240907 - DNA, 25 bp, Artificial
  Probe
agctgacctggcaatgactttttgt

SEQ ID NO: 240908 - DNA, 25 bp, Artificial
  Probe
caaacattacccagctgacctggca

SEQ ID NO: 240909 - DNA, 25 bp, Artificial
  Probe
aacattacccagctgacctggcaat

SEQ ID NO: 240910 - DNA, 25 bp, Artificial
  Probe
tgaacaagcaaacattacccagctg

SEQ ID NO: 240911 - DNA, 25 bp, Artificial
  Probe
tttgtgtgtaacaacacatgtcaca

SEQ ID NO: 240912 - DNA, 25 bp, Artificial
  Probe
ttggggcatccatgcgcattttaga

SEQ ID NO: 240913 - DNA, 25 bp, Artificial
  Probe
gaaagttcctgtactttgcactttt

SEQ ID NO: 240914 - DNA, 25 bp, Artificial
  Probe
gcatccatgcgcattttagatttaa

SEQ ID NO: 240915 - DNA, 25 bp, Artificial
  Probe
cctggcaatgactttttgtgtgtgt

SEQ ID NO: 240916 - DNA, 25 bp, Artificial
  Probe
catggttcacactatagtttgtgtg

SEQ ID NO: 240917 - DNA, 25 bp, Artificial
  Probe
attttggggcatccatgcgcatttt

SEQ ID NO: 240918 - DNA, 25 bp, Artificial
  Probe
attaaaaactcaatgtgactgctga

SEQ ID NO: 240919 - DNA, 25 bp, Artificial
  Probe
gccaggatccccattttggggcatc

SEQ ID NO: 240920 - DNA, 25 bp, Artificial
  Probe
agagaaagttcctgtactttgcact

SEQ ID NO: 240921 - DNA, 25 bp, Artificial
  Probe
aaactcaatgtgactgctgacgtgc

SEQ ID NO: 240922 - DNA, 25 bp, Artificial
  Probe
actgctgacgtgctgaaactttaca

SEQ ID NO: 240923 - DNA, 25 bp, Artificial
  Probe
ttaaaaactcaatgtgactgctgac

SEQ ID NO: 240924 - DNA, 25 bp, Artificial
  Probe
ctcttgtatggcaaccaaaattaag

SEQ ID NO: 240925 - DNA, 25 bp, Artificial
  Probe
tgacgtgctgaaactttacataaga

SEQ ID NO: 240926 - DNA, 25 bp, Artificial
  Probe
gaacaagcaaacattacccagctga

SEQ ID NO: 240927 - DNA, 25 bp, Artificial
  Probe
tttcccttgttatgggtagttctgg

SEQ ID NO: 240928 - DNA, 25 bp, Artificial
  Probe
tccctggtgcctttctaggaaccct

SEQ ID NO: 240929 - DNA, 25 bp, Artificial
  Probe
atcgtggcgtttaagggatctcaat

SEQ ID NO: 240930 - DNA, 25 bp, Artificial
  Probe
ctaaaagctcagtctggggtttcta

SEQ ID NO: 240931 - DNA, 25 bp, Artificial
  Probe
gcctttctaggaaccctttgagcct

SEQ ID NO: 240932 - DNA, 25 bp, Artificial
  Probe
gccagtgccttaaaggtttgatacc

SEQ ID NO: 240933 - DNA, 25 bp, Artificial
  Probe
gtcacatgccagtgccttaaaggtt

SEQ ID NO: 240934 - DNA, 25 bp, Artificial
  Probe
cccctttgtgcgatcgtggcgttta

SEQ ID NO: 240935 - DNA, 25 bp, Artificial
  Probe
agggatctcaatacccacttgtgca

SEQ ID NO: 240936 - DNA, 25 bp, Artificial
  Probe
aatactgggtagtccctggtgcctt

SEQ ID NO: 240937 - DNA, 25 bp, Artificial
  Probe
ggaatactgggtagtccctggtgcc

SEQ ID NO: 240938 - DNA, 25 bp, Artificial
  Probe
ttttgctgctattggcagttctgac

SEQ ID NO: 240939 - DNA, 25 bp, Artificial
  Probe
ctgggtagtccctggtgcctttcta

SEQ ID NO: 240940 - DNA, 25 bp, Artificial
  Probe
acgtagagccccaacttgagtgtta

SEQ ID NO: 240941 - DNA, 25 bp, Artificial
  Probe
cacattttgctgctattggcagttc

SEQ ID NO: 240942 - DNA, 25 bp, Artificial
  Probe
tctaggaaccctttgagcctaaaag

SEQ ID NO: 240943 - DNA, 25 bp, Artificial
  Probe
taaaggtttgatacccctttgtgcg

SEQ ID NO: 240944 - DNA, 25 bp, Artificial
  Probe
gggaacagggccaggcctgatacac

SEQ ID NO: 240945 - DNA, 25 bp, Artificial
  Probe
tcagtctggggtttctaaaactgga

SEQ ID NO: 240946 - DNA, 25 bp, Artificial
  Probe
actatttgaaagctatcgtcacatg

SEQ ID NO: 240947 - DNA, 25 bp, Artificial
  Probe
accctttgagcctaaaagctcagtc

SEQ ID NO: 240948 - DNA, 25 bp, Artificial
  Probe
taggaaccctttgagcctaaaagct

SEQ ID NO: 240949 - DNA, 25 bp, Artificial
  Probe
gtcttgaactccaatcacaggatac

SEQ ID NO: 240950 - DNA, 25 bp, Artificial
  Probe
tccctttgaagaaactgaggcagag

SEQ ID NO: 240951 - DNA, 25 bp, Artificial
  Probe
gtttgatacccctttgtgcgatcgt

SEQ ID NO: 240952 - DNA, 25 bp, Artificial
  Probe
ccacttgtgcagtccctttgaagaa

SEQ ID NO: 240953 - DNA, 25 bp, Artificial
  Probe
ccaacttgagtgttatagccttatt

SEQ ID NO: 240954 - DNA, 25 bp, Artificial
  Probe
tgactcacgtagagccccaacttga

SEQ ID NO: 240955 - DNA, 25 bp, Artificial
  Probe
agtgttatagccttattttcccttg

SEQ ID NO: 240956 - DNA, 25 bp, Artificial
  Probe
catgccagtgccttaaaggtttgat

SEQ ID NO: 240957 - DNA, 25 bp, Artificial
  Probe
tagaaaacaggtcaggctgagggtc

SEQ ID NO: 240958 - DNA, 25 bp, Artificial
  Probe
gctatcgtcacatgccagtgcctta

SEQ ID NO: 240959 - DNA, 25 bp, Artificial
  Probe
aacaggtcaggctgagggtcttgaa

SEQ ID NO: 240960 - DNA, 25 bp, Artificial
  Probe
gcgatcgtggcgtttaagggatctc

SEQ ID NO: 240961 - DNA, 25 bp, Artificial
  Probe
ggtcattgacctagtttttactctt

SEQ ID NO: 240962 - DNA, 25 bp, Artificial
  Probe
ctcagtctggggtttctaaaactgg

SEQ ID NO: 240963 - DNA, 25 bp, Artificial
  Probe
cagggccaggcctgatacactgctg

SEQ ID NO: 240964 - DNA, 25 bp, Artificial
  Probe
ctttgaaggtcattgacctagtttt

SEQ ID NO: 240965 - DNA, 25 bp, Artificial
  Probe
taagggatctcaatacccacttgtg

SEQ ID NO: 240966 - DNA, 25 bp, Artificial
  Probe
gatacccctttgtgcgatcgtggcg

SEQ ID NO: 240967 - DNA, 25 bp, Artificial
  Probe
atagccttattttcccttgttatgg

SEQ ID NO: 240968 - DNA, 25 bp, Artificial
  Probe
aatacccacttgtgcagtccctttg

SEQ ID NO: 240969 - DNA, 25 bp, Artificial
  Probe
caggctgagggtcttgaactccaat

SEQ ID NO: 240970 - DNA, 25 bp, Artificial
  Probe
ctttgtgcgatcgtggcgtttaagg

SEQ ID NO: 240971 - DNA, 25 bp, Artificial
  Probe
tcaggctgagggtcttgaactccaa

SEQ ID NO: 240972 - DNA, 25 bp, Artificial
  Probe
ggtagtccctggtgcctttctagga

SEQ ID NO: 240973 - DNA, 25 bp, Artificial
  Probe
aagtaatggctggtcctgcatcagc

SEQ ID NO: 240974 - DNA, 25 bp, Artificial
  Probe
aagttcatcctgagactcttgaagt

SEQ ID NO: 240975 - DNA, 25 bp, Artificial
  Probe
agtaatggctggtcctgcatcagct

SEQ ID NO: 240976 - DNA, 25 bp, Artificial
  Probe
tcctgagactcttgaagtaatggct

SEQ ID NO: 240977 - DNA, 25 bp, Artificial
  Probe
gggccagtttgtttcatgtaacaga

SEQ ID NO: 240978 - DNA, 25 bp, Artificial
  Probe
ttgtttcatgtaacagaagtccaga

SEQ ID NO: 240979 - DNA, 25 bp, Artificial
  Probe
catcctgagactcttgaagtaatgg

SEQ ID NO: 240980 - DNA, 25 bp, Artificial
  Probe
atcctgagactcttgaagtaatggc

SEQ ID NO: 240981 - DNA, 25 bp, Artificial
  Probe
ctcttgaagtaatggctggtcctgc

SEQ ID NO: 240982 - DNA, 25 bp, Artificial
  Probe
gactcttgaagtaatggctggtcct

SEQ ID NO: 240983 - DNA, 25 bp, Artificial
  Probe
agactcttgaagtaatggctggtcc

SEQ ID NO: 240984 - DNA, 25 bp, Artificial
  Probe
aactaaaaacctcaagaaagctgtg

SEQ ID NO: 240985 - DNA, 25 bp, Artificial
  Probe
ctcaagaaagctgtggttcttaaag

SEQ ID NO: 240986 - DNA, 25 bp, Artificial
  Probe
ttgggccagtttgtttcatgtaaca

SEQ ID NO: 240987 - DNA, 25 bp, Artificial
  Probe
gaagtaatggctggtcctgcatcag

SEQ ID NO: 240988 - DNA, 25 bp, Artificial
  Probe
actaaaaacctcaagaaagctgtgg

SEQ ID NO: 240989 - DNA, 25 bp, Artificial
  Probe
ccgcttgcccatcatagatatcggt

SEQ ID NO: 240990 - DNA, 25 bp, Artificial
  Probe
ccagtttgtttcatgtaacagaagt

SEQ ID NO: 240991 - DNA, 25 bp, Artificial
  Probe
agtttgtttcatgtaacagaagtcc

SEQ ID NO: 240992 - DNA, 25 bp, Artificial
  Probe
ggccagtttgtttcatgtaacagaa

SEQ ID NO: 240993 - DNA, 25 bp, Artificial
  Probe
atatgatctgaagtgcctgaccacc

SEQ ID NO: 240994 - DNA, 25 bp, Artificial
  Probe
tcatcctgagactcttgaagtaatg

SEQ ID NO: 240995 - DNA, 25 bp, Artificial
  Probe
cagtttgtttcatgtaacagaagtc

SEQ ID NO: 240996 - DNA, 25 bp, Artificial
  Probe
cctcaagaaagctgtggttcttaaa

SEQ ID NO: 240997 - DNA, 25 bp, Artificial
  Probe
cctgagactcttgaagtaatggctg

SEQ ID NO: 240998 - DNA, 25 bp, Artificial
  Probe
tgaagttcatcctgagactcttgaa

SEQ ID NO: 240999 - DNA, 25 bp, Artificial
  Probe
gtttgtttcatgtaacagaagtcca

SEQ ID NO: 241000 - DNA, 25 bp, Artificial
  Probe
gtaatggctggtcctgcatcagctt

SEQ ID NO: 241001 - DNA, 25 bp, Artificial
  Probe
acctcaagaaagctgtggttcttaa

SEQ ID NO: 241002 - DNA, 25 bp, Artificial
  Probe
tgaagtaatggctggtcctgcatca

SEQ ID NO: 241003 - DNA, 25 bp, Artificial
  Probe
ctaaaaacctcaagaaagctgtggt

SEQ ID NO: 241004 - DNA, 25 bp, Artificial
  Probe
agttcatcctgagactcttgaagta

SEQ ID NO: 241005 - DNA, 25 bp, Artificial
  Probe
tgggccagtttgtttcatgtaacag

SEQ ID NO: 241006 - DNA, 25 bp, Artificial
  Probe
attgggccagtttgtttcatgtaac

SEQ ID NO: 241007 - DNA, 25 bp, Artificial
  Probe
tttgtttcatgtaacagaagtccag

SEQ ID NO: 241008 - DNA, 25 bp, Artificial
  Probe
ctgagactcttgaagtaatggctgg

SEQ ID NO: 241009 - DNA, 25 bp, Artificial
  Probe
aacctcaagaaagctgtggttctta

SEQ ID NO: 241010 - DNA, 25 bp, Artificial
  Probe
gaagttcatcctgagactcttgaag

SEQ ID NO: 241011 - DNA, 25 bp, Artificial
  Probe
atctgaagtgcctgaccaccttatc

SEQ ID NO: 241012 - DNA, 25 bp, Artificial
  Probe
catatgatctgaagtgcctgaccac

SEQ ID NO: 241013 - DNA, 25 bp, Artificial
  Probe
ttgaagttcatcctgagactcttga

SEQ ID NO: 241014 - DNA, 25 bp, Artificial
  Probe
gttcatcctgagactcttgaagtaa

SEQ ID NO: 241015 - DNA, 25 bp, Artificial
  Probe
actcttgaagtaatggctggtcctg

SEQ ID NO: 241016 - DNA, 25 bp, Artificial
  Probe
aaacctcaagaaagctgtggttctt

SEQ ID NO: 241017 - DNA, 25 bp, Artificial
  Probe
tatgatctgaagtgcctgaccacct

SEQ ID NO: 241018 - DNA, 25 bp, Artificial
  Probe
acatatgatctgaagtgcctgacca

SEQ ID NO: 241019 - DNA, 25 bp, Artificial
  Probe
accctcaccatgatattctgtccat

SEQ ID NO: 241020 - DNA, 25 bp, Artificial
  Probe
tgtccatctctccacagaatgtaaa

SEQ ID NO: 241021 - DNA, 25 bp, Artificial
  Probe
tgtaaattccaaacccaagagctaa

SEQ ID NO: 241022 - DNA, 25 bp, Artificial
  Probe
gctttccccagatattgttataatg

SEQ ID NO: 241023 - DNA, 25 bp, Artificial
  Probe
tagacaatcgcttggttactgccga

SEQ ID NO: 241024 - DNA, 25 bp, Artificial
  Probe
acaatcgcttggttactgccgaaat

SEQ ID NO: 241025 - DNA, 25 bp, Artificial
  Probe
aacttatagacaatcgcttggttac

SEQ ID NO: 241026 - DNA, 25 bp, Artificial
  Probe
ccatctctccacagaatgtaaattc

SEQ ID NO: 241027 - DNA, 25 bp, Artificial
  Probe
agttgctttccccagatattgttat

SEQ ID NO: 241028 - DNA, 25 bp, Artificial
  Probe
cactaatacattcccaatgatgtgg

SEQ ID NO: 241029 - DNA, 25 bp, Artificial
  Probe
aatgtaaattccaaacccaagagct

SEQ ID NO: 241030 - DNA, 25 bp, Artificial
  Probe
ctcactaatacattcccaatgatgt

SEQ ID NO: 241031 - DNA, 25 bp, Artificial
  Probe
atcgcttggttactgccgaaatcta

SEQ ID NO: 241032 - DNA, 25 bp, Artificial
  Probe
tccaaacccaagagctaaaataaag

SEQ ID NO: 241033 - DNA, 25 bp, Artificial
  Probe
atacattcccaatgatgtggttata

SEQ ID NO: 241034 - DNA, 25 bp, Artificial
  Probe
cttatagacaatcgcttggttactg

SEQ ID NO: 241035 - DNA, 25 bp, Artificial
  Probe
ctaatacattcccaatgatgtggtt

SEQ ID NO: 241036 - DNA, 25 bp, Artificial
  Probe
ttccccagatattgttataatgaaa

SEQ ID NO: 241037 - DNA, 25 bp, Artificial
  Probe
acttatagacaatcgcttggttact

SEQ ID NO: 241038 - DNA, 25 bp, Artificial
  Probe
tgaacttatagacaatcgcttggtt

SEQ ID NO: 241039 - DNA, 25 bp, Artificial
  Probe
caaacccaagagctaaaataaagct

SEQ ID NO: 241040 - DNA, 25 bp, Artificial
  Probe
atagacaatcgcttggttactgccg

SEQ ID NO: 241041 - DNA, 25 bp, Artificial
  Probe
gacaatcgcttggttactgccgaaa

SEQ ID NO: 241042 - DNA, 25 bp, Artificial
  Probe
atattctgtccatctctccacagaa

SEQ ID NO: 241043 - DNA, 25 bp, Artificial
  Probe
ataagttgctttccccagatattgt

SEQ ID NO: 241044 - DNA, 25 bp, Artificial
  Probe
tctccacagaatgtaaattccaaac

SEQ ID NO: 241045 - DNA, 25 bp, Artificial
  Probe
tctctccacagaatgtaaattccaa

SEQ ID NO: 241046 - DNA, 25 bp, Artificial
  Probe
gaatgtaaattccaaacccaagagc

SEQ ID NO: 241047 - DNA, 25 bp, Artificial
  Probe
agacaatcgcttggttactgccgaa

SEQ ID NO: 241048 - DNA, 25 bp, Artificial
  Probe
tgatattctgtccatctctccacag

SEQ ID NO: 241049 - DNA, 25 bp, Artificial
  Probe
tccccagatattgttataatgaaag

SEQ ID NO: 241050 - DNA, 25 bp, Artificial
  Probe
tctgtccatctctccacagaatgta

SEQ ID NO: 241051 - DNA, 25 bp, Artificial
  Probe
ttgctttccccagatattgttataa

SEQ ID NO: 241052 - DNA, 25 bp, Artificial
  Probe
atttaccctcaccatgatattctgt

SEQ ID NO: 241053 - DNA, 25 bp, Artificial
  Probe
aatcgcttggttactgccgaaatct

SEQ ID NO: 241054 - DNA, 25 bp, Artificial
  Probe
tacattcccaatgatgtggttataa

SEQ ID NO: 241055 - DNA, 25 bp, Artificial
  Probe
ctttccccagatattgttataatga

SEQ ID NO: 241056 - DNA, 25 bp, Artificial
  Probe
tgccatttaccctcaccatgatatt

SEQ ID NO: 241057 - DNA, 25 bp, Artificial
  Probe
gttgctttccccagatattgttata

SEQ ID NO: 241058 - DNA, 25 bp, Artificial
  Probe
taatacattcccaatgatgtggtta

SEQ ID NO: 241059 - DNA, 25 bp, Artificial
  Probe
gaacttatagacaatcgcttggtta

SEQ ID NO: 241060 - DNA, 25 bp, Artificial
  Probe
caccatgatattctgtccatctctc

SEQ ID NO: 241061 - DNA, 25 bp, Artificial
  Probe
cctcaccatgatattctgtccatct

SEQ ID NO: 241062 - DNA, 25 bp, Artificial
  Probe
ttaccctcaccatgatattctgtcc

SEQ ID NO: 241063 - DNA, 25 bp, Artificial
  Probe
caatcgcttggttactgccgaaatc

SEQ ID NO: 241064 - DNA, 25 bp, Artificial
  Probe
catctctccacagaatgtaaattcc

SEQ ID NO: 241065 - DNA, 25 bp, Artificial
  Probe
gacagtggaggacctctggtttgct

SEQ ID NO: 241066 - DNA, 25 bp, Artificial
  Probe
ttcttggggtcttggctgtgctcgc

SEQ ID NO: 241067 - DNA, 25 bp, Artificial
  Probe
tctatgttcgtgtttcccggtacgt

SEQ ID NO: 241068 - DNA, 25 bp, Artificial
  Probe
acaacagagtcaaatccaccgagct

SEQ ID NO: 241069 - DNA, 25 bp, Artificial
  Probe
gcagaacaaaactactaaatatggg

SEQ ID NO: 241070 - DNA, 25 bp, Artificial
  Probe
tcttggaacccaacgacgctgacat

SEQ ID NO: 241071 - DNA, 25 bp, Artificial
  Probe
tgagtatctaaacaacagagtcaaa

SEQ ID NO: 241072 - DNA, 25 bp, Artificial
  Probe
gactattgtaacattcccctttgtg

SEQ ID NO: 241073 - DNA, 25 bp, Artificial
  Probe
cctggccctggcaaatcagccttag

SEQ ID NO: 241074 - DNA, 25 bp, Artificial
  Probe
ccccaataagcctggtgtctatgtt

SEQ ID NO: 241075 - DNA, 25 bp, Artificial
  Probe
gcagtaaccaaactggtcttggaac

SEQ ID NO: 241076 - DNA, 25 bp, Artificial
  Probe
agaacaaggtgtgcaaccgcgctga

SEQ ID NO: 241077 - DNA, 25 bp, Artificial
  Probe
cacgggcaggtctggaaaagaatta

SEQ ID NO: 241078 - DNA, 25 bp, Artificial
  Probe
gactgccgctcactgcttggagaaa

SEQ ID NO: 241079 - DNA, 25 bp, Artificial
  Probe
atgtggttgccgaccggacactgtg

SEQ ID NO: 241080 - DNA, 25 bp, Artificial
  Probe
ttttcctgtccctggacttctggat

SEQ ID NO: 241081 - DNA, 25 bp, Artificial
  Probe
agcctcaggtggagccgaagaaatg

SEQ ID NO: 241082 - DNA, 25 bp, Artificial
  Probe
ctttgtgcatcattatcgtcctttg

SEQ ID NO: 241083 - DNA, 25 bp, Artificial
  Probe
gcttgtctgccatctccaaattatg

SEQ ID NO: 241084 - DNA, 25 bp, Artificial
  Probe
caccgagctctgtgccgggcatctg

SEQ ID NO: 241085 - DNA, 25 bp, Artificial
  Probe
ttctggattttgtgacaatagacca

SEQ ID NO: 241086 - DNA, 25 bp, Artificial
  Probe
tgggtggctgtgtggccaaccctca

SEQ ID NO: 241087 - DNA, 25 bp, Artificial
  Probe
tgtcatcccagcttgtctgccatct

SEQ ID NO: 241088 - DNA, 25 bp, Artificial
  Probe
atccttgggtcagatgttcagcaaa

SEQ ID NO: 241089 - DNA, 25 bp, Artificial
  Probe
gtcctttgaatgtgggaagcctcag

SEQ ID NO: 241090 - DNA, 25 bp, Artificial
  Probe
acagacaaacccacgggcaggtctg

SEQ ID NO: 241091 - DNA, 25 bp, Artificial
  Probe
gcatctggctggtggcatcgacagt

SEQ ID NO: 241092 - DNA, 25 bp, Artificial
  Probe
tggaacccaacgacgctgacattgc

SEQ ID NO: 241093 - DNA, 25 bp, Artificial
  Probe
acactgtgttacatcaccggctggg

SEQ ID NO: 241094 - DNA, 25 bp, Artificial
  Probe
ggcatcgacagttgccagggcgaca

SEQ ID NO: 241095 - DNA, 25 bp, Artificial
  Probe
gaacaagattttctggacagcactt

SEQ ID NO: 241096 - DNA, 25 bp, Artificial
  Probe
cagaacaaaactactaaatatgggg

SEQ ID NO: 241097 - DNA, 25 bp, Artificial
  Probe
agatgttcagcaaatagcagtaacc

SEQ ID NO: 241098 - DNA, 25 bp, Artificial
  Probe
aagcctcaggtggagccgaagaaat

SEQ ID NO: 241099 - DNA, 25 bp, Artificial
  Probe
tcacagataatgtcatcccagcttg

SEQ ID NO: 241100 - DNA, 25 bp, Artificial
  Probe
gaaacgaaagggactccaggtgccg

SEQ ID NO: 241101 - DNA, 25 bp, Artificial
  Probe
attgccctgctgaagctaagccgcc

SEQ ID NO: 241102 - DNA, 25 bp, Artificial
  Probe
agggactccaggtgccggccgtctc

SEQ ID NO: 241103 - DNA, 25 bp, Artificial
  Probe
atattttacaaggagtcacttcttg

SEQ ID NO: 241104 - DNA, 25 bp, Artificial
  Probe
gtcaatgggccctggtgctatacaa

SEQ ID NO: 241105 - DNA, 25 bp, Artificial
  Probe
cggccgtctcaaggaggcccagctg

SEQ ID NO: 241106 - DNA, 25 bp, Artificial
  Probe
tcagccttagaacaagattttctgg

SEQ ID NO: 241107 - DNA, 25 bp, Artificial
  Probe
atatccccagagtgggtgctgactg

SEQ ID NO: 241108 - DNA, 25 bp, Artificial
  Probe
ctggtttgcttcgagaaggacaagt

SEQ ID NO: 241109 - DNA, 25 bp, Artificial
  Probe
gtgctatacaatgaaccccagaaaa

SEQ ID NO: 241110 - DNA, 25 bp, Artificial
  Probe
cccgtgatcgagaacaaggtgtgca

SEQ ID NO: 241111 - DNA, 25 bp, Artificial
  Probe
cctgctgcatgctaagcactgggat

SEQ ID NO: 241112 - DNA, 25 bp, Artificial
  Probe
ctgcatgctaagcactgggatgggt

SEQ ID NO: 241113 - DNA, 25 bp, Artificial
  Probe
aggggcctgctgcatgctaagcact

SEQ ID NO: 241114 - DNA, 25 bp, Artificial
  Probe
ggtgctggcttgaagtcagaactca

SEQ ID NO: 241115 - DNA, 25 bp, Artificial
  Probe
gtgggtgctggcttgaagtcagaac

SEQ ID NO: 241116 - DNA, 25 bp, Artificial
  Probe
ttgaagtcagaactcacggggtggg

SEQ ID NO: 241117 - DNA, 25 bp, Artificial
  Probe
gggaattctctgcgctcatctgtcc

SEQ ID NO: 241118 - DNA, 25 bp, Artificial
  Probe
gaagtcagaactcacggggtggggg

SEQ ID NO: 241119 - DNA, 25 bp, Artificial
  Probe
ggcctgctgcatgctaagcactggg

SEQ ID NO: 241120 - DNA, 25 bp, Artificial
  Probe
ggggaattctctgcgctcatctgtc

SEQ ID NO: 241121 - DNA, 25 bp, Artificial
  Probe
tgcatgctaagcactgggatgggtg

SEQ ID NO: 241122 - DNA, 25 bp, Artificial
  Probe
gcttgaagtcagaactcacggggtg

SEQ ID NO: 241123 - DNA, 25 bp, Artificial
  Probe
gcctgctgcatgctaagcactggga

SEQ ID NO: 241124 - DNA, 25 bp, Artificial
  Probe
gggcctgctgcatgctaagcactgg

SEQ ID NO: 241125 - DNA, 25 bp, Artificial
  Probe
gtgctggcttgaagtcagaactcac

SEQ ID NO: 241126 - DNA, 25 bp, Artificial
  Probe
agtgggtgctggcttgaagtcagaa

SEQ ID NO: 241127 - DNA, 25 bp, Artificial
  Probe
tgctgcatgctaagcactgggatgg

SEQ ID NO: 241128 - DNA, 25 bp, Artificial
  Probe
tgaagtcagaactcacggggtgggg

SEQ ID NO: 241129 - DNA, 25 bp, Artificial
  Probe
ggggcctgctgcatgctaagcactg

SEQ ID NO: 241130 - DNA, 25 bp, Artificial
  Probe
gggtgctggcttgaagtcagaactc

SEQ ID NO: 241131 - DNA, 25 bp, Artificial
  Probe
ctagtgggtgctggcttgaagtcag

SEQ ID NO: 241132 - DNA, 25 bp, Artificial
  Probe
ctgctgcatgctaagcactgggatg

SEQ ID NO: 241133 - DNA, 25 bp, Artificial
  Probe
gctgcatgctaagcactgggatggg

SEQ ID NO: 241134 - DNA, 25 bp, Artificial
  Probe
gctagtgggtgctggcttgaagtca

SEQ ID NO: 241135 - DNA, 25 bp, Artificial
  Probe
tcacggggtgggggggaattctctg

SEQ ID NO: 241136 - DNA, 25 bp, Artificial
  Probe
tagtgggtgctggcttgaagtcaga

SEQ ID NO: 241137 - DNA, 25 bp, Artificial
  Probe
cttgaagtcagaactcacggggtgg

SEQ ID NO: 241138 - DNA, 25 bp, Artificial
  Probe
tgggtgctggcttgaagtcagaact

SEQ ID NO: 241139 - DNA, 25 bp, Artificial
  Probe
tgctggcttgaagtcagaactcacg

SEQ ID NO: 241140 - DNA, 25 bp, Artificial
  Probe
gcatgctaagcactgggatgggtgc

SEQ ID NO: 241141 - DNA, 25 bp, Artificial
  Probe
tgctagtgggtgctggcttgaagtc

SEQ ID NO: 241142 - DNA, 25 bp, Artificial
  Probe
tcctggacagcatgcgctgtttcca

SEQ ID NO: 241143 - DNA, 25 bp, Artificial
  Probe
cccatccgcagactggagtggcagc

SEQ ID NO: 241144 - DNA, 25 bp, Artificial
  Probe
tatgaaatccggagaaacgacgaca

SEQ ID NO: 241145 - DNA, 25 bp, Artificial
  Probe
gacctgacgttcgtccacctgggaa

SEQ ID NO: 241146 - DNA, 25 bp, Artificial
  Probe
gagaaacgacgacatcataaacttc

SEQ ID NO: 241147 - DNA, 25 bp, Artificial
  Probe
accgggctgccctctcagaggtgga

SEQ ID NO: 241148 - DNA, 25 bp, Artificial
  Probe
ccgaggaagccctatgggaactctc

SEQ ID NO: 241149 - DNA, 25 bp, Artificial
  Probe
aatccggagaaacgacgacatcata

SEQ ID NO: 241150 - DNA, 25 bp, Artificial
  Probe
tgtgaggatgctcaagcagccagga

SEQ ID NO: 241151 - DNA, 25 bp, Artificial
  Probe
tcagcgaccacctggccgaggaagc

SEQ ID NO: 241152 - DNA, 25 bp, Artificial
  Probe
ggagaaacgacgacatcataaactt

SEQ ID NO: 241153 - DNA, 25 bp, Artificial
  Probe
cctcagagggcctggctgagtactg

SEQ ID NO: 241154 - DNA, 25 bp, Artificial
  Probe
agggcctggctgagtactgcacgtt

SEQ ID NO: 241155 - DNA, 25 bp, Artificial
  Probe
aacagaccgtgaagagaagacctag

SEQ ID NO: 241156 - DNA, 25 bp, Artificial
  Probe
agaggctgctcctgaagttcatcaa

SEQ ID NO: 241157 - DNA, 25 bp, Artificial
  Probe
acctggccgaggaagccctatggga

SEQ ID NO: 241158 - DNA, 25 bp, Artificial
  Probe
gggaaggtcaacttctccaagcggt

SEQ ID NO: 241159 - DNA, 25 bp, Artificial
  Probe
tgttacaggagaaggcccaggaccg

SEQ ID NO: 241160 - DNA, 25 bp, Artificial
  Probe
acagctggtgtgaggatgctcaagc

SEQ ID NO: 241161 - DNA, 25 bp, Artificial
  Probe
gaagatcaagcctaggaacataaca

SEQ ID NO: 241162 - DNA, 25 bp, Artificial
  Probe
atgacttcagcgaccacctggccga

SEQ ID NO: 241163 - DNA, 25 bp, Artificial
  Probe
ctctgaagatcaagcctaggaacat

SEQ ID NO: 241164 - DNA, 25 bp, Artificial
  Probe
aggtgcactatgaaatccggagaaa

SEQ ID NO: 241165 - DNA, 25 bp, Artificial
  Probe
agcctaggaacataacaaggcggaa

SEQ ID NO: 241166 - DNA, 25 bp, Artificial
  Probe
gacagacctcagagggcctggctga

SEQ ID NO: 241167 - DNA, 25 bp, Artificial
  Probe
agaagacctaggacagctggtgtga

SEQ ID NO: 241168 - DNA, 25 bp, Artificial
  Probe
accacctggccgaggaagccctatg

SEQ ID NO: 241169 - DNA, 25 bp, Artificial
  Probe
ggagaggctgctcctgaagttcatc

SEQ ID NO: 241170 - DNA, 25 bp, Artificial
  Probe
ctggtgtgaggatgctcaagcagcc

SEQ ID NO: 241171 - DNA, 25 bp, Artificial
  Probe
attgacagctcatcctccttccgag

SEQ ID NO: 241172 - DNA, 25 bp, Artificial
  Probe
gactggagtggcagcgacagacctc

SEQ ID NO: 241173 - DNA, 25 bp, Artificial
  Probe
tcatgaagcacctgcgcaagctcaa

SEQ ID NO: 241174 - DNA, 25 bp, Artificial
  Probe
tggcagcgacagacctcagagggcc

SEQ ID NO: 241175 - DNA, 25 bp, Artificial
  Probe
tacatagacgggaaggtcaacttct

SEQ ID NO: 241176 - DNA, 25 bp, Artificial
  Probe
cagactacatagacgggaaggtcaa

SEQ ID NO: 241177 - DNA, 25 bp, Artificial
  Probe
tccgcagactggagtggcagcgaca

SEQ ID NO: 241178 - DNA, 25 bp, Artificial
  Probe
tccatgtatcccatacctaggtttg

SEQ ID NO: 241179 - DNA, 25 bp, Artificial
  Probe
tgtttccagcaggtgcactatgaaa

SEQ ID NO: 241180 - DNA, 25 bp, Artificial
  Probe
gtggaacctccatgtatcccatacc

SEQ ID NO: 241181 - DNA, 25 bp, Artificial
  Probe
ttctccaagcggtggcagcagttca

SEQ ID NO: 241182 - DNA, 25 bp, Artificial
  Probe
gtccacctgggaaacccagactaca

SEQ ID NO: 241183 - DNA, 25 bp, Artificial
  Probe
gcacctgcgcaagctcaacaatttc

SEQ ID NO: 241184 - DNA, 25 bp, Artificial
  Probe
ctgctcctgaagttcatcaagatca

SEQ ID NO: 241185 - DNA, 25 bp, Artificial
  Probe
aagcacctgcgcaagctcaacaatt

SEQ ID NO: 241186 - DNA, 25 bp, Artificial
  Probe
aagccctatgggaactctctctgaa

SEQ ID NO: 241187 - DNA, 25 bp, Artificial
  Probe
cgaggaagccctatgggaactctct

SEQ ID NO: 241188 - DNA, 25 bp, Artificial
  Probe
ttactacacgggtgtaagacatggg

SEQ ID NO: 241189 - DNA, 25 bp, Artificial
  Probe
acattggcaagtaggacatacgggt

SEQ ID NO: 241190 - DNA, 25 bp, Artificial
  Probe
ccccacaggagatggcagcagcagg

SEQ ID NO: 241191 - DNA, 25 bp, Artificial
  Probe
aggaaattacagaccccaatgtgag

SEQ ID NO: 241192 - DNA, 25 bp, Artificial
  Probe
gagatggcagcagcagggttttact

SEQ ID NO: 241193 - DNA, 25 bp, Artificial
  Probe
tcctttgaggactggccgttttata

SEQ ID NO: 241194 - DNA, 25 bp, Artificial
  Probe
ggtccccgggcacatgttgcagtgt

SEQ ID NO: 241195 - DNA, 25 bp, Artificial
  Probe
ttcagatcatggaccccacaggaga

SEQ ID NO: 241196 - DNA, 25 bp, Artificial
  Probe
acacgggtgtaagacatggggttca

SEQ ID NO: 241197 - DNA, 25 bp, Artificial
  Probe
ttctgctgtagcttaatcctctttg

SEQ ID NO: 241198 - DNA, 25 bp, Artificial
  Probe
gtagcttaatcctctttgtactagc

SEQ ID NO: 241199 - DNA, 25 bp, Artificial
  Probe
tagagagccacaggaaattacagac

SEQ ID NO: 241200 - DNA, 25 bp, Artificial
  Probe
tcctgtggcggaagcttgggcaact

SEQ ID NO: 241201 - DNA, 25 bp, Artificial
  Probe
cagcagggttttactacacgggtgt

SEQ ID NO: 241202 - DNA, 25 bp, Artificial
  Probe
gaagagtccaagacgcgctgccgag

SEQ ID NO: 241203 - DNA, 25 bp, Artificial
  Probe
aatgtgagttcctctcgggcaaaga

SEQ ID NO: 241204 - DNA, 25 bp, Artificial
  Probe
ggagatgacccctggaaggacatgc

SEQ ID NO: 241205 - DNA, 25 bp, Artificial
  Probe
aggaggccagactggagtcctttga

SEQ ID NO: 241206 - DNA, 25 bp, Artificial
  Probe
attacagaccccaatgtgagttcct

SEQ ID NO: 241207 - DNA, 25 bp, Artificial
  Probe
aatcctctttgtactagcctcaagg

SEQ ID NO: 241208 - DNA, 25 bp, Artificial
  Probe
tgctggctttgtccttcccgggtcc

SEQ ID NO: 241209 - DNA, 25 bp, Artificial
  Probe
acgactaaagacctttgagacctat

SEQ ID NO: 241210 - DNA, 25 bp, Artificial
  Probe
tggaccccacaggagatggcagcag

SEQ ID NO: 241211 - DNA, 25 bp, Artificial
  Probe
tgaagagtccaagacgcgctgccga

SEQ ID NO: 241212 - DNA, 25 bp, Artificial
  Probe
aggaaagttcccatagagagccaca

SEQ ID NO: 241213 - DNA, 25 bp, Artificial
  Probe
gccaaacgactaaagacctttgaga

SEQ ID NO: 241214 - DNA, 25 bp, Artificial
  Probe
cctctttgtactagcctcaaggaaa

SEQ ID NO: 241215 - DNA, 25 bp, Artificial
  Probe
cagtgtttctcctgtggcggaagct

SEQ ID NO: 241216 - DNA, 25 bp, Artificial
  Probe
aggacatacgggtgaagagtccaag

SEQ ID NO: 241217 - DNA, 25 bp, Artificial
  Probe
tctcgggcaaagatgttggaaacat

SEQ ID NO: 241218 - DNA, 25 bp, Artificial
  Probe
atacgggtgaagagtccaagacgcg

SEQ ID NO: 241219 - DNA, 25 bp, Artificial
  Probe
gatggcagcagcagggttttactac

SEQ ID NO: 241220 - DNA, 25 bp, Artificial
  Probe
taagacatggggttcagttcttctg

SEQ ID NO: 241221 - DNA, 25 bp, Artificial
  Probe
tcagctgctggctttgtccttcccg

SEQ ID NO: 241222 - DNA, 25 bp, Artificial
  Probe
agagccacaggaaattacagacccc

SEQ ID NO: 241223 - DNA, 25 bp, Artificial
  Probe
gcacagtcaggtacccatgaggagg

SEQ ID NO: 241224 - DNA, 25 bp, Artificial
  Probe
ccgagaggtggcacagtcaggtacc

SEQ ID NO: 241225 - DNA, 25 bp, Artificial
  Probe
ccatagagagccacaggaaattaca

SEQ ID NO: 241226 - DNA, 25 bp, Artificial
  Probe
gaggactggccgttttatagccatg

SEQ ID NO: 241227 - DNA, 25 bp, Artificial
  Probe
ctcctgtggcggaagcttgggcaac

SEQ ID NO: 241228 - DNA, 25 bp, Artificial
  Probe
acaggaaattacagaccccaatgtg

SEQ ID NO: 241229 - DNA, 25 bp, Artificial
  Probe
tcctctcgggcaaagatgttggaaa

SEQ ID NO: 241230 - DNA, 25 bp, Artificial
  Probe
tttgtactagcctcaaggaaagttc

SEQ ID NO: 241231 - DNA, 25 bp, Artificial
  Probe
ctcaaggaaagttcccatagagagc

SEQ ID NO: 241232 - DNA, 25 bp, Artificial
  Probe
ggatgggacatcaccactgtgtact

SEQ ID NO: 241233 - DNA, 25 bp, Artificial
  Probe
tggccgttttatagccatgggatgg

SEQ ID NO: 241234 - DNA, 25 bp, Artificial
  Probe
gtgtccaggcatgagccagcaaccc

SEQ ID NO: 241235 - DNA, 25 bp, Artificial
  Probe
gctcctgctgtatcccaaagcaagg

SEQ ID NO: 241236 - DNA, 25 bp, Artificial
  Probe
cacttgtgaggctccctgaaagttc

SEQ ID NO: 241237 - DNA, 25 bp, Artificial
  Probe
tatagcatggccaaggatgctggct

SEQ ID NO: 241238 - DNA, 25 bp, Artificial
  Probe
tgccagctcttctgtctcctacagt

SEQ ID NO: 241239 - DNA, 25 bp, Artificial
  Probe
agcatcagtcacagtttgccccagc

SEQ ID NO: 241240 - DNA, 25 bp, Artificial
  Probe
tgctggcttggtgtgaactgatctc

SEQ ID NO: 241241 - DNA, 25 bp, Artificial
  Probe
ctggcttctggcaccacttgtgagg

SEQ ID NO: 241242 - DNA, 25 bp, Artificial
  Probe
aaagttcacccatgctcctgctgta

SEQ ID NO: 241243 - DNA, 25 bp, Artificial
  Probe
caggcatgagccagcaaccctggaa

SEQ ID NO: 241244 - DNA, 25 bp, Artificial
  Probe
catgctcctgctgtatcccaaagca

SEQ ID NO: 241245 - DNA, 25 bp, Artificial
  Probe
tgtgaggctccctgaaagttcaccc

SEQ ID NO: 241246 - DNA, 25 bp, Artificial
  Probe
tgtccaggcatgagccagcaaccct

SEQ ID NO: 241247 - DNA, 25 bp, Artificial
  Probe
gctgtatcccaaagcaaggccatga

SEQ ID NO: 241248 - DNA, 25 bp, Artificial
  Probe
gcaccacttgtgaggctccctgaaa

SEQ ID NO: 241249 - DNA, 25 bp, Artificial
  Probe
atcccagtgtccaggcatgagccag

SEQ ID NO: 241250 - DNA, 25 bp, Artificial
  Probe
atctgacctcgaagaagcctgaaga

SEQ ID NO: 241251 - DNA, 25 bp, Artificial
  Probe
acgtctggcttctggcaccacttgt

SEQ ID NO: 241252 - DNA, 25 bp, Artificial
  Probe
gctcttctgtctcctacagtcctgt

SEQ ID NO: 241253 - DNA, 25 bp, Artificial
  Probe
aaggccatgagcagccaaacacact

SEQ ID NO: 241254 - DNA, 25 bp, Artificial
  Probe
tgaactgatctctggcatatctgat

SEQ ID NO: 241255 - DNA, 25 bp, Artificial
  Probe
cacataaagcatcagtcacagtttg

SEQ ID NO: 241256 - DNA, 25 bp, Artificial
  Probe
gcagccaaacacactagtgaccaaa

SEQ ID NO: 241257 - DNA, 25 bp, Artificial
  Probe
agctcttctgtctcctacagtcctg

SEQ ID NO: 241258 - DNA, 25 bp, Artificial
  Probe
aacacgtctggcttctggcaccact

SEQ ID NO: 241259 - DNA, 25 bp, Artificial
  Probe
gctggcttggtgtgaactgatctct

SEQ ID NO: 241260 - DNA, 25 bp, Artificial
  Probe
gaaagttcacccatgctcctgctgt

SEQ ID NO: 241261 - DNA, 25 bp, Artificial
  Probe
ggccaggatcccagtgtccaggcat

SEQ ID NO: 241262 - DNA, 25 bp, Artificial
  Probe
ttggtgtgaactgatctctggcata

SEQ ID NO: 241263 - DNA, 25 bp, Artificial
  Probe
aagaggcgtcttctatagcatggcc

SEQ ID NO: 241264 - DNA, 25 bp, Artificial
  Probe
tctgacctcgaagaagcctgaagac

SEQ ID NO: 241265 - DNA, 25 bp, Artificial
  Probe
atagcatggccaaggatgctggctt

SEQ ID NO: 241266 - DNA, 25 bp, Artificial
  Probe
ctgtctcctacagtcctgttggtga

SEQ ID NO: 241267 - DNA, 25 bp, Artificial
  Probe
tatcccaaagcaaggccatgagcag

SEQ ID NO: 241268 - DNA, 25 bp, Artificial
  Probe
cctgttggtgacagaagagtgtatc

SEQ ID NO: 241269 - DNA, 25 bp, Artificial
  Probe
ccatgagcagccaaacacactagtg

SEQ ID NO: 241270 - DNA, 25 bp, Artificial
  Probe
caaagcaaggccatgagcagccaaa

SEQ ID NO: 241271 - DNA, 25 bp, Artificial
  Probe
ttcaaacacgtctggcttctggcac

SEQ ID NO: 241272 - DNA, 25 bp, Artificial
  Probe
catgagccagcaaccctggaaacct

SEQ ID NO: 241273 - DNA, 25 bp, Artificial
  Probe
aagagtgtatcttgccttcaggtct

SEQ ID NO: 241274 - DNA, 25 bp, Artificial
  Probe
cccagcctggatctgacctcgaaga

SEQ ID NO: 241275 - DNA, 25 bp, Artificial
  Probe
cagtcctgttggtgacagaagagtg

SEQ ID NO: 241276 - DNA, 25 bp, Artificial
  Probe
tctcctacagtcctgttggtgacag

SEQ ID NO: 241277 - DNA, 25 bp, Artificial
  Probe
ccacttcaaacacgtctggcttctg

SEQ ID NO: 241278 - DNA, 25 bp, Artificial
  Probe
gtgtatcttgccttcaggtcttgca

SEQ ID NO: 241279 - DNA, 25 bp, Artificial
  Probe
ggctccctgaaagttcacccatgct

SEQ ID NO: 241280 - DNA, 25 bp, Artificial
  Probe
gctgctgccgaagccaaggcgaggg

SEQ ID NO: 241281 - DNA, 25 bp, Artificial
  Probe
aggctgcggctgaggctgctgccga

SEQ ID NO: 241282 - DNA, 25 bp, Artificial
  Probe
tgagattagagctcagatgggcatt

SEQ ID NO: 241283 - DNA, 25 bp, Artificial
  Probe
agattagagctcagatgggcattgg

SEQ ID NO: 241284 - DNA, 25 bp, Artificial
  Probe
gattagagctcagatgggcattggg

SEQ ID NO: 241285 - DNA, 25 bp, Artificial
  Probe
agatttgaaggctgcggctgaggct

SEQ ID NO: 241286 - DNA, 25 bp, Artificial
  Probe
ctgctgccgaagccaaggcgagggc

SEQ ID NO: 241287 - DNA, 25 bp, Artificial
  Probe
aaggcgagggctgagattagagctc

SEQ ID NO: 241288 - DNA, 25 bp, Artificial
  Probe
gagctcagatgggcattgggcttgg

SEQ ID NO: 241289 - DNA, 25 bp, Artificial
  Probe
gctcagtaccgagaggcaatggaag

SEQ ID NO: 241290 - DNA, 25 bp, Artificial
  Probe
tcagatgggcattgggcttggctct

SEQ ID NO: 241291 - DNA, 25 bp, Artificial
  Probe
cggctgaggctgctgccgaagccaa

SEQ ID NO: 241292 - DNA, 25 bp, Artificial
  Probe
gctgaggctgctgccgaagccaagg

SEQ ID NO: 241293 - DNA, 25 bp, Artificial
  Probe
cagctcagtaccgagaggcaatgga

SEQ ID NO: 241294 - DNA, 25 bp, Artificial
  Probe
gcggctgaggctgctgccgaagcca

SEQ ID NO: 241295 - DNA, 25 bp, Artificial
  Probe
tcagtaccgagaggcaatggaagca

SEQ ID NO: 241296 - DNA, 25 bp, Artificial
  Probe
tttgaaggctgcggctgaggctgct

SEQ ID NO: 241297 - DNA, 25 bp, Artificial
  Probe
ctcagatgggcattgggcttggctc

SEQ ID NO: 241298 - DNA, 25 bp, Artificial
  Probe
gaggctgctgccgaagccaaggcga

SEQ ID NO: 241299 - DNA, 25 bp, Artificial
  Probe
gctcagatgggcattgggcttggct

SEQ ID NO: 241300 - DNA, 25 bp, Artificial
  Probe
agctcagtaccgagaggcaatggaa

SEQ ID NO: 241301 - DNA, 25 bp, Artificial
  Probe
cgaagccaaggcgagggctgagatt

SEQ ID NO: 241302 - DNA, 25 bp, Artificial
  Probe
tgaggctgctgccgaagccaaggcg

SEQ ID NO: 241303 - DNA, 25 bp, Artificial
  Probe
tgaaggctgcggctgaggctgctgc

SEQ ID NO: 241304 - DNA, 25 bp, Artificial
  Probe
gcattgggcttggctctgagaatgc

SEQ ID NO: 241305 - DNA, 25 bp, Artificial
  Probe
ttagagctcagatgggcattgggct

SEQ ID NO: 241306 - DNA, 25 bp, Artificial
  Probe
cagatgggcattgggcttggctctg

SEQ ID NO: 241307 - DNA, 25 bp, Artificial
  Probe
tagagctcagatgggcattgggctt

SEQ ID NO: 241308 - DNA, 25 bp, Artificial
  Probe
gtaccgagaggcaatggaagcagat

SEQ ID NO: 241309 - DNA, 25 bp, Artificial
  Probe
ggctgaggctgctgccgaagccaag

SEQ ID NO: 241310 - DNA, 25 bp, Artificial
  Probe
cagtaccgagaggcaatggaagcag

SEQ ID NO: 241311 - DNA, 25 bp, Artificial
  Probe
agccaaggcgagggctgagattaga

SEQ ID NO: 241312 - DNA, 25 bp, Artificial
  Probe
gccgaagccaaggcgagggctgaga

SEQ ID NO: 241313 - DNA, 25 bp, Artificial
  Probe
gcagatttgaaggctgcggctgagg

SEQ ID NO: 241314 - DNA, 25 bp, Artificial
  Probe
tgccgaagccaaggcgagggctgag

SEQ ID NO: 241315 - DNA, 25 bp, Artificial
  Probe
cattgggcttggctctgagaatgct

SEQ ID NO: 241316 - DNA, 25 bp, Artificial
  Probe
ctcagtaccgagaggcaatggaagc

SEQ ID NO: 241317 - DNA, 25 bp, Artificial
  Probe
ctgcggctgaggctgctgccgaagc

SEQ ID NO: 241318 - DNA, 25 bp, Artificial
  Probe
agcagatttgaaggctgcggctgag

SEQ ID NO: 241319 - DNA, 25 bp, Artificial
  Probe
ccaaggcgagggctgagattagagc

SEQ ID NO: 241320 - DNA, 25 bp, Artificial
  Probe
gctgccgaagccaaggcgagggctg

SEQ ID NO: 241321 - DNA, 25 bp, Artificial
  Probe
atgggcattgggcttggctctgaga

SEQ ID NO: 241322 - DNA, 25 bp, Artificial
  Probe
gctgcggctgaggctgctgccgaag

SEQ ID NO: 241323 - DNA, 25 bp, Artificial
  Probe
agtaccgagaggcaatggaagcaga

SEQ ID NO: 241324 - DNA, 25 bp, Artificial
  Probe
attagagctcagatgggcattgggc

SEQ ID NO: 241325 - DNA, 25 bp, Artificial
  Probe
gatttgaaggctgcggctgaggctg

SEQ ID NO: 241326 - DNA, 25 bp, Artificial
  Probe
ccggatagagccttacggagtgtgt

SEQ ID NO: 241327 - DNA, 25 bp, Artificial
  Probe
atgcccggagggaaggacagttcat

SEQ ID NO: 241328 - DNA, 25 bp, Artificial
  Probe
ctgtactgacggttgtagcctcaga

SEQ ID NO: 241329 - DNA, 25 bp, Artificial
  Probe
cgggaaaccccgtgcactatagcgt

SEQ ID NO: 241330 - DNA, 25 bp, Artificial
  Probe
ggccgggaccaaacacccatagagc

SEQ ID NO: 241331 - DNA, 25 bp, Artificial
  Probe
ggtttccctgacaacgactgaggtg

SEQ ID NO: 241332 - DNA, 25 bp, Artificial
  Probe
gagccttacggagtgtgtgtaatac

SEQ ID NO: 241333 - DNA, 25 bp, Artificial
  Probe
ttctgacacaactcccgtgtaaggt

SEQ ID NO: 241334 - DNA, 25 bp, Artificial
  Probe
ggtctgccttgttttaatcactacc

SEQ ID NO: 241335 - DNA, 25 bp, Artificial
  Probe
agtttctttggctgtctatggactt

SEQ ID NO: 241336 - DNA, 25 bp, Artificial
  Probe
acttcaagcactgtgataggacttt

SEQ ID NO: 241337 - DNA, 25 bp, Artificial
  Probe
ggagcagccttcaggcccagaattg

SEQ ID NO: 241338 - DNA, 25 bp, Artificial
  Probe
ggccttgagccacaaatgctgcacc

SEQ ID NO: 241339 - DNA, 25 bp, Artificial
  Probe
tgcccggagggaaggacagttcatc

SEQ ID NO: 241340 - DNA, 25 bp, Artificial
  Probe
catctagttgtattagaggtttccc

SEQ ID NO: 241341 - DNA, 25 bp, Artificial
  Probe
ttgtattagaggtttccctgacaac

SEQ ID NO: 241342 - DNA, 25 bp, Artificial
  Probe
gcccagaattgctggcagcagaggc

SEQ ID NO: 241343 - DNA, 25 bp, Artificial
  Probe
ttttatgggcatttcacaaacacag

SEQ ID NO: 241344 - DNA, 25 bp, Artificial
  Probe
tcaagcactgtgataggacttttaa

SEQ ID NO: 241345 - DNA, 25 bp, Artificial
  Probe
cttgtcagctcatgcccggagggaa

SEQ ID NO: 241346 - DNA, 25 bp, Artificial
  Probe
ggtcacattaccaaaacactgcctg

SEQ ID NO: 241347 - DNA, 25 bp, Artificial
  Probe
cccatccgacatttatgctgctgct

SEQ ID NO: 241348 - DNA, 25 bp, Artificial
  Probe
actaccttgtcagctcatgcccgga

SEQ ID NO: 241349 - DNA, 25 bp, Artificial
  Probe
gggcaggcaggtctgccttgtttta

SEQ ID NO: 241350 - DNA, 25 bp, Artificial
  Probe
ccttacggagtgtgtgtaatacttg

SEQ ID NO: 241351 - DNA, 25 bp, Artificial
  Probe
tactgacggttgtagcctcagacat

SEQ ID NO: 241352 - DNA, 25 bp, Artificial
  Probe
gccttcaggcccagaattgctggca

SEQ ID NO: 241353 - DNA, 25 bp, Artificial
  Probe
gtcacttcccacgaaaaggtcacat

SEQ ID NO: 241354 - DNA, 25 bp, Artificial
  Probe
aaccccgtgcactatagcgtcgcaa

SEQ ID NO: 241355 - DNA, 25 bp, Artificial
  Probe
tgaaaggcacatggatcagctctcc

SEQ ID NO: 241356 - DNA, 25 bp, Artificial
  Probe
aacacggcgcggttcaccacgacgg

SEQ ID NO: 241357 - DNA, 25 bp, Artificial
  Probe
gggcatttcacaaacacagtaaaat

SEQ ID NO: 241358 - DNA, 25 bp, Artificial
  Probe
taagtacaccggatagagccttacg

SEQ ID NO: 241359 - DNA, 25 bp, Artificial
  Probe
agtggagcagccttcaggcccagaa

SEQ ID NO: 241360 - DNA, 25 bp, Artificial
  Probe
atttggagtggagcagccttcaggc

SEQ ID NO: 241361 - DNA, 25 bp, Artificial
  Probe
cttggaagtttctttggctgtctat

SEQ ID NO: 241362 - DNA, 25 bp, Artificial
  Probe
cctcgccggcatgaaagcgcgagac

SEQ ID NO: 241363 - DNA, 25 bp, Artificial
  Probe
gttttggtctcctccgttctgacac

SEQ ID NO: 241364 - DNA, 25 bp, Artificial
  Probe
tcatctagttgtattagaggtttcc

SEQ ID NO: 241365 - DNA, 25 bp, Artificial
  Probe
tccgttctgacacaactcccgtgta

SEQ ID NO: 241366 - DNA, 25 bp, Artificial
  Probe
gaccaaacacccatagagcgataaa

SEQ ID NO: 241367 - DNA, 25 bp, Artificial
  Probe
gtcacattaccaaaacactgcctgg

SEQ ID NO: 241368 - DNA, 25 bp, Artificial
  Probe
tgctggcagcagaggccttgagcca

SEQ ID NO: 241369 - DNA, 25 bp, Artificial
  Probe
tcagataagtacaccggatagagcc

SEQ ID NO: 241370 - DNA, 25 bp, Artificial
  Probe
agtgtgcttgacctctgatggggca

SEQ ID NO: 241371 - DNA, 25 bp, Artificial
  Probe
cacggcgcggttcaccacgacggga

SEQ ID NO: 241372 - DNA, 25 bp, Artificial
  Probe
ccctctggactgtggggcagcctct

SEQ ID NO: 241373 - DNA, 25 bp, Artificial
  Probe
tgaaacaggagtctcaagggatggc

SEQ ID NO: 241374 - DNA, 25 bp, Artificial
  Probe
gcttggcctcctgtggctctagcca

SEQ ID NO: 241375 - DNA, 25 bp, Artificial
  Probe
gcctttgatcctgaactcggggtgc

SEQ ID NO: 241376 - DNA, 25 bp, Artificial
  Probe
gtggctctagccacgggttatttga

SEQ ID NO: 241377 - DNA, 25 bp, Artificial
  Probe
ggtcaccctgccattgatctctagc

SEQ ID NO: 241378 - DNA, 25 bp, Artificial
  Probe
tagagcctgaagtccctgaggagaa

SEQ ID NO: 241379 - DNA, 25 bp, Artificial
  Probe
gctccaccggggacaccaagtagac

SEQ ID NO: 241380 - DNA, 25 bp, Artificial
  Probe
gagtttgggttttgcccatgaactt

SEQ ID NO: 241381 - DNA, 25 bp, Artificial
  Probe
agtccctgaggagaaagaccaagtc

SEQ ID NO: 241382 - DNA, 25 bp, Artificial
  Probe
gctgaggaatcgtcactcctgggtg

SEQ ID NO: 241383 - DNA, 25 bp, Artificial
  Probe
acaccaagtagacagtggaatcaac

SEQ ID NO: 241384 - DNA, 25 bp, Artificial
  Probe
tccagggcatcctaagcacacacag

SEQ ID NO: 241385 - DNA, 25 bp, Artificial
  Probe
gcctcctgtggctctagccacgggt

SEQ ID NO: 241386 - DNA, 25 bp, Artificial
  Probe
aactggctgaggaatcgtcactcct

SEQ ID NO: 241387 - DNA, 25 bp, Artificial
  Probe
ggtgattcagcttggcctcctgtgg

SEQ ID NO: 241388 - DNA, 25 bp, Artificial
  Probe
ttcagcttggcctcctgtggctcta

SEQ ID NO: 241389 - DNA, 25 bp, Artificial
  Probe
aggtttctttgtattttagccatgc

SEQ ID NO: 241390 - DNA, 25 bp, Artificial
  Probe
tagccacgggttatttgaaacagga

SEQ ID NO: 241391 - DNA, 25 bp, Artificial
  Probe
ggagagattcccttggcagaagcct

SEQ ID NO: 241392 - DNA, 25 bp, Artificial
  Probe
tctagccacgggttatttgaaacag

SEQ ID NO: 241393 - DNA, 25 bp, Artificial
  Probe
aggcagcagaacctttggacggaga

SEQ ID NO: 241394 - DNA, 25 bp, Artificial
  Probe
acacaggatggctccgccttgggcc

SEQ ID NO: 241395 - DNA, 25 bp, Artificial
  Probe
atctggtcaccctgccattgatctc

SEQ ID NO: 241396 - DNA, 25 bp, Artificial
  Probe
ccagaactctccagggcatcctaag

SEQ ID NO: 241397 - DNA, 25 bp, Artificial
  Probe
caagggatggcctctgctccaccgg

SEQ ID NO: 241398 - DNA, 25 bp, Artificial
  Probe
acagtggaatcaactggctgaggaa

SEQ ID NO: 241399 - DNA, 25 bp, Artificial
  Probe
agcctgcagatagaagagtgacagg

SEQ ID NO: 241400 - DNA, 25 bp, Artificial
  Probe
ccagaagcagaccagatggaaggag

SEQ ID NO: 241401 - DNA, 25 bp, Artificial
  Probe
gatggcctctgctccaccggggaca

SEQ ID NO: 241402 - DNA, 25 bp, Artificial
  Probe
acgttccagggctaccagaagcaga

SEQ ID NO: 241403 - DNA, 25 bp, Artificial
  Probe
tgtggggcagcctctagtggcctcc

SEQ ID NO: 241404 - DNA, 25 bp, Artificial
  Probe
atggctccgccttgggccatggttg

SEQ ID NO: 241405 - DNA, 25 bp, Artificial
  Probe
gagagtttgggttttgcccatgaac

SEQ ID NO: 241406 - DNA, 25 bp, Artificial
  Probe
agtctcaagggatggcctctgctcc

SEQ ID NO: 241407 - DNA, 25 bp, Artificial
  Probe
ccgccttgggccatggttgtctcct

SEQ ID NO: 241408 - DNA, 25 bp, Artificial
  Probe
cctctagtggcctcctggatagcct

SEQ ID NO: 241409 - DNA, 25 bp, Artificial
  Probe
tgggttttgcccatgaacttgtccc

SEQ ID NO: 241410 - DNA, 25 bp, Artificial
  Probe
cctgccattgatctctagcctgcag

SEQ ID NO: 241411 - DNA, 25 bp, Artificial
  Probe
cgcctgcagggtgattcagcttggc

SEQ ID NO: 241412 - DNA, 25 bp, Artificial
  Probe
ggcagcctctagtggcctcctggat

SEQ ID NO: 241413 - DNA, 25 bp, Artificial
  Probe
tgaggaatcgtcactcctgggtgtg

SEQ ID NO: 241414 - DNA, 25 bp, Artificial
  Probe
gaaagaccaagtcatggtaacgttc

SEQ ID NO: 241415 - DNA, 25 bp, Artificial
  Probe
tggtaacgttccagggctaccagaa

SEQ ID NO: 241416 - DNA, 25 bp, Artificial
  Probe
ctgtgaagacctaagcatagagagt

SEQ ID NO: 241417 - DNA, 25 bp, Artificial
  Probe
cccatgaacttgtccctctggactg

SEQ ID NO: 241418 - DNA, 25 bp, Artificial
  Probe
ctgagaagtgctgtgtctgtggcca

SEQ ID NO: 241419 - DNA, 25 bp, Artificial
  Probe
cagagcaatgcctgccaggccctgg

SEQ ID NO: 241420 - DNA, 25 bp, Artificial
  Probe
agaagatcctccaggccatggggaa

SEQ ID NO: 241421 - DNA, 25 bp, Artificial
  Probe
gtgactgactaccacaaaaattacg

SEQ ID NO: 241422 - DNA, 25 bp, Artificial
  Probe
tttcagggtttcaggaggcagctga

SEQ ID NO: 241423 - DNA, 25 bp, Artificial
  Probe
ggcgtccccttcactgtggacttct

SEQ ID NO: 241424 - DNA, 25 bp, Artificial
  Probe
gcaatgcctgccaggccctggacag

SEQ ID NO: 241425 - DNA, 25 bp, Artificial
  Probe
tttcaggaggcagctgagaagtgct

SEQ ID NO: 241426 - DNA, 25 bp, Artificial
  Probe
gtgtctgtggccacttgattctaga

SEQ ID NO: 241427 - DNA, 25 bp, Artificial
  Probe
ctgttttcagggtttcaggaggcag

SEQ ID NO: 241428 - DNA, 25 bp, Artificial
  Probe
tgtttcccccttgacggacatttgc

SEQ ID NO: 241429 - DNA, 25 bp, Artificial
  Probe
cgaactttgcggtgcaaggctttct

SEQ ID NO: 241430 - DNA, 25 bp, Artificial
  Probe
aaatgtgcagcctgtggacagccca

SEQ ID NO: 241431 - DNA, 25 bp, Artificial
  Probe
attctagagaagatcctccaggcca

SEQ ID NO: 241432 - DNA, 25 bp, Artificial
  Probe
tgcaacaaaggtatctatgggcaga

SEQ ID NO: 241433 - DNA, 25 bp, Artificial
  Probe
ccgcatgcagctgagtgacgaggaa

SEQ ID NO: 241434 - DNA, 25 bp, Artificial
  Probe
gtgcagcctgtggacagcccatcct

SEQ ID NO: 241435 - DNA, 25 bp, Artificial
  Probe
ctgtctactgtgaggaagattatct

SEQ ID NO: 241436 - DNA, 25 bp, Artificial
  Probe
gtttcccccttgacggacatttgct

SEQ ID NO: 241437 - DNA, 25 bp, Artificial
  Probe
atttgctctgccacggctgtcacat

SEQ ID NO: 241438 - DNA, 25 bp, Artificial
  Probe
atccaggctgcttccggtgcatcgt

SEQ ID NO: 241439 - DNA, 25 bp, Artificial
  Probe
gtgctgtgtctgtggccacttgatt

SEQ ID NO: 241440 - DNA, 25 bp, Artificial
  Probe
aattacgccccgaaatgtgcagcct

SEQ ID NO: 241441 - DNA, 25 bp, Artificial
  Probe
ttcactgtggacttctccaaccagg

SEQ ID NO: 241442 - DNA, 25 bp, Artificial
  Probe
cactgtgaggactgccgcatgcagc

SEQ ID NO: 241443 - DNA, 25 bp, Artificial
  Probe
gttgctgctgtttcccccttgacgg

SEQ ID NO: 241444 - DNA, 25 bp, Artificial
  Probe
tctgccacggctgtcacatgcagcg

SEQ ID NO: 241445 - DNA, 25 bp, Artificial
  Probe
gtatctatgggcagagcaatgcctg

SEQ ID NO: 241446 - DNA, 25 bp, Artificial
  Probe
ggctgcttccggtgcatcgtttgta

SEQ ID NO: 241447 - DNA, 25 bp, Artificial
  Probe
ccacttgattctagagaagatcctc

SEQ ID NO: 241448 - DNA, 25 bp, Artificial
  Probe
aggactgccgcatgcagctgagtga

SEQ ID NO: 241449 - DNA, 25 bp, Artificial
  Probe
ccctcagagggctgtgaggacattg

SEQ ID NO: 241450 - DNA, 25 bp, Artificial
  Probe
ctgtggacgaactttgcggtgcaag

SEQ ID NO: 241451 - DNA, 25 bp, Artificial
  Probe
aggccatggggaagtcctatcatcc

SEQ ID NO: 241452 - DNA, 25 bp, Artificial
  Probe
gtgatatccatggaccgtgattatc

SEQ ID NO: 241453 - DNA, 25 bp, Artificial
  Probe
tctacagcgtcaacggctctgtcta

SEQ ID NO: 241454 - DNA, 25 bp, Artificial
  Probe
acgaggaaggttgctgctgtttccc

SEQ ID NO: 241455 - DNA, 25 bp, Artificial
  Probe
cctcagagggctgtgaggacattgt

SEQ ID NO: 241456 - DNA, 25 bp, Artificial
  Probe
caaaggtatctatgggcagagcaat

SEQ ID NO: 241457 - DNA, 25 bp, Artificial
  Probe
cccttgacggacatttgctctgcca

SEQ ID NO: 241458 - DNA, 25 bp, Artificial
  Probe
acaagtgcctggacggcgtcccctt

SEQ ID NO: 241459 - DNA, 25 bp, Artificial
  Probe
caggccatggggaagtcctatcatc

SEQ ID NO: 241460 - DNA, 25 bp, Artificial
  Probe
cacacccagtgctttgtctgctgct

SEQ ID NO: 241461 - DNA, 25 bp, Artificial
  Probe
acggctgtcacatgcagcgcctcag

SEQ ID NO: 241462 - DNA, 25 bp, Artificial
  Probe
tggggaagtcctatcatccaggctg

SEQ ID NO: 241463 - DNA, 25 bp, Artificial
  Probe
agggtgatatccatggaccgtgatt

SEQ ID NO: 241464 - DNA, 25 bp, Artificial
  Probe
ctgggcatcttctccgtgctcagtt

SEQ ID NO: 241465 - DNA, 25 bp, Artificial
  Probe
agaacactgtgaacggcacggggac

SEQ ID NO: 241466 - DNA, 25 bp, Artificial
  Probe
cacggggacccctgttcatatcagc

SEQ ID NO: 241467 - DNA, 25 bp, Artificial
  Probe
tgagaaagcccgaatcgccaaggct

SEQ ID NO: 241468 - DNA, 25 bp, Artificial
  Probe
caaggctgagcaagcagatgggaaa

SEQ ID NO: 241469 - DNA, 25 bp, Artificial
  Probe
gcctgcctgctcttcgggtttgcct

SEQ ID NO: 241470 - DNA, 25 bp, Artificial
  Probe
agaagaacactgtgaacggcacggg

SEQ ID NO: 241471 - DNA, 25 bp, Artificial
  Probe
tttgcaggttggtgagaccagatgc

SEQ ID NO: 241472 - DNA, 25 bp, Artificial
  Probe
tcccaaaagggttgaagctgagaaa

SEQ ID NO: 241473 - DNA, 25 bp, Artificial
  Probe
tggacttgggaaaccacaggcaaag

SEQ ID NO: 241474 - DNA, 25 bp, Artificial
  Probe
gcagccaagcgcattgacctctatg

SEQ ID NO: 241475 - DNA, 25 bp, Artificial
  Probe
ttgggaaaccacaggcaaagaacaa

SEQ ID NO: 241476 - DNA, 25 bp, Artificial
  Probe
gagaaagcccgaatcgccaaggctg

SEQ ID NO: 241477 - DNA, 25 bp, Artificial
  Probe
aaagtttgtacttccaagtctgatc

SEQ ID NO: 241478 - DNA, 25 bp, Artificial
  Probe
ggagcttcccaaagtgtcctacgtg

SEQ ID NO: 241479 - DNA, 25 bp, Artificial
  Probe
tgtcctacgtgaaggcactggatgt

SEQ ID NO: 241480 - DNA, 25 bp, Artificial
  Probe
gaacaatcccaaaagggttgaagct

SEQ ID NO: 241481 - DNA, 25 bp, Artificial
  Probe
gcttaccaagagattttgaattatc

SEQ ID NO: 241482 - DNA, 25 bp, Artificial
  Probe
ccattgaagtcaacaatggacttgg

SEQ ID NO: 241483 - DNA, 25 bp, Artificial
  Probe
tatgggaaacccattgaagtcaaca

SEQ ID NO: 241484 - DNA, 25 bp, Artificial
  Probe
ctccctcgtggagtatgctgttgtc

SEQ ID NO: 241485 - DNA, 25 bp, Artificial
  Probe
ccgtgctcagtttggcctcagagtg

SEQ ID NO: 241486 - DNA, 25 bp, Artificial
  Probe
gaattatccaattatgactgctatg

SEQ ID NO: 241487 - DNA, 25 bp, Artificial
  Probe
cctcgcagcggagcttcccaaagtg

SEQ ID NO: 241488 - DNA, 25 bp, Artificial
  Probe
cagtttggcctcagagtgcaccacc

SEQ ID NO: 241489 - DNA, 25 bp, Artificial
  Probe
tggaaacgcagctaagaagaacact

SEQ ID NO: 241490 - DNA, 25 bp, Artificial
  Probe
gaagtcaacaatggacttgggaaac

SEQ ID NO: 241491 - DNA, 25 bp, Artificial
  Probe
aaagtgtcctacgtgaaggcactgg

SEQ ID NO: 241492 - DNA, 25 bp, Artificial
  Probe
tgaaggcactggatgtgtggctcat

SEQ ID NO: 241493 - DNA, 25 bp, Artificial
  Probe
tcaacaatggacttgggaaaccaca

SEQ ID NO: 241494 - DNA, 25 bp, Artificial
  Probe
accacaggcaaagaacaagaagcct

SEQ ID NO: 241495 - DNA, 25 bp, Artificial
  Probe
tggctcattgcctgcctgctcttcg

SEQ ID NO: 241496 - DNA, 25 bp, Artificial
  Probe
tgctgttgtccaggtgatgttgaac

SEQ ID NO: 241497 - DNA, 25 bp, Artificial
  Probe
gcccgaatcgccaaggctgagcaag

SEQ ID NO: 241498 - DNA, 25 bp, Artificial
  Probe
ctgctatgggaaacccattgaagtc

SEQ ID NO: 241499 - DNA, 25 bp, Artificial
  Probe
gacctctatgcaagagcattatttc

SEQ ID NO: 241500 - DNA, 25 bp, Artificial
  Probe
tgtccaggtgatgttgaacaatccc

SEQ ID NO: 241501 - DNA, 25 bp, Artificial
  Probe
cattgcctgcctgctcttcgggttt

SEQ ID NO: 241502 - DNA, 25 bp, Artificial
  Probe
ctcagtttggcctcagagtgcacca

SEQ ID NO: 241503 - DNA, 25 bp, Artificial
  Probe
actgtgaacggcacggggacccctg

SEQ ID NO: 241504 - DNA, 25 bp, Artificial
  Probe
atcccaaaagggttgaagctgagaa

SEQ ID NO: 241505 - DNA, 25 bp, Artificial
  Probe
tgatgttgaacaatcccaaaagggt

SEQ ID NO: 241506 - DNA, 25 bp, Artificial
  Probe
ctcgtggagtatgctgttgtccagg

SEQ ID NO: 241507 - DNA, 25 bp, Artificial
  Probe
aatcgccaaggctgagcaagcagat

SEQ ID NO: 241508 - DNA, 25 bp, Artificial
  Probe
tggatgtgtggctcattgcctgcct

SEQ ID NO: 241509 - DNA, 25 bp, Artificial
  Probe
tgcaagagcattatttcccttctgc

SEQ ID NO: 241510 - DNA, 25 bp, Artificial
  Probe
cattacgatgccacctaccacaagg

SEQ ID NO: 241511 - DNA, 25 bp, Artificial
  Probe
gctcagaatatcaagctccctcatg

SEQ ID NO: 241512 - DNA, 25 bp, Artificial
  Probe
gtattgatctacttccctaattgtg

SEQ ID NO: 241513 - DNA, 25 bp, Artificial
  Probe
aaactgaactacttggacatcctcg

SEQ ID NO: 241514 - DNA, 25 bp, Artificial
  Probe
gaatattccaaactgaactacttgg

SEQ ID NO: 241515 - DNA, 25 bp, Artificial
  Probe
gacatcctcgtgagggcgtccatag

SEQ ID NO: 241516 - DNA, 25 bp, Artificial
  Probe
agcacgtttctagaggaatattcca

SEQ ID NO: 241517 - DNA, 25 bp, Artificial
  Probe
tatcaagctccctcatgcgggcact

SEQ ID NO: 241518 - DNA, 25 bp, Artificial
  Probe
atgcgggcactcaggttcgagtgac

SEQ ID NO: 241519 - DNA, 25 bp, Artificial
  Probe
tccccgataccatgcggtgcggatt

SEQ ID NO: 241520 - DNA, 25 bp, Artificial
  Probe
ctaccacaaggctgagatccacact

SEQ ID NO: 241521 - DNA, 25 bp, Artificial
  Probe
cagtgttccccgataccatgcggtg

SEQ ID NO: 241522 - DNA, 25 bp, Artificial
  Probe
agctcagtattcagggatagcgtgg

SEQ ID NO: 241523 - DNA, 25 bp, Artificial
  Probe
gtacgatgacagtgttccccgatac

SEQ ID NO: 241524 - DNA, 25 bp, Artificial
  Probe
agtgacggtgtttccctcaaagacg

SEQ ID NO: 241525 - DNA, 25 bp, Artificial
  Probe
ttccgatgcatagtattgatctact

SEQ ID NO: 241526 - DNA, 25 bp, Artificial
  Probe
agccgtctgataaagagaggcttac

SEQ ID NO: 241527 - DNA, 25 bp, Artificial
  Probe
gctggctctattagtgtttttactg

SEQ ID NO: 241528 - DNA, 25 bp, Artificial
  Probe
agcaaggcctctctcgttctacgct

SEQ ID NO: 241529 - DNA, 25 bp, Artificial
  Probe
cctcctggctgtgcttgccgggatt

SEQ ID NO: 241530 - DNA, 25 bp, Artificial
  Probe
ggtgtttccctcaaagacggtagct

SEQ ID NO: 241531 - DNA, 25 bp, Artificial
  Probe
cgatgacagtgttccccgataccat

SEQ ID NO: 241532 - DNA, 25 bp, Artificial
  Probe
tacgctccaggctgtggaacagcac

SEQ ID NO: 241533 - DNA, 25 bp, Artificial
  Probe
tcgttctacgctccaggctgtggaa

SEQ ID NO: 241534 - DNA, 25 bp, Artificial
  Probe
aggctgtggaacagcacgtttctag

SEQ ID NO: 241535 - DNA, 25 bp, Artificial
  Probe
cacactcagccgtctgataaagaga

SEQ ID NO: 241536 - DNA, 25 bp, Artificial
  Probe
ctcgttctacgctccaggctgtgga

SEQ ID NO: 241537 - DNA, 25 bp, Artificial
  Probe
tgccacctaccacaaggctgagatc

SEQ ID NO: 241538 - DNA, 25 bp, Artificial
  Probe
ggaatattccaaactgaactacttg

SEQ ID NO: 241539 - DNA, 25 bp, Artificial
  Probe
atgctggctctattagtgtttttac

SEQ ID NO: 241540 - DNA, 25 bp, Artificial
  Probe
tgagggcgtccatagatgtgaccgc

SEQ ID NO: 241541 - DNA, 25 bp, Artificial
  Probe
agatccacactcagccgtctgataa

SEQ ID NO: 241542 - DNA, 25 bp, Artificial
  Probe
tgccgggattttgatgctggctcta

SEQ ID NO: 241543 - DNA, 25 bp, Artificial
  Probe
catcaggtgtccactgcgagggctg

SEQ ID NO: 241544 - DNA, 25 bp, Artificial
  Probe
cctggctgtgcttgccgggattttg

SEQ ID NO: 241545 - DNA, 25 bp, Artificial
  Probe
gataccatgcggtgcggattcggaa

SEQ ID NO: 241546 - DNA, 25 bp, Artificial
  Probe
agggctggacagcaaggcctctctc

SEQ ID NO: 241547 - DNA, 25 bp, Artificial
  Probe
gcactcaggttcgagtgacggtgtt

SEQ ID NO: 241548 - DNA, 25 bp, Artificial
  Probe
aacagcacgtttctagaggaatatt

SEQ ID NO: 241549 - DNA, 25 bp, Artificial
  Probe
atagcgtggtggatcatcctcctgg

SEQ ID NO: 241550 - DNA, 25 bp, Artificial
  Probe
ctcgtgagggcgtccatagatgtga

SEQ ID NO: 241551 - DNA, 25 bp, Artificial
  Probe
tcagggatagcgtggtggatcatcc

SEQ ID NO: 241552 - DNA, 25 bp, Artificial
  Probe
agatcaacgacgagaaacacactga

SEQ ID NO: 241553 - DNA, 25 bp, Artificial
  Probe
tgcttgccgggattttgatgctggc

SEQ ID NO: 241554 - DNA, 25 bp, Artificial
  Probe
taaagagaggcttacttccgatgca

SEQ ID NO: 241555 - DNA, 25 bp, Artificial
  Probe
gtggattctttaagcgctctaggta

SEQ ID NO: 241556 - DNA, 25 bp, Artificial
  Probe
ccactcatgatgctggcccagaact

SEQ ID NO: 241557 - DNA, 25 bp, Artificial
  Probe
cgagtggacttcgaagagtttgtcc

SEQ ID NO: 241558 - DNA, 25 bp, Artificial
  Probe
ggaccactcatgatgctggcccaga

SEQ ID NO: 241559 - DNA, 25 bp, Artificial
  Probe
atgctggcccagaactgtgcggtca

SEQ ID NO: 241560 - DNA, 25 bp, Artificial
  Probe
cggatggcggtgagctccctggacc

SEQ ID NO: 241561 - DNA, 25 bp, Artificial
  Probe
gaactgtgcggtcatgcacaacctg

SEQ ID NO: 241562 - DNA, 25 bp, Artificial
  Probe
agctccctggaccactcatgatgct

SEQ ID NO: 241563 - DNA, 25 bp, Artificial
  Probe
gagctccctggaccactcatgatgc

SEQ ID NO: 241564 - DNA, 25 bp, Artificial
  Probe
accactcatgatgctggcccagaac

SEQ ID NO: 241565 - DNA, 25 bp, Artificial
  Probe
gtgagctccctggaccactcatgat

SEQ ID NO: 241566 - DNA, 25 bp, Artificial
  Probe
gaccactcatgatgctggcccagaa

SEQ ID NO: 241567 - DNA, 25 bp, Artificial
  Probe
gacaacctgatagatcgttacgacc

SEQ ID NO: 241568 - DNA, 25 bp, Artificial
  Probe
tggcggatggcggtgagctccctgg

SEQ ID NO: 241569 - DNA, 25 bp, Artificial
  Probe
ttcgaagagtttgtccggatgatgt

SEQ ID NO: 241570 - DNA, 25 bp, Artificial
  Probe
aacagacaacctgatagatcgttac

SEQ ID NO: 241571 - DNA, 25 bp, Artificial
  Probe
ccctggaccactcatgatgctggcc

SEQ ID NO: 241572 - DNA, 25 bp, Artificial
  Probe
cgagaacagacaacctgatagatcg

SEQ ID NO: 241573 - DNA, 25 bp, Artificial
  Probe
gacttcgaagagtttgtccggatga

SEQ ID NO: 241574 - DNA, 25 bp, Artificial
  Probe
atgatgctggcccagaactgtgcgg

SEQ ID NO: 241575 - DNA, 25 bp, Artificial
  Probe
gcccagaactgtgcggtcatgcaca

SEQ ID NO: 241576 - DNA, 25 bp, Artificial
  Probe
cactcatgatgctggcccagaactg

SEQ ID NO: 241577 - DNA, 25 bp, Artificial
  Probe
actcatgatgctggcccagaactgt

SEQ ID NO: 241578 - DNA, 25 bp, Artificial
  Probe
tgagctccctggaccactcatgatg

SEQ ID NO: 241579 - DNA, 25 bp, Artificial
  Probe
acgagtggacttcgaagagtttgtc

SEQ ID NO: 241580 - DNA, 25 bp, Artificial
  Probe
caacctgatagatcgttacgaccag

SEQ ID NO: 241581 - DNA, 25 bp, Artificial
  Probe
cggtgagctccctggaccactcatg

SEQ ID NO: 241582 - DNA, 25 bp, Artificial
  Probe
agtggacttcgaagagtttgtccgg

SEQ ID NO: 241583 - DNA, 25 bp, Artificial
  Probe
agaactgtgcggtcatgcacaacct

SEQ ID NO: 241584 - DNA, 25 bp, Artificial
  Probe
tggcggtgagctccctggaccactc

SEQ ID NO: 241585 - DNA, 25 bp, Artificial
  Probe
ctggcccagaactgtgcggtcatgc

SEQ ID NO: 241586 - DNA, 25 bp, Artificial
  Probe
acaacctgatagatcgttacgacca

SEQ ID NO: 241587 - DNA, 25 bp, Artificial
  Probe
acagacaacctgatagatcgttacg

SEQ ID NO: 241588 - DNA, 25 bp, Artificial
  Probe
tgctggcccagaactgtgcggtcat

SEQ ID NO: 241589 - DNA, 25 bp, Artificial
  Probe
ggacgagtggacttcgaagagtttg

SEQ ID NO: 241590 - DNA, 25 bp, Artificial
  Probe
tgatgctggcccagaactgtgcggt

SEQ ID NO: 241591 - DNA, 25 bp, Artificial
  Probe
cagacaacctgatagatcgttacga

SEQ ID NO: 241592 - DNA, 25 bp, Artificial
  Probe
ccagaactgtgcggtcatgcacaac

SEQ ID NO: 241593 - DNA, 25 bp, Artificial
  Probe
gatgctggcccagaactgtgcggtc

SEQ ID NO: 241594 - DNA, 25 bp, Artificial
  Probe
gctccctggaccactcatgatgctg

SEQ ID NO: 241595 - DNA, 25 bp, Artificial
  Probe
agaacagacaacctgatagatcgtt

SEQ ID NO: 241596 - DNA, 25 bp, Artificial
  Probe
ggtgagctccctggaccactcatga

SEQ ID NO: 241597 - DNA, 25 bp, Artificial
  Probe
agacaacctgatagatcgttacgac

SEQ ID NO: 241598 - DNA, 25 bp, Artificial
  Probe
atggacgagtggacttcgaagagtt

SEQ ID NO: 241599 - DNA, 25 bp, Artificial
  Probe
gagaacagacaacctgatagatcgt

SEQ ID NO: 241600 - DNA, 25 bp, Artificial
  Probe
gaacagacaacctgatagatcgtta

SEQ ID NO: 241601 - DNA, 25 bp, Artificial
  Probe
tggaccactcatgatgctggcccag

SEQ ID NO: 241602 - DNA, 25 bp, Artificial
  Probe
gatggctctgtcagccagtctgggc

SEQ ID NO: 241603 - DNA, 25 bp, Artificial
  Probe
ccccagtcactgacaagcaacatgg

SEQ ID NO: 241604 - DNA, 25 bp, Artificial
  Probe
aggtggcccagaaggaagttctaga

SEQ ID NO: 241605 - DNA, 25 bp, Artificial
  Probe
agtgaagacactggtctgtggaagc

SEQ ID NO: 241606 - DNA, 25 bp, Artificial
  Probe
cattcctaaaatcttaaaggagaag

SEQ ID NO: 241607 - DNA, 25 bp, Artificial
  Probe
tctggtccaaacgactccagtagcc

SEQ ID NO: 241608 - DNA, 25 bp, Artificial
  Probe
gttcccaaagacgaaaagaagtcag

SEQ ID NO: 241609 - DNA, 25 bp, Artificial
  Probe
ctgtctgcttttctccttttgggcc

SEQ ID NO: 241610 - DNA, 25 bp, Artificial
  Probe
cagtgctgaagtcactctggaggtg

SEQ ID NO: 241611 - DNA, 25 bp, Artificial
  Probe
gcttttctccttttgggcctcttca

SEQ ID NO: 241612 - DNA, 25 bp, Artificial
  Probe
cctccattgaggacggcataggcct

SEQ ID NO: 241613 - DNA, 25 bp, Artificial
  Probe
tccactgtccgtcaccattctgatg

SEQ ID NO: 241614 - DNA, 25 bp, Artificial
  Probe
tcatctctggtccaaacgactccag

SEQ ID NO: 241615 - DNA, 25 bp, Artificial
  Probe
tgggtctccactgtccgtcaccatt

SEQ ID NO: 241616 - DNA, 25 bp, Artificial
  Probe
tgaggacggcataggcctcttcctg

SEQ ID NO: 241617 - DNA, 25 bp, Artificial
  Probe
tgtgtcccacttctaccctgaggag

SEQ ID NO: 241618 - DNA, 25 bp, Artificial
  Probe
tgtcagccagtctgggcacctgcag

SEQ ID NO: 241619 - DNA, 25 bp, Artificial
  Probe
cagcctgaccgttcccaaagacgaa

SEQ ID NO: 241620 - DNA, 25 bp, Artificial
  Probe
agcctgccctcatcggggcgcagtg

SEQ ID NO: 241621 - DNA, 25 bp, Artificial
  Probe
ttcgctatgcctgtcgggtccgcca

SEQ ID NO: 241622 - DNA, 25 bp, Artificial
  Probe
gttcgctatgcctgtcgggtccgcc

SEQ ID NO: 241623 - DNA, 25 bp, Artificial
  Probe
agaaggcctcagctaccagcctgac

SEQ ID NO: 241624 - DNA, 25 bp, Artificial
  Probe
gcactaggctggatggctgcctacc

SEQ ID NO: 241625 - DNA, 25 bp, Artificial
  Probe
aggtggcaggcttctcagggccctc

SEQ ID NO: 241626 - DNA, 25 bp, Artificial
  Probe
cagaggtggcccagaaggaagttct

SEQ ID NO: 241627 - DNA, 25 bp, Artificial
  Probe
acggcataggcctcttcctgtctgc

SEQ ID NO: 241628 - DNA, 25 bp, Artificial
  Probe
ggaagacttgggtctccactgtccg

SEQ ID NO: 241629 - DNA, 25 bp, Artificial
  Probe
ggcccagaaggaagttctagaaagg

SEQ ID NO: 241630 - DNA, 25 bp, Artificial
  Probe
tccctccattaaatgactcagggtt

SEQ ID NO: 241631 - DNA, 25 bp, Artificial
  Probe
ttctcagggccctccattgaggacg

SEQ ID NO: 241632 - DNA, 25 bp, Artificial
  Probe
gtctgcttttctccttttgggcctc

SEQ ID NO: 241633 - DNA, 25 bp, Artificial
  Probe
gaccattcctaaaatcttaaaggag

SEQ ID NO: 241634 - DNA, 25 bp, Artificial
  Probe
gacactggtctgtggaagccaccct

SEQ ID NO: 241635 - DNA, 25 bp, Artificial
  Probe
aaggagaaggcctcagctaccagcc

SEQ ID NO: 241636 - DNA, 25 bp, Artificial
  Probe
ggcaggcttctcagggccctccatt

SEQ ID NO: 241637 - DNA, 25 bp, Artificial
  Probe
catggagttcgctatgcctgtcggg

SEQ ID NO: 241638 - DNA, 25 bp, Artificial
  Probe
aagcaacatggagttcgctatgcct

SEQ ID NO: 241639 - DNA, 25 bp, Artificial
  Probe
tcatcggggcgcagtgctgaagtca

SEQ ID NO: 241640 - DNA, 25 bp, Artificial
  Probe
ggctgcctacctgaccattcctaaa

SEQ ID NO: 241641 - DNA, 25 bp, Artificial
  Probe
cactaggctggatggctgcctacct

SEQ ID NO: 241642 - DNA, 25 bp, Artificial
  Probe
ctgacaagcaacatggagttcgcta

SEQ ID NO: 241643 - DNA, 25 bp, Artificial
  Probe
cattctgatggctctgtcagccagt

SEQ ID NO: 241644 - DNA, 25 bp, Artificial
  Probe
aggcctcttcctgtctgcttttctc

SEQ ID NO: 241645 - DNA, 25 bp, Artificial
  Probe
ttcccaaagacgaaaagaagtcaga

SEQ ID NO: 241646 - DNA, 25 bp, Artificial
  Probe
attgaggacggcataggcctcttcc

SEQ ID NO: 241647 - DNA, 25 bp, Artificial
  Probe
aggctggatggctgcctacctgacc

SEQ ID NO: 241648 - DNA, 25 bp, Artificial
  Probe
atccaccagctggaatcggagaaat

SEQ ID NO: 241649 - DNA, 25 bp, Artificial
  Probe
atatgagatcaatgtgctgtacaac

SEQ ID NO: 241650 - DNA, 25 bp, Artificial
  Probe
aatggatccaccagctggaatcgga

SEQ ID NO: 241651 - DNA, 25 bp, Artificial
  Probe
cagctttacacagcatgatgggaag

SEQ ID NO: 241652 - DNA, 25 bp, Artificial
  Probe
agcccaggagccaccggagtgtgtc

SEQ ID NO: 241653 - DNA, 25 bp, Artificial
  Probe
caaccgcatcagtcatgcccagaaa

SEQ ID NO: 241654 - DNA, 25 bp, Artificial
  Probe
ctgtcagaatggatccaccagctgg

SEQ ID NO: 241655 - DNA, 25 bp, Artificial
  Probe
atgtgctgtacaaccgcatcagtca

SEQ ID NO: 241656 - DNA, 25 bp, Artificial
  Probe
catgcccagaaattccgaaaggggg

SEQ ID NO: 241657 - DNA, 25 bp, Artificial
  Probe
ccgcatcagtcatgcccagaaattc

SEQ ID NO: 241658 - DNA, 25 bp, Artificial
  Probe
gtcccattgtgtggagcccaggagc

SEQ ID NO: 241659 - DNA, 25 bp, Artificial
  Probe
gcagctttacacagcatgatgggaa

SEQ ID NO: 241660 - DNA, 25 bp, Artificial
  Probe
gtgtgtcccatctgtaactcaaaat

SEQ ID NO: 241661 - DNA, 25 bp, Artificial
  Probe
agactgccaggacatgtcccattgt

SEQ ID NO: 241662 - DNA, 25 bp, Artificial
  Probe
tgccaggacatgtcccattgtgtgg

SEQ ID NO: 241663 - DNA, 25 bp, Artificial
  Probe
tcatgcccagaaattccgaaagggg

SEQ ID NO: 241664 - DNA, 25 bp, Artificial
  Probe
cccattgtgtggagcccaggagcca

SEQ ID NO: 241665 - DNA, 25 bp, Artificial
  Probe
tgtacaaccgcatcagtcatgccca

SEQ ID NO: 241666 - DNA, 25 bp, Artificial
  Probe
tacacagcagctttacacagcatga

SEQ ID NO: 241667 - DNA, 25 bp, Artificial
  Probe
gtacaaccgcatcagtcatgcccag

SEQ ID NO: 241668 - DNA, 25 bp, Artificial
  Probe
cagtcatgcccagaaattccgaaag

SEQ ID NO: 241669 - DNA, 25 bp, Artificial
  Probe
ccaccggagtgtgtcccatctgtaa

SEQ ID NO: 241670 - DNA, 25 bp, Artificial
  Probe
caccagctggaatcggagaaatttg

SEQ ID NO: 241671 - DNA, 25 bp, Artificial
  Probe
gaatggatccaccagctggaatcgg

SEQ ID NO: 241672 - DNA, 25 bp, Artificial
  Probe
gctttacacagcatgatgggaagaa

SEQ ID NO: 241673 - DNA, 25 bp, Artificial
  Probe
atgtcccattgtgtggagcccagga

SEQ ID NO: 241674 - DNA, 25 bp, Artificial
  Probe
cacagcagctttacacagcatgatg

SEQ ID NO: 241675 - DNA, 25 bp, Artificial
  Probe
tcaatgtgctgtacaaccgcatcag

SEQ ID NO: 241676 - DNA, 25 bp, Artificial
  Probe
ctggaagtgagactgccaggacatg

SEQ ID NO: 241677 - DNA, 25 bp, Artificial
  Probe
agaatggatccaccagctggaatcg

SEQ ID NO: 241678 - DNA, 25 bp, Artificial
  Probe
agatcaatgtgctgtacaaccgcat

SEQ ID NO: 241679 - DNA, 25 bp, Artificial
  Probe
ccaccagctggaatcggagaaattt

SEQ ID NO: 241680 - DNA, 25 bp, Artificial
  Probe
aggagccaccggagtgtgtcccatc

SEQ ID NO: 241681 - DNA, 25 bp, Artificial
  Probe
aatgtgctgtacaaccgcatcagtc

SEQ ID NO: 241682 - DNA, 25 bp, Artificial
  Probe
gagtgtgtcccatctgtaactcaaa

SEQ ID NO: 241683 - DNA, 25 bp, Artificial
  Probe
ggatccaccagctggaatcggagaa

SEQ ID NO: 241684 - DNA, 25 bp, Artificial
  Probe
tcagaatggatccaccagctggaat

SEQ ID NO: 241685 - DNA, 25 bp, Artificial
  Probe
tcagtcatgcccagaaattccgaaa

SEQ ID NO: 241686 - DNA, 25 bp, Artificial
  Probe
ctttacacagcatgatgggaagaag

SEQ ID NO: 241687 - DNA, 25 bp, Artificial
  Probe
agtcatgcccagaaattccgaaagg

SEQ ID NO: 241688 - DNA, 25 bp, Artificial
  Probe
ggagtgtgtcccatctgtaactcaa

SEQ ID NO: 241689 - DNA, 25 bp, Artificial
  Probe
agtgagactgccaggacatgtccca

SEQ ID NO: 241690 - DNA, 25 bp, Artificial
  Probe
caccggagtgtgtcccatctgtaac

SEQ ID NO: 241691 - DNA, 25 bp, Artificial
  Probe
ggacatgtcccattgtgtggagccc

SEQ ID NO: 241692 - DNA, 25 bp, Artificial
  Probe
actgccaggacatgtcccattgtgt

SEQ ID NO: 241693 - DNA, 25 bp, Artificial
  Probe
gacatgtcccattgtgtggagccca

SEQ ID NO: 241694 - DNA, 25 bp, Artificial
  Probe
caacccgtgtgtctcttcgaaagac

SEQ ID NO: 241695 - DNA, 25 bp, Artificial
  Probe
ccatctgtgccaaagcctcagtcag

SEQ ID NO: 241696 - DNA, 25 bp, Artificial
  Probe
ccagccacagtgctgtgctggaggc

SEQ ID NO: 241697 - DNA, 25 bp, Artificial
  Probe
cctgtgtgtgtcagcgagagatact

SEQ ID NO: 241698 - DNA, 25 bp, Artificial
  Probe
gagcaacctccgagagctgcagatc

SEQ ID NO: 241699 - DNA, 25 bp, Artificial
  Probe
ttgccttccgcgaggctatcaacaa

SEQ ID NO: 241700 - DNA, 25 bp, Artificial
  Probe
gggccagcggccacacaagacttca

SEQ ID NO: 241701 - DNA, 25 bp, Artificial
  Probe
actgaggccctgtgccttgccatct

SEQ ID NO: 241702 - DNA, 25 bp, Artificial
  Probe
tgtgtgtcagcgagagatactgcag

SEQ ID NO: 241703 - DNA, 25 bp, Artificial
  Probe
catctgtgccaaagcctcagtcagc

SEQ ID NO: 241704 - DNA, 25 bp, Artificial
  Probe
ctctgtgaaggagatcagcgacatt

SEQ ID NO: 241705 - DNA, 25 bp, Artificial
  Probe
gccatctcccggaactcggagcaga

SEQ ID NO: 241706 - DNA, 25 bp, Artificial
  Probe
agatggccagccacagtgctgtgct

SEQ ID NO: 241707 - DNA, 25 bp, Artificial
  Probe
gaggtagcagcaacctgtgtgtgtc

SEQ ID NO: 241708 - DNA, 25 bp, Artificial
  Probe
tgtctcttcgaaagacccgacagcc

SEQ ID NO: 241709 - DNA, 25 bp, Artificial
  Probe
catatcaacccgtgtgtctcttcga

SEQ ID NO: 241710 - DNA, 25 bp, Artificial
  Probe
gagcgcatcgccagtggcaccatca

SEQ ID NO: 241711 - DNA, 25 bp, Artificial
  Probe
ccggaactcggagcagatggccagc

SEQ ID NO: 241712 - DNA, 25 bp, Artificial
  Probe
tcgaaagacccgacagccgccagag

SEQ ID NO: 241713 - DNA, 25 bp, Artificial
  Probe
cagtggcaccatcaccaagggtgtg

SEQ ID NO: 241714 - DNA, 25 bp, Artificial
  Probe
tgtggttctggacagtactgaggcc

SEQ ID NO: 241715 - DNA, 25 bp, Artificial
  Probe
tgcgacagcctccagtgggccagcg

SEQ ID NO: 241716 - DNA, 25 bp, Artificial
  Probe
cttccgcgaggctatcaacaagctg

SEQ ID NO: 241717 - DNA, 25 bp, Artificial
  Probe
agagctgcagatctgccctgcgaca

SEQ ID NO: 241718 - DNA, 25 bp, Artificial
  Probe
atcgccagtggcaccatcaccaagg

SEQ ID NO: 241719 - DNA, 25 bp, Artificial
  Probe
gacattgtccggaggtagcagcaac

SEQ ID NO: 241720 - DNA, 25 bp, Artificial
  Probe
gtctcttcgaaagacccgacagccg

SEQ ID NO: 241721 - DNA, 25 bp, Artificial
  Probe
agaacctgtacacattctgtgtgag

SEQ ID NO: 241722 - DNA, 25 bp, Artificial
  Probe
gagatcagcgacattgtccggaggt

SEQ ID NO: 241723 - DNA, 25 bp, Artificial
  Probe
tcaacaagctggagagcaacctccg

SEQ ID NO: 241724 - DNA, 25 bp, Artificial
  Probe
gctggggaccagcagccatcttctg

SEQ ID NO: 241725 - DNA, 25 bp, Artificial
  Probe
gggcaagaacctgtacacattctgt

SEQ ID NO: 241726 - DNA, 25 bp, Artificial
  Probe
ctcagtcagctactaagccaccggg

SEQ ID NO: 241727 - DNA, 25 bp, Artificial
  Probe
atggccagccacagtgctgtgctgg

SEQ ID NO: 241728 - DNA, 25 bp, Artificial
  Probe
tggacagtactgaggccctgtgcct

SEQ ID NO: 241729 - DNA, 25 bp, Artificial
  Probe
gtactgaggccctgtgccttgccat

SEQ ID NO: 241730 - DNA, 25 bp, Artificial
  Probe
agtcagctactaagccaccggggac

SEQ ID NO: 241731 - DNA, 25 bp, Artificial
  Probe
cagcctggagaaggactgagaaaat

SEQ ID NO: 241732 - DNA, 25 bp, Artificial
  Probe
gtgccaaagcctcagtcagctacta

SEQ ID NO: 241733 - DNA, 25 bp, Artificial
  Probe
cgggcaagaacctgtacacattctg

SEQ ID NO: 241734 - DNA, 25 bp, Artificial
  Probe
tcagcgacattgtccggaggtagca

SEQ ID NO: 241735 - DNA, 25 bp, Artificial
  Probe
cccggaactcggagcagatggccag

SEQ ID NO: 241736 - DNA, 25 bp, Artificial
  Probe
agcagccatcttctgctgccttcat

SEQ ID NO: 241737 - DNA, 25 bp, Artificial
  Probe
acaagtttgccttccgcgaggctat

SEQ ID NO: 241738 - DNA, 25 bp, Artificial
  Probe
atccagcagatgaggaacaagtttg

SEQ ID NO: 241739 - DNA, 25 bp, Artificial
  Probe
tgtccggaggtagcagcaacctgtg

SEQ ID NO: 241740 - DNA, 25 bp, Artificial
  Probe
tgatcgacctggtccccagtctgtg

SEQ ID NO: 241741 - DNA, 25 bp, Artificial
  Probe
aaactgtgagtgactgttccccaca

SEQ ID NO: 241742 - DNA, 25 bp, Artificial
  Probe
tcagaagcacgctgaatgagatcta

SEQ ID NO: 241743 - DNA, 25 bp, Artificial
  Probe
catgaacctgggaggcagcctaacc

SEQ ID NO: 241744 - DNA, 25 bp, Artificial
  Probe
caaaccaacaaatccggctcaggca

SEQ ID NO: 241745 - DNA, 25 bp, Artificial
  Probe
tgggaggcagcctaaccagacagat

SEQ ID NO: 241746 - DNA, 25 bp, Artificial
  Probe
aacctgggaggcagcctaaccagac

SEQ ID NO: 241747 - DNA, 25 bp, Artificial
  Probe
tccacagcagattgagaaaaacctc

SEQ ID NO: 241748 - DNA, 25 bp, Artificial
  Probe
tcctgtcttctgttgacctccacag

SEQ ID NO: 241749 - DNA, 25 bp, Artificial
  Probe
acagtgatgctatggctgcaaacca

SEQ ID NO: 241750 - DNA, 25 bp, Artificial
  Probe
cagcagctggactgcgccttggacc

SEQ ID NO: 241751 - DNA, 25 bp, Artificial
  Probe
gcctgcctccacagcagattgagaa

SEQ ID NO: 241752 - DNA, 25 bp, Artificial
  Probe
tcgtcaacgggctgaggtctgtgca

SEQ ID NO: 241753 - DNA, 25 bp, Artificial
  Probe
agcacgctgaatgagatctactttg

SEQ ID NO: 241754 - DNA, 25 bp, Artificial
  Probe
tggactgcgccttggacctgatgag

SEQ ID NO: 241755 - DNA, 25 bp, Artificial
  Probe
tgatgctatggctgcaaaccaacaa

SEQ ID NO: 241756 - DNA, 25 bp, Artificial
  Probe
gaagatctcctgtcttctgttgacc

SEQ ID NO: 241757 - DNA, 25 bp, Artificial
  Probe
gcgatcagcagctggactgcgcctt

SEQ ID NO: 241758 - DNA, 25 bp, Artificial
  Probe
atgctatggctgcaaaccaacaaat

SEQ ID NO: 241759 - DNA, 25 bp, Artificial
  Probe
tccccagtctgtgtgaagatctcct

SEQ ID NO: 241760 - DNA, 25 bp, Artificial
  Probe
catagccaacattgggcgcctggtg

SEQ ID NO: 241761 - DNA, 25 bp, Artificial
  Probe
gagaaaaacctcagcgatctgatcg

SEQ ID NO: 241762 - DNA, 25 bp, Artificial
  Probe
tccggctcaggcaccatgaacctgg

SEQ ID NO: 241763 - DNA, 25 bp, Artificial
  Probe
tcagcgatctgatcgacctggtccc

SEQ ID NO: 241764 - DNA, 25 bp, Artificial
  Probe
gactgcgccttggacctgatgaggc

SEQ ID NO: 241765 - DNA, 25 bp, Artificial
  Probe
gcaccatgaacctgggaggcagcct

SEQ ID NO: 241766 - DNA, 25 bp, Artificial
  Probe
acgaaactgtgagtgactgttcccc

SEQ ID NO: 241767 - DNA, 25 bp, Artificial
  Probe
caaaggacatcgtcaacgggctgag

SEQ ID NO: 241768 - DNA, 25 bp, Artificial
  Probe
agcgatctgatcgacctggtcccca

SEQ ID NO: 241769 - DNA, 25 bp, Artificial
  Probe
tcaacgggctgaggtctgtgcagac

SEQ ID NO: 241770 - DNA, 25 bp, Artificial
  Probe
ccatgagcgatcagcagctggactg

SEQ ID NO: 241771 - DNA, 25 bp, Artificial
  Probe
caaatccggctcaggcaccatgaac

SEQ ID NO: 241772 - DNA, 25 bp, Artificial
  Probe
atgagcgatcagcagctggactgcg

SEQ ID NO: 241773 - DNA, 25 bp, Artificial
  Probe
ctggactgcgccttggacctgatga

SEQ ID NO: 241774 - DNA, 25 bp, Artificial
  Probe
attgagaaaaacctcagcgatctga

SEQ ID NO: 241775 - DNA, 25 bp, Artificial
  Probe
caccatgagcgatcagcagctggac

SEQ ID NO: 241776 - DNA, 25 bp, Artificial
  Probe
aaacctcagcgatctgatcgacctg

SEQ ID NO: 241777 - DNA, 25 bp, Artificial
  Probe
aggacatcgtcaacgggctgaggtc

SEQ ID NO: 241778 - DNA, 25 bp, Artificial
  Probe
aacctcagcgatctgatcgacctgg

SEQ ID NO: 241779 - DNA, 25 bp, Artificial
  Probe
gatctcctgtcttctgttgacctcc

SEQ ID NO: 241780 - DNA, 25 bp, Artificial
  Probe
ttggacctgatgaggcgcctgcctc

SEQ ID NO: 241781 - DNA, 25 bp, Artificial
  Probe
cctcagcgatctgatcgacctggtc

SEQ ID NO: 241782 - DNA, 25 bp, Artificial
  Probe
tgatgaggcgcctgcctccacagca

SEQ ID NO: 241783 - DNA, 25 bp, Artificial
  Probe
cacacatagccaacattgggcgcct

SEQ ID NO: 241784 - DNA, 25 bp, Artificial
  Probe
gacctggtccccagtctgtgtgaag

SEQ ID NO: 241785 - DNA, 25 bp, Artificial
  Probe
aaccagacagatggagaaggacgaa

SEQ ID NO: 241786 - DNA, 25 bp, Artificial
  Probe
aattgggctctattcaactagcaat

SEQ ID NO: 241787 - DNA, 25 bp, Artificial
  Probe
gctacacggacagctgcggggtctc

SEQ ID NO: 241788 - DNA, 25 bp, Artificial
  Probe
tcaaacccattggtaccgcgcacaa

SEQ ID NO: 241789 - DNA, 25 bp, Artificial
  Probe
gcaatatccgagacgcgctacacgg

SEQ ID NO: 241790 - DNA, 25 bp, Artificial
  Probe
gagacgcgctacacggacagctgcg

SEQ ID NO: 241791 - DNA, 25 bp, Artificial
  Probe
gcgcacaacagaagggcccagcctt

SEQ ID NO: 241792 - DNA, 25 bp, Artificial
  Probe
aggctgaaccgcaggaattcaaacc

SEQ ID NO: 241793 - DNA, 25 bp, Artificial
  Probe
ccgagacgcgctacacggacagctg

SEQ ID NO: 241794 - DNA, 25 bp, Artificial
  Probe
ggctctattcaactagcaatatccg

SEQ ID NO: 241795 - DNA, 25 bp, Artificial
  Probe
gcagcagcaaacattgatgacaaaa

SEQ ID NO: 241796 - DNA, 25 bp, Artificial
  Probe
aaacccattggtaccgcgcacaaca

SEQ ID NO: 241797 - DNA, 25 bp, Artificial
  Probe
ctgaaccgcaggaattcaaacccat

SEQ ID NO: 241798 - DNA, 25 bp, Artificial
  Probe
caactagcaatatccgagacgcgct

SEQ ID NO: 241799 - DNA, 25 bp, Artificial
  Probe
gcaggaattcaaacccattggtacc

SEQ ID NO: 241800 - DNA, 25 bp, Artificial
  Probe
cgctacacggacagctgcggggtct

SEQ ID NO: 241801 - DNA, 25 bp, Artificial
  Probe
gtagtgagcgcttcctataactcac

SEQ ID NO: 241802 - DNA, 25 bp, Artificial
  Probe
cagctgcggggtctcatccccagtt

SEQ ID NO: 241803 - DNA, 25 bp, Artificial
  Probe
gtaccgcgcacaacagaagggccca

SEQ ID NO: 241804 - DNA, 25 bp, Artificial
  Probe
aagggcccagcctttcgtagcagca

SEQ ID NO: 241805 - DNA, 25 bp, Artificial
  Probe
caccaattgggctctattcaactag

SEQ ID NO: 241806 - DNA, 25 bp, Artificial
  Probe
cgcaggaattcaaacccattggtac

SEQ ID NO: 241807 - DNA, 25 bp, Artificial
  Probe
attcaactagcaatatccgagacgc

SEQ ID NO: 241808 - DNA, 25 bp, Artificial
  Probe
agttcaccgcaaaatgaacccacag

SEQ ID NO: 241809 - DNA, 25 bp, Artificial
  Probe
agacaggtagtgagcgcttcctata

SEQ ID NO: 241810 - DNA, 25 bp, Artificial
  Probe
taccgcgcacaacagaagggcccag

SEQ ID NO: 241811 - DNA, 25 bp, Artificial
  Probe
agggcccagcctttcgtagcagcag

SEQ ID NO: 241812 - DNA, 25 bp, Artificial
  Probe
gtagcagcagcaaacattgatgaca

SEQ ID NO: 241813 - DNA, 25 bp, Artificial
  Probe
ttggtaccgcgcacaacagaagggc

SEQ ID NO: 241814 - DNA, 25 bp, Artificial
  Probe
acagctgcggggtctcatccccagt

SEQ ID NO: 241815 - DNA, 25 bp, Artificial
  Probe
ttcaaacccattggtaccgcgcaca

SEQ ID NO: 241816 - DNA, 25 bp, Artificial
  Probe
gcgcttcctataactcaccaattgg

SEQ ID NO: 241817 - DNA, 25 bp, Artificial
  Probe
tagcaatatccgagacgcgctacac

SEQ ID NO: 241818 - DNA, 25 bp, Artificial
  Probe
tattcaactagcaatatccgagacg

SEQ ID NO: 241819 - DNA, 25 bp, Artificial
  Probe
tacacggacagctgcggggtctcat

SEQ ID NO: 241820 - DNA, 25 bp, Artificial
  Probe
agcctttcgtagcagcagcaaacat

SEQ ID NO: 241821 - DNA, 25 bp, Artificial
  Probe
gcttcctataactcaccaattgggc

SEQ ID NO: 241822 - DNA, 25 bp, Artificial
  Probe
accaattgggctctattcaactagc

SEQ ID NO: 241823 - DNA, 25 bp, Artificial
  Probe
gaattcaaacccattggtaccgcgc

SEQ ID NO: 241824 - DNA, 25 bp, Artificial
  Probe
tgaaccgcaggaattcaaacccatt

SEQ ID NO: 241825 - DNA, 25 bp, Artificial
  Probe
gcctttcgtagcagcagcaaacatt

SEQ ID NO: 241826 - DNA, 25 bp, Artificial
  Probe
aaccgcaggaattcaaacccattgg

SEQ ID NO: 241827 - DNA, 25 bp, Artificial
  Probe
ggtagtgagcgcttcctataactca

SEQ ID NO: 241828 - DNA, 25 bp, Artificial
  Probe
gtgagcgcttcctataactcaccaa

SEQ ID NO: 241829 - DNA, 25 bp, Artificial
  Probe
tcgtagcagcagcaaacattgatga

SEQ ID NO: 241830 - DNA, 25 bp, Artificial
  Probe
tccgagacgcgctacacggacagct

SEQ ID NO: 241831 - DNA, 25 bp, Artificial
  Probe
cgagacgcgctacacggacagctgc

SEQ ID NO: 241832 - DNA, 25 bp, Artificial
  Probe
tctctacagactgcttcatggactc

SEQ ID NO: 241833 - DNA, 25 bp, Artificial
  Probe
tctctctacagactgcttcatggac

SEQ ID NO: 241834 - DNA, 25 bp, Artificial
  Probe
gcactagttaaacgttctaggttgg

SEQ ID NO: 241835 - DNA, 25 bp, Artificial
  Probe
gctaggctttctagaaggccactgg

SEQ ID NO: 241836 - DNA, 25 bp, Artificial
  Probe
cctgcactagttaaacgttctaggt

SEQ ID NO: 241837 - DNA, 25 bp, Artificial
  Probe
ggggtagctgccacagacaatgctc

SEQ ID NO: 241838 - DNA, 25 bp, Artificial
  Probe
gccacagacaatgctcatcaataga

SEQ ID NO: 241839 - DNA, 25 bp, Artificial
  Probe
ggtagctgccacagacaatgctcat

SEQ ID NO: 241840 - DNA, 25 bp, Artificial
  Probe
gctgctgagaacttgccaggctagg

SEQ ID NO: 241841 - DNA, 25 bp, Artificial
  Probe
gaacacactcactcaaagtttgcag

SEQ ID NO: 241842 - DNA, 25 bp, Artificial
  Probe
ttctagaaggccactggccactgta

SEQ ID NO: 241843 - DNA, 25 bp, Artificial
  Probe
ccaggctaggctttctagaaggcca

SEQ ID NO: 241844 - DNA, 25 bp, Artificial
  Probe
ggtcagactggcacctatctctctc

SEQ ID NO: 241845 - DNA, 25 bp, Artificial
  Probe
ggctgctgagaacttgccaggctag

SEQ ID NO: 241846 - DNA, 25 bp, Artificial
  Probe
ttgcagtttgcgtagaaaagcacag

SEQ ID NO: 241847 - DNA, 25 bp, Artificial
  Probe
ctgcactagttaaacgttctaggtt

SEQ ID NO: 241848 - DNA, 25 bp, Artificial
  Probe
acactcactcaaagtttgcagtttg

SEQ ID NO: 241849 - DNA, 25 bp, Artificial
  Probe
ggctaggctttctagaaggccactg

SEQ ID NO: 241850 - DNA, 25 bp, Artificial
  Probe
aaatggtcagactggcacctatctc

SEQ ID NO: 241851 - DNA, 25 bp, Artificial
  Probe
ctctctacagactgcttcatggact

SEQ ID NO: 241852 - DNA, 25 bp, Artificial
  Probe
cagggctgctgagaacttgccaggc

SEQ ID NO: 241853 - DNA, 25 bp, Artificial
  Probe
ctcactcaaagtttgcagtttgcgt

SEQ ID NO: 241854 - DNA, 25 bp, Artificial
  Probe
gggctgctgagaacttgccaggcta

SEQ ID NO: 241855 - DNA, 25 bp, Artificial
  Probe
tgagaacttgccaggctaggctttc

SEQ ID NO: 241856 - DNA, 25 bp, Artificial
  Probe
tgcactagttaaacgttctaggttg

SEQ ID NO: 241857 - DNA, 25 bp, Artificial
  Probe
gacaatgctcatcaatagaaacccg

SEQ ID NO: 241858 - DNA, 25 bp, Artificial
  Probe
ctgctgagaacttgccaggctaggc

SEQ ID NO: 241859 - DNA, 25 bp, Artificial
  Probe
ctagaaggccactggccactgtaac

SEQ ID NO: 241860 - DNA, 25 bp, Artificial
  Probe
tctctctctacagactgcttcatgg

SEQ ID NO: 241861 - DNA, 25 bp, Artificial
  Probe
agctgccacagacaatgctcatcaa

SEQ ID NO: 241862 - DNA, 25 bp, Artificial
  Probe
cactcaaagtttgcagtttgcgtag

SEQ ID NO: 241863 - DNA, 25 bp, Artificial
  Probe
cgtagaaaagcacagctctggcggg

SEQ ID NO: 241864 - DNA, 25 bp, Artificial
  Probe
gctgccacagacaatgctcatcaat

SEQ ID NO: 241865 - DNA, 25 bp, Artificial
  Probe
gccaggctaggctttctagaaggcc

SEQ ID NO: 241866 - DNA, 25 bp, Artificial
  Probe
cacctgcactagttaaacgttctag

SEQ ID NO: 241867 - DNA, 25 bp, Artificial
  Probe
tgccacagacaatgctcatcaatag

SEQ ID NO: 241868 - DNA, 25 bp, Artificial
  Probe
gtagctgccacagacaatgctcatc

SEQ ID NO: 241869 - DNA, 25 bp, Artificial
  Probe
caggctaggctttctagaaggccac

SEQ ID NO: 241870 - DNA, 25 bp, Artificial
  Probe
gtcagactggcacctatctctctct

SEQ ID NO: 241871 - DNA, 25 bp, Artificial
  Probe
actcaaagtttgcagtttgcgtaga

SEQ ID NO: 241872 - DNA, 25 bp, Artificial
  Probe
aggctttctagaaggccactggcca

SEQ ID NO: 241873 - DNA, 25 bp, Artificial
  Probe
cactcactcaaagtttgcagtttgc

SEQ ID NO: 241874 - DNA, 25 bp, Artificial
  Probe
ccagggctgctgagaacttgccagg

SEQ ID NO: 241875 - DNA, 25 bp, Artificial
  Probe
tcactcaaagtttgcagtttgcgta

SEQ ID NO: 241876 - DNA, 25 bp, Artificial
  Probe
ctcaaagtttgcagtttgcgtagaa

SEQ ID NO: 241877 - DNA, 25 bp, Artificial
  Probe
taggctttctagaaggccactggcc

SEQ ID NO: 241878 - DNA, 25 bp, Artificial
  Probe
tgtggctttggctcagtccaatatt

SEQ ID NO: 241879 - DNA, 25 bp, Artificial
  Probe
attctggtattttgtccagaatagc

SEQ ID NO: 241880 - DNA, 25 bp, Artificial
  Probe
ttttccagccctgctcatcactggg

SEQ ID NO: 241881 - DNA, 25 bp, Artificial
  Probe
ccaccaaccgccaggaatgaacgaa

SEQ ID NO: 241882 - DNA, 25 bp, Artificial
  Probe
tcactaacagggagaattagctggt

SEQ ID NO: 241883 - DNA, 25 bp, Artificial
  Probe
cattgggaaccctcgcattaccggg

SEQ ID NO: 241884 - DNA, 25 bp, Artificial
  Probe
atcactgggaagatacaggagtcta

SEQ ID NO: 241885 - DNA, 25 bp, Artificial
  Probe
ccacttgtcatagaagggtactgcc

SEQ ID NO: 241886 - DNA, 25 bp, Artificial
  Probe
ctggtattttgtccagaatagcttg

SEQ ID NO: 241887 - DNA, 25 bp, Artificial
  Probe
gcattaccggggatgctacttacca

SEQ ID NO: 241888 - DNA, 25 bp, Artificial
  Probe
atgtgccttgatgaagatttcctcc

SEQ ID NO: 241889 - DNA, 25 bp, Artificial
  Probe
agcaatgtgccttgatgaagatttc

SEQ ID NO: 241890 - DNA, 25 bp, Artificial
  Probe
acagaatgtgttctttgtccttttc

SEQ ID NO: 241891 - DNA, 25 bp, Artificial
  Probe
caccatgtggctttggctcagtcca

SEQ ID NO: 241892 - DNA, 25 bp, Artificial
  Probe
ggatgctacttaccacaatctgtaa

SEQ ID NO: 241893 - DNA, 25 bp, Artificial
  Probe
ttgatgttctacctgccaccaaccg

SEQ ID NO: 241894 - DNA, 25 bp, Artificial
  Probe
ctggtagcaatgtgccttgatgaag

SEQ ID NO: 241895 - DNA, 25 bp, Artificial
  Probe
cgctgagacaggacagaatgtgttc

SEQ ID NO: 241896 - DNA, 25 bp, Artificial
  Probe
aagatttcctccaggcagcaaacac

SEQ ID NO: 241897 - DNA, 25 bp, Artificial
  Probe
accatgtggctttggctcagtccaa

SEQ ID NO: 241898 - DNA, 25 bp, Artificial
  Probe
ccagaatagcttgtagcagctatag

SEQ ID NO: 241899 - DNA, 25 bp, Artificial
  Probe
ttgatgaagatttcctccaggcagc

SEQ ID NO: 241900 - DNA, 25 bp, Artificial
  Probe
gggaaccctcgcattaccggggatg

SEQ ID NO: 241901 - DNA, 25 bp, Artificial
  Probe
gttctttgtccttttccagccctgc

SEQ ID NO: 241902 - DNA, 25 bp, Artificial
  Probe
aatagcttgtagcagctatagattc

SEQ ID NO: 241903 - DNA, 25 bp, Artificial
  Probe
ccgccaggaatgaacgaaggaaaca

SEQ ID NO: 241904 - DNA, 25 bp, Artificial
  Probe
ctcatcactgggaagatacaggagt

SEQ ID NO: 241905 - DNA, 25 bp, Artificial
  Probe
taactcactaacagggagaattagc

SEQ ID NO: 241906 - DNA, 25 bp, Artificial
  Probe
gaattagctggtagcaatgtgcctt

SEQ ID NO: 241907 - DNA, 25 bp, Artificial
  Probe
ctgtgctctgatgttcagaaagctg

SEQ ID NO: 241908 - DNA, 25 bp, Artificial
  Probe
aagatacaggagtctaccacttgtc

SEQ ID NO: 241909 - DNA, 25 bp, Artificial
  Probe
tccttggccccaagcctgggacttg

SEQ ID NO: 241910 - DNA, 25 bp, Artificial
  Probe
caactctttgcttcttgccattgtg

SEQ ID NO: 241911 - DNA, 25 bp, Artificial
  Probe
gctttggctcagtccaatattccac

SEQ ID NO: 241912 - DNA, 25 bp, Artificial
  Probe
tatagattcctccttggccccaagc

SEQ ID NO: 241913 - DNA, 25 bp, Artificial
  Probe
tattttgtccagaatagcttgtagc

SEQ ID NO: 241914 - DNA, 25 bp, Artificial
  Probe
tttacattgggaaccctcgcattac

SEQ ID NO: 241915 - DNA, 25 bp, Artificial
  Probe
gccaacttgatgttctacctgccac

SEQ ID NO: 241916 - DNA, 25 bp, Artificial
  Probe
aaccctcgcattaccggggatgcta

SEQ ID NO: 241917 - DNA, 25 bp, Artificial
  Probe
ggacttgagccatcctaactcacta

SEQ ID NO: 241918 - DNA, 25 bp, Artificial
  Probe
ctctttgcttcttgccattgtgggc

SEQ ID NO: 241919 - DNA, 25 bp, Artificial
  Probe
aagggtactgccaacttgatgttct

SEQ ID NO: 241920 - DNA, 25 bp, Artificial
  Probe
tgagccatcctaactcactaacagg

SEQ ID NO: 241921 - DNA, 25 bp, Artificial
  Probe
cctgctcatcactgggaagatacag

SEQ ID NO: 241922 - DNA, 25 bp, Artificial
  Probe
ccaagcctgggacttgagccatcct

SEQ ID NO: 241923 - DNA, 25 bp, Artificial
  Probe
ttttacattgggaaccctcgcatta

SEQ ID NO: 241924 - DNA, 25 bp, Artificial
  Probe
ccttcaatgcaggaccagaatctgt

SEQ ID NO: 241925 - DNA, 25 bp, Artificial
  Probe
gggaacagcggtctagttttgagtc

SEQ ID NO: 241926 - DNA, 25 bp, Artificial
  Probe
atcctccttcaatgcaggaccagaa

SEQ ID NO: 241927 - DNA, 25 bp, Artificial
  Probe
gtctagttttgagtctttccccatt

SEQ ID NO: 241928 - DNA, 25 bp, Artificial
  Probe
ttctgatactttgaattcacagtag

SEQ ID NO: 241929 - DNA, 25 bp, Artificial
  Probe
ggaacagcggtctagttttgagtct

SEQ ID NO: 241930 - DNA, 25 bp, Artificial
  Probe
cccaaagcacctgctcacgttgtgt

SEQ ID NO: 241931 - DNA, 25 bp, Artificial
  Probe
acagcggtctagttttgagtctttc

SEQ ID NO: 241932 - DNA, 25 bp, Artificial
  Probe
ctttgaattcacagtagacatagtt

SEQ ID NO: 241933 - DNA, 25 bp, Artificial
  Probe
tccttcaatgcaggaccagaatctg

SEQ ID NO: 241934 - DNA, 25 bp, Artificial
  Probe
gatactttgaattcacagtagacat

SEQ ID NO: 241935 - DNA, 25 bp, Artificial
  Probe
tcaatgcaggaccagaatctgtcca

SEQ ID NO: 241936 - DNA, 25 bp, Artificial
  Probe
gtgtcggagcacatctcctgggagt

SEQ ID NO: 241937 - DNA, 25 bp, Artificial
  Probe
tctgatactttgaattcacagtaga

SEQ ID NO: 241938 - DNA, 25 bp, Artificial
  Probe
gaacagcggtctagttttgagtctt

SEQ ID NO: 241939 - DNA, 25 bp, Artificial
  Probe
tctttccccttggagccaagatggt

SEQ ID NO: 241940 - DNA, 25 bp, Artificial
  Probe
ttcaatgcaggaccagaatctgtcc

SEQ ID NO: 241941 - DNA, 25 bp, Artificial
  Probe
tcctccttcaatgcaggaccagaat

SEQ ID NO: 241942 - DNA, 25 bp, Artificial
  Probe
gcccaaagcacctgctcacgttgtg

SEQ ID NO: 241943 - DNA, 25 bp, Artificial
  Probe
cttcaatgcaggaccagaatctgtc

SEQ ID NO: 241944 - DNA, 25 bp, Artificial
  Probe
aagtgtcggagcacatctcctggga

SEQ ID NO: 241945 - DNA, 25 bp, Artificial
  Probe
ccaaagcacctgctcacgttgtgtc

SEQ ID NO: 241946 - DNA, 25 bp, Artificial
  Probe
cagcggtctagttttgagtctttcc

SEQ ID NO: 241947 - DNA, 25 bp, Artificial
  Probe
agtgtcggagcacatctcctgggag

SEQ ID NO: 241948 - DNA, 25 bp, Artificial
  Probe
caatgcaggaccagaatctgtccat

SEQ ID NO: 241949 - DNA, 25 bp, Artificial
  Probe
gtcggagcacatctcctgggagtga

SEQ ID NO: 241950 - DNA, 25 bp, Artificial
  Probe
aatgcaggaccagaatctgtccatc

SEQ ID NO: 241951 - DNA, 25 bp, Artificial
  Probe
aacagcggtctagttttgagtcttt

SEQ ID NO: 241952 - DNA, 25 bp, Artificial
  Probe
tatcctccttcaatgcaggaccaga

SEQ ID NO: 241953 - DNA, 25 bp, Artificial
  Probe
ctttccccttggagccaagatggtt

SEQ ID NO: 241954 - DNA, 25 bp, Artificial
  Probe
ttctttccccttggagccaagatgg

SEQ ID NO: 241955 - DNA, 25 bp, Artificial
  Probe
ccccttggagccaagatggttgacc

SEQ ID NO: 241956 - DNA, 25 bp, Artificial
  Probe
actttgaattcacagtagacatagt

SEQ ID NO: 241957 - DNA, 25 bp, Artificial
  Probe
tttctttccccttggagccaagatg

SEQ ID NO: 241958 - DNA, 25 bp, Artificial
  Probe
ctgatactttgaattcacagtagac

SEQ ID NO: 241959 - DNA, 25 bp, Artificial
  Probe
gatttctgatactttgaattcacag

SEQ ID NO: 241960 - DNA, 25 bp, Artificial
  Probe
caaagcacctgctcacgttgtgtcc

SEQ ID NO: 241961 - DNA, 25 bp, Artificial
  Probe
cccttggagccaagatggttgacca

SEQ ID NO: 241962 - DNA, 25 bp, Artificial
  Probe
tactttgaattcacagtagacatag

SEQ ID NO: 241963 - DNA, 25 bp, Artificial
  Probe
cctccttcaatgcaggaccagaatc

SEQ ID NO: 241964 - DNA, 25 bp, Artificial
  Probe
ctccttcaatgcaggaccagaatct

SEQ ID NO: 241965 - DNA, 25 bp, Artificial
  Probe
tgtcggagcacatctcctgggagtg

SEQ ID NO: 241966 - DNA, 25 bp, Artificial
  Probe
ctatcctccttcaatgcaggaccag

SEQ ID NO: 241967 - DNA, 25 bp, Artificial
  Probe
aaagcacctgctcacgttgtgtcct

SEQ ID NO: 241968 - DNA, 25 bp, Artificial
  Probe
agctctggagcaagtcctaggcacc

SEQ ID NO: 241969 - DNA, 25 bp, Artificial
  Probe
agtcctaggcaccaaggacacacag

SEQ ID NO: 241970 - DNA, 25 bp, Artificial
  Probe
cgccacacagagctctggagcaagt

SEQ ID NO: 241971 - DNA, 25 bp, Artificial
  Probe
acttctgatccctagagcctctgtg

SEQ ID NO: 241972 - DNA, 25 bp, Artificial
  Probe
cctctgtgtgagagacagggatgac

SEQ ID NO: 241973 - DNA, 25 bp, Artificial
  Probe
ccctgcttctcttagagtgaggctg

SEQ ID NO: 241974 - DNA, 25 bp, Artificial
  Probe
caccaaggacacacaggagcatagc

SEQ ID NO: 241975 - DNA, 25 bp, Artificial
  Probe
cttctcttagagtgaggctgggaga

SEQ ID NO: 241976 - DNA, 25 bp, Artificial
  Probe
gacaaaaccctgcttctcttagagt

SEQ ID NO: 241977 - DNA, 25 bp, Artificial
  Probe
cacagagctctggagcaagtcctag

SEQ ID NO: 241978 - DNA, 25 bp, Artificial
  Probe
cagagctctggagcaagtcctaggc

SEQ ID NO: 241979 - DNA, 25 bp, Artificial
  Probe
ctgcttctcttagagtgaggctggg

SEQ ID NO: 241980 - DNA, 25 bp, Artificial
  Probe
aggacaaaaccctgcttctcttaga

SEQ ID NO: 241981 - DNA, 25 bp, Artificial
  Probe
ctctgtgtgagagacagggatgacc

SEQ ID NO: 241982 - DNA, 25 bp, Artificial
  Probe
cctagagcctctgtgtgagagacag

SEQ ID NO: 241983 - DNA, 25 bp, Artificial
  Probe
tccctagagcctctgtgtgagagac

SEQ ID NO: 241984 - DNA, 25 bp, Artificial
  Probe
ggagcaagtcctaggcaccaaggac

SEQ ID NO: 241985 - DNA, 25 bp, Artificial
  Probe
tctgatccctagagcctctgtgtga

SEQ ID NO: 241986 - DNA, 25 bp, Artificial
  Probe
accctgcttctcttagagtgaggct

SEQ ID NO: 241987 - DNA, 25 bp, Artificial
  Probe
aaaccctgcttctcttagagtgagg

SEQ ID NO: 241988 - DNA, 25 bp, Artificial
  Probe
agagcttgtttcaaatcctccttga

SEQ ID NO: 241989 - DNA, 25 bp, Artificial
  Probe
agagctctggagcaagtcctaggca

SEQ ID NO: 241990 - DNA, 25 bp, Artificial
  Probe
atgaccgccacacagagctctggag

SEQ ID NO: 241991 - DNA, 25 bp, Artificial
  Probe
aagtcctaggcaccaaggacacaca

SEQ ID NO: 241992 - DNA, 25 bp, Artificial
  Probe
gggatgaccgccacacagagctctg

SEQ ID NO: 241993 - DNA, 25 bp, Artificial
  Probe
tggagcaagtcctaggcaccaagga

SEQ ID NO: 241994 - DNA, 25 bp, Artificial
  Probe
ccgccacacagagctctggagcaag

SEQ ID NO: 241995 - DNA, 25 bp, Artificial
  Probe
ttgaccactgctgtccggcccttta

SEQ ID NO: 241996 - DNA, 25 bp, Artificial
  Probe
accgccacacagagctctggagcaa

SEQ ID NO: 241997 - DNA, 25 bp, Artificial
  Probe
gagcttgtttcaaatcctccttgac

SEQ ID NO: 241998 - DNA, 25 bp, Artificial
  Probe
ctagagcctctgtgtgagagacagg

SEQ ID NO: 241999 - DNA, 25 bp, Artificial
  Probe
aaccctgcttctcttagagtgaggc

SEQ ID NO: 242000 - DNA, 25 bp, Artificial
  Probe
gatgaccgccacacagagctctgga

SEQ ID NO: 242001 - DNA, 25 bp, Artificial
  Probe
tctggagcaagtcctaggcaccaag

SEQ ID NO: 242002 - DNA, 25 bp, Artificial
  Probe
atccctagagcctctgtgtgagaga

SEQ ID NO: 242003 - DNA, 25 bp, Artificial
  Probe
taggcaccaaggacacacaggagca

SEQ ID NO: 242004 - DNA, 25 bp, Artificial
  Probe
aggcaccaaggacacacaggagcat

SEQ ID NO: 242005 - DNA, 25 bp, Artificial
  Probe
tgcttctcttagagtgaggctggga

SEQ ID NO: 242006 - DNA, 25 bp, Artificial
  Probe
caagtcctaggcaccaaggacacac

SEQ ID NO: 242007 - DNA, 25 bp, Artificial
  Probe
ccctagagcctctgtgtgagagaca

SEQ ID NO: 242008 - DNA, 25 bp, Artificial
  Probe
acagagctctggagcaagtcctagg

SEQ ID NO: 242009 - DNA, 25 bp, Artificial
  Probe
ccacacagagctctggagcaagtcc

SEQ ID NO: 242010 - DNA, 25 bp, Artificial
  Probe
cctaggcaccaaggacacacaggag

SEQ ID NO: 242011 - DNA, 25 bp, Artificial
  Probe
gcaccaaggacacacaggagcatag

SEQ ID NO: 242012 - DNA, 25 bp, Artificial
  Probe
cacacagagctctggagcaagtcct

SEQ ID NO: 242013 - DNA, 25 bp, Artificial
  Probe
gctctggagcaagtcctaggcacca

SEQ ID NO: 242014 - DNA, 25 bp, Artificial
  Probe
tgctgatacggagctaatggtgcgc

SEQ ID NO: 242015 - DNA, 25 bp, Artificial
  Probe
ccattgctaaactctgctgatacgg

SEQ ID NO: 242016 - DNA, 25 bp, Artificial
  Probe
ctaaactctgctgatacggagctaa

SEQ ID NO: 242017 - DNA, 25 bp, Artificial
  Probe
ttcacacttggatttgtcctttgat

SEQ ID NO: 242018 - DNA, 25 bp, Artificial
  Probe
gctacctggctaatgcctctttctg

SEQ ID NO: 242019 - DNA, 25 bp, Artificial
  Probe
cacttggatttgtcctttgataaga

SEQ ID NO: 242020 - DNA, 25 bp, Artificial
  Probe
aaactctgctgatacggagctaatg

SEQ ID NO: 242021 - DNA, 25 bp, Artificial
  Probe
ctgatacggagctaatggtgcgcaa

SEQ ID NO: 242022 - DNA, 25 bp, Artificial
  Probe
ctgagaaaccataattcacacttgg

SEQ ID NO: 242023 - DNA, 25 bp, Artificial
  Probe
tgctacctggctaatgcctctttct

SEQ ID NO: 242024 - DNA, 25 bp, Artificial
  Probe
ctctgcattgttgtagttctgttaa

SEQ ID NO: 242025 - DNA, 25 bp, Artificial
  Probe
taatggtgcgcaacccgggcagtgt

SEQ ID NO: 242026 - DNA, 25 bp, Artificial
  Probe
tgcgttcttgctacctggctaatgc

SEQ ID NO: 242027 - DNA, 25 bp, Artificial
  Probe
cattgctaaactctgctgatacgga

SEQ ID NO: 242028 - DNA, 25 bp, Artificial
  Probe
ttcttgctacctggctaatgcctct

SEQ ID NO: 242029 - DNA, 25 bp, Artificial
  Probe
ttgctaaactctgctgatacggagc

SEQ ID NO: 242030 - DNA, 25 bp, Artificial
  Probe
tgctaaactctgctgatacggagct

SEQ ID NO: 242031 - DNA, 25 bp, Artificial
  Probe
aattcacacttggatttgtcctttg

SEQ ID NO: 242032 - DNA, 25 bp, Artificial
  Probe
tccattgctaaactctgctgatacg

SEQ ID NO: 242033 - DNA, 25 bp, Artificial
  Probe
acggagctaatggtgcgcaacccgg

SEQ ID NO: 242034 - DNA, 25 bp, Artificial
  Probe
taaactctgctgatacggagctaat

SEQ ID NO: 242035 - DNA, 25 bp, Artificial
  Probe
tggctaatgcctctttctgtcccct

SEQ ID NO: 242036 - DNA, 25 bp, Artificial
  Probe
aatgttctctgcattgttgtagttc

SEQ ID NO: 242037 - DNA, 25 bp, Artificial
  Probe
tgagaaaccataattcacacttgga

SEQ ID NO: 242038 - DNA, 25 bp, Artificial
  Probe
gttcttgctacctggctaatgcctc

SEQ ID NO: 242039 - DNA, 25 bp, Artificial
  Probe
tcacacttggatttgtcctttgata

SEQ ID NO: 242040 - DNA, 25 bp, Artificial
  Probe
gatccattgctaaactctgctgata

SEQ ID NO: 242041 - DNA, 25 bp, Artificial
  Probe
tgatacggagctaatggtgcgcaac

SEQ ID NO: 242042 - DNA, 25 bp, Artificial
  Probe
aactctgctgatacggagctaatgg

SEQ ID NO: 242043 - DNA, 25 bp, Artificial
  Probe
gagaaaccataattcacacttggat

SEQ ID NO: 242044 - DNA, 25 bp, Artificial
  Probe
atacggagctaatggtgcgcaaccc

SEQ ID NO: 242045 - DNA, 25 bp, Artificial
  Probe
gcgttcttgctacctggctaatgcc

SEQ ID NO: 242046 - DNA, 25 bp, Artificial
  Probe
ctgctgatacggagctaatggtgcg

SEQ ID NO: 242047 - DNA, 25 bp, Artificial
  Probe
attcacacttggatttgtcctttga

SEQ ID NO: 242048 - DNA, 25 bp, Artificial
  Probe
cacacttggatttgtcctttgataa

SEQ ID NO: 242049 - DNA, 25 bp, Artificial
  Probe
acacttggatttgtcctttgataag

SEQ ID NO: 242050 - DNA, 25 bp, Artificial
  Probe
gtgcgttcttgctacctggctaatg

SEQ ID NO: 242051 - DNA, 25 bp, Artificial
  Probe
attgctaaactctgctgatacggag

SEQ ID NO: 242052 - DNA, 25 bp, Artificial
  Probe
gatacggagctaatggtgcgcaacc

SEQ ID NO: 242053 - DNA, 25 bp, Artificial
  Probe
ctaatggtgcgcaacccgggcagtg

SEQ ID NO: 242054 - DNA, 25 bp, Artificial
  Probe
ttgctacctggctaatgcctctttc

SEQ ID NO: 242055 - DNA, 25 bp, Artificial
  Probe
cgttcttgctacctggctaatgcct

SEQ ID NO: 242056 - DNA, 25 bp, Artificial
  Probe
ggctaatgcctctttctgtcccctt

SEQ ID NO: 242057 - DNA, 25 bp, Artificial
  Probe
tacggagctaatggtgcgcaacccg

SEQ ID NO: 242058 - DNA, 25 bp, Artificial
  Probe
gctaaactctgctgatacggagcta

SEQ ID NO: 242059 - DNA, 25 bp, Artificial
  Probe
ctacctggctaatgcctctttctgt

SEQ ID NO: 242060 - DNA, 25 bp, Artificial
  Probe
ccactacaggaagtaggaggaccag

SEQ ID NO: 242061 - DNA, 25 bp, Artificial
  Probe
ttcgggctcatggaaaaggactctt

SEQ ID NO: 242062 - DNA, 25 bp, Artificial
  Probe
aggtcaaatcgcagtccaagatggc

SEQ ID NO: 242063 - DNA, 25 bp, Artificial
  Probe
aggcctgggctcagggtccaacctg

SEQ ID NO: 242064 - DNA, 25 bp, Artificial
  Probe
caagttcctttgagaactggctggg

SEQ ID NO: 242065 - DNA, 25 bp, Artificial
  Probe
aggaccagccgcatcgggtccttaa

SEQ ID NO: 242066 - DNA, 25 bp, Artificial
  Probe
gagcatcacccgaggctgctttgac

SEQ ID NO: 242067 - DNA, 25 bp, Artificial
  Probe
caggcctgggctcagggtccaacct

SEQ ID NO: 242068 - DNA, 25 bp, Artificial
  Probe
gatgctgcagaaatctggcacccac

SEQ ID NO: 242069 - DNA, 25 bp, Artificial
  Probe
tcattaaccagaagaagatgagtcc

SEQ ID NO: 242070 - DNA, 25 bp, Artificial
  Probe
ccaggcttgcaaggaggtaaacctg

SEQ ID NO: 242071 - DNA, 25 bp, Artificial
  Probe
tcccaggaaccagtggcggcagctg

SEQ ID NO: 242072 - DNA, 25 bp, Artificial
  Probe
ttacaagtgcaatgtcttacccaag

SEQ ID NO: 242073 - DNA, 25 bp, Artificial
  Probe
ggcagctgggccttctagactgaca

SEQ ID NO: 242074 - DNA, 25 bp, Artificial
  Probe
cctgctttggagataatggagtctt

SEQ ID NO: 242075 - DNA, 25 bp, Artificial
  Probe
agtatccagctcagcgttcacacca

SEQ ID NO: 242076 - DNA, 25 bp, Artificial
  Probe
ggtgcccaagagatctgggaaagca

SEQ ID NO: 242077 - DNA, 25 bp, Artificial
  Probe
atggacatttgaattcgaggcctgg

SEQ ID NO: 242078 - DNA, 25 bp, Artificial
  Probe
ctacctggacctcattaaccagaag

SEQ ID NO: 242079 - DNA, 25 bp, Artificial
  Probe
aaggccttgtgaaggccacctggag

SEQ ID NO: 242080 - DNA, 25 bp, Artificial
  Probe
ataatggagtctttacgctgaccaa

SEQ ID NO: 242081 - DNA, 25 bp, Artificial
  Probe
aagtaagcccccagaggctgtgtct

SEQ ID NO: 242082 - DNA, 25 bp, Artificial
  Probe
cctgggccgagagagacccaggcca

SEQ ID NO: 242083 - DNA, 25 bp, Artificial
  Probe
tgtcagttttcttaacttacaagtg

SEQ ID NO: 242084 - DNA, 25 bp, Artificial
  Probe
ccagtggcggcagctgggccttcta

SEQ ID NO: 242085 - DNA, 25 bp, Artificial
  Probe
ctccggccacacagaaacaagtgct

SEQ ID NO: 242086 - DNA, 25 bp, Artificial
  Probe
gcccaagagatctgggaaagcatag

SEQ ID NO: 242087 - DNA, 25 bp, Artificial
  Probe
ggaggtaaacctggactcgtacaca

SEQ ID NO: 242088 - DNA, 25 bp, Artificial
  Probe
cttggcacatgaacggtaataggag

SEQ ID NO: 242089 - DNA, 25 bp, Artificial
  Probe
tctagactgacatgaccttggaggg

SEQ ID NO: 242090 - DNA, 25 bp, Artificial
  Probe
gcatcgggtccttaacgtcctggta

SEQ ID NO: 242091 - DNA, 25 bp, Artificial
  Probe
gtatcttcgggctcatggaaaagga

SEQ ID NO: 242092 - DNA, 25 bp, Artificial
  Probe
gatcgggagctgtggctccctgctt

SEQ ID NO: 242093 - DNA, 25 bp, Artificial
  Probe
aacagtagttggatgcttggcacat

SEQ ID NO: 242094 - DNA, 25 bp, Artificial
  Probe
cctggacctcattaaccagaagaag

SEQ ID NO: 242095 - DNA, 25 bp, Artificial
  Probe
catttgaattcgaggcctgggccga

SEQ ID NO: 242096 - DNA, 25 bp, Artificial
  Probe
tccggacagacagatggacatttga

SEQ ID NO: 242097 - DNA, 25 bp, Artificial
  Probe
ctcagcgttcacaccaagcggagcg

SEQ ID NO: 242098 - DNA, 25 bp, Artificial
  Probe
gctgtggctccctgctttggagata

SEQ ID NO: 242099 - DNA, 25 bp, Artificial
  Probe
cacaaaaacgtatcttcgggctcat

SEQ ID NO: 242100 - DNA, 25 bp, Artificial
  Probe
cactctagggaccaccagtatccag

SEQ ID NO: 242101 - DNA, 25 bp, Artificial
  Probe
atttcaagaaggtcaaatcgcagtc

SEQ ID NO: 242102 - DNA, 25 bp, Artificial
  Probe
tgaaggccacctggaggtgtgatca

SEQ ID NO: 242103 - DNA, 25 bp, Artificial
  Probe
agccagatcgggagctgtggctccc

SEQ ID NO: 242104 - DNA, 25 bp, Artificial
  Probe
gttttcttaacttacaagtgcaatg

SEQ ID NO: 242105 - DNA, 25 bp, Artificial
  Probe
cgagagagacccaggccactacagg

SEQ ID NO: 242106 - DNA, 25 bp, Artificial
  Probe
cgcacacttgtgtttattgaatgag

SEQ ID NO: 242107 - DNA, 25 bp, Artificial
  Probe
aagcatttcatacatgtcggaacac

SEQ ID NO: 242108 - DNA, 25 bp, Artificial
  Probe
gcatatctcagtgtttgcctgtcag

SEQ ID NO: 242109 - DNA, 25 bp, Artificial
  Probe
ttgcctgtcaggttctgaagcattt

SEQ ID NO: 242110 - DNA, 25 bp, Artificial
  Probe
tgtcaggttctgaagcatttcatac

SEQ ID NO: 242111 - DNA, 25 bp, Artificial
  Probe
acagtgagtgtggtgtgaagtccct

SEQ ID NO: 242112 - DNA, 25 bp, Artificial
  Probe
cacacttgtgtttattgaatgagca

SEQ ID NO: 242113 - DNA, 25 bp, Artificial
  Probe
gtccctattttatggagatctctct

SEQ ID NO: 242114 - DNA, 25 bp, Artificial
  Probe
gcatttcatacatgtcggaacacgc

SEQ ID NO: 242115 - DNA, 25 bp, Artificial
  Probe
agcgcacacttgtgtttattgaatg

SEQ ID NO: 242116 - DNA, 25 bp, Artificial
  Probe
ataagcgcacacttgtgtttattga

SEQ ID NO: 242117 - DNA, 25 bp, Artificial
  Probe
cggaacacgcagcaggattcaagga

SEQ ID NO: 242118 - DNA, 25 bp, Artificial
  Probe
acatgtcggaacacgcagcaggatt

SEQ ID NO: 242119 - DNA, 25 bp, Artificial
  Probe
tgaagtccctattttatggagatct

SEQ ID NO: 242120 - DNA, 25 bp, Artificial
  Probe
cagtgtttgcctgtcaggttctgaa

SEQ ID NO: 242121 - DNA, 25 bp, Artificial
  Probe
acacgcagcaggattcaaggaacag

SEQ ID NO: 242122 - DNA, 25 bp, Artificial
  Probe
acgcagcaggattcaaggaacagtg

SEQ ID NO: 242123 - DNA, 25 bp, Artificial
  Probe
tcaggttctgaagcatttcatacat

SEQ ID NO: 242124 - DNA, 25 bp, Artificial
  Probe
cctgtcaggttctgaagcatttcat

SEQ ID NO: 242125 - DNA, 25 bp, Artificial
  Probe
tctgaagcatttcatacatgtcgga

SEQ ID NO: 242126 - DNA, 25 bp, Artificial
  Probe
ctgtcaggttctgaagcatttcata

SEQ ID NO: 242127 - DNA, 25 bp, Artificial
  Probe
gaacacgcagcaggattcaaggaac

SEQ ID NO: 242128 - DNA, 25 bp, Artificial
  Probe
tcggaacacgcagcaggattcaagg

SEQ ID NO: 242129 - DNA, 25 bp, Artificial
  Probe
gttctgaagcatttcatacatgtcg

SEQ ID NO: 242130 - DNA, 25 bp, Artificial
  Probe
tcagtgtttgcctgtcaggttctga

SEQ ID NO: 242131 - DNA, 25 bp, Artificial
  Probe
tgaatgagcatatctcagtgtttgc

SEQ ID NO: 242132 - DNA, 25 bp, Artificial
  Probe
aacagtgagtgtggtgtgaagtccc

SEQ ID NO: 242133 - DNA, 25 bp, Artificial
  Probe
atttcatacatgtcggaacacgcag

SEQ ID NO: 242134 - DNA, 25 bp, Artificial
  Probe
agtccctattttatggagatctctc

SEQ ID NO: 242135 - DNA, 25 bp, Artificial
  Probe
catatctcagtgtttgcctgtcagg

SEQ ID NO: 242136 - DNA, 25 bp, Artificial
  Probe
tgtttgcctgtcaggttctgaagca

SEQ ID NO: 242137 - DNA, 25 bp, Artificial
  Probe
tataagcgcacacttgtgtttattg

SEQ ID NO: 242138 - DNA, 25 bp, Artificial
  Probe
aatgagcatatctcagtgtttgcct

SEQ ID NO: 242139 - DNA, 25 bp, Artificial
  Probe
atacatgtcggaacacgcagcagga

SEQ ID NO: 242140 - DNA, 25 bp, Artificial
  Probe
tgaagcatttcatacatgtcggaac

SEQ ID NO: 242141 - DNA, 25 bp, Artificial
  Probe
gtgaagtccctattttatggagatc

SEQ ID NO: 242142 - DNA, 25 bp, Artificial
  Probe
ttttataagcgcacacttgtgttta

SEQ ID NO: 242143 - DNA, 25 bp, Artificial
  Probe
atgagcatatctcagtgtttgcctg

SEQ ID NO: 242144 - DNA, 25 bp, Artificial
  Probe
gtcggaacacgcagcaggattcaag

SEQ ID NO: 242145 - DNA, 25 bp, Artificial
  Probe
aggttctgaagcatttcatacatgt

SEQ ID NO: 242146 - DNA, 25 bp, Artificial
  Probe
catacatgtcggaacacgcagcagg

SEQ ID NO: 242147 - DNA, 25 bp, Artificial
  Probe
gcacacttgtgtttattgaatgagc

SEQ ID NO: 242148 - DNA, 25 bp, Artificial
  Probe
gagcatatctcagtgtttgcctgtc

SEQ ID NO: 242149 - DNA, 25 bp, Artificial
  Probe
tatctcagtgtttgcctgtcaggtt

SEQ ID NO: 242150 - DNA, 25 bp, Artificial
  Probe
ttataagcgcacacttgtgtttatt

SEQ ID NO: 242151 - DNA, 25 bp, Artificial
  Probe
ggttctgaagcatttcatacatgtc

SEQ ID NO: 242152 - DNA, 25 bp, Artificial
  Probe
tacgccaagtgtatcccttgtataa

SEQ ID NO: 242153 - DNA, 25 bp, Artificial
  Probe
gaaagatcctagtgcgctgaaggaa

SEQ ID NO: 242154 - DNA, 25 bp, Artificial
  Probe
gcacacacaaaggaacctatgccga

SEQ ID NO: 242155 - DNA, 25 bp, Artificial
  Probe
cgatttgaccgattgccatgcacac

SEQ ID NO: 242156 - DNA, 25 bp, Artificial
  Probe
cctagtgcgctgaaggaaagagaag

SEQ ID NO: 242157 - DNA, 25 bp, Artificial
  Probe
ccgatttgaccgattgccatgcaca

SEQ ID NO: 242158 - DNA, 25 bp, Artificial
  Probe
cggatgccagatgattatggagccc

SEQ ID NO: 242159 - DNA, 25 bp, Artificial
  Probe
taaccacagatacaacatcgagcgg

SEQ ID NO: 242160 - DNA, 25 bp, Artificial
  Probe
tgaccgattgccatgcacacacaaa

SEQ ID NO: 242161 - DNA, 25 bp, Artificial
  Probe
tgaccgtgacctcaaacgaagaatc

SEQ ID NO: 242162 - DNA, 25 bp, Artificial
  Probe
agtgttacattgtggccacagttga

SEQ ID NO: 242163 - DNA, 25 bp, Artificial
  Probe
atccccgatttgaccgattgccatg

SEQ ID NO: 242164 - DNA, 25 bp, Artificial
  Probe
gatgccagatgattatggagcccct

SEQ ID NO: 242165 - DNA, 25 bp, Artificial
  Probe
acttagtgcagtcaatgatggactg

SEQ ID NO: 242166 - DNA, 25 bp, Artificial
  Probe
acgccaagtgtatcccttgtataac

SEQ ID NO: 242167 - DNA, 25 bp, Artificial
  Probe
cgagcggatgccagatgattatgga

SEQ ID NO: 242168 - DNA, 25 bp, Artificial
  Probe
tccattaaagccaaactggacttag

SEQ ID NO: 242169 - DNA, 25 bp, Artificial
  Probe
tacattgtggccacagttgaccgtg

SEQ ID NO: 242170 - DNA, 25 bp, Artificial
  Probe
acacacaaaggaacctatgccgatg

SEQ ID NO: 242171 - DNA, 25 bp, Artificial
  Probe
tggccacagttgaccgtgacctcaa

SEQ ID NO: 242172 - DNA, 25 bp, Artificial
  Probe
tgggtccaccttaccacatcctggt

SEQ ID NO: 242173 - DNA, 25 bp, Artificial
  Probe
tatcccttgtataaccgattgtgta

SEQ ID NO: 242174 - DNA, 25 bp, Artificial
  Probe
caaactggacttagtgcagtcaatg

SEQ ID NO: 242175 - DNA, 25 bp, Artificial
  Probe
ttagtgcagtcaatgatggactgtc

SEQ ID NO: 242176 - DNA, 25 bp, Artificial
  Probe
ctaaccacagatacaacatcgagcg

SEQ ID NO: 242177 - DNA, 25 bp, Artificial
  Probe
caagtgtatcccttgtataaccgat

SEQ ID NO: 242178 - DNA, 25 bp, Artificial
  Probe
attaaagccaaactggacttagtgc

SEQ ID NO: 242179 - DNA, 25 bp, Artificial
  Probe
tcaaacgaagaatccggaagatccc

SEQ ID NO: 242180 - DNA, 25 bp, Artificial
  Probe
ccattaaagccaaactggacttagt

SEQ ID NO: 242181 - DNA, 25 bp, Artificial
  Probe
aagatccccgatttgaccgattgcc

SEQ ID NO: 242182 - DNA, 25 bp, Artificial
  Probe
atcctagtgcgctgaaggaaagaga

SEQ ID NO: 242183 - DNA, 25 bp, Artificial
  Probe
acagatacaacatcgagcggatgcc

SEQ ID NO: 242184 - DNA, 25 bp, Artificial
  Probe
gatttgaccgattgccatgcacaca

SEQ ID NO: 242185 - DNA, 25 bp, Artificial
  Probe
caaagatccccgatttgaccgattg

SEQ ID NO: 242186 - DNA, 25 bp, Artificial
  Probe
cacaaaggaacctatgccgatgact

SEQ ID NO: 242187 - DNA, 25 bp, Artificial
  Probe
gatacaacatcgagcggatgccaga

SEQ ID NO: 242188 - DNA, 25 bp, Artificial
  Probe
cacagttgaccgtgacctcaaacga

SEQ ID NO: 242189 - DNA, 25 bp, Artificial
  Probe
tgcctgctgttcttggaccagcttt

SEQ ID NO: 242190 - DNA, 25 bp, Artificial
  Probe
ccacagatacaacatcgagcggatg

SEQ ID NO: 242191 - DNA, 25 bp, Artificial
  Probe
ttgtggccacagttgaccgtgacct

SEQ ID NO: 242192 - DNA, 25 bp, Artificial
  Probe
cacaagtgttacattgtggccacag

SEQ ID NO: 242193 - DNA, 25 bp, Artificial
  Probe
ctggacttagtgcagtcaatgatgg

SEQ ID NO: 242194 - DNA, 25 bp, Artificial
  Probe
caaaggaacctatgccgatgactgc

SEQ ID NO: 242195 - DNA, 25 bp, Artificial
  Probe
gtgtatcccttgtataaccgattgt

SEQ ID NO: 242196 - DNA, 25 bp, Artificial
  Probe
acatcgagcggatgccagatgatta

SEQ ID NO: 242197 - DNA, 25 bp, Artificial
  Probe
ggacttagtgcagtcaatgatggac

SEQ ID NO: 242198 - DNA, 25 bp, Artificial
  Probe
tatcatttacacagcgggactttta

SEQ ID NO: 242199 - DNA, 25 bp, Artificial
  Probe
gctcacttcgaagcacatgcaactc

SEQ ID NO: 242200 - DNA, 25 bp, Artificial
  Probe
tttaatatcatttacacagcgggac

SEQ ID NO: 242201 - DNA, 25 bp, Artificial
  Probe
ggggcttctctctgcggtgttacgt

SEQ ID NO: 242202 - DNA, 25 bp, Artificial
  Probe
acaggtacacatcacactacagttg

SEQ ID NO: 242203 - DNA, 25 bp, Artificial
  Probe
tgtggggcttctctctgcggtgtta

SEQ ID NO: 242204 - DNA, 25 bp, Artificial
  Probe
gttaccacgttgtatagcatagtac

SEQ ID NO: 242205 - DNA, 25 bp, Artificial
  Probe
tgaagactttgcaattgcatggact

SEQ ID NO: 242206 - DNA, 25 bp, Artificial
  Probe
tagcttcctgtattaacagcggtac

SEQ ID NO: 242207 - DNA, 25 bp, Artificial
  Probe
cttactgcttctaatttactgtgtg

SEQ ID NO: 242208 - DNA, 25 bp, Artificial
  Probe
acccgagttaccacgttgtatagca

SEQ ID NO: 242209 - DNA, 25 bp, Artificial
  Probe
gtacacatcacactacagttgagtt

SEQ ID NO: 242210 - DNA, 25 bp, Artificial
  Probe
ctttgcaattgcatggacttagatt

SEQ ID NO: 242211 - DNA, 25 bp, Artificial
  Probe
agatagcacccgagttaccacgttg

SEQ ID NO: 242212 - DNA, 25 bp, Artificial
  Probe
tcacactacagttgagttcataagc

SEQ ID NO: 242213 - DNA, 25 bp, Artificial
  Probe
accacgttgtatagcatagtacctt

SEQ ID NO: 242214 - DNA, 25 bp, Artificial
  Probe
gaagcacatgcaactctctgggttt

SEQ ID NO: 242215 - DNA, 25 bp, Artificial
  Probe
tcaaaattctttcctgggactatag

SEQ ID NO: 242216 - DNA, 25 bp, Artificial
  Probe
ctctgggtttaatcctccacacggg

SEQ ID NO: 242217 - DNA, 25 bp, Artificial
  Probe
ctctctgggtttaatcctccacacg

SEQ ID NO: 242218 - DNA, 25 bp, Artificial
  Probe
aagacagatagcacccgagttacca

SEQ ID NO: 242219 - DNA, 25 bp, Artificial
  Probe
acagtagcttcctgtattaacagcg

SEQ ID NO: 242220 - DNA, 25 bp, Artificial
  Probe
ccacgttgtatagcatagtaccttt

SEQ ID NO: 242221 - DNA, 25 bp, Artificial
  Probe
agctcacttcgaagcacatgcaact

SEQ ID NO: 242222 - DNA, 25 bp, Artificial
  Probe
tgggactatagctcacttcgaagca

SEQ ID NO: 242223 - DNA, 25 bp, Artificial
  Probe
acttcgaagcacatgcaactctctg

SEQ ID NO: 242224 - DNA, 25 bp, Artificial
  Probe
tctctgcggtgttacgttagggcag

SEQ ID NO: 242225 - DNA, 25 bp, Artificial
  Probe
ttctctctgcggtgttacgttaggg

SEQ ID NO: 242226 - DNA, 25 bp, Artificial
  Probe
ttgagttcataagctactgaagact

SEQ ID NO: 242227 - DNA, 25 bp, Artificial
  Probe
caggtacacatcacactacagttga

SEQ ID NO: 242228 - DNA, 25 bp, Artificial
  Probe
ttcgaagcacatgcaactctctggg

SEQ ID NO: 242229 - DNA, 25 bp, Artificial
  Probe
aacagtagcttcctgtattaacagc

SEQ ID NO: 242230 - DNA, 25 bp, Artificial
  Probe
tgggtttaatcctccacacggggag

SEQ ID NO: 242231 - DNA, 25 bp, Artificial
  Probe
ttcataagctactgaagactttgca

SEQ ID NO: 242232 - DNA, 25 bp, Artificial
  Probe
tggggcttctctctgcggtgttacg

SEQ ID NO: 242233 - DNA, 25 bp, Artificial
  Probe
gagttcataagctactgaagacttt

SEQ ID NO: 242234 - DNA, 25 bp, Artificial
  Probe
actttgcaattgcatggacttagat

SEQ ID NO: 242235 - DNA, 25 bp, Artificial
  Probe
ttctttcctgggactatagctcact

SEQ ID NO: 242236 - DNA, 25 bp, Artificial
  Probe
cctgggactatagctcacttcgaag

SEQ ID NO: 242237 - DNA, 25 bp, Artificial
  Probe
tctgggtttaatcctccacacgggg

SEQ ID NO: 242238 - DNA, 25 bp, Artificial
  Probe
ggaaaaacagtagcttcctgtatta

SEQ ID NO: 242239 - DNA, 25 bp, Artificial
  Probe
tttcctgggactatagctcacttcg

SEQ ID NO: 242240 - DNA, 25 bp, Artificial
  Probe
tactgcttctaatttactgtgtggg

SEQ ID NO: 242241 - DNA, 25 bp, Artificial
  Probe
atcacactacagttgagttcataag

SEQ ID NO: 242242 - DNA, 25 bp, Artificial
  Probe
catgcaactctctgggtttaatcct

SEQ ID NO: 242243 - DNA, 25 bp, Artificial
  Probe
actacagttgagttcataagctact

SEQ ID NO: 242244 - DNA, 25 bp, Artificial
  Probe
cttaagagtctaagctgtcattgac

SEQ ID NO: 242245 - DNA, 25 bp, Artificial
  Probe
ctctgtcgtgcttcggacgtttgtc

SEQ ID NO: 242246 - DNA, 25 bp, Artificial
  Probe
attctgtgcctctgaggatagtgtg

SEQ ID NO: 242247 - DNA, 25 bp, Artificial
  Probe
tcggacgtttgtctgacgctttgta

SEQ ID NO: 242248 - DNA, 25 bp, Artificial
  Probe
ttctctagagagctcatctgtgacg

SEQ ID NO: 242249 - DNA, 25 bp, Artificial
  Probe
agctgtcattgaccttctctagaga

SEQ ID NO: 242250 - DNA, 25 bp, Artificial
  Probe
gacgagtcaaactgctattctgtgc

SEQ ID NO: 242251 - DNA, 25 bp, Artificial
  Probe
gagtacttaacaacttaagagtcta

SEQ ID NO: 242252 - DNA, 25 bp, Artificial
  Probe
aagctgtcattgaccttctctagag

SEQ ID NO: 242253 - DNA, 25 bp, Artificial
  Probe
ctaagctgtcattgaccttctctag

SEQ ID NO: 242254 - DNA, 25 bp, Artificial
  Probe
gacgtttgtctgacgctttgtaagc

SEQ ID NO: 242255 - DNA, 25 bp, Artificial
  Probe
ttgtctgacgctttgtaagctgagc

SEQ ID NO: 242256 - DNA, 25 bp, Artificial
  Probe
aacttaagagtctaagctgtcattg

SEQ ID NO: 242257 - DNA, 25 bp, Artificial
  Probe
taagagtctaagctgtcattgacct

SEQ ID NO: 242258 - DNA, 25 bp, Artificial
  Probe
acaacttaagagtctaagctgtcat

SEQ ID NO: 242259 - DNA, 25 bp, Artificial
  Probe
ctttgtaagctgagcctgcaagttt

SEQ ID NO: 242260 - DNA, 25 bp, Artificial
  Probe
actctttctggctctgtcgtgcttc

SEQ ID NO: 242261 - DNA, 25 bp, Artificial
  Probe
gaccttctctagagagctcatctgt

SEQ ID NO: 242262 - DNA, 25 bp, Artificial
  Probe
agagagctcatctgtgacgagtcaa

SEQ ID NO: 242263 - DNA, 25 bp, Artificial
  Probe
gctttactctttctggctctgtcgt

SEQ ID NO: 242264 - DNA, 25 bp, Artificial
  Probe
actgctattctgtgcctctgaggat

SEQ ID NO: 242265 - DNA, 25 bp, Artificial
  Probe
tcgtgcttcggacgtttgtctgacg

SEQ ID NO: 242266 - DNA, 25 bp, Artificial
  Probe
cttcggacgtttgtctgacgctttg

SEQ ID NO: 242267 - DNA, 25 bp, Artificial
  Probe
tctagagagctcatctgtgacgagt

SEQ ID NO: 242268 - DNA, 25 bp, Artificial
  Probe
tttgtctgacgctttgtaagctgag

SEQ ID NO: 242269 - DNA, 25 bp, Artificial
  Probe
catctgtgacgagtcaaactgctat

SEQ ID NO: 242270 - DNA, 25 bp, Artificial
  Probe
cttaacaacttaagagtctaagctg

SEQ ID NO: 242271 - DNA, 25 bp, Artificial
  Probe
ctgctttactctttctggctctgtc

SEQ ID NO: 242272 - DNA, 25 bp, Artificial
  Probe
ctattctgtgcctctgaggatagtg

SEQ ID NO: 242273 - DNA, 25 bp, Artificial
  Probe
tggctctgtcgtgcttcggacgttt

SEQ ID NO: 242274 - DNA, 25 bp, Artificial
  Probe
ctttactctttctggctctgtcgtg

SEQ ID NO: 242275 - DNA, 25 bp, Artificial
  Probe
ttctggctctgtcgtgcttcggacg

SEQ ID NO: 242276 - DNA, 25 bp, Artificial
  Probe
agagtctaagctgtcattgaccttc

SEQ ID NO: 242277 - DNA, 25 bp, Artificial
  Probe
caaactgctattctgtgcctctgag

SEQ ID NO: 242278 - DNA, 25 bp, Artificial
  Probe
gtacttaacaacttaagagtctaag

SEQ ID NO: 242279 - DNA, 25 bp, Artificial
  Probe
ctgtcattgaccttctctagagagc

SEQ ID NO: 242280 - DNA, 25 bp, Artificial
  Probe
tctgtgacgagtcaaactgctattc

SEQ ID NO: 242281 - DNA, 25 bp, Artificial
  Probe
gagtctaagctgtcattgaccttct

SEQ ID NO: 242282 - DNA, 25 bp, Artificial
  Probe
gtctaagctgtcattgaccttctct

SEQ ID NO: 242283 - DNA, 25 bp, Artificial
  Probe
gtcgtgcttcggacgtttgtctgac

SEQ ID NO: 242284 - DNA, 25 bp, Artificial
  Probe
acgctttgtaagctgagcctgcaag

SEQ ID NO: 242285 - DNA, 25 bp, Artificial
  Probe
taacaacttaagagtctaagctgtc

SEQ ID NO: 242286 - DNA, 25 bp, Artificial
  Probe
cttctctagagagctcatctgtgac

SEQ ID NO: 242287 - DNA, 25 bp, Artificial
  Probe
ccttctctagagagctcatctgtga

SEQ ID NO: 242288 - DNA, 25 bp, Artificial
  Probe
tattctgtgcctctgaggatagtgt

SEQ ID NO: 242289 - DNA, 25 bp, Artificial
  Probe
gtgacgagtcaaactgctattctgt

SEQ ID NO: 242290 - DNA, 25 bp, Artificial
  Probe
gcctgctcctgggatggctgcaact

SEQ ID NO: 242291 - DNA, 25 bp, Artificial
  Probe
gccttatgcctgctcctgggatggc

SEQ ID NO: 242292 - DNA, 25 bp, Artificial
  Probe
ctacaccaagagctcgcacctgaag

SEQ ID NO: 242293 - DNA, 25 bp, Artificial
  Probe
tatgcctgctcctgggatggctgca

SEQ ID NO: 242294 - DNA, 25 bp, Artificial
  Probe
gcgcacctgcgcacgcacaccggag

SEQ ID NO: 242295 - DNA, 25 bp, Artificial
  Probe
accaagagctcgcacctgaaggcgc

SEQ ID NO: 242296 - DNA, 25 bp, Artificial
  Probe
gaagagctacaccaagagctcgcac

SEQ ID NO: 242297 - DNA, 25 bp, Artificial
  Probe
cctgctcctgggatggctgcaactg

SEQ ID NO: 242298 - DNA, 25 bp, Artificial
  Probe
gagctacaccaagagctcgcacctg

SEQ ID NO: 242299 - DNA, 25 bp, Artificial
  Probe
agctacaccaagagctcgcacctga

SEQ ID NO: 242300 - DNA, 25 bp, Artificial
  Probe
ccttatgcctgctcctgggatggct

SEQ ID NO: 242301 - DNA, 25 bp, Artificial
  Probe
gctacaccaagagctcgcacctgaa

SEQ ID NO: 242302 - DNA, 25 bp, Artificial
  Probe
atggctgcaactggaggttcgctcg

SEQ ID NO: 242303 - DNA, 25 bp, Artificial
  Probe
ttatgcctgctcctgggatggctgc

SEQ ID NO: 242304 - DNA, 25 bp, Artificial
  Probe
ccaagagctcgcacctgaaggcgca

SEQ ID NO: 242305 - DNA, 25 bp, Artificial
  Probe
gatggctgcaactggaggttcgctc

SEQ ID NO: 242306 - DNA, 25 bp, Artificial
  Probe
tgcctgctcctgggatggctgcaac

SEQ ID NO: 242307 - DNA, 25 bp, Artificial
  Probe
agaagccttatgcctgctcctggga

SEQ ID NO: 242308 - DNA, 25 bp, Artificial
  Probe
gaagccttatgcctgctcctgggat

SEQ ID NO: 242309 - DNA, 25 bp, Artificial
  Probe
aagagctacaccaagagctcgcacc

SEQ ID NO: 242310 - DNA, 25 bp, Artificial
  Probe
aagccttatgcctgctcctgggatg

SEQ ID NO: 242311 - DNA, 25 bp, Artificial
  Probe
atgcctgctcctgggatggctgcaa

SEQ ID NO: 242312 - DNA, 25 bp, Artificial
  Probe
agccttatgcctgctcctgggatgg

SEQ ID NO: 242313 - DNA, 25 bp, Artificial
  Probe
ggatggctgcaactggaggttcgct

SEQ ID NO: 242314 - DNA, 25 bp, Artificial
  Probe
ctgctcctgggatggctgcaactgg

SEQ ID NO: 242315 - DNA, 25 bp, Artificial
  Probe
tggctgcaactggaggttcgctcgc

SEQ ID NO: 242316 - DNA, 25 bp, Artificial
  Probe
agagctacaccaagagctcgcacct

SEQ ID NO: 242317 - DNA, 25 bp, Artificial
  Probe
caccaagagctcgcacctgaaggcg

SEQ ID NO: 242318 - DNA, 25 bp, Artificial
  Probe
cttatgcctgctcctgggatggctg

SEQ ID NO: 242319 - DNA, 25 bp, Artificial
  Probe
gttagtagactgtgtatcggcagca

SEQ ID NO: 242320 - DNA, 25 bp, Artificial
  Probe
tcctgtcttgcacttacaaataagg

SEQ ID NO: 242321 - DNA, 25 bp, Artificial
  Probe
acacacgtacccagccgagtgattt

SEQ ID NO: 242322 - DNA, 25 bp, Artificial
  Probe
gctacattacaaggagcatagaaat

SEQ ID NO: 242323 - DNA, 25 bp, Artificial
  Probe
agaattgcatgtgcagggtccatcc

SEQ ID NO: 242324 - DNA, 25 bp, Artificial
  Probe
ttacagaattgcatgtgcagggtcc

SEQ ID NO: 242325 - DNA, 25 bp, Artificial
  Probe
acttcgctacattacaaggagcata

SEQ ID NO: 242326 - DNA, 25 bp, Artificial
  Probe
tacaaacggcttacagaattgcatg

SEQ ID NO: 242327 - DNA, 25 bp, Artificial
  Probe
aaaggactgaactgccttgattgac

SEQ ID NO: 242328 - DNA, 25 bp, Artificial
  Probe
atgtgcagggtccatccacaccaca

SEQ ID NO: 242329 - DNA, 25 bp, Artificial
  Probe
gtagactgtgtatcggcagcacagg

SEQ ID NO: 242330 - DNA, 25 bp, Artificial
  Probe
gcagagcattttgcacactgtttgt

SEQ ID NO: 242331 - DNA, 25 bp, Artificial
  Probe
tacccagccgagtgattttagagta

SEQ ID NO: 242332 - DNA, 25 bp, Artificial
  Probe
aactgccttgattgacatggggaag

SEQ ID NO: 242333 - DNA, 25 bp, Artificial
  Probe
cttgcacttacaaataaggtctatg

SEQ ID NO: 242334 - DNA, 25 bp, Artificial
  Probe
cacttacaaataaggtctatgggag

SEQ ID NO: 242335 - DNA, 25 bp, Artificial
  Probe
aattgcatgtgcagggtccatccac

SEQ ID NO: 242336 - DNA, 25 bp, Artificial
  Probe
attgacaataggtcataggtcattc

SEQ ID NO: 242337 - DNA, 25 bp, Artificial
  Probe
aggtcataggtcattctctctctct

SEQ ID NO: 242338 - DNA, 25 bp, Artificial
  Probe
aagactctatggactgaaaagcccc

SEQ ID NO: 242339 - DNA, 25 bp, Artificial
  Probe
ttcgctacattacaaggagcataga

SEQ ID NO: 242340 - DNA, 25 bp, Artificial
  Probe
actgaactgccttgattgacatggg

SEQ ID NO: 242341 - DNA, 25 bp, Artificial
  Probe
ggcttacagaattgcatgtgcaggg

SEQ ID NO: 242342 - DNA, 25 bp, Artificial
  Probe
tttacaaacggcttacagaattgca

SEQ ID NO: 242343 - DNA, 25 bp, Artificial
  Probe
cctgtcttgcacttacaaataaggt

SEQ ID NO: 242344 - DNA, 25 bp, Artificial
  Probe
gactgaactgccttgattgacatgg

SEQ ID NO: 242345 - DNA, 25 bp, Artificial
  Probe
caaacggcttacagaattgcatgtg

SEQ ID NO: 242346 - DNA, 25 bp, Artificial
  Probe
ttacaaacggcttacagaattgcat

SEQ ID NO: 242347 - DNA, 25 bp, Artificial
  Probe
gcatgtgcagggtccatccacacca

SEQ ID NO: 242348 - DNA, 25 bp, Artificial
  Probe
tgcacttacaaataaggtctatggg

SEQ ID NO: 242349 - DNA, 25 bp, Artificial
  Probe
tcccacgtctttaagtttgaaactg

SEQ ID NO: 242350 - DNA, 25 bp, Artificial
  Probe
agactctatggactgaaaagcccca

SEQ ID NO: 242351 - DNA, 25 bp, Artificial
  Probe
tgaaaggactgaactgccttgattg

SEQ ID NO: 242352 - DNA, 25 bp, Artificial
  Probe
gtcttgcacttacaaataaggtcta

SEQ ID NO: 242353 - DNA, 25 bp, Artificial
  Probe
ataggtcataggtcattctctctct

SEQ ID NO: 242354 - DNA, 25 bp, Artificial
  Probe
agagcattttgcacactgtttgttt

SEQ ID NO: 242355 - DNA, 25 bp, Artificial
  Probe
cgtacccagccgagtgattttagag

SEQ ID NO: 242356 - DNA, 25 bp, Artificial
  Probe
cgctacattacaaggagcatagaaa

SEQ ID NO: 242357 - DNA, 25 bp, Artificial
  Probe
cctaactcatgaaaagactctatgg

SEQ ID NO: 242358 - DNA, 25 bp, Artificial
  Probe
ttgcacttacaaataaggtctatgg

SEQ ID NO: 242359 - DNA, 25 bp, Artificial
  Probe
tgaactgccttgattgacatgggga

SEQ ID NO: 242360 - DNA, 25 bp, Artificial
  Probe
gaactgccttgattgacatggggaa

SEQ ID NO: 242361 - DNA, 25 bp, Artificial
  Probe
gtacccagccgagtgattttagagt

SEQ ID NO: 242362 - DNA, 25 bp, Artificial
  Probe
gtgtacacacgtacccagccgagtg

SEQ ID NO: 242363 - DNA, 25 bp, Artificial
  Probe
ctcatgaaaagactctatggactga

SEQ ID NO: 242364 - DNA, 25 bp, Artificial
  Probe
aactcatgaaaagactctatggact

SEQ ID NO: 242365 - DNA, 25 bp, Artificial
  Probe
gaaccatcctggagcaggttcttcc

SEQ ID NO: 242366 - DNA, 25 bp, Artificial
  Probe
gacggcaggaccattcctgttgtat

SEQ ID NO: 242367 - DNA, 25 bp, Artificial
  Probe
catctcatccagaaccatcctggag

SEQ ID NO: 242368 - DNA, 25 bp, Artificial
  Probe
ccttcgggaggctctctgtggttgc

SEQ ID NO: 242369 - DNA, 25 bp, Artificial
  Probe
ttcctactctggacggcaggaccat

SEQ ID NO: 242370 - DNA, 25 bp, Artificial
  Probe
tccagaaccatcctggagcaggttc

SEQ ID NO: 242371 - DNA, 25 bp, Artificial
  Probe
aacacctgagaaacgtggagacctt

SEQ ID NO: 242372 - DNA, 25 bp, Artificial
  Probe
cgtggagaccttgttatcgaatttg

SEQ ID NO: 242373 - DNA, 25 bp, Artificial
  Probe
ttagccttcgggaggctctctgtgg

SEQ ID NO: 242374 - DNA, 25 bp, Artificial
  Probe
actctggacggcaggaccattcctg

SEQ ID NO: 242375 - DNA, 25 bp, Artificial
  Probe
tcctgttgtattcaaagatgtcatc

SEQ ID NO: 242376 - DNA, 25 bp, Artificial
  Probe
ttgaagtcatcttccctgataggat

SEQ ID NO: 242377 - DNA, 25 bp, Artificial
  Probe
gcaggaccattcctgttgtattcaa

SEQ ID NO: 242378 - DNA, 25 bp, Artificial
  Probe
cttgttatcgaatttgaagtcatct

SEQ ID NO: 242379 - DNA, 25 bp, Artificial
  Probe
tccagagctgcagatttccagaccg

SEQ ID NO: 242380 - DNA, 25 bp, Artificial
  Probe
caggattagccttcgggaggctctc

SEQ ID NO: 242381 - DNA, 25 bp, Artificial
  Probe
caaagatgtcatcaggcctggcatg

SEQ ID NO: 242382 - DNA, 25 bp, Artificial
  Probe
gggcttttgctctgccgaatgtttt

SEQ ID NO: 242383 - DNA, 25 bp, Artificial
  Probe
gctgcctgcattcctcaaggactga

SEQ ID NO: 242384 - DNA, 25 bp, Artificial
  Probe
cacctgagaaacgtggagaccttgt

SEQ ID NO: 242385 - DNA, 25 bp, Artificial
  Probe
actgagccagggacctttccagagc

SEQ ID NO: 242386 - DNA, 25 bp, Artificial
  Probe
cctggcatgcggaggaaagttcctg

SEQ ID NO: 242387 - DNA, 25 bp, Artificial
  Probe
gataggatccccatctcatccagaa

SEQ ID NO: 242388 - DNA, 25 bp, Artificial
  Probe
gaaacgtggagaccttgttatcgaa

SEQ ID NO: 242389 - DNA, 25 bp, Artificial
  Probe
tttgctctgccgaatgttttccaca

SEQ ID NO: 242390 - DNA, 25 bp, Artificial
  Probe
aaggactgagccagggacctttcca

SEQ ID NO: 242391 - DNA, 25 bp, Artificial
  Probe
atttatccagccaggattagccttc

SEQ ID NO: 242392 - DNA, 25 bp, Artificial
  Probe
aacattccagctgacatcgtctttg

SEQ ID NO: 242393 - DNA, 25 bp, Artificial
  Probe
tcgggaggctctctgtggttgcact

SEQ ID NO: 242394 - DNA, 25 bp, Artificial
  Probe
catatagctgcctgcattcctcaag

SEQ ID NO: 242395 - DNA, 25 bp, Artificial
  Probe
tcgaacaacattccagctgacatcg

SEQ ID NO: 242396 - DNA, 25 bp, Artificial
  Probe
cccaaaacacctgagaaacgtggag

SEQ ID NO: 242397 - DNA, 25 bp, Artificial
  Probe
ccagccaggattagccttcgggagg

SEQ ID NO: 242398 - DNA, 25 bp, Artificial
  Probe
gtcatcttccctgataggatcccca

SEQ ID NO: 242399 - DNA, 25 bp, Artificial
  Probe
agatggttctgatgtcatttatcca

SEQ ID NO: 242400 - DNA, 25 bp, Artificial
  Probe
caatatcttcaagagagatggttct

SEQ ID NO: 242401 - DNA, 25 bp, Artificial
  Probe
gaatttgaagtcatcttccctgata

SEQ ID NO: 242402 - DNA, 25 bp, Artificial
  Probe
ggacaagccacacaatatcttcaag

SEQ ID NO: 242403 - DNA, 25 bp, Artificial
  Probe
attccagctgacatcgtctttgttt

SEQ ID NO: 242404 - DNA, 25 bp, Artificial
  Probe
gagggcttttgctctgccgaatgtt

SEQ ID NO: 242405 - DNA, 25 bp, Artificial
  Probe
gacctcgaacaacattccagctgac

SEQ ID NO: 242406 - DNA, 25 bp, Artificial
  Probe
gtattcaaagatgtcatcaggcctg

SEQ ID NO: 242407 - DNA, 25 bp, Artificial
  Probe
agaccttgttatcgaatttgaagtc

SEQ ID NO: 242408 - DNA, 25 bp, Artificial
  Probe
tgtcatttatccagccaggattagc

SEQ ID NO: 242409 - DNA, 25 bp, Artificial
  Probe
cctgcattcctcaaggactgagcca

SEQ ID NO: 242410 - DNA, 25 bp, Artificial
  Probe
ggagcaggttcttcccatatagctg

SEQ ID NO: 242411 - DNA, 25 bp, Artificial
  Probe
ctatgcagacctcatgcttgctcct

SEQ ID NO: 242412 - DNA, 25 bp, Artificial
  Probe
ttagttaattcagtgggttctcccg

SEQ ID NO: 242413 - DNA, 25 bp, Artificial
  Probe
attcagtgggttctcccggtgccct

SEQ ID NO: 242414 - DNA, 25 bp, Artificial
  Probe
gatccgattctctttaaagctatga

SEQ ID NO: 242415 - DNA, 25 bp, Artificial
  Probe
tcctttttccgaggtgtccacaggg

SEQ ID NO: 242416 - DNA, 25 bp, Artificial
  Probe
agtcctatgcagacctcatgcttgc

SEQ ID NO: 242417 - DNA, 25 bp, Artificial
  Probe
ctttttccgaggtgtccacagggat

SEQ ID NO: 242418 - DNA, 25 bp, Artificial
  Probe
gacctcatgcttgctccttcagtct

SEQ ID NO: 242419 - DNA, 25 bp, Artificial
  Probe
ggtcccacaagaacaccaagctaat

SEQ ID NO: 242420 - DNA, 25 bp, Artificial
  Probe
cagagggcccggtgcagtcctatgc

SEQ ID NO: 242421 - DNA, 25 bp, Artificial
  Probe
ccggtgcagtcctatgcagacctca

SEQ ID NO: 242422 - DNA, 25 bp, Artificial
  Probe
tcctatgcagacctcatgcttgctc

SEQ ID NO: 242423 - DNA, 25 bp, Artificial
  Probe
agagggcccggtgcagtcctatgca

SEQ ID NO: 242424 - DNA, 25 bp, Artificial
  Probe
ctcctttttccgaggtgtccacagg

SEQ ID NO: 242425 - DNA, 25 bp, Artificial
  Probe
agagccctgcttagttaattcagtg

SEQ ID NO: 242426 - DNA, 25 bp, Artificial
  Probe
cagtctctgtgaagccctaagagcc

SEQ ID NO: 242427 - DNA, 25 bp, Artificial
  Probe
ctcatgcttgctccttcagtctctg

SEQ ID NO: 242428 - DNA, 25 bp, Artificial
  Probe
gtgtccacagggatccctaagctct

SEQ ID NO: 242429 - DNA, 25 bp, Artificial
  Probe
gcccggtgcagtcctatgcagacct

SEQ ID NO: 242430 - DNA, 25 bp, Artificial
  Probe
gcagtcctatgcagacctcatgctt

SEQ ID NO: 242431 - DNA, 25 bp, Artificial
  Probe
agggcccggtgcagtcctatgcaga

SEQ ID NO: 242432 - DNA, 25 bp, Artificial
  Probe
aggagagatccgattctctttaaag

SEQ ID NO: 242433 - DNA, 25 bp, Artificial
  Probe
tgtccacagggatccctaagctctg

SEQ ID NO: 242434 - DNA, 25 bp, Artificial
  Probe
gccctgcttagttaattcagtgggt

SEQ ID NO: 242435 - DNA, 25 bp, Artificial
  Probe
catcgtgtgtgactattacaatctt

SEQ ID NO: 242436 - DNA, 25 bp, Artificial
  Probe
tgcttagttaattcagtgggttctc

SEQ ID NO: 242437 - DNA, 25 bp, Artificial
  Probe
tcccggtgccctccatcgtgtgtga

SEQ ID NO: 242438 - DNA, 25 bp, Artificial
  Probe
gggcccagaggagagatccgattct

SEQ ID NO: 242439 - DNA, 25 bp, Artificial
  Probe
ttcagtgggttctcccggtgccctc

SEQ ID NO: 242440 - DNA, 25 bp, Artificial
  Probe
tcctctcctttttccgaggtgtcca

SEQ ID NO: 242441 - DNA, 25 bp, Artificial
  Probe
gctaatatctgtaccatatatgcag

SEQ ID NO: 242442 - DNA, 25 bp, Artificial
  Probe
cacagggatccctaagctctgaggg

SEQ ID NO: 242443 - DNA, 25 bp, Artificial
  Probe
aatatctgtaccatatatgcagagg

SEQ ID NO: 242444 - DNA, 25 bp, Artificial
  Probe
ctttcattgggatttagatcaaaac

SEQ ID NO: 242445 - DNA, 25 bp, Artificial
  Probe
ccggtgccctccatcgtgtgtgact

SEQ ID NO: 242446 - DNA, 25 bp, Artificial
  Probe
ctttaaagctatgatctttcattgg

SEQ ID NO: 242447 - DNA, 25 bp, Artificial
  Probe
tgaagccctaagagccctgcttagt

SEQ ID NO: 242448 - DNA, 25 bp, Artificial
  Probe
tagttaattcagtgggttctcccgg

SEQ ID NO: 242449 - DNA, 25 bp, Artificial
  Probe
tctgtgaagccctaagagccctgct

SEQ ID NO: 242450 - DNA, 25 bp, Artificial
  Probe
taaatcatggcagtgttagcactct

SEQ ID NO: 242451 - DNA, 25 bp, Artificial
  Probe
ctaagagccctgcttagttaattca

SEQ ID NO: 242452 - DNA, 25 bp, Artificial
  Probe
ggcccagaggagagatccgattctc

SEQ ID NO: 242453 - DNA, 25 bp, Artificial
  Probe
taattcagtgggttctcccggtgcc

SEQ ID NO: 242454 - DNA, 25 bp, Artificial
  Probe
cgaggtgtccacagggatccctaag

SEQ ID NO: 242455 - DNA, 25 bp, Artificial
  Probe
tctttcctctcctttttccgaggtg

SEQ ID NO: 242456 - DNA, 25 bp, Artificial
  Probe
cagggatccctaagctctgagggag

SEQ ID NO: 242457 - DNA, 25 bp, Artificial
  Probe
tcaaaatgctcaaataataggcagc

SEQ ID NO: 242458 - DNA, 25 bp, Artificial
  Probe
gagccttatcatgacacatcaagct

SEQ ID NO: 242459 - DNA, 25 bp, Artificial
  Probe
ccattctgtagagtgcaaaacttgt

SEQ ID NO: 242460 - DNA, 25 bp, Artificial
  Probe
tccagcaacggagtggaaaagcctt

SEQ ID NO: 242461 - DNA, 25 bp, Artificial
  Probe
gttctacacatcaaaagtcagaagt

SEQ ID NO: 242462 - DNA, 25 bp, Artificial
  Probe
tgtttttgacagtgatccctggatt

SEQ ID NO: 242463 - DNA, 25 bp, Artificial
  Probe
agcctcacagaatggccttctgagt

SEQ ID NO: 242464 - DNA, 25 bp, Artificial
  Probe
agtgttcaaatactactgacgcagg

SEQ ID NO: 242465 - DNA, 25 bp, Artificial
  Probe
aagctttcctataaatgttgtcctg

SEQ ID NO: 242466 - DNA, 25 bp, Artificial
  Probe
tttaaagacgttagttccagcaacg

SEQ ID NO: 242467 - DNA, 25 bp, Artificial
  Probe
gtgcaaaacttgtgccagtggcaaa

SEQ ID NO: 242468 - DNA, 25 bp, Artificial
  Probe
ttagtgctggagagtcaaagccatc

SEQ ID NO: 242469 - DNA, 25 bp, Artificial
  Probe
actcaatagtcttgggttcagaagt

SEQ ID NO: 242470 - DNA, 25 bp, Artificial
  Probe
tttgaacatttctgtagttccttcg

SEQ ID NO: 242471 - DNA, 25 bp, Artificial
  Probe
gtaagaggccctttgaaggagatac

SEQ ID NO: 242472 - DNA, 25 bp, Artificial
  Probe
taactctcagcctcacagaatggcc

SEQ ID NO: 242473 - DNA, 25 bp, Artificial
  Probe
cagtgatccctggattaggcacttc

SEQ ID NO: 242474 - DNA, 25 bp, Artificial
  Probe
actgtcaaaatgctcaaataatagg

SEQ ID NO: 242475 - DNA, 25 bp, Artificial
  Probe
gagatacactgtcaaaatgctcaaa

SEQ ID NO: 242476 - DNA, 25 bp, Artificial
  Probe
taaatgttgtcctggcatcccacca

SEQ ID NO: 242477 - DNA, 25 bp, Artificial
  Probe
ctggattaggcacttctgttaatat

SEQ ID NO: 242478 - DNA, 25 bp, Artificial
  Probe
tcctggcatcccaccagagtaagca

SEQ ID NO: 242479 - DNA, 25 bp, Artificial
  Probe
cttacatgatcatttcctgtgttgt

SEQ ID NO: 242480 - DNA, 25 bp, Artificial
  Probe
ttctgtggaattgtgtaagaggccc

SEQ ID NO: 242481 - DNA, 25 bp, Artificial
  Probe
ggaatctgtttggactttccattct

SEQ ID NO: 242482 - DNA, 25 bp, Artificial
  Probe
tgttgtcctggcatcccaccagagt

SEQ ID NO: 242483 - DNA, 25 bp, Artificial
  Probe
gatttcagtatcattgtcttccaga

SEQ ID NO: 242484 - DNA, 25 bp, Artificial
  Probe
gacagtgatccctggattaggcact

SEQ ID NO: 242485 - DNA, 25 bp, Artificial
  Probe
cagcagctttcagtatgaaaaagat

SEQ ID NO: 242486 - DNA, 25 bp, Artificial
  Probe
ataataggcagcagctttcagtatg

SEQ ID NO: 242487 - DNA, 25 bp, Artificial
  Probe
tactactgacgcaggcacattagtg

SEQ ID NO: 242488 - DNA, 25 bp, Artificial
  Probe
gatcagctccttgcactctttcctg

SEQ ID NO: 242489 - DNA, 25 bp, Artificial
  Probe
gaacatttctgtagttccttcgtat

SEQ ID NO: 242490 - DNA, 25 bp, Artificial
  Probe
aggccctttgaaggagatacactgt

SEQ ID NO: 242491 - DNA, 25 bp, Artificial
  Probe
gagtgcaaaacttgtgccagtggca

SEQ ID NO: 242492 - DNA, 25 bp, Artificial
  Probe
ggaagtacacttcctcttttgaaca

SEQ ID NO: 242493 - DNA, 25 bp, Artificial
  Probe
agttgttctacacatcaaaagtcag

SEQ ID NO: 242494 - DNA, 25 bp, Artificial
  Probe
caccagagtaagcattcatacgctc

SEQ ID NO: 242495 - DNA, 25 bp, Artificial
  Probe
gcattcatacgctctgcttcagttc

SEQ ID NO: 242496 - DNA, 25 bp, Artificial
  Probe
aatgctcaaataataggcagcagct

SEQ ID NO: 242497 - DNA, 25 bp, Artificial
  Probe
gaaataactcaatagtcttgggttc

SEQ ID NO: 242498 - DNA, 25 bp, Artificial
  Probe
ttattcggatttcagtatcattgtc

SEQ ID NO: 242499 - DNA, 25 bp, Artificial
  Probe
tcttacatgatcatttcctgtgttg

SEQ ID NO: 242500 - DNA, 25 bp, Artificial
  Probe
ttgttactttatttgggatcagctc

SEQ ID NO: 242501 - DNA, 25 bp, Artificial
  Probe
cacactctgaaaggaagtacacttc

SEQ ID NO: 242502 - DNA, 25 bp, Artificial
  Probe
gagtaagcattcatacgctctgctt

SEQ ID NO: 242503 - DNA, 25 bp, Artificial
  Probe
tcactggtgagagcaaagagcaggt

SEQ ID NO: 242504 - DNA, 25 bp, Artificial
  Probe
tgacttccctgtcagagtatgtgtc

SEQ ID NO: 242505 - DNA, 25 bp, Artificial
  Probe
aaagtgactatctccaataggcttg

SEQ ID NO: 242506 - DNA, 25 bp, Artificial
  Probe
aatctctgcaagctcatgaaggaga

SEQ ID NO: 242507 - DNA, 25 bp, Artificial
  Probe
tccgcaaaaacattgtgaagaagtg

SEQ ID NO: 242508 - DNA, 25 bp, Artificial
  Probe
gccaactctgccttcgtggagcgtg

SEQ ID NO: 242509 - DNA, 25 bp, Artificial
  Probe
gatcctgaaagtcatccgcaaaaac

SEQ ID NO: 242510 - DNA, 25 bp, Artificial
  Probe
ccatctactatatcactggtgagag

SEQ ID NO: 242511 - DNA, 25 bp, Artificial
  Probe
gtttgagaatctctgcaagctcatg

SEQ ID NO: 242512 - DNA, 25 bp, Artificial
  Probe
agctcatgaaggagatcttggacaa

SEQ ID NO: 242513 - DNA, 25 bp, Artificial
  Probe
taccatacctctcagtctggagatg

SEQ ID NO: 242514 - DNA, 25 bp, Artificial
  Probe
agtcatccgcaaaaacattgtgaag

SEQ ID NO: 242515 - DNA, 25 bp, Artificial
  Probe
tatacatgactgagcccattgatga

SEQ ID NO: 242516 - DNA, 25 bp, Artificial
  Probe
cattctctaagaatttaaagcttgg

SEQ ID NO: 242517 - DNA, 25 bp, Artificial
  Probe
gcattctctaagaatttaaagcttg

SEQ ID NO: 242518 - DNA, 25 bp, Artificial
  Probe
gctaccatacctctcagtctggaga

SEQ ID NO: 242519 - DNA, 25 bp, Artificial
  Probe
taaagcttggaatccatgaggattc

SEQ ID NO: 242520 - DNA, 25 bp, Artificial
  Probe
cttgagctcttctctgagttggctg

SEQ ID NO: 242521 - DNA, 25 bp, Artificial
  Probe
tctctgcaagctcatgaaggagatc

SEQ ID NO: 242522 - DNA, 25 bp, Artificial
  Probe
tgcaagctcatgaaggagatcttgg

SEQ ID NO: 242523 - DNA, 25 bp, Artificial
  Probe
ccaactctgccttcgtggagcgtgt

SEQ ID NO: 242524 - DNA, 25 bp, Artificial
  Probe
ccctgtcagagtatgtgtctcgcat

SEQ ID NO: 242525 - DNA, 25 bp, Artificial
  Probe
aagtccatctactatatcactggtg

SEQ ID NO: 242526 - DNA, 25 bp, Artificial
  Probe
gctcatgaaggagatcttggacaag

SEQ ID NO: 242527 - DNA, 25 bp, Artificial
  Probe
tctgcaagctcatgaaggagatctt

SEQ ID NO: 242528 - DNA, 25 bp, Artificial
  Probe
atgactgagcccattgatgagtact

SEQ ID NO: 242529 - DNA, 25 bp, Artificial
  Probe
ggtatacatgactgagcccattgat

SEQ ID NO: 242530 - DNA, 25 bp, Artificial
  Probe
catacctctcagtctggagatgaga

SEQ ID NO: 242531 - DNA, 25 bp, Artificial
  Probe
agaagtgccttgagctcttctctga

SEQ ID NO: 242532 - DNA, 25 bp, Artificial
  Probe
agatgacttccctgtcagagtatgt

SEQ ID NO: 242533 - DNA, 25 bp, Artificial
  Probe
aagcttggaatccatgaggattcca

SEQ ID NO: 242534 - DNA, 25 bp, Artificial
  Probe
agatgagatgacttccctgtcagag

SEQ ID NO: 242535 - DNA, 25 bp, Artificial
  Probe
agcaaagagcaggtggccaactctg

SEQ ID NO: 242536 - DNA, 25 bp, Artificial
  Probe
aaagtcatccgcaaaaacattgtga

SEQ ID NO: 242537 - DNA, 25 bp, Artificial
  Probe
tctcagtctggagatgagatgactt

SEQ ID NO: 242538 - DNA, 25 bp, Artificial
  Probe
tggaatccatgaggattccactaac

SEQ ID NO: 242539 - DNA, 25 bp, Artificial
  Probe
actctgccttcgtggagcgtgtgcg

SEQ ID NO: 242540 - DNA, 25 bp, Artificial
  Probe
ccatacctctcagtctggagatgag

SEQ ID NO: 242541 - DNA, 25 bp, Artificial
  Probe
ttcgctaccatacctctcagtctgg

SEQ ID NO: 242542 - DNA, 25 bp, Artificial
  Probe
tcagtctggagatgagatgacttcc

SEQ ID NO: 242543 - DNA, 25 bp, Artificial
  Probe
cagagtatgtgtctcgcatgaagga

SEQ ID NO: 242544 - DNA, 25 bp, Artificial
  Probe
gatgagatgacttccctgtcagagt

SEQ ID NO: 242545 - DNA, 25 bp, Artificial
  Probe
tactatatcactggtgagagcaaag

SEQ ID NO: 242546 - DNA, 25 bp, Artificial
  Probe
gaggcattctctaagaatttaaagc

SEQ ID NO: 242547 - DNA, 25 bp, Artificial
  Probe
ccattgatgagtactgcgtacagca

SEQ ID NO: 242548 - DNA, 25 bp, Artificial
  Probe
tgaggattccactaaccgtcgccgc

SEQ ID NO: 242549 - DNA, 25 bp, Artificial
  Probe
aatggacaggctccttggtgacctc

SEQ ID NO: 242550 - DNA, 25 bp, Artificial
  Probe
tgcctctccttgactggacgctgaa

SEQ ID NO: 242551 - DNA, 25 bp, Artificial
  Probe
aatatatgggctctcctctctttag

SEQ ID NO: 242552 - DNA, 25 bp, Artificial
  Probe
tcaacaacacacaccgggtcttgaa

SEQ ID NO: 242553 - DNA, 25 bp, Artificial
  Probe
atttccagtctccacagggctcaga

SEQ ID NO: 242554 - DNA, 25 bp, Artificial
  Probe
tctcggcagaagctagctcagaacc

SEQ ID NO: 242555 - DNA, 25 bp, Artificial
  Probe
ttgtcatcaacaacacacaccgggt

SEQ ID NO: 242556 - DNA, 25 bp, Artificial
  Probe
tctccttgactggacgctgaactca

SEQ ID NO: 242557 - DNA, 25 bp, Artificial
  Probe
tttccagtctccacagggctcagat

SEQ ID NO: 242558 - DNA, 25 bp, Artificial
  Probe
gtgacctcatctcctgggataagac

SEQ ID NO: 242559 - DNA, 25 bp, Artificial
  Probe
atctcctgggataagacctgtgacc

SEQ ID NO: 242560 - DNA, 25 bp, Artificial
  Probe
gtcatcaacaacacacaccgggtct

SEQ ID NO: 242561 - DNA, 25 bp, Artificial
  Probe
tttagtcctactcagtttcacagag

SEQ ID NO: 242562 - DNA, 25 bp, Artificial
  Probe
cgtgcctctccttgactggacgctg

SEQ ID NO: 242563 - DNA, 25 bp, Artificial
  Probe
cagaagctagctcagaacctctgtt

SEQ ID NO: 242564 - DNA, 25 bp, Artificial
  Probe
ctccttgactggacgctgaactcaa

SEQ ID NO: 242565 - DNA, 25 bp, Artificial
  Probe
cctactcagtttcacagagaaaaga

SEQ ID NO: 242566 - DNA, 25 bp, Artificial
  Probe
aggctccttggtgacctcatctcct

SEQ ID NO: 242567 - DNA, 25 bp, Artificial
  Probe
gtgacccgtgcctctccttgactgg

SEQ ID NO: 242568 - DNA, 25 bp, Artificial
  Probe
cggcagaagctagctcagaacctct

SEQ ID NO: 242569 - DNA, 25 bp, Artificial
  Probe
tatgggctctcctctctttagtcct

SEQ ID NO: 242570 - DNA, 25 bp, Artificial
  Probe
gataagacctgtgacccgtgcctct

SEQ ID NO: 242571 - DNA, 25 bp, Artificial
  Probe
agactacttcggtttcagagacttg

SEQ ID NO: 242572 - DNA, 25 bp, Artificial
  Probe
atacatctcggcagaagctagctca

SEQ ID NO: 242573 - DNA, 25 bp, Artificial
  Probe
ctcggcagaagctagctcagaacct

SEQ ID NO: 242574 - DNA, 25 bp, Artificial
  Probe
atcaacaacacacaccgggtcttga

SEQ ID NO: 242575 - DNA, 25 bp, Artificial
  Probe
cttggtgacctcatctcctgggata

SEQ ID NO: 242576 - DNA, 25 bp, Artificial
  Probe
gcctctccttgactggacgctgaac

SEQ ID NO: 242577 - DNA, 25 bp, Artificial
  Probe
gtgatttccagtctccacagggctc

SEQ ID NO: 242578 - DNA, 25 bp, Artificial
  Probe
tcatctcctgggataagacctgtga

SEQ ID NO: 242579 - DNA, 25 bp, Artificial
  Probe
acttcggtttcagagacttggggat

SEQ ID NO: 242580 - DNA, 25 bp, Artificial
  Probe
tcctgggataagacctgtgacccgt

SEQ ID NO: 242581 - DNA, 25 bp, Artificial
  Probe
tgtcatcaacaacacacaccgggtc

SEQ ID NO: 242582 - DNA, 25 bp, Artificial
  Probe
acatctcggcagaagctagctcaga

SEQ ID NO: 242583 - DNA, 25 bp, Artificial
  Probe
tgggctctcctctctttagtcctac

SEQ ID NO: 242584 - DNA, 25 bp, Artificial
  Probe
gacctcatctcctgggataagacct

SEQ ID NO: 242585 - DNA, 25 bp, Artificial
  Probe
ataagacctgtgacccgtgcctctc

SEQ ID NO: 242586 - DNA, 25 bp, Artificial
  Probe
atctcggcagaagctagctcagaac

SEQ ID NO: 242587 - DNA, 25 bp, Artificial
  Probe
cagtcatacatctcggcagaagcta

SEQ ID NO: 242588 - DNA, 25 bp, Artificial
  Probe
catcaacaacacacaccgggtcttg

SEQ ID NO: 242589 - DNA, 25 bp, Artificial
  Probe
tggagcagtcatacatctcggcaga

SEQ ID NO: 242590 - DNA, 25 bp, Artificial
  Probe
tgcacacggaagctggactaaccca

SEQ ID NO: 242591 - DNA, 25 bp, Artificial
  Probe
ggacaggctccttggtgacctcatc

SEQ ID NO: 242592 - DNA, 25 bp, Artificial
  Probe
catctcctgggataagacctgtgac

SEQ ID NO: 242593 - DNA, 25 bp, Artificial
  Probe
gggataagacctgtgacccgtgcct

SEQ ID NO: 242594 - DNA, 25 bp, Artificial
  Probe
acaggctccttggtgacctcatctc

SEQ ID NO: 242595 - DNA, 25 bp, Artificial
  Probe
ctgatcttatgatgcctgcattcag

SEQ ID NO: 242596 - DNA, 25 bp, Artificial
  Probe
acagcctggtagaactgaatcaatg

SEQ ID NO: 242597 - DNA, 25 bp, Artificial
  Probe
tgccatatagcctttgctatgccgc

SEQ ID NO: 242598 - DNA, 25 bp, Artificial
  Probe
tctaatgatgccatatagcctttgc

SEQ ID NO: 242599 - DNA, 25 bp, Artificial
  Probe
atgaggatactttcttcctgccagc

SEQ ID NO: 242600 - DNA, 25 bp, Artificial
  Probe
tggctgcttacaacctctggaaatt

SEQ ID NO: 242601 - DNA, 25 bp, Artificial
  Probe
taacttacagcctggtagaactgaa

SEQ ID NO: 242602 - DNA, 25 bp, Artificial
  Probe
tgctgatcttgcaaaggacacaggg

SEQ ID NO: 242603 - DNA, 25 bp, Artificial
  Probe
cttgcaaaggacacagggacatttc

SEQ ID NO: 242604 - DNA, 25 bp, Artificial
  Probe
tttgcaggttatgtctaatgatgcc

SEQ ID NO: 242605 - DNA, 25 bp, Artificial
  Probe
ctttatttggctactactggcccca

SEQ ID NO: 242606 - DNA, 25 bp, Artificial
  Probe
gagagtcctctcttcagtatctcca

SEQ ID NO: 242607 - DNA, 25 bp, Artificial
  Probe
gttatgtctaatgatgccatatagc

SEQ ID NO: 242608 - DNA, 25 bp, Artificial
  Probe
tcttatgatgcctgcattcagctct

SEQ ID NO: 242609 - DNA, 25 bp, Artificial
  Probe
taaagacacatttactacatgggga

SEQ ID NO: 242610 - DNA, 25 bp, Artificial
  Probe
gctatgccgctgatactcataactt

SEQ ID NO: 242611 - DNA, 25 bp, Artificial
  Probe
catggctgcttacaacctctggaaa

SEQ ID NO: 242612 - DNA, 25 bp, Artificial
  Probe
ctactggccccagcatcctgtataa

SEQ ID NO: 242613 - DNA, 25 bp, Artificial
  Probe
cataaagacacatttactacatggg

SEQ ID NO: 242614 - DNA, 25 bp, Artificial
  Probe
ggggaaaccatgttccaagatgagg

SEQ ID NO: 242615 - DNA, 25 bp, Artificial
  Probe
gatgcctgcattcagctctccctat

SEQ ID NO: 242616 - DNA, 25 bp, Artificial
  Probe
ccagcatcctgtataagcatgtaac

SEQ ID NO: 242617 - DNA, 25 bp, Artificial
  Probe
tttggctactactggccccagcatc

SEQ ID NO: 242618 - DNA, 25 bp, Artificial
  Probe
gcatcctgtataagcatgtaacatc

SEQ ID NO: 242619 - DNA, 25 bp, Artificial
  Probe
atgttccaagatgaggatactttct

SEQ ID NO: 242620 - DNA, 25 bp, Artificial
  Probe
aagacacatttactacatggggaga

SEQ ID NO: 242621 - DNA, 25 bp, Artificial
  Probe
gcatttgtgcccttttgcaggttat

SEQ ID NO: 242622 - DNA, 25 bp, Artificial
  Probe
tctccctatcctgaatgcatttgtg

SEQ ID NO: 242623 - DNA, 25 bp, Artificial
  Probe
ttgctatgccgctgatactcataac

SEQ ID NO: 242624 - DNA, 25 bp, Artificial
  Probe
ccaataacttacagcctggtagaac

SEQ ID NO: 242625 - DNA, 25 bp, Artificial
  Probe
gatactttcttcctgccagcctgat

SEQ ID NO: 242626 - DNA, 25 bp, Artificial
  Probe
tgaatgcatttgtgcccttttgcag

SEQ ID NO: 242627 - DNA, 25 bp, Artificial
  Probe
gcatgtaacatcactcaaagttatg

SEQ ID NO: 242628 - DNA, 25 bp, Artificial
  Probe
gctgcttacaacctctggaaattcc

SEQ ID NO: 242629 - DNA, 25 bp, Artificial
  Probe
gctctccctatcctgaatgcatttg

SEQ ID NO: 242630 - DNA, 25 bp, Artificial
  Probe
tgtaacatcactcaaagttatgcag

SEQ ID NO: 242631 - DNA, 25 bp, Artificial
  Probe
ctgatcttgcaaaggacacagggac

SEQ ID NO: 242632 - DNA, 25 bp, Artificial
  Probe
ttgcaggttatgtctaatgatgcca

SEQ ID NO: 242633 - DNA, 25 bp, Artificial
  Probe
tatgtctaatgatgccatatagcct

SEQ ID NO: 242634 - DNA, 25 bp, Artificial
  Probe
atgatgccatatagcctttgctatg

SEQ ID NO: 242635 - DNA, 25 bp, Artificial
  Probe
gggagagtcctctcttcagtatctc

SEQ ID NO: 242636 - DNA, 25 bp, Artificial
  Probe
tagcctttgctatgccgctgatact

SEQ ID NO: 242637 - DNA, 25 bp, Artificial
  Probe
ttcctgccagcctgatcttatgatg

SEQ ID NO: 242638 - DNA, 25 bp, Artificial
  Probe
ttatgtctaatgatgccatatagcc

SEQ ID NO: 242639 - DNA, 25 bp, Artificial
  Probe
cccttttgcaggttatgtctaatga

SEQ ID NO: 242640 - DNA, 25 bp, Artificial
  Probe
aaagttgctgatcttgcaaaggaca

SEQ ID NO: 242641 - DNA, 25 bp, Artificial
  Probe
aaattgcagtacatgttatagacca

SEQ ID NO: 242642 - DNA, 25 bp, Artificial
  Probe
tgattgagcttcaggctttccaacg

SEQ ID NO: 242643 - DNA, 25 bp, Artificial
  Probe
gattcttaccaagtccagttgttat

SEQ ID NO: 242644 - DNA, 25 bp, Artificial
  Probe
cggatccgggcctttccgatgacca

SEQ ID NO: 242645 - DNA, 25 bp, Artificial
  Probe
cgggcctttccgatgaccatggatg

SEQ ID NO: 242646 - DNA, 25 bp, Artificial
  Probe
gaccttctgaaaaatgcaattcaag

SEQ ID NO: 242647 - DNA, 25 bp, Artificial
  Probe
ccaagatgcggatccgggcctttcc

SEQ ID NO: 242648 - DNA, 25 bp, Artificial
  Probe
tcaaacagttgcagccaaacaaggt

SEQ ID NO: 242649 - DNA, 25 bp, Artificial
  Probe
acagcatttgggaccttctgaaaaa

SEQ ID NO: 242650 - DNA, 25 bp, Artificial
  Probe
gttatagaccactcagatcaagcct

SEQ ID NO: 242651 - DNA, 25 bp, Artificial
  Probe
cagttcctcgggaaaatgtgaatgt

SEQ ID NO: 242652 - DNA, 25 bp, Artificial
  Probe
cttaccaagtccagttgttattaag

SEQ ID NO: 242653 - DNA, 25 bp, Artificial
  Probe
catgttatagaccactcagatcaag

SEQ ID NO: 242654 - DNA, 25 bp, Artificial
  Probe
agccaaacaaggtgaatctgaccca

SEQ ID NO: 242655 - DNA, 25 bp, Artificial
  Probe
aatatgtaaacagcatttgggacct

SEQ ID NO: 242656 - DNA, 25 bp, Artificial
  Probe
ccgatgaccatggatgaaaaatatg

SEQ ID NO: 242657 - DNA, 25 bp, Artificial
  Probe
ccctgtagagatcatctttacagtt

SEQ ID NO: 242658 - DNA, 25 bp, Artificial
  Probe
gatttattcttggactgtactcttc

SEQ ID NO: 242659 - DNA, 25 bp, Artificial
  Probe
tttccaacgttatccctgtagagat

SEQ ID NO: 242660 - DNA, 25 bp, Artificial
  Probe
gatccgggcctttccgatgaccatg

SEQ ID NO: 242661 - DNA, 25 bp, Artificial
  Probe
tgcagccaaacaaggtgaatctgac

SEQ ID NO: 242662 - DNA, 25 bp, Artificial
  Probe
ttcaagaaatccagcgtgcgagaag

SEQ ID NO: 242663 - DNA, 25 bp, Artificial
  Probe
caacgttatccctgtagagatcatc

SEQ ID NO: 242664 - DNA, 25 bp, Artificial
  Probe
acagttgcagccaaacaaggtgaat

SEQ ID NO: 242665 - DNA, 25 bp, Artificial
  Probe
atcgcaaagtatacacatacgtagc

SEQ ID NO: 242666 - DNA, 25 bp, Artificial
  Probe
gacgaccatctcttctgttaaattg

SEQ ID NO: 242667 - DNA, 25 bp, Artificial
  Probe
agttttcaacatcagttgattgagc

SEQ ID NO: 242668 - DNA, 25 bp, Artificial
  Probe
ctttacagttcctcgggaaaatgtg

SEQ ID NO: 242669 - DNA, 25 bp, Artificial
  Probe
gttatccctgtagagatcatcttta

SEQ ID NO: 242670 - DNA, 25 bp, Artificial
  Probe
tcttctgttaaattgcagtacatgt

SEQ ID NO: 242671 - DNA, 25 bp, Artificial
  Probe
attgcagtacatgttatagaccact

SEQ ID NO: 242672 - DNA, 25 bp, Artificial
  Probe
cagaggtaactcagcaactgaaggc

SEQ ID NO: 242673 - DNA, 25 bp, Artificial
  Probe
ttcaaacagttgcagccaaacaagg

SEQ ID NO: 242674 - DNA, 25 bp, Artificial
  Probe
tgagcttcaggctttccaacgttat

SEQ ID NO: 242675 - DNA, 25 bp, Artificial
  Probe
ctcttctgttaaattgcagtacatg

SEQ ID NO: 242676 - DNA, 25 bp, Artificial
  Probe
gaccatctcttctgttaaattgcag

SEQ ID NO: 242677 - DNA, 25 bp, Artificial
  Probe
gtaaacagcatttgggaccttctga

SEQ ID NO: 242678 - DNA, 25 bp, Artificial
  Probe
gtatacacatacgtagcataaaatg

SEQ ID NO: 242679 - DNA, 25 bp, Artificial
  Probe
ctcagcaactgaaggctcgattctt

SEQ ID NO: 242680 - DNA, 25 bp, Artificial
  Probe
gcaactgaaggctcgattcttacca

SEQ ID NO: 242681 - DNA, 25 bp, Artificial
  Probe
atgcaattcaagaaatccagcgtgc

SEQ ID NO: 242682 - DNA, 25 bp, Artificial
  Probe
agtacatgttatagaccactcagat

SEQ ID NO: 242683 - DNA, 25 bp, Artificial
  Probe
caagtccagttgttattaagaaacg

SEQ ID NO: 242684 - DNA, 25 bp, Artificial
  Probe
ggactgtactcttcgcatggactgg

SEQ ID NO: 242685 - DNA, 25 bp, Artificial
  Probe
gcagcacaatgttttagtagcagag

SEQ ID NO: 242686 - DNA, 25 bp, Artificial
  Probe
gcaaagtatacacatacgtagcata

SEQ ID NO: 242687 - DNA, 25 bp, Artificial
  Probe
gcagaaaagccttctactgcaattc

SEQ ID NO: 242688 - DNA, 25 bp, Artificial
  Probe
agtgcaggtcagacctcactcggca

SEQ ID NO: 242689 - DNA, 25 bp, Artificial
  Probe
gctttctaccgcaagtcagacctca

SEQ ID NO: 242690 - DNA, 25 bp, Artificial
  Probe
tgggaaagcctttcagtgcaaatat

SEQ ID NO: 242691 - DNA, 25 bp, Artificial
  Probe
atgtcaggaatgcaggaaggcattc

SEQ ID NO: 242692 - DNA, 25 bp, Artificial
  Probe
aatatgaactcactcggcatcacag

SEQ ID NO: 242693 - DNA, 25 bp, Artificial
  Probe
cagacctcacagtgcatcagaggac

SEQ ID NO: 242694 - DNA, 25 bp, Artificial
  Probe
atgcaggaaggcattccagtgcagg

SEQ ID NO: 242695 - DNA, 25 bp, Artificial
  Probe
atatgaactcactcggcatcacaga

SEQ ID NO: 242696 - DNA, 25 bp, Artificial
  Probe
tacagatgacaaaccctgaagatat

SEQ ID NO: 242697 - DNA, 25 bp, Artificial
  Probe
caaaccctgaagatataggagacag

SEQ ID NO: 242698 - DNA, 25 bp, Artificial
  Probe
gacaaaccctgaagatataggagac

SEQ ID NO: 242699 - DNA, 25 bp, Artificial
  Probe
ttctaccgcaagtcagacctcacag

SEQ ID NO: 242700 - DNA, 25 bp, Artificial
  Probe
gctcactgtccatcaaagacagcac

SEQ ID NO: 242701 - DNA, 25 bp, Artificial
  Probe
ggaaggctttctaccgcaagtcaga

SEQ ID NO: 242702 - DNA, 25 bp, Artificial
  Probe
ttccagtgcaggtcagacctcactc

SEQ ID NO: 242703 - DNA, 25 bp, Artificial
  Probe
caggtcagacctcactcggcatctg

SEQ ID NO: 242704 - DNA, 25 bp, Artificial
  Probe
ccgtatacatgtatggagtgccaga

SEQ ID NO: 242705 - DNA, 25 bp, Artificial
  Probe
gtccatcaaagacagcacacagggg

SEQ ID NO: 242706 - DNA, 25 bp, Artificial
  Probe
tcaatgtcaggaatgcaggaaggca

SEQ ID NO: 242707 - DNA, 25 bp, Artificial
  Probe
gtacggagtgcaggaaggctttcta

SEQ ID NO: 242708 - DNA, 25 bp, Artificial
  Probe
ataagtcgtccttaactgacatcag

SEQ ID NO: 242709 - DNA, 25 bp, Artificial
  Probe
caggaaggcattccagtgcaggtca

SEQ ID NO: 242710 - DNA, 25 bp, Artificial
  Probe
gcaaatatgaactcactcggcatca

SEQ ID NO: 242711 - DNA, 25 bp, Artificial
  Probe
gacctcacagtgcatcagaggacac

SEQ ID NO: 242712 - DNA, 25 bp, Artificial
  Probe
acagctcactgtccatcaaagacag

SEQ ID NO: 242713 - DNA, 25 bp, Artificial
  Probe
gcctttcagtgcaaatatgaactca

SEQ ID NO: 242714 - DNA, 25 bp, Artificial
  Probe
gcatcacagaacacacacaggtgag

SEQ ID NO: 242715 - DNA, 25 bp, Artificial
  Probe
tgcaggaaggctttctaccgcaagt

SEQ ID NO: 242716 - DNA, 25 bp, Artificial
  Probe
ttcatacagatgacaaaccctgaag

SEQ ID NO: 242717 - DNA, 25 bp, Artificial
  Probe
actcggcatcacagaacacacacag

SEQ ID NO: 242718 - DNA, 25 bp, Artificial
  Probe
tgcaaatatgaactcactcggcatc

SEQ ID NO: 242719 - DNA, 25 bp, Artificial
  Probe
aaaccgtatacatgtatggagtgcc

SEQ ID NO: 242720 - DNA, 25 bp, Artificial
  Probe
atgtacggagtgcaggaaggctttc

SEQ ID NO: 242721 - DNA, 25 bp, Artificial
  Probe
atcaatgtcaggaatgcaggaaggc

SEQ ID NO: 242722 - DNA, 25 bp, Artificial
  Probe
gtcagacctcacagtgcatcagagg

SEQ ID NO: 242723 - DNA, 25 bp, Artificial
  Probe
aggccctatggatgtacggagtgca

SEQ ID NO: 242724 - DNA, 25 bp, Artificial
  Probe
caggaaggctttctaccgcaagtca

SEQ ID NO: 242725 - DNA, 25 bp, Artificial
  Probe
aaccctgaagatataggagacagta

SEQ ID NO: 242726 - DNA, 25 bp, Artificial
  Probe
actgtccatcaaagacagcacacag

SEQ ID NO: 242727 - DNA, 25 bp, Artificial
  Probe
gatgacaaaccctgaagatatagga

SEQ ID NO: 242728 - DNA, 25 bp, Artificial
  Probe
cttatcaatgtcaggaatgcaggaa

SEQ ID NO: 242729 - DNA, 25 bp, Artificial
  Probe
caagtcagacctcacagtgcatcag

SEQ ID NO: 242730 - DNA, 25 bp, Artificial
  Probe
aagggttttacaccaagtcagatct

SEQ ID NO: 242731 - DNA, 25 bp, Artificial
  Probe
ggttttacaccaagtcagatctctc

SEQ ID NO: 242732 - DNA, 25 bp, Artificial
  Probe
tgcagaaaagccttctactgcaatt

SEQ ID NO: 242733 - DNA, 25 bp, Artificial
  Probe
ctgctcacagctgcactctggtaca

SEQ ID NO: 242734 - DNA, 25 bp, Artificial
  Probe
cagccaagggcagctgtgtgagctt

SEQ ID NO: 242735 - DNA, 25 bp, Artificial
  Probe
cagggcttcgtacaggtgagcatgt

SEQ ID NO: 242736 - DNA, 25 bp, Artificial
  Probe
tcagccaaggatggagcgtcctcct

SEQ ID NO: 242737 - DNA, 25 bp, Artificial
  Probe
agcatgtctccattgacctctgagg

SEQ ID NO: 242738 - DNA, 25 bp, Artificial
  Probe
acatggtggaactcatccagagtcg

SEQ ID NO: 242739 - DNA, 25 bp, Artificial
  Probe
ccaagggcagctgtgtgagcttgct

SEQ ID NO: 242740 - DNA, 25 bp, Artificial
  Probe
ccggcctcctctgagagcagcagta

SEQ ID NO: 242741 - DNA, 25 bp, Artificial
  Probe
gtctccattgacctctgaggtcaca

SEQ ID NO: 242742 - DNA, 25 bp, Artificial
  Probe
gtttcagctttctcctccgtgtcta

SEQ ID NO: 242743 - DNA, 25 bp, Artificial
  Probe
ttggggccctgctcacagctgcact

SEQ ID NO: 242744 - DNA, 25 bp, Artificial
  Probe
cagctgccatctggatttggggcca

SEQ ID NO: 242745 - DNA, 25 bp, Artificial
  Probe
gtgcccctagcaagcgggagcccgt

SEQ ID NO: 242746 - DNA, 25 bp, Artificial
  Probe
atcggccatgaacttgtcccctcag

SEQ ID NO: 242747 - DNA, 25 bp, Artificial
  Probe
accctagcaccttgtcccaggaagt

SEQ ID NO: 242748 - DNA, 25 bp, Artificial
  Probe
gtcccaggaagtctacaagactgtc

SEQ ID NO: 242749 - DNA, 25 bp, Artificial
  Probe
agctaggccagcagggcttcgtaca

SEQ ID NO: 242750 - DNA, 25 bp, Artificial
  Probe
agctgtgtgagcttgctgtccccaa

SEQ ID NO: 242751 - DNA, 25 bp, Artificial
  Probe
cacagcatcgggagcagccacaagc

SEQ ID NO: 242752 - DNA, 25 bp, Artificial
  Probe
taccaaccacagcatcgggagcagc

SEQ ID NO: 242753 - DNA, 25 bp, Artificial
  Probe
gcatcacctttggtgccttcctcat

SEQ ID NO: 242754 - DNA, 25 bp, Artificial
  Probe
agctggcaccctcagttgcaactta

SEQ ID NO: 242755 - DNA, 25 bp, Artificial
  Probe
gtgagcttgctgtccccaagccctg

SEQ ID NO: 242756 - DNA, 25 bp, Artificial
  Probe
ttctcctccgtgtctacatggtgcc

SEQ ID NO: 242757 - DNA, 25 bp, Artificial
  Probe
ctttctcctccgtgtctacatggtg

SEQ ID NO: 242758 - DNA, 25 bp, Artificial
  Probe
tctccatgcgcctgaacatcgtcag

SEQ ID NO: 242759 - DNA, 25 bp, Artificial
  Probe
agctgggaaccatcggccatgaact

SEQ ID NO: 242760 - DNA, 25 bp, Artificial
  Probe
tcgtcctgccctctgtactgggcat

SEQ ID NO: 242761 - DNA, 25 bp, Artificial
  Probe
gccctgagggcgacccacgtttcag

SEQ ID NO: 242762 - DNA, 25 bp, Artificial
  Probe
gaaccatcggccatgaacttgtccc

SEQ ID NO: 242763 - DNA, 25 bp, Artificial
  Probe
gtcctgccctctgtactgggcatca

SEQ ID NO: 242764 - DNA, 25 bp, Artificial
  Probe
ccagagtcgagcagccaagggcagc

SEQ ID NO: 242765 - DNA, 25 bp, Artificial
  Probe
gggcgacccacgtttcagctttctc

SEQ ID NO: 242766 - DNA, 25 bp, Artificial
  Probe
tgccctctgtactgggcatcacctt

SEQ ID NO: 242767 - DNA, 25 bp, Artificial
  Probe
gaagtctacaagactgtctccatgc

SEQ ID NO: 242768 - DNA, 25 bp, Artificial
  Probe
cacacgtgcccctagcaagcgggag

SEQ ID NO: 242769 - DNA, 25 bp, Artificial
  Probe
ggtacatctattctcacacacgtgc

SEQ ID NO: 242770 - DNA, 25 bp, Artificial
  Probe
aaggatggagcgtcctcctgtacct

SEQ ID NO: 242771 - DNA, 25 bp, Artificial
  Probe
gtcccctcagccaaggatggagcgt

SEQ ID NO: 242772 - DNA, 25 bp, Artificial
  Probe
tggcaccctcagttgcaacttagcc

SEQ ID NO: 242773 - DNA, 25 bp, Artificial
  Probe
gctgcactctggtacatctattctc

SEQ ID NO: 242774 - DNA, 25 bp, Artificial
  Probe
cacgtttcagctttctcctccgtgt

SEQ ID NO: 242775 - DNA, 25 bp, Artificial
  Probe
gtgccttcctcattggggccctgct

SEQ ID NO: 242776 - DNA, 25 bp, Artificial
  Probe
tcattggggccctgctcacagctgc

SEQ ID NO: 242777 - DNA, 25 bp, Artificial
  Probe
agactgtctccatgcgcctgaacat

SEQ ID NO: 242778 - DNA, 25 bp, Artificial
  Probe
gacctgtctggcaaaggcctcgtcc

SEQ ID NO: 242779 - DNA, 25 bp, Artificial
  Probe
tgaccgacgaagagcgctgtttgaa

SEQ ID NO: 242780 - DNA, 25 bp, Artificial
  Probe
ggtggagccacacaggtagctccag

SEQ ID NO: 242781 - DNA, 25 bp, Artificial
  Probe
cgtgccacactgcaacgcctagtgg

SEQ ID NO: 242782 - DNA, 25 bp, Artificial
  Probe
tatgagcaggccttccagctgctgc

SEQ ID NO: 242783 - DNA, 25 bp, Artificial
  Probe
aggatgagttctgcaaactgacgtg

SEQ ID NO: 242784 - DNA, 25 bp, Artificial
  Probe
accagcagacattcgcgcgctcagt

SEQ ID NO: 242785 - DNA, 25 bp, Artificial
  Probe
ctctccggccgaggagaagccactg

SEQ ID NO: 242786 - DNA, 25 bp, Artificial
  Probe
gaattacatcttagcccagaagccc

SEQ ID NO: 242787 - DNA, 25 bp, Artificial
  Probe
gacgaagagcgctgtttgaattaca

SEQ ID NO: 242788 - DNA, 25 bp, Artificial
  Probe
ttggctgaccgacgaagagcgctgt

SEQ ID NO: 242789 - DNA, 25 bp, Artificial
  Probe
tggagccacacaggtagctccagca

SEQ ID NO: 242790 - DNA, 25 bp, Artificial
  Probe
gactcgctggcctatgagtatgagc

SEQ ID NO: 242791 - DNA, 25 bp, Artificial
  Probe
actgagggatcctgccctcgactcg

SEQ ID NO: 242792 - DNA, 25 bp, Artificial
  Probe
cgaagagcgctgtttgaattacatc

SEQ ID NO: 242793 - DNA, 25 bp, Artificial
  Probe
tggacagttggctgaccgacgaaga

SEQ ID NO: 242794 - DNA, 25 bp, Artificial
  Probe
actgcaacgcctagtggaggcgctg

SEQ ID NO: 242795 - DNA, 25 bp, Artificial
  Probe
cgctgcagcgtagctgtcgagcact

SEQ ID NO: 242796 - DNA, 25 bp, Artificial
  Probe
gctgcagcgtagctgtcgagcactg

SEQ ID NO: 242797 - DNA, 25 bp, Artificial
  Probe
cagcaggttcgaagtccctggtttc

SEQ ID NO: 242798 - DNA, 25 bp, Artificial
  Probe
tgagcaggccttccagctgctgcgc

SEQ ID NO: 242799 - DNA, 25 bp, Artificial
  Probe
tgcagcgtagctgtcgagcactgag

SEQ ID NO: 242800 - DNA, 25 bp, Artificial
  Probe
cctggtttcctctccggccgaggag

SEQ ID NO: 242801 - DNA, 25 bp, Artificial
  Probe
ctcgctggcctatgagtatgagcgt

SEQ ID NO: 242802 - DNA, 25 bp, Artificial
  Probe
agctgtcgagcactgagggatcctg

SEQ ID NO: 242803 - DNA, 25 bp, Artificial
  Probe
ggctatatgagcaggccttccagct

SEQ ID NO: 242804 - DNA, 25 bp, Artificial
  Probe
ttcgaagtccctggtttcctctccg

SEQ ID NO: 242805 - DNA, 25 bp, Artificial
  Probe
tcgaagtccctggtttcctctccgg

SEQ ID NO: 242806 - DNA, 25 bp, Artificial
  Probe
tccggccgaggagaagccactgccg

SEQ ID NO: 242807 - DNA, 25 bp, Artificial
  Probe
acattcgcgcgctcagtgggcctca

SEQ ID NO: 242808 - DNA, 25 bp, Artificial
  Probe
acgtgtgactccactggccagggtg

SEQ ID NO: 242809 - DNA, 25 bp, Artificial
  Probe
tgctgcgccgtttcatacaagccga

SEQ ID NO: 242810 - DNA, 25 bp, Artificial
  Probe
ctgtttgaattacatcttagcccag

SEQ ID NO: 242811 - DNA, 25 bp, Artificial
  Probe
gacagttggctgaccgacgaagagc

SEQ ID NO: 242812 - DNA, 25 bp, Artificial
  Probe
cgtagctgtcgagcactgagggatc

SEQ ID NO: 242813 - DNA, 25 bp, Artificial
  Probe
gtttgaattacatcttagcccagaa

SEQ ID NO: 242814 - DNA, 25 bp, Artificial
  Probe
cactgcaacgcctagtggaggcgct

SEQ ID NO: 242815 - DNA, 25 bp, Artificial
  Probe
tcgcgcgctcagtgggcctcaagtg

SEQ ID NO: 242816 - DNA, 25 bp, Artificial
  Probe
agctccagcaggttcgaagtccctg

SEQ ID NO: 242817 - DNA, 25 bp, Artificial
  Probe
tctccggccgaggagaagccactgc

SEQ ID NO: 242818 - DNA, 25 bp, Artificial
  Probe
aggccttccagctgctgcgccgttt

SEQ ID NO: 242819 - DNA, 25 bp, Artificial
  Probe
gcaggttcgaagtccctggtttcct

SEQ ID NO: 242820 - DNA, 25 bp, Artificial
  Probe
ccctcgactcgctggcctatgagta

SEQ ID NO: 242821 - DNA, 25 bp, Artificial
  Probe
aggagaacgagctcactagtctagc

SEQ ID NO: 242822 - DNA, 25 bp, Artificial
  Probe
tgccacactgcaacgcctagtggag

SEQ ID NO: 242823 - DNA, 25 bp, Artificial
  Probe
cagctggacagttggctgaccgacg

SEQ ID NO: 242824 - DNA, 25 bp, Artificial
  Probe
gctgctgcgccgtttcatacaagcc

SEQ ID NO: 242825 - DNA, 25 bp, Artificial
  Probe
ggactggacacaagatcttagcctg

SEQ ID NO: 242826 - DNA, 25 bp, Artificial
  Probe
cccaggagtacctgcgcggcatgga

SEQ ID NO: 242827 - DNA, 25 bp, Artificial
  Probe
gacagttttcggaccttcgaggtca

SEQ ID NO: 242828 - DNA, 25 bp, Artificial
  Probe
gacagctcgctgaggcccagggaca

SEQ ID NO: 242829 - DNA, 25 bp, Artificial
  Probe
actctggggcatccaccactgacag

SEQ ID NO: 242830 - DNA, 25 bp, Artificial
  Probe
cctgagaggccctggagactgcctg

SEQ ID NO: 242831 - DNA, 25 bp, Artificial
  Probe
tgaccttcctgtgctgcggctgcct

SEQ ID NO: 242832 - DNA, 25 bp, Artificial
  Probe
tcagcttcaagatgcgagagccgct

SEQ ID NO: 242833 - DNA, 25 bp, Artificial
  Probe
tgattgagaacatgcctgcaggccc

SEQ ID NO: 242834 - DNA, 25 bp, Artificial
  Probe
atccagtgagtctgggcctcgatgg

SEQ ID NO: 242835 - DNA, 25 bp, Artificial
  Probe
agagccgctgtccagcgtttccagc

SEQ ID NO: 242836 - DNA, 25 bp, Artificial
  Probe
agcctgacagtgattgagaacatgc

SEQ ID NO: 242837 - DNA, 25 bp, Artificial
  Probe
tacctgcgcggcatggactggatcc

SEQ ID NO: 242838 - DNA, 25 bp, Artificial
  Probe
gaacatgcctgcaggccccgggttc

SEQ ID NO: 242839 - DNA, 25 bp, Artificial
  Probe
tggggcatccaccactgacagctcg

SEQ ID NO: 242840 - DNA, 25 bp, Artificial
  Probe
tgtccagcgtttccagcatccgcag

SEQ ID NO: 242841 - DNA, 25 bp, Artificial
  Probe
gctgtgctcaactcagccatcaatc

SEQ ID NO: 242842 - DNA, 25 bp, Artificial
  Probe
gtgcagcacgctgtgctgaccttcc

SEQ ID NO: 242843 - DNA, 25 bp, Artificial
  Probe
acgaaactccccatgatgaatgttt

SEQ ID NO: 242844 - DNA, 25 bp, Artificial
  Probe
ctggagactgcctgacccggatcac

SEQ ID NO: 242845 - DNA, 25 bp, Artificial
  Probe
tcgctgaggcccagggacagttttc

SEQ ID NO: 242846 - DNA, 25 bp, Artificial
  Probe
cctcgatggggctcccaggcagcaa

SEQ ID NO: 242847 - DNA, 25 bp, Artificial
  Probe
atccgcagcgcctagagcttgaacc

SEQ ID NO: 242848 - DNA, 25 bp, Artificial
  Probe
atccaccactgacagctcgctgagg

SEQ ID NO: 242849 - DNA, 25 bp, Artificial
  Probe
ctgcctcaggttaggcctgagaggc

SEQ ID NO: 242850 - DNA, 25 bp, Artificial
  Probe
cttccgcagccgtgaggtgcagcac

SEQ ID NO: 242851 - DNA, 25 bp, Artificial
  Probe
ctgtgctgcggctgcctcaggttag

SEQ ID NO: 242852 - DNA, 25 bp, Artificial
  Probe
ggatcctggccctagctgtgctcaa

SEQ ID NO: 242853 - DNA, 25 bp, Artificial
  Probe
tggccctagctgtgctcaactcagc

SEQ ID NO: 242854 - DNA, 25 bp, Artificial
  Probe
ccccatgatgaatgtttggcaggga

SEQ ID NO: 242855 - DNA, 25 bp, Artificial
  Probe
ctgacagctcgctgaggcccaggga

SEQ ID NO: 242856 - DNA, 25 bp, Artificial
  Probe
cctgcgcggcatggactggatcctg

SEQ ID NO: 242857 - DNA, 25 bp, Artificial
  Probe
agagcttgaaccagccggtcgccca

SEQ ID NO: 242858 - DNA, 25 bp, Artificial
  Probe
tgcgagagccgctgtccagcgtttc

SEQ ID NO: 242859 - DNA, 25 bp, Artificial
  Probe
ggagactgcctgacccggatcaccg

SEQ ID NO: 242860 - DNA, 25 bp, Artificial
  Probe
aagatcttagcctgacagtgattga

SEQ ID NO: 242861 - DNA, 25 bp, Artificial
  Probe
ccgcagccgtgaggtgcagcacgct

SEQ ID NO: 242862 - DNA, 25 bp, Artificial
  Probe
tgaggcccagggacagttttcggac

SEQ ID NO: 242863 - DNA, 25 bp, Artificial
  Probe
tattccttccgcagccgtgaggtgc

SEQ ID NO: 242864 - DNA, 25 bp, Artificial
  Probe
gagtggccagatccagatccagtga

SEQ ID NO: 242865 - DNA, 25 bp, Artificial
  Probe
agtctgggcctcgatggggctccca

SEQ ID NO: 242866 - DNA, 25 bp, Artificial
  Probe
tcaagatgcgagagccgctgtccag

SEQ ID NO: 242867 - DNA, 25 bp, Artificial
  Probe
ctagctgtgctcaactcagccatca

SEQ ID NO: 242868 - DNA, 25 bp, Artificial
  Probe
cttcaagatgcgagagccgctgtcc

SEQ ID NO: 242869 - DNA, 25 bp, Artificial
  Probe
atggactggatcctggccctagctg

SEQ ID NO: 242870 - DNA, 25 bp, Artificial
  Probe
cggcatggactggatcctggcccta

SEQ ID NO: 242871 - DNA, 25 bp, Artificial
  Probe
tgatcggcagccagagtagcttaac

SEQ ID NO: 242872 - DNA, 25 bp, Artificial
  Probe
agtctcctttcctggcagtagattg

SEQ ID NO: 242873 - DNA, 25 bp, Artificial
  Probe
tcaccaaccagcatgggtaattatt

SEQ ID NO: 242874 - DNA, 25 bp, Artificial
  Probe
gcattttgagagcttgaagatttcc

SEQ ID NO: 242875 - DNA, 25 bp, Artificial
  Probe
ctgttgcagtgatcggcagccagag

SEQ ID NO: 242876 - DNA, 25 bp, Artificial
  Probe
caccatattcaccaaccagcatggg

SEQ ID NO: 242877 - DNA, 25 bp, Artificial
  Probe
ttgcggaagtcagtttctaaaatgc

SEQ ID NO: 242878 - DNA, 25 bp, Artificial
  Probe
acacaaaggactgttatggtttgca

SEQ ID NO: 242879 - DNA, 25 bp, Artificial
  Probe
agatctaaggattgccctgtaaaca

SEQ ID NO: 242880 - DNA, 25 bp, Artificial
  Probe
aggtgtctctgttgcagtgatcggc

SEQ ID NO: 242881 - DNA, 25 bp, Artificial
  Probe
aagatttcccattgcggaagtcagt

SEQ ID NO: 242882 - DNA, 25 bp, Artificial
  Probe
cataacagcattttgagagcttgaa

SEQ ID NO: 242883 - DNA, 25 bp, Artificial
  Probe
atgctcaagtggtaccacttaaagg

SEQ ID NO: 242884 - DNA, 25 bp, Artificial
  Probe
aagttaccctgctgcctggtagtct

SEQ ID NO: 242885 - DNA, 25 bp, Artificial
  Probe
tcaaagttaccctgctgcctggtag

SEQ ID NO: 242886 - DNA, 25 bp, Artificial
  Probe
attttgagagcttgaagatttccca

SEQ ID NO: 242887 - DNA, 25 bp, Artificial
  Probe
tcctttcctggcagtagattgtgtg

SEQ ID NO: 242888 - DNA, 25 bp, Artificial
  Probe
atgtggtcaaagttaccctgctgcc

SEQ ID NO: 242889 - DNA, 25 bp, Artificial
  Probe
aacacaaaggactgttatggtttgc

SEQ ID NO: 242890 - DNA, 25 bp, Artificial
  Probe
acagatctaaggattgccctgtaaa

SEQ ID NO: 242891 - DNA, 25 bp, Artificial
  Probe
cttatgctggtaatatcacattttg

SEQ ID NO: 242892 - DNA, 25 bp, Artificial
  Probe
agcttgaagatttcccattgcggaa

SEQ ID NO: 242893 - DNA, 25 bp, Artificial
  Probe
ggtaccacttaaaggcatgtgttct

SEQ ID NO: 242894 - DNA, 25 bp, Artificial
  Probe
ctaaaatgccttaataggtctgtgt

SEQ ID NO: 242895 - DNA, 25 bp, Artificial
  Probe
taatttatgctcaagtggtaccact

SEQ ID NO: 242896 - DNA, 25 bp, Artificial
  Probe
tgcctggtagtctagtagacttctg

SEQ ID NO: 242897 - DNA, 25 bp, Artificial
  Probe
taaggattgccctgtaaacataaca

SEQ ID NO: 242898 - DNA, 25 bp, Artificial
  Probe
tattgttttgcctcagagcagcttg

SEQ ID NO: 242899 - DNA, 25 bp, Artificial
  Probe
tcagagcagcttgtaagacattctc

SEQ ID NO: 242900 - DNA, 25 bp, Artificial
  Probe
ttcccattgcggaagtcagtttcta

SEQ ID NO: 242901 - DNA, 25 bp, Artificial
  Probe
gcagtgatcggcagccagagtagct

SEQ ID NO: 242902 - DNA, 25 bp, Artificial
  Probe
agagcttgaagatttcccattgcgg

SEQ ID NO: 242903 - DNA, 25 bp, Artificial
  Probe
taagctattgttttgcctcagagca

SEQ ID NO: 242904 - DNA, 25 bp, Artificial
  Probe
tgaagatttcccattgcggaagtca

SEQ ID NO: 242905 - DNA, 25 bp, Artificial
  Probe
ctgttgacagatctaaggattgccc

SEQ ID NO: 242906 - DNA, 25 bp, Artificial
  Probe
gattgccctgtaaacataacagcat

SEQ ID NO: 242907 - DNA, 25 bp, Artificial
  Probe
ctttcctggcagtagattgtgtggt

SEQ ID NO: 242908 - DNA, 25 bp, Artificial
  Probe
gtggtcaaagttaccctgctgcctg

SEQ ID NO: 242909 - DNA, 25 bp, Artificial
  Probe
ttttattgcttgtgcagtaactagc

SEQ ID NO: 242910 - DNA, 25 bp, Artificial
  Probe
gtagtctagtagacttctgtctgag

SEQ ID NO: 242911 - DNA, 25 bp, Artificial
  Probe
taccctgctgcctggtagtctagta

SEQ ID NO: 242912 - DNA, 25 bp, Artificial
  Probe
tctaatacagtacatctgttgacag

SEQ ID NO: 242913 - DNA, 25 bp, Artificial
  Probe
acaatgcttatatttgagttctgca

SEQ ID NO: 242914 - DNA, 25 bp, Artificial
  Probe
ccacttaaaggcatgtgttctttta

SEQ ID NO: 242915 - DNA, 25 bp, Artificial
  Probe
gccctgtaaacataacagcattttg

SEQ ID NO: 242916 - DNA, 25 bp, Artificial
  Probe
ttctaaaatgccttaataggtctgt

SEQ ID NO: 242917 - DNA, 25 bp, Artificial
  Probe
acagcatgctgctttgttaagttgc

SEQ ID NO: 242918 - DNA, 25 bp, Artificial
  Probe
tcactttaaacagcatgctgctttg

SEQ ID NO: 242919 - DNA, 25 bp, Artificial
  Probe
tgactcctcagactggcaaagtcca

SEQ ID NO: 242920 - DNA, 25 bp, Artificial
  Probe
aactggtgctttctgaaggagacaa

SEQ ID NO: 242921 - DNA, 25 bp, Artificial
  Probe
cgtgtcactttaaacagcatgctgc

SEQ ID NO: 242922 - DNA, 25 bp, Artificial
  Probe
gcaatagctgggtgattccccaatt

SEQ ID NO: 242923 - DNA, 25 bp, Artificial
  Probe
atgctgctttgttaagttgctgtca

SEQ ID NO: 242924 - DNA, 25 bp, Artificial
  Probe
actggtgctttctgaaggagacaag

SEQ ID NO: 242925 - DNA, 25 bp, Artificial
  Probe
gtgctttctgaaggagacaaggact

SEQ ID NO: 242926 - DNA, 25 bp, Artificial
  Probe
taagttgactgaaccactgcctgat

SEQ ID NO: 242927 - DNA, 25 bp, Artificial
  Probe
cagcatgctgctttgttaagttgct

SEQ ID NO: 242928 - DNA, 25 bp, Artificial
  Probe
caaggaagcctgtggaaagaactgg

SEQ ID NO: 242929 - DNA, 25 bp, Artificial
  Probe
gggtgattccccaattcactgacaa

SEQ ID NO: 242930 - DNA, 25 bp, Artificial
  Probe
aacagcatgctgctttgttaagttg

SEQ ID NO: 242931 - DNA, 25 bp, Artificial
  Probe
ctttaaacagcatgctgctttgtta

SEQ ID NO: 242932 - DNA, 25 bp, Artificial
  Probe
ggtgattccccaattcactgacaaa

SEQ ID NO: 242933 - DNA, 25 bp, Artificial
  Probe
gtgtcactttaaacagcatgctgct

SEQ ID NO: 242934 - DNA, 25 bp, Artificial
  Probe
gctatccgtgtcactttaaacagca

SEQ ID NO: 242935 - DNA, 25 bp, Artificial
  Probe
attgactcctcagactggcaaagtc

SEQ ID NO: 242936 - DNA, 25 bp, Artificial
  Probe
aagcctgtggaaagaactggtgctt

SEQ ID NO: 242937 - DNA, 25 bp, Artificial
  Probe
tgctgctttgttaagttgctgtcag

SEQ ID NO: 242938 - DNA, 25 bp, Artificial
  Probe
ttaagttgactgaaccactgcctga

SEQ ID NO: 242939 - DNA, 25 bp, Artificial
  Probe
aatagctgggtgattccccaattca

SEQ ID NO: 242940 - DNA, 25 bp, Artificial
  Probe
ctttctgaaggagacaaggactgag

SEQ ID NO: 242941 - DNA, 25 bp, Artificial
  Probe
agttgactgaaccactgcctgatgt

SEQ ID NO: 242942 - DNA, 25 bp, Artificial
  Probe
agcaaggaagcctgtggaaagaact

SEQ ID NO: 242943 - DNA, 25 bp, Artificial
  Probe
cgctatccgtgtcactttaaacagc

SEQ ID NO: 242944 - DNA, 25 bp, Artificial
  Probe
agaactggtgctttctgaaggagac

SEQ ID NO: 242945 - DNA, 25 bp, Artificial
  Probe
tagctgggtgattccccaattcact

SEQ ID NO: 242946 - DNA, 25 bp, Artificial
  Probe
ctggtgctttctgaaggagacaagg

SEQ ID NO: 242947 - DNA, 25 bp, Artificial
  Probe
tccgtgtcactttaaacagcatgct

SEQ ID NO: 242948 - DNA, 25 bp, Artificial
  Probe
gattgactcctcagactggcaaagt

SEQ ID NO: 242949 - DNA, 25 bp, Artificial
  Probe
tttttaagttgactgaaccactgcc

SEQ ID NO: 242950 - DNA, 25 bp, Artificial
  Probe
taaacagcatgctgctttgttaagt

SEQ ID NO: 242951 - DNA, 25 bp, Artificial
  Probe
tatccgtgtcactttaaacagcatg

SEQ ID NO: 242952 - DNA, 25 bp, Artificial
  Probe
ggtgctttctgaaggagacaaggac

SEQ ID NO: 242953 - DNA, 25 bp, Artificial
  Probe
atccgtgtcactttaaacagcatgc

SEQ ID NO: 242954 - DNA, 25 bp, Artificial
  Probe
tttaagttgactgaaccactgcctg

SEQ ID NO: 242955 - DNA, 25 bp, Artificial
  Probe
ttgactcctcagactggcaaagtcc

SEQ ID NO: 242956 - DNA, 25 bp, Artificial
  Probe
gcatgctgctttgttaagttgctgt

SEQ ID NO: 242957 - DNA, 25 bp, Artificial
  Probe
catgctgctttgttaagttgctgtc

SEQ ID NO: 242958 - DNA, 25 bp, Artificial
  Probe
gtcactttaaacagcatgctgcttt

SEQ ID NO: 242959 - DNA, 25 bp, Artificial
  Probe
ttgactgaaccactgcctgatgttt

SEQ ID NO: 242960 - DNA, 25 bp, Artificial
  Probe
gctttctgaaggagacaaggactga

SEQ ID NO: 242961 - DNA, 25 bp, Artificial
  Probe
gttgactgaaccactgcctgatgtt

SEQ ID NO: 242962 - DNA, 25 bp, Artificial
  Probe
tgctttctgaaggagacaaggactg

SEQ ID NO: 242963 - DNA, 25 bp, Artificial
  Probe
cagacctcagctagtgccccagtgt

SEQ ID NO: 242964 - DNA, 25 bp, Artificial
  Probe
ctgcttgctattgttctggccttct

SEQ ID NO: 242965 - DNA, 25 bp, Artificial
  Probe
cgcctctttgaaagggagactaaag

SEQ ID NO: 242966 - DNA, 25 bp, Artificial
  Probe
tcggaccctgcaattcctaccagta

SEQ ID NO: 242967 - DNA, 25 bp, Artificial
  Probe
tgattaaggtcctggggctgcttgc

SEQ ID NO: 242968 - DNA, 25 bp, Artificial
  Probe
atcctgaagccgttaaagactcgca

SEQ ID NO: 242969 - DNA, 25 bp, Artificial
  Probe
cagaagcagcggatcctgaagccgt

SEQ ID NO: 242970 - DNA, 25 bp, Artificial
  Probe
gccgttaaagactcgcactctccag

SEQ ID NO: 242971 - DNA, 25 bp, Artificial
  Probe
cctgattaaggtcctggggctgctt

SEQ ID NO: 242972 - DNA, 25 bp, Artificial
  Probe
taataacaccagcacaggtagatag

SEQ ID NO: 242973 - DNA, 25 bp, Artificial
  Probe
aagcttcatgggttctaatctgtcc

SEQ ID NO: 242974 - DNA, 25 bp, Artificial
  Probe
agctaaattaaggtcacaggatgct

SEQ ID NO: 242975 - DNA, 25 bp, Artificial
  Probe
tctgtaataacaccagcacaggtag

SEQ ID NO: 242976 - DNA, 25 bp, Artificial
  Probe
tcacgtggtattctgtaataacacc

SEQ ID NO: 242977 - DNA, 25 bp, Artificial
  Probe
catcaccgcctctttgaaagggaga

SEQ ID NO: 242978 - DNA, 25 bp, Artificial
  Probe
agtgccccagtgtctttcctgatta

SEQ ID NO: 242979 - DNA, 25 bp, Artificial
  Probe
agctagtgccccagtgtctttcctg

SEQ ID NO: 242980 - DNA, 25 bp, Artificial
  Probe
tgccaccagtcatggcaagttttga

SEQ ID NO: 242981 - DNA, 25 bp, Artificial
  Probe
tagtgccccagtgtctttcctgatt

SEQ ID NO: 242982 - DNA, 25 bp, Artificial
  Probe
ggttctaatctgtcccatgacactt

SEQ ID NO: 242983 - DNA, 25 bp, Artificial
  Probe
tcacccagaagcagcggatcctgaa

SEQ ID NO: 242984 - DNA, 25 bp, Artificial
  Probe
caaagaccctaaactggctgtgaaa

SEQ ID NO: 242985 - DNA, 25 bp, Artificial
  Probe
aggtcctggggctgcttgctattgt

SEQ ID NO: 242986 - DNA, 25 bp, Artificial
  Probe
ggatgctgttatcattctactatct

SEQ ID NO: 242987 - DNA, 25 bp, Artificial
  Probe
agcggatcctgaagccgttaaagac

SEQ ID NO: 242988 - DNA, 25 bp, Artificial
  Probe
ttcggaccctgcaattcctaccagt

SEQ ID NO: 242989 - DNA, 25 bp, Artificial
  Probe
ccctaaactggctgtgaaactctac

SEQ ID NO: 242990 - DNA, 25 bp, Artificial
  Probe
accagcacaggtagatagtgccacc

SEQ ID NO: 242991 - DNA, 25 bp, Artificial
  Probe
tttcaagcttcatgggttctaatct

SEQ ID NO: 242992 - DNA, 25 bp, Artificial
  Probe
tgcaattcctaccagtaccgcctag

SEQ ID NO: 242993 - DNA, 25 bp, Artificial
  Probe
aagaccctaaactggctgtgaaact

SEQ ID NO: 242994 - DNA, 25 bp, Artificial
  Probe
gtctttcctgattaaggtcctgggg

SEQ ID NO: 242995 - DNA, 25 bp, Artificial
  Probe
tgtaataacaccagcacaggtagat

SEQ ID NO: 242996 - DNA, 25 bp, Artificial
  Probe
ctcacccagaagcagcggatcctga

SEQ ID NO: 242997 - DNA, 25 bp, Artificial
  Probe
aattcctaccagtaccgcctagttg

SEQ ID NO: 242998 - DNA, 25 bp, Artificial
  Probe
cacaggatgctgttatcattctact

SEQ ID NO: 242999 - DNA, 25 bp, Artificial
  Probe
ctccaattcatcagtcttcacgtgg

SEQ ID NO: 243000 - DNA, 25 bp, Artificial
  Probe
accagtcatggcaagttttgagtta

SEQ ID NO: 243001 - DNA, 25 bp, Artificial
  Probe
tctttttcaagcttcatgggttcta

SEQ ID NO: 243002 - DNA, 25 bp, Artificial
  Probe
tgaaactctacttcggaccctgcaa

SEQ ID NO: 243003 - DNA, 25 bp, Artificial
  Probe
gtagatagtgccaccagtcatggca

SEQ ID NO: 243004 - DNA, 25 bp, Artificial
  Probe
attaaggtcacaggatgctgttatc

SEQ ID NO: 243005 - DNA, 25 bp, Artificial
  Probe
ccagtgtctttcctgattaaggtcc

SEQ ID NO: 243006 - DNA, 25 bp, Artificial
  Probe
gtattctgtaataacaccagcacag

SEQ ID NO: 243007 - DNA, 25 bp, Artificial
  Probe
gacctcagctagtgccccagtgtct

SEQ ID NO: 243008 - DNA, 25 bp, Artificial
  Probe
caccgcctctttgaaagggagacta

SEQ ID NO: 243009 - DNA, 25 bp, Artificial
  Probe
ccaaggctgcagaagccgctgccag

SEQ ID NO: 243010 - DNA, 25 bp, Artificial
  Probe
ccctccagaagacaagaagacccag

SEQ ID NO: 243011 - DNA, 25 bp, Artificial
  Probe
acaagaagacccagtagaccctgcc

SEQ ID NO: 243012 - DNA, 25 bp, Artificial
  Probe
agcctccctttaaccatctctggag

SEQ ID NO: 243013 - DNA, 25 bp, Artificial
  Probe
ctgggcctcccatggagctgcatct

SEQ ID NO: 243014 - DNA, 25 bp, Artificial
  Probe
ttgttcctcatgatagtgggcacac

SEQ ID NO: 243015 - DNA, 25 bp, Artificial
  Probe
tctctggagctcacaggagcacggg

SEQ ID NO: 243016 - DNA, 25 bp, Artificial
  Probe
aggagctagccctgatagaaaggtg

SEQ ID NO: 243017 - DNA, 25 bp, Artificial
  Probe
tgaggccaaggctgcagaagccgct

SEQ ID NO: 243018 - DNA, 25 bp, Artificial
  Probe
gaagccgctgccagcgcctattaca

SEQ ID NO: 243019 - DNA, 25 bp, Artificial
  Probe
atctctggagctcacaggagcacgg

SEQ ID NO: 243020 - DNA, 25 bp, Artificial
  Probe
acacaatgtctacatgcccacgagc

SEQ ID NO: 243021 - DNA, 25 bp, Artificial
  Probe
agccctgatagaaaggtggaactcc

SEQ ID NO: 243022 - DNA, 25 bp, Artificial
  Probe
gccccttgagcctggtgaccatcga

SEQ ID NO: 243023 - DNA, 25 bp, Artificial
  Probe
cccaggcctaagtataaagttagca

SEQ ID NO: 243024 - DNA, 25 bp, Artificial
  Probe
tggagctgcatctgggattccagga

SEQ ID NO: 243025 - DNA, 25 bp, Artificial
  Probe
aaaggtggaactcctggcctctgag

SEQ ID NO: 243026 - DNA, 25 bp, Artificial
  Probe
tgcatctgggattccaggaggccag

SEQ ID NO: 243027 - DNA, 25 bp, Artificial
  Probe
caaggctgcagaagccgctgccagc

SEQ ID NO: 243028 - DNA, 25 bp, Artificial
  Probe
gagctagccctgatagaaaggtgga

SEQ ID NO: 243029 - DNA, 25 bp, Artificial
  Probe
cgggcaacccacacaatgtctacat

SEQ ID NO: 243030 - DNA, 25 bp, Artificial
  Probe
agttagcaggagctagccctgatag

SEQ ID NO: 243031 - DNA, 25 bp, Artificial
  Probe
ccatctctggagctcacaggagcac

SEQ ID NO: 243032 - DNA, 25 bp, Artificial
  Probe
agctcagctctcagcgctggtctac

SEQ ID NO: 243033 - DNA, 25 bp, Artificial
  Probe
aagttagcaggagctagccctgata

SEQ ID NO: 243034 - DNA, 25 bp, Artificial
  Probe
tgcagaagccgctgccagcgcctat

SEQ ID NO: 243035 - DNA, 25 bp, Artificial
  Probe
tccccaggcctaagtataaagttag

SEQ ID NO: 243036 - DNA, 25 bp, Artificial
  Probe
cagagggactgtctggccactcctc

SEQ ID NO: 243037 - DNA, 25 bp, Artificial
  Probe
tactaccctccagaagacaagaaga

SEQ ID NO: 243038 - DNA, 25 bp, Artificial
  Probe
gttcctcatgatagtgggcacacac

SEQ ID NO: 243039 - DNA, 25 bp, Artificial
  Probe
tgtctggccactcctctactgctgt

SEQ ID NO: 243040 - DNA, 25 bp, Artificial
  Probe
gctgcatctgggattccaggaggcc

SEQ ID NO: 243041 - DNA, 25 bp, Artificial
  Probe
ctagctcagctctcagcgctggtct

SEQ ID NO: 243042 - DNA, 25 bp, Artificial
  Probe
gggggaaccccttgttcctcatgat

SEQ ID NO: 243043 - DNA, 25 bp, Artificial
  Probe
cacacaatgtctacatgcccacgag

SEQ ID NO: 243044 - DNA, 25 bp, Artificial
  Probe
ctttaaccatctctggagctcacag

SEQ ID NO: 243045 - DNA, 25 bp, Artificial
  Probe
ggcaacccacacaatgtctacatgc

SEQ ID NO: 243046 - DNA, 25 bp, Artificial
  Probe
ctcctgcagctgaggccaaggctgc

SEQ ID NO: 243047 - DNA, 25 bp, Artificial
  Probe
cagctgaggccaaggctgcagaagc

SEQ ID NO: 243048 - DNA, 25 bp, Artificial
  Probe
tcctcatgatagtgggcacacacac

SEQ ID NO: 243049 - DNA, 25 bp, Artificial
  Probe
acacacagagggactgtctggccac

SEQ ID NO: 243050 - DNA, 25 bp, Artificial
  Probe
gctcacaggagcacgggggaacccc

SEQ ID NO: 243051 - DNA, 25 bp, Artificial
  Probe
agctcacaggagcacgggggaaccc

SEQ ID NO: 243052 - DNA, 25 bp, Artificial
  Probe
cagggaaggccctgttcttccccag

SEQ ID NO: 243053 - DNA, 25 bp, Artificial
  Probe
acaatgtctacatgcccacgagcca

SEQ ID NO: 243054 - DNA, 25 bp, Artificial
  Probe
aggtggaactcctggcctctgagag

SEQ ID NO: 243055 - DNA, 25 bp, Artificial
  Probe
tatgagggcctagaggccgaggagt

SEQ ID NO: 243056 - DNA, 25 bp, Artificial
  Probe
gccttgtctgagccctatgagggcc

SEQ ID NO: 243057 - DNA, 25 bp, Artificial
  Probe
gccctatgagggcctagaggccgag

SEQ ID NO: 243058 - DNA, 25 bp, Artificial
  Probe
ttgtctgagccctatgagggcctag

SEQ ID NO: 243059 - DNA, 25 bp, Artificial
  Probe
ctatgagggcctagaggccgaggag

SEQ ID NO: 243060 - DNA, 25 bp, Artificial
  Probe
gagccctatgagggcctagaggccg

SEQ ID NO: 243061 - DNA, 25 bp, Artificial
  Probe
tatacaggagccttgtctgagccct

SEQ ID NO: 243062 - DNA, 25 bp, Artificial
  Probe
agaggccgaggagtgtggtatcctg

SEQ ID NO: 243063 - DNA, 25 bp, Artificial
  Probe
aagctatacaggagccttgtctgag

SEQ ID NO: 243064 - DNA, 25 bp, Artificial
  Probe
aggagccttgtctgagccctatgag

SEQ ID NO: 243065 - DNA, 25 bp, Artificial
  Probe
acaggagccttgtctgagccctatg

SEQ ID NO: 243066 - DNA, 25 bp, Artificial
  Probe
gaagctatacaggagccttgtctga

SEQ ID NO: 243067 - DNA, 25 bp, Artificial
  Probe
tacaggagccttgtctgagccctat

SEQ ID NO: 243068 - DNA, 25 bp, Artificial
  Probe
caggagccttgtctgagccctatga

SEQ ID NO: 243069 - DNA, 25 bp, Artificial
  Probe
agggcctagaggccgaggagtgtgg

SEQ ID NO: 243070 - DNA, 25 bp, Artificial
  Probe
ggagtgtggtatcctggatggctgc

SEQ ID NO: 243071 - DNA, 25 bp, Artificial
  Probe
gtctgagccctatgagggcctagag

SEQ ID NO: 243072 - DNA, 25 bp, Artificial
  Probe
cgaggagtgtggtatcctggatggc

SEQ ID NO: 243073 - DNA, 25 bp, Artificial
  Probe
tgtctgagccctatgagggcctaga

SEQ ID NO: 243074 - DNA, 25 bp, Artificial
  Probe
ccgaggagtgtggtatcctggatgg

SEQ ID NO: 243075 - DNA, 25 bp, Artificial
  Probe
cttgtctgagccctatgagggccta

SEQ ID NO: 243076 - DNA, 25 bp, Artificial
  Probe
ggaagctatacaggagccttgtctg

SEQ ID NO: 243077 - DNA, 25 bp, Artificial
  Probe
gcctagaggccgaggagtgtggtat

SEQ ID NO: 243078 - DNA, 25 bp, Artificial
  Probe
gagccttgtctgagccctatgaggg

SEQ ID NO: 243079 - DNA, 25 bp, Artificial
  Probe
gagtgtggtatcctggatggctgcg

SEQ ID NO: 243080 - DNA, 25 bp, Artificial
  Probe
agctatacaggagccttgtctgagc

SEQ ID NO: 243081 - DNA, 25 bp, Artificial
  Probe
gctatacaggagccttgtctgagcc

SEQ ID NO: 243082 - DNA, 25 bp, Artificial
  Probe
ggagccttgtctgagccctatgagg

SEQ ID NO: 243083 - DNA, 25 bp, Artificial
  Probe
ccttgtctgagccctatgagggcct

SEQ ID NO: 243084 - DNA, 25 bp, Artificial
  Probe
gaggccgaggagtgtggtatcctgg

SEQ ID NO: 243085 - DNA, 25 bp, Artificial
  Probe
ctgagccctatgagggcctagaggc

SEQ ID NO: 243086 - DNA, 25 bp, Artificial
  Probe
tctgagccctatgagggcctagagg

SEQ ID NO: 243087 - DNA, 25 bp, Artificial
  Probe
tgagggcctagaggccgaggagtgt

SEQ ID NO: 243088 - DNA, 25 bp, Artificial
  Probe
ccctatgagggcctagaggccgagg

SEQ ID NO: 243089 - DNA, 25 bp, Artificial
  Probe
atacaggagccttgtctgagcccta

SEQ ID NO: 243090 - DNA, 25 bp, Artificial
  Probe
agccctatgagggcctagaggccga

SEQ ID NO: 243091 - DNA, 25 bp, Artificial
  Probe
tgagccctatgagggcctagaggcc

SEQ ID NO: 243092 - DNA, 25 bp, Artificial
  Probe
ctatacaggagccttgtctgagccc

SEQ ID NO: 243093 - DNA, 25 bp, Artificial
  Probe
atgagggcctagaggccgaggagtg

SEQ ID NO: 243094 - DNA, 25 bp, Artificial
  Probe
cctagaggccgaggagtgtggtatc

SEQ ID NO: 243095 - DNA, 25 bp, Artificial
  Probe
aggccgaggagtgtggtatcctgga

SEQ ID NO: 243096 - DNA, 25 bp, Artificial
  Probe
gggcctagaggccgaggagtgtggt

SEQ ID NO: 243097 - DNA, 25 bp, Artificial
  Probe
cctatgagggcctagaggccgagga

SEQ ID NO: 243098 - DNA, 25 bp, Artificial
  Probe
agccttgtctgagccctatgagggc

SEQ ID NO: 243099 - DNA, 25 bp, Artificial
  Probe
gagggcctagaggccgaggagtgtg

SEQ ID NO: 243100 - DNA, 25 bp, Artificial
  Probe
ggcctagaggccgaggagtgtggta

SEQ ID NO: 243101 - DNA, 25 bp, Artificial
  Probe
tgagatcacgtctgaggctccgttc

SEQ ID NO: 243102 - DNA, 25 bp, Artificial
  Probe
gcagctctatccggtattttgagat

SEQ ID NO: 243103 - DNA, 25 bp, Artificial
  Probe
tctgaggctccgttcctgcattatc

SEQ ID NO: 243104 - DNA, 25 bp, Artificial
  Probe
agatcacgtctgaggctccgttcct

SEQ ID NO: 243105 - DNA, 25 bp, Artificial
  Probe
ttttgagatcacgtctgaggctccg

SEQ ID NO: 243106 - DNA, 25 bp, Artificial
  Probe
tatccggtattttgagatcacgtct

SEQ ID NO: 243107 - DNA, 25 bp, Artificial
  Probe
tgaggctccgttcctgcattatctt

SEQ ID NO: 243108 - DNA, 25 bp, Artificial
  Probe
ctatccggtattttgagatcacgtc

SEQ ID NO: 243109 - DNA, 25 bp, Artificial
  Probe
tttgagatcacgtctgaggctccgt

SEQ ID NO: 243110 - DNA, 25 bp, Artificial
  Probe
tcacgtctgaggctccgttcctgca

SEQ ID NO: 243111 - DNA, 25 bp, Artificial
  Probe
ctgaggctccgttcctgcattatct

SEQ ID NO: 243112 - DNA, 25 bp, Artificial
  Probe
gtattttgagatcacgtctgaggct

SEQ ID NO: 243113 - DNA, 25 bp, Artificial
  Probe
gatcacgtctgaggctccgttcctg

SEQ ID NO: 243114 - DNA, 25 bp, Artificial
  Probe
attttgagatcacgtctgaggctcc

SEQ ID NO: 243115 - DNA, 25 bp, Artificial
  Probe
tctatccggtattttgagatcacgt

SEQ ID NO: 243116 - DNA, 25 bp, Artificial
  Probe
ctctatccggtattttgagatcacg

SEQ ID NO: 243117 - DNA, 25 bp, Artificial
  Probe
gctctatccggtattttgagatcac

SEQ ID NO: 243118 - DNA, 25 bp, Artificial
  Probe
ttgagatcacgtctgaggctccgtt

SEQ ID NO: 243119 - DNA, 25 bp, Artificial
  Probe
gtctgaggctccgttcctgcattat

SEQ ID NO: 243120 - DNA, 25 bp, Artificial
  Probe
tattttgagatcacgtctgaggctc

SEQ ID NO: 243121 - DNA, 25 bp, Artificial
  Probe
cgtctgaggctccgttcctgcatta

SEQ ID NO: 243122 - DNA, 25 bp, Artificial
  Probe
gagatcacgtctgaggctccgttcc

SEQ ID NO: 243123 - DNA, 25 bp, Artificial
  Probe
acgtctgaggctccgttcctgcatt

SEQ ID NO: 243124 - DNA, 25 bp, Artificial
  Probe
atcacgtctgaggctccgttcctgc

SEQ ID NO: 243125 - DNA, 25 bp, Artificial
  Probe
cacgtctgaggctccgttcctgcat

SEQ ID NO: 243126 - DNA, 25 bp, Artificial
  Probe
aacgacgcatgcagttgttcgcttc

SEQ ID NO: 243127 - DNA, 25 bp, Artificial
  Probe
aatcccaaaacgacgcatgcagttg

SEQ ID NO: 243128 - DNA, 25 bp, Artificial
  Probe
ggctaccacacaatagaggatgaag

SEQ ID NO: 243129 - DNA, 25 bp, Artificial
  Probe
ctaccacacaatagaggatgaagcc

SEQ ID NO: 243130 - DNA, 25 bp, Artificial
  Probe
ttggctaggcccagggaccttgaca

SEQ ID NO: 243131 - DNA, 25 bp, Artificial
  Probe
aacatgcactttgaggtctgcccct

SEQ ID NO: 243132 - DNA, 25 bp, Artificial
  Probe
taccacacaatagaggatgaagccc

SEQ ID NO: 243133 - DNA, 25 bp, Artificial
  Probe
ggacactgactaccagatggtgaaa

SEQ ID NO: 243134 - DNA, 25 bp, Artificial
  Probe
actgactaccagatggtgaaaaaag

SEQ ID NO: 243135 - DNA, 25 bp, Artificial
  Probe
gtctgtcctctgattggatgtcttg

SEQ ID NO: 243136 - DNA, 25 bp, Artificial
  Probe
ccaaaacgacgcatgcagttgttcg

SEQ ID NO: 243137 - DNA, 25 bp, Artificial
  Probe
cgcatgcagttgttcgcttcaaaga

SEQ ID NO: 243138 - DNA, 25 bp, Artificial
  Probe
ttcaataaagcagctggtgactggg

SEQ ID NO: 243139 - DNA, 25 bp, Artificial
  Probe
ctaggcccagggaccttgacaatca

SEQ ID NO: 243140 - DNA, 25 bp, Artificial
  Probe
cctggaatcccaaaacgacgcatgc

SEQ ID NO: 243141 - DNA, 25 bp, Artificial
  Probe
gttcaataaagcagctggtgactgg

SEQ ID NO: 243142 - DNA, 25 bp, Artificial
  Probe
catgcactttgaggtctgcccctgg

SEQ ID NO: 243143 - DNA, 25 bp, Artificial
  Probe
aggatgaagccctctacaacaggct

SEQ ID NO: 243144 - DNA, 25 bp, Artificial
  Probe
cagttgttcgcttcaaagatgatca

SEQ ID NO: 243145 - DNA, 25 bp, Artificial
  Probe
gcctggaatcccaaaacgacgcatg

SEQ ID NO: 243146 - DNA, 25 bp, Artificial
  Probe
ggcccagggaccttgacaatcatgg

SEQ ID NO: 243147 - DNA, 25 bp, Artificial
  Probe
tggcgcctggaatcccaaaacgacg

SEQ ID NO: 243148 - DNA, 25 bp, Artificial
  Probe
cactttgaggtctgcccctggtcca

SEQ ID NO: 243149 - DNA, 25 bp, Artificial
  Probe
acatgcactttgaggtctgcccctg

SEQ ID NO: 243150 - DNA, 25 bp, Artificial
  Probe
ggggcacggctaccacacaatagag

SEQ ID NO: 243151 - DNA, 25 bp, Artificial
  Probe
aagccctctacaacaggctactgaa

SEQ ID NO: 243152 - DNA, 25 bp, Artificial
  Probe
gtcctctgattggatgtcttggcta

SEQ ID NO: 243153 - DNA, 25 bp, Artificial
  Probe
ccttgacaatcatgggcatgaatgt

SEQ ID NO: 243154 - DNA, 25 bp, Artificial
  Probe
atcatgggcatgaatgtgaaacctt

SEQ ID NO: 243155 - DNA, 25 bp, Artificial
  Probe
caatcatgggcatgaatgtgaaacc

SEQ ID NO: 243156 - DNA, 25 bp, Artificial
  Probe
cgacgcatgcagttgttcgcttcaa

SEQ ID NO: 243157 - DNA, 25 bp, Artificial
  Probe
ctgattggatgtcttggctaggccc

SEQ ID NO: 243158 - DNA, 25 bp, Artificial
  Probe
gcagttgttcgcttcaaagatgatc

SEQ ID NO: 243159 - DNA, 25 bp, Artificial
  Probe
gccctctacaacaggctactgaaag

SEQ ID NO: 243160 - DNA, 25 bp, Artificial
  Probe
gtgttcaataaagcagctggtgact

SEQ ID NO: 243161 - DNA, 25 bp, Artificial
  Probe
gcatgcagttgttcgcttcaaagat

SEQ ID NO: 243162 - DNA, 25 bp, Artificial
  Probe
ttccttccttcaagaccttgaagtg

SEQ ID NO: 243163 - DNA, 25 bp, Artificial
  Probe
aatcatgggcatgaatgtgaaacct

SEQ ID NO: 243164 - DNA, 25 bp, Artificial
  Probe
gatgtcttggctaggcccagggacc

SEQ ID NO: 243165 - DNA, 25 bp, Artificial
  Probe
acaatcatgggcatgaatgtgaaac

SEQ ID NO: 243166 - DNA, 25 bp, Artificial
  Probe
ccagggaccttgacaatcatgggca

SEQ ID NO: 243167 - DNA, 25 bp, Artificial
  Probe
aaacgacgcatgcagttgttcgctt

SEQ ID NO: 243168 - DNA, 25 bp, Artificial
  Probe
tctgtcctctgattggatgtcttgg

SEQ ID NO: 243169 - DNA, 25 bp, Artificial
  Probe
accacacaatagaggatgaagccct

SEQ ID NO: 243170 - DNA, 25 bp, Artificial
  Probe
gattggatgtcttggctaggcccag

SEQ ID NO: 243171 - DNA, 25 bp, Artificial
  Probe
gggcacggctaccacacaatagagg

SEQ ID NO: 243172 - DNA, 25 bp, Artificial
  Probe
atcacgcccaaatgctgtggtaggc

SEQ ID NO: 243173 - DNA, 25 bp, Artificial
  Probe
caatgcccaccagcactggattgtt

SEQ ID NO: 243174 - DNA, 25 bp, Artificial
  Probe
tttcaagaggccttgaaagactatg

SEQ ID NO: 243175 - DNA, 25 bp, Artificial
  Probe
tcaaatactggctgtattatttgca

SEQ ID NO: 243176 - DNA, 25 bp, Artificial
  Probe
ccgttatataccaaaatcacagtgg

SEQ ID NO: 243177 - DNA, 25 bp, Artificial
  Probe
cattccaatggatgaccataatgcc

SEQ ID NO: 243178 - DNA, 25 bp, Artificial
  Probe
ttcataaaggcatgtctatatcacg

SEQ ID NO: 243179 - DNA, 25 bp, Artificial
  Probe
ttaatattcctgtggatctggagct

SEQ ID NO: 243180 - DNA, 25 bp, Artificial
  Probe
tgatggtttgaactcacttacctac

SEQ ID NO: 243181 - DNA, 25 bp, Artificial
  Probe
ccaaccctcagaggtttgaccggat

SEQ ID NO: 243182 - DNA, 25 bp, Artificial
  Probe
tggacatacagagatacccgttata

SEQ ID NO: 243183 - DNA, 25 bp, Artificial
  Probe
cacagccacggcatatttctgtcgc

SEQ ID NO: 243184 - DNA, 25 bp, Artificial
  Probe
gcatgtctatatcacgcccaaatgc

SEQ ID NO: 243185 - DNA, 25 bp, Artificial
  Probe
tttgcatccagtccttcagcgccag

SEQ ID NO: 243186 - DNA, 25 bp, Artificial
  Probe
aagactatgactacaactgctttgt

SEQ ID NO: 243187 - DNA, 25 bp, Artificial
  Probe
ctgtggatctggagcttttggcaaa

SEQ ID NO: 243188 - DNA, 25 bp, Artificial
  Probe
acttgacttcggtgccaatgcccac

SEQ ID NO: 243189 - DNA, 25 bp, Artificial
  Probe
gcactcaagagacaagtttaatgag

SEQ ID NO: 243190 - DNA, 25 bp, Artificial
  Probe
agcactggattgttgactctgcctg

SEQ ID NO: 243191 - DNA, 25 bp, Artificial
  Probe
tccgtaaccggcaggagcacctcaa

SEQ ID NO: 243192 - DNA, 25 bp, Artificial
  Probe
actctgcctgcttgccctgaggagt

SEQ ID NO: 243193 - DNA, 25 bp, Artificial
  Probe
cttcagcgccagcaactcgactatg

SEQ ID NO: 243194 - DNA, 25 bp, Artificial
  Probe
gttggctttcaagaggccttgaaag

SEQ ID NO: 243195 - DNA, 25 bp, Artificial
  Probe
tcgggtttagcctgccttacgttca

SEQ ID NO: 243196 - DNA, 25 bp, Artificial
  Probe
tcccattccgtaaccggcaggagca

SEQ ID NO: 243197 - DNA, 25 bp, Artificial
  Probe
gctgtattatttgcatccagtcctt

SEQ ID NO: 243198 - DNA, 25 bp, Artificial
  Probe
tgcttgccctgaggagtccccgctg

SEQ ID NO: 243199 - DNA, 25 bp, Artificial
  Probe
gttcataaaggcatgtctatatcac

SEQ ID NO: 243200 - DNA, 25 bp, Artificial
  Probe
gacaagttcgggtttagcctgcctt

SEQ ID NO: 243201 - DNA, 25 bp, Artificial
  Probe
tatatcacgcccaaatgctgtggta

SEQ ID NO: 243202 - DNA, 25 bp, Artificial
  Probe
tcaagaggccttgaaagactatgac

SEQ ID NO: 243203 - DNA, 25 bp, Artificial
  Probe
cacaaggtggccatcattatcccat

SEQ ID NO: 243204 - DNA, 25 bp, Artificial
  Probe
gactccagccctgatgcggcttctg

SEQ ID NO: 243205 - DNA, 25 bp, Artificial
  Probe
tatcccattccgtaaccggcaggag

SEQ ID NO: 243206 - DNA, 25 bp, Artificial
  Probe
tggattgttgactctgcctgcttgc

SEQ ID NO: 243207 - DNA, 25 bp, Artificial
  Probe
caaaggaaacgatgcgccttgatgg

SEQ ID NO: 243208 - DNA, 25 bp, Artificial
  Probe
atccggcactcaagagacaagttta

SEQ ID NO: 243209 - DNA, 25 bp, Artificial
  Probe
ggttctgactccagccctgatgcgg

SEQ ID NO: 243210 - DNA, 25 bp, Artificial
  Probe
gacatacagagatacccgttatata

SEQ ID NO: 243211 - DNA, 25 bp, Artificial
  Probe
tgaagagcaacttgacttcggtgcc

SEQ ID NO: 243212 - DNA, 25 bp, Artificial
  Probe
cgcacatacaaaggaaacgatgcgc

SEQ ID NO: 243213 - DNA, 25 bp, Artificial
  Probe
accaggtgttggacatacagagata

SEQ ID NO: 243214 - DNA, 25 bp, Artificial
  Probe
aaacgatgcgccttgatggtttgaa

SEQ ID NO: 243215 - DNA, 25 bp, Artificial
  Probe
aaaggcatgtctatatcacgcccaa

SEQ ID NO: 243216 - DNA, 25 bp, Artificial
  Probe
gtggccatcattatcccattccgta

SEQ ID NO: 243217 - DNA, 25 bp, Artificial
  Probe
actccagccctgatgcggcttctgg

SEQ ID NO: 243218 - DNA, 25 bp, Artificial
  Probe
ctttaaattcacaagagtgcattgt

SEQ ID NO: 243219 - DNA, 25 bp, Artificial
  Probe
tgtcctttaaattcacaagagtgca

SEQ ID NO: 243220 - DNA, 25 bp, Artificial
  Probe
gcaaagccaagctggtagagaagcc

SEQ ID NO: 243221 - DNA, 25 bp, Artificial
  Probe
cctttaaattcacaagagtgcattg

SEQ ID NO: 243222 - DNA, 25 bp, Artificial
  Probe
gattaagggcctgtgtgaccaccag

SEQ ID NO: 243223 - DNA, 25 bp, Artificial
  Probe
tcacaagagtgcattgttttcctag

SEQ ID NO: 243224 - DNA, 25 bp, Artificial
  Probe
tccgtcaaagacaggttttcactat

SEQ ID NO: 243225 - DNA, 25 bp, Artificial
  Probe
ccagttgttgagtaacttggccctt

SEQ ID NO: 243226 - DNA, 25 bp, Artificial
  Probe
ccaccagttgttgagtaacttggcc

SEQ ID NO: 243227 - DNA, 25 bp, Artificial
  Probe
agctaactgctgagcggacaggtta

SEQ ID NO: 243228 - DNA, 25 bp, Artificial
  Probe
cccttagtcagcaaggggatcagaa

SEQ ID NO: 243229 - DNA, 25 bp, Artificial
  Probe
agaatcctgggcttagtgctgtcct

SEQ ID NO: 243230 - DNA, 25 bp, Artificial
  Probe
accaccagttgttgagtaacttggc

SEQ ID NO: 243231 - DNA, 25 bp, Artificial
  Probe
agtgctgtcctttaaattcacaaga

SEQ ID NO: 243232 - DNA, 25 bp, Artificial
  Probe
agagtgcattgttttcctagaacat

SEQ ID NO: 243233 - DNA, 25 bp, Artificial
  Probe
ttggtccgtcaaagacaggttttca

SEQ ID NO: 243234 - DNA, 25 bp, Artificial
  Probe
ccttagtcagcaaggggatcagaag

SEQ ID NO: 243235 - DNA, 25 bp, Artificial
  Probe
gggcttagtgctgtcctttaaattc

SEQ ID NO: 243236 - DNA, 25 bp, Artificial
  Probe
ataatcctgacttgcctggaactaa

SEQ ID NO: 243237 - DNA, 25 bp, Artificial
  Probe
caaagccaagctggtagagaagcca

SEQ ID NO: 243238 - DNA, 25 bp, Artificial
  Probe
ctgggcttagtgctgtcctttaaat

SEQ ID NO: 243239 - DNA, 25 bp, Artificial
  Probe
atagcaaacctccagctaactgctg

SEQ ID NO: 243240 - DNA, 25 bp, Artificial
  Probe
tgttgagtaacttggcccttagtca

SEQ ID NO: 243241 - DNA, 25 bp, Artificial
  Probe
aacttggcccttagtcagcaagggg

SEQ ID NO: 243242 - DNA, 25 bp, Artificial
  Probe
gcattgttttcctagaacatagcaa

SEQ ID NO: 243243 - DNA, 25 bp, Artificial
  Probe
tgtgaccaccagttgttgagtaact

SEQ ID NO: 243244 - DNA, 25 bp, Artificial
  Probe
agaagagaatcctgggcttagtgct

SEQ ID NO: 243245 - DNA, 25 bp, Artificial
  Probe
gaagcaaagccaagctggtagagaa

SEQ ID NO: 243246 - DNA, 25 bp, Artificial
  Probe
gtcctttaaattcacaagagtgcat

SEQ ID NO: 243247 - DNA, 25 bp, Artificial
  Probe
ttgttgagtaacttggcccttagtc

SEQ ID NO: 243248 - DNA, 25 bp, Artificial
  Probe
gcttagtgctgtcctttaaattcac

SEQ ID NO: 243249 - DNA, 25 bp, Artificial
  Probe
taagggcctgtgtgaccaccagttg

SEQ ID NO: 243250 - DNA, 25 bp, Artificial
  Probe
gtgcattgttttcctagaacatagc

SEQ ID NO: 243251 - DNA, 25 bp, Artificial
  Probe
gtaacttggcccttagtcagcaagg

SEQ ID NO: 243252 - DNA, 25 bp, Artificial
  Probe
tagtgctgtcctttaaattcacaag

SEQ ID NO: 243253 - DNA, 25 bp, Artificial
  Probe
accagttgttgagtaacttggccct

SEQ ID NO: 243254 - DNA, 25 bp, Artificial
  Probe
tgtgtgaccaccagttgttgagtaa

SEQ ID NO: 243255 - DNA, 25 bp, Artificial
  Probe
ctatataatcctgacttgcctggaa

SEQ ID NO: 243256 - DNA, 25 bp, Artificial
  Probe
ccgtcaaagacaggttttcactata

SEQ ID NO: 243257 - DNA, 25 bp, Artificial
  Probe
aaattcacaagagtgcattgttttc

SEQ ID NO: 243258 - DNA, 25 bp, Artificial
  Probe
gaatcctgggcttagtgctgtcctt

SEQ ID NO: 243259 - DNA, 25 bp, Artificial
  Probe
actgctgagcggacaggttactttc

SEQ ID NO: 243260 - DNA, 25 bp, Artificial
  Probe
aagagtgcattgttttcctagaaca

SEQ ID NO: 243261 - DNA, 25 bp, Artificial
  Probe
tagcaaacctccagctaactgctga

SEQ ID NO: 243262 - DNA, 25 bp, Artificial
  Probe
ggcctgtgtgaccaccagttgttga

SEQ ID NO: 243263 - DNA, 25 bp, Artificial
  Probe
tatataatcctgacttgcctggaac

SEQ ID NO: 243264 - DNA, 25 bp, Artificial
  Probe
ccacctcaggagaccacaaagcaaa

SEQ ID NO: 243265 - DNA, 25 bp, Artificial
  Probe
tgagatcctggactttgcactcagc

SEQ ID NO: 243266 - DNA, 25 bp, Artificial
  Probe
ctttcactttgattcgctggtgtga

SEQ ID NO: 243267 - DNA, 25 bp, Artificial
  Probe
ggtgaccacctcaggagaccacaaa

SEQ ID NO: 243268 - DNA, 25 bp, Artificial
  Probe
agaccacaaagcaaaagtattttgt

SEQ ID NO: 243269 - DNA, 25 bp, Artificial
  Probe
gccacactgctgagatcctggactt

SEQ ID NO: 243270 - DNA, 25 bp, Artificial
  Probe
agatgcttccctggtggtgaccacc

SEQ ID NO: 243271 - DNA, 25 bp, Artificial
  Probe
gtggtgaccacctcaggagaccaca

SEQ ID NO: 243272 - DNA, 25 bp, Artificial
  Probe
cctggtggtgaccacctcaggagac

SEQ ID NO: 243273 - DNA, 25 bp, Artificial
  Probe
cctggactttgcactcagcaaagat

SEQ ID NO: 243274 - DNA, 25 bp, Artificial
  Probe
acactgctgagatcctggactttgc

SEQ ID NO: 243275 - DNA, 25 bp, Artificial
  Probe
tcagcaaagatgcttccctggtggt

SEQ ID NO: 243276 - DNA, 25 bp, Artificial
  Probe
cactcagcaaagatgcttccctggt

SEQ ID NO: 243277 - DNA, 25 bp, Artificial
  Probe
acctcaggagaccacaaagcaaaag

SEQ ID NO: 243278 - DNA, 25 bp, Artificial
  Probe
agatcctggactttgcactcagcaa

SEQ ID NO: 243279 - DNA, 25 bp, Artificial
  Probe
taccggggccacactgctgagatcc

SEQ ID NO: 243280 - DNA, 25 bp, Artificial
  Probe
gaccacaaagcaaaagtattttgtg

SEQ ID NO: 243281 - DNA, 25 bp, Artificial
  Probe
gactttgcactcagcaaagatgctt

SEQ ID NO: 243282 - DNA, 25 bp, Artificial
  Probe
accacctcaggagaccacaaagcaa

SEQ ID NO: 243283 - DNA, 25 bp, Artificial
  Probe
caggagaccacaaagcaaaagtatt

SEQ ID NO: 243284 - DNA, 25 bp, Artificial
  Probe
cggggccacactgctgagatcctgg

SEQ ID NO: 243285 - DNA, 25 bp, Artificial
  Probe
atcctggactttgcactcagcaaag

SEQ ID NO: 243286 - DNA, 25 bp, Artificial
  Probe
ctgctgagatcctggactttgcact

SEQ ID NO: 243287 - DNA, 25 bp, Artificial
  Probe
gagaccacaaagcaaaagtattttg

SEQ ID NO: 243288 - DNA, 25 bp, Artificial
  Probe
ggtggtgaccacctcaggagaccac

SEQ ID NO: 243289 - DNA, 25 bp, Artificial
  Probe
atgcttccctggtggtgaccacctc

SEQ ID NO: 243290 - DNA, 25 bp, Artificial
  Probe
ccacactgctgagatcctggacttt

SEQ ID NO: 243291 - DNA, 25 bp, Artificial
  Probe
tggactttgcactcagcaaagatgc

SEQ ID NO: 243292 - DNA, 25 bp, Artificial
  Probe
tctttcactttgattcgctggtgtg

SEQ ID NO: 243293 - DNA, 25 bp, Artificial
  Probe
tgctgagatcctggactttgcactc

SEQ ID NO: 243294 - DNA, 25 bp, Artificial
  Probe
agcaaagatgcttccctggtggtga

SEQ ID NO: 243295 - DNA, 25 bp, Artificial
  Probe
tttgcactcagcaaagatgcttccc

SEQ ID NO: 243296 - DNA, 25 bp, Artificial
  Probe
gagatcctggactttgcactcagca

SEQ ID NO: 243297 - DNA, 25 bp, Artificial
  Probe
cttccctggtggtgaccacctcagg

SEQ ID NO: 243298 - DNA, 25 bp, Artificial
  Probe
gcttccctggtggtgaccacctcag

SEQ ID NO: 243299 - DNA, 25 bp, Artificial
  Probe
tggtggtgaccacctcaggagacca

SEQ ID NO: 243300 - DNA, 25 bp, Artificial
  Probe
ctcagcaaagatgcttccctggtgg

SEQ ID NO: 243301 - DNA, 25 bp, Artificial
  Probe
cacctcaggagaccacaaagcaaaa

SEQ ID NO: 243302 - DNA, 25 bp, Artificial
  Probe
gctgagatcctggactttgcactca

SEQ ID NO: 243303 - DNA, 25 bp, Artificial
  Probe
gtgaccacctcaggagaccacaaag

SEQ ID NO: 243304 - DNA, 25 bp, Artificial
  Probe
gggccacactgctgagatcctggac

SEQ ID NO: 243305 - DNA, 25 bp, Artificial
  Probe
ctcaggagaccacaaagcaaaagta

SEQ ID NO: 243306 - DNA, 25 bp, Artificial
  Probe
aagatgcttccctggtggtgaccac

SEQ ID NO: 243307 - DNA, 25 bp, Artificial
  Probe
ccggggccacactgctgagatcctg

SEQ ID NO: 243308 - DNA, 25 bp, Artificial
  Probe
actttgcactcagcaaagatgcttc

SEQ ID NO: 243309 - DNA, 25 bp, Artificial
  Probe
cacactgctgagatcctggactttg

SEQ ID NO: 243310 - DNA, 25 bp, Artificial
  Probe
gatctgggatgatgccccaggccag

SEQ ID NO: 243311 - DNA, 25 bp, Artificial
  Probe
tggcatgtagttggaccaagcagat

SEQ ID NO: 243312 - DNA, 25 bp, Artificial
  Probe
gcattctcttcttagtctaggtttc

SEQ ID NO: 243313 - DNA, 25 bp, Artificial
  Probe
acgactctctgtacggggatttgta

SEQ ID NO: 243314 - DNA, 25 bp, Artificial
  Probe
tttcctggaaatgtaagcattctct

SEQ ID NO: 243315 - DNA, 25 bp, Artificial
  Probe
aatttgcagggctctctgtctaccc

SEQ ID NO: 243316 - DNA, 25 bp, Artificial
  Probe
tggtatgaaggtctggcagagctct

SEQ ID NO: 243317 - DNA, 25 bp, Artificial
  Probe
tgaaataatgcagctcaaggaaagc

SEQ ID NO: 243318 - DNA, 25 bp, Artificial
  Probe
gaaatgtaagcattctcttcttagt

SEQ ID NO: 243319 - DNA, 25 bp, Artificial
  Probe
cactttagcttagatgcagtgggaa

SEQ ID NO: 243320 - DNA, 25 bp, Artificial
  Probe
agagctctgggctcttccagtcttc

SEQ ID NO: 243321 - DNA, 25 bp, Artificial
  Probe
gggttgtgctcaagtgtatcacaag

SEQ ID NO: 243322 - DNA, 25 bp, Artificial
  Probe
actggcaaggcatggtatgaaggtc

SEQ ID NO: 243323 - DNA, 25 bp, Artificial
  Probe
tgaaatactccgtgttcaaatctgg

SEQ ID NO: 243324 - DNA, 25 bp, Artificial
  Probe
cgtatgtcatagacccgttcacaca

SEQ ID NO: 243325 - DNA, 25 bp, Artificial
  Probe
ccgtgttcaaatctggtttgaaata

SEQ ID NO: 243326 - DNA, 25 bp, Artificial
  Probe
agaagtagtctcagggtgtcactgg

SEQ ID NO: 243327 - DNA, 25 bp, Artificial
  Probe
gtctcagggtgtcactggccgccct

SEQ ID NO: 243328 - DNA, 25 bp, Artificial
  Probe
agcccaaagcgtagggaggtcaaag

SEQ ID NO: 243329 - DNA, 25 bp, Artificial
  Probe
gcctttaccccgtatgtcatagacc

SEQ ID NO: 243330 - DNA, 25 bp, Artificial
  Probe
tagctgccacaagtgagtagttggg

SEQ ID NO: 243331 - DNA, 25 bp, Artificial
  Probe
cttctctagtcctgggcctctgagt

SEQ ID NO: 243332 - DNA, 25 bp, Artificial
  Probe
agggctctctgtctaccccattgct

SEQ ID NO: 243333 - DNA, 25 bp, Artificial
  Probe
attgctcctcactttagcttagatg

SEQ ID NO: 243334 - DNA, 25 bp, Artificial
  Probe
tgctcaagtgtatcacaagaatttc

SEQ ID NO: 243335 - DNA, 25 bp, Artificial
  Probe
ccaaatttacactggtgtgtgtagt

SEQ ID NO: 243336 - DNA, 25 bp, Artificial
  Probe
tctaacttggcctttaccccgtatg

SEQ ID NO: 243337 - DNA, 25 bp, Artificial
  Probe
tcagtattactgcttgaacgactct

SEQ ID NO: 243338 - DNA, 25 bp, Artificial
  Probe
tcagtgcaggagactggcaaggcat

SEQ ID NO: 243339 - DNA, 25 bp, Artificial
  Probe
acacagatgtgcaggctcaggcagt

SEQ ID NO: 243340 - DNA, 25 bp, Artificial
  Probe
gtgtatcacaagaatttcctggaaa

SEQ ID NO: 243341 - DNA, 25 bp, Artificial
  Probe
tgagtaatttgcagggctctctgtc

SEQ ID NO: 243342 - DNA, 25 bp, Artificial
  Probe
cagatctgggatgatgccccaggcc

SEQ ID NO: 243343 - DNA, 25 bp, Artificial
  Probe
atgtaggcttagtttctaaacctgt

SEQ ID NO: 243344 - DNA, 25 bp, Artificial
  Probe
caaggaaagcccaaagcgtagggag

SEQ ID NO: 243345 - DNA, 25 bp, Artificial
  Probe
ctctgactctcctttctggtttcgg

SEQ ID NO: 243346 - DNA, 25 bp, Artificial
  Probe
aaggtctggcagagctctgggctct

SEQ ID NO: 243347 - DNA, 25 bp, Artificial
  Probe
aggtttctctgactctcctttctgg

SEQ ID NO: 243348 - DNA, 25 bp, Artificial
  Probe
ctctgtacggggatttgtatgtgct

SEQ ID NO: 243349 - DNA, 25 bp, Artificial
  Probe
ggtgtgtccaagtggacacagatgt

SEQ ID NO: 243350 - DNA, 25 bp, Artificial
  Probe
accaagcagatctgggatgatgccc

SEQ ID NO: 243351 - DNA, 25 bp, Artificial
  Probe
gtcatagacccgttcacacagctct

SEQ ID NO: 243352 - DNA, 25 bp, Artificial
  Probe
atggtatgaaggtctggcagagctc

SEQ ID NO: 243353 - DNA, 25 bp, Artificial
  Probe
gtctggcagagctctgggctcttcc

SEQ ID NO: 243354 - DNA, 25 bp, Artificial
  Probe
ggcttagtttctaaacctgtgggtg

SEQ ID NO: 243355 - DNA, 25 bp, Artificial
  Probe
tagtcctgggcctctgagtaatttg

SEQ ID NO: 243356 - DNA, 25 bp, Artificial
  Probe
gtgcacttgttcctgctgggtttcc

SEQ ID NO: 243357 - DNA, 25 bp, Artificial
  Probe
tgctgggtttccactgagatctact

SEQ ID NO: 243358 - DNA, 25 bp, Artificial
  Probe
agtaggctgttactcctcactgccc

SEQ ID NO: 243359 - DNA, 25 bp, Artificial
  Probe
ggtctcaccctggagcccactggtg

SEQ ID NO: 243360 - DNA, 25 bp, Artificial
  Probe
cacttgttcctgctgggtttccact

SEQ ID NO: 243361 - DNA, 25 bp, Artificial
  Probe
ctggtgcacttgttcctgctgggtt

SEQ ID NO: 243362 - DNA, 25 bp, Artificial
  Probe
ggtttccactgagatctactggaga

SEQ ID NO: 243363 - DNA, 25 bp, Artificial
  Probe
ctggagcccactggtgcacttgttc

SEQ ID NO: 243364 - DNA, 25 bp, Artificial
  Probe
accctggagcccactggtgcacttg

SEQ ID NO: 243365 - DNA, 25 bp, Artificial
  Probe
ctgggtttccactgagatctactgg

SEQ ID NO: 243366 - DNA, 25 bp, Artificial
  Probe
gggtctcaccctggagcccactggt

SEQ ID NO: 243367 - DNA, 25 bp, Artificial
  Probe
tcttgggcagctacccctgggagga

SEQ ID NO: 243368 - DNA, 25 bp, Artificial
  Probe
ggcatcttgggcagctacccctggg

SEQ ID NO: 243369 - DNA, 25 bp, Artificial
  Probe
gcatcttgggcagctacccctggga

SEQ ID NO: 243370 - DNA, 25 bp, Artificial
  Probe
gggtttccactgagatctactggag

SEQ ID NO: 243371 - DNA, 25 bp, Artificial
  Probe
gagcccactggtgcacttgttcctg

SEQ ID NO: 243372 - DNA, 25 bp, Artificial
  Probe
cccctgggatgagtaggctgttact

SEQ ID NO: 243373 - DNA, 25 bp, Artificial
  Probe
ggtgcacttgttcctgctgggtttc

SEQ ID NO: 243374 - DNA, 25 bp, Artificial
  Probe
cctgctgggtttccactgagatcta

SEQ ID NO: 243375 - DNA, 25 bp, Artificial
  Probe
ccctgggatgagtaggctgttactc

SEQ ID NO: 243376 - DNA, 25 bp, Artificial
  Probe
cctaccctgtgcaggaaagcagctc

SEQ ID NO: 243377 - DNA, 25 bp, Artificial
  Probe
ttcctgctgggtttccactgagatc

SEQ ID NO: 243378 - DNA, 25 bp, Artificial
  Probe
ctaccctgtgcaggaaagcagctcc

SEQ ID NO: 243379 - DNA, 25 bp, Artificial
  Probe
tgcacttgttcctgctgggtttcca

SEQ ID NO: 243380 - DNA, 25 bp, Artificial
  Probe
gcccctgggatgagtaggctgttac

SEQ ID NO: 243381 - DNA, 25 bp, Artificial
  Probe
agcccactggtgcacttgttcctgc

SEQ ID NO: 243382 - DNA, 25 bp, Artificial
  Probe
cactgagatctactggagaaagaat

SEQ ID NO: 243383 - DNA, 25 bp, Artificial
  Probe
gcccactggtgcacttgttcctgct

SEQ ID NO: 243384 - DNA, 25 bp, Artificial
  Probe
ccactggtgcacttgttcctgctgg

SEQ ID NO: 243385 - DNA, 25 bp, Artificial
  Probe
taggctgttactcctcactgcccgt

SEQ ID NO: 243386 - DNA, 25 bp, Artificial
  Probe
ggagcccactggtgcacttgttcct

SEQ ID NO: 243387 - DNA, 25 bp, Artificial
  Probe
catcttgggcagctacccctgggag

SEQ ID NO: 243388 - DNA, 25 bp, Artificial
  Probe
ccctggagcccactggtgcacttgt

SEQ ID NO: 243389 - DNA, 25 bp, Artificial
  Probe
tcctgctgggtttccactgagatct

SEQ ID NO: 243390 - DNA, 25 bp, Artificial
  Probe
cactggtgcacttgttcctgctggg

SEQ ID NO: 243391 - DNA, 25 bp, Artificial
  Probe
atcttgggcagctacccctgggagg

SEQ ID NO: 243392 - DNA, 25 bp, Artificial
  Probe
tccactgagatctactggagaaaga

SEQ ID NO: 243393 - DNA, 25 bp, Artificial
  Probe
acttgttcctgctgggtttccactg

SEQ ID NO: 243394 - DNA, 25 bp, Artificial
  Probe
atgagtaggctgttactcctcactg

SEQ ID NO: 243395 - DNA, 25 bp, Artificial
  Probe
gttcctgctgggtttccactgagat

SEQ ID NO: 243396 - DNA, 25 bp, Artificial
  Probe
gtgtgggcatcttgggcagctaccc

SEQ ID NO: 243397 - DNA, 25 bp, Artificial
  Probe
cctggagcccactggtgcacttgtt

SEQ ID NO: 243398 - DNA, 25 bp, Artificial
  Probe
tgggtttccactgagatctactgga

SEQ ID NO: 243399 - DNA, 25 bp, Artificial
  Probe
ttgccccgcaggacgggactccagg

SEQ ID NO: 243400 - DNA, 25 bp, Artificial
  Probe
tgagtaggctgttactcctcactgc

SEQ ID NO: 243401 - DNA, 25 bp, Artificial
  Probe
gctgggtttccactgagatctactg

SEQ ID NO: 243402 - DNA, 25 bp, Artificial
  Probe
ccctccaaaggctagctgacaaatc

SEQ ID NO: 243403 - DNA, 25 bp, Artificial
  Probe
gaggcagtgctctggctcagaaagt

SEQ ID NO: 243404 - DNA, 25 bp, Artificial
  Probe
gtcggtccaaacacaattcccaggt

SEQ ID NO: 243405 - DNA, 25 bp, Artificial
  Probe
gtgggccgccatgtcggaagcctcc

SEQ ID NO: 243406 - DNA, 25 bp, Artificial
  Probe
ggcctcggcaacgagtctattaatt

SEQ ID NO: 243407 - DNA, 25 bp, Artificial
  Probe
ctgcagagtgtcatggttgggcctc

SEQ ID NO: 243408 - DNA, 25 bp, Artificial
  Probe
ttttagagaggcagtgctctggctc

SEQ ID NO: 243409 - DNA, 25 bp, Artificial
  Probe
tccaggatgtactgcagagtgtcat

SEQ ID NO: 243410 - DNA, 25 bp, Artificial
  Probe
aggctagctgacaaatcacaggtag

SEQ ID NO: 243411 - DNA, 25 bp, Artificial
  Probe
tcactctgcacagatgttccaggat

SEQ ID NO: 243412 - DNA, 25 bp, Artificial
  Probe
agcggaagtaagctccgacgccttc

SEQ ID NO: 243413 - DNA, 25 bp, Artificial
  Probe
cagtgctctggctcagaaagttcct

SEQ ID NO: 243414 - DNA, 25 bp, Artificial
  Probe
aaaggctagctgacaaatcacaggt

SEQ ID NO: 243415 - DNA, 25 bp, Artificial
  Probe
tttcctgacaataaaggaacgctga

SEQ ID NO: 243416 - DNA, 25 bp, Artificial
  Probe
ccaaaggctagctgacaaatcacag

SEQ ID NO: 243417 - DNA, 25 bp, Artificial
  Probe
aaggctagctgacaaatcacaggta

SEQ ID NO: 243418 - DNA, 25 bp, Artificial
  Probe
tgctctggctcagaaagttcctgag

SEQ ID NO: 243419 - DNA, 25 bp, Artificial
  Probe
catggttgggcctcggcaacgagtc

SEQ ID NO: 243420 - DNA, 25 bp, Artificial
  Probe
gtgtgcgatcactctgcacagatgt

SEQ ID NO: 243421 - DNA, 25 bp, Artificial
  Probe
acgtgggccgccatgtcggaagcct

SEQ ID NO: 243422 - DNA, 25 bp, Artificial
  Probe
atgttccaggatgtactgcagagtg

SEQ ID NO: 243423 - DNA, 25 bp, Artificial
  Probe
ttacagaaaacctgtgagtcccctc

SEQ ID NO: 243424 - DNA, 25 bp, Artificial
  Probe
tttacagaaaacctgtgagtcccct

SEQ ID NO: 243425 - DNA, 25 bp, Artificial
  Probe
ctggctcagaaagttcctgagataa

SEQ ID NO: 243426 - DNA, 25 bp, Artificial
  Probe
agtttcctgacaataaaggaacgct

SEQ ID NO: 243427 - DNA, 25 bp, Artificial
  Probe
aagttgttgagcatcagctggatca

SEQ ID NO: 243428 - DNA, 25 bp, Artificial
  Probe
ttgggcctcggcaacgagtctatta

SEQ ID NO: 243429 - DNA, 25 bp, Artificial
  Probe
tcctttgggaggacatttacagaaa

SEQ ID NO: 243430 - DNA, 25 bp, Artificial
  Probe
tgggcctcggcaacgagtctattaa

SEQ ID NO: 243431 - DNA, 25 bp, Artificial
  Probe
gatcactctgcacagatgttccagg

SEQ ID NO: 243432 - DNA, 25 bp, Artificial
  Probe
tcagctggatcagctgcccagggta

SEQ ID NO: 243433 - DNA, 25 bp, Artificial
  Probe
aacacaattcccaggttgtgggcag

SEQ ID NO: 243434 - DNA, 25 bp, Artificial
  Probe
tgggccgccatgtcggaagcctcct

SEQ ID NO: 243435 - DNA, 25 bp, Artificial
  Probe
ctctggctcagaaagttcctgagat

SEQ ID NO: 243436 - DNA, 25 bp, Artificial
  Probe
catttacagaaaacctgtgagtccc

SEQ ID NO: 243437 - DNA, 25 bp, Artificial
  Probe
gcacagatgttccaggatgtactgc

SEQ ID NO: 243438 - DNA, 25 bp, Artificial
  Probe
gtgcgatcactctgcacagatgttc

SEQ ID NO: 243439 - DNA, 25 bp, Artificial
  Probe
caggatgtactgcagagtgtcatgg

SEQ ID NO: 243440 - DNA, 25 bp, Artificial
  Probe
acaattcccaggttgtgggcagtca

SEQ ID NO: 243441 - DNA, 25 bp, Artificial
  Probe
agtcctttgggaggacatttacaga

SEQ ID NO: 243442 - DNA, 25 bp, Artificial
  Probe
tccaaacacaattcccaggttgtgg

SEQ ID NO: 243443 - DNA, 25 bp, Artificial
  Probe
ggctcagaaagttcctgagataagt

SEQ ID NO: 243444 - DNA, 25 bp, Artificial
  Probe
tactgcagagtgtcatggttgggcc

SEQ ID NO: 243445 - DNA, 25 bp, Artificial
  Probe
gagcatcagctggatcagctgccca

SEQ ID NO: 243446 - DNA, 25 bp, Artificial
  Probe
agtgtgcgatcactctgcacagatg

SEQ ID NO: 243447 - DNA, 25 bp, Artificial
  Probe
ggacatttacagaaaacctgtgagt

SEQ ID NO: 243448 - DNA, 25 bp, Artificial
  Probe
gcttcaggcccctgtacatcagtga

SEQ ID NO: 243449 - DNA, 25 bp, Artificial
  Probe
ggtctgttgcacaaatcacaaaaac

SEQ ID NO: 243450 - DNA, 25 bp, Artificial
  Probe
tagggctgaatccttaccccacttt

SEQ ID NO: 243451 - DNA, 25 bp, Artificial
  Probe
cacatactgaactgaaaagtctgtg

SEQ ID NO: 243452 - DNA, 25 bp, Artificial
  Probe
cctgtacatcagtgaggcatccttg

SEQ ID NO: 243453 - DNA, 25 bp, Artificial
  Probe
caggcccctgtacatcagtgaggca

SEQ ID NO: 243454 - DNA, 25 bp, Artificial
  Probe
ggaaaatgcaacacgccacatactg

SEQ ID NO: 243455 - DNA, 25 bp, Artificial
  Probe
acacgccacatactgaactgaaaag

SEQ ID NO: 243456 - DNA, 25 bp, Artificial
  Probe
aaagttctgccgtgtgtttaattgc

SEQ ID NO: 243457 - DNA, 25 bp, Artificial
  Probe
cgtgtgtttaattgccttgtgtgac

SEQ ID NO: 243458 - DNA, 25 bp, Artificial
  Probe
gtgaggcatccttgagctttaaagc

SEQ ID NO: 243459 - DNA, 25 bp, Artificial
  Probe
ccacttgtcgccttagggctgaatc

SEQ ID NO: 243460 - DNA, 25 bp, Artificial
  Probe
gccttagggctgaatccttacccca

SEQ ID NO: 243461 - DNA, 25 bp, Artificial
  Probe
ttcctttttggttgagtctcctgcc

SEQ ID NO: 243462 - DNA, 25 bp, Artificial
  Probe
gcccctgtacatcagtgaggcatcc

SEQ ID NO: 243463 - DNA, 25 bp, Artificial
  Probe
gttggtctgttgcacaaatcacaaa

SEQ ID NO: 243464 - DNA, 25 bp, Artificial
  Probe
aaagcactgagcaaactggaaaatg

SEQ ID NO: 243465 - DNA, 25 bp, Artificial
  Probe
ctggaaaatgcaacacgccacatac

SEQ ID NO: 243466 - DNA, 25 bp, Artificial
  Probe
attaagtgtccgttttgcttgcctg

SEQ ID NO: 243467 - DNA, 25 bp, Artificial
  Probe
tcgccttagggctgaatccttaccc

SEQ ID NO: 243468 - DNA, 25 bp, Artificial
  Probe
aaagctaggatgcttcaggcccctg

SEQ ID NO: 243469 - DNA, 25 bp, Artificial
  Probe
gcaacacgccacatactgaactgaa

SEQ ID NO: 243470 - DNA, 25 bp, Artificial
  Probe
gtccgttttgcttgcctggaatttt

SEQ ID NO: 243471 - DNA, 25 bp, Artificial
  Probe
ctaggatgcttcaggcccctgtaca

SEQ ID NO: 243472 - DNA, 25 bp, Artificial
  Probe
attgccttgtgtgaccacttgtcgc

SEQ ID NO: 243473 - DNA, 25 bp, Artificial
  Probe
acttgtcgccttagggctgaatcct

SEQ ID NO: 243474 - DNA, 25 bp, Artificial
  Probe
aatacttcctaggtttatggcatac

SEQ ID NO: 243475 - DNA, 25 bp, Artificial
  Probe
aggccagtttcagatagtttcattt

SEQ ID NO: 243476 - DNA, 25 bp, Artificial
  Probe
aagttggtctgttgcacaaatcaca

SEQ ID NO: 243477 - DNA, 25 bp, Artificial
  Probe
agcactgagcaaactggaaaatgca

SEQ ID NO: 243478 - DNA, 25 bp, Artificial
  Probe
ctcctgcctgccaaaagctaggatg

SEQ ID NO: 243479 - DNA, 25 bp, Artificial
  Probe
cacgccacatactgaactgaaaagt

SEQ ID NO: 243480 - DNA, 25 bp, Artificial
  Probe
gcatccttgagctttaaagcactga

SEQ ID NO: 243481 - DNA, 25 bp, Artificial
  Probe
aggcatccttgagctttaaagcact

SEQ ID NO: 243482 - DNA, 25 bp, Artificial
  Probe
ccgtgtgtttaattgccttgtgtga

SEQ ID NO: 243483 - DNA, 25 bp, Artificial
  Probe
catcagtgaggcatccttgagcttt

SEQ ID NO: 243484 - DNA, 25 bp, Artificial
  Probe
tgtgaccacttgtcgccttagggct

SEQ ID NO: 243485 - DNA, 25 bp, Artificial
  Probe
tgccgtgtgtttaattgccttgtgt

SEQ ID NO: 243486 - DNA, 25 bp, Artificial
  Probe
cttagggctgaatccttaccccact

SEQ ID NO: 243487 - DNA, 25 bp, Artificial
  Probe
ctgccaaaagctaggatgcttcagg

SEQ ID NO: 243488 - DNA, 25 bp, Artificial
  Probe
gaggcatccttgagctttaaagcac

SEQ ID NO: 243489 - DNA, 25 bp, Artificial
  Probe
ggttgagtctcctgcctgccaaaag

SEQ ID NO: 243490 - DNA, 25 bp, Artificial
  Probe
tgtacatcagtgaggcatccttgag

SEQ ID NO: 243491 - DNA, 25 bp, Artificial
  Probe
ttaaagttggtctgttgcacaaatc

SEQ ID NO: 243492 - DNA, 25 bp, Artificial
  Probe
atgcaacacgccacatactgaactg

SEQ ID NO: 243493 - DNA, 25 bp, Artificial
  Probe
tttaaagcactgagcaaactggaaa

SEQ ID NO: 243494 - DNA, 25 bp, Artificial
  Probe
taaacttaaggtgctggcagttggc

SEQ ID NO: 243495 - DNA, 25 bp, Artificial
  Probe
agtggacactatcattacaaagctc

SEQ ID NO: 243496 - DNA, 25 bp, Artificial
  Probe
gcttgttggcttagtggacactatc

SEQ ID NO: 243497 - DNA, 25 bp, Artificial
  Probe
tgtctctgatgttccctcttcagtt

SEQ ID NO: 243498 - DNA, 25 bp, Artificial
  Probe
aagctctcaggtgagacttcccatt

SEQ ID NO: 243499 - DNA, 25 bp, Artificial
  Probe
cttgttggcttagtggacactatca

SEQ ID NO: 243500 - DNA, 25 bp, Artificial
  Probe
aacttaaggtgctggcagttggctt

SEQ ID NO: 243501 - DNA, 25 bp, Artificial
  Probe
gtggacactatcattacaaagctct

SEQ ID NO: 243502 - DNA, 25 bp, Artificial
  Probe
ccatttccaagaagggatggagtat

SEQ ID NO: 243503 - DNA, 25 bp, Artificial
  Probe
agacttcccatttccaagaagggat

SEQ ID NO: 243504 - DNA, 25 bp, Artificial
  Probe
tcattgaaatgctaagtctgaatcc

SEQ ID NO: 243505 - DNA, 25 bp, Artificial
  Probe
atcattacaaagctctcaggtgaga

SEQ ID NO: 243506 - DNA, 25 bp, Artificial
  Probe
ttcccatttccaagaagggatggag

SEQ ID NO: 243507 - DNA, 25 bp, Artificial
  Probe
tcaggtgagacttcccatttccaag

SEQ ID NO: 243508 - DNA, 25 bp, Artificial
  Probe
agaaggaaatcgtcctcataaactt

SEQ ID NO: 243509 - DNA, 25 bp, Artificial
  Probe
gtcctcataaacttaaggtgctggc

SEQ ID NO: 243510 - DNA, 25 bp, Artificial
  Probe
ctggcagttggcttgttggcttagt

SEQ ID NO: 243511 - DNA, 25 bp, Artificial
  Probe
tgttggcttagtggacactatcatt

SEQ ID NO: 243512 - DNA, 25 bp, Artificial
  Probe
cgtcctcataaacttaaggtgctgg

SEQ ID NO: 243513 - DNA, 25 bp, Artificial
  Probe
ggaaatcgtcctcataaacttaagg

SEQ ID NO: 243514 - DNA, 25 bp, Artificial
  Probe
actatcattacaaagctctcaggtg

SEQ ID NO: 243515 - DNA, 25 bp, Artificial
  Probe
caaagctctcaggtgagacttccca

SEQ ID NO: 243516 - DNA, 25 bp, Artificial
  Probe
tgctaagtctgaatcccccattctg

SEQ ID NO: 243517 - DNA, 25 bp, Artificial
  Probe
ccattgtaccctgttagaaaacaga

SEQ ID NO: 243518 - DNA, 25 bp, Artificial
  Probe
acttcccatttccaagaagggatgg

SEQ ID NO: 243519 - DNA, 25 bp, Artificial
  Probe
actgtctctgatgttccctcttcag

SEQ ID NO: 243520 - DNA, 25 bp, Artificial
  Probe
tggcttgttggcttagtggacacta

SEQ ID NO: 243521 - DNA, 25 bp, Artificial
  Probe
aaatcgtcctcataaacttaaggtg

SEQ ID NO: 243522 - DNA, 25 bp, Artificial
  Probe
aggaaatcgtcctcataaacttaag

SEQ ID NO: 243523 - DNA, 25 bp, Artificial
  Probe
cctcataaacttaaggtgctggcag

SEQ ID NO: 243524 - DNA, 25 bp, Artificial
  Probe
tgtaccctgttagaaaacagaagga

SEQ ID NO: 243525 - DNA, 25 bp, Artificial
  Probe
ttggcttagtggacactatcattac

SEQ ID NO: 243526 - DNA, 25 bp, Artificial
  Probe
ctctcaggtgagacttcccatttcc

SEQ ID NO: 243527 - DNA, 25 bp, Artificial
  Probe
gcttagtggacactatcattacaaa

SEQ ID NO: 243528 - DNA, 25 bp, Artificial
  Probe
tacaaagctctcaggtgagacttcc

SEQ ID NO: 243529 - DNA, 25 bp, Artificial
  Probe
tgagacttcccatttccaagaaggg

SEQ ID NO: 243530 - DNA, 25 bp, Artificial
  Probe
gtgagacttcccatttccaagaagg

SEQ ID NO: 243531 - DNA, 25 bp, Artificial
  Probe
tagtggacactatcattacaaagct

SEQ ID NO: 243532 - DNA, 25 bp, Artificial
  Probe
tggcttagtggacactatcattaca

SEQ ID NO: 243533 - DNA, 25 bp, Artificial
  Probe
tcccatttccaagaagggatggagt

SEQ ID NO: 243534 - DNA, 25 bp, Artificial
  Probe
tcattacaaagctctcaggtgagac

SEQ ID NO: 243535 - DNA, 25 bp, Artificial
  Probe
cataaacttaaggtgctggcagttg

SEQ ID NO: 243536 - DNA, 25 bp, Artificial
  Probe
cattgtaccctgttagaaaacagaa

SEQ ID NO: 243537 - DNA, 25 bp, Artificial
  Probe
cagttggcttgttggcttagtggac

SEQ ID NO: 243538 - DNA, 25 bp, Artificial
  Probe
agctctcaggtgagacttcccattt

SEQ ID NO: 243539 - DNA, 25 bp, Artificial
  Probe
gaaggaaatcgtcctcataaactta

SEQ ID NO: 243540 - DNA, 25 bp, Artificial
  Probe
gattgtcgcagacagtgtttccttt

SEQ ID NO: 243541 - DNA, 25 bp, Artificial
  Probe
cactcttctgtcctgatttaagctg

SEQ ID NO: 243542 - DNA, 25 bp, Artificial
  Probe
tcaacctatgacttgactggtccta

SEQ ID NO: 243543 - DNA, 25 bp, Artificial
  Probe
atttgtgagcatgctttctgattac

SEQ ID NO: 243544 - DNA, 25 bp, Artificial
  Probe
tccgcaaactgaaatgattgtcgca

SEQ ID NO: 243545 - DNA, 25 bp, Artificial
  Probe
ttcgcacatttttagggtgccctta

SEQ ID NO: 243546 - DNA, 25 bp, Artificial
  Probe
ttccgcaaactgaaatgattgtcgc

SEQ ID NO: 243547 - DNA, 25 bp, Artificial
  Probe
agttgttcgcacatttttagggtgc

SEQ ID NO: 243548 - DNA, 25 bp, Artificial
  Probe
cttctgtcctgatttaagctgccta

SEQ ID NO: 243549 - DNA, 25 bp, Artificial
  Probe
cctgatttaagctgcctagtgtagt

SEQ ID NO: 243550 - DNA, 25 bp, Artificial
  Probe
ttttcaacctatgacttgactggtc

SEQ ID NO: 243551 - DNA, 25 bp, Artificial
  Probe
tttaagctgcctagtgtagtgctat

SEQ ID NO: 243552 - DNA, 25 bp, Artificial
  Probe
atagaagcctgttggttccgcaaac

SEQ ID NO: 243553 - DNA, 25 bp, Artificial
  Probe
acatagtttctactgacaggtttca

SEQ ID NO: 243554 - DNA, 25 bp, Artificial
  Probe
ttgctgatttgtgagcatgctttct

SEQ ID NO: 243555 - DNA, 25 bp, Artificial
  Probe
tttcaacctatgacttgactggtcc

SEQ ID NO: 243556 - DNA, 25 bp, Artificial
  Probe
tgtcgcagacagtgtttcctttttc

SEQ ID NO: 243557 - DNA, 25 bp, Artificial
  Probe
agcatgctttctgattacaaaagcg

SEQ ID NO: 243558 - DNA, 25 bp, Artificial
  Probe
tctgtcctgatttaagctgcctagt

SEQ ID NO: 243559 - DNA, 25 bp, Artificial
  Probe
ttctgattacaaaagcgtgagtggc

SEQ ID NO: 243560 - DNA, 25 bp, Artificial
  Probe
tctgattacaaaagcgtgagtggcg

SEQ ID NO: 243561 - DNA, 25 bp, Artificial
  Probe
atgattgtcgcagacagtgtttcct

SEQ ID NO: 243562 - DNA, 25 bp, Artificial
  Probe
tgctgatttgtgagcatgctttctg

SEQ ID NO: 243563 - DNA, 25 bp, Artificial
  Probe
tgatagaagcctgttggttccgcaa

SEQ ID NO: 243564 - DNA, 25 bp, Artificial
  Probe
ctcttctgtcctgatttaagctgcc

SEQ ID NO: 243565 - DNA, 25 bp, Artificial
  Probe
gtcgcagacagtgtttcctttttct

SEQ ID NO: 243566 - DNA, 25 bp, Artificial
  Probe
aagcctgttggttccgcaaactgaa

SEQ ID NO: 243567 - DNA, 25 bp, Artificial
  Probe
tatgacttgactggtcctaaagctg

SEQ ID NO: 243568 - DNA, 25 bp, Artificial
  Probe
attgtcgcagacagtgtttcctttt

SEQ ID NO: 243569 - DNA, 25 bp, Artificial
  Probe
tattttcaacctatgacttgactgg

SEQ ID NO: 243570 - DNA, 25 bp, Artificial
  Probe
ctatgacttgactggtcctaaagct

SEQ ID NO: 243571 - DNA, 25 bp, Artificial
  Probe
ttgtgagcatgctttctgattacaa

SEQ ID NO: 243572 - DNA, 25 bp, Artificial
  Probe
atgctttctgattacaaaagcgtga

SEQ ID NO: 243573 - DNA, 25 bp, Artificial
  Probe
tgttggttccgcaaactgaaatgat

SEQ ID NO: 243574 - DNA, 25 bp, Artificial
  Probe
atttaagctgcctagtgtagtgcta

SEQ ID NO: 243575 - DNA, 25 bp, Artificial
  Probe
ctgatttgtgagcatgctttctgat

SEQ ID NO: 243576 - DNA, 25 bp, Artificial
  Probe
gttgctgatttgtgagcatgctttc

SEQ ID NO: 243577 - DNA, 25 bp, Artificial
  Probe
ctttctgattacaaaagcgtgagtg

SEQ ID NO: 243578 - DNA, 25 bp, Artificial
  Probe
ttggttccgcaaactgaaatgattg

SEQ ID NO: 243579 - DNA, 25 bp, Artificial
  Probe
tcctgatttaagctgcctagtgtag

SEQ ID NO: 243580 - DNA, 25 bp, Artificial
  Probe
ttgatagaagcctgttggttccgca

SEQ ID NO: 243581 - DNA, 25 bp, Artificial
  Probe
gtgagcatgctttctgattacaaaa

SEQ ID NO: 243582 - DNA, 25 bp, Artificial
  Probe
aatgattgtcgcagacagtgtttcc

SEQ ID NO: 243583 - DNA, 25 bp, Artificial
  Probe
gcatgctttctgattacaaaagcgt

SEQ ID NO: 243584 - DNA, 25 bp, Artificial
  Probe
ttgttcgcacatttttagggtgccc

SEQ ID NO: 243585 - DNA, 25 bp, Artificial
  Probe
gcactcttctgtcctgatttaagct

SEQ ID NO: 243586 - DNA, 25 bp, Artificial
  Probe
ccttggcttatctattaagaggtat

SEQ ID NO: 243587 - DNA, 25 bp, Artificial
  Probe
ctgtcgtctccctgtgtccacagtg

SEQ ID NO: 243588 - DNA, 25 bp, Artificial
  Probe
tgcactaggggacatcatagtgttt

SEQ ID NO: 243589 - DNA, 25 bp, Artificial
  Probe
ctcttgacttggaatggaaatccag

SEQ ID NO: 243590 - DNA, 25 bp, Artificial
  Probe
cagtgcttaacttatgatagcttct

SEQ ID NO: 243591 - DNA, 25 bp, Artificial
  Probe
tccctgtgtccacagtggagcatcc

SEQ ID NO: 243592 - DNA, 25 bp, Artificial
  Probe
tggcactcctagattattacaatag

SEQ ID NO: 243593 - DNA, 25 bp, Artificial
  Probe
gtcgtctccctgtgtccacagtgga

SEQ ID NO: 243594 - DNA, 25 bp, Artificial
  Probe
atcttctgtcgtctccctgtgtcca

SEQ ID NO: 243595 - DNA, 25 bp, Artificial
  Probe
tccatactcagtgagctcagctctg

SEQ ID NO: 243596 - DNA, 25 bp, Artificial
  Probe
atggaaatccagtgcttaacttatg

SEQ ID NO: 243597 - DNA, 25 bp, Artificial
  Probe
tgagctcagctctgctctcatatcc

SEQ ID NO: 243598 - DNA, 25 bp, Artificial
  Probe
gagaagtctctgctatcattttatc

SEQ ID NO: 243599 - DNA, 25 bp, Artificial
  Probe
gctatcattttatcccccaggcatg

SEQ ID NO: 243600 - DNA, 25 bp, Artificial
  Probe
catcatagtgtttgacacaagtgtc

SEQ ID NO: 243601 - DNA, 25 bp, Artificial
  Probe
tcaggccaagactttccatactcag

SEQ ID NO: 243602 - DNA, 25 bp, Artificial
  Probe
tggcaacacatcagcttcagtctct

SEQ ID NO: 243603 - DNA, 25 bp, Artificial
  Probe
atggccttggcttatctattaagag

SEQ ID NO: 243604 - DNA, 25 bp, Artificial
  Probe
atccactgggttgaaaagctagctg

SEQ ID NO: 243605 - DNA, 25 bp, Artificial
  Probe
tgtttgacacaagtgtcctgactgg

SEQ ID NO: 243606 - DNA, 25 bp, Artificial
  Probe
ggctaattcatcttctgtcgtctcc

SEQ ID NO: 243607 - DNA, 25 bp, Artificial
  Probe
tcatcttctgtcgtctccctgtgtc

SEQ ID NO: 243608 - DNA, 25 bp, Artificial
  Probe
aaatggcaacacatcagcttcagtc

SEQ ID NO: 243609 - DNA, 25 bp, Artificial
  Probe
ttactatgcactaggggacatcata

SEQ ID NO: 243610 - DNA, 25 bp, Artificial
  Probe
ggcactcctagattattacaatagt

SEQ ID NO: 243611 - DNA, 25 bp, Artificial
  Probe
aaagctagctggttttgctttgact

SEQ ID NO: 243612 - DNA, 25 bp, Artificial
  Probe
gaaatccagtgcttaacttatgata

SEQ ID NO: 243613 - DNA, 25 bp, Artificial
  Probe
gtgtttgacacaagtgtcctgactg

SEQ ID NO: 243614 - DNA, 25 bp, Artificial
  Probe
agagaagtctctgctatcattttat

SEQ ID NO: 243615 - DNA, 25 bp, Artificial
  Probe
ggacatcatagtgtttgacacaagt

SEQ ID NO: 243616 - DNA, 25 bp, Artificial
  Probe
tgaaaatggcaacacatcagcttca

SEQ ID NO: 243617 - DNA, 25 bp, Artificial
  Probe
caaagaatccactgggttgaaaagc

SEQ ID NO: 243618 - DNA, 25 bp, Artificial
  Probe
agaggctaattcatcttctgtcgtc

SEQ ID NO: 243619 - DNA, 25 bp, Artificial
  Probe
atgcactaggggacatcatagtgtt

SEQ ID NO: 243620 - DNA, 25 bp, Artificial
  Probe
atagtgtttgacacaagtgtcctga

SEQ ID NO: 243621 - DNA, 25 bp, Artificial
  Probe
ttcatcttctgtcgtctccctgtgt

SEQ ID NO: 243622 - DNA, 25 bp, Artificial
  Probe
tcctgaaaactcaggccaagacttt

SEQ ID NO: 243623 - DNA, 25 bp, Artificial
  Probe
ctagctggttttgctttgactttga

SEQ ID NO: 243624 - DNA, 25 bp, Artificial
  Probe
acatcagcttcagtctcttgacttg

SEQ ID NO: 243625 - DNA, 25 bp, Artificial
  Probe
tcagtctcttgacttggaatggaaa

SEQ ID NO: 243626 - DNA, 25 bp, Artificial
  Probe
tcagattattactatgcactagggg

SEQ ID NO: 243627 - DNA, 25 bp, Artificial
  Probe
tgcttaacttatgatagcttctggc

SEQ ID NO: 243628 - DNA, 25 bp, Artificial
  Probe
cactaggggacatcatagtgtttga

SEQ ID NO: 243629 - DNA, 25 bp, Artificial
  Probe
aatggaaatccagtgcttaacttat

SEQ ID NO: 243630 - DNA, 25 bp, Artificial
  Probe
gaatccactgggttgaaaagctagc

SEQ ID NO: 243631 - DNA, 25 bp, Artificial
  Probe
gaagcaaagaatccactgggttgaa

SEQ ID NO: 243632 - DNA, 25 bp, Artificial
  Probe
tgttaaactgcctgcttgggcaaaa

SEQ ID NO: 243633 - DNA, 25 bp, Artificial
  Probe
atctgcttatcttggcatctgttaa

SEQ ID NO: 243634 - DNA, 25 bp, Artificial
  Probe
ctagaatttgattcccttgataaag

SEQ ID NO: 243635 - DNA, 25 bp, Artificial
  Probe
taaagaatctcatggaattgcctct

SEQ ID NO: 243636 - DNA, 25 bp, Artificial
  Probe
gcttatcttggcatctgttaaactg

SEQ ID NO: 243637 - DNA, 25 bp, Artificial
  Probe
ttgggtcctccatctcttattcttg

SEQ ID NO: 243638 - DNA, 25 bp, Artificial
  Probe
gtagcttcaactagaatttgattcc

SEQ ID NO: 243639 - DNA, 25 bp, Artificial
  Probe
ggaaagcctcatgctttcacccact

SEQ ID NO: 243640 - DNA, 25 bp, Artificial
  Probe
cattgtagcttcaactagaatttga

SEQ ID NO: 243641 - DNA, 25 bp, Artificial
  Probe
ccttgataaagaatctcatggaatt

SEQ ID NO: 243642 - DNA, 25 bp, Artificial
  Probe
acatttgtgacaagacaaagttctt

SEQ ID NO: 243643 - DNA, 25 bp, Artificial
  Probe
ttgggcaaaagctccctgcagctgc

SEQ ID NO: 243644 - DNA, 25 bp, Artificial
  Probe
acacagtcattggtaataagtactt

SEQ ID NO: 243645 - DNA, 25 bp, Artificial
  Probe
gcctgcttgggcaaaagctccctgc

SEQ ID NO: 243646 - DNA, 25 bp, Artificial
  Probe
ctatacatttgtgacaagacaaagt

SEQ ID NO: 243647 - DNA, 25 bp, Artificial
  Probe
cctttattacatgtagcagatgtat

SEQ ID NO: 243648 - DNA, 25 bp, Artificial
  Probe
atctcatggaattgcctctgataat

SEQ ID NO: 243649 - DNA, 25 bp, Artificial
  Probe
aaactgcctgcttgggcaaaagctc

SEQ ID NO: 243650 - DNA, 25 bp, Artificial
  Probe
atcacttaggaaagcctcatgcttt

SEQ ID NO: 243651 - DNA, 25 bp, Artificial
  Probe
catctgttaaactgcctgcttgggc

SEQ ID NO: 243652 - DNA, 25 bp, Artificial
  Probe
cttaggaaagcctcatgctttcacc

SEQ ID NO: 243653 - DNA, 25 bp, Artificial
  Probe
tgcactcagagatggctggaataaa

SEQ ID NO: 243654 - DNA, 25 bp, Artificial
  Probe
caagacaaagttcttgggtcctcca

SEQ ID NO: 243655 - DNA, 25 bp, Artificial
  Probe
tgtagcttcaactagaatttgattc

SEQ ID NO: 243656 - DNA, 25 bp, Artificial
  Probe
aactatctgcttatcttggcatctg

SEQ ID NO: 243657 - DNA, 25 bp, Artificial
  Probe
tacttgggtcccaaatacctgaatg

SEQ ID NO: 243658 - DNA, 25 bp, Artificial
  Probe
agaatctcatggaattgcctctgat

SEQ ID NO: 243659 - DNA, 25 bp, Artificial
  Probe
ggacattgtagcttcaactagaatt

SEQ ID NO: 243660 - DNA, 25 bp, Artificial
  Probe
aaagctccctgcagctgctgagcaa

SEQ ID NO: 243661 - DNA, 25 bp, Artificial
  Probe
tgcttggggttatacttgggtccca

SEQ ID NO: 243662 - DNA, 25 bp, Artificial
  Probe
agacaaagttcttgggtcctccatc

SEQ ID NO: 243663 - DNA, 25 bp, Artificial
  Probe
ggtcctccatctcttattcttgctg

SEQ ID NO: 243664 - DNA, 25 bp, Artificial
  Probe
atacctttattacatgtagcagatg

SEQ ID NO: 243665 - DNA, 25 bp, Artificial
  Probe
aaagttcttgggtcctccatctctt

SEQ ID NO: 243666 - DNA, 25 bp, Artificial
  Probe
cccaaatacctgaatgcactcagag

SEQ ID NO: 243667 - DNA, 25 bp, Artificial
  Probe
gttcttgggtcctccatctcttatt

SEQ ID NO: 243668 - DNA, 25 bp, Artificial
  Probe
ttgctgaggacattgtagcttcaac

SEQ ID NO: 243669 - DNA, 25 bp, Artificial
  Probe
cctccatctcttattcttgctgagg

SEQ ID NO: 243670 - DNA, 25 bp, Artificial
  Probe
gattcccttgataaagaatctcatg

SEQ ID NO: 243671 - DNA, 25 bp, Artificial
  Probe
aacacagtcattggtaataagtact

SEQ ID NO: 243672 - DNA, 25 bp, Artificial
  Probe
gttatacttgggtcccaaatacctg

SEQ ID NO: 243673 - DNA, 25 bp, Artificial
  Probe
cagctgctgagcaagataatagaat

SEQ ID NO: 243674 - DNA, 25 bp, Artificial
  Probe
ctgcttgggcaaaagctccctgcag

SEQ ID NO: 243675 - DNA, 25 bp, Artificial
  Probe
tgacaagacaaagttcttgggtcct

SEQ ID NO: 243676 - DNA, 25 bp, Artificial
  Probe
actatacatttgtgacaagacaaag

SEQ ID NO: 243677 - DNA, 25 bp, Artificial
  Probe
gaataaagactttcatttggctcta

SEQ ID NO: 243678 - DNA, 25 bp, Artificial
  Probe
cccgcaaggagaagctcagacagaa

SEQ ID NO: 243679 - DNA, 25 bp, Artificial
  Probe
gccagcactagttttccccctttgg

SEQ ID NO: 243680 - DNA, 25 bp, Artificial
  Probe
ctccacagtatgtcgtaggacgtgg

SEQ ID NO: 243681 - DNA, 25 bp, Artificial
  Probe
attcctgtggccatgggcaagctgc

SEQ ID NO: 243682 - DNA, 25 bp, Artificial
  Probe
taggacgtggacctgtgtctgtgta

SEQ ID NO: 243683 - DNA, 25 bp, Artificial
  Probe
gtaagggaggcctccacagtatgtc

SEQ ID NO: 243684 - DNA, 25 bp, Artificial
  Probe
ggccatgggcaagctgctggacatc

SEQ ID NO: 243685 - DNA, 25 bp, Artificial
  Probe
cctgtgtctgtgtaaaggacaagaa

SEQ ID NO: 243686 - DNA, 25 bp, Artificial
  Probe
tgtgtgtcacccttggtctcagagc

SEQ ID NO: 243687 - DNA, 25 bp, Artificial
  Probe
aagctcagacagaagaggcggcagc

SEQ ID NO: 243688 - DNA, 25 bp, Artificial
  Probe
cccagttagacctgccagaggcctg

SEQ ID NO: 243689 - DNA, 25 bp, Artificial
  Probe
gcacctagtgtaagggaggcctcca

SEQ ID NO: 243690 - DNA, 25 bp, Artificial
  Probe
tcgtaggacgtggacctgtgtctgt

SEQ ID NO: 243691 - DNA, 25 bp, Artificial
  Probe
gttagacctgccagaggcctgagca

SEQ ID NO: 243692 - DNA, 25 bp, Artificial
  Probe
tagacctgccagaggcctgagcacc

SEQ ID NO: 243693 - DNA, 25 bp, Artificial
  Probe
tatgtcgtaggacgtggacctgtgt

SEQ ID NO: 243694 - DNA, 25 bp, Artificial
  Probe
ggatgctcaatgtgtcaccttcacg

SEQ ID NO: 243695 - DNA, 25 bp, Artificial
  Probe
cagtatgtcgtaggacgtggacctg

SEQ ID NO: 243696 - DNA, 25 bp, Artificial
  Probe
acggcattcctgtggccatgggcaa

SEQ ID NO: 243697 - DNA, 25 bp, Artificial
  Probe
actgtgtgtgtcacccttggtctca

SEQ ID NO: 243698 - DNA, 25 bp, Artificial
  Probe
tgtgtcaccttcacgactgctgccg

SEQ ID NO: 243699 - DNA, 25 bp, Artificial
  Probe
gacctgtgtctgtgtaaaggacaag

SEQ ID NO: 243700 - DNA, 25 bp, Artificial
  Probe
agaagtcttctgcactctaactgtg

SEQ ID NO: 243701 - DNA, 25 bp, Artificial
  Probe
agccagcactagttttccccctttg

SEQ ID NO: 243702 - DNA, 25 bp, Artificial
  Probe
tgtcgtaggacgtggacctgtgtct

SEQ ID NO: 243703 - DNA, 25 bp, Artificial
  Probe
cccatcctatgtgtacctgaaaggc

SEQ ID NO: 243704 - DNA, 25 bp, Artificial
  Probe
tccacccagttagacctgccagagg

SEQ ID NO: 243705 - DNA, 25 bp, Artificial
  Probe
cgcccgcaaggagaagctcagacag

SEQ ID NO: 243706 - DNA, 25 bp, Artificial
  Probe
gacgtggacctgtgtctgtgtaaag

SEQ ID NO: 243707 - DNA, 25 bp, Artificial
  Probe
ctgccagaggcctgagcacctagtg

SEQ ID NO: 243708 - DNA, 25 bp, Artificial
  Probe
gtcacccttggtctcagagcagacc

SEQ ID NO: 243709 - DNA, 25 bp, Artificial
  Probe
agaggcctgagcacctagtgtaagg

SEQ ID NO: 243710 - DNA, 25 bp, Artificial
  Probe
aggcctgagcacctagtgtaaggga

SEQ ID NO: 243711 - DNA, 25 bp, Artificial
  Probe
tcaatgtgtcaccttcacgactgct

SEQ ID NO: 243712 - DNA, 25 bp, Artificial
  Probe
catcctatgtgtacctgaaaggcag

SEQ ID NO: 243713 - DNA, 25 bp, Artificial
  Probe
agtatgtcgtaggacgtggacctgt

SEQ ID NO: 243714 - DNA, 25 bp, Artificial
  Probe
caagaagtcttctgcactctaactg

SEQ ID NO: 243715 - DNA, 25 bp, Artificial
  Probe
cctgagcacctagtgtaagggaggc

SEQ ID NO: 243716 - DNA, 25 bp, Artificial
  Probe
gacaagaagtcttctgcactctaac

SEQ ID NO: 243717 - DNA, 25 bp, Artificial
  Probe
ctcagacagaagaggcggcagccct

SEQ ID NO: 243718 - DNA, 25 bp, Artificial
  Probe
acccagttagacctgccagaggcct

SEQ ID NO: 243719 - DNA, 25 bp, Artificial
  Probe
tggacatcctggatgctcaatgtgt

SEQ ID NO: 243720 - DNA, 25 bp, Artificial
  Probe
tggccatgggcaagctgctggacat

SEQ ID NO: 243721 - DNA, 25 bp, Artificial
  Probe
gggcaagctgctggacatcctggat

SEQ ID NO: 243722 - DNA, 25 bp, Artificial
  Probe
atcctggatgctcaatgtgtcacct

SEQ ID NO: 243723 - DNA, 25 bp, Artificial
  Probe
ctggacatcctggatgctcaatgtg

SEQ ID NO: 243724 - DNA, 25 bp, Artificial
  Probe
tgtatatgttctccagttacatcag

SEQ ID NO: 243725 - DNA, 25 bp, Artificial
  Probe
ggactatttctaacaagtcagtttt

SEQ ID NO: 243726 - DNA, 25 bp, Artificial
  Probe
ctccttagagccaacatcagtggca

SEQ ID NO: 243727 - DNA, 25 bp, Artificial
  Probe
tggacttaatctgtatatgttctcc

SEQ ID NO: 243728 - DNA, 25 bp, Artificial
  Probe
ctaacaagtcagtttttggtgaacg

SEQ ID NO: 243729 - DNA, 25 bp, Artificial
  Probe
gtggccttgttcttcatttcagtgt

SEQ ID NO: 243730 - DNA, 25 bp, Artificial
  Probe
gcacaatggtcttggctaagttact

SEQ ID NO: 243731 - DNA, 25 bp, Artificial
  Probe
tgaacataagccactgcctggcctt

SEQ ID NO: 243732 - DNA, 25 bp, Artificial
  Probe
tacagacaccggagaatttgaaaga

SEQ ID NO: 243733 - DNA, 25 bp, Artificial
  Probe
tcagactttctctgtggccttgttc

SEQ ID NO: 243734 - DNA, 25 bp, Artificial
  Probe
gacttaatctgtatatgttctccag

SEQ ID NO: 243735 - DNA, 25 bp, Artificial
  Probe
agaccgttctgtaacttacagacac

SEQ ID NO: 243736 - DNA, 25 bp, Artificial
  Probe
ccagttacatcagactttctctgtg

SEQ ID NO: 243737 - DNA, 25 bp, Artificial
  Probe
agactttctctgtggccttgttctt

SEQ ID NO: 243738 - DNA, 25 bp, Artificial
  Probe
catcagtggcaatccgcacacagaa

SEQ ID NO: 243739 - DNA, 25 bp, Artificial
  Probe
tctaacaagtcagtttttggtgaac

SEQ ID NO: 243740 - DNA, 25 bp, Artificial
  Probe
aatggtcttggctaagttactcctt

SEQ ID NO: 243741 - DNA, 25 bp, Artificial
  Probe
ggtcttggctaagttactccttaga

SEQ ID NO: 243742 - DNA, 25 bp, Artificial
  Probe
ggccttgttcttcatttcagtgtta

SEQ ID NO: 243743 - DNA, 25 bp, Artificial
  Probe
ctatttctaacaagtcagtttttgg

SEQ ID NO: 243744 - DNA, 25 bp, Artificial
  Probe
agagccaacatcagtggcaatccgc

SEQ ID NO: 243745 - DNA, 25 bp, Artificial
  Probe
taacttacagacaccggagaatttg

SEQ ID NO: 243746 - DNA, 25 bp, Artificial
  Probe
tcccagaccgttctgtaacttacag

SEQ ID NO: 243747 - DNA, 25 bp, Artificial
  Probe
acagcacttcagattctcatcagga

SEQ ID NO: 243748 - DNA, 25 bp, Artificial
  Probe
tcagagcttgttgtctttttcgcta

SEQ ID NO: 243749 - DNA, 25 bp, Artificial
  Probe
agttactccttagagccaacatcag

SEQ ID NO: 243750 - DNA, 25 bp, Artificial
  Probe
aacatgctgagcacaatggtcttgg

SEQ ID NO: 243751 - DNA, 25 bp, Artificial
  Probe
gccttgttcttcatttcagtgttaa

SEQ ID NO: 243752 - DNA, 25 bp, Artificial
  Probe
gtatatgttctccagttacatcaga

SEQ ID NO: 243753 - DNA, 25 bp, Artificial
  Probe
ttagagccaacatcagtggcaatcc

SEQ ID NO: 243754 - DNA, 25 bp, Artificial
  Probe
cagacaccggagaatttgaaagaac

SEQ ID NO: 243755 - DNA, 25 bp, Artificial
  Probe
ttccaccacagcagccctgggagag

SEQ ID NO: 243756 - DNA, 25 bp, Artificial
  Probe
agacagcacttcagattctcatcag

SEQ ID NO: 243757 - DNA, 25 bp, Artificial
  Probe
gtggcaatccgcacacagaagaaaa

SEQ ID NO: 243758 - DNA, 25 bp, Artificial
  Probe
gctaagttactccttagagccaaca

SEQ ID NO: 243759 - DNA, 25 bp, Artificial
  Probe
tttcagtgttaatcagctaaaacag

SEQ ID NO: 243760 - DNA, 25 bp, Artificial
  Probe
atcaggactatttctaacaagtcag

SEQ ID NO: 243761 - DNA, 25 bp, Artificial
  Probe
ctatgacgtgggagtgaacataagc

SEQ ID NO: 243762 - DNA, 25 bp, Artificial
  Probe
gttctgtaacttacagacaccggag

SEQ ID NO: 243763 - DNA, 25 bp, Artificial
  Probe
aacatcagtggcaatccgcacacag

SEQ ID NO: 243764 - DNA, 25 bp, Artificial
  Probe
gcacttcagattctcatcaggacta

SEQ ID NO: 243765 - DNA, 25 bp, Artificial
  Probe
aacataagccactgcctggcctttt

SEQ ID NO: 243766 - DNA, 25 bp, Artificial
  Probe
cttcagagcttgttgtctttttcgc

SEQ ID NO: 243767 - DNA, 25 bp, Artificial
  Probe
gttactccttagagccaacatcagt

SEQ ID NO: 243768 - DNA, 25 bp, Artificial
  Probe
agccaacatcagtggcaatccgcac

SEQ ID NO: 243769 - DNA, 25 bp, Artificial
  Probe
ctctgtggccttgttcttcatttca

SEQ ID NO: 243770 - DNA, 25 bp, Artificial
  Probe
tcacagctcacgtgggtaaccacca

SEQ ID NO: 243771 - DNA, 25 bp, Artificial
  Probe
gtgctccagttcaacacaaactgcc

SEQ ID NO: 243772 - DNA, 25 bp, Artificial
  Probe
gctttgtagaaaacccacacgctcc

SEQ ID NO: 243773 - DNA, 25 bp, Artificial
  Probe
cctcaaaaagatagcgccttggtga

SEQ ID NO: 243774 - DNA, 25 bp, Artificial
  Probe
aaagcaaatggcttccccgttcacg

SEQ ID NO: 243775 - DNA, 25 bp, Artificial
  Probe
ccttagaaacgaagtgcgtggtgtt

SEQ ID NO: 243776 - DNA, 25 bp, Artificial
  Probe
cccgctcagaccaacatgaagcttg

SEQ ID NO: 243777 - DNA, 25 bp, Artificial
  Probe
tgggtaaccaccagcggaatgtctc

SEQ ID NO: 243778 - DNA, 25 bp, Artificial
  Probe
ttggcaaactgaaggacctaaagca

SEQ ID NO: 243779 - DNA, 25 bp, Artificial
  Probe
gagttcattggcaaactgaaggacc

SEQ ID NO: 243780 - DNA, 25 bp, Artificial
  Probe
cagttcaacacaaactgcccagagt

SEQ ID NO: 243781 - DNA, 25 bp, Artificial
  Probe
gtgaaggactcataagccggcaaat

SEQ ID NO: 243782 - DNA, 25 bp, Artificial
  Probe
agtctgatgagtatccagtgtgtca

SEQ ID NO: 243783 - DNA, 25 bp, Artificial
  Probe
cgaagtgcgtggtgttggctcccat

SEQ ID NO: 243784 - DNA, 25 bp, Artificial
  Probe
agaagcaccagaagagaagtcggaa

SEQ ID NO: 243785 - DNA, 25 bp, Artificial
  Probe
ggctccaagcagaagcaccagaaga

SEQ ID NO: 243786 - DNA, 25 bp, Artificial
  Probe
aagatagcgccttggtgatcacata

SEQ ID NO: 243787 - DNA, 25 bp, Artificial
  Probe
cgtggtgttggctcccatggaacac

SEQ ID NO: 243788 - DNA, 25 bp, Artificial
  Probe
aaccaccagcggaatgtctcagctc

SEQ ID NO: 243789 - DNA, 25 bp, Artificial
  Probe
gaaggactcataagccggcaaatct

SEQ ID NO: 243790 - DNA, 25 bp, Artificial
  Probe
aaacgaagtgcgtggtgttggctcc

SEQ ID NO: 243791 - DNA, 25 bp, Artificial
  Probe
gatcattgatgatccctcgggaaac

SEQ ID NO: 243792 - DNA, 25 bp, Artificial
  Probe
ccagttcaacacaaactgcccagag

SEQ ID NO: 243793 - DNA, 25 bp, Artificial
  Probe
aagcaaatggcttccccgttcacgc

SEQ ID NO: 243794 - DNA, 25 bp, Artificial
  Probe
acgacgggcaatggaaggtgctata

SEQ ID NO: 243795 - DNA, 25 bp, Artificial
  Probe
tccctcgggaaacagctttgtagaa

SEQ ID NO: 243796 - DNA, 25 bp, Artificial
  Probe
cggaatgtctcagctcgaatgggcg

SEQ ID NO: 243797 - DNA, 25 bp, Artificial
  Probe
aagaccttagaaacgaagtgcgtgg

SEQ ID NO: 243798 - DNA, 25 bp, Artificial
  Probe
attgatgatccctcgggaaacagct

SEQ ID NO: 243799 - DNA, 25 bp, Artificial
  Probe
cgggagtgctcagtctgtgccctgt

SEQ ID NO: 243800 - DNA, 25 bp, Artificial
  Probe
ccacacgctcctcaaaaagatagcg

SEQ ID NO: 243801 - DNA, 25 bp, Artificial
  Probe
agaagggagctctgaccactgtgaa

SEQ ID NO: 243802 - DNA, 25 bp, Artificial
  Probe
tgatccctcgggaaacagctttgta

SEQ ID NO: 243803 - DNA, 25 bp, Artificial
  Probe
cactgtgaaggactcataagccggc

SEQ ID NO: 243804 - DNA, 25 bp, Artificial
  Probe
aagctgagatgctggggctccaagc

SEQ ID NO: 243805 - DNA, 25 bp, Artificial
  Probe
gtgttggctcccatggaacacgtag

SEQ ID NO: 243806 - DNA, 25 bp, Artificial
  Probe
agctcacgtgggtaaccaccagcgg

SEQ ID NO: 243807 - DNA, 25 bp, Artificial
  Probe
ggacctaaagcaaatggcttccccg

SEQ ID NO: 243808 - DNA, 25 bp, Artificial
  Probe
gcaaactgaaggacctaaagcaaat

SEQ ID NO: 243809 - DNA, 25 bp, Artificial
  Probe
ccatggaacacgtagtggggttatg

SEQ ID NO: 243810 - DNA, 25 bp, Artificial
  Probe
gtgctcagtctgtgccctgtattat

SEQ ID NO: 243811 - DNA, 25 bp, Artificial
  Probe
acacgacgggcaatggaaggtgcta

SEQ ID NO: 243812 - DNA, 25 bp, Artificial
  Probe
gcttccccgttcacgctgatcattg

SEQ ID NO: 243813 - DNA, 25 bp, Artificial
  Probe
gtgatcacatactacgaccggaccc

SEQ ID NO: 243814 - DNA, 25 bp, Artificial
  Probe
cagtctgtgccctgtattatgttgt

SEQ ID NO: 243815 - DNA, 25 bp, Artificial
  Probe
ccggaccccacagcaagctgagatg

SEQ ID NO: 243816 - DNA, 25 bp, Artificial
  Probe
ggggtacaaacgtctacttcgcaag

SEQ ID NO: 243817 - DNA, 25 bp, Artificial
  Probe
atggctgcggcgatagccagctcct

SEQ ID NO: 243818 - DNA, 25 bp, Artificial
  Probe
ccagctccttgatccggcagaagcg

SEQ ID NO: 243819 - DNA, 25 bp, Artificial
  Probe
gcgatagccagctccttgatccggc

SEQ ID NO: 243820 - DNA, 25 bp, Artificial
  Probe
cgtcctcggggtgttcagcaaagtg

SEQ ID NO: 243821 - DNA, 25 bp, Artificial
  Probe
gctccctgtgcgagaggcacgtcct

SEQ ID NO: 243822 - DNA, 25 bp, Artificial
  Probe
aggttttcgatactgcaacctcctc

SEQ ID NO: 243823 - DNA, 25 bp, Artificial
  Probe
gggtacaaacgtctacttcgcaaga

SEQ ID NO: 243824 - DNA, 25 bp, Artificial
  Probe
cgccctttggacgtgaatcgccttg

SEQ ID NO: 243825 - DNA, 25 bp, Artificial
  Probe
cctttggacgtgaatcgccttgggg

SEQ ID NO: 243826 - DNA, 25 bp, Artificial
  Probe
ggttttcgatactgcaacctcctca

SEQ ID NO: 243827 - DNA, 25 bp, Artificial
  Probe
agcagctatggctgcggcgatagcc

SEQ ID NO: 243828 - DNA, 25 bp, Artificial
  Probe
acgtcctcggggtgttcagcaaagt

SEQ ID NO: 243829 - DNA, 25 bp, Artificial
  Probe
gcccgcgctgagcagctatggctgc

SEQ ID NO: 243830 - DNA, 25 bp, Artificial
  Probe
tccctgtgcgagaggcacgtcctcg

SEQ ID NO: 243831 - DNA, 25 bp, Artificial
  Probe
cccgcgctgagcagctatggctgcg

SEQ ID NO: 243832 - DNA, 25 bp, Artificial
  Probe
cggcccgcgctgagcagctatggct

SEQ ID NO: 243833 - DNA, 25 bp, Artificial
  Probe
agccagctccttgatccggcagaag

SEQ ID NO: 243834 - DNA, 25 bp, Artificial
  Probe
accgccctttggacgtgaatcgcct

SEQ ID NO: 243835 - DNA, 25 bp, Artificial
  Probe
acgtgaatcgccttggggtgcaagt

SEQ ID NO: 243836 - DNA, 25 bp, Artificial
  Probe
gtctacttcgcaagaaggcctggga

SEQ ID NO: 243837 - DNA, 25 bp, Artificial
  Probe
ggctgcggcgatagccagctccttg

SEQ ID NO: 243838 - DNA, 25 bp, Artificial
  Probe
cgtgaatcgccttggggtgcaagtt

SEQ ID NO: 243839 - DNA, 25 bp, Artificial
  Probe
ccttgatccggcagaagcggcaggc

SEQ ID NO: 243840 - DNA, 25 bp, Artificial
  Probe
acagcgaccgggtgtcggcctccaa

SEQ ID NO: 243841 - DNA, 25 bp, Artificial
  Probe
cggcgatagccagctccttgatccg

SEQ ID NO: 243842 - DNA, 25 bp, Artificial
  Probe
ctttggacgtgaatcgccttggggt

SEQ ID NO: 243843 - DNA, 25 bp, Artificial
  Probe
agcgaccgggtgtcggcctccaagc

SEQ ID NO: 243844 - DNA, 25 bp, Artificial
  Probe
cgtctacttcgcaagaaggcctggg

SEQ ID NO: 243845 - DNA, 25 bp, Artificial
  Probe
cgatagccagctccttgatccggca

SEQ ID NO: 243846 - DNA, 25 bp, Artificial
  Probe
atagccagctccttgatccggcaga

SEQ ID NO: 243847 - DNA, 25 bp, Artificial
  Probe
gtacaaacgtctacttcgcaagaag

SEQ ID NO: 243848 - DNA, 25 bp, Artificial
  Probe
tggctgcggcgatagccagctcctt

SEQ ID NO: 243849 - DNA, 25 bp, Artificial
  Probe
caaacgtctacttcgcaagaaggcc

SEQ ID NO: 243850 - DNA, 25 bp, Artificial
  Probe
ctacttcgcaagaaggcctgggacc

SEQ ID NO: 243851 - DNA, 25 bp, Artificial
  Probe
agtccaacagcgaccgggtgtcggc

SEQ ID NO: 243852 - DNA, 25 bp, Artificial
  Probe
ccgccctttggacgtgaatcgcctt

SEQ ID NO: 243853 - DNA, 25 bp, Artificial
  Probe
tacttcgcaagaaggcctgggaccg

SEQ ID NO: 243854 - DNA, 25 bp, Artificial
  Probe
ccctttggacgtgaatcgccttggg

SEQ ID NO: 243855 - DNA, 25 bp, Artificial
  Probe
ctcggggtgttcagcaaagtgcgct

SEQ ID NO: 243856 - DNA, 25 bp, Artificial
  Probe
tagccagctccttgatccggcagaa

SEQ ID NO: 243857 - DNA, 25 bp, Artificial
  Probe
gatagccagctccttgatccggcag

SEQ ID NO: 243858 - DNA, 25 bp, Artificial
  Probe
gcggcgatagccagctccttgatcc

SEQ ID NO: 243859 - DNA, 25 bp, Artificial
  Probe
cagcgaccgggtgtcggcctccaag

SEQ ID NO: 243860 - DNA, 25 bp, Artificial
  Probe
tacaaacgtctacttcgcaagaagg

SEQ ID NO: 243861 - DNA, 25 bp, Artificial
  Probe
caggttttcgatactgcaacctcct

SEQ ID NO: 243862 - DNA, 25 bp, Artificial
  Probe
aatctcggagtagagatcgccatga

SEQ ID NO: 243863 - DNA, 25 bp, Artificial
  Probe
tcttattagctctttgcaagactgc

SEQ ID NO: 243864 - DNA, 25 bp, Artificial
  Probe
ggaccatagtagatcacgggaaaag

SEQ ID NO: 243865 - DNA, 25 bp, Artificial
  Probe
aagactgccttcatggaattgagtc

SEQ ID NO: 243866 - DNA, 25 bp, Artificial
  Probe
cctatgggtctggatcaagacgtga

SEQ ID NO: 243867 - DNA, 25 bp, Artificial
  Probe
tctttgcaagactgccttcatggaa

SEQ ID NO: 243868 - DNA, 25 bp, Artificial
  Probe
ggaattgagtccaagtcctatgggt

SEQ ID NO: 243869 - DNA, 25 bp, Artificial
  Probe
gtcctatgggtctggatcaagacgt

SEQ ID NO: 243870 - DNA, 25 bp, Artificial
  Probe
cgctgcaaagttcttattagctctt

SEQ ID NO: 243871 - DNA, 25 bp, Artificial
  Probe
cgacgatcgctgcaaagttcttatt

SEQ ID NO: 243872 - DNA, 25 bp, Artificial
  Probe
tatgggtctggatcaagacgtgaac

SEQ ID NO: 243873 - DNA, 25 bp, Artificial
  Probe
ttcttattagctctttgcaagactg

SEQ ID NO: 243874 - DNA, 25 bp, Artificial
  Probe
atgggtctggatcaagacgtgaacg

SEQ ID NO: 243875 - DNA, 25 bp, Artificial
  Probe
ggtctggatcaagacgtgaacgatc

SEQ ID NO: 243876 - DNA, 25 bp, Artificial
  Probe
acgtcataaatctcggagtagagat

SEQ ID NO: 243877 - DNA, 25 bp, Artificial
  Probe
atctgccgacgatcgctgcaaagtt

SEQ ID NO: 243878 - DNA, 25 bp, Artificial
  Probe
agagtcgacgtcataaatctcggag

SEQ ID NO: 243879 - DNA, 25 bp, Artificial
  Probe
agttcttattagctctttgcaagac

SEQ ID NO: 243880 - DNA, 25 bp, Artificial
  Probe
gcaaagttcttattagctctttgca

SEQ ID NO: 243881 - DNA, 25 bp, Artificial
  Probe
agtccaagtcctatgggtctggatc

SEQ ID NO: 243882 - DNA, 25 bp, Artificial
  Probe
gggaccatagtagatcacgggaaaa

SEQ ID NO: 243883 - DNA, 25 bp, Artificial
  Probe
atctcggagtagagatcgccatgat

SEQ ID NO: 243884 - DNA, 25 bp, Artificial
  Probe
tgcaagactgccttcatggaattga

SEQ ID NO: 243885 - DNA, 25 bp, Artificial
  Probe
ccttcatggaattgagtccaagtcc

SEQ ID NO: 243886 - DNA, 25 bp, Artificial
  Probe
accatagtagatcacgggaaaagag

SEQ ID NO: 243887 - DNA, 25 bp, Artificial
  Probe
gtcgacgtcataaatctcggagtag

SEQ ID NO: 243888 - DNA, 25 bp, Artificial
  Probe
gtatctgccgacgatcgctgcaaag

SEQ ID NO: 243889 - DNA, 25 bp, Artificial
  Probe
aagtcctatgggtctggatcaagac

SEQ ID NO: 243890 - DNA, 25 bp, Artificial
  Probe
tagctctttgcaagactgccttcat

SEQ ID NO: 243891 - DNA, 25 bp, Artificial
  Probe
cataaatctcggagtagagatcgcc

SEQ ID NO: 243892 - DNA, 25 bp, Artificial
  Probe
taaatctcggagtagagatcgccat

SEQ ID NO: 243893 - DNA, 25 bp, Artificial
  Probe
aagtatctgccgacgatcgctgcaa

SEQ ID NO: 243894 - DNA, 25 bp, Artificial
  Probe
gccgacgatcgctgcaaagttctta

SEQ ID NO: 243895 - DNA, 25 bp, Artificial
  Probe
ccgacgatcgctgcaaagttcttat

SEQ ID NO: 243896 - DNA, 25 bp, Artificial
  Probe
gtccaagtcctatgggtctggatca

SEQ ID NO: 243897 - DNA, 25 bp, Artificial
  Probe
agactgccttcatggaattgagtcc

SEQ ID NO: 243898 - DNA, 25 bp, Artificial
  Probe
tcgctgcaaagttcttattagctct

SEQ ID NO: 243899 - DNA, 25 bp, Artificial
  Probe
atccaaagtatctgccgacgatcgc

SEQ ID NO: 243900 - DNA, 25 bp, Artificial
  Probe
tctggatcaagacgtgaacgatcaa

SEQ ID NO: 243901 - DNA, 25 bp, Artificial
  Probe
agtcgacgtcataaatctcggagta

SEQ ID NO: 243902 - DNA, 25 bp, Artificial
  Probe
atcgctgcaaagttcttattagctc

SEQ ID NO: 243903 - DNA, 25 bp, Artificial
  Probe
ttgagtccaagtcctatgggtctgg

SEQ ID NO: 243904 - DNA, 25 bp, Artificial
  Probe
aaagttcttattagctctttgcaag

SEQ ID NO: 243905 - DNA, 25 bp, Artificial
  Probe
ctctttgcaagactgccttcatgga

SEQ ID NO: 243906 - DNA, 25 bp, Artificial
  Probe
caatccaaagtatctgccgacgatc

SEQ ID NO: 243907 - DNA, 25 bp, Artificial
  Probe
tcaagacgtgaacgatcaagagaaa

SEQ ID NO: 243908 - DNA, 25 bp, Artificial
  Probe
ccttgtccagattttgtgcgttgaa

SEQ ID NO: 243909 - DNA, 25 bp, Artificial
  Probe
gactatctcctgttgggaacaagga

SEQ ID NO: 243910 - DNA, 25 bp, Artificial
  Probe
atagcctcagacagttagttccttc

SEQ ID NO: 243911 - DNA, 25 bp, Artificial
  Probe
tgccatagcctcagacagttagttc

SEQ ID NO: 243912 - DNA, 25 bp, Artificial
  Probe
tggattctgatgtcccaacttgctg

SEQ ID NO: 243913 - DNA, 25 bp, Artificial
  Probe
ttgggaacaaggacccgttgatatg

SEQ ID NO: 243914 - DNA, 25 bp, Artificial
  Probe
gccatagcctcagacagttagttcc

SEQ ID NO: 243915 - DNA, 25 bp, Artificial
  Probe
cattggattctgatgtcccaacttg

SEQ ID NO: 243916 - DNA, 25 bp, Artificial
  Probe
ctgttgggaacaaggacccgttgat

SEQ ID NO: 243917 - DNA, 25 bp, Artificial
  Probe
cccccttgtccagattttgtgcgtt

SEQ ID NO: 243918 - DNA, 25 bp, Artificial
  Probe
atgccatagcctcagacagttagtt

SEQ ID NO: 243919 - DNA, 25 bp, Artificial
  Probe
cccttgtccagattttgtgcgttga

SEQ ID NO: 243920 - DNA, 25 bp, Artificial
  Probe
cttgtccagattttgtgcgttgaag

SEQ ID NO: 243921 - DNA, 25 bp, Artificial
  Probe
catagcctcagacagttagttcctt

SEQ ID NO: 243922 - DNA, 25 bp, Artificial
  Probe
cgactatctcctgttgggaacaagg

SEQ ID NO: 243923 - DNA, 25 bp, Artificial
  Probe
tgttgggaacaaggacccgttgata

SEQ ID NO: 243924 - DNA, 25 bp, Artificial
  Probe
tagcctcagacagttagttccttcc

SEQ ID NO: 243925 - DNA, 25 bp, Artificial
  Probe
tcgactatctcctgttgggaacaag

SEQ ID NO: 243926 - DNA, 25 bp, Artificial
  Probe
ttcgactatctcctgttgggaacaa

SEQ ID NO: 243927 - DNA, 25 bp, Artificial
  Probe
ggttcgactatctcctgttgggaac

SEQ ID NO: 243928 - DNA, 25 bp, Artificial
  Probe
tggttcgactatctcctgttgggaa

SEQ ID NO: 243929 - DNA, 25 bp, Artificial
  Probe
ccccttgtccagattttgtgcgttg

SEQ ID NO: 243930 - DNA, 25 bp, Artificial
  Probe
attggattctgatgtcccaacttgc

SEQ ID NO: 243931 - DNA, 25 bp, Artificial
  Probe
tgccttcatattgaaggttctggag

SEQ ID NO: 243932 - DNA, 25 bp, Artificial
  Probe
gcctcagacagttagttccttcctc

SEQ ID NO: 243933 - DNA, 25 bp, Artificial
  Probe
tctcctgttgggaacaaggacccgt

SEQ ID NO: 243934 - DNA, 25 bp, Artificial
  Probe
ttggattctgatgtcccaacttgct

SEQ ID NO: 243935 - DNA, 25 bp, Artificial
  Probe
ccttcatattgaaggttctggagtt

SEQ ID NO: 243936 - DNA, 25 bp, Artificial
  Probe
ccatagcctcagacagttagttcct

SEQ ID NO: 243937 - DNA, 25 bp, Artificial
  Probe
agcctcagacagttagttccttcct

SEQ ID NO: 243938 - DNA, 25 bp, Artificial
  Probe
gttcgactatctcctgttgggaaca

SEQ ID NO: 243939 - DNA, 25 bp, Artificial
  Probe
gccttcatattgaaggttctggagt

SEQ ID NO: 243940 - DNA, 25 bp, Artificial
  Probe
aatgccatagcctcagacagttagt

SEQ ID NO: 243941 - DNA, 25 bp, Artificial
  Probe
aggcaatcattttcccttgtaaatg

SEQ ID NO: 243942 - DNA, 25 bp, Artificial
  Probe
actatctcctgttgggaacaaggac

SEQ ID NO: 243943 - DNA, 25 bp, Artificial
  Probe
ctgctgcttcctgcctctctcagaa

SEQ ID NO: 243944 - DNA, 25 bp, Artificial
  Probe
gaacagcacacgttagccaagtacc

SEQ ID NO: 243945 - DNA, 25 bp, Artificial
  Probe
agtacctgatggagctgaccctcgt

SEQ ID NO: 243946 - DNA, 25 bp, Artificial
  Probe
catggtgcattaccacccttctcag

SEQ ID NO: 243947 - DNA, 25 bp, Artificial
  Probe
agctgctgcttcctgcctctctcag

SEQ ID NO: 243948 - DNA, 25 bp, Artificial
  Probe
taaccgtgctctgtactgaagaaaa

SEQ ID NO: 243949 - DNA, 25 bp, Artificial
  Probe
ttgaacagcacacgttagccaagta

SEQ ID NO: 243950 - DNA, 25 bp, Artificial
  Probe
aacagcacacgttagccaagtacct

SEQ ID NO: 243951 - DNA, 25 bp, Artificial
  Probe
acacgttagccaagtacctgatgga

SEQ ID NO: 243952 - DNA, 25 bp, Artificial
  Probe
ctgatggagctgaccctcgtcgaat

SEQ ID NO: 243953 - DNA, 25 bp, Artificial
  Probe
aaccgtgctctgtactgaagaaaaa

SEQ ID NO: 243954 - DNA, 25 bp, Artificial
  Probe
tacctgatggagctgaccctcgtcg

SEQ ID NO: 243955 - DNA, 25 bp, Artificial
  Probe
caggtcgcagctgctgcttcctgcc

SEQ ID NO: 243956 - DNA, 25 bp, Artificial
  Probe
ataaccgtgctctgtactgaagaaa

SEQ ID NO: 243957 - DNA, 25 bp, Artificial
  Probe
accgtgctctgtactgaagaaaaat

SEQ ID NO: 243958 - DNA, 25 bp, Artificial
  Probe
tgctgcttcctgcctctctcagaag

SEQ ID NO: 243959 - DNA, 25 bp, Artificial
  Probe
cgcagctgctgcttcctgcctctct

SEQ ID NO: 243960 - DNA, 25 bp, Artificial
  Probe
cttctcaggtcgcagctgctgcttc

SEQ ID NO: 243961 - DNA, 25 bp, Artificial
  Probe
gcacacgttagccaagtacctgatg

SEQ ID NO: 243962 - DNA, 25 bp, Artificial
  Probe
cacacgttagccaagtacctgatgg

SEQ ID NO: 243963 - DNA, 25 bp, Artificial
  Probe
accacccttctcaggtcgcagctgc

SEQ ID NO: 243964 - DNA, 25 bp, Artificial
  Probe
accataaccgtgctctgtactgaag

SEQ ID NO: 243965 - DNA, 25 bp, Artificial
  Probe
tggtgcattaccacccttctcaggt

SEQ ID NO: 243966 - DNA, 25 bp, Artificial
  Probe
ttctcaggtcgcagctgctgcttcc

SEQ ID NO: 243967 - DNA, 25 bp, Artificial
  Probe
cacgttagccaagtacctgatggag

SEQ ID NO: 243968 - DNA, 25 bp, Artificial
  Probe
gcagctgctgcttcctgcctctctc

SEQ ID NO: 243969 - DNA, 25 bp, Artificial
  Probe
gttgaacagcacacgttagccaagt

SEQ ID NO: 243970 - DNA, 25 bp, Artificial
  Probe
ctcaggtcgcagctgctgcttcctg

SEQ ID NO: 243971 - DNA, 25 bp, Artificial
  Probe
cacccttctcaggtcgcagctgctg

SEQ ID NO: 243972 - DNA, 25 bp, Artificial
  Probe
cctgatggagctgaccctcgtcgaa

SEQ ID NO: 243973 - DNA, 25 bp, Artificial
  Probe
atggtgcattaccacccttctcagg

SEQ ID NO: 243974 - DNA, 25 bp, Artificial
  Probe
cataaccgtgctctgtactgaagaa

SEQ ID NO: 243975 - DNA, 25 bp, Artificial
  Probe
aggtcgcagctgctgcttcctgcct

SEQ ID NO: 243976 - DNA, 25 bp, Artificial
  Probe
aagtacctgatggagctgaccctcg

SEQ ID NO: 243977 - DNA, 25 bp, Artificial
  Probe
taccataaccgtgctctgtactgaa

SEQ ID NO: 243978 - DNA, 25 bp, Artificial
  Probe
tgatggagctgaccctcgtcgaata

SEQ ID NO: 243979 - DNA, 25 bp, Artificial
  Probe
acctgatggagctgaccctcgtcga

SEQ ID NO: 243980 - DNA, 25 bp, Artificial
  Probe
tgctctgtactgaagaaaaataaag

SEQ ID NO: 243981 - DNA, 25 bp, Artificial
  Probe
ccataaccgtgctctgtactgaaga

SEQ ID NO: 243982 - DNA, 25 bp, Artificial
  Probe
acagcacacgttagccaagtacctg

SEQ ID NO: 243983 - DNA, 25 bp, Artificial
  Probe
tctcaggtcgcagctgctgcttcct

SEQ ID NO: 243984 - DNA, 25 bp, Artificial
  Probe
ggtgcattaccacccttctcaggtc

SEQ ID NO: 243985 - DNA, 25 bp, Artificial
  Probe
tgttgaacagcacacgttagccaag

SEQ ID NO: 243986 - DNA, 25 bp, Artificial
  Probe
tgaacagcacacgttagccaagtac

SEQ ID NO: 243987 - DNA, 25 bp, Artificial
  Probe
gtacctgatggagctgaccctcgtc

SEQ ID NO: 243988 - DNA, 25 bp, Artificial
  Probe
ggtcgcagctgctgcttcctgcctc

SEQ ID NO: 243989 - DNA, 25 bp, Artificial
  Probe
caaggcccaagcagaggcactggct

SEQ ID NO: 243990 - DNA, 25 bp, Artificial
  Probe
atccagtcactggagaagactgtgg

SEQ ID NO: 243991 - DNA, 25 bp, Artificial
  Probe
aagtgcgaagcaaggcccaagcaga

SEQ ID NO: 243992 - DNA, 25 bp, Artificial
  Probe
accaggcgctgaaggcccacgcaga

SEQ ID NO: 243993 - DNA, 25 bp, Artificial
  Probe
acaggatctgcgatgaactcattgc

SEQ ID NO: 243994 - DNA, 25 bp, Artificial
  Probe
gaagaagatctgaccacagctgact

SEQ ID NO: 243995 - DNA, 25 bp, Artificial
  Probe
catttccttgtctgtctgacttctg

SEQ ID NO: 243996 - DNA, 25 bp, Artificial
  Probe
aaggccagaggtaccaggcgctgaa

SEQ ID NO: 243997 - DNA, 25 bp, Artificial
  Probe
atgaactgaacaggatctgcgatga

SEQ ID NO: 243998 - DNA, 25 bp, Artificial
  Probe
cccaagtgcgaagcaaggcccaagc

SEQ ID NO: 243999 - DNA, 25 bp, Artificial
  Probe
aggcccaagcagaggcactggctct

SEQ ID NO: 244000 - DNA, 25 bp, Artificial
  Probe
gcaagcctgaggaaggcacagttgc

SEQ ID NO: 244001 - DNA, 25 bp, Artificial
  Probe
cttcaagcggtttgagaagcagaag

SEQ ID NO: 244002 - DNA, 25 bp, Artificial
  Probe
ctgaacaggatctgcgatgaactca

SEQ ID NO: 244003 - DNA, 25 bp, Artificial
  Probe
tccaggcaagcctgaggaaggcaca

SEQ ID NO: 244004 - DNA, 25 bp, Artificial
  Probe
agaggcactggctctccaggcaagc

SEQ ID NO: 244005 - DNA, 25 bp, Artificial
  Probe
agtccttctctgacctcttcaagcg

SEQ ID NO: 244006 - DNA, 25 bp, Artificial
  Probe
cgctgaaggcccacgcagaagaaaa

SEQ ID NO: 244007 - DNA, 25 bp, Artificial
  Probe
agaagatctgaccacagctgactgt

SEQ ID NO: 244008 - DNA, 25 bp, Artificial
  Probe
ccaagcagaggcactggctctccag

SEQ ID NO: 244009 - DNA, 25 bp, Artificial
  Probe
ctatggagaagtccttctctgacct

SEQ ID NO: 244010 - DNA, 25 bp, Artificial
  Probe
cgatgaactcattgctaagatggag

SEQ ID NO: 244011 - DNA, 25 bp, Artificial
  Probe
ggcttactgcggatctgaactctat

SEQ ID NO: 244012 - DNA, 25 bp, Artificial
  Probe
gaagcaaggcccaagcagaggcact

SEQ ID NO: 244013 - DNA, 25 bp, Artificial
  Probe
gatctgcgatgaactcattgctaag

SEQ ID NO: 244014 - DNA, 25 bp, Artificial
  Probe
ctgcgatgaactcattgctaagatg

SEQ ID NO: 244015 - DNA, 25 bp, Artificial
  Probe
ctcttcaagcggtttgagaagcaga

SEQ ID NO: 244016 - DNA, 25 bp, Artificial
  Probe
caagcctgaggaaggcacagttgca

SEQ ID NO: 244017 - DNA, 25 bp, Artificial
  Probe
gaagatctgaccacagctgactgtc

SEQ ID NO: 244018 - DNA, 25 bp, Artificial
  Probe
tcactggagaagactgtggagcaga

SEQ ID NO: 244019 - DNA, 25 bp, Artificial
  Probe
cacgaggcttactgcggatctgaac

SEQ ID NO: 244020 - DNA, 25 bp, Artificial
  Probe
gcggatctgaactctatggagaagt

SEQ ID NO: 244021 - DNA, 25 bp, Artificial
  Probe
gaagtccttctctgacctcttcaag

SEQ ID NO: 244022 - DNA, 25 bp, Artificial
  Probe
gagaagtccttctctgacctcttca

SEQ ID NO: 244023 - DNA, 25 bp, Artificial
  Probe
caagtgcgaagcaaggcccaagcag

SEQ ID NO: 244024 - DNA, 25 bp, Artificial
  Probe
ccagtcactggagaagactgtggag

SEQ ID NO: 244025 - DNA, 25 bp, Artificial
  Probe
aactctatggagaagtccttctctg

SEQ ID NO: 244026 - DNA, 25 bp, Artificial
  Probe
aagcagaggcactggctctccaggc

SEQ ID NO: 244027 - DNA, 25 bp, Artificial
  Probe
ctgacctcttcaagcggtttgagaa

SEQ ID NO: 244028 - DNA, 25 bp, Artificial
  Probe
aggcaagcctgaggaaggcacagtt

SEQ ID NO: 244029 - DNA, 25 bp, Artificial
  Probe
ggtaccaggcgctgaaggcccacgc

SEQ ID NO: 244030 - DNA, 25 bp, Artificial
  Probe
tccttgtctgtctgacttctgtgtg

SEQ ID NO: 244031 - DNA, 25 bp, Artificial
  Probe
cactggctctccaggcaagcctgag

SEQ ID NO: 244032 - DNA, 25 bp, Artificial
  Probe
aggcacagttgcagatccagtcact

SEQ ID NO: 244033 - DNA, 25 bp, Artificial
  Probe
cagtcactggagaagactgtggagc

SEQ ID NO: 244034 - DNA, 25 bp, Artificial
  Probe
gcagatccagtcactggagaagact

SEQ ID NO: 244035 - DNA, 25 bp, Artificial
  Probe
gggacagctctctgccctaggccta

SEQ ID NO: 244036 - DNA, 25 bp, Artificial
  Probe
ctgtggttcacctgtaccctcagtt

SEQ ID NO: 244037 - DNA, 25 bp, Artificial
  Probe
tcgctgtggttcacctgtaccctca

SEQ ID NO: 244038 - DNA, 25 bp, Artificial
  Probe
caaggggatcctcagaacaccctgt

SEQ ID NO: 244039 - DNA, 25 bp, Artificial
  Probe
agaaccagtgttctgttctggggac

SEQ ID NO: 244040 - DNA, 25 bp, Artificial
  Probe
gggccaaggggatcctcagaacacc

SEQ ID NO: 244041 - DNA, 25 bp, Artificial
  Probe
tgccagaccttaataaagcctctgc

SEQ ID NO: 244042 - DNA, 25 bp, Artificial
  Probe
ttcggcctaggtcttgctcaggggc

SEQ ID NO: 244043 - DNA, 25 bp, Artificial
  Probe
acagagaaccagtgttctgttctgg

SEQ ID NO: 244044 - DNA, 25 bp, Artificial
  Probe
ctcagttcagcttggcttcggccta

SEQ ID NO: 244045 - DNA, 25 bp, Artificial
  Probe
agggacagctctctgccctaggcct

SEQ ID NO: 244046 - DNA, 25 bp, Artificial
  Probe
agacagtggacaggtcaagtctaaa

SEQ ID NO: 244047 - DNA, 25 bp, Artificial
  Probe
cctaggtcttgctcaggggccaagt

SEQ ID NO: 244048 - DNA, 25 bp, Artificial
  Probe
actgaagttcgctgtggttcacctg

SEQ ID NO: 244049 - DNA, 25 bp, Artificial
  Probe
aagacagtggacaggtcaagtctaa

SEQ ID NO: 244050 - DNA, 25 bp, Artificial
  Probe
agggccaaggggatcctcagaacac

SEQ ID NO: 244051 - DNA, 25 bp, Artificial
  Probe
cacctgtaccctcagttcagcttgg

SEQ ID NO: 244052 - DNA, 25 bp, Artificial
  Probe
ggccaaggggatcctcagaacaccc

SEQ ID NO: 244053 - DNA, 25 bp, Artificial
  Probe
ttggcttcggcctaggtcttgctca

SEQ ID NO: 244054 - DNA, 25 bp, Artificial
  Probe
ttcagcttggcttcggcctaggtct

SEQ ID NO: 244055 - DNA, 25 bp, Artificial
  Probe
ccacagagaaccagtgttctgttct

SEQ ID NO: 244056 - DNA, 25 bp, Artificial
  Probe
gttcagcttggcttcggcctaggtc

SEQ ID NO: 244057 - DNA, 25 bp, Artificial
  Probe
tggttcacctgtaccctcagttcag

SEQ ID NO: 244058 - DNA, 25 bp, Artificial
  Probe
agtctaaaggcagtaactgaagttc

SEQ ID NO: 244059 - DNA, 25 bp, Artificial
  Probe
agtaactgaagttcgctgtggttca

SEQ ID NO: 244060 - DNA, 25 bp, Artificial
  Probe
ccaaggggatcctcagaacaccctg

SEQ ID NO: 244061 - DNA, 25 bp, Artificial
  Probe
gagaaccagtgttctgttctgggga

SEQ ID NO: 244062 - DNA, 25 bp, Artificial
  Probe
ctgccagaccttaataaagcctctg

SEQ ID NO: 244063 - DNA, 25 bp, Artificial
  Probe
gcagtaactgaagttcgctgtggtt

SEQ ID NO: 244064 - DNA, 25 bp, Artificial
  Probe
cagtaactgaagttcgctgtggttc

SEQ ID NO: 244065 - DNA, 25 bp, Artificial
  Probe
cctcagttcagcttggcttcggcct

SEQ ID NO: 244066 - DNA, 25 bp, Artificial
  Probe
aggcagggacagctctctgccctag

SEQ ID NO: 244067 - DNA, 25 bp, Artificial
  Probe
aagttcgctgtggttcacctgtacc

SEQ ID NO: 244068 - DNA, 25 bp, Artificial
  Probe
tgtaccctcagttcagcttggcttc

SEQ ID NO: 244069 - DNA, 25 bp, Artificial
  Probe
taggtcttgctcaggggccaagttc

SEQ ID NO: 244070 - DNA, 25 bp, Artificial
  Probe
ggacaggtcaagtctaaaggcagta

SEQ ID NO: 244071 - DNA, 25 bp, Artificial
  Probe
accctcagttcagcttggcttcggc

SEQ ID NO: 244072 - DNA, 25 bp, Artificial
  Probe
cctccacagagaaccagtgttctgt

SEQ ID NO: 244073 - DNA, 25 bp, Artificial
  Probe
ggcttcggcctaggtcttgctcagg

SEQ ID NO: 244074 - DNA, 25 bp, Artificial
  Probe
ctccacagagaaccagtgttctgtt

SEQ ID NO: 244075 - DNA, 25 bp, Artificial
  Probe
aaccagtgttctgttctggggacag

SEQ ID NO: 244076 - DNA, 25 bp, Artificial
  Probe
cagtgttctgttctggggacagata

SEQ ID NO: 244077 - DNA, 25 bp, Artificial
  Probe
acagtggacaggtcaagtctaaagg

SEQ ID NO: 244078 - DNA, 25 bp, Artificial
  Probe
tcacctgtaccctcagttcagcttg

SEQ ID NO: 244079 - DNA, 25 bp, Artificial
  Probe
ggcctaggtcttgctcaggggccaa

SEQ ID NO: 244080 - DNA, 25 bp, Artificial
  Probe
cctgtaccctcagttcagcttggct

SEQ ID NO: 244081 - DNA, 25 bp, Artificial
  Probe
actgccctagtgaggcaggcgtctg

SEQ ID NO: 244082 - DNA, 25 bp, Artificial
  Probe
aacggtgctggaagcccagctaaat

SEQ ID NO: 244083 - DNA, 25 bp, Artificial
  Probe
agcccagctaaatttctgtcttgtt

SEQ ID NO: 244084 - DNA, 25 bp, Artificial
  Probe
caatggagaccagaggaggctgtca

SEQ ID NO: 244085 - DNA, 25 bp, Artificial
  Probe
gtacagggactcaatggagaccaga

SEQ ID NO: 244086 - DNA, 25 bp, Artificial
  Probe
tgaacggtgctggaagcccagctaa

SEQ ID NO: 244087 - DNA, 25 bp, Artificial
  Probe
tgcgtacagggactcaatggagacc

SEQ ID NO: 244088 - DNA, 25 bp, Artificial
  Probe
gggaagccacactggcccctttttg

SEQ ID NO: 244089 - DNA, 25 bp, Artificial
  Probe
cctcactgccctagtgaggcaggcg

SEQ ID NO: 244090 - DNA, 25 bp, Artificial
  Probe
atgcgtacagggactcaatggagac

SEQ ID NO: 244091 - DNA, 25 bp, Artificial
  Probe
gtgaacggtgctggaagcccagcta

SEQ ID NO: 244092 - DNA, 25 bp, Artificial
  Probe
tctccttcagccactgaaggtggtc

SEQ ID NO: 244093 - DNA, 25 bp, Artificial
  Probe
ttcagccactgaaggtggtcatggt

SEQ ID NO: 244094 - DNA, 25 bp, Artificial
  Probe
tggaagcccagctaaatttctgtct

SEQ ID NO: 244095 - DNA, 25 bp, Artificial
  Probe
tgctggaagcccagctaaatttctg

SEQ ID NO: 244096 - DNA, 25 bp, Artificial
  Probe
tttttgtccccttgcacacagcgta

SEQ ID NO: 244097 - DNA, 25 bp, Artificial
  Probe
cccagttgacccatttgaagtctcc

SEQ ID NO: 244098 - DNA, 25 bp, Artificial
  Probe
gctggaagcccagctaaatttctgt

SEQ ID NO: 244099 - DNA, 25 bp, Artificial
  Probe
tcagtcttcctcactgccctagtga

SEQ ID NO: 244100 - DNA, 25 bp, Artificial
  Probe
ctttcctgatgcaggcactcctcag

SEQ ID NO: 244101 - DNA, 25 bp, Artificial
  Probe
catttgaagtctccttcagccactg

SEQ ID NO: 244102 - DNA, 25 bp, Artificial
  Probe
ctcactgccctagtgaggcaggcgt

SEQ ID NO: 244103 - DNA, 25 bp, Artificial
  Probe
tacagggactcaatggagaccagag

SEQ ID NO: 244104 - DNA, 25 bp, Artificial
  Probe
tcaatggagaccagaggaggctgtc

SEQ ID NO: 244105 - DNA, 25 bp, Artificial
  Probe
ccttcagccactgaaggtggtcatg

SEQ ID NO: 244106 - DNA, 25 bp, Artificial
  Probe
ctccttcagccactgaaggtggtca

SEQ ID NO: 244107 - DNA, 25 bp, Artificial
  Probe
gagcatgcgtacagggactcaatgg

SEQ ID NO: 244108 - DNA, 25 bp, Artificial
  Probe
agagcatgcgtacagggactcaatg

SEQ ID NO: 244109 - DNA, 25 bp, Artificial
  Probe
gaagcccagctaaatttctgtcttg

SEQ ID NO: 244110 - DNA, 25 bp, Artificial
  Probe
accagaggaggctgtcagctgcctg

SEQ ID NO: 244111 - DNA, 25 bp, Artificial
  Probe
ccactgaaggtggtcatggtactgg

SEQ ID NO: 244112 - DNA, 25 bp, Artificial
  Probe
tccttcagccactgaaggtggtcat

SEQ ID NO: 244113 - DNA, 25 bp, Artificial
  Probe
cagccactgaaggtggtcatggtac

SEQ ID NO: 244114 - DNA, 25 bp, Artificial
  Probe
atgcaggcactcctcagcccatttt

SEQ ID NO: 244115 - DNA, 25 bp, Artificial
  Probe
cagctaaatttctgtcttgtttggg

SEQ ID NO: 244116 - DNA, 25 bp, Artificial
  Probe
gatgcaggcactcctcagcccattt

SEQ ID NO: 244117 - DNA, 25 bp, Artificial
  Probe
ctttttgtccccttgcacacagcgt

SEQ ID NO: 244118 - DNA, 25 bp, Artificial
  Probe
gaagtctccttcagccactgaaggt

SEQ ID NO: 244119 - DNA, 25 bp, Artificial
  Probe
atttgaagtctccttcagccactga

SEQ ID NO: 244120 - DNA, 25 bp, Artificial
  Probe
acagagcatgcgtacagggactcaa

SEQ ID NO: 244121 - DNA, 25 bp, Artificial
  Probe
ttgaagtctccttcagccactgaag

SEQ ID NO: 244122 - DNA, 25 bp, Artificial
  Probe
gcgtacagggactcaatggagacca

SEQ ID NO: 244123 - DNA, 25 bp, Artificial
  Probe
ccagctaaatttctgtcttgtttgg

SEQ ID NO: 244124 - DNA, 25 bp, Artificial
  Probe
tgaagtctccttcagccactgaagg

SEQ ID NO: 244125 - DNA, 25 bp, Artificial
  Probe
tgatgcaggcactcctcagcccatt

SEQ ID NO: 244126 - DNA, 25 bp, Artificial
  Probe
aagcccagctaaatttctgtcttgt

SEQ ID NO: 244127 - DNA, 25 bp, Artificial
  Probe
cttctaagagggatgtctccaactg

SEQ ID NO: 244128 - DNA, 25 bp, Artificial
  Probe
ctacctgagagatgagaacgccagt

SEQ ID NO: 244129 - DNA, 25 bp, Artificial
  Probe
ggcgtatttccctaagatttctatc

SEQ ID NO: 244130 - DNA, 25 bp, Artificial
  Probe
tggacagcggcaccacactcttgcg

SEQ ID NO: 244131 - DNA, 25 bp, Artificial
  Probe
ccgggcatctgaaggccttccagac

SEQ ID NO: 244132 - DNA, 25 bp, Artificial
  Probe
gcagacaaggccattgtggacagcg

SEQ ID NO: 244133 - DNA, 25 bp, Artificial
  Probe
aagagggatgtctccaactggcttc

SEQ ID NO: 244134 - DNA, 25 bp, Artificial
  Probe
ctcaacctggactgcagagagtata

SEQ ID NO: 244135 - DNA, 25 bp, Artificial
  Probe
tctccaactggcttctctgtctgtt

SEQ ID NO: 244136 - DNA, 25 bp, Artificial
  Probe
ctgccccagaaggtgtttgatgcag

SEQ ID NO: 244137 - DNA, 25 bp, Artificial
  Probe
cattctgccgcagctctacattcag

SEQ ID NO: 244138 - DNA, 25 bp, Artificial
  Probe
tgccgcagctctacattcagccttg

SEQ ID NO: 244139 - DNA, 25 bp, Artificial
  Probe
gccattgtggacagcggcaccacac

SEQ ID NO: 244140 - DNA, 25 bp, Artificial
  Probe
attctgccgcagctctacattcagc

SEQ ID NO: 244141 - DNA, 25 bp, Artificial
  Probe
agagtataacgcagacaaggccatt

SEQ ID NO: 244142 - DNA, 25 bp, Artificial
  Probe
cttcagccgggcatctgaaggcctt

SEQ ID NO: 244143 - DNA, 25 bp, Artificial
  Probe
cctaagatttctatctacctgagag

SEQ ID NO: 244144 - DNA, 25 bp, Artificial
  Probe
agagttttctgatggcttctggacg

SEQ ID NO: 244145 - DNA, 25 bp, Artificial
  Probe
tactcttgatttccaagttttcagg

SEQ ID NO: 244146 - DNA, 25 bp, Artificial
  Probe
gtctggaacttcagccgggcatctg

SEQ ID NO: 244147 - DNA, 25 bp, Artificial
  Probe
gccgtggcacgcacatctctgattc

SEQ ID NO: 244148 - DNA, 25 bp, Artificial
  Probe
cagccttgaactcagctcttctaag

SEQ ID NO: 244149 - DNA, 25 bp, Artificial
  Probe
gatgagaacgccagtcgctccttcc

SEQ ID NO: 244150 - DNA, 25 bp, Artificial
  Probe
gaatcaccattctgccgcagctcta

SEQ ID NO: 244151 - DNA, 25 bp, Artificial
  Probe
gaactcagctcttctaagagggatg

SEQ ID NO: 244152 - DNA, 25 bp, Artificial
  Probe
tctgaaactccatgggcgtatttcc

SEQ ID NO: 244153 - DNA, 25 bp, Artificial
  Probe
agagggatgtctccaactggcttct

SEQ ID NO: 244154 - DNA, 25 bp, Artificial
  Probe
agctcttctaagagggatgtctcca

SEQ ID NO: 244155 - DNA, 25 bp, Artificial
  Probe
ggcccagctggcatgctggacaaat

SEQ ID NO: 244156 - DNA, 25 bp, Artificial
  Probe
catgctggacaaattctgaaactcc

SEQ ID NO: 244157 - DNA, 25 bp, Artificial
  Probe
catgggcgtatttccctaagatttc

SEQ ID NO: 244158 - DNA, 25 bp, Artificial
  Probe
atctgaaggccttccagactcgctg

SEQ ID NO: 244159 - DNA, 25 bp, Artificial
  Probe
gcagctctacattcagccttgaact

SEQ ID NO: 244160 - DNA, 25 bp, Artificial
  Probe
actccatgggcgtatttccctaaga

SEQ ID NO: 244161 - DNA, 25 bp, Artificial
  Probe
agttttcaggtcttttctacttcag

SEQ ID NO: 244162 - DNA, 25 bp, Artificial
  Probe
ggacaaattctgaaactccatgggc

SEQ ID NO: 244163 - DNA, 25 bp, Artificial
  Probe
cttgatttccaagttttcaggtctt

SEQ ID NO: 244164 - DNA, 25 bp, Artificial
  Probe
catctctgattccagagttttctga

SEQ ID NO: 244165 - DNA, 25 bp, Artificial
  Probe
ataacgcagacaaggccattgtgga

SEQ ID NO: 244166 - DNA, 25 bp, Artificial
  Probe
ttccagactcgctgtatcttgatta

SEQ ID NO: 244167 - DNA, 25 bp, Artificial
  Probe
tggtggaagccgtggcacgcacatc

SEQ ID NO: 244168 - DNA, 25 bp, Artificial
  Probe
cgctgtatcttgattactcttgatt

SEQ ID NO: 244169 - DNA, 25 bp, Artificial
  Probe
tgagaacgccagtcgctccttccga

SEQ ID NO: 244170 - DNA, 25 bp, Artificial
  Probe
ggccttccagactcgctgtatcttg

SEQ ID NO: 244171 - DNA, 25 bp, Artificial
  Probe
gtggacagcggcaccacactcttgc

SEQ ID NO: 244172 - DNA, 25 bp, Artificial
  Probe
ccccagaaggtgtttgatgcagtgg

SEQ ID NO: 244173 - DNA, 25 bp, Artificial
  Probe
gctccagtgcaggagacgttgcatg

SEQ ID NO: 244174 - DNA, 25 bp, Artificial
  Probe
tcactgtaaggagtcgtggacacgg

SEQ ID NO: 244175 - DNA, 25 bp, Artificial
  Probe
gagatgtcttgctgcggttttcact

SEQ ID NO: 244176 - DNA, 25 bp, Artificial
  Probe
acctggttgcccagcagccggggac

SEQ ID NO: 244177 - DNA, 25 bp, Artificial
  Probe
ctctatatcaaaaaggtggtcaaga

SEQ ID NO: 244178 - DNA, 25 bp, Artificial
  Probe
ggagtccatgacttgtggcttgtgc

SEQ ID NO: 244179 - DNA, 25 bp, Artificial
  Probe
tgctgctccagtgcaggagacgttg

SEQ ID NO: 244180 - DNA, 25 bp, Artificial
  Probe
tcagcctgttgcacaggaggatggt

SEQ ID NO: 244181 - DNA, 25 bp, Artificial
  Probe
cggttttcactgtaaggagtcgtgg

SEQ ID NO: 244182 - DNA, 25 bp, Artificial
  Probe
caggcccagagatgtcttgctgcgg

SEQ ID NO: 244183 - DNA, 25 bp, Artificial
  Probe
cctggttgcccagcagccggggact

SEQ ID NO: 244184 - DNA, 25 bp, Artificial
  Probe
gtcttgctgcggttttcactgtaag

SEQ ID NO: 244185 - DNA, 25 bp, Artificial
  Probe
ggtcatcctcatcaccatctttgtg

SEQ ID NO: 244186 - DNA, 25 bp, Artificial
  Probe
agagtcgcatctcagtgcaggagcg

SEQ ID NO: 244187 - DNA, 25 bp, Artificial
  Probe
tctctatatcaaaaaggtggtcaag

SEQ ID NO: 244188 - DNA, 25 bp, Artificial
  Probe
aaagctttggcgtcaggggtccgca

SEQ ID NO: 244189 - DNA, 25 bp, Artificial
  Probe
gtgcagcaatgcaggcccagagatg

SEQ ID NO: 244190 - DNA, 25 bp, Artificial
  Probe
ctccagtgcaggagacgttgcatgg

SEQ ID NO: 244191 - DNA, 25 bp, Artificial
  Probe
agtcgcatctcagtgcaggagcggc

SEQ ID NO: 244192 - DNA, 25 bp, Artificial
  Probe
tcgcatctcagtgcaggagcggcag

SEQ ID NO: 244193 - DNA, 25 bp, Artificial
  Probe
cgggagtccatgacttgtggcttgt

SEQ ID NO: 244194 - DNA, 25 bp, Artificial
  Probe
agtccatgacttgtggcttgtgctg

SEQ ID NO: 244195 - DNA, 25 bp, Artificial
  Probe
ggcccagagatgtcttgctgcggtt

SEQ ID NO: 244196 - DNA, 25 bp, Artificial
  Probe
tggcgtcaggggtccgcagtaatat

SEQ ID NO: 244197 - DNA, 25 bp, Artificial
  Probe
tggacacgggagtccatgacttgtg

SEQ ID NO: 244198 - DNA, 25 bp, Artificial
  Probe
caatgcaggcccagagatgtcttgc

SEQ ID NO: 244199 - DNA, 25 bp, Artificial
  Probe
gttttcactgtaaggagtcgtggac

SEQ ID NO: 244200 - DNA, 25 bp, Artificial
  Probe
cagcagccggggactggctaaataa

SEQ ID NO: 244201 - DNA, 25 bp, Artificial
  Probe
gtgtcagcctgttgcacaggaggat

SEQ ID NO: 244202 - DNA, 25 bp, Artificial
  Probe
tacagagtgcagcaatgcaggccca

SEQ ID NO: 244203 - DNA, 25 bp, Artificial
  Probe
gctcgaggacaagatcctgtggaga

SEQ ID NO: 244204 - DNA, 25 bp, Artificial
  Probe
tgtcagcctgttgcacaggaggatg

SEQ ID NO: 244205 - DNA, 25 bp, Artificial
  Probe
cccagagatgtcttgctgcggtttt

SEQ ID NO: 244206 - DNA, 25 bp, Artificial
  Probe
cgtggacacgggagtccatgacttg

SEQ ID NO: 244207 - DNA, 25 bp, Artificial
  Probe
aagagagtcgcatctcagtgcagga

SEQ ID NO: 244208 - DNA, 25 bp, Artificial
  Probe
atgcaggcccagagatgtcttgctg

SEQ ID NO: 244209 - DNA, 25 bp, Artificial
  Probe
gctgcggttttcactgtaaggagtc

SEQ ID NO: 244210 - DNA, 25 bp, Artificial
  Probe
aaggcacctggttgcccagcagccg

SEQ ID NO: 244211 - DNA, 25 bp, Artificial
  Probe
ttttctctatatcaaaaaggtggtc

SEQ ID NO: 244212 - DNA, 25 bp, Artificial
  Probe
tgcatgggtgtcagcctgttgcaca

SEQ ID NO: 244213 - DNA, 25 bp, Artificial
  Probe
acgttgcatgggtgtcagcctgttg

SEQ ID NO: 244214 - DNA, 25 bp, Artificial
  Probe
cgaggacaagatcctgtggagatag

SEQ ID NO: 244215 - DNA, 25 bp, Artificial
  Probe
tagaaggcacctggttgcccagcag

SEQ ID NO: 244216 - DNA, 25 bp, Artificial
  Probe
gacacgggagtccatgacttgtggc

SEQ ID NO: 244217 - DNA, 25 bp, Artificial
  Probe
ctgaggctcgaggacaagatcctgt

SEQ ID NO: 244218 - DNA, 25 bp, Artificial
  Probe
cctgttgcacaggaggatggtaaag

SEQ ID NO: 244219 - DNA, 25 bp, Artificial
  Probe
tttgatgagccgtagcagccctggg

SEQ ID NO: 244220 - DNA, 25 bp, Artificial
  Probe
agagattgtggttcgccttgacctg

SEQ ID NO: 244221 - DNA, 25 bp, Artificial
  Probe
acatcaagaaggaccagggctccaa

SEQ ID NO: 244222 - DNA, 25 bp, Artificial
  Probe
acagggacggcagacgaagcccctc

SEQ ID NO: 244223 - DNA, 25 bp, Artificial
  Probe
cagccacggagcaacagggacggca

SEQ ID NO: 244224 - DNA, 25 bp, Artificial
  Probe
atgaggtgcccacaggagagattgt

SEQ ID NO: 244225 - DNA, 25 bp, Artificial
  Probe
gtgcccacaggagagattgtggttc

SEQ ID NO: 244226 - DNA, 25 bp, Artificial
  Probe
ccagttacaaagtgtctcctgctgc

SEQ ID NO: 244227 - DNA, 25 bp, Artificial
  Probe
acgctgtctggtggtcagccacgga

SEQ ID NO: 244228 - DNA, 25 bp, Artificial
  Probe
gatcatagatgacttccttctcaag

SEQ ID NO: 244229 - DNA, 25 bp, Artificial
  Probe
cccacaggagagattgtggttcgcc

SEQ ID NO: 244230 - DNA, 25 bp, Artificial
  Probe
cccgacatcaagaaggaccagggct

SEQ ID NO: 244231 - DNA, 25 bp, Artificial
  Probe
ttgtggttcgccttgacctgcagtt

SEQ ID NO: 244232 - DNA, 25 bp, Artificial
  Probe
gtgtctcctgctgcatgaggtgccc

SEQ ID NO: 244233 - DNA, 25 bp, Artificial
  Probe
aacagggacggcagacgaagcccct

SEQ ID NO: 244234 - DNA, 25 bp, Artificial
  Probe
catcaagaaggaccagggctccaag

SEQ ID NO: 244235 - DNA, 25 bp, Artificial
  Probe
catgaggtgcccacaggagagattg

SEQ ID NO: 244236 - DNA, 25 bp, Artificial
  Probe
tcagccacggagcaacagggacggc

SEQ ID NO: 244237 - DNA, 25 bp, Artificial
  Probe
tgcagttgtttgatgagccgtagca

SEQ ID NO: 244238 - DNA, 25 bp, Artificial
  Probe
gacggcagacgaagcccctcgaggc

SEQ ID NO: 244239 - DNA, 25 bp, Artificial
  Probe
ggcacgctgtctggtggtcagccac

SEQ ID NO: 244240 - DNA, 25 bp, Artificial
  Probe
ctccaaggggccagttacaaagtgt

SEQ ID NO: 244241 - DNA, 25 bp, Artificial
  Probe
agacgaagcccctcgaggctgtgag

SEQ ID NO: 244242 - DNA, 25 bp, Artificial
  Probe
caaagtgtctcctgctgcatgaggt

SEQ ID NO: 244243 - DNA, 25 bp, Artificial
  Probe
cctgctgcatgaggtgcccacagga

SEQ ID NO: 244244 - DNA, 25 bp, Artificial
  Probe
agttgtttgatgagccgtagcagcc

SEQ ID NO: 244245 - DNA, 25 bp, Artificial
  Probe
ccgtagcagccctgggatgatcata

SEQ ID NO: 244246 - DNA, 25 bp, Artificial
  Probe
tgatgagccgtagcagccctgggat

SEQ ID NO: 244247 - DNA, 25 bp, Artificial
  Probe
acgaagcccctcgaggctgtgagga

SEQ ID NO: 244248 - DNA, 25 bp, Artificial
  Probe
tggttcgccttgacctgcagttgtt

SEQ ID NO: 244249 - DNA, 25 bp, Artificial
  Probe
agcagccctgggatgatcatagatg

SEQ ID NO: 244250 - DNA, 25 bp, Artificial
  Probe
atgacttccttctcaaggccccgtg

SEQ ID NO: 244251 - DNA, 25 bp, Artificial
  Probe
caaggggccagttacaaagtgtctc

SEQ ID NO: 244252 - DNA, 25 bp, Artificial
  Probe
ccttgacctgcagttgtttgatgag

SEQ ID NO: 244253 - DNA, 25 bp, Artificial
  Probe
cccctcgaggctgtgaggagttgtt

SEQ ID NO: 244254 - DNA, 25 bp, Artificial
  Probe
agtgcccgacatcaagaaggaccag

SEQ ID NO: 244255 - DNA, 25 bp, Artificial
  Probe
cctgcagttgtttgatgagccgtag

SEQ ID NO: 244256 - DNA, 25 bp, Artificial
  Probe
gatgacttccttctcaaggccccgt

SEQ ID NO: 244257 - DNA, 25 bp, Artificial
  Probe
cagccctgggatgatcatagatgac

SEQ ID NO: 244258 - DNA, 25 bp, Artificial
  Probe
ttacaaagtgtctcctgctgcatga

SEQ ID NO: 244259 - DNA, 25 bp, Artificial
  Probe
ccacggagcaacagggacggcagac

SEQ ID NO: 244260 - DNA, 25 bp, Artificial
  Probe
tacaaagtgtctcctgctgcatgag

SEQ ID NO: 244261 - DNA, 25 bp, Artificial
  Probe
tcaagaaggaccagggctccaaggg

SEQ ID NO: 244262 - DNA, 25 bp, Artificial
  Probe
agccctgggatgatcatagatgact

SEQ ID NO: 244263 - DNA, 25 bp, Artificial
  Probe
atgagccgtagcagccctgggatga

SEQ ID NO: 244264 - DNA, 25 bp, Artificial
  Probe
gaccagggctccaaggggccagtta

SEQ ID NO: 244265 - DNA, 25 bp, Artificial
  Probe
gagggtgctgcctctgatttcctag

SEQ ID NO: 244266 - DNA, 25 bp, Artificial
  Probe
aaatccagttgttaccaagtgtagg

SEQ ID NO: 244267 - DNA, 25 bp, Artificial
  Probe
tcgcgctgctatgtctgtgaccagc

SEQ ID NO: 244268 - DNA, 25 bp, Artificial
  Probe
gcgctgctatgtctgtgaccagcag

SEQ ID NO: 244269 - DNA, 25 bp, Artificial
  Probe
aacgtgagcttgatgagggtcgcta

SEQ ID NO: 244270 - DNA, 25 bp, Artificial
  Probe
cctctgatttcctagaagacccaga

SEQ ID NO: 244271 - DNA, 25 bp, Artificial
  Probe
tggcagatcgaacgtgagcttgatg

SEQ ID NO: 244272 - DNA, 25 bp, Artificial
  Probe
tgattgctaaacttggaaagcatcg

SEQ ID NO: 244273 - DNA, 25 bp, Artificial
  Probe
cagattacaagcacgggtggcagat

SEQ ID NO: 244274 - DNA, 25 bp, Artificial
  Probe
acatctatgggcaatgcttcctccg

SEQ ID NO: 244275 - DNA, 25 bp, Artificial
  Probe
ccgttcagattacaagcacgggtgg

SEQ ID NO: 244276 - DNA, 25 bp, Artificial
  Probe
ttgattgctaaacttggaaagcatc

SEQ ID NO: 244277 - DNA, 25 bp, Artificial
  Probe
agcagagggtgctgcctctgatttc

SEQ ID NO: 244278 - DNA, 25 bp, Artificial
  Probe
ctgcaaggactacaaggagactgga

SEQ ID NO: 244279 - DNA, 25 bp, Artificial
  Probe
tcgctatggcgtctatgaggatgaa

SEQ ID NO: 244280 - DNA, 25 bp, Artificial
  Probe
ctgtgaccagcagaccaatggcgtt

SEQ ID NO: 244281 - DNA, 25 bp, Artificial
  Probe
ggcaatgcttcctccgggatggtga

SEQ ID NO: 244282 - DNA, 25 bp, Artificial
  Probe
tacaagcacgggtggcagatcgaac

SEQ ID NO: 244283 - DNA, 25 bp, Artificial
  Probe
tctgtgaccagcagaccaatggcgt

SEQ ID NO: 244284 - DNA, 25 bp, Artificial
  Probe
aggagagtccagtttccattattta

SEQ ID NO: 244285 - DNA, 25 bp, Artificial
  Probe
tgaagcagagggtgctgcctctgat

SEQ ID NO: 244286 - DNA, 25 bp, Artificial
  Probe
ggtgctgcctctgatttcctagaag

SEQ ID NO: 244287 - DNA, 25 bp, Artificial
  Probe
aacttggaaagcatcgagctgaagc

SEQ ID NO: 244288 - DNA, 25 bp, Artificial
  Probe
accacctcgcgctgctatgtctgtg

SEQ ID NO: 244289 - DNA, 25 bp, Artificial
  Probe
cacctcgcgctgctatgtctgtgac

SEQ ID NO: 244290 - DNA, 25 bp, Artificial
  Probe
taaacttggaaagcatcgagctgaa

SEQ ID NO: 244291 - DNA, 25 bp, Artificial
  Probe
attgctaaacttggaaagcatcgag

SEQ ID NO: 244292 - DNA, 25 bp, Artificial
  Probe
cttggaaagcatcgagctgaagcag

SEQ ID NO: 244293 - DNA, 25 bp, Artificial
  Probe
cagcccgacatctgcaaggactaca

SEQ ID NO: 244294 - DNA, 25 bp, Artificial
  Probe
tgggcaatgcttcctccgggatggt

SEQ ID NO: 244295 - DNA, 25 bp, Artificial
  Probe
acgtgagcttgatgagggtcgctat

SEQ ID NO: 244296 - DNA, 25 bp, Artificial
  Probe
tgtctgtgaccagcagaccaatggc

SEQ ID NO: 244297 - DNA, 25 bp, Artificial
  Probe
accagcccgacatctgcaaggacta

SEQ ID NO: 244298 - DNA, 25 bp, Artificial
  Probe
tctgatttcctagaagacccagagg

SEQ ID NO: 244299 - DNA, 25 bp, Artificial
  Probe
aaagcatcgagctgaagcagagggt

SEQ ID NO: 244300 - DNA, 25 bp, Artificial
  Probe
ccgtgcgctgggattaccagcccga

SEQ ID NO: 244301 - DNA, 25 bp, Artificial
  Probe
gctgggattaccagcccgacatctg

SEQ ID NO: 244302 - DNA, 25 bp, Artificial
  Probe
attaccagcccgacatctgcaagga

SEQ ID NO: 244303 - DNA, 25 bp, Artificial
  Probe
tctgcaaggactacaaggagactgg

SEQ ID NO: 244304 - DNA, 25 bp, Artificial
  Probe
ccttcatgaccgttcagattacaag

SEQ ID NO: 244305 - DNA, 25 bp, Artificial
  Probe
cgctgggattaccagcccgacatct

SEQ ID NO: 244306 - DNA, 25 bp, Artificial
  Probe
aggatacatctatgggcaatgcttc

SEQ ID NO: 244307 - DNA, 25 bp, Artificial
  Probe
ctgcctctgatttcctagaagaccc

SEQ ID NO: 244308 - DNA, 25 bp, Artificial
  Probe
gcccgacatctgcaaggactacaag

SEQ ID NO: 244309 - DNA, 25 bp, Artificial
  Probe
atcgaacgtgagcttgatgagggtc

SEQ ID NO: 244310 - DNA, 25 bp, Artificial
  Probe
gtcgctatggcgtctatgaggatga

SEQ ID NO: 244311 - DNA, 25 bp, Artificial
  Probe
gcccaggcagctgtggctcctgctg

SEQ ID NO: 244312 - DNA, 25 bp, Artificial
  Probe
cgtcgctgactcagccagggtcttc

SEQ ID NO: 244313 - DNA, 25 bp, Artificial
  Probe
gcattgtcgccctgtgtggtcgctt

SEQ ID NO: 244314 - DNA, 25 bp, Artificial
  Probe
aagctaggcaaatgctgtgctgagc

SEQ ID NO: 244315 - DNA, 25 bp, Artificial
  Probe
cccagaggacacactgtctgggcct

SEQ ID NO: 244316 - DNA, 25 bp, Artificial
  Probe
gcttctggattggagatgctgaaac

SEQ ID NO: 244317 - DNA, 25 bp, Artificial
  Probe
cagccagggtcttctctcgggttgg

SEQ ID NO: 244318 - DNA, 25 bp, Artificial
  Probe
tcagcccaggcagctgtggctcctg

SEQ ID NO: 244319 - DNA, 25 bp, Artificial
  Probe
tgtggctcctgctgctactgcctct

SEQ ID NO: 244320 - DNA, 25 bp, Artificial
  Probe
ggcctggcgatggacatgtgtaatt

SEQ ID NO: 244321 - DNA, 25 bp, Artificial
  Probe
ggacacactgtctgggcctggcgat

SEQ ID NO: 244322 - DNA, 25 bp, Artificial
  Probe
tggcagccgcctggtgccttcgctg

SEQ ID NO: 244323 - DNA, 25 bp, Artificial
  Probe
ccagcccagaggacacactgtctgg

SEQ ID NO: 244324 - DNA, 25 bp, Artificial
  Probe
acaagctaggcaaatgctgtgctga

SEQ ID NO: 244325 - DNA, 25 bp, Artificial
  Probe
atgtgagacttgtgcgtcgctgact

SEQ ID NO: 244326 - DNA, 25 bp, Artificial
  Probe
tccagagcttctggattggagatgc

SEQ ID NO: 244327 - DNA, 25 bp, Artificial
  Probe
cagcccagaggacacactgtctggg

SEQ ID NO: 244328 - DNA, 25 bp, Artificial
  Probe
cctggcgatggacatgtgtaattcc

SEQ ID NO: 244329 - DNA, 25 bp, Artificial
  Probe
cagagcttctggattggagatgctg

SEQ ID NO: 244330 - DNA, 25 bp, Artificial
  Probe
tactgcctctcacagtggtgctgct

SEQ ID NO: 244331 - DNA, 25 bp, Artificial
  Probe
cccagagagtcctggagccttagga

SEQ ID NO: 244332 - DNA, 25 bp, Artificial
  Probe
cacagtggtgctgctggcagccgcc

SEQ ID NO: 244333 - DNA, 25 bp, Artificial
  Probe
agctgtggctcctgctgctactgcc

SEQ ID NO: 244334 - DNA, 25 bp, Artificial
  Probe
cttctggattggagatgctgaaact

SEQ ID NO: 244335 - DNA, 25 bp, Artificial
  Probe
ccatccctaggatgtgagacttgtg

SEQ ID NO: 244336 - DNA, 25 bp, Artificial
  Probe
ccctaggatgtgagacttgtgcgtc

SEQ ID NO: 244337 - DNA, 25 bp, Artificial
  Probe
cttgtgcgtcgctgactcagccagg

SEQ ID NO: 244338 - DNA, 25 bp, Artificial
  Probe
taggcaaatgctgtgctgagctaca

SEQ ID NO: 244339 - DNA, 25 bp, Artificial
  Probe
gtgcgtcgctgactcagccagggtc

SEQ ID NO: 244340 - DNA, 25 bp, Artificial
  Probe
gctaggcaaatgctgtgctgagcta

SEQ ID NO: 244341 - DNA, 25 bp, Artificial
  Probe
gctgctactgcctctcacagtggtg

SEQ ID NO: 244342 - DNA, 25 bp, Artificial
  Probe
cgccctgtgtggtcgcttctgtcac

SEQ ID NO: 244343 - DNA, 25 bp, Artificial
  Probe
aattccagagcttctggattggaga

SEQ ID NO: 244344 - DNA, 25 bp, Artificial
  Probe
actcagccagggtcttctctcgggt

SEQ ID NO: 244345 - DNA, 25 bp, Artificial
  Probe
acatgtgtaattccagagcttctgg

SEQ ID NO: 244346 - DNA, 25 bp, Artificial
  Probe
tgtaattccagagcttctggattgg

SEQ ID NO: 244347 - DNA, 25 bp, Artificial
  Probe
gctgactcagccagggtcttctctc

SEQ ID NO: 244348 - DNA, 25 bp, Artificial
  Probe
aggacacactgtctgggcctggcga

SEQ ID NO: 244349 - DNA, 25 bp, Artificial
  Probe
ctgtgtggtcgcttctgtcacctcc

SEQ ID NO: 244350 - DNA, 25 bp, Artificial
  Probe
tgctgtgctgagctacatccccagc

SEQ ID NO: 244351 - DNA, 25 bp, Artificial
  Probe
aagcctcagcccaggcagctgtggc

SEQ ID NO: 244352 - DNA, 25 bp, Artificial
  Probe
gatgtgagacttgtgcgtcgctgac

SEQ ID NO: 244353 - DNA, 25 bp, Artificial
  Probe
actgtctgggcctggcgatggacat

SEQ ID NO: 244354 - DNA, 25 bp, Artificial
  Probe
atgtgtaattccagagcttctggat

SEQ ID NO: 244355 - DNA, 25 bp, Artificial
  Probe
gagacttgtgcgtcgctgactcagc

SEQ ID NO: 244356 - DNA, 25 bp, Artificial
  Probe
gtgtggtcgcttctgtcacctccgc

SEQ ID NO: 244357 - DNA, 25 bp, Artificial
  Probe
attggcacagtcagtcctttgttcc

SEQ ID NO: 244358 - DNA, 25 bp, Artificial
  Probe
aacatagctgccttgctgtctgtca

SEQ ID NO: 244359 - DNA, 25 bp, Artificial
  Probe
agtcagtcctttgttccagaaattg

SEQ ID NO: 244360 - DNA, 25 bp, Artificial
  Probe
tctgtcatgctccagccgtacatgc

SEQ ID NO: 244361 - DNA, 25 bp, Artificial
  Probe
taccttaccagcaggccaccgaatt

SEQ ID NO: 244362 - DNA, 25 bp, Artificial
  Probe
agctgccttgctgtctgtcatgctc

SEQ ID NO: 244363 - DNA, 25 bp, Artificial
  Probe
atttgtaccttaccagcaggccacc

SEQ ID NO: 244364 - DNA, 25 bp, Artificial
  Probe
gtaccttaccagcaggccaccgaat

SEQ ID NO: 244365 - DNA, 25 bp, Artificial
  Probe
gctgccttgctgtctgtcatgctcc

SEQ ID NO: 244366 - DNA, 25 bp, Artificial
  Probe
cacagtcagtcctttgttccagaaa

SEQ ID NO: 244367 - DNA, 25 bp, Artificial
  Probe
cttgctgtctgtcatgctccagccg

SEQ ID NO: 244368 - DNA, 25 bp, Artificial
  Probe
taccagcaggccaccgaattggcac

SEQ ID NO: 244369 - DNA, 25 bp, Artificial
  Probe
tttgtaccttaccagcaggccaccg

SEQ ID NO: 244370 - DNA, 25 bp, Artificial
  Probe
catttgtaccttaccagcaggccac

SEQ ID NO: 244371 - DNA, 25 bp, Artificial
  Probe
ggcacagtcagtcctttgttccaga

SEQ ID NO: 244372 - DNA, 25 bp, Artificial
  Probe
tcatttgtaccttaccagcaggcca

SEQ ID NO: 244373 - DNA, 25 bp, Artificial
  Probe
acatagctgccttgctgtctgtcat

SEQ ID NO: 244374 - DNA, 25 bp, Artificial
  Probe
cacggtgacaggaatggcagtgaac

SEQ ID NO: 244375 - DNA, 25 bp, Artificial
  Probe
gcacagtcagtcctttgttccagaa

SEQ ID NO: 244376 - DNA, 25 bp, Artificial
  Probe
tcctttgttccagaaattggaaaat

SEQ ID NO: 244377 - DNA, 25 bp, Artificial
  Probe
tggcacagtcagtcctttgttccag

SEQ ID NO: 244378 - DNA, 25 bp, Artificial
  Probe
cagtgaacatagctgccttgctgtc

SEQ ID NO: 244379 - DNA, 25 bp, Artificial
  Probe
agcaggccaccgaattggcacagtc

SEQ ID NO: 244380 - DNA, 25 bp, Artificial
  Probe
gcagtgaacatagctgccttgctgt

SEQ ID NO: 244381 - DNA, 25 bp, Artificial
  Probe
acagtcagtcctttgttccagaaat

SEQ ID NO: 244382 - DNA, 25 bp, Artificial
  Probe
caggccaccgaattggcacagtcag

SEQ ID NO: 244383 - DNA, 25 bp, Artificial
  Probe
cagtcagtcctttgttccagaaatt

SEQ ID NO: 244384 - DNA, 25 bp, Artificial
  Probe
gccttgctgtctgtcatgctccagc

SEQ ID NO: 244385 - DNA, 25 bp, Artificial
  Probe
aattggcacagtcagtcctttgttc

SEQ ID NO: 244386 - DNA, 25 bp, Artificial
  Probe
tcagtcctttgttccagaaattgga

SEQ ID NO: 244387 - DNA, 25 bp, Artificial
  Probe
atagctgccttgctgtctgtcatgc

SEQ ID NO: 244388 - DNA, 25 bp, Artificial
  Probe
tagctgccttgctgtctgtcatgct

SEQ ID NO: 244389 - DNA, 25 bp, Artificial
  Probe
ttgctgtctgtcatgctccagccgt

SEQ ID NO: 244390 - DNA, 25 bp, Artificial
  Probe
ctgtctgtcatgctccagccgtaca

SEQ ID NO: 244391 - DNA, 25 bp, Artificial
  Probe
cagtcctttgttccagaaattggaa

SEQ ID NO: 244392 - DNA, 25 bp, Artificial
  Probe
aggccaccgaattggcacagtcagt

SEQ ID NO: 244393 - DNA, 25 bp, Artificial
  Probe
gaattggcacagtcagtcctttgtt

SEQ ID NO: 244394 - DNA, 25 bp, Artificial
  Probe
ctgccttgctgtctgtcatgctcca

SEQ ID NO: 244395 - DNA, 25 bp, Artificial
  Probe
tgtctgtcatgctccagccgtacat

SEQ ID NO: 244396 - DNA, 25 bp, Artificial
  Probe
tgccttgctgtctgtcatgctccag

SEQ ID NO: 244397 - DNA, 25 bp, Artificial
  Probe
gctgtctgtcatgctccagccgtac

SEQ ID NO: 244398 - DNA, 25 bp, Artificial
  Probe
agtgaacatagctgccttgctgtct

SEQ ID NO: 244399 - DNA, 25 bp, Artificial
  Probe
gcaggccaccgaattggcacagtca

SEQ ID NO: 244400 - DNA, 25 bp, Artificial
  Probe
ttggcacagtcagtcctttgttcca

SEQ ID NO: 244401 - DNA, 25 bp, Artificial
  Probe
tgctgtctgtcatgctccagccgta

SEQ ID NO: 244402 - DNA, 25 bp, Artificial
  Probe
ttcatttgtaccttaccagcaggcc

SEQ ID NO: 244403 - DNA, 25 bp, Artificial
  Probe
cggcccaaaacaaggaggctctctc

SEQ ID NO: 244404 - DNA, 25 bp, Artificial
  Probe
tcctgtgtggacacgcccactcggc

SEQ ID NO: 244405 - DNA, 25 bp, Artificial
  Probe
cctgggacatccacccagaaatcct

SEQ ID NO: 244406 - DNA, 25 bp, Artificial
  Probe
gaggctctctcctgggacatccacc

SEQ ID NO: 244407 - DNA, 25 bp, Artificial
  Probe
tcggcccaaaacaaggaggctctct

SEQ ID NO: 244408 - DNA, 25 bp, Artificial
  Probe
ctgtgtggacacgcccactcggccc

SEQ ID NO: 244409 - DNA, 25 bp, Artificial
  Probe
acgtcctgtgtggacacgcccactc

SEQ ID NO: 244410 - DNA, 25 bp, Artificial
  Probe
cctgtgtggacacgcccactcggcc

SEQ ID NO: 244411 - DNA, 25 bp, Artificial
  Probe
tcctgggacatccacccagaaatcc

SEQ ID NO: 244412 - DNA, 25 bp, Artificial
  Probe
tgtgtggacacgcccactcggccca

SEQ ID NO: 244413 - DNA, 25 bp, Artificial
  Probe
tgtggacacgcccactcggcccaaa

SEQ ID NO: 244414 - DNA, 25 bp, Artificial
  Probe
aggaggctctctcctgggacatcca

SEQ ID NO: 244415 - DNA, 25 bp, Artificial
  Probe
actcggcccaaaacaaggaggctct

SEQ ID NO: 244416 - DNA, 25 bp, Artificial
  Probe
ctcctgggacatccacccagaaatc

SEQ ID NO: 244417 - DNA, 25 bp, Artificial
  Probe
ggcccaaaacaaggaggctctctcc

SEQ ID NO: 244418 - DNA, 25 bp, Artificial
  Probe
aaaacaaggaggctctctcctggga

SEQ ID NO: 244419 - DNA, 25 bp, Artificial
  Probe
gtcctgtgtggacacgcccactcgg

SEQ ID NO: 244420 - DNA, 25 bp, Artificial
  Probe
gtgtggacacgcccactcggcccaa

SEQ ID NO: 244421 - DNA, 25 bp, Artificial
  Probe
aaacaaggaggctctctcctgggac

SEQ ID NO: 244422 - DNA, 25 bp, Artificial
  Probe
tctctcctgggacatccacccagaa

SEQ ID NO: 244423 - DNA, 25 bp, Artificial
  Probe
ctcggcccaaaacaaggaggctctc

SEQ ID NO: 244424 - DNA, 25 bp, Artificial
  Probe
caaggaggctctctcctgggacatc

SEQ ID NO: 244425 - DNA, 25 bp, Artificial
  Probe
ccactcggcccaaaacaaggaggct

SEQ ID NO: 244426 - DNA, 25 bp, Artificial
  Probe
ctctctcctgggacatccacccaga

SEQ ID NO: 244427 - DNA, 25 bp, Artificial
  Probe
aaggaggctctctcctgggacatcc

SEQ ID NO: 244428 - DNA, 25 bp, Artificial
  Probe
ctctcctgggacatccacccagaaa

SEQ ID NO: 244429 - DNA, 25 bp, Artificial
  Probe
ctgggacatccacccagaaatccta

SEQ ID NO: 244430 - DNA, 25 bp, Artificial
  Probe
gacgtcctgtgtggacacgcccact

SEQ ID NO: 244431 - DNA, 25 bp, Artificial
  Probe
cactcggcccaaaacaaggaggctc

SEQ ID NO: 244432 - DNA, 25 bp, Artificial
  Probe
tgggacatccacccagaaatcctat

SEQ ID NO: 244433 - DNA, 25 bp, Artificial
  Probe
ggctctctcctgggacatccaccca

SEQ ID NO: 244434 - DNA, 25 bp, Artificial
  Probe
gcccaaaacaaggaggctctctcct

SEQ ID NO: 244435 - DNA, 25 bp, Artificial
  Probe
cgtcctgtgtggacacgcccactcg

SEQ ID NO: 244436 - DNA, 25 bp, Artificial
  Probe
aacaaggaggctctctcctgggaca

SEQ ID NO: 244437 - DNA, 25 bp, Artificial
  Probe
cccaaaacaaggaggctctctcctg

SEQ ID NO: 244438 - DNA, 25 bp, Artificial
  Probe
aggctctctcctgggacatccaccc

SEQ ID NO: 244439 - DNA, 25 bp, Artificial
  Probe
acaaggaggctctctcctgggacat

SEQ ID NO: 244440 - DNA, 25 bp, Artificial
  Probe
gctctctcctgggacatccacccag

SEQ ID NO: 244441 - DNA, 25 bp, Artificial
  Probe
caaaacaaggaggctctctcctggg

SEQ ID NO: 244442 - DNA, 25 bp, Artificial
  Probe
ccaaaacaaggaggctctctcctgg

SEQ ID NO: 244443 - DNA, 25 bp, Artificial
  Probe
ggctacaggctagctcccaatggtc

SEQ ID NO: 244444 - DNA, 25 bp, Artificial
  Probe
acaactgttccattaacgagacctg

SEQ ID NO: 244445 - DNA, 25 bp, Artificial
  Probe
ccgggaagcttccagtgcagctgtc

SEQ ID NO: 244446 - DNA, 25 bp, Artificial
  Probe
gcagcttccgctgtctatccttcga

SEQ ID NO: 244447 - DNA, 25 bp, Artificial
  Probe
ggaagcttccagtgcagctgtccct

SEQ ID NO: 244448 - DNA, 25 bp, Artificial
  Probe
agctcccaatggtcgcaactgccaa

SEQ ID NO: 244449 - DNA, 25 bp, Artificial
  Probe
gaccggtatccacaactgttccatt

SEQ ID NO: 244450 - DNA, 25 bp, Artificial
  Probe
aggctagctcccaatggtcgcaact

SEQ ID NO: 244451 - DNA, 25 bp, Artificial
  Probe
ttccgctgtctatccttcgagtgcc

SEQ ID NO: 244452 - DNA, 25 bp, Artificial
  Probe
tgtgtgaccggtatccacaactgtt

SEQ ID NO: 244453 - DNA, 25 bp, Artificial
  Probe
gtgtgtgaccggtatccacaactgt

SEQ ID NO: 244454 - DNA, 25 bp, Artificial
  Probe
tgccctgagaaccatcgccgctttg

SEQ ID NO: 244455 - DNA, 25 bp, Artificial
  Probe
tccagggcagcttccgctgtctatc

SEQ ID NO: 244456 - DNA, 25 bp, Artificial
  Probe
cccaatggtcgcaactgccaagaca

SEQ ID NO: 244457 - DNA, 25 bp, Artificial
  Probe
ccggctacaggctagctcccaatgg

SEQ ID NO: 244458 - DNA, 25 bp, Artificial
  Probe
tcgagtgccctgagaaccatcgccg

SEQ ID NO: 244459 - DNA, 25 bp, Artificial
  Probe
tgaccggtatccacaactgttccat

SEQ ID NO: 244460 - DNA, 25 bp, Artificial
  Probe
cgctttgcagacacccgctgtgagc

SEQ ID NO: 244461 - DNA, 25 bp, Artificial
  Probe
ttgacgagtgtgtgaccggtatcca

SEQ ID NO: 244462 - DNA, 25 bp, Artificial
  Probe
ctgttccattaacgagacctgctta

SEQ ID NO: 244463 - DNA, 25 bp, Artificial
  Probe
acgagacctgcttaaacatccaggg

SEQ ID NO: 244464 - DNA, 25 bp, Artificial
  Probe
tagctcccaatggtcgcaactgcca

SEQ ID NO: 244465 - DNA, 25 bp, Artificial
  Probe
taacgagacctgcttaaacatccag

SEQ ID NO: 244466 - DNA, 25 bp, Artificial
  Probe
gctagctcccaatggtcgcaactgc

SEQ ID NO: 244467 - DNA, 25 bp, Artificial
  Probe
ctatccttcgagtgccctgagaacc

SEQ ID NO: 244468 - DNA, 25 bp, Artificial
  Probe
agacctgcttaaacatccagggcag

SEQ ID NO: 244469 - DNA, 25 bp, Artificial
  Probe
tgtgaccggtatccacaactgttcc

SEQ ID NO: 244470 - DNA, 25 bp, Artificial
  Probe
ctgcttaaacatccagggcagcttc

SEQ ID NO: 244471 - DNA, 25 bp, Artificial
  Probe
gacattgacgagtgtgtgaccggta

SEQ ID NO: 244472 - DNA, 25 bp, Artificial
  Probe
gacgagtgtgtgaccggtatccaca

SEQ ID NO: 244473 - DNA, 25 bp, Artificial
  Probe
cgggaagcttccagtgcagctgtcc

SEQ ID NO: 244474 - DNA, 25 bp, Artificial
  Probe
cttccgctgtctatccttcgagtgc

SEQ ID NO: 244475 - DNA, 25 bp, Artificial
  Probe
gcttaaacatccagggcagcttccg

SEQ ID NO: 244476 - DNA, 25 bp, Artificial
  Probe
catcccgggaagcttccagtgcagc

SEQ ID NO: 244477 - DNA, 25 bp, Artificial
  Probe
ctacaggctagctcccaatggtcgc

SEQ ID NO: 244478 - DNA, 25 bp, Artificial
  Probe
ggcagcttccgctgtctatccttcg

SEQ ID NO: 244479 - DNA, 25 bp, Artificial
  Probe
gagtgccctgagaaccatcgccgct

SEQ ID NO: 244480 - DNA, 25 bp, Artificial
  Probe
gttccattaacgagacctgcttaaa

SEQ ID NO: 244481 - DNA, 25 bp, Artificial
  Probe
cttcgagtgccctgagaaccatcgc

SEQ ID NO: 244482 - DNA, 25 bp, Artificial
  Probe
aacatccagggcagcttccgctgtc

SEQ ID NO: 244483 - DNA, 25 bp, Artificial
  Probe
agcttccagtgcagctgtccctcat

SEQ ID NO: 244484 - DNA, 25 bp, Artificial
  Probe
ccaatggtcgcaactgccaagacat

SEQ ID NO: 244485 - DNA, 25 bp, Artificial
  Probe
ttcgagtgccctgagaaccatcgcc

SEQ ID NO: 244486 - DNA, 25 bp, Artificial
  Probe
cgctgtctatccttcgagtgccctg

SEQ ID NO: 244487 - DNA, 25 bp, Artificial
  Probe
gccgctttgcagacacccgctgtga

SEQ ID NO: 244488 - DNA, 25 bp, Artificial
  Probe
ggtatccacaactgttccattaacg

SEQ ID NO: 244489 - DNA, 25 bp, Artificial
  Probe
acactgcacagttgggtccttagca

SEQ ID NO: 244490 - DNA, 25 bp, Artificial
  Probe
ggtccttagcagtggccccatgtgt

SEQ ID NO: 244491 - DNA, 25 bp, Artificial
  Probe
tcaacttctggtcagctgccaatgt

SEQ ID NO: 244492 - DNA, 25 bp, Artificial
  Probe
tgccaatgtggctgtgctgctgctg

SEQ ID NO: 244493 - DNA, 25 bp, Artificial
  Probe
cagctgccaatgtggctgtgctgct

SEQ ID NO: 244494 - DNA, 25 bp, Artificial
  Probe
cacagttgggtccttagcagtggcc

SEQ ID NO: 244495 - DNA, 25 bp, Artificial
  Probe
gcagtggccccatgtgtgtcccttc

SEQ ID NO: 244496 - DNA, 25 bp, Artificial
  Probe
tcctcagtgaccagggagtgccaat

SEQ ID NO: 244497 - DNA, 25 bp, Artificial
  Probe
cttctggtcagctgccaatgtggct

SEQ ID NO: 244498 - DNA, 25 bp, Artificial
  Probe
actcagatgagacactgcacagttg

SEQ ID NO: 244499 - DNA, 25 bp, Artificial
  Probe
caagaagataacctcgagcgggtca

SEQ ID NO: 244500 - DNA, 25 bp, Artificial
  Probe
agccacagaggatgacggaaacagg

SEQ ID NO: 244501 - DNA, 25 bp, Artificial
  Probe
gacaagtgccctgtgcccacgtagc

SEQ ID NO: 244502 - DNA, 25 bp, Artificial
  Probe
gatgagacactgcacagttgggtcc

SEQ ID NO: 244503 - DNA, 25 bp, Artificial
  Probe
tggtcagctgccaatgtggctgtgc

SEQ ID NO: 244504 - DNA, 25 bp, Artificial
  Probe
ctcgagcgggtcaacttctggtcag

SEQ ID NO: 244505 - DNA, 25 bp, Artificial
  Probe
ccaatgtggctgtgctgctgctggt

SEQ ID NO: 244506 - DNA, 25 bp, Artificial
  Probe
acactgaagcgcttcttccatgaca

SEQ ID NO: 244507 - DNA, 25 bp, Artificial
  Probe
ggtgtgtgacttgctggacacctcc

SEQ ID NO: 244508 - DNA, 25 bp, Artificial
  Probe
agaagataacctcgagcgggtcaac

SEQ ID NO: 244509 - DNA, 25 bp, Artificial
  Probe
cttcttccatgacaagtgccctgtg

SEQ ID NO: 244510 - DNA, 25 bp, Artificial
  Probe
ctgtgctgctgctggtggccgtcct

SEQ ID NO: 244511 - DNA, 25 bp, Artificial
  Probe
agcagtggccccatgtgtgtccctt

SEQ ID NO: 244512 - DNA, 25 bp, Artificial
  Probe
aagataacctcgagcgggtcaactt

SEQ ID NO: 244513 - DNA, 25 bp, Artificial
  Probe
cggactcagatgagacactgcacag

SEQ ID NO: 244514 - DNA, 25 bp, Artificial
  Probe
tgacaagtgccctgtgcccacgtag

SEQ ID NO: 244515 - DNA, 25 bp, Artificial
  Probe
ttcaagaagataacctcgagcgggt

SEQ ID NO: 244516 - DNA, 25 bp, Artificial
  Probe
acctcccggactcagatgagacact

SEQ ID NO: 244517 - DNA, 25 bp, Artificial
  Probe
ttccatgacaagtgccctgtgccca

SEQ ID NO: 244518 - DNA, 25 bp, Artificial
  Probe
cagtgaccagggagtgccaatggct

SEQ ID NO: 244519 - DNA, 25 bp, Artificial
  Probe
aacttctggtcagctgccaatgtgg

SEQ ID NO: 244520 - DNA, 25 bp, Artificial
  Probe
tgagacactgcacagttgggtcctt

SEQ ID NO: 244521 - DNA, 25 bp, Artificial
  Probe
cccggactcagatgagacactgcac

SEQ ID NO: 244522 - DNA, 25 bp, Artificial
  Probe
ccagggagtgccaatggctcgtaga

SEQ ID NO: 244523 - DNA, 25 bp, Artificial
  Probe
gtgtgtcccttcctcagtgaccagg

SEQ ID NO: 244524 - DNA, 25 bp, Artificial
  Probe
cgtgatcgtaatcttcaagaagata

SEQ ID NO: 244525 - DNA, 25 bp, Artificial
  Probe
cccagccacagaggatgacggaaac

SEQ ID NO: 244526 - DNA, 25 bp, Artificial
  Probe
tgcacagttgggtccttagcagtgg

SEQ ID NO: 244527 - DNA, 25 bp, Artificial
  Probe
acctcgagcgggtcaacttctggtc

SEQ ID NO: 244528 - DNA, 25 bp, Artificial
  Probe
agtgaccagggagtgccaatggctc

SEQ ID NO: 244529 - DNA, 25 bp, Artificial
  Probe
tcttccatgacaagtgccctgtgcc

SEQ ID NO: 244530 - DNA, 25 bp, Artificial
  Probe
catgtgtgtcccttcctcagtgacc

SEQ ID NO: 244531 - DNA, 25 bp, Artificial
  Probe
catgggtgtgtgacttgctggacac

SEQ ID NO: 244532 - DNA, 25 bp, Artificial
  Probe
agtggccccatgtgtgtcccttcct

SEQ ID NO: 244533 - DNA, 25 bp, Artificial
  Probe
atcttcaagaagataacctcgagcg

SEQ ID NO: 244534 - DNA, 25 bp, Artificial
  Probe
cttcaagaagataacctcgagcggg

SEQ ID NO: 244535 - DNA, 25 bp, Artificial
  Probe
cttgctgaaggagcatggttcagac

SEQ ID NO: 244536 - DNA, 25 bp, Artificial
  Probe
tactgactggggaaccttagtctat

SEQ ID NO: 244537 - DNA, 25 bp, Artificial
  Probe
accccttgatgttaataacattggc

SEQ ID NO: 244538 - DNA, 25 bp, Artificial
  Probe
aggtgaccctgtaccccttgatgtt

SEQ ID NO: 244539 - DNA, 25 bp, Artificial
  Probe
tcaggaataccactttctttgtccg

SEQ ID NO: 244540 - DNA, 25 bp, Artificial
  Probe
aattagcaagccacatgtattttgg

SEQ ID NO: 244541 - DNA, 25 bp, Artificial
  Probe
ccaaaggccaaatattagtgatcag

SEQ ID NO: 244542 - DNA, 25 bp, Artificial
  Probe
taaccatcagctgactatgcttgct

SEQ ID NO: 244543 - DNA, 25 bp, Artificial
  Probe
agatgagggcccttactattatggt

SEQ ID NO: 244544 - DNA, 25 bp, Artificial
  Probe
gcacttagcttaaccatcagctgac

SEQ ID NO: 244545 - DNA, 25 bp, Artificial
  Probe
ctaaggtgaccctgtaccccttgat

SEQ ID NO: 244546 - DNA, 25 bp, Artificial
  Probe
tgatgcacttagcttaaccatcagc

SEQ ID NO: 244547 - DNA, 25 bp, Artificial
  Probe
cctttcaagctttctgttatgttga

SEQ ID NO: 244548 - DNA, 25 bp, Artificial
  Probe
gaataccactttctttgtccgaatg

SEQ ID NO: 244549 - DNA, 25 bp, Artificial
  Probe
gaccaaaggccaaatattagtgatc

SEQ ID NO: 244550 - DNA, 25 bp, Artificial
  Probe
ctgcttaagccgactacgactgatg

SEQ ID NO: 244551 - DNA, 25 bp, Artificial
  Probe
tgtatggaccaaaggccaaatatta

SEQ ID NO: 244552 - DNA, 25 bp, Artificial
  Probe
caataaaatgcttgttgggacccta

SEQ ID NO: 244553 - DNA, 25 bp, Artificial
  Probe
ccttgtgttgtgtttactgactggg

SEQ ID NO: 244554 - DNA, 25 bp, Artificial
  Probe
gactatgcttgctgaaggagcatgg

SEQ ID NO: 244555 - DNA, 25 bp, Artificial
  Probe
ttgcctgaagtagatgagggccctt

SEQ ID NO: 244556 - DNA, 25 bp, Artificial
  Probe
ttagcttaaccatcagctgactatg

SEQ ID NO: 244557 - DNA, 25 bp, Artificial
  Probe
attttgcctgaagtagatgagggcc

SEQ ID NO: 244558 - DNA, 25 bp, Artificial
  Probe
atggttcagacagtagcacggaatg

SEQ ID NO: 244559 - DNA, 25 bp, Artificial
  Probe
taacattggcattgtagcttaaatc

SEQ ID NO: 244560 - DNA, 25 bp, Artificial
  Probe
gcttgatatcgcttttccagttctc

SEQ ID NO: 244561 - DNA, 25 bp, Artificial
  Probe
tgatcaggaataccactttctttgt

SEQ ID NO: 244562 - DNA, 25 bp, Artificial
  Probe
cccttactattatggtgattagttt

SEQ ID NO: 244563 - DNA, 25 bp, Artificial
  Probe
ttgttgggaccctaaggtgaccctg

SEQ ID NO: 244564 - DNA, 25 bp, Artificial
  Probe
tcagacagtagcacggaatggaatc

SEQ ID NO: 244565 - DNA, 25 bp, Artificial
  Probe
gactgatgcacttagcttaaccatc

SEQ ID NO: 244566 - DNA, 25 bp, Artificial
  Probe
gtgtttactgactggggaaccttag

SEQ ID NO: 244567 - DNA, 25 bp, Artificial
  Probe
caggaataccactttctttgtccga

SEQ ID NO: 244568 - DNA, 25 bp, Artificial
  Probe
aaggagcatggttcagacagtagca

SEQ ID NO: 244569 - DNA, 25 bp, Artificial
  Probe
gtaccccttgatgttaataacattg

SEQ ID NO: 244570 - DNA, 25 bp, Artificial
  Probe
cattggcattgtagcttaaatccct

SEQ ID NO: 244571 - DNA, 25 bp, Artificial
  Probe
agtctatctgcttaagccgactacg

SEQ ID NO: 244572 - DNA, 25 bp, Artificial
  Probe
gaatggaatcaccttgactgaattg

SEQ ID NO: 244573 - DNA, 25 bp, Artificial
  Probe
ccacatgtattttggccccttctgc

SEQ ID NO: 244574 - DNA, 25 bp, Artificial
  Probe
ccaataaaatgcttgttgggaccct

SEQ ID NO: 244575 - DNA, 25 bp, Artificial
  Probe
tccttgtgttgtgtttactgactgg

SEQ ID NO: 244576 - DNA, 25 bp, Artificial
  Probe
tgttgtgtttactgactggggaacc

SEQ ID NO: 244577 - DNA, 25 bp, Artificial
  Probe
atcagctgactatgcttgctgaagg

SEQ ID NO: 244578 - DNA, 25 bp, Artificial
  Probe
acagtagcacggaatggaatcacct

SEQ ID NO: 244579 - DNA, 25 bp, Artificial
  Probe
atgcttgttgggaccctaaggtgac

SEQ ID NO: 244580 - DNA, 25 bp, Artificial
  Probe
attctcccaataaaatgcttgttgg

SEQ ID NO: 244581 - DNA, 25 bp, Artificial
  Probe
gcggcagaggcttcagccagcctaa

SEQ ID NO: 244582 - DNA, 25 bp, Artificial
  Probe
cacctacggttgcacccagagctgt

SEQ ID NO: 244583 - DNA, 25 bp, Artificial
  Probe
ctggcagccagtgtgcgccgagcca

SEQ ID NO: 244584 - DNA, 25 bp, Artificial
  Probe
cacagtggtctaaagcccttcgtgt

SEQ ID NO: 244585 - DNA, 25 bp, Artificial
  Probe
ggcgaaatcgccatcccagtaggcg

SEQ ID NO: 244586 - DNA, 25 bp, Artificial
  Probe
aggcacccgaggaagccacagcagc

SEQ ID NO: 244587 - DNA, 25 bp, Artificial
  Probe
gctggcagccagtgtgcgccgagcc

SEQ ID NO: 244588 - DNA, 25 bp, Artificial
  Probe
ggttgcacccagagctgtcagggcc

SEQ ID NO: 244589 - DNA, 25 bp, Artificial
  Probe
ccacagcagcggacggcgaaatcgc

SEQ ID NO: 244590 - DNA, 25 bp, Artificial
  Probe
acctacggttgcacccagagctgtc

SEQ ID NO: 244591 - DNA, 25 bp, Artificial
  Probe
ggcagaggcttcagccagcctaaga

SEQ ID NO: 244592 - DNA, 25 bp, Artificial
  Probe
cttcagccagcctaagagcctggca

SEQ ID NO: 244593 - DNA, 25 bp, Artificial
  Probe
ctaagagcctggcacgccacctacg

SEQ ID NO: 244594 - DNA, 25 bp, Artificial
  Probe
gcgaaatcgccatcccagtaggcga

SEQ ID NO: 244595 - DNA, 25 bp, Artificial
  Probe
acggttgcacccagagctgtcaggg

SEQ ID NO: 244596 - DNA, 25 bp, Artificial
  Probe
ccacagtggtctaaagcccttcgtg

SEQ ID NO: 244597 - DNA, 25 bp, Artificial
  Probe
ggcacccgaggaagccacagcagcg

SEQ ID NO: 244598 - DNA, 25 bp, Artificial
  Probe
taagagcctggcacgccacctacgg

SEQ ID NO: 244599 - DNA, 25 bp, Artificial
  Probe
atcgccatcccagtaggcgacggcg

SEQ ID NO: 244600 - DNA, 25 bp, Artificial
  Probe
tcgtggtgggcccaccaggggacgg

SEQ ID NO: 244601 - DNA, 25 bp, Artificial
  Probe
cggttgcacccagagctgtcagggc

SEQ ID NO: 244602 - DNA, 25 bp, Artificial
  Probe
gttgcacccagagctgtcagggccg

SEQ ID NO: 244603 - DNA, 25 bp, Artificial
  Probe
cccacagtggtctaaagcccttcgt

SEQ ID NO: 244604 - DNA, 25 bp, Artificial
  Probe
aaggcacccgaggaagccacagcag

SEQ ID NO: 244605 - DNA, 25 bp, Artificial
  Probe
tgcgccgagccaaggcacccgagga

SEQ ID NO: 244606 - DNA, 25 bp, Artificial
  Probe
tgcggcagaggcttcagccagccta

SEQ ID NO: 244607 - DNA, 25 bp, Artificial
  Probe
aatcgccatcccagtaggcgacggc

SEQ ID NO: 244608 - DNA, 25 bp, Artificial
  Probe
tcccacagtggtctaaagcccttcg

SEQ ID NO: 244609 - DNA, 25 bp, Artificial
  Probe
tcagccagcctaagagcctggcacg

SEQ ID NO: 244610 - DNA, 25 bp, Artificial
  Probe
gaaaccttatacttgccccgactgc

SEQ ID NO: 244611 - DNA, 25 bp, Artificial
  Probe
ggcgacggcgagggcatcatcgtgg

SEQ ID NO: 244612 - DNA, 25 bp, Artificial
  Probe
taaagcccttcgtgtgcccgcgctg

SEQ ID NO: 244613 - DNA, 25 bp, Artificial
  Probe
cgcgctgcggcagaggcttcagcca

SEQ ID NO: 244614 - DNA, 25 bp, Artificial
  Probe
ttgcacccagagctgtcagggccgg

SEQ ID NO: 244615 - DNA, 25 bp, Artificial
  Probe
ggtctaaagcccttcgtgtgcccgc

SEQ ID NO: 244616 - DNA, 25 bp, Artificial
  Probe
gtctaaagcccttcgtgtgcccgcg

SEQ ID NO: 244617 - DNA, 25 bp, Artificial
  Probe
acagtggtctaaagcccttcgtgtg

SEQ ID NO: 244618 - DNA, 25 bp, Artificial
  Probe
aaaccttatacttgccccgactgcg

SEQ ID NO: 244619 - DNA, 25 bp, Artificial
  Probe
tggcagccagtgtgcgccgagccaa

SEQ ID NO: 244620 - DNA, 25 bp, Artificial
  Probe
cgccatcccagtaggcgacggcgag

SEQ ID NO: 244621 - DNA, 25 bp, Artificial
  Probe
ttcagccagcctaagagcctggcac

SEQ ID NO: 244622 - DNA, 25 bp, Artificial
  Probe
cccgaggaagccacagcagcggacg

SEQ ID NO: 244623 - DNA, 25 bp, Artificial
  Probe
ggcgctcccacagtggtctaaagcc

SEQ ID NO: 244624 - DNA, 25 bp, Artificial
  Probe
cggcagaggcttcagccagcctaag

SEQ ID NO: 244625 - DNA, 25 bp, Artificial
  Probe
agctgtcagggccgggtgtggcggc

SEQ ID NO: 244626 - DNA, 25 bp, Artificial
  Probe
gctcccacagtggtctaaagccctt

SEQ ID NO: 244627 - DNA, 25 bp, Artificial
  Probe
cagtggcacagtggacttcgacgag

SEQ ID NO: 244628 - DNA, 25 bp, Artificial
  Probe
tgccaccagcatggatgacatctac

SEQ ID NO: 244629 - DNA, 25 bp, Artificial
  Probe
tcagcaccaaggagctgggcaaggt

SEQ ID NO: 244630 - DNA, 25 bp, Artificial
  Probe
tggcacagtggacttcgacgagttc

SEQ ID NO: 244631 - DNA, 25 bp, Artificial
  Probe
ttcaaggctgccttcgatatctttg

SEQ ID NO: 244632 - DNA, 25 bp, Artificial
  Probe
aggctgccttcgatatctttgtcct

SEQ ID NO: 244633 - DNA, 25 bp, Artificial
  Probe
cacagtggacttcgacgagttcctt

SEQ ID NO: 244634 - DNA, 25 bp, Artificial
  Probe
agtggacttcgacgagttccttgtc

SEQ ID NO: 244635 - DNA, 25 bp, Artificial
  Probe
gctgccaccagcatggatgacatct

SEQ ID NO: 244636 - DNA, 25 bp, Artificial
  Probe
aatgagttcaaggctgccttcgata

SEQ ID NO: 244637 - DNA, 25 bp, Artificial
  Probe
gctgccttcgatatctttgtcctgg

SEQ ID NO: 244638 - DNA, 25 bp, Artificial
  Probe
ctgcatcagcaccaaggagctgggc

SEQ ID NO: 244639 - DNA, 25 bp, Artificial
  Probe
tcaaggctgccttcgatatctttgt

SEQ ID NO: 244640 - DNA, 25 bp, Artificial
  Probe
tggcagtggcacagtggacttcgac

SEQ ID NO: 244641 - DNA, 25 bp, Artificial
  Probe
gcatcagcaccaaggagctgggcaa

SEQ ID NO: 244642 - DNA, 25 bp, Artificial
  Probe
gcagtggcacagtggacttcgacga

SEQ ID NO: 244643 - DNA, 25 bp, Artificial
  Probe
ggctgccttcgatatctttgtcctg

SEQ ID NO: 244644 - DNA, 25 bp, Artificial
  Probe
aaggctgccttcgatatctttgtcc

SEQ ID NO: 244645 - DNA, 25 bp, Artificial
  Probe
ggcacagtggacttcgacgagttcc

SEQ ID NO: 244646 - DNA, 25 bp, Artificial
  Probe
gtggcacagtggacttcgacgagtt

SEQ ID NO: 244647 - DNA, 25 bp, Artificial
  Probe
ggatggctgcatcagcaccaaggag

SEQ ID NO: 244648 - DNA, 25 bp, Artificial
  Probe
gtggacttcgacgagttccttgtca

SEQ ID NO: 244649 - DNA, 25 bp, Artificial
  Probe
tgagctgccaccagcatggatgaca

SEQ ID NO: 244650 - DNA, 25 bp, Artificial
  Probe
tgccttcgatatctttgtcctgggc

SEQ ID NO: 244651 - DNA, 25 bp, Artificial
  Probe
ggacttcgacgagttccttgtcatg

SEQ ID NO: 244652 - DNA, 25 bp, Artificial
  Probe
ccacacctgaggagctgcaggagat

SEQ ID NO: 244653 - DNA, 25 bp, Artificial
  Probe
ctgagctgccaccagcatggatgac

SEQ ID NO: 244654 - DNA, 25 bp, Artificial
  Probe
acagtggacttcgacgagttccttg

SEQ ID NO: 244655 - DNA, 25 bp, Artificial
  Probe
caccagcatggatgacatctacaaa

SEQ ID NO: 244656 - DNA, 25 bp, Artificial
  Probe
ccaccagcatggatgacatctacaa

SEQ ID NO: 244657 - DNA, 25 bp, Artificial
  Probe
agctgccaccagcatggatgacatc

SEQ ID NO: 244658 - DNA, 25 bp, Artificial
  Probe
atcagcaccaaggagctgggcaagg

SEQ ID NO: 244659 - DNA, 25 bp, Artificial
  Probe
gccaccagcatggatgacatctaca

SEQ ID NO: 244660 - DNA, 25 bp, Artificial
  Probe
tggacttcgacgagttccttgtcat

SEQ ID NO: 244661 - DNA, 25 bp, Artificial
  Probe
ccctgagctgccaccagcatggatg

SEQ ID NO: 244662 - DNA, 25 bp, Artificial
  Probe
gcacagtggacttcgacgagttcct

SEQ ID NO: 244663 - DNA, 25 bp, Artificial
  Probe
aggatggctgcatcagcaccaagga

SEQ ID NO: 244664 - DNA, 25 bp, Artificial
  Probe
cctgagctgccaccagcatggatga

SEQ ID NO: 244665 - DNA, 25 bp, Artificial
  Probe
cggaggatggctgcatcagcaccaa

SEQ ID NO: 244666 - DNA, 25 bp, Artificial
  Probe
accagcatggatgacatctacaaag

SEQ ID NO: 244667 - DNA, 25 bp, Artificial
  Probe
catggatgacatctacaaagcagcg

SEQ ID NO: 244668 - DNA, 25 bp, Artificial
  Probe
ctgccttcgatatctttgtcctggg

SEQ ID NO: 244669 - DNA, 25 bp, Artificial
  Probe
agtggcacagtggacttcgacgagt

SEQ ID NO: 244670 - DNA, 25 bp, Artificial
  Probe
caaggctgccttcgatatctttgtc

SEQ ID NO: 244671 - DNA, 25 bp, Artificial
  Probe
atggcagtggcacagtggacttcga

SEQ ID NO: 244672 - DNA, 25 bp, Artificial
  Probe
cttcgatatctttgtcctgggcgcg

SEQ ID NO: 244673 - DNA, 25 bp, Artificial
  Probe
ctgggccagctcacaggctatgagc

SEQ ID NO: 244674 - DNA, 25 bp, Artificial
  Probe
ctacctacgcctctggctggaggac

SEQ ID NO: 244675 - DNA, 25 bp, Artificial
  Probe
atcctcagaagagaatggaatctca

SEQ ID NO: 244676 - DNA, 25 bp, Artificial
  Probe
ccatgctatcaaaagcccacacgga

SEQ ID NO: 244677 - DNA, 25 bp, Artificial
  Probe
agaatggaatctcacctcctcagcc

SEQ ID NO: 244678 - DNA, 25 bp, Artificial
  Probe
cctattcagggatctggtgggatgt

SEQ ID NO: 244679 - DNA, 25 bp, Artificial
  Probe
cccagtcagcccatgctatcaaaag

SEQ ID NO: 244680 - DNA, 25 bp, Artificial
  Probe
tgtggctggaagctgccaccatcct

SEQ ID NO: 244681 - DNA, 25 bp, Artificial
  Probe
cctttgaccacatgcctcagctgtg

SEQ ID NO: 244682 - DNA, 25 bp, Artificial
  Probe
acagagtcccggaactgaacctagc

SEQ ID NO: 244683 - DNA, 25 bp, Artificial
  Probe
agtgccacctggtgcctttgaccac

SEQ ID NO: 244684 - DNA, 25 bp, Artificial
  Probe
gctgtgggaacttaaggtggcacac

SEQ ID NO: 244685 - DNA, 25 bp, Artificial
  Probe
ccatcctgggcctattcagggatct

SEQ ID NO: 244686 - DNA, 25 bp, Artificial
  Probe
tgcccgaggccctgtcacatgtgta

SEQ ID NO: 244687 - DNA, 25 bp, Artificial
  Probe
gtgtactgtgccagcccggacttgg

SEQ ID NO: 244688 - DNA, 25 bp, Artificial
  Probe
acatttacagagtcccggaactgaa

SEQ ID NO: 244689 - DNA, 25 bp, Artificial
  Probe
agtctaaagacctgggttggatcct

SEQ ID NO: 244690 - DNA, 25 bp, Artificial
  Probe
ctgggttggatcctcagaagagaat

SEQ ID NO: 244691 - DNA, 25 bp, Artificial
  Probe
tacctacgcctctggctggaggacc

SEQ ID NO: 244692 - DNA, 25 bp, Artificial
  Probe
tagccccaaaaccagggagagccca

SEQ ID NO: 244693 - DNA, 25 bp, Artificial
  Probe
aggtggcacacaacccctggcactg

SEQ ID NO: 244694 - DNA, 25 bp, Artificial
  Probe
gctggaggaccacatgcccgaggcc

SEQ ID NO: 244695 - DNA, 25 bp, Artificial
  Probe
taaagacctgggttggatcctcaga

SEQ ID NO: 244696 - DNA, 25 bp, Artificial
  Probe
acctggtgcctttgaccacatgcct

SEQ ID NO: 244697 - DNA, 25 bp, Artificial
  Probe
gattctgctggctggtctactgaac

SEQ ID NO: 244698 - DNA, 25 bp, Artificial
  Probe
catgctatcaaaagcccacacggag

SEQ ID NO: 244699 - DNA, 25 bp, Artificial
  Probe
acatgtgtactgtgccagcccggac

SEQ ID NO: 244700 - DNA, 25 bp, Artificial
  Probe
cagagtcccggaactgaacctagcc

SEQ ID NO: 244701 - DNA, 25 bp, Artificial
  Probe
agctaggtaactgtggctggaagct

SEQ ID NO: 244702 - DNA, 25 bp, Artificial
  Probe
tgtggctgtgctaggcctgattctg

SEQ ID NO: 244703 - DNA, 25 bp, Artificial
  Probe
ctctggctggaggaccacatgcccg

SEQ ID NO: 244704 - DNA, 25 bp, Artificial
  Probe
ggatcctcagaagagaatggaatct

SEQ ID NO: 244705 - DNA, 25 bp, Artificial
  Probe
cttgctgcccagtctaaagacctgg

SEQ ID NO: 244706 - DNA, 25 bp, Artificial
  Probe
tgggctgaggccacctcatgggtaa

SEQ ID NO: 244707 - DNA, 25 bp, Artificial
  Probe
gtcagcccatgctatcaaaagccca

SEQ ID NO: 244708 - DNA, 25 bp, Artificial
  Probe
acttaaggtggcacacaacccctgg

SEQ ID NO: 244709 - DNA, 25 bp, Artificial
  Probe
tactgaacacatttacagagtcccg

SEQ ID NO: 244710 - DNA, 25 bp, Artificial
  Probe
gctgtggctgtgctaggcctgattc

SEQ ID NO: 244711 - DNA, 25 bp, Artificial
  Probe
agccccaaaaccagggagagcccag

SEQ ID NO: 244712 - DNA, 25 bp, Artificial
  Probe
acctcatgggtaaaggcacttgctg

SEQ ID NO: 244713 - DNA, 25 bp, Artificial
  Probe
aagctgccaccatcctgggcctatt

SEQ ID NO: 244714 - DNA, 25 bp, Artificial
  Probe
ggtaactgtggctggaagctgccac

SEQ ID NO: 244715 - DNA, 25 bp, Artificial
  Probe
tggaggaccacatgcccgaggccct

SEQ ID NO: 244716 - DNA, 25 bp, Artificial
  Probe
ctatgagctaggtaactgtggctgg

SEQ ID NO: 244717 - DNA, 25 bp, Artificial
  Probe
ggaagctgccaccatcctgggccta

SEQ ID NO: 244718 - DNA, 25 bp, Artificial
  Probe
ctgtgctaggcctgattctgctggc

SEQ ID NO: 244719 - DNA, 25 bp, Artificial
  Probe
gccaggggcaggggatcctaagcaa

SEQ ID NO: 244720 - DNA, 25 bp, Artificial
  Probe
cccaccacagaatctaagatctttc

SEQ ID NO: 244721 - DNA, 25 bp, Artificial
  Probe
tctggctgcgccaggggcaggggat

SEQ ID NO: 244722 - DNA, 25 bp, Artificial
  Probe
tgcgccaggggcaggggatcctaag

SEQ ID NO: 244723 - DNA, 25 bp, Artificial
  Probe
ctgcgccaggggcaggggatcctaa

SEQ ID NO: 244724 - DNA, 25 bp, Artificial
  Probe
gcgccaggggcaggggatcctaagc

SEQ ID NO: 244725 - DNA, 25 bp, Artificial
  Probe
agatctttcatctggctgcgccagg

SEQ ID NO: 244726 - DNA, 25 bp, Artificial
  Probe
atctggctgcgccaggggcagggga

SEQ ID NO: 244727 - DNA, 25 bp, Artificial
  Probe
caccacagaatctaagatctttcat

SEQ ID NO: 244728 - DNA, 25 bp, Artificial
  Probe
tctttcatctggctgcgccaggggc

SEQ ID NO: 244729 - DNA, 25 bp, Artificial
  Probe
ccaccacagaatctaagatctttca

SEQ ID NO: 244730 - DNA, 25 bp, Artificial
  Probe
ttcatctggctgcgccaggggcagg

SEQ ID NO: 244731 - DNA, 25 bp, Artificial
  Probe
tcatctggctgcgccaggggcaggg

SEQ ID NO: 244732 - DNA, 25 bp, Artificial
  Probe
accccaccacagaatctaagatctt

SEQ ID NO: 244733 - DNA, 25 bp, Artificial
  Probe
atctttcatctggctgcgccagggg

SEQ ID NO: 244734 - DNA, 25 bp, Artificial
  Probe
ctggctgcgccaggggcaggggatc

SEQ ID NO: 244735 - DNA, 25 bp, Artificial
  Probe
catctggctgcgccaggggcagggg

SEQ ID NO: 244736 - DNA, 25 bp, Artificial
  Probe
taagatctttcatctggctgcgcca

SEQ ID NO: 244737 - DNA, 25 bp, Artificial
  Probe
tctaagatctttcatctggctgcgc

SEQ ID NO: 244738 - DNA, 25 bp, Artificial
  Probe
ccaggggcaggggatcctaagcaaa

SEQ ID NO: 244739 - DNA, 25 bp, Artificial
  Probe
acagaatctaagatctttcatctgg

SEQ ID NO: 244740 - DNA, 25 bp, Artificial
  Probe
caggggcaggggatcctaagcaaat

SEQ ID NO: 244741 - DNA, 25 bp, Artificial
  Probe
gctgcgccaggggcaggggatccta

SEQ ID NO: 244742 - DNA, 25 bp, Artificial
  Probe
tttcatctggctgcgccaggggcag

SEQ ID NO: 244743 - DNA, 25 bp, Artificial
  Probe
ctttcatctggctgcgccaggggca

SEQ ID NO: 244744 - DNA, 25 bp, Artificial
  Probe
ccccaccacagaatctaagatcttt

SEQ ID NO: 244745 - DNA, 25 bp, Artificial
  Probe
atctaagatctttcatctggctgcg

SEQ ID NO: 244746 - DNA, 25 bp, Artificial
  Probe
gaatctaagatctttcatctggctg

SEQ ID NO: 244747 - DNA, 25 bp, Artificial
  Probe
aatctaagatctttcatctggctgc

SEQ ID NO: 244748 - DNA, 25 bp, Artificial
  Probe
ccacagaatctaagatctttcatct

SEQ ID NO: 244749 - DNA, 25 bp, Artificial
  Probe
aaccccaccacagaatctaagatct

SEQ ID NO: 244750 - DNA, 25 bp, Artificial
  Probe
accacagaatctaagatctttcatc

SEQ ID NO: 244751 - DNA, 25 bp, Artificial
  Probe
aagatctttcatctggctgcgccag

SEQ ID NO: 244752 - DNA, 25 bp, Artificial
  Probe
agccgatggtccccatccctgaacc

SEQ ID NO: 244753 - DNA, 25 bp, Artificial
  Probe
cgccaggggcaggggatcctaagca

SEQ ID NO: 244754 - DNA, 25 bp, Artificial
  Probe
ggctgcgccaggggcaggggatcct

SEQ ID NO: 244755 - DNA, 25 bp, Artificial
  Probe
agaatctaagatctttcatctggct

SEQ ID NO: 244756 - DNA, 25 bp, Artificial
  Probe
cccatccctgaacccttagccctca

SEQ ID NO: 244757 - DNA, 25 bp, Artificial
  Probe
cagaatctaagatctttcatctggc

SEQ ID NO: 244758 - DNA, 25 bp, Artificial
  Probe
cgagccgatggtccccatccctgaa

SEQ ID NO: 244759 - DNA, 25 bp, Artificial
  Probe
tggctgcgccaggggcaggggatcc

SEQ ID NO: 244760 - DNA, 25 bp, Artificial
  Probe
gagccgatggtccccatccctgaac

SEQ ID NO: 244761 - DNA, 25 bp, Artificial
  Probe
gatctttcatctggctgcgccaggg

SEQ ID NO: 244762 - DNA, 25 bp, Artificial
  Probe
gccgatggtccccatccctgaaccc

SEQ ID NO: 244763 - DNA, 25 bp, Artificial
  Probe
ctaagatctttcatctggctgcgcc

SEQ ID NO: 244764 - DNA, 25 bp, Artificial
  Probe
ccatccctgaacccttagccctcaa

SEQ ID NO: 244765 - DNA, 25 bp, Artificial
  Probe
tgaaggctattcagtacggaaccag

SEQ ID NO: 244766 - DNA, 25 bp, Artificial
  Probe
cttggcttcttctcgatctccgttc

SEQ ID NO: 244767 - DNA, 25 bp, Artificial
  Probe
aggcactgcttgtcaggtctgccca

SEQ ID NO: 244768 - DNA, 25 bp, Artificial
  Probe
ttgtgccctacctggttggatccgc

SEQ ID NO: 244769 - DNA, 25 bp, Artificial
  Probe
tggcttcttctcgatctccgttctc

SEQ ID NO: 244770 - DNA, 25 bp, Artificial
  Probe
cgattggatgcttcgtgtgtgacgt

SEQ ID NO: 244771 - DNA, 25 bp, Artificial
  Probe
ttcttctcgatctccgttctcaggc

SEQ ID NO: 244772 - DNA, 25 bp, Artificial
  Probe
gttgtgccctacctggttggatccg

SEQ ID NO: 244773 - DNA, 25 bp, Artificial
  Probe
tgtgccctacctggttggatccgct

SEQ ID NO: 244774 - DNA, 25 bp, Artificial
  Probe
ggcactgcttgtcaggtctgcccag

SEQ ID NO: 244775 - DNA, 25 bp, Artificial
  Probe
aggttgtgccctacctggttggatc

SEQ ID NO: 244776 - DNA, 25 bp, Artificial
  Probe
ggttgtgccctacctggttggatcc

SEQ ID NO: 244777 - DNA, 25 bp, Artificial
  Probe
agtcttcggctcaggcactgcttgt

SEQ ID NO: 244778 - DNA, 25 bp, Artificial
  Probe
tacctggttggatccgctgacgtgc

SEQ ID NO: 244779 - DNA, 25 bp, Artificial
  Probe
ctacctggttggatccgctgacgtg

SEQ ID NO: 244780 - DNA, 25 bp, Artificial
  Probe
cttccagaaggagttgaaggctatt

SEQ ID NO: 244781 - DNA, 25 bp, Artificial
  Probe
gaaggctattcagtacggaaccagt

SEQ ID NO: 244782 - DNA, 25 bp, Artificial
  Probe
gctcaggcactgcttgtcaggtctg

SEQ ID NO: 244783 - DNA, 25 bp, Artificial
  Probe
gttggatccgctgacgtgcagcatc

SEQ ID NO: 244784 - DNA, 25 bp, Artificial
  Probe
gcgcttccagaaggagttgaaggct

SEQ ID NO: 244785 - DNA, 25 bp, Artificial
  Probe
gcaccaaatcctatatgaaggcaag

SEQ ID NO: 244786 - DNA, 25 bp, Artificial
  Probe
caccaaatcctatatgaaggcaagc

SEQ ID NO: 244787 - DNA, 25 bp, Artificial
  Probe
ccctacctggttggatccgctgacg

SEQ ID NO: 244788 - DNA, 25 bp, Artificial
  Probe
ctcaggcactgcttgtcaggtctgc

SEQ ID NO: 244789 - DNA, 25 bp, Artificial
  Probe
cggctcaggcactgcttgtcaggtc

SEQ ID NO: 244790 - DNA, 25 bp, Artificial
  Probe
ggcttcttctcgatctccgttctca

SEQ ID NO: 244791 - DNA, 25 bp, Artificial
  Probe
caggcactgcttgtcaggtctgccc

SEQ ID NO: 244792 - DNA, 25 bp, Artificial
  Probe
agaaccttggcttcttctcgatctc

SEQ ID NO: 244793 - DNA, 25 bp, Artificial
  Probe
cttcttctcgatctccgttctcagg

SEQ ID NO: 244794 - DNA, 25 bp, Artificial
  Probe
gaggttgtgccctacctggttggat

SEQ ID NO: 244795 - DNA, 25 bp, Artificial
  Probe
tcggctcaggcactgcttgtcaggt

SEQ ID NO: 244796 - DNA, 25 bp, Artificial
  Probe
cggatccccggtgctcttcatgtct

SEQ ID NO: 244797 - DNA, 25 bp, Artificial
  Probe
tgcgcttccagaaggagttgaaggc

SEQ ID NO: 244798 - DNA, 25 bp, Artificial
  Probe
cctacctggttggatccgctgacgt

SEQ ID NO: 244799 - DNA, 25 bp, Artificial
  Probe
ttagggaggttgtgccctacctggt

SEQ ID NO: 244800 - DNA, 25 bp, Artificial
  Probe
gaaccttggcttcttctcgatctcc

SEQ ID NO: 244801 - DNA, 25 bp, Artificial
  Probe
ggttggatccgctgacgtgcagcat

SEQ ID NO: 244802 - DNA, 25 bp, Artificial
  Probe
accaaatcctatatgaaggcaagca

SEQ ID NO: 244803 - DNA, 25 bp, Artificial
  Probe
ccttggcttcttctcgatctccgtt

SEQ ID NO: 244804 - DNA, 25 bp, Artificial
  Probe
cgttagggaggttgtgccctacctg

SEQ ID NO: 244805 - DNA, 25 bp, Artificial
  Probe
cgcttccagaaggagttgaaggcta

SEQ ID NO: 244806 - DNA, 25 bp, Artificial
  Probe
aggctattcagtacggaaccagtgc

SEQ ID NO: 244807 - DNA, 25 bp, Artificial
  Probe
atccgctgacgtgcagcatccagtt

SEQ ID NO: 244808 - DNA, 25 bp, Artificial
  Probe
ttgaaggctattcagtacggaacca

SEQ ID NO: 244809 - DNA, 25 bp, Artificial
  Probe
tgacgttagggaggttgtgccctac

SEQ ID NO: 244810 - DNA, 25 bp, Artificial
  Probe
ttcggctcaggcactgcttgtcagg

SEQ ID NO: 244811 - DNA, 25 bp, Artificial
  Probe
tgattccatcgaaaagagccacaaa

SEQ ID NO: 244812 - DNA, 25 bp, Artificial
  Probe
ccagcgcttctgcaaactgcgcaag

SEQ ID NO: 244813 - DNA, 25 bp, Artificial
  Probe
agtatgaactggacttctcccactt

SEQ ID NO: 244814 - DNA, 25 bp, Artificial
  Probe
agaactgcaataaaatcctaggttc

SEQ ID NO: 244815 - DNA, 25 bp, Artificial
  Probe
gttccgggcaaatggatcattgaca

SEQ ID NO: 244816 - DNA, 25 bp, Artificial
  Probe
acatacctggagtggcccttggatg

SEQ ID NO: 244817 - DNA, 25 bp, Artificial
  Probe
tcatggtccagcagctggagaactc

SEQ ID NO: 244818 - DNA, 25 bp, Artificial
  Probe
ccagcgggaagtgttttgggcaaat

SEQ ID NO: 244819 - DNA, 25 bp, Artificial
  Probe
ataatgaacactaagacatacctgg

SEQ ID NO: 244820 - DNA, 25 bp, Artificial
  Probe
tgttttgctggaacccattgagaag

SEQ ID NO: 244821 - DNA, 25 bp, Artificial
  Probe
ctttctgagaacttcgtacgcagtg

SEQ ID NO: 244822 - DNA, 25 bp, Artificial
  Probe
aaactgcgcaagataatgaacacta

SEQ ID NO: 244823 - DNA, 25 bp, Artificial
  Probe
cccacttcaggctctttgacgagaa

SEQ ID NO: 244824 - DNA, 25 bp, Artificial
  Probe
atggtccagcagctggagaactctg

SEQ ID NO: 244825 - DNA, 25 bp, Artificial
  Probe
cagcgggaagtgttttgggcaaatc

SEQ ID NO: 244826 - DNA, 25 bp, Artificial
  Probe
tccatcgaaaagagccacaaaactg

SEQ ID NO: 244827 - DNA, 25 bp, Artificial
  Probe
gcaaactgcgcaagataatgaacac

SEQ ID NO: 244828 - DNA, 25 bp, Artificial
  Probe
aacttcgtacgcagtgagtggtgca

SEQ ID NO: 244829 - DNA, 25 bp, Artificial
  Probe
cgaaaagagccacaaaactgtgttc

SEQ ID NO: 244830 - DNA, 25 bp, Artificial
  Probe
cgtacgcagtgagtggtgcaagtat

SEQ ID NO: 244831 - DNA, 25 bp, Artificial
  Probe
tggacttctcccacttcaggctctt

SEQ ID NO: 244832 - DNA, 25 bp, Artificial
  Probe
aagagccacaaaactgtgttcgtgc

SEQ ID NO: 244833 - DNA, 25 bp, Artificial
  Probe
ggccatccttgttttgctggaaccc

SEQ ID NO: 244834 - DNA, 25 bp, Artificial
  Probe
gcttctgcaaactgcgcaagataat

SEQ ID NO: 244835 - DNA, 25 bp, Artificial
  Probe
cgcttctgcaaactgcgcaagataa

SEQ ID NO: 244836 - DNA, 25 bp, Artificial
  Probe
tgacgagaacaatgacgcggccatc

SEQ ID NO: 244837 - DNA, 25 bp, Artificial
  Probe
ttccgggcaaatggatcattgacaa

SEQ ID NO: 244838 - DNA, 25 bp, Artificial
  Probe
acgcggccatccttgttttgctgga

SEQ ID NO: 244839 - DNA, 25 bp, Artificial
  Probe
aatgacgcggccatccttgttttgc

SEQ ID NO: 244840 - DNA, 25 bp, Artificial
  Probe
aaactgtgttcgtgctttctgagaa

SEQ ID NO: 244841 - DNA, 25 bp, Artificial
  Probe
cttcgtacgcagtgagtggtgcaag

SEQ ID NO: 244842 - DNA, 25 bp, Artificial
  Probe
ttcaggctctttgacgagaacaatg

SEQ ID NO: 244843 - DNA, 25 bp, Artificial
  Probe
ccatccttgttttgctggaacccat

SEQ ID NO: 244844 - DNA, 25 bp, Artificial
  Probe
gtatgaactggacttctcccacttc

SEQ ID NO: 244845 - DNA, 25 bp, Artificial
  Probe
atgaactggacttctcccacttcag

SEQ ID NO: 244846 - DNA, 25 bp, Artificial
  Probe
gaactggacttctcccacttcaggc

SEQ ID NO: 244847 - DNA, 25 bp, Artificial
  Probe
gttttgggcaaatctgagaactgca

SEQ ID NO: 244848 - DNA, 25 bp, Artificial
  Probe
ctctttgacgagaacaatgacgcgg

SEQ ID NO: 244849 - DNA, 25 bp, Artificial
  Probe
aatgaacactaagacatacctggag

SEQ ID NO: 244850 - DNA, 25 bp, Artificial
  Probe
tgcaaactgcgcaagataatgaaca

SEQ ID NO: 244851 - DNA, 25 bp, Artificial
  Probe
aacactaagacatacctggagtggc

SEQ ID NO: 244852 - DNA, 25 bp, Artificial
  Probe
gattccatcgaaaagagccacaaaa

SEQ ID NO: 244853 - DNA, 25 bp, Artificial
  Probe
cacaaaactgtgttcgtgctttctg

SEQ ID NO: 244854 - DNA, 25 bp, Artificial
  Probe
acttcaggctctttgacgagaacaa

SEQ ID NO: 244855 - DNA, 25 bp, Artificial
  Probe
ttctcccacttcaggctctttgacg

SEQ ID NO: 244856 - DNA, 25 bp, Artificial
  Probe
tgagaacttcgtacgcagtgagtgg

SEQ ID NO: 244857 - DNA, 25 bp, Artificial
  Probe
ggtggcccaggaccatcatcctact

SEQ ID NO: 244858 - DNA, 25 bp, Artificial
  Probe
tctgctcagcttctcctgtgtgatt

SEQ ID NO: 244859 - DNA, 25 bp, Artificial
  Probe
ggctggtggcccaggaccatcatcc

SEQ ID NO: 244860 - DNA, 25 bp, Artificial
  Probe
tcagcttctcctgtgtgattgacag

SEQ ID NO: 244861 - DNA, 25 bp, Artificial
  Probe
ggggtcctggccatcccacaagtgg

SEQ ID NO: 244862 - DNA, 25 bp, Artificial
  Probe
ctggtggcccaggaccatcatccta

SEQ ID NO: 244863 - DNA, 25 bp, Artificial
  Probe
gctcagcttctcctgtgtgattgac

SEQ ID NO: 244864 - DNA, 25 bp, Artificial
  Probe
aaaggatctttgtggccaaggagct

SEQ ID NO: 244865 - DNA, 25 bp, Artificial
  Probe
aggctttctgctcagcttctcctgt

SEQ ID NO: 244866 - DNA, 25 bp, Artificial
  Probe
acgaggctttctgctcagcttctcc

SEQ ID NO: 244867 - DNA, 25 bp, Artificial
  Probe
ctcccttctgctactggcaaaagga

SEQ ID NO: 244868 - DNA, 25 bp, Artificial
  Probe
gctttctgctcagcttctcctgtgt

SEQ ID NO: 244869 - DNA, 25 bp, Artificial
  Probe
ggcccaggaccatcatcctactgta

SEQ ID NO: 244870 - DNA, 25 bp, Artificial
  Probe
ttcctcccttctgctactggcaaaa

SEQ ID NO: 244871 - DNA, 25 bp, Artificial
  Probe
ggctttctgctcagcttctcctgtg

SEQ ID NO: 244872 - DNA, 25 bp, Artificial
  Probe
tgctcagcttctcctgtgtgattga

SEQ ID NO: 244873 - DNA, 25 bp, Artificial
  Probe
ttctgctcagcttctcctgtgtgat

SEQ ID NO: 244874 - DNA, 25 bp, Artificial
  Probe
gcccaggaccatcatcctactgtaa

SEQ ID NO: 244875 - DNA, 25 bp, Artificial
  Probe
tattaattgctttgagcacaacttt

SEQ ID NO: 244876 - DNA, 25 bp, Artificial
  Probe
ggaccatcatcctactgtaataaag

SEQ ID NO: 244877 - DNA, 25 bp, Artificial
  Probe
tctgctactggcaaaaggatctttg

SEQ ID NO: 244878 - DNA, 25 bp, Artificial
  Probe
ctttctgctcagcttctcctgtgtg

SEQ ID NO: 244879 - DNA, 25 bp, Artificial
  Probe
tttctgctcagcttctcctgtgtga

SEQ ID NO: 244880 - DNA, 25 bp, Artificial
  Probe
gcagggatgccctggaggtggctga

SEQ ID NO: 244881 - DNA, 25 bp, Artificial
  Probe
cccttctgctactggcaaaaggatc

SEQ ID NO: 244882 - DNA, 25 bp, Artificial
  Probe
ctgctactggcaaaaggatctttgt

SEQ ID NO: 244883 - DNA, 25 bp, Artificial
  Probe
tggcccaggaccatcatcctactgt

SEQ ID NO: 244884 - DNA, 25 bp, Artificial
  Probe
tcctggccatcccacaagtggtggt

SEQ ID NO: 244885 - DNA, 25 bp, Artificial
  Probe
ctactggcaaaaggatctttgtggc

SEQ ID NO: 244886 - DNA, 25 bp, Artificial
  Probe
tggtggcccaggaccatcatcctac

SEQ ID NO: 244887 - DNA, 25 bp, Artificial
  Probe
gtggcccaggaccatcatcctactg

SEQ ID NO: 244888 - DNA, 25 bp, Artificial
  Probe
tcctcccttctgctactggcaaaag

SEQ ID NO: 244889 - DNA, 25 bp, Artificial
  Probe
gggtcctggccatcccacaagtggt

SEQ ID NO: 244890 - DNA, 25 bp, Artificial
  Probe
cctcccttctgctactggcaaaagg

SEQ ID NO: 244891 - DNA, 25 bp, Artificial
  Probe
cgaggctttctgctcagcttctcct

SEQ ID NO: 244892 - DNA, 25 bp, Artificial
  Probe
ctcagcttctcctgtgtgattgaca

SEQ ID NO: 244893 - DNA, 25 bp, Artificial
  Probe
catcctactgtaataaagatgattg

SEQ ID NO: 244894 - DNA, 25 bp, Artificial
  Probe
ggtttaggctggtggcccaggacca

SEQ ID NO: 244895 - DNA, 25 bp, Artificial
  Probe
gaggctttctgctcagcttctcctg

SEQ ID NO: 244896 - DNA, 25 bp, Artificial
  Probe
tggggtcctggccatcccacaagtg

SEQ ID NO: 244897 - DNA, 25 bp, Artificial
  Probe
cacgaggctttctgctcagcttctc

SEQ ID NO: 244898 - DNA, 25 bp, Artificial
  Probe
ctgctcagcttctcctgtgtgattg

SEQ ID NO: 244899 - DNA, 25 bp, Artificial
  Probe
cggcacgaggctttctgctcagctt

SEQ ID NO: 244900 - DNA, 25 bp, Artificial
  Probe
tggggtcatgccctcctctcccatt

SEQ ID NO: 244901 - DNA, 25 bp, Artificial
  Probe
aggatctttgtggccaaggagctgc

SEQ ID NO: 244902 - DNA, 25 bp, Artificial
  Probe
gcacgaggctttctgctcagcttct

SEQ ID NO: 244903 - DNA, 25 bp, Artificial
  Probe
ctacccagtgagctaactgatctaa

SEQ ID NO: 244904 - DNA, 25 bp, Artificial
  Probe
tcaaagaacccttctccaagcactg

SEQ ID NO: 244905 - DNA, 25 bp, Artificial
  Probe
tgtccttgtcacaaagatgatttta

SEQ ID NO: 244906 - DNA, 25 bp, Artificial
  Probe
acaataattccaggaggtacaagga

SEQ ID NO: 244907 - DNA, 25 bp, Artificial
  Probe
cttgcaaagttactcaggttgcccc

SEQ ID NO: 244908 - DNA, 25 bp, Artificial
  Probe
cctacccagtgagctaactgatcta

SEQ ID NO: 244909 - DNA, 25 bp, Artificial
  Probe
ttgcaaagttactcaggttgcccct

SEQ ID NO: 244910 - DNA, 25 bp, Artificial
  Probe
gcaaagttactcaggttgcccctca

SEQ ID NO: 244911 - DNA, 25 bp, Artificial
  Probe
agttactcaggttgcccctcagctc

SEQ ID NO: 244912 - DNA, 25 bp, Artificial
  Probe
atcaatttaaaagtcacccatatca

SEQ ID NO: 244913 - DNA, 25 bp, Artificial
  Probe
ataattccaggaggtacaaggacaa

SEQ ID NO: 244914 - DNA, 25 bp, Artificial
  Probe
atgtgtccttgtcacaaagatgatt

SEQ ID NO: 244915 - DNA, 25 bp, Artificial
  Probe
gggattaaacccaggcctcacatgc

SEQ ID NO: 244916 - DNA, 25 bp, Artificial
  Probe
atgttttttgagacagtcttgcaaa

SEQ ID NO: 244917 - DNA, 25 bp, Artificial
  Probe
tccttgtcacaaagatgattttaaa

SEQ ID NO: 244918 - DNA, 25 bp, Artificial
  Probe
ggaatcaaagaacccttctccaagc

SEQ ID NO: 244919 - DNA, 25 bp, Artificial
  Probe
aataattccaggaggtacaaggaca

SEQ ID NO: 244920 - DNA, 25 bp, Artificial
  Probe
tcctacccagtgagctaactgatct

SEQ ID NO: 244921 - DNA, 25 bp, Artificial
  Probe
tgtgtccttgtcacaaagatgattt

SEQ ID NO: 244922 - DNA, 25 bp, Artificial
  Probe
gacagtcttgcaaagttactcaggt

SEQ ID NO: 244923 - DNA, 25 bp, Artificial
  Probe
gtgtccttgtcacaaagatgatttt

SEQ ID NO: 244924 - DNA, 25 bp, Artificial
  Probe
taacccttaacacatcttacacaaa

SEQ ID NO: 244925 - DNA, 25 bp, Artificial
  Probe
tgcaaagttactcaggttgcccctc

SEQ ID NO: 244926 - DNA, 25 bp, Artificial
  Probe
caaggacaattcttccccaaacgat

SEQ ID NO: 244927 - DNA, 25 bp, Artificial
  Probe
acagtcttgcaaagttactcaggtt

SEQ ID NO: 244928 - DNA, 25 bp, Artificial
  Probe
gttactcaggttgcccctcagctca

SEQ ID NO: 244929 - DNA, 25 bp, Artificial
  Probe
ccttgtcacaaagatgattttaaaa

SEQ ID NO: 244930 - DNA, 25 bp, Artificial
  Probe
caaagttactcaggttgcccctcag

SEQ ID NO: 244931 - DNA, 25 bp, Artificial
  Probe
agacagtcttgcaaagttactcagg

SEQ ID NO: 244932 - DNA, 25 bp, Artificial
  Probe
catgtgtccttgtcacaaagatgat

SEQ ID NO: 244933 - DNA, 25 bp, Artificial
  Probe
caatctaactggacaccctactctg

SEQ ID NO: 244934 - DNA, 25 bp, Artificial
  Probe
caataattccaggaggtacaaggac

SEQ ID NO: 244935 - DNA, 25 bp, Artificial
  Probe
cctcacatgccaggcagactctctt

SEQ ID NO: 244936 - DNA, 25 bp, Artificial
  Probe
aatctaactggacaccctactctga

SEQ ID NO: 244937 - DNA, 25 bp, Artificial
  Probe
taattccaggaggtacaaggacaat

SEQ ID NO: 244938 - DNA, 25 bp, Artificial
  Probe
aggaatcaaagaacccttctccaag

SEQ ID NO: 244939 - DNA, 25 bp, Artificial
  Probe
aagttactcaggttgcccctcagct

SEQ ID NO: 244940 - DNA, 25 bp, Artificial
  Probe
aaagttactcaggttgcccctcagc

SEQ ID NO: 244941 - DNA, 25 bp, Artificial
  Probe
gtccttgtcacaaagatgattttaa

SEQ ID NO: 244942 - DNA, 25 bp, Artificial
  Probe
attccaggaggtacaaggacaattc

SEQ ID NO: 244943 - DNA, 25 bp, Artificial
  Probe
cactaagctatgtccccaaccctgt

SEQ ID NO: 244944 - DNA, 25 bp, Artificial
  Probe
cagtcttgcaaagttactcaggttg

SEQ ID NO: 244945 - DNA, 25 bp, Artificial
  Probe
tttttgcagtagggattaaacccag

SEQ ID NO: 244946 - DNA, 25 bp, Artificial
  Probe
aattccaggaggtacaaggacaatt

SEQ ID NO: 244947 - DNA, 25 bp, Artificial
  Probe
aaagtcacccatatcatgtaactca

SEQ ID NO: 244948 - DNA, 25 bp, Artificial
  Probe
ccatgtgtccttgtcacaaagatga

SEQ ID NO: 244949 - DNA, 25 bp, Artificial
  Probe
tgagtagcttttcgcaggccactgg

SEQ ID NO: 244950 - DNA, 25 bp, Artificial
  Probe
tcccgggttactgagtagcttttcg

SEQ ID NO: 244951 - DNA, 25 bp, Artificial
  Probe
tcttgacctctgtctatcccaggca

SEQ ID NO: 244952 - DNA, 25 bp, Artificial
  Probe
gtagcttttcgcaggccactgggga

SEQ ID NO: 244953 - DNA, 25 bp, Artificial
  Probe
tctgtctatcccaggcaaagacatc

SEQ ID NO: 244954 - DNA, 25 bp, Artificial
  Probe
gtagaaatcccgggttactgagtag

SEQ ID NO: 244955 - DNA, 25 bp, Artificial
  Probe
actgagtagcttttcgcaggccact

SEQ ID NO: 244956 - DNA, 25 bp, Artificial
  Probe
tttgtgcttgtgtctgcctttccgg

SEQ ID NO: 244957 - DNA, 25 bp, Artificial
  Probe
tgcaaagccaaacggggtagaaatc

SEQ ID NO: 244958 - DNA, 25 bp, Artificial
  Probe
ctggggacgaggctatcttattttg

SEQ ID NO: 244959 - DNA, 25 bp, Artificial
  Probe
tgtgtctgcctttccgggaccctta

SEQ ID NO: 244960 - DNA, 25 bp, Artificial
  Probe
tctcttgacctctgtctatcccagg

SEQ ID NO: 244961 - DNA, 25 bp, Artificial
  Probe
ttactgagtagcttttcgcaggcca

SEQ ID NO: 244962 - DNA, 25 bp, Artificial
  Probe
gaaatcccgggttactgagtagctt

SEQ ID NO: 244963 - DNA, 25 bp, Artificial
  Probe
ctcttgacctctgtctatcccaggc

SEQ ID NO: 244964 - DNA, 25 bp, Artificial
  Probe
acctctgtctatcccaggcaaagac

SEQ ID NO: 244965 - DNA, 25 bp, Artificial
  Probe
ttgtgcttgtgtctgcctttccggg

SEQ ID NO: 244966 - DNA, 25 bp, Artificial
  Probe
tcttcctcctgtgcccatctcttga

SEQ ID NO: 244967 - DNA, 25 bp, Artificial
  Probe
gtgcccatctcttgacctctgtcta

SEQ ID NO: 244968 - DNA, 25 bp, Artificial
  Probe
cgaggctatcttattttgtgcttgt

SEQ ID NO: 244969 - DNA, 25 bp, Artificial
  Probe
gaggctatcttattttgtgcttgtg

SEQ ID NO: 244970 - DNA, 25 bp, Artificial
  Probe
tgtgcttgtgtctgcctttccggga

SEQ ID NO: 244971 - DNA, 25 bp, Artificial
  Probe
agaaatcccgggttactgagtagct

SEQ ID NO: 244972 - DNA, 25 bp, Artificial
  Probe
gacctctgtctatcccaggcaaaga

SEQ ID NO: 244973 - DNA, 25 bp, Artificial
  Probe
ccgggttactgagtagcttttcgca

SEQ ID NO: 244974 - DNA, 25 bp, Artificial
  Probe
cttacttcttcctcctgtgcccatc

SEQ ID NO: 244975 - DNA, 25 bp, Artificial
  Probe
acgaggctatcttattttgtgcttg

SEQ ID NO: 244976 - DNA, 25 bp, Artificial
  Probe
gggacccttacttcttcctcctgtg

SEQ ID NO: 244977 - DNA, 25 bp, Artificial
  Probe
ctgagtagcttttcgcaggccactg

SEQ ID NO: 244978 - DNA, 25 bp, Artificial
  Probe
tactgagtagcttttcgcaggccac

SEQ ID NO: 244979 - DNA, 25 bp, Artificial
  Probe
tgtctgcctttccgggacccttact

SEQ ID NO: 244980 - DNA, 25 bp, Artificial
  Probe
cttgacctctgtctatcccaggcaa

SEQ ID NO: 244981 - DNA, 25 bp, Artificial
  Probe
gccactggggacgaggctatcttat

SEQ ID NO: 244982 - DNA, 25 bp, Artificial
  Probe
cttgtgtctgcctttccgggaccct

SEQ ID NO: 244983 - DNA, 25 bp, Artificial
  Probe
aggccactggggacgaggctatctt

SEQ ID NO: 244984 - DNA, 25 bp, Artificial
  Probe
caggccactggggacgaggctatct

SEQ ID NO: 244985 - DNA, 25 bp, Artificial
  Probe
gttactgagtagcttttcgcaggcc

SEQ ID NO: 244986 - DNA, 25 bp, Artificial
  Probe
ggacccttacttcttcctcctgtgc

SEQ ID NO: 244987 - DNA, 25 bp, Artificial
  Probe
tgacctctgtctatcccaggcaaag

SEQ ID NO: 244988 - DNA, 25 bp, Artificial
  Probe
tgtgcccatctcttgacctctgtct

SEQ ID NO: 244989 - DNA, 25 bp, Artificial
  Probe
ttgtgtctgcctttccgggaccctt

SEQ ID NO: 244990 - DNA, 25 bp, Artificial
  Probe
ggttactgagtagcttttcgcaggc

SEQ ID NO: 244991 - DNA, 25 bp, Artificial
  Probe
ttgacctctgtctatcccaggcaaa

SEQ ID NO: 244992 - DNA, 25 bp, Artificial
  Probe
ccactggggacgaggctatcttatt

SEQ ID NO: 244993 - DNA, 25 bp, Artificial
  Probe
ggccactggggacgaggctatctta

SEQ ID NO: 244994 - DNA, 25 bp, Artificial
  Probe
gacgaggctatcttattttgtgctt

SEQ ID NO: 244995 - DNA, 25 bp, Artificial
  Probe
tttgagttaacatctcttgaagcca

SEQ ID NO: 244996 - DNA, 25 bp, Artificial
  Probe
gatgctgtcctctgatttagctgct

SEQ ID NO: 244997 - DNA, 25 bp, Artificial
  Probe
actttcactgaggatgctgtcctct

SEQ ID NO: 244998 - DNA, 25 bp, Artificial
  Probe
tgtttattcctggagtgacatgcca

SEQ ID NO: 244999 - DNA, 25 bp, Artificial
  Probe
tctccataaatttggtgattctctg

SEQ ID NO: 245000 - DNA, 25 bp, Artificial
  Probe
ggtgattctctgctaggcctaagat

SEQ ID NO: 245001 - DNA, 25 bp, Artificial
  Probe
tctggcttgagaacttactaaaggc

SEQ ID NO: 245002 - DNA, 25 bp, Artificial
  Probe
ctaggcctaagattttgagttaaca

SEQ ID NO: 245003 - DNA, 25 bp, Artificial
  Probe
actgaggatgctgtcctctgattta

SEQ ID NO: 245004 - DNA, 25 bp, Artificial
  Probe
atgctgtcctctgatttagctgctg

SEQ ID NO: 245005 - DNA, 25 bp, Artificial
  Probe
taaatttggtgattctctgctaggc

SEQ ID NO: 245006 - DNA, 25 bp, Artificial
  Probe
tgatttagctgctgcctccagcctc

SEQ ID NO: 245007 - DNA, 25 bp, Artificial
  Probe
ctcactttcactgaggatgctgtcc

SEQ ID NO: 245008 - DNA, 25 bp, Artificial
  Probe
tgtgtttattcctggagtgacatgc

SEQ ID NO: 245009 - DNA, 25 bp, Artificial
  Probe
ctctgctaggcctaagattttgagt

SEQ ID NO: 245010 - DNA, 25 bp, Artificial
  Probe
gctaggcctaagattttgagttaac

SEQ ID NO: 245011 - DNA, 25 bp, Artificial
  Probe
tctgctaggcctaagattttgagtt

SEQ ID NO: 245012 - DNA, 25 bp, Artificial
  Probe
accccgaatggctcactttcactga

SEQ ID NO: 245013 - DNA, 25 bp, Artificial
  Probe
tcactttcactgaggatgctgtcct

SEQ ID NO: 245014 - DNA, 25 bp, Artificial
  Probe
tgaggatgctgtcctctgatttagc

SEQ ID NO: 245015 - DNA, 25 bp, Artificial
  Probe
ctctggcttgagaacttactaaagg

SEQ ID NO: 245016 - DNA, 25 bp, Artificial
  Probe
tgtcctctgatttagctgctgcctc

SEQ ID NO: 245017 - DNA, 25 bp, Artificial
  Probe
ctgttaactctccataaatttggtg

SEQ ID NO: 245018 - DNA, 25 bp, Artificial
  Probe
cagcctctggcttgagaacttacta

SEQ ID NO: 245019 - DNA, 25 bp, Artificial
  Probe
gcctctggcttgagaacttactaaa

SEQ ID NO: 245020 - DNA, 25 bp, Artificial
  Probe
gtcctctgatttagctgctgcctcc

SEQ ID NO: 245021 - DNA, 25 bp, Artificial
  Probe
ttggtgattctctgctaggcctaag

SEQ ID NO: 245022 - DNA, 25 bp, Artificial
  Probe
ctgcctccagcctctggcttgagaa

SEQ ID NO: 245023 - DNA, 25 bp, Artificial
  Probe
aaatttggtgattctctgctaggcc

SEQ ID NO: 245024 - DNA, 25 bp, Artificial
  Probe
tcactgaggatgctgtcctctgatt

SEQ ID NO: 245025 - DNA, 25 bp, Artificial
  Probe
tttattcctggagtgacatgccacc

SEQ ID NO: 245026 - DNA, 25 bp, Artificial
  Probe
ttattcctggagtgacatgccaccc

SEQ ID NO: 245027 - DNA, 25 bp, Artificial
  Probe
ctgctaggcctaagattttgagtta

SEQ ID NO: 245028 - DNA, 25 bp, Artificial
  Probe
attttgagttaacatctcttgaagc

SEQ ID NO: 245029 - DNA, 25 bp, Artificial
  Probe
tggctcactttcactgaggatgctg

SEQ ID NO: 245030 - DNA, 25 bp, Artificial
  Probe
tttcactgaggatgctgtcctctga

SEQ ID NO: 245031 - DNA, 25 bp, Artificial
  Probe
cctctgatttagctgctgcctccag

SEQ ID NO: 245032 - DNA, 25 bp, Artificial
  Probe
ccagcctctggcttgagaacttact

SEQ ID NO: 245033 - DNA, 25 bp, Artificial
  Probe
atttggtgattctctgctaggccta

SEQ ID NO: 245034 - DNA, 25 bp, Artificial
  Probe
aggatgctgtcctctgatttagctg

SEQ ID NO: 245035 - DNA, 25 bp, Artificial
  Probe
cgaatggctcactttcactgaggat

SEQ ID NO: 245036 - DNA, 25 bp, Artificial
  Probe
gctgtcctctgatttagctgctgcc

SEQ ID NO: 245037 - DNA, 25 bp, Artificial
  Probe
aatggctcactttcactgaggatgc

SEQ ID NO: 245038 - DNA, 25 bp, Artificial
  Probe
gcctccagcctctggcttgagaact

SEQ ID NO: 245039 - DNA, 25 bp, Artificial
  Probe
gttaactctccataaatttggtgat

SEQ ID NO: 245040 - DNA, 25 bp, Artificial
  Probe
cccgaatggctcactttcactgagg

SEQ ID NO: 245041 - DNA, 25 bp, Artificial
  Probe
caatcccaagcaagcctagagcttg

SEQ ID NO: 245042 - DNA, 25 bp, Artificial
  Probe
actcttcagtctggagggtcctggg

SEQ ID NO: 245043 - DNA, 25 bp, Artificial
  Probe
ccctgtgcaccgagtggccatggca

SEQ ID NO: 245044 - DNA, 25 bp, Artificial
  Probe
gccaggaacctagcagtctcccagg

SEQ ID NO: 245045 - DNA, 25 bp, Artificial
  Probe
attgaggaagccttcaccagcaagg

SEQ ID NO: 245046 - DNA, 25 bp, Artificial
  Probe
catgagcaaagtcaccaatcccaag

SEQ ID NO: 245047 - DNA, 25 bp, Artificial
  Probe
ctccagctgggcattgaggaagcct

SEQ ID NO: 245048 - DNA, 25 bp, Artificial
  Probe
gcccttcctgatgatcattgtccct

SEQ ID NO: 245049 - DNA, 25 bp, Artificial
  Probe
ccattgtgcgtttcaacaggccctt

SEQ ID NO: 245050 - DNA, 25 bp, Artificial
  Probe
cagaacatcttcttcatgagcaaag

SEQ ID NO: 245051 - DNA, 25 bp, Artificial
  Probe
gatcattgtccctacagacacccag

SEQ ID NO: 245052 - DNA, 25 bp, Artificial
  Probe
gggtcctgggcctcctgacagcaat

SEQ ID NO: 245053 - DNA, 25 bp, Artificial
  Probe
gcaaagtcaccaatcccaagcaagc

SEQ ID NO: 245054 - DNA, 25 bp, Artificial
  Probe
ggtgacagcgattccctgtgtagct

SEQ ID NO: 245055 - DNA, 25 bp, Artificial
  Probe
tgcctgggtctctgggcacagcctg

SEQ ID NO: 245056 - DNA, 25 bp, Artificial
  Probe
caagcaagcctagagcttgccatca

SEQ ID NO: 245057 - DNA, 25 bp, Artificial
  Probe
cttggaatgcaagctggatgcctgg

SEQ ID NO: 245058 - DNA, 25 bp, Artificial
  Probe
gagacaaggaccattgtgcgtttca

SEQ ID NO: 245059 - DNA, 25 bp, Artificial
  Probe
cttatccttggaaggtgacagcgat

SEQ ID NO: 245060 - DNA, 25 bp, Artificial
  Probe
cagtctggagggtcctgggcctcct

SEQ ID NO: 245061 - DNA, 25 bp, Artificial
  Probe
gtctgcttatccttggaaggtgaca

SEQ ID NO: 245062 - DNA, 25 bp, Artificial
  Probe
ccataaggctgtgcttgatgtattt

SEQ ID NO: 245063 - DNA, 25 bp, Artificial
  Probe
aaggtgacagcgattccctgtgtag

SEQ ID NO: 245064 - DNA, 25 bp, Artificial
  Probe
ctgctgccacagcagtcaaaatcac

SEQ ID NO: 245065 - DNA, 25 bp, Artificial
  Probe
caacaggcccttcctgatgatcatt

SEQ ID NO: 245066 - DNA, 25 bp, Artificial
  Probe
ggaagccttcaccagcaaggctgac

SEQ ID NO: 245067 - DNA, 25 bp, Artificial
  Probe
gcatctgctgccacagcagtcaaaa

SEQ ID NO: 245068 - DNA, 25 bp, Artificial
  Probe
tccataaggctgtgcttgatgtatt

SEQ ID NO: 245069 - DNA, 25 bp, Artificial
  Probe
agaacatcttcttcatgagcaaagt

SEQ ID NO: 245070 - DNA, 25 bp, Artificial
  Probe
ctctcagtaaggaacttggaatgca

SEQ ID NO: 245071 - DNA, 25 bp, Artificial
  Probe
tccttggaaggtgacagcgattccc

SEQ ID NO: 245072 - DNA, 25 bp, Artificial
  Probe
tctcacatgcacaggggcccatgga

SEQ ID NO: 245073 - DNA, 25 bp, Artificial
  Probe
caaggaccattgtgcgtttcaacag

SEQ ID NO: 245074 - DNA, 25 bp, Artificial
  Probe
ctgtgcaccgagtggccatggcatg

SEQ ID NO: 245075 - DNA, 25 bp, Artificial
  Probe
cctgtctgcttatccttggaaggtg

SEQ ID NO: 245076 - DNA, 25 bp, Artificial
  Probe
gatgcctgggtctctgggcacagcc

SEQ ID NO: 245077 - DNA, 25 bp, Artificial
  Probe
gtcaccaatcccaagcaagcctaga

SEQ ID NO: 245078 - DNA, 25 bp, Artificial
  Probe
cacgaggctccagctgggcattgag

SEQ ID NO: 245079 - DNA, 25 bp, Artificial
  Probe
aggggccaggaacctagcagtctcc

SEQ ID NO: 245080 - DNA, 25 bp, Artificial
  Probe
gaacttggaatgcaagctggatgcc

SEQ ID NO: 245081 - DNA, 25 bp, Artificial
  Probe
aagcctagagcttgccatcaagcag

SEQ ID NO: 245082 - DNA, 25 bp, Artificial
  Probe
cagtggggctctcagtaaggaactt

SEQ ID NO: 245083 - DNA, 25 bp, Artificial
  Probe
gcacaggggcccatggactcttcag

SEQ ID NO: 245084 - DNA, 25 bp, Artificial
  Probe
ttgccatcaagcagtggggctctca

SEQ ID NO: 245085 - DNA, 25 bp, Artificial
  Probe
cagctgggcattgaggaagccttca

SEQ ID NO: 245086 - DNA, 25 bp, Artificial
  Probe
atgcaagctggatgcctgggtctct

SEQ ID NO: 245087 - DNA, 25 bp, Artificial
  Probe
tgctgcaacacatcggcttgcgttt

SEQ ID NO: 245088 - DNA, 25 bp, Artificial
  Probe
gcattcgatttcagcctgtgtccag

SEQ ID NO: 245089 - DNA, 25 bp, Artificial
  Probe
atgccaagagccttactaaactgga

SEQ ID NO: 245090 - DNA, 25 bp, Artificial
  Probe
acagggctctagtgaatcttttatt

SEQ ID NO: 245091 - DNA, 25 bp, Artificial
  Probe
gtctcctcaggcaatgtgacctgtg

SEQ ID NO: 245092 - DNA, 25 bp, Artificial
  Probe
ctcttattttgtgtgcaactgatta

SEQ ID NO: 245093 - DNA, 25 bp, Artificial
  Probe
ggcattcgatttcagcctgtgtcca

SEQ ID NO: 245094 - DNA, 25 bp, Artificial
  Probe
gccctacaatgctgcaacacatcgg

SEQ ID NO: 245095 - DNA, 25 bp, Artificial
  Probe
tttttaatcctgcagtctcctcagg

SEQ ID NO: 245096 - DNA, 25 bp, Artificial
  Probe
tttaaatcgccacgaatcacagatg

SEQ ID NO: 245097 - DNA, 25 bp, Artificial
  Probe
ttatgaagtctaacttagtgttcac

SEQ ID NO: 245098 - DNA, 25 bp, Artificial
  Probe
cagcagctttagtgcctttctttgc

SEQ ID NO: 245099 - DNA, 25 bp, Artificial
  Probe
tatactttttagaaatgccaagagc

SEQ ID NO: 245100 - DNA, 25 bp, Artificial
  Probe
tttcagcctgtgtccagctacagga

SEQ ID NO: 245101 - DNA, 25 bp, Artificial
  Probe
gaaacagggctctagtgaatctttt

SEQ ID NO: 245102 - DNA, 25 bp, Artificial
  Probe
atgaagtctaacttagtgttcacgt

SEQ ID NO: 245103 - DNA, 25 bp, Artificial
  Probe
acagatggctatttagtggccctac

SEQ ID NO: 245104 - DNA, 25 bp, Artificial
  Probe
tgttcacgtggctagtggcaagcat

SEQ ID NO: 245105 - DNA, 25 bp, Artificial
  Probe
tggctagtggcaagcattttacagt

SEQ ID NO: 245106 - DNA, 25 bp, Artificial
  Probe
ttgaagctcttattttgtgtgcaac

SEQ ID NO: 245107 - DNA, 25 bp, Artificial
  Probe
gtcttgaagctcttattttgtgtgc

SEQ ID NO: 245108 - DNA, 25 bp, Artificial
  Probe
ctagtggcaagcattttacagtgat

SEQ ID NO: 245109 - DNA, 25 bp, Artificial
  Probe
catcggcttgcgttttagtcttaat

SEQ ID NO: 245110 - DNA, 25 bp, Artificial
  Probe
tctataactaggactttgataactg

SEQ ID NO: 245111 - DNA, 25 bp, Artificial
  Probe
tttgtgtgcaactgattatacaaac

SEQ ID NO: 245112 - DNA, 25 bp, Artificial
  Probe
atcacagatggctatttagtggccc

SEQ ID NO: 245113 - DNA, 25 bp, Artificial
  Probe
cggcttgcgttttagtcttaattat

SEQ ID NO: 245114 - DNA, 25 bp, Artificial
  Probe
tggcaagcattttacagtgatcacc

SEQ ID NO: 245115 - DNA, 25 bp, Artificial
  Probe
tcgatttcagcctgtgtccagctac

SEQ ID NO: 245116 - DNA, 25 bp, Artificial
  Probe
tcacgtggctagtggcaagcatttt

SEQ ID NO: 245117 - DNA, 25 bp, Artificial
  Probe
acgaatcacagatggctatttagtg

SEQ ID NO: 245118 - DNA, 25 bp, Artificial
  Probe
caacacatcggcttgcgttttagtc

SEQ ID NO: 245119 - DNA, 25 bp, Artificial
  Probe
gaagtctaacttagtgttcacgtgg

SEQ ID NO: 245120 - DNA, 25 bp, Artificial
  Probe
tgcagtctcctcaggcaatgtgacc

SEQ ID NO: 245121 - DNA, 25 bp, Artificial
  Probe
gtgaaacagggctctagtgaatctt

SEQ ID NO: 245122 - DNA, 25 bp, Artificial
  Probe
tttagaaatgccaagagccttacta

SEQ ID NO: 245123 - DNA, 25 bp, Artificial
  Probe
cttactaaactggagcagatttatg

SEQ ID NO: 245124 - DNA, 25 bp, Artificial
  Probe
aacacatcggcttgcgttttagtct

SEQ ID NO: 245125 - DNA, 25 bp, Artificial
  Probe
actttttagaaatgccaagagcctt

SEQ ID NO: 245126 - DNA, 25 bp, Artificial
  Probe
ttagtgttcacgtggctagtggcaa

SEQ ID NO: 245127 - DNA, 25 bp, Artificial
  Probe
atttagtggccctacaatgctgcaa

SEQ ID NO: 245128 - DNA, 25 bp, Artificial
  Probe
tcagctgttagtggtgaaacagggc

SEQ ID NO: 245129 - DNA, 25 bp, Artificial
  Probe
ctgttagtggtgaaacagggctcta

SEQ ID NO: 245130 - DNA, 25 bp, Artificial
  Probe
atggctatttagtggccctacaatg

SEQ ID NO: 245131 - DNA, 25 bp, Artificial
  Probe
gatcacattgcaaacagagaaagta

SEQ ID NO: 245132 - DNA, 25 bp, Artificial
  Probe
tagaaatgccaagagccttactaaa

SEQ ID NO: 245133 - DNA, 25 bp, Artificial
  Probe
tctgtattgctcaatattaggaagt

SEQ ID NO: 245134 - DNA, 25 bp, Artificial
  Probe
cccagctttgttctgaaggatcaag

SEQ ID NO: 245135 - DNA, 25 bp, Artificial
  Probe
ttgttctgaaggatcaaggacagtc

SEQ ID NO: 245136 - DNA, 25 bp, Artificial
  Probe
agctttgttctgaaggatcaaggac

SEQ ID NO: 245137 - DNA, 25 bp, Artificial
  Probe
gctgttgggacctggctatggaagc

SEQ ID NO: 245138 - DNA, 25 bp, Artificial
  Probe
gggagtgcatttttccacttccctc

SEQ ID NO: 245139 - DNA, 25 bp, Artificial
  Probe
ctgtattgctcaatattaggaagtc

SEQ ID NO: 245140 - DNA, 25 bp, Artificial
  Probe
acctggctatggaagctattgtcac

SEQ ID NO: 245141 - DNA, 25 bp, Artificial
  Probe
atggaagctattgtcacttgagaat

SEQ ID NO: 245142 - DNA, 25 bp, Artificial
  Probe
ggacctggctatggaagctattgtc

SEQ ID NO: 245143 - DNA, 25 bp, Artificial
  Probe
tgtcacttgagaatttagtgttggg

SEQ ID NO: 245144 - DNA, 25 bp, Artificial
  Probe
tgggacctggctatggaagctattg

SEQ ID NO: 245145 - DNA, 25 bp, Artificial
  Probe
ttagtgttggggtctatgagggtga

SEQ ID NO: 245146 - DNA, 25 bp, Artificial
  Probe
agtgttggggtctatgagggtgaca

SEQ ID NO: 245147 - DNA, 25 bp, Artificial
  Probe
aaggatcaaggacagtctgggaact

SEQ ID NO: 245148 - DNA, 25 bp, Artificial
  Probe
gggacctggctatggaagctattgt

SEQ ID NO: 245149 - DNA, 25 bp, Artificial
  Probe
attgctcaatattaggaagtcgtat

SEQ ID NO: 245150 - DNA, 25 bp, Artificial
  Probe
cagctttgttctgaaggatcaagga

SEQ ID NO: 245151 - DNA, 25 bp, Artificial
  Probe
gatcaaggacagtctgggaactggt

SEQ ID NO: 245152 - DNA, 25 bp, Artificial
  Probe
gctattgtcacttgagaatttagtg

SEQ ID NO: 245153 - DNA, 25 bp, Artificial
  Probe
cctggctatggaagctattgtcact

SEQ ID NO: 245154 - DNA, 25 bp, Artificial
  Probe
ggatcaaggacagtctgggaactgg

SEQ ID NO: 245155 - DNA, 25 bp, Artificial
  Probe
tttagtgttggggtctatgagggtg

SEQ ID NO: 245156 - DNA, 25 bp, Artificial
  Probe
atgcttatgctaaggctctgagact

SEQ ID NO: 245157 - DNA, 25 bp, Artificial
  Probe
gcatttttccacttccctctcagtt

SEQ ID NO: 245158 - DNA, 25 bp, Artificial
  Probe
gctttgttctgaaggatcaaggaca

SEQ ID NO: 245159 - DNA, 25 bp, Artificial
  Probe
tgttgggacctggctatggaagcta

SEQ ID NO: 245160 - DNA, 25 bp, Artificial
  Probe
tgcttatgctaaggctctgagactc

SEQ ID NO: 245161 - DNA, 25 bp, Artificial
  Probe
agctattgtcacttgagaatttagt

SEQ ID NO: 245162 - DNA, 25 bp, Artificial
  Probe
ttgggacctggctatggaagctatt

SEQ ID NO: 245163 - DNA, 25 bp, Artificial
  Probe
gttgggacctggctatggaagctat

SEQ ID NO: 245164 - DNA, 25 bp, Artificial
  Probe
tttgttctgaaggatcaaggacagt

SEQ ID NO: 245165 - DNA, 25 bp, Artificial
  Probe
gtgttggggtctatgagggtgacac

SEQ ID NO: 245166 - DNA, 25 bp, Artificial
  Probe
agaatttagtgttggggtctatgag

SEQ ID NO: 245167 - DNA, 25 bp, Artificial
  Probe
gagtgcatttttccacttccctctc

SEQ ID NO: 245168 - DNA, 25 bp, Artificial
  Probe
atcaaggacagtctgggaactggtt

SEQ ID NO: 245169 - DNA, 25 bp, Artificial
  Probe
attgtcacttgagaatttagtgttg

SEQ ID NO: 245170 - DNA, 25 bp, Artificial
  Probe
aggatcaaggacagtctgggaactg

SEQ ID NO: 245171 - DNA, 25 bp, Artificial
  Probe
ccagctttgttctgaaggatcaagg

SEQ ID NO: 245172 - DNA, 25 bp, Artificial
  Probe
gacctggctatggaagctattgtca

SEQ ID NO: 245173 - DNA, 25 bp, Artificial
  Probe
ctttgttctgaaggatcaaggacag

SEQ ID NO: 245174 - DNA, 25 bp, Artificial
  Probe
aatgcttatgctaaggctctgagac

SEQ ID NO: 245175 - DNA, 25 bp, Artificial
  Probe
tattgctcaatattaggaagtcgta

SEQ ID NO: 245176 - DNA, 25 bp, Artificial
  Probe
ggtctgtattgctcaatattaggaa

SEQ ID NO: 245177 - DNA, 25 bp, Artificial
  Probe
tgtattgctcaatattaggaagtcg

SEQ ID NO: 245178 - DNA, 25 bp, Artificial
  Probe
ggagtgcatttttccacttccctct

SEQ ID NO: 245179 - DNA, 25 bp, Artificial
  Probe
cagatttacccgtggatgaccaaac

SEQ ID NO: 245180 - DNA, 25 bp, Artificial
  Probe
cggctcctctgaaccctgggatgta

SEQ ID NO: 245181 - DNA, 25 bp, Artificial
  Probe
ccgccacagatttacccgtggatga

SEQ ID NO: 245182 - DNA, 25 bp, Artificial
  Probe
gatttacccgtggatgaccaaactg

SEQ ID NO: 245183 - DNA, 25 bp, Artificial
  Probe
gtgtctcaacgagagacagatcctc

SEQ ID NO: 245184 - DNA, 25 bp, Artificial
  Probe
cttgtgtctcaacgagagacagatc

SEQ ID NO: 245185 - DNA, 25 bp, Artificial
  Probe
ggtcccgaaccagttacacgcgcta

SEQ ID NO: 245186 - DNA, 25 bp, Artificial
  Probe
ttacccgtggatgaccaaactgcac

SEQ ID NO: 245187 - DNA, 25 bp, Artificial
  Probe
atgagccacgagacggatggcaagc

SEQ ID NO: 245188 - DNA, 25 bp, Artificial
  Probe
aacttgtgtctcaacgagagacaga

SEQ ID NO: 245189 - DNA, 25 bp, Artificial
  Probe
ctgaaccctgggatgtacagtcaga

SEQ ID NO: 245190 - DNA, 25 bp, Artificial
  Probe
ctgggcagagacgaagcggctcctc

SEQ ID NO: 245191 - DNA, 25 bp, Artificial
  Probe
ctctgggcagagacgaagcggctcc

SEQ ID NO: 245192 - DNA, 25 bp, Artificial
  Probe
acaacttgtgtctcaacgagagaca

SEQ ID NO: 245193 - DNA, 25 bp, Artificial
  Probe
cgcagacagggcagcctgccggact

SEQ ID NO: 245194 - DNA, 25 bp, Artificial
  Probe
agatcgccaacaacttgtgtctcaa

SEQ ID NO: 245195 - DNA, 25 bp, Artificial
  Probe
cgccgcaggcgcatagagatcgcca

SEQ ID NO: 245196 - DNA, 25 bp, Artificial
  Probe
tccgggacacgctctgggcagagac

SEQ ID NO: 245197 - DNA, 25 bp, Artificial
  Probe
agacggatggcaagcggtcccgaac

SEQ ID NO: 245198 - DNA, 25 bp, Artificial
  Probe
agacgaagcggctcctctgaaccct

SEQ ID NO: 245199 - DNA, 25 bp, Artificial
  Probe
tcctctgaaccctgggatgtacagt

SEQ ID NO: 245200 - DNA, 25 bp, Artificial
  Probe
cgaagcggctcctctgaaccctggg

SEQ ID NO: 245201 - DNA, 25 bp, Artificial
  Probe
gaccaaactgcacatgagccacgag

SEQ ID NO: 245202 - DNA, 25 bp, Artificial
  Probe
cgaaccagttacacgcgctaccaga

SEQ ID NO: 245203 - DNA, 25 bp, Artificial
  Probe
tgcacatgagccacgagacggatgg

SEQ ID NO: 245204 - DNA, 25 bp, Artificial
  Probe
caaactgcacatgagccacgagacg

SEQ ID NO: 245205 - DNA, 25 bp, Artificial
  Probe
atgtacagtcagaaggcggcccgcc

SEQ ID NO: 245206 - DNA, 25 bp, Artificial
  Probe
gatggcaagcggtcccgaaccagtt

SEQ ID NO: 245207 - DNA, 25 bp, Artificial
  Probe
cgccacagatttacccgtggatgac

SEQ ID NO: 245208 - DNA, 25 bp, Artificial
  Probe
caacaacttgtgtctcaacgagaga

SEQ ID NO: 245209 - DNA, 25 bp, Artificial
  Probe
gatgtacagtcagaaggcggcccgc

SEQ ID NO: 245210 - DNA, 25 bp, Artificial
  Probe
ttgtgtctcaacgagagacagatcc

SEQ ID NO: 245211 - DNA, 25 bp, Artificial
  Probe
aagcggctcctctgaaccctgggat

SEQ ID NO: 245212 - DNA, 25 bp, Artificial
  Probe
atagagatcgccaacaacttgtgtc

SEQ ID NO: 245213 - DNA, 25 bp, Artificial
  Probe
ccacgagacggatggcaagcggtcc

SEQ ID NO: 245214 - DNA, 25 bp, Artificial
  Probe
gagatcgccaacaacttgtgtctca

SEQ ID NO: 245215 - DNA, 25 bp, Artificial
  Probe
agcggtcccgaaccagttacacgcg

SEQ ID NO: 245216 - DNA, 25 bp, Artificial
  Probe
gtggatgaccaaactgcacatgagc

SEQ ID NO: 245217 - DNA, 25 bp, Artificial
  Probe
cccgtggatgaccaaactgcacatg

SEQ ID NO: 245218 - DNA, 25 bp, Artificial
  Probe
ccctgggatgtacagtcagaaggcg

SEQ ID NO: 245219 - DNA, 25 bp, Artificial
  Probe
cgcaggcgcatagagatcgccaaca

SEQ ID NO: 245220 - DNA, 25 bp, Artificial
  Probe
aaactgcacatgagccacgagacgg

SEQ ID NO: 245221 - DNA, 25 bp, Artificial
  Probe
ccgtggatgaccaaactgcacatga

SEQ ID NO: 245222 - DNA, 25 bp, Artificial
  Probe
caagcggtcccgaaccagttacacg

SEQ ID NO: 245223 - DNA, 25 bp, Artificial
  Probe
agcggctcctctgaaccctgggatg

SEQ ID NO: 245224 - DNA, 25 bp, Artificial
  Probe
aggcgcatagagatcgccaacaact

SEQ ID NO: 245225 - DNA, 25 bp, Artificial
  Probe
gccaacagacgactattcggaggag

SEQ ID NO: 245226 - DNA, 25 bp, Artificial
  Probe
gccctcgatgccaacagacgactat

SEQ ID NO: 245227 - DNA, 25 bp, Artificial
  Probe
gacaccttcagattgtaagctttga

SEQ ID NO: 245228 - DNA, 25 bp, Artificial
  Probe
cacctcaggggttcagccctcgatg

SEQ ID NO: 245229 - DNA, 25 bp, Artificial
  Probe
ccagctgccccaaggacagtggtct

SEQ ID NO: 245230 - DNA, 25 bp, Artificial
  Probe
ctgacacggatctcagccaaaagtc

SEQ ID NO: 245231 - DNA, 25 bp, Artificial
  Probe
cagctgccccaaggacagtggtctg

SEQ ID NO: 245232 - DNA, 25 bp, Artificial
  Probe
gactattcggaggagtctgacacgg

SEQ ID NO: 245233 - DNA, 25 bp, Artificial
  Probe
atctcagccaaaagtccgacggacc

SEQ ID NO: 245234 - DNA, 25 bp, Artificial
  Probe
ttcggaggagtctgacacggatctc

SEQ ID NO: 245235 - DNA, 25 bp, Artificial
  Probe
tcggaggagtctgacacggatctca

SEQ ID NO: 245236 - DNA, 25 bp, Artificial
  Probe
ctcgatgccaacagacgactattcg

SEQ ID NO: 245237 - DNA, 25 bp, Artificial
  Probe
gggttcagccctcgatgccaacaga

SEQ ID NO: 245238 - DNA, 25 bp, Artificial
  Probe
tccaggaagtcttggccgccagtgg

SEQ ID NO: 245239 - DNA, 25 bp, Artificial
  Probe
gtctgacacggatctcagccaaaag

SEQ ID NO: 245240 - DNA, 25 bp, Artificial
  Probe
ttcagccctcgatgccaacagacga

SEQ ID NO: 245241 - DNA, 25 bp, Artificial
  Probe
gaacggacaccttcagattgtaagc

SEQ ID NO: 245242 - DNA, 25 bp, Artificial
  Probe
gccccaaggacagtggtctgaccag

SEQ ID NO: 245243 - DNA, 25 bp, Artificial
  Probe
gttcagccctcgatgccaacagacg

SEQ ID NO: 245244 - DNA, 25 bp, Artificial
  Probe
ggagggtcccaaagaccccagctgc

SEQ ID NO: 245245 - DNA, 25 bp, Artificial
  Probe
atgccaacagacgactattcggagg

SEQ ID NO: 245246 - DNA, 25 bp, Artificial
  Probe
acagacgactattcggaggagtctg

SEQ ID NO: 245247 - DNA, 25 bp, Artificial
  Probe
gccaaaagtccgacggaccggcgag

SEQ ID NO: 245248 - DNA, 25 bp, Artificial
  Probe
gacacggatctcagccaaaagtccg

SEQ ID NO: 245249 - DNA, 25 bp, Artificial
  Probe
acctcaggggttcagccctcgatgc

SEQ ID NO: 245250 - DNA, 25 bp, Artificial
  Probe
ccttcagattgtaagctttgaagat

SEQ ID NO: 245251 - DNA, 25 bp, Artificial
  Probe
ggacaccttcagattgtaagctttg

SEQ ID NO: 245252 - DNA, 25 bp, Artificial
  Probe
cggatctcagccaaaagtccgacgg

SEQ ID NO: 245253 - DNA, 25 bp, Artificial
  Probe
tggagggtcccaaagaccccagctg

SEQ ID NO: 245254 - DNA, 25 bp, Artificial
  Probe
ctcagccaaaagtccgacggaccgg

SEQ ID NO: 245255 - DNA, 25 bp, Artificial
  Probe
cgatgccaacagacgactattcgga

SEQ ID NO: 245256 - DNA, 25 bp, Artificial
  Probe
cgactattcggaggagtctgacacg

SEQ ID NO: 245257 - DNA, 25 bp, Artificial
  Probe
agctgccccaaggacagtggtctga

SEQ ID NO: 245258 - DNA, 25 bp, Artificial
  Probe
tcgatgccaacagacgactattcgg

SEQ ID NO: 245259 - DNA, 25 bp, Artificial
  Probe
ctgccccaaggacagtggtctgacc

SEQ ID NO: 245260 - DNA, 25 bp, Artificial
  Probe
acgactattcggaggagtctgacac

SEQ ID NO: 245261 - DNA, 25 bp, Artificial
  Probe
ccaaggacagtggtctgaccagtgt

SEQ ID NO: 245262 - DNA, 25 bp, Artificial
  Probe
ggatctcagccaaaagtccgacgga

SEQ ID NO: 245263 - DNA, 25 bp, Artificial
  Probe
caccttcagattgtaagctttgaag

SEQ ID NO: 245264 - DNA, 25 bp, Artificial
  Probe
aacggacaccttcagattgtaagct

SEQ ID NO: 245265 - DNA, 25 bp, Artificial
  Probe
cggacaccttcagattgtaagcttt

SEQ ID NO: 245266 - DNA, 25 bp, Artificial
  Probe
agtctgacacggatctcagccaaaa

SEQ ID NO: 245267 - DNA, 25 bp, Artificial
  Probe
caacagacgactattcggaggagtc

SEQ ID NO: 245268 - DNA, 25 bp, Artificial
  Probe
ctattcggaggagtctgacacggat

SEQ ID NO: 245269 - DNA, 25 bp, Artificial
  Probe
acaccttcagattgtaagctttgaa

SEQ ID NO: 245270 - DNA, 25 bp, Artificial
  Probe
cctccaggaagtcttggccgccagt

SEQ ID NO: 245271 - DNA, 25 bp, Artificial
  Probe
gagacagcttcctgcggggaagcca

SEQ ID NO: 245272 - DNA, 25 bp, Artificial
  Probe
cccactgggagatgcgctgaaagag

SEQ ID NO: 245273 - DNA, 25 bp, Artificial
  Probe
gcagcattccctgaagctgtgccag

SEQ ID NO: 245274 - DNA, 25 bp, Artificial
  Probe
taagccaaagaaacaagctgtgcgg

SEQ ID NO: 245275 - DNA, 25 bp, Artificial
  Probe
ctggggcagcattccctgaagctgt

SEQ ID NO: 245276 - DNA, 25 bp, Artificial
  Probe
ttaagagcacccactgggagatgcg

SEQ ID NO: 245277 - DNA, 25 bp, Artificial
  Probe
tgccagcaggaggactatagcagcc

SEQ ID NO: 245278 - DNA, 25 bp, Artificial
  Probe
ctgtaagggcagtgcccatgtgtat

SEQ ID NO: 245279 - DNA, 25 bp, Artificial
  Probe
atataaacgtgctgtctgttcattt

SEQ ID NO: 245280 - DNA, 25 bp, Artificial
  Probe
tgaactgaccaaaggaaaagcttga

SEQ ID NO: 245281 - DNA, 25 bp, Artificial
  Probe
agcatctctgcaagatttccacctg

SEQ ID NO: 245282 - DNA, 25 bp, Artificial
  Probe
tacaagagagacagcttgggctgac

SEQ ID NO: 245283 - DNA, 25 bp, Artificial
  Probe
gagcctgaggccatgcagttggaca

SEQ ID NO: 245284 - DNA, 25 bp, Artificial
  Probe
agggcagtgcccatgtgtatagtct

SEQ ID NO: 245285 - DNA, 25 bp, Artificial
  Probe
gacagcttgggctgacccagcatct

SEQ ID NO: 245286 - DNA, 25 bp, Artificial
  Probe
agctgtaagggcagtgcccatgtgt

SEQ ID NO: 245287 - DNA, 25 bp, Artificial
  Probe
cagcctggttttggagtatagctgt

SEQ ID NO: 245288 - DNA, 25 bp, Artificial
  Probe
agtatagctgtaagggcagtgccca

SEQ ID NO: 245289 - DNA, 25 bp, Artificial
  Probe
gcagggcccacatgtacagtgtctg

SEQ ID NO: 245290 - DNA, 25 bp, Artificial
  Probe
gacccagcatctctgcaagatttcc

SEQ ID NO: 245291 - DNA, 25 bp, Artificial
  Probe
aaagcttgagacagcttcctgcggg

SEQ ID NO: 245292 - DNA, 25 bp, Artificial
  Probe
tgtggtttctacctttaagccaaag

SEQ ID NO: 245293 - DNA, 25 bp, Artificial
  Probe
tgcagatgaactgaccaaaggaaaa

SEQ ID NO: 245294 - DNA, 25 bp, Artificial
  Probe
agatgcgctgaaagagcctgaggcc

SEQ ID NO: 245295 - DNA, 25 bp, Artificial
  Probe
agagagacagcttgggctgacccag

SEQ ID NO: 245296 - DNA, 25 bp, Artificial
  Probe
ggcagggcccacatgtacagtgtct

SEQ ID NO: 245297 - DNA, 25 bp, Artificial
  Probe
aggaggactatagcagcctggtttt

SEQ ID NO: 245298 - DNA, 25 bp, Artificial
  Probe
tgaaagagcctgaggccatgcagtt

SEQ ID NO: 245299 - DNA, 25 bp, Artificial
  Probe
ttcctgcggggaagccaggtacaag

SEQ ID NO: 245300 - DNA, 25 bp, Artificial
  Probe
cagcttgggctgacccagcatctct

SEQ ID NO: 245301 - DNA, 25 bp, Artificial
  Probe
ggacctggcccattaagagcaccca

SEQ ID NO: 245302 - DNA, 25 bp, Artificial
  Probe
ggctgacccagcatctctgcaagat

SEQ ID NO: 245303 - DNA, 25 bp, Artificial
  Probe
caagctgtgcggacctggcccatta

SEQ ID NO: 245304 - DNA, 25 bp, Artificial
  Probe
cttccctggggcagcattccctgaa

SEQ ID NO: 245305 - DNA, 25 bp, Artificial
  Probe
gccatgcagttggacactgaacttg

SEQ ID NO: 245306 - DNA, 25 bp, Artificial
  Probe
caaagaaacaagctgtgcggacctg

SEQ ID NO: 245307 - DNA, 25 bp, Artificial
  Probe
gctgtgcggacctggcccattaaga

SEQ ID NO: 245308 - DNA, 25 bp, Artificial
  Probe
actatagcagcctggttttggagta

SEQ ID NO: 245309 - DNA, 25 bp, Artificial
  Probe
aagagcacccactgggagatgcgct

SEQ ID NO: 245310 - DNA, 25 bp, Artificial
  Probe
cttcctgcggggaagccaggtacaa

SEQ ID NO: 245311 - DNA, 25 bp, Artificial
  Probe
acctttaagccaaagaaacaagctg

SEQ ID NO: 245312 - DNA, 25 bp, Artificial
  Probe
cccattaagagcacccactgggaga

SEQ ID NO: 245313 - DNA, 25 bp, Artificial
  Probe
tccctgaagctgtgccagcaggagg

SEQ ID NO: 245314 - DNA, 25 bp, Artificial
  Probe
cccatgtgtatagtctgtggagttt
